United States Patent Application Publication US 2007/0067865 A1 - sequence listing, part 45

SEQ ID NO: 273674 - DNA, 1528 bp, Zea mays
atagcgcatcgaagcctggagcgacggccgggagctccctgcaggacgcgccgctaatcgaggaggtggtgcaaggaggaagcggaggccacgacggcgacggcgacggcgacggcggctcgcaggagcaggagcaggatcaggcccaggggacctgcgacctgtacaagggccgctgggtgtacgacgagtcccgcgcgcctctgtacaaggagtccgagtgcagcttcctcacggagcaggtcacctgcacgcgcaacggccgccgcgacgacgactaccagaagtggcgctggcagcccgacggctgcgacctccccagatttgaggctaagttgcttctggagaagctaaggaacaaaaggctgatgtttgtgggtgattctctgaatcggaaccagtgggagtccatggtgtgcctggtccagtcagaggcaccatgggacaaaaaatctctcgtcaagaatggttctcttaatgtcttccatcttcaggagtacaatgcaacagttgagttctactgggctccgttcctagtggagtcaaactcagacgacccagacattcacagcatcagcgaccgcatgatcaagccgacatcgatcgcgaacatgcggcaaactgggaaggcgtggactacctgatcttcaacacttacatttggtggatgaacacaccgcagatgaaaaccgcacggtggatctttctcaaggaaacacgtaaagtacgatgaaatagagcgtgtggaggcataccggaaggtcctcaagacgtggtccagatgggtagaggcgcacattgatcccaagagaagcacggtcctattcatgagcgtgtcaccggtacatatgcagagtgaaggctggggcagccccaacgccgtaaaatgcttctccgagacgcagccggcgatcaactacacgaagaaactggaggtgggcacggactgggacctcttcgcgaccgcccagcgcgtgacgaggtcgatgaagaaggtacccgtgcacttcgtcaacataactgcgctgtcggagatccgcaaggacgcgcacacctccgtgcacacgctgcggcaggggaagctcctgacgcccgagcagaaggcgaacccgaggaagttcgcggactgcatccactggtgcctccccggcgtgccggacacgtggaaccagttcgtttatggtcacatcgtgtcgagcccgccgccgccgcaggatcaacctcacagataacaacagctagaaatacttctcgtgcatcagtgtgtttgtggtcgacgccataagttatttctttttcccctaatagtaggtttagaagcctatgctgctggactggttcacctgagcatctgttggaaggtcagatcgcactagtgtagccaaaaaaagcagcagtaaatgtggctggttgagcctgaggggaaatgcgcgcttctgtgcctcgtgtttctacctggcacgtgtacataattttttaccagaatcattcgtgaaattgtttctattcgtgtcgaaatatttctctt

SEQ ID NO: 273675 - DNA, 1267 bp, Zea mays
ccccgcctgccaatcacacatggcatcaagtgcaatgatctgttctcctttagcattgggtgctatattctctggagtgttgcagctgggaccagatatgccattgattacatcagatcacgacagctggggattctggttcaacagatctgcaagtggtgctcaattgttttgaagagctcttttctcttgtcgatatggatctttgttattcctgtgctgattggactcctttttgagctgctggtcattgtacccatgagggtgcctattgatgagagccctgtcttcttattgtaccaggattgggcactggggttaatattcttgaaaatatggactagactggttatgttggatcagatggcacctttggttgatgaaagctggaggtcaaagtttgagagagttagagacgatggcttctcccgtttaaggggtctgtgggtcctccatgaaattataatgccgatcgtgaccaagctccttactgctctctgtgtcccatacgtccttgcaaggggcatcttcccgttgctgggttacccactcatcgtgaactcagcggtgtaccgctttgcctggcttggatgcctgatcttcagcgcactcttcttttgtggaaagaggttccatgtctggttcaccaacctccacaactccatcagggatgaccgctatctgattggccgaaggctgcacaactttggtgaggacacacccgagccgagtgaatctggagcaactatagggtcagatgatcaggaccaagctcttgtcctgcgagatcaggaagaggaagtggggttgaggatgaggcgcaataatatgcgtgcaaaccaacaacccaggctggctttttaaggaggagatagttttggatatagagctcataaccatggtataagctttggcctgcagcttctgcttgtgctttgtaatgggcattgtagagtgagtttatgtgttagtgataggaaatagtctaaggactgttctacgataaagcctggagaaagctgaagtggctggtgattataagaactggtggcaactcccattcctgtggtagtcctggctgactgtaaatatcgtttgacagacactaccaggccaactcagtttgttgtgatcctcttgtaatgactagtgagttaagctgaactgttgggtagacacgaggtactaggttgtatgacttccaccacttccaccatttttttgtcatctttgtttcttggcaaccgcaatatagcattctatttgt

SEQ ID NO: 273676 - DNA, 839 bp, Zea mays
cccacgcgtcctctcgactccagcatccctcgtccccgcatcaccgcgccgccgacactccgctcgctttcgctcccgagacccgggcctgccgagccgccgccatggacgaggagtacgacgtgatcgttctgggcacggggctcaaggagtgcatcctcagcggtctcctctctgtcgacggcctcaaggttctacacatggatagaaatgattactacggaggagattccacctccctaaacctgaaccagctctggaagaggtttaggggggaagacaagccaccggcacatctaggtgcaagcagagattacaatgtagacatggttccaaagtttatgatggcaaacgggactttggttcgcactctcattcacactgatgtgacaaaatatttgtcattcaaagctgttgatggaagctatgtcttcagcaaacggaagattcacaaggttcctgccaccgatatggaggctctaaaatctcctttgatgggtctatttgagaaacgtagagcaaggaacttttttgtttacgtccaaaattacaatgaagctgatccagtgacacatcaggggttggacctcacaaggattacaactagagaattgattttgaaacatggattgagtgatgacactgtggattttattggccatgcactcgctctgcacagggatgatcgttacctaaatgaacctgcccttgatactgtaaaaaggatgaagctttaacgctgagtctcttgcacgttttcaaggaggcttgccttatatttatccattatatgggttgggtgagctgtcacaggccttttgcacgtttaagtgctgttt

SEQ ID NO: 273677 - DNA, 2347 bp, Zea mays
gtccgctctcctccaacctcctgccaacagcacgcctgcctctctctctctgtgtgtgtgtgtgtgtgtgtgtgtgtgtcaccgagggtccgaggcggtcctactccctctgtcttggtgtcttcttgcgcacgccgcttggtggttctcctcctcacggttccatctccgggtccttgggtctggatggaactggagacacggtagaggagcccgcggtttcccttttcccctcccaacaagggttgatagggaggattttttggattgatctataagccttttggtggctaacggttgggagctttggaggagaactcgagtccttgggctctaggttggtctggacgaggccggaggaagttgccaatggagccgccgactgggttctgggcctcgcttctgagcttcctcaagttcctcccctacttctgcggcctcctcgtccttggactcatcaaaggtgttttgttgtgcccttgggcatgtctgattatggcgattggaatatctgccctggtcctgggcttatggcctatgcatctgatttggacatactactgcattgtcagaaccaagctggttggacctgtggtaaagcttctgcttcttattgctgcgactgcagtcttgatcatatggttgataattggcatcccgggaagcatatttgctggattggtatatggttttctagcacccataatggctacatttgatgctgtaggagaaggcaaagaaaagccatttgttcattgctttgtggatggaacatggagtactatcactggaagctgtacagtagtcagggacgtgaaagctttgcttttccactcctatttttcacttatggatgaccttcgtcttcagaaacctcctgacggggagccatatgagataagattgcttgatattcctggtgcactaatagcggctgcatttgggcttctacttgatggaataatgttcacattaattgccttctataagtgccccgtgatgcttttcaaaggatggaaacgactgatccaggacatgattgggagagaagggccctttctggagactgcttgtgtgccattcgctggtcttgctattcttctttggccatttgctgtagtaggagccgttctggcatccatactctccagtgcccctttaggtgcttatgctgcagctgtagcttatcaggaatcctcccttatcctgggaattgcctatgtgttctcgtcggtgtctatatttgatgaatacacaaatgatgttcttgacatggcgcctggttcttgttttccaagatttaaatatcggaagggcaaagatgagtcttcacacgggcacagtgttccattatccagaccagcctcattcaacagggagaagcaagaagggaaaaggcctccgtctcgtgttacttcatttaagaacagcattgatgatttcaatccattcaagctgctggaccacctatttgccgaatgcaggaaccagggggaggatttggttaacagaggagtgataacaatgaaggacattgaagaaacgaagtctggcaaagttggcagcgcgtgttctctaatgttggttctaccagcgtatgttattcttaatgcactccttcggtctgcgaaagctgattctgtcgggctaatcttaagtgacggctctgagattacatctgacaatagacctaaaaacaccatctttgattggttctttgaccctcttatggttataaaggaacagatcaaagctgagaatctcactgacgaagaggaagagtatctgaaaatgcgagtgctattggctggtgatcccagtcgcctgaaaggctctctgcctcatgttccatccttgactgaacgtaaaaaggcagatatagacgcattcgctcgcaggttgcaaggaatcacaaagtcgatatctagatatcctacatcaaagcgccgcttcgacgtccttgtgaaggcgctcttgtcagagctggagaggacgatgggccaatctggcaatggatcccagtcccaggcgcagaggctgcgaaactcggtagcccggatgttgagccagaaatctatgggcaagactgccaacattagggatgaagacccagaagcgcagatgacgagactgtctcgcaccccgtgatcgtctgtttgttagtttgacgatgccgtatcacatgctattccagccttgtacaaatgatgagtagatagaatgctgcggcttgaactgatgctcttacatctcatgtatgatctgtatattttaggcactatatgtatcgtgtatgcaatgtttttttgctcccgaaaagaaaagagtatgcccacaggagaccaat

SEQ ID NO: 273678 - DNA, 634 bp, Zea mays
cttcccccacaacgtcggcctcggagccaccagggatccaaacctggtgaagaggatcggcgccgcgaccgcgcttgaagtgagagccaccggcatccagtacgcgttcgcgccatgcattgcggtgtgccgtgatccgaggtggggccggtgctacgagagctacagcgaggaccaccgtatcgtgcaggccatgactgagctcatcccgggcctgcagggcgacgtcccgcagaacttcaccagcggcatgcccttcgccgccggaaaggacaaggtcgcggcgtgcgccaagcacttcgtcggcgacggtggcacgcacgacggcatcaacgagaacaacaccatcatcgaccggcagggcctgatgagcatccacatgccggcctacctggacgcgctccgcaagggcgtctccaccgtcatgatctcctactccagctggaacgggctcaagatgcacgccaaccacgacctcatcacaggcttcctcaagggcaggctcaacttccagggcttcacgatctcggactgggaaggcatcgacaggatcaccagccctccaggggcgaactactcctactctgtgcaggcttcgattcttgctggcattgacatgatcatggtgccaaac

SEQ ID NO: 273679 - DNA, 413 bp, Zea mays
caatggcgtctccaccgtcatgatctcctgctccagctgtaacgggctcaggatgcacgccaaccacgacctcatcacatgcttcctcaagggcaggctcaacttccaggtgagaataataagaagcagatagatgcgttttttaaacgttaatcagacttggaagctgcctgtgtatttttacagggcttcacgatctcggattgggagggcatcgacaggatcaccagccctccaggggcgaactactcctactctgtgcaggcttcgattcttgctggcattgacatgatcatggtgcccaacaactaccaaaacttcatcaccatcctgacgggtcacgtcaacagcggcctgatcccgatgagcaggatcgacgacgccgtgactcggattctgcgcgtcaagttcac

SEQ ID NO: 273680 - DNA, 1015 bp, Zea mays
aacacgcgtccgcccacgcgtccggacgcgcaccaggggaggaagcagttccagcaggaggtggaggtgctcagctgcatccgccaccccaacatggtgctcctcctcggcgcgtgccccgagtacggctgcctcgtgtacgagtacatggagcacggcagcctcgaggaccggctgttccgtcggggcggcacgccgccgatcccgtgggcgcagcggttccggatcgcggcggagatcgcgacggcgctgctgttcctgcaccagacaaagccggagccgctggtgcaccgggacctgaagccggccaacatcctgctggaccgcaactacgtgagcaagatcagcgacgtcgggctggcacgcctggtgccgccgtcggtggcggacaacgtgacgcagtaccggctgacggcgacggcgggcaccttctgctacatcgacccggagtaccagcagacggggaagctgggcgtcaagtcggacatctactcgctcggcgtgctcctgctgcaggtggtcaccgcgcggccacccatggggctcacgcaccacgtcgagaaggccatcgacgcgggcaccttcgcgcagatgctcgacatcaccgtcaaggactggcccgtcgaggaggcgctcggctacgcaaagctcgcgctcaagtgcacggagatgcggcggagggaccggccggacctcgcaaccgtcgtactgccggagctcaaccggttaaggaacctcggccacgcgtacgaggcacgcatgagcgccgtcgggaccaacagtggaagtggcgaaagtaatgaccaggtcagcgggagctcgccgacggcgggtggttcatggagaacggcggagagctagcgggtggtacggcgtggccatgagtcagttagagagcgagcttgtgatggggagagttcttttgttggacggagagttcaaaatccaaaaatcttggtgtatgtacagttgtctatgaggaatactaacacgtcttgcagtgcttctgcctctc

SEQ ID NO: 273681 - DNA, 1145 bp, Zea mays
cccacgcgtccggtccgggaatccgggctgtacattcggcgtggctccaggggacacggacgcctgccgccggtgatgcctgacgccaggcgctccatggacgggcgcagcaccctgccggagctcaccacgcgcccaccgttccgcgagcgctcgctcccgtcctcggccaccaagaacgtcgtcgtcctgccgggaaaggactactccgaggcgccctcccgctccgcgaggcacgactccgttcggcggcgacctcgacttcggcccgagcacgcgcttctcctccatggacttcggcgacaacctcgacctcaccgccagccccgctcgggagcccatgtcaccggccaccggcgcgcaacgggatattgaggtcgagatgcggcgcctccggctggaactcaagcagaccatggacatgtacaacgcggcgtgcaaggaggccatcatccccccgcgccgccccaaggagatgcagctgatgaagctggaggaggagcgtcggctggaggaggccaggcacgccgaggagactgctctggcactggccgagatggagaaggccaagtgccgcgcggccatggaggcagccgaggcggcgcagaggctggccgacctggaggcgcagcggcgccgcaacgccgaggtgcgcgcgcgccgggaggccgacgagaaggtgcgcgccctggatgccatctccaaccacgacttccggtaccgcaagtaccacatcgacgagatcgagatggccacggagcgcttctccgacgagctcaagatcggcgagggcggctacggccccgtctaccgcgcctccctggaccacacccccgtcgccatcaaggtgctccggcccgacgcgcaccaggggaggaagcagttccagcaggaggtggaggtgctcagctgcatccgccaccccaacatggtgctcctcctcggcgcgtgccccgagtacggctgcctcgtgtacgagtacatggagcacggcagcctcgaggaccggctgttccgtcggggcggcacgccgccgatcccgtgggcgcagcggttccggatcgcggcggagatcgcgacggcgctgctgttcctgcaccagacaaagccggagccgctggtgcaccgggacctgaagccgggca

SEQ ID NO: 273682 - DNA, 1131 bp, Zea mays
atgaccttaaatttgaccctgacctggtcataagaggtcttgttattgataaagagaagggaaacttggttaaagctgatcgatttgggtacattaagagggccatgcatggtaccccaaatgctttccactcgtgctgtgagtgaaatatatggaagagaattggtggacctgcggaaagaaattcgatgggagttccttaatacccttttctctgtttcagaagctgtcatgttcatgcagatggttgacaagttagatcagggattggtgccagctgaacttgggccactggattacaaaggactgtacaatgctgtttccaaagcactttttcgagcacatgtagaaggccaactcaagagagaaataatggctgagcctgatcggtttgtagagcctgatccagaacttcctttagctcttcttgatcaaaaagaggctggaaaaaagttgcttctcattactaattcagatttccattatacaaacaaaatgatgaatcatgcattcaatcgctttcttcctaatgatgtgggatggagagatctgtttgaaatggttatagtctctgcaaggaagccagaatttttccagctttcacatccattgtatgaggttgtaacagatgatggactgatgcgtccctgttgtaatgggtattcaggtggcttatattctggtggtagtgctcagatgggtgagaaatcactagacattcatggggatgagatattatatgttggggaccatatttacacagatgtaagccagtcacaagttcatttacgatggaggacggcattaatctgcagtgaactagaagatgagtttaatgcactggtcaaaagccatgatcagaaagaaaagcttgttacacttatacaacaaaaagaaattgtgggggatcttttcaaccagcttcgcctggctctgcagaggcgctctaattcacgtcctgcacagacgcttgctgcaacttgtatggatgaccaggagcttacggagagtatgcaaaagttgctcattgttatgctaagattagatgaagagatccggccaatgctagaagcagatggagaacttgtcaataaaagatggggttggttgtcacgtgctggcctatgggat

SEQ ID NO: 273683 - DNA, 546 bp, Zea mays
acccacgcgtccgcggacgcgtgggactaagttgggccaataataccaggcccaaaggcctaggaggaaaaagataagggtgcccgtttctctcctcgacgacgacattctcaactctgaaacggcgatgtcacggctactcccgcccgtgctctctcctttaccggcgttctcgctgccgccgccgcttcttcctcgcatccacatccgcacgtcggcggtgagaggcggtgcggcggagaacgcgatggcgtccgggacgacggcgagggagcggcgcctggtcaaggtgcgggaggagcgccgccgccgcgagtacgaccgggagcacacctaccccggatgggccaaggtactggagaacgcctgcagggatgatgaagagctccgcgccattcttggtgatagcatcggcaacccggagctcatgaagcaacggatccaggaaagggtgcgcaagaaaggcagggcccaattcaataaatccaagacaggctccattggtgcttttaaagtcagctttcgagactttaacccattgaattc

SEQ ID NO: 273684 - DNA, 415 bp, Zea mays
gccagagcaaagccgcagagatgatttggaatcgatcggatacgttcttctgtattggcttaggggaagtcttccttggcagggcttgaaagcagccacaaagaaacagaagtatgacaaaataagtgagaagaagctttcgactcctattgaggctctatgtaaatcccatcctgtggaatttgcttcctatttccactactgccattctctgacatttgatcagcgtcccgattatagtttcttgaggcatgtctttcgagaattgtttgagcgcgaaggctatcaatttgattatgtgtatgactggactttgttgaagtgtaagctatcccaccaggctagggctcagcaaggatgctctcatgatgcatgcgtaagcagccgtccagttgcaacatacgtggacaagcac

SEQ ID NO: 273685 - DNA, 435 bp, Zea mays
gggtcaacccacacgtccgcacaagcacgacgacggggcacacgagctcacgggtgatggcgaacgagggcgtcgcggccgagcgggcggtcaaggcccctccaccggagacggagagcatcgtgtggagggaggacaaggggaggttccagacgcccgacggcgaggccttccttcagtaccgcctcctcgacggccgcggggcccccgctgcggcagtgatggacctggtgcacacgtacgtgccgcggagcaagcgcgggcaggggctcgcggcgcggctctgcgacgctgccttcgcccacgcgcaggcccgcggcatgcgcgtcctccccacctgctcctacatctccgacacgtacctgcctcggaatccggcgttgaaggagctcgtggacaaggatcaagaaccccatcccaaacccagcagcatgt

SEQ ID NO: 273686 - DNA, 283 bp, Zea mays
cccacgcgtccgggacgctggattcaaacccttcgatcccaaatctgccctgcacgcctcgccgccggccacacccccggcggtcgtcgccctacccactcgacccttctccttacctctaaccccgccggagcccaacacctccccaccatgccgcgaaacttccgcaagcggggcatcgagcaggacactgacgaccgctccgacgacgaggacactcgccgcatcgccctcgaggagatcaagtacatgcagaagctccgggagaggaagctgggtatcc

SEQ ID NO: 273687 - DNA, 838 bp, Zea mays
gctggtccttctatgctcctgacaggaccaggaactcagcatactagcttggctatatacattctgatgcgtgcagcagtgcttgcatcccgttgtggaataaagagcaagcgttttggaaagatctgtaaacctttgacttggtcacatggtgatgtcttccttatgtgcctctcatctgcacaaattttgtcagcatacattttaaagcaggacagttggccatcatcatataaatcatttctaaacaagcatggtggaaaagatcttactattttgcaaggtgtgaaggatgtagtcaaccacactgctttcagtaacttagtgggtatcgagaagtactacaaatctgttggtgttgacataaagctagatccaaacatgaaagtgccttgctcagtaagtcttaagatccatatgaatgatattgagctactatccattgtactttgaagtttgacatatcaagcatccagaaaatagaatcaattctgtggcataccttcctctggtccgaactatctacacctaatctgttttcattttttttgttaattttctttaccctccatgatctaacttcttgtgtttgctttccagattgtgcatggtaaccagtcatgtacaggacatgtcttttcattcttgttacaagcatatggaagagcagttcctgtatatgttccagtctacttagtccctgcacttgtagttcataggcagcatctcatgaaaaggccttactcaattatagggaagagttttctaggagtagcaagatctagtctgtttctctcagtatactgtgcatctgcatgggcttggacctgcctgcttt

SEQ ID NO: 273688 - DNA, 374 bp, Zea mays
ctccattcgcgcaaagacgccaagcccacccagcgaaatctctccccaaactacccctcgccagcgcccggcgatgtgcccaacgaagcccgatcgccctggccaggccgccgccggctccggcgagaagagctggcgggaggaggccgtggccgcctgctcgctgcggctggtcgacctggaccgtggcaccaacggctgggcctcgccgccgggggacctcttccacctgcgcgcgcgcggctacttctccagcggcggcgggaagcgcggcaaggcgccgtccgccgcggactggctgctccgccccgccggcgtcgactggctacgctcccacgcgcgcctcgaccacgtgcttgtccgcgacgacaacc

SEQ ID NO: 273689 - DNA, 979 bp, Zea mays
cccacgcgtccgagctcgagcactcgacaccagcgtccaacgggatggcgagcctgaccatgccgccgatgccggcgtggccgcggcaggacgccatcgacctccacaaagcattcagagggttcggttgcgacagcacgacggtgaccaacatcctggcgcaccgcgacgcgacacagcgcgcgctgatccagcaggagtaccgggccgtgtttaaccaggacctggcccggcgcatcgcgtccgagctgagcggccaccacaagcgggcgatgctgctgtggatcctggacccggccacccgcgacgccaccatcctgaagcaggcgctcacgggcgacatcaccaacctgcgggcggccacggagatcgtctgctcccggacgccgtcgcagctgcagatcatgcgccagacgtaccgcgccaggttcggctgctacgtcgagcacgacgtcaccgaacgcacgtccggcgaccaccagcgcctcctgctcgcgtacctggccatcccgcgcgccgagggccacgaggtcgacccgtcgacggtgacgctggacgcgcgcgacctctacaaggccggcgagcggcggctgggcaccgacgagcgcgccttcatccgaatcttcagccagcggagctgggcgcacatggcggccgttgcccgggcgtaccaccacatgtacgaccgccccctggagcgcgccgtcaagagcgagacgtcgggcaacttcggtttcggcctcctcaccgtgctccgctgcgccgacagccccgccaggtacttcgccaaggagctgcacagggccatgaaggggctgggcaccagcgactcggtgctcatccgggtggtggtcaccagggcggagatcgacatgcagtacatcaaggcggagtaccacagcatgtacaagcgctcgctcgccgacgccatccacgccgagacgtccggcaactaccgcaccttcctcctctccctcgt

SEQ ID NO: 273690 - DNA, 333 bp, Zea mays
cgcagttgatccagtacacaattgcagagagctagaagacacaagaccatggcgtccaagcgactcctcgtgctagtagctctcctgctcgccgccgttttccttgccgtctcagcagcagctaacgacgaccaagcccaaccgaggaaggacgacggcggcgagaacaaagccgacgtgcaggactaccgtggcggcggcggcggctggcgcggtgggggtggctaccccggccgtggctacccgggcgtgggctgctaccctggcggcggccgctgcgtttactgcaggtcggggtgctgcaaccgcgggtactatggctgctgccggtgc

SEQ ID NO: 273691 - DNA, 878 bp, Zea mays
cccacgcgtccgcccacgcgtccgcccacgcgtccgcccaccacctgcaccgagcggttgccgccgttaaaccctaccgctgctctcgtcaccatctctccgactcatccctctgtcctcacaagccgccgccggccaagtcctgtccttctcccttgtctggttcggatcgtcgttgctagccaggtgctggatccgtagcggcggcggcggccatggacaagagcatgctcggcgacctggacggcctccccgaggaggacaagatgcggatggccgccatgatcgaccagctccagatccgcgacagcctgagaatgtacaattcgctggtggagaggtgcttcacggactgcgtggacacgttccggcgcaagaacctggacaagcaagaggagtcgtgcgtccgccggtgcgcggagaagttcctgaagcactccatgagggtcggcatgaggttcgccgagcttaaccagggtgtggccacgccggactaagaaacacgctgccgctggctggctgctctcgttgcgcgcccgccgccaggtttctggctttcgctggcacagatttgtagccgacaaaaggatttcagcacttcccctgcctgagatatatgcgttttagagccgaacgctgggtgtcagattgaataaaaactgccttgagaagtgttgtatttcgtttcatacttgtgtcaacgatttcttcttttttttacgagccacataagtgcggtttttttatatataagctgtttgtttttttttctctcttataagcagcgagcaggcatcctggatgaggtgaatccgtcgactagtgtcaggctgcggtacagcccagctgtttcagttgcatcgagtgatctggaaaag

SEQ ID NO: 273692 - DNA, 407 bp, Zea mays
cccaccggattggtccgccctccttgtgctccgccggcaatggcgtccaccgccgtcaagctcatcgacatcgcagtcaacttcacagatggcatgttcaagggcatctaccacggcaagcagtgccacgtcgccgacatcccggccgtactcgcgcgcgcgtgggctgcaggcgtcgaccgcatcattgtcaccggaggctccctgaaagagtccagagaggcattgcagatcgccgagaccgacgggagactgttctgcactgtgggagtgcacccaacgagatgcggggagttcgaggagagtggagaccccgagggtcattttcaggcactgctggctctagcgaaggaaggtttagataaaggcaaggtcgttgcttgtggtgaatgtgggttggattatga

SEQ ID NO: 273693 - DNA, 1081 bp, Zea mays
cccacgcgctcactgcaccgagctcactggcaatggctaccagcaccaagctcgtggcccttggctttgccgtcctcctgagcatcggcttctccgatgcagcgagggtagttaggcttggtagccatgcgtctgcgggaggtggaggtggcggcgggggaggcggctccgggtcgactgggggtggctttggcggtgggtctggcggtggcggtggttacggcataggtaagggtggcggggactggtggaacaatttcgtctctagtatagcaggtggtggaggaggaggacaaggcggaggcggtggcaccaatggtgggtccgggtccggcggtgggtccggttatggttctggcagcagctcgactgcagcctctggccccagcagtggcaactacgccgacgctgaaggcaagggcgccggtggaggcatgggcggtggtgccaatggtgcatatggttctggtgctggtggaggcgttggcaagggcgagggtgtgagtggtgtggcactcgcaccatcgtccaacggctactacaatggcggtgccgccgatgctaccggtggcggttccggcgccggcggtggacatggtggtggcgcagctggagctccaagctatggaaccggaggcggcctcggcggaggcaagggtgaggccggcagcgatggatcgtgggggtcaggttatgctcagggaatcggtgctggcacaggcggcggtggcggcggcggatcccaaggcggctctggtggcggtggaggctctgggtccggatccggcagcggtggaatccactgagcttgcacttcagtagctagagcctagagccccgcattagtgtcagtccattctgtggttttttgctgtctttgttacgagaattaatcaggaataaagcgtaatgggcttcgtgattgtagttcgagtaggtagcaaagcatgcaactgatatgaatgcatgtaatggctatctacgagtgtgtgcccctagctgtaatctgtttctcatcgatcgttaaggtcgttgcatccggttttatttatcttctgaaaccaaaatacattggaactat

SEQ ID NO: 273694 - DNA, 481 bp, Zea mays
aatgaactcgcaaactacaaagatgtagtggtgatggtcacaagcaacggggggcggacgaccgtgagcaggaggagcaaggcggaagacctggaagcgcagctaaccgacctcctggtgaagatgcactcggagcacattgcacagcccaattcgtaggaccatcgagcgagcgagatggttaaattaaatcagacatgccggcggcaagtatgagcgattctacttctactcgcctagcaaattgtgatatacagagttcaccgggtttgtcataaagacgctcatcaatgtgctgcagcagattaattcaaaaaattatagctgaatagctccccccaggtacatgcaagtttttgaacataacctaggtaaagcaggtgatgtgatgcccctgttcatgtggcgaagccgccagcctagctatcgagctttttttttacaaacttgccgctatcaagtcaaacttttatggtgggat

SEQ ID NO: 273695 - DNA, 357 bp, Zea mays
ccaggccgaaggaaaacaatcctgaaaccaagccatgggtctgcaggtacacggctcgtcactctctaaatcgccatatgctgctactcgcttgttgaagatcgaacgtttattcatctgatggtcaccaagattggttctttgtttccatttggttctgaatctccagttccgtttcgattcttgcactgtaccccaacccacagtagtgtctatacgaggttcgtttttaggttctccagagaaacgatctagacttgaaatccgctgctgcgtggtcttattttccatctagatttgtatgcgtagcaagatctggtggattcagactgttcggtctttgtaccctttatgctc

SEQ ID NO: 273696 - DNA, 892 bp, Zea mays
aacttcctcttatctatctggcagcaactgctggtgccaggcttggtgtagcagaggaaataaagtcatgcttccatgtcggctggtctgattatgagagccctgaacgtgggtttcagtacatttacctcactacacaagattactcacgtctaagctcttcagtaatagctcacgagctgcaactaaaaaatggagggaccagatgggtggttgataccattgttggtaaagaggatggacttggttgtgagaatctccacggcagtggggcgattgccagcgcatattctaaggcatacaaagagacctttactctgacatttgtgactggaagagctgttggcattggggcttatctggctcgtttaggcatgaggtgtatacaacgtcttgatcaaccaattattttgactgggttttcggcactaaacaagctcctggggcgggaggtgtacagttctcatatgcaattgggtggccccaaaatcatggctacaaatggcgttgtccaccaaactgtgtcagatgaccttgaaggtgtttctgctatcctgaaatggctcagttatgttcctccatatgttggtggtcctcttcccattatgaaacccctggacccacccgaaagaccagtaacatacctccctgagaatgcttgtgatgctcttgcagccatctgtggcattcaggatggtgaagggaggtggttgggtggtatgtctgatacggaaagctttgtggatacattggatcggtggggcaaaatacagtatcaccggaagagctaagcttggtggtatacgagttgtgtcatagctgtagataccagactgtgatgctagtcatcccagctgatcctagtcagctcgattcggctgagcgcgtagtc

SEQ ID NO: 273697 - DNA, 503 bp, Zea mays
gtaaaaattgtggaagtagggccacgagatggtctacagaacgagaaggacatcgtgccaacacctgtaaaggttgagcttatacgaagattggccacatctggattacctgttgtggaggcaacgagttttgtatctccaaaatgggtacctcagttagctgatgcgaaggatgttatggaagcagttcggactatggggggtgtacgttttcctgtattgactccaaaccttaagggatttgaggcagctattgcagcaggggcaaaagaaatcgcaatatttgcatcagcttctgaaggattttccaagtcaaacataaactgcaccattaaagagagcattgcccgttataatgacgttgctcttgctgcgaaagagaaagaaattcctgtccgagggtacgtttcttgtgtggttggatgcccagtagatggaccagtgccaccttcaaacgtagcttatgtagcgaaagaactttatgacatgggctgctatgaggt

SEQ ID NO: 273698 - DNA, 425 bp, Zea mays
ccagaggacaatggaataaagaaccttgatatacccattcaattttcagaaactactccttatccgtctcatgaatcctttgctagcagtgaccaccaacctgctattcctacccttgttgaaggtgataaagaaacctgcaaagaacagttcgatgtacaaattcatggccagtctaatgatactgaggtcgcttgtgactcatcagttacaacttgtgaagctgttccagatcatgctacaacagaactggatgtgaaaagtgattctttagataattctcagtctctaccttcaagcattcaggaatgtgaaccaatataccaaggtgaagagcacatacttggcaccacaaatatggtgtatgaaaatcaagagccagtgtatgagggggaggtggttcttgctgagcaggctgacaagat

SEQ ID NO: 273699 - DNA, 487 bp, Zea mays
cggacgcgtgggctccagcctccagcgtgatctgagtcctgaccaagccctaaacgccaccgccctcgcaaatctcctttcccttcgatccatggccgccgccgccgccgcccccgcgccatcccgcaagacggagacctacaccgacaccaagcgccgcgacgacgtgcgcggcgccaacatcgccgctgcgcgcgccgtcgccgacgccgtgcgcacctcgctgggcccccgtggcatggataagatgatcgcttcgggcgaccaggctcaggaggtcatcatcaccaacgacggtgccaccatcctctcccgcatggcgctcctccagcccgccgcgcgcatgctcgccgagctatcccgctcccaggacgccgccgctggggacggcaccactaccgttgtcgttcttgtttggatcccttcctcgccgtgcccagtcgtttctttccgttggggcttcacccatccgtcgtggttgacgccc

SEQ ID NO: 273700 - DNA, 567 bp, Zea mays
aaccgattggcgagactgatgggacggcgtcacagcggcggcggcggcggcggaagaggaagagggcgagggcgtgggcgagatgaggaagaagatcttcctctgcacaaggccgcaaggtctggtgatgcggcagcagtggagtcggtgtgcgagtccaaccctctcgccgtcaattcaagggatcgcctctcacgcacaccactccacctggctgcatgggctgggcatgttgatgttgtgagatgcctttgcaagcacaaagctgatgtgggagctgcagcaatggacgacactgcagcacttcattttgcttcccagaaaggccatgtagaagtggcccgtgagctgctggcatctggggcctctgtgaaagccaagaaccggaaaggcttcacggcgctgcactttgctgctcagaattctcacctggatcttgtgaagtaccttgtgaagaaaggtgttgacgtcacagcaaagaccaaaggtggtcagacagctctacatgtcgctgaggatgatgaagtgcgtgcgttcctgaaggagtgcgagcaatccttgaagaag

SEQ ID NO: 273701 - DNA, 259 bp, Zea mays
cgtccgcaaagatagagagtagtttttcggtgagcactgagcaggaaatgatgttgctgtagtagaactcaatgtcgattttgctctgaattttactgtttccttgacacaagttatttcctcattcagactccacctggctgcatgggctgggcatgttgatgttgtgagatgcctttgcaagcacaaagctgatgtgggagctgcagcaatggacgacactgcagcacttcattttgcttcccagaaaggccatgta

SEQ ID NO: 273702 - DNA, 622 bp, Zea mays
atgccgtctgatgggcctcccactgggtcatcgtatggtatgggcggggaggatatagtcgggttaggcaagcctgatccaaggcgacaaagaccaacgtccgagttaggcgctactgaagcactgatatctcgggtggtgcagttgcaagcaccctgaggagctaagcattcggcgataactcgggcgagaaggtcaaggaatttcatcctgatgtttgcaaggacccagaaattgcagatttaagaatgagcgagcgatggaggtctatcagggagtgttcttcgttgctgtccattgtgaaacatgtcctaccgtatcccttgccaaccagctcctgtatctgttgcccgctcgattcgttgaagcacagagtatggagaaaacacaacatatatcgcatggattatgatttgttagtgcatgtgttacatattgacttatcgttttgagttgtcaataggtccaaggtactaaattgttgatgcacggatttctaattttatcaatttgttttgtgggctgcgatttattttaagtcgctctaagatctcaattattcctcttttttgttattttttatgccttagctgtaatgtttgttttgaatatttattattgg

SEQ ID NO: 273703 - DNA, 406 bp, Zea mays
atgcgggccaaggcgagagggaggcactcgcactagcttcgtggattggcaggagctacagggcgcacactggatcggagatccgctggtcggacactgaagacgcggcgggctctcccctgacgctgttctggaagcacagcgacgccataatctgctgctctctaaagccggctttcacgctcaagttcgccaaccgcgccggcttcgacatactggagacgacggtggcgattgtccaggacctgccgctggaggcggtccttgatgacgggggacagaaggccctggtcgcacagctccccaagatcatgctgcaggtaccgctactaactctgcctgctcgtacataagccctgtttggcacagctgctgcttgttgaaaaagcaggttatctgagaagct

SEQ ID NO: 273704 - DNA, 648 bp, Zea mays
  unsure (1)..(648): unsure at all n locations
cccacgcgtccggtctctctctccgtgaaggaggaagttgggcttcgttctcgagtactcttcgttctcaggcggcccccggctgcttctgctggtcgccgcccagctccagttattagagaaataagggccagcctggttgcccgaggctgacccagcacctgcgatggaggagaaggctgtcacaaatggagcggcagctgctgatgttgctgctcctgataataaggataacaccaaggaagaggttagcaagagcaaggagccagtagcgaataaggatgctgaagagcagaacaaaggctcggaaaatggtgctgagggccattcaggtggagatgtcaatatggcagatgctgagatcactgaggaaggtggtggtggtgatgctggtgcggcaaagcaggtggattctggagatgtcaaaacggatgccgatacaaaggaagatgccaatgcgagaacagaagaaggtgaggatgccaagatgactgaggctgacacgggaagtacagaggtcaaagataaagaagagaaggaagatgaagttgtgaacacaactgtggataagcaggatgaatcgaaggagcaagaggaaggtgcttccgctgagccagagcaaaacgaagggaaagaaacngatgctga

SEQ ID NO: 273705 - DNA, 456 bp, Zea mays
gcgaggagccagacaagcgacgcggctccactcccttctcaggcggccccctgctgctcaccgcccagctccaggtattagagaaataagggtcggcttggttgcccgaggcctacccagcgcctgcgatggaggacaaggctatggcaaatgagaccagcgactgctgatgttgctgctcctgataataaggataacaccaaggaagaggctagcgagagcaaggaaccagcagccaatcaagatgccgatgaccagaacaaaggcttggaaaatggcgccgagggccagccaggggggagatgtcaatatggcagatgctgaggtcacagaagaaggccaagggtgatcctggtgctgcaagcacgcggagtcttgaagatatcaaaacggatgccgatacaagggaagatggcaatgcaaaggcagaagaacgtgaggatgtcaagatgactg

SEQ ID NO: 273706 - DNA, 291 bp, Zea mays
caagatgactgaggctgacacgggaagtacagaggtcaaagataaagaagagaagggagatgaagttgtggacacaactgtggataagcaggatgaatcgaaggacaccagaggaaggtgtttcggctgagcaagatgagaagcaaggagaggaagcagaagaaaaaggaaaagaaacggatgccgatgagaagcaagaagaggaagcagaagaaaaaggttctgctgatgagaaagatgaagatgaaggtgaccagaagatggaagagaataaggaggagactccgaaga

SEQ ID NO: 273707 - DNA, 467 bp, Zea mays
caccaccaccactcgcccgcgcaattcccaaatctcccaggggcctcttcgcttacctcccgcccgactcctcgcgaccccatcgcctcgcctcgacccgtcccgagccttgctcgtcgcggagcgccacaaccacgcctcgccgccgccggcgagcggtcaagcctaggggctatctccgtgtgatggctaccgcgccggcctccgaaagctcgaccgcctcctagggcggcagttacccgaggctgagctcgtgcgcgcgcgtggggacccccgtgctcagctcgcgaaaccctaggagcagcaggaggcgaggcttggctggcggcgatggacgtggactcacgcatggcgacggagtccgactccgactccgacgcgcgcggcggcagcgggtccgggagcgagaccccacggcgtccccgtccccgtctgcatccccgtccccatccgcgcccgggacgccc

SEQ ID NO: 273708 - DNA, 1398 bp, Zea mays
ttatcacgcgtccgcccacgcgtccgcccacgcgtgcgcgaaaggcatcttgactatttcggttgatgtaatagcatcctcttgtcccccgaggagcttgtctcgaccatcatctaactcggtacgtgttggtggaaacgctgaaggacaccgtatcaagcctgagattttgttaaatgtttgtgaactgctgtgcttttgtgttgttcatcatccctacagaattaagtgcaattttcttatgaacaatgctatcgagaaaatccttacattgactcaacggagggagaagtttttggttgtagcagctgttaggtttatgcgtactattatatccagaaatgatgagcatctcattcgccatgttgtgaagttcaacttgttgaaaccaataattgatatctttgttgacaatggggagaggtacaacatgctacattcaggagtacttgaattgttggaatacatacgaaaggaaaatataaaagctctcactatctatgctattgagtctttctgggatgaacttgccatctttgaacacttcgggagtattcaggccttcaaactcaagtatcaacagtacctggagagcgctgaaccaaggttgaatgcgagtgtgcctgacatgagaaagaaggcagaacaaagaggtcttgagaaggaagaggaagactacttcaatgaggacagtgatgaagaagattcaggctccggccggcgggctaaacatgcacagaaccaaaataacaagcctaagtccaaggtccccaatggaagtgaagctgatgacactgatggcgcctctaggcctaaatctgctggacttgtggactatgacgatgatgacgatgaggacttcaatccaccaccaatggagccttctacgcctgcagaggatgatgtgcccttaaacatatccccggtgaagcggaagccagtggatgtgaaacatgcagatggggagggtcgcaggaggcaaaaaatagaaaccagaattagttgtgctaaaattgctgctgttactagtaccattattaagcacacagatctacaaaacaagcatgcttgctacttgcctacatcagccgcgccaagtactgaacccaatggtgtttttagggagcgtggcactaactctgaggagcatcaacattctgtagagaacacagaaacttcacgacaagctggtggtgattgtataaaagacgggggcagtatgtctcccgagaaggctgtgaatacgacaacgacaagtgatttcggcgccttattcaaggatgatgactgactactacacagctggttggtgcctgtacccaacctggtctctggccacaggaaggaatcggaatgtgtttggctccaaaattcattgatatcaacttggaagcatga

SEQ ID NO: 273709 - DNA, 716 bp, Zea mays
tttgaattttgcacacttagcaagagtctaccagttgttcagcaactgcgactgtttcgggatctttcaggtgaaggcgttttcgaaataatttctgatgtgttgcagagtcaagatagaaaaatcgtttcagctgggacagatatcctgatactttttcttaatcaggaccctaacctattgaggtcatatattgtccagcaagaaggaaattctcttctaggacttctggttaaaggcatggtaactgacttcggtgaggaaatgcactgccagtttctagaaatcttgcgcatattgatggattctttcactatgtctggagcacatagagacgtaattattgagattttctacgaaaggcatcttgactatttggttgatgtaatagcatcctcttgtcccccgaggagcttgtctcgaccaagatctaactctgtacgtgttggtggaaacgctgaaggacatcatatcaagcctgagattttgttaaatgtttgtgaactactgtgcttttgtgtagttcatcatccctacagaattaagtgcaattttcttatgaataatgctatcgagaaaatccttacattgactcaacggagggagaagtttttggttgtagcagctgttaggtttatgcgtactattatatccagaaatgatgagcatcttattcgccatgttgtgaagttcaaacttgtgaaaccaaatattga

SEQ ID NO: 273710 - DNA, 521 bp, Zea mays
cccacgcgcccccccccccgccagatccggactctctcgctcgagggtagggcagggcagggcagggcaggcggcgatccgaatccaatcgccggagggaggaagccaccggtggccgcagtgagggcggcggaggtagaggcaaagggatgacgcgcgggaagcagaagatcgacgcgcagcggcgtaacgcggagcgaaaccagaaatccaaggggtctcagctcgaggcccgcgccgtcggcctcaagatcgtctgctccatctgcaaggtacaattggcaaatgaaaaacagctgaccgatcactatggatcaaagcatccaaaggagaaacctccgagcacatcgagcaccgaataaccatggctggtcgtgacgcagaaatatagatccttggctggtttgaggatctttaagtccgtctgatccatgccttggacctcaacgtcagttatatactctctagtgtgtgcattttctcttgtttcaggtattgtgttgtcgtgctgccaatgtgtc

SEQ ID NO: 273711 - DNA, 493 bp, Zea mays
caggaaaggagatcaccacttcactcaagaaggcaccctcccttgccactccttttccttgagatgacgatgacgacgatgaagaagcagcagcagctcctcctcctcctttctctcatgtttctcgttgctgtgacagcagccgctgttgctgccgatccacatccacagcaggtgcaggtgcagcagcagcagcaagcacagatgaggattaacagggccaccagatcccttcttcctcagccgccgccgaaactagactgcccgtccacctgctccgtgcgctgcggcaacaactggaagaaccagatgtgcaacaagatgtgcaacgtctgctgcaacaagtgcagctgcgtgccgtcggggaccggccaggacacccgtcacctctgcccctgctacgacaccatgctcaatccacacaccggcaagcttaagtgcccctaggccttcgccactcatgttatgtacaatgtactatcatcactttaat

SEQ ID NO: 273712 - DNA, 559 bp, Zea mays
ctttcacgtggcataacaaggctgaacaaacgcgcatgccaggatgctgctgttttgggcctggggtttctcaaacttgatgctcgtgcacggaaggatactcaaaagattgaccacacagtgaaggagagagcagcgcttcttaaccattttgccagagcatttaaggagcgagctcagtcagacttgaagaaagctgcagacaaacattggagtgatggtgccttggaggcagacctgcgacgagctgacttggttgttaaacgacgtgccatggaagacgctttcatggcattgaagtttgttcaggatatccatgacatgatggtgaacagattatatgagcagcttccgaaggacgggtcatcttctcgtacaaattcaacagggtttattacacttgagaagaacgggaaggctcttgaactgtttcctggtgaagtttctgctgatcagatttatgccatagaggaagcataccagagtatggcatctgccttttctgaagctgatggtattgactacacagatccttaggagctttgaatgttgtagcaac

SEQ ID NO: 273713 - DNA, 677 bp, Zea mays
actcgtgggtcgttgcaagcctctatagtgacgtcgtattaacgcgtggcggacgcgtgaggcctgccctgtcctgccttgttaagcaacccagcgagacatcacgagagctagagagagatggcggccacggtttcctccttcccggtggtgaacatggagaagctggagacagaggagagggccacggccatggaggtcatccgcgacggctgcgagaactggggcttcttcgagctgctgaaccacggcatctcgcacgagctgatggacgaggtggagcggctgaccaaggcgcactacgccaccttccgggaggccaagttccaggagttcgcggcgcggacgctggaggccggcgagaagggcgccgacgtcaaggacgtggactgggagagcaccttcttcgtccgccacctcccggcctccaacctcgccgacctccccgacgtcgacgaccgctacaggcaggtgatggagcagttcgcatcggagatccggaagctgtcggagaggctgctggacctgctgtgcgagaacctcggcctggagcccgggtacctgaaggcggccttcgccgggtcggacggcccgacgttcggcaccaaggtgagcgcgtacccgccgtgcccgcgcccggacctcgtcgacggcctccgcgcgcacaccgacgccgg

SEQ ID NO: 273714 - DNA, 536 bp, Zea mays
atcgcgtttacttcctgcgctgataagcaacccggcgagcgaggtggtgagagaacgagcgagagggagatggcagccacggtgtccttcccggtggtgaacatggagaagctggagaccgaggagagggacacggccatggcggtcatccgggacgcctgcgagaactggggcttcttcgagctgctgaaccatggcatctcgcacgagctgatggacgaggtggagcggctgaccaaggcgcactacgccaccttccgggaggccaagttccaggagttcgcggcgcggacgcttggccgggccggcgacgagggcgccgacgtcagcgacgtggactgggagagcaccttcttcgtccgccacctcccggcctccaacctcgccgacctccccgatgtcgacgaccgctacaggtgcgttcagacctcaaacacactacttgcgtgcgtgcgtgctaactagctgatgcgcgccattacattaatgacgtctggcgtagtatcatatattattagtggttagctgctagctgc

SEQ ID NO: 273715 - DNA, 1168 bp, Zea mays
  unsure (1)..(1168): unsure at all n locations
acganatcccgatgggaatgtgtgctgaattgtgttcagaccagcactcaatctcaagggaggagcaggattcgtatgctatcctcagcaatgaacgtggcatagcagctcgggacagcggtgcattttcttgggagattgttcctgttgaaatttcttctggtagagggaaaccaccagttgttgttgacaaggatgagagtcttgcaaagtttgatccagtaaagctgaagaaacttgggccaacttttaagacgaatggttctgtaacggctggcaattcttctagtataagtgatggcgctgctgcaattgtccttgtcagtggagagagagccaagaatcttggccttgaagttattgcaaggattacagggtatgctgatgctgcacaggcacctgagctgtttacgacagctccagcccttgccattccaaaggctatatcaaatgcagctcttcaaacttcacagatagattattatgaagtaaatgaggctttctctgttgttgctatagctaatcagaggcttcttggtatcccttccggaaagctaaacttaagtggtggtgctgtttccctgggccatcctatcggttgcagtggtgcacggataattgtcactttgcttgggattcttaggcagaaaaatggaaaatttggtgttgctggagtttgcaatggcggcggcggcgcttcagccctcgttttggagctcatgcaaccctcttcgcatatccattcatcattgtgaagttggcgcgagcaaattagcaagacaaaatttgtaaaatgtgctgtatctgtcgtgctgctcagcacagggcattatcttgtactcccttatatgggaaaatatagacgtatatatagcaatggaaataacagaggcccggaagaataatgtacagacactgatacagccactgaaagaagacatgggtagtgaacaatctgcgtggacgtgattttgccttgccattttatgttggggcaattgtgagtgcagttgtaagaatctttatgaggaagattcttcaataggcaacaccgaattgaattggtgtaacgtgtgccccaacatgaaatgtaatcatcaggtatggacgtattccagtacaacacactcatgttgaacagcaaaaaaaaaaaaaaaaaaggcgggcg

SEQ ID NO: 273716 - DNA, 861 bp, Zea mays
tcgccggtcgatacaagcctctacagcaacagccaacacctaaactaaagaacagtagtagtccctgtgtacgtctagcaacgatccgcaccgagctcgccagttttgctcgttagtttggggacggcgatggcgtccggtcaggaaagcagggaggagctggcgcgcatggccgaggaggggcagaccgtcgtccccggcggcaccggcggcaagaccctcgaggcgcaggagcacctcgccgaagggcgcagtcacggcgggcagacccggagtgagcagctgggccatgaggggtacagcgagatgggcagcaagggcgggcagacccgcaaagagcagctgggccacgaagggtacagcgagatggggaggaagggcggcctgagcaccatgcaggagtccggcggcgagcgcgccgcccgggagggcatcgagatcgacgagtccaagttcaggaccaagtcctagatctgatgcgtgcccccgcttagcatgtagtacgtagctgcaggaatgtagtgtcgtcgtagtagtagggtagtcgtacgacgtgccgctcctcgtttggcacgtgtgccctgaataatgtagtgctgtcagtcgtcgtcctagcacgcgtgtaggagaccatacgtgcgcgtatgatcatgcgtgcttcgcttcagttaggttctgatgttggtcgtcgtccccgtgtttgaagcaggcaggtctcttcaggctttgtcgtcgtaccagcctgtgttctagctctacgacccccatactcatagcgtgtggtggtgggtcgtgatgccttaaggtctccgagtttgtacccgtgcttgtttccctaacgcagtttggttcataactccg

SEQ ID NO: 273717 - DNA, 631 bp, Zea mays
cggacgcgtgggcgcgggtggtggccgccctagggtacgacgacggcaggttcgcgccggggaggtgcacggggtgcgaggccgggggggactcgggcaccgagccctacgtcgtggcgcaccacctcatcctctcccacgccgccgccgtccagaggtaccgccgcaggcaccagccgacgcagaggggcagggtcgggatcctgctggatttcgtgtggtacgagcccctcacggcggactcagccgccgaccgggccgccgctcaaaggtccagagacttccacgtcggatggttcctgcaccccatcgtctacggcgagtaccccaagtcggtccggagaagcgtcaagggcaggctccccaagttcacggctgaggaggccggtctagtccgaggctccatcgactacgtcggagtcaaccagtacactgcctactacgtgcgtgatcgacggccaaacgctacggcggcgcgcccagctactcgtccgactggcacgctgagttcgtctatgaacgcgacggtgtgccgattggaccaagggcgaactcagactggctctacatcgtgccttggggactgtacaaagccgtcacctacgtcaaggagaagtacggcaaccccacg

SEQ ID NO: 273718 - DNA, 630 bp, Zea mays
aacaaaaactgcaaagtccctggatgggtctgccttaaaaacagggcaggaggaggagggtcctgaagaggctgatgctactgaaaaagcaatggaagaggttgacaacgttgtgaagtccctggatgaagaggtagaatcaaaggagatgcagaagcagcaaaagcaggatcataatagcgggcgcccccgggggcttagagccacgcacaagaaatatctcattgctgcaaaggaagaggaggtcaccgaagggaagaggcttcctctcgaggaggtggatgagaacgcatgcatcagccactgaacagaacaagcaggcgatttttttgtgtggatggcgtctgccacaaaaggattgaatcgaggagtgtgctctggttgtgaagtgataactaggctaccacatgttcattttcaaaagttttcgtgtgtgatcgtgatcaggggtgaaactgtggtttcagccaacaaacttgcagttcctattgcttctccccacttttttcctttatatatattttgtatcggttacagaacatggtttatccagtggtatgctgatgaaagatgctaagtttcgcttaatataatgtatatgaaggtcctgggtacctcaaattttgtccc

SEQ ID NO: 273719 - DNA, 387 bp, Zea mays
ccacaccaccgtctcgcggagaaactcctccaaaacccccaaaccctttcaatcggcggcaatggcggcgccggcggccgacgatgcctcggcatccccaggctacgtcctccgctccacacttgaggggcaccgccgcgccgtatcaaccgttaagttctccccggatggccgccttctcgcctccgcctccgccgacaagcttcttcgcgtgtggtcttcctccgatctcacccccgttgcggagctcgagggccatggagagggtgtctcagacctctctttctcccccgacggccgcctccttgcctccgcctccgatgatcgcaccgtccgcatctgggacctcgccgtcggccgaggggcccgccccgtcaagacgctcac

SEQ ID NO: 273720 - DNA, 556 bp, Zea mays
agcccttgcacaccattgggactcgttacccatctcgtggactcttctgtttcttctccttttctccccccgtttattggactcagcggcggcttgctcctcttcgtgtggcgggatttggttttctgcgggggagtgtttattgttcgatgcggagcttcgatctggattcgtgcttgtcctcttggtctctgctcgctttgtaatgcttgggtacggtgcgctgaaggtgtttggggggtatgattgttgttgcacctgaataactgaggtgggtgtggcgcgaacttgggggtgtcttctctttggcgatcagtgcaatcgaatggtcagttgagttagatagtttttacatcggcgttgatggacttgcataattatgtgcgaatcatggggtcattaacttggcataaggggacgatcagtgatatgtgaagctggcatgtttacgtgcttgattcaccacaggggctaggcatccgacgctacgttttggggattgagatgcaaaataaattcaccccttaactatggatcaagggttgtagaggcgcac

SEQ ID NO: 273721 - DNA, 400 bp, Zea mays
ccgggaacccatccacaattggtagctcgttgatccaaatccaagacctcacgtcaacgcactgtctcgcctgttaattagtcgtcgacgtcgtcgtctatgtccaggctgatggctgccatgctgctcggaggcgcgcgcgtcgccggcgccgcaaagctcaccggtaacggcaacgctgctggcatgcaggctcttcccatgccggcgtgcttccttccgccgcgcccgcaggcagcgacctggacccgcctctgcttgcaggctgcgccaagatcgtcccaggcatacgacaacgcgccggaagaccggagagaaataggggacaagtacaaggacgcggcggaggaggcgaaggacgccaccggggacgccaaggaagcaaagtccaagaggatgg

SEQ ID NO: 273722 - DNA, 523 bp, Zea mays
cacgcgtcaggaagtgtccggagcattttccgaggccttggccgagcttgcgcaaggcaacccttccatgagaactgacgttcctttctacaacgttgtgcccgtagccggagctggccgctctgcgtgtgccaacgacataatggcgtgcgagttactggcatccaacgtctccagtgcgaagtccataccagccgaaccgttcgctgtgacgcctgcttgaatgcagctttccttcggaaattggaggtgggcgcacgttggaatttctgccagaggagccggtggccagtcaactgccagttggacgacgacggttgaccagcttctctagggctggcggcggtagcttcgtttctgtgctggcggtcgattaaaaaaaaagaccgtacggtgatcatcacagatgcacccatactgtattattctgtttcagcgtcctatacaaagtatacattgggtctgaattctgattagcccgtgctgatgcttgcaatgacattggttcttgtgtgtacagact

SEQ ID NO: 273723 - DNA, 472 bp, Zea mays
ctcgctcacttcttcccagcggagtgcgcagtcgtcatggctaacgctagccgtggtcggcccgcccgccccgggcgaagttccgtgctcgcgctgcttctcctgctttccgccggaggagcccgagcgtcctacgacggcgagggcgaggcaggggcaggggcagaggagaaggagaaggctgcggcgtggacgggcgggctgagccggcggagccttcccaaggggttcgtgttcgggacggcggcgtcggcctaccaggtggagggcatggcgcacaaggacggccgcgggccgagcatttgggacgccttcatcaagatccccgtagtacacttgtatggattgcatatgaaaatgcatcgatcgtggattgaattggcttgacatggttggatcatggcatggcaatggcggcgtcctgcttttcaagcgagattccaaacaacgccaccgcggacgtgactgttga

SEQ ID NO: 273724 - DNA, 458 bp, Zea mays
caacactctccccagctcgagtaaccacagcgagaaccaatcgccaagcaaaaagcccgagaaagaaagaacaaacaggagacacagatggcggctgcagcgaaggcgtcgtggatggtggcgatgagcgtcggggccgtggaggcgctcaaggaccaggcgggcctgtgccgctggaactacgcgctgcgctccgtccaccgcgccgccaaggccaacgctcccagcttcgcgcaggccaggaaaaagctggcgccgcccgccgcggacaaggccgccgcggaggaggggatgaggaccgtcatgtacctcagctgctggggccccaactagctagggcctctgctagtttcggcttcctgcaaccgtaccgagctcggcttcaaatctgatccatgactgggtgccttgccgacccactgtaacataggagtttagcaccacgatgatgatgatga

SEQ ID NO: 273725 - DNA, 837 bp, Zea mays
atagatatcaggtggcataaatactgtgcagggctaaaggttggtgggtcgaatggaccaggccatcaggttatcgagaaagctctcatctctactatgtctaggctagcctaggtctggaccagttaggcacgcaagtatcaatcgattcataagaggaggaggccattgagggagccaagtagaaggcagtcactgcaaacaacgaaagctggtgagcaactttgtcaagcctcaagagctcatggaagatggcagtgctccaagacggtctactccacccacccgcagaagcagatctgctgagttccacaatttttcagaaaggaggagaagggataagatcaacgagaagctgaaagcattacaggagcttcttccaaactgcaacaagaccgacaaagtctcgatgctagacgaagcaatcgactacctaaaatcccttcagctccagcttcagatgctggtcatggggaagggaatgtcaccagtggttcctcttgagctgcagcaatacatgcattacatcacggctgaccctgcccagttgcctccgttgcgcccctccggccagcagcaccggcaatttcagataactcaagccaatccccagagacaatctaacgtcgagtcggatttcttgagccagatgcagaacttgcactcttctgagccgcctcagaactttctcaggccaccgaaattgcaactttatacaccggaacaagaggggtggcctaaccagcacgagccacaacactggatggatttctgggagttcctcgtataacttcatggagtgatgtgctccttgcctccttatgacaaaatttgaca

SEQ ID NO: 273726 - DNA, 415 bp, Zea mays
agcggacgcgtgggcggacgcgtgggcggacgcgtggggcaaagctaagcacagagctagcaagtgaccgcccgcgcgcgatcaggcaaggcaagatggtgcagcaacagcaagccgcgaaggaggtgatcccgctgctgacgccttacaagatggggcagttcgagctctctcaccgggtggtgctggcgccgctgacgaggtgccgctcctacggcaacgtgccgcagccacacgccgccgtgtactactcgcagcgcgccaccaggggtggcctgctcatcgcggaggccacgggggtgtcggccaccgcgcaggggttcccggagtcccctggcaatcgggacgcacgagcaggtccaggcgtggaagcccatcgtcgacgccgtccaccggcaagggggccatcttcgtc

SEQ ID NO: 273727 - DNA, 329 bp, Zea mays
agcaaagcgagcaacagagcagaagcaaagcgcagagctagcaagtgaccgaccgagagcaaataggcaaggcaacgcaggcaagatggtgcagcaagccgcgaaggaggtgatcccgctgctgacgccttacaagatggggcagttcgagctctctcaccgggtggtgctggcgccgctgacgaggtgccgctcctacggcaacgtgccgcagccacacgccgccgtgtactactcgcagcgcgccaccaggggtggcctgctcatcgcggaggccacgggggtgtcggccaccgcgcaggggttcccggagtctcctggcatctgga

SEQ ID NO: 273728 - DNA, 1076 bp, Zea mays
  unsure (1)..(1076): unsure at all n locations
gcctgagagcgagcggtggccggcagccggcacgcatggcggcagagaagcaggcggcgatggacgggcggaaggacggggtggcgcgggaggtcatccggatggaacgggaggccgtcatccccatcctcaagcccaagctcgtcatgcgcctcgcgtatctcatagagcatgaagctgatcggaacgagttcctgaagctgtgcaagaaggtggagtacaccatccgggcctggtacctcctccagttcgaagacctcatgcaactgtactcactgtttgatcctgtttctggtaaggagaggttacagcaacagaacctgacgccggaagaaatcgagaccctcgaattcaatttcatgacatatcttttccaggtgatggaaaagagcaacttcaagttgctatcagatgaagagtttgatattgcgcaatctggaaaatatttgttgaatcttccgatcaaagttgatgaatctaagctagacaagaagttgttgacaaaatattttaaagagcacccacatgacaatctaccagagttttcaaacaagtatatcatctttcgtcggggcattggaattgatcgaacaactgactactttttcattgagaaagtagatgtaatgatatcccgagcttggaggtcattgctcagggttaccaggattgaccggttattttctaagaaacaacatttgaagccaaagaatggtacgaagaagactgatgaaattaatgaagatgaagaagatccagaattgtttgttgagagaattcgattagaaaaaattgaactaagtttgaaaaatctcatgagtaagatgacaattcaagaacctacattcgataggatgattgtggtgtacaggagggctggtacaaagactgagcctgatcggggaatatttgtaaagcacttcaagaatatcccaatggctgacatggaaattgttcttccagagaagaaaaatccgtcactaacaccaatggattgggtcaagtttcttatttctgctgttatcngtttggtcactctagttggctctcttgaaatgccaaggctgatgtatggt

SEQ ID NO: 273729 - DNA, 636 bp, Zea mays
cggctcgagccataccttcccaaaacccttttcccgttctggtctctctttcccgtctccgagcgctgccgccgcccgccgctagcgccggcgcgcgagaaacaagaggaagaagaagccaaccgatccagcagcgatggcggtcgggggcctgttggggggcgctttctgggcgacgcgggcgctggaggtggtcaagcggaacgattccccgggcctgctgtggaagcgcatcaagctcacgaccacccgcaagaacaacgccaagaagcgccttaagcggctctggcagaatgaggcggttataagggcttgtggtgaatcagaatccagatcagcgtcgaacgtggcttccaccactgagaaacaacagtagcctttgactatttcccccagtttgctgtcatcagattgaaagccaagtgcgtgtataaatcttactttcttcaacatcattcgttgctaccatatgcaaccttgccccctcccgaacttcggcgttatttttatttcactggtttcatgttacttctggaaaaactacttgggattggtttccttccttaattattctgcatatgctgaatgatattgcctgccggaatggtatgcattgcaccaaaaaaaaaaataaag

SEQ ID NO: 273730 - DNA, 414 bp, Zea mays
agcgccgacacgcgataaacaagaggaagaagaggccaaccgatccagcagcgatggcaggcgggggcatgctggggggcgctttctgggcgacgcgggcgctggaggtggtcaagcggaacgattccccgggcctattgtggaagcgcatcaagctcaccaccacccgcaagaacaacgccaagaagcgcctcaagcggctctggcagaatgaggcggttataagagcttgtggtgcatcagcgtctgacgcggcttccacagctgagaaacaacagtagcttggagcacaactggagcagagttggtcctgtgacctacctatgcttgccttgactttgctgtccacccccagtgttttgattttgctgtcctcggattgaatactttctccatccagaggacaacatcatt

SEQ ID NO: 273731 - DNA, 419 bp, Zea mays
gggtcgatccaagcctctaggattgatcgttctacaccagagccttggaggggctgttggtagctgtcagaggcttcagtatgcatatgatgaggtgtccacaagggcatcacatcttgagatacttaagaggagtcagatggagcagattgatcagctagagcagaaaaacacagaaactgtggagaaacatcggcttctggaagaggaaaagttatccgcaaataaggagaatattaagctacaaaagcatgtccaagacctcgaagttcagctccagctagcaaagcagaagcttaaagttactgaggcagaaagcaaatgcaaagaagagagatatgaagcgtcagtggaagcactgcgggcagagatctgtcatcttgaacaattagtacagcagttttctaggagagtcagct

SEQ ID NO: 273732 - DNA, 1205 bp, Zea mays
  unsure (1)..(1205): unsure at all n locations
cccacttcttctaagcagatcaaatgctgattcttttcaaaacgggttgggttttaacaatggaaatggtatttactctggtgagcaagggttcgctattggtggtgaagagaggttaagcagatcaaatggctatctttctgagttggtcgcggcagcatatgtgtgccatggtggtgttcaaagagttcatattatagatggatgtgttgatggatcacttctattagaattgtttacgagagatggagcaggaacaatgattgctagggatgtttatgaaggaacaaggatggctacagcggaagatcttcctggcattagaaaaattattcggccgctggaggattctggtgttttggtgcggagaacagatgcacagcttcttgaagcgctagagtcattctatgttgttgaaagagatggttcaatcattgcttgtgctgctctatttccattccctgaggaacaatctggtgaagctgctgcaattgctgtatctgaagaatgccgaggaagaggtcagggggacatgttaccttgattacgtggaaaagatggcattatccctgggtctcaagaaattattcttgcttactacacgaactgtatattggtttgtgcgacgtggcttctcagagtgctcaattggatctattcctgagcagaggagaaaacgtatcaccttgccccgtgggtccaagtattacataaagcagctgtagccaaagcctgctgggattatcgccaacaattttgtcatcaggtgactcagcagcatgcacagagtttggttccagcacttccacttaattaagatgggaccagccaagattacaccaatttcgcggttgcccaaaggcatataattgcacaaagaaacaaaacaccattttactgtcactgtgtttgaaagatggttgtctttgtttaagtatgtgacagaagtttgttttgccaatagaatcaaggcagagaagaaatagctgattgaattatatgtagaccctatttaacaagcaataccaaagatgaagtgctcgtacagtatcatctctggttggtgcctcattgtgtgcatcatagatgattgaacttgccttttccactcatagctgattggccttatcttttctacttttgttgagcgaaaaaaaagagcaagtcccacaattggttctcttgtaagaagaaaaaannaaaaa

SEQ ID NO: 273733 - DNA, 377 bp, Zea mays
tacacacacgcctgacaagttctagatcgcgatctagaactagtcccacgcgtccgcggacgcgtgggtttggatatgtctaatctgtggccatgttggctgtggaaggtacaagggtggacatgctattgaacactggaaggaaactcaacattgttattcacttgagttagagacacaaaaagtgtgggactatgctggggacaactatgtacatcggcttattcagtcaaaaacagatggaaagctagttgagtacaatttccatggtgatcacacagcagagagcacgtgttcactatgcagtggtgatgccgcactggatgaagctctactgaacagtaaatttgaagctattgttgacgagttcaatgatc

SEQ ID NO: 273734 - DNA, 407 bp, Zea mays
gggtcgtaccacgcgtccaagcgagcacatttgactgaccgccatagcaacgagaggaaacaaagcggcgaccgacgagccaagcaagcagcagagcatggacgcgggcgaggtgcggcactggaacgcggacgtcaacggcgtctccatccacgtcgccgagcggggccccgaggatgggcccgcggtgctcctaatccacggcttcccggaactctggctctcgtggcgccaccagatggccgcgctcgccgcccgcgggttccgcgcgctggctcccgatctccgcggctacggcgactcctccgtgccgtccgaccccgccgcctacaccatcttccacatcgttggcgacatcgtcgcgctccttgagcacctccaactcacaaatgtgttcgtggtggggc

SEQ ID NO: 273735 - DNA, 853 bp, Zea mays
tcgctttatctcggaattgaagacgggtccgttttaatttgatctgcgctggacgaatttagctagtctgatcgaattgaatcgtcgtgcagttggatgactgggtgctgtgccggctgtacaacaagaagaacgagtgggagaagatgcagctggggaagaccgccgtcgccggcgtcggcgccaccaaggaggaggcgatggacatggccacctcgcacacgcactcccactcccaatcacactcgcactcgtggggcgagacgcgcacgccagagtcggagatcgtggacaacgacccgttcccggagctggactcgttcccggcgttccaggacccggcgatgatgatgacggtgcccaaggaggagcaggtggacggctgcagcgccaagagcggcaacctgttcgtggacctcagctacgacgacatccagggcatgtacagcggcctcgacatgctgccgccgcccggggaggacttctactcctcgctcttcgcgtctcccagggtcaaggggaaccagcccgccggagccgccgggttgggacagttctgagctgaggcgaggatggagccatggatcaggagatgaagacggttgcgaactctgtaaatacagcataggagtcgaacctgaccctgacccttgttggggttacaaggttttccgagtgtcggtgtagcgtacatggagccggcggcgcggccgggccggctcattctttagtttcacttccgaagcagacggtagatatatgtgtagctgttcacttaaactctcttcgacagaacaaccgacgaaattttgctcttgtttataagaaatacctagactgtcgcttccgccga

SEQ ID NO: 273736 - DNA, 924 bp, Zea mays
cccattcttccgcccacgcgtccgcccacgcgtccggccacgcgtccgcccacgcgtccggactggatcatgcacgagtacaggctcgctgaccccggcggacgcgctaagaaggggtcgctcagggtaagtttctacacacacaaaaaaagagagagaggggtgaacgaggaattttttagcttttaattctgtcttggatcgatctgtgtgtgtgcagttggatgactgggtgctgtgccggctgtacaacaagaagaacgagtgggagaagatgcggctggggaagggggcagccgccggcgtcatcggcgcagccaaagaggaggaggccatggacatgagcacctcccactcgcagatacccactcgtggggcgagacgcgcacgccggagtcggagatcgtggacaacgacctgccgttcccggatccggcgatgatggtgcccaagaaggagcgggtggacgacggcggcagcgccaggaccagcgacctgttcgtggatctcagctacgacgacatccaaggcatgtacagcggcctcgacatgctgccgccggccggcgaggacttgtactcctcgctcttcgcgtcgcccagggtcagggggaaccagcccaccggagccgcggggttgggccccttctgagtgagctcaggcgaggatggaggcatggagatcaggagagaagacggacggcgttgccaactctgtaaatacagcataggacgaggagtcgaacctgactgaacctggtcggggttacaagtcgagtgtgtcggtgtttcgtacatgggaaccgggccttacatgggagccggcccggtcttggtttggcgctggctcattctttagtttcacttcctgcgcagacggtagatgtgtatgcatagctgttcactatcaaaaaaaaaataaaaa

SEQ ID NO: 273737 - DNA, 640 bp, Zea mays
agcggctggggaaggagggcgccgccaaagaggaggccatggacatgagcacctcccactcgtggccgcgagacgcgcacgccggagtcggagatcgtggacaacgacccgccgttcccggatccgccggcgccggcgatgatggtgcccaagaaggagcgggtggacgccggcggcagcgccaggagcagcgacctgttcgtggatctcagctacgacgacatccagggcatgtacagcggcctcgacatgctgccgccgcccggcgaggacttctactcctcgctcttcgcgtcgcccagggtcagggggaaccagcccaccggagccgcggggtcttgggccccttctgagtgagctcaggcgaggatggaggcatggagatgaggagagaagccggacggcgttgcgaactctgtaaatacaggcagcataggacgagtcgagcctgactggacctggtcggggttacaagtcgagtgtgtcggtgtttcgtacctggcccccgccccggtctttggcttggcgctggctcattctttagtttcacttcctgcgcagacggtaggtagatgtgtatgcgtagctgtgcactatcacttcctcttcaacagaaccgattcactccgaatggcaatgt

SEQ ID NO: 273738 - DNA, 453 bp, Zea mays
cccacgcgtccgggacgctgggcccgacgcccgcacgctcgggatcaagaaggctctcgtcttctaccccggcaaggcgccgcgcggggtcaagacggactggatcatgcacgagtacaggctcgccgacgccggccgcgccgccgccgccaagaaggggtcgcttaggttggatgactgggtgctgtgccggctgtacaacaagaagaacgagtgggagaagatgcagctggggaagaccgccgtcgccggcgtcggcgccaccaaggaggaggcgatggacatggccacctcgcacacgcactcccactcccaatcacactcgcactcgtggggcgagacgcgcacgccagagtcggagatcgtggacaacgacccgttcccggagctggactcgttcccggcgttccaggacccggcgatgatgatgacggtgcccaaggaggagcaggt

SEQ ID NO: 273739 - DNA, 583 bp, Zea mays
agagggacctgttctaaggtgggaatcacggattgtatttgttcatagtggagatgcatatcatcccacaaacagaaaagtcaagctcagtgtgactgtgaaggaattgggactttcacgacatgctttccgtcggttgcgtgaggttgttggaaagaggtataaatctgggaaagatgagctcacaataatcagtgaaaggtttgaacaccgggaagagaacagaaaagactgcttgaggacactgtatactctaataaaagacgcaatgaaagctgacaaacttgttgaggatgccaggaattcttatgttaaaggaagacttaaggctaatccacaatttatggagcgattgaagaggaagacagataagttgatggcagctgcataaggtgttacagagctccttgttttaacagctcctctctttccctcatcaacatggtgattattctgtattttcaattttattgttggctgtcgcacggggagaataatatgtttcatgcacttagctttgccttctttaatgtcttggcttcttttgtagggtcattcttagtcataaatatatgttgagcat

SEQ ID NO: 273740 - DNA, 383 bp, Zea mays
ctctagcacaagtgcgtttgagacttgtcaagtgttcttccggaaaaaaaaaaagaaacacaaatggacgctcctgcggcggcggcccagggttgcggcggcaagcacatcgtgctcgtccacggcgcgtgcctgggcggctggtcctggttcaaggtggccccggcgctgcgggaggtgcccacgttccgggactacacggggccgctgctggagctcctggcgtcgctgccggacggggatcgcgtggtgctcgtgggccacagcctcggcggcttgagcgtcgcgctggccgccgagacgttcccggacaacgtcgccgccgtggtcttcctctgcgccttcatgcccgactgcgcggcgcggccgtcgcacgtgctgga

SEQ ID NO: 273741 - DNA, 621 bp, Zea mays
cccattcttatcgcccacgccgcgcagttcgacgccctcctgtccgcgccgttcggggaccgcgggatgctgcattcgacgtcgacgaccggcgggatgctcggagggatggcggtggccgtcctcccgttggtgctccgcgggcaggcgcgggtgccgggcatgtactacccgagcccgtatcatctgatgagccccaggcagagacggtggcatgtggaggtagagagatccctgcatcagatatggttcttcctctgcgtgttcgtggtgctttgcttgctcttgttctgatttctgaagcagggcaccatcctgcgcctgcgggccacgagacgtgatctgtacatagcaaagggtgcgcgatatggatatggtgcggcagtgacctatatttggtgattgcatgacggggcgttcaagatgttaaattgagaaccagctgagttctggtcctagaaaggagaaatcggtttcgaaactgcaaaggacccttgagaagattatcagaagccatcgtccacatgttcatgcgcagacagtaacacataagctactggtaatatagagcgtcagaaaaaaaatgcttcagtatctaaatgtcacgctaccattttgagc

SEQ ID NO: 273742 - DNA, 394 bp, Zea mays
acgcggctccaacacctgcctgcctgcctgattcttacaccaaccaaccacgcgcgccaagccgaattcgtcttccaccgatccgccccgcccgtttcccattgcttagcttgctatggcgcagcagcagccggtgcggcggattctgaaggtggcaccgccggggaagggggacggggaatccttccccacggtgcaggcggcggtcgacgcggtgccgctgggcaaccgggcgcgcgtcgtcatccgcctcgcgccgggggtctacagggagcctgtctacgtcgccaagaccaagaacttcatcaccgtcgcgggggccctcgcccgaggccaccgtcgtgtcatgggacaacaccgccacgcgcatcatgcactcgcagtcatccagggt

SEQ ID NO: 273743 - DNA, 489 bp, Zea mays
ccagcaaggaccaatacagagcacagcgcagctcgtcggcctctcgacgccggttgcggcaaccaccgcctttattgcccacgcgggccgtgcggaagaagcaagaagacacgccaatggaggtcgccgcagcatcggcagcgagctacggattcaaggccgacgacgacgttgacagcctcagggcgacggagctcaggcttggcctgccgggcacggaggagaaggaggaggccgaggagccccagcacaaggcggccccgccgccgccgtccacgcccagaggcaagaagcgcgacgtcgtcgccagcagcgggcccgaggacgcgcccaagaagcgcgactgcgagaccgacgccgacgccgacgccgcgccgccgccggccgccaaggctcagctggggggatggcctgccggtgagggtcgtacaggaagagctgcttccagcagcaggcggcggccaagaacatagccgcgacagcggttgc

SEQ ID NO: 273744 - DNA, 580 bp, Zea mays
gccctgtatgttgttgtagtgttctggacttctggtcaacttggtatgatttaaaactaagttcgggcataatcaggaaagtgaagcagccagctcaaatgaagaatggtgtatcttggcgctgaaacgattgaaagaggcctctccgttagctttgaaggtctcactgcgatcgatacgcgagggtagatatcagacacttgatgagtgccttgtccgtgagtaccgcatgtccatgaatggaatctcaaagcaattttctcatgaattctgcgagggagtcagagcacgactagtcgacaaggacttcactcctaagtgggatcctcctgcccttgagtatgttacgaatgacatggttgacgcatacttcgcacctcttggcgattcggagcctgagttgaagctgcctatagaatcgcgagaggcatttgtatgatcacaaatcattccaagaaccggatcattgcaaggaccggactgggacctgataaacgtgttataatctgtgtagccattatttttggcagcacaaccagcccgattggaccaactattcacgtgccgtatactccttcac

SEQ ID NO: 273745 - DNA, 500 bp, Zea mays
  unsure (1)..(500): unsure at all n locations
cttgcaggggaatatgtggccttgactggtgaaaagcttaatggaacagatatgattgctctgggcctcgctacacactatttcatgagtggccatctggatctgatcgatgaacgacttgcaaagttagtaactgatgatccatcagttattgattcgtcccttgcacaatatggagacatggtttatccggacaaaaatagcattgttcataggctggaggtgattgataaatgcttcagccatgacacagttgaagagattgttgatgccttggaaagtgaagcagccagctcaaatgaagaatggtgtatcttggcgctgaaacgattgaaagaggcctctccgttagctttgaaggtctcactgcgatcgatacgcgagggtagatatcagacacttgatgagtgccttgtccgtgagtaccgcatgtccatgaagtggatctcanagcaattttctcatgaatctgcgaggagatcagagcacgactagtcgac

SEQ ID NO: 273746 - DNA, 535 bp, Zea mays
tcgtccacgcgtccggtgctcccccaacgctactaccgccgctagctggttcaagtgcggcgagcggagccggagaccggtagaggaaattaagaggcgtcgatcgggcatggggtgcgacgacaagtgcgggtgcgccgtgccgtgccccggcggcaaagactgcaggtgcacgtcggggagcggcgggcagcgggagcacacgacttgcggctgcggggagcactgcgagtgcagcccgtgcacgtgtggccgggccacgatgccgtccggccgcgagaacaggagggctaactgctcctgcggggcgtcctgcaactgcgcatcctgcgcctcggcctgatccgtgcgcctcgccctcgtgctaccgcgctgcctagtggagggagttgtctagtgaggctggagacgaagcaactagcactacttctaataaagggcttgtgtcatgctcgccagacgcatcacgcgctgcatctgcatcgtggtatcgtgtagtaagtttgtgtatgaataaacactaccactttatgtc

SEQ ID NO: 273747 - DNA, 528 bp, Zea mays
agtctgccgctgcacacccctgctgcgtttttaccacaaaaatgtcgaaacatacaacccagtagcaaaaaagcacgaaaaaaaaacggttttacaagaccatttgcgggatatactttcttcaagaaatcttccccacttgttccctcgcgtccatggccttgctccagcctactcttctcactcctcccccgctctgctgctgctcgcatggcctcctctacccagggttcctgaaactgcctcccaaattctcaaatggggcctgctgttccacggcgagggcgtcggaccggagcgagctggcgggtaaaagcgggggcttggcttggagagcggcggggagaaaggggcggctgcttggcgtcaccggagctgggcgaggccccttctttggcggcggcgggaggcgtatggacaagggcactagccgggtcgtggggaacctcgccttcgccgtcgtcgtgacgtacctcgacgtgaccggccagctccggtgggttattgacgccatcgtctctctctggc

SEQ ID NO: 273748 - DNA, 549 bp, Zea mays
gataggcgagaactttccagagcactcgccactcgcacatcgactacaactcaacgatccgagccaagcgacgcgtgtgttctcttcttctccgaggcccccatccttcgcgcgaattagccgctcagcgaccgggattcaaggtacgtcattgctcacctccgggacccctcttcctcgtttgcgcccttctcttctctcatgtggaccaggaataagacgcaagcttgtcccccaccatggttcatcgttgcgcgagaatatcgtgtcgtctatttccgatctgtggacgaggcagaaaaggcttttcacggatcatccagcttgcaaactgaagcagaaatgcagggatcgctcttggcgtttccatggacggcgacaagtctaagcagcttctctgtccatgacatgtgattatgtgaagtaaatcgccttctctgtttagctagtacaaaaccttggtttgtgtttcgttatttccgttgccgcggagcacgatacaatcagaaaccaactcgattcagtaatcctcttcatggcttgatgggc

SEQ ID NO: 273749 - DNA, 452 bp, Zea mays
ggtcgatacaaccctctaatctgtctcgcgatatagccgctcagcgaccgggattcaaggtacgtcctgctcaccttcgggaaccctcttcctcgtttgcccccttctcttctctcatgtggaccaggaataagacgcaagcttgtcccccaccatggtcccccagacccccaccatggttcatcgttgccctgagtatatcgtgccgtctatttccgatctgtggacgaggcagagaaggcttttcacggatcatccagcttgcaaactgaagcagaaatgcagggattgttcttggcgtttccatggacggcgacaagtccaagcagcttcgctgtccgtgacatgcgattatgtgaagtaaatcgccttccctgtttagctagtacaaaaccttggtttgtgtttccttattccgttgacgcggaacacgtacgatacaatcagaaacg

SEQ ID NO: 273750 - DNA, 703 bp, Zea mays
  unsure (1)..(703): unsure at all n locations
tcggctgtgtttagtgcctgggaagccagatgttattgcagcctccggtcctcccttcccttccctcctcgtctccccctctggttgatttgagagctcgggcaccagatctgaagccctcttgttctgtggttgtgtgcctttcggctggtgtagcattgagaggaggcgctgttccagttccagttccaggatgagcaaggaggatgtgctcaaggtgcagactttgatgctgagagtgaacatacactgtgacgggtgcgagaagaaggtcaagaagaccctccacaagatcgacggtgtctaccagagcagcatcgacgcggaacaggggaaggtgacggtgtccggcctgctggatccggacaccatcatcaggaagctcaacaaggccggcaagccggcccagctgtggggctccaagcccggcgtccctcagaacggccatggcggcggcaagggccagcctaaggacgccggcggtggcaagggccattccaaggatgccggcggtggcaaggcccagaagggcggtgcgggtggcggcggtcacaagggtgccggtggtgccggtggcgggggtggtggggccaaggatcctaagatggtgatgccgcagccgacgccgcagcagctccagcagctgcagcagcagttgccgacgaagggcctcaagctccccccgcncctcctgggcggcaac

SEQ ID NO: 273751 - DNA, 399 bp, Zea mays
ctcgcgggccgacacaagcctctattgtgagtcctggcaccagatctgaaacctcttgtgttgtgcctttggtagttcggtgtagcattgagctagcagaggtgctgttctagttccaggatgagcaaggaggatgtcctcaaggtgcagacattgatgctgagagtgaacatacactgtgacgggtgcgagaagaaggtcaagaagaccctccacaagatcgacggtgtctaccacagcagcatcgacgcggaacagggcaaggtgacggtgtccggtttgctggatccggataccatcgtccggaagctcaacggggccggcaggccggctgcagctgtggggttccaagcccggcatcactcagggcgcctaccatgggggcgggaaggccgattt

SEQ ID NO: 273752 - DNA, 413 bp, Zea mays
  unsure (1)..(413): unsure at all n locations
cccacgcgtccgcttgaatcttgagcacatagtatgctcgctcacaggacagtcacttgcctgggaagccagatattattgcagcctcatacaccgcccttccctactgcttcctgagatttgagagctcgggcgccagatctgaaacctcttgtgttgtgcctttggtagttcggtgtagcattgagctagctgaggtgctgttccagttccaggatgagcaaggaggatgtcctcaaggtgcagacattgatgctgagagtgaacatacactgtgacgggtgcgagaagaaggtcaagaagaccctncacaagatcgacggtgtctaccagagcagcatcgacgcggaacagggcaaggtgacggtgtccggtttgctggatccggacaccatcatcaggaagctcaacaa

SEQ ID NO: 273753 - DNA, 502 bp, Zea mays
cgagaatctaagatactgaaatccaacaggggaatttccctttcggctgctgcgaaactgcagccaaccaaggagtggaggagtaggagtagcggcagtcaaagcgtggcgggcggacgggcgggcaagctggaacccgttggatcggtggtatcaaggaatcggaagagggacccggctctcccctccccaccccgcgtcccacgtcggttcccctaatctgcgtccgcggcgtgatatgagacgtttgagtggaagcagcatattggtgaggctgaggcgaatccaacagctacacgaaggaggcaacaggcgcttggaaaggaagatgctgttaaagagaaagtaatattggcacaagagaaaaacattcagcagcttaatgagcttattcagagccttcagcttcagctattgcattgccggggcagtaacagttctgctcagaccgcctcaagccacagcgaagtggagggacatgaaatgattggtgactgataac

SEQ ID NO: 273754 - DNA, 426 bp, Zea mays
agaaaatctaagaaactgaaatccaacagggtattttccctttcggctgctgcgaaactgcagccaaccaaggagtggaggagtaggagtagcggcagtcaaagcgtggcgggcggacgggcgggcaagctggaacccgttggatcggtggtatcaaggaatcggaagagggacccggctctcccctccccaccccgcgtcccacgtcggttcccctaatctgcgtccgcggcgtgatatgagacggttctgtaattgctgatcggcgtgatgaattttaggccaatagttcttatcttcctcctgctcgtgctcattgtcacatcacagtttgagtggaagcagcatattggtgaggctgaggcgaatccaacagctacacgaacgtgttttcagtcgcttggaagggaggatgcagtaaaagag

SEQ ID NO: 273755 - DNA, 847 bp, Zea mays
ggtccacacacgcgtctacactgacttcctgagaaatcccccaaccaaaccaaaccctcgccgtgccgccgcctccgactcctgctccgtccgagcctaccaccacagggcaagggcttcatccagccgcgtgcgagcctgaccgcccagttagacgatgagccgcagcctcggtatcccggtgaagctgctgcatgaggcggcgggccacgtcgtcacggtcgagctcaagaccggcgaggtctaccgcggctccatggtcgagtgcgaggacaactggaactgccagctcgaaaacatcaccttcacggcaaaggacggcaaggtgtcgcagctggagcacgtcttcatcagggggagcagggtcaggttcatgattatacccgacatgctcaagaacgccccaatgttcaagcgccttgaggccaggattaggggtaaaggctcagctgttggtgtcggccgaggccgcgcggtcgccatgcgggctagggctgctgctggtcgtggcggtggtcctgttggacgaggtggtgcaccccctgtgaggaggtagatctgtcgcgctatgtggcaaatcaagcttttgccctagttgcaaaaactttgcttgagcagcgatgctatatggttgttaagggtagcttatcagcagcaggtcatgtttacagcatagatgcaggacttttgtgtaactttgcacgagaagactgtggacagtttcgacgatgctatattgctattgagggtctgatttggataatacttccttcgtcccaaaaaattccaaaatatgctcttgattttaaggctatgttaaaaaaaaaaaaaaaaaaaagggcggccg

SEQ ID NO: 273756 - DNA, 463 bp, Zea mays
acgttttcttccacgcgtccgagccgaagcaaatccattccacaagcacctggtgggatcatctcatcatcagaaaccaagagagagattccgtgcccgcttgttgtagtagattgtgaggactgaggaccgagaagcagccatgaatccggacaacttcacccacaagacgaacgaggcgatcgtgggggcgcacgagattgcggtggaggccggccacgcgcagctcacgccgctgcacctggccgcagtgctggctgcggacaagggcggcatcctgcggcaggccatcacgggggcgtcggggggcgacggagcggccggggactcgttcgagcgcgtgctgagcagctcgctcaagaagctgccgtcgcagtccccgccgccggactccgtgccggcgtctacggcgctgatcaaggtcatccgccgggcgcagtccgcgcagaagaaacgcggggac

SEQ ID NO: 273757 - DNA, 692 bp, Zea mays
tcgcgggtcgacccaagcctctagagatagtctgatcatgaagatgctcctattgcaaatcgagacttagttcctagcatcgattcaaacagcatacctagcactgtgactgatgataaccagcaattgaacctaaaggagtcacaggctctagaaaatccaataacagaattggccaaacgtctggggattgcactttctgaagaagtttcagcaagttttgttgacgaagccaatgataaagaacttgtggaattgtcatctagacttgctggtcaatcgcttccagctagtgaccaggttgcatcaattcaggtacttcgtgatcattggaaaagttctccagcaagctcactacaactgcaggaactaggacctttgctgagggactatcaacgcctcatcttgcgacactatacgggaaattcattgccagattttcgtgaaacggaagctctccggcttttccatctgaaaagtgcttcacagctgcgcatggatgacactcccgtcctgttgagcgagtatggaaggctgctttcaacatgagatggtgtcttgcaagctgtgccctcctgcttggtatgtgctcttgagcgtcaccgctgtgttaggctgttaggacatcattttctgcttgcggtgcggaactgtttcagctcttggtctcgcacatgtcatcttcactcttt

SEQ ID NO: 273758 - DNA, 533 bp, Zea mays
ggaattcccggggtgcagtgacaagtgagctcagcaaagccaaccaaagttcagaagaagcgagcgagcaggaggacaggaagcaagtatggcgcactaccagcaggggaggcggcagcaagtggacgagtacggcaacccggtccctgggggccacggtgtccagggccagcagctgggtgaagccgccggcgggtacggcgtcgcaggcaccggcagctacggcggccagcagcaggccgggtatggccccacgggcaccggcacgcatgacgccgggggctacggcggctcgggccatccgggttacggggctaccggaacgggcgtccacgacgccggtggcccaggtgcgtatggagcagtcacaggcacgagagcccacggcactcatggcggcgtgaccgggatccaggacggcgccgccggcctcaccggtggtggtctgcatggcgcaacaggcatggggacgactaccggtactggcgcgcacggtgccaccggaatgctcgacacgggggtcttgggcggcg

SEQ ID NO: 273759 - DNA, 641 bp, Zea mays
cccattcgtccgcccacgcgtccgcggacgcgtgggcggacgcgtgggcaagtgcccagcgtggtgctccccccagcctctgctcctctctctccctacgccctgtcgaagcccttctatggcgcgcgtggatttctcctcctccatccccagccagccagcgagctcctccctcctccctgcatccatggagctcggcgcccatctccatggctcgccctgcgtccagccgccgtgcccggttccgaggcttcttctctgcgcgtttcatctccagctcggcgaccacaacctctcccgccccatccccgacaatcttggtcgacccggcgctcgtgcaggaggttttcctggacaacatccttaacgtcaacctcggccaagctccggcagggcaggcagcccttggcgctggcttgcccaactccgtgccatgtaccaccgtcaacaaagttttctcctcgggaatgaaggctgtcatggtgcggctcaaagtattcagctgggaatcaatgatgtcgtggtcgctggtggcatggaaagcatgtcgaataccccaaaatatgggtgctgaattgtgttcagaccagcactcaatctcacgggaggtgcagaattcggatgctatcctcagcaatgaa

SEQ ID NO: 273760 - DNA, 715 bp, Zea mays
aagcgagccgtgcccgtctctcccaatccactccgtactcggcgctcctcacccgtcgccgccggaaatcaggaagcccaagtgctctcttgggtgcgctcgtcgccggtggcagtgagccagtgatgcatcttcatctccggcttccttattaggatcagcccgtcgatcgatcatggcgtcgtcgagctcggctgctactaccagtggtgacagtcagggtctcaaggctcgagatgcctgcatcgtcggcgtcgcccgcacgcccatcggcgcacttctcgggtcgctgtcgtccctccccgccaccaagctcggctccatcgccatccagggtgctctcaagagggcgaaggtcgacccggcgctcgtgcaggaggttttcatgggcaacgtcctcagcgccaacctcggccaggctccggcaaggcaggcagcccttggcgccggcttgcccaactccgtgccatgtaccaccatcaacaaagtttgctcctcgggaatgaaggctgtcatgtttgcggctcaaagtattcagctggggatcaacgatgtcgtggtcgccggtggcatggaaagcatgtcgaatgccccaaaatatgtggctgaagcaagacgaggatcacggttcggacatgatgtccttgctgatgggatgctcaaggatggcctgtgggatgtctataacgatttcccgatgggaatgtgtgctgaa

SEQ ID NO: 273761 - DNA, 547 bp, Zea mays
aagagaactcatctgaactgctcaactccgatgatcacgatgtactacataagcaggacactgatgaagggaggactctcaggacgggatcagagactcaaccatccttagaagaagttaagccttcgtgccaccagaacgtggtgagagaccaaagcaccgactccagtgactcgccctatccaacccctctggtgctcaggggtgacatccagactcctggcaccgtatacgccgccgctcacaaggaggcttggaagcctgggaagcgcgcgagggcgttcatctaccctgtcctgcgccccatcgagaacaagatgcagtggatggaactgaaagccgccgagtctcctactgtgctatcacccaaccctccaaaaagaaggaacctgagcgcagcaggttccggcgacaaggctcaccagccgcctacacgttcagcgttcgccggatcttcagagcacggatccttcccaaatacttacagccgtgcagcgcaggacggagtgatgtcgcccgatgaacccaagtgccagaacggcttgga

SEQ ID NO: 273762 - DNA, 1448 bp, Zea mays
ttccattcgtccgggctatcatcagggtggcgggtgttatgacaatcaaggaggctataatggctatgataatcaaggcggatatagtggctatgataatcaaagtgggtatggtggtggatatggctataaccaaggcagatatgggaactatcaagaaaatggcggatataaccgagacccatcaagtggtatgccaggaagatgcaattgggggccccctccagctgcgcgaatgtgaactctccatggggtcctcgaacgatgacgatccgctccgcttccgcgtcatcacacgcgacagctgccatcggaataggatgcgcgcccgcgacccgtacggtttgtgacttcaaaaataatagcaagaagcctcgaagacattcttttggataaagttaggaaagtaccatgcatcccactttcagatggttcatttacctctatttcagatggtcgtatatggttgccatatgatgttgccaattccattcctgaatgcagtagcattccgaattttctagctctatatggtaatcttcgaactgtaagtccaaaccttctccctgcatgctgcaaaaataaatatctcatggaggaagtcagaataaatgatctggcagacatgctccaaaggatcggggtgcggaagttgtctgggcatgacattgttaaaaatcacatcatggtgtccttgcgtaacggtttagatgctaatgtggctgatatagtgattagagagtatgtgagctttattatggttcatcttcagtcttcttgcaccagctgtaactttgaaagaggagagatagtgtcagaactacggaagagtcctatattccttacaaaccatggatacaagagcccagctgatgaaccaatttcacttcagtaaagattatggaaattccgtggatgctactagactcttcagaatgtagaaataagttggattgaacttgatagtacctatttgcagcatcatggttcacagtcgtcatcatttgcactggaaaaatggaggcaattttttgaagaaatgggtgtgactgattttgtgcaggtagtgaaagttgaaaaaactttatcccaagttgattctattctagcaggaggactttctctagctgatgtatctacaaaacaatgtacagtgtatgactgggagtcaccagaattatctagaattttatcaatattttcttcaaaaagatgcaaggcaaaatgtgtatatcttctggaagttcttgatagattctgggatgatcattatagggcaaaatctaggatcttcacagatgctacacattgtggtgaaaacagagcagttgaatcatcatttatgaagtgcattcaaagcctcaaatggatagcatcaagaatggatgaggatcttcattatgcaacagatttattctatgattgtgaaaatgtccgctctctctttg

SEQ ID NO: 273763 - DNA, 407 bp, Zea mays
tcgcgggtcgacacacgcctctacagtcctctccactgcgactgcagcgtgctcctgtcctcgattctcgaagcctgtatccgtctgtcgagccatggcgaagggaagggcacacccgtcgaagcgacccacccaccaacttatcctcgcggctgtcctatccgtttccgttctcctcccgctgctcgtgccggcggcggcaactgtggctgtggcggtggcggtggcggaggggggcgggaagcagttggcggtcgggaaggacgagggaaaactggtcgcggagggggatgctggtggaggcgggttagtggacgagaatgagttcgcgggtggcttcggctccctcgacatcatgctgcagtgtgcgatcggaaattctgatccggacaaactgaatgaggggg

SEQ ID NO: 273764 - DNA, 756 bp, Zea mays
agcctctacactaaatcgcccaagacggacatgcggatgcgcgccgacccggccacgggctaccccggccggacgtaccggttctaccgcggcccgacagtgttcaacttcggctacggcctcagctactccaagtactcccaccgcttcgccacgaagccgcctcccacgagcaacgtcgccggcctgaaggcggtggaggcaacggcgggcggcgtggcgagctaccacgtggaggcgatcgggtccgagacgtgcgaccggctcaagttccccgcggtggtgcgggtgcagaaccacgggcccatggacgggaagcactcggtgctggtgttcatgcgctggcccaacgcgacggacggcagcggccggccggccagccagctgatcgggttccagagcctgcacctgagggcgacgcagacggcgcacgtggagttcgaggtgagcccctgcaagcacttcagccgggcgacggaggatggcaggaaggtgatcgatcagggctcgcacttcgtgatggtcggcgaggatgagttcgagatgagcttcatggcgtgatcccggttgtgttggaagcctcgagtgtttcctcagaatttccgatgctctctaacttattcaaacgagaaaaaaaaaggtaaattcagcaagattatggcatcattgatgccagaagttcattgacaaacgcttccccgctccttttgttctttatcaagctaagggaagtacaaattatcttgattaaccccc

SEQ ID NO: 273765 - DNA, 460 bp, Zea mays
  unsure (1)..(460): unsure at all n locations
actactggctcagagtgttcatggagtccggcgacgcgcacccagaactgccgcagatttagaccgctcgcgcgagaattttcggctcctaattgattcatcgttcttctctctctctctctctctgcacgtcttgcatcggaggggacggacaaggacagcagcagctgattaacagagaaggaaatcaggcagaaacaacgcgacacgccgttgcaacttggatcgatcttgtttgccttcttgttgtatagatactagaatccatccaagcctatgcgttctgagaacagaagcacgctgtgcatgcagattcccatgtatgtacagtagccacggccgccgccagaacagaaatggatccggcctcttccaaattccaattcgttgagtttattcaaacaaaaaaaaaaaaaaaaaaccccaaaaaaaaaaaaaaaaccaaaaaaaataaanaaaa

SEQ ID NO: 273766 - DNA, 485 bp, Zea mays
ctcgccggtcgatacacgcatctacactgactcgtgctaacgcgtccgcccacgcgtccgcggacgcgtggcctgcgaggctgccatcgcaatgtacctgaacctctcctgcatccccgaggcgcaggcgatcatcggctcgagcgtcgccatccctttcctcgtcaacggcctaggggaaggtggcccccggagcgacacctgccgcctggacgcgctgctcaccctgtacaacctctccctgcacgcgcccaacatcccgcccctcatggcgtccggcatcatcgagggcctccgccgcgtgctggcgccgtcctccccgtggacggacaaggccctcgcggtcctgctgaacctggcgatgacccggaggggcaaggaagagatcgcggccagcgcggccatggtgggcgccatcgtgctcatcctggacaacggtgagccccggggagaagagaaggccgtgtcgtgtctgtacgtgatct

SEQ ID NO: 273767 - DNA, 480 bp, Zea mays
  unsure (1)..(480): unsure at all n locations
gtcgacccaagcctctacatcgcgtcgctacaccctcaagccacccccacgccacgaaacccgcaatcccagccgaagccggacgatgaagagggagggatggcagcacggcgccgtccgggccagccgcagcaaggtgcttaggacggccgccggcgacgacaactccgacgccgacgcggtcgtggcggcggcggcagcggcggcggcgaggaagccgacgaacgcgtcccggagcacgggcaagtgccggcgggcccggtgcgcgggctgccacgcgcacccggtctccaaggcgcgcgacaaggccaagggcgcgcgcaagctgcgcgcctgcgatgtcgcgctcaaccaccgcctcgtgtcctggcgcgtcgtcgaccagggccccgggtacagcggcgcgtncgcctcctccctgctggcgtacctggccggtggcagcagctggcacgaggaggatgaggacgacgacgaggg

SEQ ID NO: 273768 - DNA, 476 bp, Zea mays
gcgggtcgatacaagactctagattgagtcgtagtaaaaaagattattgtattgcaaaggagctacaatgtggcggactttccaggatactatgttttccctggaggacactcggagccgcaagaaattggaatcatgggtcatcaaactgatgaagaagactttgctagtctcaatgaacgagtttcacaagaaatgtttgaaggagtcatccgtgaagtggttgaggaaactggagttcctgctagctccctaactgatcctgtcttcattggagtttcccgccgagaagttaacgctaggccgactgcgttcttttttacaaaatgtaacattgattccagtggcgtaagcgagctttattctagagctcaagatggctatgaatctactaaactctacacagtatccgttgaagagctacaaggaatgaggcagcggatgcctggaatgcacaacggtggtattgctctgta

SEQ ID NO: 273769 - DNA, 696 bp, Zea mays
attttgagtaccacaagaaagcaattacatccatcgagtggagcccacacgaagcatgatcattagctgtaacatctgaagaccaccagctcacaatctgggacctttcattggaacgggacaccgaggaggaggctgagttcagagcgaagatgaaagagcaggcaaacgcccctgacgatttgccgcctcagcttctctttgctcatcaggtagtactccatatgttggcattggaatggctttcatcttttttggctgtatcatttttcttgcacaattgtgttgcttgtaaactgtgaagagtggaccacatgatgctgactgtttggtgtgagcagggtcagagagacttgaaagaagtgcactggcacccacagataccgtcgatgatcatatcgacggcaatcgacggcttcaacgtgttgatgcctagcaacatcgatacaaccattcctggcagcacagatacagcaatgccgcctgctgagccataggttaggtgtttctggtagctcatgattccaggttcatgcggtggtgagtgtagttgccatttgtcatgtgtcgacagtgctatgctgtcgtgttggagcatgatgggaaaattttgattggctggcgttctatgataatatgattaggatttaataaaagaaaaaaccggccgacaaaataaaaaaaaggggcggcgct

SEQ ID NO: 273770 - DNA, 1147 bp, Zea mays
caagatgctgttgacaatttgagagctggaaagacctgggtactgatagcaacggaagtcgtggcccggggaatggacttcaaaggtgtcgcctgtgtgataaactacgattttccagagtcggctgctgcctatattcacaggatagggcgatccggaagagccggtaggtccggggaggctatcacgttcttcacagaggaggacaagccattcttgaggaatatcgccaacgtgttggtatcttcaggctgtgaagtgccttcctggataatggcactgccaaagctcaagcgaaagaagcacagagtggatagggacccaatctcctacctacctgacgaagtttgagagcggcttggtaagatgctctatttatttatttttgtggggagggggggatatataacacaggctgtccagagtggtactttaaccatgcacttccgagaggtggcacgttggcttcagttttccctgtttgagcagtgcaccgatcagtttgtttagccacaacccaagacgagggatcagtatatctttgttaattggagtacgttacagtttgtgtggacgattggtggtgaatccacagagtagagcagctcgtttctgtttggcctagcgtagtcagattgcaattagggtccgtttggttgggctgtggctgtgaaaaaagttgttgtgggctgtgagctgtggaaaaagctgctgtaggctgtgagctgttaaaaagctaaaaccgtttggtggaaagcactaaaagtcgttaaaagttcttcgatatatgttttcacagttccatccgaaaagccactaaaagcaggtccaggggtgctttcagatttgcactgcgagaaagtcggcttttagaaaaagctgcttcctggatccagccctttggttggcttttggcttttaggggggcaaaagccaaagccaaaagtcaaaccaaacacttagcttcaagatcaaactgaatttaagttgccaactctcttttgctgcccaaaacaactcactattctctctgatcatcaacaccttctttcaggtatttgaaggtgtttgagataaataatgatgctaaaatgaaaaggacaatgcgacgtcccctaccatctggtcgtgttagttctacacatgc

SEQ ID NO: 273771 - DNA, 1345 bp, Zea mays
cccacgcgtccgacgtgccaaacccccaacgccatcctctataaacggcttcctcgcgggctccccctccccatcgccgccctccgatccttcatggccgctgccacagccgccgccgccgccgccgcgctcgcctccccggcggccctctccacatcgctggcgcgccgcggcctcgtcagcttcgcccccgcgctccgccccggccctgaccgcagctctcgcgccgtcgccctcctcggtgtgcgaactcatgtcgcggctgttgatcaagccattgtaaaaggtgatacgaagttggaaggtcctgtggttgttgttactggtgcttccagggggattggaaaagccactgcattggctcttggaaaagcaggctgcaaggtcttggtgaattatgctcgatcttcaaaggaggctgaagaagtctccaaggagattgaagcatctggaggccaggccattacctttggaggagatgtttccaaagaggctgatgttgaatctatgataaaagtggctgatgatacatggggaacgattgatgtactagtaaataatgcaggaatcacacgggacacattgttgatgagaatgaagaaatcacagtggcaagatgtgattgatttgaatcttacaggcgttttcctttgcacgcaggctgcaacaaaagtaatgatgaagaagaaaaagggaagaattatcaatatagcatcggttgttggtcttactggtaatgctggacaagctaattatgctgctgccaaggctggggttattgggttcacaaaaacagttgctagggagtatgccagcagaaatattaatgcaaacgttatcgctcctggatttattgcttcagatatgactgctgaacttggtgaagagttagagaagaaaattctgtcaactattcctttagggcgctatggtcggccagaggatgtagcggtcctggtggaattcttagccctcagccctgctgcaagctacatcactggacaggtcctcaccatcgatggaggaatggtaatgtaaggcttcgaatctgtgccgctggcctctaatgtgtcgcagaaaaaaatgtaattcagttttttgagtgtcatttttaaggggtggttttttgagcagcggtttgtggtatagtatagtttgattcgaagggagagttgatactagaaatttgcacacgtatagttagcttcctttcttaggattggccgagtgctccaaacatgttattggaacgctccttccctgagtgttcggtccccttactgtcgagccgaggctcatctcctgtttctacgtttttattcccacctgtgtttatagttttacg

SEQ ID NO: 273772 - DNA, 689 bp, Zea mays
cggctcgagtgggatcaatgtactctgcggtgctgttcatcggggtcatgaattgtacctcagttcagccagtggtggccgtggagcggacagtcttttaccgtgaaagagctgccggcatgtactcagctttcccatacccgtttggccaggttgtcattgagcttccatacgcactggctcaggatatcctttacggtgtcatagtgtactctatgatagggttcgagtggacggctgctaagttcttctggtacctcttctttgggtacttcacgctgctctacttcacattctacggcatgatggccgtggggctgacacctaactaccacatcgccgcgatcgtctcctcggcattctacgccatctggaacctcttctccgggttcatcatcccccgaccgaaagtgccgatctggtggaggtggtactgctggatatgccccgtggcgtggacgctgtacgggctggtggtgtcacagttcggtgacgtcatgactccgatggacgacggaagggccgtgaaggtgttcgtcgaggactacttcgacttcaagcacagctggcttgggtgggtggccgccgtggtggtggcgttcgccgtgctctttgcgaccctgtttggctttgccatcatgaagcttaacttccagaagagataatgacgataggagttgggaaatcac

SEQ ID NO: 273773 - DNA, 279 bp, Zea mays
cttctgccgcagcatgctatctggcgttaaagacaagcttctgaagaggagagtacgagaaatggtccaacaatgcattatttcactcagcagggaggccaatccctaaagataagtgaattggattattacacttgttgccggactgcaagtgggtacagtatcacctttggtctcactacaattgcaaaaaacaaaggtcaacccagtgtcatatctgtttcttcaaacatagtgagtagatctgtcctggcatcaaaatgatcagctggccgacca

SEQ ID NO: 273774 - DNA, 739 bp, Zea mays
cgcagagaactgagccaacggaagaaaaaaaaaagagctactatacagcaatggccggaggagacgacctgaagctgctgggcctgtgggcgagcccgtacgtgctgcgggtgaagctcgcgctcagcctcaagggcctgagctacgagtacgtggaggaggatctgagggacaagagcgagctcctgctcaagtccaaccccgtccaccagaaggtccccgtgctgatccacgacggcaagcccgtctgcgagtcgcagatcatcctgcagtacatcgacgaggccttcgccggcaccggcccgtccctcctcgccgccgacccctacgagcgcgccgtcgctcgcttctgggccgcctacatcgacgacaagatgctgcccgccctggaaccagtcgacgatgggccaagacggaggaggagagggccgaggggaagaagcagtcggtcgtgacggtggagacgctggagggcgcgctgagggactgcggcggccaagggaagcccttcttcggcggggacagcgtcgggtacgtcgacgtcgtgctcggcggcctgctcgggtgggtgcgcgcgtcggaggagctccacggcgtcaggcccttcgaccccgagcggactccgctgctggcggcgtggtcggagcgcttcggcgcgctggatgccgtccagacggtgatgcccgacgtcggcaggctgctcgagttcggcaaggcgttgatggcacgtctggcggct

SEQ ID NO: 273775 - DNA, 424 bp, Zea mays
acatgattgatgaggatgaaccaattttggagaaagccattggtaccgacattgagtggtaccctgggaagtgcttgacacacaaggtgctaggagagaagccacggaagggttcaaagaacacgatacctatcacaaaaactgaagattgtgagagcttcttcaacttcttcagtccacctcaagtccctgatgacgacgaggaaattgatgaggacacagctgaacagttgcagaaccaaatggaacaagattatgatattggatctaccatcagagacaagattatcccacatgctgtctcgtggttcactggagaggctgctcaagatgaggagtttgaagttatggatggtgaggatgacgatgatgaagacaatgatgatgaagacgaagataacgaagatgatgatgatgatgatga

SEQ ID NO: 273776 - DNA, 435 bp, Zea mays
cgatcaggctattttgtttatgagttaatgaagatagttctgaaagtggagtgaatacaaattcattggtgagcctacaagcaagttcaaatggctaccacgtaccttgaggaaattgccgggcacccccagtaacttaggcggtgagggtagtttcaaggttggtacaatggttgttcagctgaagctttgcacactagttgactaaattgcacacgcggtcctattcgagacccgattcagtggcttaatagaagattgttctcttcgactccgtcctagggaaaacatctcggccctgcccaatttccgttgacaaattttacatactttatcgttgatgtatgtgacacattgacagcaagccagagtgacatttgagtgatttcagttgtgactttctaaaaaaaaaaataaaaaacaacaaaagacaat

SEQ ID NO: 273777 - DNA, 526 bp, Zea mays
gcgtccagtttataacaacacttctagtcactttagtaatggttatgatatggaagacaagcctgctgtggattgcactctttctagtaataattggtggagcagagctcgtatacttatcttccgcattctacaagttcactcaaggtggctacttgccattagcttttgcaggaattttgatgtttataatggccacatggcattatgtccatgttcatcgatacaactatgagctccagaacaaagtatcaagtaactatgtggcagaattgtccgcaaggagaaatctggccaggttgccaggaataggctttttgtactctgagcttgtacaaggcatcccacccatacttcctcacttgatagaaagggtaccttccatccattcagttctcgtgattatctcaataaagtacttaccgatcagcaatatagaaacaagcgagaggttcctctaccggtatgtgaagccaagagattaccggctattccgatgtgtggtgcgctatggatccaatgataa

SEQ ID NO: 273778 - DNA, 1164 bp, Zea mays
tcaagcacgggaaggtgaccgacgagaaggcgcaggatgtgaggcagttcctctacgccaacaggaaggtggcggtgcctggggcagcacctgttacacccagggtgctcagaaagacattttcggagagggcgaatcttgccaccaaccctatggggaagaagctcttcgagctgatggagaccaagcagaccaacctgtgtgttgccgctgatgtcgggacaacaaaggaactccttgagctggctgacaaggtcggccctcaaatttgtatgttgaaaacccatgtggatatattatctgattttaccccagattttggctctaagctccgctcgattgctgagaagcacaactttttgatcttcgaagaccgcaagtttgctgacattggaaatacagtaaccatgcaatatgaaggaggaatattccgcatattggattgggccgatattgttaatgcgcatatagtacctggacctggaatcgtagatggcttgaagctgaagggtttgcctaaaggaagagggctacttctgctcgctgagatgagctctgccggcaaccttgcccatggagattacactgctgctgccgtaaagattgctgagcaacattctgactttgtgatgggatttatatcagtaaatcctgagtcttggtcagtaaaaccatcaagccctgcatttatccatgccacgcctggagttcagatggtcgcaggaggagatgatcttgggcaacaatacaacactcccgaatctgtgataaactacaggggcagtgacataatcatagttggccgtgggattataaaggcgagcgatcctatgaagaaggcgtgggagtaccgcttgcaagggtggcaggcatacaagaacagcttgctatgaaggaaggggggcgccatgagcatccccaagtataagggcgaatccagtcagtttggcgaaataagcgcatgcggaaaggttttcctgcagttgagtcaggacctaattgacatcagattcactgcagaggagactcatgccccatcatcgtttctgttacaataatttcctctcggtttaccctgttcttgctggttgagttaggcacgttgtgatgcctgtgcgcggttaaatcgtcttactgccatgccacttgaggtttggactcttg

SEQ ID NO: 273779 - DNA, 586 bp, Zea mays
gctaccaaacgcagcctaaatacctccgccaaggagctaggagtgtggcgtgaactaaccagcacgggcgctgagggctgaggccgcgacgacgacgaccatgatgaggctgaagcagcacatgggcctggtctcctcccctacccctgccatcgtcgtgaggctcggcaacaacacaccccaccgccgccgagcaactcggtctcggatcgtgtcgtcctccgcctccgacgccgcgccgttcgagaagcccagggccgtggtcaagaaggtcctcgcgcagtcgcagcccgagggtcagggtgccaccgtccgtaggagcatcggcaggcacgagctccgcaacctggacccgttcctccagctcgacgagttcactgtctccaagcccgccgggtttccccgaccacccgcacagaggattcgagaccgtcacccacatgtttgagggggccatcacccaccaggacttcgctggtcacaagggcaccatcaggacaggggacgtgcagtggatgacggcggggcgaggcatcgtgcactcggagatgccggctggggacggcgtgaacgaggccctgcagct

SEQ ID NO: 273780 - DNA, 526 bp, Zea mays
cccacgcgtccgctcctagtacactcactaataaaggagtttcttcccagtcacgcgtggaacaagacaagacaacttcttttgtttctgtgaagtcagatgatattcagcttagtattcgtatgcccagtggaaatagactggagatcaaactaacaaaacaagatgttttaaggaaagtgaagaatttcgtggatgaaaaccaaggcaatgggcttggctcatatgacctttctctggtttatcctaaaagagttttctttgaacaagatatggaagcaacactatccgagctgggtattcaaaaccgtcatgcaatgattgttgttccacatcggcagtctggtcaggtatcaaggcgtcactcctcggcatcttatgatatgggtgtcaattcaggtgcggatgatgttggtggcaattcaggtgcggggggatactttggttacctgagaaccgtccgtcttatgtgaatccactctcctacctgaggggaaataccaactcatcaaatacagagctacag

SEQ ID NO: 273781 - DNA, 825 bp, Zea mays
taagcttgcagaccccaaaaggcccatccaagatgttacgaaagacctagtaggaacgtccatttctgtcaaggtggctgaagtgaatgaggaggaaaagaaacttgtcttctctgagaaggatgctagttggtcaacatactcttcccgaataaagattggcgacatctatgatggaattgtgggctcagtgttccactatggtgcatttgttcacctgcgatttcctgatggattatatcatcttactggccttgtacatatctcggaggtgtcttgggatcttgtccaagacgtcaaggattttctaaacgaaggggatgctgtcaaggtcatagttgtgaacattgatatgacgaagtcaaggatagctttatctatcagacaactggaggaagatcctttattggaaacattggacaaagttatccctttggaagctgatcaatcacctaatcgaatgatgtctccttcggaagttgaacttctgccaggacttgatggtatatgcaatgaactattgcaagaggatggtataacagacgtacagtttgggcgccaggcattggagaaacgtgtcgtttcacaagatttagagctttggatttccaatgttcaagctaaggacaacaggttcacacttcttgcgcgagctgggaggcaggtccaggaagtgtatttgaccacttccctagaccatgagggcataaagaaagccgtgcaaagagtgctggggcgtgttccttgaacccgacacgcagcgtgtagaaaccgattttctaactaaagcattacaaggaatcaacagtacgagcgaacagcctg

SEQ ID NO: 273782 - DNA, 732 bp, Zea mays
caagcctctagattaagtcgtagaatacggtgggggatgggcggctggtggcgcacgggcggagcgtcctcgccggcgtgccggacaacatcgtgctcacgcacgcctccggggcggggctggtcgacggcgccttcgtcggcgccacggccgccgagcccagcagcatgcacgtcttcaccttcggcaccctccgggacctgcgattcgtgtgctgcttccggttcaagctctggtggatgacccagcgcatgggcacctccggccgcgacgtcccgctggagacgcagttcatgctcctggagtgcggcccgggcgacggccacggcgacggcgacgcggcggtgtacgtggcgatgctgccgctgctggagggccagttccgggcggcgctgcagggcaacgaccgcgacgagctggagatcaccttcgagagcggggacaaggcggtgcagactgcgcaggggacctgcatgctgtacgtgcacgccgggaccaaccctttcgacaccatcactcaggcggtcaaggtggtggagagacacatgcagacgttccatcacagggagaagaaaaagctgccgtcgttcgtggactggttcggctggtgcacgtgggacgccttctacaccgtcgtcaccgccgagagcgtcaagcaaggcctcaagagcttggcggacggcggcacgccgccgcggttcctgatcatcgacgacgggtggcagcagatcg

SEQ ID NO: 273783 - DNA, 545 bp, Zea mays
agagagaggggatggtgtgagggagggaagggagcaaaggcaaagcagccaacgaccagagagacacggaggctcagagagagagagcgaggaagaagaagagaagaagaagatggagcaagaggaagcgtgctcctcctcgctgcggcagtgcaggatttgccacgacgaggaggacgagcggcgctccgccatggagtcgccctgcgcctgctccggctccctcaagtacgctcacaggggatgcgtgcagaggtggtgcgacgagaagggaagcgccgtctgcgagatttgcctccagaactttgagccaggctacaccgttcctcccaagaaaacccaacctgctgatgtcgcggtgaccatcagagacagcgtgggggtgcccaggccgcagcacgagcctgaagaggaggaggagcaggagctggtggacgcggcgttgatcggagccagcgacccggagtacgccgagtgcgcgcgcgccgccggcaggagcgcgtcctggtgccgctcggtggccgtcacgttcacggtcgtcctgc

SEQ ID NO: 273784 - DNA, 347 bp, Zea mays
accgctcgaggggatggtgtgaggacgggaagggagcaaagggaaagcagccaacgaccagagagacacggaggctgagagagagagagagagagatttgggaatcgagaaagcagcgaggaagaagaagatggagcaggaggaagcgtgcacctcgtcgctgcggcagtgcaggatttgccacgacgaggaggacgagcggcgctccgccatgcgagtcgccctgcgcctgttccggctccctcaagtacgctcacaggggatgcgtgcagaggtggtgcgacgagaacggaagcgccgtctgccagatttgcctccagaactttgagccgggctacaccgttcct

SEQ ID NO: 273785 - DNA, 1509 bp, Zea mays
  unsure (1)..(1509): unsure at all n locations
agctgctgcaggcgctgtccaaggaggaggaggccgtgcgggcgcgccttcgccgncggggccgcgccttccgccagtccgcgcacaacgtcctcgccctcgccgccgcgctcgagattgttgccgttggatacgccatcatgaccacgagatcgccggacatcagctggcagatgagggcagtcagggtgctacccatgttcttggttcctgctctagctgctctcatctactcgaccattacaaacctcacgaaaatgcttgacaacagagaccaacaaactcttgaaaagctacgaactgaaaggcaagccaagattgacgaattgaaggagagaacaaattactacactactcagcaacttatacagagatatgatcttgacccagctgcaaaggcggcagcggcaacagttttggcatcaaagttgggtgcggattctggactgagagtctttttgggagatgaaacaagcagggatgcagcaataggtagaagtaatgataacaatcttggaccaactactggacttaggcaaagaaaaggacacgtaaccaatggtgctggaagggcccaatcccttgagccatttgatggctccaatgtgtatgatggcagtgatgaaggccccagccctcctaatcagactgttgagcactttagaggtccatcgggtaatgatggggggtggcttgcacgagtagcagctctgcttgtaggagaggatccaacacagtgctacgctctaatctgtggcaactgccatatgcataacggtcttgcgaggaaagaggactttgccttcgtcacatactactgccctcactggtatgccctcaatggatcccggcaacatgatgaccatgaattggtacctgattctggcaaggagagtcctgattctcaatctggcggaatcattggccaagctggtgcaagccttgcaacctcaggtgctgcgagtcctgttgcaagcagcctaccaacccttgaagaactctctgcagaggaagattctggggagaaggcgagcagtgaccaaacctgccaattgaactcatcatttcctgtatattgtgttctttgtggagtattgttttggatttgactctgggtatcgaaatttttgtacctaccatgtagtatatatggactaccatgcttcctgcatgattgtggtggtttttatcgtggcttccccccctagggtaccaggacaacgcccatttgctggcgtcttgtcgcaaccgaagggcttgaacagtgatgcatcaactcacatattggatgtattgttctttgtttatggagtgtatagtatttgaaagactttaggcatcgttttcattttcattttaattataaccgagttctacgtttaccgatgcatgatgcatcaactcacaaagtgcctttgtttttcagttatctgtgtgggggggttgctgaagctcggaatgtgtttgtggcatcacgtctagtgttgtgtgtttagtgcttgtgtcaaa

SEQ ID NO: 273786 - DNA, 1350 bp, Zea mays
cttctcgtgggactaccacaggtccaaagcaagcaagaaggaacgaaggacgaaagcaagcaagaaggaacgaaggacgataacgataatggctctggtcgggcaggtggcgacggtggcgcagctggtgggcgtggacgcgttcagcctcatcacgatgatcgcggacgcggcgcagacggcgcggcggaaccgcgccgtgtgccggcagctggcccagcgcgtggagatgatcggcggcctgctccggcggctgcgcgacgacgacgacgcgcggctgctgcggcacgcggagacgcgcggccccgtggaggccctggaggagacgctccggcgcgcctacctgctggtgcggtcctgccagcggcgcgggtacgcgttccgctgcctgatgggggcgcggcacgcggacgagctccgcgagatgcagggcgagatcggcttctacctcggcctcttccccctcatcagctacgtcgactgggcgaggcgtcgcggcaacggcaacggcaaggccgcctgtggtgacactcgttctttgcaagaggcacctatggtaagaccatgtcttgtgccgttcctgtttctctcgctcctgcgatggatgcaattgttcagggagtacgtcatgcacctgctctgcttatcagcttatgtttactgacgtgtgtatctgtgaaatcattttgcatgttaattttcattaacaatgatctagctagctagctagcaccttaattttcattgctgggaaacaagctagctagctactagtatgcagctgttgttggtcctctgtttttcggactactatctgtcgagttcaggtgaaattgcctttcttttttgaaccagattaaataggtatgttggaataatcctatttttttcctcttgggaacgcaaccagcacacgttcatcaggagtgtttctgtttggcctggctatctgtttcggtttggatacatacagatagcttaccttcttggttcatcaggagtgcaaagttgcaggatctcaggcggcgctgacgatgacgcagcagccctggagccttccacggccgagcaaggacgagtaggaaggagggccacatgcgtcgtggccccgtgacacctgcttcacgttctctcaggaaaaaaaatctgcagtaatctagctcgtcctccccgttcactatttcatttcactgtggtcttgccctcatgctcggtctgtgtatctccagatctcccccttattttgttcagagcagcattttttatttaattctattgtgaacagagcagcattttttttttgttctttcacgaggcaagcttataaagagattcctggcggcttttgcc

SEQ ID NO: 273787 - DNA, 607 bp, Zea mays
cggcttctacctcggcctcttccccctcatcagctacgtcgactgggcgaggcgtcgcggcaacggcaaggccgcctgtggtgacactcgttctttgcaagaggcacctatggtaagactaccatgtcttgtgccgttcctgtttctctcgctcccccgatggccgcaattgttcagggagtacgttatgccttggggtatatgcatgcacctgctctgcttatcagcttatgtttactgacgtctgtatctgtgaaatctttttttgcatgtgtcaccgcagggatctacttaaaactctctaacgtcttattaacaatgatctagctagctagctagctagcaccttaattttcaattgctgggaaacaagctagctagctactagtatgcagctgttgttggtcctctgtttttcggactactctctgtcgagttcaggtgaaattgccttcattttttttgaaccagattaaataggtatgttggaataatccttatttctccctcttggaacgcaaccagcacacgttcatcaggagtgtttctgtatggcctgcctacctgcttctgtatgatacatacagatagcttctgcttggataca

SEQ ID NO: 273788 - DNA, 523 bp, Zea mays
cggacgcgtgggtacagatagcttaccttcttggttcatcaggagtgcaaagttgcaggatctcaggcggcgctgacgatgacgcagcagccctggagccttccacggccgagcaaggacgagtaggaaggagggccacatgcgtcgtggccccgtgacacctgcttcacgttctctcagattttaattttatgacgcacagcgaaaagcccaaaaggaggggggggaagatgctgtcgatacagatcgttcgatccacacgggaagatctgaagcatgagagcatgtctgaaacagtcgagatgtcagacatgtcctgccgccattttattttttacccgctcatgtacgggggttatttttttttcgtatttctttcctcagcggcgctgcagaatagaaccgatcgaggcggagttgtctgtcatctcatcatctctcagtaatattcacacgcgctgcgtctctcccaagggcgccgccaacttgtacatatagcagcatttttttttgggtttttttt

SEQ ID NO: 273789 - DNA, 425 bp, Zea mays
atcctttttaagggtcgcttttctgtcattcaccacacctgtctcgcggccgcactaccacaggtccaaagcaagcaagaagaaacgaaggacgataatggctctggtcgggcaggtggcgacggtggcgcagctggtgggcgtggacgcgttcagcctcatcacgatgatcgcggaggcggcgcagacggcgcggcggaaccgcgccgtgtgccggcagctggcccggcgcgtggagatgatcggcagcctgctccggcggctgcgcgagcaggacgacaacgacgacatgcggctgctgcggcacgcggagacgcgcggccccgtggaggcgctggaggagacgctccggcgcgcctacctgctggtgcggtcctgccagcggcgcgggtaccgcgttccgctgcctgatgggggcgcggcac

SEQ ID NO: 273790 - DNA, 505 bp, Zea mays
attgaaacataggtaattcaagcaactagttatacaattacagcctgcaaagcctcgaactaaatacattgatgtaaaaataatgcataatttctctctttgttgccaacatcagtatcacacgtcaacatcttagatttcctctagcataatacgacgtgatgcaatgccgaagcatatacacttcaaaatccccagcacatccccaatgtatcggtgtacattaaatatgtgatgtggtgtgtagtagagaacgctaaaacttgattagtttttcttccttgagccacaggagcatctccgacaaaccttcggtcaagtttcttggggtatagcccagctccatctttgctttgtcacacgagtatgcccactgatgtctcagaacacgcacagtagggtaactgataagtgggagttttccagtgatgcgagaaacaaaacctgaaatccacccatacgcttcaatcaaccagagaggtacgtggaacatgggagcccttgt

SEQ ID NO: 273791 - DNA, 1395 bp, Zea mays
ggatgagccccgcgggcggcttctcgtggcagtcgtacagcgaggccaccaactcgctggacggccgcgccttcaccaaggacgggctggtggagcagctcagcatgacgtgggacaagtcggactacctgtggtacaccacctacgtgaacatcaactcgaacgagcagttcttgaagtccggacagtggccgcagctgaccgtctactctgccggccactccctgcaggtgttcgtcaacggccagtcctacggcgccgtgtatggcggctacgacagccccaagctgacatacagcggctacgtgaagatgtggcaggggagcaacaagatctccatcctcagcgcagcagtcggcctccctaaccagggcacccactacgagacgtggaacgtcggagtgctcggtccggtcacgctgtccggcctcaacgaggggaagcgggacctcagcgaccagaagtggacctaccagatcggcctccacggcgagtcgctgggcgtgcagtccgtcgccggtagctcgtccgtcgagtggggcagcgcggcagggaagcaacccttgacatggcacaaggcctacttcagcgcgccgtccggcgacgcgccggtggccctggacatgggcagcatgggcaagggccaggcgtgggtgaacggccgccacatcgggcggtactggtcgtacaaggcatcctcctccggcggctgcggcggctgcagctacgcggggacgtacagcgagaccaagtgccagaccggctgcggcgacgtctcccagaggtactaccacgtcccgcgctcctggctcaaccccagcggcaacctgctggtgctgctcgaggagttcggcggcgacctgtccggcgtgaagctggtgaccaggacggcgtgaccaggaatggagaggggagggcatgccgcacgcacacaggatgtgaataatttgctgggaagagaagcgagctgagggcagggcgcgcgcgcgcgcagacacgacacgacacgacacgacaccgattctttcttcctcgtgaagtatctatagatacggcgtacatacggacacaatttgtgcccactatacgtacgtacaaaaaagattagtactagagtttaccgtagatctgttcttggagttggccgacgccggcacggctgcaggaactgcggctcacggccggctggtaatggtactagtagcgtggtttttgctctgcactccgcatgaatctcacggcgcacgcaggcttaattttcttagcgcaaatttgcgaaactgagttgtaaatgaggttatttattcctacgattaagtatgatacaagacgaataattattatgtgagttctttttacggtggtaaaaaaaaaaaaaaaaaaaagggcggccgc

SEQ ID NO: 273792 - DNA, 433 bp, Zea mays
ttttcacgcgtccgcgcagatcggcctccacggcgaggcgctgggcgtgcagtccgtcgccggtagctcgtccgtcgagtggggcagcgcggcagggaagcaacccttgacatggcacaaggtcagtgttctactacgttgccacccaccacaagtattccattgtctgaaaccaagcacgcctgtggactgtgatcgatcgccaggcctacttcagcgcgccgtccggcgacgcgccggtggccctggacatgggcagcatgggcaagggccaggcgtgggtgaacggccgccacatcgggcggtactggtcgtacaaggcctcctccagcggctgcggcggctgcagctacgcggggacgtacagcgagaccaagtgccagaccgggtgcggcgacgtcttccagaggtactaccacgttccgcgcttctg

SEQ ID NO: 273793 - DNA, 435 bp, Zea mays
gcgcgctggcgctgggcctcgtcggcctgctcgcctaggcacggcgcgcgcgagcgggtggcgctggcgcctgcacggcacagcatggatgccgcggctacgtgcgtgacgacgacagaactcctacgcggaagatgcagccggtgcgccgcgcgcgctcaacgtccatggatgccgccggctgacggttgtactcttgtccgttttttaaccgggccgcccgggcctacgtgtatgtagtagtactagtgcagtcagtgccactcacgttttgggtgccggtgctacgtgcggacgtaccgccgccgcctcggactctttctactattctcttctttaatttcctgtaccactgccacctcatcgagatgactctatttatatctttattcaaaaaaaaaaaaaaagggtggccgctcgcgatctagaactagt

SEQ ID NO: 273794 - DNA, 481 bp, Zea mays
acttttggggggccccccctttttttttttttttgttctttttataattttttttttatgttttttttttcttttatttttttttttttttttattttttttttttttttttttttttttttttttttttatttttttttttttttggaataaagatataaataaatcatctcgatgaggtggcagtggtacaggaaattacagaggacattatagtagagaatagtagaaagagtccgaggcggcggcggtacgatccgcacgtagcaccggcacccaaaacgtagagtggcactgactgcactagtactactacatacacgtaggctcggcgctccggttaaacaacggacaagagtacaaccgtcagccgcggcatccatggacgttgagcgcgcgcgcctgcacggcacagcatggatgcagcggttacgtgcgtgacgacgacataactcctacgcggaagatgcagccggtgcga

SEQ ID NO: 273795 - DNA, 462 bp, Zea mays
actctatgcagtttactagttcccggctctctgatgccataacaggagatggcattgtgaacagaggccaggcattgaatgatgctgacgatgaagagtgcaaggacatgcctttgatcctccgcaacaaggccccaaggtggcacgagcagcttcagtgctggtgcctcaacttccggggccgggtgactgtcgcctcggtcaagaacttccagctagtcgcggcgacacagcctgccgccggagccctgaccccatcacaggcagccccgcagccagctccgcctcctccgccggaccaagagaaggtcatactgcagtttgggaaggtcggcaaggacatcttcaccatggactactgctacccgctgtcagccttccaggccttcgccatctgcctgagcagcttcgacaccaagttggcctgcgaataaatccaaccaacaattctggtacctacca

SEQ ID NO: 273796 - DNA, 513 bp, Zea mays
cggacgcgtgtgttccaattctaggcgtcttcctccgtcacacccggccccgcaaaccctagctcgccccggccctgcctccggctccgcccatcgctgccatgtcgaagcggccgaagcttgagggtttcagcatcccgcggccaacctcctacaacttcgagcgctctcagcccgtgcagcggctctaccgtccgaccgatgacccggacctcgacgacatcgccttctccgacgacgctccgtcagatgccccagccggcaccgcggtggatggaaaggcggagcatgacgaggagatcgacccgctcgacgccttcatggcggagatccaggaggagatccgcgcgccgcccccgccgcccaaggccgaggcgcttcgccgcgcggactccggcgacgatgaagatgaccccgttgagagctttctgcgggccaagaaggatgccgggctcacgctggccgccgacgccatgcgcgctgggtatgactccgacgaggaggtctacgccg

SEQ ID NO: 273797 - DNA, 511 bp, Zea mays
aagctttggacgcaactgaaagcatagatgtgggctcaaaaacgaaaatgatgaacttctttaggcacactgcttacttccttgttgctggcaatgagatgacaaggcaacagggccatggagtagcctgcaaacatgcaacaagtaaaccagctgagtaaccattttagccgtggagctggtaaccattggaataattactgataagccttttatccagtgtgcctttatagcattccgtatacaatggagttgaaacaacctccacattcaaagaaacaatggcactgactctttgtaggctttatagccattcttgagcagagagtgtactcaaagtggatagttgtagcttctgccaatatgtttatccttcttcgtctcttgtgctcaagagttattcacagcagtttttcaaatttgacctcaccctagcaaggttaccacaccacatgttaaccatgccacacttatttaaggtcatatttgcttaattttcataagtttggga

SEQ ID NO: 273798 - DNA, 447 bp, Zea mays
caacaaccgagctagcagagggcatgtttgcgttcttctgaatgttgtgcgcgtgtctgtggcagcataagtagagagtatgttgatgatgatgacgacgacgacgatcagttcgcggcggggaggttagaagtggccgggcgccgatctccgtcctagtttgggcgtttggcctatagccgagccggcaggcgcgttctccagttcttggatcaggggaagaactcctgccgtgggaggctcctagggctgcctgcttcgttttctacgcaccctcctcccctctgtaattatcccaagcaccacctcgtactggtctggtagtagtagcagtgttttgtgtgtgtgtgtgtgtgtgatgctacgatgtagctgtgccttttcttctgctcgcctggaaaccttttgcgttccaaactgcagctgttgtgttccctccctgcattg

SEQ ID NO: 273799 - DNA, 980 bp, Zea mays
cccacgcgtccgcccacgcgtccggatcagcatgttttacaagagattgttaaaattgtccagaagaggcatgatatgcaagtgagggataaggctttgttacttctggattcatggcaagacgcatttggtggacctggtggcaaatatccacagtactactggtcatacattgaactaaagagggcaggagtaatgttcccacaacgtcctgtagatgctcctccaatatttactcctcctgcaacacatcaggcatatggttcacctagatatccttctggaagtctaaatgagagaatcacatctgatgctggaacgttgagctttgagggcttgaataatattagaaatgcaacggaactgctgtatgatatggtgaatgctttgaaccctgctgaccgcatggcagttaaagatgaaattattgcagatcttgtaaatcaatgtcgttcaaatcaacaaaagctcatgcagtttgtcagttccacaggggatgaagacctgctaaagcaaggactagaattaaatgatcgcttacagagtgtcctcacaagacatgatgctattgcttctggttctccattaccagttgagacaccgattagagaaccacagagagaggatccaaatcctgagccatctacaccaattacacatgataataaggctcaagttgaagaggatgaagatgatgagtttgctcaaatagcacgaagaaaaaacaaatctgtgatatgcggtgatgaggcatcatcgagtgctggtgatcaggccctgatacctgttgatccagcactttctgaagtttcttcggttgcaagcgatgcaatagtacctctcgacgcaacttctgttagtggaaccaggacgaaggagcaggatatgattgaccttctcagcctcaccttgtacagtcctgaatcatcagaagactcttcaactcagaaccaaaatgggagtcagccgagtgtcacatc

SEQ ID NO: 273800 - DNA, 546 bp, Zea mays
cccactcgtccgcccacgcgtcccgcttctgccagtctgcctgcgtgctctgctggacagctggagagctagatggcgatgccgtccgggtggaggggtatcctgggcttccactacggcatcgtgcaggcgccgttgggccccgacatctccggccccgagctcgtcgccgccgtagcgaacgccggcgccatcggcctcctccgcctccccgactggccggcgccggatcacgtcagagaactgatccggaagaccaggagcctcacgtccaagccgttcggggcggccatcgtgctggccttcccgcacgaggagaatctcagggtcgtcctggaggagaagctcgccgtgctgcaggtctactggggggacttccccaaccaccgggtccaagaggcgcatcgcgccggggttaaggtcttgcatcaggtcggcagccttgaggaggcagctaaagctaaagaagccggtgtagatgggatcattgttcagggacgtgaggcagggggtcatgtatttggtcaggaaggactgtttccactg

SEQ ID NO: 273801 - DNA, 798 bp, Zea mays
ggaaacacttgctacaatgttagggatgggttggggatgctgttagctcaaattaccaaagggcatgctttgagtgtatgggcatcttttctttctcttacgatgttccatatgtatgcaaattacaaggcagtgcagtcactttcactcactacgctaaactatgagagagcttccatcttgctacaatacttcaagggatgtggtgaagttcttgtgccacggaaggtttcccagcaggaacatattcttccttcttggtcaaactggaggaaactgaacagaattaaactgccacatgagcgtgtgcacttgggtgctaaagcctcgatgcttacacacagtgacatgttggtgattgcaaaaacaagatgccactatgaaaacgcgaactactttttgctggataaacaaggcatcgtttacgttttcatccacaaggaggcaacaccagccgatgttttaaggtccttcgtacacgggctcgtgctagctagctcgacacagaacagcaaacctcagcacttagaggcccgtcgatggatggacgagatgtataccaggtttatctcgaagctgcagactgaaggttactcgacggaacgccttctgtcgcattcgattctttggagggcacactggcttcacggacagctggatgagaagctcaagtaggaggaacactgcaagaccgcgtctgcttatccaagggcaggtatatcgcccaggacgcgattattagctagggtcaagagcagatgctgctggaggagaatcatgaaggcgagtttagagtgg

SEQ ID NO: 273802 - DNA, 417 bp, Zea mays
cgggccgacccaaacgtcaattcatggggataagaccagtggtctagttaagcacacgggcgctagttctggtattggtttggcttccattgtcatttctcttacatgctggagtttgtggccactttatttgcggataggggaagaagactttcaggtcgtgtgcgtcactaccatgggggtatttgttacgtcccagtgtaaaatttccataagtagtttaggtggtgtttgaatgccctagagctaatagttagccgctaaaattacctgacgacttccaaacagtctacctaatagttcagctattagctacttttagcaaattagctaatagttgctagctaattccactagtaatttttttgtcaactaactattaggtctagtgccttcaaacaacccccttagtacatc

SEQ ID NO: 273803 - DNA, 584 bp, Zea mays
cccacgcgtccggttacatttgattcatatggagtatcaggccatccaaaccacaaagatgttcatcacggcatatgcaagtttctccatacgaacaagcaagggaacgtggaagcttgggaactagcaagtctcagtattcttcgcaagtacagtggtccgattgacatttggctttcttcattgacgtccttcgcaaggtcaaaacagccaatctatactctagttaacagtagcccgtccaaaagctatgaggcaatggctgcacacagaagtcagtgggtttggtttagaagattgtttgtcatgttctcgagttatacatacataaatatgctacggagaatttaacatgtgatgtggcgtcataccagagcaagccgccattgtcgtctccaatgttggacttgtgcatcgtcaattgtacatctatatgtatcaatggattttagttgtacattctctgtaggcagtgctcatagggtgactgtagaatttcttatccccaattcagaattgcactgaatggctgaaatacagttgtctttcaaaagaaactgaaatatagtgatgctcactggctt

SEQ ID NO: 273804 - DNA, 882 bp, Zea mays
tcctcttcttccgtcgctctcgctctcggtctcggactacggttgagcgaagtcgtcactgtaatctactgatctgcaaatggcggaggcggaggcgacggtggggcgactgatgctgtactcgtactggcgcagctcgtgctcccaccgtgcccgcatcgctctcaatctcaaaggtgtggattacgagtacaaggcggtgaaccttctcaagggcgagcagtctgatccagaattcgtcaagcttaatcctatgaagttcgtccctgcgttggttgatggcagttctgtaataggtgactcttacgcgataacactgtatttggaggacaagtacccagagcctcctcttctacctcaagaccttcaaaagaaagctttgaatcaccagattgcaagcattgtagcttctggtattcaacctctccataacctcacagtgttgaggttcattgaccagaaggttggtgcaggggagagtgtgttgtggactcaacaacaaatcgagagaggtttcacagctattgagaacctgatacaactaaaaggatgcgccgggaagtatgcaacaggagatgaagtccaactggcagatgtattccttgcaccccagatctatgcagccattgaacgcactaaaattgacatgtcaaactaccccactcttgctaggctccactcggagtacatgtcacaccctgcgtttgaagcagcgctccctggcaagcaaccggacgccccttcatcctcctaggaactgcaccctagtgtgttgttcctctgaatatatatatatatatatgtatacttctgtaagaattaataattacagagtttcgtctgctatgtcgaaaaatgtcccaagtttttgtgatttcaaaa

SEQ ID NO: 273805 - DNA, 1065 bp, Zea mays
atcttacagaatcagctttagtgaaagatatttacactacatctcaggctgtttcagcacctattgttgtgcccagagacattttagaggacaaaacagtaagcaatgttcgtctagggactggatagacagctgccgtcccagatgattttcggatccctgttcacagaagaaaaccctcacttagtggcagtgctgctgatagtgatagctcatcaagatcagcgctcactgaacctgatgttagctcagagggtttgtctagcttaaaattctcctttgggctaactccatatcacaagaaagaagaatttggcgatgtggataatgaaggtattgcacaaatagcagaaaagatggaaagaacagtgtcgctggaccattctcagcagttaaatgatgataaatcctttgaatcaccatgctcaacaacagagactgccaaggtcaaatatgttagaggagttgctgtgccactggggaaaacaaagtctcttgttgagagatgggaaaaaagagagacttctagcactgattattcaccacaaactggttcttgtggtgatcgggcatcgagaaatgacaaccatccattccatctggcggaaccaagtacaacatttgaaaaggacctgtcaactgtagatgaagcgatggctcctgtcaatttagtgcggaaccatgatgaattcctaaatgctgtaaaacttcggctgacaaaactagagatgatgcggcatgtctttgaacaaagtggtattaaaggagcaattgctgcagtggcaaagctacctgacaatgctgttcaagcagatgttggtagtgctctcaaaggaaagcttgatcttttcaacctggaatttttctcaaattttctgcctgttcttgctgggttactgtgtagcaagactgaaaggcatgctatggtcttttaggaaatgttgttggatttcataaagatttttgtaccaggaattcattcagcattattagcaaatttaagcgtttgagtttacaattatgctgagcataggttgtaactttgttcaccgtgctttaaccatt

SEQ ID NO: 273806 - DNA, 592 bp, Zea mays
tcttactgtcttccttttttagaagatggctttgaccaatttgatgacaacatgaccaaccaaggggaaggcattacccagcctggtggaaaaggagtaaatcagcatagagaaaggggacttaatatgggacttggtctccaaaggatgaaccgagctcggcgtggcaaactgccaattgtcattactgaaggaaggataaggcctgtggcaccaattgttgctgcaaagtttgcaactgagtgcaacattgcagttcggaatcatgtgcttgtgcttaagtcatggaaggaatacgagaagcatcctgggctctttaaattgtccacagcaaaacttagtgcaaagtttgatatcaatacagaagatgcgctagttaaaaatgctggcttccaaatgatgaggaatgcactgcgccaacaacgatataagctgaagaaacaatattttgacccttttccgctacatctagtgaggaaaacatctcctatcaaatcgacaagtgatgaacaatggaatgacctctgtggaacattggacagggccaaaaaattggtatgttgaaaaaatatgccttgtacatgctactttg

SEQ ID NO: 273807 - DNA, 978 bp, Zea mays
gcgctagttaaaaatgcttgtttccaaatgatgaggaatgcactgcgccaacaacgatataagctgaagaaacaatattttgacccttttccgctacatctagtgaggaaaacatctcctatcaaatcgacaagtgatgaacaatggaatgaccttgtggaacattggaaaggtccaaaaaatatggcgacatgtgaacataacaaaggcaaccgaggcaaagttaagttccatcaaacaactggatctcgtagctatatggttcatgtagaaaatttgggggacaagtacatggatcaagaacctgatgcattggatctgttcaaggagtgccactacagtaagaaaaagcaaggctacacttccactactcaaatggaagacaagcgatctacaccaggagaaggtgaacaaccaatgtctacgactcaggttgtagctgatgtgcttgctgagaacacaaagaagaatcggtttcttcaaaatgtgggaatccaaaatgcacgacctagatctagtgtacaaaatattgaagcacaacttgaagtagagaggaaggcaaatgcagagcttcaatcacttgtcagcatccaacgtgagcgcatggatgtattattaaagcaagtgcatgaagcagaactggtaaggattagagagcaagaagagatgaagaagaagcaagatgccatggatgctcaacttgagcttatgctaagtcagattcaaccaagttaaagctaactagtatggggtgttaggctttgttggtacttctcttttgctgatgctattgcattctattgatggataaatacgtttcaatccattttttgtctattgtgctgctagagtagctttagcggcatgtgtggtgtgttggagtggcttacgtgtcagtggttggatacttgctgtaatgacatgctattggatacttgcatgtaatgacatgctggagtgtggtcagtattttttgtg

SEQ ID NO: 273808 - DNA, 246 bp, Zea mays
agaacctgatgcattggatctgttcaaggagtgccactacagtaagaaaaagcaaggctacacttccactgtacaactggctattgtaaggcaatataatgctttttgcaatgcttattttaaattgtctcatgaaacaattacatgtatgttgatcgcattctagactcgaatggaagacaagcgatctacaccaggagatggtgaacaaccaatgtctacgactcaggttgtagctgatgtgct

SEQ ID NO: 273809 - DNA, 657 bp, Zea mays
agcatgaggaggatcatgtgaatgacccacaggaggcatggcaagaggttgatccagacgagtactcctatgaggagctagttgcattgggtgaagtagttggcacagaaaacagaggtctctctgctgatgcacttgcttctttaccttcagtaacatacaagatgcaaagtgttcaggatggcaacacagagcaatgcgtaatttgccgtgtggaattggaggagggtgaatctttgattgcactcccctgcaagcacttataccatcctgaatgcataaaccagtggctgcaaataaataaggtatgccctatgtgcagcgcagaagtatcaacctcgggtaacaaggagccatgactgctctccgatggcaatcttgggaacttggtgggaataactagcggcatcactgcagcatctgtattgtcgaaacaaaagcagaaaaaacggtctacatacatgcaaggagatcaggatataatcctcttgtcagtctaaagttctgccctggttccctgctaactggattgattggccttgccgcttattatctcagttccctatgaacgccttatggctgttgtatgatccataaattatgctaattatattatattgttagtcattctttttactgatcgcatgatcatcttat

SEQ ID NO: 273810 - DNA, 1273 bp, Zea mays
ccgtccacccttcccccgacgcgctcgagtcacaggaggccgcatcgtccccgtccccgcgtccgcctcctcctgctgctgccgaccagatcgcagatgatgtcgtgggagcagcgcgtgccctcgccgcgcggcccgaggcgtggatcgacttccccgtgctcgccctagatgagggttctgtaatttctggtatccaaagagatcatatggaatccattgaaaaacttgtcccagatttagcatctctacggggtaggctctgtccttcttacatggatgaagacatattctggaagatttactttaggttgcttgagtcaaacataaatgagcatagttctgaggaagatatccggagcgtgccaaattctgtacatcacaacaatgagatagagtctgattctccacctcacgtctgtgagatagaaagtgtgaaaagcaaccaagaagggtaccaatcttcggatggtcgtgctttccccaagacaagatctgagcgaagcattgaccaatgggtatttgcaaagtcaaaatctgaagaaagcatggatcagtggtctgaaataccttcagatgtggaatccttcagagaaggtaaaaggtacctcagtagcgaggagctgagtgacgttgatagtgccaacgttgttgtcatggacaaatacatggattcactcctctctgaccggaggaaccttccctacgctagctcctcggtgcgccgggattcagtcagacgaaaacctgcttcgtccgccgattacagccgccgacctccgcagccaactccacctgcatcgctgtcaaagaaggaatcgtgggatgtcattgaagattcggagttcgatatacttgacagttagtaattgagatctttgcgatctcaaggctgtttatccttctattttcttccatgtttccccacacttcccctcgtttgtaaatgtggacgtgcaggtggcgtcagtgatagtgggaaaggactaatgttctttttaccaatatattataacagtgtgtgcatataaatcttctgagctcgcaagctgtgagcctcccaggttaaaagtgtttatatgttggcatcattgtttgtttcagatattttattccagaacagaaaattgccacctatcattgcgaaaaaaaaaaaaaaaaaaaaagggcggccgcccttttttttttttttttttttttttcttcaaccaaagtttctattacgagttacaagttacaagcttcagtggcatactgaacagcatacaacgac

SEQ ID NO: 273811 - DNA, 344 bp, Zea mays
aggacccaatctgaggtaggagaagcacctcctccttgcgtcgcggcacgcccccaccaccaccgccgtaggcttctctccggcgctcccgctcgaacgcgcgctcagcctcagcatgccaccaccatcgccgtctcgcccgctggtgcccacttcccgctgtcccctgcaccgctgccccttgtaggctcctccacctccgctgcctcctcgagctccgtcgcgcgaggccaaggtccggccaaccggccggaacccctgtctactatggttgttgtcgtgaactctgaggccaggggtcgcccgtgcaatcgcatccgacttgacctgaccttgccgtcgtc

SEQ ID NO: 273812 - DNA, 633 bp, Zea mays
gctcactccggttcgtacctcgcacaggggcggcggcaaggcagctctgaggggatctcggcggcgacggcgcggcgacagcgaccgccgggctcgaggattcgcacggagtgaacaaggctgagcgtcgcctcattccgacttccgatccccaacggaaagcggagccaggaccgggagctggagcagttgtcttcccccctcgtctccgtcaactggtctttaattctctctttacacatatcttggtatttaattctctcatcaccagcgtaagaaaaaaccatttgaagctaaatttttcaacaagccacttgagaactaccattacatggctgttatatttgggaatcatcaagcaactggactatttgcaaaatgcaccagtgatcccctaggtttcgacacatctgaaagtgcaggtacatatggtgtgggttattctggagacttggctggtcatgagagtaacaatgcaagtccaactcgtgatagtggagaatcattgtacccaagtggtccaattcgtgatggtggagactcatctactcgaagtggtgcaagaaggaagagagggcgcatgatgatggaagatgaggatccattgatatgcactgtcactgaagcttttaa

SEQ ID NO: 273813 - DNA, 881 bp, Zea mays
aatctcgatggtcgtcttctccacgagaccacgaccgatcaaccccaatcgtagggaactgggaacccggacccagatctcccctagatcctcaatcccaatctgccctccgccgtatcgatcatacctcccgatgcgaccccaagtctggtcgatgcgagtagcggcggcgatttagcgaactgcgcgttcgctagggttagggtttcgagggtttgcgctagggtttgggcgcacgatggggcggtcgcgaggggtgcagaattccggcgacgacgacaccgtacacaggtcgaagcggaggagggtcgcatcgggcggggatgcgacggactccgtttccgctggcatcgggggagctggagaaggagggggcaagaaagcgctctaccactgcaactactgcaacaaggacatctccgggaagatacggatcaagtgctccaagtgccctgacttcgacctttgcgtggagtgcttctctgtcggcgctgaagtcaccccgcaccgcagcaaccatccttacaaagtcatggacaacctgtctttcccacttatttgcccggattggaatgcagatgaagaaattctcctccttgagggaattgaaatgtatggtctgggaaactggcttgaagttgcagagcatgttggtaccaagtctaagttacagtgtattgatcattacacatcagcatacatgaactcaccttgttatcccctaccggatatgtctcatgttaatggcaagaacaggaaggagcttctagctatggctaaagtgcagggtgagagtaaaaaagggacttcactgttgcctggagagctgactcctaaggctgaatctccattttctccctccagggtcaaggtggaagatg

SEQ ID NO: 273814 - DNA, 788 bp, Zea mays
aagaaagcagctataagtgcaagtgatatatcagaatcatttgataattttccatattatcttagtgaaaataccaaaaatgttcttttgtcatcatcgtatgtaaatctatgctgcaaggaatccactaagtggacaaaggatatatcttctctttgtaaaagggtactattatctggcccaccagggtccgagatctaccaagaattactggttaaggcacttaccaaatcctttggtgctaagctgcttgtcatagattattcactgctgtctggtgggcagccttcaaagtcaaaggatcaaaaccatacaaaaaaggtgatagggtgaggtacattggtcctattcaatcatcagggtttatgtttgagggacagagagctcctgattatggttcacagggtgaagtgaggcttacttttgcggaaaatggatcctcaaaagttggagtcagatttgataaacagatccccgggggcattgatcttggaggcagttgtgagcttgatcatggcctattctgttcagttgattctctatgcctcgatggtccaggatgggaagatagagccaaacattcatttgatgttgtgtttgagtttgcctctgaagaaagtcaacaggtgcctgtaatcctatttctgaaggatgttgagaaaatatgtggaaataattacacctaccatggtctaaagaataagcttgaaagtttcccagctggagtttttattgttgggtcccagattcagacagatgctcggaaagataagtcaaacaatgggtct

SEQ ID NO: 273815 - DNA, 530 bp, Zea mays
ctcgcgggtcgatacaaccctataggcagccagcacgcctcctcctctttcagcaaacacagctagctagcagcacctgctcccttcgcctgtaatcatggcgtattgctgcgacgacggctgcaactgcccccctgactgcgggtgcccatgcgactgctgcaatttgtaccctgaagtggagaccgccgccgccagcggcatcctcgctgcgccgaccaccaaggccagcgccggcggctgcaacacctgcaagtgcggcggcaccagctgcaactgcaactgcagctgagccggcccaatggtggcgcacgagaggacgacgacgacgaggcgtagtatatatgtatgtagcagcgtctaaataagatcctgtcaagagtcaactgcacccgccattgtatggtcgcctgcctcgccttcgtctcctggtcctggggttcgttcatctgaacgttctcgcggtcctgtcagcctcgtgccggattcaatatttatatatacacatacacacgtatgtttctgtgttg

SEQ ID NO: 273816 - DNA, 300 bp, Zea mays
ctagaactagtccttcgcttcgtttattccccacttccacacggccacaccgccacagccgccgccgccggacggcgctgtccttccctgggaggcgctccactaggctcggctcagctcacgcgcggcggcggtgtccgtggctgctgggcttgcgcgcgcacctgattccgtgctgggcttcgcgaggtgctcctcgtgcgagacacacgcccgatgcggcggaatcgcgcggccggcgcccgatacccggcgtgattcggtggggaggctgggtcgcggtgcttccgcgtgcgggaa

SEQ ID NO: 273817 - DNA, 1185 bp, Zea mays
cggacgcgtggcggacgcgtgggcatttatgctttatatttagaggagaggctcgaatgtttccgagtgttgaagtatgatgtagaaacagatcctccgagaactaaggatcttgatactgttgctttgcttgatcatctaccatcattgcagcaactccttttccgtcttcttgcttgccagccacaaggagcgtcgtcttacaatgttataatccagcatgcactctcaatggttgctttagagagtattaagatctacactgcgattagtgatggaacaatcaatctagttgacaagttcttcgagatgcaaagaaatgatgctgttagggcacttgatgtatacaaaagagcaactaaccaggctgaacgactttcagagttttatgaagtgtgcaaaactatacacattgggcgtggtgagaaattcctgaaaatcgagcagcctccagcatcattcctgaataccatggaggagtatgttagagatgctccaacaggtcaaaaagagaaggctatactagcgatagaatacaaaaaagagccagaggaggaagaaaaaccggcctcacctcctgcggctccagaaccagaaccggaacaagtgcctgagccagaacccgagccagtgaaagaggaagcaccagaagctgaaccggatttgctgggtctgaacgaaccgaaccctgctgcaactgcgatagaagagcagaatgctttggcgctagctattgttccgatagatgatgctccgaaagctgctcccacttttggaaatggagtcactggctgggaactggcccttgtgacagcaccaagttcaaatgagaccgccgttgccccaagcaagaaactggccggtggtctggacttgctgacccttgacagcctgtacgacgaggcgaaccggagagcgagccagccagcaagctacaacccctgggaggcgacccccgccgcgcctgccccgatgatgaccatggcgccggtgatgcacgacccgttctacgcctcgaacgggtacgctgcgccgcacggcgtgcagatggcggcgatggcgcagcaacagcaggccttcatgctgcagcagcagcagatgatgacgatggccccggcgcagccggtggtccaccacccgatgcagatgcagcagaaccccgcgaacccgttcggcaaccccttc

SEQ ID NO: 273818 - DNA, 435 bp, Zea mays
acgcgtgggccgatacaagcctcaacactgagtcctacatatataactatcttcctcttcgtcgctcgcacgtccgatccgtcctcacgtaacacgccgatagatggagtcgtccatgtccatgtccgccgccgcctcggtcgtcgtgaggacatgcgttccggccgctgtcatgttgcccctctcaccgtcctttactaggcccgccctccgcaccaccgggcgaggcttccgctgcaggtgcagcagcgccaccaaggactcggcggtcgtgtacagcaggctgctggacgacgcgctgttccggtcggcggaggtgatccagtgggagagcggcaagtccatgaacgccatcgccacggcgcagggcatccaaatccggcggcgctgccggcccaggtacccgtccgagggcaccggcgccgagcgcgccgt

SEQ ID NO: 273819 - DNA, 307 bp, Zea mays
cccacgcgtccgcccacgcgtccgcgcacgcgtccgcccacgcgtccgagctatcttcctcttcgtcgctcgcacgtccgatccgtcctcacgtaacacgccgatagatggagtcgtccatgtccatgtccgccgccgcctcggtcgtcgtgaggacatgcgttccggccgctgtcatgttgcccctctcaccgtcctttactaggcccgccctccgcaccaccgggcgaggcttccgctgcaggtgcagcagcgccaccccaaggactcggcggtcgtgtacagcaggctgctggacgacgcgctg

SEQ ID NO: 273820 - DNA, 445 bp, Zea mays
  unsure (1)..(445): unsure at all n locations
gaagtgtactacgcgagagcttgccggaggtctggatccctgtgataataataaactgatataagcagaggaagcggggaggaagctgcgagttggagggggccgggagaggcgtctctggttattgctgggagtggacgggccgggaaggagacgagaagataagggcgccgcgcgcggccatggctggaaatgcgccggcgacggcgatggacaagaccagctttgccaccacgtgcagcctgctgagccagtatgtcaaggagaagaagggcggcctgctgcagggtcttggtggcctccccatggcgccggcagctggagaagaaagagcttttcggccgccgaccaacatgaacttgctgtcagcgctcgacgacgcgccggccgaggagcgcagcgagaaagccaccgccggggagccaanncaccaggacaaatgcac

SEQ ID NO: 273821 - DNA, 1376 bp, Zea mays
ggctggtcgaaataaagacgatgctgaggaagctatctcactggtggaggcactagctgtccagctgacacatcgtgacggggcggtaatttatgagaaggctgcactaaaaaaattggctaacttccttaagcaggctactggagatgcacgcaaagtggctgaagaggaaagggcccttgcactggctgaaattgaaaaggctagagctgcgatcgaaaaagttgagaaagcatggcgtgtacatgattttgcgtcaagtagcagagagaaggcggaaatagaggaacttaggaaagaggtccgagaggctaggagaataaaaatgctacaccagccaagcaaggtcatggacatggagtttgagcttcaggcactgcggactctcatctcagagaagacccagctctgcaatcagctaaagaaagagcttgccatgatcaagaggttagaagacgatagttctggcccttttgagcttgaaggttctaatacccttggatcacagctttgtattatcccgcgagttgatggtgcttcaaacatcccgaactgtccaattcagtggtatcgtgtaatttctggaggcactagagaactcatatcaggagcaacaaaatttatgtatgccccagaaccgtttgatgttggccgattgttgcaagcagagatagttttgaatgcagacaaaattatagttcagacagatggccctgtagataacgctgcaggacttgaacgttatgtggactcactaatgaaaaggacggatattgagttcaatgtagtagtaacccaaatgaatgggaaggattactcgtcgaattctgttcatgtatttcacattggaaagctgagaataaaacttcgaaaaggatggtccacaaaagcaagagagtcgtattccactacgatgaagttatgcgggagccgtggtggtggtaatgctgcagctagggcagttttctggcaccctaggaaaggctcgtcctacactctagccttcgaaacagacagggacaggaatgctgcgattatgattgctcgcaaattcgcttcgaattgcaatatcgctctcgctggcccaggcgaccaaggcacctgatgaagtgatcacgcgatgttttgacggcgacaacagtacataattagggcgtggattggctgattgggtggcgtgcttgtcttagttttgtcgatttgtgcttgtgagggtagaggttgtacacggcgtgaggcattgtttttgtttgcctgcctgcagcactggcgacattcttgaaatatggtgtacgaattgataactgttcttgtgcgttactgcatgggtaatatttgacccaaaaaaaaaaaaaaaaaaaaaaaaaaaaaaaaga

SEQ ID NO: 273822 - DNA, 264 bp, Zea mays
ggcccttgcactggctgaaattgaaaaggctagagctgcgatcgaaaaagttgagaaagcatggcgtgtacatgattttgcgtcaagtagcagagagaaggcggtacttattccaaaatgagcttggatgttcattttatttgcctctcgtatcatttattgccagttgccattgacccatatttattttgtatcttgatttttgtcctctaataatcaggaaatagaggaacttaggaaagaggtccgagaggctaggagaat

SEQ ID NO: 273823 - DNA, 329 bp, Zea mays
agaccggttgaggagaagccaatcgccagaagcggcaagccttgcctcgcgcaccggtctggttctggtgggtgccctcttcgccggtggccggaaggcgagggggaagccggaggacgctgagggcgggcgaggccgccgtccccagatctcacttccgccgcccgcccgccccgcttttgcagggattgagagaggaacgaaggaaaggaggtgcttcaatatgaaggcgctcattcttgtcgggggtttcggcagccgccttcggcctttgactcttagcttcccggaagccccgtgtggggtgttgcaagcaagcccatgagtct

SEQ ID NO: 273824 - DNA, 579 bp, Zea mays
ctcgcgggccgacacacgcctcaacaggagatcgtcccagatccgattagtggcgacggtgaggggaacgggcagggaaacgtcggcgcggcgacggaggcgaagcggaaggccaatggctgcaggctcgatgggctcgtcagcaagaagaggaactacgcgcagctccatctggagctagggcagcctgatttcgtcctccacacgtgctccgtgtgcggcatgatgtacgcccgagggaacgacgaagacgaaaaggttcacagggcgtaccacaagagctactccgagggagtccctttcaagggttggaaaaaagagacagtgatagcgaggtccgagggcggtgatcgggttgttcttgcaactgacgagaactctagtatggcgaaaagtaaggccagagaggtgatcacagtggcggagaaggagctgggatttggtgaagggaaactcctgcataagctttgcaaggtgcatctatacatatctgcacaaaggatcgtggggtgccttgtcactgaaccgataaaaacaggacatagagttatcccaagctccacggaaggaagccctaat

SEQ ID NO: 273825 - DNA, 283 bp, Zea mays
tgcgttgtgctcttagtttttctgtggagcgtctagttaaccgatgagctgcagggttggaaaaaagagacagtgatagcgaggtccgagggcggtgatcgggttgttcttgcaactgacgagaactcttgtatgtcgaaaagtaaggtcaaagaggtgatcacagtggtggagaaggagctgggatttggtgaagggaaactcctgcataagctttgcaaggtgtatctatacatatctgcacaaaggatcgtggggtgccttgtcactgaaccgataaaaa

SEQ ID NO: 273826 - DNA, 386 bp, Zea mays
gcgggtcgacccaagcctctagcatcaatcagtgaatccggcgggcattctctgctggtacaccaataatcgaggagcagctagcgtgcgagagacaacagagccagaggccgcccggccggccagtacagagaaccaagctagtgccaaaccgacagaacacgcctgtgatcggtaggtctacaccaccgacacttggccatgagcacggccacggacgccgtcccggtcgccgtggcgccggcgaagcgcccgcccatcaacaagtacgccttcgcctgcgccctgctcgcctccatgaactccgtcctcctcggctatgacatctcggtgatgagcggcgcgcagctgttcatgaaggaggacctcaagatcacggacacgca

SEQ ID NO: 273827 - DNA, 993 bp, Zea mays
gcctttttcttcggcatgcacatggacgtcgtccctgccaacggttttgagtgggactttgatcctttctcactaacctttgatagcgaggataaggacaaacttcggggacgtgggacaaccgactgtcttggacatgtcgcactggtggctcagctaatgcggcggcttggtgaggtcaagccacccctgaaacattctgtcattgctgtgttcattgccaatgaggagaactcatctgtcactggcattggtgttgatggcctcgtgaaggatggattacttgacaagctcaaaacaggacccttgttttggatagatacagctgataagcagccatgcattggcactggtggaatgattccatggcatctcaaggcaacagggaagctgttccacagtggccttgcacataaggccataaatgcaatggagatgaacatggaagcactaaaggtaatccaaaaacggttttacactgacttccctccacatgagaaagagaaggtctataaatttgctactccatctacaatgaagccaactaaatggagctatcctggcggggggcttaatcaaattccgggagaatgcacaatttcaggggatgtaaggttgactcctttctatagcacttcgcatgtcatggagaagttgaaggattatgttgaggacatcaatgagagatttgaaacagtacttgatactcgtggtcctgtgtccaaatatattcttcctgatgaaaatctacaaggaaggcttgaaatcacttttgatggagatgtgatgaatggggtggcttgcaatctggagtctcgaggctatcatgcattatgcaaagcaaccaaggaaatagttggccacgtggagccatattccatcaccgggagtctacctctaatccgggaattacaggacgagggatttgatgttcaaacagctggatatggcttactgaagacgtaccatgcgaagaacgagtactgtctgttt

SEQ ID NO: 273828 - DNA, 661 bp, Zea mays
aaattccaggagacgacgaggcgccgatccgtagcggcgccgagggcgatatcgaggagccgctggtctcacgccgcaccgagacaatggcagaccagttagggtcttacactattagatcccatggaatgatattggcaagattacacatgtatgactggataatacttctcctccttgctgtcatagacgggctgttgaatataattgaaccatttcaccgttttgttggaaaagacatgatgaccgacttgagatatcctatgaagggcaacacagtgccattttgggctgttccactgattggaattatactgccttgggccatctttgttgggatttacttcaagaagaacaatttttatgatctgcaccatggcatactggggattctatactcagtgctcataactgcagtgattactgatgcaattaaggatggtgttggacggcctcgtccagattttttctggcgctgtttccctgatggaaatgatgtttatgataacatcactactggtgttatatgcaatggagtgaagagtgtaatcaaggaaggccacaagagctttcccagtggacacacttcatgcttccttgcatggtacttagctgggaaactcacggcttttgatcgcaaaggacatattgcgaactatgc

SEQ ID NO: 273829 - DNA, 444 bp, Zea mays
agccccacccgctcctccactccaccaccaccggtcagatacggatgtctccgcccgcacatccacttcacaaacgaaaacccgcagcaaacgctagcagcggcggcgccggcagttggtagccgcgaccgagacacggcgggtgacctgccccgccgcagtcggggtgtatgtattaccaccgccagaattccaggagacgaggatcgaggaggcaccgatccgtagcggcgatatcgtagagccgctggtctcacgccgcaccgagactatggcagaccagttagggtcttacactattagatcccatggaatgatattggcaaggttgcacatgtatgactggataatacttctcctgcttgctgtcatagacgggctgttgaatataattgaaccatttcaccgttttgttgggaaagacatgatgactgacttgagata

SEQ ID NO: 273830 - DNA, 909 bp, Zea mays
cccacgcgtccgaactgcagtgattactgatgcaattaaggatggtgttggacggcctcgtccagattttttctggcgctgtttccctaatggaaatgatgtttatgataacattactactggtgttatatgcaatggagtgaagagcgtaatcaaggaaggccacaagagctttcccagtggacacacttcatggtcttttgctggtctaggcttccttgcatggtacttagctgggaaactcacggcttttgatcgcaaaggacatattgcgaagctatgcattgtgtttctgcctcttcttactgctgcgcttgtggctgtttctcgagtggatgactactggcatcattggcaagatgtatttgcagggggtcttataggtcttacagttgcttcattttgctatctacagttttttccatatcctttcgatggcgatgctttgtggcctcacgcatacgcggtccggttagccgaggaggggaacagcagaaatgcgaactcgtacagcgtgagaccaaccgagatcgaaacagtcgatattcctgggcacggtgcgatcatcaccctaagagagactctaaacgatgtggagtctggcagtgccaggagattgtgagatgggtctgcaggtgtggagattgatgtctcagataccatgggagttgcttgcatatgtgtacaggtagatctattgtagagctgttgactgctgcccccgtgataggggagggttgcttagacgggcctggcagtaaatttacttggtaggggggctgtttcttctgagaacccttggcttttgtttgtatatatactcctatcaaagtgtttgctgacacttttgtaaccagtttggtcgctgcattcagcaactatgatctgatcagatgttgcccagtcaaa

SEQ ID NO: 273831 - DNA, 347 bp, Zea mays
aggagcagtctacaatggctcacagtcacagaagcagtatgagcttctgcttggtgtgcatcgtcgtcatggcggcggcggcggcgttgttgcaacccgcatcttctcagcaggcggtgccggacatcccgaacctgaaggtgggctccaacgatcgcagcacgactctcaagtgcaccaacatcaagagcaacaagaccacctgcagcgccacctgcaacgcacgctgccctcacaagtgcctcatccagtgcccaagctgcaagacattctgcttgtgcgacttctatcccggcgtgtcctgcggcgacccacgcttcacgggcgccgacggcaacaacttctac

SEQ ID NO: 273832 - DNA, 476 bp, Zea mays
gacgcacgcggccatggagccgttcatcatcgcggcgcaccggcacctgagcgcgatgcaccccatcttcaagctgctcaagcctcacatgcggtacacgctcaagatcaacgcgctggcgccgcagatcctcatcaacggcgacggcgtcatcgagtccgggttcacccctggccgctactgcatggagatgagctcgttcgcgtaccgggagctctggcggcttgaccaggagggcctccctgccgatctcatcagaagaggaatggccgtggaggacccgacgcagccgcacggtctccggctgctcatcgaggactacccctacgccaccgacgggttgctgctctggtcgtccatcacgcgatggtgcgacgcctacgtggccatgtactacccgtccgacgagtccgtgcagggcgacaccgagctgcagtcgtggtacagggaggccgtgcagacggggcacgcggaca

SEQ ID NO: 273833 - DNA, 573 bp, Zea mays
gacccacgcgtccagacccacgcgtcctcgaagttttgtgggctgaccatcagtcttccaagaggaggttctgccgaaattcccttctctcatcatcacttctccaaggccaagcagtcctcctggtcctgccgaagtgttctctgaacaagagggcatgcatgcactccttcttgtccctgatgttagactagctagctagcactagcagagactgaggccgcagcgtctgttgagaattcagatgttgttgttgctcgtcctgtccgagcacctcctcctgtccggatttatgatcggttccgccataacccgcctcgtccagtccttctctgtcgttttcctctactggttctatgtcttctcagtgcagctgccactgcgcagtgccagtgcagcagttgatctcacctttttcaagttattaataactcggcactataacaaagaggtagctagctatgtcaagtggaagctcgtttgggtcgagccagtggactcagagatccaggtcggcggaggatgaccatcatgacctccaggccgagatggagaagaggaggaagcgaagga

SEQ ID NO: 273834 - DNA, 1181 bp, Zea mays
aagctagctagctcttgtcttgtcactgagtgagcagaaggagtgtgtggtggagtgcaaaccaaatcaaacgaagaaaagtgggagcgaggaggaagaaaagaagaagaagaagacgacgacgacacccaccaccagcagcaagcagcaatcagcaaccagcataacgaaatgtcgatcaagtactgcgaccagcacaaggactgcgagcggcagcgtctgtaccgtcgcttctgcgccgccctggtgggcgtcatcgtgctcgtcctcctcatcgtgctcatcgtctggctcgtcctccgccccaccaagcctcgcttcttcctcaacgacgtgagcatcgtgtgcatcaacgtcagctccgcctcctacctcaccgtcaccatgcaggccacgctggcgtcgcgcaacaccaacgaccgcgtcggcatctactacgaccgcgccgacgtgtacgccgagtaccgggcgatgcagatcacggtgcccaccgcgctgccgcccttcttccagccgcccaacgacgccgccgtctgggcgcccttcctctccgcctccaacgtcccgctgccgccctacctcgccaccgcactcacacaggacgagacggcggggtacctgctcgtcaccatccgcgtcgacggctggatccgctggaaggccggggccttcatcaccagccactaccacctcagggtgcgctgccccgcgctgctcaccgtcaacgacggacaaggaagctacggctccaacgccggtggggggctcggctacttcaagttccagcgcgcagcaccctgcatcgtagacgtctgagatcgatctcgattcaaaaatcacattaaagaagctcggccgggatgaattgaacaagaagcccttttctttttcgtaataagatatatacatatgaatcaaataatagcttcaactctttggtttatttttgttgcttttttttcttttttttttgtttggatgggaaaaaacgtagactatattgtagcaattaatatctggaggatatgcttctagatggatggatatatgaacgaaagggccggccgccgggaaagctcagctaactttgagttacctctacttttccctatctctgtactgtagagtgtattttggatttcctcgaggtatggtgggacaaaaaaaagccccattgcttt

SEQ ID NO: 273835 - DNA, 426 bp, Zea mays
ctagctagctcttgtcttgtcactgagtgagcagcggggagctgtctagctagcctagtacaggtggagtggagtgtgtggtggagtgcaaaccaaatcaaacgaagaaaagtgggagcgaggaggaagaaaagaagaagaagaagacgacgacgacacccaccaccagcagcaagcagcaatcagcagaacgaaatgtcgatcaagtactgcgaccagcacaaggactgcgagcggcagcgtctgtaccgtcgcttctgcgccgccctggtgggcgtcatcgtgctcgtcctcctcatcgtgctcatcgtctggctcgtcctccgccccaccaagcctcgcttcttcctcaacgacgtgagcatcgtgtgcatcaacgtcagctccgcctcctacctcaccgtcaccatgcaggccacgctggcg

SEQ ID NO: 273836 - DNA, 628 bp, Zea mays
gcctgtaagcgtcagcgtgttccagttccagcttctatttttgctccaaacaagtcgtgctccactagggatcctatccagattcgtggggacacccccgtccagttccagccttccaacttccaaccctctcctctccgcaggctgtagcatttgtcgggttggattgggttgttccgcttgggtagcctggtgggatcgaaatctgtgtgggatccatggcggcggtcgaggggacgacgaagaagaaggtaatcatcgacaccgaccccggaattgatgacgcgatggccatcttcgtggcactgcggtcgccggagctggaggtgctgggcctcaccactaccttcggcaacgtccacaccgccctcgccacgcgcaacgcgctccacctgctggaggctgttggcaggactgacatccccgtggcagagggatcccatgtaacgatcaagaaagccaccaagctgaggatcgcaagcttcgtccacggttcagacggcctgggaaaccaggactttcctccaccagctaccaagcctgtagatcagtctgctgctgccttactggctgagcaggcaaatctgtaccctggtcaagttagcattgtcgccctcggaccacttac

SEQ ID NO: 273837 - DNA, 490 bp, Zea mays
  unsure (1)..(490): unsure at all n locations
gtgctgccgagccggggtctgctcagcctgtaagcgtcacgtngttccagttccagcttctatttttgctccaaacaagtcgtgctccactagggatcctatccagattcgtggggacacccccgtccagttccagccttccaacttccaaccctctcctctccgcaggctgtagcatttgtcgggttggattgggttgttccgcttgggtagcctggtgggatcgaaatctgtgtgggatccatggcggcggtcgaggggacgacgaagaagaagacgacgcgatggccatcttcgtggcactgcggtcgccggagctggaggtgctgggcctcaccactaccttcggcaacgtccacaccgccctcgccacgcgcaatgcgctccacctgttggaggctgttggaaggactgacatccccgtcgcagagggatcccatgtaacaatcaagaaagccaccaagctgaggatcgcaagctttgtccacgg

SEQ ID NO: 273838 - DNA, 1033 bp, Zea mays
gtcactgcaactctgcgagtgccagaaaaaaaatactgccacccaccaccgcgccgccgcgccatggcttccccatccccttcctcgcccctccacccgcaccagcacccacctcctccgaatgttcaccaccaattccaatccctaccgccttcgatgccgccaccgccgccgtcaacggcgctgccaaaggcgctcgaccttgaggttaccgtcgtctgcgggaagcacctgaagaatgtcaactggcgccgtggcgacctccgtgcctacgtcgtggtgtaccttgacccctcccgccgcgccgctacccgccccgacgacggcggcgggtgcaaaccaacctggaacgagcgcctcgtcctcccgcttccgccccacctctccccgcacgacccctccatcctcctgtccctcgacgttttccactctaagccctccgattcgcccaagccgctcgtcggatccgcccgctctcctctccgcgacctcctcttccccgcaaaccctaaccctagccacgatcccgcagcctccgctctcgtcagcctgccactcctccgcccttccggccgcccacaggggaagatccggatccgcgtcgccatccgcgagcgctcgccgccgcctccggagccgcaataccctccgccttccagctccccgtactactttccaccgcctcctcccgcctactcggccccgcctcagtacggatctgaccagtactatcgccctagtggatactactctgcacctgcacctccaccacatccgtatgagtacaccggagggccctctgcaccggtggactacaacaggcaatatgagcagagagggagggctggggccgcttgtagtggcacaggtaacggaatgtatagagcaggcactgcgctagcgggagatgctgaggctgaagcccttggagacctagcagatgtacatgcttaaggtgctgaagcaggtgcacgtgcacatcggcatctcgtacaaggccatgtccatcatgaactactttatcagcgagatt

SEQ ID NO: 273839 - DNA, 649 bp, Zea mays
cgccctagtggatactactctgcacctgcacctccaccacatccgtatgagtacaccggagggccctctgcaccggtggactacaacaggcaatatgagcagagagggaggactggggccgctggtagtggcagtgggaacggaaggtatggagcaggcactgggcttgcggtgggtgctgtggctggagccctcgggggtctagcaattgatgaagcggtgaagtacaaggaggataagggtgcagaacgggtggaagagaaggtggtacctgctgggagggatgattacagcgagtatcgtggcgactattgaaccgaagtttgtgtgactgtggaactaagaaagcgctgtgagtcgattcttcttccatgcctatgtgggaataaatccagtgttagtctatggctttccccatgtatgtatatatatttgtgatgttgtgaattattctgatacctataaactactccttcggttcttgtttatttgtcgctgtttagttcaaaaatgaactagcgggcgacaaatattcgagaacggaggtagtacaatgttttatgatgacagatttggtgtgtaacataaaggtatcatggcttgctttgatggtgtacttgtgtcttgatgaatgatgatgggtgttatc

SEQ ID NO: 273840 - DNA, 946 bp, Zea mays
cggacggtgtgcgtgacgcgtgggcggagtagggaggaagaagacaaggtttcaagctacttttagcttaaggcaatatcagatacctgcagagtttctgcaaccattcagtcagacattcacaaatctgaaattccagaagaaatcatggaacaatttgatgaagatcaagaactccagcaagttattaatgggcaagtttgcatgaaagtatataattttgctgctccggcggaaagtaacttgaacagaaaaataattctgcctggttcgttcaaccccttgcacgatggtcaccttagattgctagaagctgcagtaagcatgtgtgatgatgggcttccattctttgagatatcagcaattaatgctgataaacctccactatctattgcagaaattaagaggcgtgttgagcaatttagaaaagcagggaagaatgtgattatatctaaccagccatacttctataagaaagcagaacttttcccaggaagcgcttttataattggtgcagacactgcagcaaggcttgttaaccctaagtactatggaggagattacaacagaatgctggagatacttctcgaatgtaagagcatagggactacttttcttgttggtggtcgaaagattgaaggagatttcaaggtccttgagaacttagacattccagaagagctgagagaaatgttcatttctattccggaggaaaagtttcgcatagatatttcatctactgaaataagaaagagccaagggctctgatgtatcaagtggtcgtattctacagcagatttgggatgattctccacgactatagaaggtacatttggatgctagcagtcaagtctgaattctccaagcttactttttcacatttgtggggttgtattcacgcattctattgcagattatgataggtccattcatgcatccttgcaaa

SEQ ID NO: 273841 - DNA, 569 bp, Zea mays
gaccagccttcagccttctccagttctcctcacctcctcgttttttccccacctcaacgcctggacggaactgaagccagccagcctgcccagccaaggtgaccggagacaagtaaaaatctcgccggtcttctcacagaccacaaacattgcgcttgctgcccagctataagtactcgccggactaggcggccaactcatcccatcgccatttcatccatctcggagcagaggcaacgcaatccggcaaaaaggcgcttctttcttgccctgttcgggacaggacacagacacagagccaggagaaggaaccgccggaggctaagcttcttcttcgtctttcctgggcgcgctcaagtggcgatggcatttgcggtctccgacgagctgctgggcaccttcgtgccgattgcggtgtactggctctactcggggctctacgtcgtcctggacgggctcgggatggacgactacaggctccatcccaagggggaggaggaggccaagaacatcgtttccaggtggacggtcgtcagaggcgtccttgttcagcaggcttttcaaatcgc

SEQ ID NO: 273842 - DNA, 675 bp, Zea mays
accaaaaacaatagtcgatgtcggatgtggcattggtggtagctcaaggtacttggcgaagaaatacggagcgcagtgcactgggatcacgttgagccctgttcaagccgagagaggaaatgctctcgctgcagcgcaggggttgtcggatcaggttactctgcaagttgctgatgctctggagcaaccgtttcctgacgggcagttcgatctggtgtggtccatggagagtggcgagcacatgccggacaagagaaagtttgttagtgagctagcacgcgtggcggctcctggagggacaataatcatcgtgacatggtgccataggaacctggatccatccgaaacctcgctaaagcccgatgaactgagcctcctgaggaggatatgcgacgcgtactacctcccggactggtgctcaccttcagactatgtgaacattgccaagtcactgtctctcgaggatatcaagacagctgactggtcggagaacgtggccccgttttggcccgccgtgataaaatcagcgctaacatggaagggcttcacctctctgctgacgaccggatggaagacgatcagaggcgcgatggtgatgccgctaatgatccaagggctacaagaaagggcctcatcaaattcaacatcatcacctgtcgcaagccttgagccgcg

SEQ ID NO: 273843 - DNA, 409 bp, Zea mays
cgatacaatcctctacagggagtctcatcagccgcgccgctgccttcggccgcgccgccgccggcgccggttccctgcatgccatgtcgaattggatgcctccctcggagatctctcccttcagccggatagtgaagctgaagcccacgctcttggaatccgcgaacgtccttctggccgccctgctccgcgcgcacccgctctccagtgccaacctgcctgacgtccgcgcccgcgctgagctcgacctcgcgcgtgctggcatggagattggccatggtcggcgacccacccgccgccgtggacctccgcctcctcctggcgctcctcgccacgcgcgacggtcgcgcgtacgacgcgttgcggctctacgcggaagcggcccgcgacgcgcctttccgaccccggg

SEQ ID NO: 273844 - DNA, 529 bp, Zea mays
cggacgcatgggcggacgcgtgggcggacgcgtgggcggacgcgtgggggccaaaaggtctgatataccactttacaaaggagacgagctttttaaaaagctgccccaacagttgggttcaaggcctgcaagtgacatcagctaacaacagcttcacacaggttattttgtcaattctaaatttgaggctgtgttgattcatttgttgagctgatttttgtcgaattttgattatacgctgaggacaaacttcggtaaggtgtacaaatttggctcgtggaagaggcttcagaatgcaatggagcggctgacaaagggaactgactactggtggtgatgaaaacggcttgggtcttcgggggctagtaatgacaattgtacagatatgggacacaacgatacatacacttgtattttacggtagagtttgttagcttgtgtttagggaataaaaacataaatagatacagattcttttcgcactgcggtatttttttaatccctgactatatgttaaccgtcttcattt

SEQ ID NO: 273845 - DNA, 434 bp, Zea mays
cacgcgtccagaaatccacataccgtgtatagctagtggtaccattgaagccggcgggggcaaagaacggggggaccctacgtactgcatggccgcgtcgcctgcggccaagggcgctctccttccgtcgtgggctcgcagcagcagcagcggccatggcggcgacttgtggacggtcctggggaaggcgttggctacggccggaggaggaggaggcggcggatgctcccttctgctcccgcgccggtggcagtcgtcgctgccgcagctggaccacgtcgccgacaggtccaacgaggagagcggcggcggcggcggcgagatccactgggacaacctcggcttcggtctcaccccgaccgactacatgtacgtcacgcggtgctcgccggaggaccgcggcgacttcatccgcggcgagctctgccgctacg

SEQ ID NO: 273846 - DNA, 582 bp, Zea mays
gtacgtactgcatggccgcgttgacatctgcgaagggcgctctccttccgtcgtgggctcgcagcagcagcagcggccatggcggcgacttgtggagggtcctggggaaggcgttggctacggtgcgtgcgcgattctcgccgtgtgtgtgtgtgtgtgcctgtgcgcaccgttcacatcacatcccaatcccatgcgttaacctctcgccgtgtggaagctggactgtgcggcccgcttttactcgtttccgtaaccgatcgtttcttcttaattccgccgtggccgccgccgcgtccaggacgatcgatgcctctccccgccgcgatgagatcatccatgctcagaggtcggtgtaacctcttcctccctttcgctgctcgctgttcgcaggccggaggaggatgcggcggcggatgctcacttctgctcacgcgccggtggcagtcgtcgctgccgcagctggaccacgtcgccgacaggtccaacgaggagagcggcggcgatatctactgggacaacctcggcttcgggctcaccccgaacgactacatgtacgtcatgcggtgctcgcaggaggat

SEQ ID NO: 273847 - DNA, 753 bp, Zea mays
cgagaattctaccaatgtgatttcgacattgctggtgtatatgaacctatggaaccggattttgaggtcatcaaagttctgactgagttgctgaatcagctggatataggcacgtatgagataaaattaaatcacagaaagttgctggatggtatgttggagatttgtggtgtgccccctcaaaagttcagaacagtttgctcgagtattgacaaactggacaagcaaacattcgaacaggtgaagaaggaactggttgatgagaaaggtatatcaaatgaaactgcggatgaaattggcaatttagtgaagactaggggccccccgttggaagttttgatggagttgagaaaggagggcagcaagtttatgaataatgtagggtctgttgctgcactgaatgagctggagatattattcaaagctctggataaagcaaatgcaataagcaagataacttttgatttaagtttggccaggggccttgattactacactggtgtcatatatgaagccgttttcaagggtgcagctcaggttggctccatagcggctggtggtcggtacgacaaccttgtgggtatgttcagcgggaagcaaatccccgctgttggtgtgagccttggaattgagagagtctttgcaatcatggagcagcaggagaaagaaagaaatgagaagatccggcctacagagacagaggtgctggtgtcaattctgggaaaggaccttaccctagctgccgagctcgtg

SEQ ID NO: 273848 - DNA, 535 bp, Zea mays
tacccacgcgtctgccaacgcgtccgcggacgcgtgggtccggtgattccacaaaatttcaactgactgttttctgaagcattgcaaaattatgttattactatgaagtccagtgaagaaactacttttgtgatgactactcatgtcacttttgaattgttacacgtggttaggggaggaaacctcttggaggttgtagttctgatgggtggtatggtagggtgatgggctttgttgctggcaactcgtgatggtttttccagccttggtgaacattggcagtggctacagcttgggcaggggctggtggcagcgcaaaggagagtgagagggaactttaaggcaaaaacacttttctggttaatccatatggatacatccaaaagatgttatatatatgatccacccttcttaattcaattcaagctttcgccacaaagctctcttattctctaatactgataactttttggcggccccgaattggaggggtatggagcgttgcagcatgctagccgtaccctctggttgctgc

SEQ ID NO: 273849 - DNA, 461 bp, Zea mays
ggggcatttgccacgagcgccccccctgctttgcctatttcgctctcctccctaggcaacgaaaggccgcgctcccgcagacggtaccagccgccgcgatggggtcctcgtcctcgccaccgccaccaccgccgctgccactgcccatgattgggcgggccgggaacctcaccatcttcatcacgccgccatcccccgctagcacgccccggggcgctgggcgcacgccgccgctcgagtccccgcgctcggatatctccacacccatcccgcagagggcagccccgtcgccctccctttctccctctccgcggaaccacgagagccgggccgtggcgcctgcggtggtgttcaccccgcccccgccgcctgcttctgtgaatgtcgcgctgccgccggtgcaggtgccgccgccgcagtacgagaaggcgtccgcggggggcaagcatgacgtatcggcg

SEQ ID NO: 273850 - DNA, 438 bp, Zea mays
acggacgcgtgggcgagtatgaccctgaagagatggtgtacacactagcagtggcatccttgtgcatccaccacagctcaacctcgaggcctagtatgaaatcggtaggtggatctttcctgctaatcaaagtgcaaatgaggaaattgacccttgagttttttttgttgttgctgcaggtagtctgtttcttgaagggtgaccgggagtcacttgagctggtgagtaggcctaaaatcgtgaagcccctgatgtctgactcgggcgattcagaagattacacgcgctcgagctacctcagcgatctcaaccggcacaagcagctcgcgctggagcagtgaacatcgaattgagtttgaacagattcactgtaattttgtacatcatttacgctgtacccatgcacactgtgatcctcccaccttccacataggtttt

SEQ ID NO: 273851 - DNA, 835 bp, Zea mays
ttgagtcgtaccccgactacacgctcaccttcacgggtcattctctgggcgccggcatcgccgccatgctcaccatggtcgtcgtcctcaacctcgacaagattggcaacatcgacaggacccgcacacgctgctacgccatggcgccggccaggtgcatgtcgctcaacctcgccgtcagatatgctgacgttatcaattcggtcgtccttcaggacgacttcttgccccggacggctactcctcttgaagacattttcaagtcgatcctctgcttgccttgcctcctaggtttgagatgtttgagggatacatgtatacctgaagacgctatgcttaaggatccaaggaggctttatgcaccaggccggatttatcacatagtcgaaagaagaacgtgcaggtgcggaagatatccaccggtagtcaaaacagctgtgccggtggatggtagatttgagcacatagttctttcctgcaatgccacagcggaccatgccattatttggattgagagggaggcccagaaggctttggatctgatgctggaggaggagaacacgctggcagtgccgtcggagcagcggatggagcggaacgaaaccctgcagagggagcatgtggaggagcacagggccgctctgcgccgggccgtcacgctgtcggtgccagacgggcggcgaccgtcgccgtacggtacgtttgacgacgtggagcagcatcgccagcagccggagaggagcgagagcttcccgccggcggggcccaggcagcgcatgagctggaacgacctgatcggcgagtgttcgacaggaccaggacgccagatcgtgct

SEQ ID NO: 273852 - DNA, 480 bp, Zea mays
ttatcgtaactaccgtcctctgtctcggcgtcggcgagcgacagaacagacagaggaggaaggagaaggatatgggaggcgaggcgggaatggggctccgcgtccgcgcctcctccctcctgctgtcactggtcctcgagctcgccgtcgcgctcgtctcagtgtcggcgcagcacaagttcgggatcaactacgggcagatcgcgaacgacctcccggacccggcgcaggtggcgacgctcctgcagtcgatgggcgtgaacaaggtgaagctgtacgacgcggacccccgggtgctgacggcgttcgccaacacgggcgtcggcttcaccatcgccgtgggcaacgaggacctgcaggccatggcggccagcccggacgcggcgcgccgttgggtggcggcgaacgtgcagccctacgtcccggccacgcgcatcacctgcgtcaccgtcggcaacgaggttctctcgggcaacgaca

SEQ ID NO: 273853 - DNA, 436 bp, Zea mays
attggaccatggaggaatttctagggagctccaacaccttctgctagagtacggcgtagagagcatatcggaagttctagtcgaaggtctctctagagtgaagaggtgcaccgatgaagggcgtgctctgatgtcactcgacctccaggtactaattaatgggctgcagcacatcgtggcatcaaatgtgaggccgaagctgcagaccgtggacactttcataaaggcttactatctaccggagaccgagtacgtccactgggcgcggtctcatccagaattcagtacaagtcaggtagtcgggttggttaacctggtggccaccatgaaagggtggagacggaagacgagactagaaaccgtggagaagatcgaggcggggccatagactcggtgtcaggtttttttttgcctgtgttgtttttgcttcagctgc

SEQ ID NO: 273854 - DNA, 594 bp, Zea mays
aagcggctctttggaatacttagtcaatgactggagacagggtcgagactcgccgccgagatctggactcagaatgtatagctccgtaactcaggtgtccatgtgggcagatttacatcgtattccactggcaagggtagatgccgaatcgtagactgacgagtccttggacagtttgtcaacgtaatgaacctttcaagtgggagcaccagaatggatgagaaccaatcctcactattccgcccggtcgctgcctacggcgagatgggttcaccgcctaccatcccgcccaatgccacactccagttccatgttgagctcctttcttgggccagcgtcaaagacatatgcaaggacggtgggatttttaagaagatcatcgttgaaggggagaagtgggagaaccccaaggaccttgatgaagtttttgtcaagtacgaggtaaggctcgaggatggaactgttgtgtccaagtctgatggtgttgagtttgctgtcagagatggttatttctgcccggcactttcaaaggctgtgaagacaatgaagaagggcgaaaaggttctcctcaatgtcaagccacaatatggcttc

SEQ ID NO: 273855 - DNA, 434 bp, Zea mays
cggacgcgtggtgagttttgcacaacaagccgctatgctgggatttggtgcacagcaacaggcattcgctcaacccaatgcaatgcttgccatgatagcggcaatgcagaacccagctgcactagggatgacaccagccatgtttgctgctatgaacccagccttcgccgctgctgctttaggtgcaggcgggcagcaggcacagacagctggtcttacgggctttggagctcagggttttgggacgcaggcatttggagctggaggtgcagctttcccaaatgcagcaggtgttcaagcagcaacagctgcatatcaaggaggtggggctcctcctggttttcaagggccacctggatttcaggttggccaagcaactacccagacaagcactgcagtggcagcagctggttatcaggctggggcagctgggc

SEQ ID NO: 273856 - DNA, 613 bp, Zea mays
gcacccagtacgatctgacgctcatcccacatcagtagtcgaccaagcacaagcagcagagccggccggaatatgtggacgatcaggaaggtggcgacgccgcaggtggccgtcctcctgctgctcctcatcgtcgttgcgcaggaggcggcgccgttggcggaggcgcgcgtgtgccggcgccggagcgcgggcttcaagggggtctgcatgtccgaccacaactgcgcgcaggtgtgcttgcaggagggctacggcggcggcaactgcgacggcatcatgcgccagtgcaagtgcatcagggagtgctagctagctaggctctaggatctagcaagctagctatatcggcctttaattaaattaataaggatcgacgtcgtggccggtcgctaaatatgtactactatacgtctacactacatgcaataatgcaccacatgtacgcgtacgcgcgccgagctgtgtggacgccgcagctagcatgcacggccatcggtcctaatacgtcgtcgtctgtcgttcgagtactcatgagctgcgtcgtcgtcgtcaacccatgcatcccatccgccaaactttgatgatggtcatatgacatctgacaataaaa

SEQ ID NO: 273857 - DNA, 445 bp, Zea mays
cgcacccagtacgatctgacgctcatcccacatcagtagtcgaccaagcacaagcagcagagccggccggaatatgtggacgatcaggaaggtggcgacgccgcaggtggccgtcctcctgctgctcctcatcgtcgttgcgcaggaggcggcgccgttggcggaggcgcgcgtgtgccggcgccggagcgcgggcttcaagggggtctgcatgtccgaccacaactgcgcgcaggtgtgcttgcaggaaggctacggcggcggcaactgcgacggcatcatgcgccagtgcaagtgcatcagggagtgctagctagctagcagctataccggcctttaattaaattaataaggatcgacgtcgcggtcggtcgctaaatatgtactactatacgtctacactacatgcaataatgcaccacatgtacgcgtacgcgcgccgagc

SEQ ID NO: 273858 - DNA, 503 bp, Zea mays
atctgacgctcatcccacatcagtagtcgaccaagcacaagcagcagagccggccggaatatgtggacgatcaggaaggtggcgacgccgcaggtggccgtcctcctgctgctcctcatcgtcgttgcgcgtacgtcactatcactatagctacaccactaacatatatatacacacgcacacatcatcatgcgtactacgcgtgcctgcaatgcatgcagaggaggcggcgccgttggcggaggcgcgcgtgtgccggcgccggagcgcgggcttcaagggggtctgcatgtccgaccacaactgcgcgcaggtgtgcttgcaggagggctacggcggcggcaactgcgacggcatcatgcgccagtgcaagtgcatcagggagtgctagctagctaggctctaggatctagcaagctagctatatcggcctttaattaaattaataaggatcgacgtcgtggccggtcgctaaatatgtactactatacgtctacactaca

SEQ ID NO: 273859 - DNA, 1053 bp, Zea mays
acggacgcgtgggcggacgcgtgggcggacgcgtgggcggacgcgtcgggtccgtggagagcggcaagttctggttcccggctcacgtctacaaccgcgagcatgcgcatgttgggttcatgatgtcatgctatgatgcagcgctcagttacgatttccatacggacacattccgtgcaaggtacccaccacacggtcgacgaaccgtggtgttggaggatggcgtgcaatgggacagggtgagggcaccgcctgttgacacccttgcgcatgacctgcacacctctgactgcctgcatgagctccggcccggcgaccacatcgagattcagtggagaaggaacaaagaattcccatacggctggtggtatggagttgttgggcacttggagtcatgtgatggaagcgaacacttttgtcggtgccatcttagtgataccgtggtgctggagtttaatcagtacacgccgggctcaaggtggaggcaagcgttggtgaaacggaaggagcataaggaggagggcaacgagggcgacgggttctacggcggcataaggaagctccgcggcaacgatgacatctccaagtggaggcagctgtggccaacagacgtcctggagtaagcaggaaccgcatcccttctcacaccgacattgatccatcgctcaaatgacacgcctttctttcatcatcatattgaccaaattcgtcgtctctgtcgcgctgttgtaaacgggttagtagaagaacaaatcccgtagctggacaagggtgtaacacttactctctccgtttcgttttagttgtcgctggatagtgcaaaattgaactatccagctacaactaaaaagaaacggatggagtatttgttaggcgtaccaggcgcagactgcttcctatttgttcgtggggctgtaactgtaagccttgtttgtgacccctaagcagtctgcgtcttgtgcctgctgctgtagcggtagagcagagagagatcaaatgtaaattacatttttttcgctcaaattcccgccaaattgaaaaaaagtattaaaa

SEQ ID NO: 273860 - DNA, 974 bp, Zea mays
aattgaattcttgattgcctatgtagttgtcttttttttcttttttttttaggacaaccaatttgtcgtgaatttgagctaaaaaatgtaatttacatttgatctctctctctgctctaccgctacagcagcaggcacaagacgcagactgcttaggggtcacaaggcttacagttacatccccacgaacaaataggaagcggtctgtgcccggtacgcctgacaaataagtgttacacccttgtccaactacaggcttgttcggttagctctcaatccatgtgaattgaatgagattggatgtgtttgaatcgcaaacaagttaaacttcttcttaattttttccaatctcatccaatccatatgtattagaaataaccgaacaaggatttgttgtcaccctgtgtgttcttctgctaacccgtttacaacagcgcgacagagacgacgaatttggtcaatatgatgaaagaaaggcgtgtcatttgagcgatggatcaatctcggtgtgagaagggatgcggctcctgcttactccaggacgtctgttggccacagctgcctccacttggagatgtcatccttgccgcggagcttccttatgccgccgtagaacccgtcgccctcgttgccctcctccctatgctccttccgcttcaccaacgcttgcctccactctgagcccgtcgtgtactgattaaactccagcaccacggtatcactaagatggcaccgacaaaagtgttcgcttccatcacatgactccaagtgcccaacaactccataccaccagcctgccaaacatgcatggaagtgcatgaatgagaacacactatccacgtatgggaattctttgttccttctccactgaatctcgatgtggtcgccgggccggagctcatgcaggcagtcagaggtgtgcaggtcatgcgcaagggtgtcaacaggcggtgccctcaccctgtcccattgca

SEQ ID NO: 273861 - DNA, 406 bp, Zea mays
cccacgcgtccgggcggagctgcggagcatggccgccgtctgccgctccatgcgcgagcgctgccgcggcgaccacctctgggagcggcacatgacaaacaggtggggccgtgtcctgagccgcgccgccagggacgaatggaggacgcacctggcgtccgccagcgagtcccgcgccgcgggcggcggcggcggcggcaagcgccggaggtggctcgccgcgctgtcctgcgtttgcccggtggtgtcccggatgcggcccatggccgacggtggcaagtcgtccgcccccgtgcgggacgagtccatcatgtcgtggtacctgtccgtggacaccggcaagttctggttcacggctcaggtctacaaccgcgagcatgggcatgttgggttcatgatgtcatgc

SEQ ID NO: 273862 - DNA, 599 bp, Zea mays
atttattaattaacaaagagaagacttcttccttcctcgtcgtctccagcccattccaattcttgattccatcgccccaccatccacaactcccctaatccttccaacctcctcgtcgtccagtccaccacctccacgcgcaatggccagcggctaggcggcaccaaccagatcacaaggattcgtttcatccggcagcgcagctctagagcctccatgggcagctacgcgtacaagtactgcatgtgcttcacgcgcaagttccgatccccggacgcccagccgccgccggacgtccgcgccgcccacctctccttcgcctctgacgcccatgccctccgccgcttcgtcgccggcgtccagggcgagtcccccgccgacgtcgaccgcatcctcgccatgctctccgggggccacagccatggaatcgcccgcctcgtcacaaggtcgccggcggcatccacgcccacgctcgaagacttcttcgccttcctcttctcccccgacctcaacccacccatcgcgcaccaggttcaccaggacatgtcagcgccgttctctctactattcgtgttcaccgggcataattcctacctcac

SEQ ID NO: 273863 - DNA, 660 bp, Zea mays
cggacgcgtggggccgaaacacacgaaccgacgtgaccagatcaaaagcaaggagggaggcagcaactgccaacggcgatgatggggcaggacggcgtcggcggaggggtgatcggggccctgctctacgccgcgctggcggtgctggcgctgcgtctggtgctgtcgtacaagtcggcggcgcacgcggtgcggcgggcgtggcggtgggcggacgagtgggcgcaggcgtaccagtactacgaggtgccgcgcctcgccgtcgacggcgcggagaacccgctgttccggaaggcggcggcgtacgtggcgtcgctgccgtcgctcgaggacgcggacgccgcctgcgtgctgtcgtcggcggccaagagcaacgacttcgcgctgcgcctggggccgggccacgccgcgcgggacgcgttcctcggcgcgcgcctcgcgtggaccagcgccggcgccgaccgcctcgtgctgcgcgtgcgccgccacgaccgcacccgcgtgctgcgcccttacctgcagcacctcgagtccgtcgccgacgagatggaggcgcgccgccgcgagctgcggctctacgccagcaccagcgctagcggagccggtccctcgccggcgccgtggtggacgttcgcgcccttcacccacccgggcacgctc

SEQ ID NO: 273864 - DNA, 1515 bp, Zea mays
  unsure (1)..(1515): unsure at all n locations
atcgttttcgtttacccatcaccaccagtccaggaccgaggacggtccaggtcaaccaggcccgccccgacccgaagatgcagcggtggctcccggcgctcctccgccgcgccgcgcccggcggcggggcggcgcggctcttcgcctcgtcctccctcctcttcgacgacacgcaggagcagttcaaggagagcgtgcgcaagttcgcgcaggagaacatcgcgccgcgcgccgcggccatcgacgcctccaaccacttcccgcgggacgtggacctgtggaggctcatgggggacttcaacctccacggcctcaccgcgccggaggagtacggcggcatgggcctcggctacatgtaccactgcatctccatggaggagatcaccagggcctccggcgccgtcggcctctcctacggcgcgcactccaacctctgcatcaaccagctggtccggcacggcagtcccgagcagaggctcaagtatctgcccaagctcatcagtggggagcatatcggggcactggcaatgagtgaacccaactctggctctgatgttgtcagtatgaagtgcaaagctgagaaagtggacggcggctatgtccttaatgggaataagatgtggtgcaccaatggcccgtctgctcagacgctggttgtttatgcaaaaacagatctagctgcaggatcaaaaggaataactgcattcataatcgagaaagggatgcccgggttcagtactgctcagaagttggacaaacttggcatgagaggaagcgacacatgtgagcttgtttttgagaactgctttgtgccatgcgagaatgtcctcggtgaagaaggcaaaggtgtttatgtcatgatgtcagggcttgatctggaaaggcttgtattagctgcgggccctattggccttatgcaggcatgccttgatgttgtacttccatatgttcgacagagggagcaattcggccgtccaattggtgaatttcagttcatacaggggaaaatggctgatatgtacacctcgttgcagtcgtcaagatcatttgtatactcagttgctagggactgcgataatggcaaagttgatcgcaaggattgtgcaggagtaattctctttgctgctgaaaatgcaacccaagttgcacttcaggcaatccagtgtcttggtggaaatgggtacataaatgagtacccaactggtcgtctcctgagagatgcaaaattgtttgagattggtgccggtactagtgaggtaagaagaatgataattggccgtgagctcttcaaagaggactgaaacttctattttgcaagccagatatcagagcatattgttagctggaggaggtgagggcgatttagatatttagcaaatcacccctgtggttcaatgcttttgtataaccgcagacatacatcaaataaagttcacttgtacttgctgcttgcagtggctctatttttctgtcaataaagttttttatgtctctgacaaaaaaaaannngaattn

SEQ ID NO: 273865 - DNA, 451 bp, Zea mays
ctactgcgtattaggtagcctctcgcattgacaagccagccggtggtttggttcgctttgctttgcttacgtgctgcgctgcgcgctccgaccaggcccgccccgaccggcgatgcagcggtggctcccggcgctcctccgccgcgcggcgcccggcggcggcgcggcgcggctcctcgccacgtcctccctcctcttcgacgacacgcaggagcagttcaaggagagcgtgcgcaagttcgcgcaggaggccatcgcgccgcgcgccgcggccatcgacgcctccaaccacttcccgcgggacgtggacctgtggaggctcatgggggacttcaacctccacggcctcaccgcgcccgaggagtacggcgggatggggctcgggtacatgtaccactgcatcgccatggaggagatcaccagggcatccggcgccgtcggcctcttctac

SEQ ID NO: 273866 - DNA, 535 bp, Zea mays
acggacgcgtgggtatcgaatggtgagattgtgcacttcaaagttgcttttaagccgacaccatctatcggggtgaaacagaacactgtgtcaagggagcgtcagaacgttgagcttctggcaagagggcgccatgacccatgcgtcgcccctcgagctgttcctgtggtggaatccatggccgcgttggtcctcgtggaccagctgatggcgcacgtggctcagtgcgagatgttcgcgctcaatactgcacttcaagaaccagttggctctttctagcagaggcagagcacacctgatgagctcgcgccaaattttatcatttatcatagtaataagtagctcaagcgtggcttggtttgcttgtctcttgcaccgtagttttgttttttttttcccgcaagtgtgatgcgatgaagtgaataaggcacttggtttcctgtgcatttgtacacgtttcatataatgtaatctacttcgaagatgatgcctttttatagatgtggcttgtgaaaaaaaaaaaaaaaaaaaggaa

SEQ ID NO: 273867 - DNA, 603 bp, Zea mays
ctctagagtatctcgtactagcggtgggtcgggctatggttctggcaccagttccaccgcagcctctggccccagcagtggcaactacgccaacgctgagggcaagggcgccggtgggggcatgggcggtggtgccgacggcgcctacggttctggtgccggtggaggcgttggcaagggccagggcgagagtggcgtggcattggcaccgtcgtccggtggctactacaatggcggcgccgctgatgctaccggtggtggttccggcgctggcggtggacatggcggtggcgcagccggagctccaagctacgggactggaggtggccttggcggaggcaagggcgaggccggcagcgacgggtcctggggttcaggttacgcggcgggaatcggtgctggcactggcggcggctgtggcggcggatcgcaaggcggctctggtggtggcggtggctctgggtccggatccggcagcggtggaatccactgagtttccctgcggcatgcagctggacggagcgctcggcgttagtgtcagtccattttggagtcggttcgtgtacctgagttttccttgaggagatgcctgttttcgctttc

SEQ ID NO: 273868 - DNA, 798 bp, Zea mays
ccaacatggaatccattcaagctatccaagtgctccaaaccaatatcagatgccctcaagctacctgagtaactcaaaccaatatgaagtccgtgcaagctaccgaagtacaccacttccgggatatggacagagtacatatgcttcccgcaggaacccaagcccatacaattctgagatgcaccaaggtattcaggctcccatgagtagcaggaacctctaccgagcacctgggtcagccgaagcctatgtggcaccttgctatgcagctggaaatctgattgggaggccacatcaggtgttatcaccatcaacttttccagcacatggtccacaaccagctgctcagtgggtgccaaatcaaggtagttcccgctcatggagttctgacagttacaggccttactatggacaatagtctcatgatgtgcaccggccgtcgaatgctgctttggcaccacatcctagctatgctatcgtcacggttctgcaccaaactacatgaatcaatggcggagaccttggtagaattagctttgatggcagcttgtttattttctatataaataaggccatgtttggtttcaattagtcttaggactaaactttagtcctaggacctaaactttagtccctacttgttgggttctagggactaaatagactcaaatgctcttggaatacactcatgtgggcttttaatcaaaaaaaaaaaacccaaaaaaaaaaaagggagcattccaaaaaaagataatgaaaatgaaagtggtaaaaaaaaaaaaggggggccgcccaaaa

SEQ ID NO: 273869 - DNA, 991 bp, Zea mays
ttgtctctctccctcgctctctctgactcgtcggggcataaacaaacaaaccaaacaaagcatatgcaaaggcaaaaccccacctccaccacacctcgtcgtttgcttttcctcggtgcgggcggtgcggcacaagcccccagaccggttgcctccattactgagctgtgcgtgcgtggtggctgtctgccttgtggcggcgccggtcatggtgatggtggagatggacggtggcgtgggatgaggaggaggaggagggcagacgccggcgccacggcggtggcgcctggcggacgagcggtgtgacctgcgcgccatggagacggactacgtgcggcggtttcaccggcacgagccccgcgaacaccagtgctcctccgccgtcgccaagcacatcaaggcgcccgtccacctcgtctggtctctagtgaggcggtttgatcaaccacagcttttcaagccctttgtgagccggtgtgaaatgaagggcaacattgagattggcagtgtcagggaggttaatgtaaagtctgggctgccagccacaagaagcacggagaggctggaactgttagatgacaatgagcacatactcagcgtcagatttgttggaggtgatcacaggctgcagaactactcgtccatcctcaccgtccaccccgaggtcatcgacggccgaccggggacgctcgtgatcgagtccttcgtggtggacgtccccgacggcaacaccaaggacgagacctgctacttcgtggaggccctgctcaagtgcaacctcaagtcgctcgcggaggtgtccgagcgacaggtcgtcaaggatcaaacggagccccttgaccggtgatggggggagatacatacatacatacacgtcgaacgatatgttcggatcactgcattgcattgcttacgatgtgcagagctattcttcaatggagcccctaggttcctggagaaaaaagctttgagggactgctctactgctact

SEQ ID NO: 273870 - DNA, 814 bp, Zea mays
cccacgcgtccggggtcgtcgtcgtcactctctccctctcgccctcgccatcgccctcgcggtctcgccgcggcataaacaaaccaagcaaagcaaggcaaaggcaaaggcaaaacccctcctcctcgctccgcacctcgtcgtctgcttttcctcggtgcggaacacaagcccctgccgcctccattaccgggctgtgcctgtgcgaggctgcgagcgtggtggctgtgcctggctttgcggcggcggcggcggtgatggttgtggagatggacggaggcgtgggagtagcagcagcaggaggaggaggaggagcgcacacgccggcgccggcgccgccgcggcggtggcgcttggcggacgagcggtgcgacctgcgcgccatggagacggactacgtgcggcggttccaccggcacgagccccgcgaccaccttgtctggtccctggtgaggcggttcgaccagccacagctcttcaagcccttcgtgagccggtgtgagatgaaggggaacatcgagatcggtagcgtcagggaggtcaacgtcaagtccgggctgccggccacaagaagcacggagaggctcgagctgttagacgacgacgagcgcattctcagcgtcaggttcgttggaggcgatcacaggctgcagaactactccttcatcctcaccgtccacccggaggtcatcgacggccggccagggacgctcgtcatcgagtccttcgtcgtcgacgtccccgacggcaacaccaaggacgagacctgctacttcgtggaggcgctgctcaagtgcaacctccggtcactcgc

SEQ ID NO: 273871 - DNA, 356 bp, Zea mays
cacaagcccctgccgcctccattaccgggctgtgcctgtgcgaggctgcgagcgtggtggctgtgtctggctttgcggcggcggcggtgatggtggtggagatggacggaggcgtgggagtagcagcaggaggaggaggaggagcgcagacgccggcgccggcgccgccgcggcggtggcgcttggcggacgagcggtgcgacctgcgcgccatggagacggactacgtgcggcggttccaccggcacgagccccgcgaccaccagtgctcctccgccgtcgccaagcacatcaaggcgcctgtccaccttgtctggtccctggtgaggcggttcgaccagccacagctcttcaag

SEQ ID NO: 273872 - DNA, 477 bp, Zea mays
gtaatttgacaaaggaaaccctgcatttatatcttcaaacatcacacttgttgagagatatattgtggtgcatggacagataatactccagcagtttgcagattttccagatgagactatccgtcggagtgcatttgtcagtggtcttttattgaagatggaacagaggaggcatacaaagttagttatgaagaaaaaaactcaagtgatgaggggagagaatctgaatccaagtgcagcaatgggtccagcatcgaggaaaaaagcaatgcgtgcaacaacaaccaggctcatcaacagaatctggagtgattactatgcacatcatttccctgaagattccaaggagggagatggaaatgaaacaaaagaaattgatgatgaacaagaagaaaatgaagatgaggatgctgaagatgaagggcagattgaagagaacatctcaaagactcctccatcaacacggtcccggaagtt

SEQ ID NO: 273873 - DNA, 711 bp, Zea mays
gcatccacagctgttctatgaggcgatgatgtacaataccctccaaggaggaagtggcattgctaacgtcaagtggtgcggtgtggatggagaagagaatgttctcgtcattgatttgctgggtccgagtttggaggacctgttttgttattgtggccggaaattcacgctgaagactgtcctgatgttggctgaccagatgattacaagaatagagttcatgcattccaaagggtacttacacagagacatcaaacctgacaactttctgatgggtcttggtcggaaagcaaaccaggtatatataattgattttggccttgcaaaaagataccgtgattccactacgaatcgccatattccttacagagaaaataagagcttgactggtacagcgcgctatgcaagttgcaacacccaccttggaatagaacaaagccgcagagatgatttggtatctctaggctatgtgcttttgtattttctccgaggaagccttccttggcagggactaaaagccgcaacaaaggcacagaagtatgacaagatatgtgagaaaaagatatcgactcctatcgaggtcttatgcaaatcctgtccggtccagttttcatcttacttccattattgccattcattggcatttgatcagcgacctgactatgcatttgtgaagcgacttttccgtgacttgtttatcagccaagatta

SEQ ID NO: 273874 - DNA, 437 bp, Zea mays
ctggtagcagcccgcatgtgctagagctagacacaagtcagtctccttcccctctctagtgctcaccggctccttccgtcgccatggacgtcctcttctgctgctgcctgctgcttctcctggcctccgccgcgtccgccggcagcgagcggtgcgtgcggcaggggaaggcggcctactctccctcgctctccccggcccctcacggtagcagcggagcgtgcgggtacggcgccatggccgccgagatcaatgggggcttcctcgccgccggcgggcccaggcagcaccgcgggggcctcggctgtggccgctgtttccagatgagatgccgagacgcaaggctgtgcagcgccgggggagtgcgggtggtgctgaccgacttccacaggagcaaccgtacggacttcctgctcgccggggtcggcgtccgcggg

SEQ ID NO: 273875 - DNA, 592 bp, Zea mays
gcaacttggaaggaccctcatcttccaatgctgctaatgtagtatctcaagtaggaagagagctccccccagatgcgtctttgaaggcaacaaatatagattcaagtttcagcaaatttagccacatggagcgctactggagaactccctacccgtccagaccaattcctagagcccctgaagggacgtcttcatcaactcctgttgctgccagtacagctgttccagcctccgaagctaacctgactgcatatactagcacattcttgagccagcgagctgataccccatcattgcctccgaagggtgatcctcctccatcagaggatgatgatctggaactgactgtcgctccaccatcccaacagaatatgaccaatatgtcctcccagaatgcggtaggcgtgattcaagtcatctaagctaattttttttctctctctagaagttactgtgggtatttacagttcaccgaataagtactaacattctatcagcaaatacatcagtataataagatcatgagtgacaagacacagtagatgttaagcgcgttaatgtggggggtctgttgtgcatctgcatccccttt

SEQ ID NO: 273876 - DNA, 726 bp, Zea mays
ccagggacgcgctcatccttttgcctcccaactgtgctgtgcaggaacctgcggggaaggcggtcgctcgctcgctgagaggatgcctctggggctgacgctgggctcgctggggcgggcgatgcgccggaagcgcctgtccgcgcccgacaacctctcctccaagcgggcgccgcgggattactacaagggcaagaactgcaagcccaccgggttccacacccgcaaaggtggatatgtgattgttgatgaaaagttgccaagatttgtggtccctgacttgactgatttcaagctgaaggcatacgtgtcacaatgcgccagggacctcacagcgtcgacagcatcctctacttcagcagaaagtactgaaagcaagagctgatctgatctttgcttgcggggaggcagcccaactctgaagttatgtttccctagactgcccatgttccgaggattagcatcagcattctagctacaaacatttcagatatctttcttgtaagggcaaacattatggcatacctagattcacttttcctgcttgtaattttgatcttcattttgaagtaataagtacttgagttaaggggaaaaaaaaaaaaaaaaaaaaaaaaaaaaaaaaaagagaaaaaaaaaaaaaaaaaaaaaaaaaaaaaaaaaaaaaaaaaaaaaaaaaaaaaaaaaaaaaaaaaaaggggcggcccttttaaaggttccaagttt

SEQ ID NO: 273877 - DNA, 515 bp, Zea mays
ggagaaaattcacatgctctccactattaatagcccccacatatttgcagtatagcatccacaaattaaactcacgcgcacacacaattaggtcacatacacacttcccggctgcctccctaggtagcagcttctacaatggaggcatccaacaagctcgcagtcttgctcctgtggctggtcatggcagctgccactgccgtgcacccttcctactctgagaattcgcctcaagactacctcactccccaaaacagcgcccgtgccgccgtcggtgttggcccggtgacctggagcacgaagctgcagcagttcgcagagaagtacgccgcacagagggccggcgactgccgtctccagcactcgggcgggccctacggggagaacatcttctgggggtccgccggcttcgattggaaggccgtggacgcagtgcgatcgtgggtagacgagaaacagtggtacaactacgccaccaacagctgcgccgccggcaaggtgtgtggccactacac

SEQ ID NO: 273878 - DNA, 811 bp, Zea mays
  unsure (1)..(811): unsure at all n locations
cggacgcgtggngcggacgcgtgggcggacgcgtgggcaaaagcagaggggaaagtgccgtcagctctgactcttgggcacttggctgacgacccgttctctctttgcaactgcaactgcaacgcaccaagaaactgccggcgatcgatcggggcaaggagataaacatggtgcacgggaagctggaggtcctcctcgtctccgccaagggactcgaggacaccgatttcctcaataacatggaccccttcgtgatccttacctgccgcacccaagagcagaaaagcagcgtcgcaaatggagcaggaagcgagcccgagtggaacgagaccttcgtcttcaccgtctccgacgacaccccgcagctccacctcaagatcatggacagcgacctcaccaacgacgatttcgtcggcgaagcaaccatccccctggaggccgtgtttcaggaaggcagccttcccccggcggttcacccggtcgtcaaggaggagaagtactgcggagaggtcaagctcgcgctcaccttcactccagcagcggaaactcgccaccgccctgatgacaacgaggaggggccgccttacagcagctggagttgattctatctgccatgggatgggatgcatgctgcatcatatccaccaagagaagagaggataattaattaatctactcaagagaagaatcagtgttgctgttatgcgaccctctacctctatctatctatatatatgcttaatttgtcatgaccgactgcccatataaaataccccattcagagttgtttgcacgtaaaatggaaggaaaa

SEQ ID NO: 273879 - DNA, 1913 bp, Zea mays
ctgctcttgggcggacgcgtgggcgtcacgtcgcgtgcgatctgcgacgctgcgccatgtcgatgctggacaccttcttcagcaagggcggcggcggcggcttccgcggcgccaagtgcaagacgctgctgaagctgtcgatcccgcggataaagctgctgcggaaccggcgggagctgcagctgcgccagatgcgccgggacatcgccaagctcctagaggccggccaggaggccactgcccggatcagggtggagcacatcatccgggaggagaacatgatggccgcgcaggagatcctcgagctcttctgcgagctcatcgcggtgcgcctgcccatcatcgaggcccaaagggagtgtcctattgatctcaaagaagcaatatcaagtatctgtttcgctgctccaagatgtgcagatctacctgaactgatgcaagttcaaatgatgtttgcaactaaatatgggaaggaatttgtcgctgcagcttcagagttgatgcctgattgcggggtcaatcgtcagataattgaactactttctattcgtcctcctcctgtccatgcaaagttgaaactgctgaaggagatagctgaggaacatgaagttgactgggatccatcagagacagagatagaatttctcaaacctcatgaagatctattgaatggcccgacctacttcaacggctccacactacctcttcccaaggagaaacacgaggaaacagtagcggcaagtgctgccgagcggcctgacaaagactgcgagtcagataccggtcttgactcactggatttcctgaagtcccaaaagcagcaatacgtccaccttctgacgcaccattgaccccagatattggcccccatgctccgggctctcagtcacttcctcatgagttctcagatcctggtaacttggaggagaatccaacagctggtggtgcttttaatgttattcagatgaaaagcttggagcatcttgtttatgcaccatctgatcagtcaaacataccggatttgccaaatgaaaagaagcagtttattccttttgcatctccaccgcccgttctttctccttcggtgggaaaagccgagacagttccctcaccttctctgtctcctccagtgaagccgacagagccagaaccagaaatcctcacaaagaaaattgatgaagtgaccacacctccagtacttccctcagattatattttcacaaaacagccagaacaagtgcggacaatctctccttctgagagtggggcaaatattgacttggacgacgttttatctgctgcgcagacagctgctgaatcagctgagcgagctgcatcagcagcccgtgctgctgcaaaccttgcacaactgcgcatttcagacctgaagaagaattccaaggtttatagcaattacggtgatagcgtccaaaaggaaagccatcatcagactgaggcgacacagaaaccggtatttgatcaccaggactccttcaccaatgatacacaggactatgtgtcatcccatgtgccgcagaggtcgtcatctttggaggacgatccatatttctcgtatcccaacttgttctcagcgccaaagccctgaaggcggaaactagtggtctgcaagtagttgttcagaatagtctgaaacatgagatatcactttttcagctctgtccggtcctcttatgtttggtcttttctgatgcctccgaaaattctgtgtatgttgagttggtacatagcggacaaaagggagactatgaaacctctgtctagttttgtctctgtaaattgtacatgtgcggtgtttgtatcagttgtctgaaacatttctgcagtctactggtaataacagaaattgaatctcaccatcaaaaaaaaaataaaaaaaaaaaaaaaaatataaa

SEQ ID NO: 273880 - DNA, 913 bp, Zea mays
attgaccccagatatttgcccacatgttcagggctctcagtcacttcctcatgagttctcagatcctggtaacttggaggagaatccaacagctggtggtgcttttaatgttattcagatgaaaagcttggagcatcttgtttatgcaccatctgctcagtcaaacataccagatttgccagatgaaaagaagcaatttattccttttgcatctccaccgccagttgttgctactccattggaaaaaactgagacagttccctcaccttcaatgtctcctccagtgaagccaacagagccaaaaatctccacaaagcgggttgatgaattggccacacctccagtacctcccactgattatacgttcacaaaacaaccagaacaagctcggccaatctcttccgagagtgaggcacgtatcgacttggacgatgtactatctgctgctcagacagctgctgaatcagcggagcgagctgcgtccgcagcccgcgccgctgcgaaccttgtgcagctacgcattgcagacctaaagaagaattcaagggtctataacaagtacaccgacagtgctcaaaaggaaagccctcatcaggccgagggtacacagaaaccagtatttgatcaccaggactccttcaccaacgagacacaggactatgtgccgtctcatgtgccgcagaggtcgccgtctctggaggacgatccgtatttctcctaccccaacttgttctcggcgccaaaaccttgaagggctggttcggttctaccccaatccatatggattgagggggattgaggtgggtttcaatccccagtaagtcaaaatccccttcaatccgtatcaatcccctccaatccatatggattgcaaataaccgaacaagcccgagagcggaaactagtggcctgt

SEQ ID NO: 273881 - DNA, 609 bp, Zea mays
  unsure (1)..(609): unsure at all n locations
tcggacctaaagaagaattcaagggtctataacaagtacaccgacagtgctcaaaaggaaagccctcgtcaggccgagggtacacagaaaccagtatttgatcaccaggactccttcaccaacgagacacaggactatgtgccgtctcatgtgccgcagaggtcgccgtctctggaggacgatccgtatttctcctaccccaacttgttctcggcgccaaaaccttgaaggcggaaactagtggcctgtaactgctagtagtagtcctattatgtcttggtcttcgctgttgcctcggaatttctgtgtgttgctgagtttggtacataacggtacaaaaggagactactgggttattacttggctacgaaacctgtctagtttgagtctctgtaaactgtacatgtacggtgtctgtatcagttttctgaaacatttctgcagttctacccgtaagtaatgccagatcatctagtttggttgggctgggcccaaaacaacatcttgtaatttggaatggccttggaataaaaaaaggccctggagcccccaaaaaaaccccaaaaaaaaaaaaaaaaaaaaaagggtatntatcaannnggnaaaaaa

SEQ ID NO: 273882 - DNA, 696 bp, Zea mays
ctttgggttgctcaggcgctgttgcgcaagggggctgtgaagaccgtgagtggacgaattcttatattcaccaatgaagatgatccttttggtactattacaggagcagtgaaaactgatatgattaggacaacacttcaacgtgcaaaggatgcacaagatcttggcctgtctattgaacttcttccactgagcccgcctgatgaccagttcaacatgtccctgttttatgcagatttgattggtctggatggagatgagatgaccgaatatttgccatctgctggtgataagctagaggatatgactaatcaactgagaaaacggataatgaagaagcgcagagtcaaaactctttcatttgcgattaccaatgatgtgtgcatagaagtcaatacatatgcgctggtccgtcctactactacagggacaatcacatggcttgattcactaagtaacctcccattaaaggttgagaggtctttcatatgcaatgatactggggctctacttcaggatgcacagacacgtttccagatgtacaatgacacaattgtcaaattttctgtacgtgaactctctgaggttaaaagggttgcaagccatcatcttcgccttataggtttcaagccattggattgcttgaaagattaccataacttaagaccatcgacatttatttatccgagtgatgag

SEQ ID NO: 273883 - DNA, 936 bp, Zea mays
tcgtttacgtgcgcacgcgccccgcccgacgcccgccacggcgccaccatgtcgcaggctacggaggtcgtcggaaacccgtacgccgccgagctcgctgcagccaagaaggccgtcgccctagcggcccgcctctgccagagagtgcagcggagcattttgcactctgacattcaatcgaaggcagacaagactcctgttacagttgcggattatggatcacaggtactggtatgtctggtcctgaagaaggaattgccttctcactctttctcaatcatagctgaagaggattcaaaagacttgagagaagatggtgcccaagaaattatagaacacattaccaccctcattaatgaaaccatcgtaaatgatggttcatacaacatgtcgttatctaaggaagatgtgctttctgcaattgatggtggtaaatctgagggaggtccatctgggcgacattggatattagacccaatagatggcactaaaggtttcataaggggagatcagtatgcagttgcacttggactacttgatgagggcaaagttgttctgggtgtgttgggatgtccaaatcttccattaaaatcaacaaacaagaacaatagcagctcttttggggatcgaataggttccctcttttttgctacaattggttgtggagcgcaagttgaggccttagaaggatctgagccacaaaagattagtgtttgctccaccaataatccagttgacgcctcattctttgaatcctttgaagcatcacactccaagcgtgatttaactagctccattgcagagaaacttggtgtccgagctcctcctgttagaatggatagccaagcaaaatatggtgccctagcacgtggtgatggtgccatttttctgcgcatcccgcacaaaagttacatagaaacagtttgggatcatgca

SEQ ID NO: 273884 - DNA, 889 bp, Zea mays
aagccgcacggcttccggaaggtcgatccggaccggtgggagttcgcgcacgtgtccttccttcgcggccagacgcatctcctgggccagatcgtccgccggagcagcggcggcaagcgcaaggacgacggcaacggcgccggcgccggctccgccgacgacgaggacgcggtggccatggaggtggtccggctgaggcgggagcagcgggccatcgaggagcaggtggccgcgatgtggcgccgcgtgcaggagacggagcgccggcccaagcagatgctcgcgttcctcgtcaaggtcgcgggcgacccgcaggtgctgcgccgcctcgtctccggcgccgggggcgacgccgtgttcgccgccgcggagccggaggacggcgcgagcatcaagagggcgcggctgcttctcgatgccggaagcggcggcgacggcgccgtcgacttcagcgggctctatagcacaaccgccggaagcgaagacgacggcgtcgggttcggcagcgattacctgcagccgccaccgccgtacgtgttccccgtcaacagcggcggctactgactgatggcggtctggtagtccagcatctatccgagcgatgtggcgtgcttcgtcgtcgctagttgcccctcccgagtgacgtgttggactgaagtggcaacggcgccgacggacggtgagcaaccaacccaagataattagctaggaggtggtacaaagtgtaaagcctttggtttaggcaggtctgtggtgatctttaatttgcttgttgcaatgttttccttccctaccctgtcaaagtgaatgctacggatcagcggcggcaaaagccgttagctgcagctagtttgccgctgctcttcatacagctgcacgccgtaaaaca

SEQ ID NO: 273885 - DNA, 433 bp, Zea mays
cacaccattcgctctctcgctccactctctctctcgccgagtgagggtaaggagggagagagaggaggcagggaagtggggagagcggcgaggacatggcggcgaaagcgagcagcgcagccgcctccggcgcggcctacgaggagcagcgcaagaagcgggtcctcgagaacctcaagcatctggaggatttgggtatagcggagatgtctaagagcctgctccaggcggcgcgcctgcagaaactgaacaaggccggcgtgcgcgcgggccccaaggagaggaagaagttcgacgccaccgaggtgcggcgttcttcgagggcgaagaccacggtttcctacaaggacgatttcggtgaactagatgcttttctgcgtggcacaaggcgcagtggtggtaggaatacagagcatggaagagaatgcactgg

SEQ ID NO: 273886 - DNA, 450 bp, Zea mays
tcgcgggtcgacacaagcctctacaatacatcataccaagcaacaattgagcgatcgatccttcgcctctctctcactctctctcagcaatctatccgcaacaactaagcattcgattctccgacaacaacaagcagggcaatggcgtctgcggacgtgcacatggctggcggtgcggagacggagaccttcgcattccaggccgagatcaaccagctgctctccctcatcatcaataccttctactcgaacaaggagatcttcctcagagagctcatctccaacgcatcggatgcgcttgacaagatccgcttcgagagcctgacggacaagtcgaagctggacgcgcagccggagctcttcatccggctcgtcccggacaaggccagcaagacgctgtccatcatcgactccggcgtgggcatgaccaagtccgaccttgtcaacaac

SEQ ID NO: 273887 - DNA, 417 bp, Zea mays
gaacggtcaaaggcagactactattgcttacttaataagtagtagagattgttgaagagaggctctcccttactacttttcttggttcatccatggtataggatgtgactgtcagcctgggccctaacggcgagctccggtacccaccatacccgccggggaaccagggcgccgatggctacgccggcatcggcgagttacagtgctacgacaagtacatgctggcccggctgaagcggcacgccgagttgtcggggcagccactgtggggcctgtcaggcccacacgacgggccgcggtacgacgagtcgccggagacgtccgccttctttacggagccggggggctcgtggaactcggcctacggcgagttcttcctgtcctggtactccggggagctgctgggcgcacggcgac

SEQ ID NO: 273888 - DNA, 264 bp, Zea mays
acgccattgcagcaagtctgtatgatctgtgacagctgtcgatagaattatcacacacattcgttatgcgttgaactacaaccatggcgaggccgtccgaccaaagcgtccacgtcctcctgctcccattccccacgcagggccacatcaacccgctgctccagttcggcaagcggctcgccggccgcgctggcgtccggttcaagctccccgccaaccgcctcctccgtaactccacgaaacccaaccccaactccgttcaag

SEQ ID NO: 273889 - DNA, 545 bp, Zea mays
ctcgcgggccgacccacgcctctacccacacgtctggaacggctccgtcgccggcggcggagccggcaacggggcgggcgccgcgtcgaacggaggaggtgttgagaggaggctgaggtcctcggctgcgcccgcgtcgtgggcagcccagcttcccctggaggtgggcacacgcgtgatgtgccggtggcgcgaccagaagctccaccctgtcaaggtcatcgagcgccgcaagggctccgcttcctcttcccccgctgactacgagtactacgtccattacaccgagttcaatagaagacttgacgagtgggttaagcttgagcagcttgatcttgctactgtcgagaccgatgttgatgagaaagtcgaagataaggcaacaagcttaaagatgacacggcaccagaagcgtaaaattgatgaaacacatgtggagcaaggacacgaggagcttgatgcagccagcttgcgggaacatgaagaattcacaaaagtgaaaaatattgcaaagattgaacttgggagatatgagatagatacat

SEQ ID NO: 273890 - DNA, 455 bp, Zea mays
gaatgcggagggaaaagcgagggaggcagccttctattttctgtcaaaacaagggcgatactcctcctactccagcgcacacgcagatcagcgtcgaaatccgtcgcatcgtgcccgcctcgctgtctccgctgggcgctggtggtcatggcccgcagggcgctggagctcgcggcggttctgctcgcgctggcggcgctggcggccgtggcggccggaggggacatcgtgcaccaggacgacgaggcgcccaagatccccggctgctccaacgacttcgtgctggtaaaagtgcagacctggatcaacaaaaaagataaagatgagtttgttggtgttggtgctcgatttggccccaagatagagtcaaaggaaaagcatgccaactggacaaacttgctgttagcagacccttctgattgctgcacccctccaagagagaaggttgctggaga

SEQ ID NO: 273891 - DNA, 452 bp, Zea mays
actagttctagatcgcgagcggcgccctttttttttttttttatcgagcataagccgcgcccgcgcatacatataaaaccctagctcgtaccgggcagcacgctgttatttggggatgtaaagttcttgagagtagacggaggagtctaatcaagacacatcaaggtgacacagcactgcgcaggtgtacgcatgaaccgcatgcaccagtagtcttgtagctaggcgaaggagaacttaaagagcatgtcatggctatacaccttgcccggcctcacgatctgcgacgggaagctcgggtggttgacggcatcggggaacccctgcgtctcgaggcacagcgcggcgtaccgccggtacacgctaccgcccttgcccctgacgccagcgagcccgttgctggtgtagaactgcaccccgggctggtccgcccacagctccatggcccgccc

SEQ ID NO: 273892 - DNA, 879 bp, Zea mays
gttgttttctccctcccccatcgttatatacccctacggagcctcttctcatcagcctgctccttatcgccggctgccgtgccgccgcgtcctgctccccgctcccgcgttcatcgcccgaagcaccgccgggcgccgcggcctcgcgccagcgccaccgcccagaaaccatctttcccggccgcgccgctgagcccatagcccatatcggggcctcgttcggccgaagcgcgctgtgtcaaatttctgcgaccttgccgccgccgtcatcattctggagctcggattgatttcttcctttgctgtgctgtcattaccgaactaaaaacagtttctgagagcaagcgtcacaattgccatggaagctgggagaatggatcagccttgcatggctgctatcaatagccagcctttcgtggctgatactgagccagtgaagaaagccagtggggacatgcctgcgacaacaggaagcggatgcttcgaatgcaacatctgccttgattttgcatcagaaccagtggttactttctgtggtcatctctactgctggccttgtatctacgagtggctgcgccctggggtggagtcagctgccagcgacaacagcagttcggcaaggcggcaatgtcctgtatgcaaggcaacactctcaacggacacccttgtgccactatacggccgtggaggcaactcaaagaagtcacttgatggcatggccatcccgcgccgccccatggtacaccgggagactgttgaggagcaacagaatgcacagagcaatgtcaatgaccagcactaccaccagagcatggaagacaactctcagcgccagccattgctgcaagcgcaccaccatcccattcccactgggtttga

SEQ ID NO: 273893 - DNA, 1079 bp, Zea mays
  unsure (1)..(1079): unsure at all n locations
cctcttcccaccttccctcctcccttctccaatcatccctttctggctttctcctcccccctgagaccccgagtcctgccggattccgagatcccggaggcagcttcccacgggctcctctcactacggtagctggatcaaaccatcgtgctctcgtctcgacagaaaccccggccgaaaacccagccggacccagccctgttcgccgcgcgcgcggtgcccaggccgtgccagatctgcgagatccgcgccgacaccgctacgactatcaccaggtggatgctctcgtgatctctcggaggccgcggggactgagcagcgtctcggcggcggcgtggcctgcatagctgttggcttgccgagatgcaacggaacggggtggtggaatgcagcgtgtgccgctcccgggtgggtgggtgccgagcccccggaggcgtgttcaaggccgtacgacaggcaccgcaccaggatgtcgtccaagttccgggcgctcaacgtcttcctcgtcgtcggcgactgcatccttgttggtctccagcccatcctagtgttcatgtcaaaggttgatgggaagttccagttcagtcccatcagtgttaactttctgaccgaggttatgaaagtcatctttgctattgtgatgcttataattcagtctagaaagcaaaaggttggagaaaagccacttttggcacgttcaaccttcatacaggcagcccgtaataatgtacttctagctgttcctgctcttctatatgcaatcaacaattacctaaaattcatcatgcagttgtacttcaatcctgcgactgtgaaaatgttaagtaacctaaaggtactggttatagctgttcttctgaaatttataatgagaaggagattctcagttattcagtgggaagctcttgctctattgcttattggaatcagcatcaatcaacttcgaactgtacctgcgggcaatacagcatttggtcttcctgtcactgctatagcatacatatatacattgatttttgtaactgttccttcaatggcttctgtctacaatgaatatgccttganaagtcaatatgaca

SEQ ID NO: 273894 - DNA, 1627 bp, Zea mays
  unsure (1)..(1627): unsure at all n locations
tccggaatttctccggggtcgactctatcnngcgtcccgctccactgctgtccggcnncaccatcatttcgtggtcgagtcgtccgtttcactcctccccaaatgtcccctcaaatncgatcctcccccgcaccccgaatcccccgcgccccccgcgtctgaatcccggcgccccccggccccgatcccgtnnccgatccgcgccgaatcgccgttggctcgggggcggaaccccctagcccgatcgtccacactgttatccctcgcgatggggcgcgccggtcgtggtctgcccgcggcaggccctttcttccgcgctcccccgctcgctggacgccgccgcgggcgcggcgcgctccccgccgctgcaccgcgtcgctcctcctcatcctccttcgatcggcccactcccgagacagggcgtccacgtcggtcaccaagacggtgaacggctcccaccacttcaaaatcgcgggctactctctctccaagggaatcggggtggggaagttcatcgcttccgagtccttcaacgtggggggattcgactgggcgatctacttctaccccgacgggaagagcgccgaggacggcgctgcctacgtctcgctcttcatagccctcgccagcgagggcaccgatgtgcgcgcgctgttcgagctcacgctcgtcgaccagagcggcaagggtcaggataaggtgcatacccacttcgggaggtcgctcgagagcggcccatacaccctcaagtaccgcggcagcatgtggggctacaagcgtttcttcaaacgaactgccctagaaacatcagactatcttaaagatgattgccttttagtgaactgcactgttggcgttgttcaatcacatactgaaggaccaaagatatacacaattccagtaccgcggtccaacatggctctacatattggtcagctattgacaagtggaaagaggacagacattgcattcgaagttgatggagagatgtttcctgcccacaaggtgattctttcagcccggtctcctgtttttagggcacaactttttggcccaatgaaggataaggacatgaagtgtataaagattgaagacatggaggctccagtattcaaggccttgctccatttcatgtactgggatgagttgccggatcttgaagagcttactggtgtaaatacaacttgggtatccaccttgatggctcaacatttacttgctgctgcagaccgttatgcattggagagattaaagttgctctgtgaacttaagctgtgtgaagatgttgcaataaacacagtggcaaatactttggcactggctgaacagcaccactgctatcagctaaaaactgtttgcttaaaatttgtggctctgcctgagaatttgaaagctgtcatgcaaaccgatgggtttgattatttgcagcaaagctgcccatccctcctgaccgagcttcttgaatatgtggccaagataggagagcactccgtgagcccctgcctgtattcaactgaagtccttgatggtggagatgccaatggacgacgcgtgaaaccaaggatctaacggctgcccagatgagcctagaagagggagttccttgtttttttttttgttgttgtaa

SEQ ID NO: 273895 - DNA, 1376 bp, Zea mays
gcgccatctcattcttcttcctccatcttgtctctacttgccccgcgccggggagccgcgagcgtcgcgccactcccatcgcctgcccacaactccggcatggagccgtcggcgtgggccgtcgccttcgccgcactctgcatcgtcgcgctcgcgccgccggcctcagggttctacctccccggcgtcgcgcccaatgacttcgagaagaaagatccacttcctgtgaaagtcaacaagctgacctcaatcaagacacaacttccctactcctactattctctcccattctgcaagccggataccatagttgacagtgcagaaaatctcggtgaagttcttcgtggagatcgcattgaaaactctccctatacgtttgaaatgagggagcctcagatgtgtcaagtagtctgcaagatatctgttggggagaaagaagcaaagcttctcaaggagaagattgaagatgaataccgtgttaacatgattcttgacaacctacctttagtcgttcctattcaaagagtggatcaagaaggtgcatatttctatcaacatggattccatgttggggccaaaggaaaatattcagggagcaaagatgaaaaatacttcatccacaaccatctatcttttacggtgaaatatcacagggatgagcaaagggatgtttccaggattgtggcctttgaagtgaaaccatacagcgttaagcatgaatatgaagggcaatggaatgataagaagacccgcctgacaacgtgtgaccctcatgctcaacgtatcattacttcgtccgagtctcctcaggaggtcgaagttggcaaggatatcatatttacttacgatgtggatttcaaggagagcgacatcaagtgggcatctcggtgggacagctatctattgatgacagatgatcagatccactggttctctattgtgaattctctcatgattgttctcttcctttctggaatggttgcaatgatcatgcttcgtaccctttaccgggatatctctaagtataaccaacttgagactcaggaagaggcccaggaggagactggatggaagcttgttcacggcgatgttttcaggcctccgtcaaactcagactggctctgtgtttatgttggcaccggtgtgcaattctttggcatgctgcttgtcactatggtatttgcggttcttggcttcctttctccatcgaacaggggtggactgatgacagccatgctcctgctctgggtgttcatggggttgcttgctggctactcttcttcacgtctttacaaactgttcaagggctcagaatggaagaacatcgccttgaggacagccttcactttccctggcagtgtgtttgctattttttt

SEQ ID NO: 273896 - DNA, 353 bp, Zea mays
atacatagcagacgagcataacatggtcaccgaggacggcctccccggaagggacaatctcatcgtggtttccattgacactctcagcatggacgttcctctaccttctcctcctcggacaatattatctgaacgtctgcgacgtcccggactagatcatccctgacgacagtcgcattctcctgaaggcctggtcgctccgccaccagagctgctactgggagctccaaaacgagttcgtcccggagaggttcctcaccgggagatatagccggcggcatcgagctcaagactaagcagttccaattccggtctttcagatcttccctgatgatcttcctcggcgtcaaatc

SEQ ID NO: 273897 - DNA, 520 bp, Zea mays
tcgcgggtcgatacaagcctctaaaataagtctgactaggacgagactcagatggaaggcctcgcagacaactgcactcgggttatggtctggaatttggacttggaacctccacagctgaattaccctactagctggcagctgcagaagaacctagacatcgtcgtgccaataacataaaccgcgatgctgctgctgctctttttgttcgcgcctcctagtgagtgtggtggaatgatgacgacaatgcccatgccttcctgaacttggtagcgtccaggatcacgcgaagctgctctgccgagacctggttcgaataatgtggtactagtaacaatagttggaaagcgaagaagcctgcctgacaaaaggaaaaattctttctccccccgttgcgctgcattaccaatgatcctcaacatagataggcttgtatatttcttttccttccatttttcgattattactgttcgttacatataccatgcatacatacatacatacatatacactttcattc

SEQ ID NO: 273898 - DNA, 676 bp, Zea mays
aggacgcgtgggcggacgcgtgggcgcaggcagcacccagcaccacaccacagaccaaaacgaccaccgcacccgcagcagcgaagtgtccaagcggcggcatggcggcgagcaaggcgcgtgtcgcgctgttcctggcggcgctcgcggcggcgagcctgctggcgctggccccggccggcgccgcgacgacgtgcgcgccgacgcagctgaccccgtgcgcgcccgccatcgtcgggaacgcggcgcccaccgcggcgtgctgcgccaggctcaaggcgcacccggcgacctgcttctgccagtacaagaggaaccccagcatgcagcgctacgtcaactcccccaacggcaagaaggtcttcgccgcctgtaaggtgtccctgcccaggtgctgatgctgagtgagtcgtctgccgccccatcaggtcgatgtcgatccatcctgctcgatcgatcgatcatgctactacttgagcacctttgggcagagtttagtattgctcgagaataataaacggagacgtaccactcccagtacttggtacagtgtgagttcgatctgctctctgcagaaagacttggtatatatgccgtcatgtatgtatacgtgtcacgtgtactactatgaactatgatgttacaaagacgaatacaggtgttgccacttgtgact

SEQ ID NO: 273899 - DNA, 716 bp, Zea mays
tactctagatggactcactcggcgtcaccatcgaccccgcggaagcggtggcgtgcgcgtatccactcctcaaccaagtggagcatcccctcacgctagaccggagctggggggcgacgacgagccagccgccgccggtttgaccagacctgtggtgatggactgataaggtatgcctgtaggagggagagagctttcggtttagaaaataagagggtgccgcgggctggactgagagagcggaaggaaggaaggagccggcgatgggcgggtggaactggctcttctgcggccgatccaaagccggaggcggcgagctccggcctcccgagcccttccagctgccggcgcccttgcccgagtggccgcaaggaggggattttgctaagggcacaatatgcataggagaggttgatgttacaagtattaccaaattccggagtatatggacctgctcagatgctacattttatgagccagaaggaattcctgatggtttccactgccttgggcactacgcccaacagaatgaccgccccttacagggatttcttctggtggcaagggaagtggctagccaccaagttattgataccaagcccgcccttgagaaaccatcagattactcccttgtttggaccagtgctgacgcaaatgaagatgacaatagcgaatgtggttgcatctggctgccatgtccaccccatgggtataaa

SEQ ID NO: 273900 - DNA, 371 bp, Zea mays
tacaagcctctaaactgacgtcgtgctatccttttgctcggaacgcacacacagcccggtccccgatctccgatcccctcgtcgatccaagatgcagatcttcgtcaagaccctcactggaaagactatcaccctcgacgtggagtcttctgacaccattgacaacgtcaaggccaagatccaggacaaggagggcattcccccggaccagcagcggctcatcttcgctggcaagcagctcgaggacgggcgcacacttgccgactacaacatccagaaggagagcaccctccaccttgttctccgcctcaggggaggcatgcagatcttcgtcaagaccctcactggaaagacgatcaccctcgaggtgg

SEQ ID NO: 273901 - DNA, 537 bp, Zea mays
tttatcccacggtgcgtcgaggttgccctgcccgccgccgcgccgcggatactgccagcggggtggcgcagccggccggtgttccgtgagggacagaccgtcgacacttggcgttgcattgtggcattcgactccgtcgccgccgtcgctccgtcctccccgccgccgcccgtgctctcccccttcgtgaacccacagctgcagtatctgtctaatctgtacaatgacctgctgatggtgtttcggtttcgagaagagaaaacggtcccacaactcgttaattcaaagcaacccatccgttgtggtgaacaggggaaaacttctgatttgggtgatgcatcggagtccgattcggatggggattgtcaatctggcaaagaacttgcaccaccagttcagaagcatacaagagccaaccggaagcatatagatagcattactttaggtgatatagctcagtacttccatcttccaatccgggatgcatcaaagacactcaagattggggtcagcatattgaagaggaaatgccgacag

SEQ ID NO: 273902 - DNA, 480 bp, Zea mays
ttacacaggattagggtttggttttgccttatgcctatatgcaatatgtacactacgatgctttatcctttttgcctacccgcgcccgcgtgggttggagtgtcaacaaacgggccaaataataagtattaaataactctattttcctagataactagactgaaattttggtcagacaacatgcacatttgttaaacatgtattattaatcggagttaatgcagatgcttatttgtgctattggctattgactggctctttctatgcaagcaatgcagttgtagtttagatgaatatgcttcttagtttggctggtttacatgaaacaattcatattgctgcttattttaaatatatttgtgtgttgacctacttttgcttgtgatttcgggtgggttggagtgtccatttcatctgctaggttgtttgaagatttaggcggtggtgaccaatctgaacggcgcacactcgacatggcca

SEQ ID NO: 273903 - DNA, 355 bp, Zea mays
acctgcgtcctgcctcggtgcctcccagagtcccagacccaggcggccaggctcccagcctcccaggtccccggtggcggcagcaggctcccagtcccagatggccaccagttctaaaccctagccgccaaaccaacacgagcagctgtcgccctccaggccggtcgagcggggcgccgggcaccgtcgcgccgagctgagcggagagtggagcacctgcaccgagcggccagcggtgcgccgtgcgccgagcacctgagtggccagcggggcgccgagcactcgtctagtcgtcttctctgatcctgggcgtgcctgccaatgagcaagaagaggaagcatctggatccagcga

SEQ ID NO: 273904 - DNA, 639 bp, Zea mays
ccgggccgacacacgagtctaaatgtacttgtagtattaggactaggccaaaattagttgtcatatcccgctacatactgttgggtactctttttttttaaaataaaattgcattgatgtctagtaacaactccttttgtcaaggatgtaggtctgtttggctggctgataacaacgttgggaactcatacaaagagaaaacgttccatttaattatatactgatataaactgtggttatgaattaatagctgatttaatttgagacaatacagatggaaatggttgcatattaatcttctcttttgtttttagtatactgttttgttccgagctggagcagtgcattctgtttcccccgctattgaagccactcctgttgattcaactgaaagctccttcgatacatatcgttcgcccccaagacctctgccctatgatgatccacgattttcccctcctgctcgtgactggttaaggagtgagaacccaagccattccccagaggaatcggaaccacttagagcaaatgaggatgatgaagaaatggaaacaccaagtataatacagaaggcaagtaaaacaaactacaacacaaaaatgaaaatctgcagctctacttatggtgataaggtgccac

SEQ ID NO: 273905 - DNA, 372 bp, Zea mays
gttctggttcaaggaacgcctttctgaggtctcttggattatgggagcttactgttcatgtctgcaatctgattattcggaccatcatggaaaccaaacttcttcagcgtttaggaactgcatgtgcctcagatgctttacccagcagctgatcaatgcgtatactgttttgttccgagctggagcagtgcattctgtttcccccgctattgaagccactcctgttgattcaactgaaagctccttcgatacatatcgttcgccgccaagacctctgccctatgatgatccacgattttcccctcctgctcgtgactggttaaggagtgagaacccaagccattccccagaggaatcggaaccacttagagc

SEQ ID NO: 273906 - DNA, 973 bp, Zea mays
cagaggcccagcccacggtgtcagtgtcacctctgctatttcttcacccgtccgttcacttgcgttcatccggcctacgttaaaatctctccatcccggcgacgactggcgacagccgctgccggcctactccaggtccccaggtctacgtcggacccttcgccgcggcgaacaccaccagagatctgtcactgattttgcagtcctcttgtcagatggcgagcacggggcggtcgatgctgctgtcactgctcctcttcgcagtgacgctgtcgctgctggagatgtacagggccaagttcgcctcgtcggagctcatgaccattgccggtggattcgtctgctccctcctattcctgctactcctcacctttattggaaactatcaagaagctagtggagatagaactgggtggggtgcagttgttgtagcacaacttgtagctcttattgtagccggcactgtccaccgtgtctgtatcacaacatgcttcctgttttccgctggactcctttacgaggttgacaagctctctggcatgatccttgcgaggagtgagtctaaggtgaggcggcactaagcacagaagcagcacagagagatgatacatcgatatttttatgtaagatgacatattttgtatgtcaaactggagttttggttcgcgctggccatcaggccttttctgctagccatataggggctctggattctggatactggtgcgtttgcaccgaggtcacactctgatgtttgtctaatcaattgactaggtgatttaccaccttttgccggtttcatgatgtcattttccttcagccataaaaaaaaaaaaaaaaaaaaaaaaaaaaaaaaaaaaaaaaaaagaaaaaagaacaaaaaaatagaaaaaaaaaaagaaaatgaataaaaagaaaaaaaacactaaagagtgatacagaaaataaaaaaagggggggcccctttaaaggt

SEQ ID NO: 273907 - DNA, 430 bp, Zea mays
cgggatccttagaatcttgattctcttgctagaaagctagttggacaagaggctcaaggtctaacctgcactgggtgccgtcttatctataatcttacggacatctatagcgcacgaatatccgttgctgctgattatgtattcacgtgtttctgcgagagaaatcctaatggccaggcattattagcatcaactattgctccacatccaaaccaaggagatattcatgaacctgctagtgacatgccttttggaagtgtacttctgcaagctctggattctagatactggtgcgtttagcaccgaggtcacactctgatgcttgtctaatccattgactaggcgatttaccaccttttgccggcttcatgatcgaaaaacatttgccttcattatttacctttttattatcgtttaaatcaactttaaa

SEQ ID NO: 273908 - DNA, 449 bp, Zea mays
cccacgcgttcgcccacgcgtccgatctctccatcccggcgacgactggcgacagccgctgccggcctactccaggtccccaggtctacgtcggacccttcgccgcggcgaacaccaccagatggcgagcacggggcggtcgatgctgctgtcactgctcctcttcgcagtgacgctgtcgctgctggagatgtacagggccaagttcgcctcgtcggagctcatgaccattgccggtggattcgtctgctccctcctattcctgctactcctcacctttattggaaactatcaagaagctagtggagatagaactgggtggggtgcagttgttgtagcacaacttgtagctcttattgtagccggcactatgtcacgtgctgacaactctctgttcgtgctcttagagtgcaccctgatactcgagatattagtaggataccaacaca

SEQ ID NO: 273909 - DNA, 1019 bp, Zea mays
gcacatctcatcttggttcaatagacttgaagagatgtgagtcctccggcgttccttcagtgctaattaagcacgaattggcacagcttgttaagcaaccatgtatttttgacaaatctgagaactgtctttcccaaaataatggaatgcacaagtctcagatacgcctttggattgagagtggtcagaacatgaaatgtgaaagtacttcagcttctaacagcaaaggtcttgatacgccaagcaaggcgaatcgcaagagatctcgacccggtgaaagtgctaagccacgacctaaggaccggcagctgatacaggaccgtattaaagagcttcgtgagcttgtaccgaatggggcaaagtgtagcattgatggtttgttggagaagacggttaagcacatgcttttcttacaaagtgtgacgaagaatgcagacaagctcaaggactctaccgagtctaagatacttggtagtgaaaatggccccctttggaaagactacttcgaaggtggggctacctgggcttttgatgtcggctctcagtctatgacatgtccaatcattgttgaggatcttgaccgacctcgtcagatgcttgtggagatgctctgcgaggatagaggaatcttcttggagatagctgatttcatcaaaggacttggactgactatcttgaggggtgtgatggaaatgcgcaaaagtaaaatctgggcacggttcactgttgaggcgaaccgggacgtaaccagaatggagatctttctatcgcttgtgcgcttattggagccaaactgtgacggcagtgcagcggcggagaacgctagcaacatgaacatgcctcttggcttggtgcaccaacctgtcattccagcaacaggcagcatccaatgagactaagactaagaggaaaccctgtaacattttaccaagtgctaatagcacgagctcatgtaacttctgcagcgactatcatccccaatattccagtgcattgcctgactttactgagacatctta

SEQ ID NO: 273910 - DNA, 990 bp, Zea mays
cgtcacctgatattttttccgacggacacaaaagcatatatatatacatacacgccgacatagggatgatggcttcctctagtcctcagcgtgcagccggcgccgccgtcgccggcgtgctgctggtggcggctgccgccctgtgctcgtgcggcgccatggcgcagctgaccgcggactactacgactgcacatgccctgacgcctacaacatcgtgaagcaggtcctgatcgaggcgcacaagtccgacgtgcgcatctacgccagcctcacccgcctccacttccacgactgcttcgtccagggctgcgatggctcggtgctcctggacgccgttccgggggtggccaactccactgagaagctggcgccggccaacaacaactcggcgcgggggttcccggtggtggacaaagtgaaggcggcgctggaggacgcctgccccggcgtcgtctcctgcgccgacatcctcgccctcgccgcagagatctcggtcgagctgtccggaggaccaaagtgggcagtgcttcttgggaggctagacagcaagaaggccgacttcaagagcgcggagaacctgccgtcgccgttcgacaacctgacggtgctggagcagaagttcgcggccgtgggcctccacaccgtggacctggtggccctctcgggagctcacacgttcgggcgggtccagtgccagttcgtcacggggcggctgtacaacttcagcggcacgaaccggccggaccccacgctcaactccggctaccgggcgttcctggcccagaggtgcccccagaacggcagcccctcggccctcaacgacctggaccccacgacgccgaacctgttcgacaaccactactacaccaacctggaggtgaaccggggctgcctcggctcggaccaggagctcaaggcggcgccgcaggcgcagggcgacaccgcgcccgtcgacgaccagttcgccaccagccaggccgcccgcttca

SEQ ID NO: 273911 - DNA, 1347 bp, Zea mays
agaaattacaggttgagatggatacctttgtttggagagaaaggcaatttaatcaaaaagttgatttggctgaaatctcccagaaggtttctgcatactatgtatctagaattcctgatcttgaaaaggatgtccagaaactgtgtaatgaaaagaatatgcttgtgctgaaacttgaaggggcttcgagagaacctggtcggaaccaggttatctcagagtttaaagctctggtgtcatcgctaccgagggaaatgggtgccgtgcaaactgaactgtccaaacacaaggatgcttccttacagttgcattccttgcgagcagaagttcattcactttctagtatccaaaccagaaaggaacaagaaattgaagaaatgtcatttagatctgcccatgctggatctgatataagccaacttcaatctctggtccgtgagctgagggaaaatacacaggagcttaagctatttgtggagttgtataagcatgagtccactgattccagacagctgatggaatcgagagatagggaactcgctgaatgggctcgagttcacattctcaaatattctcttagtgaaagtaaattagagcaacgtgtaatttcagccaatgaagctgaagcagtctctcagcagaggttggcaactgctgaagctgagattgctgaattagggcagaagctagaaacttctaggagagatctagtgaaacaatctgatatactgaagtctaaacatgaagaatgtgaagcgtatgttgtggagatcgagagcattggccatgcctatgaagatataatgtcacaaaatcaacaattgctacagcagattattgaaagagatgatcataataccaagcttttcatggagggtgttaaatcaaaacagtcacacgatgctttgcatatggaggtgcgctcgttgcaaagaaatttgcagcatgcaagtactttgatggatttgtgcaaccagaaaactatccgcctagaggaccagctaagaggttggtcagagcggttgaggagactgtcagaggatggaatgcagcagtctatttcattgggcaattatcaaaaaaagctgtctggtatgcatggagaagctccaaagctcaggcagtcaatggatgttctacaagcgaaggctgggagcaatcggctggaaattgctgagctgcttatagaactagagaatgagaggtttggtaaaaagagactagaggatgatcttgatctaatgtcaagtaaagctaattctctaagagagaagacagataattcagcagttcttcagaaacttctccatgaggccaaggagtacaggggaatattgaagtgtggta

SEQ ID NO: 273912 - DNA, 581 bp, Zea mays
cccacgcgtccgcccacgcgtccgcccactcgtccgcccacgcgtccgatgataatgaggtgctgagtaaggcgatagaggttgctgaggctattgtgaggaacaaccgcaacttagttgtattgtacaaatcggttataaatgatggatttaagctggatttggagcatgctcaagcacttgagaaggaaagaggtcacaactattacaatggaatgacaaaggaacagttcacgaatatgcagaaattcatccagggccggagttctaagaaaacaccatcaaagctgtaggttgctggtgacattttctgtggtccgtgtacgatgtacagctactgaaagcgtgttcagtagtctgaaaaataaagatgtcggtgtggcaatatatacagttaccgtcttctcatacttttacgtaagtttatatttatctaccgtctgattggttggtcgcatcgtctcgtcctggatcactatgtacattgactttatttgaatatttgtttggttgcctgtatatctggagcatgagttccacgagtggatacaaaataaatcattttgagaccctttgattgc

SEQ ID NO: 273913 - DNA, 383 bp, Zea mays
gccggaagcccatcgtcggcgccatcgccgggttcgccgtcactgccgggttcgagatcgccctcgcctgcgacatcctcgtcgctggacgctccaccaagttcttggacacccacgccaagtttgggatatttccttcctggggtctttcacagaagctttctcgcatcattgggccgaatagagcaagggaagtgtcactaacttgcatgcctgttactgctgaaatggcagagaggtgggggcttgttaaccacgtcgtggatgataatgaggtgctgagtaaggcgatagaggttgctgaggctattgtgaggaacaaccgcaacttagttgtattgtacaaatcggttataaatgatggatttaagctggatttggag

SEQ ID NO: 273914 - DNA, 628 bp, Zea mays
gtggactctcgactctcgagcagttcgatgtacgtaacccggcccacgaacccatctttaataacggccctccagaatcccaattccccgtccagcgaggcagcggcgactgcaattctcatccgaacccgatcatctccggccgccgctccctccggaccctccgtcgacatgggcaccgtcactgccgcagatccgcacccgtccttcctcgccgacaaggacgccaaggtcttcgtcgccggccaccggggcctcgtcggctccgccatcgtgcgccgcctcctctcgctaggcttcacctccgtcgtcgtccgcacccacgccgagctcgacctgactcgccaggcggacgtcgaggccttcttcgccgcagaacgcccgcgctacgtggtcctcgccgccgccaaggtcggcggaatccacgccaactccaccttccccgccgacttcatcgccgccaacctccagatccagaccaacgtcgtcgacgccgcgctgcgctgcggctccgtccgcaagctcctcttcctcggctcctcctgcatctaccccaagttcgcgccgcagcccatcacggagggcgcgctcctctcctgcccgctcgagcccaccaacgagtggtacg

SEQ ID NO: 273915 - DNA, 737 bp, Zea mays
cgccgcgcgcgtccagctcaggcggcgcctgtttgagctctccctcggcgtgctcatggagaccatcgcgcggaccaagacctcccgctccgaggcgtgcgccgccgacactgacgtgtcgcccgaggcgagcgagttgacgcggatctccgaagagatcatgccctacctcggcacggccaacctgtgggactacctgccgttcctgcggtggttcgacgtgttcggcgtgaggaaaaagctcatggccgccgtgaggtggagggacgcgttcctgcggcggctcatcgacgcagagcgccggaggatggacggcgacggcgacggcgagaagaagagcatgatcgccgtgctgctctctttgcagaagtcggagccggagctgtacacggaaaccatgatcatgggtgatttgaaggacttgtttggagctgggacggagaccacatcggtcacgacagaatgggccatgtcgcttctcctgaaccacccggaggctctgaagaaggcacaggcagagatcgacgcggtggtgggcaactcccgccgcctgatcaccgccgacgacgtgccccgcctcggctacctgcactgcgtcatcaacgagaccctgcgcatgtacccggccgctccgctgctgctgccgcacgagtcggcggcggactgcacagtcggcggctacgacgtgccccgcgggacgctgctgatcgtgaacgcgtacgccatccacagggaca

SEQ ID NO: 273916 - DNA, 450 bp, Zea mays
aggggacgtccgtgttggaaatggtggctgcattcgagaaggcttctgggaagaaaatccctctggtgttcgctgggcgaagacccggagacgcagagatcgtctacgccgcaactgccaaggcagagaaggagctcaaatggaaggccaagtacgggatcgaggagatgtgcagagatctgtggaactgggcgagcaagaacccgtacgggtacgctgggtcacgcgacaacagcaaatgaaccacccatccatgcatcccatcctgcagtaggagcaagcagcagccttatagcctatgctaccataattagtaactcatcaatcatgcatacataatcagccagtcatctgattatgggtactgcgatgggcctcgcttcttcagtgtatagagggaggaggaggggggtcatcatgatattcatttttttatcattcccgaatgat

SEQ ID NO: 273917 - DNA, 401 bp, Zea mays
tcgttggacgatacacgcgtctacagtgatgtcctacagccattctctcttctccctgtcttcttctccctcgcgcagcagccctctcacacggcagcagcacgccagcgcaggggcagcggctccatggccgagcgcccttcccagtgctccagccggcctcctctgcctgtgctcctcatcccacacagcagcgcgcagggagctttccccttctccgcggcgtccggcagcagggaacctttctcccctacgtgcaggagcttccaggccgcccagcgctccttcttcttcatggcatgagctcctctcatggccgccgacgccctactctcctccatggctggcatcagcacggagctcgacgcccctgtacagcccccacaccttcttcctcccac

SEQ ID NO: 273918 - DNA, 368 bp, Zea mays
gcggctagctgcgacatcccatcgatccacacatcaatacaatataatctaatggcgtccaaggctctgttcctcctcgccatcctgctgctagcgacgtcggccgccgtgctcgccgccgcggcggagcaaactcatgaaaacaacgagaagatggtggcgaggagcaaggacgccgccgccggcgtgatgaagcagcaggaacggcgcggcggcggatcagacgagtacggccacgcctgcgagtacggctgctgccaccacgtattccatggaggatgccagaagtgctgcccgccgccacccggcgctgcaggtggccgaccgcagaggttaagaactagtagacgtctaaccgcggccggccg

SEQ ID NO: 273919 - DNA, 321 bp, Zea mays
gcatcatctggtagtggtgggtgctcatgtgatccctgaggagccctgatcgactgtgaaataccaaaagagtggaaccaaatacgagacagtaggagagctctgtgtcctccgtgctccattgcattgcctgcgtgcctgcgtccagttcgatgttgaagttttgatcttgttctttggtatgttatatggagatgcgggagtccttgattgttacttgctcacgaacttctttcactgtgctacaaataatgtataatatgtaatctcattgactggccgtttgatgttttgtcatggtctaatagaggagccgcagtt

SEQ ID NO: 273920 - DNA, 446 bp, Zea mays
tcgcgggacgacgcacgcgtccggcgagattcaggcagtgcgcacgccgtgcagccgtgcaggcctctcctccactcaaccgcgcgtcatggccatgttgcgcgagcatctcgacctcatccgcgctcacctcctcgacgacaaccacgacgccgtcagctccgatgactcggcgccatcgccatccccatcgccgccggggcgtacgccgctgccagcgctttccgtctcgctgcccccgaggccggcagtcgtcctgcagcagcagcacctgagggcggcggcgccgccgttgcagattcctcagcaggagcagcactgctgcccggaacccgaggaggacgatttccggcggtaccgccgcgtgcggcagcggccgtggggcaagtacgcggccgaagatccgggaccggcgcggaagggcgcgcgcgtgtggctgggcacct

SEQ ID NO: 273921 - DNA, 397 bp, Zea mays
gagaatatcttataaatgtacaatgagatatgcaacaccattcaccacagcatcagttgacgttattgcacaacagttgcacagggctggttattcacgatggggatctgagaacgtgctaaatgggcgaacaggtgacagagtgcaagccttggttttcatgggccctaccttttaccagaggctgattcatatgtccgaagataaggtgaaattccgtatcactgggccggtgcaccccctcacgaggcagcctgttgccgacaggaaaaggtttggtggacttaactttggagaaatggagcgtgactgcctcgtcacccatgggtcatctgccaacctgcatgaacgcctcttcatgcttactgacatctcccagatgcacatctgccagaca

SEQ ID NO: 273922 - DNA, 484 bp, Zea mays
cggccgaaggcccaacgaagcccaaaacgttcccaaaggaaaggaacaacccccccccgaggtagaccaccgccggcggcggcaggagtgaggcaggatgtcttcggtatacgtgcttgagcccccgacgaaggggaaggtggtggtgcagacgacggccggcccgctcgatatcgagctgtggcccaaggaggcccccaaggcggcgcgcaacttcgtgcagctctgcctcgagggctactacgacggcaccctcttccaccgcgtcatcaagaatttcctcgttcagggtggcgaccccactggctccggcactgggggtgagagcatctatggggctccatttgcggatgagttccactcgcggctgaggtttaaccacaggggtttagtggcttgtgccaatgctggtacatctcattctaatgggagccaattctttatcacccttgaccgttgtgattggcttgattagaagacacca

SEQ ID NO: 273923 - DNA, 1409 bp, Zea mays
cgaagattacataaacacgtcacacccaaattttattggtggcagcaaggctgttgagcaagcacagcagcaagttaggtctgccaaaatgtctgcagcggtggtaagaaaggacggagtggatgcacaggcttctgagaaaactcaaaaatcacgcccgatcttgggtagaagtggtgtaaatggagtagttactgaccacatccagggggtacggcctgctgctgaggcagagagaccaggatcttctggtagtggaagcacatctttctggaatcaaatatttacttccaacgaggatcgaacacatgctcctgcaagagataacacagcaaacaaatcttatgctatgcctgcccctaatctggatcattcattctccactatacagttaagagagccaccagtcgtcctgaagccttcagaacaccagtctgagcaggaggcacttgaaatagcaattacaaagttgctattgaagtcatattacaatattgtcaggaaaaatgtggaggacttcataccaaaagcagttatgcatttcttggttaatcatacaaaaagggcgctgcataattaccttataacaaaactttatagagatgatcttttggaagacttgctcaaagaacctgatgagctaaccataaagaggaagcagatacgtgaaaatcttaaggtccttcaacaagcttacaaaactttggatgagataccacttgacgcagaggcagtagagaggggtggtggatactccctcgattctgatgcgattggtctaccaagggcccatgggctttcttcatccctccacggattcaatgatggaagctcatcatattcaaccccgaagcagtcaaggtcaaggaggccaaaccattctggcgagcaacttcctttcaaccccgcaacgagtggcaatggtttttgatgccaccctacacgatggccacccagattggttatggaaccaaccattgcagcaagcacaccttactctgctccaagtttgttggcacccgtagatatatgttatttctagttaaattctttgtagcgctgcgccgatgaagcctaacatggtgcgagttttgttgtttcgccttttgtacagtatatatccagtcatttcgtcatgatatgatatcaagtgatgggtatagttttgttcggacccagggaaagcaatgggaaaaaaaatctactaggcgtgtagcagtacccagcgtctgagtcactgttacggatttgccttgcaaaatagacatggctggtatggcggcggcaaaaacaaaatgtggcataacattgttcccgttttcttaagggtttcatttgatttgaaagccccttgttaaaaaatatgcatttggaaaacagcattaaccacccctgaatattttttttcc

SEQ ID NO: 273924 - DNA, 450 bp, Zea mays
cccacgcgtccgcagctaggctgttgagcttgcactgcagctagttaggtctgccaaaatgggagcagcggtggctagaaaggacggagtggatgcacaggcttctgagaaaactcatatatcacgcgcgatcttgggcagaagtggtgtctacggaggagttactgaccacatccagcgggtacggcctgctgctgacgctgagagaccacgatcttctgatgcactgagtgtttgacgcacacccttgttgatcagccaccagtcgtcctgaagccttcagaacaccagtctgagcaggaggcgcttgatatagcgatcacatagttgctattgaagtcatattacaatattgtcacgaataatgtggaggacttaataccaatagctgctatgcatctctcgagatgtgattcatattcgattgtactttcaggtaatcatacaaaa

SEQ ID NO: 273925 - DNA, 331 bp, Zea mays
acagttctttaattcttccgttcagaagtcttggcaccacttggttccaacactagcttttcacctcacgtttcttctgcaccatgcagactttggacgagataccacttgacgcagaggcagtagagaggggtggtggatactccctcgattctgatgcgattggtctgccaagggcccatgggctttcttcatccctccacggattcaacgatggaagctcaccatattcaaccccgaagcagtcaaggtcaaggaggccaaaccattctggcgagcaacttcctttcaaccccgcaacgagtggcaatggtttttgatgccaccctac

SEQ ID NO: 273926 - DNA, 705 bp, Zea mays
cggccggaattctggtcacctagcgcctttgctggtttgacaagctggccttgtctccagaataccagcacagggctgcaatgattgagcagttcaatagcagcaacaaatggaagaaacgcggcatttcttgtgtgccagccacttatgaggttaatcttcgaccaactccaggcaaggtgtcaatcatgaatgatggttccatcgctgtcgaggttggaggaattgagataggtcaaggattgtggactaaagtgaagcagatgacggcctttggactgggacagctgtgtcctgatggtggcgaatgccttctggacaaggttcgggttatccaggcagacacattaagcctgatccaaggaggtatgactgctgggagcaccacttctgaaactagctgtgaagcagttcggcaatcgtgtgttgcacttgttgagaggctgaagcctatcaaggagagtctcgaagctaagtccaacacagtggaatggagtgccttgattgctcaggcaagcatggcgagtgtgaacctatcagcacaggcgtactggactcctgatccatctttcaagagctacttgaactacggagctggcaccagtgaggtggaagttgatatcctaacaggagcaaccacaattctgcgaacgacctggtgtatgactgcgggcagagcctaaaccctgctgtagacttgggcca

SEQ ID NO: 273927 - DNA, 466 bp, Zea mays
tttcacgcgtccgcccacgcgtccgctcccgcagacccacagccccgcccgtccccgtccgtccacagccagctccgcctcccatccagcgcccgtccacagccgccgcagttccagtgagatcgagcgaggtaagcttagatctgagcgatttctctcgcgcgtcgcaggtaaagttcactcgacttcgactctctcatcctcttctgttcttcctggttccgtcttcttcctcgagcagacagcgagagacccgtggccttttagatcccgggcttcagatctgctgtttcttcttcggtttggttctagttctagcagtgtactagtactagtcgttaggttggtagccaagagaggttctttttccacacctcccttgcgcaagtgagtcctgtcctgagtggatctacccaccactgccatctgtttttactgtggctgttgggttccgccagtttcttcg

SEQ ID NO: 273928 - DNA, 628 bp, Zea mays
cccacgcgtccgcccacgcgtccgatgctcggcctccggcgcctccccgctgtctccggccgcctcgcgccggaggtcacctccgtctctgcggcctcctcccacagcgccgtcttctttcgcaccctccaaatcctcgtccagcaggggcccgtccgcctccaaaagctctctgctccggacaccgggatcgtggagctgaggctggagcggccggaggcaagaatgccatagggaaggagatgctccaggggctgcggacgcgatccaggaggtggaggccgacacggctgcaaacgtcgtcttggtgacgagctcggtgcccaaggttttctgcgcgggcgccgatctcaaggaaaggaggttgatgggtcctagtgaagttcgggacttcgttaattccttaagggctacattttcatcctttgaggcactatctattcctacaattgctgttgtcgaaggggttgctttcggtggagggttagaattggctctgtcatgtgatcttcgcatatgtggcaaggatgcaaaattcaagttgccagagactggccctgctatcatcccaggggctggaggaacacagtgcctttctaggattggtggaaggtaagagcaaagaact

SEQ ID NO: 273929 - DNA, 590 bp, Zea mays
tctttacgcgtgggcaacggtgcccccaccgggggtgatcatacagtcgaagagatcatgaagatcgtagaggaggcccgcacgccgccccagtcgcctgctccagtggctggttttggttgggcagaggaagaagagcaggaagatgggaagaaacctgaggatgacgagcaggatggggaggatgagcaatacgacggcgaggacgagtatgacaaacaggtgaagcaagtacatgccagcggggactttcgacacctaataaaatgaagctcctagcaagaccgagttctcaactgatgagatactgtctggttttgctgtagtttgtggtgctaagatgatgcaccctcggtgcttacgtagtatacttctgtctggattcacctttttttcgcatattgtgttaatactctgtaaattatcaaactggcttcctcaatgctcgtgtaattaaatgaaccgttgagtgattaagctataaggcaagatagactttctatggagtaaattctgaaagtatcaatatgtgttgaactagactaatttaaattttactttcgcaaccaataaggatcatcatattcagc

SEQ ID NO: 273930 - DNA, 446 bp, Zea mays
cgacactcttgtgttgtcgcgattagcaagctcggcggctcgtggcagcgggaacgtacgaggcgaaggagagcgagggcgaccgcgcggatcgcatcgcagctctgggcggaggggcgggcgggcgccgagatgctggcggtgttcgatcgggcggtggcgccgagcccggaggggctgcggcagccgggcgccgcggggggcggcagcgcggcgggcctcgcggaccggttcagagaggcgcgccccgacgcggtcaccgtcaaccttggcgggtccggcgtcctggcgtactcctcgagcaaccagaaccccctccttcccaggttgtttggagcggtggacggcgtattctgcatgttccagggaacaattgcgaacgttgccgtgctgaagcagcagtacgggttgagcaaaggcgctaatgaggtcagcatcatcatcga

SEQ ID NO: 273931 - DNA, 317 bp, Zea mays
cgacactcttgtgttgtcgcgattggcaagctcggcggctcgtggcagcgggaacgtacgaggcgaaggagagcgagggcgaccgcgcggatcgcatcgcagctctgggcggagatgctggcggtgttcgatcgggcggtggcgccgagcccggaggggctgcggcagccgggcgccgcggggggcggcagcgcggcgggcctcgcggaccggttcagagaggcgcggcccgacgcggtcaccgtcaaccttggcgggtccggcgccctggcgttctcctcgagcaaccagaaccccctcctccccaggttgtttgg

SEQ ID NO: 273932 - DNA, 805 bp, Zea mays
ttcgttttcttccgagttccaactcccaaccgcagcctcagcctcagcctcagcctcacacggcccgaagcagaacccgtgaacacctcaaacctcacggctcacgccaccgtcctccagccccgttctccggcgatcctgtcattccagacgcgtctccgcccctctcggtccaccaccccgacgccgccacatgtcgacgcagtccatttcgccggcctctgcgtccgcgcagttcacctacccggcggcagcggccccgtcttacttccccgtgcccttccacctccagaacgcgcaatacaccgcatggaccgcagccgcgccggcggtgcctgtgtacaacgccatctatcccatgccccaagtccagcaggcccaacagttgttccaaaaggactcgaagataattactcctgaagctctagctactgttaaggctgctattgcaaatagtgagaaagacaagaaggttgatgcaacaaagaaggcagtgcctcgaaaggcagctgggcaaagttgggaggaccctaccttggctgattggcctgaaagtaagatacctaattctctattatcttttttcacaatgttttgcaaatgctccaattctgtggttatggagtccttaacatggcaacgttgtggtattttagctcttattgctcgttaccttgcagacaacaaccatgagaaaatgtcagtcttacaggcaagacctactgctctatctatttatgcttgatctgaaacaaaatgcttttttttccttttctctaaggtgctcaggatgtgatgagcccac

SEQ ID NO: 273933 - DNA, 1070 bp, Zea mays
  unsure (1)..(1070): unsure at all n locations
accccgtccgggtancgcgggggctgggctgctttcttcatggtttctcttttctncaatggttgatttaagcccccaatgacccgcatccacctaccaaaatttatgtaatgtccacaatttctaagatgtgccatatatgtctttttcataaaaaaatcactattgttaaatttgcaccgttttggtcaatgaatctctttaagtatttaatagttattctataattgttttgctagcactcacctgcttggtggccacaacttcaagttttgagttgcactactaattcatttgtgcattgataatgtgattctactttgtagtcttcctgatgacaattcagttagtttctttaaggatacttcaagtaccctcattcacaattgcttgatctctcgcctacagatgatttccgtttgttctgcggtgatcttggaaatgaagtgaatgatgatgttcttgcaaaggcattcgcaaaatatccatccttcaatgtggccagggttatacgggacaagtggactggtaaaactaaaggatatggttttgttagttttgctaatgcgtctgatcttacttctgccttgaaagatatgaatggtaaatatgtaggaaatcggccaatcaaattacggaagagcacatggaagaacaggatagacttagaagctttggagaagggaaagacccaaccacagaagaaaatcaaactgcagaaaagaagtgttcttcacaaatgaatctgaaaaattctgctcgttcatcgtctgtcagtatcgtttgggaaagctgtctgaagcattaacagttttacttaacgtcagatgtgtaggactgatggtcaccaagttcccggtgacactgtatacaatcgcagacgcgatgctatgttggtgattgaacaggtgtagccgaatagttggatccaataacttcacctgtagtgtaatggtccaattttatcatgggaactgtagttctaaatactccagtgaccagtgctattgtggtgaattattctgtgatctttattcataaatattcgtgggtgttggcctgtttgaatc

SEQ ID NO: 273934 - DNA, 611 bp, Zea mays
acaatggtctaaaatgagtcgtattaccctgtcctcaccagttcaacgcctcttctccgttcacccggcgtgtgctctgcctctctctctctctcgtgcagcgaccgccgacgcgcttcgccagaccttcgccggcgacgagcactcaccagggcttgaaaatgtcaacaagcactttgaaagaacccaatgtttctcaatcaaaagacgtggagaatggaaatgacaattctgtgaaatcctgcattagcaagcctgtgttgaatggcaacaaatgtgccaacaaggaacaaaatgttctgtcttgttgccctggcgctgtgacaaatggaaacgaggctggaaatgcagacgtggagtacattgattctgagaatctagtggatctaccagatgttgatgcagctctatgtaccttagttaaaaggttggattcaaaggactgggttatgacatgtgaagctctcaacaatgttcgtcagttggcgatgtatcacaaggaaagattgcaggagctgctggagcctctagttcctcttatcgtgaaatctgtgaagaacccaagaagtgctgtatgcaaaacagcactgatgacttgtgctgacatcttt

SEQ ID NO: 273935 - DNA, 504 bp, Zea mays
gcccagcccagcagaagaggacataccagattcgattcctcctcctgtcctccatctccccaattcgcacggccatcggaccatggattccggcgtgcctgcctctgcgcctgcccctcccaaacacaagacatgccggaagtgcaaggcgagctatgacccctcggccaacacgcgcctctcctgcaggttccacccttccttcttcgtctgccgccgccacgacgaccagaagaggtactacgagctccgcgacggcgatcctccctacgccgccaagttctacgactgctgcggcgccgaggaccccgacgctccgggctgcaccactgacttgcaccgttcctacgacgacgcccaagactagcaaacctttgctgcttccacaggcctcatcttaatctcaagtctcatctaccgtttcgcttttgcatcccctccttatcctctccagtcagctatcaaatttaaccaacctatgttacactttaattaaattttgct

SEQ ID NO: 273936 - DNA, 392 bp, Zea mays
gacccactcgtccgaatgatcgtcaggagattgatcagctgcttgccctggctgtgaagccacaggtgaagaggcaggttaggaggaggaggacgcacacgagcaggccgtaccaagagaatctgctcaacatggcggaggcgcggcgggagatcgtcaccgccctcaagatccaccgggccagcagcaggaggcagcagcaacccaagtaccagcgtcatcaggagccgccgctgcgtcaaccaccgtttgcgcagctccagcaacagcaagaagagccgaagcacgtgcaagaggcgtttctggatccaagatgaagccaaccgaagggtgacgaagaagcatctctggcacataccactatgaaatacgccatcttcactaacaacccg

SEQ ID NO: 273937 - DNA, 623 bp, Zea mays
cgggccgacccacgcgtctagttcgcgcagccacaagaatgtgatatccctcgttggtttctgcttcaagaatgatgaccttctgttagtgtatgagtatttgcaacgaggcagcctggaagagatactgcatggtaaaaaagaatgcaagagcatatttggttggactgagaggttcagcgtggctatgggagttgctcgtgctctggattatctccatagcgataacaacagccgtccagtgatccatagggatgtcaagtcatcaaatatcctcatttcaaaatgctttgaaccaaagttatcggactttggtctcgcagtctgggctgctgatgtgacatctcagatgacatgcaatgatgttgcaggaactttcggatacttggctcctgaatacttcatgcatggcaaggtgggcaacaaaatcgatgtgtatgctttcggtgttgtccttctggagctcatctctggcaggaaaccactttgcactggttgtccaaaagggcacgagagcctagtgatgtgggcaaattccatcatacagggaggaaagctcagacaacttgtagatccaaacttgcccactgaaggccatgtctatgaagttgagaggatgaccc

SEQ ID NO: 273938 - DNA, 535 bp, Zea mays
acattaaccgtctgcagtcggcataacataatcgtcgtcgcgtgcagtccccattcccttttccagtggtctgttgctcgcgcttcgtccagcttccccggaagaggtagcacggcaagggcagaggatgagtgaccccaagtacgcctacccctaccccgcgcaaggttactaccaagggccgtaccagggcccgccggtgatggcgccgccacagtacgccgcgccgccgcccagaagggagccgagcttcctggaaggctgcctggccgcgctgtgctgctgctgcttgatcgacgagtgctgctgcgacccgtccatcatcttcgtcagctagactagacgaaggaagaacctattggtatatataatatgtatgtatccagttgtactcttagctttattcctgcaaccttcaagctcgagatgatctgtatctcggtcgattggtgtgtatgtgtcatctgtatcaactaacatcctgtcattgtattgcttctaatttgctgctgaatcgagaacatattcgccgttg

SEQ ID NO: 273939 - DNA, 614 bp, Zea mays
  unsure (1)..(614): unsure at all n locations
gaatgttccagtgaaacgcctaggcctcattttaaggaacctgttgcggacagctctgggttaacttcagcagcacctgaaagtttagcggctaagccacatgtccactcaccagatgcctttataccaccaaagcctggtgctccaactggggaattaggtgatgtaaaatcagattttaaaggtgaagaaattattcaaaaagaacaatattgtgaaagcgaacctattgttgctacaagagagaatttgctaattgatctttcctgtggtgccgagtcgatagatgtgtcagatgtattggaatctttaatggaagaaaggagtggaacttcgtacgtgccagtatcaatagaggacttcctagccgcttcagcagtggaagaaccacaatactctagccctatagcgttatctccttggggtgaacctagttactaccaaggtgatgctggtgattctgcgctatggggtattcaagattcgatcaatgantatgtggtcgttgctttcaccaagacctatgctccaaccttcatctggtattggaactgaggggaaggaaacttttgatataacgaggtggctgtgacccatgttaatagtgatttttt

SEQ ID NO: 273940 - DNA, 498 bp, Zea mays
gatacaggtccgggacgggtcgcggacctggccagacaagaagaaaccgtgatggaagctggatttccccgctatccgatggaatccagattcagtgccagtccgttttcctgtgattttgggataccagcccaattccccttcatggagggtatgcgttgctgttggttggcacaccggaaggcagaacctttagctgtgaaggcctgtgactgaggtcatttcatgcaactaacaattctggtgaagactatccaatcttaggacccaacatgcaacaattagacggatctatcatgatccttctataatttaacgatccttatatagtttaacaagtattatgtttttctgtaaagcttagaaatacttattttgttaatgcatagaaaatcaatgaaaaaaatgtagagcttttatgaaagtcaaaatggacatcaacgatttacgctaaaacttgtacccatttacgctgttttagttcacattttatgttgg

SEQ ID NO: 273941 - DNA, 402 bp, Zea mays
acgacaagtccgattaacagaactcttctgccttgcttgtggacagtacaaccggcagtaatcctgtttgagtacggcatggtgagaacaaacgacgagacgagtccagtcggaagtcagctttgtcgcgcctgctccagcttttcgccgccggttacgtgcagtttcaagcacgtggatttgctgaccgggacctggaaaagataaatggaagaagcgaaccacagaaaatcttttgtggagtgaactcagatttgtgttgcagactgctggcagtacacctgcaatgatgagatttgtcaagtctgacggcaggtagttgcggcgagcgtggcggccgccaccggcgcgcttctgctgtgctggctgcagtgccggcggcgcaaggccgggcgctcggcg

SEQ ID NO: 273942 - DNA, 387 bp, Zea mays
agatcgatccttgagttgacgaaaacatacacagctgctagctaatcctgccgtgagtgcaatgcatgcaaagatgacgaagcccgcagccatcgttgttgctgctatcgccgtcctctccgtcagcctgctggctgggtcgtcgtgccttgcccttgcgcggcccagcggcgacttctccatcgtgggctactcagaggaggacctgtcgtcgcacgagagcctggcggagctgttcgagcgctggctgtcccgccaccgcagggcgtacgccagcctggaggagaagctccggcggttccaggtgttcaaggacaatctgcaccacatcgacgagtacgatcgcaaggtgaccagctactggctgggcctcaacgagttcgccga

SEQ ID NO: 273943 - DNA, 413 bp, Zea mays
  unsure (1)..(413): unsure at all n locations
ctcgcgggccgacacaagcctcagtaatgagtcgtagcaatcctagtgttcctgctcgtcgtcctgctcggggatgtggcgccggtcgccgagaccgagcctggcagcgtgcggctagtacaggaggcgccacatacgaaggtggtggaggatggggccaaggcggggacggtgccggtgtcgaccgtcgcgtggtccacgcttgccatggccgcggcgacggggttgggagcggtgcccttctttttcatggagctcgaagcgcagtgggctggcctttgcaatgggctggcggccggggtgatgctggccgccagctttgaccttgtgcangaagggcangtgtatggcagtgggagctgggttgtgttcggaattctgagtggaggtatatttatttggctttgtaagaa

SEQ ID NO: 273944 - DNA, 449 bp, Zea mays
ggacactacacagcgcgcgactgacatgtcgatgctcaccagcatactgggccgcaagcatcagcagccgccgccgccgccgcagcagcagcagcagcagcagaagggcggcggcgcgcgcactggcaccggcgccggcgccggcacggaggcggcggcagtggagccggtgagcatcgacatcgcggagcaggggccgctagtggacgccatcacgctggcggcgttcgcggcgccggcgctaggcctgccgccgttcgcgacggccagcatggactggaaggagacgccgacggcgcacgtgttcatggccgacctccccgggctgcgccgcgacgaggtgaaggtggaggtggaggaggagaggctgctccggatcagcgggcagcggcagcgcgccgccgaggagaagggcgaccgctggcaccgcggtcagcgcagctccgacc

SEQ ID NO: 273945 - DNA, 401 bp, Zea mays
gccgcccttttttttttttttttttttactgtgaaccaactactgattgattgttcacgcaaacgactgtacaacacattttacagaagataacacgcacgagggtattacgcactcaagcttattgagtttagcacacaccatcaggcaaagcatactagggatcatatgcatgccaagatgttactacagcatcagattcagagctccagaagaagatggcgcacagctgcacgaggcttgcacgtggcctccaacgggacggccctgggcagagtgagcccgccgcccgcggccatgtcgatctcgaggccgtcgactcggtcccagtcgaagcactggatcagcgtgccgagcaccaggctgatggtccgcagcgcgagggtctccccagggcactt

SEQ ID NO: 273946 - DNA, 532 bp, Zea mays
gcaagatcagggccaaggcggtcacggaggactggaggcagaaatccaagcccatccctcctggcgccgtctaccctgccaaggaccactgcaggatcttgagcgacaagtccacgggagaggccggaaggaaggcatggatgaaatgtactttggagtctatgaccaactcctgtatgccaggaagaccgaacctgttgaaggagcccagtggacgggaatagtgacaacaatcgctgtcgagatgctgaaagcaaacatggttgatgctgtggtttgtgtacaaagtgatcctgacgacaggcttgctccaagacctgttttggccaggacaccagacgaagtaattgcagccaaaggtgtgaagccaacattatcaccaaatctcaatacacttgccttagtcgagctggtgtaaagcggcttcttttctgcggtgtgggctgtcaagtgcaagctttgagatctgtagaaaagtaccttggtttggaaaagctttatgtgcttggaacaaactgtgttgacaatggta

SEQ ID NO: 273947 - DNA, 433 bp, Zea mays
tctctctcacacagggctttcattcaagatttttgaagatctatctagaacttccaccaatagtccagccattacaaatggaagaggatctagagcaactgaaagtttttgaaaccagctatcggatgaaggtgatcaaagtggagcaaaatgcccgtggtgtggatgcacctgaggtgcattgagaaaatcgaagcgctgacgtgagcgagaaatatccagtagaaaatgatggcagagcgagtgctttgcattgctatcagtgtaggcttgataggagacttttggttgtgatatcttattttctaaatagtatgataccagataggggggccgtaagggcgccttttgctctagtattaggctgtctccagcaacgtctcctaaatttcgtcctttaaagtaatattctttatcatctacagcatcctct

SEQ ID NO: 273948 - DNA, 841 bp, Zea mays
cttattagaagccttgtcctgggtttgtgcaggagggaggtcttctacaagaacatacatgctctagaagctgctgtttcaggtgctgcgctggaaggagccatcgcttcgggagtaaatgatccttcggggagcttggatcttctcacgatccaggcaactcccatgaacctgggaatccgtgccgacggtgatagcttcgctgcgatcatccctaggaacacgacggttccagcaaggagggacatgctgttcacaacgacacacgacaagcagaccgaagccctaattgctgtgtatgaaggagaaggggaacgtgctgaagataaccatctgttagggtacttcaagattactggaattccggcagcccctaagggagcagttgatatcagtgtatgcatggatatcgatgctgccaatgtcctcagggtgttcgcaggggtcgtcaagcctcaaggcccagccattccaccgttcatcgaggtgaggatgccaacgctggacgatggccatggttggtgtgggcaagctctagcaaagatgtatgggaagattctcgaccttgctgttcttccgaagaagctgcagccatgatatgtgccttccgtggcccgtaaagtagctggtgcgttgtgcgaatgtaggctgctcagtgttcagtattcgctgtgtcactgtcccctgtggtgtggccactgtttatgtgctgttggtgttgggcagtctacagaactgaactaccagtttcatccttgtaggcgtgtacaataatgtcccgtgcatgtgaaccccatgttgcggatgtttacttgaaaaattatttaaagagggcgagcca

SEQ ID NO: 273949 - DNA, 706 bp, Zea mays
  unsure (1)..(706): unsure at all n locations
gcgtncgggagggataagaaaatggtcgcggcggcggcggaggtgtcgacggcggcgacggctagcagtagccccccggcggaggagggggagcggcgggacgagagcgagagcgacggggagatggcggggctggcggccgtgctggacttcgacatgctgtgcgcgtccgtggcgctgtcggcggagaggaggaaggccggcgcggcgctggcgggcgcggccggcgactgcggcggtggaggcggaggggtgcagaggatgtgggagggcgacgtcgtgctggattgcctagacgaccggcgaatcgcgctcgagacgtcctgctgcccatgctaccggtttggtaagaacatgcggagagccaatctcggatcttgcttccttcagggaatggtttactgcattctgttggctgctgtcctaatcagcctaattgccttttctgtaacaaggcatcatatatatttatatatgggaatcggctctgtcctcttgatagccatctatactggttatttccggagaagaatcaggaagcaattcaacattcggggtactgagagcagtctggacgattgtgttctccatctcatatgtccttgctgtacgctgtgccaggaggctagaactttggagatgaataatgtccagtgtggtgtctagcattgccgaagtgataccgattgcttaaggagcaacggtg

SEQ ID NO: 273950 - DNA, 925 bp, Zea mays
cggtccacccacgcatccgagtaggtctgccatcaatggaaagccgggaactcataatgcggcgacttctgtcaaaggagaaagttgatgaaaggctgaacttcaaggagctagcaaccatgacagaaggatatagtggaactgatctcaagaacctgtgcacgacggcagcatatcgcccggtgagggagctaatccagaacgaaagaaagaaggagctggagaagctgaagcgtgaaaaaggagaaactccatcggatcttccgaagaaggaagagaccatcaccctaaggccgctgagcatggcagatctgaaggaagcaaagaaccaggtggatccatgccttaccaagtgcaatttgaaacgatgcggatgcagattaacacttttcaacttgaaaaataaactaatggcagttcgaatgttataataccctgtaaactctcaaattcaggtggctgcaagtttcgcttccgaaggtgtctgcatgagcgagctgaggcaatggaacgagttgtatggtgaaggaggctccagaaagaaggaacaattaacataccttccttctgagcaatatgaaaatctatggaccatcacacgcaaaaatgtatgggcattttggaaagtatagtgcacaaaatagtcatgaggaaataggccgaacatgtatgagaacatgggaaacgcggggagtgttaaaaggacaggctcccagagtgtgtcggaggctcccacaccagtgggcacaagaaatcaggtcataaaagccactttctggtgtaggacaaggaagaagagttttatctccacctaaatcccagtttgcctgtgctgtaagtattacactaaaaatggctgtatgtataaactggttggttgtggctactggttagcagcgaaaggttcaggtagcagtttttaatc

SEQ ID NO: 273951 - DNA, 708 bp, Zea mays
cacaggtcatggactcgcgggccgacccacgcctcaatcgccctgcgagagagctaatccagaaggaaagaaagaaggagctggagaagctgaagtgtgagaaaggagaaactccgtcggatcctccgaagaaggaaaaggaggagaccatcattctaaggccgctgaacatgacagatctgaaagaagcaaagaaccaggtggctgcaagtttcgctgctgaaggcgccataatgagcgagctgaggcaatggaacgagttgtacggtgaaggcggctccagaaagaagcagcagttgacatacttcctctgagcaatatgaaaatcaggcgcaaaaatgtatgaacataatttgagaagtagagtagagcacaaagcagccatgaggaaatagaccgaacatgtaatcgtgtataagaagaacatgagaaaagggtgcgtgttagggggccaaggacaagaaatcaggccgtaaaagccagtatctggtgtaggacaaggaaggacagttttcatctcccccaaaattccagtttgcctgtgctggttgttgttgtattacactaataatggatctgcggtgtagatcgctcttctcttcatcttttcctggtcgcatcatccttctgtatatggacaaactggtaggttgtggcaccgaaaggtttttaaaccagcttatatatatcttctccaagccccccagc

SEQ ID NO: 273952 - DNA, 400 bp, Zea mays
ttttaatataattgctatgcttagtgtgtgactcgttagttttttctttagggtcaaaaatggaaaaaaacttagtaatgatagaaaattaactaataaccaacctattgcttcgtattgtcgagatcctaactaagaaacagtcactatgtgaataaatacatctatcaaaaatgagtagatctatcatatagttgtagcaactgcatttttttctctacaaaagaaacctgattctaggctgtgaagcaaaactaaagggatgtggataaaaggagggatgatagatagaaggaagaagaataagaaagatataggattcccatatgtatggtctatgaattacatcataaaaaaaaggcaatgtgataaagcatcaatataataaaattctcaaaaa

SEQ ID NO: 273953 - DNA, 725 bp, Zea mays
acccgcgggaggtgttcgaggactacctccgcgacatagcgccccggtacacggccgagacctaccgcctgctcacccacaactgcaacaacttcagccacgaggtggcgcagttcctcgtcggcactggcgccggcgtgcccgactacatcctcgacctccccgccgaggtcatgtccagccccatgggcccgctcatcatgcccatgatccagaacctcgagtccacgctcaggagcaacgtcgctccgcagaccacgcagttcgtgcccacgcccgcctccgtatccgcgccgaccgaggctcccgcctccgagcgaaaagcgccggcgccggcggagaaggcttcgaaggaagctcctactcctgcgcctgcgaagaaggaagcccctactcctgcggctgacccgctcgggagcgccagggggaaggtgcaggaggaggtgatgaaggagttcgcggccatcatggccagcggtacgctacgggccagcgaggcggcggcgctggccatgcgccgggtcatggagcgccacggcgacggcgccacgatgcagcagggctagacgaatcaggctgtgaacgcgttccggttccatgggaattggaatttgtcatctgcatgctgatgccgccgccgtatggaaaaaaattggagaagttattcctgatatgttcgtgcgaatatttgggttggcattaattgcggccgccggacttgttgc

SEQ ID NO: 273954 - DNA, 415 bp, Zea mays
cccacgcgtccggtttctttctttctttctttcttgggacgatatggatgccgccgcggttccgtcgttgctgtgcgcaccgtgggtccgcgccgcggccagagaagggtgagttctgcatcgacgacatcgacctggacgagaagagcaacaaggtgaaggtgacggggcccttcgacccggacaagctcgccgacaagctgtgctgcaaggcgtgcaagatcatcaagcagatcgagatcgtgtgagccgtcgtcgtcgtcgccggagaagcccaagaaggaggaacccgccccgccgccgtcgaagaagaaggaggagccggccccgccgccgccggcgaaggtcgagccgcagaagcctccgccaccgaaggagaagcccccgccaccagcaccgaaggaggagccaaagc

SEQ ID NO: 273955 - DNA, 382 bp, Zea mays
ctcgcgtttcgatacaagcctctacacttcgtcatatcacagcacgatcgagccagttgcaatcacacagcgcagacgatgccgaccatcatcgtctcggtggacctggaatgcagccgctgccgcgccaagatccagagggtgctcaacaggatccaagagaagggcgagttctgcatcgacgacatcgacctcgacgagaagaacaacaaggtgaaggtcacggggcccttcgacccggacaagctcgccgacaagctgtgctgcaaggcgtgcaagatcatcaagcagatcgagatcgtcgagcccccgcccccgccgccgcccaagcccaaggaggagccgaagaaggaggagcaagccccgccgccgccggagaaga

SEQ ID NO: 273956 - DNA, 403 bp, Zea mays
ctcgcgggtcgatacaagcctctaaactaagtcatagtaaaaaaaaaggcaggaggccggcgaactacgcgaggaaaaattttctttcccgggaggctcgggagtcggacacgccacacgctttggtcaaaatcgtttccggttgttagcgcggctgctgctgccgctgctgtcgggggcgagcaggaaggggagcgaacgagcttgggcagctcaagaagaggggacgggggagggagcctgtggaaggcacctgagtacgcgtgaaggagcccgcgcgagagtaggggggaaaccaaatcgagagacatggactcggagcacgggatctcgcgcctggccgccgccaagcgttactacgcggcgcagctcggccgcgtcgacgatgtgcccgggatgggga

SEQ ID NO: 273957 - DNA, 368 bp, Zea mays
gtattctcttcctgccggccgccagagagatcgccattttgactgagtccctttcgtttctgtacgccgtcagggagctttctccggccgccgttctactcggttgccagggagaaccagccgttggctgaacctggccactaatttcctagccgagcccaggcaactgaccggacgaccgtcgatgaatcggccggcagccatactcggctgttcagtctgcgcggcgaagcgagggccctgcgggctctcccgccggcgtgcgcgtcccctagtgcgggcgcgccgccgtcggtagagcggtcagcggtggtccctgcaaacccggctaaatctgttgttactgtgaactttcgttttctcgcccg

SEQ ID NO: 273958 - DNA, 405 bp, Zea mays
taggacgcgtgggcgcgcgccacgccgaggcgtcgagccatcagcccatcacccacccaacccctcgccacgcagatctagggagcttgccctcccaccgggcggtgattcttccgtcccatcaccgatgcggacgccggcgatgctccggtgggccgcggcgctcgcggtcctgctcgccgtcgccgcgccggccgccgggttctacctccccggcgttgccccgagcgatttcgcgaagggtgatccgcttccagtgaaggtgaataagttgacatctatcaagactcaactcccgtatacatattattcccttccgttctgcaagccagatgccatagtcgacagtgccgaaaatctcggggatgttcttcgtggcgatcgcattgagaactctccttatgg

SEQ ID NO: 273959 - DNA, 781 bp, Zea mays
cttgttcctacaataacttgcacctcttctaatgttgttccaactatactacaggcagtttgccaaataccaaatgttaatgtctggtatggtcctgattcatatatgggtgcaaacatagcagatttatttcagagaatggctacaatgtcagatgaagaaattgcaaaaattcatccagaccacaacagaaaatctttgagttcattactgccacgcctacactattaccagggtggtaactgtatggtacatgacatgtttggccatgaggttgtggggaaaataaaggaacaatattgtgatgcatttctaacagcacactttgaggtccctggagaaatgttctctttggcaatggaagcaaaacaaagaggaatgggagttgttggatccactcagaatatcttggatttcattaaggatcatgtgatgggagctctggacaaaaatgtagatgaacaccttcagtttgtgttaggaacagaatcagggatgatcacttcaattgttgctgctgttcaggaattacttcatttttattcttctcaagagagagcaaacatcaaagtagaaattgtgtttccggtatcttcggatgcaatttctaagacatcgaatggttctcatcatgttggttcttcaatggctactgatttgaatagtcttactattgttcctggtgtgagttctggcgaaggctgctccattcatggtggttgtgcctcgtgtccctacatgaagatgaataccctggggtcgctacttaaagtttgccatc

SEQ ID NO: 273960 - DNA, 565 bp, Zea mays
ggccagccgtgcggcagcttctcccctcctccccctcgtctccgcacagagagggctcctcgctgccgtgtgccggccttcactttcccctctcgtctcctctcctctcccatggctcagcgcgacctctaggtggaggcgccgtcggagctgcgcgcgccggagctcacgctgtgcgccaacagctgcggcttcccgggcaacccggccaccaacaacctctgccaggcctgcttcctggccgccacggcttccgcctccgcctccgtctcgccgccgccgccctcctcctcctcctcgtcgccggcggtgctccagttcgacgagcagcagcagcagcaaaatccgaggccgcgtgcgccggcggcgtccgggcccacggaggaaccgcccaggccggcccgggcgtcagctccggctccggctccggcgtcgtcctcgtccgtccgccggtgccagacctgccgcaggcgggtggggctcacgggcttccgctgccgctgcggggacctcttctgcggcgcgcaccgctactcggaccgccacgactgctgcttcgactaca

SEQ ID NO: 273961 - DNA, 431 bp, Zea mays
ccaagactcgcggatcgacacacgcctctcgtacgtctcacagtccattattgccgtctcccttttgcgtgagcaaagaaagagagcgagaagcagtcgccatgtctggcatcatccacaagatccacgagaagctccacatggggggcgaccacaagaataaggaggacgagcaccacaagaaggccgaggagcaccacaagaaggatgagggggagcaccacaagaaggacggcggggagcacaaggaaggcatcgtggagaagatcaaggacaacatcaccggcgagcacggcgacaagtccggcgaccacaacgagaagaaggacaagaagaacaatgataagaagaagcacggcgagggccacgaccacgactgcggccacagtatcagcagcagcgacagcgactgagatctggtgtcgcagcac

SEQ ID NO: 273962 - DNA, 266 bp, Zea mays
gtgatgcgcgtgcgtatggctttattacaaataaatttggagctctgctggtgagcagaggtgggctgttcgtcgccaccaagtgatgcgcgtgcgtgtggctttattacaaataaatttgcttctgcaattcaccgatgggattcgcttcataacgtgattttacataactgaactctgagagtctatcctattgctttgtgctttgggacaatgagactgatataacttttacggtcctgttaaatatagagtgtgctgcactg

SEQ ID NO: 273963 - DNA, 272 bp, Zea mays
gcgggtcgctacgatacccgatacttactcgtaatgaagagtgtgttttagcgttgattgtacacctgtttgttctttgtaaagccggtgcatgatctgggaatttgtttcccatgtgaggtttcaaaacgatctctgctctaccacaactccacaagccaagtttgcaagtgggcgtcgtcaagaactcaagatctatggcacatacgttttcctgtgtgtgggttcccttccacttgtctccaatatattcttacaacaagagcatctcc

SEQ ID NO: 273964 - DNA, 834 bp, Zea mays
ctcgtgggtcgatacacgcgtctaccctcgctctcgctctctctctccgtcggcgacgagcctgggcgacctgcgccgccgcccctagcccaggtctccatcggacgcttcgccaggtcttgtttagacccaccgccggcaacgagcaacttttgttatcggatcccgcatcgtggaatgcttgccaaagggaggaaggtagctggaaggcgtgaagaaatgtctgcaaattatgcgtttggaccacaggatgatgatgcgattattaaacacaggcttctgactaggacaacgaccaccaggggtgaaccgccactaaagaagcttcagaagaagttcatgtcctttgcaactgagatcgagaaggatgcagataacataagtgactgtgaaagactgtacaaggcctttctacatgaaattaacacctttgagctacctcttctgaaaagcaaggctgtggttgatgcaaacattagggagaaagaaagctttaatgagctgcaggttgagattgagcggcagatcttgcatgctaagactgatattgaggaccttaagaagcaacttgagcagagcaagattgataggcagcacaaagaagagtgtgaagccatccggaagctgatttgtttgcagcctccacggtcagaaactgaaaaactcattgcagaccttgagaaggagataactgatttgaatgctgagaatgtagcatgcataaggactttgtaactgaggaagaagcagtttgcccttcttctacatgtggttgaggaattgcagatctcgattgaagatgagcagaagagtatagcagatgagctgagaact

SEQ ID NO: 273965 - DNA, 272 bp, Zea mays
  unsure (1)..(272): unsure at all n locations
ctcgagcgcatctgttccaggcccatgtaaatttgcactgtgtccggtcccggatgccgatccgcttctatccctgcggccctccctgcccatctcccgatttccccgcgtgcgctctctctctccgtcggcgacgagcctgggcgacaaacaaagccgnccctagcccaggtctccatcggacgcttcgccaggtcttgtttagacccaccgccggcaacgagcaactcttgcactcttttgatttcagttatcggatcccgcatcgtgga

SEQ ID NO: 273966 - DNA, 1013 bp, Zea mays
aaagaacagtgaccttgaagaattgcgtgaactgggttctggaacctttggtactgtgtaccatggaaagtggagaggttcagatgttgctataaagagaatcaacgatcgatgctttgctgggaaggcttctgagcaagagcgtatgaggactgatttctggaacgaggcagacaagcttgcatctttgcaccatccaaacgtagtagccttctatggtgttgttgtagatggacctggtggatctgttgcaacggtaacagaatacatggctaatggctcactccgacaagcattgcaaagacatgaaaagatctttgatcggcgtaggcgtctactaattgcaatggatgttgcttttggaatggaatatctccatgggaagaatatagtgcattttgacttgaagagtgacaatctgcttgtcaacctaagggatcctcaacggcctatatgcaaggttggtgatttgggattatcaaaggtcaaatgccagacactaatctctggcggagtaagaggaacacttccttggatggcccctgagttgttgaatggcagcagcagccttgtctcggaaaaggttgacgtcttctcgtttggcattgtgatgtgggagctacttacaggtgaagagccttacgccgagctgcactacggggccattataggtgggatcgtgaataacacgctgcgacctccggtgcccgagtcctgtgacccccagtggaggtcactgatggagcggtgctggtcagccgaaccgtcagagaggccgagcttcaccgaggtcggcaagagccttgcgcgccatggcttctcctaccaaggcacaacaatcgaaatagatgctttagccttgcctctcgcgtccttctgttcagcagattgtttcagtcttcaaaccgaggaggtgcccccatggctggcctgccttttgtacatgaataagttgaagaaaaatacgagaatgtggcatgcttatagagtcggtggatgcatgatcccccccg

SEQ ID NO: 273967 - DNA, 596 bp, Zea mays
  unsure (1)..(596): unsure at all n locations
gtactatccagcctgatgctatcaatctcataaggatctattgccattttagtgctacagtttttgctcatctcagttattgtttgatgaggtttctttgaagataaactgtttcctgactgttttgtcaaaattttcggattaactgcaagagatttttagttcagaggccaagtattccatgttacgtttttggttttgctagtggaatgagttttgggtttaccggagtgactttttttttgttttgcttctcagagtaacagattgtgtggtctctcaggatatggtttgtgttcacttcaattattgttcaatgtaaatcctgcttgaagatgcatcatttttatgtatgaattgaaacgttcaattgcctgcaagaactcgagttcagacgtatctcttgttgagctgtcctcagactctttttttttagataacgtgtccttccactcttaagcaagcataaatgctttttactactgatttgaacaaccatcttgtcatgaccattgcgccanagccaggcaggcgctaaggtcgtgggcttgggtcgacctggtatattngttagtggtagataattctagttacga

SEQ ID NO: 273968 - DNA, 398 bp, Zea mays
ctccctatagtacgtcgtattctgccactgcaggggcgtcggatgatgaccaagacgtggaggatgaggatggtgggctcgctggcggggagggctccggggaggctaggcggcggaggatgctggcgagggaggaggcgaagctggagaaggagattgttcggatggtgctggccggggaggccgaggacaagctcaagcccaattcgggccagtccgtggctgtcggcgaccaccacctctgcgtcggtttccacgacgatgccagcggggagtatcgcatctgggaatggcatggccacgtcatgctgttcgtcgacgacgaaggatactccgcagagtacatttatggcaaccacttcgagccgctcgctgctgccacagccagggccaagaag

SEQ ID NO: 273969 - DNA, 434 bp, Zea mays
gggtccagacacgcgtccggagaaagtgatggaagacgaggaggaggggacggtgtggcacgtggcggagcgcggcaagccggagttcgcgcgggccgtggcgctgccggagaacgtgcgcgtggacgggatcagggccggcttggagaacggggttctcaccgtcgttgtgcccaaggaagtcgccccggcccggcccaagcccaggtccatcgccgtctccagcaagctctgatgagtctgaggcgatgagtggcagagtgttcggtgcagtgttaaaccatgccgcaaatggcgggtacgtctgaattctggtcgtgtgtgtgtccgtgtcccctagaaaacgcgcacctcgtgtaaattgtgatacaatttcatgcaagtaatccgagtgagtgaaaatggctgctagccaaaaacggtcgattctgaat

SEQ ID NO: 273970 - DNA, 1464 bp, Zea mays
gcgcgcggcggagcaggcgcgggagctgcaggacgcggcggctgcgctgctgacgcagacgcgggcggaggaggaggcgctgcgccgccgcgccgccgcgttgcagggggagctgcgcccgcgacgcgccgccgccgcggcgcacgcggacagcgacaaggttgaggaggacttggatcgagcagcgtgcctcatcgctgaaggtgacgttgcgtcgctgctcccgagcaagacgcaaggcgcttttctgaaaatgttcttgggaccagtaaatttgcgtgcaacaaggaaggaggtgcagctcaaggtgaaggaggagtacaatagctacagggacagaactgccttgctgtttctttgttttccggtgattttgttgtttcttcgacaatggttatggaatggatgttttccagtattgccagttcagctataccaggcttggttgttattcctgtataccagtttagctttgcgtgagaacatactgcgagttaatggaagtgatattcgtccttgggggatacttcatcactactgtgccatgctgatgtctcttgtaagtctcacatgggagataaaggggcaacctaattgtgcacgcaagcagagaggcgtggaacttttcctttgctgggccataatgcaaggatttgtcatgatgttgcagaatagatatcagcgtcaaagattatatactaggattgctttggggaaggctaaaagaatggatgttgtatggggagagactgctggtgttgaaggtcaattgttgctgttgtgccctctccttttcctcctgcagggattcgagggttatgttgggtttttacttctgcgcacagctcatactggcgttgtccctgagtggcaggttgtggtatgcgggatcctgctgatcgcgatggcaatcggtaactttgcaaacacagtggacaccctggtgaccaagtcccggttcaaggcgaagatgaagaaatccaagggcagacgggacctcgacacatgcccctcgccaacaggttcatcatcgccgatagattcagcgaccaccaaagcatgaacaaggccaagaggaaaaggtgcccgtgtttaacccgggtgtgttaccactgtaaagcgttttagtgtttttttttcttggccgtcagctcgtaatcctggccgtcgtctgtgtcgaagctcatactcgtgtaatcaatcatcaggcaagtaggctgctgatggttctaggctggaggtgaccgagaataaacttgtggtgtttgtttatatacctgtaccctgaatgaacatcgagtgggctagggtggtgggcttaggactatgtaaggcttagcaaaattttccaagtatagttgtgagacaggcaggcatttgtcacaatgaatgaagtatgcgaagttgtataaaaaaaaaaaaaaaaaagggcggccgctcgcgcccacgcgtccgccacggtcc

SEQ ID NO: 273971 - DNA, 738 bp, Zea mays
  unsure (1)..(738): unsure at all n locations
tactacaccctaaatcgttcgataaagtgttgggcacgaatacatggacgatttcttcggctgctgcgagtcccttttggctcaagacggcatatttgtcctgcagttcatctcaatcccagaagaacggtatgaggaatacaggcgcagctcagacttcatcaaggaatacatcttccctgggggttgcctgccttcgttagcccggatcacgtctgccatgtctgcagcatcaaggctctgcatcgagcaccttgagaatattgggtaccattactacccaacgctgatacagtggagggacaacttcatggccaataaggatgcaattttggccctgggcttcgatgagaaattcatccgtatatgggaatactacttcatatactgcgccgctggtttcaagtcacggacacttgggaactaccagattgtgttttctcgccctggcaacgacaaattaggtgacagcggtatacactccttaagcaagctttctggcagctaataatgcgaggatttacatatatgtggtggtagctggatcagtcggagcctacccccctgaacttgagccctgtatttgtgatcgaattggacacccagtgctgtgtacacgtcgctaactaactgtacttgcaacggcgggtcattccattggttcgatcccatttgacgtttcacccaaaacaaaaaaaannnnnnnngggaaaaatataataatannnngaaannaaa

SEQ ID NO: 273972 - DNA, 412 bp, Zea mays
cggtctcatgcgtctaggcttcgattccgccctcctcgaacccgccttccttcccgtcgtcttctccgcagctccatcgtcctcgggctccggagaaggaagagccgctctggcaccaggtcttcgaacctcccctgccctcctccgcctcgtctccccccgtccccgtctcggtctgttgcaggtatgcgtgttctcggtggagcacctcctgcaagctgcccagcgacccggcactgcgcagaatgggcccgaatctacttgaggtactgcttgcgcagccagaaggaaggtgctgccctggcacttgggctaatcagtgtcataagctggggcttcgccgaggtgccacagataatgacaaattacagacagaagtcaacagaaggactctctgtcgcttttcttatga

SEQ ID NO: 273973 - DNA, 872 bp, Zea mays
ttcgattccgccctcctcgaacccgccttccttcccgtcgtcttctccgcagctccatcgtcctcgggctccggagaaggaagagccgctctggcaccaggtcttcgaacctcccctgccctcctccgcctcgtctccccccgtccccgtctcgggatttgtttaaccttgccggttgcttcctcgaacctgcaactctgccaactcagttctacatggcactgctatataccatcacaactctgattcttactggacagacgatctactatagccacatctaccatcatcttaaactaaaaaactccagggcagctagcaagcctcaaaagcatcaacaccgggatgcttcattacgcgaaaagcttttgggtgccaagggcagtgcagcatcaagaaacaatgaatcagatactacagttcttattccaagctcacctatccctgttaatatgaaattggttgaccaataccatggaagcagctccaacgctgactactactacatgtcagcaaggtccttgtccaggagtccagtgccaactgctggtatatggtccggcagtaatcgtcaatcatcaagaagtcctccacaaatgaatgatcaaaggggatctttaattggtgagatcgctccggaacattctgcaccatctactgttacaaaaaatgccctctcagtggcaccatggatgggtcttctattgggtacgtgcctcttgcacattttgattggaaacaaacatagggagatggcaagtggcactgtcataccaattggaagaaggcttttactgtttgtggatgatcatggaaaatcatcgcttagccagagcagtggaagtgaaattggaagctttcttggttgggct

SEQ ID NO: 273974 - DNA, 1050 bp, Zea mays
aattgctgatcgttattcttggaatcactcagtatcagaataccatgtatacgagttctttaagatatggaactgttctcgagaaagagctaattttcttgtccacgagttcttcacaacccattacttccaagatggcattcatcctattccgggggctcgagatgctctccaaactctttcttctttctgtagcttgtctgtagtaacatctcggcaggatgtaattaagaatcacacattggaatggattgagaagtattatccaggcttatttgagcagatccatttcgggaatcattttgctttggaaggtcaatcaaggccaaaatcagagatttgcaggtctttcggcgctcaggttctaattgatgacaaccccagatatgctctagagtgtgctaatgatggcatgagggtccttctgttcgattacgaaagctcgtatccttggtgcaaaactggagccgatgaactccatccgctggtgacaaaggttcacaactgggaagaagtcgaggagaaacttctctcttgggtagtacctgatagctgacactcttctgtcttgtgagaagcactgcttgagaccagcaaatgattccttttgcctggtttctaaaggaacctgatagggtgaaagactgcaatgttcctagagcttgattttcaatacagatgtcgatagcctctccaagagtcattctaaaacccactctaaatcatcatccgaagagtcatttgcataaatttgactccaactccaacagtttttctatatcctgggatatttttcattaaactctctattcacaataattagttaggatatggagagtcttggggatgttgtcaacgtaagctaggatattcagcttcattaccgcagcctggttgaggcatattcgactgtacttggtcagtctgaactgtaggcgcttctgctctcacacatcagaatcttgttttatccttttgccgcagccgggtgtactatgtatatatcgacgctgccatatggctaagatggtattcgaattgttctaatcc

SEQ ID NO: 273975 - DNA, 424 bp, Zea mays
  unsure (1)..(424): unsure at all n locations
ctaagatcgagctccagcagcagcaagtcaagttcgggagagagagagacacagatcgatcgatggcgatgatgaagaagaagggcggcgccgcaacaacagcggtggcagcagtggcgttggtcctgctggcggcggcggcggttagggcggacgtgaactgcgcggacgtggacgcaagcctgcgcccctgcgtcggctacgtgacgggcaaggaggcggccccggccgccgagtgctgcgccggcgtgaagcggatcagggccatgccgtccggcccggcggagcggcggcaggcgtgcgagtgcgtcaagcaggcggcggccaattaccagccgctcaacgccgacgccatccgcgacctcnccgcgcagtgcggcgcgccgctgccgttcccgctcaacctcaacttcgactggcacac

SEQ ID NO: 273976 - DNA, 416 bp, Zea mays
aacaccctatactgacgtcgtactactcacagcaaggcccaagggcagtgtgcatcatttcagcaactggagctatttctacagcaacccttcaccaggattcagactccggtggtgtggttacatatgagggccgatttgagatcctgtgcctttctgggtcatacttggtggtagaggatggtggcacacggtcccgaagcggaggtctttgcatagctttgtgtggtcctgaccacagggttattggtgggactgtaggcggagtcctgacagcagctggaacagttcaggtgatagtggggagcttcatgtacggaggttcgaagaagaacaatgttaaagcggaggtggacatggaacccgaggaggtggcacccgcgggagcacagtggcatggtccctcctgcgatgag

SEQ ID NO: 273977 - DNA, 1250 bp, Zea mays
actacggtagggcatggctcgcccgccggcacgggctcgggcctgactggctggaccgacccaggcgtccacgcgcgcgagtgatcctctccgtgtaggccgcgggattccgtgtccctctccaatccggcgtagccatcgtcgccggatacaggatccggtccccgcgatggagccctcaccaacctcctcctcgccggctgtggcgcgccggttgtcgccggaggtaaggagggtgccgaagcgggcgctggaggagttgttggagcaggtccagcgggctgttgagatgctgcgcgatgccgacgctgatctcgccatctctctctcggaggagaccgcagcagcctcgccggaggccgaggaccgcaaggacgatgttggtgtcgatggagatggcatggcgacgtcgtcggttgcgagtgactccgattacgagacgacgcagatgtgtgaccttcttaaatctaaggttggatcactcgagttccttcaaaagctcaatggtattcagaagtcagtaggtcagaatggtgcagttgaacctgatacatcatgggatataataacgtcagtggatttgtgggaagatggtggctcagatgatggatatgtacttgttaagcaggaggatgtggttgatgggatgacttcctttatggctgcatgcttggtgtcaattaaaaagaccaagggacctgccccctgatcaacttcagaaagcgcttaggaagacgttttcagctgaaaagaagaaaggtaaaatccggaaggcatgggatggaactaaagtcatttataatgttgcttcatggggcgccactgccgttggggtctacaataatccagcattacttacggtcgcaactacagcgtttcggacttcctgccgtgtgatatccaagttcctttgaatattgtgtagggtatgttagaactgcttgcgtctgcttttccgttcttcagctaataaaaaggtagcataaagtcggaatccatttacttaaatctgtcctgtttgccagcgacatcaagatttcgcagtcgagttcgactgctaattacgtattctcttcattttttttatttgtcgcggtttagttcaaaaatgaacaaatattagcatttagcagcgcctctagtccaaagcagcgttggtattgcacaactgtaaatgttgccttgcattgaacaaacttgcttccgtgccagaattttattttggtcacctgaaattattactttgtact

SEQ ID NO: 273978 - DNA, 744 bp, Zea mays
  unsure (1)..(744): unsure at all n locations
cccacgtgnccggttgaacctgatacatcatgggatataataaagtcggatttgtgggaagatggtgacccagatgatggatatgttcttgttaagcaggaagatgtggttgatgggatcacttcctttatggctgcatgcttgttatcacttaaaagaaccaaggtagctattttcttcacttgatgggatcatcatggtgagcgaggagttcatgtctctgcatgttgtatgggaggtgcttttatatatttaatgtgtgaattccatgtttgtgtaggacctgccttctgatcaacttcagaaagcacttaggaagatgttttcagttgaaaagaagaaaagttaaatccggatggcttgggatggaactaaagtcatttataatgttgcttcatggggcgccactgctgttggggtctacaataatccagcattacttacggtcgcaactacagcgtttcagacttcttgtcgtgtgatatccaagttcctttgaatatcgtgtcaactactagggtgtgttagaattgcttgcgtatgtgcttttccattgttcaggcagcataagcttgagaccatttgtttagtctatgctgatgagttcgactgctaattatcagcacctcagtccaaagcagcatttgtattgtacaactgtaaatattgccttggtttgaacaaactgtcttttgtgccagaactttattttggtcatccgaaataataattagtctgtactag

SEQ ID NO: 273979 - DNA, 411 bp, Zea mays
gaccacgcgtccgggacctgggccaatccaacgctattacgcaacgattagccaaacagatcaatcatcttctacttcttcctgtaggccgcgggatcccgaatcccaatccgtagtcgccaccgtcgccggctacagggttcggtccccgtgatggagccctcgtcaacctcctcctcgccggctgtggagcgccggttgtcgccggaggtaaggagggtgcggaagcgggagctgaaggaggcgctggagcaggtccagcgggcggttgagatgctgcgcgatgccgacgccgatctcggcatctctctctcggaggagaccacagcagctccgccggagggcgaggaccgcgaggccgatgtcggtgccaatggagatggcgcggagacgtcgtcgggtgcgagtgac

SEQ ID NO: 273980 - DNA, 399 bp, Zea mays
tttcttttgtctcgggtttctttgggattcttataaatggtggatgtgcatgggtgctaactactgtttgaacgaactggccacgccttggctctcattttctgccagcatcggatgtttttgactgaccccagggcaccttatatctattgttgtgagggttaaattgtaaaatttctggcccgtggttcattccttaccaactaatgcactcaggtgtaaaagaaaattcctgtaatgtatacacaaacatttatatacaattttgcactgtaaatatactaatattagtttcaatggagtgcacccacaaattaatgtacctgcccatgtaaataatttatttttttcttacaatgaaatttctattaaaatgttttaagctagttctaagatcgc

SEQ ID NO: 273981 - DNA, 243 bp, Zea mays
gtccatgcaagcctctacactgagtcgtattaattgtctgtttgctacaggttgcactgtgtgtgaggttggatcatttggattcagatgttcgtggagacatgtgatcgacaagaggtcggtggcagaaacttcagtttggcagattatgtagagcataattttgattcattcttaggccttttttgtttgtgccagattggtgggttggaacgattactaaccagattgtttctctaattt

SEQ ID NO: 273982 - DNA, 406 bp, Zea mays
attcccagagacgtactcaagttgcgagcaagaggactgaaaaagctagggacgatatttcaaggcgcaaaatcaaactaccgtcgtgaaaacagcctgcgtgttgaagatgacgcggcagaagccacaccgtcgcactgaggatggtggacaaatctggatatgatgtcatatactgcgtcaccggctcaccgagactgagcccgaaagccgaccactgtggaaggagacaaacgatgctgtttttccaaagatttttgtacggtataagcgcaaggtattgctaccatgccatactttatcgctgtccgcactgcatatagttctgttggacgaaaaatgtaatatttgaagtcaaaatgtgatgcgtaatgatttaagcgcatgatcataggctttgaatgtc

SEQ ID NO: 273983 - DNA, 420 bp, Zea mays
taaaccgactctgtccaccgagatatttttctcttctcgcctgtgcggccactgccacccgccccgttcgttattagatatacaacagcaggctgccagtcgccctcgttgacatcggttcaccgtccgcccaggtaccttccgtacgtgcaggaggcggtcgcgacgctctagcttgcattgcaccagcgcgcagagctgcaggaggtggaaagcgcccagagagatctcgagagagagagagaggctggtcggcacagactagttcattccgtttggatagagacgcacgcaacgcaggccaccacaacgtgaggagcgggaggaggagggagaggatgcaggcgcatcaccgtcagtcgtactacgcggtgctcggcgtgcagccgggcgccaccgccgccgagattcgcgccgcct

SEQ ID NO: 273984 - DNA, 735 bp, Zea mays
ctcgagccgctcgagccgctcgagccgaatcggctcgaggtacactggtgctgtgtgccacgtttgtactaatgggtgatgtagtaacaaagaagatcatggaatgggttatgagtgatgctgaacttgttaagtcttttggtatatttgtacggctctccaatgatattgtatcaaccaagcgtgaacaaagagagaagcattgtgtctccactgttcagtgttacatgaagcagcatgaactaacaatggatgaagcatgtgagcagataaaagaacttacagaagattcatggaagttcatgattgaacaaggccttgcactaaaagaatacccgataattgtgccacgaaccgtactagagtttgcacgaactgtagactacatgtacaaggaagctgataagtacactgtctcccatacaatcaaagacatgttaacatcgctttatgtgaagccggtactcatgtgaaggttctttattgttatcttggatcaagagaatatcaacatgaagcactacttcaaggaggccaaataactacatgagctatatatattgtacaccttaagtaatatcaagggatatggtgatatatatgtattactcaaagaaaaatgtcaacaaccatcctatagttgttgttctcgggcattgtagtaaaatacatatcttgccatatgttgcattgtgctatgtttccttcagctaaaataaagaaaattttctcttt

SEQ ID NO: 273985 - DNA, 523 bp, Zea mays
caatattctcattctcgaattatacttacaaagattgttgctttcatcacgattctagatgatacccttgactcacatgctaattcttatgagagtatgcaacttgcagaagcagtcgaaaggtgggatgaaactgcagtctctctactcccagaatacatgaaggatttctacatgtatttgttgaagacattttcatcgtttgagaatgagttaggaccagacaagagctaccgagtgttctacttaaaagaagcggtgaaggaattagttcgggaatataccaaggaaataaaatggcgtgatgaggattatgtccccaaaacattgaaagaacacctaaaagtttcactcataagcattggaggtacactggtgctgtgttccgcgtttgttggaatgggtgatgtagtaacaaagaagatcatggaatgggttatgagtgatgctgaacttgttaagtcttttggtatatttgtacggctctccaatgatattgtatcaaccaagcgtgaacaaagag

SEQ ID NO: 273986 - DNA, 676 bp, Zea mays
cacgccacgccaaccccgggctcaactcgagtccacacgccccagcaccacccctgcctctcagtccagtcccccacccaccaccaccactcctcccctcgccgccgcccgttcccgaccgatccggccggatcgccccgccatggaccagtacgagaaggtggagaagatcggggagggcacgtacggggtggtgtacaagggcaaggaccgccacaccaacgagacgatcgcgctcaagaagatccgcctcgagcaggaggacgagggcgtcccctccaccgccatccgcgagatctccctcctcaaggagatgcagcaccgcaacatcgtcaggctgcaggacgtcgtgcacaacgacaagtgcatctacctcgtcttcgagtacctcgacctcgacctcaagaagcacatggactcctccacggacttcaagaaccaccgcatagtcaaatccttcctctaccagattctgcggggcatcgcctactgccactcgcaccgcgtgctccaccgcgacctgaagccgcagaacctgctgattgaccgccgcaacaacctcttgaagctcgcggactttggactggcgagggcgttcggcatccctgtccggacgttcactcatgaggtacgtttcgcaccctgatgacacgctctcgatctggtagtatgctgg

SEQ ID NO: 273987 - DNA, 960 bp, Zea mays
  unsure (1)..(960): unsure at all n locations
gaccggaacggaagggccgagccaacccacccgttcggtgcagcgagggaaaagccaaagccccccagggcagcaggaagcaatagaagcgagcgaggcagcggcgtggggcgaggagtggaggacaccgatccccgccggagagcgcgtccatcccaaatggcgactgcagcttcgcccgccgctgcctttccccacatcctctccctctcctcctaatcccctcccaatccccccctctctctctcttcctcgccagctggttcgttccgcacccgccgccgcattgggtgccgaggagggacgcaatggagcagtacgagaaggtggagaagatcggggagggcacgtacggggtggtgtacaaggcgctggacaaggccaccaacgagacgatcgcgctcaagaagatccgcctcgagcaggaggacgagggcgtcccgtccaccgccatccgcgagatctctctcctcaaggagatgaaccacggcaacatcgtcaggttacatgatgttgtccacagcgagaagcggatatacctcgtcttcgagtacctggatctggacctcaagaagttcatggactcttgcccggagtttgctaagaatcccactttgatcaagtcatacctctaccagatactccgcggtgttgcgtactgccattctcatagagttcttcaccgagacttgaaacctcagaacttgttgatagatcggcgcactaatgcactgaagcttgcagactttggtttagccagggcatgtggaattcctgtccgtacatgtactcatgaggtagtgacattatggtacagagctccagaaatccttcttngagcgagacagtattccacaccagttgacgtatggtctgtgggctgtatctttgctganatggtgaacgtaaagccactatcgctgggtgatctgagatcgacgaactgttcnaagatatcag

SEQ ID NO: 273988 - DNA, 598 bp, Zea mays
gaagcgagcgagcgagcagcagtaggcagcggcgcgggcgaggagcagaccagcacccagcagccctcgtcggggggcggcactgcagcttcaccagccgccgcctttccccgtctcctctgcctctgcctctccccctaacccccttccatttctccaccccaccccgctcccgcttccgcttcctcgccacttagttcgttccgcacccgcagccgcggctgcgttcgcattgggggcacgcaatggagcagtacgagaaggtggagaagatcggggagggcacgtacggggtggtgtacaaggcgctggacaaggccaccaacgagacgatcgcgctcaagaagatccgcctcgagcaggaggacgagggcgtcccgtccaccgccatccgcgagatctctctcctcaaggagatgaaccacggcaacatcgtcaggtccgctttggttttatgcaacagcgggttacatgatgttgtccaccgcgagaaccggatatacctcgtcttcgagtacctggatctggacctcaagaagttcatggactcttgcccggagtttgctaagaatcccactttgattaagtcataccttta

SEQ ID NO: 273989 - DNA, 736 bp, Zea mays
gtgttgattgatttgtgttcctccaagaccacatggttcttaactactggaacctgatgcaagctgacaaggaaaaactttggattacaaataagattgcacattcttgggttactgttccattggagacgaataaagaggaatggtttgtaaagcaaggtgatatggtcaagcaggtcattggcagttccccagttcatttccaaacaaactacaaggagagcatgggcgaagataaaattatattctgtggtagtgaactattctacgtgccccggcggtttgttgaggactttggtgaccttgtgggtcttgtcggcaatttggatttgcatcacaagattgcggtcccaatgttcttcttggcaatggactcgactcaaaattttgactctgatgctctggctggaacagtgttcaggccacagttgccagctaatgcgacgttctcgtctatttatacagctcaagcacctgctgttttccctgtgaaagttatgaatgagattgatttcataaaggtgattcggctaatgtccataggagacccacttctgatggagttcggttaacggtgtaatgtgtagttgaagtgcaagcttatccttgtggccatgaggacagagtagaaaaggcatagttttgtgttttctggtgtttttgtaatttcatttattttgttcattctgtagctgtttattcctctgctgttgtatattggtgtaccattagtgcc

SEQ ID NO: 273990 - DNA, 469 bp, Zea mays
cccacgcgtccgcccacgcgtccgcgctcgttccctttcgaaagcccgcgcacgcacgtcggtcgtcccgagcaggacctcgatcggccgagatggcgacgccgaacgggcttgcgcggatcgagacgaccgggaagaagaagcaggacaacggcgtgtggtacgacgacagctcggcgccggtgcgcgcgcagaccatcgacgagctgcactcgctgcagcggaagcggtcggcgcccagcacgcccaagcggtcggcgcccaccacgcccatcaagggcggtgcccactcgcccttcgccgtcgcgatctccgaggaggagcgccacacgcagcagatgcagtccatcagtgcgtcgttggcgtctctgacgcgtgaaaccgggccgaaagtggtcaagggcgacccggccgcgaagggcgaggccgccgcgcagggcgcgccatcgacgccgagggcgcaccagca

SEQ ID NO: 273991 - DNA, 485 bp, Zea mays
gcgtccgaccacacgtccgcccacgcgtccgctcgtttccttccgatccatacacaccgcgcacgtacgcgtactccatcgtcccggtgcaggcgggttcacgtcacgacctcgggcgagacgagatggcgacgccgaacgggcttgctcggatcgagacgaacggggcgaccaagcccgacaacggcgtgtgccacgacgacagctcggcgccggtgcgcgcgcagaccatcgacgagctgcactcgctgcagcggaagcggtcggcgccaaccacgcccatcaaggacggcgccgcctcgaccttcgccgccgcgctctccgaggaggagcgccacaggcagcagctgcagtccatcagcgcgttgttggcgtctctgacacgtgaaaccgggccgaaagtggtcaagggcgacccggccggaggggcgaggcccccgcgacgggtgcaccgtcgacgccacaggcgcaccacagttaccacc

SEQ ID NO: 273992 - DNA, 425 bp, Zea mays
tcgatcaagaaatgcatgggtcattaggacatggtgaagaggagaatatggaagaaggaacagatgtacatctttgtgatattaatggcaaagaagtagatgaaaccttgttagaaaatagtgtgtgtacagatactgaagaaggatgtgctcattgtaaccaggaagaccagaattcatctgacagcaccaacagaggaaaaagtgatgtagataacatgtgttatacatcttgtgacgaggttaggtctgaatcattttcaggcgatgaagttgttatcaaaactacaattgatagcactgccagaacatttgttaatttgaaagatgagcaggttttgtcttcagaaatgtatacccgcatgcagcactcaatgcacaaagatggtactgctgcctttcagacatctgggggtgttcctggt

SEQ ID NO: 273993 - DNA, 765 bp, Zea mays
aagcagtagcaagtagcagcatactgtcctacgcgaatcgattaacgggcggcactcacccaccgtgtggcctgccaaactgtcccctaggccccggccccgcccgcgcctggccagtggccatccatcccttcccttcgcttcgacgcaccaatcttgtcccggcgcctgccaaatccagcaaggccacacagcccgaggcaggaagggcagcgcaggaacagggagcgagcagcgcacgggcaatggcggcttcttccgggacgcgctccgtgcgcctgctggtgctgctgctctgccttctcgggttctgcgtcgcgctgagccaccaggagtcggcggcggactcgtgcgccagggccaaggtcgcggtcgccagcctcgtgcccttcgactccacgtccttccgctgcaccgccgcctggaagcagcaggacttcgtcctcaggtacaagaacacggggcccagcgagtggagcttcatcctctcggcgccggacaggggctcgtacgtggcggtcggcttctcgggcaagggcgccatggtggggagcagcgccgtcgtcgggtgggcggccaacggcaggggcaccgtcaagcagtactacctcggcgggaagagccccgaggagtgcgcccccaacaggggcctcctcaagctcgtcaggaacaggaccgccgtcgcctcgcgctccggccgcctctacctcgccttccagctcagcaccgactacccgcagccgtacctgatctacgccgtcgggc

SEQ ID NO: 273994 - DNA, 644 bp, Zea mays
aattcagcaaagagatgacaaaggctggtgtgatggaagaaatggtcaacgatgctttagattcaactctggacagcgaggacatggaggaggaaattgaagaggaggttgacaaggtcctcactgcaatcgctggggagaccgcctctgagctcccggatgctgtcaggaaggaaaaggagaagatgaagcagccttcaacaagtgtacctgcggagagaactgctatagcagaggctgttgatgacggtgagctagaccagataagggaaaggcttgccagagtgaggtcatagaagatagctgaacaaggtcagatcattgaggtgttacggcacatgacatctcacttgataatgtatacacgtatcacacacaatcactgtgattagcagaccgatttccccacatccagcaatatgtgattttgtccaggccctgttgtaacctgtatgggtcatgatttctaatatatatcacgtattatatgtttggaagcaccgtttttaatactctgaataatccatacatttcattgcactgcgacgaagtggaaagagaagagaagtggatggcacagtacatgacaccttcccagcactgatactgtaaactttgtacctcacttattacgtacttattat

SEQ ID NO: 273995 - DNA, 1442 bp, Zea mays
cccacggccatctccaccggatccttcctccacacctcctcaaccgccgcctccaagaccctagtaccgaaccccaacctcgtcccgctccggctcgtccgccacttcccggccatggccgccaccgccgcagacgagttcgtgaagggccgcgtcttccccaacggcgtcgccgtcatcacgctcgaccgacccaaggccctcaacgccatgaacctcgaaatggatgttagatacaaggcacttcttgatgaatgggaaacaaatccaagtgtcaagtgtattcttgtggaaagcagctcttctcgtgccttctcagcagggatggatattaagggggttgccgtggaaatacaaaaagacaaaaaaacaccacttgtgcaaaaggtattcacagtagagtactctttaatttgtaagatacatgagtctgcaaaaccttatatatgcttgatggatggagtgacaatgggatttggaattgggctatcagggcatggccgctaccgcattattacagagagaacactcctagccatgcctgaaaatggtattggcctgttcccagatgttggctttgcttacattggtgcaaaagcaccaggagggggtgcagttggagtttaccttgggattactggaaaaaggatatcatcacctgctgatgctatgttcataggccttggtactcactatgtaccttctgcaaatttgggttcactcaaggagtccctgctgagtgctaacttcaccaatgatcctcatagagacgttgagtcagttctgacaggatacaagaaagaaccagagtctgaaccacaactaaaaaagcttttgccatatatcatttcttctttcagtcctgataaatcagtggctgaatctgtggaagagctaaagaaatgtagccgaagtggtgatgctgcagtggcagaatgggccaatgaagctttagcaggaattgagaaaggcgctccattttctctttgtttaacacagaagcatttctctcaagttgcatcagcatatgggactagtgaacactatttatctaagctggctggtgttatgaaattggaatatcgcattgccttgaggtcgtcgattagaaacgattttgttgaaggtgtgcgtgctgttttagttgacaaggaccagaatccgaagtggaatccagccactctggaagaagtaaacatggccgaggtcgaatcagttttcgagccattaggggccgaggctgagttgagtgtgtgaaatatggcctgccacactcagttttcttatttgtgctgcaataataatgtatacaaaacagaaatgcgatgcccacagaaacaataaatgctgtgtcttcatgaaaaaaaaaaaaaaaaaaaaaaaaaaaaaaaaacaaaaaaaaaagaaaacaagacaaaagaaaaagaacgataaaggcaacg

SEQ ID NO: 273996 - DNA, 218 bp, Zea mays
atcagttttcgagccattaggggccgaggctaagttgagtgtgtgaaatatggcctcccccactcagtttttttatttgtgctgcaataataatgtatcccaaccagaaatgcgatgcccccagaaccaataaatgctgtgtcttcatgaactaactggagtggttccattttctcgaaaggggcgcgtgggaatctaaggtctgttgcttgctttcc

SEQ ID NO: 273997 - DNA, 295 bp, Zea mays
gggccagcacgcgtccgaattgggtccgaattctgattagcccgtgctgatgcttgcaatgacattggttcttctgtgtacagactgcggacagagtcccggtcagtaacgtgtgtggacttgttcttcctctgtgttgacattcttgctcgatggtggaacctgtcgcagttggcggaggtgaagccgcgtagctcacttaggtcggccaaacacttcacttcttagactgtttctgtggaaatcgcttctgttgaatgcaaaatcaattaagtcgtccggttttgatgggagg

SEQ ID NO: 273998 - DNA, 741 bp, Zea mays
cggacgcgtgggcaagcgcgcgcgcacacagagagagagagagagagagagagagagacaagacaacagcaacagatagaccgggccaagttcgtgagtccatcgtgtacatacggccgagtggcgacgccgtcgtcttcaccacgcacgccgcgcctcttccatagtctcgctcgcctccattaattccaatcctctctcctccgctagcgctccaccagcacgcaccggcagatgaagaacatggcgtctacgacggtacggtgatcaccttcatcatctcatcactcgttcatcgcccgccggcccgccggttgttggtaggccagggtcagccactcagccgagccagccatgaagctcgtcgtcgagatctccgacgcagccgacctcgcccccaaggacggcaccgcctcctgcaacccctacgtagaggtggacttcgacgaccagcgccagcgcaccgtcaccaagcccgccgaccgctccccgtactggaaccagacgctggtcttcgacgtccgcgaccccgcgcgcttcccttccctccccatcgacgtctccgtcttccacgaccgacgccttcaggaccacaacgccctccgtccacagaccttcctcggccgcgtacgcatcaacggcgccttcgtcgcgccgtcgtcacaggaggcggtcctgcaaaggtacccgctcgagatacggagcttctttcacgcgtttgggcgacatcgcgacaggatc

SEQ ID NO: 273999 - DNA, 398 bp, Zea mays
ccaaatccaagcaaattgggcgtccgagtttctgactgatgaagatataaccgaagggcacggataccagcttaacgtcgacagtgttacggacttgaggcttgagatggcctttccagctcaaccagtctgttgcagacttgtagctttgggtgtacatagtttatccttttttttcatagggtagaaaggaaagcgtaattatccttcgcaaaagctgttaactgtgtattgaggcagcttatgtcaatatgtactatacctgttggtatcgattgttttaatgatccaaggcatttgattggtaaaaaaaaaaaaaaaacaacacaaaaaaacaataattcaaaacaaaacaaaaacaaatagcactcgacaacaacttaaagggaagatgagga

SEQ ID NO: 274000 - DNA, 537 bp, Zea mays
tccatggaactaggacagatgttgaacttatccatcccccggccataccccaggctcagtgtgcttgtacttcaaaccgctaaaggggctgttcactggagaccatgttgcaaagtcagaagaatcagacgatctgaacctctttctgatgtacagcaagcagtcagtgagccttcagctggaaagcatcaggaagctactggagctagagttcgagtggcttttacctggacatggctatcgaatcaagtacaaagatgtgcgtgccaagaatgtagccatggagtccctcctagctaattacacaagctaggagcctatgagcatcttacttgagttagtgctcgcaaataagcattccaggaggctgaatgttgatgctatgtttccagagaatagtgtgcatgatgctcatcagctcttgaatgtgcatttgttaccagagactgtaccttgtgctgcacaccaagcaagtgaatgaatcaagcatacatgactcggcccaatgaatgctttttccagaaatcttgcaagatc

SEQ ID NO: 274001 - DNA, 279 bp, Zea mays
tctatatggtccatggaacttaggaacgcattgtcgacttatccatacgccaggccataccccatttgaggttcgtgtcaaacatttttctagggctcagtgtgcttgtacttcaaaccgctaaaggtgctgttcactggagaccatgttgcaaactcacaagagtcagacgatctgaacctctttctgatgtacagcaagcagtcagtgagccttcagctggaaagcatcaggaagctactggagctagagttcgagtggcttttacctggacatggc

SEQ ID NO: 274002 - DNA, 499 bp, Zea mays
accgaactagcgaagaaaaggacgcggggcaccatggcgacggcacaggcagcgtcggcgtccccaacccaccaccgcgcgtctccagggacgtcgccgccgcagccgccgtaccccagcgccgccaggatcgccgactccgcctgcttcccccagtacaccgcctcgctcaagtgtttggaggccaaccaggacaagaccaagtgccagcagcagttcgacgattacaaggaatgcaagaagaaagagagggaggctcggctggaacggaataaaaccagatcactctttgggtgaacaatggcgtcccacctgagcaatatgctggcggtgcaataagtctcctgctgatgtgagcgaaatcacggcttttttctttggtttcatgatgatcctctgcaacttgtgcaaggtagggaatagaaatactgatctctagattgagggagatgtaagggcgtctgagaacagctcattaacacaatggctacggtgaatg

SEQ ID NO: 274003 - DNA, 621 bp, Zea mays
ccctctcgtccggccagtccctggcggggtccaagaacagctcgtccagcgacgagtcggccgcgtccctgccggactcccccaagtgctcagcgtcgacggagggggatgaggactcggcctccgccggctcccctccttccccgacgcaggcgccgcccgtgccggagatggcgaagctggacttcaccgaggcgccgtgggacgaaacggaggccttccacctgcgcaagtacccgtcctgggagatcgactgggattccatcctctcatgaacgatcaactacaactagtattttagtagtagtagcagcagcagcagcaaggttcagtcagtgatagctctgtgtaattttcgatttggggtttgcagctgcggtggatcgatggcattttagacatcggccatggcggctgtgttgtgatgcagaagtaaacgtacgtgctaatctcctggttgagctgccggttgttttttctcacggcacggccagtcgagaaagtcagtgtaatcccctgtcatgatctctctgttgcaacttaattaactcttctggggtatgtatgtaaccatgtgtgttcatcttgaacgtatcgtgatgatgtgcgtctttttggtct

SEQ ID NO: 274004 - DNA, 467 bp, Zea mays
tggcgccgcccgtgccggagatggcgaagctggacttcacggaggcgccgtgggacgagacggaggccttccacctgcgcaagtacccgtcctgggagatcgactgggattccatcctgtcatgagcaataacagctccgtgtaattttctactgtttggtttttgcggctgcgttggcccgatggcattttagacgtcggccatggcggctgcaagtagcaagtgagtaactagctagctagtacatcgtcgtcgtccagtgttgtgaagcagagttaagtacatgcgtgctaatctcctggttgagctgccggttgttttttctcacggcacggccagtcgagaagagtcagtagtgtaatctcgtggttttatgatcatctgttgcagcttatgtatggaactttgtctatctagtcctataaattggacaaaaaaaataaaaaaaaaaaaaaaataaataaaa

SEQ ID NO: 274005 - DNA, 406 bp, Zea mays
gacattgatgatcctccctgcgctattgctgcaggagctcttttatttgttttggcaagtgatgtccaggacgataattcgctggattcagaaacttgtgtccatttccttcttaaattattaaaccctccagtgaatgttgttgatgccaaagcgccatcaataggttccaaacttcttggaatcagtaaatttcagatgcttaacagttccaataaggatgcagattctagttcagaggacatacttttaaaagttgaagaaatcctcttaagctgcaaagagatcaagccactagacagtgatgataagaaaacaacaaggccagaactatgttcaaagtggcttgctttgttgacaatggaaaaggcgtgcttgtctgctgttgcattagaggatacatctg

SEQ ID NO: 274006 - DNA, 556 bp, Zea mays
ctcgagccgagagttaggagagctactagctagtgtataaatttgttctagttttttttattttgaaatatttgtttgcgtgttcgtgagattcctggccgttcttagtagtatgcatggtgtggagcactactgtacttccgctcctggatctttactactactccactgtgcttttttgtttgtttgtttgcttgcttccttgctgcgaaatcgaggagcagcgcaagattggtgtaatgatggcctgccttttgacccctcctttctctgtgcatctctgtgcatctggcaggcatgcagcaggtgatgagagttcccatcattacctcttgattgggagaatcttcgctttctctctctctctctcggcttcttcttcttcgtgttcatttctcttcctcctctccgtcgtctctctttgtttgcagcatatggctttgctggtacggtgctcagatttgttccaagaacatggcattcacaaagctggtgcaaagctttacatctgcatcgatctgatgactatatattatttcttgttttcagatatctg

SEQ ID NO: 274007 - DNA, 506 bp, Zea mays
tagtctcagtctcacgagttcttgttcgtctccgcctcaggcaaactccacacggacacggtcacacctcgctcgctctcgctcccgtatcgcggtttccttttcgaagccttgctaggtttagctggggcctccgtctatcctgtcaatggccccttaggcggctgtacttcagacttcagaggtgacgtgaggcgtggggacgcgcgtagctgattggttcgaggaggcggggatggacccggacttctcgccggcgagtgggggcccgagctttgagttcgccttcaactcggtcaacttctctgaccgggtgttgcggatcgagatcgtcgctggggatgacgccctcggggccaagggcgccaccggcgaggggtgctcatctcttgccgactgggcgtgccaccgcaagcgacgacgggaggagctccgacgcgacaaagaatctagaaaatacatgccagatccagcaaactgcaaagttgaagctgaagaatgtgatg

SEQ ID NO: 274008 - DNA, 442 bp, Zea mays
aggttgtgcgatgctttgaggatggtgatatagttcatgtcaatggcaaggtccatcccagatcacacattgatgtcattaacctagagctgatattttcggatcttccgcagatagagaagaggttagataagcttagcaagagcaaaactaaagatacacaagtaaaagtgaaggaacaagcagagaaatcacgattggaaaaaattcagcaagcacttatggaaggaaaaacctgcaagatcgatctatttggctgagcatgagaaacaagctataaaacatctttatctgctaactatgaaacctgtcatttatgttgctaatgtaacagaatcttatcttgctgaacctgatatcaatcctcatgtcaaagaggtgtctaaaccaacatcagacttgcagtctggtatggttacaataccagctcgggtttattgta

SEQ ID NO: 274009 - DNA, 497 bp, Zea mays
atgattcacaaagttttcacaagtccaagtctgttccaaacattccgaaggaccatgtatgcactgttgatgagctgtcagttaatcggggtgactggtactaccttgatggcactgggcatgatcaaggcccattttcttattccgaattgcaagaattagttaaaaaggacactatcattgaacaaagtagcgtgttccgtaagatcgataacacatggtttccagttcttaaggatttaaaacctggaagctctgttcccagtgcagcaccaagctcaagctttactgctgctcttacgctcccagaccaatataattttggtgtgaaccaaggatcaggtagcttccatcagttgcacccccagttcgcgggttatacacgtggcaaattacatgaactagtcatgaaatatttcaagagcagggaacttactttagctataaatgaggtcttggatccctggatctcagcaaagcagcaaaaaaaagagttt

SEQ ID NO: 274010 - DNA, 603 bp, Zea mays
tcgcactgcttggatttcaagcttagagcacgtatggtgcttcaacactgcgtgaacaatgcggatgattgtttcatgtgagcaaccagtatttcatcttggcaaccaaagtttatggaaccatattcagatcaggaaagaggaaaccagtgtgcttcagatctaatatattccctgaacagtggaacatgagcacctgcaggaagctttggctggtctctacaggtcttcaagagcacattttcgcaccatgataacctgacaaccggtatctgttgtgcatgttgtccattaccttgttgcgaccgtgctgtctggagaacttgagctgcctgctcgcccactgaaaggctctgggcgctagatccagaaatcccatttttcacagtgcctgccgaacctggtgcatatttttgcgatgttgactacttgagtatataattgagggactgctgttgctgttgtcggtgttgtacaaaaaattatatttctgatccaataaggcccgtttttcatgcactatgggttatacgttgtccatgaattcccatgtttcgctgaaaataaagaagacgcacgtttctatgcaaaaaaaaaaataat

SEQ ID NO: 274011 - DNA, 540 bp, Zea mays
aattggatcctttctccttttgttgtgctcatctcatgtggttctgtgactgctgagagataggtgggcgaggcagccatggagttgatggtcggaggcagatctgcttggatgcaagtggagagggggctggcgcgccgcacgcggcacctacctccagcagcggcgccagcgccggcggcttcttgtagatctggaagcgccaatattttcttctctagccgtttagcaatcatcatatataggaatgtggacgtgctccatgtacctcttcccctactaatcaagcaaggtagcaagaatatgtactgcttgggaccatgagatgctagagcctgacatgctagagccctcatcctccatgtttgatgtggttatcatctgattcaagtaaccttgtcacttgggcaggtgtcatctaaagaaagaaaaagagaggttcttggaagccaaatccagagttgatgctgacttcagaagaaaggggtaccttgtattagtggattcatacacgaagggtcgagccatatgttgcacatg

SEQ ID NO: 274012 - DNA, 876 bp, Zea mays
tgtgtatataaataaccgtgcacgcagtgtgactagcaagcagtacacagaggatctggtaagcaactaagcaagtgtactgaggacggaggcatcgatccagcgttccagctagcacgcacgcagccagcacccagcacccagcagtagaatctatatatcgtacgcaagtagtggatcgaggcatctatctgcagtccctttcttcttcttcctcttgattgataggtgcgccgaagcttgttttgttgggtggcctttgtctctgtcgtctcgtctcgtctcgtcttccgcccggccgccaccacctgcaggctatactagctagctattaagtccggccaaccaagcagctcgatcaggtcggtcgacggcggggacagttcggagggaggaggcggccggagaccgaaggacgcctaccatcaactcgcggtcctggccgcgctgccgaaaaattaaaggaagaggacgaaggctgaccgatggacgatcgttatcctcatcatcagtcgtcgatggcgacaccggcagcagcgagcaagatgagcaagaagctgcagggcggtggtgaccgtagtagtggcagtagtagtaggggcagcggcaacagtgataagcagcaggtgccggcggcggcgatgaggaagggcccgtggacagaggaggaagacgctcagctggtatggttcgtccgcttgtttggtgaacgccggtgggatttcttagcaaaggtctcaggtttgcgcggtggcgggtgcatccgatccccaagcatgcatgcatgcatgcatatgtagatgcatgcgtgcgtggggatggattgatgtaggatgggctatggcgatgggtgttgattaaccatttcatttctct

SEQ ID NO: 274013 - DNA, 290 bp, Zea mays
cccacgcgtccgccggccaaccaagcagctcgatcaggtcgaccagcggcggggacagttcggagggacgaggcggccggagaccggacaattataggaagaggagcaaggctgaccgatgaacgatcgttatcttcatcatcagtcgtcgatggtgacaccggcagcagcgagcaagatgagcaagaggctgcagggctgtggtgatcgtagtagtgtcagtagtagtaggggcagcggcaacagtgataagcagcagcagcagcaggtgccggcagcggcgatgagga

SEQ ID NO: 274014 - DNA, 1519 bp, Zea mays
ttctttactcccgcagccacgcgcccgcccgcgcaagcggataccactccgaggaagtggatggtgaggcagagaatggaggggaaggggaaggcgaaagtgaagggcaagttgtaatcgaagaggaaagtgaaggtgaagctcatggtgccgatcttgatcaaggagaaagtgatggggacaaagtccagagctccccagaaagagaactcgatgaccagaggatggaacctgatgcaagaggaatggacagtgaagatgaaggctaccagcagaggacagtatctggcagaagaaggggagttattgcctccgaatcggagggatctgaagatagttactatgctgctggagctcaagaagacgaggaacctcgccaaacaaggaaacaaagctctccgttggaggaagaaagagatcatgaagtagttcgtgatgtgtttggtgatagcgatgaagatgaaccagctccatatcgtgttcgccatgaaatcgatgaagattctcataggtctcacatggaggatgaaggccattatgagaaggacatgcaaccagatgacgttgtggctgacgaagatatgcgatatgaatctgatgataatcgtgaactgaaaccaaaagagaaaccagtcggtccaccactagacttggtggttccatttaagcaaccaccagctcgacctgacaaaatgaatgtgatcaaggtatcaaacattatggggattgaccctaaaccctttgatccaaaaacatatgtggaagaagatgtttttgttacagatgaatctgggactaagaaaaggatacggctagaggacaatattgtgcggtggagaaccattaggaatgcagatggcactacatcttgtgaaagcaatgcacgctttgtaaaatggaaggatgggactatgcagcttctgattggcaatgaggttcttgatatatctgtacatgaggcgcatcatgaccagtcccatctgtttttgaggcatgggaagggaattctacaatcacaaggaaggctattgcacaaaatgcgatttatgccatcctccttgttttcgaagtcacatcgcttattaactgccctggttgattctcagaataagaaaactgttaagatgcaaaaatggtttgagactaaggatcctgagaaagcgaaaatggaaaaagaaaggatgcagggccaaaatattcgagcccattcaatccttcaacgcaaaagggaaaaagtgaaccgcaagtacacacaacctgctcggccaaggcgacagctttctccaggatttttggaagacgctctagatgaggatgaggagccagactatggttctcggcgaatgccaggtcgtagacgtttcgaggatgaattggaggctgaagcactagctgagaggcgtatcatcaacgcgaagaagtcaaatatgagcagaaatgttccccgaaatgcaccgtaccctcctgctcgtctgccgagacgtcaagctgatgaatactcggagagtgagagggagga

SEQ ID NO: 274015 - DNA, 505 bp, Zea mays
gaagctcggattcggtcgaggattatctttctagagtttctagatgcttgattttgtactctgcttgaatacatccgtttcttaacagttcccatggaaagaactagctattatgcctgtgcagtggcatgctttagccctaggtttatttgcatcaataatagcaccatttggaggattttttgcgagtggcttcaagagggcttttaaaattaaggattttggtgacagcatacctgggcatggtggaattactgacagaatggattgtcaaatggttatggcagtgtttgcatacatataccaccaatcattcattgcacctcagaacttctctgttgagataatcttggatcagattataagaaacctaacctatgaggagcaaaaatatgtatatgaacaacttggggaaatgttccgtgagaggcaattggcttattggctgaaagctgagagttagcgtgcttatgaaatgcatgatatgttgtgcatttaggtcatg

SEQ ID NO: 274016 - DNA, 608 bp, Zea mays
cttattgtgatcaacgatatatttgcttatttatttgggttcttacttgggagaacaccattaatcaagttgtccccaaagaaaacatgggaaggttttattggtgcatccgtgacaactatcatctctgcatttctgttagcaaatgtaatgggccgtttccaatggttgacatgcccaagaaaggatctctcaactgggtggctttattgtgatcctggtccaatgtttaagccagagcattactcattgggagagtgggtgccgcattggcacaacaaggtcttgatctacacactgctcttctggacattcgtacgtaatcccgaagcctctccaaaaagctgaagaatatccaaaataatattgatatccatggctgccgctcgaaggaagatcacatcatcagcatagagttgagacctggtgctgcagtgcacgtggagcaaggggctgcagcagtccatcctgttcggccttattaatcaagaagccccaaagtatccaattatcgatgaccaagatgaacagaaaaggagacaaaggatctctctgtcggaggccacgacgatgaagaataccctgtcataggcaaactgatgtggtac

SEQ ID NO: 274017 - DNA, 417 bp, Zea mays
gttttattggtgcatccgtgacaactatcatctctgcatttccgttagcaaatgtcatgggccgtttccaatggttgacatgccctagaaaggatctgtcaactgggtggctttattgtgatcctggtccaatgtttaagccagagcattactcattgggagagtcggtgccacattggttcccatggaaagatctagccattatgcctgtgcagtggcatgctttagccctaggtttatttgcgtcaataatagcaccattcggaggattttttgcgagtggcttcaagagggctttcaaaataaaggattttggtgacagcatacctgggcatggtggaattactgatagaatggattgccaaatggttatggcagtgtttgcatacatataccaccagtcattcattgcacctc

SEQ ID NO: 274018 - DNA, 442 bp, Zea mays
ctctcattttcttcctcgtctccacctccttctctcctcctcgatacatccgagcacgccgaacgctgtcggaaggcacaaagcggcgagcggcgccgggcttcccctctctttctcgcccccgatctgcgccgatcggggcgaccgctctctggggacgccgatcgaaggtcgggcggcgatgcttccgatatacggaagcagtttctagttttcttcagttggtcgccacagtttccagcgctttcagccagttgtctaataacttgttgttgttgttgtacttaagattgacacgcttcgtgttgtaaagcattgccatgtttggggcatgacttgtttttgttgaaatcaattgacttccaaggggtacactaaatccttgatgcaacataataggatcaccgtactgtcttcctcagagaccttccaacttgggtct

SEQ ID NO: 274019 - DNA, 1314 bp, Zea mays
ctcgcccttctctctctttcttgcctccaggtccggccgtccgggcggcgccgggaggagagaatggcctccacggcgtcgccgccggtgttcgagagggtggccgggatccgagccattgccgagtccggccgcttcaaggcatggttgctggaccagtttggcgttcttcatgacgggaagaagccgtaccccggcgccattctggcattggagaagctagcggagaatggggcaaagatggtgataatcagcaattcctctaggcggtcatctgtgacaatgaagaagctcaagagcctggggttcgacacgtcctgtttcctcgcgaccatcaccagtggggagctcacacatcagcaccttcagaagagagacgacccatggtttgctgctcttggaaggaagtgtatccatatcacttgggacgatcgaggggcaatttctctcgagggccttggtttgcaagttgtgaacaatgttgatgatgcagagttcatattagcccacggtactgaagctcttggctcaccttctggtgttcctcttcccaaaagtcttgaggagcttgagcaggttctaatgcttggcatagaaaagcgacttccaatggtggtagctaatccagattatgtcactgtcgaagctcgagatctccgtgtcatgcctggcactctggcagctaaatatgagagtcttggtggtgaagtgaaatggatggggaagcctgataaggtgatctatacatcagcgatgtccctagcgggcgttgatgctcgtgaatgtatcatggtgggtgattcgctgcaccacgacatcaaaggagcgaatgcgtcagggatggcatccgcgttcgtcactggaggggtccatgcggacgaacttggactcggtgaatttggagaaactgctggggaggatgctgtcagttcgctgtgcagcaagcacggatcgtacccttcttatgttctgccttcattcgcgtggtagagatgcggcctagaatttttttttgttttaggtgcacgggaaagtgattttaggcagatattgttgttatggaaataagtgccacgcaatgatcaagccgctggaggtgtcattcttcttaataaataataagtgacacgcaatgctcaagccgctggaggcagatttgtatttgcatttgtagtgtgtgtgtgtctatatatgctgcctgtggtgtatataccgcctgtgctgcaatgttcggttgagactttagacagcgatactgtatgaaggattcacattgttctgccccattatgtaaacccgctctattacttttcg

SEQ ID NO: 274020 - DNA, 792 bp, Zea mays
tcgctccacgcgtccgcggacgcgtgggttcgattctttcacggttccacctctcccctccctctcgtgcgcgttccatcgccgctgcctaatccccatggcctcagcgaacaacgacaaccgcgaggcggcgggcatcctgcggctgctgatggggatggcggcggcggcgcccgcctcggcattgcctcggggcggcggcggcggccgcggcggcggcctgatggtggtgcagcacgtcatcctcgacgtcgacggggaattgttctcgggcggggtcggcggcggcggcgtgccgccggcgtcgaaggccgcgatcgccgcgctgaaggaggtgaaggccggggagggcgagggcgagggcgaggacgcgctgggcgagtgcgccatctgcctggacgcggtggagggcaccggcaaggagatgccgtgcgggcaccgcttccacgggcgctgcctggagcggtggctcggcgtgcacggcaactgccccgtctgccgccgcgagctgccagcgccggccaaggaggaggaggaggaggacagcgcggcgtcggcggaaggcggcgaggaggagaggcggaggcccatggccgcggtcgtcgtcagctacctcgtgttcagaggcgggcgggcggaggtgcagcatgagccggagagggaggagccgtggaacattagaatagaggatgtggattagcattgatcactttcccattggttttcagattggtttgatggcggaggaggttatgtacatactagtaatgtcatgaacgctggaaatgggcg

SEQ ID NO: 274021 - DNA, 884 bp, Zea mays
aggaagctattgttctttttcgttggcatttcaaaatgatgatcaaaagtcagaaggcagcatggaattgctgaattcagtgaaagctatttcgatccatcctctttccaataacaagtttttggtactggattcatctggagtgttgcatgtcttcattttttcaacaacacaaatggtctcaagaggtgccatcaagcaatattctgaaaatatccatacatatcgcttgcattatcccatgaaagtgcaattatctgctgtcttttcagttacctctataaagacacaatttttttgggtttcagatggtggacatactgtacatgttatgtccgcagttgagactgaatcccctaacggtgataatggagacgttactggagaaagagagttagcgcctatcaagctttcagctattgaagcaatctttacaagcgaaagagttgaggacattgtatctatctccaaggattcagttcttatccttggtcaaggcaacatgtttctgtatggaacttcttgaatttggttctttatcatgcatggtggatacctcactgttctttagggcatggttcaagactttgcagctttggatggtcttttggctaaagacaggatgagttttggtgattttgaagatgaacttatccaccagtccttgaagtcgtgagctttactatttattaatcacagtaagcagatgaaaaaagctcatgttttttcagaggacagcaagaatctgaaggtgcatgattctctaccttatatactggtttactactacatatttctgcaattctgtgaacttgcaatgccatatttctgctcacctcatggaaacttttgaataggtgacgccagattatggacggaccacg

SEQ ID NO: 274022 - DNA, 508 bp, Zea mays
tagagtgagtcatattaatggcgatggcgactgcgaaatgatgctgcaggaacagatggactcgctggtggccgacgacgtcagcatcggaggagggtcgcctgaagaaggggccatggacgtccgcggaggacgccatcctggtggactacgttaagaagaacggcgagggcaactggaacgcggtgcagaagaacaccgggctgttccgctgcggcaagagctgccgcctccggtgggcgaaccacctcaggcccaacctcacgaagaggggcctctcacccccgaggaggagcccctcatcatccagctccacgccaagatggggaacaagtgggcgaggatggctggtcacttgccagggcgtactgaccatgagatcaagaactactggaacactcgaataaagagatgtcaacgagctagccttcctatttatcctgctagtgtatgcaatcaatctacaaatgaagatcagcaactgtctggtaattttaacggtggcgag

SEQ ID NO: 274023 - DNA, 971 bp, Zea mays
tgtgatataaagcctgataattttcttatggggcttggtaggaaagccaatcaggtctatataatagactatggactcgcaaagaaatatagggatcttcaaactcataagcacatcccatacagagagaacaagaacctcactggaactgcacgatatgcgagtgtcaatacccaccttggcgttgaacaaagcaggagagatgatttagaatctcttggttacgttcttatgtacttccttaggggcagcctaccatggcaggggctgaaagcagggaccaagaagcagaaatatgacaaaatcagcgagaaaaagatgctcactcccgtggaggtactctgcaaatcgtatccatcagaatttatctcctatttccactactgccgttcattgcggtttgaagacaagcctgattactcttacctgaagagactattccgcgatctctttattcgggaaggataccagtttgactatgtgttcgactggaccattctgaagtatcctcagataggctccaacccgcggatgagggcaggtgaaaggactagtggagctgctggaccctcgatggacaagattgagaaggccacaggagaagcaggcggtagaaggaatcttagtggtcctgtgaaccagactgacagttatgcacaacgaccgcgtgagaccgtatctatgtcattaaaggaaattatgcatagcactgaccggtctggggaaaggaccatggagagaccacgtacatcctcgcgcacaggcagtgcatcccgtagagctgttgcatcaagcagcaggcaggcctcatctgtggaaccaagtgagcagcagtatagccgggcaagcagattgttctctagcaacagtggcagtcgcccatctagcacccagagggtgaacccatcgccaggcgaggcaagggctacctccctctcacgggcggcagtcgcgagaggcgctcgcgacga

SEQ ID NO: 274024 - DNA, 568 bp, Zea mays
tcgtgtaatcaagaagatccctcccctcacagctgcttttttttaggaaacatgtggttagatgaccccagaatgcatcattggtgttttcgggtcaaacaaagcccaagggcagtttgacgcagtcctgcttgagatatctatgaagactttgataagggggcagaactataattccagaaatgctgtctcctatgctttgctggataaggacaaacaatctggattcctgtcatcgtttgacaagtctggatacaggtcatctgacaagctgctcatcgcctacaagccctcgccgggggaagttcgcggtgtacgaccgcgaggtgacactggaagaagctgaaaggttcgtgggatccgttttgaacggagacgttccactgtcgccgacgaaacaaaaacctgtccttcggtagacgattattgcaagttgcaagggttttagatctaacacttattattcttaattaaggccttaattaaggcttgtacatagatggacgaagagagtaaaatcatagagcgtttgctggacagtttagtcgttcggtaaaccagagttgct

SEQ ID NO: 274025 - DNA, 604 bp, Zea mays
agatgatgcattcggtaggatactttggattgccagttatgccggcgacatgtattacaatttcagagattgtgtctggttcaagcgagcaaatatttcctgaaatatttctgcaaagcttacatgagtgccgagtttgtcttagtgaaaatactggcagaagtttcctccagctcccatgccaccatttgttttgcttgacgtgtatgaagtctcactgcagaattcacgtaacagaagggagtttaaccaagctcacatgccctgatacaacttgctgcagcccacttccaccatcagttttgaaaagcctcctgggagatgattgctataagcgatgggaatcattcgcgttacagaagctcttagatacaatgcctgatctggtatattgtccgaggtgtaatgctgcctgcttggaggatgacaatgatgctcaatgcccagagtgttttttcaccttctgctctttgtgcaaagaacgcaggcatgtggggaaggattgcgttactccagaagaaaagattaggattctgagggaaaaacaccagaaatattccctcccagaaaaacaattgttgaaagaacagagggaaatagatga

SEQ ID NO: 274026 - DNA, 953 bp, Zea mays
atctagatcgcgagcggccgcccttttttttttttttttttttctttttctctgcataatagttaagtaaaattagcatgcatccaagtacaaactgcgcttacattacatgcatgaggagacaagggtctccctctcttgaagacaaagtgctactagcggggcaatcatatacagggaaggtgtgtgtggaagtggaaggagatataaacaaggtggtgaagcagagattcatgtatctgtgtcagcatccagtaatcccacccccctgaaccaaacaaaagctcaatcattgctccggcggctcgcacctcccaccaaacatgctcttctctctctgtctactctttctcagcatgtatacaacggatccatggcacacacaggcagcatcatttgtgtgtgtcgaagtcattcacggctttgttgtgctagctctgaaatcccacgcagctgcgacggggttgagacgacgaagcaggcagctagctgtgggcagcgacgacaacggagtctagaaacaccagttagttgccttgaagctttgcattattcttggcagagacagacaggtcgacaccgaggagaggagccctactagttgtagcaccccatcagcgttttcctcaccctatccaccacacggttcctgttagcgaggctgttcgtcaacgggaactccctgctgtcgtccaggaggaacctgtacacctcccactgccgctcggacgctgcctgtctcccaatctcagccgagaagatgcagaccccaagcgctttcagggcgagggtggcgtcgtagaacacgcgcggccgtcccttcccgcagagctcgaccgggttggcgacgaggagctccgtgtccggtccgcggctgacgaccatgaccctgagcgggtggagcatctcggatctcaggcgcgcccgcagagcgtcctgcttctcaggaaccg

SEQ ID NO: 274027 - DNA, 425 bp, Zea mays
cgccgccgccgccgccctcctttctgataaacgccctccccatcggcgtatggccattgaccacatcgtccgcgccgccctccgccaccgaggaaaccgcaagcagtcatcagcaatgccgccgtacgcaccgagagagcagcggcacgacgggccgccaggggaagtcccgccgatgagcgccaaggacgtgaccgccatcgaagccctcctcggatactgcttcatcgacaaatctcttgtcgagctggcgctgacgcatggctccttctactggcccaaccgccccggggatacctacgagcgcctcgagtacctcggcgacggcgtcctcacctgcctcatgtcgcgcgaggtcttccgcacctaccgcacgctccagcccggcccgctcacaaggctccgcgccgctaacgtcgacactg

SEQ ID NO: 274028 - DNA, 469 bp, Zea mays
cgcgtgcggagagggggaggtcgacgagacagagagagaaggccaagaggcttcctctccccattcctcccttccgtgccctagccgagccagccgcgaggaaggaggcatcccgccgtctcgcctggcgcccgcccgtcggccgaccttctgccgcagcttccaattctaaaaagatcatagatttttgtgcaagagcgagtggatatggaaccatcccctcagcctatgggtgtcgctgccggtgggtcacaagtgtatcctgcctctgcctatccgcctgcagcaacagtagctcctgcttctgttgtatctgctggtttacagtcagggcagccattcccagccaaccctggtcatatgagtgctcagcaccagattgtctaccaacaagctcaacaattccaccaacagcttcagcagcagcaacagcagcagcttcagcagttctgggtcgaacgcatgactg

SEQ ID NO: 274029 - DNA, 1267 bp, Zea mays
cccacgcgtccgcatgcgcgcggccatcgagcggttccccgacctccacttctaccgctttggccgtcccgtggcggtgccggggagtcccatggagtgtgacctcgcgtggcgcttccgccccgctgccgacgccatcggcaccggccggaccacatactacaaggactaccgccggttcacgcttacccgcgacgtcaacacctgcagcctcgtcgtcgacaccgtgggtgaataccactcgggtgtgggtgccaagcgcaatggacggcgcaaggggaagaaagggaagaagggaaagcaggatgcacctgtgactgacttcgtgccggttaagacacagattaggctggacgagaacaccgccaacaatgaggctgctggggctgcagcggagccggtgtttgttgttggtgaggctgtcaatgacagcttgccagtggttgcttctgagtctgatttcagccgtggtaagtaccttatttacattggtggtggcgagaggtgcaagagcatgaaccatttcatttgggggttcttgtgtgcccttggtgaggcacaattcttgaaccggactcttgtcatggacttgaatgtctgcctcaatgcacggtatacttcgagtggcaaggatgaagaaagagatttcaggctctactttgattttgagcatttgaagcaatctgcgtccgtgattgaccagagccagttctggcaagattggggacagtggcacaagaaagataggctcaagaacttctacactgaagacatcaggatgaccccaatgaaacttcgtgacatcaaggacacattgatcatgaggaagtttgggaatgttgagcctgataactattggtcacgtgtgtgcgagggtgagactgagggaataatcaagcgcccatggcatttcctgtggaaatctcgtcgcttgatggagattgtatctgccattgcctcacggatgaactgggactttgactcggtccatgttgtcagaggggagaaagcgcagaacacacaactttggccaaaccttgacagagatacctcaccagacagtctccttatggcacttaatgataaggttggtgctggccggtatttgtacattgctaccaatgaacctgacaaatcgttctttaacccactcaaggaaaagtataaaacacacttccttgatgatttcaagtacctgtgggatgagaatagtgagtggttcactgaaactaaggagctgagcaatggtcagccagtagaatttgat

SEQ ID NO: 274030 - DNA, 397 bp, Zea mays
aaccaggaccaggtccaggagggcgcgccgcgcagccatggcgaagaaccggaacaagaagaacagggccaagagcggcggcctcgccgccatggacaccactgagggcggccccgccacatccactgccgcggacgtcccacaaccaatggacacgtccgagggaaagcagccatcgtcggccacagcggcgctcggttcgatcaacaagaaaataaagaagggggtgcatatgaaaaggtcacagaatgctaggaaaatgaaagcaattgctacggctgtatcgaagaatgagaagtccgaggagaagatccagaaagcaaaaggcaagaagacaagaatccagtcggccaagtccttgtacgactgaatatttagcactgagcagaattttgtg

SEQ ID NO: 274031 - DNA, 476 bp, Zea mays
gggatatctctctccatccgtcgggtgtcccttcctctcccagtctttctcgccttttctcctctctgcttttctttgttaccgtcggcgtcgggaactccgcttccgcacaaatattgcgtttgctgtcagcttgctcaacggttctgtttgtttggtgagatgtgttttcctctttctccttcgttgtgagtttccatttggtggacatccttttccagatcccttcgtggattagatccacgctcctctagtcgagatcgtcttgcatttttctgagatggagattgggaccgaaaaggcaagtatttttctttggtagttttggcatgtgcagacaaatgaggaagtgcttctacagttgtacctcatttaactctattttggagattgagactgaaaaggcaagtatttctttttggtaaagtctttcgcaagtggacatctgattccaatttttttaaagggatctggtt

SEQ ID NO: 274032 - DNA, 540 bp, Zea mays
cccgttctttaggcgccgacgacatgccgcacctcccctacctccagtgcgtcctcaccgagacgctccggctgtacccggttttcccgatgctgatcgcgcacgagtccaccgcagactgcaaggtcggcggccaccacgtgccaagcggcacgatgctgctcaccaacgcatacgccatccacagagaccctgcggcgtggacggaaccggacgccttcaggcctgaacgattcgaggacggcagcgccgaagggaagctcctgttaccgttcgggatggggcggcgcaagtgtcccggagagaccatggcgctgcggactctagggctggtgctggggactctgatccagtgcttcgactgggccactgttggaggcgtccccaaagttgacatgaccgaagcgtccgggctcactctcccgagggccgttcccctcgaggccatgtgcaaaccgcgccaagccatgcttgatgtccttagaagctgtgagcgcccttaatatctacatactctgcccactgaagaaagttgatgag

SEQ ID NO: 274033 - DNA, 365 bp, Zea mays
aagcctctaaactaagtcgcaggatctcggcctctcctcggtctctcctcccagatcgggccatccaggtgctaccgctcttcgccccctccacttcaccgccgccgcgtagatccgtctccgcctcctggaagcgctaccagtggaccaacgccgagccggcggacttagcggcgttagggttgcggttgggaattgattgcgggggacgcagcggtggcgcctggcatggcgggggcgcccggggtccggccgggtgcggggggtgggggccgcgccgctgcggggctcaagacttacttcaagacgccccaggggaggtacaagctgcagtaccagaaggcgcactccgcggtgctgcacta

SEQ ID NO: 274034 - DNA, 519 bp, Zea mays
caccttgtcgctacagtcggcaaattcagcgtcatttggcatgttaaggacagcaaccatgagtgctaccgtgatcagcagggcctcaagagctgctactgctacaaagttgtcctcaaggatgaatcaatcgtcgacagccgcttcatgcacgagaagtttgcgacgagtgactctcctgaagctccgctcgttgtcgctacgccaatgaaagtcagctccttcagtatagcaaatcgacgctgactccgaagctcttttccccagttgtgcagaaataatctgagaagttgcaggtttttgttcagtttgttcctttttcctcttttagacggtttggttagttctgttggtacagaactgatcgaggttcctcccgagaagaactggtttttgtgtcgtgtgcatgtctggtcatttgtagcgggctagcggctcggtaaaatggtgtgtatgtctgttggataaaatgtaccatgtgacaaaaaaaaagtaattttgatttgagcctctcaaggg

SEQ ID NO: 274035 - DNA, 701 bp, Zea mays
ttccacgcgtccgcccacgcgtccgcccacgcgtccgcctgtctcttcctcatactgcgctaccgaagacgaaggcggcagcaaatacggtggcgatggaagcaaccgcgatgaggaggaggaggaagaggaggagtccatggtctccgatgccgcctctcatgcccctacgactgcaggcgccaccgcactgataccagctggcaggtacaaggagctgaagaagctcaagaaaaagcctttcggcaaagccctggaccatgacggttccctggaggatactgcgagctctccggtgaatagcccaaagtgttgtgtcacagctggaattgagtcctaaaggaggtgcaacatcagggacctcaccaagggagtcgttggaattggcgatgatcacggcggggaggggatggacgtctgtacagatgcaacgaccacggatggagcgagggcttggtgatcagtaccacacgagcatagctccatgtgcggagctgaaagacaaggggatttgtttgttccccttttccgtgctgctgcactaccatgggccaaactgaggaaaaaaacaatatgcgaatgaacagcatatgtagtgtttcgcaacttacactctatgcgcgcatgcatgtgtggtatgaacgaatgcaagaagaatgtgatactgtggatagatatatgtttttccttaatgaggatat

SEQ ID NO: 274036 - DNA, 409 bp, Zea mays
cccacgcgtccgcgttcgttcataaacatcgcctgaacactaaagtcaccctccagcagtttcgctttcttgcttcaccctgcggtcgagatcgagctcaacaaccatggaggatttagtcagtagcccatctttcaggagcgtcctcagcagcagtagcgaagggcaggctcagtcaggagagagttcttggacggattacttcgtggatttcatgttatccgaggaggagaggaagagacaggcagatgctagctcatactcatactgcgctaccgaagacgaaggcggcagcaaatacggcggcgatggaagcaaccgcgatgaggaggaggaggaagaggaggagtccatggtctccgatgccgcctctcatgcccctacgactgcaagcgccaacgcactgata

SEQ ID NO: 274037 - DNA, 707 bp, Zea mays
cttacgcgtccgctgttgacttttggtttacctgccgaccgccaggaccacgctctactgattcttcgcattgcctttcccttcagttgcaccgacctccagacgaaaccacccaagacgcgtgcttccattcctagcccaacagaagcgaagcacgccaccgaccaccggcctcgaagggatcatcttctctacaactcgtcctcgtggccttgttcctcctcttgtataggggactgcggcggagtggagatccgtgccgacatagtccgacttcttcgctcgctgcctacgattgatggcctcaccttcaccaaccgaagagttcagcagggaagcagctcgtcagtctctgatcgcgatctccgagaccattccggagacaccttcacccgagacggtgaaggcaccgatctccattgcagaaaacgggaagctgggcgatggggcggataagttcagatcaaagctgatgtccatcacagacctgtcttctgatgcccaacctgcgcagtgccctcccgaggatattgctgcttgatcgtgtgattttcctgctcgacttgcggacataatgtatcagtgcttgctgatgctctgggcatttaactgtcgtgcattaaactgaacgtccttgtgttactagtcgtttttctttgttaaaatattcagggaaaccggtggaaatatattgtgcaagtttcctt

SEQ ID NO: 274038 - DNA, 700 bp, Zea mays
gcttctgattccgcaggtgccgggccggccggacgcgtacagcgccgtgttctacttcgcggcggaggcacccatcccgccggactcgctgctcggccgcttcatccacggcgacgacgcgtaccgcaacgcgcgtttcaaatagccaaccgcatcgtcaagggtccctggatcgtccgcgccaccgtcggcaactacgcggcctgcctgctcggccgcgcgctcacgtgccgctaccacaagggcgacgactacctcgagatcgacgtcgacatcggcagctcagcgatcgccagcgccatcctgcatctcgcgctcggcgccgtcacgtcggtgaccatcgacatggggttcctcgtcgagtcccagtccgaggaggagctgcccgagaggctattcggcgccgtgcgcatcgcgcagatggagatgagcgcggccaagtacgtggagctgccccctgatgaggccatgcctgagacggccggcagggccggggccgggttcagggtaagctccgcgaaggtggtcaaccatagccgccaacaagaccgtgccggcggtaaggtgggcaggtcgatgagttgcccggagcgagagcgcggaggtgagcgctgaattctccatgacatcatctccggattattgttgttattaaacgcagtaatgcagttattaatccggtgaccacggtccacggttg

SEQ ID NO: 274039 - DNA, 801 bp, Zea mays
gttcctaaagtatttagaccaaatattgtgactggccaaaccatggggggtacagctactggaaatggaaatgatggtctcaaaggaccagaggctacagcagtcacgcaagtaccacaatcccaaaagggaggagcagaaaaaggaatagttcctactggctacattggagtaccagctaatctccaacaatttgtaggcaatcaaacagcatttcggccaagcattgtgtacatggtaccgagtggtgttgatccacatgcttttggaaatgttatgatgccagtgatgtaccagcagatgttccaggtgcctccgaagccaaatgagaccgtgcaggatacttcagccaatggaaaaagtaagcgacctcgcggtcagaagctcacagagacatcccaacaggcaaatggaaccccagcatctgcatctggctagggtggactactaacattttgaacaggatttctgtacatacgttgacttcgttgacttcatgccgtgagaaattttacatatggacgctggcactaacaattacctcaatgttgtccaaggtatctggcccaggactggaaattgtctctcgcacactttctttttgtgtgtggctgatttctgcaagacaggttccacctaatgtacaagtccccctgtcctttttatgatatgtaaatgaatgttcttggaacagctctatcatggctcatgagtacggtgtcagttgccttcgaattcccattgtcgataccagatcgatggctaatgcatatagaaatataaaggggacaaattatgatt

SEQ ID NO: 274040 - DNA, 674 bp, Zea mays
cccacttgtccgataatgtaccaggagtctgccatagggatgtgaagccacaaaacgttttggttgatcctctcacccaccaggtcaagctctgtgactttggtagtgcaaaagttctgattcctggtgaaccgaacatatcttacatatgctctcgttattatcgtgctccagagctcatatttggagcgacagagtatacaacttcaatagacatatggtcagctggttgtgttctagctgagttgcttcttggacagccactatttccaggagagagcgctgttgatcagttggtagagatcatcaaggttcttggtactccaacccgtgaggagatacggtgcatgaatcccaactatactgagttcaggtttcctcagataaaggctcatccatggcacaagattttccacaagagaatgcctcctgaagccatagaccttgcttcccgtctccttcagtattcaccaagtcttcgttgctctgctcttgacgcatgtgctcatcccttcttcgatgagctgcggacaccgaatgcacgcctaccaaacggccgcccgttccctccgctctttaacttcaagcacgaactagcaaatgccttctccggacctcgtcagcaggcttgtgccggagcacattagacggcagatcggtgtcaacttccggag

SEQ ID NO: 274041 - DNA, 873 bp, Zea mays
cgggtcgagcccgcgtccacaacccaccatgccaagccagcgaaccaccccgcccgcagccgcaagcaagcagccaagcagtgtgaactgaccgtccgttccgtccagcccaccatggaggcgccgccggtaccggagctcatggatctggacgcgccccctcccgcgcgccggttccccccgccgtcagcgacatgaagaacgaaggggaagggggagacactgttacgggtcacatcatctccaccaccatcggtgggaagaacggcgagccgaagcggaccatcagttacatggcagaacgtgtcgtgggtacgggctcatttgggatcgtcttccaggctaagtgtttggagactggagagaccttcgccattaagaaggtgctgcaggatcggcgttacaagaaccgggagctgcaacttatgcgtgccatggagcaccccaacgtcatctgcctgaagcactgcttcttctcaacaacgagcagggacgagttgtttctaaaccttgtcatggaatttgtccccgagaccctgtaccgtgtcctgaagcactacagcaacgcgaaccagaggatgcctcttatctacgttaagctctacatgtatcagcttttcagaggcctagcctatattcataatgtaccaggagtctgccatagggatgtaaagccacaaaacgttttggttgatcctctcacccaccaggtcaagctctgtgactttggtagcgcaaaagtcctggttcctggtgaaccgaacatatcttacatatgctctcgttattatcgtgctccagagctcatatttggagcgacagagtatacaacttcaatagacatatggtcagctggttgtgttctagctgagt

SEQ ID NO: 274042 - DNA, 533 bp, Zea mays
  unsure (1)..(533): unsure at all n locations
ctggcncacgccaacccaccaccatccccgttccccaacccccaactccgagagccatcccgcccgcagccgcaaccaggcaagcaagcgggagccgccaactcgtgcctctcggcagcggcgtctgaactctgaaccgaccgaccgaccgaccgttccgttccgttcaccccaccatggaggcgccgccgggaccggggcccatggagctggacgccccacctcccgccgccgccgccgcggcgattcctcccgccggcagcgacaagcacaaggacggggaagggggagacgctgtgacgggccatatcatctccaccaccatcggcgggaagaacggcgagcccaagcggaccatcagttacatggcagaacgtgtcgtgggcacaggctcatttgggatcgtcttccaagctaagtgtctggaaacaggagagaccttcgccatcaagaaggtgctgcaagaacggcgttacaagaaccgggagctgcaaactatgcgtgccatggagcaccccaacggtatctgcctg

SEQ ID NO: 274043 - DNA, 490 bp, Zea mays
cccacgcgtccgctcacgcgtccgtttacgcgtccggccacgcgtccgcccgaagccgagccagcgaaccaccccgcccgcagccgcaagcaagcagccaagcagtgtgaactgaccgtccgttccgtccagcccaccatggaggcgccgccggtaccggagctcatggatctggacgcgccccctcccgccgcagccgacgccgcagccgcggcgccggttccccccgccgtcagcgacaagaagaaggaaggggaagggggagacactgttacgggtcacatcatctccaccaccatcggtgggaagaacggcgagccgaagcggaccatcagttacatggcagaacgtgtcgtgggtacgggctcatttgggatcgtattccaggctaagtgtttggagactggagagaccttccccattagaaggtgctgcaggatcggcgttacggaacacggagctgcaacttatgcgtgccatggagcacccc

SEQ ID NO: 274044 - DNA, 757 bp, Zea mays
tcacgcgtccgcccacgcgtacgcggaagccttcctccatcttcaggctgctactactcagtagtcagtacagtacagtggtgccgacgacatgacgaagatctcccgctcgttgctcgtcgtgccgccgctgctcatcgcgctgctcctcctcggccctcacctcccgccatccgacgcgctgacgcccaagcagggcgtcaggtccaagaccttcctgtccccgcccatcctgcttcgcccgggcgacgtggccgacaagttctactacgacatccccttcccccggggccacctggcgctcaagagcttcaacggcgaggtggtggacgagcgcggcgcccccgtgccgctccacgagacgtacctccaccactgggtcgtgcagccctactacgccctggtagtatcggcggagggcggcagcagccggccgcggaccatcccggcgcgcaacgccggcgtgtgcagcggccacacgctgggccagtactaccggcctggggtccgaaacccggggcacggcaacttgggtgcccgacccgtacggcatcgagatcggcgacccggccgcggcgcccgccagcgagggctacgagcagcgctggctgctcaacgtgcacgccatcgacacgcgcggcgccgccgaccggacgatggcgtgcaccgagtgccgctgcgacgtgtacaacgtgacggcggactggcgcgggcacgccatcgagcccgggtacgccggcggcctgcgctgctgcta

SEQ ID NO: 274045 - DNA, 443 bp, Zea mays
cccacgcgtccgcccacgcgtccgcccacgcgtccgagagagctaagctaagccgagctaagaagcacagcaagtctcaccagactagcggctagcgcgagaatggccaaggacatcgaggccgcggcgcacgagggcaaggactactcggacccgcctccggcgccgctggtggacgcggaggagctgaccaagtggtcgctgtaccgcgcggtgatcgccgagttcgtggccacgctgctcttcctctacatcacggtggccacggtgatcgggtacaagcaccagacggacgcggcggcgtcgggccccgacgcggcgtgcgggggcgtcggcgtgctcggcatcacctgggccttcggcggcatgatcgtcatcctcgtctactgcaccgccgaggtgtcgggtgggcacatcaacccggtcgtcaccttcggcctctt

SEQ ID NO: 274046 - DNA, 670 bp, Zea mays
acaacactctatagtgacgtcgtattacgcgtccgggtgcgcgcacctgaggaagcaaccactgttccagggttcctgcgagaccgcctttgagaagtgccggggtcctgaaacggtctgagatcgccagggcacagctagctgatctcttgcggttaagcatggtgccaccttctgatgataagatgctggagctgttcaagacgttcgatgtagatggcgacgagaagatcagcagggacgacttcatggcgtgtcttgggaggttcccgttcctgatcgcgttctttgctgccctgatcaatggggaagtgtacatcgagatagtctgaatgaatgcctgaggcaaagcgatgccgcgtaaaaggctggagctgccagtgccaggcgtaggcaggggatccctccgtttatgcaatgtggatacccaccgggtgctcctccactttgagaccaaagcaactgtagtattgggtattgggttgcatcaagtggctgaccagtgtagtgcgtcgattttgtttagttgcttcgttcgaattattattggccatttaccgaatctgttgagatacgcgctggactagtagattgtcgatggaactcagaacgcaaatagaaagcatctgtaatctgaactaactgagaaaacatttttttttggctctct

SEQ ID NO: 274047 - DNA, 401 bp, Zea mays
ggcattctttggctcaccgcaggagttcagtggtaatactgataatggctacatactcttctatgaaagccttgctgaaagaagttgatgtccttctcataccatgtgattagttatacactttcctttcccttccatttctgctggggatatatagaatattcagtgaaaaccagaataagctgaatgagaggccttcagcttcagttggtatggtacgatcaacgcttggcaataaaacaagttacctggaggggctataggctgactagtttgtagttcccactttatctgtttttatgcatatacaggttgtatcaattcctgaataatgtttgttgaagacctttattatcatgtaaagagattctatctaggaagccttttttggattcgagtcc

SEQ ID NO: 274048 - DNA, 664 bp, Zea mays
gcagaaggtagtcaaagggaatccacatccaaggagctactacaagtgcacgtttgctggatgcaatgttaggaagcacattgagaggtgttcatcagaccctaaggctgtcataacaacctatgaaggaaaacataaccatgaatcaccggttggtcggggcggcaaccacaacgcaggaatgtcatcacaacacaaagggcagaacaacgtatccagcaatcaggcttcattctcgacaccagactacgctaaccagatgccaagtgggatcttacagttcaagagcgagcaatagtaccatgtatttggatgacgttcttttggcaaataccggatgcctgcaattcgtacagccatatggcatcaaaagtttcttaaagcctgataatttcaaatggtatcagtttgcagtttttccccgtagatacccaggatatatagctgatccggcctcatcgtttctagtttgtacatgctattaagttggggcatgagggatgcaatcctagctaggtgaggttacttatatgtggttatggtgttctatagatggatcgatggtatacatgttctgattttgttcccaacacccgacaagattttgtatgtatttgtacagatgtttttgagttacattttgccttttgtaactttgaagatg

SEQ ID NO: 274049 - DNA, 460 bp, Zea mays
acccacgcgtccgcgtcggcgaaggcaaggccgtgcgccgccgccgcgcccgtgaatctccccagggcctcctccgccaccagctcgacatgtgctcccgcaacgccgacctcaccaccgcgctccgcctctacgacgacgccctctccccggacaaccccatcccgctctccctccaccactacaactgcctgctctacctctgctccaacgccgccgctaccgactctgacagccatctctccgccaccgccgctcagcgcggcttcgacatcttcgccaggatggaggccgacggcgtccagcccaacgaggccaccctcaccagcgtcgcgcgcctcgccgccgccacccgcgaccctgccatggccttctccgtcgtccgccgcagggccgctgcgggcatcccgccgcgcctccgcacctacagccccgccctcttcgcctactgcgatgccaa

SEQ ID NO: 274050 - DNA, 492 bp, Zea mays
gtccctgatggcaagcctcagcaacccgtacatcgtcgagtacaaggacggatgggtggacgaggggacctccgtctgcatcgtcacaagctactgcctaggaggggacatggccgagaggatcaagaaggcaaggggcatcctattctcagaagagagggtgtgtcggtggttcacgcaattgctcctcgccctcgactacctgcactgcaaccgtgtgctccaccgtgatctcaagtgttccaacattttattgacaagggataacaatatcagactcgctgactttgggctggcaaaactgctcatggaggaccttgcctcatcggttgtaggaaccccaaactatatgtgcccagaaatactagcagacataccttatggatacaaatccgatatatggtcacttggttgttgtatgtttgagattttagcacaccgacctgcatttaaagctacagacatggcagcattagtcaacaaaataaacag

SEQ ID NO: 274051 - DNA, 655 bp, Zea mays
tgctgattgcagatctccaggtgggatatacttgcacgggcacagaaggatccagatctattcaagcctacaatgacctttaactcattgtgtttgttcagtgtcttctatcttgaagtagataatgatcggggcctttattgcaggtcttctcatatttttggatgagcttgtcacgtggaatatgtgttgagtaaacttatctaatttacaaaatgctagtatacgaaccatgataaaattcagataattcttatttaatctgcagtgatagaagacaccgggcatgtttgggatgtgggagatttaagcagatacgggtagaactacagtactacagtctacaactttcatttaatcgtacttgtttctgcttcgactgaagctttaattcttgtgctgctggaatttctgttctgcagatcatttagctcaaataattggtagtccaacggtcacgatacttgttttggtttgggatttctgtgcttttgtctactttatctatgttgttgtggttggctggttgcctttacatgtggttgtttggtaagtttggcaatttggaatccctgtagcgaaaactgatatttaaaactgggccctggtcagaagtcattctggttgtgttggtttcatcacttgcttccagtga

SEQ ID NO: 274052 - DNA, 447 bp, Zea mays
ccctcgcgtccgcccacgcgtccgcccctcgccgccatctccgtctctctctctcccgcaaccaagcagttcaactcacacccgaagcggcgccgctagggtttgctccgacagccgcgaaacctagtccttactgcgccctcccacagaggccgtcattcactaatctacctgctacgcttcgcttcccgctccgattgggagctagggtttagcttatctccgagctcagcttcgggtcgcggcacgcggcatggcggggtacggggaagagaaccagaacgccatgaacgggtacgaggaggaagaggaggaagaagaagttgaagaagtcgaggaggtgtacgaagaggaggaggagggggaccgggagtgtaaagggagacgaaggggggcagtcgtcgaggcagcagcgatggcggccgagacgagaagtgtcgatggagg

SEQ ID NO: 274053 - DNA, 293 bp, Zea mays
cggtaataccgccgttgttgccgttggttaagccgccgccgccgccaccgccgccccagcttcttccacccctggtgccggttcttcctccgggggtgcctggcgtaccgccggcctccgcttcaacgagtcgccgccccgtgagcgtgaatcatccctgacaaaataacttggagctgtactgtgttgtcttttacagttacacgcacgtacgtacgaactgccgtcagctgtaattttcttgttcgtcaatctgagctgtaattttcgactctaccagctacgtgcaaaaa

SEQ ID NO: 274054 - DNA, 927 bp, Zea mays
acctcactcgctacaaacaagaaacaacaagcgaaagttttctctcgagagaggaggagaagaccaacaccgggaggagatggcagcagcagcagcgacgaaggcgtcgtcgtggatggtggccatgagcgtgggcgccgtggaagcgctcaaggaccagggaggcctctgccgctggaactacgcgctgcggtccgtctaccgcaccgccaaggccaacgtccgcagcggcagcagaagcctcgccgcgcacgggacaaggagctggccccggcggcggagtcgaagaggcggccgggcaaggccgccgcggaggaggggatgaggaccgtcatgtacctcagctgctggggacccaactaggaggactagcctttcgtatcttagctggtctttggccttcttcagcgaccgcgagctcgcgagctgattattgtaaatatacgacgatgatcggatgatgatgatgatgcagaaggcgatgatgacgacgcagaaggcgatgatgcggaaggcggtgatgcagaagacgatgatgaagttgatgaggagaatgtcaaaggtcgggatgaaggtgataatgatactgccgaagctgccaacggttctgctgatgatgctgaaaaggagaacaattgattccggccccagaataggttcagcttcatgttggcttctgcaagttggcctcgttcgtggatgtctggatgtagccagttgctcaggagttctcttctgacgtctatttatgtgtgcgtgatgggaacatttgttggcttcagctttggtgaaacatgaggaacatattgtccttgtagtaatgtgcaatgtcacattcgtcctcttagcatcttgttcgcgattgtgtagattacaacaacagtcgcaaaacatataagttagcagtaatcaagtactgattggttt

SEQ ID NO: 274055 - DNA, 411 bp, Zea mays
tctacactgagtcgtattaatgacagaaggacagaagctgaaacacgttcagggaacgctagcaagtctgctgataagcagcctgcacctaaagagccaccagacgactacggccatgtgacggctagaagaggtcaagcagcggacagccatagcctcgcagaaagagcacgacgagagacgataagtgaacggatgaaagttcttcaagatattgtccctggatgcaacaaggttatcgggaaagcatcagtccttgatgagataatacattacatccagtctttacagcgtcaagtagagtttttgtccatgaaacttgaagcgattaatgctcatgtgagcaatgcaactgtagcttttccaaccaaagattttggtgttgcgccatataatactgctcctagcctg

SEQ ID NO: 274056 - DNA, 523 bp, Zea mays
aacacatcaaacccaaaggttctgctaacacatattccactataccgacctgataactctccttgtggcccgcatcgttcttcacctgttataaatcagagggtatcttatgccgccttagaccaaggaatcacctaccaaaattatctaactaaagagacttctgaccttttgctaagcttgttgaagccgatccttgtgctctcaggccatgatcatgaccaatgcacagttgtccactccactccttttgggccagttacagagcataccctggggacaataagttggcagcaaggaaatctctatccatcttttatgctgctatctgctggacccaagttatcacaaaattcaactgatctggaacatgaggttgcaatgaacctttgctttttgcctaaacaaacccatatttatatctggtaatggttacaagcaccttctgcctgttttatttatttagtgacaaagagttacagttgaactatgcatcattgttgtttcaactgtttgtacaggt

SEQ ID NO: 274057 - DNA, 500 bp, Zea mays
gagtcatattacaacaccaacaacggcggagctgccacagatagcaaaccagaggagagaagagaggaggggttggctggctggccctggccgtcgtccgccggtagctcgtggtcgctcgctcgctccatcattcctccctctccgccggcgtgcccgcccgcccacatgacggagtcagagggcgagacggaggctgcgcgcgcggccgtgctgacgccgccgctgtcgctggggggcggcgggctcgcgggggagctccgcccggccaacctcggccaacgggtgctcagcctcttccgcaacgtccgcccgggctccgacctctcccacttccagctgccggcgacgttcaacctgcccaagtcgcagctgcagctgtacggcgaggccgtgtactgcggcggcgaggacatgctggcgcggtgcgcgcgcggcgccgacagcctgcagcgcatgtgcgccgtggtggcctggagcatctccacaagcgggccccc

SEQ ID NO: 274058 - DNA, 888 bp, Zea mays
cccacgcgtgcgcccacgcgtccggacgcacgcgtccaaacatacagctagatagcctctgcatgcctacgtacagcatggccaaggccgagctgctcctcgccctcgtggcttcgctcgtcgtgctgccattctcctccctcgccgtgtaccaggacttctgcatcgccgacctatccgccgccgccacgccgggcggctacccgtgcaagcccccgaaggacgtgaccgccgacgacttccactacggcggcctcgccacccccggcacggcgctgaaacccttcaagatctccctgggctcggccgtcgtcaccacgttccccggcctgaacgggctgggcatctctgccgcgcggatggtgatggtcccgggcggcgtcgcgccgctgcactcccacccgggaggcaccgagctcatcttcgtcatcgagggcagcgtcgtctgcggcttcatcagcgccacgctcaacagggtgtacaccaagacgctgtacgccggcgacctgatggtgctcccgcagggccagctccacttccagtacagccacggcaacaccacggcggtgacgctgtcctcgttcagcagcgacaaccccggcctgcagatcctcgacttcgcgctcttcgccaacgacctgcccacggaggtcgtgaacaaggtgaccaacctggacgaactgcagatcgtcaagctcaaggcgctgttcggagggaggggctagacgcatatgtactccgtatataggaacagtcaacggtgttgatcattgaattgtgtgtattattctatacttgtgatggatgtttgtcttgtcattctataaaataaattgtaacgcgcgcagcaggcgtgagagcgaatgtagctgccacatttgatgtact

SEQ ID NO: 274059 - DNA, 1658 bp, Zea mays
ctcatatcgcttcgacacttccgccgagctcggcctcgggcggcgtcccggtctcaccgcgaccgggcggtgagaggtagaacggccaccagacatcaaccgtgaaggggtggcgtcaaggcagcgctgaagcggcggcgacgtcgaggctcgagctcccgtgccgcgctccgagctaacctagatgaacatactcgaaaggatacgtggaggtggcgacagggcggctgccacggagcgccccccgcggccggagtgctgggtggagatttcggagtccgtctcacggctctgcagcttcgacgccgccggcagcggtagccgcagcatctctgtaaaagttattcaggattctagacctatacatgacaaacttggttgattctttcttgaacaaatttttcccatcaggttatccatacagtgtgaatgaaggttacttaacttataccaaattccgtgtgctacagcatttctcgagtgctatgctacatgtgctatcaacacagtccttgctgtttgctgcagtttgcgacctaccccggcgcatgctactgctgtaagttggattctaaaagatcgaatgcagcacgcaggaaagctcatttgtagcagcatgggtgcaagaatggattctggaaccaaagagttggaggatacttgctgatgttctctacgatcttggtactgcattggaaagttgtttcgccgctgtgtccacaacttttccctgaagtagcaggcttgggaaattttgcgaagggaatggccgttgttgcagcaagagcaacgaggcttccaatttactcttctttcgccaaagaaggcaatcttagtgatttatttgctaaaggggaagccatatcaacacttttcaatgtcatgggaattggagctggaattggattggcatctactgtttgttcaacaactcaaggcaagttaattgcaggcccgttactttccgcagtgcatatatatggggtcatccaagagatgagagcaactcctgtaaacacactcaacccacaaagaacagcaatgatcgtggctgattttatcaagagtggaaaggtttctagccccgccgagctaaggtacaaggaagacctcctgtttcccaaccgagttatagaagaagccggcagtgtgaaaatcggtcagccacttcgcaaagtgttcagtccccggcttgttgagcagctgagggcgactttcccaggcgagaaatttctgctcagccagaaaagcaacaggacgtacatggttctggagcgaagcgcgagcggagaggacgcgctgagggggtggctggtcgccgcgttcgcttcggagatggagaggtcaggcgccggctcacccgatggcgcggttctgagcgaggcctacgagaagatggagcgggtcttcccccccttcgtgtcagaagttaggagcagggggtggtaccccgatcagtttttggacgggaactgtagtcgagtctcgtttgccaagtttcggtagtcccaaagactgtatatggtctatgttttttggaggggaaattcggaaccatgaactcatgcatgcagggcagtgtagtcgaactcttaggctatccgcactcatactactctaaatttgtcctttaaaaggaatattctatcctcgtcagc

SEQ ID NO: 274060 - DNA, 389 bp, Zea mays
aatcaaatttcaactgcataaagaggggtgtcatggcgtcctcgaggatctcggatttcatgaggaagacactgcagaaggaggcttccagggatgcctgacctgagtagcaaatgtattagcacgactgagaagctgcctgcctgtgataggcgatggcgatggcaatggtgtgtagacagcagctgggtctctagttttgacggcatgtagtcgtgttagaatgaaggaggcaagggtgcgatggagtggaggtcaatcggcgtgtgatgccacgtcactagcttagctgcggatggtttggtggacttttgaggaacagataatgagattgtatgcacggcacgctgaaattttacttgaacgccgtccgattaaaacaatatcca

SEQ ID NO: 274061 - DNA, 3438 bp, Zea mays
tcttacgcgtgggcggacgcgtgggcggacgcgtgggcggacgcgtgggataagaggtcgagatgctgcttttttgggcccagatgataatcaatatgctattctggaggaagatagaactggtctgaatctctttagtctcaaagctgtagctacaaaggaagctcttgaaaataatgctgctgtgcttgaagaaaacacttttgctgataatgctgctagtgctacctcaacggaacgtcaaggtcctctacagtttacttttgaatcagagggatataggctgtctgcagacaacgggctatccattacaacaaaaactgatgggaagaagtttattaagttgaaaccaaatgagactgttcttcaggcccactggcaaacaaccctaagaggtcctgtggtaggaatattgacaaatcagagggtgctaattgcttctgctgatcttgatatactatcaagcagctcaacaaagtttgatcgtggtctcccatcatatcggtcaatgttgtgggttggaccagcacttatcttctcaagcgcaactgcaataagtatgcttgggtgggtccgcaaagtccgatcaatcctctccactagcttccctcgctcagtattacttggtgcattgaatgaccgcctactgcttgtaaatccgacggatataaacccaagacagaaaaagggagtggaaataagggcctgtttagttgggcttcttgaacctcttctcattggatttgctaccatgcagcaacacttcgagcaaaaacttgatctttcagaagtcctgtaccaaataacctcgaggtttgatagtttacggatcactccaaggtcattggacatattaactaaaggacctcctgtttgtggagaccttgctgtatcattatctcaagcaggacctcagtttacccaaatcatgcgctgcaattatgcaatcaaagctctccggttctctactgcgctgtcaattttgaaagatgagttcctgcgctccagagattatcctcaatgccctcccacttctcatctgttccagcgtttccgagaattgggatatgcatgtataaagtatggtcagtttgacagtgcaaaagaaacttttgaggttattacagatcacgagagcatgctggatctatttatttgtcacctgaacccaagtgcattgcgacgccttgcacaaaagttagaggaatctgctacagattctgagctgaggcgataccttgagagaatattaagagttcgttcgactggatggacacagggtgtattcgccaattttgctgctgaaagtatggttcctaaaggccctgaatgggcaggaggaaattgggagatcaaaacacctaccaacattaagaatatacctcagtgggagcttgcaggagaagtcatgccttatatgaagacaactgatgctggtatcccatctgttgttgcagatcatattggtgtgtacctgggtgtgatgaaaggaaggggtaatgttgtggaagtaagtgaaaagagtttggttaaagctatagctgcagctagcagtgagaacacacagccggtgtcttctgcatcagcagagaaaagtaaggcaattcctcgcggtgattcggttggtgatactttggcaaggcaactgggagtccagattgcatcttctgatgaacaggcaaaagctgccgaggacttcaagaagactttatatggtgttgttgatgatggaagtagtgatgaagacgagtcaacctcaaagactaaaaagatacatataaggatacgtgataaaccggctgcacctactgtagatgtcaacaaattgaaagaagccactaaacagctaggcttgggtcctccgctgagtaggacaaggtcattatcagggacacctcaagacttcaatcaggctcctacacaaccaggaggtccagccgcagctgtttccccagcaatgccaaattctgcgattgatttatttggaacaaatactttagtgcagccgcaagcaccctctagttccacaggtcctgttattgcaggcatgggagtgacggctgggccgatccctgaggacttcttccagaacactattccatcgcatcaacttgcggctcaactacctcctcctggaatagtcctgtcacggatggctcaacccgctcctggcattgaacaaggccgaccagtacctaatcaaatgatggctaatgttggtcttccagatggtggggtgccaccacaagcaccaccgcagcagtcccagtttcctccgcagcagtcccagtttcctcagcaaccaggcattcctatggattctattggcctgcctgatggtggtgtccccccacagagtcagccacttccttcacaaggccagtttcttccttcacaggcacagggctttcaacttggtattcctgctccatcacaaccaattgatctcagcgctctcgagggtcctggagcggcgaacaagctgctcgccctccagcacctactgctgtgcggcctggccaggtaccacgcggggcccctgctgcagaatgctacaagatggctcttgctcatcttgagcagaatcagcttaccgatgcactatcttgtttggacgaagcattcttagcccttgcaaaggaccagtcacgtgaagccgacatcaaagcgcaggccaccatttgtgctcagtacaagatcgcagttgctctgctgcaggaaattgctcgtctgcaaagggttcaaggagctggtgctctcagtgcgaaggaggaaatggccaggctatctcggcaccttgcttccctgcccatccaggccaagcacaggatcaactgcatcaggaccgccatcaagcggaacatggaggtccagaactacgcctacgccaagcagatgctggacctcctctactccaaggcgcccccgacgaagcaggacgagctcaagagcctgatcgacatgtgcgtccagaggggcctgacgaacaaatccatcgacccgttcgaggacccctcgcagttctgctccgtgaccctcagccggctgtcgaccatcggccacgacgtgtgcgacctctgcggcgccaagttctcggcgctctccgcacccggttgcgtcatctgtggcatggggagcatcaagagatccgacgccctcgctggtgggcctggacccgtgccgtcacctttcggctgaaggtcgagtctgctcctttcgtcctccatcggtcctgatattgtatctatagtgttcagtttgcgttcattacattcgattcgttgcagcttgtattgtatgtagcctttttgacgtgtagcacgcttggtgttgagagcaatgtacacctgtactgttgggttggttgtgattatacacccggttttttttggagctaaaaaaaaaaaaaaaaaaaaaaaaaaaaagggcggccgaaaa

SEQ ID NO: 274062 - DNA, 138 bp, Zea mays
agctccaaaaaaaaccgcgtgtataatcacggccaacccaacagtacaggtgtacattgctctcaacaccaagcgtgctacacgtcatctgtggcatggggagcatcaagagatccgacgccctcgctggtgggcctg

SEQ ID NO: 274063 - DNA, 515 bp, Zea mays
acgacgcgtggcccacgcgtcgcgaagctttacaagagtcactaataatgattgatagagagatgccaggctttgtttctagcaaggccctacttcatacgtgtggagaccaggacaagttctcccttacaaatttcacgacatggagaaacatacgaaagtacatcactgcgaggattatatccaactggggaaggtgctggctatgctgggggcatcttaagtgctgctgtggatggtatgtattgtggttttgctttagctaaacaactttctttattccatggcgatatagagccatttctaggcaaaacacaaaaacaaacaggttttataaagtattgaatggactagtgcttggtattttgttgttccaattttttgggggaaaagatcgatgtcattatagctttaaccataggatatttttgtcatgtttagagcagctgtgattgccttactaaattcatcagctaatttgtgcacggttgatgtagaagggtagagcaaggcat

SEQ ID NO: 274064 - DNA, 479 bp, Zea mays
tagcaccatcaccagctcttctccatcaagagtaacaggccatcgccttaccagttctgatcccaaatcatttacggcgtaggtgcctcttgctcataacccagccccacagcaatggagtgcgagaacggccgcggcgttgctgcaaccaacagcgattccctgtgcatggcgacgccccgcgccgacccgcttaactgggggaaggcggcggaggagctgatgggcagccacctggacgaggtcaagcggatggtggccgagtaccgccaacccttggtgaagatcgagggcgccagcctcagcatcgcgcaggtggccgctgtggccaccggcgctggcgaggcccgggtcgagctggacgagtccgcccgtagccgggtcaaggcaagcagcgactgggtcatgagcagcatgatgaacggcaccgacagctacggcgtcaccaccggcttcggcgccacgtcgcacaggaggac

SEQ ID NO: 274065 - DNA, 882 bp, Zea mays
  unsure (1)..(882): unsure at all n locations
ggctggtgtacgacgccggctccgacgactatgtcgccttcctctgcacgctcgggtactctccgtcgttgatctccatattcacgcaggacgcatcggtcgccgactgctcgacgaaattcgctcgccccggcgaccttaactaccctgccttcgccgccgtcttctcctcctaccaagactcggtcacctaccgccgggtggtgcgcaacgtcggcagcaactccagcgcggtgtaccagccgacgatcgccagcccgtacggcgtggatgtcacggtgaccccgagcaagctcgcgttcgacgggaagcagcagagcctgggatacgaaatcaccatcgcagtgtcaggcaacccggtgatcgtggattccagctactcgttcggatccatcacctggagcgacggcgcgcacgacctcacgagccccattgccgtgacctaggccgtccaacggtggagcagcagccatgtagtagactgatgctgttgctactgtctaccgctgtgggaagaaggacagggccatgagcccatgagatccgaaatctccacgcctcctgcctgccataggaataatttcctcgactgaaccacgcaataattcagctgcccctatcgtggttgtggtggaccaatggaccatgcttgcagctctctcttttcatttaggggtaggttggttggagcagcgtatgtgattggctgcttgcaaggccgtgagggtgccatccattatggctcattggcgattggacgtgtatgaacaagtttgtaatgactagaaataatcattgtaccatgttttttctatgctggcgcgtttatagcaccatgctttgtgtatgtcacttgtgtacgcatactanagagaaagcatg

SEQ ID NO: 274066 - DNA, 385 bp, Zea mays
cacagacagtcacagacacatccaacgagcccgaccgccagagctcgccgccgtcctccgcagacaatccaccatggcgatggtgctggggatggtgctggggaagatcccggtggagacgcccaagcacgaggtcctccacaccggcgccggctacgagatccgcaagtacccgcccagcatcgccgcggagttgacctacgatcccaaggagatgagaggagaccctgatggcgggttcaccgtcctcgccaactacatcggggtcctcggaaagccgcagaacaccaagcccgagaagatcgccatgacggctcccgtcatcaccaccgagcccatcgcgatgaccgcgccggtgattacggacgaccagcatgcgccgggc

SEQ ID NO: 274067 - DNA, 593 bp, Zea mays
agccaaacaaaaaacgaggatcccaagttcccttcacaaactgcagggggaggcgaacctcgtgcagcgcggccatggcgaagcagggggcgaagaagatgaaggacgagaacaagaagcgcttggacttactcctgcgcatcatcctcatatccaacgttatttacatagtggtgaggatggctataatgcattcatccttcacctggaagcattggattggccttatggtaacatcggccgcatattttcttccatataagcaactcgccagtatggcaaagccagtttactctgataacggagaactactggatggtggcttcgatttgagcactggtggggtttgcgagtatttatatgatgtgatctacatcactgtctttgtgcaattgatgtctatcatttctgaaaaattttggtggacatatttagtgattccagcttttgctggatacaagatttccggcttgttgagaggagcatttttcagtggtggctcagagggtgaagtatgaagatgagaagacccgatagaaaagggagaagatggagacgaaggcatctagggggaagatgatcaaaactaggac

SEQ ID NO: 274068 - DNA, 627 bp, Zea mays
tatgggaagctggacgcctgaggttccggtactgactgccggtcgacccacccggccctttgcttgaactgcggggggaggcgaacctcgtgcagcgcggccatggcgaagcagggggcgatgatgatgacggccgagcccaagtagcgcttggacttactcctgcgcatcatcctcatacccaacgtgaagcttagaagaattggaccaactatttgaagaggcgaaactaggtggactaaacatttgaagtatctcgtgctcaatttttttttgactctttcctgtaaggccggaagggaataacaccctgcctagaactggatctgggatgccactttgccgtggcgggaataaaattccctgaggataaaactaggcggagaattagcttaacttagcttggctcagcggaatcactcatctgttcctctggtagccgcctatagtagcaccgctgtgatgccaggactcatgaggttaatcgagaactatgacatggtcctgaacgacctaacaaatgtagggatggatttctaatactttattgcaatccacaaatggcagaagatagcatattgattgaacctaacagttgagagcctcatggtaggggggaaacattcc

SEQ ID NO: 274069 - DNA, 449 bp, Zea mays
aatccctaaccttcccccgcacgttcctctctctaccgtgttgcccgtcccgtgcccctgtcgcgatagatggctcgcggcccccaacgacgacgaccgcgccgccatgaccaccaccaccacgcccacggcggtggcggtcgtgaacgtggtcgcagttgcgcagctctacgtcgggcctccacctgcgcgcgtccctccacctcgcccgtggccacgaaatcctcttccatggaatcgtcgcgcatcctcctccacctcgaccgccgcggccgattcccaccgccaccacgccgcgcacgccccgtccctcggtcccccgtccgcctcttccctgcccctaccccccgcgtctaccgcgctcctcgcccctcctaacatcgtcgtcttcatctagcgcgacagccgatgcacggcttctagctcagtccgtgccacgcccgtgggga

SEQ ID NO: 274070 - DNA, 380 bp, Zea mays
ctaccagacaacagtcaccggcacgcagacgctcagcaagagccaacaggacatcgtcgctcagcaagaaacaaggggggcaataatggcggagtaccagggcgagtatggacacccgtacccgcgcgtcgaccagtacgggaaccccgtgccgccggtggaccagtacggcaacccgctcccgagggagccggcgtccggtttcggcgccatcgctcccccctacagcgctggcgacagcgccgcggggcacgtggcggcgcctgtcgagtacggtgccgacgccaagtatccgcacgatggcacggggagcggtggcggcggcggcgtcaccgctccgaccggtgtggtggcgtactccagcggtggcgtcgcaccag

SEQ ID NO: 274071 - DNA, 1293 bp, Zea mays
ccggccaagaagagccgccgcggcccgcgctcccgcagctcgcagtaccgcggcgtcaccttctaccgccgcaccggccgctgggagtcccacatctgggattgcgggaagcaggtgtacttaggtggattcgacactgctcatgccgctgcaagggcgtacgaccgagcggcgatcaagttccgcggcgtcgacgccgacataaacttcaacctcagcgactacgacgacgatatgaagcagatgaagagcctgtccaaggaggagttcgttcacgccctgcggcggcagagcaccggcttctcccgcggcagctccaagtacaggggcgtcaccctgcacaagtgcggccgctgggaggcgcgcatggggcagttcctcggcaagaagtacatatatcttgggctattcgacagcgaagtagaggctgcaagggcgtacgacaaggccgcgatcaaatgcaacggtagagaggccgtgacgaacttcgagcccagcacgtacgacggggagctgctgctgactgctgaagctagcgcagaagttgctgacgacgttgatctgaacttgagcatctcgcaaccggcctcgtcccagagccccaaaagagacaagaactgccttggtccgcagctccaccaccaccatgggcggccgtttgacggctccgccgttctgaagaaaaccaagatcgatgctccgtctgagctgtcgtcggcgggccgccctcaccggtcgttcctccctcatctcgtggctgccgagcatctaccgcctcggtctcaccccttcttcatcacacaccatgagagtgatgcatcaagaagagatcctagctgggcagcagcagcagcatggaaggtgaccgcagctgcacctcctcctcctaccaccaccctgttgccgttgccgctgccgtcgacgtcgtccgctgcagcatcatcaggattctccaataccgccacgacagctgccgccgccccatcggccgcctcctcccgccggttcgacccgccgccaccgtcgtcgtcctcctcctcgagccatcaccaccaccaccaccgccgctgagaatcgaagaagccacactgtaaatctgccgggaagcggctggtggcatccggcccgctcctccctccgggcgccgcaacttttttcgatcggttttgcgccgcccgggacgggttgtagttgatcgattggattcttcataactgtatttgcgtactgcttacactacccaagtgaaatcgaaaatggcgccttctccccacgcgtcacgccacgcgtccg

SEQ ID NO: 274072 - DNA, 417 bp, Zea mays
cgcacgcgtccgcctcagctccgttgcgcaccgccaccgccggccggccagccgccggagcaccgaaagacccccgttctttcctgtaaaaaaaaacccgccgcctttagctagctaaccggtcgtcctcttcaccccctagctttgctagctctagctaggaacgagagagattagaggataactgagattgctgattggtggtccgggtacggtgttcttgagtcgtgaagcgacagtacagtggctagggtcgtgccgcccctgcagtctccggggttgcgtgcaggatggtcgtcagggatcgggagtgaggaggcatcagctctcgcggtcgtggagcctaaatgtaccgcaacaacgactcggcactctcctgcttctacctcttcctcctctggttcttcttcttgaagt

SEQ ID NO: 274073 - DNA, 453 bp, Zea mays
cttcctcagctccgtcgtccaccgccggagcttctaaaggccccgcgcccgccgcctttcctgtaaaaaacccaacctttagctagctaaccgctcttcttcatccccctactatccctagctccaaccatagaagatactttaacggatggaggggaaggagaggatatttagctcgattgttgattggtggaccggtgtacggtgttcttgagtcgtgaagcgaccgtacagtggctagggccgtctccgggttgcgtgcaggatggtcgtcagagatcgggagtgaggaggcagctcgtggtcgtggaggctaaatgtactcccgctgagaatcgaagaagccacactgtaaatctgccgggaagcggctggtggcatccggcccgctcctccctccgggcgccgcaacttttttcgatcggttttgcgccgcccgggtacggttgtagt

SEQ ID NO: 274074 - DNA, 769 bp, Zea mays
gcatctcccaagtggtgccaagccacagcccacaggtaactaaccaagtactagcgcgagcaacgatgttcaggtgccccagcaatggctacggccaaccgcaccccaccgcgaactaccaccgcacccactccggcgaacacgtcaccaccaaggtcgcccagaaaccctgccatgccggcggcgccgtgcagcagcaccacgttgtccacaaggagtcgtcgttcaaggagctggacgggggtaaccgccgctgcttcgacaactatcccatgaacgctgctaacaacgcgaaccaccaccgctacgaggcctacgaggaaacctacgaggaaaccaactgcgaggaggagacgtacgcgtacggcgccggccgccaccatggtcacggcagcggcggcggcgggcgccgcttccagtaccagacccacgaggagacctacgaggaggaggaagaggaggtcgtcgtgggcgggggcggcggcgccggcgccggctgggcccagctcaggcgcccatcctgccgcgcatgagcagcaggcacctgctcgtacgtggaatgtgtggatgcgatgcgagtccggattggtggacgccacgcgttggttcaggggtacaattgcaaattctaataataacctgcaggtgacaacctagctaatctcgtacgtaaataaattgtactcctagtcccaatccccattaatccatcgatgctctgcatccaccgtatatgtattccatgtatggctatgacttgtgagttgtg

SEQ ID NO: 274075 - DNA, 499 bp, Zea mays
ggtcatagcatctcccaagtggtgccaagccacagcccacaggtaactaaccaagtactagcgcgagcaacgatgttcaggtgccccagcaatggctacggccaaccgcaccccaccgcgaactaccaccgcacccactccggcgagcacgtcaccaccaaggtcgcccagaaaccctgccatgccggcggcgccgtgcagcagcaccacgttgtccacaaggagtcgtcgttcaaggaggtggacgggggtaataaggccccagcggccaaccgccgctgcttcgacaactatcccatgaacgctgctaacaacgcgaaccaccaccgctacgaggcttacgaggaaacctacgaggagaccaactgcgaggaggagacgtacgcgtacggcgccggccgccaccatggtcacggcagcggcggcggcgggcgccgcttccagtaccagacccacgaggagacctacgaggaggaggaagaggaggtcgtcgtgggcg

SEQ ID NO: 274076 - DNA, 750 bp, Zea mays
aaccgttgctctaaaagcacatgaggagaacatccatcttcctcttctgtgatagcttacatgactcctctctccagggtaccggtgtacgttctatggtctttcacccagatggtaaaacccttttctgtggattagaccaaagcttaaaggtattctcttgggaaccagtaaggtgccatgatgttgttgacatgggttggagtaatttggctgaccttagtatttatgaagggaaactcttgggatgctcctaccatgagtgccgtgttggtctatgggctgctgatatatcactcattggaccctatgctcttggtgtattgcccaaagcgaatttttttgctgagcttgtgcagtctatggaagataatcctgtgaaaccagttgatagcactgcaaattctcgtcctgcttcagcaatggcacattcaagaagttcatacaaaatcaaggagtctgggattgctcaaagcagggttcgtggctcacatttgactccagcaagtacagataagaccaagaaagataggagcagcactattccacgaagacctgattcgtctttaaagtcatctgttcagagtactaccctgatgaggcgtatgaagcttgttgatagtccttccaccaacacaaaaaatgtggaacgtaatgttgggcagagagacatttcattagcgtctcgtgcagtgatggctaataattctgcaactgctaagaaaaagcaatcttacagaatcagcttta

SEQ ID NO: 274077 - DNA, 533 bp, Zea mays
ccttcatccacgaagagctgaagatatcacatgactagttgcagttagtgtggcttttctccctgcttggtcctgattgtgtgctttgccttgcaaaggaaggaatcatgacctctgttgttcagagcgtttcaggtgaccacagggctgaggatcaaagtcatcagaagaagcaaactgaacctggggaccagcaagaagccccagttactagttcagatagccaaccaacagtgggcacaccatcaacagattatgtggcaccctatgcccctcatgacatgagccatgcaatgggtcaatatgcctatccaaatatggatccatacaagggaatcctttagccgggggcttaggggggcaatccatgggggcacccaaaattagccggaatgcatccggcgggcttacctttgcctaccgatgcaattgaagagccagtgtatgtaaatgcaaagcaatacaatgccatattaagacggcgtcaatctcgggctaaagctgaatcagaacggaagcctgtcaagggccgc

SEQ ID NO: 274078 - DNA, 496 bp, Zea mays
acaggaaggcactcacttctccaggagcccggagtcggcagcaagagagaatggccgccgacgccgccgccgccgccacccttcgtactgctctctcccaagcaacagggcaagagcagagagcttcactgctgtgcacaccgaagcaccgagttgctgccagcaggagaagcttgagattcaccactagggccagctcgaatgcgggcgccagtgtgagcatcccgaagcaatggtacaacctcatcgccgacctgccggtgaagccaccgccaccgctgcacccgcagacacaccagcctctgaatcccagcgacctctcccctctgttccccgacgagctgatcaggcaggaggtcaccgacgagcggttcgtcgacatacccgaggaggtcatcgacgtgtacaagctctggcgcccgacgcccctgatcagggccaggaggctggagaagctgctcggcacgccggcgaagatctactacaagtacgaggg

SEQ ID NO: 274079 - DNA, 343 bp, Zea mays
gccgatgcatacacaaaaacagaattaaacatgcaaatgctaatggcaagattgtttctaacagcaacagggcaagagcagagagcttcactgctgtgcacaccgaagcaccgagttgctgccagcaggagaagcttgagattcaccactagggccagctcgaatgcgggcgccagtgtgagcatccctaagcaatggtataacctcatcgccgacctgccggtgaagccaccgccaccgctgcacccgcagacacaccagcctctgaatcccagcgacctctcccctctgttccccgacgagctgatcaggcaggatgttagcggcagatcggacgcgtggg

SEQ ID NO: 274080 - DNA, 682 bp, Zea mays
cggacgctgggcgagtcttacagtacgtagcagcagcctagcacgacgatggtgtccggcagcatcagcgaggagatcgccgtggccgtcccggcggagcgcatgtggaaggtggccttcgccgagaccaagtcggcgctcttgcccaaggcctgcgccggctacgtggacgccgtcgaggtcgacggcgacggcggccccggcagcgtcaccaccatgaagcttaacccatcgctgggtgagaacaagacgctcaagagccgcgtggtggcgttggaccccgcggcgcgcgtggtgaggacggaggtgctgcagggcggcacggtgagcgcgcagctcaggacgcacttcgccgagatcagggtggaggccgccggcgagggcgcctgcgtcgccaaggtcaaggtcgactacgagcgcctcgacggcgcgccgctcgcgcccgaggacgaggccaggctcgcgcaggggtacgtccgcctcgtcaggatggtggaggcatacctcgtcgcgcaccccgacgagttcgcctgagccgccacctttcctacgtacgtcagtacgtgtatgatcatgctatatggccgtgagtgttttggtttggaataacgggaggaaaggctcctctgtttggttgcttcaattcgcttcgaatcgagtatagacgtttgtgagtttgtgt

SEQ ID NO: 274081 - DNA, 1419 bp, Zea mays
ctcacgcgtccggtccccgatcagacttgttcggcctcttcgacggcgtgcccgtctccccgggctcattcgccatgcattcctcagcctccgcgagaggaggacgagggctcctcttgccggcggctgcggcggcggttgtggtgctactgttgggtgcagtggcgccagcggcgggttgctatccgcgcgtgttcaacttcggggactctctggcggacacgggcaactacccgttcgtctatggcaacgactcagccaagctccggccaccctacggcgagaccttcttccaccgcgccaccgggcgcgcctccaacgggcgcctcgtggtcgacttcatcgcggacacgctcggcctcccgttcgtgcgaccgtatctgagcggacggagcgcggaggacttcgcgggcggggccaacttcgccgtgggcggcgccacggcgctcagcccggacttcttccgtgcaagggggttccacaacatgggaaaccgagtggacctcgacatggagatgaagtggttccgcggcctgctcgacctactctgccccggcaacctcgccggttgctcggatatgatgaaccaatctctcttcttagttggagaaatcgggggcaatgactacaacggacctcttctttctggagttcccttcgaggaaattcgcgccatcactccgagtgttgttgcgaaaatttcttctacaatcagcgaattgattcagctaggagccaagactcttgtggttccaggaaacctccctattggatgcgtcccagactatctgatgatattcaagagcaataaggaagaggattatgatccacagacaggttgtcttaggtggatgaacgagttctcacagtatcacaacaaggttcttgtggagcagctcaagaagcttcgcaagcttcatcctggagcaaccatcatctatgctgattactatggagctgctatggaaattttcctttcccctgaacaatatgggatcgaatatcccctagtggcttgctgtggtgcagaaggaccctacggtgtgtccccaactacaagctgtggattgggagaatataagctgtgcgataatccagaaaggtatggatcatgggatggcctccatccaacagaatctgcatacaaggtcatcgctatgggcctgctactaggttcctatacaagaccgccaatcgcttccaccaccacttcatgtccacagcttatggagctcggctcttctgctgaatacaaacgcctctacgacctgtaataatttatgtaattatattttattgtatgtactccctcgcccacttcaataagtcccattttgcgagtacatgtactttgtaacttttaactaataacttatcaaactagctactatatatttgttaaaaaaaaaaaagaaaaga

SEQ ID NO: 274082 - DNA, 475 bp, Zea mays
ggtttggtgatgctgatgccggtgccgcatgtctatattgggtaggtgacgctgagggctcgttccccaatcagacttgttcggcctcttcgacggcgtgcccgtctccccgagctcattcgccatgccttcctcagcctccgcgagaggaggacgagggctcctcttgccggcggctgctgaggcggttgtggtgctaatattgggtgcagtggcgccagcggcgggttgttatccgcgcgtgttcagcttcggggactcgctggccgacacggggaactacccgttcgtctacggcaacgactctgggtctggcggggccgcgctccggccaccctacggcgagaccttcttccaccgcgccaccgggcgcgcctccaatgggcgcctcgtggtcgacttcatcgcggacaccctgggcctcccgttcgtgcgaccgtatctgagcggacggagcgcggaggacttcgcgtgc

SEQ ID NO: 274083 - DNA, 469 bp, Zea mays
tgtcgcgcacgaaagtagcaaactcctgcgaccctacccaccgcacctaccattctggagaggagaggaacagagccaagaaacaagcccggaagatggcaggcggcggagtggtgaagcacatcctgctggcaagcttcaaggaggaggtgacgcaggagcgcctggacgagctcatccgaggatacgccgcgctcgtcggcgtggtcccctccatgaaggcgttccactggggaactgatgtgagcatagaaaacatgcatcaagggttcacgcacgtcttcgagtccacgtttgaaagcacggaaggaatcaaggagtacattgagcaccctgcacacgtcgaattcgcaagtgtgttcttgcctgtgctggagaaggtcctcataatcgactacaaaccgacgtcggccaattagcggtagaacatgctgtgtacttgttcctcggaggatccagtttgattcta

SEQ ID NO: 274084 - DNA, 459 bp, Zea mays
aggaaacttccttcacaagatgcgttgaacaccctgggaatcacccacgccacccatctcaccactgcaccactgcgcgcttcgtactgctggccgggctgctccagcaccaggaacgctcgctcctgctcgtcgacgttagattttcccagacgcgcgagctccccagcaactccaacacgttgctcgcctcgctcagtcttcaagccatcgtgccgctggttctagccaaagtcgggcgcgttctttccttcgccaggcagcgcctccagtcgtcgtttcttttccacggctgcacgctcaccgactcaagcgcttggccatggagctcggtttcgtgtgtgcctgtgctgggtcgccgggtcacgtgctcatccgttttgatgccgtgcacgctccggcttgtggaactcgccggcgtcgtcagctactactagacctcacagtggtactgtgatg

SEQ ID NO: 274085 - DNA, 392 bp, Zea mays
cccattcgtccgcccacgcgtccgcccacgcgtccggagcggtccaagaacatgaacggcaagtgtgcgatggcggcggcggagggcgtggcgaagcggctggtcggcaacgggctgaagaacaacggcctgctgttcacggggtaccccgtggtggggtaccaggggaagatgcagacgtcgggctcctgcgcgcgctcctcggcggcggacctgctcagcgcgtgcgggtgggatcccaggttccacggcctcttcttctacgagagcacggcgatcttctcgccggcccgggtccgggacttcatcctccacgtgaagcgcctgcggcacctcgccggatcggacaggctctgcggcgtcgacgtgtataacggactcctggtccggtt

SEQ ID NO: 274086 - DNA, 299 bp, Zea mays
gagaagtgtctgaaagttgaccgagagagagacggagcgggtgatctgaagaccacgaccccgatcggcgacaggtacggtgtgcgcggtcaccggccgtccagtccggccagtcgtccccatggcgacctacgacaaggcgatccagtcctacaagaaggccgtgaccaacggcggcgtcgctggcggcgtcggcgatgctggtgcggggcgtggtgaacgagctggtcccctacgaggtgcgggacctgctcttctccggcctgggctacctgcggtcgcgcatgtcgtcgcggcac

SEQ ID NO: 274087 - DNA, 536 bp, Zea mays
gttttatcttcacttgatccctgatcggcgatcgcgccgcgcgagcagcgctataacgcacaatgaacttggcgtccgtcgttccctgcgggcaggcattcaccgcgttaatgactcccgccgctggctcccaccgtcgggtccacacgcatgcggcggcctccaagagcggattggcctgccgcgtcgcgcgcagcgggggcgcccggtggctgccggtctcctgtgcagccgggggcggtgcagttggtgacgcttttgttactgaggacactacaaatgtgaagtttcctcgggaagtaacagttccaggctatacacacccattggttgcagttggcacaggttacagagaaaagttttttgtcaaagtatatgctgccgcgttctatgtagattactcacttcgccttgatactgagcaatggaaagcaaacactggtattgagagctttgacagttcctctgttttcgactccatttttaaggcaccggttgtgaaatcattgagtataattcttgttagagccgtgatg

SEQ ID NO: 274088 - DNA, 495 bp, Zea mays
acttctcctttttgtttgggaggtcgccaaattccatcccatctctcagcgtcgtggtctccccgatatggatgggggaagagacaagctcgaacaaggaggctacgggcattgctttatgtttgtgacgctaaaggatctctatccatcattgtttccatattatcatggtattattgccttcaatattattctctatatcaactacagctaccgtggaggagttgatagtgaaggttgtccagttatttgtcgttgtcggtgctcactttcttccgcgctgccgggtgcgggagttatttggtctatatgtagcaaatgtgattgaatctgtactgtcagtggacataattagacattttcaataagaagaatatcaattttagttgattcctatatgtaatcgtgtagatgcccttaataaccatgcagttcctgagcctgctcagtcatccctgttctctcttgacatacatgaatatcctaatcttaccg

SEQ ID NO: 274089 - DNA, 489 bp, Zea mays
accacgcgtccagtgaatgcactactagctctagcttcgcactactagctctagcttcgccattgcattcgcttactggagtacgtctggtacttgcacaactggctatcatggcgccccacattgtcgtcaacaaaaccgtgatcacattcacagcggtggccctgacgattcttgctgtgacaaccatgatggccgaggcccgagacctgtcatccacctccaccggtggctatggcgaggaagccatgaaagtgaggcatcagcagtggatggcggagcatggccgcacctacagggacgaggctgagaaggcgcaccggttccaggtattcaaggcgaacgccgattttgttgacgcgtccaatgccgcatgtgacgacaagaagagctatcggctggagctcaacgagttcgccgacatgaccaacgacgagttcatggccatgtacactggcttgagaccagtcccggcaggggcaaagaaga

SEQ ID NO: 274090 - DNA, 680 bp, Zea mays
agcactcgcatctctctcgccgcagcgctttctctcctcccgagatccctctcctcgtgctcgccgccacgcccgcgtgaacgccctcgctgccgcttcctgcactccccgcgcgccactcctcgctttcgcccaagccgcctcctctccctctccgtcgcccataaccaggcgagacggcgtgcaggggtgcatgctgcacgcggtggcgacgagctacggcacgaccgcgacgtcgcgaatgactccgagttccgttcgtggggtgcaggctcaccggctccgcatgctgtaattgggcaaagcgtggggacgctacgctcgggtggtctacttcaatcttagcgcccagcgacatcgtcgtgcaccagggctggagcgactaggcgaccggcccggaacgaatgagtagcgcttccttctctcttgtacagttgtaccattccatcctgtgtgttaccttcactgtagctgtcaacttggtgaaggtgatgatgagattctaagaagtaggtacgtgcttgcctagcaggtcagcctcatcgtacggtcttcaactactggcaaatgcaacgccgttagttgccgcatgtgactactcgcaaatcagatggtaaacacgagtaaattaaatagtaggattactttacggcatgtataaatagcacatagtgcatgac

SEQ ID NO: 274091 - DNA, 403 bp, Zea mays
gagaagatagcaccgcccgctgcaatgaaccgcgcttcttggttgctccttgttctggtgcagctctcttgcttgcactgctactcagccacccaccatggcggcggccggaagcacggacgcccactactacacgcgcccgccaacatcgtcgtcggctccgttgtcgtcgtccactccggcagctccgaggctaccaccaccgccgtttcttcaggcaccctggtcggggtccgctgccacgacgggaacggccggacggtgttccggaaggacggcgtcgtgacggaccgcagcggcaggttccgcgtgcacctcgcgcacgggccaagcagctcaagcagcagcagcagccaccagctccggtccgtcacgtcctgctcggtggccgttgcactcccgc

SEQ ID NO: 274092 - DNA, 570 bp, Zea mays
cccacgcgtccggttgttctttggcttctgatttcaacaaaaaaaatggtgtttctctaaaacccacaaagccctcctctgctctccatccctgtctctcgctttccctaacccacaccagaataccagatcgagcaccgatctagggttgcacctcttctgctagccggctggcgaggagccgttcggcatctggacgcggccaagggagatgaagctcgcggggctcaagtctgtggacggcgcccacgaggagtccatctgggcggcggcgtgggcgcccgccgctgaccaccgccccacggcggtgctcctcactggcgcgctcgacgagaccgtccgcgcttggctccccgacgacctcgctgccttggggtcccccacacggggccacgcgctcggagtcgtctccctcgccgcccaccccgccggctcgctcgccgccgccgtgtcgctcgacagctttatccgcgtttttgacgtcgacacgggggcattcgtcgccacgctggaggcgccgccgtacgagatttggggcgtccagttccatcccaagggtaatgctctggc

SEQ ID NO: 274093 - DNA, 525 bp, Zea mays
ttgacgcgtgggggcgggcgtggccatgtgcctgcagaagcggcggcggcggcgcgcggaggcctccgcggggaagctgttcgccaagaagggctcgtgggacctcaagtcgttccggatcctggcgttcgacgagcgggagatcatcgagggcgtccgcgacgagaacctggtcggcagcggcgggtctgggaacgtgtaccgcgtgaagctcggcaacggcgcggtggtggccgtgaagcacgtcacgcggggggtggcgacgagcacggcgccgtccgccgccatgctgcggccggcggcgtcggtgcggtgccgcgagttcgactcggaggtggggacgctgagcgccatccggcacgtgaacggggtgaagctgctgtgcagcatcaccagcgcggacggcgcggcgagcctgctggtgtacgagcacctccccaacggcagcctgtacgagcggctgcacggggcggcggggcggaagctgggcgcgctcgggtgggtggagcggcacgacgtggcggt

SEQ ID NO: 274094 - DNA, 810 bp, Zea mays
tcctcatggtccattctccagcggcggtgtattggcagccatgccacagaaccatctaggtgccttttgaatggcccctttcttactgcgcattggtggctaactggataactgactcggagagctaatgagtaatgaatcctcccgtgtattgtgtcatggcaggcctttataattgcatcgacagcaactgaggaggagatggggaactgctaacacccttagccctacgtgtaccaagcatcgaccattcctccctatcctacctgaattaagagagatcatcacattgggctgatgattacctttgttcaggcccatggctatcattcgtggcctcaaggaacccgacgtctttaccaatgcagtaacatcagcgaaagcacagtcgaaaacgaagccgtcaaacatgggtctcggaaacaaggatcctatccagccaaacggaactgctggtcagtccacactggaaggcagtcatggaaagttgcaggcaaccgtgagaaagatcctggaaatggttgacacacaggaagaagcagcgatgccaccaatgtcgccccctggttttcttgagctgactgaaagtgtcactgccttttcatgacgctttggtttaaccatgcgtgatgcatgcagccttgagcatacgaatagcattggcttgtttggtcgtcgtcgtcgtatcttgcaaccccagcccagaatgaccagatgtatcgtgctgatgtcaaactgctagttatcaccatgcaaagagctttaaatcaacttcagaaggtattataaagttggtgcaaattatgacat

SEQ ID NO: 274095 - DNA, 520 bp, Zea mays
tggggaactggtaacacccttagccctccgtgtaccaagcatcgaccattcctccctatcctacctgaattaagagagatcatcacattggtctgatgattacctttgttcaggtaccgggaacataactatgccccatggctatcattcgtggcctcaaggaacccgacgtctttaccaatgcagtaacatcagcgaaagcacagtcgaaaacgaagccgtcaaacatgggtctcggaaacaaggaggctatggccatccaaccgaacgtaactgctggtcagtccacactggaaggtggtcacgagaggttacaggcaaccgtaagaaagatcttggaaatggtggacgcccaggaacaggaagaagcaatgccgccgaggccgtcccctggtttgctcgagctctcggaacgcgccactgctttgtcatgacgacttgacgacgctgtgaggttctggaggcgttattaagcatggactcgggatgtttaaccatgctaggtgatacagcgcccgat

SEQ ID NO: 274096 - DNA, 664 bp, Zea mays
gcgtgggttcgtcgtcaatcgtcatccatgtcccaacccaaacactctccgtccgtccctcctctcctgttccctccccgagtcgatatctcaccgtcgtgcgagtaaaacaaagcctcgccgccacggcgccacgcgagcaaagacctagcgcgagcaagcaagggaggcagagaccttagtgcgtcgcgcaacgcggctcggcccgacggcatggagagcctcgtcctcgcctcctcctgctccccgtccccacggctgccgctactctccccctccgcccgcttccgccggctgcccggctccatgccacaggcgccggcgtccaccagcggtgccacgcggaaaggtcccaggaggcacatgctcttcgtcgccgccgccaccgcggctccttccggatccaggaacgttttcaagggattgagagcaaaaggctttgcaagcatgtcatcttcgactgccaatgagaatatgtctactggaactggtacactacctcccatgccacccacatcatcatatattggttcacctggtttctggattggagttggtgtagcattgtctgtggcgtttaccacggtcttttccatgtaaaggtgagcttacagctatttccttgtttttatgttgtaaatgagatttccatgcaacaagcatt

SEQ ID NO: 274097 - DNA, 424 bp, Zea mays
ctcaaagcctccggttgcccgaagcagtcgcatctgctcttcgtggcaccgaactcttggagcaatcaacttttgaatcgtcgacaggacagccgcgcgcgtcgtggcgaaggctgcaggatggagcagcagacgaagacgacgacacagcaagagggcaaaggcctcgccaccatggagcggtcgatcgtggacaagccgccattcacgctagcggacctcaggaaggccatcccgccgcactgcttccagcgctcgctcatcaggtcctgctcctacctcgcccacgacctcgccatcgccgcggggctcctgtacttggctctggccgtcatccccgccctcccgggcgtcctcctccgcgccgccgcctggccgctctactgggcggcgcagggcagcatcatgttcggcgtgtgggtga

SEQ ID NO: 274098 - DNA, 297 bp, Zea mays
gtacggtctagggattcgcgggccgcgtcaggtcgtatcgtctgtcgcattatattccttattattattcacagcaaccacatcgtcgagaccaaccaactcaagggaagcacaaacctccaattccattcagaataatcatccacgcatcatgctatatatgtaccctcttttatttttttctctctcttttaaacttgctgctgttatttgttatttgaattaaagttacgtataccgtatacgtacgtcaaagagtaaaaaaaaaaagaaaaaaaaaaaaaaaaactcgactcc

SEQ ID NO: 274099 - DNA, 546 bp, Zea mays
ggctgcactgcagacgctgttcaagacgctggccatctccttctccacgatgacgctcttcacggggatcacgccgctgtacaggagcagcctgcagtacgcggggccggcgccgctcgtctggggctgggtcgtcgtctccttcttcacctgcttcgtcggcgtcgccatggccgagatctgctcctccttcccgaccactggttctctgtatttctgggctgcacatttggcaggtccagtctggggtccgttggcgtcttggtgctgcgcttggctggaggccatcggcctcattgccgggattggcacacaggcatacgcaggatcccaggtactgcagagcatcatcctgctctgcaccggcaccaacatgggcggtggctacctggcccctcgctggctgttcctggtcatgtacatcgggctgacactgatctgggccgtgctcaacactttcgcgctcgaagtcatcgcgttcctcgacgtgatctccatgtggtggcaggtgatcggtggcaccgtcattgtggtgatgctcccgct

SEQ ID NO: 274100 - DNA, 537 bp, Zea mays
ccctcgcttccgcccacgcgtccgtatgactgtacgagacacggcggtagtggcagctggcacgaagggagatgattaaaaataccgtggccacgctgatggtgcgcctccaccacctgcccctgcccctgccccgcgccgcgcccgctcccacctaccgttgccgccgccacctcgccctcgcgccccctctccctcggctgcgggcatcggccgccgtcatgtcaacggcggcggaacagacgatcgccgaccagaagcgcacgctgcgcgccgaggtgcgcagggcgctgaaggccctctctgccgaccagcgcgccagcgaagatctggctattcaaactacaatactggattcctcttggttcaaagcaagcaaacggttgtgcgcttatataagctgtcagcagttgcgagaagttgatacatcaaaaatactagcagagtgtctaccgtcgaatcctggacaagaggaactggcaaaggatctttatgttcctcgagtggaggataagaaccgtaatatgaggatgctca

SEQ ID NO: 274101 - DNA, 983 bp, Zea mays
cccgaggccccgatcccccctttcatttcaactcgcatctcccgcgccgcgccgccccagcccggcagcccaaatggacctgccagtggtagatctcacgccgtatctcggggccgcagccggcggcccggccgcgtcgggcgtggaggagctgcgcgcgctgtgcgccacagtgagcgctagtctgcgggacacgggggcgctgctggtgatggacccgcgctgctccgccgcggacaacgaccgcttcctcgacgtcgtcgagcgctacttcgcccgatccgccgacgcaaagcgcctccaggaacggccccacctccactaccaggttggtgtcacacccgaaggggtggaggtgcctcgcagtttggtcgacaagaacatgcaggagaagatcaggagcatgcctaaggactttaggccagccactcctaaagggccggacccgaaatggcgatacatgtggagagtgggtcctcgccctacaaacacccgttttaaggagctgaactcagaacctgttattcctgagggattacctgagtgggaagagatgatggattcctggggttctaaaatgatttctgcaattgaggttgttgctgagatggctgcaataggctttggcctatcgaaggatgcatttacttctttgatgaaagagggaccacatctcctcgcaccaactggaagtgacctgcagcgtcatggttctgagggcaccgtttttgctggattccactatgatcttaatttcttgacgatacatggccgaagtagattcccaggccttaacatctggttaaggaatggtaaaaagatggaggtgaaagtccctgttggttgccttctaattcagtctggaaaacagctggaatggcttactggtggcgattttggctggaatgcatgaggtagtggtaactaagaggacactagaggccatagcgctagcgaaagaacagaatagaagcttgtggagg

SEQ ID NO: 274102 - DNA, 435 bp, Zea mays
gctgccttcgcccaaatgtcgagcagcctgcaccagcccgcagtccttgtccctcctccagcacgttccctagccatccgtccagccgatggccatggctgaggccacccacctcgccagcttcatcatgtgttcgctccccgtggcgtgtccttatcactggtcgttggactcggcttagaccccatgctttgcgtcctttcgacgttgacgacgcttagctccctcctatagctctccgtgcggcaagcccagctttcatctccagctccagcagctgcccctcctggctccagtcctctgttcgtccctcgtcgtcgatctgtgcagccttgacgcgccatcggctccctgtccgacttcatcctcgtcgccgatctcatcccgttcaggctgtctgctcgagctccagccctcgctatcatgacttctcta

SEQ ID NO: 274103 - DNA, 853 bp, Zea mays
agcaaaagcagtggcacatgaggcaggggctaactttattcacatcaaggggcctgagctactgaacaagtatgttggggagagtgaatcggaagttaggaaaatattcactcgtgcgcggactaactccccatgcatcctgttttttgatgaggttgatgctttgacagcaaaaagagggaaagagggaggatgggttgttgaacgtctcttaaatcagttacttatagaacttgatggtgctgatcaaagacaaggtgtctatgtgataggagctacaaacaggattgatgtgatagatgatgctgttttacgtcccggtagatttggaaagaaacattatgtacctttacctggtgcagaccagagagtttcaatattaaaggcacatgctcgtagcaagcccatctcgactgatgttgatttggatgcacttggtcgtcgtgctgagtgcaacaatctcactggtgccgacctagcatcactggtcaatgaagcagccatggcagcactggaagagagactggaattccgtgacaaggggacatcctcactgagttcgtctagcttgattgagatgccgcacttcgaacatgctctatcgaagatcaagccatcagtatctgaacagcaaatcaagaattatgaggcgttgtcaatgagatactcgtcaaactgatccatcaccagctgtccacatgttagtgtgtatacgaggacaaccttgtgaaaaaaatgtggtgtcttttacccatttctgaagcacattataatttcatgtgagagcctgtggtagagtattttagatacaaatagaaatctgcatgttatcgcgatcacttttgtttccatt

SEQ ID NO: 274104 - DNA, 425 bp, Zea mays
  unsure (1)..(425): unsure at all n locations
agatcaagccatcagtatctgaacagcaaatcaagaattatgaggcgttgtcaatgagatactcgtcaaactgatccatcaccagttgtccacatgttagtgtgtatacgagggcaaccttgtgaaaaaaatgtggtgttctgtaccgtgtttgcaaggagtgtgcaccgtcaccagcttttacccatttctgaagcacattataaatctcatgtgagagcctgtggtagagtagtttagatacaaatagaaatctgcatgttatcgcgatcagttttgtttccattttcatttgtctgtaacagactggcctaccggcaattttgtatgcatctcatcaaggacatcatacatacacgaatgagttgttattgaatcatgcgtggaagccccatattgcaaaaaaaaaaaaaaaaaaatgagtn

SEQ ID NO: 274105 - DNA, 811 bp, Zea mays
  unsure (1)..(811): unsure at all n locations
cccacgcgtccgcccacgcgtccgcccacgcgtccgccctccaagcaacaaacttggcattcttgcctgttcttaattattgccaggacaggagaaacaaagatgaggcctcagctgatactcgtcggcactctggctgttctcgccatcctcgcagctctcggcgaaggctcgtcgtcctggccctgctgcaacaactgcggtgcttgcaacaagaagcagccgccggagtgccagtgcaatgacgtgtcggtcaacgggtgccatccggagtgcatgaactgcgtcaaggtcggtgcaggaattcgtcccggcatgggccatggccccgtcgtcacctaccgctgtgacgacgttctcacaaacttctgccagagcagctgcccggaggcgccggcgccataggcgggtggccggtgtcttcttctgacgtacggcatgggacgccaagtcgagtttgcttctctccagtttcgtcagagaaaagaaataaataaataaataaataaataaatgtcgccggccgctctgttcggtgttatttgctcttgttcgtcgcgtcggtgtattagtactctcttttttctttttatttcttgaataaagagccatatgctgcatatgccatgctcaaagccctgttggttggttttcgttgttggaattatgggctaggcccaaccgtgaaatttaattaaattctagaaaaatctcaaaatcacatatataggtatagcaaggaaatggtggaacaaatagtctcataactagtccccatgaaatgaaacaagtagtgtagattcacntatgg

SEQ ID NO: 274106 - DNA, 299 bp, Zea mays
aatctatccaagcaacaaacttggcattcttgcctgttcttaattattgccaggacaggagaaacaaacaaagatgaggcctcagctgatactcgtcggcactctggctgttctcgccatcctcgcagctctcggcgaaggtgaccacgcgaatcctcgatctcctcgccgttgttttgtttaattttcatcacatacaagtcaattgttattcatatatgcaaaactactagtgattttttgactaaccaagcgtcggcaccaggctcgtcgtcctggccctgctgcaacaactgcgg

SEQ ID NO: 274107 - DNA, 823 bp, Zea mays
accgcatcatttatgctgcacgtggaatcttcaatcgtttcattcctgatgttcatatacacacggatcatagatctggttctgctggtgggaggtcaccaggctatggtgtatcgttagttgctgagaccactacgggatgcctgctctctgtagatgtcactgtgagttatcctagtgttgatgaaataaatgaagaatctgagaagcctgagctgacttctccggaggatcttggtgttcaagctgcatcaatgctactagaagaggtggctctatggaggtgttgttgattctacacatcagggcctcctatttattctgtgtgctttatgcccaccggatgtatcaaaggttcgtgtgggacagttgactccatatggtatagagacacttcgaaacatcagagattttcttgacgtcaagttcatcatcaagcctgatcccaattcaaacaccgttactttaaaatgtgttggcgcgggagtgaagaatcttgctcggaagatttcataagcaacatgaccattaatctgatgaaggatccatgccacatcaagagactactatgagaccctatttgtaactgcaaacaacagtgtaggagtttcccttagctgttactgctgaaattctattcgaggtccatgatgtcttagacatcaccgatgtacatcagtattagaatggattgttctgatcatgatgccctgtattgtcgacacatttttgcatcacattgcttcactccaactatgccatgacatgctgatacatagaaatgaagaaaaggtgacaaacgtccaccctaaatgtttgtttt

SEQ ID NO: 274108 - DNA, 1063 bp, Zea mays
gtggacctgactaccctttatggaaagattgagagtgcagaatattcattcccagcctggttttcaggtggtgcaaaatcactgattcgtagaattcttgacccaaatccagagacacgaatcaggatagaagagatcagaagcgatgaatggtttcagaaaaattatgaacctatcaaagaaatagaaaatgaggaagtcaatctcgatgatgtcaatgcagcttttgatgatcctgaggacgataatgaggatgctttcgaagatgaaacaggtcctctaacacttaatgcattcgacctaatcattctttcgcaaggattgaatcttgcagcgctctttgaccgcagacaggactgtgacaagcttcaaaatagattcttatcacgcaatccagcaaaggttatcttgtcaagcatggaggttgttgcgcaatcaatgggatttaagacacacattcgcaattataagatgagggtggaaggtctaaatgccgacaagactagtcatctctcagttatggttgaagttttcgaagttgctccatcaatcttcatggtagaactacaaagagcagcaggagatacttcagagtataacacgttcgtaaataactactgcggcaaattagatgatatcatctggaaatttccaactgagaagggaaaatcgaggataccccggttatcaaagtctcattcataatctagtgctgtgtgttatcaattactatggacttaagtggatatatttgcagagtgtatcgcgattggattctgatattctaagtgtagctcttcgagtagtatatgtttgtatattcagagtccccatgtacaaagaggccgttttaattgaggtttccgtacctcgattccctgtgcaaagttttcatcgatgttttagactacacatctgtatattttgtcgagagcatcagtttcttagacaccacctatgtatcatgtgtttgttgccaactagtgtcatttttgtaagatctaacttgtgatatacttggattgagtggtatggttgaaaagagtgtgaaagtccaccaaaa

SEQ ID NO: 274109 - DNA, 267 bp, Zea mays
gggaaaatcaaggataccccggttatcaaagtctcattcataatctagtgctgtgtgttatcaattactatggacttaagtggatatatttgcagagtgtatcgcaattggattatgatattccaagtggttagcccttcgagtagtataggtttgtacatggggaccctgattatcactggcacgtaccgccaagctcttccaccctgagcagctcatcagtggcaaggaggatgccgctaacaatttcgcccgtggccactacac

SEQ ID NO: 274110 - DNA, 566 bp, Zea mays
cccagacccagacagcaaggaaccttggagcctgccggcaactctaacgacgacgatggccgaaggggacggtccaactccagcccgcggcgctcgcgtcgtgctgttcccactgccgtcccagggccacctcagcccgatgctgcacctcgccagcgcgctccacgcgcgggggctcgcagtcaccgtcctccacacggcgtacaacgcgccggaccccgcgcacctacccggggctagccttcgtcgccgtgcccgacgtcatcccggaggccgtggccgcgacgacgaatggcatcgcgaagatcctcgccctgagcgccgccatggaggcgtcggggcacgtccgcggcgcgctcgcgtcgctcctcgcggaggaaggcgggcggacagcggctggcgtgcctcatcttcgactccaccctcttcgccgcgcagaaggccgcggctgggcctcggctgcccacgctcgtgctgcacaccggcagcgcccgccgcttccgtctgttcaggtccgacacctacaacatgcttcacgacaggggctatctgccagccacagagtc

SEQ ID NO: 274111 - DNA, 503 bp, Zea mays
gcccggacagttttgcgcacaagccccccattcccattctaccaccgacccgtcccgtcccactgcctgccagcgtctcccccgctccctctcctcgagagatctcgcgctccggcgatcgggcgcggcgggcggagggtcgcgaagtgccctgcccacccccgatgctcttcccgaagcgcatcaactacgtggccccgatgctcgcctccgccgccatcctgctcctcctcctctcgggctacttcgagctcccctccatctccaccccggcgccgctcctcgcgggcgcagcgcgcttccccaccgcgctcgactccgtcggatcgcgcgaccgcgaccccttcacctcgctcctcgaggccttcgcgtcctgggacgccgccgtcggctgcccccgcgtccgcgccaagctcgccgccgcggggctggggctgggcccgggcctgccgctgccgagtgcgagcgccagcgccagcgctaacggcaccgcggaggaccct

SEQ ID NO: 274112 - DNA, 1107 bp, Zea mays
cccacgcgtccgcccacgcgtccgcccacgcgtccgcccacgcgtccgagaattttctccaatggacagtagtgacctttgtacatcagatcaatccaagtcttcgagacggggtccaagatcaagagactattttcctcaagatcagtcatgttggtatgatgactgcggagatgagtctggaagaattggtgaattacgatggaagtcaagggaaaagacaagaggtactgatagaagttgcaacacagcatccacctcaaataacaagacaagagagaggcactcatacaatttttgcagctgtggccatccagaagactatggagtcatggacagctgtttcttgccaacagttagatctggcagagagatgaagatagcaagaaaatcaggagttgagaaacctaaggtgcagtacaacagatgctatacattggatagctttatagtgccaaaaggaaaccatgctggttgtacacagaaaaatgctatcccaaagcaagtatgggagcctatggatgctcgaaggaagactaacttacacaacacagttcatgattcaggttcaattaacgatgttgatccactgaaacatgtggtttttgataacagcggatctcataagttcagtgtaagatgtgaatcacagcctcaggcttctgaaagttccagggatgtttgtaattcagatcaaagatgtgcaaatggtgggagaaatcaaactatttcatgtgctagtagtactcttatggtgaaccaacaaaactgttgcgcaggaaatgatgaaggctccaggcatgatgaagagctgatgatgaactctgctggttctgatagctcctcgtcatgcatgagccagggagatagggaaagcagctccagcagtacaacctcttcaagcgctcaaaatccggaatcatcttctgagtctgaggaatcacccgagagaataaatagcacagtaggtacacaatcatcaagagctgctttcacggtctttgcttgaagcatgtgcaggtaatggtttcagagaataccaacccaaggcaaccggcctagctcacaatgacatgtttgggtacaatgtatcccctgtccaggacc

SEQ ID NO: 274113 - DNA, 436 bp, Zea mays
gggtgaaagaacaatcactattgatccactcagaaagaattacacgaggtaaaaaaaaatcatcacgaaacgccctagctagttagatctacgaaatttacgacgacgaggaggattacaatggcctcgaaccagaggcatcaagacctctgctctggctgttgttccagctggactggctgaaatccgtcgtgaaatcttggctgccgaacgccatccgctggaacagcctgatctcggccgtgctcgcgacgttgaacatctcgctcttgcctggctgcacgccgttagttagatcgacatcagcgagactgtcgagcacccgcacgacctggctcatcctcggtctcctggatgctgaatgccgaatgcaagctgcagcagcttcgatcatacggaacatcttgacttcgttggagttcttgttaagccgggc

SEQ ID NO: 274114 - DNA, 474 bp, Zea mays
cggggccgaccaacgcgtcgacttacttgtcacctggagctggacctgacgatggcataccatctcatctcttcaccactggtccttctcgcacaattgctcgccgtcgccgtccctctccttctgctcctgcttcaccaacgctcatcaattcgccgccgtcgtcgcagcagcagcagcagatcggccaagcagggaggacagctcctgccgccttcgcccccggcgctgcccatcatcggccaccttcacctcgtcagcgacctcccgcacgtctccctccgtgacctcgccgccaagcatggtggggacgacggcctgatgctgctccgtctcggcgctgttcccaccctcgtcgtgtcatcgccgcgggccgcggaggcgatcacgcgcacgcacgaccacgtgttcgcgtcgcggcccacgtacactctcagcgacgagatcctgtacggaccctccgacatcatcttc

SEQ ID NO: 274115 - DNA, 482 bp, Zea mays
aacaagcgtagatctgtcaatgtcaagtcggatttgggcatctccaatgctacggcatgacaccgtaacagaagggaatgctcagctggcacgtgtgtgccattattaattgtagcggcacggcctcttccactctcgcctcgccgtcgccgtcgtcatctcagctttaattcgcagcaggcgggcagtggcaggccaggccacggcgtccagcaccagctacgcctgtgcgcgcgcttgtgcagtacctacgttggtgggtgggtaggtagctagtgcggcggagcatcgatcgcgcggtactctcagtgccagccgtcgagagatcgaccggtcgtcgatcgatactgggggtcggggacgagcctcggaggccgggccgttgctgcgtaagataggggcagatgcagcatctggccgaggctgctgctacgtggacggatgactcgggtgcgccatgcgccggtacatcgtggcaaatc

SEQ ID NO: 274116 - DNA, 362 bp, Zea mays
accaaaagcatcccacacatctgctaataaggatggctgccctaacacaaactacagatggtcctcgcctcggcgagcaggagatgaagaagatgtctccctccttccatccaactctgtggggagatttctttctttcttacgaggctccgaccgaggcacaggaagctcaaatgagagataaggctggagtgctaaaggaagaagtgagatacatgattaaaggttcacatgatgtgcccgaaatagtggaccttattatcaccctgcagcgactaaatctggactaccactacgacgatgagataaccgaaaagttgactgttgtttacaactccaattatgatggtggtaatttggac

SEQ ID NO: 274117 - DNA, 1094 bp, Zea mays
cacgagcccacgacagagctgaagcaaatcgctgcaggccgcgccgagccgccgacaagcaacgtgggttcaccagtaaacaattcaaattcgacttctcagctcgttaaatatacggtcgctccgctcgccccttccgctcgactcaaatcgtgaaactattgagaaaattccattccaacgacatcgaaggagcctgcgaagcgagcgagagtctataatggcggacggaggcgagctgcagctgctgggctcatggtacagcccctacgtgatccgcgccaaggtggcgctggggctgaaggggctcagctacgagttcgtcgaggaggacctctcccgcaagagcgacctgctgctgaagctcaacccggtgcacaggaaggtgcccgtgctggtccacggcggccgccccgtgtgcgagtcgctcgtcatcctgcagtacgtcgacgagacctgggcaggcaccgggacccctctcctccccgccgacgcctacgaccgcgccatggctcgcttctgggcagcctacgtcgacgacaagttctacaaggagtggaaccggctgttctggtcgacgacggcggagaaggcggcggaggcgctcggcgtcgtcgtccccgtggtggagacgctggagcaggcgttcagggagtgctccaaagggaaacccttcttcggcggcgacgccgtcgggctcgtggacatcgcgctcgggagcttcgtggtgtggatcagggtggtggacgaggcggccggcgtaaagcttctggacgaggccaagttcccggccttgacggcgtgggcggagcgcttcttggcggtggacgccgtgaaggaggtgatgccggacgccggaaggctgttggagcactacaaggggtttctggctaaacggtctccacctgctggttactgaacgctgtaactgtaagcctgtaacagcaagctcagtgttcgtgtacttttccgtgcgttaacgtgtactagagttcaggaaaggctttgattctgtccagagtccagacgaataaacgaatgttttttataattcaaaaaaaaaaaaaaagggcggccggctcgcgatctagaac

SEQ ID NO: 274118 - DNA, 719 bp, Zea mays
tttctcgcgtccgtccacgcgtccgcggagaatcaagcgagtggtttggaaggaggcagaatagggaaagtagttttggaggatggaattgatgaagaaggggtagtggaggcaagtaagtttgaagtgtcatatgaaaagagtaagattagatttgctggacatgatgaacaagatgatggtggtgacagggaagatgctataattgagcagatggcacaaaatctgctgattgatggcaatggtgatgccaagggagtagtgttggaaaaacctatcctgaggagtaaggatttcagatcagatttttctagagggcatcatgtatcaagtcagagaataagattccagaggagaaacaggccatgtcgatatgacatagatcgatttacacctaacttcttgtcaatttttgaatctttggtgccctctgaagaggaaattgcaaaccagaaacagttgttaacatctctaagcagactgataaacacagaatggcctaattcaaaactatacctctatggatcatgtgccaattcttttggtttctcaaatagtgatattgatctttgtctctcgattgataacaaggaaatgagcaaggttgatattatattgacattggcagatattttccaagctggaaatctccagaatattcagccattaacttgagcaagggtccaaaagtgaagcttatggatccaaaaccgggcttt

SEQ ID NO: 274119 - DNA, 1056 bp, Zea mays
gttcgaggtacgagcctgaagccgaggccatattttcgctaagccgtggggcctaccaacgacgccacgctgcgccagtgcctgctggccgctgtgggagagctcaccatcgaccacggaatgccaccggcttctgatccctgggtcatggagaacgttgtggagcccgcgctgcaagagctgcctgctacccagcagctcgagctcgaccagcctgttccctcccaggaagccttcctccaggaattcaggagacttgagggcgccatcaccctgagactgcgacagcaccctgtgatcgtcgcccataccgagaacaacttcgacgggagtggcgtcaggaggctactgtcgaacaagttcgagttcgacaagctgctggactctgtgtggagagaggtcccgaaagaacgcaaggacaagcaggcgtcgaaagagtacctccggatcgcgctcgacaggatcgccgattcggcgggcctgccgcctctgggggccgtcggtcaggtggatgccgtggtgaacgaggcgttcaagatggcgaaagccgacgacctcagggcggtggacgaggcggagttcaagaagctgctgaccgaggttcttggggccgtcatgctgcagctggacgccagccccgtcgctgtctccaccaacaccgtcgtccacgagcccatgtgcacctcctcctcctcctccgcgctgctgtcgcccacgccgctgtctccgatggtgtcctctcctgctagtgaataggagaagacttgacaactgagtgaggagatgacgatggagatggatcacaccggcccgtcacgctcagtttttctttttctgtgtcaccgggtactaataacatgttaggaacttgtgggtttttatgtcgcttataacttctcgtcgaaataaggcttttctaagcttttgagtagttgtgaacattttaagcaatcgtgaacagatggtggttgatatgtgtccagtatggttttttaattgtcaacatgtagtggttgattagttatgaacactacgtagacactaaaaatcattaca

SEQ ID NO: 274120 - DNA, 473 bp, Zea mays
ctgtgcagaatagtgggtatcatgaatgggagctcttatttttgcagagtccattgtgaagagaattgaatttgttaatataggtctaatccttccaactgtgcaaatcaactgtgttcctccctgaagcattggttgtagggtgcgcttgaaaggatgtgcaatgagattgtttcgatgtaacgtgcatgagtacactgagtagctgtggatggttatacagtttgtggtctagggatgtgcagtgagggcagggaattgggaataatttcgtgcccccatcgaccttgatttgtagggtaggatgattccctgtttaaccactagcaaacgttagtagccagttccatgttcatttactccacggcaactgtgctttcgtgtgccaataaccggagttgatccacatgtaatgaattggtgtcaaattgacgatcctgtgtttcaaagtatggttattggatcgtgttgcc

SEQ ID NO: 274121 - DNA, 710 bp, Zea mays
cggacgcttgggcagacccttggggccttcaactgaaaaaggtaaaccaacaattccgggtaaaccaaaaattaagtcaaaggacaaaaaaaaaaacataaaaggccaaaaacaagacaagaacataaaaacaacaacatcggcataaggatcggagtaaagacaaagataaagacaaagacaaggataagaaaaaagataaaagtggccatcatgaaaagaagaggaagcatgagggaacagaagattcagtagatgtgcataagcacaagaagagtaagcacaagagctccaaaaccgatgagatggggaatggagttagttaacacttcctagctctacctccaatccttgtaatttgctgttaaaacttaaaaggagacagacggtctctgctatcaaaaccctgtgcagaatagtgggtatcatgaatgggagctcttatttttgcagagtccattgtgaagagaattgaatttgttaatataggtctaatccttccaaccgtgcaaatcaactgtgttcctccctgaagggtgcgcttgaaaggatgtgcattggttgtagggtgcgcttgaaaggatgtgcaatgagattgtttcgatgtagcgtgcatgagtaccctgagtagctgtggatggttatacagtttgtggtctagggatgtgtagtgagggcagggaattgggaataatttcgtgcccccatcg

SEQ ID NO: 274122 - DNA, 1013 bp, Zea mays
cggaattctccgtggtcgactccaactcgtctcggacacttcgatggacacaacgactgattcatccttgacaagtagttgtacttatgactacttatttcagttgcggcaagagaaatactctggcgccataaatgctcctgaagactttgcactgtcctgctgaactcgtcagatatgttagcatgtggagaggaccttggccttatccctgcttgtgttcaccctgttatgcaagaactggggttgattggattgcgtatccaaagaatgcctagtgagccaaacttggaatttggtattccttctcagtatagctatatgacggtttgtgctccctcatgtcatgactgctctacattacgtgcttggtgggaagaagatgaaggaagaagaagtcgtttctacaagactgtagttggcagtgatgaggaggccccatctcgttgcaccccggaagtagtgcacttcattgttcagcagcattttgacgctccatcaatgtgggcaatctttccacttcaggacctccttgcactgaaagacaagtacaccaaaagaccagcgccagaggaaacaatcaatgaccccactaacccaaagcactattggagattccgtgtccacgtgacattggagtccctgctgaacgacaaggacatccaggcaaccatcaaggacctggtcacaagcagcgggaggtccttccccggaaagaaggcggaaggtgccgacgagagcggggagaagctgtccaaggtgcagctgaatggtaaagcttaggaaaggattgcgagagctgctggaagtgaccacggttacaagtaaataaatagaataaggcgacagattgcatcaccgtgttgatccaggtgatgctgtttctggtaggaaattcttacccatgtgatgttctttcaactctggaaataagaagcaccctctaccaagtcagaaagtgaaataatccatccagtgtcggttttcattaatagaattttcgttgaccgccc

SEQ ID NO: 274123 - DNA, 880 bp, Zea mays
cccacgcgtccgcccacgcgtccgcccacgcgtccgcccacgcgtccgcggacgcgtggggaaaggtggggttttcctacatataactgggaggagatgtcaaaggataattatgggtggtggcgagctcgtctgacacagatggcaaagtacttcacagcatacaggatagaccacatcttgggtttctttaggatatgggagcttccagatcatgctgcaacaggtttagttgggaaatttagaccttccatccctcttagtcaggaggagcttctaagtgaaggtctatgggattttaatcggatgagccaaccatacattcgtcaggaaatactggaggagaagtgtggatcctcttggacagtcattgcagccaattttctaaatgagtaccagaagcagtgttatgagtttaaagaagattgcaacacagagaaaaagattattgtaaagattaaaacaagtgctgaaaagtcactgtgggtagagaaagaggacaatatccgccgtggccttttcgatttactacagaatattgtccttatcagagatccagaggactccacaaaattctatccccgtttcaacctggaagacacatcaagttttagggaccttgatgaacacagcaaaaatgtcctcagaagattgtattatgactattattttgttcgccaagaaaatctctggcgccaaaatgccctgaagactttgcctgtcctgctgaactcgtcagatatgttagcatgtggagaggaccttggccttatccctgcttgtgttcaccctgttatgcaagaactggggttgattggattgcgtatccaaagaatgcctagtgaaccaaacttggaatttggtattccttctcagtata

SEQ ID NO: 274124 - DNA, 417 bp, Zea mays
cacaattatctgaggcagcaacatatgcaagacagaaaaatgttatcctgaaagtgatttacctattggtgttgataggaatagtgtcgatacttgggtatacccaaccttgtttcgcatgaatccccccacgcgtccgcctcctgattattttgacaagaatggacaaaattggggttttcctacatataactgggaggagatgtcaaaggataattatgggtggtggcgagctcgtctgacacagatggcaaagtacttcacagcatacaggatagaccacatcttgggtttctttaggatatgggagcttcaagatcatgctgcaacaggtttagttgggaaatttagaccttccatccctcttagtcaggaggagcttctaagtgaaggtctatgggattttaatcggatgag

SEQ ID NO: 274125 - DNA, 392 bp, Zea mays
tgccaggtgtctcgagcgctatcatgggctgtattgtcaatggaccaggagatatggctgatgccgatttcggctgcctcgcgggcgctcccggaaagatcgacctttacgtcggcaagaccgttgtgcagcgcgccatcgccatggaaggtgccactgacgccttgatccagctgatcaaggaccatggccgatgggtggatcctcctgccgaggagtagggctgtaggctgtagccaagtctgtagtttatatattctgtaaagcgaaacacgcaatgcagtaactgagcatacgatgtacatcatccctacacattttgtacatttattgagatctgagaaataaactagaaaccgtcggtgaaaaaaaaaaaaaaaaaacaaacaaaa

SEQ ID NO: 274126 - DNA, 464 bp, Zea mays
tcgaaaaagtatcaatcgggtttgttaagtgatggtgttcttttatcgaactgggtaggacaagatggcagcagcggagttctaggacttgtgcgtgagaggctcctatcattgtatacttgtgctggttgtggcttggaagctgagcaccaactttgggaaatgaagcttcttggccgagaacctgatacacagctctatgatgttgtattggcaatttgtgcttctcaaggggaagctgctgctgttcgccgcttgcttgcaggagtcgagtcaaccagcgccggaagaaggaagaagtctatgtcatggctactgcgaggctatgtcaaaggtggcttcattctagacgcctcagaaacactcatacagatgctggacatgggcttgcttcctgattacctggatagagctgctgtactgactgcactgcggaggaacatacaggaatccggcagcctaga

SEQ ID NO: 274127 - DNA, 758 bp, Zea mays
ccgggccaagcgtcaaactaatgcctgcctgcctgcctgcgtctctcctccaggctccagggtccccccccccgccccctcggattctttccccctctccagctcccccgtcctgcagccgcctgcactgtgctgccgccccgttcgcctcccggcctccagcctcctcggttcccgcgggagggccatgaagttaaggacaaaacgacctgaatggaagtcccttgtgcctctacaactgagcagattgagcaggaaatctgccatgcgtttctttttgttccccaaggttcagtcggctggtcaatcgccagatgataccccagtttatcttaatgtgtatgatttgacgccaatgaacggttatatatattgggcaggcctgggcatatttcactcaggaattgaagttcatggtgttgaatatgcattcggagcacatgactttcccaccagtggggtctttgaggtagaacctcgccaatgccctggtttcagattcagaaaatcaatatttgttggtacaacatgcttggatccaatccatgttaggcagttcatggagctgcaatcagtaaactacaacggtgatacttaccatcttatcacgaagaactgtaaccacttttgcacggatatgtgctacaagttgaccggtaacaaaattcccaaatgggtgaatccgctcgccagaataggcgccctttgcaactgccttttcccggagtcacttaagatcctttcggttggccatgacc

SEQ ID NO: 274128 - DNA, 1097 bp, Zea mays
cccacgcgttcgcttcaagtactcttcttgatagttcatttacatatgcatgcgatgatggtgacaagtattttgtcaaacctttgcgatccgacccgatttccaagttaaggagagtaatggttttagggaggacaattgatctaagaagcataattactcagagaatgaacaaaatattcagggaaaatattgactttctacttgagcgctttgaaaatggagatctttgtggtgttgtggaactgcaacaactgctggatattttggagcttacacaccaatcaatatcaagatttcttgaattggattcttactctcttatgcttagcgagatgcaagaaaatctgtcattggtttcttattcaagtcgcatctcttctcagatatggagtgagatgcagacagatttcttgccgaatttcatcttatgtaataccacacagcggtttgtccggtccgcaaaaggaactcaccactcttctcatagatcaagtgcttctactgggaaaccttacttctattgtggatcacatgatttgaccatggcataccagggtcttgctgggctgtaccgtgacttttttggagtccctcatatgtttgcagttgttaaacttcttggttccagatcattacctgcaatcatccgtgctttactggatcatatatcaagtaagattacaggtttgctaccgaaaataaatgcactgcaagaagcattaccaaaatctattgggcttctttcatttgatggtggtatagcaggttgccaaaagatagttcatgaaattttgacatgggaagcaaaatctgaagttaaaactgaagttcttcatgaccttaaggaaattggaagtgctttgtattggatgagcattctggacattgtgttgagacaaatcgacactacacagttcatgcagtcagctccgtggctaggattggttccaggaaatgatgggcaagtgaagcatgcctactctgataatactccatttaccacacttttaagtgctgcctctaatgctgtgacatcaagccctacatgcccgaatccatctacgtttcttgtcatgtcaaagcaagctgaagct

SEQ ID NO: 274129 - DNA, 906 bp, Zea mays
ctttttcgtccggctccgcgcgtcgacggacccggcggcgccctacgggttcgccttctccgtcgacgccggcaccggcgcgtaccagctccgctcggggctgcccgccaacgcgcccgtcctccacatcggcaccctcccagccgccgcggccgaagccgcctcagatgagctgtccgactacctgctagccaatttctcgtgcctgccggtgtacctccctaccgacctccaccaccgcttctaccacggattctgcaagcactacctctggccgctcctccattacctcctcccgctgacgccgtcgtcgctcggcggcctgccgttccagcggactctataccactccttcctctcggcgaacagggccttcgccgaccgcctcaccgaggtgctgtcccccgacgaggacctcgtctggatccacgactaccacctcctcgcgctcccgaccttcctccgcaagcgcttcccgcgcgccaaggtcggattcttcctccactcacctttcccctcgtcggagatcttccgcaccatccccgtgcgggatgacctcgtccgcgccctcctcaacgccgacctcgtcggcttccacaccttcgactacgcgcggcacttcctgaccgcgtgctcgcggctgctcggactcgactaccagtccaagcgcggctacatcggcatcgagtactacggccgcaccgtcacggtcaagattctccccgtcgggatcgacatgggccagctcagatcggtggtctcggcgccggagacggaggatgcggtgcggcgggtgaccgaggcgtacaaggggcggcgcctcatgggcggcgccgacgacgtcgatctgttcagggggatcgggctcaagttcctggcgatggagcagctgctcgcggagcaccg

SEQ ID NO: 274130 - DNA, 734 bp, Zea mays
  unsure (1)..(734): unsure at all n locations
gattgaacgaagcagcccaaccaaattcccctcgccgcctcgtcncttcgcgacatttctagtcncgtcgtcgcctcaatctcgaagcctctccggcgcagccgcctcatcatcgatccgaaggcctccaaccaaacatcctctaaggtttccgcatcgtccgtcgcgatgggcttcacgaagcggtcgccccagcatcccgcctccccagccggcggcgaggtcggcgcccagacggcagggaaggtcacaccagtgccggcggcgccggagtcggcgcccgtggcgggggggccgaggcctccagacgtggcgcccttcctgaccaaggtctacgacatggtctccgacccggccaccgacgcggtcatctcctggagcgccggcggcggcagtttcgtgatctgggactcgcacgctttcgagcgcgacctgctgccgcggcacttcaagcacaatcacttcaccagcttcatacgccagctcaacacctacggatttcataaagttgatccagatagatgggaatgggccaatgaaggctttgttaagggccaaaaacatcttttgaagaccatcaagagaaagaagaaatcctctcaggatgtacctagtgatctgcagtcggtgcctgtcaaaactgcacctggcactgagaatatcgagataggaaaatatggaggccttgaaaaggaggttgagacacttaagagggacaaggcccttctaatgca

SEQ ID NO: 274131 - DNA, 524 bp, Zea mays
cccactcgtccgcagccgaggaaatcaacggttacaattggatggttggtccgaccacaatcaatcttagtcgcacaacgcgcctccctgctccagttttccattccttgcgcccccttcagatccgatctgatccacgccggcgagacaccggaggaccgccatgacgctcagcctccgtcgcaagcagctcgatgttatcgtgcggatgctgcacctgaaccagcagcagttgccgaacggcggcgagggacagggagaggacgatgcgtacaagatcctggttatggatccgccctgtatctccatcctctcgcctgtgctcaagctcggcgacctccgccaccaaggtgtcaccctcaccctcgccatcgatcgtccgcggcaggcggtgcccgatgcgccggccgtctacttcgtccggcccacccccgggaacgtggaccgagtagcggccgacgccgccgcggggctctacgggtctttccacgtcaacttctccaccttcgttccgcgacccctgc

SEQ ID NO: 274132 - DNA, 857 bp, Zea mays
cgggctctcctcccccccaatccccaattccccattgtcttcgtccgtccagcaccagctttcctccgcaccccgatccggacagcctcgccggaaccctaaccctagcgcgccatggcgggatccgcccagcccgcatccagggccgtcgtgctacgcctggacgacctggcgctgcccccgcggcacctcaccgtcccctcccacctccccgtctccgacctcctccgctccatcccgctcccctcgccctcctgctactacctcaccgccgacgggcgcccgctgccggcctcctccccggtggcggcgctcccgccgtcggcctccgtccagctccgcctccgcgcgctccgggggcgcggcggtgacggctgcgccaccggcgccgagtcccgcgactgctacctctccatgtacctcgccaagaagcccgacaaggcggaccccaacgagggcgccccctctcgcgccttcacctgctgcgcggctctccggggagcccctcgccgcgcccgccgtcgccgaccgcctcgggaacctctacaacaaggagccgctcgttgaggcgctgctccacaagcgcctgcccagggcgctgtcccacatccggggcctgcgcgacatggtccccatccacctgcaccccaggccgggcgccgacgccgccggggacgaggtccggttccagtgccccgtcaccggcctcgagttcaacggcaagtaccagttcctcgcgctccgtgggtgcggccacgtgctcagcgtcaaggcgctcaaggaggtcaagacgtccgcgtgcttggtctgccacgaggagttcggcgaggccgacaagatgcccatcaacgggactg

SEQ ID NO: 274133 - DNA, 450 bp, Zea mays
aaccacacttctgcttgcgaggcaacgggaaggaggtattgcggggagagtaaagtagcgcgccgcagccgcagcgtgaggaaaggcaagggcggcgagggaacacgcggttgcttgcggaaacccgctcgactcggtctctccgcccgcgagttgggttgatcggagggtttgatgacgggggcgcgggagccggtggccatggagataccagcggacgaagggccagcggcggcgacggcgccgccgcggcggattaggaggacgctggtggagggggcgcgcggccgtggggcgccggcgagcgtggacgagatcgaggccaggcttagggacgccgagctccggaggcagcaattccgtgaatggttggcctgcaaagcatggaagaagccacggagcccgtcgtggtcctctcaagaggaagaccatgggcagcgccttgaagcg

SEQ ID NO: 274134 - DNA, 1382 bp, Zea mays
gggctgaggcatatgggaccagcctttcatgttcttgatgccaatcgcccttggctatgctactggatggttcatccacttgctttgctggatgaagcacttgatgatgatcttgagaatgatatcatagacttcttagctcgatgtcaggataaagatggtggatatagtggtggacctggacagttgcctcacctagctacgacttatgctgctgtaaatacacttgtgacaatagggagcgaaagagcattgtcatcaatcaataggggcaacctgtacaattttatgctgcagatgaaagatgtatcaggtgctttcagaatgcatgatggtggcgaaattgatgtccgtgcttcctacaccgctatatcggttgccagccttgtgaatattcttgattttaaactggcaaaaggtgtaggcgactacatagcaagatgtcaaacttatgaaggtggtattgctggggagccttatgctgaagcacatggtgggtatacattctgtggattggctgctttgatcctgcttagtgaggcagagaaagttgacttgcctagtttgattggctgggtggcttttcgtcaaggagtggaatgcggatttcaaggacgaactaataaattggttgatggttgctactccttttggcagggagctgccattgctttcacacaaaagttaattacgattgttgataagcaattgaagtcctcgtattcctgcaaaaggccatcaggagaggatgcctgcagcaccagttcatatgggtgcaccgcgaaaaagtcttcctctgctgtggactatgcgaagtttggatttgattttatacaacagagcaaccaaattggcccactcttccataacattgccctgcaacaatacatcctactttgttctcaggtactagagggaggcttgagggataagcctggaaagaacagagatcactatcattcatgctactgcctcagtggcctcgcagttagccagtacagtgccatgactgatactggttcgtgcccattacctcagcatgtgcttggaccgtactctaatttgctggagccaatccatccactctacaatgttgtcctagataagtaccatacagcctatgagttcttctcagaagagtgatctaatgttagaacctaagaacaattggctaaggttgtgtacgattgtgttatttgcacgaatgatggttacttagtcgtgttataccagggtatttgtatgtttggtcaggtggattgcctggataaatctctctgttgtaatggtcgtgtcccgaattatgtttgtaatggtcgtgtcccgaattatcgtactggtgttcattattagttcaaatgcaacagaagtgtaggtctaga

SEQ ID NO: 274135 - DNA, 766 bp, Zea mays
gtaattttgtcaccatacgaaaggttatagagatgtaccatccgctggctttgagaatgttcttacttggcacacactacaggtccccaatggactacacaatagaacaactcaatgtcacatcagacagattgtactacacatatcagaccttgcttgattgtgaagagatttgtcagcagcaacaaagcaacactggaaattcattgcctgctaataccttaaattacatccaaaaacttcatgaggaatttgagacctcaatgtcagatgatcttcacacttcagtggcattggctgctatttctgagccattgaaagttatgaatgatctgttgcacactcgtaagggaaagaagcaggacaaaaggctggaatctctttctgccttagaagagaaaataagagtagttctctctgttctaggattgctaccttcaagttatcatgaggctttgcaacagctgcgggataaggcactgagacgagcttccatcaccgaggagcttgtggtgcagaagattgaagagaggactgcagcaaggaaggcaaagcagtatgaaaaatccgacgagatccggaaagaactggctgccataggaattgccctcatggatggccccgacggaaccacttggagaccatctttgccaattttagaggaagcggtggttgcgaaaacatgatctgtgcaagggattccaattcgacccatggacaccagttctagtcgtgtatcatggatttgctatatgtgacgaacttg

SEQ ID NO: 274136 - DNA, 482 bp, Zea mays
aggtctgatttaatgatgcaactggagaaggggcaattgccgatgggaactccaaaattgggtaaaccaaagaagcaacaatttcaacaacctgaaaagttcaatggccactttaatcctgggtgcaatgggttcaaccgggccggtgaacaagttgttgggggttaaaaaccaaaaacgacaagaaggcaacaagggttcaacaacggagcttaaaaatttcacccattaaaaaacaaggaagcatatttgccggcttgccaattctgtacgtgtgctctcagccctaagattcactctgaccgtcgaactgataatcgaaaccatggaagcaagtgcgtcatcaaatgtagagataaatgacatgctcggggctgagttttacgtccagacagcagagagggaggctaagcgccgggctgatctgttgagaaagaagaatggggcaaagtgagtaggtagcgccctcatccttggtgatt

SEQ ID NO: 274137 - DNA, 467 bp, Zea mays
  unsure (1)..(467): unsure at all n locations
gcgtccaatttacattatggtttgctggcggctacaggggagatcttaaaagctggcgaaggcagtgattacagcgactgtatgttggaggggcatcttgggaaatacaattacggtggtaatacatttgaagcatcaggctcaccttctggtgctagttattccaagtgcagggctcttgcagttagagctcttaaagttgatgagccagcatgcacacacatgaaatgcacatttggtggtgtgtggaatggtggtggtggagatggacaaaacaatctttttgtggcctcctttttcttcgatagggctgccgaggctggttttgtggacccaaaagcagcagttgctaaggttaaaccttcagactttgaagaaactgcacgccgggtttgtaaattgaacttgaaggatgcacatgcaacctaccctgatgtctcagangagaacattccctacctttgcat

SEQ ID NO: 274138 - DNA, 611 bp, Zea mays
tccacgcgtccgcccacgcgtccgcccacgcgtccgagacggtgagggaggctcagaagacgttccgggtgacggaccccaaccagcgcctcgaggccggcacctacctgcgtgttcatgtgcatcctaaacggtttccaaggtgctatcaaattgactggaaatccagggtaatagcagtcgctgatgaatacgttgttcttgataaacctgccgcaacatcagttatctgcacagaataaaattcacatccactaatatgagtatgtacaatgtactaccactgcaacatttgacgcagccagaagcacgagttcttggtgaagcaagttttggttttttggatgtttgtaggcagctaagttacaaatgaccagtcagtcgctaggttacggttgaacttttctgagtttcagatgataacaacaggtgaattttgaacctttaagtgggcggagcaactgataacattgaggaatcctgtgcagtctttacttcgcgtgcattaggattggaaacgccattgctgacgactcaccagattgacaactgctctgaaggctggtttgtctatcactttaattgtaaaaacctaattgccaaaatgttgg

SEQ ID NO: 274139 - DNA, 674 bp, Zea mays
ggtactgctcctctctttcgacaagttcctcttccactacctgaagcgccgttggttctccggcggcagcggcgccaccgtcttaaggccccccgccaaatcgaggcggaacatggcgtccgccaagtggagcgagacggccatgctcgttatcgacatgcagaaggacttcgtggacccggcgatgcgcacccgatgctggtggccggtggcgaggccgtcgtccctgccgttgccggggccgtcgccgtcgcaagggagcgcggcattttcgtcatctgggttgtcagagagcatgacccttctggaagagatgttgaacttttccgtaggcaccattattctgggggaaagggtccaacagtgaaaggtctgaaaggagcggagctggctgatgggcttgttatcaaagaaggggaatacaagttggtgaagactagatttagtgctttcttcgcaacacatcttgattctgtcctgaaaactgcaggaataaagaacttggttattgttggagttcagacaccaaattgcattcggcagactgtgttcgatgctatagcactggactatgagaaagttacggttctaattgatgcaacagctgctgcaagaccagaaatccatttgtccaatatcagggatatgaagaacatcggagtggacacgccaac

SEQ ID NO: 274140 - DNA, 745 bp, Zea mays
gtgagccagcggtcaggtgcggaccgcggacggatgggcggcaggagggaggccatagagcgggagctgaagaagcttcgggcagagcgggaggagctcgacggccggatacggctgctggaatcgcagctcgaggcagggcctgcgggattcaacggtgcggcggcggggaaaggagtaggggacgatgcgtgcggcgggagtggagcgtgccagagccgcgtgggtaacgagtttgctccggacggtagcctcccggcggatatgatctaccggtacagccgccacctccttctcccggacttcggggtcgaaggccagcggaagctgtcacagtcgtcgattttagttgttggagctggaggtttgggctctcccctggcattgtatctagcagcttgtggtgtcggtaattttcttctccgctgttgatttttttgggggtgaattatgagtattaaataaaaagtaaagagttgaaacgaagaaaattaaccgaattaaatgaagttttcagccatgtaccaattagagggaagtggatctgcttcaccctcacggtgaacagagaaaatactcattttcttggaagcgaaaacagatggttggattccttggaaaattagatcatgataattttcttccaaatgctccagtacataatgatgataattttcataaagaaaggcctgttgagttggttgcttgaactgatgaagaccattaaaagggttcatgtctgagc

SEQ ID NO: 274141 - DNA, 823 bp, Zea mays
ggacctggcgaggtttgctccggacggtagcctcccggcggatatgatctaccggtagcgccgccacctccttctcccggacttcggggtcgaaggccagcggaagctgtcacagtcgtcgattttagttgttggagctggaggtttgggctctcccctggcattgtatctagcagcttgtggtgtcggttgcttgggcattgtggatggtgatgatgttgaatcgaataatcttcatcgacagataattcataaagaagcatatgttggacaatctaaagtgaagtcagcagctgatgcttgccgtgagattaattcctctatcaaggtagtagagtatcaccatactctgaagccatgcaatgctttggaggttgcacggaaatatgatatagttgttgatgcaactgacaaccttcctactaggtatatgatcagcgattgctgtgttttgctgaacaagccacttgtatctggtgcggcattaggcttagaagggcagttgactgtttatcatcataatggaagcccatgctatcggtgcctctttccaactccaccacctgtggcagcctgccagagatgctcagacagtggtgtccttggggttgttccgggagtgattggttgcttacaagctctggaggctataaaggttgcaactggtgttggtgagcccctatgcggaagaatgctactatttgatgcactctctgctcgtattagagttgttaaacttcgtggaagctctccagattgcacccattgtggcgaaaactccgttttcacagaagaagactttcagaagtttgactatgagagc

SEQ ID NO: 274142 - DNA, 499 bp, Zea mays
tgtccttccagtgccgcggcaggggccccagctgcaaggccgacatcaacgcccagtgccccgccgcgctcaatgtgcccggcggctgcgccagcgcctgcgagaagctcggcggcgacacctactgctgccggggccagtacaaggacaagtgcccgcccacggactactccaggttcttcaagaggctgtgcccggacgcctacagctacgccaaggacgaccagaccagcaccttcacctgcccacagggctccaactacgatatcgtgctctgcccgtgagccacatgttcgagagatcaacgaccatgcattcgcagctcgcaacaagtgcacactagtgccaacgatacacaacgaaataagagtcgcgatatttattattatcgcgcgtggagtagttggtaaataaatcgcttattgcgagtattttggcccatgaataaggccttacttactggccatcatttccgacatatatacgtttgttcatgaat

SEQ ID NO: 274143 - DNA, 615 bp, Zea mays
gaagaaggatgacaggaacattagggctgatgaagctattgtaagtaacgtcctaccattttctggctcttgacaaaacagggctacggatccaaaggcagcaagatccaccactctgggcccctgacctgcccttcaggcagcaacgtcgacgagatgctgaaggagaacgaccggcaaatccaagaagtgttccggagaacccgggtggagaagtcgagagcgaggagggaccatggacatcaccagggcggtataaggcccggcgatttcggcgccatcccagtcttcccttccagccgctccagctatcaggctgtgcagcagtaaggccggagctcgaacaagatcggttggcgttggaacctccgatgtgtttcggtcccacgctttttccgggaggggatgtgtagcatacgctatgctatgctatgtacagggacagggaggcggcagcagcagcagcagccgtgcagagactctgaaggtgaggagagggggaggtgatttgtttattggcggcgattcgagtgtctcggtgaccaaactcgtgtatcgtcaggtagttttgagatgttcgctgcaactgcaatgcaatatggtgtgtgtatctcc

SEQ ID NO: 274144 - DNA, 330 bp, Zea mays
tccaaccgctccagttatcaggccgtgcaacagttaggcgctctccaacaagatcggctggagttggaaccttttgttcggtcctgtgctggtttcgggtggtggggcgctatgctatgctatgctatgccatgctatgtacagggagggagaagcagagggtgtgaaggtgagggggaggtgatttgtttattggcggagtgtctcggtgaccagagtgagtcatgtatcatcaggtgggctttggttgaagtgtttgctcccccagcctgaaactgaaacccttcttccctgtggtttcacccaatctcagacctgggagctttcccc

SEQ ID NO: 274145 - DNA, 627 bp, Zea mays
aggccactgcagatactggggtacggctgggctgggttgctgaggaggtacctggtcgaccctgccgagatgtggtggccttctaaccttgcccaggtctcactcttcagggcgctgcacgagaaagaagaggagggcggcaagtcccgtggcccgtcgcggatgcgcttcttcctcatcgtcttcttcgcgagcttcgcgtactacgcgctgccggggtacctgctgccgatcctgaccttcttctcgtgggcgtgctgggcgtggccgcacagcatcacggcgcagcaggtcgggtccgggtaccacggcctcggcgtcggcgcattcacgctcgactgggcgggcatctcggcgtaccacggcagcccgctggtggcgccgtgggcgtccatcgccaacacggccgtgggattcgtcatgttcatctacgtcatcgtgccgctctgctactggcagatcaacacgttcgacgcccgcaggttccccatcttctccaaccagctcttcacggcgtcgggcttgaagtacgacaccaccaaggtgctcaccaaggacttcgacctcaacgtcgccgcctacgacaactacgggaagctctaccttagcccgctcttcgtcatctcc

SEQ ID NO: 274146 - DNA, 464 bp, Zea mays
  unsure (1)..(464): unsure at all n locations
gaaaaacatctcacgccacgcctgctgcagcacctcgctctccgctccgttggccccatggagtccgtcgcgtccgccgcgatcgccaccacctcccgctctctcccgctccccttctcttctaccccggtccaccgccggcgccgtgccgccttcctccccgttgccgcctccaagcgtcacgacgacgacaaggaggccgcgaaagggtccggctcggaaccacggcgcgagcctaccagcctcgcgccgtacggactctccatctcgccactctccaaggacgcggccatggggctggtggtgagcgctgccacggggagcggctggacgacgggatcggggatggagggcccgccgacggcgagcaaagccggtggggctggcaggccggaggtgtcgacgctgccttggtccctcttcacgannatcacgcggcggcgcatgcgggtggcctttcactg

SEQ ID NO: 274147 - DNA, 415 bp, Zea mays
gcaagagaatttcccttccaccacagtgctatgcggagaagcagctcctcggaaaggcgagccaagagttcctggacatgagaatcaatccagcaatctgggagctcagtggccatctggtactgaagcggaggaaggactacgaggaggcctctgaagcaaacatatgcaggtttttggttgaagcagctctttctgaaacagaatttcaggagctgaacctatgcgtgctcgacttcctgaccagctctcttggttgaaactcggatgtaggttcctatagatagtaacagttctgaggttccagttaaaacagttgtgctggtactgttactttatgatggtatatcatgtagtagtatttctgatttgactcgtcacctctgcgatgaaataatatgtcttctccggcttc

SEQ ID NO: 274148 - DNA, 803 bp, Zea mays
atccccagccgccacaaagacagccggccgcctgggaacttttttttcttttcttcttcctggccgaccgcacctcccacttctctctattttttttccttgcaccatggcttggcaaacggatctaggctggcttcctctctttctgttcttctcctgctctgttctttgcttctttcttccccaccgaacagctcaaaccggtgagctagccgctgcctgagcgcgcagccggctcacatatccgaggatgaccggattaatgttcaggggcatgcgggttttaccgccggtgtgcgcgtcccctcagtagggcgcgccgccgtcggtcaaacgccgacagctgtccctgttgacagcagagaaaaggggtcgacctcttggtcgacttctgtgactgtgcacgcccagatcttatctcccttacctctttgactcgatctcgttctctgtgatgtatgagatggatctaatgtaatattcgggatcgagttatgagttgatagaacgtagattttctgtgaggatttttttgtaccttttctaatctgctctgtcatctaggccgtggatgtaaaagatcccgagccactgtgatctctgttgacccagatttaaaactgatcagggttaggttattaaaccctaaccctaaaacatcgatctgtttttactatctcgaatcttctgggtttggcccagaccaaatcttctgtagtggccaaaaccctagatttaggggtagggaaaccctaacccgagagataaaaaaataccttctattttaaactaattggtctcgg

SEQ ID NO: 274149 - DNA, 436 bp, Zea mays
  unsure (1)..(436): unsure at all n locations
tgcctctgacgcgtgggcaggcacggcgacccggccggaaaagcacaaagcagtcctccattgcgaatcgcgctcataggcacagggctttagcagagatggcgggcatgggcggcaacaagggagagggcccggcgatcggcatcgacctcggcacgaccctactcctgcgtcggggtctggcagcatgaccgggtggagattatcgccaacgaccagggcaaccgcaccacgccgtcgtacgtggcgttcaccgacaccgagaggctcatcggcgacgccgccaagaaccaggtcgccatgaatcccaccaacaccgtcttcgatgccaagcgactcatcggccggcgcttctcggacccgtccgtgcangcggacatgaagatgtggcattcaaggtccttccaaggccccgccgacaagccaatgatcgtgg

SEQ ID NO: 274150 - DNA, 407 bp, Zea mays
atggcctgcccactgctcacagtagtctagtccctgcccaccaagtacggatctcatctcaccagctgcctgtgcagcagtccaattcctcttgctggagcataccagaagcagaatcgggtgagaggaaatgggatcaacaagaacgtctcatccatctttcccggtcctcctgctcttcctcctcgctaccgccgccgccgccggaagcaacaaggctgaggaggtggacgacctccagtaccttattgacaactccgaagacatcccacccaacgaccctgacgggtggcctgaagggcgcgcggcggcgactacgacgacgaccttctcttccaagatcaggaccaggacctcccagactacgagccgcagatcgacgagacccacgtcgtgggcctcaacgg

SEQ ID NO: 274151 - DNA, 503 bp, Zea mays
ccacggccgcggcatccctgtgcgccgtcacacgtgctctgagctgctccccgtccttgaactccattaccatctttaccttcgtgtgacctcctcggcgttgaccagtccccgcggccgccccgccagatccacaccgatcccggcctcctccaccatgaccaccgagttcatcttctgctccgcgtacatacgccagcaaagcataggcactccggccgtgaccgcctccatcaccgagttccacccgcagtgcgtcacgaacgcacctgtggccctgtggttgagcacgttcacctgcggcgcccatagcttgacaactacgccgcgagctctggtcctctccaataacccggccggcaggagcgcacagaggtcgaagtcggcgcgcgggtcgaacagcctctctgggtccatgccctcggtggggagaggagccctcaccacccacaggaaccggtgcccggacctctccaggccgacggcaatctccttgagctgct

SEQ ID NO: 274152 - DNA, 813 bp, Zea mays
ctttcgtgtcatccgggtccaacttggcggaagggacagacgtgtcgtgaagccacagtatgaagaggtctccattccgcctcatcttatggttggaacttctacggaactatttgatttcattgctgctgagttggaaaaatttgtgcggactgaaggagaagatttccacctaccagatagcaagcagagggaactgggtttcaccttttctttcccagtgcaccaaacatctatatcatcggggactctaattaagtggaccaaaggattttgcatcaatggcacggttggagaagatgttgtggctgaattgagtagggccatggaaaggcagggtcttgatatgaaagttgcagctctggttaatgatactgtaggcacattggctggtgggagatatgctgataatgatgttgttgctgctgtaatattgggcactggcacaaatgcagcttatgtggaacatgcaaatgtgattcctaaatggaccgggctgctacctagatcagggaacatggtaatcaacatggagtggggaaacttcagatcagataaacttccaaggtcggagtatgataaatccttagacttcgaaagtttgaaccctggtgagcagatatatgaaaagatgatttctggaatgtatcttggagaaattgtccggaggatcctgctgaaactggctcatgatgcttcattgtttggggatgttgttcctccgaaactggaacagctatttatactgaggacgccagatatgtcagccatgcaccatgacacctcacatgatctcaaacacctgggagctaa

SEQ ID NO: 274153 - DNA, 531 bp, Zea mays
cccacgcgtccgcccacgcgtccgcggacgcgtccgggcttccatagcgctgaagcgaggcgtgccgcattgggttgttcgagagctcctagtgttgccctactacatgatggagggcgatctccccacgcccgcgaacgctagggttgttgccgtggtcaccggcggcaacaaggggatcgggctggaggtgtgccggcagctggcctgcagcggcgtcaccgtcgtcttgacagccagggacgacgcgaggggcgcggcggccgtggagaacctcagaggcctggggctctccgatgtcctcttccaccgactggacgttaccgacgctccgagcatcgctcgactcgctggtttcctcgagacccgtttcgggaagctagacatcctggtaaataatgccgcgattggcggggttgagtatgttcatgaccaagattgtggctcagtaacgagcgaggaaaaggcaaaagtgagcatcttttttcaattcgccaggtttttcttttcagctgtggagaaaaagggcgt

SEQ ID NO: 274154 - DNA, 427 bp, Zea mays
gaagcacggcaatctcgatctcgttcgttcccctgagcggcagtcagtgcgagcgagcgcgcacacagacaactcatcctctcccctctctctctcacacacacacatccatcatcccatccctgtgacgggcgatccgagggcctaccgacgatggtgtccgccgtgctccggaccatcctcgtgacgggcggcgccgggtacatcggcagccacacggtgctgcagctgctgcagcagggcttccgcgtcgtcgtcgtcgacaacctcgacaacgcctccgatgccgccctcgcccgcgtcgccgagctcgccgggcacgacggcgccaacctcgtcttccacatggttgaccttcgcgacaggcacgcgttggtggacatgttctcgtcctacaagttcgaggctgtcattcactttgctgggc

SEQ ID NO: 274155 - DNA, 1017 bp, Zea mays
gtgacatctttatcaagctggacgggcagccatacctcgcccaggtgtggcctggccccgtctacttcccggacttcctcaacccgaacggtgtgtcgtgggtggatcgatgaggtgcggaggttccatgatctggtcccggtggatggcctctggattgacatgaacgaggcctccaacttctgcacggtcaagtgcacgattccgaatacgcaccagtgccctattcctgacaccaagacaccatggctctgttgcttggattgcaagaaccttacaaacacggggtgggatgagccgccgtacaagatcaacgcctccgggcagactgcccgtctcggcttcaacaccatcgcaaccagcgctacacactacaacggcatcctggagtacaatgcgcacagtctgtatggcttctcgcaggccattgccacgcatacggcgctgcaagggctgcaggggaagaggccgttcatcctgacccgctccacgttcgtcgggtcgggggcgtatgccgcgcactggaccggagacaacaagggcacgtgggaaaatctccgttactcgatctcaaccatgctcaactttggcatcttcggcatgcccatggttggctctgacatctgcggtttctacccgtcgccgactgaggagctctgcaacaggtggattgagctcggggccttctaccccttctccagggaccatgccaacttcgcgtcaccgaggcaggagctgtatgtctgggactccgtggcgaagtctgctcggaacgcgctcggcatgcggtacaagctgctcccctacctgtacacgctcaactaccaggcgcacctgaccggggcccccgtggcgcggccggtgttcttctccttccccgacttcacgccgtgctacgggctgagcacgcagttcctgctcggtcccggcgtcatggtgtccccggtcctcgagcacggcgccacttcggtgagcgccatgttcccgccgggcacctggtacaacctgttcgacatg

SEQ ID NO: 274156 - DNA, 422 bp, Zea mays
  unsure (1)..(422): unsure at all n locations
caccgnntcggaaaacccggccgggggacgcgtccggttcaaaaccattctccactgttcctccgctccctctgtctcgtcgtctcccatctccggctagggtttgccctttccaccgcgtccgacgcctacctcgcccgcgccactgcagggaccaaggatgtcgcaacagcaaggtgtggaggagccgccgccggcaccgctgccggcggcggaaggcgaggcacaaccggccgccgatatccccatgagcgaggccgcggcggtggaggatgaggaggaggaacccgtcgtgggggaaggggaggacggtgcagacggggccgccgacgccgtcgattccgtcaatgcttcagcgaaacccgaagcagagggcgcggaggaagggggcagcgacaggaaggagcggaatggtggcccga

SEQ ID NO: 274157 - DNA, 548 bp, Zea mays
  unsure (1)..(548): unsure at all n locations
caacacaccaacactgctggcctgccctaagacacatcttcgcgttgcgtccactggatacctgctttcttagtcagcagcatgccgaaaccctccatttgtgaaacctcagcggtgataggcggtggttgtcgaacgctggcatgaaggtgtgagctcccaactgctgaatcgtgttcctcttttacatgcacgtgtccaacaagaaccaaggtggaactgtaaagccttgtgtctttgaactttgcagccacgtattcagatttttttttgagttattgtaatttatttacattccctctagaaccgagattagcgctacctcagtacactgccggtgcaagataaacgaaggaagctgggattgcatggcactgcggtctgttatgtagccgtggaacagcaagacaaaaagacatggatattccttggttggattggggtgtttgatccagaaacagtctcattgctaattgtttcattattactacaannaaaaaaagaaaaaatcaatcaatttcaaaaagaggcaattaacactgatagtt

SEQ ID NO: 274158 - DNA, 702 bp, Zea mays
ggcgcgcgccgtggtgctgtccgccgcgggcccgcacttctgcgcgggcatcgagctggggggccccggggacccgctgtccgccgcctccgccgatcccgtggccgccgcggaggggctccgccgcgcggtcctcgacatgcaggcggcgctcacggccatcgagcggtgccggaagcccgtcgtcgcggcggtgcacggcgcctgcgtcggcggcggcgtcgacctcgtggccgcctgcgacatcaggtgctgctccagggacgcctccttcgtgctcaaggaggtggacatggccagcgtcgccgacctcgggcgcgctgcagcgcctccgcggatcgtcggctacggcaacgctgctgacctcgcgctcaccggacgcaagatcaccgccatggaggccaaggagatggggttggttaccagggtattcgattccaagcaagacttggatgcgggcgtcgcaaagatcgccaaagaaatagctgacaagtcggcatgggcggtgatgggaaccaaggccgttctgctgagaagcagggatgcgaccatagaacaaggcctggagcatgtagccacatggaacgcgggtatgatgaggtcgaacgatctgaacgaggccatcagagccttcctggagaagcggaagcctgtgttctccaagctgtaatgatcagataccatcataccatacctctgtgt

SEQ ID NO: 274159 - DNA, 954 bp, Zea mays
cccatgcgtccgcccacgcgtccgctgatacccctgcagctgtgtttccagcaatgtaagattttagatttgttttgcaattttttgtaataactaagaaaaacatctatgaaatataagatggtgttttagtgttttccaaatactactgcagcttttaatttttgtttggttgtttttacttggtgcactgaacataagcataggtaatgaaaacataataagttttatcttagaaaaaaaatatttggtgatgtcagtcatgtcactattttcacttaatttacctgtttttgattggtgaacatatagtttggatgctgaggcagccaaatcactctccctgcatagagggcccccctctatccagggagattttatgtacaatgccagatttcggaactgtcctaaggattttttcagatagatttgtcaataaagtatcatatatgcaaaagaacatatattgggccaggttctggaacattacttgcaaacaaaactttggcatttggaaaggtactttctcggactccggtggagttcgcctattatcaaacaaagatgatagcgttgttgatcgtctaaagatgtatgacagccgcatcgccaaccgagttcgtcgtcggccgatggcaagcatcccctccagtgttactgatgtagaatacgaagatgcaggttacgcttcattaatgaagtctttaactcatcatgatgtgacgcacaaattgagaaccttggtccgtgttgtggcagcacatccatgtgaagctagtttgctttcaactggtaactgtcatcttcggttgactcttgaggatcctacagcgagaattcatgcgtatgtccacaagaatgatttggtcggattctttggtggtggttttttgacaacagatgtgatagtaaaaaagatgaacatggtactgggcatcccggaaccacaagaca

SEQ ID NO: 274160 - DNA, 497 bp, Zea mays
ctacccattgctatcctacctgccagcgaacctgtctcgtctccttgttgcccacgtggcctcgccggcgccgcgagctccaccttcctcagctccgccccgagcgcgatgtggcgagcgacgaggcggtctccgccgttcctgcgatggctatcgtcggacgcagcctcctctaaggcgccgcggcagcgcgtagcggcgctgtgggggaacggtgactacgggcggctggggctgggctcgctggagtcgcggtggagccccacggtttgccccttcttcctcgcccgcgccgccgacccgcccgcctccctcgcctgcggcggcgcacataccctctttctcacccagaatgggcgagtgttcgctacagggctgaacgactttgggcagctggggataggaacctctgttacacatatgctggagcctgttgaaatttctggatttcacgaaagagttgtagaagtttcagctggcaaccatcattcttgtgc

SEQ ID NO: 274161 - DNA, 361 bp, Zea mays
agctataggaactgtcatacagggagcctgagtgctggtcgagcccggacgccgtgagcagcgtgacggagaggccgtggagtatggtcgctagccgtcgtggtcgccgtggtgtatagtcgctggccgcgcgtagcacctgttgccgtgcatgcggcgcatgtggccgaccatggcgctgggaagaatcaaattagttgctgccggtgtgcacaaggaagaagaaacacctggatcgtggttatggcctcgccaggaagactggaggctggcgctgccggggtttctcgctagagcgttttcctcgccgctgggtcaacctacatgtggccagcactgccgcaaccttaatcgacgcgcg

SEQ ID NO: 274162 - DNA, 655 bp, Zea mays
cgcgagcggccgcccttttctctcccctcctctcctcccgtctcctaccccgaaccaaccaaacctcaccgaatcgcaacgacagcgagaacgtccaaacgagcgcgagtctccggcgataaccaagagcgcgggcacgcaaagcggcgaagcgggaaggaagcagtaacgatggggcttgactattacaagatcctaggcgtcgacaagggcgccaccgatgacgacctcaagaaggcctaccgcaagctcgccatgaaatggcaccccgacaagaaccccaacaacaagaaggaggccgagaacaagttcaagcagatctcggaggcgtacgaggtgctgagcgacccgcagaagcgcgcggtgtacgaccagtacggcgaggagggtctcaaggggcaggtgccgccgccgggcgccggcggggcgggccccggcggcgcaaccttcttctccaccggcggcgacgggccgacggtgttccggttcaacccgcgcaacgcggaggacatcttcgccgagttcttcggcggctccagccccttcggcggtatgggcggcggtggcatgggcggcagcggcatggggggtgtggatgcccggcatgcggagctgctggacgaggttctgctggtccatcttaggtgacgatata

SEQ ID NO: 274163 - DNA, 545 bp, Zea mays
ctcccccgtaccaaacaaacctcaccgagtcgcaactcgcaaggacagtgaaaacgcccaaacgagcgcgggcacgccaaccaaagcggcgaagcgcgaaggaaggaaggaaggaagcaagcaaagcagcagccatggggcttgactactacaagatcctgggcgtcgacaagggcgccaccgacgacgacctcaagaaggcctaccgcaagctcgccatgaagtggcaccccgacaagaaccccaataacaagaaggaggccgagaacaagttcaagcagatctcggaggcatacgatgtcctcagcgacccgcagaagcgcgcggtgtacgaccagtacggcgaggaggggctcaaggggcaggtgccgccgccgggcgccggcggggcgggctcaaccttcttctccaccggcggcgacgggccgacggtgttccggtttaacccgcgcaacgcggatgacatcttcgccgagttcttcggcggctccagccccttcggcggcatgggcgggagtgggatgccccgcatgcgggccggcggg

SEQ ID NO: 274164 - DNA, 377 bp, Zea mays
acggacgcgtgggcggacgcgtgggcggacgcgtgggatcggatacagggttcgtctccttcgctcgttgtggtcctgcctttaggctgctccgagttgggccatgggacatcgaggcccatcgcgtggtgagccggtgccgggtgttacaggcaagtaactagtttactgagcatcacatacaattaattttctagtaagcttgctcttcagtatgacagaacatatgactaattttggatagttcgcttaggttgcaccataactcagccacatacctttatggcttcatatgacacttgtcttgattttgatccatctatcagatatcatatttctacaaacaataacctcctggccatattaaggatctggat

SEQ ID NO: 274165 - DNA, 502 bp, Zea mays
gcactgcgcccaaaccggaggcgatcacaagtcacaacacagcccacttgtgagctgtctcctatcgaatccttgcgggggaaaggaatgggcgtcagcgctcgagctcaccatccgaagcaccggtgccaccaggagacgtgcgtgcccgacggcgcgtcgctcgcggcgatgtacctctacggcgacgtgctcgagtccgtggtggagcgggtgccggtggccgacctcgccgccgcggcgcgggtctcgcgggagtggctccgcgcggtgcgcgccgcgctgcgccgccgcccgctgcggctgccctggctcgtcgtgcacctccagggccgcgggggcctccggtgcgccgcggcgtacgacccgtgctcgggcgcctggctcgccgtgccggcgccgcgccacgccacgccgtcgcacgtccgcctcctgcgcggcgcgcgcggagaccgcgtctgcgcgctctcgctctcggggctcgccgtcgcggtcgatccgt

SEQ ID NO: 274166 - DNA, 718 bp, Zea mays
ggggcattgcaagttgcggtatggagatggtggagatgatgaagatgctgacctcgaggaattctatgattacagcagcagttatgttgattcagaaggcaagcagttgatgctgttgatgacttgaacaacaacattgagctgggaatcggtgggtctgagctagtaataacaaacaagagcgagaaaggcactcgggtcagaacccttggctctagggaatttatgcgctactatcgccagaaaccacggccttctgttgcaccagaccgtgcgcttgcactttcactagcttccagctacaagagcatgggtttggtgacagtgcagtctaaggagcagatggtgaggctgaaagttctccgtgctatgaacaggaccggggtcgagactatgcggaacaagatcggaatgaagagcaatgtgatccggaacctccctaagaattgcccgcactagacaacactgccttctcctgcaccctatctggagcttctcctggcatttatatggtgtcttatggtttcttgtctgtcgctgacaacgttggcgcttaagatatttggaataggactacaccttccatagtttttgttgaactctgtggtgcggaagcagctgttgccattatggcggaaattgctgacgcctcattgaacatgtttagtttttattttgttaaaaaattgggcaaaaaagtttgatgctcatattcatc

SEQ ID NO: 274167 - DNA, 477 bp, Zea mays
cccacacgtccgcacactcgtcgaccggagcgaggtgtggtgaggtggaactgaatactacaatggagctcacgtgggacgaatgggatgtcattatactggctgcctgcagcttcctcatccctctcgtgttcctctgcaatgctacgaagcggcggcggcggcgcgcgccccctggcccggccaccgtacccatcatcgggaacctggcgtggctaacgttgcgcgacgggttgggtgagctggacatcctgcgacgactgcactcgcgctttggcccgctgctgtcggtccgcttgggttcatcggagcaggtgaacgtggcggaccgccgtctcgcacacgccttgctcgtggagcgtggcgccgctgtggctgaccgctcgccgctgctggtgtccaccgagaggttcggggccttcggctctttcagcatacacgtgtccagctacggcacacgttggagtgttctccgcc

SEQ ID NO: 274168 - DNA, 500 bp, Zea mays
tcggttcaagaaaagagattggggaacaattgatcgaggtcaatcagaagcagttcctcttagaagcgttgtagccaatgtttctcatgtggatgcaaaggattttcacaaatcacatgcagatgaaaaggcttttcataaatcacattctctaagacgaacccgctcgcctgacatgcataaccacagaaagaggagcagagaggcagatgtgcggtctaccaagagggcaacacacccagttaatggtgcaccacgtcggcttcttcagtttgctgttcgtgatgctgtcagaactgtgcccccagttacttctggttcagaatcagcttccaagcgactttgttctgtagtgtctacattgccttcagattccacacttgatattactcatattaggttacagaaaacaaattcagatttgagaataccagttgccacagcagcactaagagctgcagctgaggctgctgaagatgctctcaaggatagcttttgtg

SEQ ID NO: 274169 - DNA, 367 bp, Zea mays
gggcttcgcgccgcatcggtgcgccgaggtgtagtgtatagccgccggcgaggcctcctgagactgagaggaagaacaattcgaactcagtcctcgcttgattgattggattgggaggcaaattgggtgtagaaatttttggttgggaaggacggtggcacgtacgcaagctctaatacatagttttttttgttgcatttatctccaaggagagaaggttagggatattttattaaggaccgtgcaggtgggttgtaacgggaaaatactgattttgttcccatgtacaatacccgtttcttcactcaaattttagaaattgtaagttgtagattaagaatgagagtgcacacaatcttttttaagt

SEQ ID NO: 274170 - DNA, 893 bp, Zea mays
ccgacccgtccaaacagcgacagctcgcctccacgcgagccaagcgcccgcaaaaccctagccccgcccgccccaaaccctaggcggctacggtctccgatcccggggtcacgtcctaatggcatcttcgccggacttgttccccaacgttaccttctccgacgtctccgaagccgcagcagggcctgcggccgagggggccaccgccgcgttcggtctcggcgccgccactggagccccgcgcctcagcctcgtgaaggccgaggcggagcccacggtcgagatcgacctcgccgacgcgcaggtatttaagttgggaccgatggagtggctgtgcgtgtgcgacgagtcggaggctaaggctggcgtggaagagaagtcattttcaagagcaattaaggttgttcttaggacagaagctgagagcaaagccttctctttagcttttcaacaatggaaacaccaagttattagtggaaaagctggtgagaggttggagaatggatcaataattgcttcgaaaagcaaatttgatacaaaaattgaggcatcatcagcaaagatgtatttccactactacgggcaattattacatcagcaaaacatgttacaagattttgttcggacaggaacatactatgctgctgtaatggaaaaccgatctgactttgagggtcgagttgtggttgatgttggggctggaagtggtattctgtcgttatttgctgcccaggctggtgccagacatgtctatgcagttgaggcatccgaaatggctgaaaatgctcaacgtctaatgtccgggaatccgtcacttggacagcggatcacggtcatcaggggcaaggtcgaggaagtagagcttccagagaaagctgacatattgatttctg

SEQ ID NO: 274171 - DNA, 421 bp, Zea mays
aggagcagtacagtacaggagcaccctaaactaatccatgacgtcaatacggagaccctctgacctgtatacgagacgagactacacaacagtctggaaaaaacaaaacactcgtgtgcgtcattgcaaacgagcgtgctttgacctgttttgatgttcaccgctctgctacgtgccgtggctgaaccggtcgcacgcagcagcactactctcgccagtcgctagagagggggcagcaccgcgctggtcactggatttggatgcatgcgtgctcgcttgcgttcgctgaaacgcaaggcgtcatctgatctggccgatcgaccgatcacgcagcccgcagcccgcagcccgctaaactaaacacagatgcatgcacccagctccagcggtccgtgtatgggatccgtacgctggccttttg

SEQ ID NO: 274172 - DNA, 381 bp, Zea mays
agccgatgttatatctttcttagggatccgtttcccggcctggtaaacgattaagcactctattggggctgcccagtcaaacatttcctctggatctaatgatatggtgggcagaaggggatgcacatcccacgttttcgtgatgacctagccacctggaattgctatgtcaaacgtctctcaagaatccgaagatagctgcaataaacaaagtacttcaaacgttgaagtggagagaaactcgataccaggtcattaataagttactgatcctttttggatgtggtgctgttatttgggctatttggcgtactcgtaatgattgctgcttcaatgctaggctgattgatgatctatctaatgtgattttctcctgctgtt

SEQ ID NO: 274173 - DNA, 549 bp, Zea mays
ctaacccccaagccggtgtgctgccccagcaccagcagcagctattcgagctcaaccatccaaaactcccagggcgctactcttcgttgataaaaggtacacccctgcttcccttcctgcctgcacaccacatctcaatctttgctgcgagctcccgatctgtggtacttccggcatcgcgaactgaagtttaccaccgatccgttggctccttggcattccttttcctccagcagcggcaaagcctccatctttttgccaaccgacttgaggaatggggtgcatgaagctgcttggagtagacgcaagctttatggaagatttctagtacttcattcccaacaagcaatcagataaaaacaaaaggagcaacttcaacagaacctgcggctccagtgattggaccgaccgatatttgcaaactgctgaaattgaatccatgggtagaggaagaggaagagggaagaagctaaccactgtcaggagccacgaagataaaggtagcagcggcgaagaagttgtgcctgcaaaaaaaaaaaaggcgggcgc

SEQ ID NO: 274174 - DNA, 594 bp, Zea mays
  unsure (1)..(594): unsure at all n locations
gagagatctagcaaccacaatttggtggagtcaacaatggagaagcgtagaacgagccctgctcctgcatacaataacaccaagcagaacaacagcaacaactattccagtatttcatcgtcagcaccagctagagcaatacgggagcaaaagaacactcttttggattctgagaagctagactcagctaggaagaggcttcaggaaaactaccaggaagcgcaaaacgcgaaaaagcagaggacgatacaagtgatggatatccacgacataccgaagccgaagaacaggaacaccttcgtgcgcaagagcggcagcagcgccggattcccggcaaagcaccggtgatctctgcctgaccaccatcggatctgtagcggactcagcgtatttatttctgtactagcaaaaagaaaaaaaagaaagaaattttaagaagcaaactcttgttttcccagtttgatttgtagccctgcagtccagctcactgatattatagggatatatatactgcctagtccatgaggctacgcttttgtacctctctttaagattggagaacagaaggaaagcanattgtgttattattcaatg

SEQ ID NO: 274175 - DNA, 409 bp, Zea mays
cgaagaaccagcgtgaggcgacggcggcggcggcggctacatcagcggctacctacgaggctacgacacgaagatcagcgtggagaacatcaggctttacatctccaggacacttttgctattactatataaagttttaaacttagaagcctggccaaacttgatggtaggctgtaaccatgcctagaactgtgagccatgagtgatgtctgcattttgttggattgaaccttggtctacgagtgggacaaaatgactgcaagcaccaactctactttgttctttgtttttatctatttaaatcatgtgcaaactatgaccaacatattgtctgtttgctaggacatacagttatcttgttgaattgaaactttatgtagaactaaaaaaaaaaaaataaaaatggggg

SEQ ID NO: 274176 - DNA, 861 bp, Zea mays
gcattgctagagggctgctatagcttcttttgggattcgaggctgtgagtgggccgccgtgatctcaaggccagcaacattctcctggacgtggacatgaaacccaagatatcagattttggaatggcaaggatgtttggaggggaccaaaaccaattcaacacgaatcgggtcgtcggtacatttggctacatgtctcctgaatacgcaatggaaggcattttttcagtcaagtctgacgtctatggcttcggagtcctgatcttggagatcatcacaggaaagagggctgtgagcttccactgtcacgaggactccttgaacatcgctggatatgcgtggcggcaatggaacgaagacaatgctgcggagctgatcgatccagtgataagagcatcgtgctcagttcggcaggtgctgagatgcatccatattgcgttgctgtgcgtgcaagatcacgcagatgagcgacctgacatccccactgtcatccttatgctgagcaacgacagctcgagccttcctaatccgaggccgcctacgctgatgcttcgaggccgtgagatcgaatccagcaagtcaagcgagaaggaccggagccactccattggcactgtgacaatgacacagttgcatggaagatgaagtataacacgaaaaatatactgaatttgtgatatatttggttttttttgttctcccttcctgatgttgataatttgccatttgtcgcggattagtttcctctttttctccttttcatgacggcgaccgcgaagttgtatgaaaatcacattagcgtcatacattaagtgacaattaattttgcaaaggtgagatatttcccatgtggttcctcgt

SEQ ID NO: 274177 - DNA, 715 bp, Zea mays
actgaactgcaggaagagaagaacaaaaaacggaagctagaccgagctgagtatgacagaaggtccagggaaaggagcggggaacgtgccagggattcgagcagggatcgctacatagaccgcagcagcagccgtgacagggagtatgaccgcagaagaagccatgatcgctaccatgacagggaaagagagagagattccaggcagtctcgtagttatgattccagaagccaccgcaggtcatattcaccagggggaagttctagggattatgatcgatctgggcgtcatgaacgccgtgatcggtactaggagcaaggaagcctccttgaaatttagggtactagattgttgcctcagggctagtttggccacctcattttttcaaggatttctatttttccaaggattgacaaccttatttttctaagggatttctattttcctaagaaaaattagttcattttcccctggagggaataccgtggggaaatggaggtgccaaactagcctaagtgttgttcgggaattctaagagttggcttaggtccaactggagaaaggcatcagctctttgcattataactaagggataggatctgacgtaatctatgcgtatcatattgttgtgttaggtggtgttcatcgtgtaaacacaatgtggtggaaacaagtcatgctttaataaactaaactgcctttgaattaagttaaa

SEQ ID NO: 274178 - DNA, 845 bp, Zea mays
ctacggtcccacacaatcaatattataatagaaaaaactctactaccagacgtccggactccagacccaccggtcaccaccgcgtcgccgccgcccttctccgcccccaccttatattataaatacggcaggaaccgaaagcgccagacatgggaatcacctcctcaacctccagcccaacctccagcccggaatcgagagcaatggcgctcgccaaggccaaggagatcgttgcctccgctcccctcgtcgtcttcagcaaaacttcctgccctttctgcgtccgtgtgaagcagttgttcgagaagctcggagcaagctacaaggccattgagttggataaggaaagtgatggagctgagctccagaatgccctgaaggagtggactggacagaggactgtcccaaatgtcttcatcaatgggaagcatattggcggctgtgatgatactatggcactgaacaatgatgggaagctggtgcctctgctgactgaggctggagccatcgccggttctgcctcgaagacaaccatcactgcttgacatgtgtgttaccattcccgtgcttaaaaataatgatgctttgcaagtgctgaacttgcagatgctatgtgggagtgactgttcgttccctgtgtagaactccctagacatcagtcgagtcgtgttgctgtggtggttgtgaaatctacaataatcattgctacaataatgtcgtgttccctagacatcagatgagaaagatgagaagaaataacattataatcttattcgaactatcatctgtaagcttcttttgatacaatatttttatttatagattttacaaacatttgtaggact

SEQ ID NO: 274179 - DNA, 288 bp, Zea mays
aacgcgtccgcccacgcgtccggcgcggctttccctctcgtcgctgacatgccgaagcggcaccgcgacagtgagggccggcagcggtcgtcgtcgtcgcggcggcggcgcagcccgtccccgtccgactcggacgccgcctcctccgattccagcggctccccccgacggagccgtggacgccaccgccataggagccgccgccggagggacactccgtccacctccagcgacgcgagcgtgcagcgggagcgaggattcgaggtcggactccggacgccgagggag

SEQ ID NO: 274180 - DNA, 1655 bp, Zea mays
ggctacctgacttccacctttctgtccacccacgcgtcaacttgaacaaaaaacaaagctcctactgcgagcatggattcgcttgtgaagcgcacaatggctatggtgcttacggcagcagcaagccccagatgagctaccaccgccagagcaccgagtccgtgaccaccgtcgtcacggaaattaaccgcatgaccatcaacgacaagccctactacggcggcggcggcggcgtgcagaagcaggcctgcataggtggaggcgttcgatgagcacgacaaagcgtacaacggcaccctggccgtgaagaagcacgacgagtacgaggaggaggaggagtacggccaagtagtcgacgcggactacggtgcccactacggcaacgccggcgccgctgtgaagaagcaaggctacagctaccagcaggaggcgttcggggagactggagctgccgggtaccgtggcgccggcaatgaagaagcaaggctacaactacacgaaggaggcgtgcggagagagcgacgccggctacggcgcgcaccacggtggcgccggtgccgccgtgcagacgtacgcctacaaccagcaggcgctgtacggtggctccatcggtgccgccgtgcagcagccggcctacaagcagaagcagggcaccgctagtaagattaacggctcccggcagaaggtgtacgggtacgcgggggaagccgtcaacacagcaggggcggggtacggtgctcaccacggcgtcgttggcgccggggccgggcagcagcacggctaccaccagaaagatgcgtacgggaccgggtacggcgctgtcgcggtcgttggcaaagagaagaaccgataccagtaccaggaggcgtacggtggaactgacgcgggagggtatggcggcgctcactacggcggtggtggcgccgtgcagcagcatgggtatggcggcgaaaccgccggtggcaaagcgaagcagagcggcgaccagtaccaggaggcggcgtacggcggaaccgacgcgggaggatacggcgctcactacggtggtggcgccgccgccgccattcagaagcacggctacaggaaggacgtgtacgggagcgagactgagagcgaggacgacgagagcgactgcgaggaggcgttcccgccgcgcggcggccgaatgcagggcggcgtccaggtgcagcacggctacggagccggcgtcctcggccggctcggctacggagctgacaacctcggcggtgtgcgccgctacgagtcgtacgagagtcgcgaggagcacggcgacgggcgccgctatgaatcgtacaagagcaccgtccagtacaacggtggcgggcacgccacgtgctccccgatcaagaaccgccacctccttggctacggcgcgtaggcataatacgcgctggctgatccagtgcacctacgtactgtatattcgtatgctctgtcgtatatagacagacaggcctatatgccgctaccgctacggctacttggtcgatggatctgcttgtggttgctgatgcagctaaaccatcgaaatatctaaaaaaataagatgtaacataatgccaccttgggataataatgtatgatgctgggccactctggtccgcccaaacccccataaccctcatagatatccc

SEQ ID NO: 274181 - DNA, 472 bp, Zea mays
ggcggaaccgacgcgggaggatacggcgctcactacggtggtaggcgccgccgccgccattcagaagcacggctacaggaaggacgtgtacgagagcgagactgagagcgaggacgacgagagcgactgcgaggaggcgttcccgccgcgcggcggccgaatgcagggcggcgtccaggtgcagcacggctacggagctgacaacctcggcggtgtgcgccgctacgagtcgtacgagagccgcgaggagcacggcgacggccgccgctatgagtcgtacaagagcaccgtccagtacaacggtggcgggcacgccacgtgctccccgatcaagaaccgccacctccttggctacggcgcgtaggcataatacgcgctggctgatccagtgcacctacgtactgtatattcgtatgctctgtcgtatatagacagacaggcctatatgccgctaccgctacggctacttggt

SEQ ID NO: 274182 - DNA, 397 bp, Zea mays
acggacgcgtgggtgactgtggaaaccgaacctgcccaaaaactcagcagaagctccagaacctttcgttgaccccaaactacgtgcttagaagcttaatactgcagtggtgcgaggaaaaggggatggaaccacctagcaggtctaaaagcgacggttctcctcttgaggttgctggcaacagattagcaattgaagcgttagtccgcaacctctcgagcagttcattagatgatcggaaatctgctgcggctgaaataagatccttggccaagaaaagcacagacaaccgtatacttctagcggaatctagcgctataccggctctggtgaaactcctgtcgtccaaggacccgaaaacccaagagcacgcagtgacagctctcctgaacctctc

SEQ ID NO: 274183 - DNA, 398 bp, Zea mays
cagagggcctcgcacagtcgcactctttattatagccacggccggccggtggacgacagcaccacaccacctccaactacccgagaccatcgacgagcatcttcctgcatctgcaatggctgccgctaccgtgtccgtcccccgcatcaagctgggctcccaggggctagaggtctccgcgcagggcctcggctgcatgggcatgtccgccttctacggtccgcccaaacccgagcctgacatgatcaagctcatccaccacgccgtcgccgccggggtcaccctccttgacacctccgacatgtacggcccgcacaccaacgagatcctgctaggcaaggcgcttcaaggcggcgtgcgggagaaggtcgagttggccaccaaattcggcgtctcct

SEQ ID NO: 274184 - DNA, 311 bp, Zea mays
cccacgcgtccgaacctccagctccccagcccccaggtggtcaagagacagagagagcatggccgctgctcccacggtggtgccgcgcgtgaagctgggctcccaggggctggaggtctcggcgcagggcctcggctgcatgggcatgtccgcctactacggccctcccaagccggagccagacatgatcgcgctcatccaccacgccgtcgccgccggcgtcaccctcctcgacacctccaacgtgtacggcccccacaccaacgagctcctcctcggcagggcgctccgggcggcaggcggggtgcggg

SEQ ID NO: 274185 - DNA, 583 bp, Zea mays
ctctggtgttcagaagctgctgcttgatcagaacgcgttctctggtgccatacctccggagattgggcggctgcagcagctctccaaggctgaccttagcagcaacaagtttgagggaggtgtgccaccggaggtcgggaaatgccggcttctcacttacttggacatgagccaaaacaacctctctgggaagatacctccggccatctctggaatgcgaatactgaactacctcaacctgtccaggaaccatcttgatggagagatacctccatccattgcaaccatgcagagcttgacggcggtggacttctcgtataacaacttgtctgggcttgtgccagggactggccagttcagctacttcaatgccacatcttttgttggcaatccaggcctgtgtggaccatacctcggtccatgtggtgcaggcataggtggcgccgaccacactgtccatggccatggctggttgactaatacggtcaagctgctcattgtccttggcttgttgatctgctccattgcattcgctgtggcggcgattctgaaggctcggtcattgaagaaagctagtgaagct

SEQ ID NO: 274186 - DNA, 549 bp, Zea mays
catagcactccacctcactgctccagtcgcgagccgcagctgcgcgtcgcgtcgcatcgcacgcatctctcctgccctccagctccaaagcttcgtcgtctgcgtcgccccgcgccccgtcttgctcgctccaagctagacaccataccacccagatcccgaggcccctctccctcgatcgccgcctcccggtagcggatccggcgccggctcgcgccccccgacaggttttgttttatgcttgttcatttgtctatggacaatggactagttgctgcactgcttttgtgagtcaccatgggaagcagtggagcagatacatcgtctaagccaaacaaggcatccgccccacaggagcagcaacaacctgctacctcaggtgctgcaacaccggctgtttatccagactggtccagcttccaggcatatcctccaatcccaccacatgggttcttcccctcacctgtggcatcaagtccacagggttcatccttacatgtggggagctcagcctatgattccaccatatggagcaccgccatatgtcat

SEQ ID NO: 274187 - DNA, 604 bp, Zea mays
tgctgagcacagcactccacctcactgctccagtcgcgagccgcagctgcgcgtcgcgtcgcatcgcacgcatctctcctgccctccagctccaaagcggcgtcgtctgcgtcgccccgcgccccgtcttgctcgctccaagctagacaccataccacccaggtgacttcgcgcgccactccttccttccctccctttccccacagctttactctcccctcccgcgtccagatcccgaggcccctctccctcgatcgccgcctcccggtagcggatccggcgccggctcgcgccccccgacaggttttgttttatgcttgttcatttgtctatggacaatggactagttgctgcactgcttttgtgagtcaccatgggaagcagtggagcagatacatcgtctaagccaaacaaggcatccgccccacaggagcagcaacaacctgctacctcaggtgctgcaacaccggctgtttatccagactggtccagcttccaggcatatcctccaatcccaccacatgggttcttcccctcacctgtggcatcaagtccacagggtcatccttacatgtggggagctcagcccatgattccaccatat

SEQ ID NO: 274188 - DNA, 468 bp, Zea mays
ccctcgcgttttgccacgcgtccgggctcctacccgttgatcgccgcctttcagcggccgatccggcgctggctcgcggcccccgacaggttttgctttatgctggttcatttgtctacggacaatggactagttgctgcactgtttctgtgattcaccatgggaagcagtggagcagatacaccgtctaaggagcagcagccacctgctacctcaggtgctgcaataccacctgtttatccagattggtctagcttccaggcatatcccccaatcccaccacatggattcttcccctcacctgtggcatcaagtccacagggtcatcctttcatgtggggagctcaagctatgattccacctttatggaacaccgccaccatatggtatgttcccccctggagttttatgcccaaccatctatgcccccgggtgcacatccatttacttcttatgccattacttttt

SEQ ID NO: 274189 - DNA, 954 bp, Zea mays
gagcttatcatctgaggacgttggtcaagttcttgcagtcactggtgccagtcttcttgtttatcaactctttctataccccagtatcaataaggttcttggacctatcaaatcttctcgagttgcagctatcctgtgcataccgatcctctttgcctacccctacatgacgtacctgtcggaacctggattgtcaatcgttttgaatattgcgtcagtgataaagaataatctcggtgtcaccatcattacaggcactttcatccttcaaaacaatgccgtgcctcaggaccagcgaggcgctgcgaatggactgtccatgactgggatgtcctttttcaaggcacttgctccagcaggagcaggcattgtgttctcatgggcgcagaaacgccagcatgcgtttttcttcccaggtgaccagatggtattcttcctcctgaacgccgtcgagctggtcgggcttctcctcacgttcaagcccttcctggcagtaccagagcagtacgattcgagatagttagacgatctatctatctatacaagttctggaacgttcaagacgattcatcgtgtgcggctgtaccagtgaaggagaagcgccaaagcgtgtgccctttacgccgcggaaggtctacaaacagggacatactcctatataggaagatgcaatgcaagatctgtggtgtacttttaattgtaggtgatgtagtagtgtatggtagtatcagcattttctgcattcatgaaatgcacacgcaggtggtgggaaatgtgggcatggatcgagagtcgctgcgctgttaagtagcaataaatgttaaggttcagtgactcgctgttatttgttgggaatgaaattactgggcatctgtaccctcgttgttttaaaaaaaaaaaaaaaaaaaaaagaaaaaaaggggcgccccccgattagtgaccccttcgacccgg

SEQ ID NO: 274190 - DNA, 748 bp, Zea mays
acgcgtcaaagttattgaacctgcagttggatggatagagctgaacgaatacctgaagccctatggcctagtttttcctcttgatccagggcctggggccaccattggaggaatgtgtgctactcgttgttctggttcattagctgtgagtttgtaggtatggaacaatgcgggataatgtgattaatcttcgggctgttttgccaaatggtgatgttgtcaagacaggctcccgggctcgaaagagtgcagctgggtatgaccttgctcgtttgatcattgggagtgaaggaactttgggtgtaattacagaagtgactttacgactccaaaagcttccatctcattctgtagttgcaatgtgcaatttcaaaacaattaacgatgctgctgatgttgctattgcaacaatgctttctgggatacaggtttcaagagtggaattgttggacgaggttcagataaaggcaataaatatggcaaatggcaaaaatttgcctgaagtgccgaccttgatgtttgaattcatagggacagaagcatatgctctggagcaaactctcttggttcaaaaaattgccactgaacaccatggatcagattttgtttcggtcgaggagccagatgctaaagcggaactatggaagatcaggaaggaggcactttgggctggttttgctatgaaacctgatcatgaagctatgataacggatgtttgtgtccctctatccagacttgctgaatgcat

SEQ ID NO: 274191 - DNA, 359 bp, Zea mays
cccacgcgtccgctccaagcgagctagagctagagctatagagatcactctccttctccgcgtgaggtagtgacgcccagccatggcgacaatggcactgcgcgccgtggcaacggcgctgctggtggtggcggcgtccgtgtgcggcgcgtcggcgtcgacgctggtgctgtacaaccggtgcggggagacggtgtggccgggcatccagccgagcgccgggaatgaggtgctggcgcgcggcgggctgcagctggcgccggagcggtcggcgtcggtgcggctccaccgcggtgtggtcggagcgcgtgtgggggcggcaggggtgctcgttcgacgcggcggtgcgcgggcggtgc

SEQ ID NO: 274192 - DNA, 1056 bp, Zea mays
cccacgcgtcccgctccagattccagtccccagacgagcggttggagcttcgacgtgcggtttccatttcctgccctgctctgatggccgtcgccgaagtggcgatcgagattctcccgcagcagcagcagcagcagccgccgccgccgccgcgggaaccggcggtagtgcctccgaacctctccgtgccgagagtgctccagtatctgtacctcttgagcgcgtgggtcgcctgcgcgggcgtggctgccgggaccgtggcgcgccgggccttgggcgactcttccccgttggtctacgggttcctcaaagtctcgatcggagccctcgttttccccgcgctgctcatcctcgtcttcgccctgcgggtcttgcgcgccatgcttgccgtggggttcagacggtcactccgcactcacgccagggagattcagatccaagccacgaagatatttagagcgttaacgtggaaggtgctgcaggaccctatcgtgcttgcgtggctcgcatctttgcttttcatcctgcttcttgcagcaagtgttctggtgtttgtgggacttctaccaatggaggagtctcgcagagaaaggattggttatgcgctctctgatgtgggggtattgggtgcaatggcaatgtattgccttatcattatacccagttttgcgctgaagatctggaggagcaagtagggtggcgatgctgcacaaggcacaacactggcgatatctgaggcaaggacagttggagaaggtgcaaaagatggactcctagttaccgtgggtgaagccagctaattaatgttttagagaaataattctctcttggagactactactactgttctacctcagcatcaccggtgctggtgcgtgtgtaacgtggtcactgtgggtatcatcactaccctaccctaagccctatcagaacataagcaccccttggagatttgtgccgtctaaatgaatatagttggttcagcgtcgtgactggatctgtggttgtgattattacgtatacaactagttgtggacttgtggtaggagtgtatcc

SEQ ID NO: 274193 - DNA, 469 bp, Zea mays
gccatggatgctccgctgagaggcaagagcacggcaagggcagcatggcggcgaccagccgtctcctgcctcctgttcgtttttgttttggtgctattgatctctacgacggcgacagcgacggctacgacagttcagtcgcggcaggcggggctcacctctcgccaaagaggctctggattccgggcgtggcggagggatgtgctgaggccggacaggacggccggcgaagcttgggcgccgccggcgcccaaggccaacagcaacgtcccaggagggcccttcggtcgtcgttgactcatccagatccagtcgcacccgcccaatcgccatcgtttcatgacacatcgaccagaagatagctagcaattcccatctcactggtgtgtgttattttagcttcttttaacgatgaagaactactggcgatgattgaaataatacaacttaatgcaacgaaaattaagaa

SEQ ID NO: 274194 - DNA, 606 bp, Zea mays
agccgggccgaggccatgatcgatgcagggaggaggatgccgccgctgccgcggagattgatagtactagtataaagcaggcggagacagccggcccctctggcctcgctgctcccccttcctccccgtccccacccacatgccctgcctccgccccgccccgccctgcccaagctgagttcccccacccccaacaaacaattactagagtagctgcattggcggggaaattaaagcgctagaagctcagcagcaatggcggagcaggcgggcgtcggaaggtactggtgccacatgtgcgccgcggccgttagccccgcggagggcgaggtggagatgaagtgcccgttctgccacagcggcttcctcgaggagatggagaccgcccgcggggccgcgaccgacgacggtgacggcgacggcgcggtggctcaggtgcaccccggcgccgaccgcccgagctccatctgggcgcacgctatcctcagcacggtcgacagctccgcccgtcgccgccgcaaccggcggcagcaggaggccgccagcgacgtctacgactggaacgaccccgagttctcgctgcgccggcggcgcgtcaccgcgttc

SEQ ID NO: 274195 - DNA, 586 bp, Zea mays
ctcctaatcactgccctaaacacatgtgtgccgggccgaggtcacaatcgatgcacggaggaggatgccgccgtagctgcggagattgataatataaagcgggcggagaccgccggcccctctggcctcgctgctcctccccccttcctccccccacatgcgctgcccccgcccggccctgccctgccctgccctgctgcgcccaagcagctgaatctccgcacagacaattagagtagctgcattggcggggaaagcgcaagaagctcagcagaaatggcggagcaggcaggcgccggaaggtactggtgccacatgtgcgccgcggtcgtgagccccgcggagggcgaggcggaggtgaagtgcccgcattgccacagcggcttccttgaggagatggagaccgtccgcggcacgcccgcggccgatgacggcgacggtgacggcgcggtggctcaagtgtaccccggcgccgaccgcccgagctccatctgggcgcacgctatcctcagcacggtcgacagctccgtccgccgccgccgcaaccggcggcagacggaggccgccggcgacgtctacgacggga

SEQ ID NO: 274196 - DNA, 707 bp, Zea mays
acagacactcgtgtcatctcgccatcggccatcgctggcgcatgatcgagccgcacgaccgaggcagcacgtgagtcgcacacaccaccatgcaggccacgcgtccggccgcggagggggacgcacaggagcacgcggtgagggcggaggcggacgaggtgaagacggaggtggcgaacgcgcacgacgaggaggaggcggtgcctgaaggagaaagacgtggcggttgtaggggaggaggtggaggcggaggcggagacggagacagagactgaaggcgaggcggaggcagaggtcgaggccgaggtggaggtcgaggtggaggcggaggccggtgcatcgtctgcgaagaagaaccgtatccaggtgtccaccaacaagaagccgctctatttctacgtcaatctcgccaagaggtacatgcagaactacgacgaggttgagctctccgctctggggatggccattggtaccgtggtgaccgtcgctgagatcctcaagaacaatggcctcgccactgaaaagaagatcctcacatcaaccatcggcaccaaggatgaggcgaagggccggcttgtccgtaaagccaagatcgagatcctgctgtgcaaatcagagaacttcaacagcatcatgtcgagcaagaagtccgagcgcccgaagccgcccgccgaggaagagataaggtgtgatctatccgaacaacg

SEQ ID NO: 274197 - DNA, 945 bp, Zea mays
cgaccacgagttcgccctgcgccggcgtcgcgtcaccgcgttcctgcggctcctgcacgagctccgggaccgccagctgcagcggctggaggctgctgccggggtcgccctccaaggcgaccagctgacccctttcggccggagcctcttcatcggcgcagctggcggccgcgagcatggcgtggcgctgggcgactacttcctcggccccagcctcgacgctctggtgcagcagctcgccgagaacgacgcgggacggcacgggacgccgccggccaagaaggaggccgtggaggcaatgccgaccgtggaaatcgccggcggcaacgatgacgacgcggccagctgccccgtctgcctggaggactacgcggccggcgagcgcgctcgggagatgccctgcaggcacaggttccacggcaattgcatcgtgccgtggctcgagatgcacagctcctgccctgtctgccggttccagctgccggccaccgacgacaagagctcatgcagcggcggcgacggtggtttcgtcagtgtcgatgcggatcgtgaaggcagtgacaacggcgggggtgatggtagggcaagctctccgggcaacgccgagctagctgaagctgaagagagtggcaggcggttgccgccatccttgcagtggctcaacagcctgttctcgccgtcggcgcagtcctccggtagcggcggcggcagttcgcatcattgggagaactaagcaatattgccatggttgctgccgcttgaaagcttggcccgttggtgggtcccaatgtacataggaaggagcaggagcatgccgggtcatgaaaaatttggagcctttttttcagtgtgtcaatttggctcatgtaatgttctctctgatatagttgtcatggctataaaaagaacaaaaattggcaagtatatgaacttgcctcttgcgtg

SEQ ID NO: 274198 - DNA, 484 bp, Zea mays
  unsure (1)..(484): unsure at all n locations
cgctcttggtgctagccctcgcgctagtggcggccaccgccccacaggtagcggaggcaaagaagaagagagcggcggagagcggcaatgacaacggcggcggtgatggtagggcaagtattccaggcaatgcggagcccgccgaagccgaagagaacggcagccggttgccgccatccttgcagtggctcaacagcctgttctcgccatcggcgcagtcctccggtagcggcagcggcagttcgcatcattgggagaattgagcaataatgcaatataaggatggatgattgttgctgcttgagcccattggtgccaatgtacataggaagagcaggagcatgccggcatgaaaatttggagcctttttttcagtgtgtcaatttggctcatgtaatgttctctctgatatagttgtcatggctataaaaagaacacaaattggcaagtaaaagaacngagccatcancaggtccgaacggcc

SEQ ID NO: 274199 - DNA, 1752 bp, Zea mays
cccacgcgtccgcaagaaaaatggcaaaggctctcctaggtggcctatcggcgatcctcgtcgtggcggtggtcgtcggtgtggtcgccaccgtcacccgctccggcaagaaggccggcgacaacttcacggtcccgggggaggcttcccttgccacgtccggcaagtcggtcaagtccctgtgcgcgcccaccctatacaaggagtcgtgcgagaagacactgtcccaggccaccaatggcaccgagaaccccaaggaggtgttccacagcgtggccaaggtggcgctggagtcggtccagacggcggtcgagcagtccaagtcgatcggcgaggccaaggccagcgactccatgaccgagagcgcgcgcgaggactgcaagaagctcctggaggacgccgtcgacgacctgaggggcatgctcgagatggccggcggcgacatcaaggtgctgttcagccggtccgacgacctcgagacctggctcacgggcgtcatgacgttcatggacacctgcgtcgacggcttcgtcgacgagaagctcaaggccgacatgcactccgtgctgcgcaacgccaccgagctcagcagcaacgcgctggccatcaccaacagcctcggcgggatcctgaagaagatggacctcggcatgttcagcaaggactcgcgccgccgactgctgtcgtcggagcaggatgagaagggctggcccgtgtggatgcggtcgccggagaggaagctgctggcgtcgggcaaccagcccaagccgaacgcgatcgtggccaaggacggtagcgggcagttcaagagcatccagcaggccgtggacgccgtgcccaagggccatcaggggaggtacgtcatctacgtgaaggccggcctctacgacgagatcgtcatggtccccaaggacaaggtcaacatcttcatgtacggcgacgggcctaagcaaagccgcgtgaccggccgcaagagcttcgccgacggcatcaccaccatgaagaccgccaccttctccgtcgaggcgtccgggttcatctgcaagaacatggggttccacaacacggccggcgcggagcggcaccaggcggtggcgctccgggtgcagggggacctcgcggcgttctacaactgccggttcgacgcgttccaggacacgctgtacgtgcacgcgcggcggcagttcttccgcaactgcgtggtctccggcaccatcgacttcatcttcggcaactcggcggcggtgttccagaactgcctcatcatcacgcggcggcccatggacaaccagcagaactcggtgacggcgcacgggcgcaccgaccccaacatgaagtccgggctcgtcatccagaactgccgcctggtgcccgaccagaagctgttcccggaccgcttcaagatcccctcgtacctgggccgcccctggaaggagttctcgcgcctcgtcatcatggagagcaccatcgccgacttcgtcaagccagaggggtacatgccctggaacggcgacttcgccctcaagacgctctactacgccgagtacaacaaccgcgggcccggcgccggcaccagcaagagggtcaactggcccggcttccacgtcatcggacggaaggaggccgagccgttcaccgccgggccgttcatcgacggcgccatgtggctcaagtacaccggcgcgccgcacatacttggtttcaagttctaaaggccgcatggcatggcatacatcacatcatatatagtga

SEQ ID NO: 274200 - DNA, 482 bp, Zea mays
  unsure (1)..(482): unsure at all n locations
cccacgcgtccgcccacgcgtccgcccacgcgtccgcccacgcgtccgggcgacggcgccacggagactgtgatcatgggccacaagagcttcatgatgaacatcaccaccaaggacacggccacgatggaggcgatcgggaacgggttcctgatgcgcgggatcggcgtgaagaacacggcgggagccaagaaccaccaggcggtggcgctgcgggtgcagagcgacatgtcggcgttctacgagtgccggttcgacgggtaccaggacacgctgtacacgcacacgagccgccagtactaccgcgactgcgtcatcacgggcaccatcgacttcatcttcggcaacgcgcaggtggtgttccagaactgcctcatccaggtgcgcaagtgcatggacaaccagcagaacatcgtcacggcgcagggccgcaaggagaggcngtcggtgggcggcaccgtcatccacaactgcaccgtcgc

SEQ ID NO: 274201 - DNA, 1311 bp, Zea mays
  unsure (1)..(1311): unsure at all n locations
cggacgcgtgggcttccttccgccgtgccacccaccctcctctcgcggtcgcgggggtagggccgggtgagcacgagcgctgcccgctcgctgaaccatggcgggctccgcggtggccgtcgtcctcctgtcggccgtcgcgctgctctgcctgtaccacctccttttcctctccctgtccgtcccggacccggcagcagcagcagcagccgtcccccgccgcgccggtggccaccgtggcagcaacgttccgtccgggtcaggaaccgccaacgtcgtcctccgcttcggcctgtccgggcagccgctccgcctccacgaccccgccgccgccgccggcctcccggacatcgacaccttccgcggcaagctcgagcggctgcttcctcccgacgaccacgaccccggctggtcgcgccgcttcgacgccgagctcggccccgtgcaccggtacttcggcccggacgcgccgctggacgtgcggcagcggatcgcgtacctgttcgcgatcctcgaccggtcgtccaggggcgtgggcggcggcgtcggcgtcggcgagctggaggcctggctgcgctggcaggccgccgcccggctggacgccgtcacgcggagggagatggctccgcacgacacggaccgcgacggtgccgtcacgctgcgcgagttcttcgcagactggatcaacatgggacatgacaaaatggggtggtggatgcacaagtttgcgagcgcggacagagacggggacggctcgctcaacgccgtcgaattcaacgacttcctgcatcctgaagacagcagccaagagagcgtgatgctgtggctactcaaggacaagctaagcgagatggaccacgacggagacggcaggctaagccaggaggagttcgtcgcccaatctcacatcatcatctccggcgcgcgtcacgacgacgacggtggccatgcccatgaccttgagcgtgccgaaccggcgaagaagttcacggaactggaccccgacaaggacaactacttgacggtggaagaagcgcgctgcgtactgcagagcctcgttacgggggagttctcctatgctacctcacatgccaagttcttgatgaaggctgatgtgaaccatgacggcaaactgtcgctggaggagatgctagacgactacatatccttctacagcaccgtgtatatggatgatcattacgccagtgaaggtgaagtagatagtgattcccgcgacgagctatgagcagttaagccaggacaggacagcaagtcggaggttctttactttcaaatacactangattttgc

SEQ ID NO: 274202 - DNA, 430 bp, Zea mays
gggccgacccacgcgtccagaccgactggccggtcaacccaaccccaccaccaccagtccccgcggcccgcgtcgaggaagaagaagggataggagacggggacggagacggagccggtggtcgcaaggatggccgggggcatgcaggcggcggacgcggcgggccggctgagcgcgctgctctcgctgctcgcgctgcgccggctcctcgccgtgctccagccgctggccctgctcctgctcctgcccttccggtggcgcgcgcggccggccggggccgtggccgcggccgtggcgtccgatgccgccacggcctccgcgccgggggccagcgggaggaaggggaaggcgtcgtcgtcgtcgtccgtggttctgcgggtggccggcgggtcccccatggtcgccgcgcggaagcaggcgtccgcgcgca

SEQ ID NO: 274203 - DNA, 627 bp, Zea mays
gggctacgcgtacggctactgcagtggcttgaaactcggcgtataattaggctgctcagaaggctacggacggaacagtgcagtttcaagctagtgagaaggattacctcggagacatcagtcgagctcaagattctctctgaaaaatggcggcttctcctcgctggcgtcatttttcagtgcattcatggtttggccgctcatggggttcattatttgcaccggccggggcccacccttcaagatcttggcttcatgattcttccggagcttgggaaagaaaggggttacatcagtgagacattgtttacgttcgtcttcctcgccttcgtgttgtggacatttcatcctttcatccttcacactaaacgcttcgacactgttctgatatggcgcacggtacttgccttcttatgtgcttctcagtttcttcgaataataacattctatgcagcacagcttccagcacctaagtatcattgtcgcgagggctcgccgctggcgagattaccacctccccagaatgcagctgaggtctttctgattaagttcccagcaaggagtgatttacggatgtggtgacttgatattttcatcccacatgattttcagcctagttttcgtcac

SEQ ID NO: 274204 - DNA, 615 bp, Zea mays
acgcgtccgcgacatccgatttctctccctctccctcccttcccttcctctgcttccggggaggaggagaggaaagagacgaagggcgcgccgggaaggaggaccaggagggggaggcacacaacgcttcctcttgcacgcgggagtcctcaagcgggcctcctcctcggccttggctccaattccgggtgccataacacgacctccgccggcggccaccggcagccatgtcgcccttctacctcgctcgcggtgcttccaagctagtgagaaggattacctcggagacatcggtcgagctcaagattctatctgataaatggcggcttctcctcgctggcctcattttccagtacatacatggtttggccgctcatggggttcattatctgcaccggccgggccctacccttcaagatcttggcttcatgattcttccggagcttgggaaagaaaggggttacatcagtgagacattgtttacattcgtcttcctcaccttcgttttgtggacatttcatcctttcatccttcagactaaacgcttctacactgttctgatatggcgcaaggtacttgccttcttatgtgcttctcagtttcttcgaataataa

SEQ ID NO: 274205 - DNA, 1027 bp, Zea mays
cccacgcgtccggaagaagttagagagctcaaagaacagattgcttgcctcagggcagcattagctaggaaagatggaggtcaagagagcattcgaagcactcaatcaagcccagacatatatagaatgagaacgggcaatggattacctgcgttgaggcacccaatagtagatggaagtatagagaacgactcggcattgggagatttcgctgagcactcgccattcgggagcagcaattcgctgccagagttgggaccagatggcacacaagatctagccttctaccaaagaagcagccctgaacagcaatggagctggtccgggtctgttgcaacagaggattccgatgacttcgaggttgcaacgaattgctcgtcagatctggactgcgtgaggccatctagtgccccaaaagcttctggtttatcaaacggagggggctcagctgcaagaaagtcccaactgaagggtgcaaaaagttcagacatcaggggagggaatcctgcaaaaaggtcatcgccattacagaagaagccgagtggaccctcaccgacgctaaccaagaagggcggagctgaaggaaggaagactccaaatggtaaaacaggagccaagaagtaagcaacccagttgaaacttcgttttgctgggaccaacttcaccttggttagggacagataaacatgttgatcctatctactgggtgatacattggtgttttgacacacggatatgtcagtcctattggttgagagagcatgctggatcttcggccatatgctgtaaatcgcttgttaatttttgttctactagtacacgaagaaatcaaggaaaaaaaaccttgactacgggaagaaaatcacggccacaggggtattttaacctccttcctaatgcgcatatatctatcgaagttgagtaaactttgatataatgtattcatgggtcacgtccaaccaaccctgtgattggttgcttgtaaatttttgtggccttaatcatggcttcaatgatgtccttcgtt

SEQ ID NO: 274206 - DNA, 495 bp, Zea mays
ccgggatccactcaaacgacgcatctgccaacgcgtccgcccacgcgtccgatcgccattacagaagtcgccgagtggtccctcaccgacgctaatcaagaagggcggaggtgaaggaaggaagactccaaatggtaaaacaggaaccaagaagtaagcaatccagatgaaacttggttttgctgtgaccaacttcaccttggttagggacagataaacatgttgatactatcgggtgatacattgatatttgccacacgaatacgtcagtcctcttaagggaggaggtcgctagatcttcgggcatctgctgtaaatcactcgttgatttgttgtagtacgaacagaaaacggaccacaaaaaactcgaggatgggaggaagatcatcatcacaaggacgtttttgttagatgtatatgttgcttagcttatttttctcgctgtgtgtaagggcttctatgccctgcccatgtacatgtttggcttcctgcccc

SEQ ID NO: 274207 - DNA, 693 bp, Zea mays
tctgcccacgcgtccgcattgggagatttggctgaacactcacagttcgggagcagcaattccctaccagagttgggacctgatgccacacaagatctagccttctaccaaagaagcaactccgaacagcaatggagctggtctgggtctgttgcaacggaggattccgatgatttcgaggttgcaactaattgctcgttagagctggactgcgtgaggccatctagtgccccaaaagcttcaggtttatcaaatggagggggcacagctgtaaaaaagatccaagtcaagggtccaccaggcgcccgcgttaggggagtgaatcctggaaaaaggtcatcgccattacagaagaagccgagtggaccctcaccgacgctaatcaagaagggcggaggtgaaggaaggaagactccaaatggtaaaacaggaaccaagaagtaagcaatccagatgaaacttggttttgctgtgaccaacttcaccttggttagggacagataaacatgttgatactatcgggtgatacattgatatttgccacacgaatacgtcagtcctcttaagggaggaggtcgctagatcttcgggcatctgctgtaaatcactcgttgatttgttgtagtacgaacagaaaacggaccacaaaaaactcgaggatgggaggaagatcatcatcacaaggacgttttt

SEQ ID NO: 274208 - DNA, 1244 bp, Zea mays
caccgttccaatcctctccgtcgtcgcgatggcggcctcctgccgccgccgccgtcacacgccaccgcagagctagctaccgacgaagacaaggcgggcaatggccaaggcgcccctgccgcttccgtcgctgctcgtcctcgccgccttcttcttccaccacccctgctgcacggcgcagggccgcgccgaaaacatctcggaggtcgaggccgcggtccgcgcccgcgcgtccgagctgctccgcgacgccaccagccagctcgtcgacctgcccctcccggccaacctctccggcgcgggcgtccgggcctcggccctcagcgtgcgcagcaacgcgctctgggccggcggcgtcaacaccaccggcttcaccgtcccgccgcgcgtcgtgccggccccgttcgcgcgccgcctcgccatcgtcttcgagctcttcgtgggaaactcgacggccgcgttcgccgcgccgcgcggctacgcgctggccacgcccgtggccggcctcctcgcgtacgacgcgtcggcggggcccgacgcgcgcgtctcgctccgggcgctcggcgcgccggtgcgcgtcgagttcaaggacgacctgtcggcggcggcggctctggacaaggggttcgagttcgacgccaccaccgcgcggtgcgtgacgttcgcggccagcggggaggtcgtggccacgcacgccgtcgcgccgggctccgcgtgcgcggtgaacggcacgggtcacttcggtatagcggtgctgctgcccgagacgccgccgccagcctcggccgtgagggccaggtggtgggcgtggacggtgggtgtcggcgccggtggggtgctgggagccagcgccttgacgctctctgtggccggcgcggtgagctggaccaggatgcggcgaagggaggagatggatcggcgggcgatggccggggaggagctggggaggatgacggtgcgcgggagcaggatgccatcggcgaaggtggtacggacgcggccggagttggaagagcgcagctcagcacgccgccgtagcggtacgcgagctcctctccgagtaccttgcaccagccggggggtctggctcctcaactgatggcaacggggagttcccctccggaaatatctcaccgtctccgtccacgcgacgaatcaacttccctgcatggatgctatgaacgctttgctaggaatatttcttccttatctctgttcctcgctgcgataaatccccaacggga

SEQ ID NO: 274209 - DNA, 751 bp, Zea mays
agccgccgtgctggcgctcgccgtcgcgtggcgccccgtgctgtgggtggccgtgctcgccgacgtcggcacgtgcctgctcgtcgtcctccacagcatgctgctgctcagggacggcgccgcccgccgcccgaggtgctgcgctagcgctacggcgtgcaagagcaagcaggcgtccaagccgtgctgcgcgacggtgaagccggtggcgacgacgaggcacaggcacgggcacgggcacgggcacgggcacgcaggcgcggggaagcccgggacgctaggaggcgacaagcagggtaaggactgccatggttgctgccagaaggagagcaagccgcccgaggacgccgtcgtgatcgccattccgggacgggccgtggagcaccggaaggaggccttccctcacgagaacgcgggagccggggggtgctgcgctgcagcgcacggtgccgaagacgaggtatgcattgtcatcagcgccaggtcgccctgctgcagcaccgcgaggagtcggtctggttctcccaaggacgcattgtgctgccacggctccggtggtaaagacggcggcgccatctcagccctcgtgtgctgacctcacctaccagcactaccattcgtggaatacggtcgtcttgtatataaaaaaattactcatatcctatgccgtagacaggaagttgtttctattacgagtactaatattcttgtactgaacgtacccctgacttaattaaccaaccccttatat

SEQ ID NO: 274210 - DNA, 416 bp, Zea mays
gccagaaaaaaggaagactagcgatggcatcatctagcaaggacgcatcacaagatatttgcaagggcaaccggttttcgttctctagttttttcttttgcatcatggacatggaggactccggccagttcatgcagtgggcgatggctacgctgcagcacgatgaggaccaggcagtggactaccccatcgacgacggccgcggcggggctaccttcccctcgctccgagcgctccgcgaggcctcgtcgcaagctgcagaaatgatccaggaacctctcgccgccgcaaacagccgctgcgccggcgacgggggcaccgcagccgcaggcaataatatctcaggaaccgcgccaagaagaagcagcagtggtagtgccgtaatccagcccttgaggtggaattttggcgccggc

SEQ ID NO: 274211 - DNA, 596 bp, Zea mays
acccacacgtccggtcggccccagccgagataccggagtacgagctgaaccccggagaggtccagttccggcgaggctgtgacgttacaccgggtgtgtaccacatcgcgaaatggaatggcacaaaggtttccgtaaaaatacttgacagagacggttgctccgatcaagaagccgcaaactctttcaggcatgaattgactgtgctggagaaggtccgacaccctaacgtcgttcagttcgtcggagccgtcactcagagcatacctatgatgactgtgtctgaactccatgaagagaaagacttatcagtctgtatccagaagataggaaagttaaagcctcagaaggtgctaagatacggccttgatattgccaggggcatgacctacctccaccagtgcaacgccggaccccatcatccactgcgacgtaaagctaaagtgccagacatatcttcctggatagcggaggccagctgaagatcgcggggttcggagtgacaaggatgtccaaagtcgggaccgacaacgtgaggttgattctacatggcgctctcgtcgacagcttcagctaccacaccgcgcctgagctgt

SEQ ID NO: 274212 - DNA, 798 bp, Zea mays
acccacgcgtccggaaaatgagcctttcacgagaatgatggtgtttgagttcgctccacatggtagtctctcacagcaccttcacgtcaaagagtttgagcatctggactgggctgcgaggatgagggtcatcatgggcgtcgcatactgccttcaatacatgcaccatgagctcagtccacctatggcgatccacgacgtgcggtctgacacaaccttcatttcagatgattatgctgccaagattgcagatgttggtgtatggaacgagcttgctgccaaagcgaaggctggaaaggaggacggcagcagccgtgctgaagctcctccggatctcccaagcaacgcctactgcttcggcgcgctcatgatcgagaccatatccgggagggttcctgacccgtatgatcacaaacccatatgcagctgggcttctgagcatctgaaagacaagaactacggcaagctcgtggacgcgtcgctgaaggagcacaaggaaagcgagctggaggccgtctgcgaggtgatccaagagtgcatcgaccctgacccgacgcggcggccgtcgatgagagacgtcgtgggcaagctgcgagacgctctccgcatctcgcccgaggcggcggcgccgcggctgtcgccgctctggtgggcggagctggagctgctgtcggtgaagtcaacctagtgtggagaacgctgtgtatactgatactgtaccaacatgttccaacgctcctctagctgagctctaacaggattcgtataggggcttcaattcgtgctgctgatgctaca

SEQ ID NO: 274213 - DNA, 1748 bp, Zea mays
gtaggccctaaaaagcggggcacttcgtagccgcaagcattcttccttccttctccattccatcggtgaccatggattgaagacattgatcggcttctctggaggtgcgtgtgagcagctcggaggtcagccgccgagaagagctcataggcaatggcaaccgcaaggaaggatcctcagcaggttgataaagtcaacctgaaacccagcgagtctggcaaaggggtagtacggcgtgcaaggtctgtcccgacctctccggatcgcagatcgtccccatccccggccccagtctcagacaacgccagccgaccggcatcatcactcaacactcgcacgacctcgtcccggtccacaacaacatctagctcggcggcctcttcaagccacgggaagacgatgcgctccgcttcgtcgtccgtgggtggtgcaagtgcaagcgcaaggcagacaaacgcggcgagaaggagagcagagaagcccggtgccacatccgtgtggcctgcggccggcggcgcggttaccaacgcctcgtcgtctaaggatgtggccagcagggcagcaaaatcgccatccaccgccgcgcacaagacgaggcctgctggtgtcgagaaggcagcagcgtcttctgctgtaaagctgatgacgatgcctcagaaaacaacggcaggagctggaaaaactcaagctgcacctcccgcccgtgctcctcctggcacggtaatagcaaagaagagtacgggagccgagaactatgtccccatccagaggacgacgagcgtgccggcggcgagaccaacagagacgctcaagaacgaggaacaggaggtcgacgagctgctgatgcagttcgacgagaaggagagcataagcacctcctccattgaggagcacctgcaagaacggctccctgaccctgtcgatctgaaagccgtggatctcgacagcagcaagacgacgtcctcctcctccagtcaggaggagtgcaaggatcaagaagagaacacgggggacattctggaggagaagcgtgacgggaaggacagcgaagacctgagcagcacaggcgacaaggcttgtgtcgggctcgggagcagtgatataaacatcccgatggaagaagcggttgatgaacctgttaaaccggcggaagctgtggacgaagctgggctgaagagagatgtctgctgttcaccagctgagccaaacgaagccgttggtcagaacgagctcaatgaggctgctgtcgtcggtgaaacgacgactgaaccgaaggaggctgaggatgaagccaagataataaagcaagtcgactgcgaaactgcatcaaaagaagttgctagtactggggccgagtcaagggacgatgccgctactatggaacgcgagccgctggtagcagcagcagcagcaccacaagaagagaaggccaaagctgaggagaagacgacgcagccaactaaggccgtggaatctgccaagtggaggacgaaggatgaagggaggagcaacgaagccacagaggagggcaggggcaagtctaccactactgctgccacccaggagaggaagaacaaggtgatggccttggttgggaggtttgagactgccatgtctggctgagaagagatcagaacgaggtgatgtcaaaagactgctctggctcatgaaaatgtgtacgagtactactcaactgtgcaggcgtggagggttcgtatgtgtcgtttcattaattaatgtggctgttg

SEQ ID NO: 274214 - DNA, 1149 bp, Zea mays
cccacgcgtccgactagttctagatcgcccagaaatctggccaccctcctcgcgcggagcgacccgtgggtgccccgtccactctcgtgtcggtcccgcgatgggcatgttcgcatcggccgcaaagagatacagcaacggcaagaattttctccgcagcgcgggcgtgtgctgttgttcgccgtccgcctccgcccagcttggtggtgtgcgcggcaaggaagagacatcgacgtcggcgccagctttcgcgccggatagcaacaagaaaaggtggaggaagaggaggttctggagaaagaagatgaaggccaggaaggagatcggcgggctggtggacctcgtcaacgatatttcggccaagtcagaggagagcctaagggttagcaaccaaaacatgcccagcagggcgctgacgttcagtcagctgagcgccgcaacggacgggttcagttcgcagaacctgctcggagaaggcggctttggacgggtgtacaaagggctcctcgaggacaccggagaggtcatcgccgtgaagcagctggacaggaacgggttccagggcaaccgcgagttcctcgtggaggtgctgatgctcagcctcctgcaccacccgaacctcgtcaagctgctgggctacagcaccgactccaaccagcggatcctggtgtacgagtacatgcccaggggctcgctggaggaccacctcctggacctgcccccgagctggaagcccctgccgtggcacacgcggatgcgggtcgcggtgggcgcggcgaagggcatcgagtacctgcacgaggtggccaacccgccggtgatctaccgcgacctcaaggcgtccaacatcctccttgacacggacttcaacgccaagctctccgacttcggcctcgccaagctgggccccatgggcgaccagagccacgtcagcaccagggtcatgggcacctacggctactgcgcccccgagtacgccatgaccggcaagctcaccaagatgtcggacatctacagcttcggcgtcgtgctgctcgagctcatcaccggccgccgcgccatcgacgtcacgaggccgtccgaggagcaggtcctcgttcagtgggtgagctgagcttttcgtttcgtttcgttacgttttccaccagc

SEQ ID NO: 274215 - DNA, 443 bp, Zea mays
aacacgcgtccgcccgagggtgcccctcccactctcgcgtcggtcccgcgatgggcctgttctcatcggccgctaagagatgtagaaagtgcaagaagttcctccgcagcgcgggcgcgtgctgctgctcgccgtcggcctcctccgcccctgctggtggtgtgcgcggcaacgaagaggcgtcgacgtcggcgctggcttccgcgccagatggcaagaaaaagaagaggtggaggaagagaaagttctggagaaagaagaagaaggccaagaaggagagcgacgatggcagcggcgagctcgtggatctcgtcaacagcttctcggccaagtccgacgtgtgcaagaacgtgaatgcggccgaggagatcctacggggctgcaaccagaacatgcccagcagggcgctgacgttcagccagctgggcgccgcgaccgacggg

SEQ ID NO: 274216 - DNA, 1105 bp, Zea mays
  unsure (1)..(1105): unsure at all n locations
gtgggcgcggcgaagggcatcgagtacctgcacgaggtggccaacccgccggtgatctaccgcgacctcaaggcgtccaacatcctccttgacagggacttcaacgccaagctctccgacttcgggctcgccaagctgggccccatgggcgaccagagccacgtcagcaccagagtcatgggcacctacggctactgcgcccccgagtacgccatgaccggcaagctcaccaagatgtcggacatctacagcttcggcgtcgtgctgctcgagctcatcaccggccgccgcgccatcgacatcgccaggccgtccgaggagcaggtcctacttaactgggcttcgcctctgctgagagacaagaggaggttcgtgaagctggccgacccgttgctgggcaacaggtacccagtgaaggcgctgtaccaggcgctcgccgtcgcgtccatgtgcctgcaggaggacgctgccagccggccggggatcagcgacgtcgtctcggcgctctcgttcctcgccgatccgcaatactaccctccccaaggcacgggagccgagcagaaggccacagccacaggtcgagagagtaaacccaaggaggatactacagacaaggatagcagtcctcataaggccgaaatgatcagggcagacgacgaaacgaagcatagatgatgaccgtagggggaagctaaccacgggaaagggaggaacactgcagagctgtctgtctgctctcttgaatcttctttttgtaaagcgtacaccacgtaggcaggatgtaacaacaacattcaaggagttatcttgactgagatgcagattttcagcagcaatgcagcatgaagtcgagctaactgttccacacaaactactcagcaaaaggtcatgggagaggtctcaagcagggtgaccctcctcctcctcctcccctcctttttgttctggcgattgacccactacaaaaaaaatctaaagattgctacagagaccggagtactgagcanatcggggagctgttcgcccactataaggatctcgatgtatacacatgatgcgaccttgtttgttaagcccaaaaaagaagaaattgagagaattgtnt

SEQ ID NO: 274217 - DNA, 415 bp, Zea mays
gtcagatcttccaaagataaaccagccaacgctgatcatttggggggagcaggatcaggtcttcccaatggagctggcgcataggttggagaggcatcttggggagagttctagattagtagtcgtaaaaaacgctgggcacgcggccaatctagagaagtccaaggaggtgtgcaagagcatcattgactattttcaggaaccgggttcaagtgattgagttggggggaaaggaggtgaagccacaatgtgacggttggaaattctgagctaggacatcgtcctgtgattggcccgcagttttgccgtttccttggcaacttgtaattgtaacaaaagaacctttgtaatcacacggaccatacaagtctcctgtaaattgtctgaaggctttctgcgctcaaagaaacacact

SEQ ID NO: 274218 - DNA, 1198 bp, Zea mays
ctctcccccgcctacagaggaccaaccattctgttcttccaagaaaatgctggcaacatcgctcaccgtttggaatttgttcgactaatgatgcagcgtctacagtgcaatgcttttatgctttcttatagagggtatggtgagagtgatggttatccttctcagaaagggatcacatatgatgcacaggctgcacttgatcatctagctcagaggaaggacattgacacaaccaggatagttatctttggaagatctttaggaggtgctgttggagcagttcttgccaaaaacaatcctgacaaggtggccgctctaatactggaaaatacatttacatccatactggatatggctggtattatgcttcccttcttaagatggttcataggcgggagctcttctaaaggtccaaaacttttaaactgtgttgttcgctctccatggaatacacttgatattgttggagaggtcaaacaacccattctcttcctttctggattgcaagatgaactagtcccccctccacacatgaagatgttatatgacaaagcttctgatcataacagaaattgcagatttgttgattttcctagtggtatgcatatggatacctggatgtctggaggggaccgctactggaggacaatccaattgttcttggatcaatacgctcctggagtgcagaatcatgatgccagcttcaaaagtgaaattaccgaggatgatgaagctgctgattgactggaaaatctggatcggactttttccaaatttctgtttcctgatgttgctgcaatttgtcaccaatgaactgaaactcaccgcaaacaattaattcaggcaattattctgctccattgtacctgaagcaaccgaagttgtgaatatttttcgaggatattctccaccatgctctgccgctacatttgcccctggaacttaagttatttgcccatgaaccgaatatatatcctcttgattgaatgtatgaatgatattttttttctcctttgctagtatttggaacattcctaaaaatgtggctgtatgacagcccgatagataggctgtaagctcattggctgaactatttggttttgtgattttgattgtttcctttttcgatgttaaagcatctagacctttaatatgtttggatgacacaagattattgtgattaatgtatgttttgcag

SEQ ID NO: 274219 - DNA, 428 bp, Zea mays
gtgcagaatcatgatgccagcttcaaaagtgaaattaccgaggatggcaattattctgctccattgtacctgaagcaaccgaagttgtgaatatttttcgaggatattctcccaccatgctctgccgctacatttgcccctggaacttaagttatttgcccatgaaccgaatatatatcctcttgattgaatgtatgaatgatattttttttctcctttgctagtatttggaacattcctaaaaatgtggctgtatgacagcccgatagataggctgtaagctcattggctgaactatttggttttgtgattttgattgtttcctttttcgatgttaaagcatctagacctttaatatgtttggatgacacaagattattgtgattaatgcatgttttgcagaagtgttgaagttaggccctgtttcc

SEQ ID NO: 274220 - DNA, 437 bp, Zea mays
ctccaagccaagcaggtccagagatctcgatcggtcctcttgcagaaacgaggaaagaaaacatgtcttctcgctgggttagggcggaggtgtacccgctgttcgcgacgacaggggtggcggtggggatctgcgtgatgcagctggtgcgcaacatcaccaccaacccggaggtgcgggtgaccaaggagaagcgggcggccggggtgctggacaaccacgacgaggggcggcgctactcgcagcacggcgtgcgcaggttctggctctccaagcgccgcgactacatgcaggccatggacaaggtgcccacggaccctaataagtagacgacgacgatataccccaatgcatggcaagaagatatatatatcagcacaacgcaactgcatgcgatgctgcttgttgctgcaattaatccactatactatatacta

SEQ ID NO: 274221 - DNA, 633 bp, Zea mays
  unsure (1)..(633): unsure at all n locations
cccacgcgtccgcccgtcgcgcgtccgcgaccgcatctcgcgctcggtgcgccaggagctggaccagccgctcaactacgcgcgcgtctacctcgccgacacgctgccgcgcgacgtgcgccgcgtcacgtacctcgactccgacgtggtcgtggtggacgacgtccggacgctggcgtccgtggacctcgcgggccacgtggtggcggcgcccgagtactgccacgccaacttcagcaactacttcacggacgccttctggtcgcacccggcgctcaacggcaccttccacgggcgccgcccatgctacttcaacacgggcgtcatggtcatggacgtcgacaagtggcgcgccggcgggtacacgcgccgggtggaggagtggatggccgtgcagaagcggcggcggatctaccacctcggctcgctgccgccgttcctgctcgtcttcgccggccacatccgggcggtggaccaccggtggaaccagcacgggctcggcggcgacaacgtcgagggccgctgccggggtcttcatccgggccctatcagcctncttcactggagcggcaagggcaagccgtggctacgnctcgacgcccgncggccgtgctctgtggactacctatgggg

SEQ ID NO: 274222 - DNA, 1038 bp, Zea mays
  unsure (1)..(1038): unsure at all n locations
cccacgcgtccgcggacgcgtggggttcgcggagatccaggcggccacccagaacgtcgacgagaaggccatcatcggcgtggccgggtccggcaacgtgtacgtcggggagatcgacgacggcaccaaggtggcggtgaagcgcgggagcgcggagtcggagcagggcatcaacgagttcaacacggagatccagatgctgtcgaagctgcggcaccggcacctggtgtccctgatcggctactgcgacgagaaccaggagatgatcctggtgtacgagtacatgcacaacggcgtgttccgggaccacatctacggcagcgaggggaaggcgccgctgccgtggaagcagcggctggagatctgcatcggcgccgcccgggggctgcactacctgcacacgggcacggcgcatgggatcatccaccgcgacgtgaagaccaccaacatcctgctggacgacaacttcgtggccaaggtgtcggacttcgggctgtccaaggacgggcccgggatgaaccagctgcacgtgagcaccgccgtgaagggcagcttcgggtacctggacccggagtacttccggtgccagcagctgacggacaagtccgacgtgtactccttcggtgtggtgctgctggaggcgctgtgcgcgcggccccccatcgacccgcagctgccccgggagcaggtcagcctgccggactggggcatgcactggaagcgcaagggcctcatcgagaagatcatggaccccaagctcgccggcaccgtcaacccggagtcgctcgccaagttcgccgagaccgccgagaagtgcctcgccgagttcggcagcgaccgcatctccatgggcgacgtgctgtggaacctcgagtacgcgctgcagctgcaggacgccaacccgcccgagggcgcgcggcagggcggcgacggggacgaccaggacggcgccgcggcggccggcggcggcggcgcngtcgtanncgcgggcggtgccgtgcccgacgcgtccgacgccggcgccggggagctcttccc

SEQ ID NO: 274223 - DNA, 625 bp, Zea mays
  unsure (1)..(625): unsure at all n locations
ggtcaagggttcagggcccgtccgaccacgcatccggctgacgacaccaccgtgtggtcgacaaaataaaaaggagagagagagagatggctctgtcgtctcgccgtatggccgccgcaccattcttcgtcgtcgtccttctcgtcctcgtggcggcagagaggacgatgggcagggtggtggtggaagagacgctctgcttgtcgcagagccatgccttcaaaggcgtgtgcctcagcaacaccaactgcgacaacgtatgcaagacggagaagttcacaggcggcgagtgcaagatggacggcgtcatgcgcaagtgctactgcaagaaggtctgctagggcatgaccggcagcaagccccagccgtacggctggttgatccggttgcacactgcacagctcgtttgggcacgcggtcatgttccggcttctcggctttatttatttcttctttgttataataaatagactctgttagtcacgtgcgttttagtctgggttgtacgttattaattctctagtgtattgtatttgcgcaacgcgctgtacttaacgtagccatgtattcgcgttgcgtggtggagaggccaacgatttataaaaaaaaaaaantaaataaaaat

SEQ ID NO: 274224 - DNA, 588 bp, Zea mays
cgcgtcgggccctcgacttctatttcaacgtcaaccggcaggtgtcggagcccaggatgtcgtttcgcacgagcacgagctcagggccgtctctgtcggccaccaagtcctcgcccaacctctgcggcacgcccagcccaggtagccctggtgcgcactctagtaacgccttggagtcatggaagatttgcaacccaggagataaccctctgcttgtgaagacaaggctcaggcactgggctcaagtagtggcttgttcagtgaagcactcgagctgatcctcgtcagtgttttattcacgctcttcttccatacataatacccgtacaagtggttgcgatggcgatgaattagtcgtgtccgagtgaaactagatcaattgaccttgttgctcgatctaatgtcgtcccaggtcacattgttgtggacagatttaattagcgtcgggttggcaaattaaaaaatgtatatgcaaagtactgttaaaggttggcatggtgtaaaaggtgtgagctatctccctaaatcattatgtcacagatttgaaacagtctttccgtatctgcgaaaacaaacttgtctcgtttt

SEQ ID NO: 274225 - DNA, 971 bp, Zea mays
cctttgcgtccgcccacgcgtccggctgaatccggggtccttttgctagtagattgctgaccccttcccccaatcccagcctgacaccggtccacggcagaatcccattccgattcctccctccccgtaccgtctcccctctcgccctaggggccggggggttagggttcgcttcaccgtcgggctgtccctacgacgaggaaccgtccctcgcgcaccgggcccgggtgctatgctgctgcgctgcatgactctcttcacctggagcagaggttgctttggatgctgtgctaagccaactccaatgatagcagtagacgagccttccaagcggttgaggatccaggggcgatcagtaaggaaggctagcctctcggaggacttttggagcacgagtgcgcatgagatggagaacagcgggatccaatcgcagaggagcatgtcttcgatcagcacgttggctcagtccagcgatcagcatgcgtcaggaagttgcagcaacccgaatgagtttatgaatcaaggtcttatgctctggaaccagaccagacaacagtgggttggaagcaaaaaacgccactctagatctcaacagcctcgagaaccaaagttgagctggaacacaaacgtatgaaagtctgctaggaagcaataagccattctcccaaccgatacctcttggcgaaatggtagatttgcttgtggacgcttgggagcaagaaggcctttatgattaggcctgtggagttcattatttgactcggattaatcgcttaatgcagaagctctaggttctcaagcgttatattttctgagcacaatggtgtaccatggatgtatcatgaaacatggcagcatccttatattaagcaattgtaatatattattcctgtcaagcttatgagaacattggatgacattgtacctggtgtttttatatgaaaactttgggtgatctaggcaactggatt

SEQ ID NO: 274226 - DNA, 423 bp, Zea mays
gattcctccctccccgtcccgtctcccctctcgccctaggggccggggggctagggtttgcttcaccgccggcctccccctccgacgcggcaccggcccccgcgcaccgggcccggatgctatgctgctgagctgcaggaccctctccacctgggtgcgccgcctcgtcgcttgcatgggagcagaggttgctttggatgctgtgctaagccaactccaataatagcagtagacgagccttccaagcggttgaggatccaggggcgatcagtaaggaaggctagcctctcggaggacttttggagcacgagtgcgcatgagatggagaacagcgggatccaatcgcagaggagcatgtcttcgatcagcacgttggctcagtccagcgatcagcatgcgtcaggaagttgcagcaacccgaat

SEQ ID NO: 274227 - DNA, 468 bp, Zea mays
ggcaaatttcagacagacttgggaaaagcccgggcagcggcgattgcatcgagaagaaaaacaaagtgatcaaacgatgctcattttaccacgtcggttccaagacaacttgctggcacagcatttctgttgaactttgcttttactagatgatacttcgaggtggcattgagacgtagggttgccttgggaatgtgaacttcaccacatttcttggtcctgccctgaccctgaggcatattgggcttgcgataccagggctctagataagtaagatatcccactttgggtattggttgttgatgctcctgccaagggcagttagctggatccaacgggaaggttcagcaccagctggtggtgatgtaaaatccttcacttcatgaattactgtaccattaccgtttctcttgttaatccagcctcacggtttcggccttttttaacgtaattctattgttttcaagt

SEQ ID NO: 274228 - DNA, 1085 bp, Zea mays
cggacgcgtgggcggacgcgtggggtacgcagatggccatggagggtcgtcgtcgtcgtcgtctcgttctgtggctcgtgatatccgcgcaaacaatgctagttgccgccgcggccggcgccaagcggcaggcgccggtgatgttcgtgttcggcgactcgacgctggacgtcgggaacaacaacttcctgtcgggggcggccgtccccagggccaacaagccccactacggcgtcgacttccccggcggccatcccaccggaaggttcagcaatggcgacaacacggctgacttcgtcgcgaagagcatggggttgaagagtagccctccgccgtatctgtcgcttgcacccaacggctccagccctctgctcgcgcagactgctctcaccactggtgtcagctacgcttccgcagacgctggcgtcctcgactcaaccaacgagggcaagtgcatcccgttgtcgacgcaggtgcgctacttcaacggcaccaaggcgaagatggtcgccaagaagggcgccgccgcggtgagcaagctgctggccgactccgtcatcctcatgggcatcgccaacaacgacctgttcgtgttcgctgccgccgagctgttgcggggcaggtcggccgcggagcagaagagcgacgccgccgcgttcctcaccgacctgctgtccaactactcggccgccatcacggatctgcactccatcggcgcgaggaagttcgccatcatcaacgtggggctggtggggtgcgtgccggtggtgcgggtgctggacgcggacggcgggtgcgccgaggggctcaacaagctggctgaagccttcgacgtcgcgctggggccgctcctcgccggcctcgccgacaagctgccggggctgacctactcgctggccaactccttccgcctgacgcaggacgccttcgcggacccgaaggcgtcagggtacagcgacgtggccagcgcctgctgcgggagcgggcggctgctggcggaggcggactgcctgcccaactccaccgtgtgcagcgaccacgacagccacgtgttctgggaccgctaccacccggcccagcgcgcg

SEQ ID NO: 274229 - DNA, 448 bp, Zea mays
ccgcacccaccgctgctccaccttctccacgagcccggcaacgggaaccaaggaaaccgaagccccgatgacaagcttcttcagggacgcgcgcctcccgcagcagcgcgtcgtcgagggcgtccccttcccggcggtgctcgtcccgagcgctcgtgcgggctcctgcgccggcggggtcgacaagttcctggcggccgtgcgctgcgagagggcgtcccggctggagccgctggtgcgggacgcgggggccctgctgctgcgagggttccccgcgacgacggccgccgacttcgaccgcaccgtcgacgccttcgggtacgaggagctgccaatcgtcggcagcgtcgcgccgcggaccaacgtcgtgggccgggtgttcaccggcaacgactttggcgccgaacagaagatcccctatcaccacgagatggctcaaggtccaaca

SEQ ID NO: 274230 - DNA, 559 bp, Zea mays
gcgagtcgctcaacgaccctaacaccaccatgggcgacctggtcccgctggtgcgcgacgtgtccgatggcctgtgcgtcaacgggaacgtgctgaaggcacaaaacgtctccggaaagatcatcatctgcgaagccggcggcgatgtctgcaccgcgaaggccaagatgctaaagggcatcggcgtggtcggaatgatcgtggtgaccccggagttgttcggtccggtaatcatcccgaggccgcacgccatcccgacggtgcaagtctctaacgcggcggggcagaagatcaaggcctacatccacaaggcgcggggcccgacggcgacgttcgtcttcaaaggggcagcgttcaacaccccaaggtcgccgatggtggcgcccttctcctcgcggggcccgaacaggacgagccgtgggattctgaaacccgacatcatcggccccggggtgaacatcatcgccggcgtgccctcgatcgaggacgtggacctgctgcgcaacgcggaggtgcccacgttcgacatcaagtccggcacgtccatggccgcgccgca

SEQ ID NO: 274231 - DNA, 777 bp, Zea mays
catgccctgaacacggtgtccaggtgttggagtgcggttgctcttgtaagcagggtacaacatatgacgaaaggtcattcctaaggggagaaaaaatggtaatgtttctttataggattcaaaagatgagagtaacatgatacaacagctgaaaacaatcaattggtacccaacccctccataagcaaaggtatcttctaagaagtggctaatgaaaacctaaatgaataagtgttggtatgctctctttccaatgtgtaagcaaagtatctctaagacctcccaagttggagcatcgaagatgcccttgatgactcgtatgtttgttgcttccaatatactacacatttttaagtaaagtatagctaggaagataataagaaccaagaaactaagtgacataaaattcttagaaaataaaagtaggcagtgctaaagggcctctagccgagttggctaggtggtctgagtagcactcctcaggtcctgggttcgactccccgtgggagcgaatttcccggctgtggttaaataaatcccctcggctgtcccacgccaaagcacaggtctaaggctcagccccggtcgtggtcgttctcacatgagcttcgatgccgctgtgtatgggtggggcaggggttcgggggttttcttgacctgtgtgagaaggtcttcttcttaatacaatacccgggggctgtcttaccccccgcaggtcaagttttttttataaaactggtactcacagaaaatgtagtaaaacaaagtagaagaaac

SEQ ID NO: 274232 - DNA, 1160 bp, Zea mays
ggaggtggccgtgaagcagctcaaggccgggagcgggcagggcgagcgcgagttccaggccgaggtggagatcatcagccgagtccaccaccgccacctcgtctccctcgtaggctactgtatcgccggctcctcccagcgcctgcttgtctacgagttcgtgcccaacaacaccctcgagcaccacctccacgggaagggtgtgccggtgatggcctggccggcgaggcttgccatcgccctcggctccgccaagggcttggcttacctgcacgaagattgccaccccaggatcatccaccgtgacatcaaggcagccaacatccttctggacgagaatttcgaggctaaggtcgcggatttcggacttgccaagctgaccacagacaccaacacgcacgtctccacgcgtgtcatgggaactttcgggtatttggccccggagtacgcgtcgagcggcaagctcaccgacaagtcggacgtgttctccttcggcgtcatgctcctggagctcattaccggcaggagaccggttgatcccacgaactacatggaggacagcctggtcgactgggccaggcccctcttggcgcgcgcgctgtccgaagacaacttcgacgagctgctcgacccgcggctggagaacagggtcgaccggctggagctggagcggatgtgctcctctgccgcggcggccgtccgccactcagccaagcggcggcccaagatgaaacagatcgtccgtgctctggaaggggacgcgtcgctggacgacctgaacgacggggtgaagccagggcagagcatgatgttcagctccggatcggagtacgactccggggccaactacgcggccaacatcagcaagttcaggaaggtggccttcgagagcagcgagttcagcaacgactacagcgggacaagcgagtacggcgccgactccggggacgcggcgacccagcggcagcaacatcgctgacctcctcgtccgagatgcgtgtgtggtgtacaatatttataccaaggggtcgatgtcgactgtcggatactatcagagatacccaaccctcgatcgtgacagctttagggcatgtaatgatgctcataaaatgtcatgtaacgtacgtatttgtgtgtgacatgttgctgcttgcttgact

SEQ ID NO: 274233 - DNA, 395 bp, Zea mays
ctcggacggacggtccgccgggcggcggcgccgctaggtaagtaggtagctagagcgctgcgccaaccacgacgtagcacatgcaatggcactcgcggccgtggcgctgccgtcgtcctcgatcgtcggcctggtgtctagctgcacggaaccgcagccatgcagacgatctcgaccgtacgccgtgtgtagccggccccggccaccgcccactgctgccaactgcccagtgatgacgacccggccatgtccgccgtacgcacggtcctgcctctcgatcgtacgccgtgagcaacaggagttctgtccggcgctggaggtcggtccttgtcctggctagagctagcccgcccgccggtcacacggatcggatctctccatccactcccagctgt

SEQ ID NO: 274234 - DNA, 1074 bp, Zea mays
accacgcgtccggtgacgacgctggcgtggacggcgctggcgttcaagcccgagctggagtcgaccaaggagctgaagcacgtgcaccaggccatcaagtggggcaccgactacctgctgaaatgcgccgccaggaagaacaagctgtgggtgcaggtcggcgatcccaacctggaccaccagtgctgggtgcggccggagaacatgaaggcgccgcgcacgctgtacgagatcgactcgaagacgcccgggacggagatcgccgccgagacgtcggccgcgttcgccgcctcgtccatggtgttccgcgacgacaagaagtactcgcgcaagctgctgaacaaggcgaagctgctgttcacgttcgccaagagccacctgggcagctacgacggcgagtgccccttctactgctcctactcgggctacaacgacgagctgctgtgggccgcgacctggctgtacctggcgacgaggcggcaggtgtacgcggacttcatcgcccacgaggccatctcgtcgagcgtggccgagttcagctgggacctcaagttcccgggcgcgcaggtgctgctggccgagttcaacatgacctcggcgggcggcgcgcagaacttcaagtcgcaggcggacaacttcgtgtgcgcggtgctgccggacacggcgttccaccaggtgttcatcaccccgggcggcgtgatccacctccgcgacggcgccaactcgcagtacgtgaccagcacggcgttcctgctggtggtgtacgcggacctgctgctgcggacggggcagacggtgctgtgcgggaaccagccgctgcccccggcccggttgcacgagttcgcgcggcagcagatggactacctgctggggcgccaacccgcggcacagctcctacgtcgtgggcttcggcgccaacccgcccacgcagccgcaccaccgcggcgcatccacccccgtgctgccccccggcacggacgtcaactgcggcctcagcttcggggactggatggcgcccgacaagcccaaccccaacgagctcaccggcgccatcgtcggcgggcccgacaagaa

SEQ ID NO: 274235 - DNA, 898 bp, Zea mays
atcaagaaaccctaaaaacatcatcggtctcctccgcccgcgcggccgtttgactgttcgtgctgaaacggagacgccggttagtgcggtttcaattagaaggattccaagggttccttcagacatgcctttgtatgatatacccaatgagtttcagaaaggaagtagtcatatggctgctgttgtgaaggctaaacctaaaactgaaccaccgcctgacagaactgaaccaaatagggaagcagttgggccagcacagttgactgttaccttgttatctaatgctgaagaaagtgcagacaatgtggttgtggatatcgaaagaccacataacaggcagattaatgggatcccagcatctaacgcagtgcctaggtcatcagaggatattgaggatggtgaggtcgttggaatcatcacacttgaggatgtatttgaagaactcctacaggaggaaattgtggatgagactgatgaatatgttgatgtccataaaaggatccgagtagctgctgctgctgctgcatcatcggttgcaagggctccatccgttaggagattaacgggccaaaaggctgcaaaccttcagggagcacagaatcgccaaggacagcagcctcctggaattctcaagaaacctactgagggtgattcaaactcatcaaaacaagtgaaccttgtcgaacctcttcttgaaaagaggaggtaactctaaaaacgtagccgataaaacgcatggaatcaagccggaagagcctatggttcttgctattataacaagaggtaaatatagatgaactcggtgttgtaaattccaacaggagcttttggtgtcatgggccttagtcatgaaaaacccaaaaaaaaaaaaaaaaaaaaaaaaaaaaaaagatcgcga

SEQ ID NO: 274236 - DNA, 513 bp, Zea mays
ggtctagaactcgcgggccgacccaagcgtctatggaaaatctgtccatcatctttacaaggtcaattttcgggccatcatcacacgcctactataattttagaagcagttgcctcacaagatttatggatttggcatgctttttttggattacctggctctctcaatgacatcaatgttcttcatcgatctcccctcttcgcaaaattatcaaatggagaaagtccacaagtgaattatagaataaataaccatgactattcgatgggatactaccttgcagatggcatatacccttcttgggcaacattggttaagaccataccagaaccacggggcaataaaaggatctactatgcaaaagcacaagaagcggcacggaaggatgtagaacgagcctttgggggtcctccaatctcgttttgccattgttcgcggtcctgactcgattatgggacgaggagacactaagcaacataatgatagcatgtataattatgcacaacatgatta

SEQ ID NO: 274237 - DNA, 495 bp, Zea mays
agcggggaccttctgctacatcgacccggagtaccagcagacgcgcccgctcggcgtcaagtccgacgtctactccttcggcgtcatgctgctgcagatcatcacggcgaagccgcccatggggctgtcgcaccacgtcggacgcgccctggagcgcggcgagctgcaggacatgctggaccccgccgtgcccgactggcccctggaggaggcgcagtgcctcgccgagatggcgctccggtgctgcgagctgcgccgcaaggaccggccggacctcggcgccgtcgtgctcccggagctcaaccggctgcgcgcgctcggcgaggacaacatgcagtactgcggcgccatcatcaggggtggcagcggcagcggcggcggcatgcacagctcgtcgccgttccacagcaacatctcacggtcacacgccgagatgatgatccattctcagtacccaagatcagtgttcagctcaagagcggggaattcgcccag

SEQ ID NO: 274238 - DNA, 1206 bp, Zea mays
ttttcgcgtccgcccacgcgtccggctatattcatactgtgtggaattcatcattttggagggtgataacctcacatcaatttttcctaaagctggttttgattggcttgggattcatgttgatggaaaacattttttcggagtgttaactgctattttagtcttgccaacagtatggctgcgagatcttcgagtactctcgtacctttcagcgggtggtgtgattgcaactcttctcgtattcctgtccgttggtttagtcggtgttaccgatggtataggcttccattcaactgggaaggcagtaaactggagtggcatgccttttgccattggtatttatggattttgctactccgggcattcggtatttccaaatatctaccagtcaatgtccgatcgctctaagttccctaaggcactgttcatatgttttgcaatttgcacagcaatatatggatcttttgctgtcattggctttctcatgtttggagagaacactttatcccaaatcactttaaaccttccaaagcattcagttgcctcaaaagttgcactatggaccacggtgatcaaccctttcaccaaatatgccttgttgctaaacccactcgctcgaagtttagaagagttgcgtcctgaaggttttttgaacgaaacatcatgctctattatactgaggactgcccttgttgcgtcaactgtatgcattgcctttcttctgccgttctttggtcttgtgatggcgctcattggatctcttcttagtatacttgtggcggtcataatgccagccctgtgcttcctgaagatcgcacaaaacaaagcaacctgtccacaggtgatcgcgagcgtcggtatcgtaatactgggcgtcgtcagcgccgcgctggggacctactcgtccgtgaaaaagatcgcagaaaactactaggcactggggacggtttctctccgcagaggctactaccactcggccgcacggttccacgtccggccggagctggggaatggtcagggtttacgtacacgatctcaaagttctgctagaactaccgaaattccctgtagattattactggtatgattcggaccacaatagtctacttatacaaacaaaaaaaaaaccctgcatcatcacatcacttggaataatgcaatcatgccctccttttttagcccaggtccctaccatctcgctgtact

SEQ ID NO: 274239 - DNA, 467 bp, Zea mays
  unsure (1)..(467): unsure at all n locations
cgcgtccggcagtgcctttcttgcatcaactgtatgcattgcctttcttctgccgttctttggtcttgtgatgtctctcattggatctcttcttagtatacttgtggcagtcataatgccacccttgtgtttcctgaagatcgcgcagaacaaagcaacttgtgcacaggtaatcgcaagcatttgtatcgtaatgttgggcgtcatcagtgctgccctggggacatactcctccgtgaaaaagattgtagaaaactactaagctcttcgacaataattgcctgcctgcaccagactccacgtatggaactcgaaatggtcaggttttactgtacgaccaaatttttactagaactaccggatttcctgtacattattgctgctgttattattcggaccacactagcctactaaaaaggaacacttccaataatgtaatcttgcgcacctttaaaaaaaaaanaaaa

SEQ ID NO: 274240 - DNA, 1120 bp, Zea mays
ttcgctcgtcgcgtacagctggacgcctcctttctcgctgcgggctgttgccttgcctccgtcccctcccctcgtcgcctccgactccacctcccctccccggtctctgagagagggagcccggacccggagaccgccagcaagcgcgaggcagaggaggagcatggcggccccgccgtcgaggtcgcggggcgactacgaccacctgattaagctcctgctcatcggcgaccagccggagttggaaagagttgcttgctgctgcggttctctgatgacacattcacgacaagttttatcaccaccatcggcattgatttcaaggctaggacggtcgagctcgatggaaagcgtgtaaaattacaaatttgggacactgctggtcaagaacgtttccgaacaattactactgcctactacagaggagccatgggcattctgcttgtatacgatgtcacggacgagtcatccttcaacaacattagaaactggatccgcaacatagagcagcacgcgtctgacaacgtgaacaagattctggtgggcaacaaggtcgacatggacgcgaagcgggtggtgtccatggctcaaggccagaagcttgcagacgagtacgggatcaagtttttcgagacgagcgcgaaaacaaaccagaatgtggagcaggtcttcttcgccatggcgagggacgtgaagcgaaggctcaccgagaccgttgccgccgcggccgagcctccggctatccagatcagcaggccggactcgggccaggccggcgcagcctcgtcgacgaggtggtcatcgtcctgctgtagcacctgatctgccgccgtgtgtgtggctggctctggctgctataggttactgcttaccgcgtggtgtgtgtgtgtgtttacttcctccggtgccaagccaagatttaaatttcgctccaaagatttgccggagcaaacgtgtaggcagatagctaggctgctgtgctgggtttgcttgcttctgtcgtgtaaacaaaacccttgaaagacggtagtgtctgattgtgtcggaacatgacatgcttgtacattattagtgcatcgtatatccagctgttgctaacaaaaaaaaaaaaaaaaagaaa

SEQ ID NO: 274241 - DNA, 910 bp, Zea mays
tgcaggacctgttcggaattcctgggtttactccacgcgccgagtacgcgtgggcggacgcgtgggttggcattgattttaaggttaggacggttgagcttgatggaaagcgtgtaaagttacaaatttgggacactgctggtcaagaacgtttccgaacaattactactgcctactacagaggagccatgggcattctgcttgtatacgatgtcacggacgagtcatccttcaacaacattagaaactggatccgcaacatagagcagcacgcgtctgacaacgtgaacaagattctggtgggcaacaaggtcgacatggacgcgaagcgggtggtgtccatggctcaaggccagaagcttgcagacgagtacgggatcaagtttttcgagcagagtgcgaaaacgaaccgaaatgtggagcaggtattcttcgccatggcaagggacgtgaagcaaaggctcaccgagaccgttgccgctgcggctgagcccccgaccattcagattagcaggccagaccccgaccaggctgacgcagcctcctcgcggcggtggtcgtcgtcctgctgtaacacctgatctggcgactgccgtggcgaaatcaagcagcgtgaatcttgatgcgcgtgactggactgctaggttactgattgtcgcatgtgttcactttcattccggtgccgtgccaagccaagccgggatgtataaatttcgctgtctagtattcacctcaatcaatgtgttaactcccgctgcttcgcacgtcacgtcgtttgtttgttgagagcaaaacgtgtgtggggcagataaaaaaaaaagccctggtgggtttgctcctgtcacgtactaaacagaacgtgtctgatgattgtgtcgacggtggaacttggaagcgtgcttgtctcact

SEQ ID NO: 274242 - DNA, 483 bp, Zea mays
acttcatataccctccagcgccggtagggcgtggtttgatccactcgactgccggaggggtgctcggagggatggcagaggttgtgctcccgtgggtgctccgtggccagctgccagccagcttgcactacacgagcccataccatgttgcggcacagaacgtgaaccccaggctgaggcggcatcagatggaaatagagaggtccctgcaccagatctggttcttcctctttgtgtttgtgctgctgtgcctgctcttgttctgagacagaggactgttctatatgcctctttgtagatattgaagagggggagagagggatactaatggatgatgcgtatagtagacagggtaatggtctgtatcgacaagcatgtgtctaaagcatgctgatatagagttgtaatatgatgagacatgggaggtgaaatgtatatttcattcttctcgtcataacgtcagcggtttcctgatcaaaaaga

SEQ ID NO: 274243 - DNA, 391 bp, Zea mays
cccacgcgtccgcccacgcgtccgcccacgcgtccgcccacgcgtccgcgacgctggaggagctgaagaacgacccgcgcacgtcgggcgcgctccacgactgccaggagatgctggggtacgccatcgacgagctcaagtcgtccttcgacaagctgggcggcttcgagatgaccaacttcaacaaggccgtggacgacctcaagacgtggctcagcgccgcgctcacgtaccaggacacctgcctggacggcttcgcgaacgccaccaccaccgaggcctccgccaagatgcagaaggcgctcaacgcgtcgcaggagctgacggaggacatcctggcgggggtggaccagttctccgacacgctgggagggctcaacattcggccgcg

SEQ ID NO: 274244 - DNA, 814 bp, Zea mays
cacacgcagtcaactcgttgctgggggcgggatcccggccgagcaccatgcgaggaaataacatgccgcggcacacgtcgccgttcctttttgccttgttggcgtcggcggcgaccctgctcagcgtcggcgacgcgttggtcgtcgacggcctgcaggtggggttctatggcaagacgtgcccggcggccgaaggcgtcatcagcgacatcgtcaacaacgaaatcgctatggaccggggcatctcccctggcctcattcgcctcttcttccacgactgcttcatcacgggttgcgacgcttccattctcctggacgagtcgcccgccggcgacgtcccagagaaggagtcgtccgccaacggcttcaccctggtcgggctcagaaccatcgacatcgccaagtccaccgtagagggcatgtgccccggcaaggtctcgtgcgcagacatcctggccttcgcggcgcgcgacgccgccgtggccgcgggcctcccgagatacgaggtcgcggcggggcgccgcgacggcatgcgctcgaacatggacgacctcccgggcaacttccccgtgccgggccaccacgtgccgcgcctcaccgagctcttcagccagcgggggctctcccaggaggacctcgtcctgctctccggcgcgcactccatcggcggcgcgcactgcttcatgttctccaaccgcatctacaacttctcccaggacgccgacgtcgacccgacgctggacccggagtacgccaagtggctgcgccagatgtgcccgccgcggcagcccggcgacgaccccgagcaagcgcc

SEQ ID NO: 274245 - DNA, 480 bp, Zea mays
cccacgcgtccggttctcgtcatcgtcgtgggccttcatttctcctagaaggtgaaggtcgagaggagaagaaggcgagacgtgcagtccgtcgggctccgatcgagaacagggaagcaagaggctgctagagatcgagctcatcaaccaaccaagtcgtacgtcgtcagcatcacgaccggatggcgcgtgccgcgtccagctatgtatccaggagggggctctccgcagcgatgacggtggcggaggagtccgtgaagaaggtggaggacaaggcggtgaagctgggaactgtggccaaggacatcgccagcgccatggccaccacgacggaggagaagacggcgttctgggaacctgaccccgagaccggatactaccgtccggtcaccggcacgaaggaggtggacgccgccgacctgcgcgccgagatgctcaagcgggggattctgcaggacgactgatgcatgcaacatgcac

SEQ ID NO: 274246 - DNA, 483 bp, Zea mays
aggctcctgcccagggcgtcgactccgaggcgtaccacatgcgcatcctcgccaccgcgctcggcagcgaggagaaagccaagcgggcgctgatctacagctacaaggccgccgctagcgggttcgccgccaagctcacgccggcgcaggtcgccgcgttgcagaagcatcctgacgttgtgcaggcgctgcctgacgtgaagtacacccttgaggacaggaaccacctcaactgaaccgagtgcggctttcaccaacacgatacatagctcggcactagtgccatctcatgttagcaagtgtgcatgtgcccacaccctagggtcagaatttatataagcatgctatgtgtgggctagtgatggtaatttagtctcttcataaagattgaatgctgtacccggagcgtacgtacatattactacccagcctgctgttcattgtttgatatcaccgtggattcacgagactgctggcactgat

SEQ ID NO: 274247 - DNA, 646 bp, Zea mays
tcgtcaaatcggttggaagagcctaaggctgcacttggactacgcccgccggaagagaggggacggttcctcagacttcgagtacgctggcaaggatgcatgggcttctgcatacagtgctgtcgcggcaggggcggctctggttgctgggctcggcgcgatggcttacttgaaacggtcagggtaatagcttgaggcaagcacggcagggactacggagcacggttttgatcgtctttgtgatacaagtgccacttcatcggaattggcagaatggctgtgtaagtaattcttgtgagagaggaaaaaaatgaagattttaataatactactgtcaaggcagtgaatggtcccttcatacaagtacacggaactgatcgagttttttttggtgggttgagacttgagagtcaccatggctgtcagcttcgtcacgattgtatttattatcataaaaacacatgattcattgtacaagaagagtcttgatagaccttcttcatgcagcgtctggctgattagaatttatccaaggcgatttttgtccatagttactagctcttgctgcaacctgcaatgtactaagctccttgttccagcagacaccagattttttgtatgatactgtgaataaaattttgctctc

SEQ ID NO: 274248 - DNA, 814 bp, Zea mays
caaaaggaagtgtgtgcaaagctttgcttctgagagagggagagccggagagcgaagagaagcaggccaacccacccccacccctgcactgcactgcacacacaatccccccatggcctctgctccagctgctgctatataagcgcgacccggacggctctgcttccccagtagtcctctcctcccatccatgcttcggtccacgcacccacccagccccaccagcggcagctccgcggcgccggcgtccagctccgacgccgcggcgatggtcgggggcggcgcggcggcgggcagcggcggcgcaccgagcggcgccaagctgctgcagatcctcaacgtgcgggtcgtgggcagcggcgaccgcgtggtggtgctgtcccacgggttcggcacggaccagtcggcgtggagccgcgtgctcccctacctcacccgcgaccaccgcgtggtgctctacgacctcgtctgcgccggcagcgtcaacccggagcacttcgacttccgccgctacgacacgctcgactcgtacgtcgacgacctcctcgccatcctcgacgcgctccgcatcgcgcgctgcgccttcgtcggccactccgtctccgccatgatcggcatcctcgcctccatccgccgccccgagctcttcgccaagctcgtactaatcggcgcgtcgcccaggtatgcggccgtatgcgtatgaatatgatgcccaccgaatcaatccatccatcccgattcgatcaacccaacccaacctctggaagcaatttgagtttttttttaaaattccgggcacaggtttctgaacgac

SEQ ID NO: 274249 - DNA, 797 bp, Zea mays
  unsure (1)..(797): unsure at all n locations
gcttcggtccacgcacccacccagccccaccagcggcagctccgacgccgcggcgatggtcgggggcggcgcggcggcgggcagcggcggcgcaccgagcggcgccaagctgctgcagatcctcaacgtgcgggtcgtgggcagcggcgaccgcgtggtggtgctgtcccacgggttcggcacggaccagtcggcgtggagccgcgtgctcccctacctcacccgcgaccaccgcgtggtgctctacgacctcgtctgcgccggcagcgtcaacccggagcacttcgacttccgccgctacgacacgctcgactcgtacgtcgacgacctnctcgccatcctcgacgcgctccgcatcgcgcgctgcgccttcgtcggccactccgtctccgccatgatcggcatcctcgcctccatccgccgccccgagcttttcgccaagctcgtactcatcggcgcgtcgcccaggttcctgaacgaccacgactaccacggcgggttcgagctgccggagatccagcaggtgttcgacgcgatggcggccaactactcggcgtgggcgaccgggtacgccccgctggcggtgggcgcggacgtgccggcggcggtgcaggagttcagccgcaccctgttcaacatgcggccggacatctccctccacgtgtgccgcaccgtgttcaacaccgacctccgcggcgtgctgggcatggtgcggtccccctgcgtggtggtgcagaccacccgcgacgtctccgtcccggcctccgtcgccgcctacctcaaggcccacctcggct

SEQ ID NO: 274250 - DNA, 882 bp, Zea mays
  unsure (1)..(882): unsure at all n locations
tcctgagcccgacacttgcgctccgcttcggccgccctcttcacctctcccgtctctccaggccgccaccaacaccacaccaccttcgacgagttcccgtactacctcagtgagcaaacacgtgttgtgctgacgagcgctgcgtacgtccacttgaagcaagcagatatttctaagtacaccaggaaccttgctccagccagccgtacaatcctgctgtcaggtcctgcagagctctaccagcagatgcttgccagggcgcttgcccactattttcaagcaaagttgctcttgctagatcctactgatttccttataaagatccatagcaaatatggcacaggtggcagcacagagaagacggttaaaagatcaagctcctagacgacgcttgaacgtgtgtcgggattgcttggatctctttctattcttccacaaaaggaacagcccaaaggaactatacgtagacaaagcagcatgatggatgtcaaattaaggagttctgagagtatgagcaacttaacaaagctcagaagaaatgcatctacttcctctgatatgagtagcatggcttcgcaaggaccttcaactagtacagctcctcttaggcggtcaagcagttggacttttgatgacaaaattttagtgcaagcgttgtacaaggttctgctttcagtgtcaaagaactaccctgttgtactctatataagagatgtcgagaagttccttcacaagtccccaaaaatgtatctcctgtttgagaaactactaaacaagcttgaaggtccagtgttaatcctcggatcaaggattgtagatatgaacagtgatgaggaatcggatgacagattgactgntctgctcccatataatatagaaatc

SEQ ID NO: 274251 - DNA, 571 bp, Zea mays
gaaccctccctcctcgcccagtcctcgatcccggccggccggcagagatctcgccgtcgtcgcgcgctctacctgcgccccgctgatgagttccgagagcgactccttggcctcacggcggtccaagaaacccaagtattccaagtttacccagcaggagcttccagcatgcaagccaatgttaactcctggaatcgtcatcggtgctttctcgctcatcggtgtcttcttcgtcccgatcggcctcgcttcgctatccgcgtctcataacatcgttgaggtgatagatcgatatgacgccgagtgtgtgtccgccaacgacaaggtcggcttcatccaggacgccaagaccgacaaggcgtgcacaagaaagatcaccgtgccaaagccgatgaaagggccgatacacatatactaccagctcgagaatttctatcagaaccatcgacggtatgtgaagagccgtaacgacatgcagctgcggaacaagggcgacgcaagcacgatcgcgaactgcgagcccgagggcaccagcgaggacggcgggaagcccatcgtgccctgcgggctc

SEQ ID NO: 274252 - DNA, 517 bp, Zea mays
  unsure (1)..(517): unsure at all n locations
caccaagcagcagaagaaggtcaccaagagcattatttccaatacctcgaatggattgaaggaactgtttgctgaagtcgagaaggagctcacatcaagcagcagtagccatcctaatgtagcagctggtcccactactgcttaaatgttatcagtatcacatacaaacaattattacaggattcacatcaaagcaattcaggtacaaggctaacatcagtacaacaccaaaagatagattgggcattgcatgaatcacatgcgtatgaagaagccagaagagtggatagctgtttgtgatctcttcctgttctcttctgttcacggtgtcacctgcttcagcgctcttgcactgccggtagaaagtcttacagagatgagagctaaaaagggtttcaaagtaaacaggttgtttcagaaacgcttcacagaaagtggcgcgcagagtagtgtatgtgcagctgacatgtatgtatagttaanagggaactaactttcgctcataaatgtaaaataa

SEQ ID NO: 274253 - DNA, 2065 bp, Zea mays
cggccccggaacctggcaacgggccggctggtggcgctcaagaaggtgcggttcgacagcgtggaccccgagagcgtgcggttcatggcgcgggagatcctcatcctccgccgcctccgtggccaccccaacgttgtcggcctcgagggcatcatcacctcccgctcctctccctccatctacctcgtcttcgagtacctcgagcacgacctggccggcctcagctcctcccccgacatcaccttcaccgagccccagatcaagtgctacatgcgacagctgctggaggggctggcgcactgccatgcgcgcggggtgatgcaccgggacatcaagtgcgccaacctgctggtgaacaacagcggcgagctcaaggtggcggacttcgggctggcgaacctcttcgcgccggcgccggcggcgccgctcaccagccgggtggtcacgctctggtaccgcccgccggagctgctcctgggcgccacggcgtacgagccctccgtcgacctctggagcgccggctgcgtcttcgcggagatgcacgcgcgccggcccgtcctgcagggccgcaccgaggtcgagcagatccacaggatcttcaagctctgtggctcgccgcccgaagacttctggcgccgcttggggctctcccacggcgccgtcttccgcccgcagcaaccttacccgagccgcctccgggacaccttcgccgcgtccatgcccgaccacgcgttccgcctcctcgccacgctcctcgccctcgaccctgccgcccgcggcaccgccgccgccgccctcgacgccgagtacttcacgacggcgccgtacgcgtgcgaccccgggagcctgcccaagtacgcgcccaacaaggagatggacgccaagttccgggaagaatctagaaggaggagcaacctccggagccaaggcggcgagggggcgaagcggctgtcctgggggcacaagagcatgcagctgcaggacacgaaccagagccacgtgcacgccgaggaatcgctgcccgttgtggccgaaaacggggtgacaatggcggggaacgacggcgactcgcggctgttcgtcgacctggagcccgttccggccatcagcaagcggcacggcggcagcgtcggcggcgaccacgcggcgccgtgcgccagggctaggaccatgtccaccagcttcaaggagccgccttgtgtcgccgaacacctccctctctctggccccgtgcagctcgcggcgtccaccggcttctcctgggccaagaagccccggcccgacgccacgacggcggcggtaactgtgacgatgcggagcggctccatggggccagggaccaacaggaacaacaacagcggaggaggagacggagcaagaaccacctccggctccggcgccaccgccaccgccacagcagcggcggcaccatacgaggcggagaagcaggaggtgatcaagcagtgggcacaggtcgctgacgccttcagcgcctctgaagcttacaacagcaggttgaggcagacgcttgacgccaagcagctcaagactggaatgatgcacaaggggaaggtgaacagggtggacttctcagggccgctgctgtcgcagccccggcgcatcgacgagctcctgcacatccacgagcagcagatccggcaagctggtcgccggccatggttcatgaaaggcaccgaggaggaggagcactgatggcagagacacggcatggacacaactaaacgcccatcagatttgcacgtacttaccacagagcaagagaagatgctggaaacatatcaaaggagttggaccgtgagctagctctcctgatgagcaggtgttttttcagggccggggacagacaaacgagtcggcctcatgccatcagggaagagctcagatggaagctgctgtagtggttttcaggtttcatgcaaccagaatttgctctacgcctctacctgaactagacaacaatgttgttgttgttggtgttgtataagatctttttgtgctcgcttgtgatgataatatgcatgacaagctccaaaatgtggtttcc

SEQ ID NO: 274254 - DNA, 872 bp, Zea mays
cgcctcaacacgctccactacgtgctgacccacctggaggccctcgacagctcgctcgcggcctcgacctctcagctggaccgtgcacgcgccgcggcgcagtcgtcgatctcggccgtcgccgaggtcgccgcgcaccgcctcatcttcctggactcgcgccactccttgtaccagggcctgtacgcccgcagcgtggcggacgcccgcatccgccccgcgctccgcctgctgaagcagaacctgtcgttcctggtgtccgtgctcgcggaccgcgcgcagcccgtggcggtgcgggaggtgatgcgcgcctccttcgaggcgttcctgatggtgctcctggcgggcggcaacgagcggagcttcgtgcgcgccgaccacgccacggtggaggaggacttccggagcctgaggcgcgccttctccacgtgcggggaagggctggtccccgaggacgtggtggcgcgggaggcagagacggccgaggccgtcgtggagctcatggcacgctccacggactacctcatcgacgcgttcagcgtcgccacgtgcgactccatcagcgaggacggccgcgccggcgcaggccggtgcacgccgctgccgcccacgacgcggaggtgggaccccgccgacccgaacaccatcctccgggtgctgtgccaccgcgacgacgaggccgccaaccagttcttgaagcgcacgttccagctggccaggaggcggtgaggccacggccatagcttgacttgaaggagcacgaaagatccttacgcgtcccgcgccccgcggcccgattgatgaaatgatgtgcgtggtgtttcgcatttttctcgctgaaaattgctcgcaagctgtgtcgctcgctcgca

SEQ ID NO: 274255 - DNA, 417 bp, Zea mays
gacacaagcgtccgatctcgagtctccttccaagggccacgatgagggcgcctctcctctcctcgctcctcgtcctcgccgtcgtcgccaccgtgcctctactagtcccggcggtgtgcatctcgcggcacgacaagtccgagagcaaggctgacgaataagctgctgctactaccgttgccgccgacgagcatggctctgtcaagaccatgtccctcgacgcatacgggccactggagatggccgccaagaagcccaaggagcaggtcctgaacgcgcaagctacgccggcgacgaccgctggcgctgacacatatgaccagaaacccgttggtgaaaaacaggctgaaacggccacggcctccgctgccgatgaacaacccgacaaatacggtggaagctctagttcctgacgag

SEQ ID NO: 274256 - DNA, 686 bp, Zea mays
cccacgcgtccgcccacgcgtccgcccacgcgtccgcccacgcgtccgttttatcaacgcttctcctgctggttactccgcgcgccttctctttctctcccggacgtcgatcgtgttcttcagcacgggctagctagctccctccctcccagccatggcgacgccggacaacaaggggcacgggcatccgctgcccaagtttggggagtgggacgtgaagaatccggccacgtccgagggcttcaccgtcatattccagaaggcccgcgacgacaagaagaccaccaccggccctggggctgggaacgcgcgcgcaggcattccgccggccttcaggaacggcggcggcgacggcgggtacaggcccgacttcggcgacggcaaccagtacacgccgcccaaacggaagaagtgggccttctgtggctgctgaatcgaagctcgctgtgctgctgtgctgactcgaaaggagaacggatcgtgcagcagctcaagtgatccaggatgatgggagcgccgagacacgatggaaggcattaattatttcagccatggtgtttcgccttgctttaaccttttgctcatctctaccgaggaacactagttccatcgggtaactgaacctgcaaatcttcatgatgaaactgtcgcatcaattggttccaaaaaaaaaaaaaaagggcggc

SEQ ID NO: 274257 - DNA, 615 bp, Zea mays
tcttatctcgtttcgccctccccctcgagcaccccgccggctagggttacggccaccgccttccacgcctcccccacttcccgtaggcggaggctggtcggcgtgcacgcgaccgcggcggcggagatggacccggacttctcgcccgggggcggggggcccagctttgaattcgccttcaacgaggtcaacttctccgaccgggaattgcgtatcgaggtcgtcgccggggatgactacgctccggggtccagcggcgccggtgccggaggaggtggcctcgccgactgggcgcgccaccgcaagcgtcgccgtgaggagctcctcaaggagaaagaatctacaactcacatgtcagaccaaacaaattgcaatgaagttgaagcagaagagtgtgatgcgtatgaagaaaatcaagaggaacctgtagcaatggtagaagaatctccacccgatgttggccaagatggtgatgatgggcaaggtattgattcgtcttggactgtggttggtacaccagttttacgagtcaagacaatttagatcagttcagcgattcttgctgcgaagagtcctttctttatcaagcttttctaaaacggcatgaaagaatcg

SEQ ID NO: 274258 - DNA, 801 bp, Zea mays
gcgctgcaagaacgccgaggacaactcgccgctctgctcggggaccaaggacgccgcctacaaacaactccgcaacatcgacgccttcaacaaccaagccaacaactggcaagacaagaaagtcaagcccaaaaggttcaactgcatggaccttggctgattccttgcgcccaataccacgtggaggcgtaacctgaaccagccagaggtgatgaagaccatccgtgccaacacagggctcaagtacagatggactagatgcaggggcacgttctacaacctgctcaagttcggtgactcgccgtcgaaatcgatgctgccctacgtcaaggccgtcgccgccgccggcgtccgcgtgtgggtcctcagtggcgacctggacgcaatggttcccgtgatcgcgacgaagcggtccatggagaagctcggcctcggcgtcgtggaggactggcgcccctggtccatcgacgccaaggaccaggaggtcgccgggtacgtgatcgagtacaagggcgtggtgttcgcgacggtgcgcgggtccgggcacatggtaccgatcgaccagccgggccgcggcttcgctctcttctcgtccttcatcaaggggcagccgctccccaaggccgcgccgatggtcgacggatgaagagccacggtcgttgggattccggagtttcacccttgtctcgtcaagtcaccatgcatattgtctccatttccacgttaactaccagaccgtgtacatactgactaaacgctcgatctgtgacctcaactgttgtatgaatgtttcgctgcagt

SEQ ID NO: 274259 - DNA, 703 bp, Zea mays
cccaggcctccgatggcccgaggtgcgattcaaccgcggcctcgcatccggtgcggaggtctgcaattggggggaggctcctctccgccgttggaaccgctgcggcgtcgcagcctgtgcgactttcctgctggttcctcatccctcagggagagattttgcattctttggcattactgtttgatggcagacagtagtgctccttctctgtggaggcattggggcaaaaggcagttgaactgaacgggcacatcaatagtctctggcctccaagggaaattgggaaattcagattgaacgtggctgcatcatttttcctttcattggtcttttcagcaacagcgatccattctcgtaggggggagggagagagagagagagagggagagaaatcaaagaggagagtgatcatggagcatgtgattggagggaagtataagcttgggaggaagattgggagcggatccttcggagagctatatctcggtgttaatatacagaatggagaggaagtgggaataaaattggagcctgtgaaaacaaaacatccacagctgcactatgaatctaaagtttatatgctgctgcagggtggaaacggtatcccacacctcaagtggtatggtgttgagggggagtacaatgttatggtgatcgatcttcttggcccaagcttggaagatttgtttaattcctgcaacag

SEQ ID NO: 274260 - DNA, 550 bp, Zea mays
  unsure (1)..(550): unsure at all n locations
agaaccgcaaccgctcgcttccccgcacctccccacctttcgctccctccctccaattgcaggatcggcaccgatgcgattcgaccgcggcctcgcatccggtgcggaggtctgccattggagggaggctcctctccgctgcgcgcgcgcgtcgcggcctgggcgagtttcctgctggttcctcgtccctcgggagagattttgcgatccttggcgttactgttcgattgcaaacagtattgctgcttctctgaggaggcattagggctatgggcagttgaactgaaccgccgcggcagaaatccatttcgtgggagagagatatcaaagaggagagtgagtgatcatggagcgcgtgattggagggaagtataagcttgggaggaagattgggagcggatcttttggggagctatatctcggtgttaatatacagaatggtgaggaagtgggaataaaattggagcctgtgaaaacaaaacatccacagctgcactatgaatctaaagtttatatgctactgcanggtggaaatggtatcccacacctc

SEQ ID NO: 274261 - DNA, 412 bp, Zea mays
ggcaagggacctgatgaacctggctaggttgaccatcgatgagttctccgagatcccagcgagtgcgaaagacgaggtggttcaagatctcgtcgacggcctggagtcgatcttccaggagtacatcttctttgtggcgtcttgcggttcgaaacagaactacctccctccgctgccgccgctgacgaggtgcaaccaagactcgggcttcttccgactgtggaagaaggcggcgctgccgacgtgccaggcgccgccggatgccaccccgcgcggcggccgcggttcgcaccacgtcccgcggccgtccatcagccggggcacgcagcggctctacgtccgcctcaacacgctccactacgtgctgacccacctggaggccctcgacagctcgctgtcgtcctcgacctct

SEQ ID NO: 274262 - DNA, 420 bp, Zea mays
acgcgcgggacgatgcaagcctctacactgagtcgcccccccatccctcaactcgcgcgcgcacggccgcatccgcggcacgccgcgccgcatcccgtgcccgcgcaaaaccggatccgccgccgccatggcggtggaccgcgtggacggcgaggaggcgttcgaggaggtggacccgacggggcggttcgggcggtacgcggacgtgctggggctcgggtccgtcaagaaggtgtaccgcgggttcgaccaggaggaggggatcgaggtggcgtggaaccgtgtccggctgcggtcgctggccgaccgcgaccccggcatggtggagcgcctccacgccgaggtgcgcctcctccgctcgctcagccacgaccacatcatcggcttccacaaggtgtggctggaccgcgacgccggggt

SEQ ID NO: 274263 - DNA, 532 bp, Zea mays
gccgagacacacgggccgacgcaaacccaggaaagaaacgaagcgagcggcaccaccggcgcgtcctcggctcctcgcgtgcgtgcttaccccggcgaatattcgaccacggaagccgcataacctccgtccatcccatccccgctcgcctctccagtctcctctcctcgccccgctctagacgatcgatggccgcgacggcggcggaggagatggagaggatggtggaggcggagtgggaggaggggatgaggagaagaggaagcggtacgggctggtggagtaccgggcgctgccggcttacctgcgggacaacgagtacatccaccgccactaccgctgcgagtggccgctcccgcaggttctgctctccgccttctccatccacaacgagaccctcaacgtctggacgcatcttataggatttttcatctttctcgctctgaccatatacacagcagcacaagttccaaatgcagtagatatccggagcttgcagcatttgccagatgtactgagaaaggctgatatt

SEQ ID NO: 274264 - DNA, 584 bp, Zea mays
cccccgccgccgcggcgcgcctaggggcggaaggccgccgtgccggttcttcccagctgcagcaaccggccagtgcgcgcggttgcgttgcatttgcatggctgcgcgctgcgctctgggagcttgcactagcgggtcggcggcctaggcgcggggcatctttcgagtgcgtgcgtgtctgttcaagctctgatcgtctctccggcccattcgccggaggaaactgaccgccgccttctcgctctcgctctctaccctattcccggggctgagaggggaggagagaaggccacgtccacaccataaagcaggacgtacagacacgtgtacgagggggatcacggtcgggtgaggtgactaagctggcggacggaacgacgacgatggcgaggagcggcggcgggatggaaggcagcggcgggctgaagaaggggccgtggacgcaggcggaggacaagctgctgagggaccacgtgcggcggcacggcgagggcaactggaacgccgtgcgccgggagacgaggctgcagcgctgcggcaagagctgccgtctccggtgggccaaccacctccgccccaacctc

SEQ ID NO: 274265 - DNA, 878 bp, Zea mays
cccacgcgtccgtctctctcccgtcgccgggatcccgccggtgacaatggtgaggtggctgccgccgccgccgccagcggacggcgagatacccttcggacacgacgccgtcgccttgtccttcttcgtggcgtgtgtggccgccaccgtcgcgctcgcgtcgtccatgtgctcggcatgcggtcgcaagccgaaggcggccacccgtgcagacccggccgcttcggaccagtccaccgggacgggctcgggctccgtctccggtggcggcggaagccaggaggctagcgccgcggaggcggaggaggaagtggtgagactgtcaccggagctggcgatgcacggcgccatcgacccggtgacgctgccgtcgtcgacgtcgaagcggcgcctgtccatcagcgtgagcaagaagctgagcatgaacatcccggacaagctgcggctgagccggcgggagcacaaggaccaccaccatcacaaggtggagtcggaggacacgctgtggaagaagggcatcatcctcggggagaagtgcaggatcccgggcgagagggaggcggagaccggcgagcccgtcgaccccgccgacgagatcgccgccgccagcttccgccggtccagctactcccggcccgtgtcgcggtcgagctcgttcgccgtgtaccaccaccaacagcagcagcaccagcacgacaccccggccgccttgcatgcctcggattcttgacagcccctcgagacccgagtataaatgtataatactattacgtacgtgtgtaggcgtcgaaggggagaaggatgctactatgcctacgggatgtaatgtgcattcaaattcagatgtaattgctctataattctactaggtgtgtgcc

SEQ ID NO: 274266 - DNA, 423 bp, Zea mays
ctcgcgggtcgacacacgccggttgccgcagccggtgacagcggacggcgagctacccttcggccacgacgccgtcacgttttccttcttggtggcgtgcgtggccgccaccgtcgcgctcgcgtcgtccatgtgctcggcgtgcgaccgcaagccaaaggcggccaccaacgcggacccggctgggacggcctcctccatctccggtggtagcggcagccaggaggctggcgcggaggaggcagcggtagaggaggaggtggtgaggctgtcgccggagctggcgatgcacggcgccatcgagccggtggcgctgccgtcgtcgacgtcgaggcggcggctgtccatcagcgtgagcaagaagctgagcctgaatatcccggacaagctgcggctgagccggcgggagcacaaggaccacca

SEQ ID NO: 274267 - DNA, 513 bp, Zea mays
gggtcgacacacgcctctacagtcaccgtgcctagcatgcatgcatgtgacgacctctcctcctcgctgtctctctgtatctgcaactgcaagcaaggaaattaattaaaagaagatcggcgccatggcggcaacgacgacggggatgcagatgatgcaggtgcagcaggcggcggcgttgctgctgtgcttggttgtgttggcggcgtctacgcgggtcgcgctgggcaactgccgcgacgactgcatggctgcatgcaacggctggaccatcgtctgccagctctcctgtgccagcgcatgctacggagaagtcgggatcacaaccttaggtacgtcggctgtattagcgaaagcagaagcgcctgcatcagcaccacaagcagcacaagagcgaggcgccgccgccggcgtgtccgcgctcagagggttcaagctatcatcaccgacgacccgtggccgtggatgaatttattaaggccccatgcatccatgcatcatgcatgcatgcct

SEQ ID NO: 274268 - DNA, 818 bp, Zea mays
tcttcgcgggtttttgcttgcatatcctttgtttaggccagagttgagttgtgttccaacttccaagtcttgggttgcggaatcgccggcctcgctcaatcgatggaaaaccataatccattacattctcagattgctgaagtgaaaatggacatctcagcatcagcttctgttgcatcagggaacaaattctgcaagggtggtgcctgtgatttctctgattccagtaactcctcgaaagatgccaaggagagatccacgtccatgaggaagcttataatcgcagtgatcctttgcatcatattcatgacggtggaagtggtcgggggcatcaaagcaaacagtcttgccatcttaactgatgcggcgcaccttctttctgatgtggcagcatttgccatatcgttattctctctctgggctgctggatgggaagcaacaccgcagcagtcatatgggttcttccggattgagattcttggtgccttggtctccattcagctcatatggctacttgctggcatactggtatatgaggctattgtaaggctcattaacgagagtggcgatgtgcagggctccctcatgtttgctgtgtcggcgtttggactgtttgtcaacattataatggctgtattgctaggccatgaccacgggcacggccatggacacagccatggacatccacatgaccatggtcatggtgattcagacgatggccattctcaccatgaagaaccagaacagggccatgttcatcatcatgagcatagccatggaagctctattactgtcacaacacatcaccaccaccactc

SEQ ID NO: 274269 - DNA, 490 bp, Zea mays
tttcttccacgcgttcgcgctgttcgagcagagccccatccccgtgccaggccgctcggccttcgacgccgtgagcccgtgagtcaggcaggcaggcgcctctttctgtccctccacccgggtctccacgccgccgccgccgccgcctcgaccgcccccacgcattcgccgctcctctacccatcctcggcccgcggcccagggagaagaccgcacgggcgggcgagatggaaaaccataatccattacattctcagattgctgaagtgaaaatggacatctcagcatcagcttctgttgcatcagggaacaaattctgcaggggtggtgcctgtgatttctctgattccagtaactcctcgaaagatgccaaggagagatccacgtccatgaggaagcttataatcgcagtgatcctttgcatcatattcatgacggtggaagtggtcgggggcatcaaagcaaacagtcttgccatcttaactgatgc

SEQ ID NO: 274270 - DNA, 608 bp, Zea mays
gtaatcaattctaaactctgtctgcaccttttatctcttgtttctgatcgagcagcccctgtcgtgttttaccggccgtttcattttggcaggaaagtgagagagctgtgacaaaaaaggaggggattgaatttgctagggaatacggttgttctgtttctagaatgcagtgcgaaaacaaaagtaaatgtagaacagtgctttgaggaacttgtggctaaagatattagacaccgccaagcctcctcgctgatgcttcgtctggggccaagaagaacatcttcaagcagaagcctccggaagccgatgccgctgcaagcagctgctgttaacatgcttttgccatgctaattccgcgtcctcccgtggatgatgacgatgatatctttgtttggtgtgtcggtttattgtttcttcttcttttggtcctgtatatgctgaatttattacacccacacataactgtacgttggcagcagctatataatatatcgttttttgttgttaaaaaaaaaaaaaaaaaaaaaaaaaaataaaaaaaaaaaaaaaaaaaataaaaatgtaaaacaatgaaactcacaaaaaagaagtaaaaaaaaaggggcggc

SEQ ID NO: 274271 - DNA, 433 bp, Zea mays
cccacgcgtccggactagttctacatcgcggcgcgcgctcgatctagaactagcccacgcgtccgggccaaggaaattgacctgtattcaaccaaccaggactgtgtaaagatgcttgttggaaataaagtagacaaggaaagtgagagggctgtcacgaaaaaggagggaattgaatttgccagggaatacggttgtttgtttctagaatgcagtgcgaaaacaaaagtaaacgtagaacagtgttttgaggaactggttctaaagatcttagacacgccaagcctcctggcggatgcttcctcagcaggggtcagcaagaagaacatcttcaagcagaaggctccagaagctgacgccgccacaggcagctgctgttaacatggttttggtcctgtatattgctatatgtggtgaagacaattggcagcag

SEQ ID NO: 274272 - DNA, 1390 bp, Zea mays
  unsure (1)..(1390): unsure at all n locations
tcacctcccccggtctccctcgggctaggctagctagctaggttaccactctggtacaacatggctggtgatggcatggaggtatctgccagcgggggtggcggcggcaacaagcagccgcagatcagccttttggggctgttcctcgcctgcatggtcgccggcggcgtgcagtacggatgggcgctgcagctctcccttctcaccccctacgtccagacactggggattcctcatgctcttacatcagtcatgtggctctgtggacctattgctggcttacttgtacaaccctgcgtcggcctctatagtgacaaatgcacttctaagcttgggagacggaggccattcatctttacaggatgcatcatcatctgtatatctgtgatagtcatcggtttctcctcagacatcggttacgctctcggtgacacgacggaagactgcaatgtttacacggggaagcggctgcacgcggccttgttcttcgtgatgggattctggctgctggacttttccaacaacacggtgcagggccccgcacgcgcgctgatggcggacctcgcaggcagccacggacccagcacggcgaacgccatcttcgtgtcgtggatggcgatcgggaacatcctgggctactcgtcggggtccaccgacaagtggcacacctggttcccgttcctgcagacgagggcatgctgcgaggcgtgcgccaacctcaaggccgccttcctggtgtcggtggtgttcctgggcctgtccacggtggtgaccatgatcttcgcccgcgaggtgccgctggacccggcggcggcggcgaagcaggacgaggccggggagtcgtcgggcccgttcgccgttttcaagggcatgaagaacatgccccccggcatgccgcaggtgctcatcgtcacgggcctcacctggctctcctggttccccttcatcctcttcgacaccgactggatgggccgcgagatgtaccacggcaggcccgacggcagccccgaggaggtggccaggttccaggagggcgtccggcagggcgccttcggcctgctcctcaactccgtcgtcctcggagccagctccttcctcatcgagcccatgtgccgcaagctcaccgccaaggtcgtgtgggtcatgagcagcttcctcgtctgcgtcgccatggccttggtcaccgtcctcagctcctggtcgctccgcgacatcgggggcaacgtgcaggacgccgccgccgtggataagggcctcaagaccaccgcgctcgccatcttcgtcttcctcggcttcncattcgcggtcctatgcagcgttccgtccgccgtgacggcacagctggcggcggccaagggcggccggcaagggctgtgcacgggggtcctca

SEQ ID NO: 274273 - DNA, 702 bp, Zea mays
ctccttcgtcggcacggaggagtacgtggcgccagagatggtgcgcggcgagggccacggcttcgccgtcgactggtgggccgtcggcgtgctcgcctacgagatggcgttcgggcggacgccgttcaagggccagaaccgcaaggagacgttccggaacgtgctgcagcaggagctcgagttcccgggggacacccggtggcggacgccggagctcgcggatctcatctcgggcctgctggagcgggacccgaggaggaggctcgggtacgccggcggcgccgacgaggtccgggcccacccgttcttcgccggcgtcgcgtgggacatgctcacggaggtgtccaggccgccttacatcccgccgccggccgacgaggacctcgcggacgtcgaagggttcgacgtgaggggccacttcaaggaccttcaccagccgccgcctcccaagtccgcgtcggagtcgtcctcgtccgagttctcgacggagttctgactgtgagctcgggctagcttcttttgcgctttggtcctcggtagattactatatttgtaaccagagggtcgagggtgtcggtactgtacatacatggagacggggatggtgctgtaaattcgacgtagagttggtgtggttgtgcaaacattttgggaagcgcgagggctcgccggcgcactgtgctcgaggcattttcttcgtgt

SEQ ID NO: 274274 - DNA, 828 bp, Zea mays
tcgcgggtcgatacaagactctacatcgcttcgctgattctcgtcgtcgccttggcgacgtgtacaaacaagtctgttgatgcccgcgtggtccaccccatcgtcaccctcgaggccgatggctcatctcccacctctggcgatggtcgtcgcctgatcagctccaccaaccaagatgaacttggagcgttatgccaacagatgcactacaagacgttgtgctccacgatgacgacactgcctggggtgactacgccagagcaactcttagatgcatccctgcggattacagcggtgaaggcagcgatggcggagatgaagctagacaatgcaataaaatcaggcagtgctcagggtaacccgatgatgtcgtcgctaaagacatgcaaggagagctacgcgtcgctggtagactccatcaataccacgcggaacacgctcaaaagcggcggcagcaatgcagacctcatgtcggagctatccgcggcggacaccttcgccaccgactgcggggacaccttcgacgagcgaccagacctcaactcacccatacccggtgcgcagcgccacgtcaaccgcctcatcagcaactgccttgacctagcagccaccattaaggaacaaccctagatgcctatgatgtggacactgacagaaatttatctacaactggctgaagaagaaacagtcccacatcctacttcaaatttacgacatgtctgcacatactaataattgtgtggcttatcgattttggctctttttatatcctttgatattgctggggcatacaaagcaatcatcggttattaatacgtggatacgtgt

SEQ ID NO: 274275 - DNA, 504 bp, Zea mays
  unsure (1)..(504): unsure at all n locations
cgcgcatcccacaaccaccgaccaacctacgtcctaatcctccgctgctcgggtataaaaatgatgatgcctctgaaggaaagccataccaggttcttgcattcctgtcagatcccactgaaacaggtctgaagagaagcgctcgacgtggtgcaggtctgtcatattctgtggtgtagttcaagcataagccattacagggaggctcgtcttcaggatgcaagccttttcattatgatgaaggcatacgagatgaaggtgtaatctaaggatgacatgaataaacgccgaagctaccgccagatcgatagcttcggctcatgatgaagatgaagtatgatggtgatgctgaccgaaggggaaaaaaagactatttagtccttaataatttgtattttgatcataagtaaatattggggatataaatgtacttttacctgngcttgggctgcgtcncgtgcctataaataggtgaacggtagcaacatactgttcacactgatt

SEQ ID NO: 274276 - DNA, 1410 bp, Zea mays
tgtttctgcgaagagtactgactctctcaagctagcgtcaaacgggatgaaagaatgggatcagagacatgcaaccccaaggatgactgactgagacggaaactgagctcatggagctcttaagctatatgattagcggcaaggtggtatctactgagcccactcttctgctggatatcttgatggctgccgacaaatacgaggttgtttcatgcatgaggtactgcagccagttgctcacaagcttaccgatgaccacagaatctgcacttctctacctagatctcccttgctcaatttcaatggcagcagcagttcaacctctgacagatgcagctaaggatttccttgctgtaaaatacaaggatttgactaagttccaagatgaagtgatgaacatccctcttgctggaatcgaagccatcttgtcaagtaatgacctccaggtggcatctgaagataccatctatgacttcttgctcagatgggcccgtgcacaatacccgaaatcagaagagagacgtgaggtccttagttctcggctgctccctcttgtgcgattcagtcatatgacgtgtaggaagctgcggaaggtcctagcctgcacagatatagaccacgagcaagcaaccaagtgtgtcaccgaggctcttctgttcaaagctgatgcaccacaccggcaacgagctcttgcagcggacgcaataacctgccggaaattcgccgagcgggcttacaagtacagaccactcaaagttgttgagtttgatcggccctacccacagtgcatagcatacttggatctcaagcgcgacgagtgctctcgactctttcctgcagggcggatatactcgcaagcgttccaccttgcagggcagggtttcttcctctcggctcactgtaacatggagcagcaaagcgcgttctactgcttcgggctcttcctggggatgcaagagaagggctccacgagtgtgacagtggactacgagttcgctgcaaggacgagaccatccggcgagtttgtgagcaagtacaagggtaactacacattcaccggtggaaaggctgttggatacaggaatctctttgcaatcccatggcagaagttcttggccgatgacagcctcttcttcgtggatgggatgctgcatctgagagccgagcttacgataaagcaaccctagagcaatggtctctgtatagtggtagttgttacgacagatgaaaaagatatcggatgggaaacctcacgagttccagttcgctgcaagtttccagatttgccggtatctcactgccaatgagcttgttgcctccgtaacggcgcagggtgtataatggcttatttattcctagtatatacaaatacaagttgatgaaaaaaaaaaaaaaaagggcggcccccga

SEQ ID NO: 274277 - DNA, 441 bp, Zea mays
acccacgcatccgcccacgcgtccggctgttgctacagtcctaggaatgatgctatatggcacatacgcaagcgtgcatgtctatgcatatggaccaggtccctgtgtgggctttgtgagagcgcgcggcatgttctgcattttgtcacaaccattatttgccatgatgaatttccctctcgcctttcaatcaattcgactcccaggctacgatctgctgcaataagtgctctttcagataactctccagctgatacagcaatgatacaaaagctcgctcgacgaattttgcatgtgaacaggtatcatgataatggtcctgacgatggcataatccagggctatgctgatcatacaagaccagcagatacaacagtaccgaatgacagacaaatttctcatcagattccattatgcaatactgaactagacctccacaat

SEQ ID NO: 274278 - DNA, 394 bp, Zea mays
acccacgagtccgtggaaagcgaggcgttttgttttctcccgtgctccccctcccggggaaggggcaacgagaaatcgaacccacacgcaacgcgacgcctccacccgctcgcctagtccagaatccagatccagcgcccgcatctctctctctcgcgcgcgcgcgcgagcgcgatgagctgccgcgacgggcgatcgtgctagcggtaacagcgagcggtgcgcgagggcggagtgggagtgtggatccgaggggcggcaaatctggcaggcgccgcggtggggctgcgggcgcgggggagggcggggggctgggcggacggcggggagggaggggaggactgcggtaggctcaggccctggcgcaggaggctgctcgcgtccatggcgctct

SEQ ID NO: 274279 - DNA, 519 bp, Zea mays
cttttcttttgacagccaccacacactagagagagagaaggagaacgcgcgtcgtatatgggtcaagaagaggccgcggcagcgaacggcaccggcggcaggccgcacgccgtggtgatgccgtacccgctgcagggccacgtgatcccggcggtgcacctggcgctgcggctggccgagcgcgggttcgcggtcaccttcatcaacacggagtccgtgcaccaccagatcggcgccggcggcgacatcttcgccggcgtgcgcgcgcgggggggagcgacgacgacggaggagctggacgtgcggtacgagctggtgagcgacggcttcccgctgggcttcgaccggtcgctgaaccacgaccagttcatggagggcgtcctgcacgtgctcccggcccacgtcgaggacctcctccgccgccgcgtcctcgtggacccggccaccacgtgcctcgtcgtcgacaccgtcttcgtgtggccggccacgctggcccggaagctgggcgttccgtacgtg

SEQ ID NO: 274280 - DNA, 214 bp, Zea mays
gacacttgacagccaccacacactagagagagagatggagatcgcgcgtcgtatatgggtcaagaagaggccgtggcagcgaacggcaccggcaccggcgtcggccgcggcaggccgcacgccgtggtgttgccgtacccgctgcagggccacgtgatcccggcggtgcacctggcgctgctgctggccgagcgcgggttcgcggtcaccttca

SEQ ID NO: 274281 - DNA, 841 bp, Zea mays
aggggtggcgcagggcaggattaggcagggcagcgccgcgccggccggaccgcccgtccacgagccagggactttcggccatgggggacggtggtgctgacgacgcctcctcgccgccgccgcatgacgggggcttctcctacctcgccgtcttccacaactaccccctcgtcgccgccctgctcggcttcgccgtcgcgcagtccatcaagttcttcctcacatggtacaaggagaacaggtgggatcccaagcagcttatcggctctggtggcatgccatcatcacattctgccacggttacagcactagcagtagcgattgggttgcaagatggctttaactgctccctctttgcaacagcaactatatttgcaagtgtggtaatgtacgatgcttctggtatcagattgcatgctggaaagcaagcagcggtactgaatcaaatagtttgtgaacttccttctgaacaccccttgtctgagacaagaccactgcgagaacttttaggccatacaccaacccaggtggttgctggtgcattgcttgggtgtacaatagccacagcaggacaattattcctttgaactacgaaggtgcggcagaaatgttgtagcatttgtatcgcagggacttgagaagaagtttctccagtgttctgctactttaggtattggtaagatttgcaagttggtgctgtagtgttgttgaatgttgtatgttctgatggaatgtggttatatgtcaaaaaggtgacgttcacaggattgctgtacagaacattgttcatggttatgattgatgaaatctaagatgagatagaaaaaaaaaaaaaaagcaa

SEQ ID NO: 274282 - DNA, 1058 bp, Zea mays
cggacgcgtgggcggacgcgtgggatctacttggtacaccttcagcagagtctatctccaagataaggaatgagaaagctcgacgatacatgaacaatatgaggaaaaagcctcgggttccctttactaaaaagtttccagggatagatcctatggctctccatttgcttgaacgtcttcttgcttttgatcctaaggaacgaccaagtgctgctgaggccctggcagatccatactttaatggattagcaaataatgaacgtgaacccatagcacaacctatctcaaaacttgaatttgagtttgagaagcggaaactggccaaagatgatgtccgagaattgatttaccgagagattttggagtaccatcctcaaatgctacaagaatacctacaaggagcagaccacaatcagatgaccttcatgtatccaagtggggtggatcgcttcaggcgccaatttgctcatttggaagaaggtactgcaaagggtgaaaaacacagtccacagctgcgacagaatgtttctttgccaagggaaagagtaattggcaataaacatggagatggcaatacaggtgataagctagcgcatgcctcagtgacggatggcatcagccaaccgagcttgagtgagagaagctttctgaagagtgaaagcatcagtgcttccaagtgtataggtgaaaaaccgaagcatgtcaaagatggagaatctgttttagagagcgtggatgaaacagtcgatgatttgtcgaagaaaattcctcaactgaaaacctgatttttctcaagttcactggagcaatgaatagctcgtagtatggcacgttaggttctcaagacgatggacctacggcaaaggtctatagccaatgagaccacaagttctaatgccagtaattctgttgtgatgtaaatttcctcccgtttgtgtttgtacttcgcgactgcaaacaacctgtttctgactaaatggctcgtgttttcctccgtggagccatcaccatattctgtaaattttcagttggaagtgaatcttcagctgcagaggcat

SEQ ID NO: 274283 - DNA, 944 bp, Zea mays
tcgagagatccgccgattccgatgcatctgcgtatttcgacaaggaagagcagaaatccggcgattctgacgccgccacgtctgttgacaaccagcagaagcagaagtaaggacaactccggtgattatttcgacaaggaaaaggaggagaaccccgaggaggacgctgcgcccgtcgacgtctccgcggacggcgtgtatgtgcctctcaaggaggagaaatccggcgaagacgccacgccggtcgacgtctccaacaccaccggcaaatacgtatcttcttcttccaaggcaaacggcaagcccacgggaggtcagcccgcagagagctccaccaccgccaccgcggatgcgtacgcgtctccaaagcagaaagtcgtcagcagccagcccatggccagcgccgctcctgacgagcttccgctggcggccaagagctccaccacctccgacgcgtacgcatctccaaggcagcagcaggtcgccagcagccagcccatgtctggtggcgctcccgacgagcttccaccggtggccaagacctctgccacgcccgaaccgtacgcatctctgaacgtcgccggcggcgggcagcccaacgagccggcggcggggaggccgccgaagctgtcgatggagacgttctcggggatgatcaagaggccgttcgccaagttcctgagcccggtgatcaagggcgtgtgcgccaagacggagtacccggaggactgcgagtcgtcgatcgggggcctcccgggggccgcgtcggcggcggccacggacagcgtgggcgtgctgaagctggccatggaggcggtgcggcagaaggccatcgaggcgatgaacgcggccacggacaggatgaacgcgccgggcacggacccgacgaccaacgaggcgctcgactcgtgcacgtcgtcgtacagcgacatcaagacgagcct

SEQ ID NO: 274284 - DNA, 741 bp, Zea mays
acactcctctagcttgactcgtagtacgacgagctgtgcatgctcacggtgccgcacggccacctcaagtcgtccaacatcctgctcgacggccactacgagccgctgctgacggactacgcgctggtgcctgtgatgaaccagtcgcacgccgcgcagctcatggtggccttcaagtccccggagcggaagcagttcggccgctcgtccaagaagagcgatgtctggtgcctcggcctgctcatcctcgagatgctcaccgggaagccgccgacctacgacctgcccaaggcggcgggggcggtgccgtcggccgaatcgttgtcgtcaccgcagaaaccgggtccggcggcgggcaacaccgacctggtgaccgtcgtggggtcgacgccggagggcgagtggctgaacaccgtggtggaccgggacctgcggggcgaggaggaggaggacaaggaggagatggtgaagctgatcagggtcggcatggcgtgctgcgagagcaacgtggacaaccggtgggagctcaagaccgccatcgacaggatcgaggagctcaaggcgaaggagcgccccgacgaggagcacgcgacggtgatcgaccaggactacagcgatgttgccctcaactgatcatcgacacgaaccggccgggaatcgatcgatacggagggttgtgcgcaagctgatgatatgagcccaaaatgtgatgacctgcatgcatgccgagaccctaaacat

SEQ ID NO: 274285 - DNA, 1075 bp, Zea mays
gggcagacacgagggagcgcgtggggggagagggcatggtctctctcgtcccggcagtcccgtctcaagcaaaagctctctcctcttcttccgctcagtgcaccaatcactgcaacatactggcctgaggtcattgagttggtgaaagggaaggagggggtatcatgggcatctcatccaagtggattaaatccttggttggcataaggaagcaagaaaaagcgcagaatgcagaaaagcaagaaaaagggtggaacgctgagagcagtgaaactaagagctctgctaatcaatcactgcacaaacggaaacattctttggatcccggagctgcacttgcagtcgaagaaattacagtacaaagtgaagcattgactgataacaaaagcgcacaaatggtttcaaattcatttttttcagacagtacaccgcttgatgtgcaaatttctcaggctggacatcatagtaacgaagatttggccgcaactgttgtccagtctgcgtttcgagcgttcttggctaggcgtgctttacgagctttgaaaggaatagttctacttcaagcccttattaggggccattctgttagaaggcagacagcagagacgcttcagtgtatgcaagcgctggtaaaagcaaaagctcgtgtccgagcaagacaagttcgtgctgccttagaaaatcaagtggcacggaaaaagattcctgaacaagatgatcatgagaaccatgtcctagaagtcgagggaggctggtgtggcagtattggttccatggaggaaatgcaagctaaagcattgaaaagacgagaagctgctgctaagcgtgagagggcaatggcatatgctttgactcatcagcggcaagctggttccaagcaacaaaattctttgagcctgcaaggtcttgaacttggtgagaaccactgggagtcaaattggttagacaggtggatggctgtacgtccatgggagaacaggttacttgactgtaatgccaaagagagtctgccaacgcatgaagataaggatgaggaagcaaattctcagatcacaccaaagggtaagtgtcactt

SEQ ID NO: 274286 - DNA, 573 bp, Zea mays
gaaaatgagtaatccccctttaccctcaaaagaagggaagaaaaactaggctgttcagggcacatggataaaattcgcttctcttctctttcttcgttgcagcattgcatcctacaaaggtagcatcgtaaattctattcaaggatgctaatgtgctatcacctttaattcatcctctgaccaaaggctacatggtcctctaccgcaactatttctgcaaacatcgagctgatctcggagcccggagctgcaatctgacaacagtgcgtgtcgcaacaggagatcgggtcaccggaatcgatagaaaggacgattagactatggtgccccgaattaccaatcgagttacacgccacagatcgcggcttgggatttgggacgtccccaaatcagaaccccggacttagcggcacagggccagggatgaaaacggtcggaaacggtatttattcggtaatcagttttttagtcgtttttctttgattgcgaataaatagaatatagaatctatcatacaaatttgtattcctgtttttaacattcagtttgtaaagattcataaaagataaacct

SEQ ID NO: 274287 - DNA, 1117 bp, Zea mays
cccacgcgtccggcgcgccgccatgtcggagaccgaatcggcggcagcggcgccggtggctgcggctgaatcgaagcctcggcgactgcgggggcacaagaagggcgccgtcacctgctgcgtcgcctcctccgcccgccccggcggcgtcgcgtcctccggcgaggatggatgtctttgctggtttgatctgcgcaccaaagatgtacttttgaccatggaggcagcaaataaaccaatttcttcaatttgctttaaaccaggaaatgaagattttgtgtatatctctgctggaaatgaaatattgtcctttgatgttcgtatgggaactcaatcaaagccattagagacatataactacaatagagatgaaatcaatcagattgctgtcagctctaaaggttttctcgctgctgcagatgatagtggggatgttaagattgtcaataccattcagaaatgcctgtataaaagattaagggaagcccacacaagtatttgcagcagcgtgcaattcattccttggagaccttggacagcaattactgggggccttgactcaaagctcgctgcatgggatttctccaaaggacgaacactgttttctattgattatggatcacctgaattgcaaaacggcagttcttccggtagtgcagggcaatgtttcaaccctgcttttgttcattccgtagcagtttctgaagagggtattttgggagggctctacaaggtttgtgctgttgcaaggggggatggtgctgttgatgtggttgatcttgagtatgaactggcccctgcgaaatcgaagggacctcctcgggcagctattttgacaacgagatcaaaaggcgctgaacttggagatgggagctgcaatcaaagtcgagcgaaaagaatccatcttgattacaccatgggtggccatactgcagctgtgtcttgtgtagcattttcagcatttggtgagaaggtgaagttcctcatttcaggtggcaatgatgcatcagtgaagcttggggattggtcgaaggattttactctgaaacaaccagaaagttgattggttttgatattgatgtaagaaaaaggtaattgcttggtactgctccactga

SEQ ID NO: 274288 - DNA, 324 bp, Zea mays
cgtattgtgcttctttttttgtctgtggttgttttttttaaaaccgatgaatcatataattataagaagaaattgtatagaatgcaacaccggtctccacatttccctctatggtgtaatatagagaactccacgacgctatacatggtgtgccaccaattaaccggagttaattagtagcaagaaggattaattagcgccgtgcatgcatccatgcggcgatgggctggccagtaataattataattaaggagaagacacgaagcgtatagtacgcttaatcatttaagccgacttgttgcggttgtggtgctccggcttgcc

SEQ ID NO: 274289 - DNA, 424 bp, Zea mays
atttgtgtttgttgttgccgccgctgcttctcccgttgccaagcctccatccaattggatagtcgcttcgtgcggtcccgtcccctcgccggccggcggagctcacggcttgccgctgcattgccatcgtgtcacttgtacacaatccaccaatctgattggattcggggggatgcttgggcaaattcgagaatttgctcaggcattcgttccgattgcggctagctagctgatcgcttaatcacccgacgcgggcaaatttgcacggcgacgacgatgggcatcttgtgttgtttccagtcccacaccagcgatcacgctgttgcttcgtccccggctacctcttcgtcctctgccccctcgtcgtgccgaaacaacgatcgccgtgctccccccgagcggcaggcccccggcgaggagaaga

SEQ ID NO: 274290 - DNA, 446 bp, Zea mays
cccacgcgtccgcccacgcgtccgggcagccagcaggggaggaggacacgaatcgtagtcggcctcccgcccgccccggcaattgttgttgctgctgcgcgcagggcggttctggattgcggtctgccccacccacgaacaatccatggctccatctccgcctcggcgtgctgcgctcctcctcgccacggtgcttctgctggcggcggccgggtccacccccggcgccacggctgctggcatcttccaggtgcgccgcaagttcaccgccggggtgggagggggtgctggcgccaacatcagcgcccttcgcgcccacgatggcacccgtcacggccgcctcctcgcagccgccgacctccctcttggcggcctcggcctccccactgacactggcctctattacacggagatcaagctcgggacgccacccaagcactactacg

SEQ ID NO: 274291 - DNA, 977 bp, Zea mays
ctcgcgggtcgatacaagcctctaaagtgagtccatactgtcacggggtgggagggggtgctggcgccaacatcagcgcccttcgcgcccacgatggcacccgtcacggccgcctcctcgcagccgccgacctccctcttggcggcctcggcctccccactgacactggcctctattacacggagatcaagctcgggacgccacccaagcactactacgtccaggtcgacaccggcagcgacatcctctgggtcaactgcatcacctgcgagcaatgcccccacaagagcgggctcgggttagacttgacgctttacgaccccaaggcatcctcgaccgggagcatggtgatgtgcgatcaggcattctgtgcagccacctttggcggaaagctgccgaagtgcggcgccaatgtgccctgcgaatatagtgtcacctacggtgatggtagctcgacgataggttcctttgtcaccgatgcgctgcagtttgatcaggtgactagggatgggcagacacagccggctaatgccagcgtcattttcgggtgcggtgctcaacaaggtggggatttgggaagttcaaaccaagcccttgacggaattcttggttttggtgaggcaaatacatcaatgctatcacaactaactaccgctggtaaagtgaagaagatatttgcccattgtttggataccataaaaggaggtggaattttttctattggggatgtggtgcagccaaaagtaaaaacaacgccattgggtacccgaacaggccacactacaatgtgaaccttaagacaatcgatgttggtggcactactctacaactcccagctcatatttttgaaccaggagaaaaaaagggtaccataatcgacagtggtaccaccttgacataccttccagaattggttttcaaagaagtaatgctcgcggtatttaacaagcatcaggatataaccttccatgatgttc

SEQ ID NO: 274292 - DNA, 619 bp, Zea mays
ctgcctcgctcttccccctcctatttaccgcccgcgtcgaccgccgccgcacgccttcccacccccgcgcctccctcggccggcctgctccccgacgccggggggccccacaacgatccggccccggccccgcgcggtcacagcaagccgggacatggcgcgcggcggcatcgcccgcctactcgccacgctcctcctcttcctcctgctcgccacgcccctcgcagacggagcttccgaggcagaggcggcgggcctcgcgcagggcgcgtccgaggcggcggcgccggacgcgggcgcggacgcgcagcagcagcacctcctgccgcggcccctcgtcatcgagctcccgtcgtcgcgggccgaggacgaggacgagcccggcgccgacgccgtgccgccggacgtgcgctgcgccagctggcggctggcggcggaggccaacaacctcgcgccgtggagggcggtgccgccggagtgcgcgccgcacgtgcgggactacgtcaccggcgtcgcctaccgctccgacctcgacctcgtggcgcgggagtccgccgcctacgcgcgcgccgctgcgccgctcggggccgacgggcgcgacgcctgggtcttcgacgtc

SEQ ID NO: 274293 - DNA, 404 bp, Zea mays
acccacgcgtccggtgcaacctccgtggacgaagcattcgcctcgccttgatctccaaccccttccttccttgcttaggagagagagggaggagaggagaggaggaagaagatggagagggcggccccagtgaggagttcccacacctccacggccggcctactcgcgtggcctcaacccgatggcgccgcgtcgcaggcaccacgtcggcctaaccagccgacggaggaattcaggaaggtggtgttcggggggcaggtcaccgaggaggccgacggtctcaacaagacgaagatgaggacgacggcctccgcacccaagtcgaaggagacaacagggatcggcatgtttaaggccgagagcgccgccgccgccgtcacaactgcatcccgtgatcgccaagc

SEQ ID NO: 274294 - DNA, 431 bp, Zea mays
ctcgtcaaggagccgcacctcgacgagcttgagcagcggcggcacgccgtcctcctctatgatgagccgcacctcgaggggcaggagaactgcgcgctcgccatcggcctgctgggccgcgacccggagtgcgtcgagcagatggtccaggccggggtgtgcctcgccttcgccaaggtgctcaaggagggacccatgaaggtgcaggccatgctggcctgggccgtctcggagctcgccgccaaccaccccaagtgccaggacgccttcgcgcagcacaacgtcatccggctgctcgtcggccacctcgctttcgagacggtgcaggagcactccaagtacgccgtcacgtccaagatgtcgatacactccgtgctgatggacagaaagaacaacgccgcctctgcggttcagccggacttgctggatgc

SEQ ID NO: 274295 - DNA, 587 bp, Zea mays
  unsure (1)..(587): unsure at all n locations
cccacgcgtccgatttatttgtagaacaacactctgtgttggtgtcaagatctatagagcaggcatttctagtaagtataggcttgagatgtgatgtttaccttctttatctaaataacattattgtaatgagctgtcaatgttacaagactacagaacaaatgcactgcattctattttagctaataggtttattctttggaaaagaaaatgatgtgctaattagcttagttctggggacttcaggggttccatgccggcctaacctattggaacgacttgttagttgttattccattgcatccaaagtccacatgttattttgttaagctccataatgctgtggcatcgtgttgcgaaaacattaattgggagaacattagtacatgaatacttgatcttcatagttcagttttcgtgcatgtgcacttgttagttgcgaaaatgaactaatttcccttggngaaatangtatcccttggaaaaatggttttgccanactaccccttanaggaactaattcctggcatatggtgctcagtgggcagtgcatcaggactcgaaggaagcatagcatcatcggtttt

SEQ ID NO: 274296 - DNA, 576 bp, Zea mays
acccacgcgtccgcccggcgctccctttgccgtggtgggggcgggccggccgcggtgcgctcgtccgcgcccgcgcccgcgccgtccgcgcggcgctacggcccccgagccagtgggccgttcgggaccgggcggggccccccggcgcagcagcagcccgagtacccggaacaaggcggacctggaagacgtgctgcggacggtgggaacgttcccgcccatcgtcttcgccggcgaggcgcgcaccctcgaggagcgcctcgcggaggccgccgtcggccgggccttcctcctccagggcggcgactgcgccgagagcttcaaggagttcaacgccaacaacatcagggacaccttccgcgtcctcctgcaaatgtccgttgtgctcatgttcggaggccagatgcctgtcgtcaaggtgggaagaatggcaggtcagtttgcgaagcaaggtcagatggttttgaggagcgggatggattgaagttgccaagctatagaggggacaatatcaatggggatgcattcaatggggagtcaaggttgccagatccacaccgcatgataagggcgtac

SEQ ID NO: 274297 - DNA, 980 bp, Zea mays
cattgccgggggaaaagaaaacaaccgccccgcccccgcccccgcccctacgagcacgacggcctccggatgagggtcctgccgcgtcttttaccgtcagctggatgtcaaatcacaacgcgccctgtgacatccccaagccggcctccgtcgacgagttcctcgccaagaatggcaagaagaagaagtccttcatgtcgggcctcttccgcaagaaagggaggggcgcggacaagaagctgctctcgcggcgggacatcggcttcgatttggatggcagaagcggcgacaggatggacctcttggagacgtccgccgctgtccgcaagagcttctcagatcggcactgcacggcgcggatcgagaacctgaccctcagctgcctggattctcccgggagacccaacgtcgatacccgggaataccgggtgtttgtaggcacatggaatgtgggagggaagcctcctgacagcagcgttaacctcgaagagtttctgcagattgaaggattgcccgatatatacgtcttggggtttcaggagatcgtgcctctgaacgcgggcaacgtgctggtcgtggaggacaacgagccggcgggcaagtggatggagctcatctaccaggccctgaacaggccgccgccccaccaggacggccagtcctccggcgacgagctctcgccgccgccgtccacctcctcctcccactaccccagccggccgcaaggtgccgcccgcgaccccagcaacgccgccgccatccccaagacctccagcggcggcatgctctgcgcgcagaagccgccgccgccgctcaagatggtcagcaagtgctaccgcgtcgacaacgcgctggtgaagacgtgcacctgcatgtccgacccgtccaacatgcagctccgggcgcgtgagatgcgcgagttcctctgccgcgtccaggccgccgccgcctcgccgggccgcggcgccgacgacgacgcg

SEQ ID NO: 274298 - DNA, 1279 bp, Zea mays
cgcgcgatcgcccgccgcagcagcaatgcctccacctccgccgccggccgcccgcatcagggggcggtgcagcgcgctcagcttcgcggcggcgcgggaccgctgcttcagccaccgcttccgcagggcggggctgcgcccgctcgccgtgccgctccctggcccgggcccaggccccgacgccgacccggccaccaccgtccacatgtgggtgcccgcgggcccgccgccgcggaacccgctgctcctcctgcacggcttcggcgcctccgccacgtggcagtgggcgccctacctccgcccgctgatcgccgccggcttcgaccccatcgtgcccgacctcctcttcttcggcgcctcctgcacgcgcctccccgatcgctccgacgccgtcgaggtctccgccatcaaagccgccatggacgccatcggggtccccatgttcggcctcgtccgcgtcagctacggcggcttcgtcgcctaccggatggccgccatgttcccggaggcggtccgccgggtcgccctggtctgcgccggggtctgcctcgaggagagagacctggcggagggcctcttccccgtggccgggatcggggaggccgccgcgctgctcgtgccgcaccgcccggaggaggtgcgccgcctagtccgcctcaccttcgcgcgcccgcccctcatcatgccctcctgcttcctatgggactacatcaaggtgatgggctctgatcatatccaggagaaggctgagctgctatacgctttgattaacgggaggcaactctgtactcttccaaaattgacccagccgacgcttatagtctggggagagcaagatcgggtgttcccaatggagctggctcacagattgaatcggcatctagaggggaattctcgattagttgtcataaaaaatgctgggcacgcggtcaatatcgagaagcccagggaagtgtgccggagcatcattgagttcttcaaggagccggtcgctggagctgcaaatgcggacgacaaggtgtagtagcttccaccaatggcggacgtggacaggtcttcgctgggcatcggcagacggcgcacccgcttgtggcacgcaaacacaaggcagatacgtggcattgtacatctacatccctctgccattgttctgatgtacttaaagggtgtatgtagagtcattgcagtagcgattcataaagcatgtaacggggaacagggaaaccagagtggctcaaatccgagtgaaaccactgtgctgttgccgttctcggatccc

SEQ ID NO: 274299 - DNA, 516 bp, Zea mays
  unsure (1)..(516): unsure at all n locations
ggggaaggtgggcggctactggttcaaccagaaggccaacaaagagctcgacgacatggcctcgatctctagcagcatcggagatggagctaaatggatggtcaacaaagtcaaagggaagatgcagaaaccgctgccggagttcctcaaggagtacgacctcccagcaggcctgttcccgcaggacgcgacgaactacgagctgaacgaggacaccaagctcctgacggtgtacatcgcgtcgccgtgcgaggtgggctacaacgactcgtcggtgctgcgcttcgccaccaccgtgacggggtacctggagaaggggaggatgacccacgtcgagggcctcaagaccaagatcctcatctggaccaaggtgacggaggtacggaccgaggccaccaaggtgcacttcgccgccggcatgaacaagaccaggaaccgggacgcgtacgaggtcgtcagggacggcatcgncgtagacaagttctagcagaccttgtaattaggcgcgtaatataa

SEQ ID NO: 274300 - DNA, 708 bp, Zea mays
  unsure (1)..(708): unsure at all n locations
cggacgcgtgggttccgccgctcctgcagcctctcgtggacgacgcgggtggccatcgcgctcgacgtcgccaggggcctcgccttcctccacgggtccgaccgccccatcatctaccgggacttcaagagctccaacatcttgctcgacgcgaaattcaacgccaagctgtcggacttcgggctcgccaaggaagggccgatgggcggtgagacgcacgtgtccaccagggtcatgggcacctacggctacgccgcgccggagtacgtagccaccgggcacctgacggtgatgagcgacgtgtacggcttcggcgtggtgctgctggagatgctggtgggacggcgcgcgctggagccgagccgggcggggggccgcgacggcagcctggtggactgggcgcggcccatccttatccggcccaaaaagttggagcggatcctggaccggcggatgggcgaggtctgctcggagatgggcctgcagcgcgtggcccgcctcgcgtacgactgcctcagccagaaccccaaggtccggccctccatggccagggtcgtcaccacgctcgaggcagtcctcgccgccggtgccggtgccgccgacgccccgccgcggtgagaccggaggttgatgtaggtagtanggtcggcatacggattaattaggtgcgtacgggtatatgcttgggcggaggaggcatgtttaatt

SEQ ID NO: 274301 - DNA, 719 bp, Zea mays
gggccgacccaagcgtccacgccaacgccgatcgccacgccggaaacatactcgtccgcaagcacgacggcggcggaggcggaggcatgtcgctggttcccatcgaccatggatactgtctgccggagagcttcgaggactgcactttcgagtggctctactggcctcagtgccgggagcccttcagcgacgagacggtggagtacgtgcggtccctggacgcggaggaggacgtgactatgctgaggctccacgggtgggaggtgtcgcgcgagtgcgcgcgcacgctgcgcgtcgccaccatgctgctgaagaagggtgtggagaggggcctcaccgccttccacatcgggagcatcatgtgcagagagaccctgaccaaggagtccgccatcgaagagatcgtccgtgaggcggcggaacggggaggaggatgcgagactgtcttcttgcaggctgtctcggagatcatggaccgccgtctcgacgacatcaaagaacatgttagcctctagatatgcacatggctgacaaaataacgatgtaatcaactcaatggctaatgcaaagaatggtgtactatttcaaaaaaaaaaaaaaaaaaaaaaaaaaaaaaaaaaaaaaaaaaaaaaaagaaagaaaaacaaaaagataaaaaaaaaaaataaaaaaaaaaaaaaaaaaaaaaaaaaaaaaaaagggggggcccccctaaaggt

SEQ ID NO: 274302 - DNA, 413 bp, Zea mays
acccacgcgaccgcctcgatccgcagcgaggcccttgtgcaggcaagcggcggcgtccccgaagccccgaggaggcggcacttccaaggccggcgagcaagcgacgcccgtcgacgtgcgagtagcgacggcgacgcatgaggcgcgatgttcgatcgagcgacgtcacggaacgggcgacatgcgcgcagcgatgatcgcgcgtgacatcctctgatccggcgcatttttcttttcgtttattgtgttttatgcctaccacatgtattatttacgctaaaaactgtacgtttttatgctttaacacagagttcgtatatcagtttactgcatgcacatttgaaagacaattccttgatttgtgctgttcttaatttgcgcgcatgcaatggaaactcccccgattttgccat

SEQ ID NO: 274303 - DNA, 929 bp, Zea mays
cgggtccgccacgcgtccgcccacacgtccgagcgggttttctgcatacgacgtcctcaaacaaccctgggttaaaggaggacggcaagggccggacacgccgctggacaacgcggtcctcggccggctgaagcagttcacggccatgaaccagttcaagaaggcggcgctgcgggtcatcgcggggtgcctgtcggaggaggagatccgtgggctcaaggagatgttcaagagcatggactccgacagcagcggcaccatcaccgtggacgagctgcggagaaggctggccaacaagggcaccaagctgagcgaggccgaagtccagcagctcatggaagctgccgacgccgacgggaacgggacgatcgactacgaggagttcatcacggcgacgatgcacatgaaccggatggatcgcgacgagcacctctacaccgcgttccagtacttcgacaaggacaacagtggtacatcacgatggaagagctggagcaagccctgagggagaagggcctgctggacggccgagacatcaaggagatcgtggcggaagtggacgccgacaacgacgggcggatcaactacaccgagttcgcggcgatgatgaggaaaggagacccggagccgtccaaccccaagaagcggcgcgacatcgtcctgtagaggaggggcgtggagctcgggagcacgtcacgtacgtacggctgctggcaggaatcttcgtcttcgtggtggcggagaaattaagcagacgcgtgcgttccatctctggacatgtataatgttgcacgcgacgggaggagctgagggagtgaggggggagtgaccgcgcattattaatattatgaaaaatggcaaccgggtgtcggttattcttgtctgcatgtcgttactcggacgttatagtagaacgaactgttcgtact

SEQ ID NO: 274304 - DNA, 1357 bp, Zea mays
gtctcccctacggcttcacatccccatcaccgtcatcctctccggggggacggacgccggggcgcctccgccgccccgtcgccatgggcaactgctgcccgggctccggggatgcggagcccgcccccgctgcctccgccgatccctcctcccacctccaccccggcaccttgtccctcaaggccggcgcctcggcaggctcggcgcccacgcccacaaagcggcccgcgcctaccggcccggtcctgggacggcctatggaggacgtgcgcagcatctacactgtcggcaaggagctcgggcgtggccagttcggcgtcaccagcctgtgcacgcacaaggccaccggggagcgcttcgcgtgcaagaccatcgccaagcggaagctctccaccaaggaggacgtggaggacgtgcggcgcgaggtgcagatcatgtaccacctgtccggccagccgggcgtggtggagctcaagggcgcgtacgaggacaagggctccgtgcacctcgtcatggagctctgcgccggcggcgagctcttcgaccgcatcatcgccaggggccactacaccgagcgcgccgccgcgtccctgctccgcaccatcgtcgagatcgtgcacacctgccactccatgggcgtcatccaccgcgacctcaagcccgagaacttcctcctcctcagcaaggacgaggacgcgccgctcaaggccaccgacttcggcctctccgtcttcttcaaggaaggggaggtgttcagggacatcgtcggcagcgcctactacatcgcgccggaggtgctgaagcggagctacgggcccgaggccgacatatggagcgtcggcgtcatcgtctacatcctgctctccggcgttccgcccttctgggcagagtcggagcacggcatcttcaacgccatcctgagggggcaggtcgacttcaccagcgacccatggccgcgcatctcgcagggcgccaaggacctcgtcaggaagatgctcaaccctgaccccaagcagcggatttctgcatacgacgtcctcaaccatccgtggatcaaggaggacggcgaggcgccggacacgccgctggacaacgcggtcctcggccggctgaagcagttcagggccatgaaccagttcaagaaggcggcgctgcgggtcatcgcggggtgcctgtcggaggaggagatccgtgggctcaaggagatgttcaagagcatggactccgacagcagcggcaccatcaccgtggacgagctgcggagagggctggccaacaagggcaccaagctgagcgaggccgaagtccagcagctcatggaagctgtaaggatcaggatcatatatactagaaccga

SEQ ID NO: 274305 - DNA, 1662 bp, Zea mays
cggacgcgtggcgtgacgcgtgggggaaaatatgaagaggctgtacctgtgctgcatcgatccaatgagatccctgacatcgaggaaggccaggaacatgctctcgcaaagttttctggttgcatgcagttgggggacacctatggcatgctaggtcaaactgcacactcactgcaatggtatgcttctgggcttgaaatacaaaagcaaacattgggagagcaagacccaagggttggagagacttgtcggtacttagctgaggcccatgtgcaggcactacaactcgatgaagcacaaagattgtgtcagatagcccttgacatccacagggagcatcgcgagacggcctcactagaagaaacagctgataggaggctgatgggtctaatttgtgacactaagggtgatcacgaagctgccctggagcatctagtgatggccagcatgtccatggtagccaatggtcaggagacagaggtggcctcagtggattgcagcattggtgatatctacctctccctgggccggtatgatgaggctgtgtttgcttaccagaaagctctcactgtattcaagaccagcaaaggggagaaccatgcaactgtggcttctgttttcgtgcgcctagcagatctgtacaataagacggggaagctgagggagtcaaaatcctactgtgaaaacgccctaaaaatctaccaaaagcctattccagggacttctctggaagaaatcgccactggtctaactgacgtctcagccatatatgagacgatgaatgagcacgagcaagcgctcaagctacttcagaaggccttaaaaatgtacaacaactctgccggccagcagagcacgattgctggcattgaggctcagatgggcgtgctgcactacattttgggcaactatggcgagtcctacgactccttcaagagcgcaattgcaaagctccgcacttgtggcgagaagaagtctgccttcttcgggattgccctgaaccagatggggctggcatgtgttcagaggtattcgataaacgaagcagcagaattgttcgaggaagctagaactgttctggaacaagaatacgggccttaccatccggatactttaggagtctacagtaatcttgctggaacttatgacgcgatgggaaggctggatgaggccatcgagatcttggaatatgtggttggaatgcgcgaggagaagctaggtacggcaaacccagacgttgacgacgagaagcggaggcttggggagctattgaaggaggctggccgggtgcgaagcagaaaggcgaaatccctggagaatctgctcgagaccaacccgtatatcgccaccaagagaaatgccgttgctgcatgagtcactctgtcctcagatgacacggtattgtgatggaaggcgaggattgttactaaggtattcgtattcatttggtttgttcagatggggggtaacgggagtagtggtgtttacatatttggaaatatgaaaatgcttaaattggtcgttgtaaagtttcaaatgctactgtttctccttttctactacctctctgaggtgcgagtttgcattcgtcagttgtacctgggtttttattacatacatgaaaaaaaaatcaatgacacacagcaaattcgatccctactt

SEQ ID NO: 274306 - DNA, 817 bp, Zea mays
cggacgcgtgggcggacgcgtggggtttttgtgcgcatagcggatctgtacaataagtcagggaagctgaagggagtcaaaatcgtactgtgaaaacgctctcaaaatttaccaaaaacctattccagggacttctctggaagaaattgccactggtttaactgatgtttcagccatatatgagacgatgaatgagcatgagcaagcactcaagttacttcagaaggccttaaaaatgtacaacaattctgctggccaacagagcacaattgctggaattgaggctcagatgggtgtcttgcactatattttgggcaattatggcgagtcatatgattccttcaagagtgcgattgcaaagctccgcacctgtggcgagaagaagtctgccttcttcgggattgccctgaaccagatggggctggcatgtgttcagaggtattcgataaacgaagcagcagaattgttcgaggaagctagaactgttctggaacaagaatacgggccataccatccggatactttaggagtctacagtaatcttgctggaacttatgacgcgatgggaaggtaaactccctacttctcgaacccaattcattgtctcaactaggtgctgatgactgtctgtgtggctgcatgcataatgatttgcattccaatcagtgatttgctggaaacagtaggtggcatgtagggtaaaggtactatggcaagtggggattctttggtcttagtctactcctcttacagctaggctcatgattagcatctatcaccagctcttgctactccaattagttgatcagataccggt

SEQ ID NO: 274307 - DNA, 381 bp, Zea mays
ggccatcgagatcttggaatatgttgttggaatgcgcgaggagaagctaggtacggcaaacccagatgtcgacgacgagaagcggaggcttggggagctattgaaggaggctggccgggtgcgaagcagaaaggcaaagtccctggagaatctgctcgagaccaatcccatatatcgcccccaagagaaatgcagttgctgcatgaatccctgttctgaagatgaaaggccaggattgttactaaggtattcaattggttcgttcagatgggggtaacgggaatattggtgcttccctattaagaaaatatgaaatgatcaaatccctggtctcaaattctttgctgtaaagctttcaaatactattaccgttacatgtac

SEQ ID NO: 274308 - DNA, 994 bp, Zea mays
ctagcgttgtgctattttgcagtttctcataatgaagctgcattaaacttgttgaggaaatctttgaataagaatgagagtccaaatgacataatggccctcctgttagctgctaagatatgtagttccaataatcttctttcttctgagggtgtagagtatgcaaagagagcagtcagagatgccgaatcatcagatgggcatttaaagagtgtggccctccatgttctggggagttgcctgtccaggaagtctaaggttgcttcatctgatcaccaaaggtctgtcttgcaggctgaggctttgaagtcactcaatgaggcaatttctcttgaccgtcacaacccagaattattatttgaattggggatagagtatgctgagcagcggaatatgcatgctgccttgaaatgtgcaaaggagttcattgatgtcactggtggatctgtctctaaaggctggaggttgctattgttggttctttctgcacaacaaaggtattcagaagctgaagttgtaactgatgctgcattagatgagaccgcgaagtgggaacaagggccattgcttagaataagggctaaactgaaggttgctcaagcattgcctatggaagcagttgaagcatatcgcacccttcttgctcttgttcaggcacaacggaaggcttatggatctgtcaaaaatggcacagaggataatgaggataaagtgagggaagttgaagtttggcatggtcttgccaacctgtactctagtctttcctattggagagatgcagaaatttgcttacagaaggctaaagccctcaaaacatactctgcgacaacccttcatgtagaaggaaacaaacacgaactgcatgagaaggtacaggacgcggtggctgcatacttcaatgccatctctatggaggtagagcacgtcccatccaaggtctctatcggtgctctcctctctaaacaagggcccaagttcctaccagtggcgaggt

SEQ ID NO: 274309 - DNA, 494 bp, Zea mays
cccacgcatccgaccatgcacgcgcgcacaaggcacgcccagcaacacaaaagttccaaggcctccccttcctcggccggcgccggggcaggaaggcaggccgggtgtcctgcctcccttgcgcgcgctctcacgacccaccccgtcgtgcgtcatcgagctccggcgggcgggccatgcacgcgtccagctagctcacacagcgccgtctcgaccggctgccggtgctccacccggcccgcgtccacatcacggcgggcgggcgcgcgcgtgaacggtttcctctccgcatgaccctgtgatggtcggtgggttcctgcggcgcggccacagcctcgacaggctcctgtcgaggaggcgccgggccgtttcgcccagcccctcgttctcgtcctcctcctccacgccgtcgtctccgcgtggcagcagcgtcaggagcggcatgatggcagaggacgacgacgacgcgcccaccaccgtggcggcgccaccgc

SEQ ID NO: 274310 - DNA, 512 bp, Zea mays
gtccacggcgacgatctgcagcggcgatggctcggcgaccggacgacctagcgttggccgccatcacctttgcgatcgtcgccttgtgcgcgcggtatgcatcggccgtgggcactacaccccagtcaaccttcagctacaaggagggtgaccctaccgggcctacaaaatgggccacattgcagaaggactgggatgtctgtgacagcggcaccgagcagtccccgatcgacgtcgccaaggtggaggtctctgaggatttagacccgctgcagcagacctacgagcctggcgacgccgtcatgcacaaccggctccacgatttcatgctgaactggacaggagggaacggcggcctgacaatcgaagggaagaagtacaagctgaagcaggtgcactggcacgctccctctgagcacaccgtcaacggcacccgctttgacgcggagatgcacatggtccacgaggactccaccgacgccaagtcgaaagccgtcgtcgcggtgctgttc

SEQ ID NO: 274311 - DNA, 464 bp, Zea mays
tcacgggtcgatacacgcctctaaaatccacttcacttcgtcttctttctatatacatatatagacctaataagaacaaagacgtacgataacctgcttattttgcgacccatcccgttcccacgcaaaggcgccgagcgtgatctccgtccgtgccgccatggcctcgcaccgggcgctgctgctgctgctcctcgccgccgcgctcgtcgctgcgctggcctctgtcgcatccgccgacgacgccaacgccatgcccaccatcctgacccccgtggcgcataccccgctggggtccttcgacggcgacaagccggcctctgacgacgacgccgtcgacgacgacgaggacgccgcccctgtcggcgcgcccaacggggccaccatgactgagcccagggacgacgtccccgccccgcccggcgccgaagcaaccgcgggcggcgccgccgccagcaacgcgc

SEQ ID NO: 274312 - DNA, 508 bp, Zea mays
  unsure (1)..(508): unsure at all n locations
gaagggcctccgcgacccggtgctcccgatcgccgaggggcagcacgggacgcacacgtccagcaccgcggccggcgcgttcgtgcccaacgccagcgtcttcggcaacgggctcggcacggcggccggcatggccccgcgcgcgcacatcgcgttctaccaggtgtgctacgaggacaagggctgcgaccgggacgacatactggcagcggtggacgacgccatcggggacggcgtcgacatcctgtcgctgtcgcttggccacgaggatgccatcgacttctcggacgaccccgtctcgctcgccgggtacacggcgatcctcaacggcgtgttcatctgcgccgcggcgggcaacaccggcccgtcncccgcgaccctcgtcaacgaggcgccgtggctgctcaccgtgggcggccaccaccaccgaacaggaggttcttggccttcgtaaagctaggggacacggtccatattgacggcgattccctcaaggaccctaacacaa

SEQ ID NO: 274313 - DNA, 447 bp, Zea mays
cccacgcgtccgcccacgcgtccgcccacccacccggccgcccgcattctcttcccttccctgagcaaagagaagtagccacaagcatgtctggcatcatcgacaagatccaggagacgctccacatcgggggcgaccacaaggaggagcacgagcacaagaagggcgaggagcaccacaagaagggcgaggagcaccacaagaaggacgacggggagcacaaggagggcatcgtggagaagatcaaggacaagatcaccggcgagcacggcgacaagtccggcgaccacaaggacaaagaccataaggagaagaaagataagaagaagaagaaagagaagaagcacggcgagggccatgaccatggtgatggtgacggcggccacagcagcagcagcagcgacagcgactgatctcgcctcgccgagcgccgtacgcacatatgca

SEQ ID NO: 274314 - DNA, 972 bp, Zea mays
ggtgtctcgtggcggcggcggcctctggggcagggttgcaggtgccgccgcggcgggctggaccaggaagctctggaacgtgcttctcgccctggggaacattgccttcgcctacactttcgctgaagtattgatcgagatccaggatacactcaagtcaccaccaccggagaacaggacgatgaagaaggcagcaatgtacgggatcggagccaccaccatcttctacatctccgtcggctgcgctgggtacgccgcgttcggttcgaatgctccgggcaacatcttggcggcaggcgggctgggtcccttgtggctcgtcgacattgccaacatgtgcctcatcctccacctgatcggtgcataccacgtatacgctcagcctgtcttcgcttcggttgagaggtgggccgcctcacggtggccagaagccaagttcatgagcagcgcatacaccgtgtccgtcagcatccccctcttgcagagaggatcggtcaccgtcgcgccgcacaagctcgtcctgaggaccgccatagtcggcgcgacgactgcggtggcgctggcgatacccttcttcaacgccgtgctggggctcctcggcgcgttcagcttctggccgctcacggtctacttccccatcagcatgcacatcgcccagggcaagatcgccagggggaccaagtggtggtgccttctgcaggctctgagcatggtttgcttggtgatctcggtggccgtgggtgtaggctctgtcactgacattgtcgatagcctcaaggcctcttctagccctttcaaaattgtaggctaacaggttactgtagtcatgtacaatgctctgagccgatcgtgcgttgaggtttaaaagaactgtggtgcgcgaattcgcgtcaaatatcgaaacttctcgattgtattttcagagagtatttattgaatttgatcagtaagcatcattttgcttgtgtgagg

SEQ ID NO: 274315 - DNA, 1468 bp, Zea mays
gctgggtgtcaaatggtgttgttggctcaccatcatttgcagcttatgatcaacgttatgaggttttgcttggaaatcttcgtggcttggtctcaagggagcatatagataaaagtatttcctcctacaaatactggaaatattctgttaatgagcatgggactaaagatatgccagcaattattgaggatattcacaagatcaaaatatcggaacttggcggaagtcatcctcaatcagcagaggggacaggagatcaaaatgataagttaaaaagtttggaagtacaggcttcacaggaagacagtttagaagaccaaccctacaagctttgtgctgtatgtcacagcctgggtggtgcagttatgctgatgtatgtggttacttcaaggatcacacaaaagccccacagattgtctagactggtcctgctatctcctgcaggttttcatgaggattccaatgtggtattcagtatggtagagaagctcatcttgtttgttggtccagtgcttgcaccacttattcctggactttacataccaactcggttctttaggatgcttctgaacaaattagcaagggatttccacaattatccagctttgggtggacttgtccagacccttatgggctatgtcgttggcggtgacagttcaaattgggtaggagtgctcggtttgccccactacaacatggatgacatgcctggtgtgtcatttcatgttgcgcttcaccttgcccagataaagagggcaaagaagttccaaatgtatgactacggtagctctgcagcacatattgaagcgtacggaacaccggaaccattggacttgggagctcattatggtctcattgacattcctgtggacttagtcgctgggcagagggacagagttatctcaccatccatggtaaagaagcactacaagctgatgcggaagtcacgggtggaggtttcatacaatgagtttgagtatgctcatttggatttcacattctcgcatagggaggagcttttgtcctatgttatgtcccgcctacttttagtgactgatccaggtaaaggccgtatcaagcagaccaccgtgcgactcaggaggcagaagaaagttcagtcagagattgaggagagcattgagtgcagagccaaggaggaatctgatgaactagctggacatttggagtgatgtggagcctgcaggttaagagtgtgttgtaagtttgtgaataggatactcgtgtcgtctctcatatgttatacaccatgtggaagatcaggggagaataggtctctgtttctagtatcatgttcatggggatcgctttttttaacccctgtaagtaacagtagaggtatatgcatcgactccgttgagcattaggtgtcctgctcttttaagtatcgagaacgaggagaatggtcaggaaccggatgtttacctggcaaatatccagtgttcttgcg

SEQ ID NO: 274316 - DNA, 874 bp, Zea mays
ctcttctccccgaggcaccccctcctccctgcggggcgtttcgacaaccacgcggccggggagggtaatccaagcgagggcgagccatcaccgtgctgttcctcgtttgctggcgcctcgaagagcctcctccgttccctctccctcgaccgatcggccggtctcacggggcatttcgcggggctggtcgatctctccccgctcattctgtcaagggattggtcggttgccgattccgtgcggccggataactcggatttattcagtttttcgggttcgctacatgcgtgtgcgatgccggccagctccctcccggcgtcccccgacgccaccggcgacattggcgccgcgctcgagctcgatctcgaggatctcgccgccggcggcggcacggactgcatcggcgcgctcgcctgcggcaggagcagcttctcctaccggcggctcccggagccccgcctccgcctcaccggtcagaagcttgacgactccttcttcgacattgaaatcgcgcggtcggccacggtgtgggagctcaaggtgaccatagagaacttgttctccgccctctatgacgacacccagaagaccatctcttggaatcacgtgtggagtcacttctgcttatgcttcaaggacgagagactgacggatgacaaggcaacattgcgtgggtttggtataagagatggtgatgtggtacatgcacttccttaaacagccataggttcttggatgcatttttccttttagtgccgactaattctgctctgtcttgtgagatgagccagaatattacttaccctgcttcatttaccaaatagaagttcctggatgcattttgccttttagtgccgactaattctgctctgtc

SEQ ID NO: 274317 - DNA, 482 bp, Zea mays
cgaccaaccaccccgcgctcccgccccacgcacgccctcgcgctcaccggcgccccgcccctcccccacgctggccgcacccgcaatggggtgcgcggcgtcggccgccaacggggccgggccccggcggcgggggtgggcgcgggcgcggatgcggcggtacagcgaggcgtccacctcgggtctgccgccgccgccgccgccgccgcaggaggcggcggagtcgtcgtccgggggcaggaggcgagggcgcaaggtggcgccggagcccaaggagccggcggaggaggggaccgccgcgctgccgccgatgcccggctcgcccagcttcaggtactactgccagaagaagacggcggccgtcgacaggatcgtggccgacgccgacgccgccgacgccgatgactccgtcagggtcagagcgacggcgcctcacctgaacaacaggtgcaaaatcacggcgaccaaggcacacgattcta

SEQ ID NO: 274318 - DNA, 1695 bp, Zea mays
agcagataacgtggcagcattattattgcaaataacacaatgaaactcttaacgagaatagcctgattactagtacaacagcctgtgaaaattccgtaactgcatatgtttattcctttgctcgtcccacgagcaattcatcactagacacagtgcactgcatacacgtacgggacgcacacgttacacatgaatgaatacgtatatacacatcgcatttacctgttcctgtatgcgaatgtgctgcacgactggagtgtacactacacagtacatacactgcaatggcagtacgtactagtacgggctcgtcgatcgccgtcacgcggtgccgtcgacgcgcgccttggtgacgccggcgcaggcgtcgacgaagtcgccgtcgatgaagtcggtggagaagacctggagcttgtcgccgaggcccttggcgaagacctcggcgatgaacatccgcgcgtagccgtggatccgcctcgtcacgggccacacgcacaccaccgggttgtcgggcctgggcgtcaccgtgttctccacccggtacaagaacccgcggcccgccaccggcggctgctgccccaggaacttgaggttgctctcgaacttggtctccggcaggtccgtgtcgatccagttgtccttgaggtagccggcgctccacagcgggtccccgggcctgggcggcggcgacttgcggggcttccagacgcagatgacccgccgcgggagcagctccgcgacggtcctgtggaacaccgcctcgtcctgcgggatcaggtgctcgcccagcttgtcggccaggaacctgtcgaaccccggcgggtcctcgtgcccgaactcggtgcggatctccaggatgagcagctcggactcggtctcgcccaggaaccggctcacgtcgtccagcaccacgtccacggggtacgtcgccaggatgccgtggcagacccggcgctcctcctgcacgcgcacgtcgacgacgcgcgtgcccatggccagctgctcgtacacggacatggactggcactgcgcgaaggggcgggtcaccagcggcacgccgatcttgttggtggccgagtcgtgcgtgccgggccacaccacctggtgcacgcgcagcttgtcggcgcccagctccgccatccaccgcttccggtccgccggccggtgctccgaccccgggaacgtgtcgccggaggaggacagccgcgtggccagcgcccgcttctcggtggtcaccagcttccgccggtccacctgcttcgagaagaaggcgcccatggcttccagcgggttgctgctgctgttggaattggaggaagccatggatggataaattataaagggagtcctgtgcctcgagctcagacctggacctggacgtcgctgtaagctggagatcgattataaatagcagcaagacaatcaaggaagaaaaatatcagtgcgtcgtgggattagccaacatgtggcgatggtttttttgtaggggcttggctgatcgatgattgatccggagaggagggaagtgttcttgcgacctccgctgctgctttcggttaccttccattattggaatggatggtagaattggcgccgttaggtgtggacgtgtgctgatgccaggccggtccagaccgagatttttcttttcttttctttagcaattgccaattggcatatatctctatccaaatt

SEQ ID NO: 274319 - DNA, 496 bp, Zea mays
  unsure (1)..(496): unsure at all n locations
ttnntttttatttttttttngggnnnnnnnntttttttccggaactgcatatgtttattcctttgctcgtcccacgagcaattcatcactagacacagtgcactgcatacacgtacgggacgcacacgttacacatgaatgaatacgtatatacacatcgcatttacctgttcctgtatgcaaatatactgcacgactggagtgtacactacacagtacatacactgcaatggcagtacggccgcaacactggcacacgtacgtacgtacgggctcgtcgatcgaagccgtcacgtcacgcggtgccatcgacgcgcgccttggtgactccggcgcaggcgtcgacgaagtcgccgtcgatgaagtcggtggagaagacctgcagcttgtcgccgaggcccttggcgaaggcctcggcgatgaagagccgcgcgcacccgtggatccgcttcgtgacgggcccacgcgtccgcccacgcgtccgcccacgcgtccg

SEQ ID NO: 274320 - DNA, 707 bp, Zea mays
gtccgcccacgcgttcgcccacgcgtccgcccacgcgttcgcccggcgctccacagcgggtccccgggcccgggcgccggcgacctgcggggcttccacacgcagatgacccggcgcgggagcagctccgcgacggtcttgtggaacaccgccttgtcctgcgggatcagcaggtgctcgccgagcctctccaccaggaacctgccgaactcgggcgggtcctcgtgcccgaactcggtgcgcacctccaggacgaccacctcggactcggtctcgcccaggaaccttgccacgtcgtccagcaccacgtcgacggggtacgtggccaggacgccgtggcatacgcggcgccccttctggacgcgcacgtcgacgacgcgcgcgcccagcgccagctgctcgtacccggacagcgactggcactgcgcgaagggccgggtcacaagcggcacgccgatcttgttggtgcccgagtcgtgcgtgccgggccacaccacctggtgcacgcgcagcttgtcggcgcccagatccgccatccaccgcttccggtccgccggccggtgctccgaccccgaaaagagtatgaattcgccggtaggtttacagacatatcagacaggcgtacaccatatgcaaagtacgcgccccacgagatcgcaaggatcctacaggttaacaaatctcgcaatggcgtcgtcgtgcccgac

SEQ ID NO: 274321 - DNA, 741 bp, Zea mays
gggacagacagcggtgtcgcgggggcacctgcttcccaacgccgtccgcacctgctgccctgtcgtccgccctccttcccttctcctcccctccaactgtttcctcaacctcccgacccaaccacggccgtgcccgccaaggcgccaaccgcacagcagcagctggggtgctgacgtgctgtgggtggttctgttgtccatggcgcggaagcatcagcatgttgccatatttaccacagcgtgcttgccgtggatgactgggactgcggtaaacccactgtttcgggctgcataccttgccaaggctggagattgggaggtcacgctggtggtgccttggctgtccaagggggatcaggagctcgtttatccaaacaagatgaggttcagtttgccggctgagcaggaaaactatgtgcggcggtggcttgaggaacggactgggctgttgccgaagtttgacataaagttctatcctgggaagttttcaactgagaaaagaagtattctacctgttggagacatcagtcagacaatatctgatgataaagcggatattgcagtgctagaagagccagaacatcttacttggtaccaccatggacggaggtggaaaagcaagttccaaaaagttataggtgttgttcatacaaactatttggaatacgtgaaaagagagaaaaatggatacattagtgcgtttatcttaaaacacattaattcttgggagacagacatcta

SEQ ID NO: 274322 - DNA, 446 bp, Zea mays
ccggatcgcacaacaggaacatcagcagcagggaggacgccacctcaggagcggcagccacacggccgagatgcacgagtccctttccaatggagccggcggcaccccgccccttcccaacggtcgggcagcggctgccggggcggcgcggtcgcgcctgggccgcgacgggccgccctccgagctggacgtgatgaaggagaagttctccaagctcctgttaggcgaggacatgtccggcaccggcaagggcgtgccgtccgcgctcgcgctgtccaacgccatcaccaaccttgcggcgtccgtcttcggcgagcagcgcaagctggagcccatggcgcccgacaccaaggagcgctggaagagggaagtcggatggctgctctccgtcaccgacctcatcgtcgagttcgtgcccacgcgccagaccgcggagaacggaacta

SEQ ID NO: 274323 - DNA, 617 bp, Zea mays
  unsure (1)..(617): unsure at all n locations
cccacgcgtncgccgaggcctccacgtctctggaaccgttttacccgccattttcctctcctctcctctccctccatctaaggagaggagagatatgcagctcacgagctccaccaaatcctgacctcccaaagctgtggtcgcgatccaaacagaagggaaatgatcaggcgacaacccggcatggatcggttcctgcagctgctggccgccggcgtggccgtgctactgctagtggcaccgccggccatggctgacgacgacattgtagaagtcggcgtcaactggggttcgcagctctcgcacccgcttctccccggctccgtggtgaagatgctcaaggcgaaccgcatcgccagggtcaagatgttcgacgccgactcctggcccgtcggagcgctcgtcgactccggcattgaggtcatgctcggcatccccaacgacatgctggagaccatgagcagcagctacggcaacgcccaggattgggtcaaggagaacgtcaccgcctacggtgacaagcttaagctcaagtatgtggcagtggggaacgagccatttctcaaagcatacaacgggtcattcatgaaagacaaccttcccggcgctcaagaaca

SEQ ID NO: 274324 - DNA, 928 bp, Zea mays
acgcgcgggtcgatacagaatcgtatgcgggtggtcggcgtctcactatccaccaccgcgccgctccggtttaatttctcctcgaccggccagcgcaattctgtggctcgatcgatcggtcggtcgtaaggcaagtgagcaagctatatatatatataggagattcttcgagcgagctagtagcgagatgggttccgccgtcctcttttactgcatctgcatcgccgtcgtcgtcgcattgtcgtcgtccatggtcgccgtcggggccgccgccccgggggaaacccccaagttcatctcggcgagcgcccttgagtgctccgctaacgtaacggaaatagcaaaggcgcgcaagctgatcgatgtccatggccacgggctgtgcccggtgcggttcgaccacacgcgcgggatcagcgcggtggccagcagctgcaaggaccgcccgctgccgtcgccggagcgctgctgcggggcgctcaaggcctacgcgtgcccctacagcgagctcatcaacgacaacgccaacaacggctgcgccagcgagatgttctacgtcatcatgacacgcggcaggctgcggccgggcctcttctcgcagctgtgcgtcgaaggcccgctgggcctccagtgctgatcaacactggcctgctgccgcccaccgcccggaatctatctatctatctatctccttgtaaacctacatcagacgatgccccagcgcgtgccgctgatttgatgcaagtatgcggttttaatttgtaaatcagagtcgacccatactacgcgacacccagtatcaattttcacttgtaatgaaaaattacacatgtactcatttgttgtacacaaacaaacaaaaaacgttagaatataagaggatgtttctcaatcgatcgttagacagaatgaatactcagattcctca

SEQ ID NO: 274325 - DNA, 427 bp, Zea mays
acaatactctatactgacgtcgtagtaggcgggtggtcggcgtctcactatcaaccaccgcgccgctccggtttaatttctcctcaaccggcaagcgcaattctgtgcctcgatcgatcggtcgtaaggcaagtgagcaagctatatatatatatatatatatatatatataggagattcttcgagcgagctagtagcgagatgggttccgccgtcctcttttactgcatctgcatcgccgccgtcgtcgcattgtcgtcgtccatggtcgccgtcgggtccgccgccccgggggaaacccccaagttcatctcggcgagcgcccttgagtgctccgctaacgtaacggaaatagcaaaggcgcgcaagctgatcgatgtccatggccacgggctgtgcccggtgcggttcgaccacacgcgcggga

SEQ ID NO: 274326 - DNA, 357 bp, Zea mays
cgcgtccaagaggtggtccccgtgggctgggacggctggcagatcgccaagccggagagcagcggcatctactacggcgagttcaagtgctttggccccggcgctgacgccaagaagaagaagagggtggggtgggcgctggacctcaccgaggcgcaggccaagccattcgtcggcacacactacgtcctcggcgacacgtggatccagccaccgcccaagtagcgacgcatgccacacgatatatctatttgagtacgaagcaaaagcgagagacacgaatctctaatctctttactgatgagatgttttgcttatatatatatatagacgagctaatgaaagctcagggttttc

SEQ ID NO: 274327 - DNA, 446 bp, Zea mays
acaaacaggcggaaggagaacatcgatcggtcgtggctgtttccacagccggaccgaatagcggcgcggccgggaaatggggagaaaaggcaagtggttcgacaccgtgcagaggatcctgatcacctctgaacctgatcccgtggagacgcagaacgatgatgccgccaaggactggaagctcgatcatcacgagaaggctgcgaagctgagagacaataagtcggccatcaggaggatatggcagttcggcaaatcaaactcgtccggtgcttccgcctccgcgacggcgccggaggacgcggaggttcttcagtttccgaagtcgccaaggtcggacaacgagtaccatgtcgtccaggacctcaccgaggaggtgccgttcatggagacgagaggcgaggaagaagaagaagaagacggcgagcgcatgaaccctggggatg

SEQ ID NO: 274328 - DNA, 417 bp, Zea mays
cccaggcctccaaagcacctaactctagctagctactagacgacagctagagctagctccctcaacgacgacgcagtagtacatatggagaaggcggccggcgtgagcccggcgaggctggccctggccgccgccgccgtgctgctgtgcctgctgctgctgctggccgccgggccccagggggtctccggcgccgacgggaggaggaagacggcatccccctacgataagttgatcagctgcagggtgctgggcaactgcgacaagaacaagggcccggaggccacccgccccgggaagccggtcaacaagtacacccgcggctgcagcaagatcgacaagtgccgcgactgatcaatcgtcatcaatgcaggcagccggagctatatatatcgtgtcgttctcgtaccgtgtgca

SEQ ID NO: 274329 - DNA, 894 bp, Zea mays
acccacgcgtccgcccacgcgtccgcccacgcgtccgcccacgcgtccggcaagggagagaaaggaaggagggcaggaggagaggcggaacaacccgtctccctccatctctctaccttctgctcctgcgcccctatccatcgctcgcaccacccactgaccggccggcggcatccttattaccataacatcacgggacggtggcgcgatgcaaggaggcccactgagcccggatgagtactgggtgatatcgccgccggcgctgctgcaccagccggcgtccaccatcgtcgtggccatcgaccgggaccggaacagccaactggccgtgaagtgggtggtggaccacctcctctccggcgcctctcaaatcgtcctactccacgtggccgtccattaccacacgacccatgggttcgccatggttgagaccacgcagggtgcgctggaggctgaaatgaaggagatctttgtcccctacagaggattcttcaaccggaatggggtaaatgtggaagtatccgaggtagtattggaagaggcagacgtgtccaaagccattctaggttacatcactgcaaacaagatccagagcattgcgctcggcggagccaacagaaatgcgttcaccaagaaattcaagaacgcggacgtgccgtcgaccctgatgaagtgcgctccagactactgcaacatctacgtcgtggccaagggcaagtccgtcaatgtcaggctcgccaagtgcggcgtcccgccgatgcacactggcgccgacatcgcttcggacaccgactccctccgggaatcggtgctctacatgcgacgcggctccagtggggcactgccgcgggtgacgccatgacgcctggcgctccattgacaggcgcacaccgc

SEQ ID NO: 274330 - DNA, 745 bp, Zea mays
gacgcgcgggtcgatacaagcctctatagatagtcatcggacgcccttttttttttttttttttttttttttttttttttttttttttttttttttttttttttttttttttttccagattgccctcctttcgtaacactaatttgcaccatttacagaatcagctttagcttacagggactaaccaagtctgaaaaatatcagttaatgatgcaaagccagcatcgatgcatcataaacgatgactgaatgagccaggcgtgtgtgtttttataagctgagacgtaggaaaatgtacaagatcccatacagcgctgcctgatcagggttgggagcttgcatctgaagtggcagcaggaggcggcgaaggcttgcttctttggcggctgaacaagttgtgcttgtgccaagcggcagcgacgatcgacaagccactgaacctaagccatttggtcccccctttaggttgagagacctcgttggagtcctgtgccttgtttgccgtgatttcgctcctattgctcagctgtcgcgccgtcgctctgatcctgacggtgtcatcggcgtcgatggcatcagccacgatcctatcgacggccgccgtcttcttctggcagtagtacctgaagctcggcgagccgggcatcgacgggagcgcggcggtcccctcctccagctccttgggctccggcgccaccttgcaccctcgcctcctgtaatacgactcagtctagtgagttgtaac

SEQ ID NO: 274331 - DNA, 743 bp, Zea mays
aagctgttcgacgtatctccgtctcggacgtcttcgttttcagacagccctgatcgactgaatctcagattttattaaggtataggtttcgtttaatttctttccttgaattctactatttcagaaaaccaaatctgaattctctttctccagagtggcgagtgctcggaataatcacttaggatttcaggaaagaatggcattttaagagttacatcatggcgtgaatcaatatagttgccagtttgttaaattagtttcataaaatgttgtgctctgaatttggaaattttccgagatttgttcattgcttagttgaactatatgaggccgtttcttgggcggtgattcctgaagcattcacaggttactataagaaagaaccatgacgtgttgatatttctatgaaatattgtattttcatataatagtgttaaagcttctctttgtctgtgaatctataggcaggtcaatacttcgtcattaatttgtacccgatttcttgtcattcatttcataaaaacatgtagttttgatgtatttggtcataactaacaattatctatccttctgaactaaactagtatcacagggtcaaatgtacagaattgttaatataatagtattatcttatttagtgtatgtgaaagggaaatgtgcccttgggccatttttaagtattttggtgattaagtgtccaacacaaatggttgtgtgttaaactatgacaaatggtggacaaa

SEQ ID NO: 274332 - DNA, 421 bp, Zea mays
agaccagcccaccttcacgctcaacttctccaaaggttccagccagattatcgcgcagtattaccagctcatccgcctcggattcgagggctacaaggacgtgatgcagaactgccgcgacaacgcggcggtgctccgcgagggcatcaacaagatgggctacttcgacgtggtgtccaaggactcgggcgtgccgctggtcgccttctccctcaaggactcctccaagtacacggtgttcgaggtggccgagagcctgcgccggttcggctggatcgtgccggcctacaccatgcccgccgacgcggagcacgtggccgtcatgcgcgtggtcatccgcgaggacttcagccgcgggctcgccgagcgcctcatcgcggacctgggcaagaccatggccgacatggacgcgcacgccggc

SEQ ID NO: 274333 - DNA, 626 bp, Zea mays
gggccggccaaggcgtcggggtaaatctcggacctggagcgcaccgtcacgtcgctccagacggaggtgtcggcgctgtccccgcgcgtggcgttcctcgaccaccagcgctcgctgctgacgctggggaacagccacctgaggcagcggatcgcggcgctcgcgcaggacaagatcttcaaagatggtgaccgccattgccggccgcccctgctcctcccgactacgaccctcgccgctcagcagcaggcactgaggaaggagatcgagaggctgaggcaaatctaccaccagcagagcctgaagagcggcagggagcccgacgcggccccgtcggtccgcgacgacaaggacatgatcggcagcgaggggaccgccgcgcccgggcccgccctcgtgatgaggaggaggtggtggggcgacacgtccagacatccgagtcggtcgctgtagtcggggatggccctgtcgcccgccctgcagcccatcacagcgaggttgccgctgccgctgctaggattggtgtgtgtgtgccgtgtgcgtgtccgtgtgtgcattctttgggggtgtgtaacgtgatgtgatgtaaagagaagaggaactgcatcggtttgggttgggttggt

SEQ ID NO: 274334 - DNA, 811 bp, Zea mays
aatgacttctgcaaacagcttgagcttgccaggacgttccagtttcctactctcaggcagccacccgcatcgtttcttgcaacgatggaagagtacatcagagaagcaccccgaccctcgatcaagagtgaggagagcgaggagccgaagctactgacctacgagcaagaagctccagaggaacccgaaaatgctgtggaagaggagaaagaagaaccgagtcaaaaaccagaacctcagcctgtgcctgatccagaaccccacccacagcaaacgactggagatctactaaacctggaagcagaggtgaatccttcggctctggaactcgaacaaagcaatgcattggcactcgctattgtagcaccaggtgactacaagccgccagcatctcaaagtatgtttgatgtcaattcgtctgggtgggagctggcactggtcaatgctccaagcacccatacaagccaagcagttgagaccaacttggctggaggctttgacaagctgctacttgacagcctctacgaagacgaggccaggaggcagcagatcgccggcgcgacctacaccggtagcctaggagcagccaaccctttctgcaccaatgccagcgatccggttcaccatgtccagcagatttgcaccaccggctaatgtgcagttggcactgatggctcagaaccaacagcagtattaccaggcgcagcagtattaccaggcgcagctgtatttccagccacagcagcagcagtattttcagcagcatcaacagacgttggcaatgccaatgccaaacatgtatcaccaccag

SEQ ID NO: 274335 - DNA, 571 bp, Zea mays
caggcgcacggctcacgttgtccgcctcacgtaaaggtcggtgccttcctctcctatctcgcctcgcgcagttccacttcccatttcctccttcgtccgcatcagggacacactgcctccgcatgcggcaagatcctccctcattccccaaacatgagaggagcagaggaggagagatctggcgccgccactgatgcgggaggagaggaggagaaacgggagaggagcgtcggcctgatggccggcctcatggacaaggccaagggcttcgtggtggagaaggtgacgcaaatccccaagcccgaggctgcgctggatcacgtctccttccagagcatcagccgcgagggcgtcgagctgcatagccacgtcgacatcagcaacccctactcgcaccgcatccccatctgcgagatcacctacacgttcaagagcgccggcaaggtgatagcgtcgggcacgatgcccgaccccgggtggatcgcggcgagcggcagcaccaagctagacctgccggtgaaggtgccgtacgacttcatcgtgtcgctgatgaaggatctcggaggggact

SEQ ID NO: 274336 - DNA, 541 bp, Zea mays
acaacgcgtccggccatcttcttcttcttccccgaccttctcccttaaggcctcaaccaagcaaaggtttgattttacataccagagtaacggacccagcgccagctggaacaacgaccagagactccggcatccagtcgaccaacgtacaatgcgtttcatccaaggaaggacctccaagccgacgagcagggttaagacccttctatggcttgccttgtcccgccttgccgctgcccgccgtccccgcctcgctcgcaagtcgatttcccgcagcgatgttggacagctactagcactcggacacattgatcgtgctctccaccgtgcagagcagctcatagaggaggacaacatgctggaggcgttcaacataatagagctacactgcaatcgcctcattgagtgcgcaaagcagctagacaagccccatgaatgtggtgatgacattcgggaggcagccgccgggatcatgtttgcagctgggaggtgcggcgacctgccggagctgacgtttgcacgaaccatactgacaaacaag

SEQ ID NO: 274337 - DNA, 473 bp, Zea mays
cacgcgtccggtacctggacgccaacccgtccgaggtggtcaccgtcttcctcgaggactacgcggcgccagggtcactcagcaacaccttcaatgccgccggactgtccaagtactggttccccgaggctcaaatgcctagccctagtaagggcggcggtgactggccgctgctcagggacatgatcgccgataaccaccggctcatcgtgttcacatccaagaaagggaagcaggggacggaggggctcgcgtaccagtgggactacgtcgtggaaacccaatacgggagcgagggcatggcggatggcagttgcccaaagcggaccgagtcgaagcccatggactctaaggcccagtcactagtgctgctgaacttcttcaccagcaacccgagccaaagctgggcctgcagcaacatctccgcgccgctcatcagcatgcttaacgcctgctaccacgcctccgccaaa

SEQ ID NO: 274338 - DNA, 440 bp, Zea mays
cccacgcgaccaaccacgcgtccgcgggagcacagagctagctagccagccagccagcagccagcttgctcgccgcgcccgtccttcttcctcgcctccgttccattccgttccggcctccaccgccgccgccgcattcagggatggagatgaagaagatcgcctgcgccgtcctcgtcgccgcctcggcggccaccgtggcgctcgccgcggaggctccggctccggcccccaccagcggctcctccgccgtcgcgcccgccgtcggcgccgccctcggggccgccgtcgcctccttcttcgcctactacattcagtgagccggccggcggcgcccggaggccgaggaagagacgagggggagagagagtgacatggctgcgcgcattccgatgcgtgggcatgttttttgattcgacacaccttttgtcctcgttttc

SEQ ID NO: 274339 - DNA, 513 bp, Zea mays
cggggccgaccaagccttcgacggacccttggggccttgctgacgccgccgctgtccctggggggcggcgggctcccggggaacctccgcccggcaaacctcggccaacggttgctcagccccttcggcaacttcggcccgggctccgacttctccaacttcaagctgccggcaactttcaaccggcccaagtcgcagctgcagctgtacggcgaggccgtgtactgcggcggcgaggacatgctggcgcggtgcgcgcgcggcgccgacagcctgcagcgcatgtgcgccgtggtggcgtggagcatctccaccacgcggccccccatcttcggcttcgcgccctacaacccggtgctcggggagacgcaccacgtctccacgcccgccggcctcaacgtgctcctggagcaggtctcgcaccgcccgcccgtcacggcgctgcacgcgacgcacgcgcgtgggcgacggtggagctggtgtggtgccagagccccgcgccgcgttccacgg

SEQ ID NO: 274340 - DNA, 629 bp, Zea mays
accacgcgtccgcgaggttctctccgacaatgggtcctctcctccgcgccgccgcgctctccgtcgcgctcctcgccctcgccgccgtcggcgaggcgcacagcgccaccgaattcctcaacatcttcaagccgcggaacgagcacgactacttccacaacgcgaaccaggaggaggatgtgatgccccgggccagcgaccagcagaacctcataacggcgccggtgaccaagagcggcctcatgaaggtgccgccccggtccgcgcccaccgcggttgcgcaggacacggtggtgctccccgtggacaacgccgcggggttccccggcgcttggtccatcatcagcgagaacgcgggcgtgtccgcgatgcacctggtgatcatgcggagcgacaaggccatcatgttcgacacggtcaccacggggccgtcgctgctgcggctgcccaaggggaactgccgcctcgatctccgcagcaagcaggtcggcgccaaggactgcgccgcgcacgccgtcgagtttgattacgcgacaggcggtgtcagggccctcaaggtcttgacggacgtgtggtgctcgtcgggcgcgctcgacgccgagggcaacctggtgcagaccggcggctac

SEQ ID NO: 274341 - DNA, 938 bp, Zea mays
aacatgaatggatccctctatgactttctgcacttgtccgacgactacagcaagccgctgacctgggacacccgcgtaaggattgctgttggtacagcttgtgctctggagtacctacatgacgcgtgttcacctccagtgatccacaagaacatcaaggcatccaacgtcttgctcgatgctgacctcaaccctcacctcactgactgcggccttgcatacttctatgaggatccaagtcagagcctgggaccagggtacgatcctccagagtgcacaaggccatcaggttacgttatgaagagcgatgtctactgctttggtgtcgtcatgcttcagctgttgaccggccggaagccctacgacagctcgaagcctagagcggagcagtccttggtcaagtttgtcggtccacagcttcatgacaccaacgccttggaagctctggcggatccaggccttcgtggcctatatccaccgaaagcattgtcccgtttcgccgatgtcctctcccgctgcgtccagtcggatccagaactccggccatccatgtcagaggtggtgcagttgcttctccagtgcgtccagcgcacaaccagcaacaggaggctgggtggccaccgcaccgtctcgcagcgaagcgacgattctgattggtgatgctctgtttctgcctccatcttgctgctgcggccgagttgctgaaactgtctcagaacagaaccgtaggtgtgcggcccttggcatgccgctgtacaaaagaaaatgctttattagacaatctggttgctcgaacagtgtggcaacaaataagtcggttgatttaggtaagataaaagcagattgggtgttctagtgagtagtgacattgtatttgtaatcataaacttaaaaacatatgaccagctaattttaaaaatatataaaccatcttagaa

SEQ ID NO: 274342 - DNA, 615 bp, Zea mays
gtacaagcatgaacgcgaatgtaatgctgtaattgcacaaacacttgaaggaaaaattgctaggcttgagagcctcatggatggaactttaccagctgaagaattcatgaatgaagagtttttatcacttatgaatgagcataagatcctccaaaagaaatatgaaaaccatcctgatgttttgcatgctgaaattgaggtaaagagactccaggaggaattggacatgttcaggaactctgtggacgagaaagaagttctacaggaggagatacaagatctgaaaaatcagttgcattatatgctttcatcatcgtcatcaatccgtaggctctggcctccagtgccgctgtctcagggaagtaattctgaacgtggaacaaaagatatagatggagatactaattttgtggacactcccaattggactgaggctgatagtaaatggattacactcactgaagagcttatagtcgaacttgatgtaacaaaattcctagttggaatgttgcagtcagaactggattctgagaaaaaattgtcagaagaactaaaggaggcactacaaacagcctttcaaggagctgcaagacacctggaacaatatgctgatct

SEQ ID NO: 274343 - DNA, 1076 bp, Zea mays
cgcgggtcgacacaagcgtccaacgacatgcataggacactctctatggccgtctctgtgttttcatcttcggctgctatctttgacaagatgaacaaggacaagcactcagaaaattcacaaggagaaagcacggacaatagtttgcatagcgttggtgaagggaccggacaaccaaagaatcaaaaccttcatgtgtctcaaagccgacgtagtagcatgagaatttctaatttttccatgaaaagaggcccttcaatggccatgagagctccttcagtagctatcagagctccttcaatatctctgagaggtccttcaatgtcttcgagagcatcttctgtgtctgtaaaggaagaccaaatttccccaaacaaatcagacgaggaaacggaatcagtgttggtgaagctgagcgcccgtcagatcacacttttgctgtcatccatttgggctcaagcaacatcccctgaaaatactcctgtgaactatgaagccattgctcatacttacagtttgcttctactgttctctggatccaaggcatcaacttttgaggctcttacccagagttttcaggttgcattttctttgaggagctatgcgctcactgaagcagattcattacaaccgtctcggcgtcggtcattgtttactctgtcgacagccatgattattttctcgtcaagagcttacaatgtgttgccactcattccaatctgtaaacaaatgatcaatgatcgcgcggccgatccattcctttcgttggtggatgagagcagacttacagctgtcaaggattcttcaaatgatccttcaaaaatatatggattcacagaggacaacaataatgcactgaagtccctttcagaaatagaactatcagaaagtcaatctcgagaatgcatagtctccacaatcatgaacaacatcgcaaatatgctggatgcggaattgcataatgtgagaagccaattgctaagtgatttcactcccgatgacatgtgtcctacaagcactcagttctttgaagtgcatgctgataacccttcatcagggtcttatgagactggtca

SEQ ID NO: 274344 - DNA, 442 bp, Zea mays
agcggagttcgacgtggaggcgctggcgcagatcgtgcagatggacctggaggacatccgcagcggcaccgtcgtccgcaccgtccgccccggcggcacgggaagctgcctcgccgacgagagccacatcatctgggacaagggccacgtcctgcaggacctcctcctcaggctccggaacgtccactccggcgtcgtccacctgcagctcagatgggtcgccaccccacctgaagcagactgaactggaggagacgaactgcagtatgtacgtgctctcgctccatatccccatgggaagaacgtacggattcgctcgcgtgacgatgatactatgcgatgcatgcatgctcaagagtcaagatgtcactgtcttctgtgtattttagtacagccacgtacattgtcgccatccatcatcactatgcatggactttttttt

SEQ ID NO: 274345 - DNA, 483 bp, Zea mays
cggacgcgtgggcagcagctcaccgtcgtgcctcctccatcggcatccacccggccgagagcacaacgtgtaccgtctctccccagcgtgcgcgcgcgcgtggtcggaggctgccgtcgctcgcgtcggccgcccccgccggccagcgagagcgagggacaacgaccgaccgaccgaccagctcgaggtgaatgaacagccgcataccgttcctccagaaaatgcaccgctggatcatccctagctgcggcgacacccgccagccgcgcccttcctcccgccatcgagatgcgttcccgaggccggcgtcggcgtcggcgtcggcgtcggcggccccgtcccctcagaagctgaggaaggtggggtcggaggggacgctggtgctgtccgtgcccaaggacgtagaggagatccggaccatgtcggcgtacggccgcctcaagctcttcacctaccacgagctcaggaaggccaccggcaact

SEQ ID NO: 274346 - DNA, 759 bp, Zea mays
cggctcgagcgcattaagctcttagctagccctagccacgtacccacacatcgtagacaacgcaattagctaggaatagcatccatggcgtccggggctgctgcttcctcggccctcttgctcctcgtcgcggccttggtggccaccagtgcgagggcggccacattcaccatcaccaacaactgcggctcgacggtgtggccggcggcaccccggtgggcggcggcacgcagcttgaccccgggcagacgtggaccgtggacgtgccggcggggacccagtccggcagggtgtgggggcgcacggagcctcccatgacgctggccgagttcaccatcggcggcggcggcagccaggacttctacgacatctcagtgatcgacggctacaacctgcccatgctcttctcgtgcagcaccggcgtgaccctcaactgcggcgggcccagctgccccgacgcctacctgtttcccagcgacaacaccaagacccatgcctgcagcggcaacagcaactaccaggtcaccttctgcccgtgagatcgcgcgtgcgagaggcaggcggcagtgtggccggacgacgatgcaatatgcaatgcatgctccagccaacttctttctttgcgaataataagtatgttgtttgtcctagtttgttattagtggagaaattaaaaaagtagccaatcgaataagacgatgatgttccccccatagattatgtaacttcgatgagtttgatctacatacatgggcttgc

SEQ ID NO: 274347 - DNA, 616 bp, Zea mays
acacatagtagacaacgcaattagctaggaatagcatccatggcgtccggggctgctgcttcctcggccctcttgctcctcgtcgcggccttggtggccaccagtgcgagggcggccacattcaccatcaccaacaactgcggctcgacggtgtggccggcggccaccccggtgggcggcggcacgcagcttgaccccgggcagacgtggaccgtggacgtgccggcggggacccagtccggcagggtgtgggggcgcacggggtgctccttcaacggcggcagcgggagctgccagacgggcgactgcggcggcgcactctcctgcacgctctcggggcagcctcccatgacgctggccgagttcaccatcggcggcggcggcagcaaggacttctacgacatctcggtgatcgacggctacaacctggccatgctcttctcgtgcagcaccggcgtgaccctcaactgcggcgggcccagctgcccagacgcctagctgtttcccagcgacgaacacaagacccatgcctgcagcggcaacagcaactagcaagtcagcttctagccgtgagttcgcgcgttcgaagcaagcggcagtgttgccggacgacgat

SEQ ID NO: 274348 - DNA, 405 bp, Zea mays
  unsure (1)..(405): unsure at all n locations
aattcntaggccgacccgacccgtcaggccccctaacgtccgtgcccaccaccctcgctcgtcggcgtcgtccccctctttctctctcctgtgccccggccaagaaggcaaggctgcctgccgactggttggacctggacgaaggaggacgagaggctcgctcgtcgctggcggttggtacgtgcgcgcgcgatggacaggggaacggtggaggacctcatacggcggttgctggacgggaagaagcacatggcgacggggaagaaggtgcagctgaccgagaccgagatccggcacctctgcgtcaccgccaaggagatcttcctctcccagcccaacctcctcgagctggtggcccccatcaacgtctgcggtgacatccacgggcagttctcggacctgctg

SEQ ID NO: 274349 - DNA, 654 bp, Zea mays
taagggacaggcgcaccagaccccggcgacgcagacgaagctgttcctggaccccgcgatgcccttctacggcgtgaaggtcgacgccgtccacgtggccggccaggccctcgacatccccgccgaggtgtgggaccccaagagcggcggcgtgatcctcgactccggcacgaccctcacggtcctcgccaccccggcgtacaaggccgtggtcgccgcgctgaccaagctcctggccggggtccccaaagtggacttccccccgttcgagcactgctacaactggacggcaccgcgaccgggagcgccggagatcccaaagcgggcggtgcagttcaccgggtgcgcgcggctggagccaccggcgaagagctacgtgatcgacgtgaaaccgggcgtgaagtgcatcggcttgcaggagggcgagtggcccggcgtgtcggtcatcggcaacatcatgcagcaagagcacctctgggaattcgacctcaagaacatggaggtcaggttcatgcagtcgacctgcacccggtgatcgtaaagctgacctcgatggttttgttcagagcattccaaggggaaatgttttttctgaacataaaaaaatagaaaacgaaaatgatgctctgcataaatcaactttctgcacgagat

SEQ ID NO: 274350 - DNA, 703 bp, Zea mays
tccccaacggcatccccccttaactccccttctcctcctcctcctgcggtcccaactcccatacttcggttcaggaggcaggcaggcaggaaggcaggttcgaggggggattggctccgctcctgctccattgcgcgcgatccggctcgttcttgtgatctatctagccgtttcttgggtcagtgctggaaggtcaaactgttggtggaaacctcaccggggtgcttcaacgaacgcgaaggtgtcgctgtcatttagcgcgtcttgattggatttgacctgttggcctggtggcgtgttgtcgttgattgagctcgaggatgatgaaatgggggctcagcagcggcacgcccgcggattcctactacgaggtacggtcagattgcacggacggtgtgcccaagagcaagttcaagatcaaggctggcaaaacattaagtgctcggaaatggcaggctgcatttagtcccgatggctgtcttgatattgcctcagtcctaagccggatacagagaggaggtgtccatccgacagtcagaggagaggtctgggaattcttacttggttgtttcgatcccagaagtacctttgatgaaagggaagagatcaggcaaatacggaggatacaatatgacagatggaaggaagattgtcgacagatggattcgcatgttggtagcggtaaagttatcacagcaccact

SEQ ID NO: 274351 - DNA, 860 bp, Zea mays
cccacgcgtccggacccacgcgtacgtccactcgtccgcccacgcgtacggcattacgaggccaaaagtaagctgctgctgttcttcgacccgtcccgttcgttcgattcgttctttccgccatggaggctcggaggaagcccgcggtgtgctgtgcccttcttgtgctgctcatcgtcgcctccagcgcaacggtgtcgactgctcatgacgagagctgctggaaggacgacgaccaccaccctatctgctttcccgaagactgcgtggcgacctgccaggatcacggccacgcggacggccgctgcaactgggcatggtcgtggaggccgtattgccagtgcctgttggcggactgccaataggcgcgaacagctgcgtcgcatggcgtcctggctgcctcgccggccgatgaaggatgaacggttgcggccgatgatcgatgtgtccgtcggcatgtcgatcactcattgaaaccccctctaatcctgtgcggtattattttcatggcacctgtggccattaaagatccatggacacgtacagtaccaatacatgattcttcacagttcaactaaaataaaaataaaaacaaaaaaaaaaaaaaaaaaaaaaaaaaaaaaaaaaaaacaagtaataaaaaaaagatataaaaggatcacaaagacaatgaaccatgatagtgccataaactacatatggcaagcgcctttgaactgcctcttcaaacttcaccgtgaagatcgacaacattggtgctgcatatgcccaatccgaggtacttgcaacgctaagaggacactatggtactgcgagacgagtagcttggaccaatccaaagtatggtgcaatacttgcat

SEQ ID NO: 274352 - DNA, 575 bp, Zea mays
gccacgcgtccgcccacgcgtccgctcacgcgtccgcccacgcgtccgtccacgcgtgcggaagagcgtcagccggttcaggaccttgctgggccgcccgtggaaggagcactcgcgcacgctctacatccagtcggagatcggcgggttcatcgacccgcagggctggcggccgcggctcggcgacttcggcctcagcacctgctactacgccgaggtggaaaaccacgggcccggcgccaacatgaccagacgcgtcaagtggaggggtatcaagaacatcacctaccagcacgcgctgcagaagtacaccgtcgagagcttcatccagggccagcactggctcccacagctcggcgtgccattcatcccggggctgctgccgcagcagcaatcgggcaggatacactgacatctaaggaagatgatatatgatcggcaggctgcgttgtcgatatgacgtggcactaacatgtacgtaccatggtttagtttgttggttggtttatgctattttgactactactttttttatattcgataaaaaaatgcagtacagaattaaaaacgcaaat

SEQ ID NO: 274353 - DNA, 612 bp, Zea mays
agcggcgccgccagcgactacaacgcgtcgttccttgaagagttccgaaccaaggtggccaacgggaacgactctgtccgctatgaagacaggacagtgggagggaaagaggaagtcgttgaggcgatcaaggcaacagggcggtgcaacctgttcctcgtcggacagggcacgccctgcatgccgctggttgactggagcacggacagcccggagctcgggccggtgggtacttacctggcgctgccggaattctcgacggtggcatctgtgctggtcatgaaacagtacgatccgatggcgaagcacgacgacttcgtcgaggaggtggccgacatagcggtggacgttgacacgccgggccccagtaaccggggaaacaatactagcttccatgccggatgatacgtgctggtgttagatgtattattaacatgtcgagcagacaagactgattaacattatgtaatgtaatctcaaagtggtgtaaatggatggatcaaggtataggatcccctggagtgtccaaccggcaatccaaaccaattccttttttcgaattatcatgatgtaattcccaaatgtataaaattcagtttttagtttttcctt

SEQ ID NO: 274354 - DNA, 245 bp, Zea mays
gggtggccccacgcgtccggaaatcaccgtcgaaaagcagtctcccaattccaccgaataactaataacatctcctcgagcgcgaggccggcttccttggaccaatccagcagcaagcgacccggccagcaccagcagccatggagatgaagaaggtcctctgcgccgcgctcgtcgccgccgcctccgccaccgccgtgctggccgaggtcgcctccgagtcgccctccgaggcgcccgccggc

SEQ ID NO: 274355 - DNA, 392 bp, Zea mays
gccgcctccgcgttagtcgtcttcctcacgtcggtgggctcgctcatcttctccgcgctcgcgctggggaccgccatcgtctgcgcgcacggcgcgtgccgcgtgcccgaggacctcttcctcgacgatgttgaccaggctgccggcggcaccggcaacccgctgctgtcgctcatcgcctccgccaccggaggccgcgtctgatcatgagtctgtaatagatgctatgcttgaggtcactgccattttcttgatcgattattttcgcggaactatttatgcagctcaaaaattatactactatatatagctacggaaagcaacaaatcaaaccatatactggagtttgtttatgtatcatcgagcagaaatatattcttgttattcgtagc

SEQ ID NO: 274356 - DNA, 570 bp, Zea mays
cggacgcgtgggtctagatcgcgagcggccccccttttttatcttttttttaatcaaaactttataaataaaaaaatagaatagtacaccataacaacatacaacagctttgcctcgatcgagagcatgcatgaatcacaggcgtcgtcgaatcaaaagaaaggaagaaacaaaatgatgtgtggggtgggggtttggtgcatggccgtcgctgttaaaattcgacacacgacagttgcgtaaatagacctagcgtaatcagctgcacaaacgaatgagagagcgagcgagggaagcaaaatctgggtgaggagatgaatagatgatgacgggagcgcagcgcggcctggcagactgggcctaggcagtaggcacctgctccgatccttgtgctctgctgggcctaggcaccgccgcggagtttggccatgttcctcttcttcttctcctccagggccgccgccccctcctgcttgtcggcctcctcggcgccggcgccggacaccaccgggcccgggttcacagtctcctggcttccgcggagcttggggccgggcgcggacgcgtggg

SEQ ID NO: 274357 - DNA, 756 bp, Zea mays
gtcgcacttccggcaggcagacgagctcctcgccgattcagggtggcattgcagcttctgcttccgctacataagcgatttcgcattcaagatgcaagcgtatagccacgtcgaccggatcaggttcaagtacttcctgaaccctgagaggatccaagatgtcatctgcagaggggcggaccttttcgatatgcttccagaagagtacacgttccaagagatcatcgccaagctggggccgatcccgagcacgtattctggcgttcatcttcctagctatctgctaaggaatgtcgaccggtttagataccttctaccgggcaactgcaggagagaaagtggctaggttttatggcccactaccctgcaacctgttgtgcgtgggtgggtgggtgccagtgccacactgccccgctgcaaagctgctgtccatgggatatctgtggcagttcacctggtacggttgcctaacgtagttgaacaaatgctttggggaagaattggttcatggatgggggtgagcacatgattctctaatgtgtaatagaacatgggaggaggatctaacggcatagcgcacgcttggtcctggctgggtgtgcatgagctgagcggtttgtcattgtcattcattacttccctgattgatatatataaactcaaaaaggctgttgtagattgcaatccaagtggtatttcagaattaaaaaacatgaacttgataactaatccataaaaggaacacaacctaatagg

SEQ ID NO: 274358 - DNA, 590 bp, Zea mays
ggtcgaggcgacccgtccggttcaggaacccctacgactgaagccggaaacccactctcttgcctcctcctcctccttaaggaagggtggcaaaacttcagcgaccgacgaggaggacgtgccggtgcagcagcggttcatctggtcagggaagagaaagatgcggcgcctttttcacgactccatcatctctcttctggattactctcagtgctgcagcgtaaactcgcgcgcagttccctgtaaaagctggagcttttctgagcgtgtaggtgcgttggtggaacttgggcccccagtcccccacccaagatctcacctatctgcactgggctggccggctgggcccgccgccaaccaccgtgcttccgccattgcgtcgccgcataaccttggctaagcgtgaactttgtcacaacaaccacgtttggcgtttccatgcttgtcctgggttcctggcaatccctgtattaatccgtctgccattgcattatcttgcactgactgatcttttccaaccgaaggatgtggtggtcggtagagctaaaagttaagttggacccaaaaaaagaaaagaaaaaaaaacaaaa

SEQ ID NO: 274359 - DNA, 585 bp, Zea mays
actcaatactaggacgcgtaggtcgttacaacaccctacactgagtcgtactacttctggctcacgacgatagccgaggaattcgaaggaccgaacgagaagctcctgcgtggtgtcaacgtctaccctaccgtaccagctagccaccacacgcgtagcgcgggaaatgccggcggcggcggccatgacgacgaggcgggtggtgctggaggtgctacggtcggcctcccgcgacgccttccaggtggccttctccttcgcggcgaggccgcccgtgtccaccatgctcaagccggccatcaccaagcccctctaccaccaccaccacgacaacgactaatctggcgcagatctacagcacggccgtcggcatgccttcacagcccggtgggtgtgacgactattgatgacgtactaccacatttcgtcgctcctattctagtaagcaacgcaaaagaaaatgttgtaagattgagcctgagagcttgagtcaccaatgtaaattgtatacgactgactatatatagagcatgctctgtaaccatatatattgcccgggccccccttgccctcgcaatctatgct

SEQ ID NO: 274360 - DNA, 936 bp, Zea mays
acgctactatgttcctcggcaacaccgacggggaaggcttgaccctcgcccggtacttcagggtgtccgaatcctacaacaaggaggtttccgaacatttcaaggagtctatgatgaggtttttcgaggacgaaaccgagaaggtgaaagggttcacgtcagaatccactgtgagctacagagatcggctgaagatcatggccggcctggtcaacccggacgacctccagctgggctctacggagaggaagctcgtccaggcgtacaacgagaagccagtcctctcgcggccccagcacagcttctacgagggagaggactaccttgaggtggaccttgacatccaccggttcagctacattgctaggaaggggctggactcgttcagggcacgcctcaagaacggcatcctcgatctggggttaacgatccaggcccagaagcagtcggagctccctgagcaggtcctctgctgcgtcaggttgaacaagatcgatttcactgaccaagaagttccaacaatagtcaccgttgatgacacctgacgcatttgatcaaaatggtcatcagacgtgcgagctattattaactgctgcaaggctagatccatgggattcagaggcgacacaagaactgatgactccacgccttggtttctgcctaatatgttcgccgatctgcctacttttaagcacgggctttttcttgtcttccctgtaactataatataagaatgtgtattatatacaagacgatacaaccctgcgggtgttggtcatgttcctaacctttttgcacactccacttgctggttgcaatatgcctgcttccagatgcagaaagacattgaacctgacaaaaaaaaaaaaaaaaaaaaaaaaaaaaaaaaaaaaaaaaaaaaaaaaaaaaaaaaaaaaaaaaaaaaaaaataaaaag

SEQ ID NO: 274361 - DNA, 375 bp, Zea mays
cggagccatgctcagaagtttttctccatggtcgtgcgtgaacctggggccagtaattcaatggagatcccaccccctaggccaaagagaaaaccactgcacccataccctcgcaagtgtgccgactccaccgtgacaaatgctccaatgggcgaaccgaagaatgctcctgtttcatcaccatctggttctgaccaagagaatggttcgcctgtctcggtgttatctgcaatgcagtcgggtgctttcggttcatcaatatcaaacccatcaactgggggcacgtctcctgcgtcatcagatgatgggaataatgtccctgagttagtgaatttggagtgaaaatttgctcactcagcaaatagaagaccgatc

SEQ ID NO: 274362 - DNA, 444 bp, Zea mays
ctcaaggcggccatggccatcaacgccgacgtcatcgcggagatggagatccccgaggagtatatcgagtccctgccgaagaacggaaggtccattcttggagactccatgtacaagatcataaccgacgacgtcttcgaccccaacgagctcctgcagtccgtggacctgtcgacggagcacaagatcgtggacctcaaggaccggatcgaggcctccgtcgtcatctggcaccggaagatcagcaacaagctctcgtggggccccgccggcgtcagcctggagaagcgggaggagttcgaggagcgggcgcagaccgccctgctcatcctcaagcacaggttccccggcatccctcagtcggcgctcgacatcagcaagatccagtacaacacggacgtcgggtacgccatcctggagagctactccaggaccctcgagagc

SEQ ID NO: 274363 - DNA, 492 bp, Zea mays
tttgtactcgaagtatataagccacctttccccttacctccctaatcccccagcttaccatcccgagatcttcccccgatcgacctcgtcatccctgcggccatgtcgtcgtcggcagccatgggcaattgatgaactcgtccagctctctgagtccatgcggctggacgcctcgctacctgcgggcgatgacccgtccgatgagaccgcctcgcaccgcccctccatcattctcaacgccgtcgcgctcggcaatatcggtgctggcaagtcggctgtgtggaacagcctcatcggccaccctgtgctgcccacggaaggggaaaaccacgcgtcgcggaccgccgggaacccgggcgcggcggaatcttgcgcggtggtctgctggtgaggccggaatcgctcaccagtgccaactcgtcgccttgcgcccgccgtatatcgtggccagcagctcctgctctacaatcgctggaaataccgccttcagca

SEQ ID NO: 274364 - DNA, 429 bp, Zea mays
ggtcgagcccgcgtctgctcggcagcggcgccatgggcaccgtgttcctcgtcgcggaggggccctcggccttgcgccccagccgctacgccctcaaggtcttcgacaagcgctccgccgcccgcagcaggaagcctgacgccgaccgccgcgcgcggtgggagatcagcgtgctctcccgccttgcgcacccgcacctcccctcgctcctcggcttcaccgagacggacgaccttctcgcgtgggccgtcccctactgctccggcggcgacctcaacgagctccgctactcgctccccgaccgcatcttctcccccgcggccatccgcttctacattgccgagatcgtctccgcggtcgccgagctccacgccgcgggcgtcgtgtaccgccacctcaagcccgagaacgtgctcctccgcgccgacg

SEQ ID NO: 274365 - DNA, 590 bp, Zea mays
cccacacaagcgccgcttaccgcccgggacaggactgttggaagtccccagacggcagcgatggcggaattatcgacatcttcggatggattggtggacgaagaagcgaggcagcaggaaccaggacaaggaagtgctgaaggtagccatggtctgcaagacacaaaggagcaggacataataaagggaaaggcggctcttgtttccactgaactgctgagggaggatctggttcagagtgctgttagttttctgaaacacccgaaagtagtagcctcttcagatggacagaggcgttctttccttgtaaataaaggactcaccatggatgaaatagatgaagcatttcgacgtctacaaagcccgtcatcgaattctgcgagctcaaatatgtgcacatctcaaggtatggcagagtccatttactagttagctttttatatgatattttagttctatatgttcgtggatcatataatgatgtttcattgtttatgtgtgttttccgctgtaaatgatggtgattccatatgaaattccccattcagagtttcagacctaaatggcttaatcatgaccaatctaactta

SEQ ID NO: 274366 - DNA, 1000 bp, Zea mays
  unsure (1)..(1000): unsure at all n locations
ggcggaattatcgacatcatcggatggattggtggacgaagaagcgaggcagcaagaaccaggacaaggaagcactagactgtcgccatggtctgcaagacacataggagcaggacatcagaaagggaaaggcggctcttgcttacactgaactgctgagggaggatctggttcaaagtgctgctagttttctgaaacacccgaaagtagtagcctgttcagatggacagaggcgaccttttcttgtaaataaaggactcaccatggatgaaatatatgaagcatttggacgtctacaaagcccgtcatcgaattctgcgagctcaaatatgtgcacatctcaagggatgtttgatcattcatgcaggattactgaggaaattgaagtcgatcgaaagtgtatggatggtttagagagggtggaacctgaagctggacctgtggcccctgtggtacctcgtcatccaaaatcatatatggagatcatggaaatgatacaaaggggtgagcggccagacgatatacaggatattaacgatgaccctccaaatcctgatcaaccaatctcagaacctcgtatggcaccgaaaccaaagccatgggaaaagcaaggtcaagggagtttggcctgtgatttgaaatcgctgccaagggaatccgacgtgctgaggtcagaagttcagcacgacgacggcaccaaccaggttacggagtccgccgatggcgccaaccaagcggactcattgctgcaggcaggcgtagctgctggatctgaatctcctggggttccagatgacgccgcttcttcgcttgagtaaccaccgcgaaaataaatgaatgacgccgtaatcagacgcgaaaacaaacgacctcattaccacaacactgttctgatatttttgggtcctgagagagccacttgagttcacaataaatgtagtacccatcactggatgatcttttttagttgctggaacccaannnnnnnnnnnnnnnnnnn

SEQ ID NO: 274367 - DNA, 689 bp, Zea mays
cccacgcgtccgacccatcgtccgctcgcgtgtcctttgcgctcgcgaactccgtcgccggacacgagccagggacaccgagtgtggtgaggttgccccttcccttcccccacccccatcgtcgtcttggaccagctctgtacgtaccgtccgtcgatcgtcctttcccgtcccctctagcatcgatcgcagcctcctctgctactgccacgtctctgtgcctgccgagacaagcaagggggtcgtcggtcggggctaggttgttcccttaattcattctaggggcagatcagatcgaaagaaatcaaactaacgtagccatggaagaagctccacgtcattccatgtagttacttcttcagagcgcgcggtggcggccggctagaagctttgttcgttgcatttgaattcaccaccaaaggagaaggcgcctgttggcgttccaccaattccatcccatcgccacaaggtcgtcgatcacgcggatcgtcgcgactgaccggccggcctcctcagccgtccttgttgtgctacaagatcgaggcgacaggatccagccagccacgatgtcggcggccggcgccaccgccgtctgcacgaaggacggcggcctcctcccgctgcgtccgcactgcgcgaggtcgtcctcctccttcgccgccgccgccgccggcatcgtgatctacctg

SEQ ID NO: 274368 - DNA, 739 bp, Zea mays
ccctcctagctccccgacccggcctccgctcctaccccacccgccacccgtcgacgccggcctctctcctcacccgctcggagagtcggagcccggcggccggagggcgacgtcgtccctaataaatactaataatttatcactatacataaccaatatataagccatgggcaagcgcagcgtccctcggtaccctgaggacgaggacaaaggcggctgctgcggctgcctgtgctggtgctgctgcttcctgttgttcatcgtggcggcgctggccggcacggccgcctacttcttcttcgtgtacaagcccaaggcgccgtcctactccgtgagcaacatgtccgtctcgcagttcgacttcagcacctccgacctgacgctgtacgtcaagctcaccgcctccgtgcgcgccgagaaccccaacgagatgatcaccatcaggtacggcgagggctcccacaccgtggtctcctaccgcggcacgccgctgtgctccgggaagctcccggccttcttccagggctacaagaacgtcaccgtcatggacatctccatggagggccgccacggcttcgggtcggggctccagcaggcgctagaggagagcgagaaggccggggacatcccgctcgacatcttcgtcagcgtccccgtggagctgcagctcggctccgtcgacctccgccagatttaagtccacgttcactgcgcgcgcgtcctccatagcatcctccgc

SEQ ID NO: 274369 - DNA, 369 bp, Zea mays
agcgcatgaataatttaatgatatcacttgcccacaagttcacgaacttgcaagttctcactctccggcaaaacaaacctcagcttgaagacagtgccgtagaggctgttgccaactactgccatgacctacgtgagttagacctcagcagaagcttcaggcttagtgaccgctccttgtatgcgctggcccatggatgcccacggcttacaagactgaacattagtggatgttccagtttcagcgacactgcgttgatttaccttacctgccgctgtagtcacctcaagtgcctgaacttgtgtggatacgtacaggctgttactgacacagctttgcacgctattgctcacaactgtgggcagctgc

SEQ ID NO: 274370 - DNA, 1302 bp, Zea mays
aggtaaaaatgacgagtccatggaagattcaacaaggaaatgtattgaaatgctttgtgctcctgatggtgagcttcctgagaagctgaggaatctagaacctcgccttattgaacatgtcagtaatgaaataatggatagggatcctaatgtccgctggaatgacatagctggtttggaacatgcaaagaagtgtgtgacagagatggtgatatggccactgctacgtcctgatatattccgtggttgtcggtctcctggaagaggtctactgttgtttggacctcctggaacaggcaaaaccatgattggaaaggcaatagctggtgaagccaaggcaacatttttctacatatctgctagttcactaacaagcaaatggattggtgagggtgaaaaacttgttcgggcactttttggtgtggccagttgtcgtcaacctgctgtcatatttgtggatgagatagactcattattatctcagcgcaaatcagatggtgaacatgaatcaagcaggagactgaaaacacagtttctaattgagatggaagggtttgacaccggaaatgaacagatcttacttataggagcaacaaacagaccccaggaactggatgaagcagcgcgcaggcgactcacgaaacgtctatacatcccccttccttcattagaagcacgggcttggataattcgcaatctattggagaaagatggacttttcatgctctcggaagaagaaacaagtgccatctgtaaattaactgaaggctactcaggatctgacatgaaaaacttggtgaaagatgcctcaatgggaccactaagagaggctcttcagacgggcgttgaaatcgcaaagctcagcaaggaggatatgcggccagtgatgctgaaggatttcgagaatgctatgcgggaggtaagaccttctgtttcctcaagcgagctggggacttatgaagaatggaacaggcagtttgggagcctatcgatctagtctgtcggcaggcatcaacgaatacaatcatgtcggcactatagaaaaaggagctcaacgattttagccggaacatgacatgcataacacagctctacagtttaacaatcttttgaagcatcaaaatttgaactgtctatttggagtgctgagtaatatccaggagcctacatatcaaatagtttcaattgtttttaaatcttcacttttctgtaaatttgtttgccttggttttgattgacatatgactagcgcggaagtcaaatactccgttccaaattataaaatgttttatcttttcctcc

SEQ ID NO: 274371 - DNA, 1095 bp, Zea mays
  unsure (1)..(1095): unsure at all n locations
gaagaaatgttaataaataacactaattaatgaccagagatctcgtacgacagaagggcattaatatgcatgcgcgcgaggcaaggcgcgcggttccctagcctggccaccaatatttgatggcaatcacaggtgaccgccggccatgagcgcggtggccgtggcgccacaggatacagcctcgttgggcaccttggcgacgaggtcgacagcctcagcgaagatgacgcccatgcccatgtggaggtgcggctcgatatggcagtggaaggcccacacgcccgggttgtccgccacgaaccggagcatcgtccacccgtacggaaagatgaccgccgtgttccgcagcggcgggtcccggaggttgagccgcgcttcgtcggcggcgtccccgcggtacgcgccgtcgccgtagcccagcacccagaagtcgtggcccgtggaggtgcccacgggtgcacctcgctgacgttgcgcgacagcgcgttggcgttctggagcagcacgtcgacggtggtgttgtgcgccaggacgtacacgttgtcccccaccgtcgtgttggggttcggcggcggcagcgtcacgtcgtattcccggctgaacgtctccgcggggcgcgccgccgccagcgtcgacttgagccccatcttcagggagcccaggtacggcgtggcgggcagaaccatggacacgttgttgatgggccacctgatgcgcccgtccatccggttctgcgtgttgagcagctcgatgcggcgggccgccgtcggcggcggcgggggcgtcccggcgcgcgcgcggatcctgtacgtgaacgccttgctgtggccgtagtcgtcccacgccggggtgaccggcggcgcgagggctggcaggtccgacgcgcggttggggcggtagttgagcactgccagcgccggcgccgtcttgggcagccggccgcgcacgcccacgctgacccagtagttcgaggacgtgtcctggtccgtcgtgagcaggacagagtagctgtcgccggagtagaggtcgatgtcgtccacaacgaatgggtccaagtagttgccgtcggcctccaccaccgtcagcatgtcagna

SEQ ID NO: 274372 - DNA, 448 bp, Zea mays
attcccgggccaaaccacgcggtcgatccattgcgcccggagccggccgatcgggggagcgcagcaggcgggccgcgccggccgccgcaccaccgggtagcccaggccgcgcgcgcgcgccgtccagctcgtctgctgtcgctcctccgtgatggccgacgtcgacgtggacgccaacaacgaggccgagcaaaggacgcgctcggagccggggacctccatgtcgccgtcatcggaggccgacgacgacacggccagcagtacacccaacgagtccccggcgcgcgccttcgcggggcacacgctcgaggagccgcctcggcggcgggcgccgtcccggcggtcccgtcccgttcggatgctccagagcgtgtgccggtcgctcccgctgctgaacccgcggtgcgggcggccgatgatgcaggccgggggcgtgcggatcgcgccg

SEQ ID NO: 274373 - DNA, 470 bp, Zea mays
gcgcagcgcgcagcgcagcccacctatcactctccggcgagcgaggcgcgagaaccgacttgccaccggctgctcgccgtctctctctctctccctcggggcgcgcgcgcgcgggagacaggccaaccgatcgccaggccgccagccatgggcaagcacgggcacgtgcaagtgccacgacgtggaggcgtgctacccgccgggggcagcgggcggcggcaagtacccgtacatgacggagaacccgcagctgcggtgggccttcatccgcaaggtgtacgtgatcgtgtgcctgcagctgctgctgacggtggccgtcgccgcgacggtgaacctggtgcgcgccatcggggacttcttcctctcccgcaccatgggcgccatgttcgccatcatcggcgtcatcgtcgcccccatcctcgtgatgatcccgatgatcatttaccggaagcggcacccggtgaacctcg

SEQ ID NO: 274374 - DNA, 888 bp, Zea mays
  unsure (1)..(888): unsure at all n locations
cccacgcgtccgaaagggcatcaccagatgcggcggtcagcggcgttcccaccgcgtcgcccggggccagggcgtcgccctcctcagcgttgtgacagcgacctcaacatccggcagcaccgcacctgcagcgaggtggccggcggcaccgcggcgggctgtgcggccgtgtgctgctgcttcccctgtgtcatggtggaggtcgtggtgctcgccacggtgcgcgcgcccgcggcgctgtgccgcaaggcggcccgcgtgagcaagggcgggcggcggcgctccgcctccgtggggcaggccacggagatctacgagctcccggtggacaacgccggcgtcgtcgtcaaggtggacgccagcgccgtcgaggcggtggcgctgccggtgaagcccgccttgcagctggaggagacgggggagcttgagaaggaggtgtgggccaggttctacggcacgggcttctggaggagcgtgtctcagctcgacgacgacgacaggtgaccggaacaatcaggcccgtgagtgagcgagcgatcgaccagctcctccggcgatgcttaagcaatagcatgcgtttccttggttgggtttccttcgttgtttttctgcggaaataagagaagatcgaggaaaaggaaatgtgatgcatggtcgtcgatcgactatacgagtttcttttgttttgctttttggaagggagaaccattctcttctacgatgccctgcatatttaataaaatgtatgtctattgaaccaatgtcgactgaaaaaaccgcaaatacattgaggaatcgctagttgaaaaacgtagtaggaaacaaaaaaaaaacaaggggggccgcctcgcgatctcagaccacacgcgtcccgcggacgcngtgggt

SEQ ID NO: 274375 - DNA, 416 bp, Zea mays
gccatttttattccactgaacatctagatctgtaattgagcttgcgcgcgtgtttcatgatttcgttataatatgtggtcgagcgagcagcaacatttgagttgagaagaatacatgacacccgtgtcaactaaccgcatcattttttagttgatggttcttatgccatggaaattcaacggatgttacagccttttcgtaatagatcatgttaaaaagcacgtgacttttatcgactttacaccgacccaagattggtataagcacatgccatacaagaggttcgcagaagcgattatcatggccttaaagaaatataagattacctacagcaagaaatgttctggatgggaaagaggatatttttaagtgaaaacatacaatttggaatggtgttccaagtgacttaagagagt

SEQ ID NO: 274376 - DNA, 489 bp, Zea mays
ttccgggtaaaccccgcgtccgccaaaacatagagtgtcgacttttctattggtgtgattgggggcactaaatacctaccacattgcactcagactacatatactgtgtttgtgtgttgtatgccgtatgcgtgtgtgagcttgcgcaaattggacatctaggccgtgcgtaccctgcgatgaaaggcgccgtcatcggcgcatcgaccgtcctggtcgtggcggtggtggccaccatctgcgtcgtttccttcaaaggcagcggcgatggcgggagggccgaggagggcgagatgtccacgtcggtgaagtccatcaagtccttctgccagcccgtggactacagggagacgtgcgagaaggcgctggaggcggcggccgggaacgccaccagccccacggagctggccaaggccatcttcaaggtgacgtccgaccggatcgcgaaggccgtgcgcgagtctcgcctgctcaacgagctcaagcacg

SEQ ID NO: 274377 - DNA, 732 bp, Zea mays
acaagcctctatattttttcttttattttttttggaccacagttccaccgtccagtgactactctcttatgtactctgatgaatgtctgactaatgatagatggtgcaatgctgcatagggcacaaatccaagaacacctcgtatacaacaacctaataacgaatcagccaaaaaaaaaattaaccagaagaccttattagtcaatcttgaggtcgttgcacgatcaaagattgggcgactctctttgattcttaactctttcttgttagtcaatctttaggttgcaccatccaatgaatgctgacgatgtttatgtacgtggcgtcgtggcggttaatggatgcccttgggcggttgggccgtcttcgcatgcatgggggcgaggagatagctagaggcaaggcgcggggcggatcggatcggaggtcagagcctgacgaagaagacggccagctccgggcccgtgccgccgccctgcggcgcgatcatgtacagcgactccgagtcccgggacccgacgaagtggtcgaagcagccgcgcatgtagggcacctcgtcgtccgctgccgcagccgcagccgcctcgggcgccgacgaaggggcggccctcccggggagcacgccggcgcccatggagaccgcccgcagcgtctccatcacagcgaggtcgtcgtccgtggcctgcctccgcaccgcgtacccggtcttcttgccgttgccggacgcgtggg

SEQ ID NO: 274378 - DNA, 488 bp, Zea mays
  unsure (1)..(488): unsure at all n locations
ctgcaggcactgttccggttttccttggtcgtcccacgcgtttgatgagaacctnggggacactccctgttaccaaactggattgctccgtacaaaccgcattcatcgcctggatcgcacacatgttgctcagtatgcatatggccttgctgctttggggaggcaacttcatgcaatgggactgacagatgttttaaaaatccaccctgatagcagcattgcttctgctttgatggaaatgtaccagagcatgggtgatgcacttgctcatcagtatggaggatctgcggcacataacacggttttccctgagaggcaagggaaatggaaagctactactcagtctcgggagttcctgaaatcaattaaacggtattacagtcatgcctacactgatggtgagaagcaagatgctataaatctatttttggggtattgtcaaccacaagaaggaaaaccagctttttgggagctggatactgaatact

SEQ ID NO: 274379 - DNA, 436 bp, Zea mays
gtgtgggcatgtgtgcgcctgttttgactgcgccgatcagctgaaatcgagcggcatgagctgcccaatctgtcaatctcctattgatgatgttgttctggcgcggttgaatttttgagcttagaatttaggaaaggccaagagaaaaagagccggcactcccagatttagacgtggagtttgcgaagccctggttttgaggcggcttcttacctttttgcttaaccaccactaaagaaatacgagctagttcttggagaaaatgtaaatatgtttttttggcgcaagagcggtgtgcttgtatcgcactaaaggaaaacagagttctaattaaaatgccggttgtattccccgtatgttccacatcacttgttcacggagagaatgtagtggttctggttctatttacgcagagccttcaactcacggcattgat

SEQ ID NO: 274380 - DNA, 430 bp, Zea mays
caagggcaacaggagagagggatggctaggctgatgtcgctggttgacgaggggttcgccgtcaggcgccagacccaggaagcgttgtactgcatgcagatgatgacgaggatccagactcagctgtacacgagacggctcaagaccgagaaggacaagaaggttctcaagagtcagaccaaggccgttaataaacatagcctggactccgcaaagattggtgaaggctgggatcatagcctgcagtccaaggagcagatggaaacggtgcagaagatgaagcaggaagctgctacaaggcggcaaagggccttgtcatacgcattctctcaacagtggaggaacaggaacacctcttctgcgcgagctgcgcatgggcctgctcccatgtacatggaacctggcaacccgaactggggctggtgctggg

SEQ ID NO: 274381 - DNA, 631 bp, Zea mays
tttccttgaaaaggtgcattgtgggtctctttgtctgctgcccttgtttccaccttgtgtaaatatttttcctgtcttcaaaagttggcatcagttttgcagttttcttatgccactgctaacaacttctcttccagtctatttgacttggcgtgtcagttgtttatactatcagcttttgcgtttcatgtttgcaggaacaggttagggccttcattgaaggtactggtgacagcgacgtgcttgtgctgaatgtccaggacccgttccagaggctgcttctgcacggtgtttgtgagttctataacgtaacctcaatgaccacaagcagtgtaagggacgggaagccatggaagagcaccaccatcaagaagaggcatgtcaccggtcttcctccgagaatcacattagttagcttcctgaggatgaggaagaattagtcgtcccagtaacatgtggatgtgagggtcctacactaattcgcctggatgtgtactaaaaagacaaatttgttgctttaggtcgcatctagcatgtaatcaaatgtaaaatatccatgtcaaatgtaaaatacattgcaagaccttgttccagatgaagaaactcaaaagtgtaagcccctacttctatc

SEQ ID NO: 274382 - DNA, 530 bp, Zea mays
ggcggttcctgagggctcctacgctggtagcacgcccatggggagcgactgctacggtggtgctccgtgggcagaagacgaggaggtgcgccgcctcagcgtgcggatgcaggcgttggaggcagaccgtgagtccatgaggcaagccatcatgtccgtgggagccgagaaggcgcaggtgatgctgctcaaggagatcgcgcagaagctctgcaaggacacgacaccaccagttccagcggcagcagtggctcagcacagcttttacaaagggggcaacacacagccggccatgaccatcactgtgcgaccaccacggcacccggctttgcttatgcaaaggaaactggtgaagaagaagccatcactccttgctgcagtggtcaagtgggttacatcaatcatgtggtggcgaaggaaatcatcccgcgtcaagttccctattgggcagtgcggcaacaacgtggggctgcttctgctgctcgacaaggctcccagggcaggccacgggcaccagaggccctcccaag

SEQ ID NO: 274383 - DNA, 689 bp, Zea mays
gtgttcaccgccaacgactcgccgcccgatcagaagatccccttccaccacgagatggctcaggttccaacatttccgtccaaattgttcttcttctgcgaagtggagccaaagagtggcggagagacgccggttgtaccgagccattatgtctacaagaggatgaaggagaaattccctggattcgtggagaaactggagaaggacatgattgtatatacaagggttttaggagagggcgataacccgtcctcgtcaatcggtcgtggatggcaatcgacatttctcactaaagataaagctgttgccgaggaaagggccgcaaagctcgggataaagctagaatggaccgacgacggcgtgaagacggtcatgggccccatccccgcggtgaagtgggacgagagccgaggacggaagatctggttcaacagcattgtcgccgcctacattgggtggaaggacgcccggaacgaccccacgaaggcggtgaccttcggcgatggctcacccctgcctgctgacgtcatcgacgcgtgcggccaggtcctagaggaggagtccgtggccgtgccatggcagcacggcgacatcctccttatcgacaattgggccgtcctgcactcccggcgctcgttcgagccaccgcgtcgcatcctcgcctcgatctgtaaatgatgtgtgtagat

SEQ ID NO: 274384 - DNA, 439 bp, Zea mays
cccacgcgtacgcccacgcgtccgcccacgcgtccgaagatgctaagttggctccgacgcttccctaacgatgtgatccataggaaggggggcagctcgggccggaggacctcctcctccacctcctggaggaacaagagcagcagcagcttcaccgcgcggatcatccgttgtgcgtcctccgtcgtcgacacacaccaccagcaccgtggtgatgatgatgacgacgatggcgatgaagacgacgagtacgacgactgtcgtctaccgtcgtcgcctcctaacaaccacgctagaagaaacaccaccaccactgctgtcatctcggcccgagccttctccttccgcgagctagccgatgccgcaggaaacttccgccaggacaacctcatcggagagggaggcttcggtcgcgtctacaaagcccgcctgccaactc

SEQ ID NO: 274385 - DNA, 468 bp, Zea mays
gcgaattttcatgtaaaaagagctgatcagacatggctgcgaaggacggctcagggtcacaggaccaggggcacaggttgtggcccatgctgtcctacgcttgcggcgagctatgtgtgatcatgctgctctacgtggctgcctttgcatcccatgcagccacaaggctggcgcgcatctgcgggctcaggccaccatgcatcctgtgcacgaggctggaccgcgccctccatggaaacttgccatggttctccgcggacctggtctgttccgtgcatcggtccgaggtctcgtctctggctcactgcaagagccatggccggcttgcacggtccggcgatctctgcaaatcatgcctcctttcatgcacggcggtaggtgcccgtgaggaggtggtgaactctcggcctacgacatccagcagcaggttgtgttcttgctgttctgatccgttcaagaataatactg

SEQ ID NO: 274386 - DNA, 2396 bp, Zea mays
tcggaggggggttgccgtccaaatcgaaccaggctctgaacatccgtaaagcaacccccctctccattccaaacaggccctcctgcctccgttcctgggctagctgtcaggacggctcagctccagctttgcggccctccagctctccccagttcaagttcaatattggcgagcatgcgagtttgccctcttccgtcgtcgtcatcatcatcgtcctcgcgatcccggcgtccctgtttcggcctacgcctcccgtagacaacagttgcgccctgctctccggcaagctatggccaagctgagctgcttccccgctctgctccccggcaagaggaagaagaagacacgcaagatcaccgatgctatcaaggccagcggcaacgagtgccccaaggtgaagccggtcgaagtcgaactcatcgacccgacgcttggtgcaggcgtcgtccaggacgtcgtccccgccgagctctcggtccccgtggaggaccgcaacaataaggaagcggctgatcaactggtgttggtgaaggagagcgatctgtcagatttcgacttcagcttccacgcggccatgaagcccgtccggtccgacagtgacgtggcactggacacctcggccgacgctgcggtggcggacacatcgccgaagctgaagcggtcttgctccaacatcgagactaagcgaccaggctcgcgttccgcgcccgagatgccggcccggtcgcgctcctacggcgatctgggcaacctggtcgccggcctcgccctggacgcgacggcgaccccgcacggcgcgccggaggccagtccggcgtccgtgaagacgtcgcgcactgccgaccgcgtgatgctgaagaagcggtcgtccagccaggtgctgccctcgcgcagccggaagctctggtggcggctcttcctctggagccaccgcaacctgcacatgccgcggtcggcgcgcacggcccaccgatcgttctcgcctggccgccacgacgggtacacctcggacacgttcgaggagggcccggccgccgaccgcaagaacaagacggtcatggtcgacgagtcgccgccagcagcgtctgtgcccaaccagtgggtcgccttctgcgccgagagctccatccacgaccgcgtcagcgcgtgggtcagcagcatcgaaagcgagcctccgttcgatatcgccgaggaggatgacgacaactacgacggagaggacgatgaggagaatggcgagtgtgcggcgtcgcagccgcgccatctcgagctcggggagccatcgtccgggaagggcggaaacagcaaatccaagcgctgcgcaacgacggccgacgaggtcgtccaggccaacaccgtggtgcagtccctgaacgccttctcgtcggtggcgcacatctcagggatgggcctcaaggtggtgccgatgatcgcgcccttctcaaccctccgggccgtcaacctctccagcaacctcatcgttcatatctcccctggatcgctgcccaagggcctccactctcttgatctgtccaggaacaagattgccagcgtcgagggcctccgggagctcacaaagctacgcgtgctcaacctcagctacaacaggatttcgcggattgggcatggtctgtcgaactgcacggccatccgggagctgtacctggcgggcaacaagatcagcgacgtggagggtctgcaccggctgctgaagctggcggtgctggacctgagcttcaacaagattacgacggccaaggcgctggggcagctggtggccaactaccactccctcctggcgctcaacctcgtaggcaacccggtgcaggccaacatcggcgacgacgccctgcgccgggcggtcacgggcctcctcccgagccttgcctacctcaacaagcagcccgtgaagccgcagcgcatcgcgcgggaggtggccacggacagcatcgcgcgcgccgcgctcagcggctcggacagccggagcatccggaagaggacgtcgcggcggctcacgcagagcccccgctcgtcgtcgttgaccagggcccgtggcggcggcggcggcggttcacccacaccaagaaacacctctcgtcgtcgttgaccagaagaaccaactgcgtgattcgcgttgctctttggagacgggagacggtggcgtgactgcgtgcaggcagactcagacgacaccatgattcggcacggcgccagcatgatatgagacaaaccaagtatataaagcaagtatgatgtgagagaattgcgatgcaacacataatgtacatacttgttagggagatattgcttagattaatactacgaccgatgcatctttgtacctgaaaatatcaatttgagcctggttgaagatgaaaaaaaaaaaaaaagggcgg

SEQ ID NO: 274387 - DNA, 657 bp, Zea mays
ggaaaaccatcagagtacaacacctacaatgacatagaggctgtttatgattgcttgagaacggagtatgggatagaagaagaggatctaatcctgtatgggcaatccgttggaagtggaccaacgttgcatctagcctcacgtctcgagaagttaagaggggttgtcctccacagcggcatactctctggcatacgggttctgtatccagtgaaagtgacgctttggttcgacatcttcaagaacatcgacaaaataaagcaggtggactgccctgtgttagtcatacatggcacagccgacgacatcgtggacttggctcacggcaagcggctgtgggagctagccaaggacaagtacgagccgctgtggatcaaaggcggtgggcactgcaacctgcagacgtacccggagtacatcaggcacccgcgcaagttcataagcgccatggagaagctggccaaggacagcagcaaggcggcccgggcgccgccgccgtcgagcatggccgccgaagtaagacgcaccaagtgcttgagattcgggaagagatgaggctggcggcgaggccatgcgggtctcggccgtctttagctgcgtacgccagtcactaaccccctgctgcattgcattgcattgctttgctgctgcacgtgc

SEQ ID NO: 274388 - DNA, 554 bp, Zea mays
ccgacgacatcgtggacttggctcacggcaagcggctgtgggagctagccaaggacaagtatgagccgctgtggatcaaaggcggtgggcactgcaacctggagacgtacccggagtacatcaggcacatgcgcaagttcataagcgccatggagaagctggccaaggacagcagcaaggcggcccaggcgccgccgccgtcgagcatggccgccgaagaaagacacaccaagtgcttgagattcgggaagagatgagatgccggcgacctggacctgggaaggaaacgcggtgcagcagcaaccctagttcgtgtatcatccgtgtgagattgagttcagacttcagagtagagagtagacagagtggagtgacagacagacctgtggctgctgtagtatgctgtacgtgctggagttcaggactagagagatgtctttgttttcctaggggcgccccggattagcctgttcgcagctgaattttttcttgttttttttttctgttttcgctacctgtattgtagtcactgcgccccaaaaatcgttttgatt

SEQ ID NO: 274389 - DNA, 829 bp, Zea mays
aggccggggcgtgccggatcgcggcgccgtcgtcgcggcccgccgccgccgccgccgcgccgtcgtcggactcatcgagctcgctgctgacgcagctcatcgcgtcgtcctccttcggcggggccgcgtcgtcgcgccgccgcctcaccggcacgctcttcggctaccgcgacggccgcgtgtcgctgtcgctgcagcagaacgcgcggtgccagcccacgctggtggtcgagctggcgctcccgacgcacgcgctgctccgcgagctcggcgcccacgcgggcgcgcgcatcgtgctggaggtcgagaagcgcgccgagcagggcaccgccgacggcaacgaggccatcgccaccaccgaccacgacgggtgggtgctggaggagctcatgtggaccatgttctgcaacggcaagagggtgggctacgcggtgcggcgggaccccaccgaggaggacatcgccgtgctggagacgctgtgggccgtctccatgggcggcggcgtgctccccggcaggtcggacatggacggccccgacggcgagatggcgtacatgcgcgggagcttcgagcacaccgtcgggtcccgggactcggagtcgctctacatggtcggaccgcccggcggcgactgcccggagctcgccatcttcttcgttaggctatgaattgaaccgagcgaaccatacgaatcgaacaatacagtgtacacgtcgcagtcgtggggtctaatctctcgcctggtctcgttcgttgttcagcagcctcagctatcgtcagagatattactcatttgccccaaaaggaaagggaaaagggcgggcgctct

SEQ ID NO: 274390 - DNA, 1715 bp, Zea mays
gccgaggggatggtacttggtgcctgtgagcattaccgagaagctgccatactgtgtccatctcatgccagggcactcaagctcctggggagcgctctctttggcgttggggagtaccgagctgctgaggaagcactggaggaggccatcttcttgaaggaagactatgctgatgcgcactgtgaccttgggtccgctctgcatgcagtaggggaggatgaccgtgccatccaggagtttcagacagcaattgatcttaaacctggccatgttgatgccttatataatcttggtggattgaacatggacgctggccgcttcgtacgggctgcggagatgtatactcgtgtgctgagcatccgaccaaaccattggcgtgcgcagctaaacaaggcagtggctttgcttgggcagggtgagtccgaggaggccaagaaggcactcaaggaggcgtttaagatgacacagagggtggaagtgtatgatgctatctcacatttgaagacattgcaaaagaagaagctaaagccttccaaaggaaaaaatgatggtcaaggggagcaggcttatgttgttgtggaggcatccaagttcaagagggttggcaggaagactaccttgcggcaggatttggccaatgctctagatataagggccttcgagaggatgacgaagctaggccactgcgatgtggagcttcttagaaaagagatgaatgagactgatgtccccgtatcttactcaggcactggcatccctgagaagtcaatacgcaaagcagctcttgaggttattctccgcaggctcctctcttttctcaagccagacacctttcagggtgccatcaaggcaatcaacgaaagaattctctctgtccttgatgctcctggctctggtcgtgttgatctgggcatgttcttcgccaccattgctccaatctgttctggccctgtggataggcgcaagcgtatcgtctttgatgcactcctttggcgtcctgctagcgaaggcagcaatggccagataaggaggagtgatgcgttaacctacattaagcttcttcgagctgtttatatacccacgcatggggctagtgacatgctcgaaatgcatggggagtctgaccctaccatggtatcatacacggaattcttagagatgttcaatgacccgagattggggatttgggatcctgagcactctggtgaagcttgaggagagtgaccacatacgtcacggtcgccacacatgctccatctgcctgtaccctatcattggttcacggtttaaggaaacaaaacactccttcagcctgtgcaaccggtgctacagtgaagggaaggttccgtcagcgttcaagttggaggagtacaggttcaaagaatacggtaacgaatccgaggccctcattgataagtgcatgtgcttcaatttgcattctaagaagctggaagctgatgcttgatcattcaaactttgatctcgagtgctcaagcatgaatctgtgtatttacctaggtgcaaagatgtctagttagctctcccactcccttgtaaacaaagttgctgccattcagggtttctctagatgtgtcccggttactaatatatgaccgttatgtgttagctgttgttttaagtgtccgggaacgagtaaatgtccctcccatacactctgtcgccccagtccaattcagccttgttgaaccttcata

SEQ ID NO: 274391 - DNA, 641 bp, Zea mays
cagagaacagcgaacaaggtgataggtacatggagttggctcaccgagttgacgaagctttggggttcatgtcagctgctgggctccctttagatcaccctataatgacaacagcagaattttggacgtcacatgagtgtcttcttctaccttatgagcaagcgctcactcgtgaggattccaccacgggcctctattatgactgctctgcccacttcctatgggtcggagagcgcactcgccagcttgatggtgctcacgttgagttccttcgaggcattgccaaccctcttggtatcaaggttagtgacaagatggacccagcagaacttgtgcggttgattgatatattgaatcccgaaaacagggctgggagaataaccatcatcacaagaatgggacctgaaaacatgagggtgaaacttccacacctgatacgcgctgtccgtggggccggtcagatagtaacatgggttactgacccaatgcatgggaacactatgaaggccccttgcggactcaaaacccgctcgttcgacaggattttgggtgaggtgcgtgcgttctttgatgttccaacggaaaacccaaaaaaaggggaaaaaaaagggggggggggggaaaaaaaggggccccccccc

SEQ ID NO: 274392 - DNA, 667 bp, Zea mays
gcggttgattgatatattgaatcccgaaaacagggctgggagaataaccatcatcacaagaatgggacctgaaaacatgagggtgaaacttccacacctgatacgcgctgtccgtggggccggtcagatagtaacatgggttactgacccaatgcatgggaacactatgaaggccccttgcggactcaaaacccgctcgttcgacaggattttgggtgaggtgcgtgcgttctttgatgtccacgaacaagaagggagccaccctggaggagtgcatctagagatgactggacaaaatgttacagagtgcatcggcgggtcacgtacggtgaccttcgatgatctggggtcacgctaccacacgcactgcgacccaaggctcaatgcctcacagtctctggagatggcatttatcatcgccgagcgccttaggaaaaggaggatggcctcgtcgcctttgtacacgaaccagctgggttccattccatcaatgggtctgtgaacaacactaggttcactgtcaaggactagtccttgggttttgtttcagctgctgtgtcaaactttgctggcatgcactggtaaactagatagcctgctgtactgctcattcccggcactgggtctgccctcaaagtataatagatactcatcactttttgaccag

SEQ ID NO: 274393 - DNA, 348 bp, Zea mays
cggcgaggtcaggcggcgctgcgacgcctacaacagcggccccgccgtcgccgccaccatacccaagatgtgacgacgctgcggtggtacgacgacgggcgcgcacgtgcttgtctgcatgcggatcgatcgacggccgagctgtctggcacgacgacggcgtgttgatcgagggcctcggctcctccagctgcgacggtcacgatggtgttaagatttcgtgccgaaatgtgatatgtttcatgctcgatcaagtaatttattcctaatctgtgtgctgcgcaaaagaaagaaaaacttcgaagtgttgcgctactcgctagtatgaattaattcgtttttcccttt

SEQ ID NO: 274394 - DNA, 424 bp, Zea mays
  unsure (1)..(424): unsure at all n locations
cgaagattgccacttccctaacagcatcgagaaggcaatcagaagcgcttttgtaaaggccgacaatgcaattgcggattcccattctcttgaccggaattctgggaccacagcattgacggtccttatatttggcaggacactgcttgttgcgaatgccggtgactgtcgagctgtattaggaaagcgaggccgagctgttgaactctcctagagaccacaaacccagctgcatagttgaaaggctcacaatcgaaaacctgggtggtaccgtctttgatggctacctcaacggtcagctggctgtagcaagggcaatcggtgattggcacatgaaaggctccaagggctctgtatgccctcttacaccagaacctgagtttagggaggttaggcttactgangaaaatgagttcttgataat

SEQ ID NO: 274395 - DNA, 544 bp, Zea mays
  unsure (1)..(544): unsure at all n locations
agcangaagcaggtgttcatccagtccgatgactcgtctgtgctcgcggcgttcaagaagttcgccaggttcaggagggtgctcaacatcgaggccaagatcagcggcgcctccaaaccgtcggtggatgacatcaagaagtacgcggacacggtgagggtcaaccggaactccgtggcgcagatcaatggctacttcctgacgcacttcaccgacacggtcagcaacctacaggacgccaacatcaccgtgtttgtcggcgtactcaagaacgagttcatgaacctcggcttcgactacttcgctgacccgacggtcgagatcgctacctacacgttggcagtgctggctgatgggctcgtcacggacaaccctgccactgcagcttcctacttcaggagtccatgcagtgacatgaagctgaacctgagctacacgatcctgcctgcacaacctggcgctctggtcaacctggcatcnccggggggccctggctccggcgggagccccggcaccgttgctccaacccgctgacgttgtggac

SEQ ID NO: 274396 - DNA, 942 bp, Zea mays
cgccatcgagcacccgtggcgcaacatcctggagcgcaggtaccggccgcagctgacggtggcagcgctgatccccttcttccagcagctgacgggcatcaacgtgatcatgttctacgcgccggtgctgttcctgaccatcggcttcggcgacgacgcgtggctgatggcggccgtcatcacggggctggtcaacatgttcgccaccgtggtgtccatcgtgtgcgtggaccgcctgggccggcgcgcgctgttcctgcagggcggcacgcagatgttcgtctcccagatcgtggtgggcacgctgatcgcgctccagttcggcaccgccggcgtgggcgagatgtcccgctccaacgcctggctgctggtgctcttcatctgcctctacgtcgccgggttcgcctggtcgtgggggccgctgggctggctcgtcccctcggaggtgttcgcgctggaggtccggtcggcggggcagagcatcgccgtgtgcgtcaacatgctgctcaccttcatcatcggccaggccttcctcagcatgctgtgctcgctcaagttcgggctcttctacttcttcgccgggtggatgttcatcatgaccaccttcatcgccctcttcctgccggagaccaagggggtgcccatcgaggagatgaacctcgtctggagccgccactggttctggggcaagtacgtcaacgtcgacacacaacacggcggcgccagcccgagatccaacggcgtctgatctgagcaagctgcagcaacacctcggcacctgacctggccatgcatgcacacgtatactataatctaacaacgtagctgacctgggcaaattgccagcctgacaggggccagggtgctcgaatgtctcactctcaccgccgactaactttccatcaaaattgattcttgttcatactccatagcatgcacaga

SEQ ID NO: 274397 - DNA, 572 bp, Zea mays
ctaccaagccatcagctcgcggggccaccacacctacatgctgcagactgccgagctggtgcacgagtcgtcgacggacgcggcggcgtcgctgctggtgacggcgctgaacgaggggcgggacgtgatcctggacggcaccctgtcgtgggagccgttcgtgcggcagaccatcgcgatggcgcggtccgtgcaccggcagcgctaccgcatgggggtcggctacaaggtcgcgcccgacggcacgaccacggagaagtactgggagcccgtggaggaggacggcgagcagcaggcaggaagggcaggcaggacgaggaagccgtaccgcgtcgagctcgtcggcatcatctgcgacgcctacctcgccgtcgtcaggggcatcatgcgagctatcatatccgggagagccgtgcgggtgaactcgcagctcaagtcgcacaagcgcttcgccggcgcgttccgcaagtactgcgacctcgtggacaacgccaggctctacagcaccaataccatcgccggcgcaaagctgatcgggttgaaggacaatgacaaccggctactggtggacg

SEQ ID NO: 274398 - DNA, 392 bp, Zea mays
cagagaacggactaggtgcgtgctctgcgctgacaagagcagcggcaggcaggtcgtcggtgcgccttgggtggtgaataattgaagaagaagaagaggcggagacttgagcaggtgatgtcttcgctgccaggaggcttcctgtgcgtgcgcgtcctgcgcgggatcgacctcgtcagctgcgacgccaagggcagcgacccctacgtcgtgctcagcctggatggacagaaactgatgacgagcgtgatgaagaagacggtgaacccgttgtggaacgaggacctcaccttggccgtcatggacgcgtcggcgcccatcaagctagaggtcttcgacaaggacacgttcagcaaggacgacatgatgggggacgcggagttcgacgtgga

SEQ ID NO: 274399 - DNA, 1230 bp, Zea mays
cggacgcgtgggtctagaaacactagtgcttccaaaattgcaagcaaatcttcctttggtgggagtgcgcctttgaagaatggtgaatttcagaagatgttggaaatggaatcacagaaaactatagtggtaaattgccctgatgtgagcatccctgtagtggaagagacaaaaccactcatatgcggaatcactgaattggatgatggccttttcaaggacaagcaactttccactaaggagattgcaacgtatggattgtatctttgccccttatggtttgtgacagagtatttatcgaatgccagcgccttgcaagaactagtgttgccagtaccacagtgctgtcttcaacttcaggactcttcactcttttcattggtgttttacttggccaagactccataaatgctgcgaaaattattgctgttttcattagcatggctggcgttgtaatgacaactgtgggccagacttgggcatctgatgaatcagaagcaggcaaatctggttttacacagaggactcttctaggtgatatgtttggtcttatgtcagcaatcgcctatggtctatttactgtgctgcttaaaaaattttgtggagaggaaggagaaaaggttgatgtccaaaaactgtttggttatcttgggctttttacccttgttgctctatggtggattgtctggccattaaccgcactaggcgttgagccaaagttttcaatgccccactcagctaaagtggatgaagtggtggtggcaaatagcctaatcggaagtgtattatcagactacttctgggctctttctgttgtttggactactcccttggtggccactctaggcatgtctctcacaattccaatagcaatggttgctgatatgatcatccacggccgtcactattcagcagtatatattcttggttctgtccaggtattttcaggctttgttatcgcgaaccttgcagatcgcttttctcgttctctagggctatcatagtctcataaaacagaacaggcccttattagtgcgtgcatcaggaagctccaaggtcgggttggttaggccaatacttcagataacctggatcgggagatgccagaaattattttccctttgcttctttaaacatagtggaggtgaattttgccgtggtgaatagtgaaaggcagcagatgaagaagatcacatatgttatagcaaccctttgcaactgtaaattctc

SEQ ID NO: 274400 - DNA, 386 bp, Zea mays
acccacgcgtccggagaggccaggtgccaagcagaggcggtgcagtgcaggcagggcgtgtggagaagcagagcagcgggcggcgcacctgcacgtgccaggctgccagctctggccatggcggatcaccagaggatccaccctgtcgacctggaggccggcaaccggccgacgacgccgctggtgccgggagcctcgttccggtcggacaagggcgacccagcgcagcgcgctgatcaaccaccaccaccaacagcaacaacgaggctacgtctacgtccccgggccgctgcctccgccgccgcgtcacgccgcgccaccggcgccgcctctgccgccgccgaagcggcgcaggcggcgctgctgctgccggttcccctgctgcg

SEQ ID NO: 274401 - DNA, 874 bp, Zea mays
tgcgcattcgcatccgggcatcccaccccacccacctccttcctcttcccgcccgctaaaacccacgccaccgccgcgcgccgccggcagcgcaagggacgcacgatggccatgcaggtggtgcgcaacctcgacctggagcggtacgcggggcggtggtacgagatcgcgtgcttcccgtcccggttccagcccaagacgggcaccaacacgcgcgccacctacacgctgaacccggacggcactgtgaaggtggtgaacgagacgtgggccgacgggcgccgcggccacatcgagggcacggcctggcgcgccgaccctgccagcgacgaggccaagctcaaggttcgcttctacgtgccgcccttcctccccctcattcccgtcaccggcgactactgggtgctccacatcgacgccgactaccagtacgcgctcgtcgggcagccctccaggaactacctctggatcctttgcaggcagcctcacatggacgagtccgtgtacaaggaactggtggagcgtgccaaggaggaagggtacgacgtgtcgaagctccgcaagacggcgcaccctgacccgccgccggagagcgagcagagccccagggacggcgggatgtggtgggtcaagtccatctttggcaagtagccttgtggtggtgggtggcagcgcgggtgctgccgtgccgagcaggcgagcgcacgcaagagatgcctgtgaccgtcggttccgcgtgtacattcagcactagctggggattaagttggttcgttgttgctgtcgcgatctgcaaatggcgaaaagtgtgcttgtttcttgcccgtctgtattgtatcgaactttgagcgaatgtttcagtttgctgcatcag

SEQ ID NO: 274402 - DNA, 326 bp, Zea mays
gccgactaccagtacgcgctcgtcgggcagccctccaggaactacctctgggtgcgtgcgaattcctctctggcctccgtccgtctatccctcgccgaatcgtgcctgtctgcccaccaatccccctgtgtttgtgtgtgcagatcctttgcaggcagcctcacatggacgagtccgtgtacaaggaactggtggagcgtgccaaggaggaagggtacgacgtgtcgaagctccgcaagacggcgcaccctgacccgccgccggagagcgagcagagccccagggacggcgggatgtggtgggtcaagtccatctttggcaagtag

SEQ ID NO: 274403 - DNA, 503 bp, Zea mays
accacgcgtcgccacccgcccgtccacgcgtccacccgacgcgacgattcctctcctccgcccgttcccaccgatctcacgctctctctcttcctccgtcgcgtcggcgtcgccatcgccggccatgggttgcggtggctccaaggaggccgtggccaccggcaacaccagcgccggcagcaaggtcctccggaggaagtcctcctccgtctccaccggcgcaagccacacctccaccacgtcgccgtcgtcctccggcgtcgtcgtcaaggacgtcgtgaaggatgcggcggcggccggcgaggtgatgacgcccgccgacgccgagaagcctatctctgtcgaccccaaggcagacgccatcgtggtgatggacgccaagaaagaggagggcaacaacaaggtggccgtggaggaggatctgcttcctgaatccaccatggccgacgaggcgcttgctgtggatgaggggcccaaggttgacgaaccactcaaaatcaaag

SEQ ID NO: 274404 - DNA, 405 bp, Zea mays
cacctctgagactcctccttcacaggccggcgtcgtcggtggtcggagagatggggcaacaacgcacgttggggtataccttcgtggcgcgaggcaccatcgtcctagcggaccatgctgaggtctccggcaactttgcctccgttgctgcacaatgcctacagaaactccccgccaacaacaatcgcttcaactacaattgtgatgggcacacattcaactaccacatttatgatggattcacgtactgcgtcgttgctaccgagtcagctggtcgccagcttccagttggatttattgagagagtcaaagaagatttttccaagaaatatagcggagggaaagccaaaaatgctagtgccaatggcctcaagcgagaatacgggcctaaactcaaggagcaca

SEQ ID NO: 274405 - DNA, 505 bp, Zea mays
tcgtgggacgatgcaagcctctacactgacgtcctgctaacgcgtccggtcaactgcggcctcagcttcggggactggatggcgcccgacaagcccaaccccaacgagctcaccggcgccatcgtcggcgggcccgacaagaacgacggcttcgtggacaagcgcggcaactcctcctacaccgagccctgcacctacatcaactccctcgccatcggcccgctcgccgcgctcgccgtccgaggcgtgcagctcgtcgccacgcagtgatctatccccatgcgtgcgtgtgtgtcccgctgtttcgtttcttccctgacatgatatgatttctactccgttactgatgattcattgattccggccgcccccgcattgttcattatattaggtgacgtctgcgggcgcgtgcggggatccatccaaatctctcactcgctattgtttctgtacgtacgtacgtgtacgtccaagattataatgatactcataataatctcgtcgc

SEQ ID NO: 274406 - DNA, 470 bp, Zea mays
catgatcccgaccgccatgggcccgggatacaagcatcatgggttaccagatgagggattccttttgtgcccacaaagatctttctcactttgcacaacttgtacttggcctcctcaggtgtaattcgatgaacagcaaagcgacccttggtgtcatagatcagacggaagttctctccagtcttgtcaatgctgatgacatccataaacccagcagggtaggttatatcggtcctgactttcccatcaatcttaatgaatcgctgcatgcaaatcttttttacttcatctccagtcagggcatacttaagtctgttccttaggaaaatgattagggggagacactcccttagcttgtggggaccggtagatggacgaggggcaaacacgccggtcagtttatccagcatccaatgttttggaccggccgcgcgtcagatgtttcttgggaccacgagccatgctgcgct

SEQ ID NO: 274407 - DNA, 445 bp, Zea mays
gagcggaggacgcctataaaaatggcggggcggaggcgcggacgggagcctgacccatatccgtcatccctccgggcgcggagaggagggggaagcagagcagcgggcgcggcggacatgacgccgatgcggctggtcgtccgagcctgcaccgcaccccccatccgcgtactggttaattacctgtatgatggagggtgcagtggccagtactggacccagtcttccagagggttcgcgtagtgcttcaggaacgacctggccctgctgatcccgtcccttgagctcgtgtcatacctgacaggccttccgatggcggtcgatgcaaacagctccttgtgctctggcgagagctggaagaacttccaggcgggcttgtatgcgcctgccgtgacggacttgctgacgccgtggtttaccacctgttaattggcaccacaaggaa

SEQ ID NO: 274408 - DNA, 752 bp, Zea mays
gccatgggcgcgggataccggctgaggcatggcaggcggctctggcttcccacccttctgttcagagatgggggtggtgggcagtatttcatctttgggttccacaatgctcacgtgatcaggcagaggcttcttagggccaatcttaccagtcgggtcccagggcagcatgatcttcaccttgatgcccagcacaccctgtctgagcagcacgtggcgcacggcggtgtccacgtagttgttaacagggtccccgctgtggatcatcaggccatccacaaacttcatggatttagccctctgtcctcggagtttcccagacaccacaacctcgcagcctttggccccactctccatgatgaaccgcagcacaccatagcaggccctccgcacagcaagccctcctaggagtttgtaacgcagagactctgcctgggcaatggcacacagacctctagtggccaccttttcagcataaagctctacactgccctctggaaagccaaacctcttctgaactacagcagtcagttcccgaatccgccggcccttctcaccaagaacattctgtgttctggtggctaagataatgatttctgtcctggttggtgtaactcgcacctcaactccagagtagccatcttcagccagctcccgagtaagaaactcattcagttcagctttgaagatgccatcagcgacaaacttcctcttcttggatatttgcactgccatcttgccgccgcgtccgc

SEQ ID NO: 274409 - DNA, 512 bp, Zea mays
atcgctacgagggtgatcgcgcgcgagctcaagatcgacgagacgccggtgtggaaggtgatgacgaggcaccccatcttcgtcctctcggatacgctcgccgtcgaggcgctgcagaagatggttcaaggcaagttcaggcacctgccggtggtggataacggcgaggtggtggccatgctggacatcgccaagtgcctctacgacgccatctcccggatggagagggcgtccgagaaggggaaggcggcgatcgccaacgtcgcggctggcgacgacaagtactccatcgtcgaagctctcaaggagcaaatgttcaggccctgcttgtctgccattattggcgaagactcaacagtcgtcatggtgtcgcctggtgattccgtccttgcagcgaccaagaggatggtggaagcgcatgcgacctcagccgtagtggccgtggggagcaagccgcaaggcatcctgacttcaagggatatcttgatgcgcctggtcgctaagaacctgtc

SEQ ID NO: 274410 - DNA, 466 bp, Zea mays
ccacgcgtccggggagaccgtcctcgaccgcattgaccccgccgtggcacggcctcgaggccggcgacgacgcaggcgcgaggcgccggagggtccggccatgacgtcgtccgtgcggcagtggtggcgccgcgccgccgctgcgctcaaggacaggaggagcctgctcctggcgcgcctgcgcccgcgccgggccgggtcgtcgtcgtggcaccaccgggagctggaggcggccgtgatccgcgcgacgagccacgaggaccggtggatggactaccggagcgccgcgcgggtgttcgcgtgggcgcgctcgtcgcccacgttcatccggcccgtcatgtgggcgctggcgcgccgcgcgcggcggacgcggtgctgggtcgtggcgctcaagtcgctcatgatggcgcacggcatcttcctcggctcgggccgcgcgccgcgcgccggccgcgtccccttcgag

SEQ ID NO: 274411 - DNA, 427 bp, Zea mays
gcatctattgcgcctttttgtaaaattgccagagctacttgcttctgtcaatatggaggaagatgcgttgaacaagctacagctgaaactgctggacgttctcaagtttcttcagaagaatcagatcaccttctttacctctgcgtacgatggttcttgtaaaggtgcagatgaggataaaaccaaatgattgcatgtgaacgttttatatcatgtaacatctttcgatggacttgtctggcactattgttgatatgaatgtcgcttaggacaacaatcggtttatgtaggatagatgctgcagattcctgaaagacggtacttgaactgcccggagcatgttgtattttcttaagatgctggaactaagacggcttagttgaattttcactatcaaaaaaaacaaagatgcttaacataatctttg

SEQ ID NO: 274412 - DNA, 554 bp, Zea mays
  unsure (1)..(554): unsure at all n locations
gaccctcctccccctctccggcgcgcgacgctcgccgccgcgcctcccctcccctcctccgaacgccgtggctgccgtgcgcccgaccggccggtgacggacacggcagctgctacgagaggaggaggatatatactagtatatagctagagcaattattagctggtcgtaagcatgaatcgacgattggacatgatagacaacatcgacggccgtcgggtaaccaagaacaaggcgcgcatccaagttggcgactcctcttcgtcggacgaaagcgacagggagaaggaggaagatgaagaagaagcacatgaggaagtggccaaggcgcccccgctgggttggaatcatcacaatcaccacgaagcggccggcggcattggcagcaacagcaacaggaggcggcttctgtcgaagcagctgtccatgaaggagaccaccagggagatcaaatgggagaagcgccggcggcagataatgcggcgcagcagcctggtggtgtcgttaaacgacgacggaggaagangangctgcggcagcatgaagagcgccgc

SEQ ID NO: 274413 - DNA, 370 bp, Zea mays
  unsure (1)..(370): unsure at all n locations
caataacccagtcggcaggcgtgacccgatgctctctcgtcgtcggatcgtcgccaccgtctcctccgcgtcgtctacaccgacatggacgaccggcagtatgccggactgaccaaggcaggtttgggcgtgctggccttcaactcgggcctcgccatctacaactcctggggcgacgcgagctccgtcgcgttcgtgctctccgcggactccatcctcgtgctgctcttcctctgcctccgtgagctggagctgcaggggcggccgggggccgccggcaggggcagggatgtcgggatcatcagagccgcggtgtggacgctgacgacgctgctctcggccatgttcgcgtctanggtggcgccgctga

SEQ ID NO: 274414 - DNA, 699 bp, Zea mays
tcggcgtcatgcaacatcggtcaacaaagatcttgaatctaagctaaaaaatgcctctacacttttggtgaagttgcaagatgagttttctagttatttgaaaggggaatgcacacaagaggttagtatagatggagatgcagagagacaaccattggtgtttatcaagatgaagctagcaaatgccaggaaggagcttgaggacatgagagcagacattaaaaaattcaaggatgatgttaggaaactttggaatgtcgcagctacatttcgggctgatatagatagggaggaggcaggtctactagcattagagcacaaagagcaccttgcttcgatttctgtatcatctcaccaggaagagctaagcaacattacatatgagctcaacatcatccatgaaagaacaaaagcaactaagatgcctatagagctacaacaagcaactgaaggtgtggaacaagcaaaagctaaggctttgatggcccattatgaggtggcaaaagctagggaagatgcggatcaagttaagtcacaattaaatgtcattaaattgagactagaagcggcatcaagggagatacttgcagtgaatgcatctaaagaaattgcaaccacctcagcaaatgcattgcaagaatacaaagatgaagcacatatagagccccaagatgagcagataagaaataactatatgac

SEQ ID NO: 274415 - DNA, 399 bp, Zea mays
ggaatcatggaacgaccacgcgtcgggcaggggaaggaggagaaacagaccaccagatcgatcgagacctcgccgtcgtccggcagggttaatatttggttcttctccggccgggtgtgcatggcaaaacgacccacggtgcccaagttcggcacctgggacagcggcgatgccgggtacacggcctacttcgacaaggtgcgcgagaacaagggcgccacggcgccgccgctgcgccggccgcgcagccccaacgaccccgaccccgaccgcgagcccgagccagaggaggggccaatgaggagagtccccccgccgtcgtcgtcgaggccggcgaccgcgggaggccaccgcgagccgccgccgccggggcggcgccacgggcagagccacggcgaa

SEQ ID NO: 274416 - DNA, 939 bp, Zea mays
cggacgcgtgggcgcgagcggccgccctttttttgtttttttcaaacgagtgggcaaaactgataacggccaaatggcagagcccaaattgctggctccaacaacagacgaggccaacacagttcaaggatccccaaagtaacagtggcttcagcagctctggaaaccaggcacgcttcagcacaggtaaagaatcatttcggatgcatttcttccacgggcaatctatttttacaagtttgagcaacatctccctactaccaagtgtccccctcccctgagcacgttttgtcccctttaaaaactaggaacagaattagaacctattctcttcttgcgggtttccacggacgggcgacgaatatgggtaaaaccaaagaacgtatttgctttgctgccttcacatcacgatgcggaggacggcgaggccgacggctgagatcgaaacaatggtacctatgcagtacttgatgacatcgtactttgctgcctccaactgggccttcagtgagtggatttccttgtcaagctttgtggtaagctcagtggtttcctcattctgcttggcaagctcatcacgtatgcgccctctttcaagattcagatccaatcgctgtcctgcggtgaccttgtcgatctcatacttcagttcactcctcatcttatcaatatctccgcgaagtttctcagtctcccgctgtagtaaagagaaatggttttcctgcgagctctgcacttgggacttgaacttggagatattggactcctgcagcatctcactcttctgcatctcggccttggagacgaaggactcggagatgctctcgaggctgtcgttgaggacctccgtgatggcggaggtgatcgcctccgcctgcttggtgggcacgccctgcgactccagtttcatgacctgggccggatgcgtcgacgcgcgaa

SEQ ID NO: 274417 - DNA, 669 bp, Zea mays
gccaaaaataagcttccatctctaacaagaagaaaaggggcggttgcaaatgctgcacaagaacttgctcttgtcggccaggaaatcatgagttgactgacgacacactagatatacacaattagatgggacatgcttcggcctctgatggcaacaagattggatatcagctgccatggagggtgctagctattcagtcttagcgacgtcatcaagctccaaggccacagcaccaacaaatgcattttgttgctgctgttcgtgccttttgtacacatgctaacacataatccatgtcatttgtgaagagaagctgccatggacagtgacttcatccacaatattatgtggatggcggcagctggagatgttaggccccgatcgaatggtgatcagcagatgagacttgcttgggcttttctggcactcgtagttctttgctgtctgtaacatctttctcatgtatcgttatcatgtgcatgtgcaacagtcaagtggttgcatttggtagtttatggttgtgctgtgtgttggtcgatttagtggtcgttgatgagtgaagcgagccatgtacatcattttcttttgaagatttgatatcttcttttgccttgatgactcctctcgttatacttgagtgaaaatgatatcttgtgtacttgccttgac

SEQ ID NO: 274418 - DNA, 1302 bp, Zea mays
cccacgcgtccggaaaaaatttcttgagtttgaaaataaactgaagagactagaggagctggaaaaagaggcaacagagctaagagcggcaaattcaaggctgcagcaggagaatgcacatcttattaggcgactggaggttacacgcctaccccctgtacccaagcccagaactagtatggaggtagaagcattggaggaggctgatcggttgaagcaagaaactgataggttggctaaagaggttgaacaacttcagagtggcaggtttgcagatgtcgaagaattggtatatctgaaatggataaatgcctgcctacggtatgagctgagaaacaaggatgccccatcagggaagactgttgcacgagatcttagcaagaccctgagccccaagtctgaattgaaggccaaacagctgataatggaatatgccaatgtgggtgcggaggacagtcacttggggcatgtcgaattcggttcagagtgctcttcctcacgggcttcgtcaggtgaaccggatgatgtgtccattgatattgcttccatgacaaagcatactaataaaaaccccaaaaagaagaagttcttctctaagcttcggaaactggtgctgggaaaagggaaagagaaccgtgaaatttctactctggagaggagagtgtctatttcaagttgttccttcgatgacttcactggaagggattcacatgatagctattcttcggtcatggcagaaccaaacatgcctgatagtcgacggcatggtgatcatggctttggtacacattcttctttggacagcgcaaaatctagtcctcttggcacagaaattgtaggtgaaagaagtgaccattctgtggtgaagagtgtatcttctagagaggaaaaggtaaatgcattcggtcccagcattggccttgatagtagcaaggccatacctgaggatgttgagatccataaatttgctgatgcgctgatcacatcaaggtcaggttccatgtcatcaagaagatcggcatccttccgacactgatataggagtcatctgctactgacccctctgcctggatgtatatttctgccagttcttgatggggggagttatagcagatgttactggaatataagttgtcaatactttatttttttgtaccattgcgtatagggtgtagtttacttacctttaataccaactcctactacctgggctcgtcatgtgtaccataaaatggcacatttcaatggccaacacaagacaattgtaccaccctaaatccatcaattaaggtaacctagatt

SEQ ID NO: 274419 - DNA, 1681 bp, Zea mays
ctctaggggaagcattcgtctgagatatgtgacatgggtatcacgcactctatctctgagttgcctgaagaaaatctttgcctctctttcctttccaacaataacacgggcgaagatggaacagtaatcttccgaggggagaagcactacgtgcctagccgttctgtctccattcttgctgggtgcaagaacgtggtttacaataccaagagggtgtttgtacaacacagtgaaaggtcattccatacctcagatgtaacaagcaagaataaccagtgggagatgttctcagaaacgatcccgaagtaccgtgatactaaagtcaggacgaaggaacccctagagcaatataaccaaaccaaggacgatactgactacttatggtacaccacaagctttcgcttggagtcggacgatttgccctttagaaatgacatccggcctgtgcttcaggtcaaaagtagtgcacacgcaatgatgggatttgctaatgatgctttcgtaggatgcgcgcgcggaaacaagcaggtgaagggtttcatgtttgaaaaaccggttgatctgaaagtaggtgtgaaccatgtcgtattgctgtcgtcaactatgggaatgaaggacagtggtggtgaacttgctgaagtaaagagtggcattcaggagtgcctaatccagggtctgaacactgggacgttggatttacaagtcaatggctggggccataaggctgcactggaaggtgaggacaaggagatctactcagaaaaaggtgtgggcaaagttcagtggaaacctgccgagaacggccgggcagccacttggtataagagatacttcgatgagccagatggagatgatcccgttgtacttgacatgagctcaatggacaaaggaatgatttttgtgaatggtgaaggcgtgggtagatactgggtctcataccgaactcttgctggaactccttctcaagcactataccatattccgcgtcctttcttgaaatccaaggacaaccttttggttgtcttcgaggaggagatgggcaagccggatggcatcctcgtgcagacggtgacgagagacgacatatgtctgttcatctcggagcacaacccgggacagataaagacgtgggatacggatggtgacaaaatcaaactcattgcagaggatcacagcaggcggggcaccttgatgtgcccccctgagaagacaatccaagaagtcgtctttgccagcttcggcaacccagagggcatgtgcggcaacttcactgtaggcacttgccacactcccaatgcaaagcagatcgttgagaaggaatgcctcggcaagccatcctgcatgctgccggtggatcacacggtgtacggcgcggacatcaactgccaatcaacgactgctacactgggggtgcaggtgagatgcggagggggcaagaagggtgcctgagaataacaagatggatgctgctaattaatggacgtttcagcttgtttgtttgttcatcccttcggtttggcactgatgcttacattgttctgacattgcaattgaaatgtgattggaacattcttgatcgggaactaacatgaaatgagtggagggtagatgctgatcagaccaaagatgtgtatttcccccctctttccttctgtctcgtgttgtttcatgtaaccatcac

SEQ ID NO: 274420 - DNA, 403 bp, Zea mays
cccctccagtcctccaccgccatcagcgctcgcccgcgcagatctcgctctcagcgctcgcccgccatccgctctccatgcttagggtccgccatcagcgctcgacacattcgcctggctgctcgacgcattcgccagcgccaccttcaaccagatcgactccgcctaccgtgaggccggaggggatcctttcgtggctgccagtatcctgtcctccacgcaggacacgcacccgccgcagcccctgccgccaccggatctctcgccaaggacaggctggtgcaggaggccactcctagaacctgtcatccgccgccatcaacgccctcctcctagatcccatcatccgctgcgaatctccgttcagctccccctcgcgctttcgtcgtcgccgtggaccgct

SEQ ID NO: 274421 - DNA, 644 bp, Zea mays
gaaagtccccggcctctctcttctcgcctcgcggcgttggattgaatggcgacgacgatgaacgtcagggcgctgtgcctggccgtcgcgaccgtcttctgcgtgctctcacggcagagcctcgccgccggcgagggctccaaggaggcggacaggatcgccacgctgcctgggcagccaccggacgcggccgtccagcagtactccggctacgtcagcctcgatgacaaggccggcaagtcgctcttctactacttcgtggaggccaccgctgatccggctacgaaaccgcttcttctctggctcaatggagggcctggctgctcttcgtttggaatcggagcattccaggagataggtccgttccgcgtggacacggatggcaagacactctgcaattttaaatacgcctggaacacagtggcgaacgtgctgtacctggagagccccgtgggcgtgggcttctcgtacgccgccaacacgggcgtgtacaaggtgatgggcgacaacatgaccgcggacgactcgctccagttcctgctcaagtggctggaccgcttcccggagtacaagggccgcgacttcttcatcgccggcgagagctacgccggccactacgtcccggagctcggccgctccatcct

SEQ ID NO: 274422 - DNA, 541 bp, Zea mays
  unsure (1)..(541): unsure at all n locations
acggacgcgtgggcaagcagcagccaatggcttctcgttcgcccaccattgccctggtcctcatccttgcctgcttctcctcgccggcggcggccttcaacatcaccaggctactcggacaattctccgacttcacaacctttaacaacctcctgtctcagacgaagctcgcggaggatatcaaccgccggcagaccatcaccgtgctcgccgtggacaacggcgccgccggtggcatctcctccctcccatcagacgtccagcggaaggtgctctccatgcacgttgtcctcgactactacgacaccgccaagctggaggccatcaagaaccactccgccctgctgacgactatgttccagtcctccggccaggccaccgaccgcatgggcttcctcaacttcaccaagcgctccgacggtgtcatggtgttcggctccgctcagcccggagcgcagatgacctcccatatggtcaagtccgtcacttcncgcccgtacaacatctcagtgctgcaggtcagcgcccccatcgtgccgcc

SEQ ID NO: 274423 - DNA, 393 bp, Zea mays
gcccgacgcgcggtgggagaaagacgacatgcccgtgggccgcgtcatgggcgacatgctgatcctccccaccggcgacctgctgctgctgagcggcgccgccaagggctgctccggctggggcttcgggcggcagccggtgctgaccccggtcctgtactcgccgcggaaggcgcatggcccgcggttccgggcgctggcgtcgtcgaccatcgcgcgcatgtaccactccaccagcgccgtgctgcccgacgccacggtgctggtggccggcggcatcacgaacgcggcgtacaacttcagcggcgtggacttccccaccgaggtgcgcgtggagcggttctccccgccgtacctcagcgatggggccgccggcaaccgcccggtgctgga

SEQ ID NO: 274424 - DNA, 788 bp, Zea mays
ccgcttcgtgcgccgcaagaacgtgctcctcagcgtcgactccgacaagacggacgaggcggagctgcaggccgccgtggagcgcgcggcgcgcctgctggcgccctacgacgcggccatcgccgagtacacgagccaggcggacgccaccaccatcccgggccactacgtcgtgtactgggagctcatggtgagggagggcggggcgtcgcccgacgccgccgtcttcgagcgctgctgcctggagatggaggaggccctgaacgcggtgtacaggcagggccgcaacggggacgccatcgggccgctggagatccgggtggtgcgcggcggcacgttcgaggaggtgatggactacgccatctcgcgcggcgcctctatcaaccagtacaaggcgccgaggtgcgtgtcgttcggacccatcatcgagctgctcaactccagggtggtgtccagccacttcagcccggcgtgccccacgtacagcccgcacaagaagtgatgacctaatagcattggccgtcggagctcggaggctggggttcacggtcacggcccagactgagctactacacttctgctagtactatatattgctacttgttgctctctacagtgcgtgtctttcggttccttctcgtcatctcgtgtgcaaggcagaggagtgaattagtcacgctcctgccagattctgcctggctctgtgataactcttactccactgctagttgttacatatacttgtgcgtcatgtcatttctcgaggagatgactagtgtttgtacctg

SEQ ID NO: 274425 - DNA, 547 bp, Zea mays
ctcataaacgcttccggcctcccggagtcccggacacaaaccctagcattcaaccacgccgagctcgccggaacaagcccaacccgagcccattcccgctcgggtcccggccgatccggcagctcctcatcagcacaacccggggcaacgtcccccagcggatgctagcctgatcgggtccccacggtcgatgggttcgcccgggtccgccaatggcagacgcggcgactacgtgaggatccctgacgaggtggaggtggcgtccaacggggaggcagatgccgcggcggccatcacggcggccgtggcagcggagtgcccgagggtgctgcggtgccgcgcgatccggtggtgggccaagggcgccgtgcttgggatcttccttgcacgggctcggagctgctgccgtggtcttcctcggcccgctcgttattacgaagagttgttgcacctaatccttacggggaatcaacaacatgcagcacatcatctatcgccctaataggttctggcacagtcaccttattcccaactgttgtgttaccat

SEQ ID NO: 274426 - DNA, 454 bp, Zea mays
gtcgatacaaggccctatgctgtcctgagcctccgtttgcggtgcgacagctcctccaggaccggcccccgcgcgcgtgccgtacgtgccagggacgacgccgggcggccgatggagttcacgtcgtcctacttccacgccttcggcaaccccgacctcgcggcggtggtctccggcgacggcggcagcgcgcaggcccaccggccgcgccgctccaccgacggcgcgaaggcggaggacggcaggagccccaccaccacaacggcgaggcgcgcgccgtccatgttctgcgtccccgacacggaggcggaggagcccaacggcttcctggacgagtgcaccctctgccgcaaggcgctctgcggcgacatcttcatgtacagaggggacacgccattctgcagcgacgattgcaggagggagcagatcgacatgggacgcataaggcaccggg

SEQ ID NO: 274427 - DNA, 441 bp, Zea mays
aaaagatgagctgatcaaacagctcgaagaacaattgaaggaattgatggggcagaaagaaaccgttcagtctcaacttgacaattttcgtagagttgcaatagatgaaaattttgatgaccatgcaataagacaatgggatcaacgaaataggtcttcagagtcccttccacataatgtgtctgaagatgctctttcttcttttgatacttacgatgttgtttatggagaacaagatggtctaggcccaaaagcatttgatgtacatccaatatctatcttgcatcaaccaagaaaccatatttctgataacattcagatatatcaaccaaataaggaggcttcctcagaggtctctgaggagcattgcaaggaagtccagtgcatcgaaacaaatgagcttaggaggagtccattattctttcctgttgatcgatatca

SEQ ID NO: 274428 - DNA, 508 bp, Zea mays
  unsure (1)..(508): unsure at all n locations
gtctttaggaatgatgttgcagcagcagcgaagaagaagaaggcagaaggcgaggcgccacgantgcgggtgctaggaacaaaggcaaccttctacaactgcacaattgaaggtggacaaggcgccctgtatgaccagatggggctgcactacttcaagtcctgcaccatcaggggcaccatcgacttcatctttggctctgccaagtccttttacgaggactgcgccattgtttccgtgaacaacatggaggagatcatgaccttgcctgtggcaccacctcaacttgacattcacgacaatccaatcaaggttgccccagggaagggaggcttctccttcaagacatgtaccatcaccggggaagggcaacatatcttcctcggaaggatgggcacgccttccatctactcctacacccagattgctaaggaggttgtgcccataatctacgacaaagggaacatcttcatgcccagtaatatgactggtagacgctgtgccactt

SEQ ID NO: 274429 - DNA, 615 bp, Zea mays
aggagtggtggcgcaacgagcagttctgggtgatcggcggcacgtcggcccacctggcggccgtgctccagggcttgctgaaggtgatcgcgggcatcgagatctccttcacgctgacggccaaggctgctgcggaggacgacgatgaccccttcgcggagctgtacctggtgaagtggacgtcgctcttcatcccaccgttggcagtgatcggtatcaacatcattgcgctcgtagtcggtgtgtcccgcgccgtgtacgcggagatcccgcagtacagcaagcttctgggcggcgggttcttcagcttctgggtgctggcgcactactacccgttcgccaaggggctcatgggtcgccgcggacgcacgccgaccctcgtctacgtctgggcgggacttatctccatcaccgtctccctgctttggatcaccatcagcccgcccgacgacaggatcacccagggcggcgtcgatgtgtgatcatccaagcttcaccaacgagagattaccaaacaaagaatagctgaaattttctggacgatttgcctagtttttgtactgaacactatgtctacttacgcgtactaattaattactgaccaatagtgtctat

SEQ ID NO: 274430 - DNA, 621 bp, Zea mays
actcgtgggccgatacaagcctctatagtgacgtcctgttaacgcgtccgcgccggcgtgctgcggctggccatgggcgccgtgcgcaccaaggccgccgaggccaaggccgcggcgggcgcgctcgccaacgacccccggacgcagccgctggcgcgcggcccgctgcacgactgcgtcgagtcgttcgacgacatcgcctacagcctcgaccaggccgccaagtccctcgccgccggcaaccgcgacaccaccggcaccatgctcgacaccgtgcgcaccgacgtggacacctgccaccagggcttcgaggagcgcgaggagctcacgccgctcatggccaagcacgacgccgagctcgccaagctctccagcaactgcctcgccattgccaccgctgccggcttgcgctagaccccctatgtatcgttcggtcatccatagctgtgcatgtgctagctcctaggcagcagcaacaacatatactgcccctataattaactctccacgcatcagagaagcttcactcatgcaacacacttgtaattgtatatcgaggaagaagatgtagttagtgcaatcgttccggttctaaaaaaaaaaaaaaagggcggccgctct

SEQ ID NO: 274431 - DNA, 544 bp, Zea mays
ctttcgcgtgggcgcgcctgccaagcatggcgtcgtcgcggccgttgcccccgcgatccccttccatcgacctgccaagcatggcatcgccccggccgttgccactgcccgcccgcacacgccgccgaatgagatcctgggatccccccgcgacatcctcctccaccgcgccatggccgcccccgacgtcctcgcgtgccgctccccgaggtggcgggcatggtgcgcgcagctatcgcgggggtcacgacggcgacgcgattccaggagctggtagactggatggaggagcggaaggcggcgttcagggacgacggcaagtggacggagacggtgaacctggggctcgggagccccgcgctcatcatgtccgggctgcttccgttcgccatcgacggggacctcgggttcgggaagcccagcctcgtgctgccctgggtgcgccatggccggctggggtccgcgtccgtgacggtggtgccctgccccagcggcgacgggtcgtggttcttcggcggcaccaggatgtggctgcggctcatgg

SEQ ID NO: 274432 - DNA, 720 bp, Zea mays
ctgaaatggtgggagaaaaatgctggaccaaatatgattgacatccactccacagtggagttcttggatgcacttagagatgctggagacaatcttgttattgttgagttctacggaacctggtgtgcttcatgcagggctctctttccaaggctctgccggacagctttggagaaccctgatatattgtttctaaaagtgaattttgatgaaaacaaacctatgtgcaaacgactgaatgtcaaagtccttcctttcttccatttttatcgtggagctgacgggctacttgaggctttctcctgttccttagctaagtttcagaagctgaaggatgccattgcaatgcacaacactgctcgttgcagcattggtccacctgttggagttggcgatgttgacttgctggataacgcgagccctcaagagaaacctgcagaagctagcccacggtagattcatgagaatgagctccacctcatccacttctacgtcctgctcattgttttcttcactatagatctcaatgtaatcagttgtggagaacataagtagcctcggttcatgaatcagatgtatggattattgtaacgcattcttgaaagggaaaaacatgtattatagcgtgataactgtaccttttgtgtttgttgtacagaaccatagaattgtacttcattttaggtgaagacgcctttgaacatttaagctcccttgtgg

SEQ ID NO: 274433 - DNA, 641 bp, Zea mays
cccacgcgtccgagcgccccagcccagcgatcgccggagcccgggcctccccaccgctcgcgccggcggtcgccgatcatggccaccacccccgccgaggatccggagcctgggctacctcctcccaaggctctctgcgagcagccgcggcggcggcgcccgtgcgtcctccttagcttctcggcagcgcgcgaccgcttcctccggggccggttcctctcggcgggcctgcgccccttctccgtccgcctcccctcgccggccggcaccagcaccgtcgtccacctctgggcgccgccgcggtccgcgcggcggcccgtgctcctcctccacggcttcggcgcgtcggcgacgtggcagtgggccccgtacctccgcagcctcctcgcggccggcctcgaccccatcgtcccggacctcctcttcttcggcgcctcctcgtccacggtccccgaccgctccgacaccttccaggccaggaccgtgaaggccgccatggacggcatgggcgtgcgccgcttcgccgtggtcggcgtcagctacggcggcttcgtcgcgtaccggctggcggccatgtacccggaggccgtggagcgggtggtcctcgtgtcgtcgggcgtgtgcctggaggagggggacct

SEQ ID NO: 274434 - DNA, 476 bp, Zea mays
tagtgctccgctaggtcaatcgaagagtcgaaagatcccagctttcccatcccatggcgggcggcgacctcacgcctcctcctcctcctcccgaagagacgccgccggcagcggcggccgaggacctgatcgagatcgtggaggaagggtcggggcggctggacatcgcgcggtacgtggaccacgtgcgcgacctgtcggcgggcgccatcgcgacgttcgagggcacgacgcgggaccacttcgcggggcggcgcgtggtggagctccggtacgaggcgtacgcggccatggcgcggcgccgcctggcggccatactgcgggaggcccggtcgcggcacgcgctgcggcggctggccgtggcgcaccgcctgggcgccgtccccgccggcgaggccagcgtgttcgtggccgcctccgccacgcaccgcgccgacgccatggaggcctgccgctacgtcatcgacgagctcaag

SEQ ID NO: 274435 - DNA, 525 bp, Zea mays
gatacaaccctctacactgagtcgtagtagacgagatccacacgctcatcgccgccatggacgccgacggcaacggcaccgtggagttcgacgagctctcctcctccctggcgccgctgctcctggggccctgccgccccgccgtggccgtcgaccacgcgcagctcgccgaggccttccgcgccttcgaccgcgacggcaacggcttcatctccgccgccgagctcgcgcgctccatggcgctcatgggccaccccatctgctacgccgagctcaccgacacgatgaaagaggccgacaccgacggagacggcgtcatcagcttccaggagttcaccgccatcatggccaagtccgccgtcgactttctaggcctcgctgctctgtgacttcctctctctctcttcctacacatcggaggcgatctcctcctctgtgctctgttcgtgcgttccttcccttttcttctccatttggcaattgccagtgcgcgttcgaagtgaattgatatgtgatgatgtctgt

SEQ ID NO: 274436 - DNA, 1830 bp, Zea mays
  unsure (1)..(1830): unsure at all n locations
tggcattgacgccttcggtgtccgggcggccgcgtcgggtccgcgcgcctgctgcccgccaacccgcctctcccaaatcccatccaaattcctccgcgtctttcgaagatcatattttgggaggggcaccgcccccagatcggggaggaatccccattccgtctggtgggtcggtctcccctgtccgtttttggctcttttcccctctcacaagggcggctcttggatgggctgcctgccgtgcttcgggtcggctggtgagggggcggccaaggagggcggtgcgcgcaaggacggtacgtcggatcttcgcgtcacccgggtcgaatcagataaatcaaaaccacagggtggactagactctaagaaggatgcagtcattttgagggaggggaataatcaacatattgcagcacacactttcacttttcgtgaacttgcagctgccactaagaacttcagacaagattgcttattgggtgagggaggttttggtcgtgtttataaaggacgtttggagaatggacaggttgttgcagtgaagcaacttgatcgcaatggccttcaaggaaacagggagtttctggttgaggttctaatgcttagtctgttgcaccatgacaatctagtaaacttaattggatactgcgctgatggagaccaacgtcttcttgtatacgagtttatgccattgggatcacttgaggatcatttgcatgatattccacctgataaggaacctctggactggaatacacgtatgaagattgctgctggtgccgccaagggcttagagtacttgcatgataaggcaagtcctcctgttatttacagggatttcaagtcctcaaacattctactcggtgaagggtttcatccgaagctatcagacttcggccttgccaaacttggccctgttggtgacaagactcacgtttcaacacgtgtcatgggaacttatggctactgtgctccagagtatgcaatgacagggcagcttacagctaaatctgatgtatatagttttggtgttgtgttccttggactgattactggccgcaaagcaattgacaacacaaaaccccatggagagcaaaacctagttgcatgggctcgtcctctattcaaggaccgcagaaaattccctaaaatggctgatccgtcacttcagggctgtttccccatgaggggactgtatcaagctctagctgttgctgcaatgtgtttgcaagagcaggctgctacccgcccctttataggtgacgtggtcactgctctttcatacctagcttctcacacatatgatccaaatgcgcctgctcaacataatcggagtaattcatctactccgagggttagccgaggtggtgggagcaatgaccaacgccgtctccgctcatcaaaccaccactctccagatttgagaagggaagtcaccacagcatcaagatacgacgatgaggttagcagggcaaactctggtactggttctggtcgccggtctggcttggatgatgcggatatgtcaggctcacaattgggtagccctgctcacactggaaggaagaggggatctcctaggacttctgaaagccagcatgctatagcagaggccaaaacatatggggaaaattcaagaggcagaaagtgaccaaactctcagagcagcattgaccgtatgagcagaatgctgaaccagatggttcatccattcatcattcatagaaaaaaaaaatgataagttccttgctagcgccagacaggaacattgcatcagtccatctaggtcncttggtctttgtgaatagagctttcctcttttccctttac

SEQ ID NO: 274437 - DNA, 477 bp, Zea mays
ggttgcttgggcggacgcgtgggcggacgcgtgggctttgacgccttcggtgtccttgcgtccggcgtcgtgtccgcgcgcctgctgcccgccaacccgcctctcccaaatcccatccaaattcctccgcgtctttcgaagatcatattttgggaggggcaccgcccccagatcggggaggaatccccattccgtctggtgggtcggtctcccctgtccgtttttggctcttttcccctctcacaagggcggctcttggatgggctgcctgccgtgcttcgggtcggctggtgagggggcggccaaggagggcggtgcgcgcaaggacgataaattaaaaccacagggtggactagactctaagaaggatgcagtcattttgagggagggggaataatcaacatattgcagcacacactttcacttttcgtgaacttgcagctgccactaagaacttcagacaagaatgcttattgg

SEQ ID NO: 274438 - DNA, 443 bp, Zea mays
acacgactctagactgagtcgtctcaaagtcggagagtgaagtttccaaggagatgttctctcgtcaaaactccggagaggccacgtccaaactacgtatacacgaagaggtctcaccggagaactgctctgctcttcagagctccaaggaggctgcacctgacgcatgtggggttgtagactccgtggacgtggacaagggcaagggctctcaccaagactccaaagacgatgtgcctgtcagtgagagatgtgaacagtggctccatgtgctgaacaagaacgatgctgagagcatgagtgagagacttaagttggtcgagcagatcaggatcctgttgaagaacgacgacgaacttcggaactatgcaggtgctaatggtattactgagccactaatccattttctgaagatggctatccacagaggaggtgtgcaatct

SEQ ID NO: 274439 - DNA, 629 bp, Zea mays
agtgcaggctgctgctagccgtggcggcggcggccgtgctcgtggccgcggcagcgcaggcgcaggagacgtgctcggggaccgtccccgcgccgccgcgccgcggggcgcgggtgtccgtggccagcttcggcggcgcgggcgacggacggacgctcaacacggcggcgttcgcgcgcgccgtcgccagcatcgagcgccgcgccgcgccgggcggggcggagctctacgtgccgcccggggtgtggctcacggggcccttcaacctcacctcgcgcatgacgctcttcctcgcgcgcggcgccgtcatccgcgccacgcaggacacatcacgctggcctctgattgaaccgctgccctcatacgggagaggacgtgagctgcccggcggaagatacacaagtttaatccatggcaatgggcttcaggatgttgtcatcacaggcgagaatggaactattgatggtcaaggcagcgcgtggtgggatatgtggaagaacaggacactgctctacacaaggcctcaccttcttgagctgatgagctcttctgatatcattatgtccaatatcgtctttcaagattcgccattctggaacatccatcctatttattgcagcaatgttgtg

SEQ ID NO: 274440 - DNA, 449 bp, Zea mays
ctcaactaaaggagatcgagatgtgactttttctcgcgtttccttctctagccagccttgtctgtcccctcctcgtttattctctctctctcttttttttcgttcgcttccgaggaataatacccaaaaacaaaaaaacaaaggggctcaagacttcatcatgcatgcatgcataacacctcgagtaggagttgaagtacatgatcattgatggtatatatatagaggaagcatgtctatctaataagtccctcatccaaaattgttctttatgtcatgtatatgtacgtgcatatatatatatataaaaatacgtctccttttattaagtgtctttcgctttcgcgccgaactctgtaacttgagatatggatcaaatagattgtcatcactgcatatctactatggggctatggcttcccgttccagctcacatagaaaagcaaaaa

SEQ ID NO: 274441 - DNA, 1168 bp, Zea mays
  unsure (1)..(1168): unsure at all n locations
ccctcggccgccccgtcccggccgcctccggcgcaccaatcccgacgcgaatcgcccagaacgcgaggcggaatttcccatcctcttggaccccccccccccccctctgttcttcctccttccccgctcctcgtccacacgctccgctccgattccgcccgcgtccgcggacccagatctggcgcccgcgcccatggcgacgcgcaggcgaatgctcctcaaggtcatcatcctcggcgacagcggggtcggcaagacctcgctgatgaaccagtacgtcaacaacaggttcaacaaccagtacaaggccaccatcggcgcggatttcctcaccaaggaggtccagatcgacgaccgcctcttcacactgcagatatgggatacggcaggacaggagcggtttcaaagtcttggtgtggcattttataggggagctgactgctgtgttcttgtatatgatgtcaacgtatccaagtcatttgaaaagctcaacaactggcgtgaggaattcctaattcaagccagcccatcagacccagagaatttcccatttgttgtgcttggtaacaagatcgatgttgatggtggtaacagccggactgtttctgagaagaaggctaaagcatggtgtgcttcaaagggaaacatcccctactttgagacgtcggctaaagagggcttcaatgtagaggctgcatttgagtgtatagcgaggaatgctgtaaaaaatgagccagaagaagatatgtatcttcctgatacgattgatgttgggggcgctggaaggcaacaacgttcgtcaggttgtgaatgctagaagatatggagcactgcgaattgctcggttggttggtctgattctctagggcttgttgtttgggtggcctgtgtcatcatttcatatatgtatttagtttgcaaaactgctatttgtggacactggatagtttggaagtctgcatgcgggtgcttattgtcgactcccgtgtagatgcagagaactcatttgtaactgccgtttcggtgttgtatcgtatctgcgctagatgctagtgttgtaacgcttttgattgttgatggattgcatatatgtactgtatttgtacatgaacagaacgtagtgcccattttcatagtgttccnnnnnnnnnnaaaaaaaaaaaannaa

SEQ ID NO: 274442 - DNA, 449 bp, Zea mays
agctacgaggagttcgagctgatgatgaaagctggaatggactggaggaacacgtcgcggcagtactcgagagcggtttacaacaccctcagccgcaagatgttcaaggatgtctccctgaagcttgacgctaacaatggcccacttgctgcagcagccgtcgttgtcaaagaacaagcggttgactgagtcatgtcgtctctactacctgcaaactcaactaaaacagagaatgcgagaactgtacccagttttcagtgttttgtgtataggtcgccacattttggcaagcaaatgtatcagggcgggtcaattgacttagtttcaggtgcaaaatgccaatgctctccgagaactacacgcttactctttctcataaaacaacaaaacaagatgctgttatgggaattgtggctctggtgaaaataaagaaacgactacatcttcag

SEQ ID NO: 274443 - DNA, 555 bp, Zea mays
acgcgtccacttcatccagcacgagcggcagctgtcggagcacgacagttgcagcgtccttcaggggaggaagaaaggggacgacggcacgagtttaaaccaacaatctctcgtcatatatatcataatagagagtacgacgacaaaagccatgggcagtaatggcagacatcataggcgcggagtcccacgcccgccacctttaccactttacagggattgggaggaggaagaggtcgccaacaataagaggctgtcgaagcagctgtccatgaacgagaccaccatggaggtcaagtgggagaagcggaagcggcagatacaacggcagaggagcagcatgcgcctgagcgaagccgacgacagggcaggtggcagcactgctgtctgtcctgttgacggcgaggcgagctcgagcgcggagcgggtggccactggtataaccgacggggacctggatgagctgaggggatccatggatctcggcttcaggttcgacgagcagaacggcggccaggacctctgcgacaccctccccgccctcgacttctattt

SEQ ID NO: 274444 - DNA, 492 bp, Zea mays
tcgcgggccgatacacgtccgagctcctcgggaatccggtgccaggcctcgccttctcgcggcggtgctccctccctcttcgtcccccagcgacgcaggcaggcgcgcgcgcggccatgaaggggggcggtgccatgaggccgtcgcctatgttctacgtccacgaggcggacgtcgtccagatccaccacttcctcgaggagtgctccctctgcgccaaatcgctctccggcgacatcttcatgtacaggggtgacacgccgttctgcagcgaggagtgcagggagcagcagatcgaggtggacagggcgaagcaccggcggaagaagcgcgcggcggcgcacgcgctgtccgcacgcagcagggagcaccggcaccagcagcagctgcagcagcaccaccaccagcagcagcaaccgcagccgcggaatgccggcatggacacccgccacccgtgggtcgacgccgggttcgccaggcccagggcgcccg

SEQ ID NO: 274445 - DNA, 709 bp, Zea mays
aaataggaagaaaaaagaataaagaagtaaataatgataaattagaaaaattaataatataaaaaaaaaaaataatgaaaataagaataaaaaaagaaaaaagaaaaagaatgatataaaaaataaaaataaaaaaataagaatatatagaaaatataaaatagaataaatagaaaaaaaaaaaaaaagggtaatataataaaaatgagaaaaaatgaaataaataaagaatgaaaatacaaaaaattagtaatcacaaggaaagcgccgaaacatagaccgggcactatgccgcggtgaaaaaatccgtaggcgaggaggaatatggcgatagatgtattcctttaacccaaattcttcttgtcctgattattacagactcatagtacttatactaccctgggacgcagcccatactcatttggtacactctggccatgaacacgcttgttcggacgacgcatacgactggacgcgtcttttcttctcccgcgtcttcagtatcagtagcttcactcaccggactgctaacattccctaccgcttgaaatgcggcttgcccccaagccgctgatagtgtagacaatgattgatgactctacttcagctttcagggattagcactgattaccccatagtttgggtgagtgagagacaagggcagtactgatgctggccttacaggagaaactcagcagccttgagttgt

SEQ ID NO: 274446 - DNA, 640 bp, Zea mays
tcgccagccaatctctacatcgcgagcccccgccctttgttttttttttttgaaaggaagatggcgatagatgtattactttacctaaattcttcttgtcctgattattacagactcatagtacttatactaccctgggacgcagcccacactcatttggcccactcgcctaaagctagaactcatttggcacactctggcccatgaacacgcttgttcggacaacgcatacaactggacgcgtcttttcttctcctgcgtcttcagtatcagtagcttcactcaccggactgctaacaagctcgtccaggccaccaacctcctccagctcctttggtcccaggaagagcccatacgggacgccgccgaacttgtccatgtggtgtatcttgtgcgaggcagccactcggcggaagtagggcacgtcggcgatggggccgaccggaaagcggcggtggaccaggccgtcgtggacgaacatgtaggccatgccgaacagcgtaatccccaggcccgcgccgaagcagaggccgggcacgatgccgcggtggaagaagccgtaggcgaggagggagatggccggcgcggcgttgacgatggcgaacacgtcgttgagctcgaaggggccctcctcgagcgg

SEQ ID NO: 274447 - DNA, 743 bp, Zea mays
  unsure (1)..(743): unsure at all n locations
tttattcttatcagcgctggtttcaaacaaccgaattttaaccttcattgaccggggggttaataacatgtcccaacagttaatatacagaatccaaccaataaaaaaatgtcaggaaaaaaaagaaaagaaaagtaattcaagggcaacagacatctccaggtacgagctgtgcctccagccctccacagnacatccgaaatgcaggtcaagatctacgctcgcgcatccaaaccaaatcccttctggtcttctggaggttctggtcgtcggctccccaccgaccacgaggctgcgccggaatcacggagcggagcggagatcgccgcgccggaatccggacgaatccatcagctggtccggccgattcgcgcgagctccttttccagctcgtccaggccaccgacctcctccagctcctttggtcccaggaacagcccatacgggacgccctcaaacttgtccatgtggtgtatcttgtgagcggcagccactcggcggaagtagggcacgtcggcgatggggccgaccggaaagcggcggtggaccaggccgtagaggacgaacatgtgagccatgccgaacagcgtaatccccaggccctgtggacgaacatgtggaccggaaagaggtgggtcatccgaccaaccaactaactaaactaaccaggcacagtccgtggctagctagctagcttaccgcgccgaagcagaggccgggcacgatgccgcggtggaagaagc

SEQ ID NO: 274448 - DNA, 342 bp, Zea mays
ccaaccaccgaattttttgcttcattgagctggcggttcataacatgtccctacaagttatatacggaatcctagccttgagaacagtaatacaggggcccgaacgggcgacgtcttctacaagtcaacacgccggcgtgaaaatgtcaggaaaaaaagaaaggaaaagtaattccatggcactagacatctccaggtacgagctgtgcctccacagaccatccgaaacgcaggtcaagatctaggctcgcgcatccaaaccaaatcccttctggaggttctggtcgtcggctccccaaccatgaagctgcgccggaatcacggatcgaagcggaaatcgcc

SEQ ID NO: 274449 - DNA, 763 bp, Zea mays
  unsure (1)..(763): unsure at all n locations
gtcgacacacgcctctacatctattcgtggcagccctcactctttagacngtgaggaggagcacaattctgatcagcatctggcagcaagtgtcactgagangttaatanacctgttggctcagcagcaagaagagcttcgtgcgctgcaaaggaaacacaaggcggacatagaggagatgctgaaaatcgtacctgcggaggatcgggaagagaccttaactctatgccgcttgaaggcggaacagaaaaacagagccgccgaaccttagataaactgtctcatgtgcatgttcctctgtgtgctgttagatttatacatactcacaccaaggagttgttgtttacactttacagccgttgttgtgcaaaagttggacctctgttgtgcagaagataagtctgaagcctttttcattgttcttttttgacataatggagaagctgggggagtgcttgtctctggaggacctccaattcagtgaccgagcactaaatagtaatcaggttctttttgacataatggagaaggttggtttttgacggcaaagatgaagtttctgcccaccaaatgaaatctgcagatgccactttgatgccgctgcgtgcctgaattaacggttcataaagagtgcctcccttcctttttcttttgttttcttttttgtttcttctggactttgacttgccaggaatatacatcagtgtttgagctgttccaaacctgcaatgacagactttacagcgcaattattttccggatc

SEQ ID NO: 274450 - DNA, 461 bp, Zea mays
tgggatctgcatcgccgtgtgctccctcaccttctggatctgcgacatcatcgtcaccatctctctccctgtgatgctcagaaccatcggcctcgcgggtgtatttggctcctacgccttcgtctgctgcttgtcgctcgtcttcgtgtacctcagggtgcccgagaccaaggggttcccgctcgaggtcataatcgagttcttcaacgtgggtgccaaagctcagaagccggagcagcatgaagaggaggagaaccacgactaacccgtatatatttggattcattaataataactgttttttctttctttctttctttctttctttctttctggattatgagttgaatgaatgatgtcgatcagagagcttgatgaccatcatgttagcgatcccatgaaatatgtttgaggacgcatttggatgtttctaaaaaaaaaaaaaaagggccggcggctct

SEQ ID NO: 274451 - DNA, 869 bp, Zea mays
tgctatgtccaatggcagagtcaatgagcaaagtacatgaccaaacggaacgcaatgtttcggttagtgtaatggatgaacggatctctccctgatggggccactgccagtaccagcatatcgtcttttgaaactgattcatgtgaggtcagtgttgagcagaagaggaaaaatattccatcagtctctacagcactactacttggtggggtgcttggcctacttgaaaccctactgcttgttctctctgcaaaacctatcttaggctacatgggtgtaaaaccggactctgcgatgatgaagcccgcattgcagtacttagttctcagatctcttggtgctcctgctgttctgttatctctggcaatacaaggagtctttcgcggatttaaggatacaaagacgcctctatacgcaactgtggctggagatgcgatcaatatagttttggatccaatatttatgtttgtgttccaatatggtgttagtggtgccgccatcgctcatgttatatcacaatatttcattgcatccatactcttatggagattaaggttgcatgttgatttgttgccacctagcttcaaacatctgcagtttggccgatttcttaaaaatggttttctgctacttgcacgagttattgccgcaacttgttgtgtgacactatccgcttcaatggccgcacggctaggttcaactccaatggctgcattccagatctgcttgcaaacctggttggcttgctcacttcttgccgatggattggcttttgctggacaagccatacttgcaagtgcatttgctcgtaaggactatccgaaggccaccgccacagcttctcgtatcttgcagctggccttggtctt

SEQ ID NO: 274452 - DNA, 326 bp, Zea mays
acccacgcctcctcgaaggcaggcagtcctgccagcgcaccggccgactcaccgaacgcacgcagtcctgcagctcctgccaaggctctcgaatctgctgccacgagaactgcccccgctaatgcacctcaagccgcctccatctccgccgttgctgctgctccatcgtcgtcgtcgtctatgaagtctggtccacctgccgcacctatcagcgccgcctctacaccgtcttcttccaccgacgaagagttgagcccttccccgtcggcatccatcgacgaagttgcgtcccctgtgtctgatggggcagcttatggatcgggagc

SEQ ID NO: 274453 - DNA, 528 bp, Zea mays
agctgcgtccgcactgcgcgaggtcgtcctcctccttcgccgccgccgccgccgccatcgtgatctacctgacggggccgggcctggccgtgttgccgatgcgggtgatggcgtccgactccatcgcctcggtgaagctccgcgtgcagacgtcccggggcgtgagggcgcgcaagcagaagctcgtcttcggcgggcgcgagctggcgcgcgacgacgggcgcatcctggactacggcgtggcggacggcaacgtggtgcacctggtcatccgcgtcccggacgtgcgcctcatcaccgtggagaccgtgcagggcggcaagttcaggttccgcgtggagcccgggcgcaccgtcgggtacgtgaagcagcagatcgccaaggaccaccccgccggcggcgcgccccggcgagcagcggctcgtgctcgagggcgaggacctcgacgaccggcacctcatccacgacgtgtgcatgggccgacggccccgtgatacacctgctggttcggcgctccgtcttcgcgcg

SEQ ID NO: 274454 - DNA, 909 bp, Zea mays
ggtacaaaatctggagcatcgtaactcagcttgcatcttctgtgcggcctcttttgcgcctcttctgcctcatagctcataaaatcatcaaacaggcagtcccgcactttgatgtctttgaagatcttgatcacagacattccagggaggtatggtacttcctgtgtatctctgctgtgcgtcacaggcttgttttcgttattctgcagtgtgatatgctgcaaagaaccatttggtatgtctttaacaatgtgccatctcacaggaaagcatccggtccatttatcctgacaccagaagtccatgtccttgtgaaaatcaacaggtccgaccatctcagccatgccacagaagtgcccactcccattcacagagaagaacaagaaaaccggacacttagtagaatgcctcctcgatatcctgtcagcatccctgaatgcgctatctagcttgctgtttccactggaggaacttgaccatacaccatattttatcgatttgtgcacatctgcctcaccaattgacttgataacaaagaactttgcatacatatagtcaactcggagatcatctctgttgtactggtcggttcttataatgattgtcccatccggattaccgacagggagccttaatgtgtgagatttcacaatcatggcaaagctctgattgcttggtttctcagaatcaactaagctatgcaccttttggccagtaccatttagatgaccacttgactttgaagatggctggaatttctcggcggcagcccacttatgaagatcagatccagcagcacatccaaggcaattgtttccagacaaatgtgctgatacctgagaagcatgagggagtttagcaggtaccatacatctatctgcaaactctagcttctgtggaaccgaattg

SEQ ID NO: 274455 - DNA, 956 bp, Zea mays
  unsure (1)..(956): unsure at all n locations
ggggctggcgagggctcctccgccgcggccgggctccagcggcgtttgcatcgcccgcgcacatgcaagaggcgncgccgtcgcggccaggccggggacgacgaggacgacgacgacggtcgcggcggcggcggcagaggccgcttctaacgggtcagcggcggcggccgtcgcagggatcagcagcagcagcagcgcgctggtgacctcgaccgtcgggaaatcgacgaacatcctgtggcatgagtgcgccatcgggcagaaggagcgacagggtctgctgaaccagaagggctgcgtcgtgtggatcactggcctaagcggttcacggaaaagcacgctcgcgtgcgcgctgagccgcgagctgcacggcacatgccacctcacgtacgtcctcgacggcgacaacctcaggcacgggctgaacagggacctcagcttcggagcagaggaccgcaccgagaacatccgcagagtaggggaagtagcgaagctgttcgccgacgctggcctcgtctgcatcgccagcctcatatcgccctacagaagcgaccgaagcgcgtgtcgcgatctgctgcccaagcactcgtttatcgaggtgttcctggacgtgccgcttcaagtgtgcgaagccagggaccccaaaggcctctacaagctcgcacgcgccggcaaaatcaaagggttcaccggcatcgacgatccttacgaaccgccgtcggactgtgagatagtgatccagtgtaaagtcggcgactgcccttcgcctgaatcgatggctggtcacgttgtgtcgtaccttgagacgaatggtttcctccaggactagacatggaatgcgatcgatgcgtctgatgtgtatatatgtagcagcagccggagcggcattgccaaggctgtgtaatctcatggctgtctttctctttaagaccaaaacaaacaagagatggcagtgt

SEQ ID NO: 274456 - DNA, 428 bp, Zea mays
gcggcatcctgcagatagagcgacagggtctgctgaaacataaggactgcgtcgtgtggatcactggtctacgcggttcacgtgatgtctgcaaaagctgatctcgtcagatttaattacgagcacagatacttccttttatatgtatacacctgtctgacagtctgtctgtccgtctgtcttgacttgatcaggggaaagcccgctcccgtgcgcgctgagccgcgagctgcaccgcagaggccacctcacgtacgtcctcgacggcgacaacctcaggcacgggctgaacagggacctcagcttcggagcagaggaccgcgccgagaacatccgcagagtagcggaagtagcgaactagttcgccgacgctggcctcgtctgcatcgccaggctcatatcgccctacagaagcgaccggagcgcgt

SEQ ID NO: 274457 - DNA, 589 bp, Zea mays
cacgcgtctacccagacgtctggaagacaagtggccagagtattatgacaccaggacaggaatgttcattgggaagcaatcacggctatatcaaacttggagcattgctggatatcttagctctaagatgttattggactgtccggagatggcatccatactagtatgcgatgaagacttcgagctgctggaaggttgtgcttgcagcttgaataagaatgctcgcaccaaatgctcacgtcgtgcggccaagtcgcaggttcttgtgtagttccatgcctgttcttgacccaaaagctgcaacgctccttcaacttgttgtaattgttcgtcacagaagctggcactagttactagttacttaagcagaatgatcacaaaccacctatgccgatttttttggcgagttcgtggttgatccatttatacaggagtatatgttgttgtctgtacattttatctaatggattttatgtatcctgctggtcaactcaagttgattggtagtttcttttatgtaagcagacagcatgtaaatatcaccgctcgttacaagtgtactaaaagagtcatgctcttgtgacccgac

SEQ ID NO: 274458 - DNA, 659 bp, Zea mays
atcccaccgttctgggcagagactgatgagggcatagcacacgctatcatccggtccaacatcgacttccgcagagagccttggtcaaaggtgtcggaaaatgcaaaagatcttgtgaggaagatgcttgatccaagcccctactgtcggttgactgcccagcaggttctagaacatccctggatacagaatgccagtgcagctcccaacatcccacttggagaagcagtgaggtccaggctgaagcaattcactgttatgaacaagttcaagaagaaggccctgcttgtggtggcagagtacctaccagccgaagagctggaagcaatcagggagttgtttcagttgctggacacgaacaaggatgggcatcttacaatcgaagaactcaggaagggaatgcgattgataggccacaatgtccatgacactgacgtcgatatgctcatggaagctgccgacatcgacgggaacgggaccctggactgcaaggagttcgtgacagtctccattcacctgaagaaaatccgtagcgaggatcacctgcccaaggtgttcagctacttcgacaagaacgggagcgggtacatcgagatcgaagagctgaaggaggccctctctccaagaggtgaccagaaggcgatcgaggacataatcct

SEQ ID NO: 274459 - DNA, 402 bp, Zea mays
aagcctctagaatgaatgtgatgagtccacacacgcatgcatgcatgcatgcatgcattgcgtttgcgtctcaagagttcacttgtaaatttgtaatcgaggaagaaaagcacctctcgatcgattaacatgtctagctgctacgatcctgtgattcgacgatgttaattaatcggcagctttcattatgatgtgtagcagtatactgtatgattaattgtggatcttttcgaaaacaaaaactgtaatattcgtgaaattgtagagccttcacctattattaatctatcaagtaatcgagaaaatgtaattaatcccaaacgtgaatacatggtgcaaaaacatgaatgatggtaggaaaatgaaaacaacatttgaaaaaaaaagaaaaaaaaggggggg

SEQ ID NO: 274460 - DNA, 496 bp, Zea mays
tctaacgcacactgccgcgccgccctcggtctcccctctcctctcccttccttcctcttccacggacacgggaggagaagggttgatcacgaccggggaggacgcgtggccagagatgggtctccacggaggcgtcgtcgtgctccgcgcggccgtgctcgccgccgtcctcggcttcgtcgccgctgccgggttcatctcaaacgacgcgctgctggagcgcgggcacgacaccaccggccggagcctgctgcaggccaagaaagattgcccggtgagcttcgagggcgccaactacacggtgatcacgagccggtgtaagggcccgctgtaccagccgacgctgtgctgcggcgcgctcaaggacttcgcgtgcccttactccacctacatcaacgacgtgagcaccaactgcgccgccaccatgttcagctacgtcaacctctacggcaagtacgcgccgggcctcttcgtcatacctgccacgagggcgaca

SEQ ID NO: 274461 - DNA, 507 bp, Zea mays
gcaggtcgaggcgtggaagcccatcgtcgacgccgtccgccgcaaaggcgccatcttcgtctgccagatctggcatgtgggcagggtctccaccaacgagctccaggccggacggcgacgcgcctatctcgagcacggacaagcagatctcccccgacgccaagtccggaacggcgtactcgaagccgcgccggctgcggaccgacgaggtccccgggatcgtcgacgacttcaggcgggccgcacggaacgcgatccaggctggtttcgacgccgtcgagatccacggcgcgcacgggtacctcctggagcagttcatgaaggacagctgcaacgaccgcacggaccagtacggcggcagcctggagaaccggtgccgtctcgccgtggaggtcgtggacgccgtcgtccgcgaggtgggcgcgcgccgcgtcggcatcaggctgtcgcccttcgtcgacttcgtggactgcgtggactccgacccggtggcgctcggccactaca

SEQ ID NO: 274462 - DNA, 1307 bp, Zea mays
cggtgttttatttccgggtcgaccctcttcgtccggcggttgttctaggaggacgaaagggaccggacgaagctacgcgctgcaccgaccgaccaaaccctaggcgttcggcgggcgtcaccacggcggcgaagaaagggtgcctcgcgtcgccttggtgtccccgaagtcgtcgacggtgcagctcgatccgcctcgtcgagcatgtcgaggagggtcccttgcaaattcttcttgcatggagcttgcttcaaaggagattactgtgaattctcccatgactgcaatgatcaaccagataatgtttgcactttctaccagaaagggacgtgcacctttggtagccgttgcagaaatgaacatgttgaagttcattgtaactgcccccaaccagcaaccactgtagcgcgtgcatcctccaattcttctcagctagttgcttcttccagagatccccattgcagcgaatgccaaacggatttatgtgaccaaacacagcagatttgcaagtcaacagcagcactttctgcacatcaacctgcatgggttgttgattatcatgaccatgacactccagatgatactacaagctggccgttgcaccaagctgtgcaaaatcaaacatcacaatatcctgttcatctgccaatttgctcttctactgctgatggcacttgtccttatgggaaaggctgttctcagatgcatggagatctgtgtgcattctgtgaaagacagtgcatgaatccttatcaatctgatgaaaggggggtacatgtcaagctatgcaagaaaaacaatagagttcttgaggccatgagaagaagtgaagacatagaatgtggtgtgtgcttggaccgtgtgctttcaaaacctacggcagcagaaaggaggtttgggctgctatctgactgcgaccattccttctgtatctcatgcattaggaattggcgtagcacctctcctacgtctggcatggatgtcaactctacactcagggcttgtccaatttgccgcaaattgtcatactatgtagttcctagcattacttggtactcctcaaaggaagaaaagcaagaaattgttgaaggttacaaggccaagctcaggtaagtacttgatttgaaaatttgttttatccttaggcacatcgtttatgcgattttcaggctgcccagactaataacagcaactcatctgtagtgattaatttgcttattgttgaggcatagataaaacttctgttgtatttttctgcccaagcagaagttaattcactagtctgatatgttatgcaagtctattga

SEQ ID NO: 274463 - DNA, 352 bp, Zea mays
agcttccctcaccacacgcaccgaggcttcgagaccgtcacctacatgcttgagggcgccgtgacgcacgaggacttcgagggccaccgtggcaccatcaaggccggcgacgtgcagtggatgacggccggccgcggcatcgtgcactccgagatgcccgccggccccggcacgtccaggggcctgcagctctgggtcaacctctcctccgccaacacaatggtcgagcccgggtaccagcagatccagagcacggacatcgcgtgcacgtccgacggcgacggcggcgtcacggtgcgcgtcatcgccggccacgccatgggcgtgcgctcgccggtgcgcacgcgcacgc

SEQ ID NO: 274464 - DNA, 521 bp, Zea mays
cgagccgcagaagtgcaagtggacgaagaaggcgcggaagaaaaagaagacgaagaatgagcagaacgggctggcagccctagtggaggagatctcgctctcgaacagtcccaagcacagggcagcagcaggggagatactgcggatcggcaaccacaacatccccagcagggtgtttacgttccgtgaactggtggacgccaccaactccttctgcccagaaaacctgctgggcgagggcggcttcgggagggtgtacaagggatgcattccagacaccatggaagtcatagcggttaagcagctcgacaaagatgggctgcaaggtaaccgtgagttcctcgtcgaggtgctgatgcttagcctgctgcaccatccaaacctagtcaccttggtcgggtacagcacagactgtgaccagaggatcctagtgtacgagtacatgtcactcggttcactgcaagaccatctcctcgatctcagtccgaaatcccagccactttcctggcacacaccgatga

SEQ ID NO: 274465 - DNA, 1438 bp, Zea mays
cgaccagccggatccccgtgagagtccccacccacaccccgagggcggcgtcgggtcgtcggggacagctgatttcacacgacgagccggcgagccggccggcatttcgtcgtcggatggcgccggcctcctcctcgtccgccggcgtcgcgtgcctcgtcctgctcctgctcctgctcctcgccggcgcctccgcggcgcacggctcgttccaggctaggcgtgctctgtcagatgaccatgggagcggtatagtggcgcgatggcggaggttgctcgccgacgctgcgactccagcgaacaactctcttgtgctggctgcggcgaggactcaccggagcgaccccttcgccaaccttaccgcgtacagcggcggctggaacattagcgacgagcactactgggcttccgtgacgtacaccgcggtgcccctcttcctcatggccgtgctgtggttcgtcggcttcggcatcgtgatgctcgtcatctcctgctgctgctgctgcttctgccggggcaagaacgacgcctactcgccggggtgctacctcagctccctggtgctcctcatcatcttcaccatggccacaatcgccgggtgcctgatcttgcacggcggcagcgacctgttccacgggagcaccatcaggaccgtcgagtacgtcttcgggcagggcaacctgacggtggaccacctgaggaacttcgccgacagcttggcggcggcgaaggacatcacgatcaaccagatcttcctcccggccgatgtccagcagaagatcgacgtcgtcgaggagaagctcaactcctccgcgggcgtcttctccactcgcctgcaggagaactccaggaagatcaagggagtgctgaaccacatggagcacgaactgtttgctgttgcagctgttatggctggcctatcaatactcggattcttgttctccgtactggggttgcggtttcttgtctccctactggtgatcgctgcttggatccttctcaccaataccatcatcagttctggtcttttcctcctcttgcacaacgtggtggcggacacgtgcgtcgcgatgggcgattgggtggcgcacccgcaggcgcacacggcgctggacgacatcctcccgtgcgtggacgtggccacggcgaacgagtcgctgtaccggagccaggaggtgacgtcgcagctggtggcgctggtgaacaacgtcgtcgtcaacatctctaaccggaacttcccgccggggctccgcccgctctacttcaaccagtcggggccgctcatgcccgtgctctgcaacccgttcaacccggacatgagcccccgccggtgcgcgcccggcgaggtcgacttccgcagcgcggcgcgggagtggaagcggttcgagtgccagaccacggggccgccggggtcggagctgtgcgccacgccggggcg

SEQ ID NO: 274466 - DNA, 674 bp, Zea mays
ggccaacttttcccccatcaacttaagcttttcagttgtctctagtccgagtcttggcattaggtacttcacttaactttgagaataatcgtcttcgccgttttttctgtattttgcatcaggtacttttcctaacagaaggagggacatcgaaacaccacgatccaaggaggaactcgtttgacgacgccgtccgggtatgcctagagtacgatctgcacgggatcgtgtcagaagcgagaggcgttctcaagaacccatccgcggtcgccagagcacaagaatctaacctcgcgcttctcacgtacgggcagctcaacaacgtgtgggaggcagtctacatccaatacctgatgggcgtgcacggcgtcatcgttgaccgggtggaggagatctcggacgccgtggccggttttggtctggggaaaccaggccttggccggggccgtgctggcgtggacggagcgaaaacgcatcaggctcaggccttctcgcagcagcagctggggttcctgctccggcttatccctgaactgattgagcagcggcactgaaggacggtacaccaccatatgtaacatcccagtttttgacccccctcgaagcggatggcaagcattcgcctttggggtcaacacttctcctgactgactgactggcaggtccgatttgac

SEQ ID NO: 274467 - DNA, 507 bp, Zea mays
cttaaaggctggctatgcggtcattttcgtccatcggcgagggagttgccagcctttctccaggttcctgcctgatgactcgtttctccacttctttgatgtcacaacagattcgaaggttcaagtggccgagtcccaggcaacggtggtaaagagagcaattggggattatcgcaaggctactgaaggaggctctctgctgaaactcccattcaccacgatatttgagtatcttcagttactgaagatggttgctacatccatgagctgtgtgggtctccacgggatgttctatctcgctgcagctgtgtctgacttctatgttccatgggatagcatggcaaaacataagatccagtcagcccgaaggcccactggatatgaagctcagccaggttccaaaaatgctccccgttctgcgcaaccattgggcccccttggccttctgcgtatccttcaagctggagacggatccagacattctagttcagaaagcagagacggctc

SEQ ID NO: 274468 - DNA, 875 bp, Zea mays
cccacgcgtccggttctcaagacaattgccatatgcgagtatggggtccatgttgtatctgctagatacataatgaagtgtgatgatgatacttttgttagacttgattcagtaatggctgaagtgaagaaaatccagaatggtgaaagtctctatatagggaacatgaattatcaccacaagccattacgtgatgggaaatgggctgttacttacgaggaatggccagaagaggattatcccatctatgcaaatggtcctggatatgttatatcctctgatattgcaggttccattctatcggaatttttaaagcataaattaaggcttttcaaaatggaggatgtgagcatgggcatgtgggtagagcggttcaacaacaccagacttgttaaatatgtccacagcatcaaattttgtcaatttggatgcatagatgattattacactgcacactaccaatcaccaaggcagatgttgtgtttgtgggacaaactgcaggctggaaaagcccaatgctgcaatatgagatagcaagaatggaggtggtggtactggtaggcgtttctgtggtggtagtgcctatccttattcatgaaggagaacctagaagctagaagccttgaaaataaattaaaccctcgagatgactaacaaattgccatttaacggatttttttggtatagctgaacaggcggtgtttcagctggaaatggaaacagggggaatgggcagcggcctgtaacgactttctgattgagcttgcggcgctcttctttctcgacgtatagacggagttctgtgagcagtatggaacctgcttgggtcttgatttgtaaatgggacgggtagaaagcttagtcaaataactatt

SEQ ID NO: 274469 - DNA, 376 bp, Zea mays
cggacgcgtggggccggcggcgggctcggcgagccccggccccggcggcttgggcgcgcggcgccccggctggggtgcgggctgcacaggtgagcggcctccagcccctcggcggctcggcacagaccggcagcccgtcgcacgagggcgggcgtaggccctcggcacgagcgcggctgcacgagcatggccggcgcgggggcacggccggcgcggctccccggcgtccaagcggccctgcggcggtgcgggcagcaccggcgtgcggccctcggaccctttggcggctcggcgcatgccggcggacgagggcggctcagcccctcggcgcaggcgcgcccaccggcggcggttcggctggccgacgcgcgggtgt

SEQ ID NO: 274470 - DNA, 1163 bp, Zea mays
tacatgaactcgcctcatgaagcagagaagtcatccccgccactggcaccgatcagctcaccgccatcagagcccaagtcaccgtcgtcacctccaatggtagagaaaacttctccaccaccggcaacggttagctcaccaccgccgacgcctaagtcgtcacctccaccggctcctgtgagctcaccacctccagcggtgaagtcttctccaccaccggcaccagtcagctcaccaccaccgacacctaagccgtcacctccacctgctcctgtgagctcgccacctccggtggtgaagtcttctccaccgccgacaccagtcagctcgccaccgccggcgcctaagccatcgcctccacctgctcccatgagctcgccaccacctccagaggtgaagtctcctccaccaccagctccagttagctcgcctccacctccaggcaagtcgccacctccacccggccctgtgagctcacctcccccccctgtgaagtctccaccaccaccggcaccggtcagctcaccaccacctccagtgaagtcaccgccacctccagcaccggtcagctcaccaccacctccagtgaagtcaccgccacctccagcaccagtgagctcaccaccacctccagtgaagtctcctccgccaccagcaccagttagctccccaccacccccaataaaatctcctcctccaccggcaccagttagctctcctccaccagcaccagtgaagccaccatcactaccaccaccggccccagtaagctcacctcctccagttgtcacccctgccccgccgaagaaagaagagcagtcattaccaccaccagcagaatcccaacccccaccatcattcaatgacatcatccttccacctatcatggccaacaagtacgcatctccgcctccccctcagttccaagggtattaagcgccacagagacatggttgatgaagcatgaatggaacagtctataaggtcacatgcgcagacaaactgctacatgtaaaacactgcaagcgtgtgtgaaattgtttttttcttttgcacgtgcacgcgtgagtaaattcttattcgtacatatgtccggacgtgtgtatgtgtgaactagctgcactacatgacgctgcaacgtgtaagaaagtgtgatttgtgtg

SEQ ID NO: 274471 - DNA, 453 bp, Zea mays
cgtagaaaagcaagacgatgatgaaattcatccaaggcgggtacctgccgttctgcttctggcttgtcctcatggccttgatgatcacatggcactacgtccacgtgatgaagtactggtacgagctggaccacgtcgtgccagccaacgaagtgacaacgctgcttgagaagcatgaggtgcggcggatccccggggtgggcctcctttactcggacctggtccaaggcatcacccccgtgtttccacgtctggtgcagaggataccctccgtgcacgcggtcttcctgttcatgtccatcaagcacctgccgatcccacacgtggcccctgtggagcggttcctcttccggcaggtcggcccgagggagcaccggatgttccggtgtgtggcgaggtatgggtactgtgacaagctagaggagtcggggctggtaaaaggttcctcatgga

SEQ ID NO: 274472 - DNA, 449 bp, Zea mays
ttttcagtattcgcgtacctgaggagagaaagagagagcgagttcgccggcagtcgccgatcgccgtcggtgcagccattctggcagccggcgccaacaccgacgccgacgcaaaggccaaggacgcccctgtcatctcgccgcccttcgagagcatcccggagctccacgagggcgccatgaagggaaagtgggaagctactccttcgccttcccaaacttggtagaggacaagatgaactactccaaggagccgtctcagcaggacctccagccggagccagcagcggcatcggcggaggcggccaacaaggccgtgccaacaccggcagaagctgaagcgagggcagacggcagaggcgcagccgcagacgagcagcaacccggaggcgactccggttccgggagcaggacgaaagggcggcttgttctcaagcttcccctgctgc

SEQ ID NO: 274473 - DNA, 427 bp, Zea mays
gccggcgacaggataaatccacgacctttattagagagaagagatcctattcctacggttctcctcgcatcctgttgcttctgcgtgcggccagacgcgggcacgatatgcaggccgccgccgccgcagccccgtggacgacgaagaccctgccggtgtttcggaaccacctcggcaaccccacgcgcctcacaggcgccccctcgtccttccacagtacgcccgcctccttcgccaagtggaggaacaaatgggactgccacaagagcgaaaaaggagcacgaaaggcatccaggaattatgagaggtatgtggttcggcaaaaacgagcagaaggaaagaaggccctaaagggatatcttctctatggaaagccatgcctcatttacaggatggaacacaggtagctttgctaactcacatgcaa

SEQ ID NO: 274474 - DNA, 422 bp, Zea mays
cggacgcgtgggctagttctagatcgccgagcggcccccttttttttgtggccgcacagcgaacgggcctcgcaggcctcgtgctttcagctcatgtattacagtattccctatggcccgtgtcaagcacgcacgcactatataaaatacacttatatacatacatgacgtgtactacgacaacgacgaagaagaatgaacagctagcagacgtaccggcggccgattcacaagtgtacagaaaacgatcgactccactccaactatacatatcctactatggcttttgctacaacccgatggatcagaaggcatgcatgcatgtacaggcaggcatggccatggcgatgcctgcaggctgcaaacgaatttgatcagatggctgacacctttgggacggcgacggggtacctatcgatgtc

SEQ ID NO: 274475 - DNA, 568 bp, Zea mays
aaactattcaagtcacagactattcaaaggatggctagtacaagagatatttctctcccctcttccacagatacaagtccttcgagcgaaccaacttcaaatcaggaaaaggatgctgtcaccctcatgctcagtgttcgtcaggcaaatcttcttctttcctccttatggactcaggcactgtcacctgaaaatgttccacggaattatgaagcaatttctcatacttacagcttgatgctattgttttctagagccaagggctcaggtgccgacgttttggttggtagctttcagcttgctttttcattaagaagtgtttcgttacaagcaggctttcttccaccttcacgcaggcgctctctttttactttggcaacttcaatgctcgtgtttttttcgaaagcttttaacgttcttgcgctcattccaattgtgaagcaagtgttgaccgaaagtacagttgatccatttcttttgttaatagaagactgtagattgcaggctcttgatagtgctaatgagttctgcacgaaactctatgggtcaaaagagatgatgagctagc

SEQ ID NO: 274476 - DNA, 656 bp, Zea mays
  unsure (1)..(656): unsure at all n locations
ctttttgacggtgaaatcgtagtttttatttaagactagtcttattacaagatcacatgaattcaggacaattttattttatacagtagctcacaaattcagaaggtcaggcctgatgcagtgatgggagctgtctgaggtcgtgggttcgcagcagctggggagccctttctccagaaggtactcatgtggggagccttcggcactggatttgcccacaagtagctcacgaattcattacttcatgacaccactaaatgacatgaaagtgacaccttttccagacccccttcatccagtgcaataacatagctcatccattcattcctcccgaacttgattggcatccatatttgggatctccacttcatctggaaagcagcctgcatatatgtcgatactccgtgtaaggtagatgctatataaactgtcagagtatattgggcatgttagaatatattagacaactactaatatgattggtttaggattgattataatcctggataaccttccttgtatctaagataacattccttgtatctaagataatcttccttatctctaggatagccttcttgtcttcaagtcgtgtattcctatatattctctctaaaggcttcattganaaaaaaaaaaaaaagggcggccgctct

SEQ ID NO: 274477 - DNA, 435 bp, Zea mays
ctcacgcgtccggaccaacgtcccagtaaacatgcccgccaacgccaaccagccggccaacgtcgttccaccgcaagtagtggtgtcgaagcttccgccggaggtgctggccaagctcccgcccgacgtgctggccagcatcccgccggagacgctggccaacatcgcggcgtcgcaggggcagctgcagacgagcgagatcctggccaccatcccggcggcgcaggcgcagggccagctgccggcggacctgccgccggaggtgctggccaagctcccggccgtgcagagccaactgccggccaacattacgcccgagatgatgaccagtctcgccgccgtgcagcagcctgcggctgctggccagcctggggcggccccggctctcccggccgacatccctcagatccccaagatgcccgacctctcccggct

SEQ ID NO: 274478 - DNA, 587 bp, Zea mays
cccacgcgtccgccccttcccccgttcgctgtcccgacaggtcctccccactcctggagccgggcccccccctccccggacgcatgcatgtcgacatgtcccaccgcgtccggctcgccgcggcggcgctcgtcgcggtcgcggcgctggccctggcgctcgcccccggcgccgcggccgcgtggcagcggaccaggaacggcaccgtggtcagctacgaccgccgctcgctcatgatcgacggccaccgggaaatcttcttctccgggtccatccactacccgcggagcccgccggacatgtggccggagctcatcgccaaggccaaggagggcgggctcaacaccatcgagacctacgtgttctggaacatccacgagcccgagaagggtgagttcaacttcgaggggcagaacgacgtggtgaggttcttccagctgatccaggagcacgacatgtacgccatggtccggctcgggcccttcatccaggcagaatggaaccacggaggactgccctactggctaagggagatccctgacattgtgttccggacgaacaacgagccatacaagatgcacatggag

SEQ ID NO: 274479 - DNA, 421 bp, Zea mays
acgccaggatgctggcggaggcgagcatggcgaccaagtgccccgaggggaaagtgccgctcatctccatcaacgccctgcaccagctgcacatcttcatcttcgtcctcgccgtcttccacgtctcctacagcgcaatcaccatggcgctcggcagggccaagatacgtgcatggaaagagtgggagaaagaagctgcaggacaagactacgagttctcacatgacccgacgcggttcaggttcacccacgagacttccttcgtgaggcagcatatgaatgtgctgaacaagttcccagcatcattctacatcagcaacttcttccggcagttcttcaggtccgtgaggcaggcagactactgcgcgctgcgccacagctttgtcaacgtccatctggcccctggcagcaagtttgattt

SEQ ID NO: 274480 - DNA, 637 bp, Zea mays
ccactcattccaagaggcagccgcggtctcctctccaccccggccgccggccgcccccacagtgccgtaccccgaccagccatgcgcatcttcgtgctgtccgggcagagtaacatggccggccgcggcggcgtacaccacaggcactgggacggcgtggtgcccccagaatgcgcgccggatccgtccatcctccgcctttcctcggcgcagcagtgggatggaaagcccgcgagccgctcctacgccgacatcgacacaaccaagacctgtggcatcgggcccgggatggcattcgcccgcgctgtgctctcgagcctgcaggaggacacccctggcgcggcggcccagatcgggctcgtgccgtgcgccgttggcgggacggccatccgggagtggtccctcgggaaacatctgtacgagcagatggtatcccgggcgcgcgtcgcgaccttgtacggcgagatcgaggccatcctatggtaccagggagagagcgacgccgaatccgatgccgacacgagtgcctacttggagaacgtcgagaggctcatctgtaatgtcagggcagatcttgggatgccgcagttaccctttattcaggttgcacttgcatctgggaataaaaggaacattg

SEQ ID NO: 274481 - DNA, 484 bp, Zea mays
cccacgcgtccgccgagctcatgcggccctgccacttcacgtacctgcgcatgggcgccgagttcttctcccccgaccacttcccgcagttcatggagttcgtgcgaagcgtcgtgtgccggcgagtgggacgagggacgacggcccccccgacgaggaccgtggcatgactgtgtcaggcaataccagatccagggaggccaaggcggtttgaagcttcaactcatcgccgcccccgccatgtctcagtcagctgtctcgttttatttttgaagtgccaaaatacttgcaaatttccgctgctactagatttagctgagaagaacgagatgatccaggtattagtggatcaggagttgcaaatgtgggatcccacatgcattttttcttttgccgatgtttcgtcgtcttcattgttgttaattttttttgtttcatcttgagaccatttatattatactctctcttttctaaaaaagaaaaa

SEQ ID NO: 274482 - DNA, 1228 bp, Zea mays
cggacgctgggcggttgtggccgtacagacgggcccgcagaagccgtctccgtcgtcgtcccaggccgccgcggcggaggatgaggcggatgcgctgcagaagcttctgaagagggagtacaagtacgggttcgtatccgacttcgagtccttctccatccccaaggggctgtcggaggccaccgtccgccgcatctcggagctcaaggcggagccggcgtggatgctggacttccgcctcgccgcctaccgccgcttcctcaccatggtcgagcccacctggaggacaacgagtacgcgcccgtggacctgcagtccatttgctactactccgcgcccaaaaccaagcccaagctcaatagcctcgacgaggtcgacccggagctgctcaagaccttcgaccgcctcggcatcccgctcaccgagcagaagcgcctctccaacgtcgccgttgacgccgtcatcgactccacctccatcgccaccacccaccgcgaagcgctcatggccaagggcgtcatcttctgctccatctccgaggccatccgcgagtacccggaccttatcaggcgttacctgggcagcgtcgtaccgccaggcgacaactactatgccgctctcaactcagcggtgttcagcgacgggtccttctgcttcgtgcccaaagacacagtctgccccatggaaatctcgacctacttcaggatcaacgacaaggagaccggtcagtttgagaggactctgattgtggccgatgagagaagcacagttagctatttggaaggctgcactgcaccagcttacgactcgaatcagctccatgctgcggttgtggagcttgtgtgtgacgagggggcagagatcaagtactccacggtgcagaattggtactctggtgatgaggagggcaaaggaggcatttataactttgtgacaaagaggggaaggtgcaaagggcggggttcgaagatctcatggacacaggttgagacaggatctgctattacatggaagtacccaagcgttgagctcgtcggggatgacagtgttggagagttctactcgggttgcgcttacaaacgattgccagcatgcagacacagggacgatcatgatccacaaggggaaaaattcacgcagccggattatatccaagggcatctctgcagggaagtcaaggaattgctaccgtggcttggtcctgatgaactctagtgcagagaatgct

SEQ ID NO: 274483 - DNA, 555 bp, Zea mays
gtcgacttgcccaacacccctgcagtgttggacgcagggaatacttggaaccccggctcccgatggccgatggatctcctctctgctgcgtacggtgctacctctgacgatgaggatgccgcggaccgacccttctccatgccggttgccaccaggtccgcctccttctctccacctcccatgaagccgccgcggtgggaatctcacccatacctccctccaacccactgcttcccgcaaccacctctgcccgacgcagcgctgccactggcatctccatccagcggcagatacatttccaagagggagcgcgctctcctggcctcatcaggggcacatattgaatccggatcatccctgcctctgacgagagtggattttgaatctgcagttggctctatcacctatccaaatctacgagctgacattttgcattcttttgcgatgccaaccgaaacctggaccaagcacaagtttccctttgaggctctcagtttggttgaagggtcacactaaagcaatcaattgtgtagattggtcaccgactcatgggca

SEQ ID NO: 274484 - DNA, 721 bp, Zea mays
ggcgtactggtgcaccgaagaagagattcgacaagttgctggcttggactctgttgtgctccttcgcctcttcattttcagcatccgtatcttctcaattacttctcttgtttgtatatttgttgtgcttcctgttaattatcatgggaaagagatgtatcacaatcatattccggaagagtcactgaatgtttttactatagccaatatcgtcgaagaatctcgaaagctttgggtgcactgctctgctttatatgtcataacaatctcagcctgcattcttcttttccacgaatacaagtatatttcgaggaagagactagcacatgttactggatatcctccaaatcctggcctttttaccgtgcttgtccgttcgattccgaggtttgacaatgagctgcttgatgacacaatcagaaatttctttgttaactatcacggatcaagttatctgtcgcatcaaatgatctttcgcaagggacattttcagaagtttgtggatagagcagagagggcttacaggagatttgtaagggtaagactctccgtatctgagcggaatgggagatctagcatgtccaggtgtggtgtctgtggtgtaagagcttcctcatttcagctttaccgcaacaagttcatcgaggccaagaagtcagacctcactaatccggaagtagtggaagctcaaaagaactgtcccggtgccttagtgttcttc

SEQ ID NO: 274485 - DNA, 358 bp, Zea mays
  unsure (1)..(358): unsure at all n locations
cgagcctcgagggagcgtggagggaaaccttggctcctgtacgggagtagggccaccagtgctcactgtatattgctcgtcgtcgctcgttcttggccgcggatcggtgcagtgcatgcgtacgcggaagaggtggcgcgacctggtgtcgtgagattgaagatgagcggggactccagcgcgggatcgagtaacacgatgaagaatctccatccactggtgattaccgttgtcacccgtgctcgccgcgacccaaggccagtgcctcggcgggaccctcgcgctatcggcgtccggtcncccccatgccgcgtgaggacacgtgttacctgaagagcaagttggtacctggaatctc

SEQ ID NO: 274486 - DNA, 528 bp, Zea mays
ccctcgcgtccgaaaaggcttaaccttaagtcatgtcaggtaagtctatggcagctcgaggacgagctggtcctcaagggagggggagatgtcatgggcataatagggagtgagaggcaacagccaggctaggataaggctagagaataagattgagatgagctaggataaggctagagaataagattgagatgagagaattgtggagagttggttagcagcagataagtccaagaaagtaggagttagttgagagtttgtaggagaagttggttagccatagggctatttataagccgcatggcagcagggaataaatcaagcaagatcattatcaaaccaatctctctctcccgtgctatgaccctctcgagcgcttagggctgctaccctagaaccaagcctacggcagaggggtataacctcgccggagaagacagctatccccatggaccgaaggtccatgacacaatcaaactaacaaagtcataaaattcttaaaaatttatagatgtatctactctaata

SEQ ID NO: 274487 - DNA, 666 bp, Zea mays
  unsure (1)..(666): unsure at all n locations
cccacgcgtccgcccacgcgtccgctcctttgtgggtttgccaattagcccaagataagtacaaggaaaatccttgactgtacaggacttccttgagacatatacaagtattgcattcagaatattcatgaccaaaatgaatagcattggtgtcatgggcatcatagggagcgagaggcaacagccagactgggataaggctagagaataagattgagatgagttgggataaggctagagaataagattgagatgagagaattgtggagagttggttagcagcagataagtccaagaaagtaggagttagttgagagtttgtaggagaagttggttagccatagggctatttataagccgcatggcagcagggaataaatcaagcaagatcattaccaaaccaatctctctctcttgcaatgaccctctcaagcgcctagggctgctaccctagaaccaagcctgcggcagaggggtataacctcgccggagaagacagttatctccatggacagaaggtccatgacacaattgcacttgtttatgatgttagcggtgtagtgtaatcactattcntgttataatgttaacagtgtaaatgctgctgctaagtacctggtttttagactngtggcatggtctgtttcacttcacattgctatgtct

SEQ ID NO: 274488 - DNA, 443 bp, Zea mays
ccatagggctatttataagccgcatggcttcagggaataaatcaaacaagatcattatcaaaccaatctctctctcccttgcaatgaccctctcaagcgcctagggctgctaccctagaaccaagcctatagcagaggggtataacctcgccggagaagacaactatccccatggaccgaaggtccatgacacctggtatcagctccaggttatcctcaccaccaccagccgcccatccctcaccaccaccagccgccgcgccatctgccgccgcaacgccctcccacccgccctctccaactccagatgcattcactcggctcaaagagagttttggccgcttcgcagagcagtgggatcagttcgttgtgatgttccaccgctacaaggagaagacagagaaggaactccaagcagcggtgcggcttcagacgacaacgcg

SEQ ID NO: 274489 - DNA, 400 bp, Zea mays
aaagaccctaagaaatctaagtattcagatacactgcatcggttttggaagaaagagcatgattaggggtgttaaaagtttatggagctgtcagaattacatgatggctttattgttcaggattctcttaccatcaaagcccaagttcaagtcattagggagaagatagaccgtccatttcgttgccttgatggtcagtaccgaagggaactaattagggtgtatctatcaaatgtggaacaaatttatcggtgttttattgatgaaaaagaaggacgttcagcaggctgattgaggataaactcgggtggtccagtttcagtggattctggctagccatttttcatctttgattttatctgaacagagacttgaactcgctatcaactttcagtagacc

SEQ ID NO: 274490 - DNA, 415 bp, Zea mays
agaaaaaggagacgaccgcgccggcgccgaccattaatttctcgccttctatccgcgatcacctctcctcgctgccgcggcatcttcttctgggtcctggcccgtcctcgtcgcaccattccatggccgattcagccgcgctctccacctccctcccccgctctctggcgtccaggaggcccctctcgtcgcctctccacgccagaacccgggcccgctcccagcgccgctgccggctcggatcgcgctcgctccaccggttgcgtgctcgggcgggaaaggacgacccggaggacctctacgggccctacccctgggaccagcccttggatctcagcgctgggttcgacattcaatgggtgcctgaagacagagtcacgctattcacttctgatgggctgatccagattggggg

SEQ ID NO: 274491 - DNA, 888 bp, Zea mays
aggaggggctgtcggacgtgacccgcaagtggctgcagtaccagaaggagtgcgtcaaccaggtgctcaaggcggccatggccattaacgcgcaggtgctcgtggagatggagatcccggagatctacattgagtcgctgccaaagaaagggaagacgagcctgggcgacgccatctaccggagcatcaccgaggaaacgttcgacccgctggagttcttggccgggatggacctttcgacggagcacaaggtgctggacctcaagaaccgcatcgaggcctccaccgtgatctggaagcgcaagatgcagaccaaggactccaagtcctcgtggagctccatcgtcagcttcgagaagcgcgagcagttcgaggagcgcgccgagaccatcctccacctgctcaagctccagttccccggcacgccgcagtcgcagctcgacatctccaagatacagtacaacagggacgtcgggtacgccctcctggagagctactcgcgcgtgctcgagagcctggcgtacagcgtcatgtcccgcatcgaggacgtgctgagcgcggacgcggcggcgcagaacctgacggcgagcgaggcggcgcggcgagcgctggagtcgacgtcggcggagctgcccgcggcgcggaagctggacgccaaggaggagctggagaagctgaacgaggccccggcgtcgatgacgctcttcgacttcatgggctggcacttcgaccaggacgagctgatgaagcgcagggaggacggcacgctggacgccgacggcgaggccatgctcctcaagaaggcgcccagcgtggcccccaagaagttctcctacgtcgacagcctctcctccggcggcatgaggagcccctccgcgcgccactgat

SEQ ID NO: 274492 - DNA, 611 bp, Zea mays
ggcgggcctcgaggcctccgtccgagcctatggcagcagcgccggcgcaggcgggcggtggcccagcccgttcaccatcgcctgcggcgccctgctcgccttgtccctgctcgcgccgctgctccccccgctgcggtggctggcggtggcggcggcctgcgtgggctcccagcccatgctgctccgggcgttcgccgcggcgggcaagctgacgctggacatcaacatcctgatgctcatcgcggtcgccgggtccgtggcgctcgggagcttcacggaggccggcgccatcgtgttcctcttcaccgtcgccgagtggctggagacgctggcgtgcagcaaggccagcgccgggatgctgtccctcatgtccacggtgcccaagactgtcgtgctggccgagacggggcaggtcgtcggcatgggcgacgtcgcggtcggcaccgtcgtcgcggtcagggccggcgacgtggtccccgtggacggcgtggtcgtcggcgggcacagcgaggtcgacgagagcagcctcaccggcgagtccttccccgtgccgaagcagccgcagtcggaggtctgggccggcaccatcaacttagacggctacatctccg

SEQ ID NO: 274493 - DNA, 482 bp, Zea mays
tgaaaaccgggccgaccgcacgcgtccggtcttccccaccgaagcatggtgattcggagggcgtcgccttcgctgtctccggcgaggggcccggcggtcttcgccgccgcggtcgtggtgtttctgccggtcttattccccgggttgttctcccctcttggccacgctttcccttctgtcttctcggagtggaatgcccctaagccaatgcatccttctcttttgaatgaggccttgcgatggacagctacagacggacaaaagaaagatctatggtcacccttgccatatcaggggtggaaaccatgcttaacgccatcagtttctcacaaattacctctggaaccaagtggatacatccaagtatttcttgatggtggattgaaccaacaaagaatggggatatgtgatgccattgcagttgcaaagattcttaatggtactcttgtgaacccaaaccttgaagaaaccctttttggaag

SEQ ID NO: 274494 - DNA, 441 bp, Zea mays
ggggtgaccgtctggaggtgctggtggacaagacggcaaccatgcaggggaacacggtgcgcttcaagcgccaagctcgccgcttcaggaacaccatgtggtggaggaacgtcaagctcacagctgcagtgatattcatcctcaccgtaatcgtgtacgtcctgctcgcctacatgtgtcgcggcttcaccataccgtcatgctttccgtaatctccatccgtcccggtgccagtgcggaccaccagccctagctctagctgcctcacaacttggttttccgggttctgtaacagcagcagcggtgctgcagttctttctctcttgtacgagggaaacaacagctcattctcaagttctgcaacaaccagatctgattttttttaaaaaaaaagatggtagtcaaatgggaaagctttcccacctgattttttatcattaa

SEQ ID NO: 274495 - DNA, 677 bp, Zea mays
gtgacatcagacatcaccaactcgtcgacggtagagagagcaagctcttcggcgatttgagaagaatcgaggagcgagcgagcgagcgagcgagagaggaggaggaggagctggggcttgagcctgcgcccgggggccccgggtcacggaatcctaccattaccaaccctagccttcgttgatcgccgtctcaggtcatggcagggccggcgccggatcgggccgccctgactgtggggccgggcatggacatgccaatcatgcacgacagcgaccggtacgagctcgtgcgcgacatcggctccggcaacttcggcgttgcccgcctcatgcgcgaccgccgcaccaccgaactcgtcgccgtcaagtacatcgagcgtggcgagaagatagatgagaatgtccagcgcgaaataattaaccatagatcattgaaacaccctaacattattaggtttaaagaggttattttaacaccgacccatcttgctattgtcatggaatatgcctctggcggtgagctttttgagaggatatgtaagaacgtgcgattcagtgaagatgaggctcgcttcttcttccagcagcttatttcaggagtaagctactgccattcaatgcaagtatgccaccgtgaattgaagttggagaacacacttctagatgggagcgacgct

SEQ ID NO: 274496 - DNA, 675 bp, Zea mays
acttttcatcacatgatattagaagtgtaatctatggagaacaaccaagaaataggtaggatttgtacatacccaaagataatagcaaatcaagtccagttgtggcattcgtaactggtggagcttggatcattggttacaaggcttggggtgctctccttggaaggcggttagcagatagaggaattatagtagcttgtattgattacagaaatttccctcaaggaacaataagcgacatggtcagtgatgcttctgaggcgatatcattcatttgtaacaatgttgttagctttggaggggatcctaataaaatctacttgatgggccaatcagcaggagcacatatcgcggcctgcgctctcttagagcaagcaattaaggaatctaagggagagaatacctattggaatgtggctcaaataaaagcatattttggtttatctggaggatacaatatccaaaatttggtcgatcactttcatgagcgtggtctttatcgttcaatatttctcagcataatggagggagaggaatcactgccacattactcacctgaaattgtcgccaaaaaattaagtgcagaaaccatatctctactacctcagattgtactattgcatggaacagcagattactccataccatcatctgccagcgaaacttttgctgatg

SEQ ID NO: 274497 - DNA, 410 bp, Zea mays
atgctgcatagccacgagcagcaggtccggcaagctggtcgccggccatggttcaagaaaggcagcaagaaggagcagcacagatggtcagaggcacggcatgatcacattgagagcggcgtgttcaaaacaggagatgctgcgagcagatgaaagggatggaacgagttgggccatgagctctcctgatgagcaggtgtttttttcagggctggacagacagacagccccatgccatcagggaaagctgagatggaagtggaagctgttgtagtggggttttcaggtttcatgcaaccagattttgctctacctgaactagacaacaatgtcgttgctgctgctgttgtacaagatctttttttgtgctcgcttgtgatgataatatgcatggcaagctccaaaatgtg

SEQ ID NO: 274498 - DNA, 582 bp, Zea mays
acggggaggagcagaacggcttgcagatgacgggcctgaatctcatggacaagacgatgcccgtcaggggagcaaggattgcctacagcatctgggatgtggcaggagaccaccagtccgtcgaccacatcccaatcgcgtgcaaggacgccgtggcgatcctgtacatgttcgatctcacgagccgctgcacgcttaataacattgtagattggtacgggaggtcgaggaaatggaataagacggctattccaatcctaatcgggacaaagtttgatgactttgctcagcttcctcttgagatgcaatgggccatcgttaaccaggccagagcatacgcaagagcgatgaaggcgaccctcttcttctcgagcgcgacgcacaacatcaacgtgaacaagatcttcaagttcatcacggccaagctcttcaacctcccgtggacggtggagcgcaacctcaccatcggcgagcccatcatagacttctgacgaccccctcctctaactagtaactcggcaacacacgcaagacgaaccttggtaaataacaagggtttacaaggtcctgtccttccattct

SEQ ID NO: 274499 - DNA, 1267 bp, Zea mays
cggacgcgtgggcggacgcgtgggcggacgcgtgggcggacgcgtggggtcgggcgttacaagcaaatcaagcgaacagaaggtgtctcgagcactgacatagttgggaggatattgctaacattcaggcagaaagatgctgacactgatttaagtgttgtcgttgctgagaagtctggagagaaatcaaatgatgaagtgaaaagtcagctatctcatttccttccaacttctcgccggatcatgcagttttcaaatgggcaggctccttcgccaggtgctcgtgttgtctatgtagatggcacatttgatcttttccacgctggccatgttgagttcctcaggagtgccagacaacttggtgactttcttcttgtgggtatctatgacgacgagtcgatcagggatagaagaggctgtcgtcctataatgcatctccatgagcgtactcttggtgttcttgcctgccgttatgttgatgaagtcattattggtgcaccatgggaagtttctaaggacatgatcactacgtttaacatttcattggttgtccatgggactgtagctgagggcaattcagctggtgaaattgatccttatgctgttccaaagagcatggggattttccagacaatcaggagcccaaaatctataacaacattgtcagtggcgacaagaatagttgacaatcatgaagcttacaagaagaggaacctgaaaaagaaggctagcgaagaccggtactacacacaaaagaaattcgtttctggagactagtgctgcacaaggagtgtatatttctgccagcagtccgaggaaatgcatgtgccaccctgtattgatgttattctacagcagagactggaacagattatcagcaatagaaaggtcacaatgatagtttgagcagcaatggtgtggatggaccaagctagggaagagagagagagagagagggagaaaactgtcacattcttctgctgtcgcccttttaggaacgctcacatgacatgaggagttcacataaacgattgtttttctttctgactttgttatccccgtatggggatttatatatatctgtagctgaaggccttcagcaaaccgttgttgtatacttgtgtgttgttacttaacagcgtgtgtagtgattagcactgcacactccctgattgtaccatggtatattgaatgtttatactgctggaagaaaaaaaagggggaccttgtgatggtcagatgtttaaagctcgaactggatccggag

SEQ ID NO: 274500 - DNA, 665 bp, Zea mays
gagataacagaagaattcatgaatactctcttcaacaagtacagcattgattacattattcatggagatgatccttgtcttctacctgatggcactgatgcatatgcgctagcgaagaaggtcgggcgttacaagcaaatcaagcgaacagaaggtgtctcgagcactgacatagttgggaggatattgctaacattcaggcagaaagatgctgacactgatttaagtgttgtcgttgctgagaagtctggagagaaatcaaatgatgaagtgaaaagtcagctatctcatttccttccaacttctcgccggatcatgcagttttcaaatgggcaggctccttcgccaggtgctcgtgttgtctatgtagatggcacatttgatcttttccacgctggccatgttgagttcctcaggagtgccagacaacttggtgactttcttcttgtgggtatctatgacgactagtcgatcagggatagaagaggctgtcgttctataatgctattttcatgagcgtactcttgttgttcttgccttctcttttgggggtgtatttatttattttttcatttttttatgtttttttttttctttatctttcttttttattttatattcttttatttttgttttttttttttttttttttatttttttttttt

SEQ ID NO: 274501 - DNA, 444 bp, Zea mays
gcacccagtctcggcgcctaaagccccaaaatcctctcgcggtcgcagatcgctcttccctcagcctcttatctctttctcttctcccattccttccttccactcccccgcccagcgccaccatggcctcctccgtcgcggtgtccctccgcgccctcgctgccgccccgctccccaagtccagccccgccacttcctgccccttcttcgtgctccttgcgccggcgctgccccgacgcctgctccgcctccgctccgcacgccgcctgccgctcgccccgctcgccgcctccgattccgccttcgagtcctccgtcggagttaactacgcggagcccgacgactcggagaaggataaggaggtggagttgttcggatcgggtgacgacgagggggcgggtgagttggtggatgaccattccgtagaggtctcagccgctgtcg

SEQ ID NO: 274502 - DNA, 447 bp, Zea mays
  unsure (1)..(447): unsure at all n locations
aatctctcatctgagatacagacagattaatcaacgcccgcacctcctatgggcacgaccggcgacgctccggctccggcgggggatccgcaggaccgccaccgtacccaccccccggcggcgaagcagcggacgacgctggtgttcacgtacgggacgctgaagcgcggcttctccaaccaccgcctcctggaggagctcttcgcgagcggggacgcgtcgctggtgggccccgcggtgacgtcggcgcggctgccgctggtgtgcgggccgtaccgggtgccgttcctgctgaacctccccggcgccggcgccggggcgcaccgcgtgcgcggggaggcgtacgcggtgacggcccgcgggcttgcgcggctggacgagctggagggcgtggagacggggcactacgagcggctggccgtggccgtggacctcganggcggcggg

SEQ ID NO: 274503 - DNA, 265 bp, Zea mays
aggcacgtcacgccccgcgactggcagttcggcaaaacgtaccaggccaccaagaacttctacgctcggctcgcggagctgagccgcgcccttctttatatgtagatatatgcatgaagcggattatattggactgttgtactgtgtactaccttgtttattccatgactaacatattgttatattgactgggttgtttgtactgaaaagaatggatggcgcccgacaagcccaaccccaacgagctcaccagcaccatcataaa

SEQ ID NO: 274504 - DNA, 1079 bp, Zea mays
ttattaagagacaccaagctcagtgacacagatctggcagttggcaacacaacctgcctttctttgttatgcggcttctgcattgactatctcactgatcttgatatttcactgtgcaccccgttatggccagacaaacatcgtggtgtatgtgggaatttgctcagtgataggatctttgacggtaatgagcatcaaggcagtaggcattgctatcaagcttacaattgagggcataaaccaggctggctatttccagacttggctgtttgcaactgtttcagctacatgcataattattcagttaatttacctgaacaaggcattggatactttcaatactgcagttgtttctcccatctactatgcgatgtttacatccctcacaattttggcaagtgccataatgttcaaggactggtctgggcagagtataagcagtattgcctctgagatttgggggtttcttactgtgcttactggtactgttgtactgcattctacaagagaacatgatccaacccttacttcagatctgtatgctcctctttccccaatatattggcatatccaaggtaacggtgaaacaggaggaaagctgaaagaggatgatttactctctggcaatttcatcactgtggtgcgacaagactactttgtctagagaccttccacgatgctcaatgttctggattaaaagaaaagagaacaacactacggaaggatcctactgatgcccagtgtactgcggcttccccactgtgctcatgaacagacattttttcctgccttccaaacaggcccttagaatttgttgaaaagttccagtttgatcacaggcatctgggccgatgccttgtagtaaaatgtaagcaatccgtcctctggccgggttgagcaaggcttggctgcagtgtatcagggtggtgcagctgatgtatttatactgtacaatctagtgtgaatgtatgaactagagctatcagaatctgcacagatatttcatgacagactctgtccagcatgttaagaaatatcctgctcctgacttgtgaataaaaaaaaaaaaaaaaggccgc

SEQ ID NO: 274505 - DNA, 385 bp, Zea mays
agggcaactccacagacgcgcgcttgcactctactcgtgtgctggggacctttgggtaccatgccccagaatacgccatgacaggccagatcaaccagaagagcgacgtctacagtttcggcgtgatccttctggagctactcaccgggcggaagccagtcgaccacaccatgccgaaaggccagcaaagccttgttacctgggccactccaaggttgagcgaagacaaagtgaagcagtgtgtcgatccgaagctcaacagcgactaccctccaaaggcggttgcaaagctggcggcggttgcagcgctgtgcgttcagtacgagtccgacttccggccaaacatgaccatcgtggtgaaggcgatcacgcctctcctgaacgc

SEQ ID NO: 274506 - DNA, 422 bp, Zea mays
cgtatctcttgtttaggccgggctcgagagagttgggctccgaatcctgggtgggtttggagttggagaatcgccttcgtcgctcgacccagaaagattcgatggagagccacaacccatcgcactctcagatcgccgaagtgacgatggacatcgcagcgtcagcttctggagcggcagggagcaagttctgcaagggcgcagcctgcgacttctccgacgccagcaactcctcgaaggacgccagggagaggtcggcgtcgatgaggaagctgatagtcgcggtggtcctctgcgtcgtattcatggcggtggaggtggtggggggcatcaaggcgaacagcctggccatcctgaccgacgcggcgcacctcctgacggacgtggcggcgttcgccatcttgctgttctcgctctgggcc

SEQ ID NO: 274507 - DNA, 476 bp, Zea mays
aaaccgtccaaggccgccccgcccgcgcaccaagtttcctcgtggtccgagcgcgttctcaaacggaaaacccgcactcccgtgtctcgtcgtcccgtgcgtgccgctgacttctcggcttggccgggcgggacacgcccacggcatcgcgatggctgcgcgcggccactgcacgcgcacacggcggcgtcccgcccggcggtttccccaggcccagggcatccacgaggagaggacaagcgcgcggcgcggtcgagctgttgaaacgccggccgaggttgattttctcgtgcgatggacacgacacggtgttgacgacgacacggtgttgacgtggccggcgccgttgacgcgttgcgattgcgcggaggaaagagatcgcgcgctagctagctctgaaaagtcactagcgttcaggagtaccaggcaggtcttgttcttttacacacaatccaacactggattaacacggtttg

SEQ ID NO: 274508 - DNA, 517 bp, Zea mays
actcacgggtcgatgcacgcctctaatctgaatcgtaggaaggaagctcgtctccggcacgatccccgacgccgggaccatccacgcgcacggctcggagaccgtcaccatccccttcctgctggtctacgacgacatcaggagcacgtacagggagatcgagcccgggagcgtcatcccctacaaggtcagggtggtcctccacgtggacattcccgtggtcgggagggtctcgctcccgctggagaaggacggcgagatcccggtgccgtacaggcccgacgtcagcgtcgacaggatcaagttcgagcagttctccttcgaggagtccaccgcgacgcttcacctgagcctggacaacaggaacgccttcgacctggggctcaactccatggactacgaggtgtggctcggcggcgtgagcatcgcgtccgctgagctcagggaggctacggatatcaagagacgggaagtgaccaccatgaacttgcctatcagcttcaggcctaaggatttc

SEQ ID NO: 274509 - DNA, 521 bp, Zea mays
cccacgcgtccggagatgaagaagatcgcctgcgccgtcctcgtcgccgcctcggcgggcaccgtggcgctcgccgcggaggctccggctccggcccccaccagcggctcctccgccgtcgcgcccgccgtcggcgccgccctcggcgccgccgtcgcctccttcttcgcctactacattcagtgagccggccgggctcccggaggccgaggaagagacgaaggggagagagagtgacatggctgcgcgcattccgatgcgtgggcatgtttttgattcgacacaccttttgtcctctttttctttgttccctctttctccttaatttaacgaattgatgcatgccgctgatgttcttcccctgagagagggattaacacttgtatcatttcatcgcttgccatttgtttgaatccattcaacaattcgatttataaaaaaagaaataaaaaaaaacaaagtaaagcaaaagtgaaaacacttcaacaagatgaattctcgaacggtccaccgaaggggtg

SEQ ID NO: 274510 - DNA, 540 bp, Zea mays
ctcgcgggtcgacccaagcctctaggctgacacgcatgagtcaacgatcgagatcgacccggggcacgacggcggccgacggcggcgaggagggagacgatcgatccaagaggaggggtgtgtccgtgcgtacgtgtgtgcagcgagcagctagggcatatgcattatttcagaagagaactagctactccgatcaagatgagcgacgaaggattgtacgtatattgctgagaggagatcgaagagacggtgatgagttggcggaagatcgatgcatgcgtggatgatcatcacagccaatcgtacgtgtgtaaaaggtcggccggaggggggaataatcgtgcatgagacacctctctcgctcgctcttcctctcctacgtcttaattcattgggttcgtcgatccgagatcctacgtacgtcgtcgtttttgtattgtatatattataggtcatcatctcgtgggggtcatcagatctggccggtttggtggtgtgttgtaatttgtaaagagatcgatcaagggtgatgcggtgtgg

SEQ ID NO: 274511 - DNA, 764 bp, Zea mays
gttctagatcgcgatctagaactaggaaatacgatgctggtttgaactttacatgtgttggattgcgcaccatggaccaacatgaagtataccctgaggcatttgcagatccagaaggcctaatatggcaggtgctaaatgctgcgtgggatgctggtatacaagtggctagtgagaacgctctaccttgctatgatagggatggattcaacaagattttggagaatgccaaacctctgaatgacccagacggacggcatttgttaagtttcacctacctaaggcttggcaaagatctgtttgagagacccaacttttttgaatttgagcgcttcatcaagagaatgcatggtgaggcggttcttgatctgcaagtataagattggtagcatattgcatacacgtatacaagtgactgattggctcaggccttatggcttacatttttttcttcttttgctttgtgtttttaggcggtaatatcagctgatttttgagctgttaaatagagaactcgctgctcaatttttaactctagtcttcaagaaggaagacgagttgagttccgtataatcggtgaattcacatccttttgtcgccggcggctccacatgtgccatcatctcatggccatggcgcaatgttatgcagatgtagtgtgaaatccgaagaacctaagcattctgctcatctccatctccatatcagcgtcaaatgctcaaattttttagttcaagtgactgctgatacgcatggaacaaaac

SEQ ID NO: 274512 - DNA, 600 bp, Zea mays
acaacaagcaggttctcggcgcgctgccgttgccgctgccgtacaccatcacagccttccagctcgcgttcggctccctgctcatcttcctcatgtgggccaccaggctccacccggcgcccaggctctccgctgcgcagctgggcaagatcgcgccgctggccgtggggcacatgctgggcacggtgttcaccaacatgagcctgggcaagggcgccgtctccttcacgcacaccatcaaggcctccgagcccttcttcaccgtcggcctctccgccctcttcctcgggcgaggttcccttcccttccggtgctgggctccctcgtgccgatcgattggcggcgtcccctttggcgtcattcaccgaagtttcttccaactggaccgggttttggagcgccatggcgtccaatctgaccaaccaatcgaggaacgtcctcagcaagaaactccttgccggtgacaaggatggtatggatgacataaatctcttctcggtgatcactgggctgtcgtttctgctgccctgccctccaatgctctttgccgaaagcatcaagtttcaccccaggatacctccagagcacgggcctgaacct

SEQ ID NO: 274513 - DNA, 373 bp, Zea mays
gcttcgtcaacgtcggctgccgccgtgcgccggcgctggcggtcgggtggtggtcgcggcgccgggtgctggcgggatcggaagatctccatcccagcctcgcggtcctagcgcttgagcttgcccgcaaggccggcgccggcgccggcgccacagggctgcgcgcagatctcacgtgcggcgccggtccgtgcctccccacctgatctcctcccccccatcctacgcgccgggcgcccgcgctggtcgtccacacgctgctccgctgtcgcgtaacgcgcatctttggacagcccagacactccgccttcgtttggcagcagccaagcaaagcaagatcccctcttcctccactttctatttgtccgcagtg

SEQ ID NO: 274514 - DNA, 443 bp, Zea mays
cccacgcgtccgcccacgcgtccgggtccaagccagaaaacagtaaaatggcccaatgtaagaccatcgtcgcagcagtcctcgtggttgctctcgtggtttcgacgatcccagccagcgccgatacgaacctggaacctgcaggaggctctacggagggcagtgcccgcacctccggcatgcagaaggaagagacccgaggcaacaagaagccagcgaccctcgctggatctcttggttcaggcaagaatgccatctacgggtaaatgattagaaggaatcctgcttcggaaggtatgaaaacaatggggatgtgctcaacaatcaatctcaaccccaggtgacggcaatgagtcacccacaggaatgtaaccggatatagatggacattgctcgttccatatttctttttcatattttctcttcaaattcaattgaaatac

SEQ ID NO: 274515 - DNA, 739 bp, Zea mays
ctctacagtgctgctcaccaccggcgtggtgggctctagggccggcccgctgctggccgggtgcgggttcttcgaggcggtgatcaccggggtcggcggccacgccgcctccccccacaacaccatagaccccgtcctggcagcctccagcgtcgtgctcagcctgcagagcctcgtgtcgcgcgaggcggacccgctggactcgcaggtggtgacggtgacgaggttcctgggcggcggcgcgttcaacgtggtcccgggctccgtgacgatcggcggcacgttccggtgcttctcgaccgagggcttcctgcggctgaagcggcggatcgaggaggtggtcgtggcgcagtccgcggtgcaccggtgcgcggcgtccgtggacttcggcgccggtgggagcccgctgctgcccccgaccgtgaacgccgccccgctgcacgcgcacttcgaggccgtcgccgccgacacggtcggcgtgggcgccgtccgtggcgccatggagccctgcatgggcagcgaggacttcgcgtccttctcggcggccgtccccgcctcgcacttctacttcgtcggcatagggaacgaggcgatcggggccgtgcacgccgcgcactcgccgcacttcctcgtcgacgatggtgcgctcccgtacggcgccgcgatgcacgccaacctcgccatcgagtacttgcggaaccacgcgatagccaataggtccgttggtccccacgacgag

SEQ ID NO: 274516 - DNA, 503 bp, Zea mays
gatatccggagcttgcagcatttgccagatgtactgagaaaggctgatattcataagattcaggcagagcttgtgtcatgtcttccgtcgttacctcacctttcagatctacaaaagctgaaggatgagctgaagacctcttggaattctatggaggttcttccatctctgtcccgttggcatctcttggagttactcgcaaattgtctgccacacagatttacccatcccaatgaaacaagtttgtctgttcttcaaagcatgaaggaggatctagcaagcctgattgcaccgcaactgatcagaccaattgcgcggtggccattctatgccttcttgggaggagccatgttctgcctcctggccagcagcacttgccaccttctctcctgccattctcgccgcctagcatacattatgcttcggcttgattacgcaggcatcgcagctctaatcgccacatccttctaccctccagtatactattctttcatgtgctaccc

SEQ ID NO: 274517 - DNA, 907 bp, Zea mays
  unsure (1)..(907): unsure at all n locations
gcccacgcgtccgaagatgacgatcaagctctgaaatcactctcgagcattgagatgaatgagcatcagtcaaaggaagcatcagtgtctcttatacttgatagcttggaagatctgtcagagtcagaattgtctactattagaaaacagctgattgaggaattttcagcagatgacatttgtctgggatctcattttactgaaacaccttcgaaatctgcagcacaaaatggaaaactgcaccacaaatctatggaggttattccattcggatttgtttttgaagatgatactctcgctgaagcatctgacagctcagtagaacctcacttgcgacatctgccatgtaacagcgttcttgatgtcaaccggcttcttgattcagttttggaaacatctcagcatgttggaaggtcgtcagtgtcaacaaaccaggatctgcctttcaaggacgtagccaaccaatgtgaagcacttctgattgggaagcagcaaaagctatctgcgtgcatgagtgtctgtgaaaaagaggctggtgaatcttccgtcgagcagtcatctcggcaggatcctcaagcagatacgtttctctgcacagctgatgaacaatggcaccccaattcctgtaagctgccagcgctgtgtcnctacgaccggttccttgcaacgtctgggtgctacgatgatctcttctgcgatgtggatctctataaccaagaacgtgttcagtggacgcctaaacaattggtggttccagagctcatgcatgctaaaatatgtgctgtcgtgtgtgagtgccagatgacatgaatttcctgatttgtaaatgggtctcgtctaccatgcatgggaaatattgggggtggtacaatggggtttaaaaaaacaaaaaaaaaaaaggggggcc

SEQ ID NO: 274518 - DNA, 683 bp, Zea mays
atcgatgcgctcgtcggggccggcgggcaaagccaccagtggtcagagatctagctatggcgccggcgcttctgctgctgcgacttctggcattgattgcgacggcaagggaggcctgcgcggcgagggcgttcgccgcggcgtccaacgcgacggcgcatggggcgacggtggtggccgggaagctgaacgtgcacctggtgccgcactcgcatgacgacgtcgggtggctcaagaccgtcgaccagtactatgtcggatccaacaacagcatccagggcgcgtgcgtgatgaacaccctcgactccgtggtcgacgcgctcgccagggaccccgcccgcaagttcgtcgtcgtcgagcaggcttttttccaaaggtggtgggcagagaaaatcccaaacattcaggcagtagtccgcaagctcgtggattcgggtcagctagagttcataaatggtggatggtgcatgcatgatgaagctgctgtccattatattgacatgattgatcagaccacgcttggtcaccggatgatcaagaaacaattcaacaagactccaagagctggctggcaaatcgatccttttggacattctgcagttcaagcttatttgcttggagcagagcttggcttcgattctttgcattttgcaagaatcgattaccaagataaggaaaaagcg

SEQ ID NO: 274519 - DNA, 424 bp, Zea mays
cggagacgctcaagggcaactgccagcagatccactcgtcgtcgccgtaccgggagaacctgatggagggcaccccggggctgacctggaagatcaccgtggacggctggagcgaggagaagaagaactaccactacgactcggacacctgcgaccccggcaagatgtgcggccactacaaggccgtcgtctggaagaccaccaccagcgtcggctgcggacgcatcaagtgcaacagcggcgacaccatcatcatgtgcagctactggccgccggggaactaccacggcgttaagccatactaaaatatatatcgacccattgcatatatatatgttgcagagctttttattttggcaacatatctagtgcatatggactgctggtatacatcatgcacatattaaatcctatcctttaattt

SEQ ID NO: 274520 - DNA, 388 bp, Zea mays
ctctagaataagtcgtatgtaccagcgccggatcatcgagcggtcggggctgggcgaggacacgtacctcccggaggccgtgctcaacatcccgcccaacccgtccatggccagcgcgcgggacgaggccgagatggtcatgttcggcgcgctggacgagctgttcgccaggaccggggtgcggcccaaggagatcggcgtgctggtggtgaactgcagcctcttcaacccgacgccgtcgctgtccgccatggtcgtcaaccactacaggctccggggcaacgtcgcgagctacaaccgcggcggcatgggctgcagcgcggggatcatcgccgtggacctcgccagggacctgcgtcagtgccagcggggcaactacaccgtggtg

SEQ ID NO: 274521 - DNA, 610 bp, Zea mays
  unsure (1)..(610): unsure at all n locations
ttctctgtttcataaccatcctaggagtggcaactatcgcgttctctctacttccggtcttccaaaatccggagttcagaaccatcagagcatgcctcttctttggcatgggtgcatctggcgtgatacctgttcttcacaagctagtactcttctggcaccaaccggaggcattgcacacgaccggatacgaaattctgatggggctcttctacgggctgggagcattggtatatgcggcacgggtacctgagcgctggatgcctgggaagtttgacatcgccgggcacagccaccagctgttccacgtcttggttgttgccggagcctacacacactaccacgcagggcttgtgtacctcaagtggagagacctgcaaggctgctgaaaggtactgcatcgttgaggatgtggatagattgtagattccgtgaattcaggctgaaggtcatggtctgttgtaaattgtaacagtaatcatgaaacaattgctacaagtctaccaggtagtcgggcttccattaataatcaattgaagactagtatttatgctattactaaatgttcgtgtgactgatgcgataaaaaaaaaaaaaaaaaaaaaannna

SEQ ID NO: 274522 - DNA, 1139 bp, Zea mays
cccacgcgtccgcccacgcgtccgcccactcgtccggccacgcgttctgcggattctgcgggagatcaagcttatgagactcctaagacatccagatatcgttgagagcacacatattatgttgcctccatcaagacgggaattcaaagatatttatgttgtttttgaacttatggagtctgatcttcaccaagttatcaaggctaatgatgacctgacaaaggaacattatcagttctttctctaccaactgatccgtgctctgaaatacatccacacagctaacgtttatcaccgggacctgaagccaaagaatatattagcaaattctaactgcaaactgaaaatttgtgattttggactagcacgagttgcattcaatgataccccaacaacaatcttctggacggattatgttgcaacaaggtggtacagagctccggagctctgtggatccttctttaccaagtatacaccagctattgacatttggagcattggatgcatatttgctgaggtgttgacagggaagcctttatttcctggtaaaaatgttgttcaccagctagatttgatgactgatcttctaggcacaccatcaacggacacaatttctcgggttcggaatgagaaagcaagaaggtacttgagcagcatgagaaagaaggaccctgttccattttcccagaagtttcccagtgcagatcctttggcacttaaactgttagaaaaactattagcgtttgatccaaaggaccgtctgacagcagaagaggcattgcgtgatccatacttcaaaggtcttgccagggctgaaagagaaccatcctgtcaaccaatcagaaaagtggaatttgactttgagcacaaaagaatgtcaaaggaagagataagagagttgatattccgcgagatactggaatatcacccacaactgctgagtagctacattaatggcacagagaggacaacctttctctacccaaggttttagcttttctgtgtttgcacattgctgttgatcaatttaagaagcagttttcttatcttgaacagagtggtggtaacggcccattaattccaacagaacaggaacattcattcctttccaggaccactgtggttcaccttaatccaat

SEQ ID NO: 274523 - DNA, 522 bp, Zea mays
tgtccatcagttagacttaatgactgaccttctaggcacgccatcgatggatacgatttctcgggtccggaatgagaaagcaaggaggtatctaagtagcatgagaaagaaagagacaatttcgttctcacaaaagtttccgatgcagatcctttagccttggatcttttgcaaaggcttttagcatttgatccgaaagaccgtccaactgcagaacaggcattggctcatccatactttaaagggcttgccagggctgaaagagaaccatcctgtcagccaatcagaaaagtggaatttgactttgagcacaaaagaatgtcaaaggaagagataagagagttgatattccgcgagatactggaatatcacccacaactgctgagtagctacattaatggcacagagaggacaacctttctctacccaagtgctgttgatcaatttaagaagcagttttctcatcttgaagagagtggtggtaacggcccatcagttccaacggacaggaaacatgcatcc

SEQ ID NO: 274524 - DNA, 329 bp, Zea mays
atacaagactctaaagtgagtcgtcatacagctgaagctcgcacacccggacaacgcgctggtgaaccgaatgtcctcggcggcagagagcttcgacagagcctgccaagcaagggcgtgaaccccgtttgcgaaaattacaatttgttttcccctaggatgagtcgggaataacatcgtgatctactctgaagcaaagcagctagtgcatggctttctcatgggcagcttggactccaccgtcggcatgcttttccactggtctcggatagtacattaggcctcgctggtgcgctggaaaggcccaggtgtttcctttaccttttggg

SEQ ID NO: 274525 - DNA, 419 bp, Zea mays
gaccacgcgtcagcccacgcgtccggctactcagagggacactgtctcggcccggccaattgcccggccggaccttcgcccatgatcacagggagaacatcctttgcttcccatggccatgaagaagaaccaagactcccagttggtcatgggccggtacaggctgggccaactcctcggcagcggcaacttcgctaaggtgtacaaggcccataaggtggccaccggcgaggctgtggccgtcaaggtgctggacaaggatgctgtgcaccgctccggcatggcggagaaggtgaagaccgaggtcgacgtgatgcggcgcgtgcgccacccgaacgtcgtccgcctccacgagatgatggccacgcggtccaagatctacttcgtcatggaatacgccagcggcggggagctcttcc

SEQ ID NO: 274526 - DNA, 738 bp, Zea mays
tgtgtccggttcttgcagcgggcggcaggtaagccaaccgaaaccgatggcgtcgggctccggcggcgggagcgacttctccgtggtcgtggtgggatccgacttcgcggtcgacgccggcgccgcgctcctcgcccccggcgaccacgaggtgtggcacgactgcctccccgtcctcgctgaggcggacgcctgcttctccgacctcgaggagcgccaggtcgtgcgcatccagggcacggatagggcaggccgaaccatcgtccgcgtcgtcggcaagtttttcccggctccagtaattgatggtgaacgtctgaagaagtatgtgttccacaaactgcgcaccgaattgcctgtgggtccattctgcattttgtacatccacagcactgtacagtctgatgataacaaccctgggatgtcgatcttgaggacattttatgaggagcttccacctgaatacaaggaaaggcttcaagttttctacctcttgcatcctgggcttcgctccagactggccatcgccacacttggcaggctatttttaagtggagggttgtattggaaaatcaagtacattagtcgactggagtatctctggggggatataaaaaagagagaggttgaaattccagattttgttattgaacatgataaggttcttgagcaccggccactgactgattatggcatagaaccagatcccctacatcttgctgatgtacctgctgtgggata

SEQ ID NO: 274527 - DNA, 383 bp, Zea mays
cccacgcgtccgattctgtgtgtatgtcttggtttattaactaataacttaatagaccaagacatgcacacagaatcaaaccaacaatcaaaccttttatttgttccatcatatatctacaggaggaatttaattagtacgtaattaatccccctatgatacaataataataataatgaatacaacacatgcaatggagcaagtggacgacgggcagcatacgcaggaaggcgtgtcgacggagcgcgcgttcgaggcagacccgatcccatccttgtcggagacgatcacggcacgggcgatagcggccagcttcatcctgggcgtcgccctctgcgccgtcgccatgaagatcagcctcaactcgggcttcctcccgtcgc

SEQ ID NO: 274528 - DNA, 665 bp, Zea mays
  unsure (1)..(665): unsure at all n locations
tttgtgaagcctaacaagtttacatttgtcctttgtgagcattaaatggaatgggttaaagcgcctcctttccaactcccttgctctggaggaattagagctagtatgttgtgacaagatcgtttgcctcgagataccttctgccctgcagcgtctcaacagccttaatatttttggatgctcgcccctcaaagtgctagagagcaaagctccaaatctctctagtctttctctttcacattttggaggcgggctagtcttctcacgtgtgaaaacattgcaaatgaagaaactaatcactgaaagtactgtctatgatgctcgtaccaggctgccatccattatgcccaatcttgaaactcttgtcataaactcatttgattgggttgttgatgcaccaatgctgcctaccaaattcctctgtcttaagcacctgaccgttcgcttgtcatcaggaacaaccattacccaggcatttgactatttctctttggtttctttccttgatgcgtctccttccttggagacttttatattaaatgtgagtgggaaaggcatgatccatgaatcgatttctgcgcatccacaatngaggcacacacctgagcaccaccatggccaccctangagtgtgaagattgtggtttcagctctgagaaagctta

SEQ ID NO: 274529 - DNA, 337 bp, Zea mays
caactcgtgatcgtcggcggcgcctagcggtgacatcgtcccctcgactcctcctccatccccgacgcggcggcgccagcctgcagattagcttattaccaccatgggtaaaagaaagcggtcgtcatgtcaacgagataaccataatgattctctagccagcaaaataatgagaactagaatcccagatcttcctgaggttgttgatgcaccaatgctgcctaccaaattcctctgtcttaagcacctgaccgttcgcttgtcatcaggaacaaccattacccaggcatttgactatttctctttggtttctttccttgatgcgtctccttccttg

SEQ ID NO: 274530 - DNA, 303 bp, Zea mays
acgtcgtagaactatgatgtgcccttgcttgattcgttattgggtctctagccaagaagatgaagaacaacaacaacaacaaaaatatatatatggtgctgcgtatgcccattgtaacagttgatgagatctgtgactccccgtgccgtgtcccgtgagttgctgatgatttcatccccccccccccccccgcccaacacacacacactttttttaatctttccccttattatggggtcccaaattgatgcggagatctcgagcgactctgcaaatttcagatgagtggacatatgtcgaagg

SEQ ID NO: 274531 - DNA, 448 bp, Zea mays
cggacgcgtgggcaagcttaccacaaaagaaaaaggggtatcaatgcatctctttcagatccagcttcgtcttcagataatgttgacgtagatgtgatagttgatggcaaatttgaacatggctacataataactgttattatgggatcaaaatccactaaagcaatcctctataactgcactgaagaacctgctctaccaacttcggagctagctgttgcaagtaacaacaatgatttgaagggtggacgccgccgaagacgacgtaagaagaagctaagtacaacagaccccaggcaccccaaaccaaacaggagtggctataatttcttcttccaggatcaacatagaatgcttaagccacaatgtcctggacaagacagattgatcaggtaaatgattggtgaacgatggaacaatctaagtcctgaagataaagctgtatatc

SEQ ID NO: 274532 - DNA, 366 bp, Zea mays
accctcgccaagccacaggctccccgtgagctccgccacgcgggcgcctcgcctccctcgtcctactccttcctcaccgcagtccgcaggagcaatggcgatggcagccatagcctccccgtcgtcgaggaccctgatccctccgcgacaccacggcgccgcgccctccccgtccacctccggcgactcctcgctccgcctcctccgcgcacacccgcgccacggacggcgcggccgggcggtgtccgtctcgacgcccgcggcgcggagccggccgttcgtcttctccccgcgcgcggtgtccgactctaagagctcccagacctgcctcgaccacgatgccagcacgagtgttcttggaatcat

SEQ ID NO: 274533 - DNA, 461 bp, Zea mays
ttctatttttctcctctcgagtagcgtggcgggcgtggacgcggcggcgatgctgcggtcggcgctgcggcggggaggggcgtccgcgaggcaggtcgcgttggcgggagaagcctcgccgagagacctcctccggatgcgcgtggcggagcgggagcgcgcgaggcggcggcgtcgcgacccgggccgcgacgagttcttcgtgcccacgccagagtcgctggcgtggctcgactcggtctccctccccatggtgctcaccgccgccgccgtggccctcttcaccaagctcctcatgatggaacatgaagctacagatcaagaaaggagagagcgcaagataaagaatagccaccctgatcaaggaacagtaaggatgctatctcgtgaagaatgggaggaggtccaagaagtcaggccaaggaccccttttgaatcaaagttagctcgtccacatgccc

SEQ ID NO: 274534 - DNA, 672 bp, Zea mays
gatccgggggccctgcccggtccagcggtcctgccactttcgtctgcctcttgctccttcgcagctccgccccgctcctcgccgctgtggcctggtccctttatataacgcctcccccttccggtccgcgcccctcctccgctgccctcctcgcctccctcgattcagggttcagcgaattcggacagaacccggcgtgtccgtgtcgaccgacccgtccccctgcaagtctgcgacgagtctcctgccgctcttcccggccgggcgaaatggacggtgtcgttgtcaggagggtcatcccttcggataacagttgcctcttcaacgctgtgggctacgtgatggagcacaaccgaaataaggcttctgagctcagacaggtcatagcagcaacagtcgctggtgatcctgagaaattcaatgaagtgtttcttggcaaaccaaatgaagcgtattgtgcttggattttggatcctgaaaagtggggaggagccattgagctctctattctatccgaatactacgggcgtgaaatcgcagcatatgacattcagaccactcgctgtgatctctatggtcaggagaagaattacagtgaaagggccatgctcatttatgatggtttgcattatgatgctctcgctatgtctccggctgaaggtgcacctgaag

SEQ ID NO: 274535 - DNA, 412 bp, Zea mays
  unsure (1)..(412): unsure at all n locations
cggacgcgtgggtggattttggatcctgaaaagtggggaggagccattgagctctctattcgatccgaatactacgggcgtgaaatcgcagcatatgacattcagaccactcgctgtgatctctatggtcaggttagtgatctttcttccccctaactacttatgccaaatttgttaacttacttatcagctttgcaccccttgacacaggagaagaattacagtgaaagggccatgctcatttatgatggcttgcattatgatgctctcgctatgtctccggctgaaggtgcacctgaagaatttgaccagacaatcttccccgtcaatcatgaccgttccattggtccagcagaaggccttgccctcaacttagtgagggaggcgcanaggaagaggagctacactgaca

SEQ ID NO: 274536 - DNA, 497 bp, Zea mays
caactatctcgccgcatctggacacagactgacatggaacatgtgagggaaagtgccgctcgtgtcataaaattggtagaacatctggagaaggggcaagccatcaaggaaatgtttgggttaagcttcacattgaaccaacgagctatccgaagacctttcagctgggttagtgctaactcctaaagcaagcatcgagacaaattatgattatgatggttgatagttgcatgggacaacaaacaatgccatgatgaaatacatagtagaggagacctcttgtcagtcacccatacgagcattgattttcactgatgcccctgtatatttcgtatcacttattatgtagatgtacatgtgatggattttgcattgtggaactgttaaaatgaaccgacatgagatgccaaatctttgcaccaaacagtatgatgtattgctgatctgatttttttgcatcaaatgtatatctaatataccatattttttgcttaagt

SEQ ID NO: 274537 - DNA, 787 bp, Zea mays
ccctcgcgtccgcgcacgcgtggccaagcccgcaagcaatcaggagccggggagatgtggagacgccggcgacgaggcgaagaagaaggaggcggcgcttgcatcaagcaggctcctcgacccggcgttcaagccctccaaactatcccaggaccggctcgacaagtttaaggaattacacaagaaacggttacagataactgaaaagccgaagtataaaagaaaactgaaaggaaccgctgggagaagtaccaaagtaaccagtgattacaaattcactaatacggatgcatctgctgatagttctccaagagatgtacatcatacgtcatcaattacaggaatccaaggggatcctgcatcaggcctgtcctcgaggaacaaaagaaagctacattgggggcttgatattaaaggacgatggggaaggaaggcaaacatgtaaaaatctgaagacccaaccgcaaaagcatatccacagttccacaccccacttgattcagatttgaaaggagaaggacagaggaaagtggcaggccttttccacggatcatcaggttgcttgtaaggttcatgtttgtgacagcaaccagaaacactggagcgtggacagcagtctcagaactaagcagtaagctatagtatccaaccttacaagtgcgatgatagtttgtttatcggtttcgcttgctgtgtggtgtagtttgtctgtttttgtttgttttttttttggtgaaaaaaacactgatggtgcaagtgcaacaaaggcccacgtggctcgtcaccc

SEQ ID NO: 274538 - DNA, 615 bp, Zea mays
accccagggtctccgaaccaaacaacttcccggttaaccaagggtttcaacaaatggccttgtgatttttgcgggcaaccctggtcaaaagaaagctaaggtctcagaactaccaaaatttggaaaaccggcaaaactgcggagttcctcgtggtggacaaaatactttgtccaaactggcttaacagagaacgaacggccactgaagaaatttgaagaggctacatcccagaacaaataccaaccagattgtcagatcttccacttaagttcgccaaggtgatgcgcatccagaacaccttgggttgttgtcagttgtcacatcagttctgtaagcagcacctttgcttacccctgttgacttgcgcatctttcgtgcggaggaatggtcacacaaacagagccagccatcagcagtaggttagcttgtgtagagagggagagagagagagagagaggcctcgacacttgttcctagaaaatcgttctggaaattaaattatgtgtaaccaatgactgaaaactggagcccgctgggatatatatgtaagaacttcacgctgttgtactactcagctatgagctatccatggtgtgccaggtgttcccgctgtt

SEQ ID NO: 274539 - DNA, 236 bp, Zea mays
ccaagggctggctcaagtggaacggcgacttcggcctcgagacgctcttctacgcggaggtggacaaccgcggcgacggcgccgacatgagcaagcgcgccaagtggggaggcatcaagaccgtcacctacgaggaggcgcagaaggagttcaccgtggagaccttcatccaggggcagcagttcatccccaagttcggggtgccgttcatcccgggattgctgccgcaggagcag

SEQ ID NO: 274540 - DNA, 479 bp, Zea mays
agccaagggcgacacgctgtacaccggctcggacagcaagaacatccgcgtctggcgcaagcagaaggactcgggagggttcaagtcctcgagcggcctcgtgaatgcgatcgtcatgtccggcgagcgcatcttcacgggccaccaggacggcaagatcagggtgtggaaggtgtcggccaagaacggcatgcacaagcgcgtcggcagcctgccccgcctgcgcgacttcctgcgcggctcgctcaacccgtccaactacgtggaggtgcgcaagaaccggtcggcgctgtggatccggcacagcgacgccgtgtcgtgcctgagcccgacggacccggcgcaggggctgctctactccggctcgtgggaccgcaccttcaaggtgtggcgcatcagcgactccaagtgcctcgagtcggtggtggcgcacgacgacaacgtcaactccgtcgtggcggcgttcgacgggctggtgt

SEQ ID NO: 274541 - DNA, 634 bp, Zea mays
aattagcacatggagaaggtgctcttatctggagctctaaaagattggtcaaagagctaaaggaatcggagaaggaatcgatctagaactgaaggaaaccaggtcgacatcgttgcaaggaaaactcctgcagcacaagctgaacccaaaggttgtgcgcgcactgaaaggtcttaggaacaagcttgaagaacaagagcggggaaagaagtgaacaggaaccactggttgacaggaaacagagcaggtgtacagaagtggcgtttgtgcggccgacggacatcaactaacactggaggctggatccactgaaagtttgatgcgaacatcatgtaaatggatctggcttccttttgggtgcagtcagttttgtgtaggcaccatcagagccctgtgaaaaatagaagcactcacgcatggtagcagcttgttattgttgttagctgctgacgctttgaggcatgtcaacaagtagagatggattgcaaatcctaatcaatgtatattactttgtgtgtgtgtgtgtgttgttattgccataaaagtcaaaaccttcctgtactggttcaccgcaccacagctagcagtgtccaattcaattcacattcagctgccccccaatttttttacgtcg

SEQ ID NO: 274542 - DNA, 425 bp, Zea mays
tcgtgggtcgatacaagcctctacagggactcctgctatgcctcgcgcgccgccgccggcacggccacccccgagaacgagcccgagcccttcgacccggtcatgttcttccagaattacatccatagcctcgtggagggaggcgccggcgtccaggtcctcctcgacgacgccagcgccaccctcggctccggacccggcctcgggcgcctcggcggggcaagcttcggggattacttcgtcggcccaggcctcgaacaactcatcgagcagctcgccgagaacgaccccaaccgctatggcacgccgccggctgccaagtcggccctctcctcgctccccgacgtcctcgtgactcatgccatggtcgcagctgcggagggcgctgagtgcgccgtctgcaaggagggattctcgcctggaga

SEQ ID NO: 274543 - DNA, 488 bp, Zea mays
agccggccgggcggcaccgccatcggagtacgtacacacgtcctgctgtcccgcatgccaccggccgggggagaaaaccaacagccaagccaagcccacattgtttccgcagctaggtagaggggcaaaggaggagtactagcggagaggttgatgcgtgacggaggaggcgccatggacgtcgacatgcaagcccgcggtggcggtgctagccatggcggcgaacttgacgacgacggcaaggagaagaggacagggacggtgtggacggcgtcggcgcacatcatcacggcggtgatcgggtccggcgtgctgtcgctggcgtgggcgatggcccagctgggctgggtggccgggcctgtgatcctgctgctcttcgcggccatcacctactacacctcctgcctcctcaccgactgctaccgcttcggcgaccctgccaccgggaagcgcaactacacctacactgaggccgtcgagtcctacct

SEQ ID NO: 274544 - DNA, 825 bp, Zea mays
  unsure (1)..(825): unsure at all n locations
cccacgcgtccgaacaagtgtacgtaaagggcggccagaagctacagcaggtgctgggtgaacaagaacgcactcgagggttagcggatgcttccagtccatctctccgttgttctactcctgctgatagtactggtagatcaaacaataggatttctgggatcgaatctacacctgtggatcaagacggaactggaccatccgctttacaatcaatggtacagggatttcataatcaaagtgcaagtggatgcaggcacaggtggttttctcggagcaactctttactggatcttggttctgaggtgaggagggaggtcaacgcggggattgctgcggtgtctcgcatgatggaatggcacgatgcaagggacgggacgggagcggggccttctcctacctctgcatcaagatctggttctcagtgaaacactctgcacttgaaaggaccgatgcaaatgtaaagattaaggtatgtgctcatgctgtgctaatgaaagccttaaattcagtgttttgttttttttctggtggcgtactgtcactgttgactggcctacggatctgagtttttgtgtaattgtttggaagcaattccactgtcgccgaaatggcgcggtagtttctctgactgctgctgctaaatactaggaactttagttttcttcaagtccaaagggtcagagttgagagcacctgagatccggcgatgcttcatggccacggtcccccagaggctattcgcaatagttgactctaaatttctctctatatatcagttttttgtgtcacattatcaacatttcataccttaacttttttang

SEQ ID NO: 274545 - DNA, 306 bp, Zea mays
cgtttgaccttgcaacaccctgacgtgagtcgtattatgttcgcgcacgccgcctccgtggccatggcgttcctgtggctcgagttctcgcagtcgttccaggtgctggcaatcctcgcgtccacgcgcacgcgcgccgtcgcgctcggctacaggttctgggtcggcgcggggctccccgccaggggagccgcccacgtcgcgcgcgcctgccagctgggcctcctccggtgcaagctcgcctgccatgtcggcgtcctgtggatgcatcttggtcccgtcggcgggggttgcagcggcatgcgg

SEQ ID NO: 274546 - DNA, 418 bp, Zea mays
aataatctcgaccaatggcggcaccaacggtggtgctcatcccgttctgcgtcaccggccacctgacgtccatgctccaagccggcaagcggatgctgatgagcggcggcggcgacctggccatgtcgctcaccgtgctcctcgcgccactgccgatggccaggttcgcgcacatcgtagagcgggaggccacctcgggctcggggttcgacatccgcttccaccgcctccctgacgtggagctccccgccttctccggcccggaggacatgatctccagtttcatccagctgcaggcgtccaacacctaggcggccattgccggcctggcaagccccgtcgccgccgtcgtcatggactactttttgcacacgctgttcgacgtcgcccgcgagttggcactgccggtgtacgtgta

SEQ ID NO: 274547 - DNA, 360 bp, Zea mays
accacgcatccgcagcagatgaggttgttgactgttcccatgggcggtcactgtgggaacttgctgaagtgaagtacgagccgctgtggatcaaaggcggaaaccactgcaacctagaactgtacccggaatacatcaaacatctgaagaagttcgttggagccatagagaaatcgccacccccacctccgatcgacgagtgcatggagagctcaggcccgtcggattgtaccccagcagaacccgagtgtacagcggactcaaggaagagcacggactgcagggacaaagcaaggccaagcatagatcagagacaaagcacggaccggcgggacaagccgaggggcagtacggatagga

SEQ ID NO: 274548 - DNA, 495 bp, Zea mays
ggctaaggaagctccatcgatcctgcgttattttgccggtaattgattgatagatggcgtcggagaagagcaagatcctggtggtcggcggcacggggtacctgggcaggcacgtcgtggcggcgagcgcgcggctgggccaccccacctcggcgctcgtcagggacacggcgccgtccgacccggccaaagcggcgctgctcaagaccttccaggacgccggtgtgacgctcctcaagggcgacctgtacgaccaggctagcctggtgagcgcggtgaagggcgcggacgtggtcatctccgtgctcggatcgatgcagatcgccgaccagagccggctcgtcgacgccatcaaggaggccggcaacgtcaagaggttcttcccgtcggagttcggcctggacgtggaccgcacgggcatcgtggagccggccaagtccatcctaggcgccaaggtgggcatccgccgcgccaccgaggccgcgggcataccct

SEQ ID NO: 274549 - DNA, 633 bp, Zea mays
cccgtccctcgccaccgccatggccgacgtcggcgagcctcctccctcgctctgccccttatgcggccaccccgctgccttctccgtttcaccgtcgacgtctgcggcggccagcgtgtcccccgcaaggccgctgctgaagcgaaggaccccacccgaggcgccacctgcggtcgtgagggtggagatcggggatgaggccgcggcgctgcgcgaggcattggcgcggcagcaagcggcgctcgccgacgtccaggcggagctcgacgcggagcgcggggccgcggccggcgccgccagcgaggccatgaccatgatcctccgcttgcagcgcgagaaggctgaggccatgatggaggcacgccagttccgccgctacgccgaagagaagatggcccacgacgccgccgagctcgcggccctcgaggaggctctctcgaagcgtgaggccgggatgcgggcgctccagggccagacgccccgtcacgcctgcgccgtgccgtcggggggctccaccccacgacgcccctccgtggccacgccgcgccacccaccctcctcgctgtcccccgcggcgtcgtccggaggagggtactacccgcctctgcggtgcagcatcgaccacccgcccac

SEQ ID NO: 274550 - DNA, 257 bp, Zea mays
cccacgcgtccggtggaagtggagagagtggtgcccagatcagcggggactcgacaacggtgggtggttcatgggaaacggcggacagctagcgggcggtccggtgatcggtgtggccggtggcccggatgagtcagttagagagcgagctttttttttgatacgggggagttaaaaaatccaaaaatcttggtgtatgtacagttctgtctatgagaaatactaacgcgtcttgcagtgctgctgcctgctgcctc

SEQ ID NO: 274551 - DNA, 1115 bp, Zea mays
accacgcgtccgctctcctctccacctcatccgtatctccctccctcttctcggcggccgtggcggcgccggaggactatgcgcggcctccaccgctgcccgcaccagctcctcctggtctctccaccgccgcggtccgcccccgcgtgccgccagtcggccaccgcctcatcgcggggcctcaggagctccctcgccgtcttctccgcacccggggctcgggtagcggcggcggcgcgcgagcagaagtggggccacgtggagggtgatgaagacggtggagaggagggcctaggggaggcgctccacaggacgcgggagctcgtggagtgcgccatgttcgcggccgtcgctgggctcgcctacttcctcagcaattccctcgccattgagaattatttcagttgctttttcccattgccgatagtcatttcctcattaagatggggactagaagccagcaggaaaaccgtggtggctactggtttactgctattcacattatctggccctgcaaaagcgtcaacttatctgctaatgcatggagtagttggtctcatcatgggtactgtttggagattggagaccaactggattgtctccatcatcctctgctccattgtccgtgccctgggagcttgtggttacgtgctagtgtcatcgtttctgataagagaaaatattctcgcgctgataactgttaacattcatgcttcgttgacatacatcctgacggcagctggcgtgaacacaattccttccatgggcacaatatatctactctttgggacactgcttctacttaattgtgggttcttcgtcttcctcctgcatgtgatgtatacggtattcctggcgaagcttgggataaagccgtcgctgaggtcaccaagatggctggacagagtgatgtgaaaaatttaggagtagggcatcgtacgtagtgactgttatgctgttttagccttgctgtttgtcgcccctacctatactgggaactgtaaccatggggtgcatctgtgcatgcaaacgcgacaagcaaaattcgggattatcaatcatctgtgctactcgtgctctgttgatgaaaaaccccctaaggcaaatgcgagagg

SEQ ID NO: 274552 - DNA, 617 bp, Zea mays
cccacgcgtccgcatcgccgtcgtctcctcctccgcctccctgtcggtccgctccgcacctcgcctaaaacacccctccgggcattgccgcaccgagctccccttcctcaaattgccccaagcccggacgcctcgacgcccagctccgtgctcgagttgctagcggcgtcctccatcgctccgcctccctatgtctccgcccggccgccggctcctccgccgactccggccggggccacggcgcggttatgatcggtgattcgaggacgcgcgttgctgctctgcggctgggaggatctagccggagagagttattatctgtcacaatggcctccagagatcacactggcttgacccgacaacttcttgattttcaacatgatacaatagatgaggtaggcgcaggacatgacccattcattgatttgaaagcgagattcatggactttaaacagagaaactatgtggaaaaattttcaaattaccaaacccttgctgagcagcaaacaccaaagttcatggtggttgcttgtgctgactccagggtctgccctaccgctgttttggggtttcagcctggggaagcatttacagttcgtaatgtggcaaatttggta

SEQ ID NO: 274553 - DNA, 1284 bp, Zea mays
tcgcccacgcgtccgcccacgcgttcgcccacgcgttcgcccacgcgtccgagatgaggtaggtgcagaacacggtccattcatggatttgaaagcgagattcatggactttaaacagagaaactatgtggggaatttttcaaattacccaaatcttgcttagcaacaaacgccaaaagttatggtgattgcttgggctgactccagaatctgccctaccgctgtttgggggttcagcctgccgaagcatttacgggtcgtaatgtggcgaatttggtaccaccatatgagcatgagggatcagagactagtgcagcactagagtttgctatcaatacactcgaggtagagaatgtgctggtggtaggccacagtaggtgtgggggcatccaggcactaatgagcatgaaagatgattcaacgtccggaagcttcattaaaaactgggtttcaattgggaagagcgcaaggttaagcacgagagctgcagctggaaatttgagttttgacatgcagtgcaaacattgtgaaaaggaatcaataaatagctctctgttgaacttgttaacatacccatggattgagaagagggtgaatgaaggcactttgaatcttcatggaggctactacaacttcgtcgattgcacatttgagaaatggacattgttgtaccgtgaagggttggaaggtggaagcaagtatgccataaagaaccggtccacctggtgttgaccaacgaaggtcgtgtttacttgggtaaatttcactctgccccccgctgttcagcatggtttcgctttgccactacgttgtccatttcccattgcacctttgctccattgtggcatcgatgttctccgggtcccggtatctaataactgtggcaaggctgttggcatgccagcttgaactgcgtgttgtagtgtcgcatacacatgcgcaggcacgtctgcatcgtagcagttatttgatacaggaactttttgatactgtagaagcacaataccacaatggagtgaggtgcaacgcgcgatggacaatatggttgcaaggtgaaagtctgtggaactgccgggggcaaagtgaattttatccaactatctgtaatatgtgtgctgttttccggttgaaactattaagaaaaaaataggaataagctgcaggatcggtcgtaatgcgtgtaattgtcgccacatttggcattaccttgctattgtaacattggtaccatttgttgtatcattataactgagatatacacggtctcgtcaaatttgcttggtg

SEQ ID NO: 274554 - DNA, 830 bp, Zea mays
ttttctcgtccgtgatttagcaccagccaaatggacctttaactctggtgacataagctgttgctagggtagcaaatcaagagctaagaatggcagattcaatggtagcaagcttctgggggcctgtgacatcaacgactgagttgtgcgaggagaattatgcacactcgtcatatatcgcagaattctacaataccatctctaatgtcccatgcgttcttttggcacttattggattagtgaatgctttctgccaaggttttgagaaacgatttagtgtcctgcacatatccaatatgatacttgctattgggagtatgattttccatgccaccttgcaacttctcctacaacagagtgatgagactcctatggtttgggagatccttctctacatgtatgtcctctattcaccggactggcactacaggagcacaatgccaactttcctgttcctgtatggtgctgcctttgccgtagtacatttctttgcccggttccaagtcgtattcaagctgcattacgttggcctctgcttgctctgcatcccccggatgtacaagtactacatacagacgaaagacgtgggtgcgaagcggctcgcaaaactgtgggtccttacactgacccttgggaccctctgctggctggttgatcgcgtcttctgcaagaagctttcgcattggtacgtcatcccgcaggggcacgcgtggtggcacgtgcttatgggcctcaactcgtactatgcaaacacgttcctgatgttctgccgggctcagcagcgcgggtgggagccgcggatcacgcacctccttggattcttgccgtat

SEQ ID NO: 274555 - DNA, 717 bp, Zea mays
agacttctggctctactacacagcctacttctgtggagccactgttggtctcgtatacagcaacaacctgggccagatcgcgcagtcactgcaccagcaatcgcagctcaccatgttactcgctgtgtactcatcctgctccgtcttcggccgacttctctctgcgctccccaacttgcctcacaggatggtatcacttgctcggacagggtggctcgctgctgcattggtgcccatgccaatggccttcttcctgatgtggaaacaacaggacgtaggcgctctggtagcaggaacagcgatggttggcctgagctcaggattcatcttcgccgcagcagtgtcagtgacctccgagctctttggaccaaacagcatcggtgtgaaccacaacatcctgatcaccaacatcccgctggggtcactcctctatgggcagatcgccgccatggtgtacgacgcgaatggacaaaggatgacactgatggataatcgcactggcatcattgacaccatgattgtgtgcatgggggtgaagtgctactcgaccaccttcctcgtgtggggttgcatcacattgctggggttagtgtcgagcgtagttctgttcataagaacaaaaccggcttatgctgctgctgctgctgttggtcggtcgagttgtaagcaccttcaccaagttttcagttaacggcggacttcttggtcaaaacaaat

SEQ ID NO: 274556 - DNA, 485 bp, Zea mays
ctcgcgggtcgatgcacgcctctagccgcagtgccagcagagcctcgtcgtcgagctggcgctgcagacgcacgcgctgctgcgcgagctcggcaaccccgcgggcgcgcgcatcgtcctcgaaaccgagcgccgcgcggcactggaggccgccccctcagccgccgccgcccgagacggaggacgcggggcgtcgcgggctaataataagcgcggagtccgcgcgccgccgccgccgctgctggacgagccgtcgtggaccatgttctgcaacggcaagaagaccgggtacgcggtgcgaaggcaggccacggacgacgacctcgctgtgatggagacgctgcgggcggtctccatgggcgccggcgtgctccccgggagggccgccccttcgtcggcgcccgacgcggctgctgcggcggcagcggacgacgaggtgccctacatgcgcggctgcttcgaccacttcgtcgggttccgggact

SEQ ID NO: 274557 - DNA, 504 bp, Zea mays
  unsure (1)..(504): unsure at all n locations
cattatctctctctcccgagctctttctaccgcttctcttcttgtcgagcggggaaaacaaagatacagaaaagcaaggaagcagctgcacgcacgcacgcgcgtcgcctggccggccatggggttcccgtcggtgtgctactgcgtgatcctgccgcagccgctcatcctggtgctgcagctgctggacttcctgcggcacgccgtgctgctctgcctctcctcgctgggcctcgcggcgccgccggccgccgacgaccacccggcctacgcctacgcggcgccgccgccgccgccgtcggacctctgggcactgcagccgtcgtccctgcagcagcagcagcagcaggcggcggcggcggccctggcgcggcggcccacgccggcagccatcaaggcgcgcctgcccgccgtccggtacgccgacctgctcggggcncgccgcgccccgccgggccccgccgtctgcgccgtgtgcctcggcgcgctccaggcgcggcaccg

SEQ ID NO: 274558 - DNA, 961 bp, Zea mays
ttatagcaaccgagcattggccaagcataagtcagaatatttcgggatttagctcaggcaacatagtttttggtggcagcgggaattctgtagggcaaacgaaaagcaaccaaatgagctggtcaaacacgtctaatctaatgggcacgaactcaactggcagctatttgaatcagggcagtgcagctctaggtttcggaaatccaaatggaggattgagcacaggtctctccaatccaagtagttccagtacaggcctgagcatgatgcaaccaaaatctgattctggatcactgtcgacgtcggtcaacaatgccgcacatgggctactaagacttgcccctcctccatccacatcggttggaagagggcgcggtagaaatcaaggacagtccgcactctcccgagcatcaaggcctcatgccaactcggcatcaggacaacaacctatcctggatttactctagtaagagatggtcgcctctgatcttcgcgttcggattgtcaatgtgtacatcctcaaacctttgtaaggtgagcatcatactgttcttttggacatgcatgtggcgaaagcagttctttttgttcattttgaagctgggtggccttggtttatagtctgaagggattctacttcggggatcttgcagaggtttaccttttctcatgctcccgtgcttagggttttgaattgggcatcgaggccatcttcatactggtgacagaagaaatgttttgtgtatatttctgtccaaactcggctgtagctttcagagtttgtgaatagttgacatgtttatatgggctgtgaagttttgaaatgtttaatgggccttacaggtgtgtaccttttctcatgtactccgcgcaaaattgtacaacaatgtttaatgggccttataggtggacctttccccaaaaaaaaaaaaaaaaaaaaaaaaaaatataaaaaaaaaga

SEQ ID NO: 274559 - DNA, 850 bp, Zea mays
cccacgcgtccgaggattgagcacaggtctctccaatccaagtagttccagtacagggctgggcatgatgcaaccaaaatctgattctggatcactgtcgacgtcggtcaacaatgccgcacatgggctgctaagacttgcccctcctccatccacatcggttggaagagggcgcggtagaaatcaaggacagtccgcactctcccgagcatcaaggcctcatgccaactcggtatcaggacaacaacctatcctggatttactctagtaagagatggtcgcatctgttcttcgcgttcggattgtcaatgtgtacatcctcaaacctttgtaaggactgggggttcaactgcagtggtgctgtgagccgtgcatgcgatggacaactctcctatcgagcattttcatcaattcgctacacggccctacatccctgtgcctgtgtgtgtaccactagcttgcattgcattgcatgcagagtgtactattgatgggtgatgcattggatggggcatgcacagcaggaatatttgcagttgatgagcggcaggaatcagtggctcagggaaaattgaatggcgatctggccttcactccacatgagtacgtacctatacgtacgcatgtatcatcagacggagtcaggaggatgcgggtagtgtccctgtgttgtctaccattttgtctcaccaatgtggtcccaaagtacatgatgtttttttacttttacacactttaaaccgaccgtaatatttaattcttctgtaaatacccattttattttatcattaaatatattttttaattacttaactaaaaaaaaaaaaaaaaaaacttgagactagttctc

SEQ ID NO: 274560 - DNA, 576 bp, Zea mays
acacccacgcgtccgctttagtaagagatgcttgcctctattcttggcgatgacgattgtcaatgtgtacatcttcaaacctttgtaaggtgagcatcatactgttcttttggacatgcatgtggtgaaagcatatatatattttttgttcatttcgaagctggctggccttggtttatagtctgaaggagttctacttcggggaatctggatcttgcagaggttaccttctctcatgcttagggttttgatttgggcattgaggctatcttcatattggtgacagaagaaatgtcgttgtgtatgtttctgtccaaactcggctgtagcttgcagagttggtgaatatagttgacatgcttatctgggctgtgaagttttgaatgtttacaatgtttaatgggccttacaggtgtgtaccttttctcatgtactccgcgcaaaattgtacaacaatgtttaatgggccttataggtggacctttctcatgtactccacgctccaccaacaatgtttggccttatatatatttggtgactcggtgttatagacaaaagccagatgttatactcgct

SEQ ID NO: 274561 - DNA, 823 bp, Zea mays
taaagaaactcgggcggacgcgtgggcggacgcgtgggcggacgcgtgggttcgccgagagggaaagcacattcttcatggaaacatccgcgctggagtccatgaatgtcgagagcgctttcaccgaggtcctaactcagatctatcgtgtcgtcagcaagaaggcccttgacattggcgatgaccccgctgctccaccaagagggcaaaccatcaacgttggtggcaaggatgatgtctctgctgtgaagaaggcagggtgctgttcatcctaaatcacttgtgaccatgaaaaggattaaaggaactatatactcaccccggtcatatgattggtaactgaaaatatgactcttgtgctgcctaacctggtggctattagattatgttggtactccagagacatgatttagaggttaagaatttgattccaagttgggacaaaaaacttacttttcacgggggcattgatattcatggcttcgttgtatggttcatatgcgctactgttccacactagttgacattagaatcctcccaatccctcactgcgtaacataccctgctaaaagtgttgtaattggagctactgatgttttcttactgggagcaaagagtctaaccttttctttttttatgtcacaatgggttatgttccactcggtaaatgcccatctctcattggtaggcagcaagtgttagagggttatatcatgtaattctctcagatgtacaaaatttggattgaaggtttatgaggctatttactgtcatgttcagacatatacacatgtttatatttgctgttcatgatggttaagct

SEQ ID NO: 274562 - DNA, 353 bp, Zea mays
acgctgttggagcacttgtcgtgtatgatgtgacacgccatgtgacctttgagaatgtggagaggtggttaaaggagctccgggatcacactgatgcaaacattgtcatcatgcttgttggcaacaaagctgatctgcgacaccttagagctgtatccgtggaggatgccaagggcttcgccgagagggaaagcacattcttcatggaaacatccgcactggagtccatgaatgtcgagagcgctttcaccgaggtcctaactcagatctatcgtgtggtcagcaagaaggcccttgacattggcgatgaccccgctgctccaccaagagggcaaaccatcaacgttggtggc

SEQ ID NO: 274563 - DNA, 459 bp, Zea mays
tttttatttccacgcgtccggggggccataagacccttgcgcgctgcgcagcggtgggcggtggccggtggcaatggcgcccacgacttgcctccggatccccttcctccccgcccgaggccgctccgctaacgtcaacgcccctccgtcctggctcccccgccgcctttctctcaaatccagcgcgaccaacggtgacaattccctccccaatcccatctccacctctcccacctcgccgccttggttaacggtggtggacgttaacgggttgcgtcgcccgcccgcgcctgtttccgcccctaccatccccggcgaccgcggtccccggtggctgcctcggccgttcactagcgcggacgtcatgggggcggattggaaggggctcaaggttgcttaccagggttgcgctggggcgtacagcgaagccggagcaaagaaagcatacccaaattgtga

SEQ ID NO: 274564 - DNA, 551 bp, Zea mays
ttactttgcgcgtcctcccaatccgtggctagcggtcccctgtttcctgccgagctcgccggcgttccccttcctcctgccgctgcgcggtggtggttggagatgacacatgtgtttccaagggaaggtgcctcatctagctcaacctcaatgagcagccagaggagtgaaactgatgatgataggatgattgcaatggttctctctgaagaatatgccaagttagatggtgctatggccaagcgtcttactaatttaacatcaattccccatgttccccggattaacacatacttcccgacatatagtgatgctactatggaccattatcgcctccttgacaggttaaatgcatacggcttgtttgaggtgagagtgtctggtgatggaaattgtcagtttcgtgcactctcagacccaactatattggatcaccccgtttatcacaaggaatgttcgaagggaggattgtaaaacacctcagggaatgtaactccttatatgaaggttatgttccaatgaaatataaacattattgcaagaaaatgaag

SEQ ID NO: 274565 - DNA, 713 bp, Zea mays
acgtgccaaatgggtctctgaacttcaaaccaatgggtctctggtagtgccgagaattgtcttggaagcgcttcctgctgttttactattcgaaaagaagcaaaaggcaaaagctattgatataatagtgagtgaatgcagggataagggctatgacggtattgtgctcgagtcctggtcaagatgggctatttatggcgtgctggatgaccaagagctacgttacatggcacttgaatttgttaagcagctgggagaggttttgcattcagtcaattccaaaatcaagtagccaccatttggaattaatttatgttattccagctccaagaatgcaaaagctcaataatcaggactttggacccaaagatctcatgcatctggctgacactgtagatgggttttctcttatgacatacgacttctcaggacctcagaatcctggtcccagtgcacctctgaagtggatacatcattctttagcagcacttccttcagcaaaaggttcctctcatagcaattcacattcacggatgatattccttggcatcaacttttatgggaatgattttctactgtctggaggtacatataactaacctttatctttctcctcttttcttttgacatgatcaaataagcttctgtatagcttggctagcaaaagttcacccatgtttcttctgtgtgctgtccagattttcactaaaata

SEQ ID NO: 274566 - DNA, 314 bp, Zea mays
cggactccccgtcacgccgccgggcaagaagctctccgcgccggcggagactgcgaaggccaaccactcccagccgccgaataactcggtggaagagcgacggattcacattgctcgtcttaatgccctgaaccagcggcagctcctcaagcaccggcgggatcgcgcagctcgccgtcgccacggcggcggcgtggggcaccagtgttgctgggtctcatcgtgccgctgccgccgccgccggcgggtacggtgcgccggcgccggcgcccgcgccacgtgtcctgagctcgtacgcgtggcccccgctacag

SEQ ID NO: 274567 - DNA, 306 bp, Zea mays
tcgatctctacaaggaggcggcttgcgcggggggcatcgtgcaatggcgcggcggtgcccgtgcaggctgctgctagccgtggcggcggcggccgtgcgcgtggccgcggcagcgcacgcgcaggagacgtgctcggggaccgtccccgcgccgccgcgccgcggggcgcgggtgtccgtggccagcttcagcggcccgggcgatggacggagcctcggaacggcggcgtccgcgcgcgccgtgcccagcattcgagcgccgggccgcgccaggcggggggcgagctcggcgttttttttttgggt

SEQ ID NO: 274568 - DNA, 398 bp, Zea mays
ggccgacacacgccaccaaagaaaggcgcctgagaacaagacggatgctgctaattgacgtttcagctcgtttgtttgttcgtcccttcggtttggcactgatgcttatgacccattggtctgccattgcaattgaaatgtggttggaacgtgcttgatcgggaactaacatgaaatgagtgaagggtagatgctgatctgaaaaatatgtgtgttcccccctctttccttccatgtcgtgttgttgcaggtaaccgtcacaatatatataggtggccccctttggaatccggggattattccgtttgctgtatttttttctgtgaaaatgaactgattcctgtcaattttctatatgatttatgtttcatctgaaattcctgagaccgatgttgaat

SEQ ID NO: 274569 - DNA, 503 bp, Zea mays
aggaagctggagcccatggccccggacagaaaggggaggtggaagagagaagtgggctggcttctgtccgtcgctgaccacatcgtcgagttcgtcgccaagaaacaagtcctggacaacggcaccgaaatggaggtgatgggcacgcagcagagacgggatctccaggccaacattccagcattgcgtaaactggacacgatgcttctcgactacctggataacttcaaggaacgcaacgagttctggtacgtgaagcgcgactcgtgctcagagagcgagaacgaggagaggtccgacgagaaatggtggatcccgatcgtcaaaggtgccccccggcgggcttgtccagaactctaaaaggctgcttctggaccaaaaaggacttgtgaaacaagtgcttaaagcctgccttggccataatggcaacttgcttaatgaaaataaccttccggacaccgattttgacccgcttccttaaaaccggaaaaccaatcttgggg

SEQ ID NO: 274570 - DNA, 559 bp, Zea mays
tcggaatcggtcgagaataccttgtcaatgacatgtttccaccaacgactctggttgagcaggaagactacaacaactggaattactggaaggtgccattaccagatgttgatttgtagtgtagttttgacagaaacagccgtagataccagtagatcctgcaaaagcctagcagtagagcttcctgtaccctaattttcagccaccacgacggttttaggtccaatttgtgaaggtctcaagaattcccggatgtatggttttctgaaagccaatggcccaaggaaacgttgccactttatttccttcgacggagctttcacgtgatcatacggcttttgggtagtcatctgattgtcttcgtcgaacttgttgtacccagaggtctgagccctagaccctcgattcattagagaactcgtgatctggtcattgtccaagctactttgttctgattgcaggaaatctttaggtgccaaaagcagctgtacattttttttttcgtgatccaaaaacagctgtacatcgtatatcagcgcatagaagagaattgctaagc

SEQ ID NO: 274571 - DNA, 499 bp, Zea mays
agcaagggcaacaccgcgctgcacatcgcggcggcaaggcgggcacgagatcatcaggcggctggtcacgatgcccgacacggacgtcagggcgatcaaccggtcccgcgagaccccgctggacaccgcgctcctgatgggcaacacggacgcggcggaactcttggcggagcacggcgtgcagtcggcgcgcgccatcagccccggcggcggcggcgggggcggcaacaagcaggcgcgcgagctgaagcagcaggtgagcgaacatcaagcacgaggtgcactcgcagctggagcagacgcggcagacgcgcgtgcgcatgcagggcatcgccaagcgcatcaacaagctgcacgaggaagggctcaacaacgccatcaactccacgacggtggtggccgtgctgatcgccacggtggcgttcgcggccatcttcacggtgcccggggagtacgtgcaggacccgggcagcctggcgcccgggcacgatctgggcga

SEQ ID NO: 274572 - DNA, 663 bp, Zea mays
  unsure (1)..(663): unsure at all n locations
cccacgcgtccgcccacgcgtccgcccacgcgtccgcccacgcgtccgagcacacacgggcgcatcagggcctagctcgagtccactacttgaaaaacaggaaaaaggttgcgtttgaggagatgacgaagctcgtggagatagccagccactgcgcgtcggcatatgaaaagcggtcggaatacggtgagcgcgaagctgcgaggagcgacctgaacatggcgacgcttcttgatcctaccaggacttatccttacagatacagagcagctgtactgatggacgagggcaaggaggaggaggcgatcgcggagctgtcaggagccatagctttcaagccggacctccagctgctccacctccgcgcggcgttcttcgactccatgggcgagcgcgagagcgccctgcgggactgcgaggccgcgctctgcctggacccgacccacgccgacacattggagctgtacagcaaagcctccaccaccaaggccgaaccccagagctaggcagccagccagccggccggccggcaggccgccgctctcctcgtcgtcgattcagctgcggtttttgcgaggcangatgatgagacgatctcttctctactctcatggggtggaagctgcagatcagtgaggcangagcaccggaacatgcacatat

SEQ ID NO: 274573 - DNA, 403 bp, Zea mays
gggccgacccacgcgtctacccacacgtccgctaacgcgtccggtccggggacgacatttggcggcatcaaccacacagcacaggcacagcgcagcaccatgacgatggagggggcggtttccgacaacaccaagggcctggcgctcgccgtcgcctccagcgccttcatcggcgccagcttcatcctcaagaagatcggcctcctgcgagcagccaagtgcggcgaccgcgcacgtggcggaggacacacttacctctccgagcctctatggtgggcgggaatgaccacaatgctgcttgatgaggtcgcaaacttcattgcttacatatttgcgccggctgtactcgtgactccacttggggcgttaagcataatcgtaagttcagtgttggcgcactttg

SEQ ID NO: 274574 - DNA, 790 bp, Zea mays
  unsure (1)..(790): unsure at all n locations
gagtgatgatggcattgctccagcagatgaacgggaggatggttggctatgcttctatgagattcttgccaatcattttgttagagtgcctgaaagtggcaggcgtatacttgagttgattgtgcaactctggagccagtccttcgcggccaacatatttgcacttcttttccagaaatggttgtttgaagcccctcttgatgaaaaagaaatatcgctacgatatagctctgctcttgttcaaggtgctacaaatgtattttggattgacatacagacaaatacaagacattttctctctttgtatcattatctctttgaggacgttgctctagtccctgaaagacttagtaaaatatcactacaggctggtagagaccttttccttctgctctctagattcatgttcttctatgatcaagatcacatgctttctagtttcctagagcattttcccaatttcccaaattccttcttggttggtggaccagcagattactttgtaattgaactcgctgatcagcttcaaaagctaaaaattgagccagtactactacactacctctcccgcatgagcatacttcaagggttggaactgaggttgagtacaagcaccagactaaaggcctgcctctacagcttcacttctcctggtggccctacctacccaacacgggctgttcgangnncannnnnntnnagcnnganagcnccancnncagatgcagatgcagcaattgcaacttatgcatcagagacatgctcaactttaacgaactaacgcgaatca

SEQ ID NO: 274575 - DNA, 528 bp, Zea mays
cagcagattactttgtaattgaactcgctgatcagcttcaaaagctaaaaattgagccagtactactacactacctctcccgcatgagcatacttcaagggttggaactgaggttgagtacaagcaccagactaaaggcctgcctctacagcttcacttctcctggtggccctacctacccaacacgggcggtgcggcacgcagcctggaacaccttggatttgctgttccctatcggtcgttacccgaggcacgtgatcagcctgttcttccggctgctgtatccgtggtactggccttcctcttgctggaacttcgtgatgacctgtgccatgaccgtgtactactacatcctgaacctgctggtgtcgtgttgggagaacctgacgcggcccagtcaccggagaacgcacggtgaatgaagacgcggcagcccatccagtggcaccttgtgttgttgttgttgttcatttttctttcgtttgcgcgagtggtgtactagttagtagcagcggcttatgtgttcgt

SEQ ID NO: 274576 - DNA, 534 bp, Zea mays
cccacgcgtccgaacacggtggacactgcagcatcagggaaaaataattttggtggcgaactttgctgttcttcatcagatccaatccatgtgccctctcctggttctaaatcagctggaacttttggagccataaagcgtgaagttggagtagttggtgctaggcaaaggccagctgatagtgcagcaatatacacatctacttctaatggcttagtcaaagtggtatcagcaccaaaggttagcccacatttggaatggaagcccaaatcagtaagccccagcactgctgcacctcctggtgctccatcacctgttgatgatggaagtaaaacagaagtgtctgctttgtctaagaagctttcacatgctaatgtatcacatgaacatgtcattataccggagcacatcaggataccagattctgaaagaactcatttcatcttcggttcttttgaatctgaaatttatccaaaggcttctttagcagcctattatgatgctgtggctaaagaagacttgaatgatcactct

SEQ ID NO: 274577 - DNA, 473 bp, Zea mays
agcgacccagccgacgccagggccctcagtggcgtgtgggcgtcctgtcccggtggatagggcacgaacccaagccccggctcaccggtgggtggcccggccaggcgcggtggccgggcgggtgcggcctcctgccccgacctcggctcggcgcgcgcaggcgcctggcagcccccagcctcggcctcggccaggcgcgcgcgacccccagccccggctcgccggctcgccggtcatggtggctccgatccgggctcctccggcatgggcaggcgcgggttcccccggctagcagcctctcctggtgggcacggcctgccccggcggctcaggaaggcgcggcggccccggcgtgcacagccgtggtccagccatggcggcgcgggcacgcagcctcggctccccggcgggcatccatggcgcagtacgggcgcgcagcccggcggctagtctgctcggcggggcaccggcct

SEQ ID NO: 274578 - DNA, 746 bp, Zea mays
cccaagttttcttgttgccattgtgagaaggaatgatgtggtaacagcagcgcggacgcgatgggtccggacgagccttccgcgcgacgctgcacggctccgccagccacccgtaaaaccctagacggctagccggcgcacggaagcgggcagcggagcggaggtgagcctctcctgcgtcggattgtccccgcccccgcccccgctaggcgccatgaagctgacggtgaagaccctcaagggaacgcacttcgagatccgggtgcagcccaacgacacgattatggctgtgaagaagaatattgaagagatacaagggaaagacagctatccatggggccaacaactgctgattttcaatggaaaggtcttgaaagatgaaagtacattggaagagaataaagtcaatgaggatgggtttctagttgtcatgcttagtaagggtaaaacatctggttcaactggaacttcatcttcccagcactcaaacactcctgcaacaaggcaggcacctcctctagaggccccacaacaagctcctcaacccccggtggcaccaattacaacttctcagcctgaaggacttcctgcacaggcacctaacacacatgacaatgcggcatcaaatcttctgtctggaaggaatgttgacacaataattaaccagctaatggagatgggtgggggcaggtgggacaaagataaagtccaaagggctctccgtgccgcttacaacaaccccgaac

SEQ ID NO: 274579 - DNA, 951 bp, Zea mays
cgtcgagacacgcgtctaaagtcactcgggcggacgcgtgggacttgctagggagatctacaatgatgacaggatgactgaaaatttccccatttgtgtgtgggttgacatgtccaagaatttatcggagctagatttccttaaaacgatcatcaggggtgctggtgccaatgttggggttacagaaaacaaggaggaactcctcatcctcctcgcttctgccctttccaaaaggttcctccttgtcctggatgacttggagagcccgagcatatgggacaatctgctcaaagattcattgggagatggtgttgtcagaggaagaatactgatcacaactcggaacgaggaagtggcaacaagcatgaaggcaactatccaccatgttgacaaaatggaccctgagagtgcctgggcattattgtgcaatcaagttgatgcagaatgcaattcggaagagcttgcaacattaaaggatgttgggattaagattgcagagaaatgtgatggccatcctctagcaatcaaggtcattgcaggtatcctaaggtcaagaggcaacagcaaggctgaatgggagatggttctgaacaatgattcttggtccatgtgcccaatccttccagaagtaccacaagccgtgtatgttagttatgtcgatctttcttctcaactgaaggagtgtttccttcattgctctctgtatccagaagaattccctattcagcgctttgctcttgtgcggcgttggattgctgaaggaattgtaaatgccagagacaaaaaactgcttgaagaatcagctcaagagtattatgtagaattgataagcagaaacttactacagcctgatcctgaagtgttgagcgatgctggataacacaccatcttctgcgatgtatagcccgcgctacgatagcctgtgagagtatcttaacttatggcgcatca

SEQ ID NO: 274580 - DNA, 1202 bp, Zea mays
  unsure (1)..(1202): unsure at all n locations
agttgccgcaagcacagaaccatctgctgttttcactgatgtgggacgggtcaatggtacttcagtggaaaggtttaaatctgcagtgagtggaagaagagcaaatattctgggtgagattacccagattgatacacgaaatttacttcttgagaaagccaaggcaactgtctgtgaaaaattgcatgaattaaacatcacaccatcttcacgagctgcagatagaagaggatctgaaggaaagctgtatccttgtgacaacaacataaaggtcaacggtgtcctctctgacaaacctggcaagggagtcaagctatgcaactcaagaagcatggaaatccaagtgcctgctaccgatgacaagaatccagagcagcgccgtgtacctgtgtcaattgacgtcccagaccccgacttccatgatttcgataaagatcgaacagagaaggcatttgacagtgatcaagtgtgggctacatatgacagcgaagatggcatgcctcgcctatatgtaatggttcagaaagttctttcgatgaggcctttccggatccgcatgagctttctcaactcaaagtcaaatatcgaactggcacctataagctgggttgcctccggtttccagaagacatgtggcgatttcagggttgggagatatcaggtcagcgaaacggtcaacatattttcacacagagtgaggtggactaaaggtccccgtggcatcatcaggatcgttccccagaaaggggacacgtgggccttgtaccgtaactggtcccccgactggaacgagctgacgcctgatgacgtgatatacaagtacgagatagtggaagtcgctgatgatttcactgaggagcgagggctgactgtcatcccgttgctgaaggttgccggattcaaagccgtcttccacagacacgtggatcccgaggaggtgaggaggataccaaaggaagagctgttccggttctcgcaccgggttccttctcgtctcctgacgggcgaagagggcagcaatgccccgaaaggctgccatgagctggactctgctgccactccagtggaccttctcaaggttatcacggagcacaaggaagacgcggtggcgcagagtcctaaataggagtgagcgactccgataacagcgaagataacgtanctggatgtctgagtgaccagatccccacttggttaatgac

SEQ ID NO: 274581 - DNA, 494 bp, Zea mays
agaacagcccccgcgtcgtcctccgctcgggcgacacgggaggccccccagccctagcgccgccactctctcctcctctatttcccccctcgccgtcgccagaggagactgccgaaggccggcgcgacctccaaagatggcggctacggggcgtttctccggcatttctccttcgtttggtcttccgatgctcagatctgagcgggttctgtgccgggcggttcaagttccagccgcggggttgctggggcgggcgtcgtcccccacgccgtcgtcttccttgtccccggcgtcgtcggggggctgtgctcggtggttcaacatctggtcctgcaggtgcatccaggtgatggattggcggcatctactggtggtggcggggctgcgccgtttcggcggcggacacatggcgtggtgggcctggaactggctggcgggcgtgctcctcctggtgttgggtttgtggcgtgtaggccggatctgccctcagcagc

SEQ ID NO: 274582 - DNA, 584 bp, Zea mays
tctagatcgcgagcggccccctttttttttttttttgaaaaagaaaatatgaccgttttctattttacacggtaatgtatcaccgaaacaagtatacagcattggccaactggtaatttccttaccatgtaccaacgtatctcctctcacccacaaacatctacaccatgagggggcacagactaaacttgcatctcaggggccgaagcaatctcgctgcaaagaaagaatacccaggaggaacgcatgacacgagcagcaatcttcacgcgcggttggcctggaaaccacattttaatttgattcgatctgagccattatcgtctaccagctacatgacctcttctgtcttcgtcactgatggagctcatgatgttcgaggcaatggcgatgctgctcgtgaccactgccagaacgatcatcgttgccgccaatgccttgtccttgcgcttcgctattccatgaacatccctgagaactatggcgccagggaagatcaacgagatggtgaccgcgaacgtggacccggagtactcgaagagcgtccagatgctggggattgcgatggccagcgaacgcgtggg

SEQ ID NO: 274583 - DNA, 538 bp, Zea mays
cttcgtgatggtcatcgccctgcacttgtgcagcagccagcctagcagcagccgccgtgcccgcaagctcgacatggagggcctcgaggagaagtcgcccgagtacgtggccgtcaagaaggcgtcgtcgacaccgcagaagagctcctcgtggctcgggaggagggcagggtcgtcgcttggtgggcttggacacagacgggccgcttctgccgcgaaggtggacgatctaagcagcagatccgcgggggatctggtcatggtgaacgaaagcaagggcgtctttgggctcacggacctcatgaaggcggcggccgaggtgatcgggagcggtgggctcgggtcggcatacaaggcggtgatggccaacggcgtggccgtcgtggtcaagctgctcccgcgacatgaaccgggcgaccaaggacgcgttcgaatccgagatgaagcggctcggcgccaatgcggatgccaaactgctgccgccgctggcctaacactaccgcaaagacgagaagctcctggtctacgagtacatccc

SEQ ID NO: 274584 - DNA, 678 bp, Zea mays
  unsure (1)..(678): unsure at all n locations
cggacgcgtgggcgccggcggaggagcagcggcggttccagggcgtggcctgcaacatggccgcgtccgaggacgagatcacggagcccggcgcgctgtccatggccttcatacgcaacgtggaggcggaggtgatgaggctggagaacctcaaggagtgccggatgagagaactcgtcgtgaagaagcacgaggagctcaaggagatccgccgccgcgcgcgtctgcccgaggacgacaccgccgtcatggtgttcgacgccatggacagcgatgccgaccgggctgcgatcctggagcggctggaggtgcagatctccgaggccaaggacctggagttcagccggaaggacgtgctggagaagatggacaggtggcaggcggcgctggaggaggagtcctggctcgaggagtacagcagaaacgagaacagatacaacgccggcaaagggacgcatctcgtgctcaagcgcgccgagaaagcccgcgccctggtcagcaaaatgccggtgatggcggaagctctgatggcgaaggtagtcgcgtgggagaaggagagaggcgccaagttcgagtacgacggtgaggtgctgctggacgtgctggatgactacggaaacgcgaggaaggagaaggagcangagcggaagcggcagcgggaccagcggcggctgctgc

SEQ ID NO: 274585 - DNA, 513 bp, Zea mays
actagttctctccaaagatatacaagtatgtgtgagaatgcgagatcgtgaaaccagatagatttgtgtgatcatatttctttcatatgtttgtaaacattacattgccatccatattctaggatggtattttttgtagcttcagtgtcattcttttgttaatatgatcgattgtttttgtgtatgttacccccttcctcgactatatgctcccccgtgctgaattgcaacacacacacgcacccacacccacactggccgcaacgattaaaaaagcatcctgcgaagcctagtcagcagttaccgcctcttgggaagctgaaatgtgcgcttcaggaagtggctggcgacctcgtcgtcgcgatggcacagcacgcgcaggatggtgtttggctcactgcggctccaccgcctggtcgtcggcggcaacggtaggcgctgcctctcggagaccgcctcggtgcactcgtacgccgcgatgccaaactcctccacgagctgctccgccgttag

SEQ ID NO: 274586 - DNA, 495 bp, Zea mays
gataatccagagaaggaactaaagccagggatcgatcttcttgggaaggtggacgagttatttatcgacatatatgacagatatgaacctaccaatgactcatcagcagacaattgtttcatctcaacaagttatgatgccacaacacactttgagtccactgttatggatgtactttccctttacacaaagatcaccggaaagactgttgatctcagcgtggatctaagcgctgctagtgctgctgaagatgatatgtgatacttatcgtagtgctatgtggcgtagtgtggaaaatatttaattaagctttgctttggcaacgattattaggttcacctttatttttccaattgttgttattagctgtgttgtgaccatgattaaagattgcatgctgtaaatttgaaggcattttttttgctaaagttcacccacaccaaataaaaaaacaaaaaaaaaaataaaaaaaaaaacacgaagattgcccgggcg

SEQ ID NO: 274587 - DNA, 727 bp, Zea mays
cccacgcgtccgcggagaagaccgacgtgtttgggttcggggttctgttagtcgagctgatcactgggcagaaggcgctggatttcggaagggtggcgaaccagaacggtggagtgctcgactgggtgaagaaactccaccaagaaaagcagctaggcacgatggtggacaaggacctgggcagcagctacgacagggtggagctggaggagatggtccaggtgtccttgctgtgcacgcagtaccacccgtcccaccggcccaggatgtccgaagtgatcaggatgctggacggggacgggctcgcggagagatgggaggcgtcgcagaacgtggacacgccggagtccgtctcgtcggagctcctgctccagaagtacatggacttcgcagcggacgagtgctcgctcggcctggaagccatggagctctctggcccgaggtgaccgtaccgacgggctggttgaccggacccggcgggcatcgcacgggtcggcgtaggtgtttttgccgtatcaagccctatattgttgtgttacgttggacacatagggaaggcgatggattgtatggtctatatagctgtgggggcattcatttggacatacagcagcattgtgtgaggtgagcccacccttgttgcgcgtctacttggtggcaaagagatgaagatgaatgagtatatagagatagagatcaaagttcccagtgcggagcggttggtgcc

SEQ ID NO: 274588 - DNA, 650 bp, Zea mays
acgcgtccggacgtcgtggccacgatccgccagcggcgttgcttcgtcctggtgctcggaacggccattgtcgtcgccttctccgccttattcggcacgacgtccggcgccgcgctagtgggtgactcgtgcagagcgtcatcgtccacctcggacggaggcagctgcggcaaggggcttcgttgcaccacctgcgtgcctccaccggggacaggtccggccgcgtgcgcgcggaccacgcccgtggacccaaagacgcacggcacgggtctccccttcaacaggtactcatggctgacgacgcacaactcgtttgcggtggtgggcaccaagtccccgctgggggtccgccatcatctctccgcccaaccaggaggactcggtgaccgaccacctgaagaacggcctgcggggcctgatgctggatgcctatgacttcaacgacgccgtgtggttctgccactccttccacggccgttgcctgaccttcaccgcctacgtgccggcgctgagcgtgcttacggaggtccgggtgttcctggacgccaacccgtccgaggtggtcaccatcttcctcgaggactatgcagcgccggggtcactcagcaacactttcaacgccgccggactgtccaagtactggttccccg

SEQ ID NO: 274589 - DNA, 1129 bp, Zea mays
cccacgcgtccgttcacactgatgcaagcgctcatcaaggctgatttctggcttctatttttctcccttctgctgggctctggatctggtctcactgtgattgataatcttgggcaaatgagccagtcattgggttacgaggaaacccatatatttgtgtcaatgataagcatctggaactttcttggacgtattggtggagggtatttctcagagattattgtcaaagattacgcatatccaagggcgatcgcattagcgatagctcaagtcctgatggcgatcgggcacttcaacttcgcgatggcttggcccgggacaatgtacatcggcacgctgctcgtcggagtaggctacggcgcgcactgggccatcgtgccagccgcggcctcggagctgttcggggtgaagaacttcggagcgctgtacaacttcctcacggtcgcgaacccagcaggctccctggtcttctcgggggtcatcgcgagtggcatctacgacagtgaagcagcgaagcaggctcagcagcgccacaactccacgtcgctggcgatgagtggcagagtggctggcatggtctctggagccgctccgtcgttgaagtgcgagggcgccgtctgcttcttcctctcatcgctgatcatgtccgggttctgcatcatcgcttttggcttgagcttgatcctggtctaccgcacaaagatcgtgtacacaagtctatacgggaaaccgcgtacttgaaggatcaaccctaaatggacacagggttatcaaagcatacgtcaatttttaagttattagtctgggaccccatgcctgtacaggtacagtgtcggtcttcccgttgttgtgcacaggttctcaagcagcatttcaacttttcaagtatgtggctgcaaatgggagcttcagtatagcgaagcatgttagagtagaaagtccgtctgtggctggactgggacgctgtccttggctcaagttttgctgtatttggttgtgaaaaatttgtgtacacatgtaataagctagagacgtttcgacgcatgtcagagtggagaacatattcttttatgatttgttgaaacttgcgtatttgtatctatcacaaagaaaacagtccaacttgtcc

SEQ ID NO: 274590 - DNA, 1736 bp, Zea mays
ggacgacgcaccgcacactacccgacggtggaactcctcgcccgcgtcgctgctccggtctccgcgctgctagccgccgactgtaataactataacatttcaggtgtgcttctgaagagagatttcgttgaacaggatgaatgcattggcagcaaccagcaggaacttcaagcaggcagctaagctgctgggcctcgactccaagctggagaagagcttgctcattccattcagggagatcaaggttgaatgcacaatcccaaaagatgatggaactttggcatcctatgttggatttagggttcaacatgataatgctaggggacctatgaagggtggaatcagataccaccatgaggttgatcctgatgaagttaatgccttggcacaattgatgacttggaaaacagcagtagctaacataccatatggaggagccaaaggtggtattggatgtagccctggagacctgagcatctctgagcttgagaggcttacccgagtttttactcagaaaatccatgacttgattggcatccatactgacgttccagctccagatatgggcaccaactcacagacaatggcatggatacttgacgaatactcaaagttccatggttactcacctgctgttgtgacaggaaagcctgtggacctcggaggatcattgggaagagacgccgctactggaaggggagttctgtttgctactgaagctttgcttgcagagcatggcaaaggcattgcaggccagcgtttcgtcatacagggattcggtaacgttggttcctgggcagctcagctgataagtgaagccggtggcaaggtgattgctatcagtgacgtcacaggcgccgtcaaaaacgtcgatggcctcgacatcgcgcactcagtgaagcactcggcggagaacaaggggatcaagggcttcaaggggggagacgccatcgctccagactcgttgctcactgaagagtgcgacgtcctcatcccagcagcgcttgggggagtcataaacaaggataatgctaacgacataaaggcaaagtacatcatcgaggctgccaatcaccccacagatccagaggcagacgagatcctgtcaaagaaaggcgtcctcatcctccccgacatactggccaactctggtggcgtcacagtgagctacttcgagtgggtacaaaacatccaggggttcatgtgggacgaagagaaggtaaacgcggagctgcggacgtacatgacgcgcgccttcggggacgtgaagcagatgtgccggagccacagctgcgacctccgcatgggcgccttcacgcttggcgtcaaccgcgtcgcgcgcgccaccgtcctcaggggatgggaagcatgacctccctccgtgtcgtccgtgtgcccctccctgttgtatcctcttggtcttgggcccttgtttttctttggttaattattgtcgagatcaacggagatccgagaaaaacgggctcagttaataattccaagaagtgcgtcttcttggagataaaatagcggaaggagagttataataagtctgtaactgtaacccatagctgagatgctgtctgcaagcagcaatgccaatgccaatgccatctggttttcgtgcacgactttgggtcattttcgaatcctgatcactcaacgacagggtcggtagagatgaagctgtagacagccacgtccctgagcctcccactcaccacgcggtagctccg

SEQ ID NO: 274591 - DNA, 338 bp, Zea mays
cccacgcgcagactctcctcagtaactatagtttttttgttccttgggaggatagaaaaaatatatccttggttttcttgaacagataacatttcaggtgtgcttctgaagagagatttcgttgaacaggatgaatgcattggcagcaaccagcaggaacttcaagcaggcagctaagctgctgggcctcgactccaagctggagaagagcttgctcattccattcagggagatcaaggttgaatgcacaatcccaaaagatgatggaactttggcatcctatgttggatttagggttcaacatgataatgctaggggacctatgaagggtggaatca

SEQ ID NO: 274592 - DNA, 441 bp, Zea mays
ctcttggtctcggatctccgttgatctcgaggatacaacagggagggaagcatgacctccctccgtgtcgtccgtgtgcccctccctgttgtatcctcttggtcttgggcccttgtttttctttggttaattattgtcgagatcaacggagatccgagaaaaacgggctcagtcaataattccaagatgtgcgtattcttggagataaaatagcggaaggagagttataataagtctgtaactgtaacccatagctgagatgctgtctgcaagcagcaatgccaatgccaatgccatctggttttcgtgcaaaaaaaaaaaaaaaaaaaaaaagaaagaaaaaaaaaaaaaaaaaaaaaaaaaaaataaaaaaaaacaaaaataaaaaaaaaaaaaaaacaagctcaaaaaaaaaaaaaaaaacagggggcccccacgtcc

SEQ ID NO: 274593 - DNA, 464 bp, Zea mays
actgtagccgctccttcaacggcgtcctccggctcctcctctcccttcctgattctttctctctcccgctaaatcgatgggcacgctacgccgtattccttccccgcagccccgcagccgcttcttcgcccgcgcgctcggaatactccgcaccaatcctagctgcgggcaggggttccagccgcttcttcgcccacacgcccgctcgctcggaatactccgcaccaatccgtgtcggaccggtacgtgtgcgagatctgcgggcaggggttccagcgcgaccagaacctgcagatgcaccggcggcggcacaaggtgccgtggaagctgctgaagcgggaggccggggaggcggcgcggaagcgcgtgttcctgtgcccggagccgagctgcctgcaccacgacccctcgcacgcgctgggcgacctcgtcggcatcaagaagcacttccgccgcaagcacag

SEQ ID NO: 274594 - DNA, 467 bp, Zea mays
gttcttatagatatgaaatttgttaattttgtagtctcagtttaaagttggagcttcttttttaaacaaaaaatcttctgaatgcttgacggcatatgccattttgtatgctggttatcccatttatgtagggttgctggatctgtttactccttgctctcgggtgggcggctgcttcaattgtcagaaaaggggtcataaagaacatgaggcgcagcattgcagatggaaatagttttgcatttctttgtggcaacatagatgagcttgagcactccgtccacgagaatttacctagagtctctgtagtcatgcctttgaacggctttggcgaacataagttgcaaaattggcgaactcagattacatcaccttatggggggccactggaattcctgtttgtcgtagagagcgaagacgatccggcttatcatgctgtttcccgtttgatcgcagagtacaaggac

SEQ ID NO: 274595 - DNA, 494 bp, Zea mays
aaatcaacccgttcgttcctcccttctcccccctctacccacatcgggcggccgcccccctctctctcaccgctcaggtcaggccaggcccggcgggagagagatccggcgagagacgcggcctcttgctcccctcaacccccttaaagaagcgcatagaagcttcggaaggtgcccctccgcggctcgaaggaggggaggggacgccgcggacaatgacggcgatggaagccgccgtcgacgctatgctcgccgccgcgagccgtgccttcacgagcacctttgccatcgccatccagatccaggggtgcatgatctgtttagtccttgctctcgggtgggcggctgcttcaattgtcagaaaaggggttataaagaacatgaggcgcaacattgtagatggaaatagttttgcatttctttgtgacaacatagatgagcttgagcactctgttcaggagaatttacctagagtctctgtagtcatgcctttg

SEQ ID NO: 274596 - DNA, 457 bp, Zea mays
  unsure (1)..(457): unsure at all n locations
gcgcggacgcgtgggcgccggaggccggcggcgacgccgtggctcccgttcctgtacccggcgccggcgtcggcgtacgtggcggcgatgtcggcggtgtcgttcgtgtccatggcgaacgcgggcctcgccgagctccgcggcgaccacatgccctactccaagttctggcacgccgtggcgggtgccgccggcggggacaccaggcagcggggcgggatgccgctcctgcgaagccgggacggcatgctgctggcctacgccccggcgctgctcgccgccgccgcgtccttcgcggtgccgggcgccgtcgagggcgcgcgcgccgagctgctcagcgccgcgctcgccgcgcacttcctcaagcgggtcctcgaggtgctgtgcgtgcaccggtacagcgggagcatgccgctgggcacggcggccaccatctnctgcagctacctggtcagca

SEQ ID NO: 274597 - DNA, 429 bp, Zea mays
gtttgatttccagaagtacatcaagcggtctctggaggatgacttcaaggtgatcgtggggatcagtcctcctctgtgggcttctgctctcatcttcctcttcctcaacgtcaatggatggcacaccatgctctggatctccatcatgccggtggtgatcatcctgtcggtggggacgaagctgcagggcatcatctgccgcatggcgatcgacatcacggagcgccacgccgtcatccagggcatcccgatggtgcaagtcagcgactcctacttctggttcgcacgccccaccttcgtgctcttcctcatccacttcaccctcttccagaatggcttccagatcatctacttcctctggattctgtatgagtacggcatggactcgtgcttcaacgactccgaagagttcgtccttgcacgactctg

SEQ ID NO: 274598 - DNA, 421 bp, Zea mays
  unsure (1)..(421): unsure at all n locations
accacgcgtcagatcgcggcggcgccctttttttttttttttgccccgtaaagatggggattcattaacaaccggctactgcagtttcttactagtagtacaaattatacatcactagtttacgcaagagcttgctcaaaaagagagtacatgggattactactcctccctatacatcgatcgatacaagtacaagtgcgcgcgcgcagcggcgtgccatgccggttcaagcgcgcggccggccatgtgcgcgcgtgttgggcccgggcacatcaagcagctcggtacgacgccgtagccgaagtcgagcacatatgacatcggcacggcggcccccgcctcggcctcagcgtcgtcngcgtcggcgtcnccgtcgtggtcagcacgcttggcaaaccggcccttgatttcgcggcgctct

SEQ ID NO: 274599 - DNA, 681 bp, Zea mays
cacgtacgttgaacaaacacccaaggcctgacgagacgagatccggacctccgtcctcccaactagggcgcgcgcgcgacctcggcaccggcggcctcgatccatcgttctctcggatccccgccagtgcatgccctggaacggacggacggaatggcagcgtcgccggaccacctcttcggcctgcgcaacagcttctacgtcggcgcataccacgccgtcatcaccagcagccagtccctccccgcgcacgcgctctcccccgacgacctcgtcgagcgcgacgccctcatgtaccgctcctacatcgccatcggctcctaccagctggtgatcggcgagatcgggcccagcgcggccacgccgctccaggccgtcaagctgctcgccgtgtacctctccggcgacggcgggaacagggaatcggtggtctcgaggcttcgtgagctcctgtcagacgcggcggtcgggagcaatccgattctccgggtgatggccggcaccgtcttcatgcacgaacgcgattacgccgaggctctcaagcacaccaactccggtggcagcatggagctgcttgcgctgaatgttcagatataccttcaaatgaacaggacggaccacgcagagaagcagctcagggtgatgcagcagctggacgaagaccacacgctgacgcagctc

SEQ ID NO: 274600 - DNA, 1498 bp, Zea mays
tttctcggctccatggaggccggctactgcaaccgcatgaagaccgacggcatctgcgagtcagtctgcgacagcgagtttggctcgaagtcagtcctgagcatgtcaaggctgaagtgcgcactgcggggatttgatctgagggttctcttgatcctactgattggtgtgccaattttgatctttgccatatatgtgcatggccagaaggtgacttacttcctccgaccaatctgggagaagcccccaaagcccttcacaatactccctcactattaccatgaaaatgtctcgatgggtaacctatgcaagttgcatggatggaaagtcagggagactccacgccgtgtctttgatgccgtgctcttcagcaatgagcttgacatccttgatatccgctggcacgagcttagcccgtatgtgtcagaatttgtgctgcttgagtccaattcaacttttaccggcataaagaaggaccttcacttcaaggaaaaccgccaacggtttggctttgcagagtcacggttgacctatggcatgataggtggaaggtttgtgaagggagagaacccatttgtcgaggagtcgtatcaaagggttgctctcgaccagctcattaagattgcgggcatcacggatgacgacctgctgatcatgtctgatgttgatgagatcccaagtggacacaccatcgacctcttgagatggtgcgatgacgttccggagatactccatctccagctcaggaactacctctactcgttccagttcctactcgacgacaagagctggagggcttcagtgcacagatacagagctgggaagacgaggtatgcacatttccggcagacggacgacctcctggctgattcagggtggcactgcagcttctgcttccgctacataaacgacttcatcttcaagatgaaagcctacagccacgtcgaccggatcagattcaagtacttcctgaacccgaagaggattcagcatgtgatttgcgaaggggctgaccttttcgacatgcttcccgaagagtacacgttccaagagatcatcgccaagctggggcctatcccgagtacattctccgccgttcatctccctgcctacctgctggagcaattcgatcggtacaggtaccttctcccaggcaactgcgttagagagagtggctaggcagctggctgcccgccgtctgcatcatgaccctgaggcgcacggacgtcgctctctcgcggatgtctgtcttatggcggcgggggttgtgtccgatacgattggctgacttagttgagtgatcgcttggctgctggttgagttcatatgggatttttgtgtaccgtgtaacagaaaccatggaaggcctgacggctgcgtagcgcagcgcgtgcttgatcgctgctgcgttcttgtttggcagaggagagctgagagctttttgttcgttgcttccatgattgatatatgatgaactcagaacccgttgtagatctcc

SEQ ID NO: 274601 - DNA, 861 bp, Zea mays
cccacgcgtccggaaagctgttgctgaatggactgcaaaggccatgacagggactgttccgtttgaggaggcgctggcagccaggctgtctttaatcaagccatctctctcccaggtggaggagtgcctggagaagaggccaccaaggatttctcctggaatggctgatttggttaagaagctaaaatccaataatattgacgtgttccttgtgtcaggaggcttccgacacatgatcaagccagtggcatttgagcttggcattcctcctgaaaacatcactgcaaaccaattgtaatttggcacattgagggagtacgccggatttgatcccacagagcccacttcacgcagtgggggtaaagcaaaagcagtgcagcaaataaaataggaccatggctacaagacaattgttacaattggtgatggcgcaactgatctggaggctcggcaacctggcggagcagactgtgtgccgccagagctagcggagggaggcgggtcattcgattcgccatgcttaggattggagaatcactagagtaatagtatatacatggtggggagtgaaaccaacagaggaagaatccgttcttgatcaaaattagtcggctgcttggttcgtcgtctgcgtgttcgatcggaggttggcgacgccttggcgtggccgctttccgcaagaaagcaaggaaattggtcggcttctgcgctaccagtccggtccacttcgttcacctttccctttcggtgccaccaacatctaactgtacatgcatgcttgcttagtgctgaccgccgctaatgcgctggatatttctgggagtggaaacgaaagtgtactctgaatttcaagttcctgtc

SEQ ID NO: 274602 - DNA, 408 bp, Zea mays
gcttccgacaaatgatcaaaccagtggcatttgagcttggcattcctcctgaaaacatcactgcaaaccaattgttatttggcacattgggggagtacgccggatttgatcccacagagcccacttcacgcagtgggggtaaagcaaaagcagtgcagcaaataaaacaggaccatggctacaagacagttgttatgattggtgatggcgcaactgatctggaggctcggcaacctggcggagcagacttgttcatctgttacgccggggttcagatgagagagccagtcgcagcacaagctgactgggtggtttttgattttcaagagctgatcactaagttgccatgaattcattacctaccgcaatttatgaaacctttgcatttgcccggcaaagaaattgcgg

SEQ ID NO: 274603 - DNA, 352 bp, Zea mays
gacagcgcgctcaaggcgagcctcctgccggccatgcagtccgtgtaccaggcgctgaccgcggtgggcctgcagggccgggtgaacgtcaccacggcgcactcgctggacatcatgggcagcacctacccgccctccgccggcgcgttcggccccgacgccgtgccctacctccagccgctcctggccttcctgtccgcggcgcggtccccgttcctcatcaactgctacccctacttcgcgtacaaggccgacccgggcaacgtgccgctcgagtacgtcctgttccagcccgacgccgccggggtcaccgacgccggcacggggctcaagtacgacaacatgctgtacg

SEQ ID NO: 274604 - DNA, 724 bp, Zea mays
  unsure (1)..(724): unsure at all n locations
cccacgcgtccgcccacgcgtccgcccacgcgtccgagcaaccttcacgagctgcgtggtgaggttgaccaggactccttccggatccggagataaggccaccgctcgggtcctctccacctccctcctccttcactccctccccttgcgtttagcctcccgctgttgtggagccgcgggccattcccaaccatcgttgcggtggtggccggtattggccgagacccatgggcatccaggtcgcggcggtcgtgatcccgccgccctgctcttctccttcctcctcctcctcctctccggcgtcgccttcgtcctcggccattgccacgtcgccgcagcatgccgttcttggcgccaggctggcgaggagccagtcgtcgctggcttgctggaacgccgccggtctcggccggcggcgcggcggcgagcacacgatcaggcgcgctctcagcgcgagcatcgacagcgtcgggagcgacggcggggacgacgaggagttctcgaggaggatccaggagctcgcggtgggtcagcacccgggcgccggcggctgcnggtggccggcgagcgtggagcggagcgcgagcagcgtcgggctgccgctgtcnctgcggatgctcaaacggaggaagcagcagcagctggagcatgggcggtgggacgagcggctggtcgacagcgccggcgagtctgcgcgcgccgcggtggggcgcgccttctcctc

SEQ ID NO: 274605 - DNA, 393 bp, Zea mays
cccacgcgtccgcctgaaaccagcgtgctgtgccgcccgggacgatggcgccgcgccagccgctgctccccagtttcctctacgcggcgtcgtccggcgtcaacggcagcagggaggcgcctccggtggtggcgggcgccccgagcgagccgctcggcaagatcgagatgttctcgcccgcatactacgcagcgggcgccttgggaggcgccgcggcctgcgggttcacgcccgccgccgtcacgccgctcgacgtcatcaagtgcaatatccagatcgaccccgccaagtacaagaacacctcgtcggcgttcagcgtggtgatgagggagcagggcctccggggcttctacagggggtgggcgccgacgttcgtgggctacagcgctcagg

SEQ ID NO: 274606 - DNA, 530 bp, Zea mays
aatcaacgctctggcttttgtttttgatggaatcaattacggagcatcagatttcggatatgctgcctactcaatgttttattggaatctggatagctctggtgatctacatgagcctccggatgtttgctggattttggaggatagggacgacacaagggccctaggcttatcttcgcggctgaacatagcggcagatgcaaaattaagtcatggttggctactatgcattgcagggctgcaatacatgtttccatcagggagcctgtcagaagtttaacacacttgttgtaccaaggcgtgtgaactatagctatttttttctgtcctaggacaaactgtgccacgacatgttgtagctatttttctgtcacgtattcatccgagcagatacatggtcctacaagtaacacatatatgtaactaaaaatagtgaggactgttccatgtatggactctctgactcctaacttttaattgggatcgactattaccggtttcaatcatcaaaaaaaaaaaaaaaaaaagaa

SEQ ID NO: 274607 - DNA, 503 bp, Zea mays
agcttctcgtatcttgcagctggccttggtcttgggacttctcctaagcatacttcttggtgttggtctgcgcatagggtccagattatttacatccgatcagggtgtactgcatcatatctacataggaataccgtttgtctgccttactcaaccaatcaacgctctggcttttgtttttgatggtatcaattacggagcatcagatttcggatatgctgcctactcaatggtccttgttgccgttgtcagtatcatttgcatcctcactcttgaaagttatggcgggtttattggaatctggatagctctggtgatctacatgagcctccggatgtttgctggattttggaggatagggacggcacaagggccctgggcttatcttcgcggctgaacatagaggcagagctagtaacctgacttcaccagcacgacgagcacatggtttattattgttcacggaagtggcagtccttgatgtggtctcgtaaatatgccat

SEQ ID NO: 274608 - DNA, 423 bp, Zea mays
  unsure (1)..(423): unsure at all n locations
atcattaccatcgccgcgcccgcctgctggctcgccggcgatcgaatttgaccgccggtccgcgagcggagcatacgtgcatacatggtttgcctgacgccggcggcggcggcgctgctgctcgtcgtcgtcctagcggcggccgtgtccgcgctcccggcgatcaacgtgacgacgatggcgttcgaggacgggtacgcgccgctgttcgggcacggcaacatcctccgctccgccgaccaccgcaccgtcagcctcctcctcgaccgttccaccgggtccggtttcatctcgtcgtccatgtaccagcacggcttcttcagcgcgtccatcaagctccccttcgactacaccgncggcgtcgtcgtcgccttctacgcgtncaacggcgacgtgttcgagaagcggcacgacgagctggac

SEQ ID NO: 274609 - DNA, 796 bp, Zea mays
cccacgcgtccgcgcttcttccgcagaagaacaaggagaaaagggaggggttcgtcacgaggaggaggaggaggaggaggtgcgtcgttccaatcgaaccccggcgcacaatctagaggccggggtggatcatcatcctcaccaagacagaactccatccccgttaaggtgttaaacattaatcatggccacaccgccagacggggcgcccgctggacctgatgacacgtcgccgccgccttcttccaactcgtcgacgccgcctccttccgactcatcgacgccgccacccaagtcctccggctcgggctcgccgtcgccatcgccacccgcaccgtcgttgtcgccgccaccaccggcgtcgccgcaggatagcacggcgccagcggccagaggctcgccggccgcgccgtcgacggactccccgtcaccaccggctccaaagcgcagcgacagtgactccgataatagtggcagcagcaagagcggaagcggaagcggaagcagaagcagaagcagcgggtcgacgcaggtggatgtcatcctggccggcgtggtgattggggtcctggcatttagcctgctgatgtgcatcgccgcgtgcgtgtgctgcgccaagaagaagaggagggaagaagcccccgcacatgaacatgccggactacaccgacgagcacgggaacgtcttctacgcgaacagcatgccccagtggcagagcagcgcgatggaccacggctggcacgcgccgtactcgcccgcaagcggggacatgagcggctcgcacgggccggggct

SEQ ID NO: 274610 - DNA, 369 bp, Zea mays
gggtcgaccaacgtccaacacacttctggtcaactggagcataacctttatgtgcctgcctcaaatccaattgaagccactgtctacctttgttaacaattacattgaccttatccccgccaagtacccatattggaataggacaaaaggagctgatcatttctttgttgcttgccatgactgggggccttacacaacaaaattgcatgatgaattgcggaagaacactattaaagctctctgcaatgcagatctctctgaaggattttttatccgtggaaaagatgtttcccttccagaaacattccttaggtcaccaagacgacctctaacagatattggaggaagaccagctgcgcagaggactat

SEQ ID NO: 274611 - DNA, 374 bp, Zea mays
gtcgccgccgcagctgaccacaacatcatcgaactgacagggacagacaggccaggactgctctctgaggtcagcgctgtgctcaccagcctcaagtgcaacgtggtcagcgccgagatctggacccacaacacccgagccgcggccgtgatgcgggtcactgacgaggacactgggctggcggtcacggacgccgagaggctggagaggatcagggagaagctgtcgtacctgttccgtggaggcaatctctctcgaggtgccacagtgtcgtcgaggactgccaccacgcacaccgagagtatgctgcaacgtaggaatcactatgaccgcgttcacgcaccactatctcagctccatccacgacgatctca

SEQ ID NO: 274612 - DNA, 740 bp, Zea mays
cggacggtgggtcctccaccaccattcatcagaaagcgaacaccagcctctgatgccaagccaaagcacacacacctcctccagcctttcttcctctacaaccccaattcttccctgcagctctgctgctgccttgtttcgatcggtcatggcggcggtggccacagagactccgttccatgtcctggcggtggacgacagcctcccggacaggaagctcatcgagaggctcctcaagacctcttccttccaagtgaccactgtcgactccgggagcaaggcgctgcagttcctgggcctccatgaccaggacagcacggttcctcctgtccacacgcaccagctggatgtggctgccaatcaggatgtggctgtgaacctgatcatcacagactactgcatgcctggcatgacaggatatgacctgctcaagaagatcaaggagtccgtcgtctctcagagatatcccggtggtgatcatgtcctctgagaacattccttcaaggatcaataggtgcctggaggaaggagctgacgagttcttcctaaaacctgtgcggctatcagacatgaacaagctcaagccccacatactgaaaagcagatgcaaccaggacagcaccagcaaagtgacagtcacagtggcgaacgcaggaaccccacaatcagcagcagcgatagcataaacaaccgcaagagaaagggtgcaggcaccgaagaaatcttgccccagctggcaa

SEQ ID NO: 274613 - DNA, 407 bp, Zea mays
gggcatcgctctctcccgtgggcggctcgggaggcgaaaccctagccgctgccccactctcccccgccctctccgtctcgccgctgccagaggggctggccgggttggccgcgcgggcccccaggacggcggcggcgaggcatcccctgttggcgttgagagctcccagattcgtgcggggaaggagctcgtggccaaggcttgatcttggtggccgtggtggtgctgtgcgacctcgtgggcacctcatgggcacattcgtgctgtgcggcgaggcatcccctgttggcgttccgggagttttggcctgacagggttgtgctgggagcttcttgggcgaaagcctcgcgacggtgacgcccatgggcgccgggtttccctcttgagggcgtcgcacggtgaaagcc

SEQ ID NO: 274614 - DNA, 514 bp, Zea mays
gggttctcttcccttccctgagcaaatagaagtagccacaagcatgtctggggtcagcgacaatatccaggtgaggctccacatcggtggcgaccacaaggaggagcacgagcacaagaagggcgaggagcaccacatgaagggcgaggagcaccacatgaaggacgacggggagcacaaggagggcatcgtggagaagatcaaggacaagatcaccggcgagcacggcgacaagtccggcgaccacaaggacaaagaccataaggagaagaaagatttgaagaagaagaaagagaagaagcacggggaaggccatgaccatggtgatggtgacggccacagcagcagcagcagcgacagcgactgatctcgcctcgccgagcgccgtacgcacaaatgcaccgcgcaggttataatacgagctgtccgccgaacaccatgcgcatatattatacagtactcgccaagattgttgttctgcaatcttcgggataaaaaggttctttttttgttt

SEQ ID NO: 274615 - DNA, 978 bp, Zea mays
ggacgctggcggacgcgtgggcggacgcacacaaaagcgaaagggaggagagagaggggcagggcagagcaggagagagaaattcgatagggttcccatgccccttccccaccggccaccacttgccaagcgaaagcgggagtgaaggaggggagagtcccatttccccaagccctacacgagagaaagagagagaggggggagcagaggagcacgctacgagagagggaggtcgagggagacagcagaggctgcagcagaggccagaagcattagaagcggcagttgtaaccaagtggcatcagaagatagagccagccatccgtctatccatctatctagctctacaggtataaatcctcgcgcatcggtagggggcgaggggaggaccgggaaccggaggggatttctcgggggtggagtggcggccaggacctctgattgggctccagtgcgcgatctttgaacgcagatttggtgcccgcaatctgccatggatttggtttaagatttggtgagatcggtcgggttcgcgctgcaagattagatttttgtgcctgttttattcacgagatcgcaacaacgatattgctaagcaagataagatttcaactttttttcccctggatcgatctcagattaggaggagcaaataaagcaagaatagaaagatttttgggggagaaggcatgatgctggaagggaagtcctaccttgtgtcacgctccgtgccgagctcctgcgagccggaggcggagtgggagtacctcgcccacgcggtcctcagcggcaagcgcccggcgccggaagatgacgtcgaggtcgaagacccggacgaaactggcagcggcggcaagcgcagcaagccggcgtctccgcagccgcacacgccggacatctgcgagggccacggctccaaccgccacgccactggttccggagagcagcggatcaccgggagcaaccccatgacttcga

SEQ ID NO: 274616 - DNA, 516 bp, Zea mays
gttaaccggaggggatttctcgggggtggagtggcggccaggacctctgattgggctccagtgcgcgatctttgaacgcagatttggtgcccgcaatctgccatggatttggtttaagatttggtgagatcggtcgggttcgcgctgcaagattagatttttgtgcctgttttattcacgagattaggaggagcaaataaagcaagaatagaaagatttttgggggagaaggcatgatgctggaagggaaggcctaccttgtgtcacgctccgtgccgagctcctgcgagccggaggcggagtgggagtacctcgcccacgcggtcctcagcggcaagcgcccggcgccggaagatgacgtcgaggtcgaagacccggacgaaactggcagcggcggcaagcgcagcaagccggcgtctccgcagccgcacacgccggacatctgcgagggccacggctccaaccgccacgccaccggttccgaaagagcagcggtcgccgggagcaaccccatga

SEQ ID NO: 274617 - DNA, 885 bp, Zea mays
  unsure (1)..(885): unsure at all n locations
cagagagacctgactgcaccttacgttgacgatgggcttatcgaggttgtcggcttccgtgatgcctggcatgggctcatcttgctggctcctaatggccatggaactcgtctagcgcaggtggaaggaactagtctgctctgtcagcactcagcggctcggcacacagtgcgcctaactaggaaaggaaactgaagatttggtgatgagtgtattttggtttcaggcccaccgaatccgtttcgagttccacaagggagcagcggagcacacgttcatgaggatcgacggggagccatggaagcagcctctccccaaggaggacgacaccgtggtggtggagatctccaacctccgtcaggtggccatgctggccaacgacccgtgcaggtccaagagcgtgaacgagccgtcctccccgtcgtgccacggccatgaggacgacgacagcaacagcctggaggacgaggacgaggacgagtgggaggacgggaggaagaagttcggtgcggcggccaccttcaagatccccgacgaggtggacatcgctcatctcagttagaacctagaaaccccgccggctgcttctgcgtcggttggtggtgctgactgctgagtctgtgcatttcagagtgtttgctgcttgctacagcctacagtgctactgccccctttttttttgttggtttttttttggttgcccccccgagctcagatttcagaagctaaccactgctgttggtgaaactgctcgttatgatcccccattgttctgtaaattttcaagttttagcagccatgtgtatttcactggctgataatttttttgtgtgctccgtaatttgaaacgtggaaacgacttgtacccaaggtcccnnctcttgc

SEQ ID NO: 274618 - DNA, 472 bp, Zea mays
agcatgagcaccggaacatgcacatatctcttctaagagtatatacaagagccttagttctgttactgttagagttggacatggggaggcagcaccgcaggagattgagtgcgtgttgccttaagggtagactgcgcaggtgaggtgacaaagagcatgcactgcactgcactgcaccacatatgtgcatcgaaggttgaagacgaccagcacctccggtcagaagagaggaaggagaggcggctggagaaagagagccaggtcagcagggtgttcaaaccgccggcggtaccaacgaatcttcctctttttcttcttttgcttgaatttatgccttgtgacgtgcatctggaggcacgactgatcacaaaagaatacgagttttcctaaagttaacaacattcttgactggcaaaaccctggtctttcccaacttaattgccttgcaatacattcccttttttccagttgg

SEQ ID NO: 274619 - DNA, 690 bp, Zea mays
acgcgtcaacatgaactcattggatgttgcaaaaggcaaataaagaagaaaacaaatatcacaaatgcagtggtatagaaccacaatacatggttcatgataggcaaacatacttacttttagttcaggttattgagatttgtgctggacgaattggtgaggctgtgtcaatgataaacaacaaggataatgattggtttattcaactcacatgtgcctacttgtacagtcttaaccatagggatttactgtcccaggatactatgaagaattaagccagaattaaattggatttaaaaaggacatccaattgaatatgcaagagcttgctcaatctctccttttgagatgtgatgagaaaactagcaataagaagaccaagaaaaccttatgggatgtcctaagaagtttatactatgctactcattccccacaacatatgatcgatagacatgtttccagagttatctttgagcctgtttaaaaatgtttaagtggtagaccattatgttaggtgtaaatgtgtacataaaagttatcataaggagtaatggtagcagaagcatgcagttgtaagtttatttgttgcttagaatagaaattagtgtagctataatatcaagaatgttcctatataagtaatcatattatggacacaggtgttcataaaaataacaattttatatgttg

SEQ ID NO: 274620 - DNA, 415 bp, Zea mays
ggccgccctttttttttttttttgaacgaaaacaacagtacgtgactggtccaacgcagcagcgggacgcgcttggtacgacatccacgagagcacgtctatacccgacggtgacctccggttatttaggagcacgtctctgatcccatcagatcgatcgcgcaagttcaactgaacatgcacacaagcaccagacagaaaggaaacaatgacgtaacggaaggcgacggctgtgcctcgacaaacaacctcgaccagatcgaaggagaacagtgcgtgtaccctaccgtgcaacagccacacacacgacacgttacgttacgtacgtacttgttccttatataacatttgcatgcatgcatgcagatgcatctactacggcgacttacacgggcactgtgcggttgttgtagtt

SEQ ID NO: 274621 - DNA, 493 bp, Zea mays
aggtcatcctctggagatccaggctctgttctattctgctttacgctgtgcccgagaaatgattggggtaaccgatggatccaagaacttgatccgtgctattaacaacaggctcagtgctctgtcatttcacatcagggagtattattgggttgatatgaagaagataaatgagatttatcgctataagactgaggagtattcccatgatgctattaacaaattcaacatctacccagagcaaattccatcttggcttgcagactggattcctgtgaaaggcggttaccttataggcaatctgcagccagctcacatggatttcaggtttttctccctagggaatctgtgggcgattgtcccatctcttgctactcaaaggcaagcagagggtattctgaaccttattgaagccaaatgggatgacatagtagccaacatgcctcttaaaatatgttaccctgcactagagtatgaggaatggcgtatcatc

SEQ ID NO: 274622 - DNA, 353 bp, Zea mays
cgacgagaggctatccggctgctccatggcggggcggcggtgggaggcccgtgcccggcagtgacggtggcctcctccgtccgtcggccctccccagcaccgaggacacgtcccctcacgctcaacctggatcgttgtaccgcaaccactttgtgtttgagcgcctctagctggccatgcgcggcggatttgagcatcgcgggctcgcggccagaatataaccacctgttctgcttgctcatcgatgtgtctaattcaaaagggaaagtcctacaatgattgggcatttctttcaaaaaagaataccacggagaaaacgccatactgaacagacaagatcaccgaagcacaaa

SEQ ID NO: 274623 - DNA, 767 bp, Zea mays
ttcgttggcatgatcaaggccctcaccaacgatgtggggaagttctaccagctgtgcgaccccgaaaaggaaaacttgtgcctttatggctaccccaacgaaacatgggaagtaactttgccagcagaggaagttcctccagagatccctgaaccagctttgggtataaactttgctagggatggcatgaacgagaaggattggttggcgttagttgctgtccacagcgatgcctggttactagctgttgcattctactttgcagcccggtttgggtttgacaaagaggccaggcggcgactcttcaacatgataaataacttgcccacaatatttgaagtagcgactggggttgccaagaaacaaaacaaggagaaggaacccaatagtaccagcaaaagcaacaaaccaagttcgaaaatgacaacaagacccgagtctcattccaaggcgacaaaagtggcagtgccccctaaggatgacgatgatgagagcggtgaagaatatgaagaggaagagcgtgataacaccttatgtggatcatgtggaacaaatgacggcaaggacgaattctggatctgttgtgatagttgcgagcggtggtaccatgggaagtgtgtcaagatcacgcctgcacgtgctgagcacatcaagcactacaaatgcccagattgcagcaacaagagggcaagagcctagcaccaagccctgctgtgactctggagtgaagtaagcgccaaatcattgatgtctgcagatatatgcct

SEQ ID NO: 274624 - DNA, 292 bp, Zea mays
cgctcgtatataacgcatgcacgtacacaccatgctcgacgagcagatgcgcgtggtggtcaagatgtactggggtgatccgagggagaaggtgtgcgacgcggtggaggagctccagatggagtcgctcgtcatgggcagccgtggcctcggccagctccaaaggattctgctgggaagtgtgacgaactacgtgctgtccaatgcgtcatgccccgtgaccgtcgtcaagtcgaagtagtggctctggcctttcatttccagaaagatgaatctgcagctaacctatacg

SEQ ID NO: 274625 - DNA, 455 bp, Zea mays
ctttgccacggaaggaaaggactgtagtttttcttcagtatacccagaattacagacgccaacaaagatacccttcgagaaagggttggcccaaaggtttatccagccctctggatctggtgttgacttgggattcttttctcttgatgagctttcgagttcatcaggggaagtattcccacttgttgtttatgcagaagcatatccatctccagaggaaggtggcccgtcagtaaacgccactcgtgcacagattactcttgctgttttggagaagcacaacaacgaccttcaagtcaaagttatgaagcaaatcttgtggattgatggcgtgaggtatgagctacaggaaatttttggtcttgtcaactccactgaagcggatgttgctgatgctgatgccgatgacacggggaatgaatgtgttatctgcttgtcagaaccaagagacactg

SEQ ID NO: 274626 - DNA, 370 bp, Zea mays
cccacgcgtccgcggaagcaaagcacaccagctcatttgcttcgcccgttcgccgtgcgtgcgtcgtcaaccagagactcgtttccttctttgtgctcctgttcgttccttccttccctggacacccttcccccgtaagctcgccgctgcgctgcgttcggatggcagttggaggcggcgtgtgtgtggcgtcgccctcgccgtcgtcggtcgaggcgtggtcgtggaggacgagcggggcgcggcgccgcgcggctcgttaggtgcagcgtcgttggcgaggccgggccgggcgccgccggcgggcgggtggaggacccctaccggacgctgcgtctgcgccggggggccacccgcggcgaggtcaaga

SEQ ID NO: 274627 - DNA, 1020 bp, Zea mays
agcccacgcgtccgccgacgacacggccctggacgcatcctccccgggcaccgacacgcagcgccgcctgctgtcccgcctcgcctccgactggctcgccctgctcctcttcaagtccgcctacctcctcgcgctcctcctgctctcgctcctctccgtcgccgcctccgtgttctccgtcgcctccgtctactccgccaagcgcgacgcgctcaccttcccgcgcgtgctctccgtcgtgccccgcgtctggcggaggctcgccgccacgttcctcgccgccttcgcgctcctcttcgcctaccacgccgtcgccgtgctcgtcttcgtcggcctcctcgtcgccgcggacaacggctccggcctcgcgggcctgctcgccttcctcgtcgccgtcgcctacctgctcggcctcgtctacctcggcgtcgtctggcacctcgccagcgtcgtctccgtgctcgaggaccacaagggcttcgccgccatgcgcaagagcaaggacctcatcagggggaagctcgtcaccgcgggggccatattcttcacgctcaacgtcgtcttcgccgccgtcgagctcggcttccgcgcctgggtcgtcaggggatccggcgccgcgtcgtccaggctcttgctcggcctcatcatgctcgccgcgctctgctgcgtcgtcatgctcgcgctcgtcacgcagaccgtcgtctacctcgtgtgcaagagctaccaccacgagagcctcgacaaggccaacatctccgaccacctcgaggtctacctcggcgactacgtcccgctaaaggcgtccgacgtgcagatggagcagttccaggtctgactgtgaatcccatagcttctttctgtcttttatcactgctcgccaatccatcctctgatgccggaattctcctgttaccaccggcagccaggtaatctgtaattgtgtacgtacagcaggcagcaggtgatgaacatacttgcgttaagtaggaagaattgggaatttttgtcttgggtgtacaa

SEQ ID NO: 274628 - DNA, 410 bp, Zea mays
aagagagtagtactggacagaagcaacctcctgttcttgtcatagtgttgcagtttataactgcaatggttgttatggacacatggcagtacttcatgcacagatacatgcacattaacaagtttctgtataaacacatccattctaagcaccatactcttgtagtcccttattcctttggagctctatacaaccatcctcttgagggccttattttggacaccattggtggtgcactctcattcctcgtctctggtatgactccacggacatccatattctttttctcctttgcaaccatcaaaactgtggatgatcattgtgggctgtggcttcctggtaatatcctccaggcgctgttcagcaataacagtgcttatcatgaacatcacaatcagctctatggaaac

SEQ ID NO: 274629 - DNA, 408 bp, Zea mays
aaaaaacgttgccaatcccatggagcatccgcttcaggatcgccgctgacatcgcaactggactcctcttcctcgaccaagcgaagccagaaccacttgtccaccgggacctgaagcccgccaacatcctcctcgaccacaacttcgtcagcaggatcagcgacgtcggcctcgcgaggctggtcccacagtccgcggccgtcgtcacccagtacaggttgacttcgccggccggccccttctgctacttccacccggagtaccatcagactggcatgctcaccaccatgtccgacgtgtactccctcggcatcatgcggctctcagatcatctcggcgtgggtcgcccatgggcctcacgcaccacgtggagatcgccatagagagaggagccttccaggagatcct

SEQ ID NO: 274630 - DNA, 667 bp, Zea mays
acgacggacccgcacatgaaggacctcttcgtcccgttccgatgcttctgcacccgcaaagacatcaattgcaaggacgtggtgctggacgagcacgacgtggccaagtccatcatcgagttctcggcgcaggcggccgtggagaagctcgtcctcggcgccacgacgaggggcggcttcgtccggttcaaggcggacatcccgaccaccatctccaagggcgccccagacttctgctcggtgtacatcgtcaacaaggggaaggtctcgtcgcagcgcaactccacccgcgccgcgccgcgggtgtcgccgctccggtcgcagatccagtcgtcgcagattgccgcaacgctcaagcccgagccgccgcagtcgcaccggtggtcctcgtcgtcgagaggccacgagcacggcgagacgccgcgggtggacaacttccgctcgccgttcgcgcgcgggggccccgcgaacacgcgcaagtcgtacgccgacctcagccacatgtccatgccggactcggccgacatctcgtttgtcagcagcaccggccgccggagcgtcgaccaccacccggcgatcccgccgcggatgtccaacggctccgtggacagctacgaccacagcttcgagatgtcacgcacgcccagcaagtggggcggcgactcct

SEQ ID NO: 274631 - DNA, 481 bp, Zea mays
ggaagcgtgggccggggccgggaggagcggtacgtgctccccttcgaccccaccacggagttccaccgctactccatcctgtggacgcccgccgccgtggccttctacgtggacgacgtgccggtgcgcgaggtgcggcagtcggccgccatgggcggggacttcccctccaagcccatgtccgtgtacgccaccgtgtgggacgcctccacctgggccaccgccgggggccggtaccgcgtcaactaccgctacgggcccttcgtcgcctccttcaccgacctggccctcctcggctgccgcgttgacgggcccatccagcagacgacggcggagcggtgcgccgcagccgccgaggcactcagggcgtcggacgtggccgtcatgacggtggagaagcagcaagccatgcgcaggttccgggagcgcaacatggtctactcctactgctacgacacgctgcgctaccccgccgcgttcc

SEQ ID NO: 274632 - DNA, 558 bp, Zea mays
gaatgatgtcctcagctccatgcacaaggatgctggagaggcaggagaagtaaagagcgcagaaggagagttcttattgcgtgttgatggcggtgctactgttaataatcttctaatgcagatccaggctgatttattaggcagccctgttgtcagaccagctgacatagagaccacagccctcggagctgcatatgctgctgggttggctgcaggagtttggaccaaggagaaggtttttgcaggtttgcacaaggagaacacgacagtcttccgcccgaaactggatgaggcgcacaggaaaaagagggcggattcatggtacaaggcggtttcaagatcattcgatctggctgatctttctctgtaaatttatcctgccagcgctcctctatctggttttggaagctgcaaatgaataaattggtcttcgctgggactaatcttaactgcttgttatttatatataacatcacgatgtttataaaagtgagtacatgaatatcctcagattttctgctggaagtgtttttctagaatatttatgtgtgcttccat

SEQ ID NO: 274633 - DNA, 461 bp, Zea mays
ccgcgccgcgcgtggcccgatccagcccggccctcggatggtcgccgctggcacgtgacagggacgacaccagcggcggcgggtgcgggtccatggagttctggccggaggtcctggcctccagcggcgggcgcgagttcgtggccggcggggtgggcggcatggcgggcgtgctggcgggccacccgctcgacacgctccgcatccgcctccagcagccgcccgccgcgggcgcaccacgccgccgcgacgcgcacccctcagccccgcgcctcctacgcggcatcctccgcgccgagggcccctgcgcgctctaccgcggcatggccgcgccgctcgcctccgtcgccttccagaacgcgatggtgttccaggtgtatgcggtcctgtcgcggtcgctgggccccgtcaccttcgagccgtcgtcctacgcgagcgtggcgctggccggcgtcagcacg

SEQ ID NO: 274634 - DNA, 1034 bp, Zea mays
cttcacatggcctcctttcgccgtgctctctcaccagtctgccacgcgcgctatggtggtgtcaattgtcatgtcccatgctagctaacgaaaatgctcgctgttgctgtctgtgtttgcagaacgcgatggtgttccaggtgtatgcggtcctgccgcggtcgctgggccccgccacctccgagccgccgtcctacgcgagcgtggcgctggccggcgtcagcacgggggcgctgcagacgctgatcctgtccccggtggagctggtcaagatccggctgcagctggaggcggcgtcggggcacggccccgtggagatggtccgtgaaatcctccggcgcgagggcctgcgcggcgtgtaccgcgggctggcggtgaccgcgctccgcgacgcgccggcgcacggcgtctacttctggacgtacgagcgcgcccgggagcgcctgcacccggggtgccgccgcagcagcagcagccaggaccaagacggggacgagggcctgggcaccatgctcgtggccggcggcctggccggggtcgccagctgggtgtgctgctacccgctggacgtggtcaagtcgcggctccaggcgcagggcgcggcgtcggcgtcggcgcccaggtaccgcggcgtcgtcgactgcttccagaggagcgtccgggaggaaggcctccccgtgctgtggcgcggcctcggcaccgccgtcgcccgcgcgttcgtcgtcaacggcgccatcttctccgcctacgagcttgccctgcgcttcattgccagcggcggcggccccaggctggtcatggaggacaagtgagtcagactggaccgtgttgtacataggctagtataagtatccattccagtggttggtggagagtatccatgccactgccagcgcagtgagctgagattcgtggactggagtagcgtaccgtagctgcaagcttcatacaaatcgaagcatgcgtcttgatgatggcgatcgattcaccctggtaatttggggaaataccctgtgcagtgcattgtgcccccc

SEQ ID NO: 274635 - DNA, 534 bp, Zea mays
ccgagcgctgatcacggtgaggccacccagatccacccgattgccacgcggacttcaccccttgccttttctcctcccgtccacccatcgggcgctttccctccatccctctctctcgtgcggcatctgggcgacccgccgacgcccctacgccaggtgcccaggccttcgtcgggtcctttaccggcgacgagcacacaccagggcactggagggctaccatctgcttcgctttctgaaaaaaaaacagtttcggcataattatcaccctaagatgcctggaattacaatggatggatttgttgcagaggaggtgccgaacagggtgaattcctctccacagaacgaaaatctgcccgccccaaattcgacggcagcttcaacaatggcgccaagcatgcaaagtgaggcacttgagatgcatgtcgagagctccggtactggggagccctcaattgagcagctctacaacaatgtgtgcgagatgaagagctcaagtgagggtggctccctgtcacatgagagctttggctc

SEQ ID NO: 274636 - DNA, 480 bp, Zea mays
cccacgcgtccgccaccgcacaccatctgggaaaccgatcgagcgagcgaccatggcccgtgctctcaccctcaccgtcttcctcgtcgtcatcgcctccgctgtcgtgtcgttcgctgcggatgaggcaccggctgcctcgccaaagcattcggcctccacaccgtcaaaggcacccagcacgtcgcccgacaagtctgagaaggcccccacggcgtcgtctgaggatggtgcggctacccccgctaaggccccagctcccgcggcctccaactcagaggcgtcaccttccgaggcacctacctccgggtctgagtccggtgccgcctcgcctaacgagagcgctgcgtcagaagaggcccctacaagtgcccccgaggacgcatcatcggccagcccttccacgtccccgtcggatgccgatgctgcagtatcgcccgatagtagcagcggtggtggtaccgcctcgaaagagccttc

SEQ ID NO: 274637 - DNA, 327 bp, Zea mays
gcaatgaccagagacgggaggtctccgttgcccagaacatcgctaacaaggaaattgaccgcaacgttgcattcgacaaggaggtgctggaggccacaaggcagcagctcgagagggagctctccctggagaatctcaatagcagccatgacctccctgcctgcaaccttttgtacaaatagtactaatggtagttagattactgtgatgcagccaaaaggaaatttgtatgatgatcaggttgcatcgtaaccagaatcatcaatcagcctgtaaaaagagaatatgttaaaattgtattaagttgaactgactactgttgaggtc

SEQ ID NO: 274638 - DNA, 922 bp, Zea mays
gggactgttcatattttctccctgagagtcagagttgctggagtggattcaagcaatgagcaacgcactcttgaaggtccacggatggatcaccagaactcttccagttctattgatcctcttattcaagcgaacactggatccaacgctagttcatcactgtcttttatgagagggatcctgccgaagtatttcagttcagagtggtcatttgctcagttccatttaccagaagtcactcgttacatagtagcctttggtgcccagaatactgtgatgatggttggcctggatggcggcttctacaggtgcagctttgaccaagcgaatggagggcagatgttgcagagggaacatttccggtttctcaagtccgacagcccacctttcagactgcagccgcttgacctgcagcacgagggatcatcccatcccaccatgtaaatgtcgaaggtcccctgtacatatcgccttctcgccggcgaagttataggcagccggaataaggagagctggctgttgttggatcgcagcctacaggattccaacgttcggatcggcgccccgtccaaattgcaggcatttctttgccggtccctcttctatcttcaaacgagaacacacccccattgctgggtcagaacatgacataaaagattcagtaacgtgatatttgaccgtgtggctttgtggtgcctgcaaggccgtgtagcgaatctcagacctgttcttgccggtggcttgttgatgctgatgactgttacgcactacctcaatgttctttctgcatgttgtgcgattgcgttgctggtagcggttggcatgtcagatctgctcgattgattgtttgatgtgcgttgctccaggctgagaccacgggctgggtctaacaagttcctgattgcatgaagggccttcttat

SEQ ID NO: 274639 - DNA, 522 bp, Zea mays
ctcagttccatttaccagaagtcacccgttacatagtagcctttggtgctcagaatactgtaatgatggttggcctggatggcagcttctacaggtgcagcttcgaccaagtgaacggagggcagatgttacagaaggagtatttccggtttctcaagtccgacagcccacctttaaggagcgcagccatctgacctacctctctcaccctgtaaataccgaaggttgtgcccggtccattgtacatatcaccatcttctcgccggctaaagttattacaggcagcgggaataaggaggagctggccgtgtcggatcgccgcagcccacaggtttccaaccttgaggtttctggagcggttggtgtcccatccaagctgcaagcatcatttgccatctctcttctttcttctagcgagaacctcaaccacccattggttcactacatataacgtaaaaagttcgataacgaatttgaccgtgtggtctgaaatgccgtgtaagaaatctccgacttgttctt

SEQ ID NO: 274640 - DNA, 385 bp, Zea mays
attggagattaaaaaggatgtagttctgttggatgacgatgatgatatagagcctgctagatcaactgatgttcagatatccaataagtgggaggagtcaaatatccactatccttcaagcactgatccagaagcggttgaactgacctactctgacatgaaatgtcttgaaccagaagaatatttaaaatcacctgttagaaatttttaccttcagtacctcaagaaggcaagacctcgcagggtatttacacatgtttaacacctatttttatagcaaactcgaagaagcactatccatgccgggtcaccatgactcagacttcagcaagtttcggagatggtggaaaggtgtaaataattttaagaaaacgttcaaaaattt

SEQ ID NO: 274641 - DNA, 565 bp, Zea mays
cgaccgtggcgagccgagccgggagaatgggaatccagctcagatttcgcttctctccctccgccgtggtgagccccccgcgggcgacgtgtgtcccgttgcctttccttcgcttcgacggccaggccacctgttggcctcgcatggctctggcgcggcctcctgccaagcatccaagctccctctcgcccggcggcccagcgccgcggcgtctatatagagccagatccgcgcgatccccgccaatcggcaatcgctgcaccctgcctcaacttatctagctcacccgcatccctgctcggcactgccttgtgccttctcctcgcacttcccttcttcttgtatctagccccccttcatcacaatcaccggcagcggcgcgccgtcgtctcagggttttcgaaccataccgataatttttttgcaagttgtgcagttgttgtctcaagcttgctgcctccctttgccaaaactatgaagaaacaggttttgttatcaatgaacacattggcacagattttaactgggttatgttggtaagacatgacgtttagttggaatcttg

SEQ ID NO: 274642 - DNA, 1170 bp, Zea mays
  unsure (1)..(1170): unsure at all n locations
tantcgcaacagcccaaacagatagacccggtccggttggcggccgtttcggttcgaggcttgtggccggccgccgctgaagcaggaaggagcgtgcgtcggacatggaggacgcacgcgtgctgccggttgtcttcgtcgacggcgagcagagcgtggacttgggcacggtgaccgtgcagccgtcgtttggcggcgtgaagcggcttcaggccgtcgtggcagaccgcgtgggcgccgcgccgcaccagatctcggcgtccctggcgcggccccgccgcgcccgccatgtgcccctcgacgacgccaccgacctcgccgccgccgtcgcgcgggagggttccgggtgctacgtcatcgctgggttccgccgctcccgccggggcggccggtcccgccgcgtccgcgggcgcgtcggcggcgcggccgtggagaagaccatcctgaagcgcctcccgcccacggatctggcgtctctggtcagccctctccctctccctccccgcgccagtgccggtgcctcgcccgggccgctcgtgctctacgacgactacgaggcgcggctgcgggagctgcagcggcagcgcgactggtacttgatgagcaccgcgggtgcgggtccgggtctggaccccgcctacttgcacttgtcggtggcggcggggcatccggataacgaggacccacagcagtggtccccgaggcgacgaccgtccccgtgccccgagtgcgaggcggcggcggcggccatgcggcagccggcgttccactggtgcgtgcgcgcacgcggtggtctccgcgggattccgctcccacgtgggccccatcgagcccccgccgaagaagactccgtctcctctgtcgccgccgagccccggccgccgcccgggccttgtctactaatccatcggccagcagctgatccaattccatccatagtactctgtctagcagcaatttgtatgtaagacaaagtcaagcggagatgggattggggacgaatcatggatggtggaggttgcgcgtcgcgacacggaggaagaggatttcttcgccgtagagttgctttgtttgtttttcctttttgccctggactcttctgttttccttcttaacgagaggaagctgtttctggtacaatgcagaaagaaggcttctggtaatttttag

SEQ ID NO: 274643 - DNA, 665 bp, Zea mays
gaggatcaaggactgcgtacggttttcttattggccaacaacgggcgacatcaatgtcattgatcttaagtttaggtataggcacaacactcctctagtgttgaagggcatcacaataagcatacatggaggagagaagattggagttgtcggcagaactggtagtgggaaatcaacactgatccaggcactgttcagaatagtggagccttctgaggggagaataatcatcgacggtgttgacatctgcacacgcgtccgccatgaccttaggtcacggtttggtatcatacctcaggaacctgttctctttgaagggaccattaggagcaacattgatccgcttgagcagtattccgatgatgaaatctggcaggcattgggccgctgtcagttgaaagaagccgtagcttcaaaacccgaaaagcttgatgcttcagtcgtcgacaatggtgagaactggagtgttggacaacgtcaactgctatgcctgggccgggtgatgctaaagcacagcagaatactgttcatggacgaggccactgcttccgttgattcccagaccgatgctgtgattcagaagatcatccgggaagactttgcagcttgtaccattatcagcattgcgcacagaatacctacggtgatggactgcgacagggtcc

SEQ ID NO: 274644 - DNA, 436 bp, Zea mays
acagtcggcagaaaatttgcatgcgcgggaatattctagttgaacaatacatagattcatacatcgtcttcagctcagtcttaaaatttcagcttaaaccgctcaaatacatttcgataactacttactatcctaggcatctcgatgtctccttcatccgatcggggcttctcctctggccttccacatgacccaattacgtttcgcgaaattttgagggctcgcagttttatttggagcatgaatgcagcattgctcgttcaccacaccgagaaatttccaatcattggttcctcccaaatctcgagtcaaaaaattacgccaccctgaaatgctaaacgtcgcacgaacggctcgcgtacgcttgtaccattatcagcattgcgcacagaatactacggtgatggactgcgacagggtcctggttatagatgca

SEQ ID NO: 274645 - DNA, 1023 bp, Zea mays
cccacgcgtccgcccacgcgtccgttcactcgtccgcccacgcgtccggcaacccaccgtgtcgtccgtcgtcggctcgtcctcgccgtcctcctccacaccgcgcgcgcggcggtgttgacccacccacccgttcctcccccaccccatcagcgctggaggcggcggtgcgtaagtcccccggacccttcggcggcggcggcggcgcgcggttatgccgagaggctcccaggtttcatcaccgtgctctgctggagttatagcattttcagcaaggatatggagtacaccccctgcacagcaagttcctttgtatcccacatctcgctgctcgaggaagttcttggctggaggttttgtctttacggagacttcctggtcatctcttttgtcaactgcacttgaggatcaacccacacttagtgactgccttgcctggtcccatgctgtcagacattagagttgcccagtgattacactattacagtgcagctgtagcacatttatttgagcatggtggatctgtttctctggcaacattccagtaatctttgtcttggtgctaatcagccagcagaagttaccatcaagacatctttggacacttggatctaacgcttagagctttgccttcgcatataggctctaggtttgggttttcgttttctgctagctttcttctactctaccactgtaagttttcagtctgatcggtccaaaatttggtgtgtattggttacgctgtccttcatcagccttcactttgcatgggttgaccttagagaagacgtgttcaagattttgttgtcgcaaaagcatgggaatagcatacatagctttgagaggagtctccagtgactttggtgttgtaacatccaaagacactcctggtatacatatatgagtcctggtttttactatacaactgttctgaaataagggcagttctgtgcaccaccagcgaataaaatggagagatatacaattatcaacgaagttggtgatggaacatttgggagtgtt

SEQ ID NO: 274646 - DNA, 409 bp, Zea mays
atcatgtgtatgatcaacaattagagaaggtttcatcaccttgctctgttgaagttatagaattttcagcaaggatatggagtacaccccctacacaacaagctcctatgtatctcacatctcgctgctcgaggaagttcttggctggaggttttgactttacggagacttcatgttcatctattttgtcaactgcacctgaggatcaaccaacacttagcgactgccttgaatggtcccatgttgtcagacattaggagatctataataacggtgggagatctatagtattatagcgttgtccatggaaggagaatcagaagccccggatcgccgccccagcctccatggaaggggagtcctcttgatccgtgtctgcgctgtccaggaaaggggagcgtctgacgcc

SEQ ID NO: 274647 - DNA, 739 bp, Zea mays
cccacgcgtccggtttggtttgtccgcgcaattttgggtgttggactggcctggtaaggactcaggagcatatgcaatcttctttgtctgaactagaaactttcacgcgccaacaaaacggaacgatttggtagtcctctcctcttcgttgaattcattcagagttagagaccataacagaaaacagggcgtcagttctgtgattctagttagctgctgtttaaaattagttggagatataggctattagctgtttttaggtagagacatctaatatctctagctaataggcttaactgcttgtttctttctcctcctgcgtttcccaattctaatattgtgcatccagctcatcaaagttgtgctcgctgtggtctgcgggagctttctccatttgcatccaaattaatgccttgatgttactaccttctacgtttacattacagtactttgggtgctgctgctttgacccatcctcggctttgtatcctcctcctgtcctccatatcgcttttgccgaaatgacgatgacgacggggctatgtgcatacaaaataaacatgttttaagatggggaaaaaagctatagatacctagccttgagggctagtttggcaacaccattttctcaaaggaaataaactaatttcttttaagaaaatgaaaattatttggaaagacgaggatgtcaaagtagccctaaatattagattcctccgctggcactggcaggcagcta

SEQ ID NO: 274648 - DNA, 821 bp, Zea mays
tgaatgcaaaaattcaggtccgtggattcctcaagtacttcgggatcagcttcctgtggagcttcttccagtggttctacaccgccggcgaccactgcggattcgcccagttccctactttcgggctccaggcttttaaccagacgttttccttcgacttcagcctgacgtacgttggtgctgggatgatctgctcgcacctcgtcaacctctcgttgctgttcggtgccgtcgtttcctggggcgtcatgtggccactcatcggcaagcagaagggcaactggtatccggcagacgcatctcagaatagcatgacaggcatctacgggtacaaggccttcctttgcattgcccttctcgtgggagacggcctctacaacttcgtcaaagtcatagctatcactgtcaagaacatacgcgagagatcacgtcgcaagaacctgaacagagtggcggacgcggacacgatggcgctggacgacatgcagcgcgacgaggtgttcaacagggacaacatcccgacgtggctgtcctacgcggggtacgccgcgctgagcctgatcgcggtgatcgccatcccgatcatgttccgggaggtgaggtggtactacgtggtggtggcgtacgcgctggcgccggcgctggggttctgcaacgcgtacgggaccgggctgacggacatgaacatggggtacaactacgggaagatcgcgctgttcgtgctggcggcgtgggcggggaaggacagcggcgtggtggccgggctggtggggtgcgggctggtgaagcagctggtgctcgtgtcggccggactgatgcac

SEQ ID NO: 274649 - DNA, 497 bp, Zea mays
gtcacaccaaacacccagtggttcaggctggccaaagttatgagttatctgccctgtcctcccaaactaatctagtcccaggaaactaatttcaacacacaactggtcggcggtgcgttgcgttggtggccgccggcgacgatgtcgtcgtccgcgggcgacaagaggaagaagacggcgtgcgtgaccggagggaacgggtacatcggctccgcgctcatcaagatgctgctggaggacggatacgccgtcaagacgacggtcaggaaccccgacgacatggacaagaactcccacctcaagggcctgcagcagctcgggccgctgacggttctccgcgccgacatggacgaggagggcagcttcgacgacgccgtcgccggctgcgactacgccttcctcgtcgccgccccggtgaacctctcggcacaggatccagagaatgagcagatcgagccgtccgtccgaggcacgctgaacgcgatgcggtcgtgcgc

SEQ ID NO: 274650 - DNA, 595 bp, Zea mays
  unsure (1)..(595): unsure at all n locations
atgatccgatcaccgcagcacatgatacacctgagggagttgctgagacaaatgatgacagcatagacatggtggctatacagacactggaaacatttcctgaggaaggacagcagcatcaaatgaaagctttgaacgttgaatcaacgaatggtttggatcatctcatgaaccccagtaacccgaattatttgagaaaccacaacatggatgttgtctcatgcgattccttcacagagaaccagctcctgcttgcagagatgttgctgaaggatccctacctactcgaaaccacgaaggcgatcaccgggttccacgtcccagccagcgcagctcaggttaacacggggaagtggctagacgaaggcaacagggttctttcagacatcgggcgcgaagtgatcagaaggaaaggcaagcgaatggaggcgatggtcgatgtcagcgcgacacgtgccgctaacctgaagctgcggactctggacgatctggtcagggaactggacagcgacatccagtctctccacgtcncgaggaaaattcagcaacggggggatgaccacagcacagctgagaacctgaggatggtcctccg

SEQ ID NO: 274651 - DNA, 432 bp, Zea mays
  unsure (1)..(432): unsure at all n locations
cccacgcgtccgagacctaccacagggctgggccaaccagtcccgatcgatcagccagcatggcgtcctcctccaaacggtcgctgccatgcgtgctcctcctcctcctcgctgtcttccaccacggctgctcgtcggcgagggcccacagacgcgccggcgacatggaggggagcatgagcaccgacgacagctcgatgatagagcggttccagcggtggaaggcggcgtacaacaagtcctacgccacggtcgccgaggagcggcggcggttccgggtgtacgcgcgcaacatggcgtacatcgaggccaccaacgccgaggccgaggcggcggggctcacgtacgagctcggcgagacggcctacaccgaccttcacaaccangagtttcatggcatgtacacggcgcccgcgccggcgcagctgcccg

SEQ ID NO: 274652 - DNA, 608 bp, Zea mays
tcgttcaccacggacgcttgcaacagggccaagctctcccacaacgcggtcagcatcgccgggctccggcgcgtggccacccggagcgaggcgtcgctggccaacgccgtggcggggcagcccgtggccgtgtccattgaggccggcggcgacaacttccagcactacaagaagggagtgtacaacgggccctgcgggaccaacctcaaccacggcgtcaccgtcgtcggctacggccaggaggcggccggcggcgacaggtactggatcgtcaagaactcgtgggggcaggggtggggcgacgacggatacatcaggatgaagaaagacgtcgccggcaagccggaggggctctgcggcatcgccatccgcccgtcctatccactaatgtgacatggtgtggtgtacatctgttttcgttttaattatcattttattttattaaacaataaataagtagtcaacatatggatcgactcaaacttttgcagttacgtgtaccagtacacttgttgtaaataataatccatggcatctcgcgtgtaaactttattctggtgcgaaaacgacttctgcaaatgaaggtttgtacgtgtacaattttgtcg

SEQ ID NO: 274653 - DNA, 847 bp, Zea mays
agcccacgcgtccgcccacgcgtccgcggacgcgtgggcgcgcccccgctccggaactacttcctcggtgatcgccacaaccggttcctctgcccgcgccgcacgcccgtcaggcaccgcgcctcggacgccgacagggtcgcgtgcctcgcgtgtgatctcgacgagatctactccgcggccttcaacggggaccgcacgccatacagccccgccaagtttctatatagttggtggcagcatgcatcaaaccttgcaagctacgagcaacaggatgctcatgaattctttatttccatccttgatcatatccatgaaaatataaaggatgatcaacaaaagtcatatgcccaaggccatggggattgttgcattgctcacagagtgttttctggtatcctgaggtcagatgtcacctgcacaagctgtgggttcacatccacaacttttgagccctgtatggacatttccttagacatggatgcaggagataacagttcttttggtgttgcaaacacaaagtcgcatgtgcgcaatggagagcgaggcttggctggcgtgaattccaaggtattaactctaatgaggtgtttggagaggtttacaaggtctgagagacttgatgccgagcagaagttcttctgtgaacactgcaacgagaggcaagagtccctgaagcaaatgtccattcgcaggctttcattagtttcctgctttcacataaagagatttgagcattcgtcagtcaaaaaggtgtcgaggaaagtcgatcactgtttgcagtttcccttttcccttgacatggcaccttacctgtcgtcatctattctcaggagtagatatggta

SEQ ID NO: 274654 - DNA, 440 bp, Zea mays
  unsure (1)..(440): unsure at all n locations
gctgtgagcaagcttataggctctcctccggggtacatgggatttggtgaaggtggaactttgactgaagcagtccggagaacaccattcactgtagtcttgcttgatgaaatagagaaagctcatccagatattttcaacattcttctccaagtatttgaagatggacacctgacagactcacaaggacgcagagtttccttcaaaaatacgttgattgtcatgacatcaaatgttggttcaacatcaatctcaagcggaaggaggagtataggtttctcaacacaaagggatacagaggagaccacctatgctgcgatgaaatcacttgtgatggaagagctgaaggcattttttcggcctgaattgctcaatagattggatgaagtggttgtattccaccctcttgaaaaganccagatgatggctattctcaacct

SEQ ID NO: 274655 - DNA, 390 bp, Zea mays
acgcaaccctgatgtatgggacgaccctcttcgcttcgaccccgaacgccacatccctttgagccccgagatggaggtctcactcgttgagcgtgatctacggtttatctccttcagcactggtcgtcgcggctgcatcgctgcagctcttggcactgatatgaccatcatgctcttcgctaggctcctgcaggggttctcttggagcaagatgaccggggtggcggccatcgacctttagcgagtccaggcacaacactttcatggcacggccactcgtgctacaggctaagccacggcttccagcgcacctctaccccgggatcttgctttgtaagtagtcccaaataacggctgagcatgtagaaaatttcaccacttatacatgct

SEQ ID NO: 274656 - DNA, 812 bp, Zea mays
caccaccaccactgaacccgctgcttcccctcctccacacctctcggtttcgggaaacctctcccccgttcccctcgaagcctacgggctcggggggcttcgatcgaatcgaatcggatcggatcggaagcatggagatctcgctcgaggcgtcgtgggtgggcgtgcagcggcacgggcaggacctggcggaccgcctcgcgcagggcttctcggggctcctcctccacgcgcagccgccgcagctgcccccatggtcgccggcggcgctgttgccgcccaagctcgtcatccccttcgacctcgacctccccgttgtccccttcgtcgccgggatgcgccgcggggtcgggaccgtggacctccccgccgtggccgtctcgtcgctcgtcgagatcggcggcaggctcgggcaggcggggtccgagctcggtgcggcggttcagcatctcgcgcgccaggtgcctgtgcctgggcccttccggaaatgggaagccgcacagccgccgaccgtggtgacgggggaatgttgcgctcgctgtggcgacggattgggtccacgaacgtcgctttggaaagggctgtagacatagggtacctcgaggtggcagcggctgctgctgcggcggccactggaagtgccactgcaggtagtgttggcgcggttggggtcatggacgacgattgactgtatgatgaggaagacggatttgaatggcaaattgggacattggagatcgttaagatggctaaggacactgtcaatctcttagcaacctgacaacaccagtcaccttgaatttgagagattc

SEQ ID NO: 274657 - DNA, 1502 bp, Zea mays
gaaacttccttgtaaaggtgaatgcaaatattgggaattcagctgttgtgagctccattgaggaggaagttcacaagctccagtgggccacgatgtggggagctgatactgtcatggacctttcaacagggcgacatatccatgagacgcgggaatggattattcgcaactctccggttcctattgggactgttcctatttaccaagcacttgagaaagtaaatggtattgctgaaaatctgagctgggaaatttttagggataccttgattgaacaagctgagcagggcgttgattacttcacaatccatgctggtgtcctgcttcgttacattcctcttacagcaaagagaatgacgggcatagtttcacgtggtggctcaatccatgcaaaatggtgcttaacttatcacaaggagaactttgcatatgaacattgggatgacattcttgacatatgcaatcagtatgatgtggcattatcaattggtgatggtttgaggcctggttccatttatgatgcaaatgatagtgcacagtttgcagaactgctgactcaaggtgaactaacacgtcgagcatgggcgaaagatgtgcaggtaatgaatgaaggcccgggtcacatcccaatgcataaaattcctgaaaacatggagaaacagttggagtggtgtaatgaagcgcctttctatacattgggtcctttgacaactgatattgcacctggttatgatcacatcacttcagccattggtgctgccaacattggagctcttggcactgcacttctttgctatgtaacaccaaaggagcaccttgggttgcccaatcgtgatgatgtcaagactggtgtaatatcctacaaaatttctgctcatgctgctgatttggcgaagggtcatccctatgcacaagcttgggatgatgcacttagcaaggcaaggtttgagtttagatggcttgaccaatttgctttatctctggatccagtaactgctatggctttccatgatgaaacattgccctctgagggtgccaaagtggcacatttctgctcaatgtgtgggcccaagttttgttcaatgaaaatcacggaggatatcaggaagtatgctgatgaaaatggttatggaacagtagaggaagctgtgatacaaggaatgaatgctatgagtgctgaatttttggctgcaaggaaaacaattagtggggaacaacatggtgaagcaggaggggagatctatgtaccagaaagctatgcagctcagaaataaggtttcctcggagccatccattctaaatgaggctaaggcatcagcagctgttctggctagtggctaaggcatcagcagctgttctaccatcttatctaatgagatggggtgcctgtgttctcaacagtctgagagcctcttagcctggactgttgtgagatgggctgagaaagtccctttgaacctgaacaggataatgcctgcgaatggagtgtgcaatctattttc

SEQ ID NO: 274658 - DNA, 342 bp, Zea mays
catggtgaagcaggaggggagatctatgtaccagaaagctatgcagctcagaaataaggtttcctcggagccatccatgccaaatgaggctaaggcatcagcagctgttctggctagtggctaaggcatcagcagctgttctaccatcttatctaatgagatggtaagcagtatgtgaataaagctggtgttgcttaccttcagtttgtgaatgccattatgtactgtaataaaaaactctgtattgtactccctagcattatcattatgcttttgtcttctttgtatcacaatgggattgttagtgatgaaaattgcaccaggggtgcctgtgttctcccc

SEQ ID NO: 274659 - DNA, 431 bp, Zea mays
acccacgcgtccgctagaaggtaacttgtggaaggaactgtgggaggctgcaaaacctatacctgctgttgaacagactcctatatatgatgaagatttagctgtggagagcatctttgatgcgttggaggttattgagccatcaaaactgtttgagcagctacttggcgtcattctttctgtatgctttgtggcagctgaatcagttttagcagcagatagcaatctgtcaaaattattctacgattgcaaggactacataattggcgtttaccacaatgacatgtcaaaagatgagctagatgagatgtacaaggtgtacgagacgatggaagccatagtaacccaccctgaagaagctctccagatcatggagcaacctgatgagaagtctgttgacaataaaaaccgcttcacgctgaagctcaact

SEQ ID NO: 274660 - DNA, 788 bp, Zea mays
ctcgccatcgcggcgtccctcgagagtcgaccacctcgacggccgaccaatatagcaacctatacagggcattctcatctcatggcgacgacggagacgatggagatgggcatgggcgtcgtcgtcgacggcgtcagtagcaacggatcaggcggctgcggcgggctggtggtgacggagctgagccacatcaaggagctggtgaggcagctggaggtgcacctcggcggctccccggacctgtgcaagcacctggcctcgcagatcttctccctcaccgagcgctccatcggcctcatcacctcctcctccagctccagcggcctcgacggcgcccgccggaagcgctccgcgggcgacgccggcctcgcctcgccgctctcggccacgcccaccagcggcgtcaccgacgggccgttcaagaacaccaagaagaggaaggcgatggaacagcggaggcagagggtgagctcggccggcggcgagaacccggtcgacgacggccgtagctggaggaagtacggccagaaggagattctcggagccaagcacccaaggggctactaccgctgctcgcaccgctactcgcaggggtgccaggcgacgaagcaggtgcagcgcaccgacgaggacccgacgctgtacgacgtcatctaccacggcgaacacacctgcgccccccacaggccggcggcggcggagcacaacccggacgcgcgcggccacctgcagaccctgagcgccggcctcacggtgaagaccgagggactgccggacccgccgcgggg

SEQ ID NO: 274661 - DNA, 796 bp, Zea mays
tttgtcggtcgatcgatcgatggccagcgttatcgacggcaatggaggcagccggctggtggtgacggagctgggccacctcaaggagctggcgatgcagctggaggggcacctcggcggctcctcgccggacctctgcaagcacctcgcctcgcagatctcctccatcaccgaccgctccatcagcctgctcatcaccgccacctcatcaagcccccacggcggcgcctctgacgcgccgcccttcatcagggctactaccaagaaaaggaagaggatggacaagaagaggcatgacgtgagggtgggctcggccggaggcggcggcggacgaccatccggccgacgacggctacagctggaggaagtacggccagaaggagatccttggagccaagcacccaaggggctactaccgctgcacgcacaagagctctcagggatgtgcggcgacgaagcaagtgcagcgcaccgacgaggacccggccttcttcgacgtcgtctacctcggcgaccacacctgcgttcagagccagagggcggcagcgacggcgggtcgtcaggctgccgcggacgcgcaggcgccggtgtacgacgccaacctcatggtgaagaccgacgggccggccttggagccagagcagcagccgcggggctgggacgacgcgcccacgccctttcgcttctcctccacgccggcgtgccttgtgcaggagcgcagccccttctccgcgccgtccacgtccgagaactggggcgtgtccccggcgacctcggactccaaccacgtcgtctc

SEQ ID NO: 274662 - DNA, 666 bp, Zea mays
tctcgatcaaacagcttctctgatctcgctcagaagcgaggacatcagacattattgcaattgtatttgcacagcagcgagatctcgctcagaagagactctgaagagataacgagctgcgcttcttcgtcctcgatcaactagcttctctggtcgcttccatatggagagagctgcgtcaagctgcgctagcctcctagcacaaaggaggtgctactccgtggccgcggtcgtggtgaagggatgcgggcggaaggccgtggagaaggtggccaagcgcatcatgggcaaggaggtgaacaccgcggctgcctccggggagaagacgccgtgggtgccggacccggtcaccggctactaccgcccggcgggtggcgccaaggaggtggacgcggcggagcttcgcgccaggctgctcaccaagaggatcgccaactaaatcaatctagcagcagagcagtgcggctgagattatttagcgccagttgatctcttgggcctagagcatgacggtgctgtaacttttgaggcataatatatatagatagatagatgggaagagctcgaacgtatctccgtttctagaaagaatggcgcaattcttgctttgctttttaacgagtcaatttgtcttgactttaccatattgtatacgaaaatgtacta

SEQ ID NO: 274663 - DNA, 522 bp, Zea mays
aggccgccggcggcacggcgaagcacacccgcacggtaaccaacgtcgggcagcccgggacgtacaaggtggccgcgagcgccgccgccgccggcaccccggtgacggtgaccgtggagccgtcgacgctgagcttcagcagggccggcgagaagcagagctacacggtgagcttcacggcgggcgggatgccgtcgggcaccaacgggttcgggcggctcgtctggtccagcgaccaccacgtggtcgccagcccgatcgcggcgacgtggacctaatggctagcggcggccgtaccgtagcaatagcgagataaaatcccgattgggggacggcaatggcgagcgcgcgccattctcgaatgcgagagagatggcggatatcgtcgaggatgtgctgttgtattgtgtgcatgagtccgctccggtgtgtaagctgccggtgtagtgtaatctatctgtagctgacccgattgtagcgatgcagcaattaaatctcaccagggttgcctccttgaccccc

SEQ ID NO: 274664 - DNA, 503 bp, Zea mays
ggcccggccggactgggccgaccgacgcgtgcgtccacgcggcgccaggcagacccgcaggtcgcagccacaacccaagcgcagcgctctgcctgcctccgctccggctcagctcccgccctgcctccgccttccattccaccgcgcggcgctgccgagtgccgacgtcgtccccgccggagtttctggtttctgggttggatctctcggagtcggagcgagcgaggatgggcggcggcaacggtgaaaccacccagctgggggagccactgctggcgaagaaggcgaaggcgtatcgccctaggtgccccggctgccgggtggaccgcctcaacgcggagcgggagggtgtcttccctctcaaggacctcttcctcatctggctcgtcaccatcacctgcaccctgccgatccagtctctgttccccttcttgtatttcatgataagggatctgcatatggctaaacaaacacaagacattggattttatgctgggttttgt

SEQ ID NO: 274665 - DNA, 533 bp, Zea mays
aggacagcggctgggcctcgccagggcgatcggcgtcagctacttcaccaccaggcacctcgacggggtcctggccgtcgccgcggtcccgcccgcggtgaaccaggtggagctgaacccggcgtggcagcagcggacgctccgggcgtactgcgccgaccggggcgtccacgtcgccgcctactcgccgctgggagggcagaactgggacgggcggggcaacgccgtgctcgactcggaggtgctcgcggagatagccagggcgagggggaagaccgtggcacaggtggcgctgcgatggatacatgagcagggagtgacgtgcatcgtcaagagctacaacagggagaggctgaagcagaacctcgagatattcgactgggagctgaccgatgacgaccggctcaagatcagccacatcccgcagaggaaggttgtcgaggcgagcggcttgttctcgcaggagggtgagttcacctctgttgatcccgcggaactgaatattgtggaggaataggaactggactgcaaaa

SEQ ID NO: 274666 - DNA, 990 bp, Zea mays
  unsure (1)..(990): unsure at all n locations
cggacgcgtgggcggacgcgtgggctcccgtcttcttcctcgaccgctaaccttaccggtccccaaatgtcgcctctcgtgctgctgctcctcgcgcacctactcgccacggccactgcagcgggagcagcgcccaccagggacgacgggcctcctgctccgtcgtcgtcgtccccgcgggtgccggcgacgacgccgccgtggccggaccagttccacgcggtggtggtgacgaacctgagcgcgcgcggcggcgggctgcagctgatcgacctgtactacgactggccgcgagggcgcgacctgaacatcgtccgcgaccagctgtccggcgagcggcgctggagctggaacgtggagtggagcaacggcaccgccttcctgttcgactccgcgtcctgccgcaccttccagttcgccgtgggcctcctgccgcccgactggaaggcccgcggcgccgcctacctgnggcgcgaccgcgtcgacggcttcgactgccacgtctggtccaacttcgtcttcgcccgctactacgaggacgtcgccaccggacgccccgtcagctggaacttcaatgggctgcagcggcatgtgctgagcttcgaggcagggggcagtgctgctggactcctccaagtggcaggcgccggcttactgcttcaccaacaccaatggcagcagtgccgacgccgccgcttcgtcttcctgagatcacgtcgctgggcctccggagtccgggctccagcctgcagctggacgctgcatgtcatttggcagtcggctctcatcttgatggttgactcaggagagccttttactattagtcagtaccgattctcgcgtcgcgtgggctagaatccgtgcgatgccacggaacataaattgacgagccttcaatagcgcgacggacgacgtgagtataatggtgggattgtttagtggtgctattaagaatcaactcaataatcataatacatattgaatcctgtc

SEQ ID NO: 274667 - DNA, 640 bp, Zea mays
cggacgcgtgggtctggattcatggctagatacagaagcgatcttcagggagagctttcgtcactggacgacagcatggaggatccaaatggatacttgcgctttgaagtgggcgggattgaagagctcgagaactatttcatattcaatgatcggcatagaggaatgaggatggatatcgacggcatgtcctacgaagagttgcttgctttgggggagcgaattggtaccgtaaacacaggtctttcagacgacgcgttatccgcgtgcctgaacaggaggctctacatgcccacagcttcaggctctcatgaagattgtgaaagaaaatgcagcgtatgccaggaggagtatttagcaggcgaggaggtgggcgagatggcatgtaaacactgctaccccctttcctgcatagatcactggcttcggcagaagaactggtgtcctatctgcaaatctgtcgccctgaaaatcaactagcaacgtgtttcatgtttcttcataaatgaagtgtatagattcttcatctcctgtattccttccccaccccactccttttcccttttgatttttttttctttctttctttttcttttactcaaagcactcatttgttattatccctttaaatccgcaccgg

SEQ ID NO: 274668 - DNA, 534 bp, Zea mays
gagcgatatatattatccattacagtctagtgatgtgccaagcaattcccgtgttacatttgcgttggaccataactaccgatcacatatcgagtatcgttggggaggagaaggtttaaggaagtacttagttaagtgggcttcttcagtagtagaaagaagggggagaaccgaaaagcaagtcatctttgaagattcggaacactcttcaacatattgtcttgcatttagagtggttaatccaagtcatttgcctcctttgaaggagctgccaaacgtgatgagaatccagtcactgcgttgtcatgcactgtataaccatggcgccaccaggttatctgtaattccaattcatgcatcgcgatctcaggctctaaggtatttgtctatttgctggggcatagagttgccagatgctgtggtcattgttggtgaaactggtgattctgattacgaagaactgtttggaggtcttcacaagacagtcatccttaagggtggattcaacactcctgccaataggattcatacggt

SEQ ID NO: 274669 - DNA, 472 bp, Zea mays
aggcgcgccacgctgagcgtcccggaccgcccactgttcggcctggggatgttcctcggtgccgtcgccgtgcggcacggcttcgacgccgggtgcaagcgcgccgagctgctcgccatcaacgacacgccgctgtaccacgacaagctcgttagattttacatgaggatgggtttcaaagcagttcatgaggttgatggatcatcaatcagtgatcttggtcacatgttggtgtggggaggtaggggtactagaatggatgctgatattgaagagcttcttattaagtggggaaacagattcagactacaagactaaaaggtggatggtaatactgatatgttttgtcgagacatgcagtttttgcagcatgccgcatacaaatcttgtttggatgcaataaggtacaagccttgcttcaacctttcttaacatacaatcactgtacatcaagatcttgctatgtttcagt

SEQ ID NO: 274670 - DNA, 398 bp, Zea mays
agcaggcgcctggtttccggtttccctgcagtgaaggaagaggaagcccaaccccaaggacagcagcgtacaatcaggctgatgcttgttggaactcagctgttgatgcttgtaagcctcgctgcctggctgcgtcctgtgctgtagatacgagatcccgcagcgttcgtttgttgcacttgcaccggcttgctgctagcttgcgacaggactaggaggagctagccgaggaggaggtgtgtgactccatggacgcgggccagcaggatgcgtgggactgggactgggaggtcctgctgccataccacaggagctcctcctccgtgcgccaccacggcagcaagaataaccttgacgattaagaagaaacagacgagcacgaactgctgcctccgcca

SEQ ID NO: 274671 - DNA, 596 bp, Zea mays
agggcacttgcagctcagggtgcatttcgtggatttctggatacgaggacaccattgtatgctgtgggtgctggcaacctattaaatgcattacttgatgtggtacttatttttccacttggtctaggagtaagtggtgctgcactggccaccgtgacctctgagtacttgacagcaatcatcctcctttggaagttgaatgatgaagtagatctattgtcaccgcgcgtccgtgaggatggagtcatccgctacctgaaatctggtggtctactaattggcaggacaattgcagtattcttgacactgacactagctacatccctggctgcaagggaagggcctgttccaatggcgggctatgagatatgcttgcaagtgtggttaacaatttctctgctcaatgatgctctagcccttgctggccaggctctacttgccagcgaatatgcaaaagggaattacaagcaagcccgcacggttttatacagagtcctgcatgttggtggtgtgactggttttgtccttgctgcttccttaattgttggatttgggatcttggccttgctgtttacagatgattcaaccattttaaa

SEQ ID NO: 274672 - DNA, 669 bp, Zea mays
agaaagaagctgctcagcgcaaagactcgagtgaaaatcaagggcagaatgatgctctagagctagacaacctccggatggagatgcaagctgacgaacgtccgttagaaccaggaaacaagagggacaggaagtggcagaaaaatgtatatggactcggatcagcttcgggacagaaggaaaccttgtccaggagagaaaatccacggtcagatagagggatggtccacagtaacgacagcaaaacaatttattacaggaagggtgggacggaagtcgataatgttgatgaccaccctttagaaaagcaagaccaccaggatacatcaagtgacggatctaaaaagagaagccgatctgtggacaacgcatctggtggcaacagaccatacttggatgagagcaagaagcgtaatctcagagaagatggaagatatgctcattatgaagactggagaactgaaaggaatacagcagcagacacgtctggatataaggcccaatcagaagagaagcctgtatggacaaacactcgaacaggatcaagggagcattcactggacaggcaaaggatagagtgtggtgacagctatcgtggaacctataacaatagacaaagacatgaatggccgcacgctagtggtaattcctcgagaattggttgggatg

SEQ ID NO: 274673 - DNA, 928 bp, Zea mays
agcccacgcgtccgcggacgcgtgggaggaggccgagggcgagggcggcgcaggggcactcacggggacgctggtcgcaggagcgctactggttggtttcgtaggggggtttggggcggccggatacgtgtacaaggaccagatcaacaccttcctcacgcagttctcagggttcattgacggctatggtccagccggatatgctctgttcgtacttgtatatgcaggattggaggttctcgctattcccgcaatacctttaaccatgtcagctggtctattatttggtagtgtgaccggtacaattattgtttcaatcagtggaacactagctgcagcggtggccttccttattgctagatacttcgccagagagagaattcttaaattggttgaaggaaataagaagtttctggcaattgataaggcaataggtgaaaatgggtttaaggttgttactttgctacgcttgagtcccctgttacctttctcccttgggaactatctatatggccttacttcagtgaagttcttgccgtatgtcttgggcagttggttgggaatgcttccaggttcatgggcttacgtcagtgccggtgcattcgggcgagctttaatccaagatgagtcggaaattggtttgggaggaaacgaacagctatggacactgggcgttggattattgtttacagccattgctgccgcttatgtaacgaggctcgcaaaggacgctgtaaaggagatcgacgactagaatggtaggattctctaggagaaagggccatctggatagtgtactagcctagcacattgtacatcactggcacctttggtgcgctcaaatcttatagaaagccagagcaattttatgaggtaatgtgatctctaaagcccgcgcgtccgcggacgcgtgggcggacgcgtgggt

SEQ ID NO: 274674 - DNA, 742 bp, Zea mays
  unsure (1)..(742): unsure at all n locations
ggaacgggggcngcttctctgtgtaagtggcacgattgtcaagggacgtgcccaacaatgtatctcattcgttctccagggtgtccgctgctgctgtggcttgaggagcggtacgagtggtgtacagccgccacccggggttccaggccggcacccggccgctgtcgcgctcgacaacccgttccccaccacgctccccgagaacctcttcggcgacaagtgggcgttcgtgcagctcccgttctccgctgtgagagaggaggtggagtcactggagaggaggtacgcattcggtgcggggctggatttggaactgctggggttcgagcttgatgacaccacgctagtccctggtgtcgccgtggaatcatctcgcgccaagcctctggccgcgtggatgaacggtctggagatctgcgcgatggaggcggacaccggcagggcgagcctgatcctgtcggcgggggtgtcgacgcggtacgtctactctgggtaccagaaaaccgccgcgtcgacgcaggaggccgaggcctgggaggcggcgaagaaggcctgcggcgggctccacttcctggccatccaggagaacctcaactccgacggctgcgtcggcttctggctcctgctggacctgcccccgccgcctgtatgatggatggtctattctacccggacgctacttcttctctgtcgtgcatttcgtcttgatagccactgtagcatcatcgacgtctagtgctag

SEQ ID NO: 274675 - DNA, 689 bp, Zea mays
gggaactgagcaggcccatggcacaggctatggtggtagtggttttaagtttaacgaggaagaggatgaagcacggaagaccgcgaagaaggctcaggcaagggaatatggatatgaggaggacaagtcagattcagattctgatgatgaagggggagtgcgtaaggcaggaggtgatctggcagcacaagctattgccaatgctcatgcagctgctgctttggttgcaaacaaggctgctaataatgcaaatcagcaaataccaggatctgcaacagcccccttgattcctttactcacagcatcaaaccaacaaaatgatgaggccactgctcgggcacttcaggctgcaatgaacttgcaacaaaatctggcaaggatacaggcccatgcagttccagaacactatgaggctgaacttgagattaatgatttcccacagaatgcccgttggagaatcactcacaaagagacactggcccctattcaggactggactggtgctgctatcactacgaggggaacatatattcctcaaggaaaaattgttggtgcaaatgagcgcaagctttacctgtttatcgagggcccgacagagtcttctgtgaagaaggcgaaagcagaattaaaacgtgtccctgaggattgtgcaaaccaggctctaaaatcttctgatctgctcaaactgg

SEQ ID NO: 274676 - DNA, 433 bp, Zea mays
agcgtcatcgtcgagtacgtcgacgagaccttccaccatggcgcggcgccggggatcctcccggccgacccctacgaccgcgccaccgcccgcttctgggctgacttcatcgacaacaagtgcttgaagccgatgtggctgtcgatgtggacggacggcgaggcgcaggcgcggttcgtcagggagacgaaggagagcctgggggtgctggacgcgcaactccaggggaagaggttcttcgccggcgacgcgctcggcttcgtcgacctcgccgcctgcacgctggctcactggctaggcgtgctggaggaagtggccggagtgcacctgatagcggcggacggcgagtaccccgctctgcgccgctgggccaaggagtacgtctccgatgaggtcgtgagccggtcgctgccggacagggacgagctcgtcg

SEQ ID NO: 274677 - DNA, 425 bp, Zea mays
cttctcccggcaactcctcatcccagaggccacaactgccaacaagccaatggctctcgtgcgccagcgccgccagctgccgcaccttaccctcccgctggaccacttcgccctgcgcgtgccaccgcagcctcagcccaccgccgcgccgtccacctccacgtccgacgcccgcctctccgactacgagaggctctccgttctcggccacggcaacggcggcaccgtgtacaaggcgcggcaccgccggtccgcgcagccggtcgcactcaagctattcgcggacggggacacctcggcggcgcgcgaggccgagatactgatgctcgccgcggacgcgccccacgtcgtgcgcctacacgcggtgatcccgtcggccgccggggaggctcccgcggcgctggcgctggagctcatgcccgggg

SEQ ID NO: 274678 - DNA, 683 bp, Zea mays
agcaacaatttgtctcttgtcaacattactgccgcttggcaagttcaaaagctgcaaaattttgtgtgcttcagtcacaatattctctattttctccaggattttactgagctccatttttgacaccctaagaggtgggccatttgaagtagcaccgtttacctgctagaagaagccatgtggccgtcaattggcaggggccaggcagggcatcctccgcccacccttctccggcgagaagcgtcgccaatgtgtgctggcctgctgggagtgggtgaaggtgtcggcaagaggcgaggacatcggaagcggctctcctcggagtcaacggcttgattgggcctactggatcccaaacaacatgggcctttgctcttggaaccatcagtagcgactagcgatagcgagtgcgaggcttccaccaccaccagtagcgagtgcgaggccgaccgtcaccgcgagcggcgccgaacgcggcaatcccccctcgatgacggtggctccaggccggggcgtcaactccaacggcagcggcgtgctcccaatcaggtcagccgtcagaaaacgcgtgaccgccgctgtgtcctggaatttctcgcgtatttcgtcctgtgttttttcttccattttgtgtacacaatttcctttttggtgataggtttggtcatttacttaggtaaagt

SEQ ID NO: 274679 - DNA, 555 bp, Zea mays
cggctcgagggctcctcctcagaaaaacacaagggaagacagctgcctacccaacctaccagccatggcgccaccttcttactccatagcccccgtccaaagcgagctgaacatgacgctgtacaacaaggaggtgtacggtgggcgggggaccaacggagtgaccactctagtgaaccgagggccaatcggcaccacctgggtcttctcgtggcctgtcaccgacgggcccgccggcgccgacgcgaacgtcgtcggccatcttcagggcaccggcgttcaagtcgccacttaccccgactacatgtggcactactcccttgggctggtgttcggccagggaagcaggttcaatgggtccacactacaaatacaagggacttccaaaataaatggcgagtggagcattgttggagggacaggagaacttgctatggcaaagggcacggtcagacgcacagaagtttcgtatacgggaaatataaggatttcagaactcaatatacatgtgctttacactccaatgtgacctatacagatgtcaagaacaagtat

SEQ ID NO: 274680 - DNA, 673 bp, Zea mays
acggacgcgtgggcggacgcgtgggcggacgcgtgggccgccgcggagcgtcccggtcgccgacgacgtgtacgtggcggtcggcagcggcggctccagcatggcggctctgtcctgggcgctgcgccgcctcgccaagccgcgcagcttcgtctacctcgtccacgtcttccccgtcgtcaccagcatacccaccccatgaatgatgcctaagagccaagcaagcccggagcaggtcgaaacgtacctgaaccaagagagatcgaagaggcgagacatgctgcagaggttcttggaccagtgccgcgagattcaggttaccgttgacgtctacctcatcgaaagtgatcagattgctaacgcgatcatcgagcttgttcctgttcctccgcataagtcaacgggtactaggcgtctcaaagtcaaatgtgcggaagctgaagaaaggaaccacgatagcaggacaggtacacaagggcgcacctctctactgcgaagtcaagatcgtctgcgacggcaaagaggtgacgactgttgacccaacgccaccgctgtcaccttcccctgttaacaacaacagcagcagcagcagatccaacaacccgacaccaccgtcgtctacgccgaatcatgatacaacagctgcaaacggtgacaggaaagacagagaaag

SEQ ID NO: 274681 - DNA, 427 bp, Zea mays
agcaggtgtcttggcctcttgatctaattattaatacagaggcactgaagaagtataatcaggtaatgggattcttactgaaggtcaaacgagcaaagttcgttttggatgaaacacgaaagtggatgtggaaggccagaggcaggaccacgcacaatttcaaacaacacctaatagtggcacagaagctcctccattttgtcgatgcatttcatcagtatgtcatggaccgagtttatcatagtgcatggactgagctttgtgatggcatgacggctgctaccacactggatgaggtcatggaagttcacgaggcatatctctcttctattcaacgacaatgctttgtggcctctgataagctgtgggccctcattggcagtcgagttaagactattcttggattggcactggacttccacaatgt

SEQ ID NO: 274682 - DNA, 485 bp, Zea mays
atccaattgagttaaagagattgcattttcaacaatgtgaacctgtagagccaccggcaaagcatccacgtgtggaacagttgccccccaataatatgcttttgcagagaagcatgagtagcactgcagaacgttctgcagaaatattgagaagtcctgtacgagctccactgggaattccattttgttcagcaagtgtgggtggtgcaaggaaatttccacctccactaattgttgcaggtgaggatcacttcaacagctgttctgagcatgatgggctgttcagcactgaactgctgcatagacggatggagaaaacagcagaaacgctgggtttagctggtatcacaatggatagtgctgagcttctgaatattgctctggacaagtacatgagaaacctgattaggtcatctgttgagttagtaggaggtagtgttcagagggatgcaaggaaagggacaccaacctacaagcagcaagcc

SEQ ID NO: 274683 - DNA, 515 bp, Zea mays
aggagctggagcgcggcaccggggggttcgacgacgcgcacctcgtcaacggcagcgtgtacaaggccaacatcgacggcctggtgttcgccgtgaagaagatgaagtgggacgcctgcgaggagctcaagatcctgcaaaaggttaaccacagcaacctggtgaagctggaggggttctgcatcgactcggcgacgggcgactgctacctggtgtacgaatacgtggagaacggatcgcttgacctgtggctgctggaccgcgaccacgcgcggcgcctgaactggcgcgcgcgcctccacatcgcgctggacctcgcccacggcctgcagtacatccacgagcacacctggccgcgcgtggtgcacaaggacatgaagagcagcaacgtcctcctggacgcccgcatgcgcgccaagatcgccaacttcggcctcgccaagacgggccacaacgccatcaccacgcacatcgtgggcacccaggggtacatcgcccccgagtacctcgccgac

SEQ ID NO: 274684 - DNA, 823 bp, Zea mays
  unsure (1)..(823): unsure at all n locations
tttctttcgtgcggcccaacgcttgagctngctgtggggcctgtcgagtctgctggcggtcgatacctccgcggccggaggcgatgggccaggacctcgacgagatccatccgagcgagctccagttcacctttgaggtcaagaaacaaagctcatgtgttgtccacctaatcaacaagaccaacgactatgttgctttcaagggtaaaacaacatctcctaaaagatactgtgttcgaccaaatactggggttatccttccaaggaaaacatgtgaattcacagttaccatgcaagcgctccgaactgctccaccagacatgcaattaaaggacaagtttttagtacagaccacagttgttccttatggcacatctgatgaagaactcgttcctgccgttttctccaaagaaactggcagatacatcgaggaaagcaaattgagagttgttcttgttagttcataccaatccctcgaagagcaacccactaatggaattcatgacactgagccagctgttgaagttcctttactgaaagagatgccaaatttagggagcgaagtaccagatgttgcaaaagaaattcctgcccctctggtacaaggtccagcaattgtgaccggaataccttcacctgtcaaagaggttccaggcctgagagaaattcctgtgccactgaacgaagcaccaactttattggcagaatttccttcccctcaaaaagatccctctgctattacagttgaacatgcctctaatgttacaattgagcatgcccctgctatttccattgaatccccacgttgaaacaaagtgttcca

SEQ ID NO: 274685 - DNA, 607 bp, Zea mays
acgcatcgaacacggtccgggagctggcagagccactcaaatccccttcctcttctctacacacacgaacccacgaacgcaggctcccgagaacggcagcccccattggatttggaagcttctccatgggacaccgagcctcgtagacgaagcagaggggaccagagaaaccgaggagcaagaagcagggagccatggcgttcctcctacccaagctcacaacgccgtcctgcaagttgcccccgagccccctcctcaagccccagctcgtcccgccgggccacggcggcggcaagattcaaggctcctccgtctccggctctggcgcggcgcaggtcgcggccccgggccacctcagcctcctgctcctgctcagcgcctcgcagcaggcggccggccccgcggccaagtccacggcgaccaagaaccgggccaagggcggcggggatccgcaaagggcggatttttacctcaacctcggcacggcggtgcgcacgctgcgggacgacctgcccgacgtcttcgtccgggaacccaactacgatatctaccgtgaagacatcacatttggggacccactaaacacttttcatgggattgacaacta

SEQ ID NO: 274686 - DNA, 580 bp, Zea mays
cccacagcgtccggagaagagcgccgtgaagaggaagaaagctgacgctgcggcgaggcacgcggcgctgctgctcatgatggggcacgatgggttcacctccccagaggtgtgcctgcattacctatttgcatcagggaatgtggattccgtggtgcttggagcggctctggttgaacttgatggcggggaggtagtcaggttgatgagatatctcaacaagtggattcggaagtactggagcttctcagaagcgcacacttgcccggaggctgtgggaaacctcagattggagcagtgtgacagcgtgccgtcgtttggagcagtggctagggcgctaggagtgctgctggataatcatttttcacatcttgtgttgaatgctgatgtgagggaggacttgagggctgcggacttgatggtgagggagctcgctgccgaagcagagtcttctgggccaatcctagacttgctgcataggtttcaactggataagtgagagattgatcttattctgtcggaactatttacttttgtacttccaaatgccgatgcatggaaatttttaactgttttattg

SEQ ID NO: 274687 - DNA, 624 bp, Zea mays
atcgttctgacctgcgcaaaaccccgccgctctcatcttgccaaaaccccaagaagccgcagggggacggaactccctccccagctttttccccagaggaagcaaccgcagaggaggagaagctgcgcagaaggggaagcggcggcggcggcggcggcggcgtgtaggctgcgcacagagagagagagagagagaggccggcagggagggagcgtaagctttttggcagtggtggttctggaatgcagcagcaacacctgatgcagatgaaccagaacatgatggggggctacacctctcctgccgccgtgaccaccgatctcatccagcagtacctggacgagaacaagcagctgatcctggccatcctcgacaaccagaacaatggcaaggcggaggagtgcgaacggcaccaagctaagctccagcacaacctcatgtacctggccgccatcgctgacagccagccgccacagaccgcgccactatcacagtacccgtccaacctgatgatgcaaccgggccctcggtacatgccaccgcagtccgggcagatgatgaacccgcagtcgctgatggccgcgccgtcctccatgatgtacgcgcaaccgttcctgtcgccgc

SEQ ID NO: 274688 - DNA, 790 bp, Zea mays
ctagttctagatcgcgagcagccgctcggacgccgaaaagagggggctcatcactccaggaaagtccgcgttgatcgagcccacgtcggggaacatgggcatcgggctggcgttcatggcggcgctcaaggggtacgagctcgtgctcaccatgccgtcctacaccagcctggagaggagggtgacgatgcgggcgttcggcgccaacctggtgctgaccgacccggccaaagggatgggcgggacggtgaggaaggcgacggagctgtacgagagacatcccagcgcgcacatgctccagcagttccagaaccctgccaacgtcaaggtgcactacgacacgacgggaccggagatctgggaggacacgcttggccaggtcgatatcttcgtcatggggatcgggagcggcggcaccgtcacgggagtcggcaagtacctcaaggagaaaaaccctaacgcaaagatctatggagttgaacctgccgaggcaaatgttctgaatggtggaaagccaggacctcacctcatcactggaaacggagtagggttcaagccagatattctggacatggacgtgatggaaaaggtgctcgaggtgaaaggtgaggacgccgtcaagatggctcgagagctggcagtcaaggagggtcttttggtcgggatatcatcgggagccaacaccgttgctgctctcgagctagccaagaggccggagaacaaggggaagctcatcgtgaccgttcttccgagccttggcgagcggtatctgtcgtccgcgctgttcgat

SEQ ID NO: 274689 - DNA, 685 bp, Zea mays
gggccggcccacgcgtccacgtaaagatagtggaggtggggcctcgggacggcctgcagaacgagaagggcaacgtcccggcgtccgtgaagatccagctgatacacaagctggtcggcgcgggcctgtcggttgtcgaggccaccagcttcgtctccccaaagtgggtgccgcagctagccgacgcagaggaggtgctgaagggtataaagcaggagccaggcgtgcggtacccggtgctaacacctaacctcagagggttcgaggctgccatcgcagccggcgcgaaggaaatcgcggtcttcgcgtccgcgtctgaatccttctccaggtccaacatcaactgcaccatcgaggagagccttgctcggtaccgcggcgtcacagcggctgccaagaaacacgggctaagcatccgggggtacgtgtcatgtgtgattgcttgccccgttggaggcgcaaccgatccggcgaaggtggcgtacgtagctaaggagctgtataccatgggctgctcggagatctcgctcggcgacacgaccggtgtcgggacaccaggtagcgtggttgctatgcttcaagctgtcatgtcgtttgtcccggtggacaagattgccgttcatttccacgatacgtacgggcaggcccttgccaacattctcgtctcccttcaaatggggatcaa

SEQ ID NO: 274690 - DNA, 1000 bp, Zea mays
  unsure (1)..(1000): unsure at all n locations
gctagtctgtattatgacctagctcgatgcctttgcagtggtggacggtgcaaagaagcacttctccaggttgagaagatatgcagaggttgcctacaaaccgctggttgttacctacacaggactcattcagacttgcatagacaatggtggcatggaagatgctaaatacatattcaaccacatgtgcgactactgttcacctaattctgttacttgcaacatcatgatgaagtcgtatattaggcatgggatgcttgaagacgcgaaagtcctgctccatgatattctgaattgcaggataaggagtaaagcggattctaatcaagtggcaaccgctgacaagtttactttcaatactttcatggaggcctgtgctgcagcaaaaaggtggaatgacttcgagtatgcgtttcgtgagatgttattgaatgggtaccatttcgatgagcgaagacaccttcggatggtacttgacgcttttaggcatgggaaggaacagctgttggatgatctatggcactacctgtgccgtcacagccgtgtcccgccctcccctgtcataatggaaagattctgcctaaaactgatgcagggagatacactggcggcgatctcctgcgtcagcagcttccatgagggcaagatatgcaacgtctcctccatgtcatggctcaatctgctgagccgcaatgcagataggctgaaggaggagcatgttaccaagttagctcatgaactcaacagcctcattagcttgaggagttcctctgatagcattagtcttagcctgtaccaaaaaattattagtagctgtacggcattcctctctggagccacagttgtagaaaaggcaccttctggccaataggtggtgttacagaaattataataaccacagttagtaaattctagtactccaaatcataatgaccacgactgatgaagtgtacccgccttcaacgtttggttatcggtgcaaaaaaaaaaaaaaaanaaa

SEQ ID NO: 274691 - DNA, 810 bp, Zea mays
ctcctggtgggcgtgaagagggcgatgacgttcgtgccccgccgccggaagaagacggcggcgttgccgtcgtcggcggccctgaagaccggctgggtcatgcacgagtaccgcctcgccgcgccgctgcacaagaacggctgcagcctggctcaggcgcaaggagagtgggtcgtctgccgcgtcttccagaagggcggcaacaggccgaggaggaggcagcgagaagcgtcgccgccgccgtccgctagcagcagctgcgtcacggatgcgtcgagctcggacctggacgaggtcagcagctagcttagctagctagctagcagaaccgaccgtacgtgccggctggccacaacatgcagtcaagaacgtacgtacgtatatgtataccgccaccagctcgtcgcgcgcgcagctgtgctgtgcatgccgtacgtgtgcggccggcctcgacctcgatctcgaagagaggatgtgatcaagctgagttacggataagggggaacaacccatccacacgcacttctcctccgacccaacattatttgttgttaactagtttttcttttctttatctctttctttcttttgcactctgtacgtgtaatgtaatgcagtgtaatttaattagtgagagaagcatgacgccctactaccggccggattattagttaacagcaaattaattactacgtacctagctactactcgcgtcatcagcttctactgtacttgaggtttcagaagccaatatgtatattgtcaaattcgtaaaaaaaaaaaaaaaaaaaaaaaaaaaaaaaataaaaa

SEQ ID NO: 274692 - DNA, 706 bp, Zea mays
atctacgtcaccccgataaagcgcttcctccaggcgctgtgggcggccggggcgctcggctccgtcgggacctacctcgtcgccgcccgcccgctggatgaggcccgcgtgcagtacgtgctggaccaccccgccgcgctctggttcgtcggccccacgttcgccgcgctcactggcctcgtcttcaaagaaggtctctgctatgggaaactggaagctggcatcttgacgtttcttatccctgggcttcttcttgggcatttgtctggtttaatggataacagcacaaaggcaggtcttttaggactgtggatgcttcttttcacaatcttcgccgctagaaaattccagcagcccatcaaggatgacgttggagacaaatctgttttcatgttcaacgctctccccgaagaggaaaagaaggcttggatccagaaactcgagaggcaaaagggacaagagttgtttgagtagaaaagagtagcttgtcttggtgcagccaatagtgcgtccgtgaatgtttgtagctcatgtatatgattatggctccagaaaattgaccaaagacatgaagacgtgaacacgttccaatagagatgtaattacaaatctgttagatcacaggtaagatgtaactaaataaagcagttttgttgttatagtcgttgacaataaaaaaaaaaaaaaaaagaaaaaaaaaacaaca

SEQ ID NO: 274693 - DNA, 583 bp, Zea mays
tttttaatcacaggcatttgtgaagatcgcacaagcagtttcgtcacggccggatgttgttccacctgcataccttgatgagctctcactacttcaggaccgcatagcaccattttcaaacgatgttgcttttaatattatagagaaagagcttgggcttccactggatatggttttctctgagataacaccagagcctgttgctgctgcatctcttgggcaggtttaccaggctaggctccgctccagtgggaagattgttgctgtcaaagtacaaagacctggagttcaagcagcaatttcattagacatatatatcttgaggttcctagctagtcttgcaaggaaggctgccaagttgaacacagaccttccagctgtgcttgacgaatgggcatcaagcctattccgggagatggattatagagaagaagcaagaaatggacttaagttcagagaattgtttgggaaatttagagatgtgtcggttcctgaaatgtatctggaccagacaagaaggcgagtccttatcatggaatggatcgagggggaaaagttatcagaagtcagagatcaatatttg

SEQ ID NO: 274694 - DNA, 1354 bp, Zea mays
attcggtggcgcccgcccggagctcggatgccgcggcgtcggcgtcgtggatcgacaggaagctgcttgttgatccaaagatgctgttcgttggggacaagattggggagggagctcatggcaaggtctacaaggggaagtacggtgatcaaattgtagcgataaaggttcttaaccgtggcagcacccctgaagaaaaagcaacacttgaagcccgtttcatccgagaagtaaatatgatgtgtaaagtgaaacatgagaatcttgtcaagtttattggagcttgcaaagaaccattgatggtgatcgttagtgagctactaccagggatgtcactgaaaagttacctgcatagcatacggcctagccaactagatacacacactgcaataagctatgcactggacatagctcatgcaatggactgtttacatgccaatggcataatacatagagacctgaaacctgataatttattgcttacagcaaatcgcaagaagctgaaacttactgattttggacttgcacgtgaagaaactgtgactgaaatgatgactgctgaaactgggacttaccgatggatggccccagagctatacagcacagtcacacttcgacgtggtgagaaaaagcattacacaaataaagtggatgtgtatagctttggcattgttttgtgggaattattgaccaatagaatgccatttgaaggcatgtcgaatctacaagctgcatatgctgctgcttttcagcaaaagcgcccagctctccctgaggagaccccccaggagcttgtgttcatagtacaatcatgctgggtcgaggatcctgccatgcgacccagtttcagccagatcatccgaatgcttgaaactttcattatgacaatacatccacctccgctttcagagccaaacgaaggcgaggaatcggaagaaacgaggtcgtcactgagcagtaggagctcctctggctcctcgctcgtttctcgcgcgacaagcaagctctcggtcgtccgccacctcttcgtctcaaagaagacaggcaatgggaaggcgtgatgcgccatgccctgagacgcttttcttcggtgctgtaaagatgctagcctaggtgatgcgcaatacaagagggaacttgttcagtgtagagtagctgttgtattgatgttacaaaaggggaaagttgaagtgcagcttttgcaagctatgtatagctcgcagctcctttactttactgaaagttgcatatgtagccgtccaaagaaccgagatatatatgaaatcaaacatccgactttaattcgatgaacagagatatatattacttcaaaacggctcgagtcggctcgaga

SEQ ID NO: 274695 - DNA, 562 bp, Zea mays
aggcacgtcggcggctacgacgtgccgcgcggcacgatgctgctggtcaacgtgcacgcggtctacagggactccgcggtgtgggaggacccggacaggttcgtgccggagcggttcgagggcgccggcggcaaggccgaggggcgcctgctgatgccgttcgggatggggcggcgcaagtgccccggggagacgctcgcgctgcggaccgtcgggctggtgctcgccacgctgctccagtgcttcgactgggacacggttgatggagctcaggttgacatgaaggctagcggcgggctgaccatgccccgggccgtcccgttggaggccatgtgcaggccgcgtacagctatgcgtggtgttcttaagaggctctgaaaacctcatggatcgaattgctggcatcgtctgaagggtgtatgacgtagcttccgagttccgagcatatatattcacttgccttgtactagttgattttcgccgagtgtatggaatggattttctttttttttcttgcaatggatgtgaattttgtttttctcgacgttacaagaagtgaatc

SEQ ID NO: 274696 - DNA, 265 bp, Zea mays
acggcatcagcaggcgcaagtgccccgtgggagacgctcgcgctgcggaccgtcgggctggtgcttgccacgctgctccagtgcttcgactgggacacggttgatggagctcaggttgacatgacggagagcggcgggctgaccatgccccgggccgtcccgttggaggccatgtgcaagcctcgtgcagctatgtgcgatgttcttcgggagctctaatattctggcacatcctaggttctcgctctataggtgaaagtttcat

SEQ ID NO: 274697 - DNA, 247 bp, Zea mays
ggttgatggagctcaggttgacatgaaggctagcggcgggctgaccatgccccgggccgtcccgttggaggccatgtgcaggccgcgtacagctatgcgtgatgttcttaagaggctctgaaaacctcatggatcgaattgctggcatcggctgaagggtgtatgactatgacgtagcttccaagttccgagcatatatattcgtattgtgggttgccttgtactaaaaaaaaaaaacaaagtaaaa

SEQ ID NO: 274698 - DNA, 711 bp, Zea mays
tcgtaaccttgaccaaatcgcgaggttaagccgcatcggcggcgcgatggcgccgtccttgggcgtctcggcgaggcatgggcatgcccacgctgtgccccaccggagaggtcgcaggcagcgtgtggtcgtcgccagttccggtggcgccacgtccgccgccgaagctggtgaccttcctcgggaagggcggctccggcaagactaccgcggccaccatcgccgctcagtattatgcaagtgaaggcttcaagacatgcctggttgttcagtcccaagatcctactgcggagcacttgatgggcagtaaaattgggaattctctgaccgagtgtgtggccaatctctcggccataaagctggagactggtaagttgctgcttgaacccctagaccgactgaagaaggtagacgcccaggtcaattttactcaaggaatccttgaagggattgtaggagaggagcttggagttttacctggaatggattcgatctgtttagtcttagctcttcagaagctccttaatttcttttcatctggaaggagtaattcacattcagaatttgatgtgatcgtgtatgattgcaacaatacagaggaaattccaccgctgatacgtgctgctgaccgggcaagatcttacttgaggtatctgagggaccttgctgataagactgacatctgaagacttgcttcaccttcattactga

SEQ ID NO: 274699 - DNA, 557 bp, Zea mays
gaggcacgcgtctgcacacgcgtccgcccacgcgtccgctaaagcgagcggcggtcttgcaccaggagttgctattcccaacgttgctgctgctggggagcagggacagcatatcaaaagtaatatccgtgaccataacggcgcggtgaagggtgctgctccagctggtactggcccaagcaatgtgatcaacaacaacacagccagcatgccccccggcagaaacaacagcttcaagtcggtgagcagcagtccagctgctgctaccggtggcattgcggtgaactcgaaggtcgacgactccttccatcaactggaggacctcgacctcgacggcttgatcacaaacgaactgatggagagcgggttgttcggcgccggacaagggtggtgagcatgtcccaccacgcctcacactactatcgagttccttcaccgaaagcgccaagcaacaatataagctttgccatccttctctttctggagtttttgtgttgacagtttcagatgatcgtgccatatacaattatgtaaggtagcgagttggatttggctgg

SEQ ID NO: 274700 - DNA, 470 bp, Zea mays
atcgagagggaggcaccacgcaccatcttacattgcctgccgtaagcagatcgactactcagctcaaggttgaaggcatggctgcatccaaattctacgtcgccagctgcgccctcctcctaatcggcgtggtgctgctggggcagcagggtatagatggcgccgtcgccctgcccccagttctgcctcgacgtggactacgtgacctgcccgtcctccggctccgagaaactcccggcgagctgcaactgctgcatgacgcccaaggctgcacgctccatctctccgatggcacgcagcagacctgcagctagctctgaaccaatgtgtgcgtgattcgatctggacattgaccaacctgctggttttcgcaaataaagctttcgcgcctgtatatggccatccgaataaatgtgtgatcgtctatatagaaacgtgacagactacatatatatacatatatagatata

SEQ ID NO: 274701 - DNA, 551 bp, Zea mays
cccacgcgtttctttcacgcgtccgggcgcggacactgccgctcgcgatatttgcgagagagagagagagagggcccgagagccgaggacgagtgcagtctggctggcgtgatgctgcttcggagcgcgtcctcgccgctgctcaactgcgggcgcgcgccggctgcggcggcgtcggtcgagcacctcgcggtggtttcgccgttgttgtcaccggcagtggcggcgcctaggcatgggccggtgctgtgccgcgccatgtccgagggggacctcgccgcgccgctcgtgcccaagaaggacgatggacacgggagggcgccgaggctgtccctgtccgcgtccttgtcctcgtccgcctccatcttcgtcgaggaggaggacggcgagggcgaggaggaggaggacctggtcgcggtcgcgggggccggcgtggacgtgccgctgccgctgcgtcggctgctgacgaacacggggctggacgtgtccgccgccgccgggctggggttccttgaaccagggcgtcgggggcagcggcgggggcgggaagg

SEQ ID NO: 274702 - DNA, 463 bp, Zea mays
gtcgcatggctccccacatcatggcagatcaatggaggaaagggtcagagtggtttgagcttaaccgcgagctggctgtccagatagtagcggactacaagtactactccatcttcaggaagcactgcaggccatcctgttatccagacgagcattacataccgacttatcttcatctgttccatgggccactcaacgccaacaggactatcacatgggttgattggtcaagaggaggcccgcacccagcaagttatggtgccacagacatcacagaagacttcatccaggccatcaggaataatggtacgcagtgcttttacaactcgaagcccacctctgtctgctacctcttcgcgaggaagttcgctcctaatgctttgccacggctgatgaacctcacctcgaccgtgctggacttctgagccgattctcaccatgcgggcgggcgggcgtcgttgtc

SEQ ID NO: 274703 - DNA, 539 bp, Zea mays
gggtcgagcccgcgtccgcatccacccttctctagttctctgatcctcagcacttagcatcaagcttagcacaccggcgagatggcctccacctccaccttcctgtccaccctcgccagcaggtccgcggcagccgatagcctgcgcagcgccgtgccgtccttcgccaagatcgtcaggttcttgcccgcgcaggcgcagatcagccgcaggcggcgcgcggcggtgctgcccacgccgagggcggcggtgtcgggcaccgagaaggcgccgtcgagcaagcacgagcgcgtggtcagggtgcacagcacccaggagttcgacgacgcgctcaaggccgccaagaaccggctggtggtggtggagttcgcggcgagcgacagcgaggacagcagccagatctacccgaccatggtgcagctcagccgcacctgcggcgacgtggacttcctgctggtcctgcctccacgacgagtcggaggccaccgaggagctgttccgccgggagggcgtcacgaaggtgccccacttcaacttct

SEQ ID NO: 274704 - DNA, 920 bp, Zea mays
ggctagttctagatcgcgagcggccgctcggatctagaactagaagagaaattcaaactgatgcatccgttcaaaatttagttgaaagaacagatcacaacttccaagatctagtttctttcaaacaacccccggcagatgataaaatagctcttattgacctaactactaacagggaattgccttctcagatggatctcgacatcactgatgcagagacaaaaaggtctaatgcggtctggaaaaatcttgagctcgcaaccatgaaattgtcccaagaactggcagagcaattgcgcctggttatggaaccaactcttgctagtaagcttcaaggggattatagaactggaaagagaataaacatgaagaaggttattccatatattgcgagtcatttccgcagggacaagatatggttgcgccgaactaagcctaataaacggaattaccaagtggttattgctgttgatgactctagaagtatgtctgagggcaaatgtggaaaatttgctatcgaggcattagttactgtgtgccgtgctatgtcacagcttgaggttggacaatttgcagttgcaagttttgggaagaaggggaacgttagtgtgctacacgattttgatcagatctttaatagtgaagctggagttaatgtgatctctagcttgtcgtttgagcaagataacaaaattgaggatgaaccggtgtctcatctcttgacacatctgaatgttatgcttgatactgccgttgcacgggcacgcaccccatcagggcaaaatcctctccagcaactgatactgataatatctgatggaaaattccatgaaaaggaaaacttgaggcgccatgttagagacgttctaaatcgaaagaggatggtcgcgtatgtgctcctggatagccccgaggattct

SEQ ID NO: 274705 - DNA, 462 bp, Zea mays
tcgaccgtggtccccacgcgtccgcccacgcgtccgctggactcgcctccacggctccaccatgtatcccaaggcggcagacgaaggtgcgcagccgctggccacgggcatccccttcagcggcggcggcggctactaccaggcgggcggcgcgatggcggcggcgttcgcggtgcaggcgcaggcgcccgtcgccgcctggtccaccgggctctgcaactgcttcgacgactgccacaactgctgcgtgacgtgcgtgtgcccgtgcatcacgttcgggcagaccgcggagatcatcgaccggggctccacgtcctgcggcaccagcggggcgctgtacgcgctcgtcatgctgctcaccggctgtcagtgcgtctactcctgcttctaccgcgccaagatgcgcgcgcagtacggcctccaggtgagcccctgctccgactgctgcgtgcactgctgctg

SEQ ID NO: 274706 - DNA, 454 bp, Zea mays
acgcgtccgcatggatggtggagcgcggcgcggggcatgcgtgcaagtgcaaccaatcgcctcgtcgtgtgcgctcgcctttgcttccctcggtaacgtgagtaacctcgttggctgatcaaggctttgacggcggcaccaacgttcttccctcgccgcctcgttgcgtccgcccgcccagcgccaactcctcgtactcgtacataaccacgcaccccaccgcgtacagcgctccctctcgcgccccgcggtgagctacccccgctcgcctttagctagccacccaccatggccctcccgccgtcctcctccccgtcgtcgctctccgccgcgtcagcgcagcccacgcccctggcacctgcacctcccgaccaaggcgcccggccgcctcccgctgctccccttctcgcgcgccgcactcccggccgcgccggcgcctcggcattgcgcgcac

SEQ ID NO: 274707 - DNA, 668 bp, Zea mays
ggttcgaggctgtcattcactttgctgggctcaaggctgtaggggacagcgtgcacaagcccctgctttactacgacaacaacctggtcggcaccatcaccctcctggaggtgatggctgcgaacggctgcaagaagctggtgttctcgtcatctgcaactgtctatgggtggcccaaggaagtaccctgcaccgaagaattcccgctctgcgccaccaatccctatgggcggacaaagcttgtgattgaagacatctgccgcgacgtccaccgctccgacccggactggaagatcatactgctcaggtacttcaaccccgttggcgctcatccaagcgggtacatcggcgaagacccctgcggtgtcccgaacaacctgatgccctacgtgcagcaagtcgctgttgggaggttacctcacctcacggtctacgggacggactacagcaccaaggatgggactggggtgcgtgattacatccacgttgtcgacctggctgacggccacatagcagccctgaggaagctccacgaagactccgacaaaataggctgtgaagtgttcaacttggggactggaaaggggacctccgtgttggacatggtgggtgcattcgagaaggcttatgggaagaaaatgcctttggtgtgcgctgggcgaggaccc

SEQ ID NO: 274708 - DNA, 621 bp, Zea mays
ttttattctgattgggacacattcaatcaacgttgtcttcagagttggagatgcagctctaaacagactgcatttcccgtggtttaggatagcatacttcctactgtggacgggcatttttgttaatgttcagtggatcgtccactttttcgtgtcaatagggtggccttacccatttctagacttgacattccctggtgcacctgtatggtacctggtggtggcactgctgcacctcccatgctacggcatgttcgccctggtgctgaggctcaagcatatgttgctggaaagctggttccctcaaacttatgcgaagtaatcaaggacgacaatagatggagttggttgtctctatacgcttccttcagcaaaaaaattaagcggaggttctgcaaactgtatgcaccacggaatcacattgaaatagatcacacttgtctgtcgacgggtttctccggaagtggacatgtagattgacagagcatgttccaaaaattttgagaccagcagcttatttaaatcagctgttgtctccagcatcataccccctttttttacccccaatggagatatcagacatgtgtacagtccgctaatatattcaatcatttccagcag

SEQ ID NO: 274709 - DNA, 707 bp, Zea mays
ttccacgcgtccgcccacgcgtccgcccacgcgtccgctctggtccgtggccatggcgtcgtccatgctctccgctaccaccgtgccactccagcaggggggcggcctgtccgagttctccgggctcaggagctccgcgtcgctgcccatgcgccggaatgccacctccgacgacttcatgtccgccgtctccttcaggacccacgcggtcggcacgagcggcgggtcgcggcgggcgccgacggaggcgaagctgaaggtggccatcaacgggttcggccgcatcgggcgcaacttcctgcggtgctggcacgggcgcggcgacgcctcgcccctcgacgtcatcgccatcaacgacaccggcggtgtcaagcaggcgtcccacctgctcaagtacgactccacgctcggcatcttcgacgccgacgtcaagcccgtcggcgacaacgccatctccgtcgacggcaaggtcatcaaggtcgtgtccgaccgcaaccccagcaacctgccgtggggcgagctcggcatcgacctcgtcatcgagggcaccggcgtcttcgtcgaccgcgagggcgcggggaagcacatccaggcgggggccaagaaggtgctcatcacggcgcccggcaagggcgacatccccacctacgtcgtcggcgtcaatgccgaccagtacaaccccgacgagcccatcatcagcaacgcct

SEQ ID NO: 274710 - DNA, 366 bp, Zea mays
ccacgcgtccaacggaattcgatggggaaaagccggagccggcgaaggtttgacctgtaactctgcagcggatgatctcataataaggtaacactggcattttggtaaccatagacgaataagaatgagggaaatttcagaacatgttccggtgatactaattagctagaggaaaatttgacacggaaagttccttattctgtagaatgtgcctttgtggtgagtaaagatgtccatttcatatggcctttgtgatgagtatgtctgcattgaaaagttagtgctttcattcttgataatggacacttcgatttgattcaaaaaagataatcagtttcataattctgaaataaaattcatttttta

SEQ ID NO: 274711 - DNA, 609 bp, Zea mays
cccagggccgcaagtgctggaggtccgccccatgatccgctgggacaagggcaaggcgctccggttcctgctccacgccctcggcttcgccgccgacgccgaccgcgacgacgtcttccccatctacgtcggcgacgaccgcaccgacgaggacgccttcagggtgctgcgcgcgcgcgggcacggcgccgggatcctcgtgtccaggttccccaaggacaccagcgcgtccttcacgctacgcgaccccgccgaggtcaaggagttcctgcgcaagctcgtcggcgccaacgacgacagctgatgatccggcccgcgattcgtttccctttcccgccgtgaccagctccgatccgcctgtgtcaagccgctaactcaacctcggctacctacctgctgcaccggcagagggcttccttgttgttgcaactgcatctccatcgagcagcctgccttgggaccaggacaggccttacctattatataattaaacccctttggtacctccgttttttttggggtccacatctctcgtgtacaacatgcatgcctgctgttgtttaccatttgcctcggctgaaaaggcttgtattttcggcgcccttcccg

SEQ ID NO: 274712 - DNA, 494 bp, Zea mays
gtccactaaatcgcgagcggccgcccttttttttttttttttttttttaccaataaactccttatttggatccaatggaggcaggagaattctgtacaatgcagactttaaaaatcaaacttgaaagcaatacattgacaatgtcatagaaggtgaggggcacgtatctatcttgacattgtctctcgtggtggggacgcatgttctcttctgtacgacgcaagcatgctaacccgtcactaatctctgatcagttcaattgtcacacttccagcttgacgtcgcctcgcaggtcaggtagtggcaccagctacagtgatcgttgccgttctctcctctgaacaccattaccaatccaacgagcgaaccctgcagcctgcacgacgaggacatcaagcaggaggattatgtgatatgcgattgtacttgtagttcgtcttggcaccgaaggatgctccagcctcccgaagtggcgctgaatcagcagctcgagt

SEQ ID NO: 274713 - DNA, 1813 bp, Zea mays
ggtttacttggatgacattgaaattggatatttgggcaaatttgaactcattaacaattatttgccacattatctttctcccttgtttgaacaacatgatgattcatactctccgcagttcgcggtaggtccaggtagtaatattttgtgcataatggaagatgagatatccagcataatagctcgtgctcttgccatatctgatgaacgccaccatttgatagatttaaaattcgagaacggaatggattattccaaaggagagtatgctaaagcaatagagaaatcttttagttttctgtctgaaagttctttcagctcatcaccatggtcatctacagattctgaagcaagcttatcgtctctgtcttcattttcatctgatgacttttctggttatgatagctcatctttattgtccccaatgcatccagaaatgactgtgaatgggaaagtaactctcaaagacaaatattcagttactgttgtatatgacaatcaattctttgcactccgaaaaaagtgttgcccatccgagcttgcatatattacttctttaagccgctgcaagaagtggaatgctcaaggtggaaagagcaaggcctattttgcaaagacaacagatgacaggttcatcataaagcaaatcaagaaaacagagttcgattcatttattaaatttgcacctgattactttaggcatgtttaccattctctggacactggaagccaaacttgcctcgccaagatattaggaatatatcaggttaagcagattagacatggcaaagaggtaaagatcgacttgatggtgatggaaaatcttctctttggccacaatatttcacgaatttatgatctcaaaggtgttactttttcgcgacgcgtcactgactcaaatgatcatgatactgtttacctggaccaaaattatgttgaggacatgggtttttctccaatctatattggtggaagaacaaagcatcttttgcagcgtgcaatctggaatgacacgtctttcctcacttcggtgaatgtcatggactattctctacttgtcggagtggacaaagagaagcatgaacttgtgtttggcatcattgattatctgaggcaatatacttgggacaaacaactggagacatgggtgaagacttctctggtagtacccaagaatgtttcaccaactgtaatttcccccaaggaatacaaaaaaaggtttaggaagttcatggcgaagtactttctgtcagttccagacacatggagtcctgataatccgtctaagccatgcaaatcccttggtcagagcaatcgcaagttggcggaagtccagaatggtgataacctgtcagagcacccaaatgaagttgaggggtgtgcctaatcatgtgcaggatttcctggcagttttgttgaatcctatcatgttgttgtttggctatatttcactttgtaaaatggtgtacatagaaggacctcactgtgcggtttttaggcaaattgttgggcaagtgaggtccacatgacgtgtacctatacaaatgttcattgttgatttcccaattattatagtgaaattaagaattcatatgatcatttttttggacctaccacttgtgagattgaagcagtctattcttcacttatgactaactgtccaagaccaagatagacatttcctacctctattgaaattaggtcaatttgagtattatgttgtactgtggacccccactgtcatgctgggatatgtaaaaggttccgtataaatgtctgctcccctgaccttgtttgttgcacgcagcccaat

SEQ ID NO: 274714 - DNA, 815 bp, Zea mays
accacgcgtccgcccacgcgtccgcccacgcgtccggaggaatggtggatctgattattttggcaaaggtgttcttaagaaatgactgtgaatgggaaagtaactctcaaagacaaatattcagttactgttgtatatgacaatcaattctttgcactccgaaaaaagtgttgcccatccgagcttgcatatattacttctttaagccgctgcaagaagtggaatgctcaaggtggaaagagcaaggcctattttgtaaagacaacagatgacaggttcatcattaagcaaatcaataaaacagagtttgagtcatttattaaatttgcacctgattactttaagcatgtttaccattctctggacactggaagccaaacttggctcgccaaaatattaggaatttatcaggcagcagttatatcacaagctcgagtaggattcgattcgattgactgctttctcttccatgtggactaacttgcctatgtcaggttcagcaaattaagcatggcaaagaggtaacgattgactagatgggtatggaaaaccttctatttggccacaatatttgacgaatttatgacctcaaaggtgctattttttcgcgacgcatgactgactcaaacgatcatgataccgtgtacctagatcaaaatcatgttgaggacatgagcctttcttcaatctatattggtggaagaacaaagcatcttttgcagcgagcaatctggaatgacacgtattttcttactttggagaatgttatggactattctctacttgggggagtggacaaaggggagcatgaactt

SEQ ID NO: 274715 - DNA, 609 bp, Zea mays
aaaaaaaggtttaggaagttcagggcaaagtactttctgtcagttccagacacatggagtcctgataatccgtctaagccatgcaaatcccttggtcagagcaatcgcaagttggcggaagtccagaatggtgataacctgtcagagcacccaaatgaagttgaggggtgtgcctaatcatgtgcaggatttcctggcagttttgttgaatcctatcatgttgttgtttggctatatttcactttgtaaaatggtgtacatagaaggacctcactgttgatttatccaaaagtttgcggtttttaggcaaattgttgggcaagtgaggtccacaggacgtgtacctatgttcattgttaatttcacaattattatagtgaaattaagaattcatatgatcatttttttggacctaccacttgtgagactgaagcagtctattcttcacttatgactaactgtccaagaccaagatagacatttcctacctctattgaaattaggtcaatttgagtattatgttgtactgtgtacccccactgtactgctcgcctatgtaaaaggttccgtataaaaaaaaaaaaaaaaaaaaaaaaaaaaagggcggcc

SEQ ID NO: 274716 - DNA, 533 bp, Zea mays
tcgtcgtcctgcagccccgcaatagagcatcgtacttcatcgttccacttacatcgtttgttcgttcgttcttccgcgtgatctgcttgggagttgggggcaatggaggcctacgtcctgttcgcgcgcgccaaggagcaggaggaggacatcggctgcccgtccgagtcgtccgcggcgcgttccacgtcctcgtcgtcggacggggtggacctcgccgacgacgccagctcgtccgggtccacctgccacttcgagatggcctccctcatgacgcagctcccgatcaagaggggcctgtccaagttcttcgacggcaagtcgcagtcgttcgcgtcgctggcggcggtgggcggcctcgaggacctgcccaagccgccggcgaagcggctcaagacgtcgcggagctgcggcgtcggcctcgaggacgcgcaccgccgtggccctccctccgcgaccggcaggaagcaggcgtccagggctcggctgacgccgccggcgctcgcctcggcgccgagaaggctggtgcgagc

SEQ ID NO: 274717 - DNA, 653 bp, Zea mays
gaacaaccatcttcatcagtttctaatagagaatctagtgcaaataatgcttcttctctgaagtcccaagaaattacagaggttgcaggcgacgcaagaactcaacaccaaaataaacctcgtcgatactcggagatgaactttggccagtgaacatagtgatgatagtaaatcagtgagggttcattggagctttggatccaagtaagacttgtgcaagagaccctggccttaccaagtgcttccagcatttcactgtctgatgtctagcactatcttgtgacccaaacgaggtttgacaggaggtgttcaaaccatcgctgtggtcatttgctgtgattattctgacgggctggtgttgttacaatcattaggtgagattttctggtactctacgtcaccacaataccagacggtcggtccgtaagtgcgaaggtcttgatggaaatcgtgaggacggaggtctcggtcgtactgcaaagctcgtgtccccgctgtacagtgtacatcacgtctctgactgtgtttgggtgtgcgctgcctctgcctacgaactcttcggtggttgtcgcatttttgaattgacaaataaaaaagaacgtgttgagcaccaaattgagaagggcggacggtccagccccgtccggacagtc

SEQ ID NO: 274718 - DNA, 665 bp, Zea mays
cggacgcgtgggcgacgacgaggaccttctgtactgcgtgccggtgttcgaccctatgctcgccgagttctacaaccccgtggccgacgagggggagcagaagccggcctgcctgatgctgcctctcgtggaaacatcgccggagttcgcctccggcggcttggcagaggcggacgggctctccggcttcgacgtcccggacatggatctcgctagcttcgcggcggacatggagagcctcctcatgggagtcgacgacgggtttgacgatctgggtttcttggacgaacagaagcctcaggtgaacgcggacgtggacttggaggccatggcggcgccggagcctgaacgagaggacaagaaaaggaagcgggacggctttgattatctgggtttcttggacgaagagaagccacaggtgaacgcggacgtagacttggaggccatggtggcgccggagcctgaacgagaggacaagaaaaggaagcgaacagatatgatactcaagctgaactacgagggcgtcatcgcctcgtgggttcgtgacggcggatcaccgtggtaccacggcgagcgtcctcacctcgacgatccttacgagctatggttggagttcccggcaacggggagccggggacttttcggcggcaccatgacagcggtga

SEQ ID NO: 274719 - DNA, 1020 bp, Zea mays
ctctgatggaagcttacagccgcgcagggctgccgcaaggggcgtcggagatcttctctttgatggaacacatggggtgcgagcctgatagagcctcttacaacatactggtggatgctttcggacgagctggccttccccaagcggaagcagcgttccaagagctgaagcagcagggcatgcggccgacgatgaagtcgcacatgctgctcctgtcggcgcacgccaggtccggcaacgtggcgaggtgcgaggaggtgatggcgcagctgcacaagtccgggctgcgcccggacaccttcgccctcaacgccatgctcaacgcgtgcggccgggccgggcggctggacgacatggagcggctcttcgcggccatggagcgcggcgacggcgcgagcgccggcgccccggacaccagcacgtacaacgtgctggtgaacgcgtacgggcgcgcggggtacctggaccggatggaggcggcgttccgctccctggcggcgcggggcctcgccgccgacgtggtgacgtggacgtcccgcatcggcgcgtacgccaggaagaatgagtacgggcagtgcctgcgggtcttcgaggagatggtggacgccgggtgctacccggacgccggcaccgccaaggtgctgctcgccgcgtgctccgacgagcgtcaggtggagcaggtcacggccattgtcaggtccatgcacaaggacgccaagacgctcttcgcattgtgaaatccgcgcaggctaaattccgatcctgctgcatgatcacatacgaaccttgacgagaatcgcctagcttacatactcgttaacaagtcacaaggccccgtttggttagatatagaataatctagtttttagtcccgtttagtacttagtacttaattgtatttagtctctagcccctcacatgggtgctaaaggggactaaaggatatcatttactctaattaccattgcacggagaatctgcaccgtatacatgcaataaaaagagaggcatttcagtctt

SEQ ID NO: 274720 - DNA, 1267 bp, Zea mays
ccatggttcacagtcagtggcaatggttcaggtcataacaatggccgtggatagtaatttattggtagttggtggctttcaaggggagattatatgcaagcgtttggatgatgacggggttgtttacagcacaagggttacagatgatgaaaatgcaatcactaactctttagagatgtatcaggatcccagcggatctagaaggttggtggctgctaacaatgactgctccatcaggatttttgacactgagtactttgacctcctcaagcactatgtcttcccttggtccgtgaatagtgtttctgtgagcccgaatgggaaactctttgctgtcctgggagatcatgaggatggttgtgtggtggatcccaagtgtggcaaggcaattggctctctcaggggtcacttggattactcatttgcatctgcatggcatcctgatggcaatatcgtggcaactgggagtcaagacactacatgcaggctatgggacatcaggaacctatcccaatcagtagctgtgcttggtggaaggatgggctcaattcggtgtgtgaagttctctccagacgggcgcttccttgcaacagcagagcccgtggattttgtccacatgtacgatgcttatgcggactacagcagatctcacgagattgacttgtttggcgagattggaggtttagcattcagccctgacaccgaggccttctatgtgggccttgcggaccagacgtacggaggcatgatcgagttcagcaagaggcaccaacatcattactttaactccttgtggtgataaccacctgagcggaaatttggtcgcacagctgttggaccccattgttgcattgtgtgctccagaggagtgcatggtcctacagaggaggatctcatgagtgcatgcagaagtgtataaaattctggggggtttctttccctgttgctagtaatctgggttttgtcgctcgactcgtggaactgaaggcggtagcatatgtatagcctttctgtttctcgacacctaacaatgtacatagtttgtgtcaggatattatctccccattcaccgtctgcctgacatgtagtagtaggttggagttttatggcttccgaatcgggagccctgcatgagtcccagcattgctgtctgcggcaactactggtcggcaccttgtacgtcgctgtatcagcaccagtaccagcagttgtatcagcacattgttggtccttacgctgcagttgcagcatcagcaccagcagtggt

SEQ ID NO: 274721 - DNA, 575 bp, Zea mays
acccacgcgtccgcccacgcgtccgcccacgcgtccggtcccggatcccggcggtttacccctgcggcctccgccgctccgcggctctgcctcttcctccgcttctccttgccccgcgtgcgcgacgaacgccgccgcctccgccctaagagtcttcgtcggaccctccgtcaggattcttcggggcccttcgccggcgacgatctgacgtgacgatgtctggtcatacccaacctgaaggaccacgccaacttgattcaaaacatgctgtgaattcatgccgaaagaatgtacccggtacatcgctcgtctcagatttgagggatcacatccacgagttcatcaatgcctctgcagatgaacaccggacatgcttcacaaagactctcaaaaggatgttcgatatgtcaaagactgtcactgatagatcctctgaagcagaggaagctggacccgaaagcgtcttgccacttcagaccacagtgtcgcggtagaagtttcgccacttcatattgcctctgtagaaataggataaagctagaaagcctcgccctccgcagatggagaaatttgtt

SEQ ID NO: 274722 - DNA, 426 bp, Zea mays
gtctatcatagcttgtatgatgacttcatatggatggaaaagtttggagatcccttgttccagaggcatgttgcagctgcaagcatgtgggggcttgttgctcttaggctctcagatgaggagatcctacccttcaactacagcaattatgccacagagcttgagaatggagcattgggcataagtgaaagagtacagggaatgcctgtcagcttatcacccctgcacaagtcaatcaaagagttcagaaaggcagttgcaaaagtggattctgaattgaaggctctacagacatggaaaatttggtccccatggagaaacaaccccttaaaggtcagagacatcaatgatcggttgatgatgaccgaacgggcattcacagaccgggaaagactgtttggacggccatggtacaaacacctgatt

SEQ ID NO: 274723 - DNA, 473 bp, Zea mays
gttcaatctgaagggcaaatggcacttggacgtagcatttgggtgcctgctattcccactagttaatctactctcacacataaacatcagcctagttccagcgtcaccaggtccagctgtcggggtttccagcgtagaacagtccatcgtggcccgggatccagtggcaatggctttgtatgctgtggtagtcacggtatgcgcgcctatatgggaagaaatcgtgttccgaggattccttctcccgtctctaacacggtacatgccactcccatggtcgatcctagcgagcgccgctgcgttcgcgctcgctcacttcaacgcacagagggtgatgccgctagtgtttcttggagtggtgatgggaggagtcttttgcaggtcgcgcaacctgctggcgtcgatggtgctgcacagcttgtggaatggatttgtgttcttggatttgatgaagtgagcagctgagctgcagt

SEQ ID NO: 274724 - DNA, 408 bp, Zea mays
cgcagtcatgccggcgcctgctggccatcctgctgaccatggcgctgctggtgggcgtcggggcgctgatcgtgtacctggtgctccgccccacgcacccgcgcttctacctgcaggacgcggcgctgcggcagctggacctgagcaacggctcggccccgctgctgtccacggcggcgcaggtcaccgtggcgtcccgcaaccccaaccgccgcgtcggcgtctactaccgaccgcctcgacgtctacgccacgtacaagtcccagcaggtgacgctggcgtccaggctgcccgcggtgtaccagggccacggcgacgtcgacgtctggtcgcccgtgctggccggccccgccgtccccttcgcgcccttcctcgccgacgcgctcgccaaggacctcgccgcgggg

SEQ ID NO: 274725 - DNA, 1317 bp, Zea mays
cccgcgcgtccgccataccggaatgtgtgacgactgacgactgaggtctgacgaggcgaaaacctcgctgactcgccccgccgccgccccgccccgcccgcgcgtcctccgccgtcgtccccggaaggttttcgcctcagggcatgtggatctgttagttcacctgctgcaagcaagtatagctatagggttgaccagtgcagaagtatgaatccttactttgttgggattcttgtccccgtcgcggtctccctgctgctccgcaagaagagaaaggccgaaaggatgaggggagtgccagttgaggttggtggggagcctggatatgcagtccgtaactatcgttttgaacaacctgttgagacacactgggagggggtgtccacacttgctgatctgtttgagcaatcttgcaaagagtatgtatacatgccactccttggcacaaggaagctcatttcaagggaaactgaagcagcacctggtgggagatcgtttgagaagctgcatctgggcgagtatgagtggaagtgttatgcagagtgcttcaagagcgtttgcaacttttcatctggactaattagagtaggtcaccagaagaatgaacgtgttgctatttttgctgagacacgggccgagtggcagattgggttgcaggcatgcttcagacaaaacattacagttgtcaccatctatgcctcattgggggaggaagctttgtgtcactcactaaatgagactgaggtcactactgtagtttgtggtcagaaagaactaaaaaagttgattgatataagtgggcaacttgacactgtcaagcgtgttgtctatatcaatgaggaaggcatctcaactgaagtttctttagctcaaaactgcactagctggatggttgaatcatttgaggaagtaactaggttaggagctgaagcacctgttgaagcaaacatgcctctaccttccgatgttgcggtgataatgtacacaagtggtagcaccggatcgcccgagggagttatgatgacccaccgcaacgtcctggctacactctcagcagtcatgaccattgtgcctgcacttggcagtaaagatatatacttggcctaccttccacttgcacacattcttgagttggcagcagaggcactaatggctgctgttggggcctcaataggatatggatcacctttgaccctgattgatacatccaataaaataaaaaagggaactctaggtgatgcttctgcactaaagccaacattgatgactggcgtacctgctaaaacttgttcgtatccgtgatggtgtcaggaaaaa

SEQ ID NO: 274726 - DNA, 529 bp, Zea mays
  unsure (1)..(529): unsure at all n locations
acagcaacatacatcatcccgacaacaattacatattcaagctgaagttgaagctgaagctatgagctctttcaggattgatgatgacctcggggttaaccctgatttgaacccattctcttcaaatttgcatgggttggcagcttcaagtacccgtgttgagattggtggacatgaacgcanccccccgatcttcagcacaacgagcggagagtcatggaaggaagcgtaagcaaagtcagattgctggggttcttgaggaatatttggattacaaaagacaacataatgataagttgcttgatgtggttgttggggactttttctcaaatgctatgagttaagaacaaggcaacacagaaaatgttaaacattagagtccttcgtccttcaaagcattatttcccttgagagataatgattttcggacgaaggttatggaggacgtaccttcgtcaatataacatataaatgacgaaggagacatatgaaatacaaaaagtaacataaacaattatgtattacaatc

SEQ ID NO: 274727 - DNA, 956 bp, Zea mays
tctgagaaagcccactcgttagtcgttactcccaacaccgggaatccatggagccggcctatgtcgtcaccctctccttcctcttcctcttcttgctccaccatctcctcggccgccaccgccgcaggaccaatggcaagaacaagagaacgcagctgccaccgagccctcccgccatcccggtcttgggtcacctccacctcctacggaagcctatccacgcggcgctcgctcgcctcgcggaacgctacgggccggtgttcttcctccggctcggctcgcggcaagccgtggtggtgtcgtccgcggcttgcgccacggagtgcttcaccgagaatgacgtctgcttcgcgaaccgcccgcggttccccacgctcctgctggtttccttcggcggcgccacgctcccatgtgccgctacggcccgtactggcgcaacctccgccgcgtcgccacggtgcagctcctgtccgcgcaccgcgtcagctgcatgctccccgtcatatccgccgaggtgcgcgcaatggcgcggaggatgtaccaatccgccgccgccgcccccgccggcgccgcgagggtcgagctgaagcggaggctgttcgagctctcccacagcgccctgatggagaccatcgcgcgaaccaagacgtcccgtgccgtggcggacgacgacacggacatgtctccggaggcccaggaattcatgaaggcgctggacgtgttccttccgcttctcagcggggccaacgcgtgggactacctgccggtgctacggtggctcgacgtgctcggcgtgaggaacaagatcctgcgcgcggtgagcgcaagggacgcgttcctacggcggctcatcgacgcggagcggcggaggctggaggagggcggccagaacaacgataagaagagcatgattggcgttctgctctcactgcagaagtcagaaccggaggtgtaca

SEQ ID NO: 274728 - DNA, 413 bp, Zea mays
acccacgcgtccgcggacgcgtgggtaagaaatcttttgctcaaatgtagctaattagcacttcatacattctggatagaatcgattataccatttcgtcatctgacttgtttgaagaactttggtcttcctttacagacatagaaggtgctctcaaagacatcgaaggtcttcctttaccgtttcgtcatctgcaatgtgcttatagtatgagagttgcctgctaattcctctaaatatagcattagttcagcttgtagcttcatattacatcaggtaatggatggcatcaggactattctctgtaatgatggtataagagctcacttgctaattcttctgaacattccctgggttcagcttgtaactttagttagattaatggatatcatctaaactattcttttcttttt

SEQ ID NO: 274729 - DNA, 470 bp, Zea mays
ttttgcagaaggattttgcttggcatcaaggaacagtgcaaactagaagaaacccccgtcatcagcgacctctccccaacggcgccgacgatggcgcaacagcagacgcagctaaccactggctcgggcatcctggatgccgtcccgctcttcgtcgtcatcctcctcgcggcccacgtcctggccctcgtgttctggatgtacaagctggcttccgagaagcaaccaccccggaggaagacacagtgacggcgccgatctacgccatcggcgatccttcgctagcctctttatcggttccattttcatgtgaaccagtaccctccagaacattcaggccgtcaattattcagagatatccatatagcctctcttgttgttttatttatacttattgcattttgggtattgtttgataacaacttagcgatattctatgaatcactatccgtttgggtgataaataaatg

SEQ ID NO: 274730 - DNA, 596 bp, Zea mays
gttcaacagcaaccaaaatcggatgttggagaaagggcatcatctatgaaacgacgttgcaggaaaaaggtgcaaaaagttgggacacctaatcacactgttgatgattattttggtgaagactgtgttgaaccttcattagctgaagaagataaagatactggtgatcattacactactggtaataaccataaggctaggaaaaagtcaaggggtggtgtagaagagtcacagcagcagaaagttcaaaaaaataaaagcaaggtgtcttcacggggccgcaaaagaaccttgaaggatgaaacggcagagaagcctgagaagaagctaacccacaggatacgtcagaggataacaaaagaggttaaggctttactggaaacacctcgtgagcagataaaacccatgaagctaagcgcatcacatctcaggttgttacaagaagctagagagcgtgttaatccaaaagggattccatccgggccatcttctaatacaagaaactttcaactagatgatatggatgatttgggctacagagatgaggaagataggtttcttgacaacgatacaacagaggagcatgtacaaaatgc

SEQ ID NO: 274731 - DNA, 485 bp, Zea mays
taaaggggcaatgatcccatcgccaagtatacttgtgaggtctacataccatcatccaatacatggttagcatttgttgatgagatggtcacaggctggcggaacccaagtttttctttcaatgggccgtctctattcagctgacctgccgggatggcttgcacgctcacagtccatgatgagatcacaggaacatggacaaggttcatggacagcaagcaccacttgggcagctcacgtgcctttgaagctgcagcttttggggtcacctaaatgggaaaactctgtgtcatcgggaacaacatgagcataactcttgttgatgtctccaacccaacaatgagtgttgagacagatagtgcgcgcatgtgggaaactgttgttcggaagggccagcacaggtcgtttgtggcgaacttatggtcgagcattgcaggacggaacttaaagagtcacattatccattgccatgtgctgcaagtttg

SEQ ID NO: 274732 - DNA, 689 bp, Zea mays
aatattggtccgacccacgcgtgcgaccgaatatcttcttttgacttttcactgtgatttcgcgtgtagctcgcttcgggtctgatcgagggccggccggtctaggtgtagtgctgcaaaaccaacaccaccgtgcaggcacactctctgcgggcggctcgatcgacggacaatcctgcgcggctgcgcccgtaggtatataccggtcgtcgatcaggttcgtcagttcttcattcattcaggtcgacgtgcaactggtaattgtacaagatcttgggcagctgccgtatggagatcgatgagtgccgagttagcatggaggacgactggtggtcatggttggtacagagctagctagccgtccgatcgggtatcggattaatctgattgccagttttgtttttttttggtcgcgtcaagtagctgacatcttaagaatgaagcctactggattcagaggcctgttgatggtaatggtatggtgtatgtatatcgtctagtttagtctagcctagctgtacttagaattggttcaggttggtggcaagcagagcgctgtaatttttgttgagtgtttatgcactataattgcaacgtcatgtattagagtcgctctcagcggtcgctttctcgtgatcgaaaattttgcgatgcaaattatcctaataaagttgttgtaagatgtaatt

SEQ ID NO: 274733 - DNA, 899 bp, Zea mays
gtcttatctacaacaagaagggtgttatcgagcggtacgacacagtggacgacgacgacggcgacggcgccgtggccgaagacgtcaagccggtgccggcgccggcggcgtcgaagaacccgcgtgccagtgcccgcgtaggggcagcagcggcggcgccgatgaaggtggagctccccgagtacggcggcggctactacgactacgacgacctggagacgccgtcggcggggatgctgtgcttcgaccgcccgtcggccccggcgcccgcggaccgcgactcaaacaactccgtgccgtggacgacgcaccacacgcacacggacaactccagcagcggctccgagcgcgtgctctcgccgtcgccggacctgcccgaccgcgaccacgccgagagccagcccgccgccgccgggtggtggcctgtcggaagcgactggggcagcgccgccgaggacgggttcatggtcgacgtcgacgtcgacgacgggagctcgctgttcgggccgctgtccccggggctgttcgcgcgcgtcgacgccgccgcgttcggcttcggcgacatgctcgcgtcgtacctgcacaaaccgttctgatgcaacgcgacgcgagcgcgcggccaccccgcgcctgcgtgctcctctaggccactgaccactgacatggacattctggtcgtcgtgtagctcggttcaggacgaatcgagagccggccggtctaggtgtagtgctgcgaaaccaacaccaccgtgcaggcacactctccgcgggcggcagatcgacggacaatcctgcgcccgtaagtatataccggtcgtcgatcaggtgttcatcagttcttcattcattcaggtcgacgtgcaactggtaattgtacaagatcttgggcagctgccgta

SEQ ID NO: 274734 - DNA, 847 bp, Zea mays
cccacgcgtccgcccacgcgtccgcggacgcgtggttcggcggcgtcaccagcttcctgctgggcctgtcgccggatctcggccgctcgctccgcctcgacgtgctctaccccgtcggcggcttcacgcgctgcctcgactccgacaatgggttcgaattcatctatccatcaagttgggttggagaccagacgctactgtacagagaagcgaagaaggcagaattgcaaagatcgctagacccaccgccactgccaaacggaggatctccatctgggcctcggaacatcagtgaacctgtggcagcatttggcccccctggatccaatggggagctcaacgtcagtgtcatcgtctccactgtgccacgagacttctcgatcgagacgttcggcagcccaaaagacgtgggggaagtggtgctcagaaggatcgcgaggacgaggcgaagcccggacatcaacgctacccttatcgacgccgccgtgagagaggacgcgggcagggtgaagtactacaagctggagttccgagtcgagagcccttctttccggcggcacaacgtcgcggtctgctgcgtgagggacggcaggctctacaccatgaacgcgcaggcaccggagtcggcgtggaaggcggtccagaaggagttcttggcgatggcggactcgttcggcttagttagcgacgcttgattgacatgcagttaggcacgcagttttggttttgtacccctgagcgttttgtccactagtttgcaaggtctcggtaacgagatgccgtgggttggtgtagagaaactaggacatgatgtttctgtttctgttatccttacaatcatgtctga

SEQ ID NO: 274735 - DNA, 531 bp, Zea mays
acggacgcgtgggcggacgcgtgggcggacgcgtgggcggacgcgtgggcggacgcgtgggcggacgcgtgggcggacgcgtgggcggacgcgtgggttttgaatcaaagttagctcgtccacatgcccggataagaacgggggagccagtgcgactggaggatgtcaaggattgggctactgatgtaatcgcagattcttttaccagagcagaagaagctatccaagaaaaaatgatttagaagaatctaaaacacccggtgtatctgctttatcgtttctctgaatctaaaacacccagttgtaaccgagttcttttacagatccatgaccatatgggtattacggccactatggtattctgagagtgaagccctgagtcccttggtctatgtttcggtgcaccatggtaaacaactgcttcacccgggcctcttggagaaagagcgatataataaagaatactaggtgaattgacacggtgaaatttctcttaaaatttgcgccatgtattggtataaggttaatcgt

SEQ ID NO: 274736 - DNA, 721 bp, Zea mays
gtgtacatatcgctaccccttggacaagatcggagacggaaccggtattggcagttttctgcatcttcatcatcctatgaccctggttcgggaagagtcttttttgaatctagagatggatattggagggtcattgattcatctgaggcgtttgaagctttggtatcttcccttgatactcgtggcatccgcgagtcacatctgcactcaatgttgcaaagtatcgagccaaccttcagggaagctgttgagaggaagaggtgtgctagtttagaacacccaactgggcggacttcggacaatggaagtaatgaaagtccaaactgcaacaatgagtttggaagtccatgcagtaccctttctggtgttgcttctgataatcttatggcacattcagatactttcaagatagaggttgggcgcaacgaagctgagaagagttctatctcgaaaagggcttccgtgtttctgaaatggatctggagagagtgctactgtcaccaatccacgtacgccatgagatatggaaagaagcggtgtcctgagttgattcactcttgtgattattgctaccagatatacttagctgaagaaaggcactgttcttgccacaagtcattcaaacacattcacaatttcttggaacactcatcacaatgtgaagaaaaacaaagaacagatcccaattggaagatgcaaactgtggacctttctgtacccg

SEQ ID NO: 274737 - DNA, 609 bp, Zea mays
gatatgtttgggcagataaaatcaaaacttcctggagctcctaggttcctcttgtgccttctccctgagaggaaaaattgtgaaatctatggtccttggaagagaaagtgcctggccgagtttggtattgtcacacagtgtctagctccattaagagtcaatgatccgtacctgcttaatttgctgatgaagatcaatgcaaagcttggtggtctgaactcgttgctgcaagttgaagcatcttcgtcaataccacatgtgtcgcaagtacccaccatcatcttaggtatggatgtttcacatggtcatccaggacaagatagaccttcggttgcagcggtggttagttctcgtcaatggcctcttatctctagatatagagcatcagtgcacacccaatctgccagactagaaatgatgtcctcgttgtttaagccgcggggtactgatgatgatggcctcatccgggaatcactgatcgacttctacactagctctggaaagcgaaaaccagaacacataattattttcagggatggagtcagtgaaagtcagtttacccaggtcatcaacattgagctggatcagatcattgaggcatgtaagttt

SEQ ID NO: 274738 - DNA, 511 bp, Zea mays
acccacgcgtccgcccacgcgtccgagcttttaactttctcaggacacgggagcccttcttgccgacaaaactgaagaaagaactgggagagctagcatggcaagttcgcgctgctttgagaacccgccggtgctggagccggccagcggaggaggcgaggtcgttgacgacttcggcgggcagaaggcctacgtcagcggctccgccgggtccaaggccgccgtcgtcctcatctccgacgccttcgggttcgaagcgccaaacctgaggaagatagccgacaaagttgcttcgctcggttacttcgttgtggtgcccgatttcctgcatggggatccatatgaccccagcaataatgcccatagcaatcctggaacgtggatacagtcgcacaatccgcaaacggcattcgaagaggcaaaaccggtaattgcggctataaaggagaagggtgtgtcgagcatcggagctgcaggttactgttggggcgcaaaggtggttgtggaactg

SEQ ID NO: 274739 - DNA, 1400 bp, Zea mays
cttaatggcgcaggtcatctgctgcatcttttgggagggtgttttcggggatgcgagcctcaccacaaagtgctgggcgtgcttttatgggaagtcgtttgattggaggtctaggtgaccttcgtcaagttgaagccaagtaccctgccctgcttttcaagcatctccccccgcttttccttgagaacgatctatgcgaatgatattgagacacatttgaaaaagggagatatctcctttgcttggcctttgcatccaggcaccaagaacatcccgtgcaagcctaattaaagggtcacgttcccaagcaaatgccttagctcagcaaactctgattgcacattggcagagcattgtgaaaatattgacaaattacttgaatgttttaaaagcaaattatgtcccttcagtcttaatcagcaaagtgttcactcaaatcttttcatttattaatgttcagttatttaatagtcttcttcttcgccgggagtgctgttcatttagcaacggggaatatgtgaaagctggattggcagaattagagcagtggtgcatttatgcaactgaagagtatgcaggttcttcctgggaagaattaaaacatattaggcaggctgttggattccttgtgattcatcaaaagccaaagaaaacattgaaagaaattaccaacgatctgtgccctgtccttagcatacaacagctatatcgaatcagtacaatgtactgggatgataagtacggtacccacactgtttcatcagatgtcatctcaagtatgagagtaatgatgacagacgattctaataacgcggtcagcagttcgttcctgttggatgatgattccagcattccgttttcggtggacgacatctcgaagtcgatgacagaaatcgaggtaacagatgtcgacatgccacctctgatccgggagaattctggcttcaccttcctacaccaaagaaaggactaacagggtggtccttccagctgcatgtccctttttgcacattctttttctccgctcaacctgtgcataactcatgtacatacgctcgtgccttttgctctctggtcagggcttgttagatgtattgtctttggtttgattggttggttggttctttcctcgatcctctcccaattttgttgggcgaagggtccacaatctatgtttctccatactgtagtgaaaaggggccggatgcccctggtcagttccccgagctgcttttggaaaagctcgtggtcattaagcagttaagcgtgtggaaaaggttctccgcatctaccgagtcgttcgttgtgtcgccttcttcatatggatcatcgccatattgtaaattgcaaagacgattatagttgaaaaaatagatattacagtgatattacatatggat

SEQ ID NO: 274740 - DNA, 1163 bp, Zea mays
gggtccagcacgcgtccgagaggacccggcggcgggggcgagcggcagcaagtggcggctggcgacgctgacggacgtggaggaggtgaagacggtggcgcggatgctgccgatctgggcgaccacgatcatgttctggacggtgtacgcgcagatgaccaccttctcggtgtcgcaggccaccaccatggaccgccgcgtcgggggctcgttccagatccccgcgggctccctcaccgtcttcttcgtcggctccatcctgctcaccgtgcccgtctacgaccgcctcgtggtgcccgtcgcgcgccgcgtcagcggcaacccgcacggcctcaccccgctgcagcggatcgccgtcggcctcgcgctctccgtcgtcgccatggcgggcgccgcgctcacggaggtccgccgcctccgcgtcgcgcgcgagtcctccgagtccgcctccggaggcgtcgtgcccaggtccgtgttctggctcatcccgcagttcttcctcgtgggggcgggcgaggcgttcacgtacatcggccagctcgacttcttcctgcgcgagtgccccaaggggatgaagaccatgagcacggggctgttcctcagcaccctgtcgctgggattcttcgtcagctccgcgctcgtcgccgccgtgcacagggtcacgggcgaccgccacccctggatcgccaacgacctcaacaagggccgcctcgacaacttctactggctgctcgccgccgtctgcctcgccaacctactagtctacctcgtcgccgcccgctggtacaagtacaaggcgggccgccccggcgccgacggcagcgtcaacggcgtcgagatggccgacgagcccacgctccactgatccatccatgttcgatcgatcgacgaggcacgcgacggacgaccctaaattgaaccctatacaccgagcttaattatatatccgtccgatcgtcgtcggtcagattcattgctagctccgcgtgttgtaccatcgtgtcagtcagtgtatacgagtgtgtatcttttgtatccaagtacagcacgcgcgcgtgcgtaagcgtgtagttataaaaattaataacatgtttcttataggagtgagggggtaattgtaaacccgcttgtcatttgggctaccctcgttcgggacactgagc

SEQ ID NO: 274741 - DNA, 409 bp, Zea mays
aacatgaatgttcatcagctccagtgcttctgtgtagtagattaggagtttagagaagaggaggaggacgacgacgaggacgacagcacgcggcgacctaatgcgaagcggcaggttgtggttgcgtgcgtggacgcgtcctcgatcgtcgtccatccgtgaccaaacaagaagaaaaagtatcgcgcgcgtgtgtggcttttgcctagcgtagccagccaaagaaggttctactgcaactgcaagtaataaatcctagtgttgtacagcataggtagccgccactcctgctctgtgggtttcgtgtctcgatgtttttgtacttactttgcagtgtactacgtccatactaatacgtgcttccagcttccatccagttaaatataacttattaataaaaaatatattt

SEQ ID NO: 274742 - DNA, 570 bp, Zea mays
gtcctttgctcgcccgcccggatataaatttatatcgcacacatcccccgttcgccaatctcgcggcggccctgcaaagctgcgatcaggaggtgcagaacagcggtgaagggtggaaaccgagaacactaggcagaggcactagccgagccgagccgcgccaccacgaccacgagtcgaccggcgagtggttggcgcaagttgtcaggggcgttgccggagccgtgcggcggccggcggccgggagcggggccgatggggcgctacgagctcgtccgcagcgacgacgcgcctgccgtcgccgcggatctggaggccggcaccgccgcgccgtgcgacggctaccccaagcgccgcgtgcccacgccctctccgttttcgtctccggcgccggcgccgacccggtaccggcagcgcctcgtctcgctcgacgtgttccgcgggatcaccgtcctgctgatgatcatcgtggatgacgccggggcattcgttccggcgatgaaccactccccctgggatggcgttacggtggccgactttgtcatgcctttcttcctcttcatcgtcgga

SEQ ID NO: 274743 - DNA, 707 bp, Zea mays
ttcatgatcggtggcactctgggctggatagcttgcaacatcttgaagccaccgcagcactttaggggcttgatcatggccttctgctcagcaggaaacctcggaaacctgctcctgatcattgtcccggctgtatgcgacgaagacgggaacccgtttggggatgattcaagcacttgccgctcacgcagtctctcctactcgtccttgtccatggctctgggtggcctcttcatatggacgcacacgtacagcctgatgcagaagtccggcaagctgtaccacaagatgcagtccaaaagcattcagtgcccagccgacagcgacgaggagcatgagcaagcgaaagaagatgggccagctggctgcgctgacgaggaggcacctcttccgacgtcagtcaagcctcgcgagcacgagcacggggaagaggaagaacaccaaatggaggcccctctcttgtcctgcgagagcgaggtcgctgacaaggggttctggacgaagctgaaagacgctatccaccagttcatcaaggagctgatggcaccgcccaccatatccgcgataattgggttcgttgttggcctggtcccatggctgaaatccctaatcgtcggcgacggagctcctttcaaagttatacaggatgccctccagctgatgggcgacggcacgatcccttgcatcacccttatcctaggcggaaa

SEQ ID NO: 274744 - DNA, 418 bp, Zea mays
agcaaggcagtatccttggtatatcgtgacattttcaacaatttcactactagggaaatgggccttgctatggtactctgagtctctgacaaccccttaggaaatcaccttacacctacttgtgttgaaaaaaatgctaactatatataattgatctaacatgcaactatcatataccttttcatgacatgtcacacctgtgacatagtaattcatgttcgcgtactcgcctatacacatttctcttttgtttatgtcacatttaagaactaaaaactttactcatgtcacattcaaacaaaaacattgcaaggaagaattatgcaagtgtcatgttgcaaaaaaaggttataaggaagtgacatattctgacaagaagtaataggaaatcacgttagaatactatatcacttacatg

SEQ ID NO: 274745 - DNA, 704 bp, Zea mays
attgtttaccatggaccagattttgttaggaagatctgatgttgcaggttggggtgcattcattaagaatcctgtaaataaaaatgattatcttggagaatatactggtgaattgatctctcacaaggaagcagacaaacgcggcaaaatttatgaccgggcaaactcatcttttctgttcgatttaaatgaccagtatgtgttggatgcttatcgcaagggggacaaattgaagttcgcaaatcactcatctaaccccaactgctatgcaaaggtgatgctggtggctggcgaccatcgggttggtatctatgcgaaggagcatattgaggctagtgaggaactcttctatgattatcgttatgggcctgaccaggctccagcttgggctaggagacccgaagggtcaaagaaggacgaagcatccgtctctcaccatcgagcacacaaagttgctcgatagctgaaaagcagctccggatgatacaatatgcagtaaattatatatttaatacatgatttagtcctagttcattatacgaggacttcgttggtagataagcatattgtatattcattagtgaataaactcccatacatcaagttggggaataagtgcatataaatattttttaccttaggtcggaaggtgacaaactgacaaccctgttaggttgagtaaagttagtgcttacaggttttcc

SEQ ID NO: 274746 - DNA, 620 bp, Zea mays
ccgggcccgacccacgctttgggttgctccaggcgggaacgcgtccctctgctcctgcgtgctcaccggcgccgtgctcttctcctcgacgctcatctccatcggcatcgtcgaccgcctcggccgccggaagctcctcatcagcggcgggatccagatgatcgtctgccaggtgatcgtggcggtgatcctgggcgtgaagttcggggcggagaagcaactggcgcggagctactcggtcgcggtggtggtggtgatctgcctgttcgctctggcgttcgggtggtcgtggggcccgctgggatggacggtgccgagcgagatcgtcccgctggagacgcggtcggcggggcagagcatcacggtggccgtgaacctgctcttcaccttcgccatcgcgcaggcgttcctgtcgctgctgtgcgccttcaagttcggcatcttcctctttttcgcggggtggatcaccgtcatgaccgtgtttgtctacgtcttcctgccggagaccaagggcgtgcccatcgaagagatggtgctgctctggcggaagcactggttctggaagaaggtcatgccggacatgccgctcgaggatggctggggcgcggctgagggtcatg

SEQ ID NO: 274747 - DNA, 509 bp, Zea mays
gcgtggtatattcaagcagaacggtggcacctagggatggattcgtcttatgatattccattttcagggaggatatggaggcgtctttcaaaaaatatcaatagggaaaagattgaggtgccacgtcagggtaacgagtatgattgtggcctctttatgctttactatattgacaggtttattcaagatgcgccagagaggttgacaaaagagggccttggcatgtttggacgcagatggttcaaccatgaagaggcttcagcgtttcggggagggatacgggcgctactgattgatctatttcatagtgctctagacgacgatggaccatcggaggcagagcttgaagacaaggacattcagatggactgagcctgctgttgctgctttgattgaatatgtagtaacctcgttcactcccaagtgaagtttggccgtggagggaatgcgccccgttggctacacacttttgtttacacgctcgttcattcggcggtggaaatgtacag

SEQ ID NO: 274748 - DNA, 563 bp, Zea mays
agcccacgcgtccgcccacgcgtccgggacagggaagatataggagagagcatgacagcaacagaaggacttcagatgtgaggaagtgggatggtgatagtagcgagttcgaggcatcagatgaagaatgggactctggtgatgacaggggtaatgctctgggcttcgacaatgatagaggttctactgatgagcaccctcggcgatttggaagcatgagggaacgagaagagtagatccactcgggcacaggattttgtccctaggggaggcgtgggtgaggggaagggtttcaatagaagctatggcaacccagatgctgatgttcacaatagaggccagggaagacataggagagataatgaaagaacatcagatgcaaggaggtgggatgataatagtgagatcgaggcgtcaggtgaagaatgtggctctggtgatgacagagatagtgttcttggactcaacaatgatatagacacaggtgatggtcatcctcggcaattcaaaagcatgaggaacgagaggagcagatccagtggcaggcagatttccattcctgg

SEQ ID NO: 274749 - DNA, 420 bp, Zea mays
ctcttttaggaccttgttttcttggatgctcctattttattttgcgtttctaacatctatgtggttcaaggttttcattgcatgttgacttatttttagctcccaatgatgttaatgttatgttgcatcttgacataagatcttttttaaaaaaaaaaatcgtgcatgtcgtctgtctgtttctgtattcctataaatgttcttagatcgtaacatattgcacttcgtgggaatgatactgttctaatatatcatttttatgtttttttgcatacaagatatacagaaaaatgggtgaaggtacttttggtcaagtactggaatgctgggaccgagaaagcaaagagatggtggctattaaaattgttcgctctgtaaagaaatacagtgatgcagcaatgatagaaattgatgtcctgc

SEQ ID NO: 274750 - DNA, 244 bp, Zea mays
acgcgtccgagcgactagagccaaggcagcacgttcccggcaggagaagaacaacaccgcaggcgcccgggaaatcagttcaggggccgcaaggcgtggaagtgagagagcctctgctgccgctttgcgattcatctagccgaatggccaatttttttgactctttgtatcttcttctgccagttaatgtttccatataataccttgattctatgagaatgcttttccatatttcgccgttggt

SEQ ID NO: 274751 - DNA, 483 bp, Zea mays
agcccacgcgtccggcaatttgttatctgccatgcataactagactggatggtcatggctcaaactaacttactttttgcctacggctgaaacatttagacaggcagcttaccatataaatgtcacctcctaggtggctaccctgactaccttttcgcgggggggggggggtgactttttttttactgcaagatctaataaactactgtggcgtttaaatttgtatattcccagatgacattcatcctgcgcatgatgaacaataaatcaaggttgtcggtaagtgaaaatagagatcaagattcaacgaacacaacacagatcctgatgtttagtggaagtttgctgcctgtaatgtttctgtcaggcttattgggatgtggagctggaattttagcatggaccaatgctttaggtgtatacgtgagacattaagtagagttacataaacccaaaaaaaatcacctaggacgtagcagttat

SEQ ID NO: 274752 - DNA, 1654 bp, Zea mays
cccacgcgtccggtggatgaacaaactgtaagagcttcacactccctagcggagagcaccgggacagctagcattccagtgactgtacctgaaggaactcatcctgatcaaacaagtgatcaagtgggaatcaatggaagcatgaacccatccatccatccaatggttcctgcagacccaaaatttggtagcagtgccacaccacagccttttcctcataattatgctgcctttgctccaatgatgcagtgcaactgcaaccaagatacccacagatcattggtcaacatgtcatccaccttctccagcatgcttgtttccacgttgttgtcaaaccctgccatccatgcagctgccaggctcgcagcatcatactggccagcagctgaaggtaacactccgattgatccgaatcaagaaaatcttgcagatggtgttcaaggaaggagcatagggtctcctccaagcatggcttctattgtagcagctacagttgctgcagcatctgcatggtgggcaacacaaggtcttctccctttcttcgctccacccgtggcttttccatttgtaccagctcctagtgctgcctttcccacagttgatgttccacgaccttcagagaaagacagagattgcccagctgaaaatgcacagaatgaatgccaagaagctcgaaaacaggtacagttcgaaggtttaagagttgctgcttcttcagagtctgatgggagtggaaaaggcgaggtgtctctccatacggagttaaagctatctcctgcccagaatgctgatgccacacctaccacaggagctggcacaaatgatgcattcaggaataagaaaaagcaggatcgctcttcatgcggttctaacacaccttcaagtagtgatgtagatgcgggcaatgttcctgaggaggacaatgctaatgagaaggcgaagcaagcctcctgcagcaactcttcagctggtgacactaaccaccgcagatttagaagcaatggaagcacaagtgattcatggaaggaagtttccgaagagggtcgtctggctttcgatgcgctgttcagtagggaaaagcttccgcaaagcttttctcccccacaagcagtagactcgaaggaggttgccaaggaggaggaagatgaagtgaccacagtggcagttgacctcaacaagagtaccacaagcattgatcatgacctcgacacaattggtgagcccagggcttcctttcccaatgaattgtcgcacctgaagctgaaatcgcgccgtacaggcttcaaaccatacaagagatgttctgtggaagcgaaggaaaaccgggtgccgactagcgacatggttggtaccaagaggattcgtcttgatagcgaagcatccacataattgatttcttcaaagttatatttacatctaagctactataggacttcagatcttgcaatgcagtgcttcattaaaactcaatctgttgtgtgctgtattttaatgcttgtcaagcagcccgctagactgctttaaaaccttatctcgtagactctgatttaagcatcatgcaactatcaaacttttttttggtcaaaatgtattttccttatgttttatatttttggaaaggaaaataattgaaatattatttattttgaaggct

SEQ ID NO: 274753 - DNA, 663 bp, Zea mays
gatttagaagcagtggaagcacgagtgattcatggaaggaagtttccgaagaggttgtaatctaccaacactatgccaattcactctgcccaaacctttgagcatgccgcactgcctttctaattcactttttttgttggcagggtcgtctggctttccatgcgctgttctgtagagaaaagcttccgcaaagcttttctcccccacaagcagaaggctcgaaggaagttggcaaggaggaggaagatgaagtcaccacagtggcagttgacctcaacaagagtaccacaagcattgatcatgacctcgacacaattggcttcaaaccatacaagagatgttctgtggaagcgaaggagaatagggtgccggctagcgacgaggttggtaccaagaggattcgtcttgatagtgaagcatcaacatgagcgatttctacatggttaccgctcggacttcctctgccgccatgaagtttatgacaaagttgtatttacatctaaactagtataggacttaaagaccttgcaatgcaatgcttcatgaaactgttgtgtgctgtattttagtacttgtgaagcagcccggtagactgcttttaaacctttatctcgtagactctgatttaagcatcaagcaactattgaactttatatttttggc

SEQ ID NO: 274754 - DNA, 372 bp, Zea mays
aaaaaaaaaaaaaaaaaaaaaaaaaaaaaaaggaaaaaaaaaaaaaaaaaaaaaaaaaaaaaaaaaaaaaaaaaaaaaaaaaaaaaaaaaaaaaaaaaaaaaataaaaaaaaaaaaaaaaaagggcggccccccaaaaggttcaaacctaacttacccttgaatgcaacttcaaaccccttcaaaagtgtcaccaaaattaatttcacgggccgtcttttaacaacgtcgtaacgggaaaaaccctgggtttaccaaatttaacccccttgaaaaaaatccccctttcccaagctgggttaataccaaaaaggccccaaccgatcccccttccaaaaaattgcccaccctaaatggtaaatggaaccccccc

SEQ ID NO: 274755 - DNA, 404 bp, Zea mays
ctcccccttgttgctcttggctccgcgatggcggtgggttgcttcaaccacgtgctctcgccgcttgttccttcgccgccgggtaggcgcgtccgagcggcgctgcggtgccggtggcatcgtcacccgctgaccgcggtctccctccggcggctcccgtgcggcgcggcagctggtcgtggcacgcggcggctcgcggcggcggcagagtcgcaggccgtgcaggagcagccggcgcgggccgaagaggccggcggggcgggtgccgctgaggcgtcctccaagctggttctggtcgttggcggaaccggcggcgtcgggcagttggttgtagcatcattgctgagcaggaacatcaagtcaaggttgctcctaagagattcagaaaaggcgtttgtccctgt

SEQ ID NO: 274756 - DNA, 825 bp, Zea mays
gctcgagtatgctcttgtatatggggagttcaaggcgatccccaaacagcagattcgtgactacatggcttaaggctgggacaattgtctgagaaggggccattcagggggcagcgacgttaagacagatacttggtgaatctgcggtttcatatttttagttgctgagaatgaagaggcacttgttaaaaggctaatccaccgtaaaacagaaacatcagatatgcttcttgtcagagtcgcaacagccagggaggaggtgaaacacatgaagaatttcgactatgtggttgtaaacgctcaagggaaacttgaggaggctgttaaacaagtggaatctatcattgatgctgagaagtctaaaattcacaagcggcatgtcaatatctaagccaaggatcatgtgatttatgcctattgtcttcatctctataaaggaaaattatctgtccaagtctactgaagcgtgatgaaatgactcaggtttcagtagccagaaagttcaatggattgctgagttacaagaatatggcatgttctgtttaagaaatttccctcaccacaaccgggccagcacaatctctgggatatatacacgactctcttgttgttatttgtctcttttttttccctttgattttttagctctgcctggaggaatctggaaggctgtaccaaactagttctgggtgaatcttaagtgatgttccatcccttctcaatttcgtactgaccagtgttgctgggcatgcacaagcaatcggtgccccaaatagcaaaattgccagtttggctgcaaaatataaattgcattgttttttttcc

SEQ ID NO: 274757 - DNA, 541 bp, Zea mays
ctcgagcgcacgcctagccggtgtgcttgtggtcgtcgtagagtgtcgccctggtgataacgaggaatggcgccggacgctggagagccgtgggtcggctgttgccaatggtggcggtggtgatggatggcataagccaaagacatgggctgagctggagaggcttctggaagggtaccaaggttgcacagactatgaaattggggatgtaccgaggattgtagtggatacaactgatccgacagttgatgcacaggtggtagctgaaaaggttgtggttttcattagatcccatcttgcttgtagccaaccatcttgtgggagacaggattcacctgtttgccattagaaaccaaaatgtaccctagcttaagcattaggtgaagtttcgttgcaaaaggttgatctgttgtactgcaatgctcaaagttcttttttttatgggtgtaacctaaaggttctgttactgttgggacttcaaagggattttgttgttgttgttgtgtgatctagaggtttcgtaaaaagatgttcttttttc

SEQ ID NO: 274758 - DNA, 460 bp, Zea mays
ccgacccgtgggggaggcgtggccgccggcgagcttcgggcggtacaggacgcgggtggagctgccggagaacgtggacgtggagaggatcgccgcagaagtgaaggacggagtgctgtacctcaccatccccaagctgtcggcgggggccaaggtcgtcaacatccaggtgcagtgatgctgtgggtcagattcatcaggacgatgagcacctgctgccgtgcttttcgcagcttctagaatctggatgcttgggacgagagcgatatcgatctagctaccactcttctttttctgtttcgttcctcgattttgtttgctatgtcacacatggtaaatcttggtagttggtgccagaagataaggtgtaatctttgccctgtttggaaccaattccagaatgggccccaatagtcttaaaattaacaaatataaaaaaaaaaaaaaaaaaaaaataagg

SEQ ID NO: 274759 - DNA, 357 bp, Zea mays
tcgcttccaggcactgacgccgtgaactaggtagggatagccccccccctgaaatcccagtcccccaagtcccaaaccaagggcccttgtgcccatcccatccgtcctccttcgggacttgcagggaggtgtgacctgcgtcggcgggcggctgggcctgaccatcgacccgggctggcgacggggaggcccccgccgagcgcgtggggcggttggtccgcgagagccccgtggtgatcttcgcctggcgcgggtgctgcatgtgccacgtgatgcggccgctgctggcggccgtgggcgcgcacgcgacggtgatcgagctggaggaggccgccgaggaggccgcggcgtcggccg

SEQ ID NO: 274760 - DNA, 416 bp, Zea mays
acggacgcgtgggcgggagaacatgtacgaggcgatgtcgccgcgccgggcgctcctcgccatcctcctcgccgtcgccctcgcctccgcttcctcggcaccccagcccccgccgtgcagccgctcgtgtgcggccctcaactgcgactccgttgggatccgctacggcaagtactgcggcgtgggctggagcggctgcgacggcgaggagccctgcgacgacctcgacgcctgctgccgcgaccacgaccgctgcgtcgagaggaaaggtatgatgagcgttgaatgccatgagaaattcaagaactggcatgaggaaagtgaaaaaggcaggcaaggttggcttctccaagaaatgcccgtacgagatggctatggctacaatgactcaggggatggatatggccatcatcctt

SEQ ID NO: 274761 - DNA, 365 bp, Zea mays
acccacgcgtccgcccacgcgtccggttctgcgtcagcacattcctgaatctgaagccaaggataagttcatatctaaatggaataatgtggctcataacagaaatattacttctggcttgaactcgtatggtttttatgcttatgactcggtttgggctgttgctcgtgctgtcgataaatttctcagtaatgggcaacagatcaacttctcaacagaccccaggttagaagattcaaatggcagcacgttgcacctatcaagtctcaagatatttgacggtggtgagcagatgctgcatcaacttctcctcacaaactttacgggtgtaacaggtccagtccagtttgattcagagcacaatt

SEQ ID NO: 274762 - DNA, 447 bp, Zea mays
tcgcgctgacctacgtggtggtggcgcgcgacgactggtggctggcctggcacaccatgggcatcggcgccgcgatcatgctcaccaccctcggctccatgtgctactgcatcgtcgcgcacaggctggaggagaagaacaccaggaagatcaggagggcctccgcgagccagtcccgcggctcgtggtcccgatcggtcgactcggacgaggagatacttaacagcgagtacaagacgaagatgtacgcgctgtagcctgtaggatggatagcaagtgtaacatgacggattcttttgtacataccagtgctttgtttcgccagaggctgctccatggcattcggctcgggatgcagaggctgcggcaccacatcagtcttcaaccaaaggactgaaggcccttcctgtgaaaccaagttcaggtcacttgaccggtgtgcctgtt

SEQ ID NO: 274763 - DNA, 1002 bp, Zea mays
agattcattatctaatccgatatatagaattcccttctatatggaactggattccatatctagttctatgcagcatattgttatcaattgtatatcttgatttgattcctattggatttggattagttcgatttcaataggggttcttcctgtatttcgtcttttattatgttagatgaaggggaaaaaatgggaactcaaagatatcgaagagtaaaaaaaaggatggaataaaagagtgattggttgaaaagaaagagaaatagaataatgagaatcatatggatttacacaaacctctaatgattagaaactaaaaacgagatctcgaagtaattcgaacgatttcgattatcatttatttgtacttattagttacttctacccgatagagcttagaagttggaagtaataatttcttggttgattgtatccttaaccatttctttttttttgacacgaggaactcatcatgaatccactaattgctgctgcttccgttattgctgctggattggccgtagggcttgcttctattgggcccggagttggtcaaggtactgctgcaggacaagctgtagaaggtattgcgagacagccagaagcagaaggtaaaataagaggtactttattgcttagtctagcttttatggaagctttaacaatttatggactggttgtggcactagcgcttttatttgcgaacccttttgtttaatcctaaaaaagaaaatgagtcctttagattagatacttttttctttttttagtacattggcatttgcttatgtaattctaagtatatcaatactttactttactcctatttattatattatttcttttttatattattccggaaattttgtatttatcgggacagacaataccctaggaaccccaagaagggctgatttgagcatgatcaatttagaggatatgctcgccctcttccttcccgtccttagtttaggacagtgggaagtatttttcctttttatt

SEQ ID NO: 274764 - DNA, 831 bp, Zea mays
ctcaactcttcttttcccctctccctcccctcgccgtcgctgtcgtcgccgtccgtgctagccatggatctaggcgctcccgcccgacggcgcctaccgatccgcctcttgctggtgttgctcaccgtcctcgtggtcctcacagcgcgctccagtgccgaagtcatcaccctcaccgaagagaccttctccgacaagataaaggagaaggacacggtgtggtttgtgcagttctgcgtcccctggtgtaaacactgcaagaaccttggaacactatgggaggacctgggaaaggttatggaaggtgcggatgaaattgagattgggcaagttgactgtggtgtcagcaaaccagtatgctcaaaggtcgatatacactcctacccaacattcaaggtgttttatgaaggcgaagaagtagtaaaatataaaggacctagggatgtggaatcgctgaagaacttcgtgttgaatgaagctgagaaagcaggcgaggcaaagcttgaagctgattgaggcaggggagtttcagcaagcatgtggcgagtggcgtagacaaggaacaatgctttgcaacattgtcttctatcctgtcatttacaaagccagtttacaggaaagaaatgaccttatgacctcgtatcagagtattcctcttccaaagtaactccgaatcagttcatagaagctgtactccattccatagtttttatcacattgacaaactctccgaatcagttaatagaagctgtactccattccatagttttcatcacattgacaaactgaagtaatgattggaacgcatccatacaaagggcctgttatgtc

SEQ ID NO: 274765 - DNA, 543 bp, Zea mays
  unsure (1)..(543): unsure at all n locations
gtcacgtttgactggtgattctagatatgaagctgcagctcttcgtgctctccgcaagttatggagcatgagaagttcactgaatctagtaggcaccacacttgatgtttttactggcaagtggattcagtattcatccggaattggtgctggtgttgattcattttatgagtatctgattaaagcatatattcttttcggaagcgatgagtactgggatatgtttcattcagcttatcttgcggtgcagaagtacttccgacatggtccatggtatcatgaggctgatatgaggactggagaagcaacgcactggcagctaactagccttcaggctttctggccaggtcttcagacacttcttggagacgttactgctgcaaatctatcacaccgtgagttttacaatatatggcaaagatttggtgtgctacctgaaagatatcttttggactatggaatgttgcatcctacagagaagtactatcctttgcgtcctgagtttgctgagtcaacattntatctntatcaagctactaaaga

SEQ ID NO: 274766 - DNA, 693 bp, Zea mays
  unsure (1)..(693): unsure at all n locations
cgggccgagccacgcgtccagcgaaatggctggtgaacaagctgaagggcaagatgcagaagccgctggcggacctgctcaaggagcacaacctccccgtgggcctgttcccgcgcgaggcgaccaactacgagttcgcgccagagacgcggcgcctgacggtgtacatcccgtccccctgcgaggtcggctaccgcgacggctccgagctgcggttcgacgccacggtgtcgggcacgctgggcgagggccgcctcacggaggtggaagggatcaagaccaaggtgctcgtctgggccagggtcaccgccgtcaaggccgacgccgccaaggtccacttcaccgctgggatcaagaggtcgcgcagccgggacgcctacgaggtcgtcaggggcggcatcaccgtcgacgagttctagcttagttttgctttcgcggctcacatggatggacgggcttcctcttgctcgctgcacgctaagatggacaagattgttgctttcagttgcaggaataaattctacacccattagctatgtgggagatctgcgtgcactgtacatcgtgtgttttgtgctttgttgtgagaatgtaacacctgaaggattcagaacgtgtgctcattgcttatgatatatgacacgtgacaggctttagcaaaaaaaaaaaaaancnaaaaaaaaaaaaaaggaa

SEQ ID NO: 274767 - DNA, 487 bp, Zea mays
agggccgactatggatgccgtggtaactatcctagaggagcttcaagactctggtgaggccgacaagcgtcaaggacccaaggctggaaccaaacaggcgcctgctgctgctgccgcgagcgctagcaagagcagtcgcaagcttcgccggagaaccctgggagggacgaaggagacgactgttggtccaaatccaaaaccattattggcccgttctcgttagcgaggaaagggaaagcgttgcttggtcaggtggtttgggtaggtagactgtagcttgtgaatatgatctgtcctgtgtataatgagggtaatcggattctttttttttttttggcaacgagtcttgtcgggttttttttaatcgtgagctgctcggtttttgcattgtctggatcctggatgtcgaaacccatggcatggcatcaagggaggagaggccatgttccgagtgtttaattaacctgaatcattatgtttttgctgc

SEQ ID NO: 274768 - DNA, 646 bp, Zea mays
gttaagaagtgggtctccaagactagttgaactgaacgattttgtgcgtcaacgacacagcaaaggatttcttgatgttcttagttttagtgagacccaggtcacaccgattgttgaaggatatggcggttgggcacttcgtatggagatagtgccaattgaatctgcatacccaggctttggggagcttgtcgttctaccgtccactgatcatataaattcatgtaagccagttaacatgaacgatccttcttatgcggaaaccttggcatttttggagaagaacttcgaattatgcctggagagagcagagtcctaggtcttgtcattggcgccgtggagttttcagcaatctgaaggcttcattttccatttaccgccagagacttttctcccgttaacgacgaatggtggttgatctgaccaaatgatctgggcgtgctgtggtttatgaagctcgcaccgaactttgtagtaacattgcacatagcggttaggctgtaaatagctgtcatttaccttttagttgacatgagttgcccccatgtaagatcaagctatataccccaatgcctgtatcgtctcaacagttttcagcaacagatttttttacaaaacaatctcataatatataagccattttcat

SEQ ID NO: 274769 - DNA, 477 bp, Zea mays
  unsure (1)..(477): unsure at all n locations
ctggagctgaaaaatccatttgttcgtaactggatcgatcttctgtgctttctacttgctggagttaaatctgatggtgctctttctgcagaaatggtttatatgtttgcagaatggtacaaaccaggatgcttgcttgagtaccctctgggtggaactggagcaataatagatgcccttgtgagcggtattgaaaaatttggtggcagacttgctcttcgttctcatgttgaaaagatcttaatagagaatggtcgagcagttggtgtcaagctacaaagtggacaagttatccgtgcaaagaaagcggttgttagcaatgcatctatgtgggacactttggatctgttacacccgatgctgtcncaaaatcatatgaagatagagtgaaagcaactccacaatgtgaatcgtttatgcatctccaccttggttttgatgcanagaatgctanagaagaccttgggatccatcaca

SEQ ID NO: 274770 - DNA, 1089 bp, Zea mays
cagttgttatgaacttatgtctgaaatggcatttcataataagaaggttgaggttgaggattggctaaaaacatactcctgtaggagatatggtcaagcaaatgctgacatagagaaagcttggagatatttgtatcatacaatatacaattgcactgatgggattgcggaccataataaagactatatagttgaatttccagacataagtcccagctcagttacttatcaggtttctaaacgaaggggcatgtcaattacgagaaaccataggaggtttttcttaagcgaggtgtctggaatcctaccgcagccgcatctgtggtactctacgaaggaggccgtcaaagcccttgaactattgctggatgcaggaagcacattttcagaaagtctcacgtataggtatgaccttgtcgacctaactaggcagtgcctatccaaactagcgaatgaagtttaccttgacgcgataagtttgtaccaaaagaaagattcacatggcctgaatgctcacgcgaggaaatttcttgagatcatcgtggatatcgatacgttactagctgctgatgataactttctgctgggcccctggctggaaagtgcaaaaagccttgctataactgaaaaggaacgccagcagtacgagtggaacgccagaacacaggtgacgatgtggtatgacaacacggagaccgagcagagtaaactgcatgactacgccaataagttttggagcgggctgctgaagagctactaccttccaagggcgtcaaagtacttcgcctacttaacgaggagcctgcaagagaaccggagcttccagctggaggagtggaggaaggactggatctcgtattccaacgagtggcagtccggaaaggaggtgtacgccgtgaaggccccgggtgatgctttggcgattgccaggtcactgtacagaaaatacttgaggccttgagctagtgctagtcaatgcacggatgtgaccattagaataagtggattccacatctctctccatcaatttaagtttaattgatacatataatttaatatatggtgtcccccagatatctttaagttttc

SEQ ID NO: 274771 - DNA, 646 bp, Zea mays
cccacgcgtccgcccacgcgtccgtccgcggcgccgcagacatgcgcccgcttatccgaaccgctcgctgctggctcctccgcgcgcgtgttcgcgccatggccacgcttcctatggcgtcccccgccgccgccatcccctcctccgccacccgccccctcgcctccccttcttcgcgttctcaccgccccctcacccgcttcttctccgtcgcgccggcgccggtcggggcgaaagggctccgagcggcggcctccgccgttgaggtgggcggcgtaaagatcgcgcgcgaggatgttgtgaaagaagatgacccaacaaacaacgtgccagacactatctttgcgaagattggcctgcagctgcacaggagggagaaccatccccttgggattctgaagaacacaatttatgattactttgacaagaacttcactggacagtttgacaagtttgatgacctttgcccccttgtttctgtcaagcagaattttgatgatgtcttggtcccttctgatcatgtaagccggagttacaatgacacatattatgttgatgatcaaacagtcttaaggtgtcataccagtgctcatcaagctgagctgctaaggcatggacatacacactttcttgtaactggagatgt

SEQ ID NO: 274772 - DNA, 413 bp, Zea mays
ttatccgaaccgctcgctgttttctcctccgcgcgcgtgttcgcggcatggccacgcttccaatggcgctctcccccgccgccatttcccccttcaccaccctccccctctactattcttcgcgtcctcaccgccgcctcctcgcccgcttcttcttccgtcgcttcggcaccgggcggagcgaaagggcaccgaccggcggcctccgccgttgaggtgggcggcgtcaagatcgcgcgcgaggatgttgcgaaggaggatgatccgacaaacaacgtgcccgacaatatcttttcgaagatcggcctgcagctgcacaggagggataaccatccccttgggattttgaagaacacaatctatgattactttgacaagaacttcactgggcagtttgacaagtttgatgacct

SEQ ID NO: 274773 - DNA, 1082 bp, Zea mays
gaatttttacacatctggtttcggggtaccattgccagccagagcgagagggagagggagagcgagcgcgccgcgcagtcgccgtccacaccgttgagctttttctcaggcttcgcatggcctgattcatcctacagtctccaacaagccaagcaaacgccgcatcgcgctttctccgcttccttctttcccctcacagggtcagaccccaacgccgggagaataggggattaggagccagacctggcggcgccgggcgtccaagaaacgctgcctaataaaatccctccggcgtctgtcgtcttgaccgcggcggcgcaggcttcttcttttcgctctccacggcagcgtcatgaagattaaggggaacttgcatgtttgatgtacccctgtagcaaaaattcttgtgataaaatttgttgaattagtcactgtcagggagggatctagttgtcggttgtttgtattaaagctgctggcactttccttgcagggtatctgtagaataaatgggagaagcacacttggatgaatgttgtcattgccaggggtgtgctggcaagtatacactactcagagatgaagaaaacccacggtggacaatctttgagaggcggcttccttgctgtggttgtgggataggatggtcttcttttcttttagggttcttgtgtcctttgatttggtactttgcagccatactttactgctgcaagtactacaacaaggatcctcgagagcgccctggtctagctgcatcagctgttgcggctctcatcttcacagttctggcaattatcgctctctctgtggcactgataatctgtgtatacaagtagtacccaaagcgaggaaaacgcggtcgctggacctggaattcagaaggaccttgtaatttgagtgataggagcatgcctttccagtcaccctacattcatgtatccctatatcaagttgttgatttaaatgctgcatcggttgacctgtcggctgctgttgtctatcaacggggatgaccattgctctttcgccaaaaaaaaaaaaaccacaaaaaaaaaaaaaaaaaaaaaaaaattattaaa

SEQ ID NO: 274774 - DNA, 576 bp, Zea mays
ggagaaggggtgtgctggcaagtatacactactcagagatgaaaaacccacggggcaatctttgagaggcggcttccttgctgtggttgtgggataggatggtcttcttttcttttagggttcttgtgtcctttgatttggtactttgcagccactctttactgctgcaagtactacaacaaggatcctcgagagcgccctgggctagctgcatcagctgttgcggcactcatcttcacagtcctggcactcatcgctctctctgtggcactgatattctatatataaagcgaggaatgaccttgcgcttgcttgaaatgcgtactcaggcactcatcttcacagtcctggcaaccatccatagctctctgtggcacagacatctgaaacccaaagcgaggaaaacgcggtagctggacctggcattcagaaggaacttgtaattttagtgatagtagcatatctttgcaatcatcctttcatgtatcactatatcaagttgttgatttaaatgctgcatcggttgacctgtcggctgctgttgtctatcaacgaggatgatcattgctctttcgc

SEQ ID NO: 274775 - DNA, 410 bp, Zea mays
gacaccgatcgtactgagccattacatctacaagaggatgaaggaagaattccccgaattcgtggagaaacgggagaaggaggggctggtatatacaagggttctgggggagggcgacgacccgtcttcgccaatcggccgtggatggcagtcgacatttctcactaaagataaagccgttgctgaggaaagggccgccaagctcgggatgaagctggaatggaccggcgacggcgtgaggacggtcatggggcccatcccggcggtgaagtgggacgagagccgggggcggaaggtctggttcaacagcatggtggccgcctacacggggtggaaggacgcccggaacgacccggtgaaggcggtgaccttcggcgacggctcgcccctgcccgccgacgtcgtcgccg

SEQ ID NO: 274776 - DNA, 363 bp, Zea mays
tagggaggctccgcgacgagctggtccacctcccggtggtgctcgccgccggcccactccacaagctctcctcctccaggggcgccgggagcagcttgctcgccccggaccacagctgcatcgagtggctggacgcgcagcgccccgggtcggtgctgtacgtgagcttcgggagcctggcggccatggactcgagcgagctccgggaggtggcatggggtctggcggagtgcggccaccccttcctatgggtcgtccggcccaacatggtacgaggctgcgacgtctacaccgcacggcacctcccggatggtttccaggaccccgtcaagggcataggcgtggtggtccgctgggccccgc

SEQ ID NO: 274777 - DNA, 417 bp, Zea mays
agtgacaacggagcttgtcttaaaagacaccttgtctgcaacggaatgaatgactgcacggatggtaccgatgaaaaaatgtgtgaaaactgggagtgcaattttgatgaattgaaatgcccgtcttccaaccaatgtattccgatcgtctggaaatgcgatggaaccaaacaatgcaccaatggaacagacgaagaaaactgttcagaaacatgcccgaaccctgatgatttcttctgcccaggagggccttgcataagcagcacaaaacgctgtgacggtgtaaacgactgctcgaacggaaaagacgaagccgattgtaaagatacgtaagactgcgacgattccctttaggtcgttaccgctttgttttttaaaaacatttttctttgttatgatttttgtaaatatgtacgt

SEQ ID NO: 274778 - DNA, 849 bp, Zea mays
  unsure (1)..(849): unsure at all n locations
accaactgcaattgaggcaaatgattcttcctccaatgacgatgaaagagattcaggagcagatacaccagaacaactgtctagtggaggtgaaaatgagaaatcttcactatctgagagtgaaaagaatgatacaccaagagaaggtgctaaagagacaacaagtaaactttctgctgctgcggctccattcaatccatccagcgtaccagcttttggttcaatggctgtcccaggtttcagagaacatggagggctattgccatcaccagccaatgtgccccctatgctgtccatccctctccgcaagcaccctcaccaatctgcaactgcaagggtaccttatggtccacgtctggctggaggctacaatagatcagggcaccgaggacttcgtaagaagcctgtgttgacaagtggtgaggcccctacagaaacaaacacgtctggccccaggattatgaaccctaacgccccagagtttgttccaggtcaatctcggagtcctaatgggcatccagcatctccaaatggtcctttagcatctccaggtggtattccatcttcaccacaggaccttctatcctctccagatagtaccttggagtcaccagtaactgcatccccacaagtttctgaatgtagccagattagtcctgaaggagatgttgagggtgtgggtgtaaagcagaacatggatgacacgaaccacccagaaagtaaagatggtgaagtggagcctgagcaaaccaaagctcctgaaggtacacaacaaggcgcagcggtaaaagatgctgctgaagagttgattgcagccgagcagcccaaatcctgngctgactacagcga

SEQ ID NO: 274779 - DNA, 440 bp, Zea mays
cccacgcgtccgcccacgcgtccgcccaccagaaacccacgcgacgcgaccgaccaccatggccgccgccgcgctcctcctctcgccgcggctcgtgtctttcccgcctcacccgagcctcgccccactcttcaccaagagaccaccgccctaccccctcggcggcgccggcgcgaggctccgggccgtcggggacgggcccggcgcggggctgccacccgagcaggccacggtctacgacggcgcctacggtccctggaccctggaggactccgacgtgcgcgaggtcctgctgtaccggtcggggctggtgacggctgcggcgtccttcgtggcggcgtcctccgcggcgttcctgccggaagggaaccccgccgcctccgccgtcaccggcgccgccgacctcctgtacgccgccggcgccgcggggctggggctgt

SEQ ID NO: 274780 - DNA, 543 bp, Zea mays
agaccagaggacggctggaaagggtaacttcgcctcctgatttcctcccccgcccgcgctcacccggtgaccgcatctcgggcgcagccacctcccaatctccgatggcgctccaaaccctaaacccctaccggcacgcggcggccgtctccccggccccgtcgcccgtcccgcaccgcggccacccgccgccgcatgccgtcctgcacctccctccccgccgccgcctagcgggcggcgccgcccggccgctcgccgtcgctgccgccgtctcgggggccgtcaacgaggccaggaggcgtggggttcctcaagagggcggggaggacgggaggaaggacacggacctcgccacgctcggaaacctatgcgtcgacgtcgtgctcagcgtgccccagctcccgccggcgcagcaggaggagcggaaggcctacatggagcgactcgccgcctcaccgcccgatcagaaattttgggaggctggtggaaactgcaatttagcatttgctgcagctaggcttgggcttaactgttccactctgg

SEQ ID NO: 274781 - DNA, 913 bp, Zea mays
acgctggcgcccacgcgtccggcacggaaaagcagagagcctcttgctgttagtgaactaaggcgacggagaccgcgagggcggcgaactaggctgggcagcgatgatggcgacctcggccagcggcgtctccctcctcctcctcctcgcccatccggcgccgccaccgcaccccgccaacggcgccagcagcctgtggcgcggcggtggcgccgcgctagctcctcatcctgctcgcttcgcggccaagaggaggacgctccggttggttaacgtcagcgtcagctgcagcgccgaggcgctgcgctccgacggcgctggcgcggagccggcggtgccgcggtctgtgccggtgcgcgtcgcctacgagctgcaacaggccggccaccgctacctcgacgtcagaacggagggcgagtttagcgccggccaccctgaaggagctgtgaacatcccatacatgaacaaaaccggctcaggttaaaaagaaaaagaaaaaaaagcgttgcttcatctgttctattctgttctgttcttgcgccgcctcggttctgaatgccacgcgcaggaatgacgaaaaacgctcactttctcgagcaagtgtcgagggctttcgggaaggacgacgagatcatcgtgggctgccaaagcggcaagaggtctctcatggcggcgaccgagctctgctccgctggcttcaccgctgtcaccgacatcgccggcggattctcgacctggagggagaacgagctgcctaccgtccagtgacggtgatttcagcctgcctcgccggcgtcgtaagtgtggttggagcttgcccagcgttttctgtccaagcctgtacatatgtcttcctgccttctgctatagttctggaataaagagtgctggggaatggaatggagcatgttgt

SEQ ID NO: 274782 - DNA, 446 bp, Zea mays
agcatggatgaaaatctggagtcccgctcagatttgaataacactcccccaaattgtatactggtatacttaatttggggtggtcgagctgttagcatccccttgcttgtcaggcgaccgtcaagttgtcttctgtgcattgttttcttatcccaggtcaggtactggtctgaatttaatcaaatgagcatcgagctgttagaaaaccaaggcaccaactctaatagattcaccatctggaaagcgagggcagttatcatgccttgtgaagatggtttgttgggattgcgattccctttatgcgtcctgtttttttatttgtcatcttctgctgtatcatcctttctttgaactatattttcatgtggtacatgataccttttgttaccttcgccacagtactgctcacgaatagcattttgagccattttgctatgccttggaat

SEQ ID NO: 274783 - DNA, 864 bp, Zea mays
cctctgcaaccaccaacagctaaactaaaagcagcggcggacggcgcgcggtactggacgaccggccgacgatggctacgccggcgcagcagcagggtgaccagcaccagccgaggctgcagaaggtgatggtggctgtagacgagagcgagtgcagccggcacgcgctggagtgggcgctgcggaacctggcgcccacgctggcgccgccgctactggtgctcaccgtgcagccgcacttccccctcggatacgtctccgccgcgtccttcggcgcacccctgggcaccgtccctccggtggctccggagctcatcaggtcgatgcaggagcagcagagggagctcacgcaggagctcctcgacaaggccagggccatctgcgccgagcacggggttgctgtagaggcaattgtcgaggtcggagatgcaaaggaggtgatatgtgaagtggctgagaagaaaaatgtcgatctgctggttcttggaagccacagtcgtgggccaatacagaggttgttccttgggagcgtcagtaactactgtgtacatcattctaagtgtccagttcttgtggtgaagaaccaaggctgatgaaggattcaactcccagctgctagtcctaatcatgttcgggtatttgtcaacgtatttgtaatgtgtagtacttgctttagccaaacgcattggcgaataaagtagcttgctttgcttcttggaagggccgaggctggactggaggagagttctttttctttttcttttttctggtcagtgtgcctttgctccggaatggcagagttgtaaataagatctacgaactctgtccgtatttatggttgttgtattaataaaaaaaaagaaa

SEQ ID NO: 274784 - DNA, 467 bp, Zea mays
gccttccggtggctccggagctcatcaggtcgatgcaggagctgcagagggagctcacgcaggagctcctcgacaaggccagggccatctgcgccgagcacggggtatgtgcagatccggtccccttctttctcccaagtgctagcgtttatctattttacagatcgtcgtagtactttctttttggctaattttcacagagcaggttttagctagaagcctacaactagctgttccttagctagagccatagagggttttgaggttaccactcgacccctgtttgaactgcactgcaggttgctgtagaggcaattgtcgaggtcggagatgcaaaggaggtgattggtgaagtggctgagaagaaaaatgtcgatctgctggttcttggaagccacagtcgtgggccaatacagaggttgttccttgggagcgtcagtaactactgtgtacatcattctaagtgt

SEQ ID NO: 274785 - DNA, 532 bp, Zea mays
gggcaccgtccctccggtggctccggagctcatcaggtcgatgcaggagcagcagagggagctcacgcaggagctcctcgacaaagccacggccatctgcaccgagcacgggagcaggttttagctagaagcctacaactagctgttcctctagctagagccatagagggattgaggttaccactcgacccctgtttgaacggcactgcaggttgctgtagaggcaagtgtcgaggtcggagatgcaaaggaggtgatatgtgaagtggctgagaagaaaaatgtcgatctgctggttcttggaagccacagtcgtgggccaatacagaggtatacatgcatcttggacccatcaagagttaatcctaagcacttggtcactcgttttctcaccactatccttcatcgtcgctgcaggttgttccttgggagcgtcagtaactactgtgtacatcattctaagtgtccagttcttgtggtgaagaacaaagctgatgaaggattcaactcccagctgctagtcctaatcatg

SEQ ID NO: 274786 - DNA, 416 bp, Zea mays
accccagctggagtcaaaaagagattcttttgatattggcaccgtggaggttattcaggatttcaggttacacaaaaaggatagcatttttaaagagtaaagtcacctagtgtcgaaacacgacgatttagcaagctacaatttgaactttcttgggtcctctcacaaccagcaaactgccggtatccaaaatagttcgtggtactagctattgccgtggcatgtgatgtgagcaaaaggacacatcaggccccggtgtgcttttcaactagccaaaagggcagcatatatcgctactttggaggaaatgccttgctgatgctttcttccagatcataaaattcaaattttgatgatgatagggagctggagctaggttcaaccgcaacctcaatctaagaaattggctgtgcatg

SEQ ID NO: 274787 - DNA, 609 bp, Zea mays
ggagccggagggagatttttttgatattggggccgtggaggttattcaggatttcaggttacacaaaaaggatagcttttttaaagagttaagtcacctagtgtcgaaacacgacgatttagcaagctacaatttgaacttttttgggtcctttcacaaccagcaaactgccggcggacccttgggcggacccctgggcggacccttgggcggacccttgggcggacccttgggcggacccttgggcggacccttgggctataacctctaaaatattcttcatgaaaacatattagttcctgcgtaaatgtgatttgcaaacttatctgctgtttaaattgtagaccatataagttgctatcctatctgctgacgaagtcggtcatgcattgggctagcttccatgttcattttgatccttttcaagcatcatttgtaattcttaaaggttgaacctatgctgtgattttttatttcaaaagtatagtgatctattagcagtttgatttcatgtgattcatctttctaatgttcttgatagtgattttctcgatgaaataattggttcatgatgtttttggtcatatccaggtagctgctaatggagat

SEQ ID NO: 274788 - DNA, 1137 bp, Zea mays
cagcacacagacgcaacctccctccctccccatcaccgttcatgtcgcccccgtccgtgatcccctccccgccctcctctccgcgaccccatccatcctgtcgccgtccacgcacaaccccgcgaactcgaaaaaaagggtacgaatacgaaccccaatccagggccggaggagggcgagcgaactcaaaagcaagccgttccagtccaatccgcctcagtccaaatctaatcgccgggtttaggcagaaggggcgggacgcggcgaggtttaggcggggtttgttttgtcccttccgtgcgattctgctctccgcgcgggaggcaagtactgacggaagcgaaggcgaaggcggaggagggggtccccggcggtggaagtggaacgcgccgatgcgcaagtttcaggactccatcaaggccctccaggccgacatcgatcacgccaatgcgatggcgtcggaattcctgagggactacgacggctcggtcatccagatgcgggtggcgtacagcgccgtcgcgcatttcctcctgcagtggaccgactgcaagctcgccggcgcgctcggcctcctcaaggttatgctatacaaggtgtgcgcggacggctcgtcggcgcttcctgactgggagatggaggccagcatcagggagttctacggcgtcattttcccgtcgctgctgcagcttccgagtggcatcaccgagctggacgacaggaagcagaggaagctctgcctgaagaaattcaggagcagggatgagcagctctcggaggtggacacggagagggagctcgagtgcgggatctgcctcgaggttagccccaaggtcgtgctgcccgactgtgcccacatgctctgcatgcggtgctttgaggattggaacgcgaaatcgaagtcctgccccttctgtcgcgcctgcctggaagaggtgaagccgggcagcctgtggatatacaccgacgacagcgacgtggtggacatggataccttgactagggagaacatcaggcggctgttcatgtacataaataagctgccacttgtagtcctacatgtagttgaccttgacgtttacaagtaccgcatcaagtaaaatgcaactgatccttccttggtgatgtgccattgtt

SEQ ID NO: 274789 - DNA, 437 bp, Zea mays
ggccgcgtccgggaaaacaaccaccacgaccccgtccattccgttccacttccacccgagctcagcgatcgcggcggcggatgcggatgcggatggggaaggggccgtcgtcgcgggcggggtcgcggcaccggcagttccgcgcccgagccatgacccgcgtcgacgacctccaggaggtcttctcgggcctgcagtccgcgcgcaaggactcacgctccgcggacgccgccgtcctcgaggcgcagctccagcagatgctgcgggagtggcgctccgagctcagcgattcctcccccgcctcctccctgcagggcaacgccagggaactgtcggattcgccttccgatactcttcgtctgctgcagttggtggtggccgaggaggaggatgacgccacgagcaagatggtcgagcagcagcagcagcagccccca

SEQ ID NO: 274790 - DNA, 452 bp, Zea mays
ttcttgtctcctagctctggccatggcagccaggggcgttttttaaaacacggctgagaactacacacaggactacgtggacccacaccccgcggcgcgcgccgacgtgggcgtcgggccggtgtcctgggacgacaccgtcgccgcgtacgcgcagagctacgcggcgcaacgccagggcgactgccagctgatccactccggcgggccctacggcgagaacctcttctggggctccgccggcgccgactggtcggcgtccgacgccgtgggctcctgggtgtccgagaagcagtactacgaccacgacaccaacagctgcgcggaggggcaggtgtgcggccactacacgcaggtggtgtggcgcgacttcaccgacatcggctgcgcccgcgtcgtttgcacaacaacgccggcgttttcatcatctgcagctacaacccgcgggcaac

SEQ ID NO: 274791 - DNA, 478 bp, Zea mays
acgcggacgcgtgggcgccgatcacacattggacttgcactggtgcttgctcataattactagttcatcagcaaacaacaaacaatggcaccgaggctagcgtgcctcctagctctggccatggcagccatcgtcgtggcgccgtgcacggcccagaactcgccgcaggactacgtggacccgcacaacgcggcgcgcgccgacgtgggcgtcgggccggtgtcctgggacgacaccgtcgccgcgtacgcgcagagctacgcggcgcagcgccagggcgactgcaagctgatccactccggcgggccctacggcgagaacctcttctggggctccgccggcgccgactggtcggcgtccgacgccgtgggctcctgggtgtccgagaagcagtactacgaccacgacaccaacagctgcgcggaggggcaagtgtgcggccactacacgcaggtggtgtggcgcgactcccacgcat

SEQ ID NO: 274792 - DNA, 1142 bp, Zea mays
ctcttcctcatggccacgtactcctagttggatttctttactgcgtggtcacacattctattccagttttgctaggatattcaaaaggcttatacagcaatgtggaatgccagtaatctcttctcttcagagtacactagaagagtttttaatttcaaaagagagaccaaggcaatgtgtcgctgctgaagcgatggctgggatgctgcactctgatatcattgggaatctggaatgtgagaacaactggttgatggcccagttgcataagattatgttagcaccatctgtggagtcagctcctgaatgggcagcttgtattcgatatgctgttacaggaaaagaaagagctggaactcgtgctcctgttctcaggcaaaaagtattagaatgcttatgtactcctcttcctcattccatggcaactagcgtacttgcgaagagatattcttttctgtccgttgctctaatagaaatttctccacccaaaatgttcccagcagagaagcaataccatgttaaaattcttgatgaactacttgacagcatgaaccattcatctgctcaggtaagagaagcaattggtattgccatgtgtgttacaacctcaaatatgagactttctgggttatttggcactggatgttcaccgcaaggccttcatggggatgtaagcatgattgaacaaacaggaaataaatattggtctgaacgtttgacagatggagctaatgaattagccgtaagtatacaaaatagtactcaatctaagcaactagaatcaacatcagattcggctgaagatagcatggatgatagagagcaggctgatgctaaaaggatggaaacgatatttcattttatgatcgcatctttgaagtctgggcgatcttctgttctactggacactattattaggcttgtgtacccaattctctcactacaggaaacatcacataaagatttatcattgcttgctaagtcagctttcgagttgctgaaatggaggattctacatcggccttttcttgaaactgctattacgtctattcttcctttagtcagtgatcctaactggcgtaccagatctgcactgttatcgtatctcaggacctttacctacaggcacacattcatacttt

SEQ ID NO: 274793 - DNA, 623 bp, Zea mays
gccgagccacgcgtccaccaaaattggatcagcttcgagttcttcacagatgtattgcaagggtcacggaggaaattcaggaaacaagatttaacactgcaatatctgcaatgatggagtttctgaatgctgcatacaagtgggaaacccagccaaaatctgttattgaatcctttgttctgctgctttcacccttcgcgccacacttggctgaggagctttggtttcgcctcggacatccacaatcattggcctatgaacagtttccagaggcaaaaagtgagtacctggaggaatcaaagcttgtactccctgtccaaatcaatggaaaggccccgggtgcaatccgtgttgacaaagcgtgctctgaggatgatgcttttcgaactgcagcctcggatgagaaactctccaaatatcttgatggaaaaggcatcaggaagaaaatttacgtgcctggaaggatcttgaatgttatcttagatcaacaaaagtcaaggacctgataattgctcttgcttgtccatttatctcgttatgagtcaggaatagagatcactaagacatgacagatctgtaaatttgttttttagcacccgcagtttactgtcaatctgcccccc

SEQ ID NO: 274794 - DNA, 323 bp, Zea mays
gaactacaccaaaaccagcagcacgccgacacgccgccgcgccgccattcccccatccgcccccccgcccccgccgcccttccctaacctcgccgcggaagacgtcgcgccgtgcgtactcagcagttccccggcgcacgcgcgtcggataagaactggttttggctcttcgtctccccccatccttgggtccttcccctcccactccctcttcgcctcgtccgcggcagtaggctcaagcttaggaactcgctaccgaggatcataaatttctctagggatttggcatatccgcgagtgagcaggattagttggaggcttcg

SEQ ID NO: 274795 - DNA, 578 bp, Zea mays
gcggatgctaagaaggtggatttgtcatccacttaaagacattgatgctatcaataaaaggcttgatgttgttgaggggtttatccaaaactgtggactaggccctacaacacttgggtatctccagaaaattcctgatcttgagagattattaggacaagttagatccactgttgggttatcatctttgcttcaactgccctttattggagaaaaaataataaagaaacggattaaaacatttataatgcttatcaatggcctccgcaatggtattgacttgctaaatgatttacaaagagcggaccatggtatcttggcgctttataagattgtggatattccatcattgagctatcttcctgagttaatccataagtttgaagagagaatgcaaaatgagtttccatgtggccaggtttctgatgtcaatgccaatggtgccaacgatttggctgctctgatggacgtttttatcggaaaggcttctgaatggtctttggtgatcaatgccgtcagcactattgatgtgcttaggtcctttgctgcaatgacattgtcatcatttggtgccatgt

SEQ ID NO: 274796 - DNA, 346 bp, Zea mays
cgccaagatggagtcccggaggacgcccgcccctgctgatagcgacctgcccgtgtcctccatggacgaaccgtagatcgcttctagctgcgccccggctgtggtctcctggtgacatggaatggtggcgggagagtagatcacctgtgattttaggcctggtgggactgtgggagcaggtgcgcagtgcgcttctgtcccggaactgtgggatcttgctcctgccgtgccgtgcttcaccgcttctggttcgtcatggtatacatgtatatggaatgtcttctggttgccgacgaacatacacaaatacacaataaaatcacaaagaaaataaaaaagacataat

SEQ ID NO: 274797 - DNA, 459 bp, Zea mays
gaaatcaaccggtttttcaggaacacattaagcagggcagatgttccggtgagctctcctgatgatgttctacaggcccctagtgtttctgcgtcaccgggcaacaagggcgtggaaggagtcagcaagggcagttcacccaacaactcgtgtgacgttctgtgcaatcagttcggttacattaaaatctcagattccaacaatgcgctgcagaatctggtcgtggacaggcccgcttaggctgtacctgcacatggtcatagaacctccagcagcttactcatcttactttctaccatacttttttaaaaaactttcacattataaagaatacagtctatggtataaaataatgttttacatggctgtatacacggaccgctgatcatagcctaagtcgttgtcgttggtgcccacacaactgtaaaatcgtaacctgttacaacgtcttttttagac

SEQ ID NO: 274798 - DNA, 436 bp, Zea mays
gacccacgagtccgtgtcaattaggtggtctttggacttttgtcgctctccatggagcttttgcactaataggtttcatgctacgtcaatttgaacttgctcggtctgttcagttgcggccttataatgcaatttcattctctggtccaatcgctgtttttgtttccgtattccttatgtatccactgggacaatctggttggttctttgcgccgagttttggcgtagcagcgagatttcggttcatccttttcttccacggatttcataattggacgttgaacccatttcatatgatgggagttgccggagtattaggcgcagctctgctatgcgctatccacggggctaccgtagaaaacactctattcgaagatggcgatggtgcaaataccttccgtgcttttaacccaactcaagctgaagaaacttattc

SEQ ID NO: 274799 - DNA, 692 bp, Zea mays
acccacacgtcaggtcaaagggaagcagcacctatattggcaagctaagatcaaacttccttggaacatagttcactgtctatgatgctcatccaccatatgatggtgctgcggtctcaaagagtcgctctgcacgtgtggttggtttgaagcaggtctcccctagagttccggctggaaattatcccgtttcacatatttcttacgagctgaatgttctgggctccagaggtccacgaaggatgaactgtgttatggattccatccctgcatcagctgttaaggaaggagggaaaactcctacacagactgaatttccacttagcagccttgactctttcccatcatttccattcttcagatctaaatcagctcggatagacagttcaacgtcgcaatcatccagtcagagggaagataggttggtgctgaagaacaagtctcctaggtggcacgaacaactgcagtgttggtgcctgaatttccgtgggcgggtcactgttgcctcggttaaaaacttccagttggtggcttctgaggacaatggaccagagagccaagagagtgacaaggtgattctccaattcggaaagatcggaaaagatttgttcaccatggactacggttatccaatatcggcatttcaagcttttgcaatttgtctgagcagttttgatacaaaaattgcctgc

SEQ ID NO: 274800 - DNA, 421 bp, Zea mays
cgggccgagccacgcgtccagcagagaccgaactctgccgtctcttcctcctccctctgcacccccacgagctccatggccgccaccgccatgattgggattaccaacctacgttgccgccacgacccgctctcctcccttccccgggctacgtcgtcggccgcccggtcctgtacgctgcttcctcctcgatgccgccgccattcttcttgctgctccccttcctcctccgtctctccgtgccgggcccgggtccgaccaacagcagcactgaagcgcatccctgccgccgacaccggcttcatgggtccagccaacaatgatgccaccactcttaaactatcatcgtctgccgaccttctccgcctccttatcgtccccagctccaccgctgtcaccggacactccttcagtgctttca

SEQ ID NO: 274801 - DNA, 415 bp, Zea mays
cccacgcgtccgcccacgcgtccgcaataatgattgtagatagatatgttattattgcattgcagttcatctatatcgatcactccagtgcttttgtttcattgtatgcttgcagccttgcacttcaatttttgcagtccaaagttctattctttacttggatatattactctcttaaaacatcaattcattgttttgcattcctttgtttatttgtagatatgaacaagtcctttgttctttaatgggtttgattttgctggcttgaactctttaggtttttgaactaatgataacatgtgtagacctgaaaattcgtagactattgtactgaaccttctgatgtttgttcctttcttcatgttgtaggttgctgatcaatttttaagcaagaaatctggtatgacgcatgaca

SEQ ID NO: 274802 - DNA, 629 bp, Zea mays
ctttctcgtgggcggacgcgtgggcggacgcgtgggcggacgcgtgggcaaaatcttggggagtcaagttctgatccacaccctgattatttcaattttgggataaatgaaagtgagggttgtagcttgttatctgaggaagaaccatgcataaagatcagaaactcgactgcacagtggtgcattgagcagaacatagaatatattgaggcctgtgcttccaatgctgactttgataagtgtctatcagtggatggtgatagccaaggcttagagcgactccttggagctctttctgcacatatgtggcctggaatgattctgaaatctggaaacagaataactgtcccatccttggttgaaaaacaagaatccacagatgatgaatccaactatgattttgagtacgaggtcttgtctcatggatccgatgaccagtgggaatttattggagagacaagtacatccagaagatttgagagaccaaatgagcctgatggtgcacaggatcacacacatcaagttgtgaatgccggtactgactcttcagcatccaactctcccccgactaacacacccacagaaactgctgaagagaatactgtaactcagagcaacaaaaccgacaa

SEQ ID NO: 274803 - DNA, 908 bp, Zea mays
cggaccgtggggcctgctagctatctatcagtgatccctcgcgaacgatgtgggacgggctggagagcgcggcgaccgtggcgcacctggctcggtctcgacgtcggcggcctcatcaccatgatcgggcaggcggcgcggaaggctcggcagaacaccaaggactgcgagcacctagcccgccgcgtcggcatgctcgcggagctggtcccccacctgcaggacccggaggccaggcgggcggtggccgggctcaaagatgcgctcgtggaggctcaccagctcatcacatcctgccagaggagggggctcacgtcccagctgttctcggcgtccaggcaggccgacaggttcagggacgtcgagcgcaagatcgaaacctgcgtgtccatcatccctgtcatcggctacatcggcataacaagacgcctcgatggttcgcaatcccagtcccagctgtcggcgggaggggctgaggatcgggagttcacgctggcggagatcgccgtggccaccaacaacttcgccgtcgtgctcagcaacgacgccgacactggcaccaagggatacaagggaaggctcgtgcacaacgggcctgaggtggccgtcaagcgcctgaaccgcgcgcggaggggagcggaggacgccttattcgcggagcagcacatgctctcggcgatccggcactgaccgcatagatcggctactgggcacctgcgcacgacgacggctagcgcatgctgctcacccagatacatgcacaacggctggctacacgaccacctgcacgggcaccacctgtcgttctcgtcagcgtcgacggtgacggagatctggaggattcgcgttcaggagctggatggcacggggcgcgccgtcgcgcacctggactgacacgacgagcctct

SEQ ID NO: 274804 - DNA, 449 bp, Zea mays
caaaaactgtttatttgtcttctggagagtctatttctaacaatgaggtctgggcgggcgcctgcgcaaagatttcaaatgttaagggaatggacgtggagttgtggacgcaggatgggcttccttcagcacaactcctgaagctgatgagagatgtggttgctggccttgtgcatctgcatgacttgggaattattcatcgtgatttgaagcctcagaatgtcttaataagcgcaggaggacctattagagcaaagctttctgatatgggtatcagtaagcacctgcaagatgacatgacttctgttagccatcatggtacaggatttggaagctctggctggcgggcacccgaacagcttcgtcatggtcgtcaaactcgtgcaatggatctttttagtttgggctgccttattttctattgtatcactaaaggcaagcatccgttt

SEQ ID NO: 274805 - DNA, 503 bp, Zea mays
cggacgcgtggctcggctggctgcacgccggagccccggcgccagatctcgcccagtgccagggccgccgcaggcccctctttgcctgcgcgaggtcttagaatcccgagggggaaaaagaaaagaaaagatgatgactgcctctgcctcttactacctgtgccgctccctcgtccgggctcctccgctcaagtccaggagtgcagtgcgctgtccaagcgccgccccgccaggagccagcggtgccacctccacctccaagcttgtcctagaggtgaaagaacggctagcaagggagcacccaagcctccccacgggcaggaacgggagggacgatgacgacatggtcctctggttcctaaaggaccgcaagttctccgtcgatgaagccgtctccaagctcaccaaggcgatcgtatcctctaattcactcataccagtgaagctcacacctaatagcttctttactcgctcaataatttcctgaagtatcagagggatca

SEQ ID NO: 274806 - DNA, 1105 bp, Zea mays
atcccttcccctggcttcacggctcggctggctgcacgccggagccccggcgccagatctcgccaagtgccagggccgccgcaggcccctctttgcctgcgcgaggtctcagaatcccgagagggaaaaagaaaagaaaagatgatgacttcctctgcctgttactacctgtgccgctccctcgtccgggctcctccgctcaagtcggggagtgcagtgcgctgtccaagcgccgccccgccaggagccagcggtgccacctccacctccaagacacaggatccagttgaaaaccagaagctatgtgcctatttggttgagaaggcagtcaacagacttccgccaggagcagagaatatacttgggatctttgatctgcgaggctttcgggttgaaaatggtgatctccagttcctaaagtttttgatggacgttttttactattactacccgaagcggcttggccaagttctttttgtcgatgctccatttgtttttcaaccaatgtggcaggttgttaaacctctattgaaatcatatgcctccctggtaagattttgtgatgccgagactgtgaggcaggaatacttcaaagaagaaacggtgcctcctgatttccgcgattgcaagaaatgtgcaggtggtctcggaaacatgacctttaattgattcagaatcgattggcacccaggggggctggcgccttcctataccttttgattaacttctcaaaagttgctcagacgacaacaaacgattggagagtccagtaaaaaatgaccctgtagtcctgtacttgtataacttctgcgaagtagaatgctgagtttaggctgctgtctggagtgctcctgtaccatatttttctggttttggatgaagctatatggaccaaattcatctctgttgaacaattgccaattacataacttgtgtttgcccaattccatggtgtagtaccataacttctcagtgcagtgcagacaacacatggattccattttttgattaaagtatcatctgctacaaatatgaatcatggcttagtttgtagacttcataaagaaacacacagattaatcaaaccagtcttcgaagagtctct

SEQ ID NO: 274807 - DNA, 748 bp, Zea mays
ggggccacccacgcgtccgcggacgcgtgggtacctgtgccgctccctcgtccgggctcctccgctcaagtcgaggagtgcagtgcgctgtccaagcgccgccccgccaggagccagcggtgccacctccacctccaagacacaagatccagttgaaaaccagaagctatgtgcctatttggttgagaaggcagtcaacagacttccgccaggagcagagaatatacttgggatctttgatctgcgaggctttcgggtagaaaatggtgatctccaattcctaaagtttttggttgttaaacctctgttgaaatcatatgcctccctggtaagattttgtgataccgagactgtgaggaaggaatacttcaaagaagaaactgtgcctcctgatttccgcgattaggtgacatgattatttcttcagtaattgcaaaaatgtgcaggtggtctcggaaacatgacctttaattgattgagaatcgattggcacccaggggggctggcgccttcctataccttttgattaacttctcaaaagttgctcagacgacaacaaacgattggagagtccagtaaaaaatgaccctgtagtcctgtacttgtataacttctgcgaagtagaatgctgagtttaggctgctgtctggagtgctcctgtaccatatttttctggttttggatgaagctatatggaccaaattcatctctgttgaacaattgccaattacataacttgtgtttgccc

SEQ ID NO: 274808 - DNA, 648 bp, Zea mays
gcgcgtacttaatcggtggcctggagtcaatgtgcagatcctagctaccgttgaagtttacaacgcgagctccggctggtcagttctcggtttgagttcactcgggaagaggtcctttgcatctgccgtagtcatgtagttactgatcacgatgttaactactgtcgataacatcaggtttaacatagtcgctgcgttatgcaaggagtagttagggtaaggtgggtggggctagatcacccttccgatgtgtaatgtgttgagatcttcatcaggggaaattcgcatggtatgggagactacggcccgtatacctttgaaccctcgtaggaagtcttgagaacccttgcatgcattcgctgttgtatgcgtgccatgctgttgaatttagctgtactacaccagatagtgatacccgaactcacggagtttaatggaaccggatagaaagctgcccatgtagtttggtgtttgttgcttacgttgtggattttactgtagtgacttgtctaatgctccgtttctccgtttggttatcgaccatattggagggcatggaattaaaataagttcaataccaaatcaaatatagtattgaaatgagatgtaatttcaattctattgtttggatgtcgctgatttggaatt

SEQ ID NO: 274809 - DNA, 472 bp, Zea mays
ccgacacccgacaatcttaacatcaaactcgtcgtccacgcctcctcggcaaggttgcgtacggcgtggccctaaggttcatctcgccgcctccctcaacctcttgattccgcctccctcaacctcttgattccgcctccctgaaggcataccagcgggatcaagctattttgctggccaaccgaacggtcaagccgacgatgacgctcggatcggcggcacacaagatcccgctggaggttgcgcacaccctcgtcgagatcgccgaggtcgcgcgctacgcctaccaccaccgccccggccgccctgcaacccacgagggggaccccgactgcgccgcccgcaggggctgatagcagcgggggcaccaacgatggatgccgcgcggctgctggaggagaacgccatgctccgcgcccgactcgcagatgacctcgcgctcctgcgtgagcttcacggcgcgccctgcgtc

SEQ ID NO: 274810 - DNA, 469 bp, Zea mays
gcacgagggaacaccacacctgaaacttcactgcctttttgtcaggcacgctggtcaggaaatcagtagcctgttttggctgctgttgctaatcagttgggagagggggagatggccaggaggaacatcggagtcgcagtggacttctcgtcgtgcagcaaagcggctttgcggtgggcgtcgacgaaccttgccaggaacggcgacaggctcatactcatccacgtgaacagctcctgccagaacgagcggggcgccgttcatctctgggagcagagtggttccccattgatccctctggccgagttttcagacgtcgccaggacatacggtgtgtcaccggacaaggagacgatcgagatcctcactcaagcggcaaaccatagaggggtatggatgggccggggcttccgtctattcattcacaccttttcagtgttcagttctttctggaagttgctattgggag

SEQ ID NO: 274811 - DNA, 529 bp, Zea mays
aagaggaacagttggatatgtgcctccagaatacggggagtgccgccaggtctcctcgtgcggagatgtcttcagctttggagtcacgctccttgagatgttcacagggaaggcccccaccgacgccatgtttgaggacggattgaccttacagggcttcgtggagatagcgtttccagagaagctgatggacatcgttgatccagtactgctgtccactgatgagaggttcgcaagaaagccgcgacacagaagcgttggaggggaagagattgagaacgccatagcttctgtcactaagctcgcgctgtcctgcaccaagctaacaccatcagagagaaagcccatgggtgatgccgcagccgagatgcgcatgataagggactgctatctcgcagacctaacaagggcaaaatattaagtgatcatatatgtaactgataggggacaagttttgcactctatttatgtattttagacatacagtatgctgctgaaaaaaaaaaaaaaaaaaaaggggggccgccga

SEQ ID NO: 274812 - DNA, 263 bp, Zea mays
cgcgagatagcccatgggtgatgccgcagccgagatgcgcgagataagggaccgctatctcgcagacctaacaagggcaaacaattaagtgatcatatatgtaactgatcgataggggacaagttttgcactctatttatgtattttagacatacagtgtgctgctgaactggcttggtgccctgcccccaggccccagcattcccgagactaccaatatgagcactacgtttgttttcattagaactttggcgtcattgcag

SEQ ID NO: 274813 - DNA, 597 bp, Zea mays
ggaacaatgttgacccatttgatgaacctgagtgtgaagctcgtgacatatttgtcaatgaacttctatgcattggcactggatgtccatattcttgtgttaaaagggcacctcatgtattttcattttcagaatgatactgggacagctcctgcaatatcccaagggaatggggaagatgatcctggtcagccccccgttgggcagtgtccaagaaagtgcatatactatgtgacgccttgccaacgcactattttggaggatgttcttgctagtgtgttgatggtgccttacgatcttgctgaagcagcagttctggattccctcctttcaaaagcgaagttcgagaataacaggtataagaagccccaaagaggagcaaaatcatcctccgattatgttgattggatgtgatctgatcccgagacacaaagaggatgccagattcagccgaaggcagttcggtagatttatgctggtttgcctattctccttggtcagttgcccgatagtttataaaatggaatacgtttacgtggacagactgctttgcctgtggtatacggttatgccctctataatatttctttctgccag

SEQ ID NO: 274814 - DNA, 763 bp, Zea mays
agaagagagaacggaagctttttgatgatccaactaacacagtggagactatagtttgtgtttacaagataagagacctgtcccatccacagacacgcttcaaagttgatgtgaatgcacaagagaataaactgacaggtgctgcggtcattactgatagtatcagtgttgtggttgttgaacggggggaaaagtcaatcaaaaggtataataagctcatgctagaccgtatagattgggctgctgctgttggtggtgatgaagacgcagaagcagaagcggaagctgacaagccagtgaatagctgtgtattggtctggcagggtagtgtggcaaagcccaccttccacaggttcactgtacataactgccggagtgaggctgcagctaagaaggttttcgttgatgcttctgttcctcactactgggaccttgctgtcaatttctcagaagattcttcctgagcaaagcacctgttcagaaccttggtagcttctgctgacctttgctggctacatgctagtgatgtgtggccagtgttatagcacttgtcatgatggtaagtcctgttatcacgagtttctacaccaatgggcacatctgctgaagtgctgaaccgaggaatgcctgctgttggcctgttgtcaatctgttgtgaagatgtcatttcagtgatgtttattgctggattttcctgtggtctagaaatgtgttgtgagcaactgttgaattttgcagcgtacatttggaataaatccattgc

SEQ ID NO: 274815 - DNA, 461 bp, Zea mays
acatgattgagaatcagaagtcagaattgatagcatttggtctttgcttcagccttgtctcttacctttatgttctcgctacaaggaaaaacatgcgatttcaagtttcatatggccgtaacagtgatcagcagcacccaacactacaaatggtttctgatcttctgaattcagcaacacttgccctagaaagagttggtgaagaaaaatatatgcttttaaacaagatccgtgacttaaatgagttgtccagaaaggaggttgatgagataataaaagtgtgcatgaagcaagattgcatatctcctaacgataacatccgtaaaaggaggtacattgcaatgatagatttgtgttgcatggctggcaaccgagaccaactcattacccttctactccaaataacggaatgtgccgttactattctcctcattcatttttaggacgatgcttctgcaaaa

SEQ ID NO: 274816 - DNA, 1055 bp, Zea mays
catacttctgcattaggttgtcttaaaaatgcattacgtagagcatgtaccaaaatttttgttagctataattgatgtttagtacatatagtataaaaggcaaggtttttgttacaaagaaaatactctctgtttgtgtgtgtgtttgcttaagtgttatggattattcattttttgtaaatttagtgatatttttatttgacctgctgcacacctagctaatagttcatttctctgttggcatagcaagaagtggtacacaggttgcatttggacaaggaaactcttattatgcaagaaattttcccatgcccaaaaaggattcttcagcaggtggagcttcgaagttaccaaaagaatatgcagaaccatgggactatagccatgattatcctgttactctcccactaaggaagccctactctggaaatcctgaaattctggatgaggaagaatttggagaatcttctgccagcaggacccaagatgatgaattatctgcagcagagcagcttggattaatggatatgtcgtcggaatcacagttcctcttcttccagttgccatcctctcttcctttaccgaggcagccacaatcaggtgctgaccctaacgaagtccgcgatgagaaacgtgaggacatgaggccatcatcgcacaatggctcgaaactcaaagaggttcctgaaggctatatggggaaaatgctcgtatataagagtggtaaagtgaagatgaagataggagacactctctttgatgtttcatttggctcgaattgcatgttttcccaggaggttgcagcaatcaacatcagagaaaaacattgctgtacggtgggagagatcagcaagcgtgctatcatcaccccagatattaactacatgttgggttctgttgacaagatggaagaatagtccattggtttctttcgcgcaaaccatatagaccatattatgccattacaagatagttttgctttcttatagagaacgacctgtgataccctctcagacttcttcaagaaaagatgcctcaaacaaaggaatgtgcct

SEQ ID NO: 274817 - DNA, 779 bp, Zea mays
atagttcttgcatgtgcattgtctgctcaaagtttgactcagcatctaatacttgtagttgggttggttctgatgtatgtgcttcattggtgccacacagattgtggtctacgccactctctgattcgataggggcaaagtgcttcaagggcatatggaactactgagatgcagtttcactgttctgcctgtggatatccatcggagatgtttggttttgtgaaggaagtatttcgaacatgtgcacaacaatggaggatagacatgctggttagagagttacagtatgtagaaagaattttttctgcaagtgaagatgtaaggggcaagagggtccgggacttcgtgaagcagatgctaattaagtcagaaaacaaggcctatcatgctgaagttgtcagatgtgtcattgcattcttttctgatgatggtgctaaccttggcagtgatccatcagtaccactgaaaggcattccatgcagcatttctgaagctgttgatgggattcctagttcaagtcggaaggcatggataccatttaccttagagggacttccagttttagacaaaacaactcttcctaccacaagcacagggagcccatctgtgcctagaaaatctggtgaagctgagtttcagacaattgaatataagcctgccactgatgaactggatagcttgatcagggtaaagcaagctgaagcatatatgtacccagaacgtgcaaatgatgcaccgaatgagggtgacaatctgagacacattgtatgggtaaaaat

SEQ ID NO: 274818 - DNA, 949 bp, Zea mays
tcagtccgttcatgcttacttcccccgtcgaatcgggccttctttgccccgcccgttaagctgccgagtcagcagcaatggcggcccgcgcgcggattcgggagtccggcgccggcgccgtgccgtacgccgacttcctgcgcctctgctgcgacgccgccggcccggacgcgggcccctccgtcgcgcgcgcgctcgacgagtccggatccgtcatcgtgctcggaaagaccgtcttcctcaggcccgacatggaaaagattcaaagaaagggcgctgttctaaaacgataataagagatgttgccacccaaagtttgggcaattttactccgctccaagatgggagtttttcttctctcaaaaccaggagataaaaaccttaattttaactccccctgtccaaatcttagaggatacaagaatctgaatctgactccgatgaatgaacatgaggagaattcacctaaccctcttctagacaccattaatttcgaaataaagaagttagtatttcatttggtaaatatatattggcaaagtgtagtatttcaatagacaatttacagatgtagccccatcacatgccagtggtggagggtcgaattgatgaatctgttaacttgtataaacttagttaaaaataagttaagtatataagtaaaaaaagtttattgtagagtaaaattgttaatctgaatgtttatgccactttgatttgattttaagcgtaggggaatcttctgattttgcggggagtaaaccactaaaggttcattgtttgattttccattatatgtggcacagaaatatcttccctttgatgaaacaaccaacggagctctattctttttgacatcagacgaaaatacttctttcacctttcctgtttgtgttacatcctatgtccactagaccatgctgttctagttactaacttactattgcta

SEQ ID NO: 274819 - DNA, 597 bp, Zea mays
cccacgcgatctcattgattgattacagcccgttcatccttccttcccccgtcgaatcccaccttccttcccccgcccgttaagcagccgagtcagcagcaatggcggccgtgctgaggagagccgtggcgcagtgcttcgcgtcgtcgtcgtcgtcgtcgccggcgacgttcgggctccggcggttcctgcaggagcagccggcgttccgccccgccgtgccgcccgaccgcttcatgcccctggccgaccggatccgggacctcggggtcggcgtcgcattcccgcggatcaacctcgacggcctcgtgccgcccgcgccggcgccggcgccggccaagcgggagccggacgcggcgctgcccgcggcgagcctcacggtggaggaggcgcgcaaggtgctgcgcgccacacagatggaggcggcccgcgcgcggattcgggagtccggcgccggcgccgtgccgtacgccgacttcctgcgcctctgctgcgacgccgccggcccggacgcgggcccctccgtcgcgcgcgcgctcgacgagtccggatccgtcatcgtgctcggaaagcccgtcttcctcaggcccgacatgg

SEQ ID NO: 274820 - DNA, 384 bp, Zea mays
cgaccaaacctccgaaaaaaaatgggaaagtggtataattcaataaacaatttaaaaatgttaccccaacaaaagccaattgtggaagggccaaattgagaaaccggtaacctggtaaaacctaagttaaaattaagttaagtttataagttaaaaaaagtttaattggagagtaaaattgttaatccgaatgtttatgccactttgatttgattttaagcgtaagggaatcttctgattttgcggggagtaaaccactaaaggttcattgtttgatttttcattatatgtggcacagaaatatcttccctttgataaaacaactaagggagttctatttttttgacatcagataaaaatactttttcacctttcccgtttgtg

SEQ ID NO: 274821 - DNA, 977 bp, Zea mays
tccacctcctgtagctacagttccgctggggactggaaataacttgccatattcttttggatggggaaagaaaaatcctggaacagattatgattcggtcatatcatttcttcagttggtaagagaatcaagagagatgaacattgacagctggcacattgtcatgagaatggagagcccaaaagattctccttgtgatccaattgcacctcctgacttgcctcattctttgcatgcatttcgacgtatgccaaagacagatccacaagatatggagtattcttatacatatcgtgggggattttggaattacttcagtatgggaatggatgcccaagtgtcttatgcatttcattctcagaggaaactgcatccagagaagttcaagaatcagttgtccaatcagaaaacatacttgaagctggcatgcacacaaggatggttttgtgcctctttgtttcatccaatgtcacggaacattgcttgccttgcgaaagtgaagataatgaaaaaatctggaaaatgggaaaccatggaaattccacaaagtattcggtccattgtttgtctcaatttgcccagcttctctggtggactaaacccttggggaacaccaagtaagaggaagcaaagaaaacgagacttggtgatgcctccacttgtggatgatggccttctggaggttgtgggtttcaaagatgcttggcatggccttgtcttgctatctccaaaaggccatggaactcgccttgctcaggctcaccgtgtccgattcgagttcctcagaggcgcaactgatcatgcttacatgagaatggatggggaaccctggaagcagcctcttcccacggatgatggcaaagtcgtggtagagatctcccatgctgggcaggtgaagatgctcgcgaccaaagactgcatagccaaaggggtccatgaccatgagtcgtgcccagctatttcaacggttcatccag

SEQ ID NO: 274822 - DNA, 850 bp, Zea mays
gtgatacataaaaatgaaagtgatggtcttgacgattattggaaagattttgcattggctgttgaaagcacaaagcttgacgaagttgatgaggcggcaattgaaaaggaagataatggaaagatggaggacatcgattgcaatcatgacatccggattcatgaagatttgggtcatgtatgccgtgtgtgtggtatgattgtgagaagagctgattcaataattgattatcagtggaaaaaggcttcaaggagaagaacgaatggctatggaggacattcaaaagatgctgatgagatagattgtggtactgttaaactgtctgaagatttccatagtcgcagatattgctattcatcctagacatgctcggataatgaaaccacatcagttggaaggtttcaactttttggttaagaatttgattggagacaagcctggaggttgcattctagctcatgccccaggtacagggaaaacatttatgcttataagcttcattcagagcttcatggcaaggtatccatctgcaaggcctcttgttgtgctgcccaaagggattctaggtatatggaagacagaaattaaacgatggcaagtgcaggatataccagtgtacgatttttactctgtcaaggctgaaaaaagagtagaacagttgcaaatcctcaaatcttgggaagacaagatgagtatactatttcttggatacaagcagttctccacaatcgtcactgatgatgggggcagcaatgtcacagctgcatgtcgagacaggctgcttaaggttcccaaccttctgatacttgacgaaggacatacacctagaaatcgggagactaatgtactc

SEQ ID NO: 274823 - DNA, 591 bp, Zea mays
cgggccgagccacgcgtccgcggaagcgtgggctactacacacaaacacagctagccggcgctgccaggttggctttggcgagcaacgacgacgacgacggcgctcaggactcaggtgctttcggttcaggcggaggagggcatggagcgcggcgactgccagttcacggtggtgccgccgcggcagtacgacgaggcccagttcatgcaccagctgatggtggccggcgaccagcaggaccccgcgggcgcggggcggggagctgccgccggcggcggggagaggaagcggcggttcacggaggagcaggtgcggtcgctggagaccacgttccacgcgcggcgcgccaagctggagccccgggagaaggcggagctggcgcgggagcttggcctgcagccgcgccaggtggccatctggttccagatcaagcgcgcccgctggcgctccaagcagctcgagcacgactacgccgcgctccgcgcccagttcgacgccctccacgcccgcgtcgagtccctcaggcgcgacaagctcgccctctccacgcagctttttgcttggtgcgcgcgcgtgcatgaccagttgaa

SEQ ID NO: 274824 - DNA, 692 bp, Zea mays
attctcctccatctcttccttttccctttcctttttctcattgcgacgcctgcctgggcgaccgtcgccgctctacaccaggtgcccaggtcttcgccggcgccgagcagccaccagccgctgtgcaacaaatcacgtctgtcgagggcatggatccctacatgacaaggctcggcgccggagccactcaccagctttccagggctgaagcaatgcctgaccgaaggtctaggttttggcagacagatgtgcagcttgcgcctcggatagacatcatctgccctctgcctcgccgcccttctcgcctaccggttctcaatagccccaagctcaatggggcactcccactgtatagagcagaccccacttttgatatcgttgacctcatccttagcaagaatgaccctgatgtggatactgattcaagcagccaggcgggctttttctgtggctcgcctcccgcccgcactgacaaccctgttatccatgacccacagtttggaaagaaagcaccatccttttctcctctaggaagctcttctggaaaaatggcttctggaagagctgaagtaggttctccgtcctgcaggtcgagcagcccaaaaatgagaatcgaacgttttgcttgcgggaacacagagccccctcactgctttgcctgatgatccccattgaccctgcctaacctgttt

SEQ ID NO: 274825 - DNA, 1231 bp, Zea mays
cacggactaccgtctcctctcctttcctctcctgcaactgcaagccaccccccctccacccccatccacccacccgcccgccgacgcttggatcccctcccttgctttgccgtgtccccgcccaaaccccgtagccgccgccacagcaatcgctgccgccgccgctggaggccgggccgtgggggctgaaatgaaggaggtggtgctccacgtgtatgacgtgaccaacagtgactccgagaagacgaacaacaccatcctccagatcaaccgcatcttcaaggaccgcatcggcctcggcggcatcttccacagcgccgtccaggtagtgggcctggctcccctctcccccttccctcgccaatcgctcagatcccagggaccgacgcttgcgtgccgcttctccagatccctaaatctcacgccatttcttgaacccctcaacgcaggtctatggctaggacgagtggtcgttcgggttctgcgagtccggcagcggcgtgtttagttgccccataggcaagaaccccatgtacacctgccgggagcgcatcgtcctcggggagaccgagtgcggcatcgccgccgttaaccggatcctgcgggagctcagccgcgagtggccgggccactcgtacgatctcctctccaggaattgtaaccatttctgcgacgtgctctgcgagaggctcggcgtccccaagctcccaggttgggtgaatcgctttgccaatgccggtgatactgctgtggttgttgctgagaacacagcagttaagttcaggcaggctaaaacagaaatcgtgaatgccagtagagtagcatacagatttatggcaggcctgacttccaaaaatcaagcctcacctgagtctccgggtaacaatcaaaatagaggcagccctagtttccagggagcttggttcaagaacatcgtctcagctggtgcaaagccttcatcgagtggatcgacacgcacacattttcaggacgctgatgatggaacccctttgcaacatcaaagttcaacagagcaatcaacacagttgtagttgcttcccagcatatcaaccaacaattgaattgaatctgtcaatctgttgtgtaacattagctaatatctgttcgaaacctgttgttaaattgtatcagtagtgtaacagttgctgagatttgttcaaaaactgctattttgcatttgtccgtgaatcagttttttgcagcattgttg

SEQ ID NO: 274826 - DNA, 576 bp, Zea mays
caaggagtaaggtggccgacgaggacttggaggaggtggacaaggcctgggaccggcccagcaggagaaagagcacagaattcgatatagccaagagcatcgagctgctggctagctcgttcttgaagattgagcacgccaggatggagatgtacagggagacagaaaggatgagggttgaagctgagattaagaagggggagatggagctcaagagaactgagatcatggcgaaaacgcaccttcagatcgctaggctttttgcaaagaaattgaaacagagcagtggaaagaatggtgtcagttcgtcagtaacagctgaagtggacacccttaccaagaaaggcgagaatggttccgggtgatgtggcatgcccggcagttgattctatcctcagcgtacatggcacctcacttttcctgtgcagcaagtgtaccgagtctgattgagaaatagtcagctgtaaacttacagatgcaataatgggagcgaagatttgactgtttggcccattgcgggattatagaagcgatttttgaatcagtgacttcctaagtctgagagtttctgccctc

SEQ ID NO: 274827 - DNA, 655 bp, Zea mays
cattcagttgataaggagaaggtatttttcgaatgagcttcctgcccctagcccatggtcactcactcccagggaagataccattcttcccgtagaaactgtgaacgatgatgacatgttccaaagaaaaagctacggcggacagagctacaaatacaatggggttaccccactgcctgcacagcggaacctaactccgccccccacactctatccacagcagccaatgtcctcttcatcagaaaactacagataccacagattttcctcttcgtcaatacctgattcaagtggtggttcaaaaagccgagcgaaccttaatatatgatgggatatgtaagtccttatccattatcacctggagtgtgggaaaaaaacatgacacctgggttttttggttctcaggtttttgatctttttgagttgttcatctgtctttgatttgattgtaatatgtgcatgttgacagggcgccagagcattatgtttgtgggatcactagtgataattctttggttcttctctgtatatctcctaattttgtgtatgaattcaatatagttatttaggaaaacacattacatggtcagatggtctacactgtgcaacggcaatctgaatcaatcttgtttcctgagtcccttcaagtcacctg

SEQ ID NO: 274828 - DNA, 959 bp, Zea mays
ctgcatgcgcgtgcgcgacaggtagcagctgcctgagccagtgcgcttcggtgagcagacaggacggcataggatagagatggcggccgcggtggagggggtgcggcaccgaacgctggaggcgaacggagtgcgcctgcacgtggcggaggctgggcccgaggagggcagcgccccagtggtgctgctccttcacggcttcccggacctctggtacggctggcgccaccagatgtccgccctggcggcgcgcggctaccgcgccgtggccccggacctccgcggctacggcgactccgactccccgcctgatgcgtccagctacaccaccttccattgtcgtcggggacctcgtcgcgctcatctccgacctcggccagcggcaggtgttcgtggtggggcacgactggggagccattttgtgtgtggcagctttgtctgcttcggcggcacgtggtgcgggcgctcgtgaacctaagcgtcgtgtaccacccgcggcggccggagatgagcccgctccaggccatcagagctgcctgcggcgaagaccactacatgtgccgcttccaggaatttggtgttgctgaagctgaatttgctctatatgacatcaagtgggtgtttaagaagacatttggcatgcgcaagccagctcctcttattctgcccaaggacaagagcttctttgactctcttgattcagatggaacttgtccaccatggctatcagaggaagatatttcttactatgcagaaaaatttgcaaaaacaggctttactggaggacttaactactacaggtgcatagacaggagttgggagctttctgcggcatggactggagctccgataaaagttccgtcgaaattcattgttggggaccttgacattacatacaacgccccgggggtaccggactacattcacaagggtggcttcaaggcaagcgtgccaaatct

SEQ ID NO: 274829 - DNA, 562 bp, Zea mays
cgaaaccgctagaggcagagggaggcgcacacgaggaactcgctggtggcatcgagcgagcggtgcgagtgccacgagtgcgtgcgcgagcaagatcggagcttgtccttcgtcgcagttctggcggaacgcggcgagcgcttccgtgatgggcgccggcgcccaggaggttgaggaggagataaccacggctggccgagggaggagtcggagaggaggagcaagcggcggctgagggcgcaggggaggaggagcagttggagcagggtgcagggggcgagggagagggtggggaggagaaagctccggcggtgatgttgtgctcgatctgcctcgacacggtggtcgccggaggcgaggagaggtccaccgcgaggctgcagtgcggtcacgaatttcacctcgattgcattggttcagcatttaatgccaaaggaatcatgcaatgccccaattgtcgcacaattgagatggggaactggctttatgcgaatggttctcgatcatcacaggacgtaaacaatgatgaatggggttatgatgacctatatgatcatggtca

SEQ ID NO: 274830 - DNA, 413 bp, Zea mays
gtgatcgcggccatcgttcgccgatggtctgcgtcgtcttcactcgtcagggaaccggctgtgacggcttggttctaacaggcgccgatggaggccatggagctcgtcgtcgcgctcaccgcctgcgccgactccgtcgcagcctgcaaccacgacgtcgccaactactacctcgtgcggctgggcgagatggcctcccccgcggggcccccgctgatgcaccgcgtggccgcctacttcgtggaggtgctccccctgcgcatggtgcgcatgtggcccagtcgagatctggtcattagattcaatagtgtggtactggtggcatgtggcccagccgagatctgacagttcttagaaaaattcagctttcatttccaatcgttacagctttaaactattatgatcgttacttt

SEQ ID NO: 274831 - DNA, 432 bp, Zea mays
aaacacctcgcttcactagaggaataatctagcagcttctgttgcctccaaattgtccggagaaaggagttgaagcagtgtgagagggccctgagacgatggcgaacctgttcctcaagcaggcaaagcagtacgtggcgacgcggccggtctacccgccggagctcttcgacttcatcgcctccaagacccctcgccgcgacatggcctgggatgtcggcaccggcaacggccaggccgcagcgtcggtcagtcgaccatgcatcctcgctctcccctacacggcacgctgcacacgcactgtccgtgcattatctttataaagtgaaggctggctgggtgaactttcattcaacttgcagctggcgaagctgtacaagcacgtggtgggcacggacacgagcgcgcatcagctcgcctacgcgacgcgcc

SEQ ID NO: 274832 - DNA, 641 bp, Zea mays
cggacgcgtgggcggcgcgtgggggaaagctaatctcgcccggttcttggagaagcgacaggaaggagtggcttgcgtcgagccatacctgacgtccaacttcaagagcccgctagagagcagtgacgccgtcggcagcgctagcgctccaacgaaatcgtcatccacagacgtcgccccggcgagcagccacaacggcggcggcgcagagcttgtgcgccatggccgatatctgaggagcatcaacttcagcacaaacctgcagatctgactctggtgttgctgtccatagactaccactaccactacgactccgtgtccgtgagcgcgcccctccctacccatcgacacgaaagctggatagctgtcttgctttgcatccggatgaggcgggaggtataggaagatacgatgagatgagagtataaagatgctgagtgctagcctagccgcccgctgtatagcttttgcagcgcgctgctgacaagatcgagggccgtgacctactcgtttcaggctcttcttgaatggtttttttgtcgtggtccattgttgtatattattcaacttgagaaacagagagtgctgctctgtctctgataaaagtttatatgaaattgataaaaagtttctgctatttc

SEQ ID NO: 274833 - DNA, 404 bp, Zea mays
gtgggcggacgcgtgggcccacgcttccggtcctacctgacacccggctcgtcggctctgtacctcttcctgtatgcagcattctatttcttcacgaaactgcagatcacgaaggcggtctccggcgtgctctacttcggctacatgctcatcgcggcttatgccttctttgtactcaccggcaccattggcttttatgcctgcttctggttcaccaggcttatatactcttcggtgaagattgactaggaagctagaatgccatcgtttcatggtcggcaagagaaatcagaggtcaaagttgtgaaagaatacatgaaaatgtagcatggtttatgcacagaagtaaggtgtccatagggtatctattcgtctgataattcagttacacttttgcgttcagt

SEQ ID NO: 274834 - DNA, 373 bp, Zea mays
ttcgagatttgaattccaccggcatttggtccaaaatttggcaaggtttttaaccaggtttcccctttccaaatgcagggtttatgaccaaattaaagtacttcattgttgtagatccagtacaaatgacatactacatatctgaaatattggacgctggacagcagggaccactttttatggtgactgtacaaaactgtcctggtgaaattttcataaacatctctcctaccaagtgctggaacatggttcgtgaaaggctcaatatggaaataaggaggcagctcaatatgggaagagctaaccttcctacactacagcctccaggatcagttgatggccatgaaatgtttgggttgttaacaccagcaat

SEQ ID NO: 274835 - DNA, 687 bp, Zea mays
ggaaggcccccaagaaaaaggacgcccccccggctaatttcaacccccccttcaaggcgcccccggttaatggcaacttccccggttccaatccaacctcctggtggaaccccaaaaacaacaacgaggaaacaggcaccccaccggtcgatgtggtcgcgtcgtgcgactcgccggcgttggtgcccgcgtgctgatcgttgtccgcgtggggtgtggacggtgtccggtggtcacctgcttcatctgctgtgttttgttaggactggtgtacatatgaggacggatgagggcggcggagggagcaccagggtaaatcaactgtcaccgccgtctacggaaccggcgaaaaataattaacaaggaacctcgccgacgggacgaacgcgcggcgaaaaataatgatggccgcagcaaaacggctgggccatcgacggtcacctcgtttgcctctactctaatcattactgtttgtgtttgacagatgtgttagtgcgcccttgtagctggatgaatagctgaatttactgaccagttgatgtacttaggctcctggtgccctaaaatgggtgggcaaatgtgcaatcctagtgatctagaatcagtagtgggtaatcctgtgtttccccattgatagtcgatagaggactgcctcgctatatagcttgagctcaataaaccccccct

SEQ ID NO: 274836 - DNA, 871 bp, Zea mays
cggaccgtgggagctgcctgtgctggtccggcttcttcatcctccagtcgaacacgctgcagagctaccccgcggagctgacgctggcgacgctgatctgcttcctgggctcggtgctgaccggcggcgtggcgctcgtggcggagcgccgcgacatgagcgcctgggtcattggcttcgacacccgcctcttcaccgccgtctactccgggatcgtgtgctccggcgtggccttctacgtgcaggggatcgtgacgcaggcgcgcgggccggtgttcgtgacggcgttccagcccctgtgcatgatcatcaccacggtcctcggctccaccatactcaaagaggagaccaccctgggaagcgtgatcggcgcggcgatcatagtggtggggctctactgcctcatctggggcaagagcaaggaccacctcggcagcaacggcggcaagcccggcgccgcggccgtcgccgagctgcccctgacctcgtcggctcctgcttggtccaacggcaagcaagctctggccgtcgtcgagacgacaccgccttcgtctttgcccaacaagtgcgttcactgacgcgcggatcggagctccatgcatgatgcggaccgtacaccaccgcacactactagtagtgcattgccagtgactgtaagccgccggccgtgtatgatcatgcatgcataccgatgtcccatactcccatcgttgcgtttaacactctcgagtttttgataacgtacttgcgtgtgctctgctgtgtgccactgccagtgccaccacaaccaatagtctaatactactacgacaattaagctttgtttagtttgtgcaaggaaagaagagaattaattactactattagagac

SEQ ID NO: 274837 - DNA, 1148 bp, Zea mays
ttctgtgtcaacgccggcgccgttgtcgactagccgggggactgtttcacgccggcggcgcgccttctggtcggcccggggctgaaccagaccccgttcctgaccttgatgctcagcactttcttcgtgtcctccttcctcggcctcgacgagtggttccagcacgagacgggtccgtccccgttcgagctggccaatggccgggacatatggaccctgtccggccacgacgcgagcttcggcaagctcttcgacgacgggatggtcgcggacagcggtttcatcatggacgtcgtggtcaaggagtgcggcgacgtgttccgaggggtcggctccctcgtcgacgtcgccggcgggctcggtggtgccacccagaccatcgcgaaggctttcccggacgtggcgtgcagcgtgctggacctcccacacgtcgtcgccaatgctcccaccgacaccgccgtgaagtacatcgccggcgacatgttcgagagcattccgtcggcaaacgttgtcttcctcaagtggattctgcatgactggggtgatgccgaatgcgtgaagatactgaagaactgcaagaaggctatagcgtctcaagaagaagggaaggtagtgatactggatatggttgttggagcagggtcatccgacgagaagcatgtggagacgcaaatcgtattcgatctctttatgatgtttatcaatggcactgagcgagatgagacggagtggaagaagatcattttcgaagccgggtttagccgttacaagatcatacctgttctcggtgttcggtcgataatcgaggtctacccataaaaatctatgcaactcaagtatactgcatgcgtgaataatctgcgtgtgaaatcaaaactaggtgtgaagaagtgagtatctgcggggctgggctgcaacgccgcaaactccattggagtggtgcctcctgtggcggaatgatcgcttctccccccttggctgtccgtggcggggctctctgccgtcacaactgtagtcgatctgttgccggtctatggtctgtaatgtcaaccagttgtctctttaagtctgctgtcaggtcgtgcctgtctttgtgctccttaggtcggtgttgtgtgtgcccctctgccgttgtcgtcgtgtgctct

SEQ ID NO: 274838 - DNA, 727 bp, Zea mays
  unsure (1)..(727): unsure at all n locations
cccgttcgagctggccaatggccgggacatatggaccctgtccggccacgacgcgagcttcggcaagctcttcgacgacgtgttccgaggggtcggctccctcgtcgacgtcgccggcgggctcggtggtgccacccaaaccatcgcgaaggctttcccggacgtggcgtgcagcgtgctggacctcccacacgtcgtcgccagcgctcccgccgataccgccgtgaagtatgtccccggtgacatgttcgagagcgttccggcggcagacgctgtcttcctcaagtggattatgcatgactggggtgatgccgactgtgtcaagatactgaagaactgcaagaaggccataccagctcaaggaggcaaggtgataatactggatatcgtggttggagcaggatcgtcgtcgtgcgaccggaagaacgtggagacgcaatgctggtttgttccctacaccatgactatcaacggtgtcgaccgagatgaccgagagtggaagaagatcacctttgaacccgggtttacatcttacaagatcatacctgtcctgggcactcgatccataattgaagtctgcccatagaaaccaatataattaaggatggcaacagcctcccatcgcccttgcgagtataattccaaaccagcacttcaatacttgaatccgtgaggttttgaggtcacttacgtgtnttactcattgtacgcttttaaacaataacta

SEQ ID NO: 274839 - DNA, 738 bp, Zea mays
  unsure (1)..(738): unsure at all n locations
agaaaattgattccttgtcggatccggccttgcaggaattctcggcggcctcaaatttgatacaccttgggttccgcgggaatatattgtcaagctttgggcttttacagtttgtaccccctgtcacactctgtgtgttggatttaagcggctgttggatcttaacaggcgatgctatttcaacattccgtaagcgtcatcctacgattgaattgagacatgagctcctgcacgaagttgaggaaaattttgttggtggttcccaatttcgtaaacctagacgcagacgatctcctcatgtgaaagcagaagttggaaacagttttgctggctcaagtaggctacacgatatccgttttgtagatgaaaggataaaatacagcaaggaggaatttgtggagctgcaaggccttgctaaaccaaattcgttaatgcttggcgtgtggcttccaccagaactgcgaaggcccaaatgatagttttggatcttgattccttacgcatttactgccagcatatcataatcttccttgagttattcttgatatgacagacttttgagaattaagcatcaagcatgtcactcagttccaaattatagttcactttggttttgtcctaggtcaaacttttctagctttgacctatgcattcaaataaatgctgtaccaaaatgtatttggtgaacaatctaaagaaactgatttgatgttctaanttacnnaaaaaaaaaaagga

SEQ ID NO: 274840 - DNA, 373 bp, Zea mays
cacacgcatccgcggacgcgtgggcggacgcgtggggcaggatggggcaaggaagggcggtggctccgtggttgacagtggcctgcgcgtcgtcaggtatatgagcgataagtcgatggttatcgccacgatctgcattacgttgtgcttgcatgtgttgaatgggactaggctcttggtaacagcttgagagtgtacttgtttggttttcctattttttgcacattgtttgtgtaaaactgtaggactcatactgaatctgtaaatccaaaaggaatggaaatcatagacgtaagatcaattgtgctgtacaattctgttttatgcctatatacttgaggtctgaacgactttagtgagagagttgttgatc

SEQ ID NO: 274841 - DNA, 1572 bp, Zea mays
cgtacgagtcacgccacgcgtacgactggactccctggtggtaaaaatgctgagccactgaaagttggtataagggggcatgacctacagatgtgcactcttttccaggcacaaataaatggaaactggtattccacagtaatagagactctaccatcagctacttcatactcaccaaatggagaactgcaacccacattacagaaaatgcggattcttgttggacaaccactaaagcagcctccaaattacattagtggggatttcatgattcctgtgatggcaggtgctgattcaacacccgactttggatttgagtcattttttgaagataaagattgctgcaagggtttgagtggatttctaatatatgggacaagtgattttgtaactgtacgtaaagaggtccacgttaggactcggagagtgcgattgcttggattagagggggcaggcaaaacatccctgcttaaagcaatgttaggacaagttaaagaaagaaatagcactgttcttgaatgcatacatgtcgatttgcatggcaagggaatatcaaatggattgtgctacatagattcgacaacggtaaacttgcaggagctacctttggaggttgggcggttcaaagaagaactgttgttaggactccatgatatcagcaggaagactgaccttgttattgcggtgcataacctagcacaccgaattccacagtatcaacggtccaatacttctcagcctcagcctgctctttcacttctcttggatgaagctaaggcgctaagcattccttggattcttgcaataaccaacaaattctctgttagtgcgcatgagcagaacagattgatcagctcagctatggaagcatatcaagtttctcctgagatgacaaaagttgttaactcttccccatttctgatgccaagtgctagaaacagtttgcagcagatcagatcagctactgggaagttgaagaagggtccagcaaatagatctggttatcttcctgtaaactttggattgtcatcatttcagaggaaggacattgttatgcatgtggagggtgttagttcccttcgtcaacttgtacatcaagtagtcctcaacaatgaagaaacagcatttgaggaacttgctcgtgagagattgttgaaggagctagcgtcagagaaagcagcgtccctgcaagtgaagcagaagccccggaaaagagatggctctgttacagctgctgctgtaggtgcatctctgggcgcgggcctgggaattgtaatggctgtgataatgggggcagcatcagcccttcgaaagccgtgattcatgtattcttttgatccattatttacttcttgatttaaggatgtctgaacaaaagcactagtgtaggcatgaaaaatgaaattttagggcagaatagttagctgataccgtagtgccacattttggctgtgtatagaatgtaggttgagccttttttttgctgatctgaattttgttgtgttactggagtatggcttggatatgttctccctcatgttttaatctaggcataaatctgtatcatgtctc

SEQ ID NO: 274842 - DNA, 521 bp, Zea mays
cggacgcgtgggcggacgcgtgggctcgtgcgcctcgtggattcgtgggtcgcgactcgcgaccagacgacaaacgtcgagaggggccgatcgtgatcgagcagcgatgtcgacgtcgcggaggcggacactgctcaaggtcatcgtccttggcgacagcggggtcgggaagacgtcgctgatgaaccaatatgtccacaaaaagttcagtcagcagtacaaagctacaatcggtgcagatttcgtcacaaaggaggttctgatcgaagacaggctagtcacgttgcagatatgggacaccgcggggcaggagagattccagagtcttggggttgcattctacagaggggccgattgctgtgtgctcgtctatgatgttaactctaacaggtcatttgatacactcaacacatggcatgatgaattcctcaaccaagctagcccatcagatcctaaaacttttcccttcatcttaactcgtaacaagattgatgtagatggtggaaaaagcagaagtggtt

SEQ ID NO: 274843 - DNA, 450 bp, Zea mays
ggtccacgacgcgtccgcaccacgagtccgattccagataagcacgatccgatgatggccccaccgatatccgccgatgccttggtggaggctgcctcggccgtcgccgcgtacccagccatcgcgccgaacagaatgctttgcaaggacgcgccggcgccggccatctctgtcgtctcgaagcagacggtccggcccgccggcgcgtcggcggcggtcggcagtggagacctcaggctctcggtgtcggacatgccgatgctatcgtgccactacatccagaaggggctgttcttcccgccgcctcctcccggcgtgctggcggcctcgctggtgtcgtcgctcgtggcggcgctctcccgcgcgctcggcgtcttccccgcgctcgccggccgcctcgtcacgctccacgacgacagcatcgtgatacggtgcggccgcgatgacgcg

SEQ ID NO: 274844 - DNA, 573 bp, Zea mays
  unsure (1)..(573): unsure at all n locations
ggtcgaccgacccgtccgcccacgcatccgagcttctccttctctctctctccttcctggaccattctctctatctcctttctctctctacacatactcagacgagcagaagcagctagggacaccataggcaaactacttcagcaagaaattaaactatctcctacgcaagatcagaagaaactgtgtatggagcaagaagaggggggcctcgccctgggcctctccctcggctccggccaccaccaccaggagctcaagccccaacatccgtcgcatccgtgtgcggcgttgttggagccttctctgtcgctcagcggcccggcgaccaaggatgatggcccgaccgcaccggtgaggaggttcgctgccgtgaagagggagctgcagacgatggaggggaacgacgacgaggccaccggcagggtacttgtctactcagtggcgtcgtcggcggtggttactgccgacgacgacgaagggtgcaacagcagccggaagaagctgangctgtccaaggagcagtcggcgctgctggaggaccacttcaaggagcacagcaccctcaaccct

SEQ ID NO: 274845 - DNA, 862 bp, Zea mays
atgacatcgactgctccctcgacctcaccggcgcgcgcgagaagaagaaggcggcggaggacgacggcgacaaggacaagaaggacggcggcggccccagcaagcccggcgagaagaaggacaccagcagcaaggtgacgctgtcgggcctgctcaacttcatcgacgggctgtggtcggcgtgcggcggcgagcggatcatcgtgttcaccaccaaccacgtcaagaagctggacccggcgctcatccgcagagggcgcatggacaaacacatcgagatgtcctactgcggcttcgaggcgttcaagttcctggccaagacgtacctcgacgtggactcgcaccctctgttcgacgccgtcggcgagctactccgggaggtggacatgacgccggccgacgtcgccgagaacctcacgcccaagagcctcgacgacgggccggactcgtgcctcgcggacttggtgaaggcgctggaagaggccaagaaggctagcggaccggagaggatgaagaggaccagcaacatgagccatgaggaggaacagctctagattattcagttcattattactgccagtttgtcgttagtcggtaactctgctgatttgtctgctgtgctacagtagtgcagaggctaatgataaaagttacccctagaataaattaattagctaggggtttgtgtttgtctaaatttatcttatcctagagaagagaagccccgttcttttttttctataaataagtctagataagacagtttttttccataaaagctgttagttcccctcaccacatgagagaatcggtaaacctcaaaatactaactcttttaaactttttatgatggattgaattc

SEQ ID NO: 274846 - DNA, 490 bp, Zea mays
cggattcgtgggcagccatccccaaaaggccaaaacccgcgcacaccggcgacggcaggagaacctcccgccggccgccgccatgccgccgcctctacaggcccaccgcctactcatctcccaccgccgcctacccactccagctcgccgccggttcaccgccgcctcttccgtccaatccgctcccgccacaaccttggccccgggccccgccacatcctccatcctctccatccgcgagtcgctcctctcaggcgagaggaccgcggcggacatcacctccgagtacctctcccgcctccgccgtaccgagccgaccttgcgcagcttcatccacgtcgcggacgccgccgccgagcgggaggcggaggaactcgaccggaggattgcctccggggagaaggatgcggtgggtccgctcgctggagtgctggtgcgagtgaaggacaatctttgcacagccaacatgccctccacgggcgggtcgcgg

SEQ ID NO: 274847 - DNA, 1072 bp, Zea mays
gtggcacgcagcgacattcactcgtcggcttagggaccccccggtctcgaaacgccgacaataccggtccatgataggttcattgctttatttatgtgctagtagaccagacattatgctaagtgtatgcatgtgtgctagatttcaatccgaccccaaggagtgtcaccttgtggccgtgaagcgaattcttagatatttggttgctacgccttgcttcgggctctggtatccaaaggggtctacctttgacttggttggatactcagactccgactatgctggatgtaaggtcgataggaagagtacatcagggacgtgccaattcttaggaaggtccctggtgtcgtggaactctaagaaacaaacctccgttgccctatccaccgctgaggccgagtatgttgccgcaggacagtgttgcgcgcaactactttggatgaggcaaaccctccgggactttggctacaatctgagcaaagtcccactcctatgtgacaatgagagtgctatccgcatggcggaaaatcctgttgagcacagccgcacaaagcacatagacatccggcatcactttttgagagaccaccagcaaaagggagatatcgaagtgtttcatgttagcaccgagaaccagctagccgatatctttaccaagcctctagatgagaagaccttttgcaggttgcgtagtgagctaaatgtcatagattcgcggaacctggattgaattgtagcatacatgtacttatgcttttgatcatgttcctttttgcattttgttgcttattatggtgctcaagttgtaccaacactccctggacctcacaaatccgttgcaaagtgatgcacatgtttagggggagatgtgttacaacttgaccctttgagactaaccatttgcttgagtttgcttgattgagtctcgaaggaagattgaaagggaaaaggtggacttggaccatgaaagacttccactgcactccgatgagaggctaactaattccaagttcatctcatgaaatcttattgccatttgctcttaattgaagactttggtgaggcaatgggg

SEQ ID NO: 274848 - DNA, 746 bp, Zea mays
tctttataatcctgttgaacacagctgcactgagcacatagtcacccggcatcactttctgtgagaccaccagcaaaagggagatatcgaagtgttccatattagcaccgagaaccagctagccgatatctttaccaagccattagatgagaaaaccttttgcaggctgcgtagtgagctaaatgtcttagattcgcgtaacttggattgatctatagcatacatgtggtttatgtctttgatcatgttactttatgcatttatgaaatttgttgcttatttatggtgctcaagttgtgcaagggatccccggacctcacaagtccatgtgtgaatgatgcacatatttaggggagaagtgctataacttgaccctttgagactaaccttcgtgtttgagttacttgatgtagtctcaaagtgcattgaaagggaaaggtgaacttggaccatgcaaagacttccactgcactccggtattagtgtactcacctccaagttcattcttatgctctcattgcctttttgctcttaattgacatttttggtgacgcaatgcggttaaagggccaaaaatgatcccgttttggtgcttgatgccaaaaggggggagaaattaaggccaaagcaaatggatcagctaccacttgtgaattctgaaaacagtagagttagaacttttttgatttgtccaaaatactcttattgcaaaatttgggctcttgtgggggagaatctatgattat

SEQ ID NO: 274849 - DNA, 494 bp, Zea mays
  unsure (1)..(494): unsure at all n locations
ttttgaactacttccttgggttccaagtgaagcaactcatggacgacaccttcatctcctaaacgaagtacactcaggatcttctcaatcggtttgggatgaaggacgccaagcccgcaaagactccgatgggaaccgacggacacgccgacctcaacaaaggaggtaagtccgttgatcaaaaggcataccggtctatgatagggtcattactttacttatgtgctagtagaccggatattatgcttagcgtatgcacgtgtgctagatttcaatccgaccctagggagtgtcatcttagtggccgtgaagcggatccttagatatttggttgctacgccttgcttcgggctctggtatccaaaggggtctacctttgacctgattggatattcagactccgattatgctggatgcaaggttgataggaagagtacatcanggacatgccaattcctaggaaggtccctggtgtcttggagctcaaagaaaca

SEQ ID NO: 274850 - DNA, 671 bp, Zea mays
gggtagtctttgtaactgtgatcacagacctcaacacatgccaccctacatggtttcatgcggaggtgaatagatgttactgtccttcagaagaagttgccaagcgggcagcactggatgatctacaaccatctcaaatccgcgtgttcggtcttccgattcgaccatctttctgtcgtgcagttcttgttaaggatgatttgaggagggaacttgaattggatcctgagcttcctgcagtactgctcatgggaggtggagagggcatgggtcctgtcaaaaagactgccagagccctaggagaatcattgtttgacaaagagcttggaaaaccaattgggcagcttattgtcatttgtggccggaacaaaacgctaagctcctcactgcaggcagttgaatggaaaataccagtaaaggttaggggatttgaaacccaaatggagaagtggatgggagcttgtgattgcattataacaaaggctggaccaggtaccattgctgaagccttgataaggggtcttcctataatccttaatgacttcatacctggacaggaagttggcaacgtaccttatgttgtggacaatggtgcaggtgtgttctcgaaaagccccaaggaaactgctagtcttgttgcccgctggtttggtccagattcagaggaattg

SEQ ID NO: 274851 - DNA, 800 bp, Zea mays
ctacctggccgtcccctctccgattacggtcggtagcctcagctgaaggatctggacgacgggacaggttctgtttggtcttcataaagtagagcactagctagaagacatattcacacgcatcagctatcaaattgcaagcttagaattgacctcaaagttgggacatgcttgtcttaccagaagcaactgatagcttggagttgtagtccgtccggactgtctgctggaccagtatggctgacactccaacttcccgcatggtgcacccctttggcgacgtcccaaggcagactcccaagcaattcctgtattctggtaacccgcagcacctctgccatccgtaccagtcagctccggacgcccatgtcgtgccgcagcgccgttacaccgtgaggtctcagtctcactcgccaaataatgctggttctcaagaccatgagactcacaagcagtacacgctggagtcctcggcggcttccggttgttcaaggcatggttctccctccagccaaagcgtccatgccgggagtggcagccctgtgtctcacgacgacagccactccggctccacgaacggccatggatcacctgtgagcgcgtcgtgtgtcaccggcgaggaccctactgatctcaagcagaaactgaaggatcttgaggctgtaatgctggggacgtctgatgattaccccgagatagtcaacagtctcgagatctccgcggcaaaccaactctcgttggagcccgaggagtgggagcacatggtgagcatgctcagatggaacctgaaggagctgctg

SEQ ID NO: 274852 - DNA, 453 bp, Zea mays
cccactcgtccgcgttgttgcacagcacatcgatcgacgacgatatcgggaagcaatatggggttggccttgtcgcggctggaggagattaggacgcagtaccgcatggcagcggaagacggcgaggctgacagtccggcaccggcgccagtgtcgccgaccggtgctgctgctgcttccggcggcggcactgaaaagaagaagcaggcggacgactcgtcgtcgtcgtcaaagacgacagaatgggttcctcataagttctctgagatcgtcggtcaaagacgacctggtgaggatatgttccgagggatctaccttccacgatcggatcagcagccgaaaacaaagaagtactgggtagatgggagaaatgccaactgcttcatgctgttccctaaaggattcagcatcacctggggttcggacgaaaggtactggagttggcgcaagctc

SEQ ID NO: 274853 - DNA, 384 bp, Zea mays
  unsure (1)..(384): unsure at all n locations
atcgccggcgtcgacgcgacggcacggctgcgtcgggttcgaggagttcaagatgatgatgcgcggcacccagctccagccccaggccggcgccggagtgactgccgtgccggacaaggccaaggaggagtgacgggtccgggtgtaggtgtactcaccagggcatcagtctgggggaagggatcgagttcctctgcctcttctgttgctttcacctcctctggagaggcatgaaaatactcaacttgctgcataagactacttattactgtacttggggcctgggggacaaaatttctctccatgactactagtctactaccatgtaaatgtangagtttatattatatcctgcaatatatactacctattatctacagtatt

SEQ ID NO: 274854 - DNA, 1456 bp, Zea mays
  unsure (1)..(1456): unsure at all n locations
gcggggcctnaccaccagggccagcccgngcaganggncgngcccggcaaccatcagggacaggcccnccgggcggcctaccaggccaacacgangcccgacacggccgngcccatcgacgggcaagaaacncacccngactcggngcaacnnaagccagggaaagcggagcaangngcaaggcaagagaaacnccacaagagncaggagacaggaacagaagnaaaggaaccagangaaaccgggngagcngaaancacggggcaacagacgctagcaataaacatgggaactcatccatattagccggatggtaagctatcaattcctgaattcatgttgaatgagccccaacactatctgccagagaaagaacttgtcatcccagatcctcttctgcacttcatccagtcccatggtgctgctcttactattgatcaaagtggtcgggtcctcttagctggcaatggtgatgagatgagagacttgctctcaattttcctggcgttcaacatgtcgagacgagaaacaggtggctgcaaggctgcatttcttgttccatactttgagaggaaaagacgttctcgggctaacagccaagtatccaatttaaaattagcaggcacaactgctgatgtttcaaaaagtactgattttaattcaaaatctttgtcaaagaagaaacataaagtgaaaaacatcaaagaacgtgactcgtatcagagaaactacatacatgctagcgaggttattttatccatcctgctggacaaggacaggagcagctcgacaatcctctcgctgaaaaaggctggtcctgagatcactgaacttttaacgcaatgctctatcggcattgctggaactggactggctattctcctgtcagttatgtgcaagatgtctaatggcatgaggactccttttgcttctgcccgactgcttagcaccagcgtcggattcggactcttctggctatcctgggcagtcaatggattgcgtgacaccatcgccagcattttcagaagccgaagtggcatgaatatcgaggatgacgaggtcgcagtgaaaatagaaaaaagtgtgaacgagatcctcttcagggcattaactctcctggcaatcactgcactgaagtttgcatgagcagtcatcacgattttataggtttgtcgatgcagttgtgatatactcacctatgtctatgtggttcaggagtgtagacgtgtagtactgctttctgtaggaccaagttccacctgcccaaaccatggttatagcttcccagttctcattgatctcgtagaaaatgagccaagttgtaaattgtacagaaattttgcaggaaactcggtgtatattgtggatgatggattttaactctgtgaacattggataatctgatgcccagagcttatttatatttttatctacttaaaaaaaaacccaccgtccg

SEQ ID NO: 274855 - DNA, 716 bp, Zea mays
cccacgcgtccgcccacgcgtccggttggtgatcctcagccttcggaggagtcgtgagtgcatacttcagtggttctttagtggatacttatggtgtaagatttgtttttggtgttacagcacttctgccactgatgacatctgctgttgcagtccttgtaaatgaagaacgcttacctttggggaaaagttcagtctcactttcagttccaggttcagaattaattgagagctctaagcaacgtatcatgcagatttgggattcagtaaagcaacccagcatactcctacccaccttgttcatattcctttggctagcaacaccgcaatcagactctgccatgtttttcttcataacaaataagctcgggtttactccagaatttctaggacgcgttacgcttgtcacaatctgttgcatccttactgggaatcggagtgtataatttgtttctgaaggaagttccattgaggaaaatctttcttgtgacaacagtcttaggttctgctctcggaatgacacaggttcttcttgtcactgggctcaaccggaagcttggcataagcgacgaatggttctccattggggattctttgattatcacagtcctcggccaggcttcctttatgcctgtcctggtgttggctgcaaagttgtgccctgtgggagcggaagcaactttatttgccactttgatgtccatctctaacgccgg

SEQ ID NO: 274856 - DNA, 388 bp, Zea mays
gccaacgcgcccaagcccttcgcctcggcggcgccgcccaaagcaaccgacgacaacgggagcaacgaggacgaggcggcgtcgtggctcctccccgagcccgaccacgggcagaaagaaggcgccacgacggaggtgttcttcgcggactctgacccgtacctcgacctcgacttcgcgcgttccatggacgaagtcaagaccatcggcgtccagcagagcgggtcaccagagctcgacctcgccggcaccaagctcttctactccgatcactccgtgaaccacagtgtgtcatcgtcggaggcagcggttgtgcccgacgcggcgtctggcatggcgcccatggtggcagtggtcagcaggggcctgtagcgggatgcgcggctga

SEQ ID NO: 274857 - DNA, 449 bp, Zea mays
caacggctttggccggtccctgggaatccagaaaaagggcccaacaaccttaaccttgaacaataattttgctgcaaggacgaaaccatccggcgagtttgtgagcaagtataagggtaactacacatttaccggtgggaaggcagttgggtacaggaatctctttggaatcccgtggcaggcgttcatggccgatgacagcctctttttcatcgacgggatgctgcatctgagagctgagcttacgataaagcaacctacgtagatgtgctcccgtcgggttaagtgtgtccagtcatgggtgatgtggaaaatgctgtgtgctgcagatatcctttttgtttttttccttttgttcacgccccttaatccttacattaatagacagtttggtgatgccaaaatataaagggaaaaaaagggctggaaagctgccttttgttgtttcc

SEQ ID NO: 274858 - DNA, 853 bp, Zea mays
aacgctgtgaagtcagtcagcttcagcaccacgagcacgatggccctcgcgctcgccacgaccccactcgcgcatctcgcccttgccccgccctcgatcttcggctcccaatcctcgctgctgctgctcccgcgccgcgcgtcgcccgcccccgtctccctctctcaccgccgcatcatcgcggccgtcgcgaccaaggaacccgagctcggcggcggcggatcgggggccggcgacggtgccggagggagcggcggcggcagcgacccgaggggaggagggcaggaaggagacggggaggaagagaagatggggcagggcctgtccatgtcgcagaaactcaccctcgcctacgccgcgctcgtcggagctggtggtgtaatgggatatatgaagagtggaagccagaaatccttggctgcaggaggcatatcagccctggtcctgtacgtcgtccacactcaactcccagtgagacctgtcctcgcatcctcgatcggtttaggtatatcggccgcgctactgtcagtgatggggtcgcgcttcaagaagtccgggaaggtattccctgccggcgtcgtgtcccttgtatccctggttatggtcggaggctacttccacgggatcttgcgtactcgcacgcgtgatgcagcctgtggtcttttctgttccgtaatgcaatttggctccccctttgaacgtgtttctctgtttcacttctcggtggatgttttgtatccgttctcaactttagttcatcttttgtgacagtgggcaataataaccaataagcatgtgagagctgatagaggtgaaaaaaaaaaaaagggaaaaaaaaaaaaactcggggggg

SEQ ID NO: 274859 - DNA, 670 bp, Zea mays
gatcatcatatgaacttagttgatgggcaggtcagttggaataaggcagataaatttggcagcaggccagatgaggggtctttgcaatttctacaaaaacgaagtcccaatattggttccaaaagcaggaggttcttaatcgacgctgaagatgccatggaactaaagcttacctgggaagaagctcaagagttgttgcgccctgctcccactgcaaaaccaactgttgtgatgattgaggactatgaatttgaagaatatgatgaaccccctgtctttgcaaagagatcaatttttaccatccgtgcaacaggggaacaagaccagtggattcaatgtgacgagtgctcaaaatggcgccggttgcctcttaatgttattgttgcatccaaatggacatgcaccgacaactcatgggacccaaaatgctgctcctgctctgcgcctgaagagttgaccccaaaagagttgcaaagtgttatgcagcagtatgaagaaatgaggaggcgaaagggcagctatggtctgaagctgaatgtccctgtaatggatgcatccagctttgacgccttggccacgggtgcagtattcggtgaagtcgggaaccaaggtacgggttcagtcgcgacgaccacaagggaccccaggcatcggcccggctgcacatgca

SEQ ID NO: 274860 - DNA, 448 bp, Zea mays
tcgggtccacgcatacgtccgcttcggtgatgagtgagggttgacaacgggatggcgcggagcgtatcgtacgtttcggcggcgaactggtatccatggcgcgaggcaatccccgcctcgccatcatcgacgtcagggatgaggagaggagctaccaggctcacatcgcgggttcgcaccacttcgccagcggcagcttcgaggcgcggatgccggagctggtgcgggccgccagcggcaaggacaccctcgttttccactgcgcgctgagccaggtacgaggtccaacttgtgctcggatgttctcagactatctatcggagaccaaggaggattcagggatggcgaccatcatggttactggagtcgccggtttaacggctgggaggtttcagggcagcctgtcctgcagctgcaccgacgctccattgcatagggacgtgttctt

SEQ ID NO: 274861 - DNA, 795 bp, Zea mays
gcgtggagcgcgcgaccccgtacgtttccaccgctgcaggaactcccccgctccccggcggcccgcgcgcccaccaaccatggcagtcgcagccgccgcccaccacctgcccgttgtgccgcaccgccttgtcccggtccggcacaccagtagcagcccgccgccgcatccggcctcccgctgctccgccgcggggaagccgcccgtccagctccacgcggcgcaagcgagggcgtctgggttcgccgcgcgcgtcgcgttcaacccttccgggaactacgacctgtccctctccatgggcgaagacgagaccccgcaggtccagcctccgccgccgcctacccaagggcgcttcgaaatcgttatcaacaacgacaacatccgaacgctcgacctatcgccagtcgaagcagcactcggcgacttgagctccttgacaccagctgcttcaagaaccctgctggaccagaccgtcgggttcaccatcagctacgagagggaggacgagtacgacacgcgggagctgtcggagttccccgacatacggctgtggttcgtgaggctcgacgccgcgtacccttggttcccggtcgtgctcgactggagagccggcgagcttgccagatacgccgcgatgctcgtccctcaccagatgagcatgcggatgggcgtcgtcttcaacccggaggcgctggagctgttcgtgatgaagaaggtgttcgccgtcgacgcttggctgaagcagcagagccatcccaaaccgaggctgaagacggcggacatgggcaagatgct

SEQ ID NO: 274862 - DNA, 356 bp, Zea mays
aaaccattgtcaaagctcgtagtggttctgttctgggaaagggatcaatactcaaaatgtacttctttcctggacagaaaaggtcaagcagtgtgaatttccggggtgcacctcatgttattaaggtggatggataccctgtgtatagcatggcaacgcccactattgatggagcgagtgatgttttgtcgtatctgggctctaaagacacaaccggaagaaacattgcacagaaggtggtcgtcacagatcttagagaggaagtggttgtttacatcaagggatccccatttgttttgagagaactagatcaacctgttgatactttgaagcatgttggcattattggtccaatg

SEQ ID NO: 274863 - DNA, 416 bp, Zea mays
tcgtgctctcgtctccgccgcgctaggaacttccaactcccaagcccagccgcctgcctagggttaaggtcgcccctccgccccctcgctccgctcgtgaccggcagggttcgtcgccgccgttggatatgtcgcggacgctggtgcagccggtggggcagaagcgcctcaccaacgtggctgtggtgcggctgcgcaagcacggccagcgcttcgagatcgcctgcttcccaaacaaggtgctctcgtggcgctcccgcgtcgagaaggacatcgacgaggtgctccagtcccacaccgtctactccaacgtctccaagggcatcctcgccaactccaaggaactcgccaaggcgcttcgggcaccgacgaccttaccccaatctgcatcgagattctggagaaggggaactcca

SEQ ID NO: 274864 - DNA, 1647 bp, Zea mays
cggggccgaccgaggcgtccgcccacgcgtccggttgattactatcatcaattttgtttggcaaaaaggggtgccacttctaggcggaagaccaatttctccccaacatcaatgaaagatgtaccatccaagtctcgatccagcagtgatcagcgacacatatcttcaggttgatgctcttggaagagtatctttttcttccatacggaggcctcggtctcttcttgaagtcgaccatccttcatctgctgatggctctcatgatcagaagtccactgtgaggcccctggagaaagaaccaatgcttgcagcaagagtcactgttgaagacgccctttgccttgttcttgaggttgatgacactgaccgtctgttgcagtctagccagtcacaggacaacattttcgaactgaaacgaagacggcaagtcctcctggaaggtctagctgcatcattgcagtttgttgatcctctcggacccagcaaatctggtcattcatctgggtcagccctgaaggacgatgttatttttctgcgcattgtttctctgcccaaaggacgtaagtttttagcacgttaccttcggcttcttgtccctggcagcgagttgacccggatagtatgcatggctatttttcgccatttgaggttcttgtttgggggtttgccatcagactctagtgcagcagaaactacagttgctcttgcgaagactgtttcatcttgtgtgcatcacatggaacttggtgctcttagtgcctgccttgctgctgttgtttgttcgtctgaacagccacctctgcgccctcttggtagctctgctggtgatggggcttctcttgttattaaatcagtactggaccgagcaactgagttactgactgatcgccatgctgcagccagctacactgtgccaaaccgtgctctctggcaggcatcatttgatgctttctttgggcttctaacaaaatactgtgtcagtaagtttgaaagtatccaacagatgtttgtcacacagacaccgagctcaggaatcggacctgaggcttccaaagctactagtaaggagatgcctgttgagctacttcgtgcaagccttcctcatacaaacgagcagcagcgccagcggcttcttgattttgctcagagatccatgccagtaacaggtttcaatccctcaggtgctagaggtgggcacatcacttcagaatctgttcctggatgatgtaactgaaggagacacacaagggcaaagagtcaatgcttttaaacattgatgagatggtcttcagctgataattgttgtatctgaagacatgcatgccccattataagttgtgagcgagcttggagaagttccgattgctcaggaaagtagccttcacttcaggttgtgacgtaagtttaggtttcagagtaatcgaatagaccagtgaaatgttccttatgtgggtcatttaatatagtacccacctgatgatatcataatactggaacaggaaatgtaccccttcacatttctactagagtcgatgttcttcgtaggccattgtggactggtttgcacatttactgggcatgtatttgtttatattctcacatactgttattaagctactcctgtcctgggtcgggctcttggcttct

SEQ ID NO: 274865 - DNA, 634 bp, Zea mays
accacgcgtccgcggacgcgtgggtggatgcagaaacaacggtggtatgttgctgacaacggcatctactccaagttaatatctgtgatgggaaggaaagggcagatacggatggcaatgtggctgttctctcagatgcggaacagcgggtgcaagcctgacacttctgtatataactcccttatcggcgcacatctgcattcacgagacaagactaaggctttggccaaagctctcggctattttgagaagatgaagtgtatagagagatgtcagccgactattgtgacatacaacattctgctaagggcttttgcacaggctggtgacacaaagcaggtagacatgttgttcaaggatctggatgaaagtgtagtatcgcctgacgtatatacttacaatggggtgcttgacgcatacgggaagaatggcatgatcaaagagatggaatctgtgttggtgcggatgaaaagcacgcaatgccgtccagatgtgatcacattcaacatactcatagattcatacgggagaagccgacatttgataagatggagcacgtgttcaagagcctactgcggtcaaaggagaggcctacacacccgacgtttaattccatgataacaaattatgggag

SEQ ID NO: 274866 - DNA, 539 bp, Zea mays
cgcgtccgcccacgcgtgcgttctgcacaaccgctcgtcactctccaaatttgctgcacctgccctctccaaagttcttgcactcgtccctctccaaagttcctgcagattcacttctctgcaaagttcaggaggatgtgtggtgtgacagcgctacaacaaatctgtcaacggggactctcatcctcttgcgcatagaatgaactgcagtgttacaggtaggtaattactagagtactactactaagtaaatctgtcaaaggcagtcatggcatccatatccttcacatcagtactgggagtggcacacgcaccgcacacatactactacatctactagtatgtagtggagtgcttgaaaggcataagcgaattttcttcttgtttggtctacgtccatttgcttgtccactaaccggctagtttactctgctttttgggttttccacgtctctacaattgtgactgttagagcaactccagtaggactgttgaccacctatagatgcggttcagctagccctccgacccccctctcg

SEQ ID NO: 274867 - DNA, 840 bp, Zea mays
  unsure (1)..(840): unsure at all n locations
tggtgtcaattctccactacattgaaatatatggttatatatatatatgaatgggctnattcacgggaagctgttgnagatagtagcaataggctaggaggatgtttgaaactttgaatgcattagagcaactccagtagttctctaaaaaatagcttgctaaaatcatgtttagcaagttgctaaatagctattggaagtaaaaaataacttagtctccaatagttgctcatatttaggaagtagttcgattttgaatctagctttagcggccctgtccctatgagatctgcctgataataaggttgagagcagaggatatgagggcggaagaaaaaaggtcggtcgatatgaattatggatgagtggtggtccggtgacgcaacctatgagaaagttaggttcgacggtgaaggagaaacttgcgtcatacgtgtttgacctagctacctcattatgctagaaaataaaaaaagagtgtgttataactggctatctcactgtataggaaaggtaaaaataatcacgctagtgtgaagaaattgacgtcaactgtatttagggagttcctaccgagttgctaaatgtggagagtaaatagagttgaatagcaactaactaaatttagcaagtctatttagagaaccattggagaagtatttttctgttcacttcttaaatttaagatttagagagttatttagagaactattgaagttgctcttagaccacctataattgtgactgatgaccacctatagatgcggttcaactagccctccgaccccctctcgagagttccgcttcaccgcggtgaatgatgtggcggtggaggaggat

SEQ ID NO: 274868 - DNA, 805 bp, Zea mays
gccaggccgccacccaagcaaccatggcgaccgcgctgctccgccgcgcgctccacctccgccgtgtgctcccctcgcccgccgtcaccgccgccgccgcccagcgcctcatcgccgccttctcgaccagccccacaccgaccccgaccacctcccagcagaacgccgccaccactacgatcgacctctcctccgacgagagccgccgccgcctcctcaataggttggtgtaccggagcaagcagcgaggttttctggaactggacctggtgctgggggacctgggtcgagcagcacgtgcacgccatggacgaggccaacatccgcgccctcctgcaagtgctcgacctcgaaaacccagatttgtggaaatggttgactagccaggagcagccaccagaggatctgaattctaatccggtgtttgctgccatcaaatcaaaggtcacagataacctgaccaagcatgcttctcctgagacccgatctacaccaggtcaaccatgggttagaggatgggacgacataaagaaaggcaaagatggacccaagtatggaaatcagtgataagctgcttgaaatggggatgacggctttccatcctaaataatagctgtccgcccaccccaccccccaatatgcttgttttgtgattgtgtagaataaagtgaactgccaccggcatgtgtgaagtttgttaaattgtagaatcagcttgtaactatggatggtactcctgatgtttgcctggcaattccagccttccaggtatcgtctactacttggaaatatgttatattgtacg

SEQ ID NO: 274869 - DNA, 1169 bp, Zea mays
ccctcgcttccgcttgcatgctgcggaccagcgtggcgctaaactgtccactgctgctgtttttgtaaaaaggttgcatgatcttgcagttcagaaaagaggatacattgacttacagggagctgcagatgctgataatgggccatgttgctatggatatactcttcccaaagattcgagctatacagtgccttctacttgggcaatgacagatcctacaacattcttaatccggggagagacttatttgcacgatcgtataaagatcaaggcaaatagtaccctgatgcaaatggtaggtgctgactggataaaatctgataagcgtgaggatgatctagctggtcgccctggggggctagtccagaaatgtgcagcacaagggggcacccgattcttcttcattgtaaacattcaggttcctggttcaaccacatacagcttagctttgtattatatgatggatacaccattagaaaaggtccctctgcttgaaaagatttgtaaatggagatgatgcattcagaaattcaaggttcaagctcattccttacatctcaaagggatcttggattgttaaacagagtgtgggcaagaaagcttgcttggttggacaagcattagaaatcaattattttcgtggaagaaactatttggagcttggagttgatattggttcatcaacggtggcacgaggtgtggtgagcctagtgcttggctacttgaacaatcttgtgatcgaaatggccttcttggtacagggaaacacaaatgaagaactcccggaattcctcctaggtacctgccgactgaattacctggatgcctccaaggcagtgtccatagacgagtgctaggaccccaactgacctcattttttaaagccaagtacaccaaaagacaaaaaaaaaaggctgaatccccattccttgctgccgacacaatcggcaaccctagcccagatgcccattttattgcctcaccgcaaaagtgggggatccattgcaaccgttgtacattctcttcttgccgactgctcaggtattgtgttgtaatgatgatagcaatccatgataaaagccccctcattctttggcctccaaaaaaaaaaaaaaaaaaaaaaaaaaaaaaaaagggcggccgctcgcgatctagaacggacgcgtggg

SEQ ID NO: 274870 - DNA, 522 bp, Zea mays
accacgcgtccgcggacgcgtgggctcgtgattcgtgaacggcggcgacaagaagccgggagagatgccgctggccacaactgctccgccgccctgtcctccgccgagtccagcagcggcaccagtccggacgcagctcctctcctccgtcgcgaagctcgcgctcacggccgcgctcgtctgcggctctggcggtcccgctgccgtcgtcgtcgtcgttccggccgccgctcaggccgtcccgttcgtccgtcctcctcctcctcccctgcaaggaaggcccttagcctcctccactccttacgcgcagtcccagaagctgcagcttggcctcgacaagctcggaaagatcaggccatgcccgtccaccaacccggggtgcgtgtccaccaacccgctgggatcctccggctccttcgcctcgccactgctcatcccggaatcatccgcaggggagaaggccgtcgcctcgctgcggcaagccatcgagaagacgcagcgtaatgtggagttcaaggtcga

SEQ ID NO: 274871 - DNA, 529 bp, Zea mays
tagacgatcccaaccttttgtggagattatggttcaacaaaactagcagctgaaacaaaccaagtgaggttgacacagcaaggaaacagccatgaccatggcgattatatggcgacggatgggatggcaggcgaagaaggcgaacgcaatgaggttcacataaactgtgaaaccaaagaagtttccattcatataaaatctgaagattgtgatgcagcaagccattggcaaacagaccatgaaacggtgaggctggggtcttcccacaatacatccgatggcataactatgagcgaaaaccaagacagcagtaacataaaatcatccaacaaaagggtcacaattcacacatatcctcataatgcagcaggttctttagtacagaacgggaagcttatcaacctgcctggttcactggacgagatcttcgaaattggatgccagaagtttccgggtctccgccctacaaaactggtcagtggagactatgctgagatagatgacattagtgttatacgtgatggtgaac

SEQ ID NO: 274872 - DNA, 855 bp, Zea mays
cccttcgcgtgcccggccgcgtgcgtactcgctgacccaagatgcacgcttgttgtccaggtgcctggatggagtggactgtcgaacgcgcgagtcaccatatttggtgatgtttaccctttgccagctgaacaacaggaatgggcacataagcaatatgtagcaaaacatcagcagtgggcatcacagcagtggggaaacttttactattacaggatgcacaacataagtgacatatacttcatcgggggcttcggaactgtcgcatggatagatgttaaggagtatgaaacgattcaacctgacaagatagcagttgatggtggtgacttgcaaagtttaaaggagttgaacgctattttctctaaaccacttcgggaggtcctatcatcagaaggggaggttgatgatgctgcgcttatatcagtagatagcaaagggatagatatacgggttcgacagggtgcacagttcaatattcagaggctagcatttgatgtccctcataaggttgagactctggaggaagccaagaaagcactccccaagataatcaaagacaagcagcaaataaagtgaagttgcaggagctggctctacccatttttctggtggtgtaaggtttcattgcaaccggaccaaggattacgtaatggtagcaggtagcatgatacaagtgaaaacgatggctgtttttttaaataatgagagtctcgctctccagctgtggtgaagattgtatatatgctcgtgttgccttattaataattattattgtgcggttgcttcttgaggaaaaaaacaacaaaaagaaacaaagttcataaataaaaaacgggaagcttatcaacaagc

SEQ ID NO: 274873 - DNA, 856 bp, Zea mays
gtggcgccgacgacgctcgctccgactttactgcggcagaagcggtggagcggggtcgactgctgcctatgggtttacaggctctgcccattcttatttggacgactgggcaaaaccaggttgccgcaccagatgggctactccatctacgggctatgggcgcccaactcgctgcctacgctgtactacgctgtcgtcccttcgctgtgcctgctcaagggcacccctctgttccctgagctcacgagtccgtggatcgcgcctttcgtctacgtcgcggtcgccaagaacgtctacagcgcgtgggaggcgctgtggtgcggagacacgctgagagggtggtggaacgggcagaggatgtggctggtccggagaacgacctcgtacctctacggcttcgtcgacaccgtcagggactcgctggggctgtccaagatgggcttcgtggtgtcgtccaaggtgagcgacgaggacgaggccaagaggtacgagcaggagatgatggagttcgggacggcgtcgccggagtacgtgatcgtcgcggccgtcgcgctgctcaacctcgtgtgcctggcagggatggcggcggcactggatgtgttcttcgtccaggtcgctctctgcggggtgctggtgctcctcaacgtcccggtctatgaagccatgttcgtcaggaaggacagggggaggatgccgttcccgatcacgctagcctccgttggctttgtgacgctggccctcattgtgccattcttttgactttgaggtgctaataatacgtgtacgggcacacgcacgttcgcatgtatgacgattatggccaacaggcgtgtaataccactaatacctattaacc

SEQ ID NO: 274874 - DNA, 688 bp, Zea mays
catttttgaaaaccctgcatccatccaatctggacatacataaaagttgtcataaagaaaggcacttgtccaggaaaaatgttttattgactgtcctgctgttcctttccccgctaaataatgtatcaagttaaaacttagctgagataatgtcaacttaagcttttccatgtcggcatatgtgcttcccacaatcttcggatggtcttttttttaaaaaaatctttggcctgcttcatcaagaactagatttgatcatgttcttctctgtgttgatgaattatctacagtttagctataaacacatctgaaatgttagtctattgaaggatacttggatactgaagccatgcatctttaaattgttaacttttctttttgtggtttagtatggatgaataaaaggggaaaaagcaaaagggaacaagcatcctctgatttttattctgatgatgcaatcttagaaaccctacctgaactgaacacctcttttggcattttaaaagtgctgcaaaggaaacaagcatcctcttgcttttgtatctttagtatgttgtcggcatatgtacgctattatgtccttttttggttaaatatctattattcatgggtttgctgttcacatgaatcgcatatagctatcacctttgctgcattcaggttgatgctatgctccaagaattagaaa

SEQ ID NO: 274875 - DNA, 1399 bp, Zea mays
aaacggcactgtccccgcaaagaaaagcagacccgtcgccgacgcgtgccttctcgttgagcccgatcttgtgggacgtcgccgcattcccaaatccgttaggcaatggcgccccctctcctctcgccaccgctgctcgccgacgcgctcgcgacgctgccacggtctttcctctgctcccgcccaacgcggcaactgcccaccgtccggctcgccggagccgtacgtggcgaccgggggagctggagtgtgcggagaagggatcccagggtatttgccacctccacggaagcggatcgtgaaaggtcggaggaggatgtcgccgacgattactattccgttctgggtgtgatgccagatgcaaccactgaggaaattaagaaggcatactacagttgcatgaaggagtgccaccctgaccttagcggggaccaccctgacgtgacaaacttctgcatgttcatcaacgaagtttactcggtgttgagtgatccagcacagcgtgctgtgtatgatgagatccatgggtacacagcaacagcaatcaaccctttctatgatgacagtgcaccgaaggatcaggtgttcgttgatgagtttacctgcattggatgtaaaaactgtgccaatatttgccctggagtctttcaaattgaggaagactttgggaagtcaagagtctattcccagtcaggtagcacagagctaattcaagatgccattgatagttgcccagttgattgtattcactggacttccgctgcacagctgtcactcctcgagaacgagatgcgtagagtagagagggtgaatgttggtttgatgcttgctggtatgggagcttccatcaatgttttccggatggcaagtgttcgttgggaaaagaggcaagcaaaagtcctggagaaagccagaacacggatggtgaaacaggagacgtcagacacgaggagctcttggagcgaggtctgggcatcatccccaccacgagacgaccaaagcaacggcgatggggaagcatcggaaagggccaaaaaagcaccacctgcggcaagccggtggcaaaagttctcaaggcaaggttccggacaggcctccaacgcacaagcttcccgaggcagtgggcaacaaggattagtagtagtagtaaatttgatcatattggctaaatgtacagtgccattgtctgtagaggcttgcagtgccttcccagctttgcacgcactcatgtgctccatttgtaaaatctaggtgagtaggtatatagtgatgttgataacctgaacctgtacgtagaagacaacaagcacccagtgctgcagaacaaaggtcaaacatgtacaatacaatagaacgaatacaagtgtatacatacatccgctgtacaatcgcggtacgt

SEQ ID NO: 274876 - DNA, 409 bp, Zea mays
  unsure (1)..(409): unsure at all n locations
atccccaccacgagacgacgcaagcaacggcgatggggaagcatcggagagggccaagagagcggcagctgctggcangcggtggcgagagttctccaggcgaggtgcggacaggcgtccaacgccctggccgcccggggcagtgggcaacaaggattagtagtagtagtagtccatggaacagagagagccttggcaatgttggtttgatcatattggctaaatgtacagtgccattgtctgtagaggcttgcagtgccttcccagctagctttgcacgcactcatgtgctccatttgtaaaatctaggtgagtaggtatatagtgatgttgataacctgaacctgtacgtagaagacaacaagcaccagtgctgcagaacaaaggtcaaacatgtacaatacaatag

SEQ ID NO: 274877 - DNA, 1048 bp, Zea mays
  unsure (1)..(1048): unsure at all n locations
ccataaggaggaagaaccttcatgactttgagagccttgtggtgttcttcgaagatgctgcaggtgaagcttctacctacagcctagttacgatgttcgataagctggcctcctctccagaataccagcgccgagctgcaatggtggagcacttcaacagaagcaacaagtggaagaagcgtggcatttcttgtgtgccaattacatatgaggtcaatcttcggccaactccaggcaaggtgtctatcatgaatgatggttccattgctgttgaggttggaggggttgagctaggccaagggttgtggacaaaagtgaagcagatgacggcattcggactgggacagctgtctacgaggagtacgcaaccaactctgatgggttggtcatccacgatggcacatggacgtacaagatccccacggtcgacaccatcccaaagcagttcaacgttgagctgatcaacagcgcccgtgaccagaagcgcgtcctctcttccaaaggtgagcctggacccgagaaaacgtcctgatggaatgaatggccggtcaacgggtcgccacttctcgtgattgctactggagatcagtttgttccaaaaggacttatggagattggaggacggccgaaatgtcaggaagctgcatggaagaacagaagagagccgcaggagctggaattcctggccattactattcagttccctgtaaagaaacaaccctgttttgcaacccccccatgctaatttcgcgctgccaaattttaacgtgatcgcgaagctaaccagtcctggggggtttactttgcctggttttctgccccccaaagttaatatgaatatgaaagggccttccttaatgttttttttccccttggggctgtataaaggttcagtgtatattcccttccggagaatgagaaaaacttcaacacttcagtgtgggtggatcaggatttaggcaacacaatggaactcgatgtgtaattcaaaacagacagacttttaattttgccccggttcatagaaagcnnaaaaaaaaattgatga

SEQ ID NO: 274878 - DNA, 1351 bp, Zea mays
ctcctctccagaataccagcgccgagctgcaatggtggagcacttcaacagaagcaacaagtggaagaagcgtggcatttcttgtgtgccaattacatatgaggtcaatcttcggccaactccaggcaaggtgtctatcatgaatgatggttccatcgctgttgaggtcggaggggttgagataggccaagggctgtggacacaagtgaagcagatgacggcattcggattgggacagctgtgccctgacggcggcgaaagcctcctggacaaggtccgggtcatccaggccgatacattgagcatgatccagggagggttcaccggtgggagcaccacttctgaaactagctgcgaagctgttcgacagtcgtgtgttgcgctggttgagagactgaagcccatcaaggagaatctggaagctgaggcaggcacagtggaatggagttccttgattgctcaggcaagtatggcgagtgtgaacttatcggcacatgcatactggaccccagatccaactttcagaagctatttaaactacggagctggcattagtgaggtggaaattgatgtgctgacaggagcaacaacaattctaaggagtgaccttgtctacgattgcgggcaaagcttgaaccctgctgtcgacttgggccaggtggaaggcgcattcatccaaggagtaggcttctttacaaacgaggagtacacaacaaactctgaggggttggtcatccacgatggcacatggacgtacaagatccccacggtcgacaccatcccaaagcagttgaacgttgagctgatcaacagcgcccgtgaccagaagcgtgtcctctcttccaaagcatccggcgagcctccgcttcttctagctgcctcggtgcactgcgcaatgagggaggccatcagagccgccaggaaggaattctcggtctgcactggtccagcaaactctgccatcacgttcgagatggacgtgccggcgacgatgcccatcgtcaaggagctctgcggcctggatgttgtggagaggtacctggagagcatgtccactgccggaccaacaaccactgccaaagcatagatccagcaggtgcaccgcccatggtgagagagcttaataggtctgtgtaaaacactgaacagcatgacatgccaagcttacatgtgttagctctgatgtacagaagacgaggtagcaatgggagctgtggtcttttgaatcaggatccatgaacattagaggaaaaaaataaagtaaataagtgtcgggcaggcaaatgtgtggatgaaatcatgtggttttgattggattttgaagaaatttttgcaatgaatctccgttcat

SEQ ID NO: 274879 - DNA, 426 bp, Zea mays
  unsure (1)..(426): unsure at all n locations
acggacgcgtgggcgggcatcaagatcacgttcgagaagacgacggtgaagaccaagggcaacctgtcgcagcttcctccgctggaggtgccccgcatcccggacaacctccggccgccgtccaacaccgggagcggcgagttcgaggtgacctacctcgacgacgacacgcgcgtcacccgcggggacaggggggagctcagggtgtttgtcatcgcgtgacctgatcgcgcttgcggcgccgttctgctggtccgtgagattgtcatccttcttcctccctgttgctccagtagatttgttggtttcttcgtctgaccaatgtataccgttctgttcttccgtgaactgaatctgcgattaacttagtaactatcttgtgtggtttaaaaaaaaanaananaaaaaaaaaaaaaagggcggccg

SEQ ID NO: 274880 - DNA, 402 bp, Zea mays
cccacgcgtccggattcatcgcgattttaaggcaagcaacattcttctggagcatgattacacaccaaaagtgtcagactttggacttgccaggactgcaaggggagaggggaaccagcacatctctacgcgtgtcatgggaacattcggctatgttgcgccagagtacgccatgacgggtcatcttcttgtaaagagtgatgtgtacagttacggagttgtattgcttgagctcctcactggtaggaaacctgtggatatgtcacggcccgctgggcaagaaaacctagttgcatgggctcgaccgcttctaacaaatgttctgagcctacgccaagctgtcgatccacttcttggacctaacgttccactggacaatgtagcaaaagcagctgccatcgc

SEQ ID NO: 274881 - DNA, 374 bp, Zea mays
acccaaacgtcaaggcacctcacccgatccctatgggggtggcagcatccacctagtgtgtgatcattgcggtaccagtgacaactacaccactgacgacgctgatgatggccaattcacgtgccgtacatgctctgccgtgcacactacacaggcaactgctgctgatcctcatgacttccccgccactggcaacatctctgtccgtcgtgttgccacccagcccacccccaagcttggtgcccgcacacccgcgccttacctgaggacccctcaggctgctcccgtgcctgctactgccgcttttgatgacttcacagagctgagtgagccgccggactttgtgtctggatctggcacgtgtggggagcctg

SEQ ID NO: 274882 - DNA, 630 bp, Zea mays
cggacgcgtgggtgttcaacaacattgatacagacaggagcggcacgatcacggtcgagggactcaaggacgggctggcgaagctcgcgtccaagattagcgaagcggaggttcagaagcttatggaagcagttgacgtggacaagagtggcagcattgactccgccgagttcctcactgccatgatgaacaggcgtaaactggacaaggaggaggatttgttccttgcttgtcaacacttcgacaaagacgatagcgggtacataacaagagacgaactggaacaagccatggcggagtatggggtgggtgatgaagcaagcattaaggaagtgctggacgaagttgataaagacaaggatgggagaatcgactacgaagagtttgtagaaatgatgaggaagggaagttatacctgaggaagctctgttctcatggtgggagaggttgtgtatatatgtttcagcaaatgtgtcaagtacaagcaacgaagcaagtttaacttagaacaagttgcttctgcagctatggtccgaggcaagcatgtacagctatttatttattgaccccatccgcaacgagagagaaaatgtccaaaattcaaaagaaaaaaaaaaaaaaggccggcgc

SEQ ID NO: 274883 - DNA, 419 bp, Zea mays
tttgcggacgcgtgggcgaggcccggcccattccttgcccacgtcatctttctgtctctccctctcatcgccgcgtcacgcacagccgccgccgtcgtgcgcgtgtgccggaacggccgcgtggatcctccgccccgtcccagcggcgacttgtccgtgcgaagatgctggggttctcgaccggacagctgctggtcgtcctcggggcctgctccgtcatgatgaagcccagtgatatggtgaagattgcgaggacggccgggcggatgactggaagagcggttgggcggctcatagtggctcgccggcagctggacgagattctgggccagtctgcagccacccaggttcataaggagcttaaagacgctatgacacaattagactcgatccgttatgaagtccagaacttatcaaga

SEQ ID NO: 274884 - DNA, 664 bp, Zea mays
gcagcgttcccggtaaaatcgagcgccgccggaaaggcctccttgacatcgtcgaccccatcattctggagcatcaggagaagagagcggccggtggcatagacgaagatgaggacttgcttgacgtgctcttgagactccagaatgacatggactcccagtaccctctcaccaccgacaacatcaaatccgtcctcatcgacatgtttggagcaagcagcgagacgtcggcgacgacgctgaagtgggcaatggccgagctgatgcggaacccggcggtgatgcggaaggcgcaagatgaggtcaggggagcactcgccggccacgacgaggtggcggaggacagcctggtcaatctgcggtacctgcagctagtcataaaggagacgctgcggctgcacccgccggcgccattgctgctgccgcgggagtgccgcagcccgtgccaggtgctcggctacgacgtgcctcgtggcaccatggtgctggtgaacgcgtgggcaataggcagggacccagcgctgtgggacgcgccggaggatttcgtgccggaaaggttcgaggagagtggacgagacttcaagggcatggattttgagttcatcccgttcggtgcgggaaggaggatgtgccccggcatggcgttcgggctggcgcacattga

SEQ ID NO: 274885 - DNA, 638 bp, Zea mays
acccacgcgtccgcccacgcgtccgcccacgcgtccgcccacgcgtccggtcgaaccagggacgcgctcccttctccgtttctttcagccacctccgccgctggtggagctacgtttctgtgcgatcctcgtcctctggggccggaagccagtcaagcgttgcggatgaaccagaggctgcagaatgggccttgcaggatttctacattttgcggaaggatgttgagttggctcttgagcgtgtcaatgaagtcaggcagtctgccggtttgcaacagctcgaggaggatatcgcttcgcttgagaacaagtccagtgatagttccttatgggatgatccttccaaggcacaggggatacttgtttctctgacagaggtcaaagacaaagtgaagcttctcaacgatttcaagttacagattgaagaagcagagactattgtgaagcttacagaagaattagattctatagatactggtcttcttgaggaggcctcaaagattataaaggcattaaataaggcattagacaactttgagatgacacagcttctttctggaccatatgataaggaaggtgctgtaattaatatttctgctggcgctggtggcactgacgctcaggattgggctgacatg

SEQ ID NO: 274886 - DNA, 387 bp, Zea mays
cgttcgtctgccactgcctgcccgagccgccgctccccttcctcggtctctcctcgcttcccagtcccagtcctagcccagcgcgccgcggcgttaagccgttaactggccagctggtagtgatggcaaccgagccgccggcggcagcggagaagaagaaggcgccgctccccaaggtggtcacgctcaataaggccctcaagctggcccagacatgggtggacaaaatgagtgcatcggagccggatgaacccaacgataaggatttcgagggccggccaccaaagctcggtcttggtgctaaagcggcacctggtgtgaagcgtgtggctcccactgacccagttgagaggaggttgcttgggaaggtgaatgcgcataagagga

SEQ ID NO: 274887 - DNA, 459 bp, Zea mays
acgtgagctcggtttccggcgaagggttttcggacagagaagatggcgacggcggcggcagggttggctccggcaaaggaggtggtggagaagaaggtggaactcctgaaggagatacgggcgcacgaggtggcgatcgcggagctagacaacctgaatccctcccgggcggtgtaccagaaagctggcaacatcttcttctgtaagagcgtcaaatcggtgatcacaacggagcagaagcaacttgaccaagccaaggctcggctgagcaagctgaaccaagcttgatgggcagcacgctacaaatgttgaccttgaacacaatagagcatgcagatttgaatggtcttctcgttgctcattaattctgcagttgggcgttgtggacctaatccatgtgtaatgctactttctttttcatgaaaaaaaaaaaaaaaaaaacaaaaaaaaaaaagagaa

SEQ ID NO: 274888 - DNA, 287 bp, Zea mays
tgcaccggtagaagctttgattatccaggttgcgagcaagagcacggatatgcttactggatctgggtcaaattttgagtagcttgcctcgtcacgaactcacagcttgtccatcgtactcacagtttcttgctttgcaacaggcggtgtaccagaaagctggcaacatcttcttccgtaagagcgtcaaatcggtgatcacaacggagcagaagcaacttgaccaagccaaggctcggctgagcaagctgaaccaagcttgatgggcagcacgctacaaatgttga

SEQ ID NO: 274889 - DNA, 560 bp, Zea mays
cagtctggcgcaccggacagtccggtgtgccagactgtgctgagtattggctgcacacaggcactctcttccaatctttttctttttctgtttctagcacttaggtaacttcattagtacccataacaaatgtactaagtctagaaacataccttctttgttgatttcacttcattcatcatttggcatataataacccacttaatatgtgttggacacttaatcaccaaaatatactagaaatggcccaagggcacatttcccttttaggttcgtggactaattttgaggggacttggcccaaatcggtttggtatcaatcttttcttttctctctttttttgttgatatttttatgtatcaattcaaatctggtttgaattttcaattcatgtttaaaggcgcaaacaaaatcccaacatgagatacaattgaagttttatttatttattttaggagaggataaagtgtagtctttgtcatgactcattttaatttatctatggtttgaaaaagaaatagtctgcaacctttcttttaatgttccaagttttaaattt

SEQ ID NO: 274890 - DNA, 684 bp, Zea mays
gggcgacggtgcgggcgctgcggctggtgcctggtggtggtggggtaaaacggaatggtaaactgaagccaactgccaacccgacgaaggccagaactgcgcgcgcggaacctgttcgacgaattggcgcactggctatggcgctgctacgcgccgcgctagcccagccgttatcgccgcgccccgcgctcccggtccgccaccctccgacctcgctgacaggctccaggtttatcctcgacttctcgcttccaccacatccaggccccggcgcgccccggcgcgagtaccccaggatcgaggcgacggcgaggcgaggcgcgcgaactgagagcgccaaggtcaggaaccgtcggctgcagaagaagttcaacggcacggcgacgaagcccagactctcggtgttctgctccaaccggcagctctacgctgtgctcgccgacgaccacaacaagaagatcctcttctatggcagcacgctgcagaagtccatctgcggcgatccgccctgtagcaccgtggacgctgccaggaaggtcgtggaggagctcgtcagggtgtgcaacgtagttggcatctccgaggtctcctacgaccgcaacggctttgctcgaagcgacaagatgatggcgttcgaggttccggtctcacagcacgggttcctgccaagataggatgcaactg

SEQ ID NO: 274891 - DNA, 657 bp, Zea mays
cttctgggcctcaaggaggtttatcctatgtggcaggacaggactctcacatgttgagttcaacacatcaaggagcttttccacctaggaatccatttgagtgagactagtaaagagagttttgctggatagtggtggacagaagaggaaggcaatcagcaccggtcgaaactcaaatggatactcaggtctactatactagatgcattgaaagcaactgtgcatcgaatctgaaaccctgaggtaaatatgtgtcttggatttcattgtctatggtctctcgtgtatcagaaaggactgcatagaagtctacatggcaggagtgctggaatttttgcccgaagcaaaagctgtcctctactcccatggactaatgtatctctggcaggcagtgctggtccagcatcaaaaaatttctttcatttcgacatttgcccaatagttgtgttcatgttcttgttaaaccctgttgtgaatgagaagggacgacatttacctccttaatatagtaaaaacatgttcgtcaaaagattgaattgctgtcaaatgctgtgttgttcagtaatggttattacctttgtatgttgaaggggcctgtcggctctcctgagcaatattaatgttcatcatagtaaagggccatgatgacattttttc

SEQ ID NO: 274892 - DNA, 440 bp, Zea mays
  unsure (1)..(440): unsure at all n locations
gcgtcaagtctaggtgcaaaaaagcgggaaacaaagcgaagttggggcggcgagacgcgagacgcgagacgcgagaaatggcggagccgcctttggccgccggctgcacgacaaactggaggagggaggccgatgagcggctgcggccccgccactccctcctcttcggcgccgacgccgcactcgaccacggggaccccacggtcgcgcaggcgctcgcgctccgcctcctcggcttcctcgactctcaggcgctagccgcaggcgcgggccccgaggacgccgccttcgtcgcgcccattcgcaccgcggcttccgctcggctagccgccgnctcacgcgcccgcgcctatgactccgaccgtttttgagcttgcaagaacggaatgtggctgtgtttttgcaaatccagggtgacaataatgttgaaagaatccagc

SEQ ID NO: 274893 - DNA, 526 bp, Zea mays
gcccaagtcacagccaaacgaaatactagttgacatggcagtgtgtgctgccaccaagctccagtgccttaggcatttgtcacggggcgttcaaacaatctgctacgacaatggagcaacagttccaaaaggagactaggttctacagctccttaataagattgcagcagaactggaaagtgaagcggcagcggtctgttgggagtccaggaagtgagggcttcatgtttgatctagttgatacttctcagctagacacaacaacaatgcctcgattatcaccattatctttgattccgattgatcaagactcttcaggcactttgtctgtacaaattccacagaagtctttccgttccttgagccttcgatttcatggagacatagtcaatattgcagaaagcagtgctatcaaaaagaaagaaggcacatcaaccaacactactgctgaagccgaaaatgatgttttggcagatgatgatgtcaataagtctattagacatgcaaattccatccttcgtgatat

SEQ ID NO: 274894 - DNA, 489 bp, Zea mays
cagttcaataacaggctgatgaataacagagaaaagattaagtcaaagaaaatcactgatgttctcttgtctagtgatacaactgaagctcaaggttttctccaagagggtggagatgattgtgcacaagttgtctttagagatgaggaagatgagatggaaggtacagggataccttggtctgttattggagaggcagtgggagcagaagaacagcttgagccttgtagaagtgcaagagtgagagagctctatgaaggagaagagtttgagtctgaagaagaagagtatgaagatgaagatttgtgctacagtgaagatgaaatatgatctggaccatctccatctagtagtgaagccttttgtgatgccctggtcttatgaactgcagctgtgtcactttgtgtctgtgtgtcttcttttgtgtgagacctgaactaagaactatgtgcttgtgttgtcctttatttataaattgtgttctgcact

SEQ ID NO: 274895 - DNA, 648 bp, Zea mays
agggaacattttatgccaggtataatgacattgccaagcatgcattggatgttgtgaaaagtaagagcctagttttgactcaatcactggatgctcacaacataactgaaacaaaagagcagcctgaaggatttgacagtgattggttacataccttactttggcaaggcaatgaacttcctgctcctgtcattgatgtatgcctactactgctttgagtacaagtggaacttctttgcagtgagtctgcatgagaggcttgatttctttgaatcaaactgggcgttctttgctggatttggtgctccatgcgtccttccaattttcttcttctctcctcttataagctatgggtttctggctatactttatccgttgtttgtcttgactgccgcagcactcaagctgagcaagtaattgatgcactgaaacctgcacaccgagggaaactacaaagaatacctgtgttctttgtcgcaaagcgactgacgtcagcacccccccaacctgtcaatcgtgcaagatatgaaaatcagtggtattcagtttcttccaagtagcgagccccatatggtcaacaacaacaaccccatattccttcctactgttttgggttctctgtcactgttacatttaggtggctgacgt

SEQ ID NO: 274896 - DNA, 574 bp, Zea mays
tcttgtcgcgtgggcggacgcgtgggcttgaaacatgggtaaaatcttctggcattctaggtgggccgaagaacgcttctccaactgtcatttcacctatgcaatataagaagcggttcaggaaagccatgtctgcttattttattgtcattcctgagcaatggatgcctgcaataatcaatccaagcaaatcatcatcaaatatttgccaagaagattctcaaaatgggtctcaagagtgatatgatgttcgataagtccggttttttgtcctgtcctgtcgtgaaaagttctgaactgctagtctggcgcaatgccttggctgctactgttgcgtcaaagtgatattctggctgaccgcattctcttgtgctaattggcacaggtccgattgcatcattgagtccctcaagcatcggatgtgtatattcccaaagatgtaattatgccctagtcgtagttttccccccttcaataaatcagttccatagtatcatcacttgtgtcgtcgtcgcttaatttttgttgtatgtatagaactagcaggacgcttgtttttgtggtcgttttgtac

SEQ ID NO: 274897 - DNA, 574 bp, Zea mays
  unsure (1)..(574): unsure at all n locations
agctgcgttgcgccgctggtctccatccatcgatttgttttgttggcttcttcgcatgtgattccgccagtaggagtgttgcttatcttaccctcctcctcggctcctccacaacgtccacgtgagcagagccagagggtaaaacggaatagtctattcccagtagtgataaacaaaacaaagaatcttctctgtcttcgtgcggtgtgcctgccatttccaggcccagctgttcattctcgaggctccttctcttgtagttcgtcgtccttgcgcagcagatcgagaggctgaggggagagggatccatggagctgggaaagcccctttcggcgcacagatgtagctacaccgctacctacacccactgttccataggcttctcccctcgggtcgtccgtaccagctggatccgcgcggcggctgagggcggcgacggcggggcagaccggcgacggagaggtgccagcttcgccgccgatgggcccagggtcgtcgaggtcgccgctgccccggtggctactagcggaggcgccgncggagcagccgggagcgcgtggttcgagcacgggac

SEQ ID NO: 274898 - DNA, 642 bp, Zea mays
  unsure (1)..(642): unsure at all n locations
gttccttgggggtactctctcatcgaagaatggcttcaagggcggtcatggtcaagaagagaaggtcgagtactcgggccctttgttgtcccagtcgcacaaggtcgatgaactgttgcagaagaacgagcgccacatccggcaagctgttcgaacatcatggttcaggagagtcacaggaagaaaggtggacaagtgaggaaaagcttgaccgtttctttccatgggagggcttgtgacgcttagagaaaggggagagcatgtcattagcttctgatgggcctctgctgccaatcggggaagcgggcaattgctgctgacgagtccattgttagctgaaaacatcatcaactttggtgatcctatctcacagcaaaacaaaattagctactgtgccttgctgcttctggggtttgttgtagattccccgaagtgccgtatccttttttgtttgttgtccagagaagtattaccggctgactgacggggcggtgtggttgaacagaagattgtgtagttggaataaccagtaactaagctgcacaacatgcatggtgcggttgtagtaaaggcagcctcttaagacaatgagaagtgaaatccnaccccctgttcgttgtcaaaaaaaaaaaaaataaanaa

SEQ ID NO: 274899 - DNA, 261 bp, Zea mays
ggacctgggctgctgccagtctgggaagcgggcaattgctgctgacgagtccattgttaactgaaaacatcatcaactttggtgatcctatctcacagcaaaacaaaattagctactgtgccttgctgcttctggggtttgttgtagattccccgaagacgccagtgccgtatccattttttttgggggttgtacagagaaatattagcggctgactgacggggcggtgtgattggacagaagattgtgtagttggaataa

SEQ ID NO: 274900 - DNA, 436 bp, Zea mays
aggtaggatgttttcttatgaagaactgaagcttgcgacgtccaactactcacctgatatgttaattgggaagggtggaaccagccaggttttcaaggcacagcttgatggcggaacatttgctgccataaagattctgaaaccctcggttgatgcaatacacgagtttgttacggaggttgagaccgtaaccagcttgcagcatgagaacattgtagcactaaggggattcagcttcgagaactacaaccttgtgttggcatatgattacatgccccgagggagcttggacaaagctcttcatgggaagaatgatggcacagagtttcttgtctgggagaggagaattaagatagcaattgacatcgcaagagcactcaaatttctccatctcggcggtgtgacccagtctgtgatccatggagatgttaagtct

SEQ ID NO: 274901 - DNA, 441 bp, Zea mays
cgtccaaagtgatcttggttggtgccacggaagctcaccagctccatttgtgttccacagatcgtcgtccttctcgttcccctcgtgtgtagcctttggtacgttggtggaagggcgaggcacacacgagaattgatagaggggggatccccattttcagctcttcgtgtttttttgtaggaggaattcccgttcacatgatccgtgcctggacctgacggttttgccccgctctgctgcttccctttcggggagaagaggactcgactcaaatcatttggtatcgcagacctcgcccttcccagttcagttgagagagatttctggcatgtccggcgcaagtaactatggatccctcatcgatgaatggttgccgccccctacacctagcccaagaactctcatgtctagctttctgaatgaagaattcagctctgcgcc

SEQ ID NO: 274902 - DNA, 403 bp, Zea mays
ccacgcgtccggcccccgagagcctcgtcgttcccctcgtgtgtaggtgtagcctttcactcggttggtggaagggcgaggcacagaagaacatcgattaagggtgtgtctattttttagctcttcgtgttcttgtaggaggaattcccgttcacatgatccgtgcctgtacctgacgggccttgtcgcgctctgctgcttcgctttcggggagaggaggactcgactcaaatcacttggtagcggagacgtcgccctttctagttcagtcgagagatatttctggcatggccggcgcaagcaaccatggatccctcaccgacgaatggttgccgccccctacaccaagcccaagaagtctcgtgtcaagctttctgaatgaagattcagccccgggccattc

SEQ ID NO: 274903 - DNA, 751 bp, Zea mays
accacgcgtccgcggacgcgtgggcggacgcgtggggcagtgaaagcaaggcagcatgcatgtcgtcgttgaccacaaaagtgtttggagtgccccagccagggtggtacagggtttattacatcattaataatattcaagagttagtaaccgctctgacccaagagcatccggtggtgctgatgttctgggcggactggaaccagccaagcaaggccacgtactgggatctggccatcgctaaaaaggatgaggccgtattctgccagctggactttgataagtttaaagatgtcgtagagaagttcagagtgaaggctctgccgacgttcctcctgatcaaggagggcgaggagcagcgcagggtcgtcggtgccaaggtcgaggagctcaacatggcattatcagatatcggataatctaggcagctatagcgctcacattctaacttcatcaaattattctaataaattaataagctggaaataagtcttaaaaatacaaatggctaattaatgcattttcgatttacaaagattgaaattcaagaaaaggtgtattaattatatcatatacaactactacacatgcatgcaagccatggttggattttgttacaaaatattgtgtacaaagtgatcaacccctatctgacagttttctcccaaaggacacaccccttgggagacactgcatccattgtatataagagatcctatttgcaataaagttgacaactgtcattcccttc

SEQ ID NO: 274904 - DNA, 477 bp, Zea mays
cccacgcgtccgcccacgcgtccgcccacgcgtccggcagacggcaatgcagacccccgcgcgcctctccgctccatcctcgccgctcgtctcctccgcgccaccgatacctgtacggccacaacgcgtcgctttcccctccctccgccgccgtgatctcctcctcctgccggcggcgctgaccctcccgacggcgcccgccccgttgcctgcctcggcgcgagggctgttccgcatgcccccgccgcggctggtgaaccgttactttctggtgcgcgcgggcgagtccgtgtacgaggggcagggcctcctccgcaccacccccgtcgccaaagacctccgtcgacagcggcctcccccccgtggggctccgccagacggcgcgcgccgcgctcgagctccagcgcctcggcgcctgcgaggacgactgctggatatggccgtccatcactcagagagcttaccaggcggccgaga

SEQ ID NO: 274905 - DNA, 539 bp, Zea mays
accacgcgtccgcccacgcgtccgcccacgcgtccgcccacgcgtccgcttggatgtctgaaacatgggttaggtcaaggaagaaaaggtggggatgaggagtatgctgcagatgaagatggccctgacacaactgatcatccacgagactttggaacagatgttaccgcccaaatctcagaaacacatttcgatcaccaggccgaagatggcacccatgacaagggtggaatgaggcagcaggggagagggagaggccgtggaggtagaggcagaggccgtggtcagcattatggccacaacagccgagatggccaccatcctattggcactcccccgtcggagcatccagctgtgccgaagccgcccccgggcccccgcatgccggatggcacaaaagggttcaccatgggccgagggaagccgctcagcattaccattgatgctgcggctaaccctaccaccacggatgctgcttagccgcagcgtctatgctggtaccggcctattgccctgatcatcagtcttttgcaaaccga

SEQ ID NO: 274906 - DNA, 1069 bp, Zea mays
aggatttgtaatttatttttttggattgaccattatttgggaaaagaactggtggagaatttgtctgccctgcgcttctcaaatctcgtttttgagcctctctggtcaagacactatatatgaaatgtgcaacttatattctcagaagactttggtactgaaggacgtggaggatactttgatggctacggtattattcgagacataatgcagaatcatctcattcagatactagctttatttgctatggaaactcctattagtttggaagcagaggatataagaaatgagaaggttaaagttcttcgttccatgaagccgttgcagctggaagatgtggtcgtaggacagtataaaagtcacacaaaaggtggtaccacataccctgggtatactgatgataagacagtgcccaaggatagtgtgactccaacgtttgctgctgcggcgcttttcataaataatgccagatgggatggagttccctttcttatgaaagctgggaaagctttgcacacaaaacgagctgagattagggtacagttccgacatgttcctggaaatctctacaaggggagttttggcacagatcttgatagggccactaatgagcttgtgatacgtgtgcaaccggatgaagcaatttacctaaagattaacaacaagattcctggtctcggtatgcgactagataggagtaacttgaatctccattatgccgcaaggtactcaaaggagatacctgatgcttacgagagactcctgcttgatgccatcgaaggagagcgcaggcttttcatccgctcagatgagttggatgctgcatggtcactcttcacacccctcctgaaggagctgcaagagaaacggatagctcctgagctctacccatatggaagccgtggtcctgtcggggcccactatctctccgccaagtacaacgtaagatggggtgacttgagtgcgaagcactacaaggcatgaaacgaagatggctatatctttgtgatattcttgcttttccatttctgtaagtttgcacgccctcgcagtgagatagatttaagag

SEQ ID NO: 274907 - DNA, 595 bp, Zea mays
ggggtattacctcatgtacgacaactgcaacaacggcgacctgaagccgctggagaggtacccggagatgagcagagcactgatgaaggtggggcggccgatctacttctcgctctgcgaatggggcgacatgcacccggcgacgtggggcgcgacctacggcaacagctggaggaccaccaacgacatcgccgacacctgggacagcatgatcgccacggcggaccagaacgaggtgtggtcggagtacgcgcgtcccggcggatggaacgatccggacatgctggaggtgggcaacgggggcatgaccaacagcgagtacgtcgtgcacttcagcctctgggcgatctccaaggcgcctctcatcatcggctgcgacgtcaggcatatgtcgcgggagacgtacgccatcctggccaacaaggaggtgatcgccgtcaaccaagatccgctcggcgtgcaggggaagaaggtgcggatggagggcagcagcgagatctgggccgcgccgctctccgagtaccggacggcggtgctgctcctgaaccggcacgcaaaggacgagcctacatcacgcgcactgggacgactgggc

SEQ ID NO: 274908 - DNA, 749 bp, Zea mays
gtaacaatgatgtgctcctttggggcagcttcaggctgtgcgtacaggttattcaaggttcatttcgtagtaccaacatacaggtgcacatgctgggtctgcaagtactgagaagctatgcacagaaggagctaactgaaggttcagaaacaaagttggattcttttatgatgttgcttacggaattgttgggagacttgtttttggtgatggagactacattgaaggaatgttcaaacaaaaaatctgtcagtgtcgttgatgaatgtttgaaacttgttttcctcttccacacactagcacaatcaaagaaataccgacaagatgctacaactcttctgctggaggccttgctgatggttttctctctgtccagtgatactgtttcacaggagcttgctgaagtgaacaccattttcagaaagttgttctctcaatttattcagattccgtctgtggctatacagatcaaagacataatgctttctgcaccagctgaaaggagactacagcttcaggacatggtccgagcttcagtcagtcaagggcagataacggtgccagtggctacgagtgcaaattcggaccggattattcaggatagttgcagttaaaaccctgggtccacatctgaagcttctgattgtgttgcaactcacgggaataatgacaatgaagttgttgatgatgactgggatgacgattgggatgctttccaatctcttcctgcaattgcaaatgatggtgtt

SEQ ID NO: 274909 - DNA, 503 bp, Zea mays
  unsure (1)..(503): unsure at all n locations
ggccatctnctncgtgtcttatgacacagacaccgattccgactcctcgcggtgcagcgaggcaagcacatgggattctcaagtgttaagcaggcatgctgaatgtctggagctggaggagttgactgcaatatcagtcaatcccagtctgcttccagctttgaatcagttgcttctcgaggcgtatgccattctacgtcccaagccgcttgactatgaccagcgcaacaccttggttgatgtcttcaggaagatggtgaatcaaagatttggtagcaacagtgggtctccggttgtggaaccatttggatcattcacgatggatttatttactcctcacagtgaccgggacctctctatcaattttagtgctaatactgatgagcaatatactcgcaagcaaatgatctctattatcaagaaattttccaaggttctattttcttatcagaggagtggaattttctgtggggttttacctattgtaagtgctagggtgccta

SEQ ID NO: 274910 - DNA, 493 bp, Zea mays
caccagaccacaaggagggatattcgcaggaccagcagcacccgaggacgaggtgtgtggagaggctgctctgcctggccaaaaagcagacagaggaccaaggaaggaagcagggatccggctttgctctgcaaccatgagctccctgtacgacgtctcctgcttcgccgctggccttgctggcaacgtcttcgccctcgccctcttcctgtcgccggtgccgacgttcaagagggtcctcaaggccaagtcgacggagcagttcgatgggctgccctacctgctgtccctgctcaactgctgcatctgcctctggtacggcctcccgtgggtctccgacggcggcagggccctcgtcgccaccgtcaactgcaccggcgccctgttccagctcgcctacatctcgctcttcatcttctacgccgacagcaggaccactcggctcaaagtcgcggggcttctggtgctattggtcttcgcgttcgcgctcatc

SEQ ID NO: 274911 - DNA, 746 bp, Zea mays
aggacacgtgggtttttttttttaatataataacgaattgcataaatataaataattcgtcatcaccataaagtattactgttgtgcccaatgtccactgatcacaattttcctccccgtgcgtgagaagttagaataggcacaagctgccaggaagagattcgaaagctccgaatgagaccatatcacattggtgaatgtctatcgaggagctgcagaatgcttggagaagagcagaaatgcaactgccaaagaagacacaatggaaaaggctccggaacaggtggtgcagagaaaacgtcatcaactaccgctctctaagacatgctcgcgatgttcacagacaaattcagggccatgtccaacaaatggggctgagcatgtcgtcatgtggagatgacatggttctgtttcggagatgccttacgtctgccttcttcttgaatgcagcgatgcgacagccagatggttcatacagggcccttgcaactggccagagcgtgcagatccacccttcatctgtgcttttcaggaccaaggtcgactgtgtcatcttcaacgagctagttcggacgacacagaactatataagaacctgacccgtattgaccccttgtggctggctgagctcgccccgcagtactacgctaccgaagagtaattgtgatcagtggacattgggcacaacagtaatactttatggtgatgacgaaatatttatatttatgaaattcgcctattatatt

SEQ ID NO: 274912 - DNA, 488 bp, Zea mays
  unsure (1)..(488): unsure at all n locations
atcagtctgatcgcattgcattgaccgctaacttcacctttgtcgcacgcgattctaagactggaaaatctgctccgggggaccgccttttcacctgaaaccgaaagagagaagcagctatttggagaaagtgaagcacgcgataagatgagaaaaaggaagagagaagaacagaagggaggactcgaaaatgggatacataggctccgtgccgaggccgagaggctggacgtgttgctcgcggagggccgtgttttctctgacctgcctgctttggccgatagagatagcatcttgctgaaggatacccgcctggagaattctcttgtctgccagccccagcaacggaacttgcatggtcgaattttcggtggtttcctgnatgcacgagcatttgagcttgccttctcgactgcgtatgcttttgttgggcagagaccttgtttccttgaagtcgatcatgttgacttcttgaaaccagtggacgt

SEQ ID NO: 274913 - DNA, 459 bp, Zea mays
gggtcgagcacgcgtccgatactacctccggccgatctgggagaacccccgaagcccttcacggtactcccccactgctaccacgacagcgtctcgatggccaacctctgcaagctgcacggatggagagtcagggagaccccgcgccgcgtcttcgacgccgtgctcttcagcaacgagctcgacatccttgacatccgctggcacgagctgagcccctacgtctcggagttcgtgctgctggagtccaactcgaccttcaccggcataaggaaggacctccacttcagggagaaccggcagcggttcggcttcctcgagtcgcggctgacctacggcaccatacgctggaggttcctgaatggagagaacccgttcgtggaggagtcttaccagagggtcgacatcgaccaggtgatcaagatacggggcatcgaggactacgacctgctgatcatg

SEQ ID NO: 274914 - DNA, 795 bp, Zea mays
cccacgctatcgggcccgcggcgggcgccgcggcggtgacgacagcatgggcgcgtggccgtggagttacaggcagtcgatcaacatgctaagcgtggtgccgtcgtcgacggtgagcatgctgatggcagcgagcccaaacctgctacacaggcttgctgctccccttgttgggtgaccaggattctgaccacatcttatggaatcaaggaagggggatggtcaagcctcctgctgctccccttgttgggtgacagctcttgctacacaggcttgcttatgaagagatgcatagacagtttcgcccaacattgggacatacccagacattgggcaagctgctttcggagttgtatatcgaatctttgtatcggttgttctttacttggagctttatgcaagctgtgtggagtactatcacgctgcttggagacagcatgtcatcagtgtttcccttagcacattttgacctgaatgcacacactctctttgcgatcacaacggccttggcaattctcccaacactggcggtgtgatggcgacaattgcagtcatcgtcttcctattctgggttggctcctgttctgcttcacggtggtgacggttgcctatgctggaatcgccgtctcagggtttctgatgtttggcgagtccaccatgtcacagttcactctgaacttgccacagcagtacatcccatcgaaaattgccatctggatgacggtattctgcagctgcattcagaatgaagaagatatgctcatttcattacttgattgattactttcagatttt

SEQ ID NO: 274915 - DNA, 401 bp, Zea mays
aaattcgtgaaagtgacaaggacaaaattatatgtaatgtggatgagaaagatatagcggagcatcttcggattagattagaaaatgaccgtgaagagaaggaacgtcggaagaaggaaaaagcggaggcacacctctatactataatcaaggttgcaagggatgatgacttaaaagctcagatagggaaagacatatattttgatcttgttgatcatgataaagtcccaagcttccgtatccagaaacagatgacctttgctcaattcaaggaggaggtagcaaaagagtttggtattcctacacagtttcaacgattttggctgtgggccaagcgacaaaaccatacctaccgacctaacaggccattgtgtcctcaagatgaagcacatactgttggg

SEQ ID NO: 274916 - DNA, 619 bp, Zea mays
aagataagcatggcagcaagctcaccgatgtcagggagttccagcctagtgactcaagtgactcagatgatgaatatttggatacatgcatatgctcaatcatgtaaatacatcttgcacaggtggattctatcatgtgtataaagagctgtatctcagtattcctgtcttcggcttggccctaacagtacagtgacaatcatgcatgcatgcatagttcgttccaacagactccgaactggtgataatcagcgggtggatatttagctggccttaactgggagttacatcaaagacctagaaaatgatcaccggattcagtaggtagacatgattgaagaagccgagaaagaatgcctttctttggtttaattttggataccaacaccatcctgagtttttggcagagtaatgattcatgtgataatgcaaatgctattagaatcgaacattactaattcctgtgcatgattcagatcgattttgtcaaataggatttgatgtattaacatggtatgtttcttttaaaaagaatccttgctaccatcatttgttacttacaggagctagtgcccagatttgtgctgaacactattaacaaactgatctgtgcaatttc

SEQ ID NO: 274917 - DNA, 936 bp, Zea mays
cccacacgtccgatcccagctctcatttccaatttttctgctaccaaatccaagaaacgttccaagaagaaaagcaagcacaagcaggctaagtctgctattcatgaggactctggtagacatgaaagcagttaccatctatcatcggactttgacaatgagaagagaaacataacatcaagaagcaagagaccggaagcttactgttctgattcatcatattctgattccgagatagatgctagaaaaggcaagagcaagtcaaagcataagcatacgaagaaataccagttagagtcttctgattcagaatttgatgtccgtgaagatacaaggcggcgtctgaagagagaccacatgaaggagaaaagagatgagtcaccattgccgttctctaaggatcaaggagacacagaaggcaagaggcattcaaggtgttcaagggagaagcacaactacagttattcatcgagttcttctgagagaggcaggcggcgttcgagggagaaacgtcactacagttattcaccaagttcttctgagagaggcaggcagtctctacggcacaaggagaaacaatattacagtgactcaagttctgatcggagccatcgacactcgagaagatcgagggagaagagacatgatagagactcaagttctcctgatgccatcaggcgctcaagtagatcgacggagaaacagcgccgtcctgatacaagcccacgtcatgccaacgggcattcaaagaacatcaagtggcaagcaagactatactgagcgtagccgttacgaaaccagtagacattcaaggagatctcaggagaaacggcactaccctgattctagcgcctctgattactcggactctgatcagcacaaaaaacatcgccaccatcataggagaaaatgaactggcagtgtataaggtaaaat

SEQ ID NO: 274918 - DNA, 485 bp, Zea mays
taaattgagccggacgtctgtgaaccaagagggcttgtgtgaggtaggtgaaacaaagtcgtcgagcgctctttccctctctctatacctctctgtctgcgacgcggttggataggctaccgccgctaggtgccgactgccgaggccctcaccggcggcgaagagcgcccgccagtcccagcaatggcagcaaggtgtagcctttcctcgtcatccctgtcggtccatggacccctccgccacaataaacccagcaagagactcgctccatgcctgccatcggcgccaagaccaggagccgctgctctgagagcgcgtgctgcgaaacttcctccaggggttgaagcgcccagggtgcagccgaagctgagcgagcccttcttggggttcacccagaccgcggagatttggaactccagggcctgcaggatcggcctcatccgcaccttcactgtggagcgggtgctgaacaacgggattcgtca

SEQ ID NO: 274919 - DNA, 611 bp, Zea mays
ctggaggtttgtagtcctcgtgcaaataatgaaccttctgaggttgttcgtggacgttgatgcgaaatcaaagcgcttatcgttaggaagagctagtacatttaaagaaccagaagaagtgctccatccccactcccatggtacatctactcccagctggcgtagatctaagtcaaaatcaaggactgaaaaggcaaggccaggcttgtctgctacacacgatgcaaaatcttctaaggttaatgcagcagacaaagaggacacgtcatccacaatttctgatcctggacctgtggctgtatgggattcaggaccaaagtgggacgatgaacctaaatgggataatcaacctaactgggaacccgagacttcaattgagctccatagccctcgcgaggatattgagcttggtctgactaaggagctggtacctagtttagatgaaaggtggactgttaggaaaggacgctatcttggtgtactggtgtgcaaccattcatgcaagactgtgcagagtctgagctctcaggttgttgctcctaaggctgaatatgatgacaattgtttggacctgctgttagttggtggtagtggaagactgagattactga

SEQ ID NO: 274920 - DNA, 641 bp, Zea mays
tttacacgtgattatttcttgaggggtctcttagcacgagctctcgtatcaggtctctcgccccgcgcgccgccggcggcttgcttcgccgctgcccgtgcgccaccgtcctccccgtcgcggcatcatctcgactcgaggcgatgcacatcggaggtggatttggttgagcagcttgcgaggcatttctctaggcctctgaccaaggaacaaatggaggcaattatggagctggcaactcaggggaaggaaaaggaagggatcaagaagaagggcagcaaggtgacacctctcaaggctcctatcattgaggctgctgagatgctctgagttctattatgagatgtgtgggtagttctagtgcatcatgttatgtcgccggtgtacttgcctatgagtcgcccaggatcttttgttggctgctttgtgtagcaggttgttgtctgggcagtggtgtttgtttctttggctggcaatgtctgtgtttctgtctatcttagtttctgttgtaagttgttggttgttcgcttctggaagtgtgttatggacggtggaaggccggttggctcttgttctcctttcctatcctgtgtacctcatgtgtgacattatttgtttaagtaggggagctgtttttgttt

SEQ ID NO: 274921 - DNA, 703 bp, Zea mays
  unsure (1)..(703): unsure at all n locations
tttgtcttcatttccacgtcattatttcttgagggggctcttagcacgagctctcgtatcaggtctctcgccccgcgcgccgccggcggcttgcttcgccgctgcccgtgcgccaccgtcctccccgtcgcggcatcatctcgactcgaggcgatgcagatcggagctgttgtaggtgagccaggtggtgaaataagtctgaaacctgctagcagatcgacccccggcgacctggcagttcagcaacctctttttgctgctccttcaaagcttgcgaggcatttctctaggcctctgaccaaggaacaaatggaggcaattatggagctggcaactcaggggaaggaaaaggaagggatcaacaagaagggcaccaaggtgtcacctctcaaggctcctatcattgaggctcctgagatgctctcagttcttttatcacatgtgtgggtagttctagtgcatcatgttatgtcgccggtgtccttccctatgattcgcccaggatcttttgttgcctcctttgtgtatcaggttgttgtctgggcagtggtgtttgtttctttggctgccaatgtctgtgtttctgtctatcttagtttctgttgtaagttgttggttgttcgcttctgccagtgtgttatggcccccggaaggccgctaaactccccccctcctttttgtaaaaaaaaaaaaaaaaanaaaa

SEQ ID NO: 274922 - DNA, 577 bp, Zea mays
ggacgggcggaccgtgggcggaccgtggcggaccgtggatttgaccagctggagtcaacaggcatgccgaacggtggcggcaagaggtggctgctgctgctgccgctgtcgcggtgggttctcctcctcggcagcctccagctcccggcggccggcgcggccacgtcgtcacgcgcatgcgcgggttcgacgggccacttccgttctacctcgaaaccgggtacgtggaggtggacgagcagcaaggtgtgcagctcttctactacttcgtgcgctcggagcgcgacccctacgaggacccgctgctgctgtggctgtccggcggcccaggctgctccggcatctccggccttgcctacgagataggacccttaaaatttgatgcccgagggcaaggtgaatttcccactcttctctaccgaccggagacatggaccaaggtgagcaacatcatatttgtggactcgccggtggggactgggttctcgtacgccaagtccgaggaagggctcgagaccggcgacaccaagcaagtgaagcagctagtcattttcctcaggaagtggctccaagacca

SEQ ID NO: 274923 - DNA, 498 bp, Zea mays
gcgagatagccctgagtacaagtacacagtggcaatgatgggttacggccctgaagacaaggacgcggtgctggagctgacctacaactatggtgtcaccgagtatgccaaggggaatgcatacgcccagatcgccattggcaccgacgatgtctacaggaccgcggaggcggcgaagctgtccggaggccaggtggtgcgggagccggggcccttgccagggatcaacaccaagatcacagccatcctggaccctgatggctggaaattggtcttcgtcgacaacatggacttcgccaaggaactggagtacccacgccaacgacctcggacgccctgcaacaggattaactcgcactgctgttggtccgtaattaagatgaaagctatcctagtgaaatcccaaattttcatcatgcatagaacacaggaccaccattatatttgcgacagaccctgaatcaacgatcccaatcgaataacaccagggcggccgct

SEQ ID NO: 274924 - DNA, 643 bp, Zea mays
ctggactacagcagatatccagatgttgacgagcagaagcgttttgttaagacctacctgaacatttctggtgaggaacctgatgcggaagttgtggagaacctgctccaaagcattgagaagcacacgctcgccagccatctagtatggggcctctggggaataatttcggaccatgttaacgacattgacttcgactacaaggagtatgcgaggcagagattcgagcagtactggcacaagtctgcgatcttaacatcttgaacatgtgtataaacacccgtacgtggtctcaggaactccctgagggcctgtggctgcacacacgaaattgtgcagtgccactgacacatagataagctgtgaaagaagaaatactgacgacgacgacgaataatcccgttttgggctcgggaggttatttctccgcaactcgatgagcttcaggcttcagcttcaggaaggaaggaaggagctatggggatttggctgcccgcttatgctgtaccaatgcaattaaaagataaagatccggtccggtgttgcgtgtgctatgtttagttttggctagcaccgccgagagccgtggtcctgttgtggcgtttctagtttctggatgcttgatgttgctagtgcgctggat

SEQ ID NO: 274925 - DNA, 530 bp, Zea mays
gcttattactacgatatcacagaggacaggtcacacgcatggcaagtagttggtgaaagccaccgcataatgtccccgttgcagcgcgaagacggtctgcctcttttcaagtcgagcccaagctcgccctacaggagcggcaacgctagtccgtcgatcttcatcctggagagcccgtcaccgtcggccccacgtaggtcgtctggttcatcgcctcagggtggtggttcaccgacgatgggccatagggcgatgaaggcgccagttccatctgttcttcaaagagagagtggaccagatcatgcacagggatgatccaatgaagcagctaccgcttgccagtccaatgagatatgtatatttttgtaaaggagatacatcgtcggcagatttttttttctgtgctgtctttcttgttcgtaagaaatgtatagaccttcgagttctgttgtgcatttgagctccgtcatgcatggttgcttctgatgtgaggcacgattattgaagagacctctcgtttgctgctcggt

SEQ ID NO: 274926 - DNA, 1043 bp, Zea mays
ttctggacgcgtgggcggacgcgtgggcggagccagaagttcatgtgccatctttgcaatcagctcctcctagttttaggaacagggtcaagatatccgagtcatcaaatgaagtttcaaacagaaacagcagggctcgcgtgctgtctgctccatcagcccttattgtggtcgatcagtttggctttccatattcggaataccgagatcaagatgactccagggataaggaaggtttgacaaaggggcatcgcttttcaaatcctttgccccttcctcttccttcacgcgaaggacattcttttaggaactctggtagcttcaaagccagcaacgtaagcgggcctgggaagatgtctggccctctcccattgcctcttatgaggagatttcatctgcctgccaacgattttctagtgatcaggggggtttcagaaacacttggttcaacatcattacagggcaacatttagagatgaatttattgatacgaggaccactgaagcaacagtagctcgattactcccctccactcagagtttgaaggagtttaaaacgcaagcgaccacattggcatcacttcagcatcccaatttatgtaaactgattggctattatgcaaaagaagattctaatgaaaggatgttggtctatgaacggctttatcatggaagcttacataagctactctttggaagatcagatggtcgtgtcatggactggtctagacgtttgaaggttgccctgggtgctgccagaggtctagctttcttgcatgatgaaggaccctttcaggccatgtacagcgagttctcaactttgaacatccaaatagataaaggtttcactgctaagctttcaggatatggttgtgttggcttcaataccgaggagatatctaatgcacctgtgtctgcagcaaacctttcggtggagaccttgtagaagggtttactcactcccaagagcaacgtatgtagctttggagtcgtgttactggagctaatcacttggaggaagaaccttgatcccaattattccaa

SEQ ID NO: 274927 - DNA, 594 bp, Zea mays
tcgtccacgcgtccggagcaaagagagagacgcggagccaccgcgttccggagagagacgcggagagccaaggcaaggcagctgtcgccgcagcgacgatgtggagctcgggctctgaccgcgacgaggccctagacacggcgaacgcctcgtcagtcgacgcttcgtcgcccgcgcggcagccgtccacgccgcccccgccgcctcggcgccggcgccagcgcgcgcgacgccgcgctcaccgcctccgtgccaggaacacgggcgcaggagcggaggaggaggagggactcgtggaggccgacccggacgcggacgacgtctggcgcgggctgcagcagcagcgggagcgggaggcgtggctgcggcgggcgtcgaggcccgtggtggtggtcgccggcgaggaggggtcccctccggacgcctccgccggctcgggggagagcggcggtgtggtgagggcgctgagcctgaccgacgacgaccctgaggagctcaaggggtgcgtggatctggggttcggcttcagctaccgggagatccccgagctgtgcggcacgctgccggcccttgacctttggttcctcatgagcc

SEQ ID NO: 274928 - DNA, 507 bp, Zea mays
ctctgatttgtttcattttcatttagtcacttgatgcagctgtaggcgactttgctatagtgagaaatggcacacagcttgcagaatacacacagccttatattgagtcagggcttgtgatagtagcgccggtgaaacatgtaacttcaagtgcgtgggctttccttgaacctttcacattggagatgtggtgtgtcacagttgctctttttattttggtgggcatagtagtgtggcttcttgaacatcgtactaatgaggaatttcgagggtctccaaggcgacaagtcataacaatgttatggtttagcttctcaacaatgttcttttcacacagagagaacactgtaagcacacttgggcggttcgtgctgataatatggttgttcgttgtgctgatcatcacttcaagttacacagctagcttgacgtcaatcctcacagtccaacagctctcaactggaattacagggattgatagtttggtttcaagttctttacctattg

SEQ ID NO: 274929 - DNA, 421 bp, Zea mays
atcctcccggacggccactgccagtcaccaaacactgcacatcagggttcaccaagctgcggcggtagcagcagcagcagcagcacggggtctctagtcacggtggcattccagatcctggtgaacaacctgcccaccgcgaagctcaccgtggagtcggtggagaccgtcagcaacctgctctcctgcaccatccagaagatcaagtctgcgctccaggccagcatcgtcacgccctagctattagcgggcatttgacatggattccggccgccggttctcagaaaaaaggacggagtagtcggatgccatgtcaaatgcttagctagaggacgacatgctgtgacggcgcagatgctaaacaaggctgtgctcgtacgtacgtcgatcgcttcacatcagaccggcggggaactggtgc

SEQ ID NO: 274930 - DNA, 1785 bp, Zea mays
gatgaagggaccagcacctgaactcgttgaggacatcagtatgctaaacttgactaatgccgtaaagagacgtgttggactgagtgttgggaaactgctatctggtttcaaaggcaactgagctggagagattgtgtggagtactcttgatgacgttgtgatgggtggtgttagtgaaagtacattcgaaatcttgccaacaggaagtgaaagtagtggtccaactgggttgttcgaagggactgtatctacttcaaataatggtgggtttactagtataaggacaaagaattttactgtgccagaggacctgtcagcatatgatggtattgagttacgagttaatggtgatgggcgacggtataaactcattatacggactagctatgaatgggatactgttggctatacagcaagttttaacacaactaaggggggatggcaaagtgttaaagtacctttctcttctctgaaacctgtattccgtgctcgtactgtgactgatgctccacccttcgatgcaagcaacattacttcactacaactcatgtttagcaaatttgaatacgatggaatactcaacccaacatttactgaaggtccgtttgagcttcctttttcgagtattagagcatacatcaatgagccgatcactccaaggttcgttcatgtgagttctgcgggagttacaagacctgaaagaccggggttagatttaagcaagcagccacctgctgttcgattgaacaaagagcttggctccattttaacttttaagttgaaggcatgctcattctattagacacatctttatattaaaaaaaactatcttaaactcggtcttttaattcttctgacataacaaatcacaattgtacattttttgtactgcaaataaaccatcgatatgcatctaagtactttaagatatagactgaacaatggtgctcctcattttgtcatgttggttatcttggaaccattatataatgtctgaggtggcctttcagggagaggatttaattcgggaaagcggtattccgtacactattgtaaggccatgtgcattaactgcggaaccagctggagccgatctcatgtttgaccagggggacaacatctcaggaaagatatcaacggaagaagttgcccgtatttgtgtagcagctctggcaagcccagatgctgtgggcaaaactttcgaggtcaagagcactgttccattcagcgaaccgtatgtgattgaccctgcaaatcctcctcctgaaaaggactatgaagtatatttcaaagaactcaaagaaggcatcacgggtaaagaggcgttagaggcaacacctgctcaagtttgaagatgtcgttgaattaagaattgcgtctgttttcgtaaattctgacacagtaacccccacgctgaatgtctaaaggcatctagaaacatagatgacactaatgctaaattttgtagctgaagatcagaccaataaatattcccacgaacacattactgttaggttgggggatcattaaacccgagctaagacacaaatatgtagatgaaattagtgctgctgttcatgccttcgttggagttagccattacaggacacaagaatttagtaagaggtttggtaaaccttttccagtgcaggagcagctgcctgatgagttggtagagtggttgctttcagtcaattctctagggtgcctatctctatttaacttgatgctgcacactgggggctcccttcagtcaaaaaaaaaaaacaaaaaggcggccgctct

SEQ ID NO: 274931 - DNA, 437 bp, Zea mays
accacgcagtccgagcatacatcaatgagccgatcactccaaggtttgtctatctgctagttttcaggttcgttcatgtgagttctgcgggagttacaagacctgaaagaccggggttagatttaagcaagcagccacctgctgttcgattgaacaaagagcttggctccattttaacttttaagttgaagggagaggatttaattcgggaaagcggtattccgtacactattgtaaggccatgtgcattaactgaggaaccagctggagccgatctcatgtttgaccagggggacaacatcacaggaaagatatcaagggaagaagttgcccgtatttgtgtagcagctctggcaagcccagatgctgtgggcaaaactttcgaagtcaagagcactgttccattcagcgaaccgtatgtgattgaccctgcaaat

SEQ ID NO: 274932 - DNA, 1099 bp, Zea mays
cccacgcgtccgcctttccctcgccgggtataaagattcgctgcccgcgacaagaagatgcagctcattaccaacgcgtgggccgcgatcgaagctcctcacaaaccgttatcgtcgccatggcagccgccgcgcctgcaagctccgtgaaggaagtgctgccgtctcccctgacctccgcctccgagccccctccccttttcgatggcaccaccaggctgtacgttgcctatcattgcccgtacgcgcagcgcgcttggattgccaggaactacaagggtttgcaggacaagattaagatagtcgccatcgatcttgctgacaggccaacatggtacaaggagaaggtttatccagaaaacaaggtgccttctctggagcacaacaaccaggtgaaaggtgagagtttggatctggtcaagtacattgacagcaactttgaaggcccatcgttgctcccagaggatcctgcaaagcagcagttcgctgaggagctgctcggatacactgacgcattcaacaaagcattttactcatgtttagtcgacagggaagatgtgtctgaggaagccgtcgctgctttggataaaatagaagacgccctcgggaaattcaacgagggtccattctcccttggtcagttcagtctggtggacattgcgtatgtaccattcatcgagaggtttcagatattctattccaacataaagaactatgatattacaaagggcagacccaaccttcagaagttcattgaggaagtggacaagattgatgcatacacacagactaaacaggacccacagtttttacttgagcagacaaagaagcggcttgggattgcttaaagcttgcggccgaggatgactctcgacagaaataccagcatagtagatcgacacttgtttagtcatttgtgtgcttgaataatgaatactacatatatggttttcaataagacatggtcctctatactgggttgtacttctgaaaacaaactagttgtcctgatattatagctttcgtggtgtgtttacgtcactgtatatgaaagggtggggagaggaatgatatgcatgtatcttgcaatgttttttat

SEQ ID NO: 274933 - DNA, 926 bp, Zea mays
tttcgtccacgcgttcctttcgcgaccggctcggtttgcccgggtgcccgttaccactgacgcccggtctcccccgcggcccttaccatcggcgcgtataaaggtctgctgccggaaactagaacattagcctgaccggcaccttcaccattgaatgttcttccgaaccggcctgatcaacaccatggcagccggcgctccaacaagctccgtgaaagaagtgctgccgtcttccctgacctccgtcccgagccccctacccttttcgatggcaccaccaggttgtacgtggcctatctttgcccgttcgcgcaacacgcttggattgctagaaactacaagggtctgcaagacaagattaagatagtcgccatcgatcttgctgacaggccaacatggtacaaggagaaggtttatccagaaaacaaggtgccttctctggagcacaacaaccaggtgaaaggtgagagtttggatctggtcaagtacattgacagcaactttgaaggcccatcgttgctcccagaggatccttcaaaaaagcagttcgctgaggagctgcttgcatatactgatgcatttaacaaagcattatacttttctatagtctccaaggaagatgtgtctgaggaagctgtcgctgctttggataaaatagaagacgccctcgggaaattcaacgagggtccattctcccttggtcagttcagtctggtatgtcactggacactaggaatcctcctctctgcagcatggttcaaaatcaaatctctattagaaagagttcatattatgaatgtgggcttcggttgtcatgtggctttgtcgtccgtgatgtgtaatttcactacaggtggacattgcgtatgtaccattcatcgagaggtttcagatattctattccaacataaagaactatgatatta

SEQ ID NO: 274934 - DNA, 765 bp, Zea mays
gtggagatgaggttgatgggttcgatgaaaccctctgcccgttggattttgagacacaagggatgattttggatgatgagataaatacagcattagttcgaccacttcctcatggagttaaacttcatgcactcattgatgcttgtcatagtgggactgcacttgatttgccttatctctgcagaatgaacaggagtgggcaatatgtatgggaagatcaccgaccgcgatctggtgtctggaaaggcactagtggtggggaagctatttcctttagtggttgtgatgatgatcagacctctgcagatacctctgctttatcaaagatcacttcgactggtgcaatgacattctgcttcatccaagctattgaacgtggacagggcaccacctacggtagtatcctgaactctatgcgttccacaatacgcaacacaggtgactcagcgggtgtaggtggcggtgctgttacatcactaattacaatgcttcttactggagggagcctatctgctggtggtctgagacaggagccacaactgacggcatgcgagccatttgatgtctatgcgaagcccttctccctatgacgcgttcatggtgctgctgctgcccacccatttcacgttatcaacttatcatcgtgtacatttcaccatcccgattgttaacagcgcgtggaattacaatccgtataaggaagctatgcatatatatcgtttgtttcacaggtacaatccgtatatgcatgaataattttttgtg

SEQ ID NO: 274935 - DNA, 601 bp, Zea mays
caagctagatttcagtaccgcttaccaccctcagacagatgggcagacagagagagtcaacaaagtctttgaagatctgttaagagcatgtgtgttagcttttgatagaagttgggagtccagtctaccctacgcagagttctcatacaacaatagcttcaggccagcatcaagatgtcgccattcgaagcactgtatggacggaaatgccagacccctctcatgtggtccaacgtgggcgaaaaagcactagaaggacctgcctttgtcaaagaggcggaagagaaggttgcactgatccgcagaaggttactcgaagctcagagtcggcagaagagttatgcaggcaacaggcggagggaactccgatttgaggaaggagacttcgtctacctcaaggtttctccaatgcttggtgtcaggaggttccaggtaaaagggaagctagccccgcgtttcgtagattcctatcccatcattggcagggtaggacccgcagcataccgtctggaattaccggaatccatgtccgacatccacaatgtgtttcacgtatcccagctccgcaaatgcctgcaagcaccagaaagtcacatcgaag

SEQ ID NO: 274936 - DNA, 375 bp, Zea mays
cacacgcgtccgcccacgcgtccggatcgtgcccatcttttgtttgatcttcatcaagttgttgatggtcttagggaggcagagcttgggaattcctttataggaacaacaaagagaggaattggaccatgctattcgaacaaggttacaaggaatggacttagagttggtgacctgcgacatatggatatctttggtgcaaaactcaacaccctattaagagatgcagctctacgcttcaaagattttgaatatgataacaagattctgaaagaggaagttgagaagtataaaaagtttgctgaacgattggaacctttcatcaccgataccgtgcatttcgtgaatcagtcgattttgcagaagaagaaaata

SEQ ID NO: 274937 - DNA, 502 bp, Zea mays
agcgaagccgtggaagagacaggtcttatgattacagagagagaggatcagagcaccgaagcaatctctacagaaatgggagggattccgaaagaggtggacacagatacaggagtggtgatatgacaaacgaccgggggagaatgaggagcagatcacgttctccaacaaggcatggctatggaagatctggaagtccaaatcattagctgaatatttagatagttttattcacagttgggactcatgagctctgttggaaccctacagtcttgctttttacatgagaaaaaaaaaattctcagttaaactcgtaaggccggtactggacttcatgtatggatgatgatgtttacagaattacagtctatagcaggtaaaccttgaacattaatgtttcgtgtgacacattttttttatttcccttgacaactttgcttgaaaccttaagcctgctctttggccttagattttttcacttcttaggcccagtatttttttt

SEQ ID NO: 274938 - DNA, 455 bp, Zea mays
gggcggacaaagacaccaaacagatttctccattttcataaatagttcatcttttatttaattatccattactcagtgagcagaggtggtctctacaccctcaaagccaagcccatacaacacaccagcatatttctcagttaacccgttgaagtatgcctctttaagcttcttgaaggacagtgctgtcagaagcgaatcagaccctgcctgggggcagattccaacccttgcaacatcaagcagctcagcaagcttgttcagccctccatggaggctattggagaacctcatcaagtgttttatatcgtagataacaggaaagtaaatcttgatgagatcgaagaatcctggcagcgtatcagggagatttgtgccagtgagtagcttgagcaggtagccaaagtcgtagccgctatgaaaagtcacccaatgcacatctgaattcaatacta

SEQ ID NO: 274939 - DNA, 549 bp, Zea mays
cggacgcgtggcggtacgcgtgggcggacgcgtgggcggacgcgtgggcggacgcgtgggcggacgcgtgggttcgcttctaccgttctcccccccccccaattcgcccttcacctcgccgcttcctccattgaccgccaccgttgacgtcgtcttccggcgaggtagctcgccggaagacctcacctggactttcccgacgcaccctccacacactctttaaccctccggaatggccgcctgcttctagctcgtcgacgccccaatctccgcttgcttcctcgacagccccatccgcctcttctcgctctcgctacggctcctctgcctgttcgccatggcgatccgcatcaccgtctcctactccggctacgtggcgcagaacctcgccgcgtcgctcggccaccgcttctcctccgcctccgcctcgggcagccgcctcctccatgacggcgcctggcgccccttctgcatcttcacctccacccgccagcccgagcagcaccgcgggagccgcagcgaccgccatgacggaagcgactacaaaca

SEQ ID NO: 274940 - DNA, 1479 bp, Zea mays
  unsure (1)..(1479): unsure at all n locations
gcttgncgtccgcctactgctcatcctcttgttttcgttttctacccgatcagtaagttgtcggaccgcctactgggaaagggacattttgcactaatgagaagagctgagttgaagacgttagttgatatgcacggcaatgaggctggaaaaggtggagagctcactcgtgatgaaacaactatcattacaggagctttggagctgactcaaaagattgcaaaagatgccatgactcctatatctgaaaccttctcacttgacataaatgctaagctggacttacacacaatgggtatgataatgactagagggcatagtcgtgttcctatatactctgggattccaagcaatattattggccttatattggtaaaaaacttgattacttgccgagctgaggatgaagtgcccattcgtaatcttactatcagaaaaattccaagggtggctgatgatcttcctctctatgacattctaaatgagttccagaaaggtcacagccacatggctgtggtagttaaacgaacaaaggaagcaggagtatccactgaaaaccaaaagagcacaactgcagattataaaataaaccccaaagatgctcatgctgatggctcatccccttcttatgctagcaacactgctggaagtcgtagatttaacatagagaagcatggagacgggcgctcatgtaataagaaatcagaaaagaagcgggaaaatattcttgattttaacacagatccacttccaagctattcaatggatgaggcggcagtcggaataatcacgatggaagatgtaatggaagaacttctacaggaagaaatctatgatgaaacagatgagtatgttgatgtacataacaagatcaggataaacatgttgactccaggcaaatcgctgtcacctgccatatctcctggtggtgggcccttacctcaggggctccgaaggactcctatggcatctccgttctcaccataccaccatggtagttctgtcttgcgttccccggcttccaaccatggtcagtcacctgggactctaccgacaatactgtcccctggaagatcacctactgcacagacacctgggcaaagttcaccaaacggaagtcaggtttcaataaactccaacggtcaacataaaaaggacggtgagagctaacatcccagaagattggttctcggatgaaggtctcgtctcaagacggcatgcgtgatcaaattatgacattgctagcgtaggattaagctgcgagtataagtagcacagctctcttggcccataggtttgatcgcttgcctgtacatatatgcttcagcatccggacctttagtatgtcctaatcctcgctctgtattggagaggtcacatcttatatagttataatatatctggtgatggggaaaagagctaagcgttggactgaatatattaaagaaaaaatcaagctgattttgcgacttgtgatcg

SEQ ID NO: 274941 - DNA, 554 bp, Zea mays
tggtctcgtgggcggacgcgtgggttcgacttcatcagcggctccgaggacaggcagcggttcgggtcgtcgcagctgctgcacgattttgtggcgtgagcggctgcactggacgtcgttggggaatggggaataacgtgcgcggacggcgtcagaagcctgggatggccggccggcgccgccgcgggtatacctaccaaccatatgatggccgtcatggtacatggtctcaaattaaccagcaaggttaagcatgcatatatacatacacacatatatatatataaggtgtggtaagtgaggtagcataagcagggtaagctgtatatgatatgaggtgtggtataaagtaagtgtagggattattattggtattatttttggtagcttgaagattcgtctaatgatgattcaagtccggccagatatggtgtggtgttgttggacctcaagtgagtccatgtacacacaaatgtttcatgttttgtactgtaccagttgttcagttcagcgctaacaacaatgcagaaacattaagcatactactctacttt

SEQ ID NO: 274942 - DNA, 643 bp, Zea mays
  unsure (1)..(643): unsure at all n locations
cggacgcgtgggcggacgcctgggcggacgcgtgggcggacgcgtgggatcaccgggaccaccaccgcctgcttcaagatcggcgggcgggcaccggccggctatgacatccaccgtcaccacaaccgttgggtgcggggggctccccgtccgcccgtcgtcgacggaaancaagagtttgttttttttnaatgtatttgtgtgtccntgccgtgggagcggatgccttcaatgataagtcagtggaggtcatgcgcaaggtcttcgagcagtacgcccgccgctccaacactttcttctgcgccgacaagacagtcactggcgtcgtcatcaaaggacttgctgatcacaagggatactcttgggagcctcctctatgcccttggagggcattattgatgacaaagctgcgggaggggagcacaaggattttggaattgcccatgcgtccccatgcgtgagaggaaggaatgccactgtatgctttttcttactcccgataatgactttgctgggaaggatcaggttatctccttcgaggagatcaaagaggcgacatcgaagttctaagcccttgtatttgtcacggagtgtttacttgacagctaattttttatatgtatatgtacttaagtagcatcta

SEQ ID NO: 274943 - DNA, 369 bp, Zea mays
agcgataatgactttgctgggaaggatcaggagaagaaaaagcatacagtggcattccttcctctcacgcatggggacgcatgggcaattccaaaatccttgtgctaggggggctccccgtccgcccgttgtcgacagcgaccagaggacgcccacgcagatgcgccgtccgagcccaggccgcgggagcggatgcctccaatgataagtcagtggaggtcatgcgcaagttctccgagcagtacgcccgccgctccaacactttcttctgcgccgacaagacagtcactgccgtcgtcatcaagggacttgctgatcacagggatactcttggagctcctctatgaccttgtaggcattacgatgaca

SEQ ID NO: 274944 - DNA, 513 bp, Zea mays
aaagcaccggatattttctctctatccacaaacaggggacaaggaacaggggacaggcacagccgcacagccgccgcccctccatccacctctccacaccatctgacgctgctcccaccgaggtctccaaggctcactcctcaccagcttctgctctctccctcctcatctctgctctgctctggaccgttaactctccagctccccctcgctccgttcccttccgcccaaatcactgggaccaccaccgccttcttcaagatcggcgggcgggcaccggccggcgatgacatccaccgtcaccacaaccgttgggtgcggggggctccccgtccgcccgttgtcgacagcgaccagaggacgcccacgcagatgcgccgtccgagcccaggccgcgggagcggatgcctccaatgataagtcagtggaggtcatgcgcaagttctccgagcagtacgcccgccgctccaacactttcttctgcgccgacaagacagtcactgccgtcgtcat

SEQ ID NO: 274945 - DNA, 624 bp, Zea mays
cacgcgtcagcaaacgcgtccgtaaacaaatggaaagacgtggcaaatgattcacgcaaacaattgcatgacaaagaacaggatgttctagacctgcggcaagaagttattgggttaaaacattctctaaaagaggctaacgaccagtgcatacttctgttcaatgaagttcaaaaagcctggacagtttcatcttcactccaagctgatctcaagtctgaaaatttaatgcttgcccagaagcacaagactgagaaagagcagaatagccagctaagggatcagatttctcatcttttgaaagttgaacaagagcaaaacctaaagatgcaggaacgggatttaacaattcagtcactacagactaaactcaagtccattgagtctcagcttaatgaagccctcaatgctagcgatgctagatcaactattgggtctgaatctgcttcagtaatttcttccccaaagataacagaatcaactgctgactcatcttcagtgacgaaaaggcttgaggaggaattggcaaaaagggatgcccttattgagaaattacatgaagagaatgagaagctttttgacagacttacagagaagtcaggataggaagtgctccaaggcttc

SEQ ID NO: 274946 - DNA, 569 bp, Zea mays
gagagctccttgctgcggctgcttgctcccctcatctctagcctgtacactggttggagtggttgccagtgttctccccacctgctcctctcgatccactccatcccctttggccatgggtgtgcaagcatacatctacggtaattgcatgcttctcctgccttgaagcggaagccttagccttagcctgccgcctgggggaaaccttctgtttcgccgctgccgctgctgtggtataaaggtggaaggctgatccgtcgacggacggagtcccggcggagggaagattgctccgtcgccgcggtttcgcggccaagaaggtggcctacgcggtggaaaggggcggggcggggccgtgaaggaatcttgctccgacgccaatccctcctctgcccctcgattttcgggcggttgtcggtgctgcctttcgcagtaagaggtgggatctcgcgtccggcggcggcggcggcggcgttgctggatcgagcaacctccggcggtggcctgcgtacctgcgtggccgatctgtgcgtggctgttcatctcttcgccggcattgcgaggcgggc

SEQ ID NO: 274947 - DNA, 1089 bp, Zea mays
ccggctggccccacgcgtacgaagcaaaaacacaaagcgcttaaaccacactcaaaccaaccgccagccaacaaacaggcctcctagtcccgaccagaactcgctcgtagccccgcccccgagaacccgacagcgcgagatggctcccgagctgatgacagccaagatgaccgccaaggccgccgcggcggcggcggcggcggcggcggcgaagcctgccacgagggcgtacgtgacgttcctggcgggcgacggcgactactggaagggcgtggtggggctggccaagggcctccgcaaggtccgctcggcctaccccctggtggtggccgtgctgcccgacgtgcccgagtcccaccgccgcatcctcgtctcgcagggctgcgtcgtccgcgagatcgagcccgtgtacccgcctgagaaccagacgcagttcgccatggcgtactacgtcatcaactactccaagctccgcatctgggggttcgtggagtacgagaggatggtgtacctggacgcggacatccaggtgttcgagaacatcgacggcctgttcgagctcgagaaggggtacttctacgcggtgatggactgcttctgcgagaagacgtggagccacaccccgcagtacaggatcggctactgccaacagtgcccggacaaggtggcgtggccgaccaccgagctgggccctccgcccccgctctacttcaacgccggcatgttcgcgcacgagcccagcgtggccaccgccaaggcgctcctcgacaccctccgcgtgactccgcccacccccttcgcagagcaggacttcctgaacatgttcttcagggatcagtacaggccgatccccaacgtgtacaacctcgtgctggccatgctctggaggcaccccgagaacgtgcagctggagaaggtgaaggtcgtgcactactgcgcggcggggtccaagccgtggaggttcacgggcaaggaggcgaacatggacagggaggacatcaacgccctggtgaagaagtggtgggacatctacaacgacgagacgctggacttgaagggcctgccctcgctctcgcccgacgacgacga

SEQ ID NO: 274948 - DNA, 316 bp, Zea mays
cggacgctggtaagcaaatacaagctctcagttagacaacactcaaaccagccacggacagcctcaaaatcccgagcaggagctcgctcgtagccccgagaacccgaaagctctgcagcgagatgtctcccgagctgaccggcaagatggccgccaaggccgccgccgccgctgcggcgttgaagcccgcgacgagggcgtacgtgacgttcctggcgggcgacggcgactactggaagggcgtggtgggcctggccaagggcctgcgcaaggtcggctcggcctatcccctggtggtggcccatctgcctgacgt

SEQ ID NO: 274949 - DNA, 1017 bp, Zea mays
  unsure (1)..(1017): unsure at all n locations
cagtctttgactcgatgccaattcaaatagatgacaatgacaacattgaagtcgaagaggaagaatacgacgctgaagctggttctaagagaaagctcacctcaactgtttggaaagagttcaagagagtgaagttcaatggcacagtccgggcaaagtgtaactattgcttcaagcaactttctgcgtcaagtaataatgggacaaaacatcttcatgttcatttaaaaagttgtgtgcaaaggaagattaagttgaatgggaagacattggcacaagcttctttgagatttggtagaacagatggtggaaggtagctggaactcgttttcctattttaagaaggattgcaagagacatatatgctatccctgttacaactgttgcttcagaagctgctttcagcactagtggtagagtacttagtgagcatcgcagtaggcttacttcaaagatgttggaggctctcatgtgctctcaagattggcttaggaacaaatacaaagttgatgagaaaactaaacaacctgccaccttttggtcctgtctccaagacatgcaagagggcctccaggaacttgcactttgacattttcatttcaaggatttaggtggcgttaatcttttggctgttgacatgtagtgaacaagtcaagtacaagtagcaattgacaagatcacaagaaccttttggctctcatgaacacttgatatggatcttttggttctcatgtttttactcaatggtgaacttgtaatgaacttgtaacagatgtgcttttgggagcggtttgcacatctgttgatgcgcacctatgttgtaagcacattgtatgtgttaatttggaaatttggatgtttaatgtggtgaactagtggcgccatgctaggggtggtggacactaactggatattaatctagctgtgaacatctgatgtctgatgtgatcaatggtgttatgatttgtgacccccttaacatttaaaactcacacagtnttattgttgntgtttctt

SEQ ID NO: 274950 - DNA, 700 bp, Zea mays
cgcggccggctagagctgttagaaatctgtgggttggtggcattagcccatcgatttcaaaggaggagcttgagggggagtttctaaagttcggaaaagttgaaggtgttgcattctcccaagatcagacttcagcatacatagattttgagaagcttgaagacgcaatttctgctcacagatccttgaatggaaaaatgctaggtggcaaggaattgtgtgttgatttccagaggtccaagggaagagcggaatggtcagaagctagcagcttcaatggtagagtaccagggccagtgggtgataagagaggcagtggccctctgaagagttctgctggagtgcggatgcgagaggcacagcctaccaatgttctctgggttggttttccaggttcttatagagtcattgatgaggaggcacttaagcatgccatgtcagtattcggtgtcgttacgaagataaaagttttccagacaaggcagtatgcttttgttgagtttgcaaatgttgcggaagcttgtaatgctaagatgaatctagatggtcatcttttcaatgatcccaggattcagattcttttctcaaacagtgggcttgcaccaaacaaattggacaacccaacatcggttgctggatttcctagttcagaaatctattccagtgatggtcgtctaggccctggaattggcagtggaac

SEQ ID NO: 274951 - DNA, 359 bp, Zea mays
acgcgtacggaaagacggtggaagcggtggccgagatcaccgcgccgttgctgcccatggagcagctcctctccgcaattccctccaagagggaacaacgccctgcagatcgatgagctagacggcctcaaagcattgcatatgcttctaggttttgttttgtatgcaatgttgtgatatcagagagatatctgggttggtatattttatatgatgacgatgagaactaagtacaagtgcttttattttttattattcctaaagacaacttttgtatatgtaacatcatgaatgtttgaggtgtctcatgtgtaactttaattaatatcaatttatgcatgaaatattatggatggttc

SEQ ID NO: 274952 - DNA, 453 bp, Zea mays
accacacgtccgcccacgcgtccgcctacgcgtcggcggactcgtgcgggcgtggcttgggactgggccgcccggccgcgaggaataaactcactcctgccttcatacgtatccaatagccgcggcagtacgtgtatgtggttagctatacgcgacctcagctcgggcgcaagctacaacgccgaccaggcgagaagaagcatcgatagtgtgacgagctaacccaccagcagcaacgtaatccaaatccatggacaaccagccgctgccctactccacaggccagccccctgcccccggaggagccccggtggcgggcatgcctggcgcggccggcctcccacccgtgccgcaccaccacctgctccagcagcagcaggcccagctgcaggcgttctgggcgtaccagcgccaggaggccgagcgcgcgtccgcgtcggacttcaagaacca

SEQ ID NO: 274953 - DNA, 536 bp, Zea mays
ctcgccgccgccgcgacgtcactagtagagggcaggaggcggcggaatgacggagcggcaggtggcggagctgggtcccgggacggcgtgctgcggctggaaccactgtggccgccgcctcgccgctggcgccgtcgacggctccgtctccgtctatgactcccagccgccaccctcgttcaagtggcaggcccatgagcaagccattgtgaatgtcgtctggcttcctccagagtatggtgatgctatagcttgtgtttgtgctgatgggacactgtctttgtgggaggaggttgctgctgatgatcaacttccaacctggagaaattgtaaaatcttcgaggatggcaactctcatatactaaatgtacattttggattacatctgggaattctgaaaatggttactgcatactcagatggccaagtcaaggtctacgagctcttggattcattcgaattagacaagtggcagcttcaggcagagttccaaaacattactgatccaatctctagatttggaaacctgcatgcac

SEQ ID NO: 274954 - DNA, 614 bp, Zea mays
cccacgcgtccgccgaaaacacaacaggaaaacacacgcacaaaactgccgtttccgaatggccacggccgtgctccgccgcccattcctcgccgcgctcctcctccccgccgccggaggggcgtccgggacctcctcctggttccgtccccggagacgtaggtcctctccttccgtgcgcgcggtgtcttccgactcccccaagcccgtcgcctccacctcctcccccaccggcggtgacagccccgacgaggaaccaccggtcctaccgctcctccaggagcttgcggattgcttgattcttccgcccaagctcctcgctcagctcccgagcgaccttcgtctcgacctcaatgacgctgcgtttgatctctccaacgggccagttctcgacgagtgtggccaggaagtgggtgatctgctcctgaacctggcaaaagcatgggagttagctgagacgtcaacatcaaatagcattgccaagcagctgccgttgatggagccctacttgacgcgcagcgccaaatcagcgtttggcaagcggctggtgtcagctggaaggaggtttcagtcaatgggacagtacaaccagggataactcagaccgattgctg

SEQ ID NO: 274955 - DNA, 457 bp, Zea mays
accacgcgtcagaaaatcgagccgaaaaagatcaaacgaaaaaaaaagaagaaaaaaaccctaaccactccgatcgaatcatccgagggccgcagcagcccggcgaggctatgtctcaggcaaccgccgcctcccgggatcgcttcccctggtgatacaactcgggccgttcatttcgtctttccgtggggatatgagggccgctccgaccgatccgcccacggcgccggcgaagtcgatgctgaggcggctgttcgatcgccagctcctgcggatctcaccagcggagcgtctaccatcggcgggggctggagagaaggatgaggcggagccccactccgtgtgcctggacagcatggtgcgcatcttcatggaggaccactttggtagccagaaggctgcctactgtggccggttttgtaactgctttcacgtaggctacaatttaatattacta

SEQ ID NO: 274956 - DNA, 567 bp, Zea mays
attctgttaaggctgcatatgatgggttgttcatcggggctgtgcatttcggtcactatgaaagagttcggaaaacttgggccccctctaaatgccacttcttcctctggttatcggtgctaaataaatgctggacagcagataggttggcaaagagaggacttgatcatccggagaagtgtccgctttgtgaccaagagtctgaatctttggatcatattttggtttcttgtgtttttgcgagagaattctggttccggctgatgtgcattttcagactacaaaatctggctcctacacctagtacggtgtcttttacggggtggtgggagatgattgacaatggctctggagatatgattatgaagggtgtcaactcccttattgccttgggagcctggattatttggaatcaccggaatcgaatggtctttgatggactctcccctagtgtttctgcagctctttgtcaggcaagggaggaacaacaattgtgggaaatggcaggagctaaaggtctctcctttcttgccgcaaccatcagaagcacctaactgcctggttttt

SEQ ID NO: 274957 - DNA, 356 bp, Zea mays
gtggtggactcctccgtcgccggcctcggtggctgcccgtacgcgaagggtgcgtcggggaatgtggcgacggaggatgtggtgtacatgctcaacgggctgggcgtcaagacgggcgtcgacctgggcaaggtgatggccgccggcgagttcatctgcaggcacctgggacgccagtctgggtccaaggcagcgaccgctctgagcaaagttaccgcgaacgcctccaagctctgacaatttaccatgatcacctactgcagataattgcagtaaaattagcgcatggtaataaatagactgaggctattcaaataaatacggcctcggagctaataatgagtaaatttttaatt

SEQ ID NO: 274958 - DNA, 751 bp, Zea mays
agcccacgcgtccgcccacgcgtccgcccttacaaaactggtgcttgcaattcggttgtatttgcatgtctctttggcacgatatggacaaaggaaaatagagaaggatgacgctgctgtgttgcagcaagctgtggttatctacaccaaggagtttttgaagttcactgaattcattggtgaggtctttgtgaatgcaccattctttatatctgctgaggatgcaggtgccgtggatgcaaggaaaagtgatgagtacaaaggggctattattccagctggaaagacacatgaggtcattttgagtgttgaagctgtaaactcatccatcgcatgggacttttccttgcaacaaggggccctcaacatggtattggacattggctttcatgtggagtacattagcccttcaggggagaaaactttaattcttccataccgacgatatgaagctgaccaaggtaatttttgcactgtttcatcgggatcatacaaacttgtgtgggacaattcatattcttcattcttcaaaaaggtccttcggtacaaggtggatgctgtgccaccggttgttgagccggccttgtcagccacggaactctgaagaggtctgtcttaatataatgatgtaacgagggccgatgcatgcccgagtatagctgtacaaatgtttctgaaggccccacacggtgctgttactgattattccatcgaatgctttgcggtgttctgatcgcagcattccctgata

SEQ ID NO: 274959 - DNA, 283 bp, Zea mays
aggggccctcaacatggcattggacattggctttcatgtggggtacattagcccttcaggggagaaaactttaattcttccataccgacgatatgaagctgaccaagtccttcggtacaaggcggatgctgtgccaccggttgttgagccggccttgtcagccacggaactctgaagaggtctgtcttaatataatgatgtaacgagggccgatgcatgcccgagtatagctgtacaaatgtttcttgaggccccacacggtgcttgtactgattattccatc

SEQ ID NO: 274960 - DNA, 411 bp, Zea mays
agcttcgtcatacagaagtttatctcctttaagagatcctgatatccttggaagaaacttgccaggaccaacatcccctattccttcgacatcaagtcgcaggatcgcagcattgaacacatccaatgttcggatgaacatgtcgctgcctgtctctccctgctctagcccgctacggcagtacaggcagtccaaccgaagttgcttgcgctcccctccccacccagcctattcagctggagcagccaactacaatcctatcaacaatgcactctacccaacgcgaccaagcagcggtctcacagatccatggctcgaaatctctcaggtgaaaacgcaaacttttgattctccaagaagattgtagagattccaaaaagaagcaatactttgtatacaggcagggaaaga

SEQ ID NO: 274961 - DNA, 713 bp, Zea mays
cggacgcgtgggttgaactgacgggcgcggaccgcccgggcctcctctgggaggtgtgggccgtgctcgccgccctgagctgcaacatcgtgaaggccgaggtgtggacgcacgacgggcgcaccgtcgccgtgatccaggtcaccgacgaggccaccgggcgcgccgtccacgacgcgggccggctgtccagggtgcaggagcttctccgcgacgtgatgcggggcgacggcacgtgcaaccacggcggcacgggaatctccgcggagaggcgcctgcatacgctgatgctggacagcgtcggcggcggcggtgccgaggaggctggtggcggcggtgacgagaggggtggatgtggcgtggcgaagcccaaggtcgtggtgatggactgcgcggagaggcggtacacggtggtgatcctgcggtgcagggaccggccgaagctgctgttcgacacgctgtgcgcgctcgccgacctgcagtacgtcgtgttccacggcacggtcgacgccgagggagccagcaaggacaaggaggcctaccaagagtactacatccggcacgtcgacggccacccggtgcgctccgacgccgagcgggcccgcctcgtccggtgcctagaagccgccgtcgagaggcgcgcgtccaacgggctggagctagaagtgtggacggaggacagggttgggctgctgtcggagattacgcgcgtg

SEQ ID NO: 274962 - DNA, 383 bp, Zea mays
gctgtttgattattactgagattcaatcatttggtcagatgagagttctggctggggacttacaagtgtagcactgttgtcggcttgtgactaaatagcatcacttcacatacaacactggataatggatcgtagggatacttcagggtttgttagtggaggatgcaaaaataatgaagcctactagtttctctatatcttctaacttggtagctttattgacaattatttaacccagaagtgaggccagctggtacttcccataaagcttggttactctaatagcaatggaacccaggcatggggcgttcagcattcactataagttttctcaaatccaaatggctttgctaatcagtgcaccgccattccagccgtcagtt

SEQ ID NO: 274963 - DNA, 881 bp, Zea mays
  unsure (1)..(881): unsure at all n locations
ggtactcgccatctcttgtttctccatcagagataccatcagaccagtatgcactggaatttggagcttggaaggtgaaagaggaatcaaaaataggacagtgcaaacgaccagaaaagcctatcgagatatatgaatttgaaggttgtccattttgtcggaaggtcagagagatggtaacagtcttggacctagatgtattattttacccctgtcctcaaaaaggcccaacattccgacctaaagtcctcgaaatgggtggaaagaaacaattcccttacatggtagatccaaacacaggggtcgccatgtatgaatccgatgacatcataaaatatctagctgatacatatggcgatggaactgttccaattatgctatcacttggtctgttgacagcaattacagcagggcttgctactcttggtcgtattggaaagggaaattcctacattgcttcaaaagtcccaccgcagcccatagagatatgggcatgtgagggatctcccttctgtaaattagtacgagagacacttgtcgagttggaattgccacatctgctacacagctgcgcacgaggcagccccaaacgacaagaatttttcaagaaaaaggggcttttccaggcgccgtacatcgaagatcctaacacgggagtccagatgtttgaaagcgctgaaatcatagactacctgaaggcaacatatgccctgtacccaagctcgtagtgatgtatcagaaatggtcattgtaatgttgcgtgtagattcagttcttcccggtaataaaaggaaaagaaatagtgggccacgcattctgtatgatgcacagccgattttgtctatgcacatctaaactttgaagttaaaaaaaaantataa

SEQ ID NO: 274964 - DNA, 755 bp, Zea mays
agggctcttacattggctgttggtgatgaagatactgacatgcttgctgatgtgaaacagatggcagctgcagcagctgcagcaggacaagcgagttcatcatttgagaaccagctccggccaattgatagatatgcaatgcgctttatggaactctgggatccagtaattgacaaagctgctttaaatcatcaagtaaatgttgaggaggaagaatgggagcttgatcgtattgaaaaattcaaagaggatttagaagcagaaattgatgaggaccaagaaccactttcttatgaatcatgggatgttgattttgctacgacagcctatcggcaacatgttgaggctttaactcaaaagcagttgttagaagaacaggaaaggcaagctcaggaagcaacaaaagagttggaggagaagaatgataatatgagcagtcaccacagaaagtcaaaaaagaacaaaaagaagacaggcaaactcaagcccctgaaaagagtgcgtctgtcgcctgaatcagaagtcatactggaggaaacctctgtagataatgcaccctcacctgagcttacaagtgatgaatcgccacaccattattgtaacaagcgtaagaagattacggttgccactgaggaaaatagtaacagcagaagtttaaagaagctcaagaaaactactaaatcaagttttatttctgaagccttgtcacctaggctgaaggaggaccttaatgattcagattcaaaatcagtggg

SEQ ID NO: 274965 - DNA, 507 bp, Zea mays
gctcataagcctgtgtggatgggagcctaggtggcttccaaatgttcaagactgtgaagaaaattcaacgcattcagctaaaaatttaccctcagctggacctgacgaacggttatatccccattttgttgaacataacaaaaattcattttctgcatcagccaagaaagataaggggaaaggcaaattgcccgttggagattctggatgcagcatgaggtcaccgttgttagattgtaacctgtgtggagctacagtcaggatgcgggactttagacctgtattatgtccttctcgtttcagtccaaataacattgttgtgcctggaacaggcagaaagctaacactgacacatggagttagtgctgccagtggtatcaatgagtgggttactgatggggtggaaagaggtcaagatgaagggcgtgatgaagcagcaacaaatgaaggaaaaccactatcacttggtggaggagacctagacctaacaatggcttgaggattacc

SEQ ID NO: 274966 - DNA, 577 bp, Zea mays
gataatggttatgtatgttctgcactttcaatcaatccatggtctcactgctgcccaacaacaggggaccgcttttcctgccagggctgcgaacttgatttacagtgctgcaattcatatgaatattgtgtttcttgctgtttgaatccttctaagatcaagaaagaagacgtgctgaagctgaaggtagctaagccagttactgctggaacatacacaaatgttttcgatttctgcatgggacgatgccgccatagctctgcaagtgtggttcatgaaaatgcctatgccagtgatttccatcactgtttttcagtgcaacaaaattcatcaggatcaactgagtctagttctgtatcaaagttgttgggcattaacgttgtagtaggaaggcccagggaatcttgcagcttggtgtgcaaagtaagaggacagtcctgtgttccaagcaggctctctgtgttgaacaaatgtgagattttgcagaaatatatgagatgcaagagtggctgctttcccagccttgggaccagatcaacctgctgaagttgttgacgaagctccaaccagcttgaat

SEQ ID NO: 274967 - DNA, 385 bp, Zea mays
caaagatctgctccagttcttgagaagcgtcgtggatgcagaaggagatgcaatgcaatacctttcaaatccttgcatggtatctgatataagacatgtggcgtgagaagtgataaaatggttttttatggagatatatactcgaacgtgtcttgtaaggacggcaggacgcaccgtctctcctgagttataggtacctaattatgactgtggtaaaccaatctatgtgttttaattgaggcatctagatacaacgtatgttttttacacatacgatggttttaatgtaagtaattgtttgtaaatgtttttttgttgttccttgatgtgttattaaagaatgatagtcctgacaagtttgaaccaataaacctcctttacgacc

SEQ ID NO: 274968 - DNA, 734 bp, Zea mays
agcccacgcgtccgcggacgcgtgggtgaaatctcaaatggaagttaggcccagggaatcttgcagcttggtgtgcaaagtaagaggacagtcctgtgttccaagcaggctctctgtgttgaacaaatgtgagattttgcagaaatatatgagatgcaagagtggctgctttcccagccttggaccagatcaacctgctgaagttgttgacgaagctccaaccagcttgaatccaggagcatgcttatacatgcagatggatgagcggctcacatgtgatggtttcgcacatcatacccgggcggctctgtccatgcgcctgagaaggggaaatgaatgtgacactcataagacagcagagggcttgctcactcgacaggaaacaagtggaggcgataagctgataaccgatggttctccatcacacccccatgacgaacaacctctccgcgcaccggttgcgggtttcctcaacaagaacgccctactctcctcctgtttctgggaaggattatggatgcaaaatgaaatggagtgcctgcaaagatctgctccagttcttgagaagcgtcgtggatgcagaaggagatgcaatgcaatacctttcaaatccttgcatggtttctggtaggattttgcatgctgaatgaaaatgcacgcaggcgattccacgagcctttcatgcatgttttgagacacctgaaccaattatatatattcgtaatatattgcac

SEQ ID NO: 274969 - DNA, 437 bp, Zea mays
cccacgcgtccgctgttttgcttttgtgttgctgttaggttcttggatagtttgatgaatgatactgtgcagcagcagcagcagtagtaattcatagtgggcggtgtgatagcagcagtgagatcgaggagaggatggaggtgttcatccacgaggactacgtgaacaagcgcaacgagctgaggagggagcagaggcgccgggaactgcagaggctgcaggtggagagcaaccccgacgcgtcccgggaggcgctggcaagccgggagagcccgaggacgccggctcagtgcctgacgccgaccggcgcgtcgccgtccagcttcagatccccgacttcgaggagcacgctgcagtcgccggccgcagcggcggggcaggctgccggttggccgtccgagcatcgccgcctctacgactgcctcaagccgtactag

SEQ ID NO: 274970 - DNA, 279 bp, Zea mays
agagcacaacaagtagtcaaagcatctagctcgttacaagtggctcttgtcgcctacaattttgccttcttccaagtcttgtttgaagttgctctctgcgaagagccggtagagaagttaatatcgtctagcaatggaccgggtgacgaaactggcttctcagcgcgcggtggtcatcttcagcacgagctcctgctgtatgtgccacacggtgacgcgcctgttccgcgagctcggggtgaacccgacggtggtggagctggacgaagaccccagggg

SEQ ID NO: 274971 - DNA, 594 bp, Zea mays
  unsure (1)..(594): unsure at all n locations
ctcatctaaacgctanaaagatatgccacatattgtatcctgtggatgaatcactagatgggcaagtagtccgatgggagcaacaatatacagttgtggtcagcctcactacaggacatcagtgctcgttttgagagtagagctggcgagtctctcaactgggaggacttcccctccaaagttgctgtgcagatgaatgacactcatccaacactatgcattcctgagttaatgagaatactgatggatgttaagggattaagctggagtgaggcatggagtattacagaaagaaccgtggcatacactaaccatacagtgcttcctgaagctccagagaagtggagcttggacataatgcagaaacttttacctcgacatgttgagataatagaaacaattgatgaagagctgataaacaacatagtctcaaagtatggaaccacagatactgaactgttgaaaaagaagctgaaagagatgaggattctggataatgttgaccttccagcttccatttcccaactattgttaaacccaaagacaaaaaggaatctcctgcaaaatcaaagcaaaagttacttgttaaatctt

SEQ ID NO: 274972 - DNA, 446 bp, Zea mays
cccacgcgtccgctaccgaataatattctgcagtagtttctcgagctcctgtagcaagaaagaaaccatgtcgggggtatgggtgttcgaggacgggatcgtgcggcgtgcggacagcgacccgcccagcggcgccggcgccggcgggtcccggccgaacaaggtgctggtgcacgttcccagcggggaggtggtgacgtcgtatgacgtgctggagcggcggctacgcgagctcggctgggagcgctacctctacgacccctgtctgctccagttccaccagcgctccaccgtgcacctcatcaccgtaccccgtgacttctcccgcctcaagctggtccacatgtacgacgtcgtcgtcaagacccgaaacgtcttcgaggtccgtgacgccgcccctgcctgatggtcttcgttgcgacgcaagctgctgctgtgtacctatt

SEQ ID NO: 274973 - DNA, 484 bp, Zea mays
aagacggggaagaaacactcgcttctgagtttggtcgcggttttgcccctcccttcttgaactcctccgctcgatcgaactcagttccgattcggcaggttcattgtgaagttgaggtgggtggtataagcatcgaagagagcatgagcactgccagtggtacaaggcgtgcaccaagaagacagtcgcaagatgggtctgctgataaagtagtggtgatcatcgaagcaacctccccggtggtggggagccgtcgtggaccaccgacccctgttcctggcgcccaaaactcacccattgatgtggaggccatcgaagatgaagttcaggcagtatctccctcgcgagtgcccccaccgaggagggacaggagaaccaggagggaacctataacagtggttgacttggaggttgacgctagccgggaagggagcaaacgccagacggttgaaccagtaggtcacctctctcccgattggggagc

SEQ ID NO: 274974 - DNA, 641 bp, Zea mays
aagaagcgctccctacccaccgcggttgccccctttcggcctttccccttctcgagcgagcgcgggtccttcggcgacgtgcggatttttcggccctcccgatgctcccggggttcattgtgaagctgaggtgagtatataggcataaagagagcatgaacactgttagtggtacaaagcgtgcaccaaggagacagtcgcaagatgggtctggtgataaactagtggtgatcgtggaagcaagctcccggggggtggggagccgtcgtggaccacatgcccctattcctggcgccctaaactcacccattgatgtggaggccatcgaagatgaagttcaggcagtatctccttcgcgagtgcccctgccagtatagttctctcactatcttgaatttaaacaagtgtcgcacttttcaatgttgttagcgtcatgccattaggcccattggtcattttcaaggagtagccttttaacaggaattctcaaactctttaccattgccagttattcctgttaaataatattttttatgaatgatagtctgtgctactatggtgtaccattagctagcacttacaacaaagcatagtgtattctgcagaggaggaacaggagaaccaggagggaacctataaca

SEQ ID NO: 274975 - DNA, 530 bp, Zea mays
tttgttttcgcgttcatgggcttgggctggtccgcctcgtggtcatgaactcgcttaaagtgggcttgcttgctcggctgccccacttggcagggacgctgataatcacataagtccccggagggtggaccgtggaccatattcacccaattgaaaggaagaagcgctccctacccaccgcggttgccccctttcggcctttccccttctcgatcgaactcgggtccttcggcgacgtgcggatttttcgtccctcccgatgcttcgcctgtatctgatccggggtgcgtggattgactaccggtgttgatttggcgaggcaatcggcggggagggagggggtattaatttcgatcgctgcgccgccgattcccccggtccttaggttcattgtgaagctgaggtgagtgtataggcataaagagagcatgaacactgttagtggtacaaagcgtgcaccaaggagacagtcgcaagatgggtctggtgataaactagtggtgatcgtggaagcaagcttcccggggggt

SEQ ID NO: 274976 - DNA, 181 bp, Zea mays
cagacgcgtggagggaagaagcgctccctacccaccgcggttgccccctttcggcctttccccttctcgatcgaactcgggtccttcggcgacgtgcggatttttcccccctcccgatgctcccggggtgcgtggattgtcgaccggtgttgatttggcgaggcaatcggcggggagggag

SEQ ID NO: 274977 - DNA, 1218 bp, Zea mays
  unsure (1)..(1218): unsure at all n locations
agttctagctcgcgatctagaactggctcaaaccttttcctaaatgattttggtggttgaaatgcccaacacanataattggactaactagtttgccctagattatatgtcctacaggtgccaaaggttcatcttgtcggcgtttcgaccccgggggtccctggaccgacgagtaaattgtcgctgcgtgtcccagcccagatgggtcngcgcgagacggaacacaacgggtgaggaaccggcgccgcagccgcggtgagccccgtgtcgaccgggagtacgacatggtcatcgtcccgtccgacggcggtgggtgcctctccggctctgactcggacgactccgactggtccatcggctggctcgagccacaggcaccggagcttcagacggatggcgaccccgagaactgcttcgccgtcctcgtgccctgctaccgccacggccgccaagagcagcagcccgggaggcacgagggcaggtttcttggcgccggcaccctcaccaatggtggattctctgatggaaagaattttgtagagcagtggctttcttctctccagaactaataccgtccgacctgtcctagctaccctgtaaatagtatcactctgttttgttctactacgtttgtcctagtcgcagaatgtatcgatgaaggaagacatggaaaagccctaaaaaaagaaggaaatctaaaaagaaaaatgaggagcagtgggattctgaagcggcaccaaatgggtatgtccttcctgaggtgttcccagaatcccaggctattctactcttgcaaagcaatgcgaaagctgaactacacaaactgcacgccatcaaaaatgattttgccgtcctgatatgtgcggagtgctaacctgatgattgataacacgtagagatgaactgctattccattgttaatttgtcccacttgctcgtggacctcgaattctactgcatgtacattctgttcttgcagtgtatatatatatagtcttgcccagagctgcagtggcgtgattgttcagtctgcctgtatatagtgttcttgcagtgtatatagccttgcgcagagctgcagttgcgtgatttagtgtgtggtgcgtgtgtcctattcttgtacatgggaattgtattctgatgaatgaatctatgaatgaatctatcaaaaaaaaaaaaaacccacaaaaaaaaaaaaaaaaacccacgcgtccacga

SEQ ID NO: 274978 - DNA, 445 bp, Zea mays
ttgtaacttagcaacatatataatgaaagggaaatatggtcaaaccttttactaaatgattttggtggttgaaatgcccaacacaaataattggactaactagtttgctctagttgatcatttcacaggtgcataagttcatctacaagtattctaaatcgactgtccggaataccgtagattatttcggacaggagaagttttttgggaaaatcacccaagcgcggactgtccgggcccttgcggtggaccgtccgcgacacccaagtggcctcggacaggaacactgcataaacggaagtcaaacactgtggatcgtccgatggaaaagcaacaacgtcccgggaccaggagcggaccgttcggtcggcacaaccaaaaaccccgacagtgacaggttcggtaaaatgaattatagcgtcctcacggaccatccggggtacac

SEQ ID NO: 274979 - DNA, 290 bp, Zea mays
gccgcggccgccaagagcagcagccccggaggcaggagggcaggtttcttggcgccggcgccctctccgatggtggtccctctgatggaaagacttttgtagagctgtggctttcttctttccagacctgatctcgtcaggcctcgcctgagctgccctgtaaatagtatccctctgttttagttctgctgcgtttgtcctagtcgccccacgtatcgatgaaggaccacatgataaagtgatctaaaaaggaaaaagaaaaaaaagaggagcagtagaattttgatttc

SEQ ID NO: 274980 - DNA, 424 bp, Zea mays
agctttgatcagcagcatcctcctataggacaaaactcaaaccatgtcctcagttaagacctctcagaccttgctaggccagatcagaccagtgaataaggatgtcctgagccataatatacagcagcaggctattcagggcctaagtctcactttaaaacctctaaaaggaaacttggcatctggaggagagtccaatgaccaggtataggcaacctattcttgaacaatgaaaacatcgaagcagtcattctgaatacatgtgattttctatgtatcaatctgccttttttttctgttggaatgttgttgaagagtacacatttggtttgtctccagttaattttatgcaacttggtattgttctgaacgtttgtctttactacatgttttgaaaggaagtctttactataaattcccttgg

SEQ ID NO: 274981 - DNA, 567 bp, Zea mays
agcccacgcgtccgcccacgcgtccggtctcactttaaaagctctaaaaggaaacttggcatctggaggagagtcaaatgagcaggctgggatcaacgtggagaactttagatcttctgtatttccttcccggcagttgtctggtgaggtaaaaccattttatccaaatcctggaatgcacagtgagaatgtttggattcaaacaactcagacaaacgagacaatgaagctgtgcaacacaacttactacagacagcttccaggacatagcactgagtcaataaaccaaagaagtacaggaagtttccagagttcggtgagacgtcaatctttcccaccttcaagttacaagaaatgagattcataccagtagccgtcctgatgtatagcagaaagggagaaaaagatgaacccctgtcattgatccttgttgtgctagtgcacatattgactgtagagaacaaagacttggggctgttttacttgccctctgaatgcctctttggatttttggcattcggttaactgaaaggtgaggaacccaatattgactgtaggtgcagggta

SEQ ID NO: 274982 - DNA, 460 bp, Zea mays
aggccccagctcaccaagtcgaactccaacctctcgaaacaggcgctcaatggcctcctctcggacaagaaggacgtggttagctcgaaggcaaaatcaaccagcgctaggtcgacgccgtcttccccgaccagcgcccattctctgcctgcgtcgttcgataaattctcgagtgacatgaaacagagagtgagaaccaaaggagcagagaaatcgccgccgtcaagggtgtcccttgcaaaaaaaggctgcgtctgtgttgaaggccactacggcaggggaggaagtcctccctgggtaactccattagtaacaccttgttgagcttcgaatctgggcccaaggccttgagaagaagctgggaagggaaagcagatgcgtaggacagaggcaattcggattcaaagcctgccggagctgaaaagaagtctgaaaatcgaagctcttcgactcccagacg

SEQ ID NO: 274983 - DNA, 623 bp, Zea mays
  unsure (1)..(623): unsure at all n locations
ttatatccggtgtcggtgcccacggacaggcgtgtgcgccacgagcccgacgaacaagggaacgaggctatttccaccggtcaaactaggagctttcacaccaaacacggtgattaagcaagtttcttgtggagctgttcatgtcatggctctatccgaggatggtctactgcaagcatggggctacaatgagtatggtcagcttggcagaggtcgcacttctcaaggacttcagggagctcgtgtgttaaatgcttatgcaaggttccttgatgacgcccccgagcaagtgaagattgttagagtgtcatgtggagagtaccatacagcagctatatctgaaaatggggaggtgtatacttggggactgggaagcatggggcagcttgggcattgctccctccaatctggagataatgagctgatccctaggcgagttgtggcccttgatggtatagtagttgggggacgtttcttggnaagngtgtccactcttgtgctgtaactgaagggggagctctatatgcctggggcggaggacatgtgggtcagctgggagtcggacctcagggtggctacttctcttgctcccttaatggatccgacatgctgctccgaaacat

SEQ ID NO: 274984 - DNA, 445 bp, Zea mays
ttatgtggtcagcatcaaaaacaagggtgtccaaccattgcttgatgctgttgtcgattacttgccatctccacttgatctaccttcaatgaagggtactgacccagaagaccctgaaataatatttgaaaggcaaccaagtgacgatgagccattttctgggttagctttcaagatcatgactgatccgttcgtggggtcactaacatttgttcgcatatactccgggaagctgatagctggttcatatgttctcaatgcaaataaagacaagaaagagagaatcggaaggcttcttgagatgcacgctaacagtaaggaagatataccagttgctgtgacaggtgacatagtagcgcttgctggtctgaaagacacaattactggtgaaacactctgtgacccagacaagcctgtagtgcttgaacgtatggaatttccaaat

SEQ ID NO: 274985 - DNA, 604 bp, Zea mays
gtgagctttttcttgcaggttatgaaagctctaattgatatggaagctctccagccaacaggagatctctcaccggttaggaggtccatacaatttttcttggataatctgttgagccagacaccggatcagcaacagactctggctgcaattggagaggacttatttgctatagcacaagatcaaccttttcggtttccatccacatttacatttgttataagggcattctctactcttgaaggaattggatacatattagatccagaattttcgtttgtcaaagttgcagcaccatatgctcaagaactgttagacttgaaacagagacgacaaactggacctcaattggtccaggaaataaggaagcaagcaaatgatgctcgtgattctacaatatcaatgccgtacagaatacagagaattgaagattttgtaggacaacttgagacaggagatctgaaacttagggtcagagtactggagtcagaacgtgctgcacgtaaagctactgttcttcagatggccaccatgtatacagccttgggtggtactctcttgaatgttggggtcacactgaatagtcaagggaaccagataattg

SEQ ID NO: 274986 - DNA, 902 bp, Zea mays
ccagttttcacccacatcagaacacatactattggcatatggtcggcaacatagttcactgttgaggaccattttgatcaatggggagaccagagttcctgtgtacacagtcttggaggtgtatcgagtttcagacatggagcttgtaagagttcttcctagtgtaggagaggaagtcaatgttgcatgttttcatccttcccctggatcaggtcttgtttatgggactaagcaagggaaggttaggtttcttcggcaccatggtgcatcattcacttgctggggagaacgttcatgagatttagaggcatgtgctacaaatgcagttctggacataataactgaatttgagcatcgcattcttgtgctgctgaatcttatcttgattatggcttcggcaacatcctggaagaggaatttatggtcaactgagatcatctccaagaccgagagggctaacagaaaacatcagatttcagcatccaattactcttgactaacgttccactctttgcaaaaccattgtgccggcaaggagggctactattttaggtccggttaacgtgtgtaagtagccccgtctatgagaaaatggacaaggaatcgcagcctcattcagcatgaattaccaacgatggttgactactactagtacaaggagacctcaagggatacggtcgcctgtacgaatatggatgcgagccatatactgacggccggcctaccaaagatgcgatgtgttccttagttcgatgattttttttttgaaactgtatagaagcctgcgaagaaatgtagtggttggctgagtgaagtgagggaagggataggcattatttcccttgggtgacattgaccctgtttggatcagattctagccgggagaatctgattttcgtaat

SEQ ID NO: 274987 - DNA, 481 bp, Zea mays
gacccacgcgtcagatctattatgtcggtgttttccggtacttcggggtcttgtcaaaacctgtcgtacccctggtgtttggaacctattaaattatgcataaacgggttcaatatcaatttcaatgaggccttctcctcgctgcgcatagcaaactataaggcattcacacggctccacatcaagaaaaacggagaccttgaggtcttcaccctggctgtggacaaggtgccaaaggattggatgctggatccagactgggacatggaacccaagcagccattccagatgagctacaccaggaaattcccaagcaaatggagggctgcgtcgggccttgacccaatcaatgctgtgcgcattgttgaccggtttgtcatcccgccaacgccctcaagtcctacaacaccaggaggctctgtttcaagtcctacaacaccaggaggctccgtttcaagtcctacaacaccaggaggcttta

SEQ ID NO: 274988 - DNA, 808 bp, Zea mays
gacgcatttcatacagagctacttctctcttgtatgcaaaacttgaaatgtggcaaagctgttgacatccctaactacaacttcaagacatacaaaagtgtcccaaatgcaaggaaggttaatccttcggatgttattattttggaaggaattctagtttttcatgattcacgcctcagggatttgatgaacatgaagattttcgttgatacagacgccgacgtacggttaacaaggaggatccatcgtgataccattgacaagggtagagatatcaaagctgtgttagaacagttctcaaaatttgttaagcctgcttttgaagacttcatcctcccaacgaagaagtatgctgatgttatcatcccacgcggtggagacaatgatgtggcaattgacctaatcgttcagcatattcggactaaacttggacaacatgatcttcgtaaaatacaccctaatctgtatgtaattcagactacttatcagatacgaggcatgcacacaataataagggatgctgccacagcaacacatgatttcatattttatgctgatcggttgattcgattggttgtcgaacatggtcttggtcatcttcctttccaggaaaagcaggtcatcactccgactgggtctgtttacactggtgtggagttctccaaaaggttgtgtggtatctcagtgatcacgagtggcgaaagcatggaagactgcgctacgtgcatgctgtaaacgtatacagattgggaagattcttattcatccggaaggtgacaatggacaacagctcatctatcataattta

SEQ ID NO: 274989 - DNA, 932 bp, Zea mays
tccttctccgcggagggccacgggcacggcgacgcatccggcttccggccctcctgtccccggaggtcaccgccgccgtcttcgtgggcggccataccggccacgatgaatagcatcaagtcggctatcttctccggccatcggtcgcacccccacgtgggggcggcggcggtcccgcagcagcagcatggggagcaccgcttcgttccactcgacacccgttctgcagcggaagcacaagacccagtggcacaacagattcaactattatacgagacgtaggaggaacagagaaactaaaaggtcaatgctacggaacatgtcagaatatgcagagcctctcttccagagttggcgtgatgaagatgagaaaaatgctgcatctgctgggccttcatggtttagaggacatcgttgggtcagaaattcaagcaacaatggtttccgtacacacgatttttattacgggaatttcaaaagcaaaggaggatttgagttttgcacaagtgatgaggatgaaccagagaatctgtttcgtaatgtttttcgagaccagcacacatattattggtctttttcatctgataattttcagaggaactccaaacgtgctcgctcacaaaaatccagaaactggagttttgaaacagacgaggaggatgaagtatcagctccatcagaggtatctttggcacgacaagctcttgggttgagcacttctggtccgcttaaacttgaagatgttaaaagcgcataccgagcatgtgcacttagatggcatccagatcgccacaatggatcatctaagtctacagcggaggagaaattcaggcattgcagtgcagcagacaagaccttatggtgatacttgggccgctgcatagataattttgaatgagcatggactctgggatgagccccttccaaacttt

SEQ ID NO: 274990 - DNA, 1247 bp, Zea mays
cggttgctgggctccggagctgcgaaattttgagaccgatcctgtaaagcggaggcggtgactacccaccccaccaccagccccccggaattcgcgcaaatcacagaagctccctagccgccggcgagcactcgcgcgcgcccccgcccccggcggaggcggcggcggagcccgcctctctgccggcgccggcgatgggcaactcgctggggtgctcggcctccggcgagcggctcgtctcggcggcgcgcgacggggacgccatcgaggcgcggatgctgctggagctcagccccgcgctcgcgcgctactccaccttcggcggcctcaacactccgctacacttcgccgccgccaagggccatctcgacattgtcacgatgctgctggagaaaggcgctgacgttaacgcgcgcaactactgcggccagactgcgctgatgcatgcttgtcggcatgggcactgggaggtggtgcagatgcttcttctatttagatgcaatgttactagggcagattacttgagtggtcgaacagcactgcattttgctgcacatgatggatttgttcggtgtattagacttttagttgcagactttgtcccgagtgtggccttggaggatattgcttcttctgtggtggatggtggtgattgccagacaaacagtgggagcagtcctaattcatcgtcggggcagaagtttaatgaatcggcccgtgtgaggtacatcaacaaacctgcagatggtggtgttacagcacttcacatggcagcattgaacggtcacttagattgcatgcagttgttgattgacttgggcgctaatgtctcagctgtctcattcccctatggcactactgcaaatttgataggagctggcagtacaccgttgcattatgcagcaggtggggggaaacaagaatgctgtgagctactaatatcaaaaggcgctagcaggttgacactcaattgcaatgggtggcttcccgttgatgttgctagaatatttggacggcgctctttggagccattactttctccaaattcacactcgaatgtccctgtatttcaaccgtccagttatcttgccttgccactcatgagtatacttaatatagccagagaatttgggttgcagcataccacaccctcgattgatgataatgatctatgttcagtttgtctagaaaggtcttgttctgttgctgctgaagtcatgaattctgcatcaaatgtgctctctacc

SEQ ID NO: 274991 - DNA, 601 bp, Zea mays
acgggtcatgtatatcatggtaccatctgtcccaatgtgtaaagtagtatgcttactattttttattcggttcaggttgcagtcatgaattctgcatcaaatgtgctctctacctctgctcaaccagcaacatccgcgtcgagttcacaggcccacctgggtccatcccgtgccctctttgtgggaacggcataatgtctttcaccaagttaccaagcacaccaacagaagggcttaaatcaggttcagcgctcacattctgcaacccatgcatactgaacacccggtccatggactcgccagccactttctccaaagccgaaatcagacggaaccgtgtggcagctgtctcttcggagctggtctgtccaatcacctgcagcccattcccgtcgtccgccctcccaacctgcaggtgcagcgacgacgatccatgcggcgatacagacgtgcaggatggtcccgagttccagtctccccggccctcgcacagcgcaagcatggagctggacaagaggggggagggggatctagaccgggccagttgctcaggcatgttctggagccgaaaaactgtcacagggagcagcatgtgatgcga

SEQ ID NO: 274992 - DNA, 469 bp, Zea mays
ggtactagttaaaccattttacacactccgctctactcccggaagagacgatggcggaggcgacgccgacgatggtgttcgtctacggcaccctaaagcgcgggttccctggccactcgctcctcgtggcctccgccacccccttcgtgggagccgcatccacggccgagccagcctccctcatcatcggcccctactcggtacccttcctcctccccactcccgcctccgcctcctccggtcgcgtcgtctcgggcgagctctacgccccatcccccgccgcgctcgccgagctcgacgccctcgagggcacccacatcggcgtctacgagcggcgcccgatcaccgtcgtggtcgacgggtcgggcgaggtggtgcaggcggaggcgtacttcgcgcacccgagctacgcggaggcgctctggcggcgctgcggcggtgaggaggccgagattggagagtacaccgt

SEQ ID NO: 274993 - DNA, 1020 bp, Zea mays
acgggaatataatcaagatgcttctggttttcctcggccaacggaggatgaaaatgccgcgtctgctacaggagataattctggcttccaagaaaacaacacgggttctcatatggatctggatatgatgaatgactatgaagtgaaggaatgcaacgattttgggagtgcgattcatggcgttgatacagattttctgaactatggtgacgacgacaacgacgacgacttcgacgacgacttcgagccaaatcccagcgagttccagtctctcgacaacagcggctggtcttctcgcaccaggggtgtcgcgagatatctcaagactctgttcgacgaggactccggtctggggaggaagagcgtcgccatcgaccatctggtgcgcgggaagacgcggaaggaagcgtcgaggatgttctgcgagaccttggtgctgacgacgaaggactacatcagcgtggaccaaccgaaccccttcgacttcgtgagcgtgaagccaggcccggagctgctcatgtcagaattctagatcaacaaagtcagcgtacccctggcgcgatacattccttgttaccattgtatccatcatcgcaccgaccagcaacaacaccgcagatattccccccaaccacagtaccacaccctccctcccttccaaatccatttttgtgtatgttgttgcagttcccctcccctcccctgtagcatgtgctgcgctgatctgttgttgttgccagggcgtctgtccgagtaggatggtggttgtgttgtaccgtcggctatccaacagtatatagtagtagtacgattttagcgacactcgtgaagcccgccgtgtaatgtgctagggttcgcgctcccctaagttactgtcgctttagactggctaaagcccgtaggaattgtatacgacaaggacagggacagcccgagatgatgaatgatgtattgatgtgcctgttgactatgtgagggctgacggttttaactcaataattcaagtgacccttcctgtgg

SEQ ID NO: 274994 - DNA, 1434 bp, Zea mays
  unsure (1)..(1434): unsure at all n locations
cccacgcgtccggtcacggagagccttttgattgaagttttccagagtgctggccttgtggaaagatgcaagctcatacggaaagagaagtcgtcctttgggtttgtggactactatgatcgaagatctgctgctctagcaatcatgacccttcatggccgtcacatatatggacaagcaatcaaggtgaactgggcatacgcaagtacgcagagggaggatacgtcggggcatttccatatttttgttggtgatttaagttctgaagtgaatgatgcaactctttatgcctgtttctcagcatatccttcttgttctgatgctcgagtcatgtgggacaacaaaactggacgctccaggggttatggttttgtctccttccgtaatcaacaggaagctgaaactgctataactgaaatgactggaaaatggcttggaagcagacaaataaggtgcaactgggcaacaaagaacaattcggaagagaaaccagaaactgacaatcataacgcagtcgtactaacaaatggtagctccaacaattcagcaacggatgcaagccaggacgcaggaagtaaagagcccccacagaacaatcctgattgtactactgtatatgttggcaacctcggccatgaggttaaccgggatgagcttcaccgccacttctataacttgggggtcggggcaatcgaggagatccgtgttcagcaggacaaagggtttggattcgtgagatatagcacccacggggaagcagcactcgctattcagatgtccaatgggtcggtagtccgcgggaaaccaatcaagtgctcatggggtgtcaaaccaactccaccggggacaggctccaagcccctaccccctccagccgcaacgtaccagcccgctgtggcaatgccaggcgtcccccaaggtttcacgacagcagaactcctagcctaccagaggcagcttgccctgagccaggccgcggccgggcagcagcatgctggtcttgcgggccaggtttctgcagcaggccttcttgctgctgccggttcccaggccctctacgacggctacccgaatcaatcgtcagcgcagcagcttatgtactacaactagtagagctcaagaggaaggaaggcgtctgtagtgttcagcttgtttttgcgcaaacttgggtcatcctcgccctgtttttttttctttattattttgtggttcatgtactatttgtgtgagagctcttgttctctcttctcagccgcgggattgtgttacttactgtcttcttactgtaccattttccttgtctaattctgttgagtaagaggtgtattctatgtgactttgcgattgattaatgtaatgctcccctggggatcggctttggtcgctgggctggttcatgttccaaaaaaaaaaaaaaaaaaaaaaaaaaanaaa

SEQ ID NO: 274995 - DNA, 361 bp, Zea mays
cacccacgctagcgaacctggcgacctgggcggagaagacacatgcctcccttcctccgcccactggctgagcctcgtcgggagcatctggctgcagaccgtcaaccggccgaacgccgacttccccgtgtactcgtcccagctcaaggagctgaagcacatcacgcaggtgcagctcaacttcctggcgttcgcgtcggacgcgggcaagctcttcgggtggttctccggggtggcggcgctgtacctgccgctgtggctcgtggccttcgtcggcgccgcgttcggcctcgtcggctacggggtccagtacctgttcctggacagcgccggcctccggtactggcacctgttcctgctc

SEQ ID NO: 274996 - DNA, 469 bp, Zea mays
gtcctacgccacggccgtggcggcggcgcgcgcctacgacacggccgtgttctacctgcgcggacggtcggcgcggctcaacttccccgaggagatcccctcgttcgggctggcggatggcgtggacgtgggggaccccgcgcgcgacccggccgccgccgccgccggcggcggcggcggctgcacgctgtccgcggcgtccatccggaagaaggccatcgaggtggggtcccgcgtggacgcgctccagaccggcatggtggtcccgccgccgcaccaccgcgagcgccataggcaccacaaccacctgccgcagctgcgggtgcacgcggaggagcagcaggaggaagaggagcagaagccgcagcggcctgcgtggagcgggcgcgtcaagatacccggatctgaaccgtgcgccgagccccgagagctccgacgcccagtgacaagcgagcgagagctgagcagc

SEQ ID NO: 274997 - DNA, 318 bp, Zea mays
acccacgcgtccgcccacgcgtccggcacaaaacacatcaccgcatctttttccttccgagctgtacgtatctgcagagagagagagagagagagagagatagagagatagattaggtcagagaccatgaagcacccgaggccgacggagcaggatgtgtcgctggcgctgtcgctgagcacggactcgtccacgacgacgtccgactcggcggggacgccaccggcgaagcgggcgcgggcgcaggcgcggtggcggggcgccgtggtggccacgtcgggggagggcgagtccgtctgcaggacctgcagccgcgcc

SEQ ID NO: 274998 - DNA, 866 bp, Zea mays
  unsure (1)..(866): unsure at all n locations
ggttacggtcaggggcccccggctcgacccaagcgtcagcggacgcgtgcaagttccttcgctcgcaagggtttgtttcatcatatgacactgctcatcaatacagtgacagcgaagaagatgcacataagtgggtcagtcaccgaaaccatcgagggaacatctgcggagttgatttcatatggcttttaaatcctgataagtgcaggaagcccctgaagaccagctggaatgaagctgtttttggtatcattaagtacttcctccaagttgcattcctttccgaggagaatgcatttgcactcctgaaggcagacagcctttatgatcacatcacatattcaagtttctaccaggcattgtgtcagttaggaatggtccatcctgatagactaaaatcagaagaaattgaggagttgtggagtgaagctgaccgtgatggcgatggtgttattaactacaaagaatttcagtgcatctggagcccaaactgctgtagtcaagaggaggaggatactgaaattgacatcactgatgaaagtctggacacttttgaggcaaacaacgaagccttcggcttcaccgtgaaggaagctgttctctttcccccagaagtagagaagggcatgtggccagaaaactacagcctctcagatcatgctcccctcactgtggtattctcccctattagaatgccttgctctccacgcaatcgtggggagctctagctatctaatgtcaatgatctcatgtatacatatacatgccccacgaaatcgttgttagatttggtggggactacagaggtttggatggggttaaatcactaacaagtcaaaatcttcctcaaaagaaaaaaaanaaaa

SEQ ID NO: 274999 - DNA, 420 bp, Zea mays
gggccaacccacgcttcgagcaaattccccaaccaaaatttaaccatttcccacaaagcaagccgtaaaggtccgccgaccccaacaatgcgcccaacaccgacatccggatagcaaggcgcctccccggccttcacggtccactttgctggtatacccgctagacacagtcaaaacgcgcatgcaaagccccgactacaagaaactatacacaaatggcgccgacgcaaaagtcagccggtcgatgtttcgcggcgtataccaaggaattggaagtgtaactctggcgacattgccttcttcaggagcattcttcacgacgtacgaaggagtgaaatctatcctgaaagacaaaattctaaatctggcaatggacacttgcttcgtcaacagtcatccactcagttgcctctgcaaccg

SEQ ID NO: 275000 - DNA, 412 bp, Zea mays
agcccacgcgtccggacggcccagggcatcggttgctggccggcgctgtggggacgcgggcgccggccagccaaggcttgcagctgaagctgaaagacggccgccgccgcgcgccaccaaccggagtccgaactccggagaagcgagcttgctttctttcatgagctttcgttcttgaatctacagcagtctacaaccgacctcagaccccctgctacctgcacctctgtaaaataacgccgtcgccgtcgtcgccctctccctttctggtgtgcgtgtgacgcagcgatctctgtcgcagctcttgacgtctgatccgtagctcctcccgctttgagccggcgcggggcgcgggcctcacgttccagctgccgcattgcacgtggtcagagaaagcggacagaacagaaca

SEQ ID NO: 275001 - DNA, 498 bp, Zea mays
  unsure (1)..(498): unsure at all n locations
accacgagtccgcccacgcgtccgcncacgcgtccgcncacgcgtccgcncacgcgtccgcaagcgacggcgcttgcacaagatgaaccagctctctctcctccaccacctacatcggctgtctcccggacgcggccatggcctcaccgccgcctcccccaccgtcgtccgagctgggctctcctcctgtgaaccaccaaccccgcagcagcacgcaaaacgcctccttgccatagcgcctcacgaaagcatcgcagcagctagggaggaggagagccacttgcgtcaagagctcgctgcagcgggcaataataacgaggccggcggcggcaggacgaggacgtgcgcgctgccgacgtgggcgctcatcggcggcatcacggtgggcgtgaccgtggcgctggccctgtccgcggggccaggccccgccctggcgctggggccagagggccccctgntggaggagttctgggacaacatgcggcggtacgcgctgta

SEQ ID NO: 275002 - DNA, 556 bp, Zea mays
agcggacgcgtggggttctctgcaccttatgtttgcagctctgctctgttcagtgggaacgggtcagggggtagatacatcagtaacgggaagctgttgtccagacggcctcgtggaatcgattccaagaagaggctctggactaacgtccttcttgctcttaatgtcctggcttatgtcgctcaggtagcatcacaaggaaagcttctcatgtggggagccaagatcaacagtctgattgatagagggcaattttggcgtttggcaacatcatctctacttcatgcaaatctcacccaccttgcattcaattgtttctctttgaactctattgggcccatggttgaaatgttaagtggtcctagaagatatctagctgtttatttcagttcggcgctggcaggttcactgatgagctaccgttttagtgcgtcacctgctgttggtgcgtcaggtgccatttttggattggttggagcctatgcagtttatatgtggaggcatagaagattttttgggaattctagagagagtttagaacatattgggcgtgtgg

SEQ ID NO: 275003 - DNA, 324 bp, Zea mays
aaaaccacccgcgctccgccaatccagagagccagccagcccgagctcacacagcagcgagctcggtcttctcgccaggacacgaacacgaccccagcaggcggcaggcaagccacgctctctcgacgggcggacgttaatcgagacatggggcgctctccgtgctgcgagaagatggggctgaagaggggtccgtggacggccgaggaggacaggattctggtggcgcacgtcgagcgccacggccacagcaactggcgcgcgctgcccaagctaagcaggcgggcctgctccgctgcggcaagagctgccgcctccgctgga

SEQ ID NO: 275004 - DNA, 338 bp, Zea mays
agcactgttgtcgcactgctcagttatccctggcggtgtgccggtgaccgagtttgcaattccaccctcagcatcttcgctagcggtgaggctgccatcgttgctcgcttgtcgacgctcttcaaggaaacacgtggtacatgggcaagttcgtcgtgcggcaacccgcgaagctgggcaaccagatcgccatcgcatccaccatggtaggtcttgtggagtgcaaggtgtacgcgtacaaggtcggtctggatgtgatcaagttgctggagcgcatgcagattcgacaagaggggtggtagctttggaagttgagatgagcttgcgctgtggagaac

SEQ ID NO: 275005 - DNA, 435 bp, Zea mays
atggcatttcttgtgatacaccacatcagagaagtgcacccatagaaacaacaccaggaagtgaaacagttgttgacgattgcatacaccacgaagataccagcagcaaaccatcagaggaaaacaaagctattgaggagccagaagaggtgagtgccaagctgccagatgaccatgtaacttctgagaagtcgtcagaggaagacaaagaaaacgcagaggcatcagtagacagtgctcccctggggaacccattggaggtcaatgaggagagctccaatccttcaggggatactgtaactcctgagaagccactggaggaggataagacgagcgcagagccatcagaaagcgatgcatcctttgggaaaatattggaggccgatgaagtgagtgcaacccatcagaggatattgcaactcctgagaagccact

SEQ ID NO: 275006 - DNA, 731 bp, Zea mays
ccagcctaaacatcaccgagcataatgacatccaagacaagatagcaatcaaccaaatcaatgctttccagctcattggaatgtcctcctgccttgatctatccggattttttgagaaagaggatgtttctgaaaggaaaatcagatttgcatcaaattattccccagcttatttatttgagaagattgagagcattgtcagaaaaatggggttccaggtacataagagcaacggcaagctaaaagtgatccaagactgcaagggactagcaaattcaagagggcaagagtcattattaatttctgctgaggtgtttgagatcaatgaatctctttatgttgtcgaactaaagaagtcatctggagactgctccctgtacagaaagttgtgtgagacgctctcggaggacttgggcacatgcaaaagccagcaatttttaaagcaggattctatcagacaagatataggtagatataatagtagcttttaacaaagagaccccttgttaaatagcctatagacacaaactaacacaaacaatatactgaatttaaaacagtatattgtccatgcacctattttaaatgtgctctcttatgccttttgtcatgaaacctcaaggatcttagtttatgacaaattggcatctgacaatgtattgagctcctaagggataatatgatgtaaacaagtaaactccccatataagagattcagagttccctggtcc

SEQ ID NO: 275007 - DNA, 435 bp, Zea mays
agcccacgcgtccgcggacgcgtgggggaaaacaagtcaaatgcaactcctatcaattacagcgagaaggatattacagtaatattcagaaggaggggtggttgtgatcttgttcaaagttttagtgattggaaaggaactgttgcctcagcaccagatgtcataggcatcacctttctatcaattgtctctcttgttgacgatataccaggaaagaagcaccttgctcgtgcagttgagctatacttgacctacaaacctccaattgaagaattacagtacttcttagattttcgagtcccactagtttgggctccagctccaccaggtattgctggtcaccataggaaagaaccagtctgcccatcgcttcagtttagcttaatgggcccaaagctcttcattagcacagaacagatctctgttggccgtcga

SEQ ID NO: 275008 - DNA, 746 bp, Zea mays
aggaactttatcattcactgactcataattgctgcatgttttgtataatgagtttttggttgatggagctcgggttgtgggtaatagatgcatccagtcaaatcgtgttcacttggggaagggtacatggattttgtgctgaacacaaacttacaaaggcacatgtcttaactcttaatacaagttttgcttaatgacttcatgtgagtaccaatgtttatagcaaactttggtgaatattcacctttcgcatatcaattcttagtttcaacagattagcatgtttcatggacatggaatggagaagatctaccccctcctgattctaaagctattagggatatctgtgtactgcctggcgggcatgttgttattgcatcactaagcaggaagttcccttttcaggtctataaagaaagtgtgcaagttctattcttcactgtttttttgctacatttactgaaatatgacctttgttcatatgatctactggtaattcttcgacctttcaatttcacaaaacttgcaactatttttatgctctgcatcctaccaaaagtatacattgtcgttctactacttagacctaggtatgagcaagtctgttgcatttctattctttctactacttatacatgcactgcattatgtatttaacttttaagaagatcaagcaagtgcttggtaatcaaagcacttgtttttgatagagacatgcattctttttccttaaattgattttaaag

SEQ ID NO: 275009 - DNA, 370 bp, Zea mays
cggacggtggggtttgacgatcggttcatgcgcccggtgttcggggggcgaggtttcgtcccctttgtgcctggttcgccggtggagaggagtgtccctgaatctcacctgggcactgtgacggaggctgagggcagttgaaatgaggcaagagggatgccgacaattttctgtagatcttcagacagataccactcatactcctattttattttcagaatccactggtgcgaattgttctttgtagtaccttgtgcatatagttttatatagagctgctacacaagctgctgtaaatttctgggaggcactcccaactgtggattactgcaattcatctgtaaatttcaatcttgttcaagaaaaatga

SEQ ID NO: 275010 - DNA, 456 bp, Zea mays
acccacgcgtccgcccacgcgtccgcccacgcgtccggtcttcggacgctgcctccgcgccacacagaaaggaaaaagtatctctctctcccgcgcgcgcgggtgagccggggaccctcctacgtctcgccaccctgctggtatagcccgccggtcgtccacgccatggccacccaatatgcgcggctctccctgccatgccgcctgccctcgccgctccctccgccggtgccgacgacgacccgccggctgccgcgcgccgcggcggcggcggcgtccacctccccgcggtgcccacgcgtcgggggcgcggcggccacgcgcgcccgcggcccgtgccggcctcgcgcctccgagggcgaagtgcatcagcaggaggcggaagcggaccaggtggtggacagcaacatgctgccctactgcagtcataaccgcaagtgagaaaatcagcatcga

SEQ ID NO: 275011 - DNA, 454 bp, Zea mays
gggtcgaggcgacgcgtccggctagctactaccttattacctctctccggtctccgcagctgtaggcggcggcggcggcggccatggacttcgtgctccaggtcctgctgcgggtggtgatgagaagaagcatccgcaggctgcaagatgtcgttgacatcgccgtggacatcggcacggctgtcttcgtggccgtgcgggtctccggcctcgtcttccgccgccggctgcccacgccgactacgacatcgtcgtcgtcgacgacgtactactactccccggggacgtcctcctcgatcggcatgcatgtccaggaggattaattattgacaggcactagatgagctagctagctagctagggccaaaagatgtatacttctcgcgggggggcatgtaagtaacaaagtcatatatctgtgcgttcttttttgtggaatcaaactaatttcgct

SEQ ID NO: 275012 - DNA, 899 bp, Zea mays
ttgtcctgttcctttgaactttgagaaaaacgatcaactgctttgtggggaaaacgagtttgatggatcatcaaggctgtatatgctagatcagactcgagccaaaacagaagagccaatgcatccttcaaatgtgaagatggctactactacaagacatactcctgggaatatgctgtgtgatagtttctcaggtgattatcagcttaggtcagggggggatgcatcgggatcagtccagcaagcacctaagtacagaagactatgcaaatatggtgacaagatcaaaagagtctcttccatatctttggatggctgtgatgataggtttgaagaatgcaatattgctaataaagataggccaaaccaaataaaacatgctatggggacaaaaaggaagaccaagaggcgtctagatgcctatattgacgaggaagtcggggtgtctgaagatgcatatgtttcagaggatgaggatgataatcagagtgaagataaatacgaagatagcttcattgatgatcaggcaactccaactgaatttacacaaactgaacaaggtgatcgacacaatggtgacatgatgggtttctacaggcaatcgttgtttactcagtccccagtagttctaccctcaaggtaccttgatgtttcttacaattctgcttctcggaccggaaattcaagctattcttcagaggccaggcacaattacactgagactcccaaagagattcaaacacatcataccataaacccaagcccatcgtacagttttgtacaggatcgatgtgaaagagggatcgccaattgtgaatcatcgactaagctggattgcagaaagagaaggctaagcttccagcaacctctggcgatccctgttataaaccttgaaccag

SEQ ID NO: 275013 - DNA, 571 bp, Zea mays
aatgattaagataggagattattgttgaggagagagatcgattattattattgctgctactgcatatgtttagtgggtgtataggttgggaacacacattcatggaggatggaaccacacaccgatcaattggagggagaaagagattgttcgggtaattaattgtaatatatatagagagagacaattgagccacatacatatataagctattagtgcagtgcttgctgttgggtactcggtcagatgattgggtatgcgtatacatgcctgtgaaaaattgtggagccatatgtcatgtatctttcgtacctaactacgtagtaggtaggtatatagctgagttacacactctatattgcctgtcaatcttgcttttgtatgcatgtagtacgtaggtctacctatctgaatggggaacatgtgattactgatcaactgtctgagcacattacctgaccttactatgccatgacatgcagtgtcacaccactttgtggtttacacggatgcctagatggatttcttgtggccctgaagcaactgttaccaggggtggggctttctatgg

SEQ ID NO: 275014 - DNA, 477 bp, Zea mays
gagcgtgaaacggaggaaagaaggataagaaaatggaggaagacgataggtgttggtggtaatgactggaagcattatgttagaaggaaccctcatgtggttaaaaggcgaataaggaaaggaattcctgattgtctcagaggacttgtttggcagttgatttcaggcagtcgggacctcttactaatgaacccaggggtttacgagacactggtgatatatgagacatcggcctctgaattggaaattattcgtgacatatcacgcacatttccatctcatatattcttccaacaaaggcatggtccaggccaaagatcattgtataacattttgaaagcatattctgtctatgacagggatgttggatatgtgcagggaatgggatttttagctgggttgctgcttctttatatgagtgaggaggatgcattctggttattagtcccattgctaaagggagctgtccatgcacca

SEQ ID NO: 275015 - DNA, 620 bp, Zea mays
atgattgggatgatagggggcatggtgattcagtggctccatctgccactgttgttgtcaagggactgtccctgaagactaatgatgatgacctatataagattcttgctcagtggggacctctacgcatgtgcgtgtgatcagggaacggaattctggcatgtctcgtggatttgcttttattgacttccccactgtggaagcagcccgtagaatgatggaagctacaggagagaatggtctcgaaattgatggcaggaatgtgttctttcagtacagtaaaccaaccggggggatgggtgggccttctcttggacaagaaaattttacgaggcctacttatgggcacaggactgctgctgcaccgtgtgactggatttgtactatatgcggatgtatgaattttgcccgcacgacctcctgctttcagtgcaatgaacctcgtactgaggatgctcttccagctgatgcgacaggttccgcttcacactttgggagaaggggatctgaactaggtccaactcatgttttagttgttcgtggcttggatgaaaatgctgatgaggaaatgcttcggtacgaatttgctaagcacgcaccattaaaggacatcccccttg

SEQ ID NO: 275016 - DNA, 487 bp, Zea mays
tcgcacaaggacggcgcgatccggcgcgccgcggcggagtgggaggccgcgccccgttgcttcccgctaggcaaccccgacggggcggccctcacgatggggagctcgcctcggttcccgatgtacgacgggaacgacttcgggtggggccgcgcgctcgccgtgcggagcggccgcgcgaacaaattcgacggcaagatgtcttcgttccccggacaggctggggacggtagcatcgacgtggaggtgtgcctcgcgccagacaccatggcgcatctcctcctcgacaaggagttcttgcagtacgtgtcctcccctgcaccgtgaggcggtgacagagtgaatgtgtggcttgttgctgcgcagctacatatagtaactggatttgtaccctttcagcagatatcaagcacttgatatcggcaatttaacccccttgtacacaaattgtcctacaactaactctaggatatataggtgcatttgg

SEQ ID NO: 275017 - DNA, 348 bp, Zea mays
caaccagttgcatatgcattttgtgcctactctacctttaaggcattcatttataaatggagtattctaatttgcagcagcaggcagcgtccttgaaaaagaacctctttgatcagggatacttggatgagcaattttgtcagattgaggacttgcaggatgaagcaagccctaattttacagaagaagttgtttccctgttcttcaagaactcaaccaggctaatgacaaatattgagcaagctatggacaggaatcccagagatttcagtaaatgggatgtaaacatgcagcatttaaaaggaaccggttcaacaaccggtgcttgcaggatgaaaaacgattgca

SEQ ID NO: 275018 - DNA, 525 bp, Zea mays
  unsure (1)..(525): unsure at all n locations
accacgcgtccgcccacgcgtccgcgacgtccatcctgcacagccttgaagggatgcctgacctggactggccgaggcttctgaacctccagtcctgcgacggctccttcttgttctctccttcggctaccgcttacgcgctgatgcaaaccggtgacaagaagtgcttcgaatacatcgacaggattgtcaaaaaattcaacggnggagtccccaatgtctatccggtcgatcttttcgagcacatctgggctgtcgatcgcctggagcgtctcgggatctcccgctacttccagcgagagattgagcagtgcatggactacgtgaacaggcactggactgaggacgggatctgctgggcgaggaactccgacgtgaaggaggtggacgacacggccatggctttccgcctgctacggctgcacggatacagcgtctcgccagatgtgttcaagaacttcgagaaggacggggagttcttcgccttcgtggggcagtcgaaccaggcggtgacggggatgtaca

SEQ ID NO: 275019 - DNA, 436 bp, Zea mays
gacagatggactgattgggtagctgttggcaagctagttacccattattctttccactccacctcgcccgtggcccgtacccgtcgtcgtcgtccacacagccacaagctgctgctgctgctgcgcgtgcttcctcttcagttcagctgaggtagcggcgcctcacccatcccccccgctacatacacatatctccttcttcgaagaactcggccctttgggagcgagcaggagccggagcaggaccgggcagatcatatcagaagctaggggatatggcgaacgctggcggcggggcggccggggaaggggagtggctcaaggtcgcccagctcagggccctcgtccaggcccaggatgaggaccaccgcgcaaaggaggtggacaacctgacgctgcgtcggttcctgcgcgcgcgcggccacaacgtggacaa

SEQ ID NO: 275020 - DNA, 476 bp, Zea mays
  unsure (1)..(476): unsure at all n locations
tgctaaagcttatgaaagttgatggtttgactatatatcatgtcaaaagccacctgcagaagtaccgcacagcccgctataaaccagacctgtcagaaggtacatcggaaaaaaggacagccactgaagagctggtcctggacctgaaaacgagcatggatcttactgaagcgctgcgccttcagatggaagtccagaaacggcttcatgaacagcttgagattcagagaaaattgcagttgcggattgaagagcaaggaaagtatctgcagatgatgtttgaaaagcagagtcaatcgagcacggagaaagtccaggatccatcctcaagggatacaacagctaaaccgtcatctaatcagagccagtctacaaacaaggatantggtgcaaccatggacccaaatggaacaggagacatcgcacggacggcagaactgggaaaacgttcgtctgaactaggtgtaaaacagaaa

SEQ ID NO: 275021 - DNA, 436 bp, Zea mays
ggacgagtcagacgtccacatctgccacatcggtgaagtggtgtcgcggggaccatggcgcctggcctcctcgccggcgccgccgtcgtcgtgctggccgcggtggcggcgtcccgcgcggcccacgtcgcgctcaactgccccgtgcacccggcgccgtcgcatcgcccgccgcccactccggcgcccaacaacctactccagaggccggagacgctcggggaaggggcgctggacgccccggaggacctgtacgtggacgccgcggcgggcggcgcgctgtacacggccaccagggacggctggctgcagcggatgatgcaccccaacaacggctcctgggagcggtggcgcttcgtcggcggcacgggcctgctcggggtcgcgccgtccgccgacggcaccatgctcgtctgcgacgccgacaaggggcttt

SEQ ID NO: 275022 - DNA, 773 bp, Zea mays
caactcccgtcttccttcttcctcttcctgttcgaatccaagtttccttcccaaaccgccaaccccccaccccaaggaaggaaccctagtaccctacccgtgagaaccgccgccgcacaaccccggacgtggtggcaggcgaccgatccggatccatcatcccaagcttcctttctgtctcctcttcatccatctccacaaggataatcaaggaaggaaggccatggttttgttcgaacttgacccggacatcatccgatggggtcttcaccatctcctccccgctccggctggatactctcctcattgtcgcacccaaaccacccctaccacaccttgtacagcttttgctcgccctcctcatcagcccatcggagacatgggtacctcaagctccgttgagatcaaggtcgagcatgtcgatggggttgacaacgacgcgatcatcgcacaagccctccaggaggaattgtccaatgtcgccttcgccgcagcgtccggagccaacctctgccgctgacaatcaacaacattctgctgttctcacgcagcaatggcttcgcccacgcgccgtgcatgtagaaccagcttctcaagaggcagggaccagggaggaacctttcagcacctgctcaagccctggagatgacaataacgtccaggacagccagcaatgcttgatagagctcatggataacttctctgtcattgacggcgaagtgggcaaaagattgaacaacatggttcctgttcctcatgttccctaaactaat

SEQ ID NO: 275023 - DNA, 596 bp, Zea mays
cccacgcgtccgcccacgcgtccgcccacgcgtccgcgcgttcgctggcctcttcttcctcttccgccgcgcgcagggcgggcccggcgccgggcctggtggcctcggcgggcccatggacttcggccgctccaagagcaagttccaggaggtgcctgagacgggtgtcaccttcctcgacgttgccggcgcggaccaggccaagctcgagctgcaggaggtcgtggatttcctcaagaaccccgacaagtacaccgcgctcggagccaagatccccaagggttgtctcctcgtcggcccgcctgggaccgggaagaccctccttgcgcgtgccgtcgctggggaggccggggtgcccttcttctcctgcgctgcctctgagttcgtcgagctcttcgtcggtgtcggtgcctccagggtgcgcgacctcttcgagaaggccaaggccaaggcgccctgcattgtcttcattgatgagattgatgccgttggaaggcagcgcggtgccggacttggtgggggtaatgacgagagagagcagaccattaaccagctcttgacggagcaggatggcttcgctggcaacagcggtgtca

SEQ ID NO: 275024 - DNA, 420 bp, Zea mays
acccacgcgtccgcccacgcgtccgcaccaagggccgaactcaaccaaccatcggccccatttgaagccccatgaatgaaggaaatgaaggaaaaaaagaaagaaacgcagttgtttctcagagtagttgaatgtctggagggaggctgcaatatagctgtctgctaactaagggcttcgttctccaagagaaataggcagacgctgtctaatcaatcatgggcatgtacatatgtgcatcattttatacagaaattttatatgtatctaatcaatgctggtttgcggtcatctggtcctttttggcgcatcacttgctcaccttatcccaatttagggctgatttgttaacaatagaattagatgggatacatgagaggaaatccattactatttaaaattaaataacaagggattttc

SEQ ID NO: 275025 - DNA, 696 bp, Zea mays
agctggttcagttgttccaaattactccttcatcccactgagtgaagaaagacgaacatcatggatttccaggttgcaggcacagctccttttgctcttcttgaggtcaagggcagaaggcattcttaaagaatattatcctacaagaactgaacgggtggacaagccacttctggaccagattgtaagagcttcatatgatcctggtgctgcaaaagtccttgagagtgtattcaacttcaatctttcaattcctcttaacttcttatttgattcttttggagggaagatattagttatccagggtatgaaagacccccttacaaaatctgaggcatttgtcaccatgctccgagaacattgcagcaaggttcaaatcagagagttaaatgcaggtcatgctccacatgatgaagttccagatgaagtaaataccatactatgtaaatgggtggagcagattgaagttaagccagccctggagaaagaccaaggcaatataggtaacatttagaattatggacaccctatccattggttgattgtttaacatgatcttcaggagcaccttggtacattttcagtgacctaccaaaacttgtgtgattaaagcattgtgaattgttagccctatacaaattgtgattaaagtattgtgaattgttagctatatacaaaacttgggacattttcttt

SEQ ID NO: 275026 - DNA, 920 bp, Zea mays
gttcgtgatctccgacccggaggtgctggtggtggagaggaaggacggcgaggacgagttcctgatcctggccagcgacgggctgtgggacgtggtgagcaacgaggtggcgtgcaaggtcgtgcgcacctgcctccggaacagggcgccgcgcggtggccgggagcagtcgagcccgacctccaacctgagccctaggcagagcagcgccagcggcggcagcagcagcagcggggacgaggaggctggtgggcccagcggcgacggcgcggggtccgagagcgacggcgagagcgccgaggacagggcgtgcgccgaggcggccatcctgctgaccaagctagcgctggcgcggcagagcgccgacaacgtcagcgtcgtcgtcgtcaacctcaggcggcgcccgcgatcgtgatcggtggtggtggctctgtgatggactagccgttcttggttggtttggttttctggccccctccgtaagttcaaatgggagcccggttcaccttcgcttcggcagagcaatcatcagacaagatgtcaaagcgaagatcgaacaaaatgtgagatccttagcaaaattgcatgctacttccttttacagtagtacagcaggactattgtttcgttagcgttttttttatgggtgggtggagggtgcgtttctgatctggtcggacagatcatcccgcctttcttcccccggtaaattctccaaatagaaaagcgcatgcgtctccgatgtttgaagaaactttaccgtgcgtccgagagatttaattgtaatatatagtccagtgcccctttcactagccaaatgcccaaatccttccaaccttctctgactaagatcgtgatgtgctcctccggttccgtgtttcatgttttatataaataaatttgacccaccatgattgacc

SEQ ID NO: 275027 - DNA, 550 bp, Zea mays
gtgggcccagcggcgacggcgcggggtccgagagcgacggcgagagcgccgaggacagggcgtgcgccgaggcggccatcctgctgaccaagctagcgctggcgcggcagagcgccgacaacgtcagcgtcgtcgtcgtcaacctcaggcggcgcccgcgatcgtgatcggtggtggctctgtgatggactagccgttcttggttggtttggtttcctggcccagttcaccttcgcttcggccgagcaatcattggacaagatgtcaaagcgaagatcgaacaaaatagtgagatccttagcaaaattgcatgctacttccttttacagtagtacagcagcactattgtttcgttagcgttcttttttcatgggtgttggagccttggagggtgcgtttgtgatctggtcggacagatcatcccgcctttcttcccccggtaaattctccaaatagaaaagcgcatgcgtctccgatgtttgaagaaactttaccgtgcgtccgaagagatttaattgtaatatatagtccagtgcccctttcactagcc

SEQ ID NO: 275028 - DNA, 541 bp, Zea mays
cgtccgacaacacgtcggccaacccttccggaattatttaacctaacataacaaccaaaatggcaacggaatttataacaaaaccaaccaaaaatgcccctggggcaacaacaaccctccaattgcttcgggtccaaacatttggttatggatgtggcagttaacaatattgcacatgtcaagagtgaatactttcaaaccaatggacactattgctctacatttgatgttgccattgccaaggtttggcaagctaggacaagggcaatcaagtacgaaccaaatttcaaggtgcatgtttgcttctttgccaacactcgccacctcctcacacatgtgctacccaaggttggtggcttctatggaaattgcttctatccagtgactgtcacagcaactgctgaggtagttgctagttcaagattgcttgatgtgattaggatgataagggatgggaaaggctaggcttcctttagagttttccagatggtccacgggcaatgtgaaagtagacccatatcaactaacattcaagcacaat

SEQ ID NO: 275029 - DNA, 447 bp, Zea mays
tcggatttcgtcggtcgggcgctacgtcgacagtcgcacagccctatgctagacggggctcggatgcagctacaacttccatcagatgcaatttcctgagtttgcccgtggagtagttaaacctacaatagcacctatatgggcacgggggttaataccaaacccacctaaaatgcctcctgggccaccaccatccttcgagtgcttcgggttcaaacattttgttatggatgtggcagttaacaatattgcacatgtcaagagtgaatactttcaaaccaatggacactattgctctacatttgatgttgccattgccaaggtttggcaagctaggacaagggcaatcaagtacgaaccaaatttcaaggtgcatgtttgcttctttgccaacactcgccaccttctcacacatgtgctacccaaggttggtggcttctattgaaa

SEQ ID NO: 275030 - DNA, 465 bp, Zea mays
cgacccacgcgtccgcccacgcgtccgtgattgctcatctattcaatacaaaatgaatggatgtgcttgacaccgacagaaaggagagcttcctccaggcagaacagcagtcagcaactcaggtgctgggcgccctttccccgacctagagattgagagcgagctaaacgagctgcggaggaaagccaaggaatattaggttcattccttgtcgattcagcaggcctgacggaatctcatttccaagaaaatatagtgcagctgcagattgctccattgcgcgtttcgaaagttgaaacacaagtgcgcattgactgtttgttaaagagtatggaatcggctaatttctcggcattttccccctcgagtgacatttgtacagctatccataaaattgttgtaaatcactactctctctagagcctttttttcatactatatataaagtcaaagttcgaagttccc

SEQ ID NO: 275031 - DNA, 549 bp, Zea mays
aaaaagttatggcgatggaatcccaagcggaggcactcggccaattagcaactgacgatctagaaggaaagtttgcactgctcgagaattcatctgtccatgctgatctttcacagctgaaaaaagaactctcgggcagctctttgaaaggggagctcccatcaggcagaagagcggccagcaactcaggcgccgggcgccctttccccgacctagagattgagagcgagctaaacgagctgcggaggaaggccaaagaatactagagagtagagactctccaccaaccatccttcccgggcctgacagaatctctcatttccaagtacatatagcacagctgcagatttgctccatcgcgccttggaaagttggaacagaggtgcgcctttgactgtcactgtcaaagggtatatggagtcgccgagtttctcggcattttcccgtcgacggacatttgtacagctagccataaattgttgtaaatcactacgctccctagagcccttttttttgcgtactacgtatatagtcaaagtttgaagtttc

SEQ ID NO: 275032 - DNA, 436 bp, Zea mays
gggtcgaggccgcgtccaggggaaggcgggcgggctggtggttcgggcggagatgtttggccagctcaccaccggcctcgagtccgcctggaacaagctgaggggagtcgatgtattgacaaaggaaaacatagctgaaccaatgcgggatatcagaagagcacttttggaggccgatgtaagtttgccagtagtaagaagatttattgagtctgtaagtgaaaaggctgtaggcactgatgtgatccgaggtgtccgacctgaccagcagttggtgaaggttgtgagtgatgaactggtacaactgatgggcggggaggtatcagatttggtgtttgcaaaatctggaccaactattatattattggcaggtctgcaaggtgttggaaaaactactgtttgtgcgaagcttgccttctatctcaaaaaactgggc

SEQ ID NO: 275033 - DNA, 782 bp, Zea mays
cccacgcgtccgcccacgcgtccgcccacgcgtccgcccacgcgtccgcacatatgtgcagatggaactacaatactctccaagaggtacagcttcatggatcagcatttaggaccttcttggacatagctggtgacaacttaagtggcaagatttttactgaggcatttgatgcggtctgcttcccccttacactcttctcaagtttatttgaacctggatggtcttctgggagttcagcagtctccattaagggccttttatcattgctggtggaaggaggcgctgacaatgtaaatcagtgttttcttgaagcagcgcgctttggaagtactgaacttgtacgcattctgctgaaggtcgcatatcagaatagcttggctgtggacaccgatctggctctggtgtatgcctcacattactgcaagttcaaaacaatggaatgcctagttgatgaagggaacgtgagttctttccttggccctctgataaaagctgcagagcgtgggtgcttgcaggttgtccactggttcgtcagtcgaggcgtctctgacattgagatgtgccttgccctgacgactgctgcctccagcggccatttcgtagtggcgtcgtacatgcttgcacatatccctcagcagatccttgaagctctcagcacacagatcctcaaagccgcgagcggccacggcagcaggccgcttgctggtgtccactatcttctgcgcatccacttcctaagcgcgcagctgcaacatatgaggacgcagacatcattgcaa

SEQ ID NO: 275034 - DNA, 1191 bp, Zea mays
  unsure (1)..(1191): unsure at all n locations
gggtcgagcacgcgtccggcacccatcctgtcgccgcccaagtcgcccccgtcggagtccccgccattgtcgcccgacttccgccgtgggtgctggccgggcgccgggtcccccgtcaacgacgtcctcgcctcgctccgccagctccgcctcagcagggccaactcgtccccgtcgggcgggtggtgcggctaccctgcatccgcggtcgcgtacggatcgcctacggggggcgcgatctacggcctgtcctccaccccgagggccaccgccgcatccggctacatggccaacctggaccctctcgacgtcagcttcggcggcgacgaggagcccgtggagagggtggagtccggccgggccctccgcgccaaggtgttcgagcggctcagcagggagggcgctgtttcctgctacccagctgccggaaccggtggccccgacgtcgggtgggtctccgacctcatcaactgaggcggcttcggcggcgggtcggtgctgcatagcagtggagaaaaggtggtggtaactggtaagccgtaacagacaaggatggcataaaaaaaaatgttcccctttggttccagataattccgctaattaccctgtacatagatatctatcgccctgtgaatattctcggctggttgggtggagggctgatgctagggggtggatttgttttggggttcttgaggtagcggaaaatttccaaggaaaagaaaatatgtaaggaagtgtagatgtcgtaggcggcggcggcggcggcggtttgtgccctcttgtgtgctgcgaagcatggcgagggccgacggtgacgacgaagactggccggatttccagctttggtgttcctgtgattccgcagcaagttcagtttgatgttgtttcaagttgttccgtcgtctgtgcactatgcatccggccggctagttggcgattgcaacctgcttgtggattactaccccccattttgttgttgatgttgatgtaatctgtttattaagacccagcattcccctacagcttattttgttgtacttactatatatctttagtaggtgccgagatctaagttcacccgctattggaggtgaacttgccgtgtaatctttggatcaagtaaatggtttaatgtcttacgcccaaaaaaaaaaacaaaaaaaaaaaaaaaaaaaaaaaaaaaanaaa

SEQ ID NO: 275035 - DNA, 537 bp, Zea mays
tcggacgcgtgggtacggcctgtcctacaccccgagggccaccgtcgcatactgctacatggccaacctggaccctctcgacgtcagcttccgcggcgacgacgagcccgtggagagggtggagtccggccgcgccctccgcgcgaaggtgttcgagcggcttagcagggagggcgctgtttccggcgacgccggtggccccgacgtcggttgggtctccgacctcatcaactgagcgcggcggcggcagtggcaataacaatgggcacggagaaaggtgatggtgagccgtaacggagaaggatggtacggagtatccaaaaaaaaaatatttccctatatttaatttcgttcctcagttaattccgataatccccgtgtacatatctatcaccctgtgaatattctcagttggtaagagggaggatgctagcggtggtggaagtggaaggaggggtggatttgttttggggttcttgaggtagtggagaatatccaagaaaaatagaataaaaaagtgtacagtagatgcattat

SEQ ID NO: 275036 - DNA, 408 bp, Zea mays
atcgcctacggggggcgcgatctacggcctgttctccaccccgagggccaccgccgggggcgggtacatggccaacctggaccctctcgacgtcagcttcggcggcgacgaggagcccgtggagagggtggagtccggccgcgccctccgcgcgaaggtgttcgagcggcttagcagggagggcgctgtttccggcgacgccggtggccccgacgtcggttgggtctccgacatcatcaactgaggcggcggcgggaccctggcatggcagtggcaatggcaataacaatgggcacggagaaaggtgatggtgagccgtaacggagaaggatggtatccaaaaaaaatatttccctatatttaatatccttactcagttaaatgcgataataccgggtacatatctat

SEQ ID NO: 275037 - DNA, 619 bp, Zea mays
acggacgcgtgggttatgacgctattgaattagagacaagaatttccaagctaaaagaatccatgtgcaatttacacagcctacaaatgaagttgaaggtacctgaggatgaaccactgcaaactaacatcagggcatctctactgtggtccgagaaagaaagttttgaagagtataatgagtcttttatccctggacgcccagaacgtctctcatttgctgcgtaccaaacagtttcaggcatgtcagatgaagaacttctcactgtgcaaaactacaagatacaagcaatggattcgacagacacccttgaaaggctgaacactggtatcaagtttgtagaacataacatcggaatgatagccgcaaggcttgccattcaaaatatatgatcctcattggcagtgtttagttcatatgctaaatgatgtccgtgatgctaactccatctggtcgtaaaaaagaactcaaagcttttcaagtttcaactgtaaacgtggaaggtctgatctggtacattcggataacttctgacataactttgatatacattcagagaacagtacgaagatgaagaacacaatatgaagttgcctgctcaaaaaaaaaaacacaacat

SEQ ID NO: 275038 - DNA, 792 bp, Zea mays
aggaggcgctagtcgggaaggtcaacaaaaaccttgtttccctcatcaacatcgcgggaggcaccgccattggtctgtgcggcaaggacgcgcgccttatcaccgctcgcccgtctccaaatgcagcggcgctgggattcgtcggcgaggtttcgcgcgtggacgccaccgtcctccatcccatcatcgccgcgggccatatcccggttatcgccaccgttgccgccgacgagactgggcaagcctataacatcaatgctgatacggcggctggcgagattgccgctgccgtgggcgccgagaagctgctgttgctcacagatgtgtctggcattttggcggaccgtaatgaccctgggagcctggtgaaggtggtcgacattgctggggtgcggaagatgggggctgacgggaaggctgctggtgggatgatacccaaggtggagcgctgtgttcaccccctggcacaaggtgtacacaccgcacgtatcattgatgggcgtgttccacactctcctctgcctgagattctcacagacgagggcacaggcaccatgatcactggctgagctgcttcatgccttcatgaaacgggctgagaagcgaactctgtggtggccagaaaccgattctgacggccagaagccgatccaaacaggcccgatgttggattgaataatattttttgaaatgcttgatcgtgaacatcagttgtccttcaggcaaggtttttgcacattaatgagaattgtccaagttatgtgccatcctactttggttactgctcacgat

SEQ ID NO: 275039 - DNA, 383 bp, Zea mays
aaagtacatggagagcggcggcggtggcggcgtgagggaccaccaccaggacggcggccggtactcgctgttcgcgccggggccgtacgggcagttcaccacggagcccttcgcgttcgctgggaacggcggggtgtcgctgacgctcggcctcccgcacggcgccggaggcagcgccgagcagaccgcgtcgttcctcatgggcagcaccacggccggcgacagcggcagccacggcgccgccaccagctacgacatgaacatgcagagcaccaagtcgttcgcggcgcacctcatgagggacttcgtggcctagctcccttaggacgcatagcatagcagtcgtccacgcaattaatcaaatcatctctccatcgatcaat

SEQ ID NO: 275040 - DNA, 621 bp, Zea mays
  unsure (1)..(621): unsure at all n locations
cttcttggtagctgagatgctccttctgtccgtcaatgcattgcattgcatggctagaagcgttatatctaggaggcaaaagcaggaggagactggtgggaggggagtagaccatcgcctattcgattctcactacttgtccatgctgcttaaaagaatccctctggtcctgattaattagaagctgtagttgtccttgacttgcaaccatgtatccacagatggtatatcatgcagatgttcgggcgagggagaaggagttggcggcggcggagacggagacggagaccatgggctgctgctcctgcgctcccttgggcaggatgatatccagatgtatcatcaaacgcaacgtaggaagagaacggcgcatgaggtacgacgagaggacgggaatggactatgccatggcgtacgctcccccgcagacatgctacgtgcgcccaacagacgcgcgcaccgtcaccttggccaccaccaacgcccacgccgaccatccggatccacacccacagcgagcgcacgcagcgacgaccatgccgcttgaaccggcgggcggcgccccttgccaacgcgccggcatgcagncaccgcgcaagcccaagangaagaagaagaaga

SEQ ID NO: 275041 - DNA, 541 bp, Zea mays
ggggtgaagcccgtgcagtcaccgggtccgttcctcgccggtatggagccgagataccaatcggtgtccagggaggacatactcggggagcccctaaccaaggaagaggtctccgaactcgtgaaagggagcctcaaatccaaacggcaactcaatatgggcagggatggtttgacacacaatatgttggagaacattcattcacattggaagaggaaaagagtttgcaagataaagtgcaaaggtgtctgtacaatagatatggataatatctgccatcagctagaggaaaaagttggaggaaaagtaatacaccgccaagggggtgtcatatttctttttcgtggtagaaactacaattacaggacccgcccatgttttccgcttatgctctggaaacccgttgcacctgtgtacccgcgccttgtcacgaaggtcccaggtggcttaactccagatgaggccacagaaatgcgcacgagaggacatcagttaccaccaatttgtaaacttgggaaaaatggtgtttatgccaaccttg

SEQ ID NO: 275042 - DNA, 407 bp, Zea mays
gacttctgtggactcggcggccagctacactcacatcgcaacgcaaaatcaaattgttgctggcagaagtgcataaattgaaggtgccgatgcttaagcaaagcagctcagtgtttatacctcggaacttagctctgtagataagaaatgcacaacattgcccatgtattccgccttttttgagaggaaagctcgtggaatctatttgattttttttctctgtactaccaattacaaagggttgtaggtggagctgtggaggccagagcgggcaaccgtgtggcttaacattctaccacgcctagcactctagcaggtttcatgaagtctactacggtggtgaatcagatcgcccaactgttgtgttgtaggagcgagtatgtgctcgttttgtcgcacaaagatgt

SEQ ID NO: 275043 - DNA, 462 bp, Zea mays
  unsure (1)..(462): unsure at all n locations
aggacgcgtgggcggacgcgtgggcgccgcatagaataattctggcgaggatgacgagctcctttctgaactaaaagataagtgggatgcaatggagaacaagtcctctcttgccttgtatggtgctggagcaatcctcgctgtctggatatccttggttgtagtgagatctctcgactctgtcccgttgctcccaggcatattggagctagtcgggctcagctactctggatggtttgtgtaccgatacctgctttttcaggaaaaccggaaagaattggccggtgttatcgatgatataaagagaaggattgttggcgatgatgaatagctgtttcctggtttggtactctatttatctcgccctgtttggttctgaggaattgaaaaataatccaatggtgaagtgagaaagcactntctagttattggttntaattcatggngtccaaacaggctcct

SEQ ID NO: 275044 - DNA, 443 bp, Zea mays
  unsure (1)..(443): unsure at all n locations
aagtcggtgcacaagagcctggacctgagcccctacgcggccgtggaggaggaggacgaggcctaggatcagccggaggtggaagagaaggagccggcggccaaggaggggtcggagccgtccttcgacaaggacgagctgtagactgtagtcggcgtgcgttggtctcgtcttcgggatctcttttgaagtctagctgtagctcccgtttagttgagatatcggggaactccactcactgccagctttgtgtttaggaacgtgatacgggatcgtctttcttttttttttgttgcctgtctttgttactttgtacaaacttcagttcagtgactcggtctaattaccggctccgattagtgaactgtttctgtctgattagtaagctcaccgacanccatagggtggccggtggcgctccctcccttctaatttaacttgta

SEQ ID NO: 275045 - DNA, 946 bp, Zea mays
ttctactggcaactgataggtttctggagtaaggttcgcagctcatgactcctgagcggcgcaaagccgtctgggcgatctacgtgtggtgcagaagaactgacgagctagtggacggtcccaacgcgtcctacatcacgccgaccgctctcgaccgctgggagaagcggctggaggatctctttgagggccgcccgtacgacatgtacgacgccgcgctctcggacactgtgtccaagttccccgtcgatatccagccgttcaaagacatggtccaaggaatgaggctggacctgtggaagtcgaggtacatgaccttcgacgagctctacctctactgctactacgtcgccggcaccgtcggcctcatgacggtgcctgtcatgggcatcgctcccgactccaaggcctcgaccgagagcgtgtacaatgctgctctggctctcggcatcgctaaccagctgacgaatattctcagagacgtgggcgaagattttgtttgctgtcgcggacggaatgaagatgcgaggagggggagaatataccttccgttggacgagcttgcgcaggcaggtctcacggaagaggacatattcagagggaaagtgaccggcaagtggagaaggttcatgaagggccagatccagcgtgccaggctcttctttgatgaggcggagaagggcgtcacccatctcgactctgctagcagatggccggtgctcgcgtctctgtggctgtacaggcagatccttgatgccattgaggcaaacgactacaacaacttcaccaagcgtgcgtacgtcggcaaggccaagaagctgctgtcgttaccgcttgcatatgcaagggctgcggttgcaccatgaaccatccgtagatcacatcttttttttcttttcgtttccaaacccaccttgttttgcccacccttccttttttttttttt

SEQ ID NO: 275046 - DNA, 597 bp, Zea mays
cagaaagtgatgcagatgggtcattgttgcatgagcattggaactctgatcttaggcttttcagttacgatgagaatggggcttataatcttcttcagctacttttgatccgagcagagtcagagatactgcgccttccaggtgagacgcaacaagcactccagacgctggattctatcaagtcacagatgaaaacagccttccaagggcacattgaaagaattaacgggaatacgtcgttggaggtatcacataatcaacagcatcaggtgcgtggggaggtattcacacctaagcatcccagcttgaggaagggttcttgggctgatgttaaatacaaaggtgagtggatgaaaaggccaatctcagaggctgaagctagcctggcttgcaaggattctgatccggctctctgactggttgaatgacgccctggggcttgagtgtgctgatgctgaaggtagtcctgctggcgccacctacattcagtttgatgggaacacgacggtgggcgggccaagggatgctgcgagaatggctctcggtgctgtatgttcattcatggtgctagtggggcaagcggtactgaagttgatg

SEQ ID NO: 275047 - DNA, 1102 bp, Zea mays
cagacgagtgggcggacgcgtgggagcgtttactcctaactagtttgccgatcgagcccgggcgacgtgagatacgagcggcgtcgaccggcgccggcgagcctccgcagccgcagccgcccgatctgggttttctttcgtagcggtagcggaagatgagccaggaccaggagaacggaggcaccaacgggcagcacgccgccgacgtgatggaggtggagccgaagcgccgggcgccgcggctgaacgagcgcatcctgtcgtcgctgtcgcggaggtccgtcgccgcgcacccctggcacgacctcgagatcggtcctgaagctccggccgtcttcaacgtcgtcgtggagatcaccaaggggagcaaggtgaagtacgagctggacaagaagacggggctcatcaaggtggaccggatcctctactcgtccgtcgtctaccctcacaactacggcttcgtgccccggacgctctgcgaggacaacgaccccatggacgtcctcgtgctcatgcaggaacccgtccttcccggcgccttccttcgcgccagggccatcggcctcatgcctatgatagatcagggagagaaggacgacaagatcatcgccgtctgcgccgacgaccccgagtaccgtcactacaacgacatcagcgagctctgccctcaccgccttcaggagatccgccgcttcttcgaagactacaagaagaacgagaacaaggaggtggccgtcaacgacttcctgcccgccgccgctgcccgcgaagccatccagtactccatggacctgtacggccagtacatcatgcagaccctgcggcggtagagcgtgtcctaccagatcccatgcgagctgagctgacgcaagagcacagatcgacagaatccttgtggtctcgtctcatgcatggatagccaggtcacatggcttgtcgacgaccatgcatctcttcttcccagcgattttagcctgtatcttcccttatttatagtcttttgggtttggtggaatctgtccacagtgtggtttgatctatgtactcctcttctacatttctaccagaacgaatcgatcagattaatcccaatgtttctcct

SEQ ID NO: 275048 - DNA, 610 bp, Zea mays
  unsure (1)..(610): unsure at all n locations
cccacgcgtccgtggatacacaaatttggtatacaatcttctccactctacttggtggaatttacggtgctttccaacggctcggagagattcgtactctggggatgctgcgatctcgctttgattcaatacctttagcctttaactcgtgcctaattcctgttgaaacatctgatgcaaaaaggaagaaaggtctgaggtcttacttacacaatcgtttcaaagagatggaacatgctgacaaggagaatatagcagcaaggttcgcacaaatgtggaatgaaattgtcaccagctttcgagatgaagatcttatagacaatagggagaaggagctgctacttgttccttatgtgtctgatcggacccttggtgtcgtgcagtggcctccatttttgcttgccagcaagatcccgatagcagttgacatggctaaagatagcaatggcaaagaccgagatccgagaaagaggcttgacaatgattattaatttaagtgtgcaattgaggaatgttatgcatcatttaagaatatcatcaatggccttgttcaggggtaaccanagaaaagggtcataaataagatatttgtagaagttgaaaaatgcat

SEQ ID NO: 275049 - DNA, 833 bp, Zea mays
tctggctgaagttgggtcttcaggagcacctggtccaaaaaataccccttggtcaaaagaatcaagaattaagtgaggggatgcttcgctttgatacacctagaattcttttcaagggccaggttggatggcttcgtgaccatgagtttgctcgacagactgtggcaggagataaacccagttagcatctaccaggctcacgggtttcccaccagtaagcaagatggatcctgcaatctatggcccgccagaatcattcgatcacagaagcgcacatcactggacagctcaatggactcacggtacaacagcgcggtggacgaggcaaagctgttcatattggactaccatgatgtatatatgccattcctggaccggatcaatgcaatagaggggcggaagggcgtatgcaacccggacaatgcttgtttcttaccaaagctggcacattgaaaccgattgctattgaacttagccttcctccgagcaaggcaggcgagccccggccaagcaaggtccttactcctcccgctgatgctacctccaattggctatggatgcttgccaatgctcatgtcagctccaacgacgccggtgttcaccagctcgttaatcactggctgaggacacatgctgtaatggagccgttcatattggcatcgcatcggcgtatgagcgcaatgcacccagtcttcaagctcctgcacccccacatgcggtacaccctggagattaatgcgctagcactgcagagcctgatcagcgcggacggtgtcatcgagtcttgcttcacccctggtcccgtctccttcgagatcagcgctgcatactac

SEQ ID NO: 275050 - DNA, 1084 bp, Zea mays
gtggagcttactgaaggtggcactttttggttgtcggaatcaccatcggttccaggaagcggttcatggggagcaaaggcaccctgcattgcaacatgggcaacgtttcaactcaaaagactagaaccacctggattcagtttccagatcgtaaatacaaatcttgatgaagttagccctcgtgctcgacgaagaagtgctttacttacatggcaacatatagcatcgctgccacccaatttgcctgttatctattgtggaggcttcaatacacagaaggaatctatgactgggcggtttttgcttggcagatccagagaacatggtgttgttggtgatatgagagatgcttggccaaatgctcgagtgcgaaaaaatgtttcactaatacacacatatcatggatttaaaggggagaaacaaggtgccctggaatttcttaaattgatatttagagctctttgcctctgctgggatcgacagacacaggacttgcatatcgactggatcttgtttagaggacgcccattggttcctgcactttgtgaggtcattaatgacaatatagatggtgtttatccgtcgtcgcacttccctatctttgccgagtttttgcttccacgctcagtccgcctagctgagacacctgcatagctattgtgtcaattttttgttctatttttcccaatcttattttgattacggctgattgtttctttcgaccactttcaccatgatcttgcggtaacccccctttacaaccattgttgggtttctttctgttatcccattccgcaaaacaagacaatgcacatgtgcatccttgtatgtttcctgtcactagtccctattatgtgttcgccttagctttgttatcttcttaaagttcactttttccttatgtcattgatttttagactgtcatatataccgtgtatatatatggtatgaatatgttgtcacgtatagtcggccgatccttgtatatgttataccgttatatatgaagtgtgtatagagatattgggagatttcatttggttctgtttccataaaccatgagatctctcctctctttatatat

SEQ ID NO: 275051 - DNA, 671 bp, Zea mays
ggtccacgcacgcgtccgcacacgagtccgcggacgcgtgggcgacgcgcagtcgcccattccgcatctcgccctcccgtcccgtcccgtcccggccgtccgttctccgattggccgccgcccgcctcgccctcctcgtcaacaaaagcccaccgcaagcgagcgagcgagccaccctccccgccgccgccaccgcccccgtcccgcccccaccccgactcctcctgaccgccggcgtggggtgcccgggctccacctccggcgacgacaccctccccgccgcgcgcgcccccaccgcctgctccggtttgcgggggtagccggggctccggcctcggcggctttcaaagccccctccctcacaacaggatccaaaatcccgtcctagacttcttctacctccccttccagaacttcctcttttggcatcccggacggtcgatctcgacccccttcgatttcgattcatctcttcttatcgattgatcttttttctagcttatttcgtaaactgtcattttgattccttccttcttcccgccgccggtagctaatcacaaatcccaatcgaatcgactcccccctgttcgtaggattctcttcctccgtccgcacccagctaacgccaccgaaaacagaaaatttaccaacaacccaaaaaaaaaaagaaa

SEQ ID NO: 275052 - DNA, 490 bp, Zea mays
cagatccaagaaacgcataacggttcgcttctccggctgtcctcgcatggcgctcggcagacccgttgcttctcgtgtgcgcgtaggctgattccgtgtgcctgctccttgtctggatttcttagggcgtggagccagttgggccagggaagatttaaccagtcgggcccggaaggagcctaagggttggatctgatgctaccaggtcgctgagcatcgctactgaagggggcagcttctgattccggcagatggctcctgaaatgatggaggaggggcaatcagcttcctataccgtggatgacgctctcttgtcatcaggttttgggaggttccagatattgattctttcatatgctgggattggcttaattgccgaagcgatggaaatgatgctgctatcaatttgttggtccatcagtacagctagaatggaagcttacttctcatcaggaaagcatgattacaagtgttgtttttgttgggatgc

SEQ ID NO: 275053 - DNA, 1229 bp, Zea mays
cccacgcgtccggtttcctggcccaccgcgcgagcctgcccatggatacgaacgagagcggacgcgaaaccttcttgtggacggatgcgaaatctcaggccacggccacaccacacccctctcccctccctccaccttctccctcccacgccggtccttcttgagcgccgcgagtcgctcgcccgtgtccgccgcacactattccatgtcagccggcgtccgccctctccaccgagcgctgcatcaacgctggccacgccgcggggcagaagcagcagggcagccacagccctgacgccttgcgtcgaccttggaccctcttttggcgccaacaataggaggaggagcggagccacgttccccgcgccgccgctcctgtcccggatgctgtcacccaccacgcggccggcagctcggactgacgagagatctggcaccagcccggagaagcccctgttgcgccggtgggtactacgggcgccgtcgggaggatctacgtggttagggttgcagtccccaagtgcgatgagatctagaacgccatctccgacggtgaggctgagctagcgcccgtgccggtgttcgtgtttatggattttgtggatttgaggatgctcgtagaccttgtgcaccgggtccggaacgatgtcggcgggaggtgaagcagagatgaaggagctgcccgaggagcttgcctgcctcgcatgcgaaacatcggcccaagtggtggcggcgggacctgccgcgtcggcaccgcttatgtgtcgcatgtgagcttcttttccgtttgtctgccgacactaggacctcccctgcccccacgagatttgtatctgtacctgactacgatgaggagtacaatgactgtgatgatgatgactatgatggaaccgaatatggcatcaaccatcctgttaatatggggaaaggaagaagggcgagcccatcaagctcgtcttcaccggcaagaagaagggaatcactcccgtcgcctccttcagcgccctcgacaaggagggcgaggaccccaccccgtctgccgcagccgagccgaagcccagcaacgatccacccgaggacgacataagcactttataaaaaataattctcacaggtggaaccttgttgcattctacagatttaggcaaaatccttacgggttgccttttgatttaactaccattcaaattaccaactcttgaccagatttattagttccaattgcggtc

SEQ ID NO: 275054 - DNA, 1171 bp, Zea mays
tacctaccttttcacacacacacgccccggggggtcggttggggcacttaacccgctctttcctacactgccgtttgactttccgaccggggaatcggcgctgcgtttgatttgaggaggcgacacgagacgggacgggagggatctcttcgctggagcgttgcccgattcgtcgcggttctcggacaagggagggagggcacacctcgggctccgatcgaagagctttgttaacattagagattaaaaggtagcgccgtagcaaaatgaaggcaccatcactactggttcagtgtttccctggcttgcttcccagcaaggccactagttgcgtgccaattgtatctgagaaggatctgcagctaccatcaccagctgttgaaataatcccctcaaagagtgttcatccatacaaatatgctggagagaaggttgatgtgcaaggtcttaatattttcaagggtaaagtcagtgtagcagatatgatagttatctcaccttctgaagtagcatcatcaaaatatgatggaactctgaaatactgggagagttccattacccttgtcgacattcttaaaaatgagatccgtgatgggcagttgagcttcaggggcaagcgggttctagagcttggatgtggatatggcctctctgggatttttgcctgcttgaagggtgcatccacagttcactttcaggacataaatgcagaaacgatacggtgcagaacaatacccaatgttcttgcaaatcttgagcaggctcaggaccgacagaacagaccatcagagagccctgttacaccatctaggcagctcttggctcctaatgtacatttctatgctggagagtgggatgaactcccaacaattctctcagttgtgcagccacctgcagcaccaacaaacctcagcttctctgaggatgattttatggatggctgcagtagccatgatggaagcagtgtagttggtcatgactactgccccaggagatctaggaagctttctggtagccgtgcatgggagagagctagtgagaccgaccaggcagatagtggctatgatgtgatcttgatttctgatgtcccctacgcagctaactctctgaagaagctctatgcgcttatttcaaagtgcctacgtcctccttatggagtcctgtacgtcgc

SEQ ID NO: 275055 - DNA, 787 bp, Zea mays
  unsure (1)..(787): unsure at all n locations
gcaagtcccacggcggtggcaggcgctgctcgtgggggcaccctggctcagacctcgggtctggtggcgctccctgcgaccggctggcgagaggcaagaaggggctgtgcgaccggcacaacccgctggtccatgacaacagcgtgcatgggggtgcgtcgttcggtggcttcagtgtcgtcagtgccgccgccctttctgagggagatggctctccatctccaggcaccgagacaagcatgcgcagtctcttcatgcacgcggtggaggctcctcgctgtgtggcggcctcggcccatgaaggccgggtgcatgggggcaacttcatgcctatcatgctcgacggtggcgtgggactcgggaagaggccggccgacaacgctgatgctggtgcctctgcccctcctcgcagctggaaaagtatggagaaggcctgtggatctgcgccgcgcagctggctgtagtatttgccagaagttcgtgacctgctcacagctcactctctccatctgggtctcctctgctcctgctccaagtgtctcccgtgtcctctggtcatgcgtggtatggtatgataacatgaactgtgtgtgtactggttggtcaggactcgggacttgtttggtactgtggatattgtggttgtttgtgctcttgtagcataggtctggtcgaacatacctactagtaacagtcgtcgtgtgcggtgtgtgattgaattgtaaatgaaaggaacgcctcgtcatgatacanataaaaaatagtacctttcctcgcggcgcccgcc

SEQ ID NO: 275056 - DNA, 965 bp, Zea mays
tccgtcttgacagctccactcctaactccagcgaccaccgcgtccccaccatggccgctcgccggagcactagccccgcccggcacggcgtcctccccgccctccttctcatcctatgctcgtccctcccttccctcgccgccgcataccgcccaggcgacatcgtcccgatgctccgctcgggccagtaccacggctcgaggtcggtgtggttcgacgtggtggggcgccattgcccggccttcgcggtcaaccgggaggtgctgatgccgatcccaaagcctacggggttcactggtgctgatccgtacaagataacatttcaaattggacatgaaaagttccatgttccttggctttatgttataaatcgcaaaacctctgaagttccactgatcgatttccatttgaagtactctggaaatgatatacttggggtgacagctaaagttgtggacatgcctcaccactacgtggaagttcatcctgacataaagaagaatttctgggatccacagaattggccaaaatacgttcttgttagatatacatgggaggagcaatcagagatagatgttactggaggattttatgtgttatttggatccgggcttgttttgtccttcattcttgcaatatatgtcctacagtcatctcaagagaagttgacaaggtttgtgcgagaagcagttgcagatagtagcctcccagatggagttgcaaaggtcgagtgatgacctgtctacgatgagctgtcttattacccactaatttctacactgatcagaacctcaagttttctaacagtcaactttcttagctgcggaacgagtaatacaacagagtagcatacatatgaagagctagtggtttatttgattctcttgtgcatgctcttaaaccaactttgcttatatggtggaagtgcataatttcatttccaggcaggagttttggtgcttgct

SEQ ID NO: 275057 - DNA, 536 bp, Zea mays
agatgatgaagtcatgcgagcagcgggggagggacctcctgaaccagaacgtgataacggccgcggggctggcggagtggctgaggggggcgaaggagggcgggcaccacgagaccgtgagcctgggcctgccgtcctactcgctgctgtgcaccgtgctgcagtcgatcagggccgggtccgggggcctggtgctgggcagcttcgaggtgaaccagcacaaccggccgcaggaccggctgctggactggttcttccaccccgtgctggtgctcaaggagcagatacaggcgctgaggatgaccgaggaggaggtcaggttcctggagaagctgaccgtcttcgccggcaacgtcgcgggcgctggcgctggcgggtgggagaacggcgccgggatgatggtggtgccccaggaccctgtgaggctggcgcagatccaggccataagtagaaggctggttgggattgtgaggagcctgtccatgttcccgacgtacaggaggaggtacaggcacgtcgtgaagctgctcatcgcc

SEQ ID NO: 275058 - DNA, 406 bp, Zea mays
agagaaaagattcgcggcggtggagtcggagctcaactcatcaatagggtttgatcagcgctccgctcgtgctagccacccagcccccccgcgcccacttgcgacggcgatggcttcgccgtactcgctcagctgggccgacgcgccgccctaccactaccacgggagaccccagccagcgcccgactcacccgcatcctccgacggggccgggccccgctcgctctggatcggcggcctgctgccatggatggacgaggactacctctacggctgcttcaccacctcgcgcgagcttctttcccttgtcatcaaacggaacaagcagactggccaatcagagggctttggcttcctcaaattttctgaccataccggcgctgctcatattctcaagtcttacaat

SEQ ID NO: 275059 - DNA, 417 bp, Zea mays
acgcgtcagcccacgcgtccgcccacgcgtcggcccacccgttcgcccacgcttccggactatttctagaatcgcgagcggccgcccttttttttttttttttttttttttttttttccctggatacaaacaagtccataacacagtgatcaactaaaatttactaccattgtcgttgaaccaattagcagtaccatcacatatagaagttcaaaattgggactctttcttgttgagtaacagaattgcaaattcagctaaaataacttcgagttctctctctatttcatactagagcagcagcggagaaactgcaaccttaaactttcggcatgccatcacaacgcgatgctctattccagcaatgcaaatttgggcggacttggtcccctctgagaccaaaggagagaagcatcc

SEQ ID NO: 275060 - DNA, 723 bp, Zea mays
ggaggcgccgctccggtggctcaacggccgtgcgccgcgctccgttgtgtatgtcaacttcgggagcatcacggtgatgtccaacgagcagctggtcgagttcgcgtgggggctggccaacaccggctactacttcctatggaacgtacgcccggacctcgtcaagagtggcgactccgccgggctgccgccagagttctcagctgcgacagagggacgaagcatgctgtctacgtggtgcccgcaggcagctgtgctggagcatgatgccgtgggggtgttcctgacgcactccgggtggaactccacgctggagagtatttgcggcggcgttcccatgctgtgctggcccttcttcgccgagcagcagaccaactgccgatacaagtgcaccgagtggggcatcggaaaagagatcggtgacgatgtacagcggggcgaggtagagtcgctcatacgggaggccatggagggggagaaagggcaagagatgctccggcgcgtgactgaactcagggacagcgccgtggccgctgcagggcctgacggacggtctatgcgcaacgtagacaggctcatcgaagaggtgctcctagcctagattgagcactgctgcgcatcctagcagtcatgtgtcttcgcgtctggcactccaatcgattcaaatcctttgtgttttgatgtcaagcgtttactttcggtacccataaaagtattttctcg

SEQ ID NO: 275061 - DNA, 1038 bp, Zea mays
aatttccgggccgaggctcgacccacgcgtgcgcaccaattctagcaaggcagctctgcagcttttgtagcgagcttcttggagccttgaaatgagtagtagtggtagcctagccaccacgagtagcaagtaggcactataggcactaggaagtagctaaagcagtcataaccatgggttcgctgccgccggtggacgggcagagacgccccccacacgttgtgatgatcccgtacccggcgcagggccacatcacgccgatgctgcagtttgccaagctcctccatactcgcggcttccacgtcaccttcgtcaacaacgagttcaatcatcgacgccacctgcgtgcgcgagggcccaacgcgctcgacggcacggatgggtttcgcttcgccgccatcgacgacggtctcccgctctttgaagcggacgccacccaggacatccccgcgctctgccactccaccttgaccacctgcctgccccggtttaaggatctcatcgccaggattaacgccgaggctgaggccgagggacaacccaccgtgacatgcgtcgtcggcgacagcaccatgaccttcgcgctccgcgccgcgcgagagctcggcctccgctgcgctacactctggaccgccagcgcctgcggcttcatcggctacttccactaccgccacctcgtcgagcgtggtatggtccccctcaagaacgaggagcagctcacggacgggtacctagacaccatcgtcgactggatcccgggcgcgcccaaggacctgcggctccgggacttcccgagcttcgtgcgcaccacggatccgaacgacgtcatgctcaacttcttcatccacgagacggtgggcatgtcgcaggcgtcggcggtggtcatcaacaccgtcgaccagctcgacgcgacgctgctcgctgccatggcgaagctcctgccgcccatctacaccgtgggcccgctccagctgacggtgcggaacaacgtgcaggcgaacagtcctgtcgctgctatggggtccaacctgtggaagg

SEQ ID NO: 275062 - DNA, 880 bp, Zea mays
tgctgatgtgtgcagaatctgagaaagtgccatctgatggaagttcctgttggatgtttaatctaattaactttgttttttatgaagtagcatgaagctgaatatagtccaacagtgcaaaagcataggtctttcatttgagcttgctggtcaacttgtacagagagtgatcatattccttctttttttacgttgattacacccaattagtatatatagttgcatacccacttggatgatttagttagtgaggaacacaagtgaagatgagctttgcactgttcaatgcttgtgcttggaagaaggatgctcttgcgcccgcagttcattgttatctggaaagtggcttgctactgagcattctcttactacatgatgtaaattgtgaatctccatcaaggctggcttatggctgaagagtcagtatcatagtttcctttgatgggagaggacagcaaagccagctaatctcgctaaccaagaaatcggctagtagttttttcccttttgaaccttgtcatgatgccttgtcttctggataaagttcacgcaggtttcaaataagaaatcacatggacgactatcagacttgtatggaatatggatgctgtacaaaggtttctaatgtacattagtctaacttttttttttcgtgatccccgaaatgccgactatcaccagcgcatgtacatgtatatatacatacactaaaggttggggcatttttaccacgtgctggtctctatgtatgacgcctttggttccgtccaacttttagtctttcacatttttgaaattttgtgacattctagttttttgttaggatagcgtctagtactgggaatttgttgcagaatgcaaaataaattcagtgctgtac

SEQ ID NO: 275063 - DNA, 873 bp, Zea mays
tttgctctgcaaatactactccacttatatcagcagctatgagaggccatattgaagttgttgaacttttgctggaacaagatgactttggattggtggaaatggccagagataatggaaagaatgccttacattttgctgctcgacagggacatactggaatcgtcaaagcgctacttgagaaggatcctcagttagcaagaagaaatgacaagaaaggtcaaacagctcttcatatggccgtaaagggaacaagctgtgatgttcttagagccctagtggatgctgatccagcaattgtaatgctgccagataaaaatggcaacacggctttgcatgttgcaacaagaaaaaagagagcagagatagttagtgttcttttgcggctaccagatactcatgtcaatgcactaaccagagaccacaagactgcctttgatatagctgaagggttaccagtatgtgaggagtcttgcgaaattaaggatattttatctcaacatggtgcgctcagatccagggagctcaatcagccacgagatgagctacggaagacagtgacagagataaagaaagatgtccacacacagctggaacaaacaagaaaaaccaacaaaaatgttcatggcattgctaaagaactcaggaagttgcacagagaaggcatcaacaacgctacaaactctgtaactgttgttgctgtgctgttcgcaacagttgcttttgcagctatattcaccgtacctggtggaaatgacaataatggacttgcagttgttgtccagactacgtcctttaagatattcttcatcttcaatgctgtggctctatttacatcattggcagtggtcgtagttcaaataacagttgtca

SEQ ID NO: 275064 - DNA, 680 bp, Zea mays
agggaatgcctgagggaggcaaagagtaacgggattatcaatggtggcaatgtggagagcgagctctccaagcggtggagagcacagaggatggatgagcttgatgtcttgagccggaggctgaggttgctcgtcgagtatgctgcagcggctgggcattgaagcttagattttggtggttttggtgatgtgcctcccaccatttgcccctttgttgtgtatagaacctacgttattgtgctatgctttgtaatgtcttcctcagctggacccttagaaagcctactatatttgcctatgtacccctcgtgtttaatagtttgagcagcgataataatctatggtgttagcactgttaaaaaaaaataaaaaaaacaaaaaatgaaaatatagaataaaaaaaagaaagaagatatgaaagttctgacaatcaatgcacataatagaatcagaaatacatgatgcacaccctgattatgggagattctgcactagtctgactaaatgaccctgacgatggaataaaatacacattaagcatgtacataccttctatcaatgatgatactaaccttaaatgatacagaatagatatccatttgcaggcaataaaactcgagacaacaactacttaacatgtcaagatggacattaggcaatacgtaaacgatgatatgata

SEQ ID NO: 275065 - DNA, 746 bp, Zea mays
agcccacgcgtccgcccacgcgtccgcccacgcgtccgcccacgcgtccgcccacgcgtccggggctgcctgtcgcacatgctggcggactccatccacgcggacgtgaccatcaacacgacggacggggtgctgaaggcgcacaaggcggtgctggcggcgtgctcccccgtgttcaagagcatgttcgtgcacgacctgagggagaaggagtcgtcgacggtggacatcggcgacatgtgcgtggagtcgtgctcggcgctgctgggtttcgtgtacgggacgatcgagcaggggcagttctggaagcaccggctgccgctgctggcggcggcggacaagtacgggatcggcgacatcaaggactgctgcgaggagagcctgctggaggacataggctcgggcaacgtgctggagcggctccacgtggcgtggctgtaccggctggagcggctgaagaaagggtgcctcacctacctgttcgtgttcgggaagatctatgacgtgagggacgagatgcacggcttcttccaccacgcggaccgcgagctcatgcacgacatgttccaggaggtgctcagcgtgtggaagcccatgtgaatggaagtgtccctttccacgcgagctgtgtgtgtgtgtgtgtgtcgtgcttgttcagtcacagtgtgtggagagcatgctggttatgcatatttgaaacgaaaaggatgctcagaatttgaatggaagctaaattatacatgatg

SEQ ID NO: 275066 - DNA, 357 bp, Zea mays
gtcgatgcgatgccccatgggcgttttacgattgatgttgagtttctagacctgaggatagccacgaacaatgctacggaatcgtcatcggtgtggccaaacgaaggcatggtgcagaagatcgcgagcaagagcgccctgggctgcctgtcgcacatgctggcggactccatccacgcggacgtgaccatcaacacgacggacggggtgctgaaggcgcacaaggcggtgctggcggcgtgctcccccgtgttcaagagcatgttcgtgcacgacctgagggagaaggagtcgtcgacggtggacatcggcgacatgtgcgtggagtcgtgctcggcgctgctgggtttcgtgtac

SEQ ID NO: 275067 - DNA, 416 bp, Zea mays
agcccacgcgtccgcggacgcgtgggcggacgcgtgggtggacggcggcggcatgtccgcgatacaggggagccgccggctcgcgcacaccgatcagttcaggttcctggacaaggcagcgtcggtggagccatcggacgacaagtcgcgtccggcgagcgcgtggcgtctgtgcacggtgacgcaggtggaggagctcaagtgcgtgctccggctgctgccggtgtgggcgagcgggatcgtgttcgcggcggcgtacacgcagatgaccaccaccttcgtcctgcagggcgacacgctggacccgtacgtgggcggcttccgcgtgcccgccgccgtgctctccgtcttcgacacgctcagcgtcatgccgtgggtgccgctctacgaccgcttggtggtcccgctggcgcggc

SEQ ID NO: 275068 - DNA, 687 bp, Zea mays
gggactgattatgggtctgtaagagtaggcacttacatgggccgcaagatgatcaagtgtgctgcatccaacctactttcagaattgttgctctcgtgtacgtctacgcaaccaggcgactcaagtcccgacgaatatgaaggacatggcgtcgacctcctgaaatctgaagcgtcaatggagtatctatgcaacttaccaccacataggtatgaagctgttttcgcgaaagaaattccggagacgatcactggcgatgcgtttttagagaagtatggagaccacaacgatgcggtaacagaagttgacccaaagcggtcttactgtgtcaaggctcctactagacatcccatatacgagaacttccgagtcgaggccttcaaagcgttgctaacagctgccaaaacagacgagcagctctcagcccttggagagctgatgttccagtgccactacagctacaacgcttgcgggctcggatttgactgcacatacaggctagtgaatcttagttcatgaaatcctgtacatgtagagctttatctcctcttttttttcttttttgtcttttatttttctattctttcttttttttttattatttatcttttttcgcttcttaattttttttttttctacttctttctctcctttcttatttactcttcttctcttttcttcttttta

SEQ ID NO: 275069 - DNA, 364 bp, Zea mays
caaggctcctactagacatcccatatacgagaacttccgaggcgggccctcccgtgcgttgctaacagctgccaaaacagacgagcagctctcagcccttggagagctgatgttccagtgccactacagctacaacgcttgcgggctcggctctgacggcacagacaggctagtgaatctagttcaagaaatccggcacaggaagagctcgcgcgccggagggcccagcctgttcggcgcgaagatcaccggcggacggtccggcggctcggtctgcgtgatggggaagaactgcctgaaaagcagcgaggagatcttcgagatccagaagaggtacaaagcggcgactgggtacctcccgact

SEQ ID NO: 275070 - DNA, 475 bp, Zea mays
ctactctccggccttcctccgctgggcgctcaagccgccgtccttcttccgggcctggcacatcggcgttcgcgccaaggagtccaagaagctcgtcgccttcatctcgggcgtccccgcccgcatccgcgcccgcgacgacgtcgtccgcatggccgagatcaacttcctctgcgtccacaagaagctccgatccaagcgcctggcgcccgtgctcatccgggaggtcacccgccgcgtccaccaggagaacatctggcaggctgcatacaccgcggggatcgtcctcccaacccccatcaacacctgccgctactggcaccgattcctcaaccccaagaagcttatcgatgttggattctctcgccttggtccgcgcatgactatgagccgcacggtccggctatacaagctgcctgatgcgccgctcacccctgggtttcgcaggatggagctgcgggatgtccctgcggtc

SEQ ID NO: 275071 - DNA, 759 bp, Zea mays
ctctactacgcctcggaatcagaggaacccgaacggtggaagagtacgcctcggaatcagaggagcagcgaggaagctgaaggaggggcgaatctaagcccaattgaagcatgagggcgtcgattaatcgtcccccgacgccgagcgcggaggaggatcgggacaagcagccttctctcggagagatcattaacatcaagttggtagagactggggagaaggagaagctaatggagctactccgcgagcgactcgctgagtgcggctggagggatgagatgaaggcactctgcagggcatatgcaaggaagaaagggagaaatactgtgacagtagatgacctcattcatgttattactccgaaaggaagagcatccgtgcctgattcagtgaaggcagaactcctgcaacgcatccggtccttccttatgtctaccacacttcggtagtcatttgtcgcgacggttggagcctatatgtaccattgtaggatcattgggaagtcgatcttgttggggaccaaagggtgcaggaaagcagtgcgtaggggaatattgtgagcatgaaaagaaacagtgtgatcttcatgacactgtcgacatgttcctcgtcaggcgcaggcggttggcgtaatttcaggtgtaccaatagagttgtaagttgtaacccctgaatactgtattgttaaagcaaccttcccccttgtaatgctacattgtactataactgctcagcgctgatgcttaatttcccaattag

SEQ ID NO: 275072 - DNA, 446 bp, Zea mays
atttcctgtcagtttctctcctttgcagaactccatcaagcagctcgagagtgctgccaccaaaatttacaaagagaagaagttgctgcaagcagaaaactggagcctaaagacaagtaagtatacgctgaaagtcagggagataaacgaccggttgatgatggccgagcgagcgttcaccaaccgagaaggactggtcgggagaccatggtacaagcatatgatatatgcatcatcggatcaagacgactgggggaccaaagccttccctggtatagtctcggccatggacaaggctaagaagtccaacacaaccgagacgtggcgactgctgcagcacgagatttacagggttgccagggctgtgtccaaggcttctgcagtcctggatggtaaactaacatgatgtgcacgtgcactgcagattttcattccattctacatag

SEQ ID NO: 275073 - DNA, 531 bp, Zea mays
  unsure (1)..(531): unsure at all n locations
cccacgcgtccgcttgagaacgtgtacatagatcccagcaacgtcgacgactacctggtcggctccatcacggcgccggcggcggaccccaacgccggcgaggtgtactacaggctgatgtcgcggttcatgtcgaaccagagccggtacacgctggaccggctgctggggaagatgtcgtgcccgctgctgctgctgtggggcgacctggacccgtgggtcggcccggccaaggccgcgcggatccaggagttctacgccgacaccgccgtcgtgcacctgcaggccggccactgcccgcacgacgaggcgccggagcaggccaaccgcgcgctgctcgagtggctcgcggccctcgacgcccgcgccaagtcggccgagcccagcctacagaccgtctgatggatcgagcgcaaggggcttagcgtatgctagtcaaagaatataatttggtggcctatatctatagtttgatgtagtatgtcctgtantangaacagtaatttcttactgtgagttagtttacggttc

SEQ ID NO: 275074 - DNA, 729 bp, Zea mays
accacttgcacatgctgtcggcgcgggtaatctgtcactacacgttagaggatccttcatttcgttacgtgtttcctcattcctatgaccatgttgatcagtggttgagaagccaagaaggtgactgcaaggctataataaatttgtacaaggagcagttgcttcaagcactgcaggctgataatgagttgaggaggattgcacaggacatctcaattcaagggaggtataaaagccgtttcagtactatgaagaagctagtaaaagatggacggaagccagaagaagttaaagacattctaggtttgagggtaatcttggagcctcggtgtggtggcaattcatctgattggggccctagggcttgccacaggacacatgaaattattcaagctatgtggaaggaaatcccgggtagaacaaaagattatataactcacccaaaacgaaatggttaccagagcttgcatgtggccatcgatgtcagtgaacctgggaaggtgaggccattaatggaggtacagatacgcaccaaggagatgcataggtttgctgttggtggagaggcatctcactctctctacaagggtggtcttactgatcctggagaggctaaaaggctcaagactattatgttggcggcacggagttagcagctctgcgcctacgagcctacaggcagtgaccacgtattgggaactgcaagaaccggctttctgtcacttgaca

SEQ ID NO: 275075 - DNA, 419 bp, Zea mays
tcgcggacgcgtgggcagcacagagcattcagcttcccccaacaaaggaatctccctccccttcctcagcagggtagccatgtttggtcttcgtgcccgcgcagcggcgcagctccagcgcccaaccccgtctccctcctccgcttcctcggcgtcgttctcgctcgcgaggctcgggtgcgcctccccgctcgccgccctcgcgcctctggcttccgcaccgccgtcgccgtcggccagggagacacagccgacctccctctccgccaggtggcctgccgcgcccatgcgtccctggggaacccgtggccactccaggccgaccacgcgcgttctctgcactgctgccggcagcgtccaaagagaggggaaagaactgctagttcagcatttgcttgttggtgaaaaggatttcaggc

SEQ ID NO: 275076 - DNA, 831 bp, Zea mays
atccaaagagctgcatagcacgcttctcccagccacgtcttcatcacacacggtcgcggcgcgaagcaatggcgaccacggcgccgctgctctcgccccagcgcgcttgccctacccatctccggcgccgcctctcgcccctacatctcgtattccccctcgacgcgtcagcgaggcggctgcgccttcgccgggcgccgccaccttgttcggccaagttcggcaagttcgacgcctccgacgccccggcggaggccgaggaggcggggggcgcgacggatggtgggctggcgcagcccgtggaggaggaccacagttgcttgccatcggatttggagggcgcgattcggcagtcagggaacgcgagcgcagatttcgtaaactccggaggcatgcgagctatcgcagaactgctgatccctcagttggaattcctcaacgaggaaggagcacaggctgaactctgggcgttgtcaaagattttcctggacacacttgtacaagagacaggacagaaagttactgccattttccctgacgctggagcagctgcccttctcaatagacaatggaaagatgcacaattcaagtgtgccagtttaggtgaccggaagccagttggtcctgaagatgaggtcgcagttatgattatccctgatcatcagatgctggaagctgttgaacgcatcacatctcaactctctgatgatcctataagacctcttgtcatgtggaacccacggcttgttagtggagatgttggagtaggctttaatgtacggaatctgcggagaaatttcttaagcacttttaccactgtttactcgatga

SEQ ID NO: 275077 - DNA, 422 bp, Zea mays
gccgcccttttttttttttttttttttttttttttttttttttaaaatccaatccagagttctcaatacttgtctcgtgagtttgtccgctaacatattcaccttcttgatccttaacatatttggcatgtggcttacaagcacaattgcatatttcctttacatttggacagtactcatacagacatacacaatgtatctgcacggcaaatggtcaggtacgagggcaagctaagctaacaatcgcctcacttgtttccgagtccgaacaaggacttgatggcgttgatggcgttctcgttgatgaacgactcgtcgtagttcttcagcaagggctcgaactcctccgacttcctcaggttcgcgagatccgggtcggtgcgaactgccttgaagtcttcataccctgacttgagcgcatc

SEQ ID NO: 275078 - DNA, 620 bp, Zea mays
  unsure (1)..(620): unsure at all n locations
agaggtgatcggccaaagctgccagaacctcagggtcctcaagcgcaacgtcttcaactggatcgacccatcggagcatgccggagtagttcctgaggactatctgagagaatgccccgaagacggcaacagggaagccattacgatatccaggttcatgccgaagctgagacacctcgagctgaggttctcgaagctgaccgccgtcgccctcggctccatccctgaaggatgcaaggacctggaggtcctggacctgttcggctgcgcgaaccttacgagccggggaatagaccaggccgctgctagtctgaagagtctggtgacgctggtgaagcccaacttctacatacctcgctcctccttccacatgggngaggtacggccactggcagctctacgacgagaggttccagaccaatgtgtttcagatatgatcatagtctcaggtcaggtactcaggtgctccctttgacctatggtttatattctgtgtatgtgggcgcatatagtggcaccataacgtgtggtttgaatcgtttctctcgacacattttgacagatggttatgctcagcggttggagatgggttttggttttatataaatgactattgctgc

SEQ ID NO: 275079 - DNA, 681 bp, Zea mays
  unsure (1)..(681): unsure at all n locations
gcgtatgaacagggaggtatcaatgtggatgaaatgttcaggcgaagacagtggtgacgagacagacatccccttcatagctactagaggttatgacagcgtcgtgtggagtcgaatgtactcgcaagaccctgccgaaagaacacgacacgctttgatgctatcttctattgctgctgaacaaacgctagaagctgtaggagccaaagggatggttgtagggcacacaccacagacgcatggggtgacctgtaaatgtgatggcaaagtctggtgcgtggatgtgggcatgtcctgtggtgttctttgctcaaggccagaggtcctagaaatagtcaatgacagaccaagggttttgaaggagcggagagaattatatgatgagatggaagtgttggactatttgtaaaaccttgagaaacttatgtacataatagaaaacattaattgtcctgagaatcatcgtttcagacaatttgagtgggaatactgtacgcaacatgctacagagagagatatatatatataatcagaaggaaggttttttcactatggttaccgtttgtctgaaaccagatgcaaacatagatcaaaagcccaaaggcgctttatttgccatggtagaccanagttttagtggtgcttaatttgatcagcattcaaacattgactctagcctta

SEQ ID NO: 275080 - DNA, 1131 bp, Zea mays
ggcacattctttagaacttccactgcattggagagcttcaagactagaaacaagatggttcattgattactatgctagagacagaaacatgtgccccttgctactccaatttgctgaaattgacttcaaccaggttcaatatgaacatcaaaaagatcttgcagtagtgacacggtggtggaagaaaattgggcttggtgaaaagttgccatttgcaagggatcgtctgatggagtgtttccattatgctaatggaattgtttgggatccaaagcttggaacgtgtcgtcaaatgcttgctaaagtttccaatctaattgtttacttggatgatgtttatgatgtatatggaaccatagaagaacttgtactcttcacaaatgcaattgcaaggtgggatgcgataccaaatgagacactcccagagtacatgaaagcactttattctattatatatgacacatcaaatgaagttgctgaacacgctttgaagaaacatggttgtagtatgcattatcttctacaaaaatcgtggtatgacatatgcctggcatttttggtggaggcgaaatggcaccatggaaactatagaccaagcattcaaaagtatctagagaatggatgggtatcatcttcagcaccattgttgttgttacatgccttctcaatgcttgattcagtcgtcaacatgagtccgatatcccctttgcaaaccaaactcggattagttcaacatctttccttaatttgcgtctctgcaatgattctgcaacacacttagatgagttgggaagaggagatgctccatctttcatagctttacacatgatcgcgaatggtggtaatgcgaatgattctcgtaaggccatgcaagagcatatcttgaagtcatggaaagtaattaatgaggcggcatttgatagttgccagtattctatgccctttaataaagcttgtattgacttggctcgcatttcacattgcgtttatcaaggtggagatggttttggtacaccaaatggtctaaagaagaaacaaattagagatttgttcttggatcccattgatatatgtaataaacaataaaatataaagatttattgagaatacgaagataatagtttgttagtg

SEQ ID NO: 275081 - DNA, 477 bp, Zea mays
cacgcgtccaaccaagcgtccggatctcttgaagagctaagcagggagacactagaacttcttgtggtacctcatatattcaggtatccaagctctgtgctaccgattaattgctgaaaacggagcgttgggttcatgttaaatattcccaaggagggataattgggcaacggtgtgtgtatatgttcagattcagaaagtgaggacaatatagcgtttgcagcagtggtcgtcgccctgtgcagggagggcctgctgatcagagatcaagagggaaagcacaagacacgttgtgccgggaggaaacacaccacgttggtgagacttagaagcaataagctaaatatttagacaactttaattcgagcactccaagaggtgtctcaaacaactggttaattcgttttatgaccaaaagaggaaaaatggccatctaatagttttgtaaacccactccctaaagataagcccctgctt

SEQ ID NO: 275082 - DNA, 675 bp, Zea mays
gttttcagagcagtccgatcggactcccagatgttcaagatctcagggttcacgctgtcgactgccatgccgttgtccgagacactccagcttctgcagctcggcaagatcccagcgaccgacttcgacgccctcatctgtggcagcggcagcgaggtctactatcctggcacggcgaactgcatggacgctgaaggaaagctgcgcccagatcaggactatctgatgcacatcagccaccgctggtcccatgacggcgcgaggcagaccatagcgaagctcatggccgctcaggacggttcaggcgacgctgtcgagcaggacgtggcgtccagtaatgcacactgtgtcgcgttcctcatcaaagacccccaaaaggtgaaaacggtcgatgagatgagggagcggctgaggatgcgtggtctccgctgccacatcatgtactgcaggaactcgacaaggcttcaggttgtccctctgctagcatcaaggtcacaggcactcaggtatctttccgtgcgctggggcgtatctgtggggaacatgtatctgatcaccggggaacatggcgacaccgatctagaggagatgctatccgggctacacaagaccgtgatcgtccgtggcgtcaccgagaagggttcggaagcactggtgaggagcccaggaagctac

SEQ ID NO: 275083 - DNA, 558 bp, Zea mays
agataatcaggtcgaaccatgtctccatttatttgcactgatgaggcagtctgtgtgcaagccaaatgacatcacatttgcaactatcttcagtgtctgcactaatcatgcatttcttgtacttggtaaaagtgtgcaagccctacagatgagaatgggttttgattcgtatgtgcatgtgtccaatgcattgatatcaatgtatgcaaagtgcgggagtattggtgaagcacgagctgtatttgagagcattagatgcaaagacctggtctcttggaactccttgatctttggatattcacagcatggccttgctgagcattgcctatacttgctaagagaaatggaagggcatataacaccggatgcaatctccttcctaggtgtgctctcatcatgccggcatgcatgccttgtggcagagggccgacgatgcttcagggcaatgattgaacatggagtagtaccagagatagatcactactcatgtatggtggatctttttggccgtgcagggctgcttgatgaagatgggatctgatccagacgatgcccatg

SEQ ID NO: 275084 - DNA, 1160 bp, Zea mays
cctaaactaccattcccagttcccacggcacgatggcctccgccgaaatccccaactccagccccgacgccaccaaccccgcccccgccgccgccgccgccgccgccaccggccccgacctctcctcttcgccgccgccgctcccgccgcgcaagcgccgcctttcgccttccccaccaccaacgcggtccgcgtcacgctctcggtccccccgctcccgctccccgcacggccgacgctcgcgcagccggagccgcagccggagccgcagcccgcagtacccggccgacggcaagcggcagcggcacaacggccttaccgtggaggcgtgccgcgacttcctgcgcgataggtgcacccgctccgacctcgagtgcagatacgcgcaccctcacaactccgcttccgtcgaccgggacaacaaggtgacggcgtgcgcggattctcttaggaacaattgcttccgggggatgacatgccgttactaccacccgcctccacaaatccaggagcaattgctgagatcaattggtatggaagatccaaaggtgaagacgatctgcagagattttacacgtgggaagtgttcaagatcagcaaatgagtgccgattcttgcaccattcatctgttgaagatgctgcaattgtttgccaagattttttgcgtggacaatgcaatcgcatagcatgtaggtactctcatgtagtagcacatccggtgccaccaatgagccatgttcctatgccataccctgagatgctttacatgccaccaccaccaccaccacctcttggagtaccaatgatggggcctccgccttcaccatttgctgataataagaacagagttgaagtttgtagggacttcttgaagaacatgtgcaatagagaatcctgccggtttgtgcaccctgggacacatacagcggcggcgagcgccaatgttgaagtatgccgtgattttaaacgaggagaatgcaatcgacctgcctgtcgctttttgcatccatatacaagttgaagttttctgttagctaaacttgagtgctctgcccaccgccgccgctactgctgtgctgctgctgctgctgctgccgccgctgctgcgccaccaccacccattctgcttctgccaccaaagagctgctgcgctggctgt

SEQ ID NO: 275085 - DNA, 482 bp, Zea mays
gtccagaacgtgtgcgccttgaagaaatgagggagaagttctcccttcaggatagagttgagatgttaggagctgtacctcatgctcaggtgcgatcgggtcctgatatctggacatatatttttgaacagttcactcacagaggcattttgcatagccattctagaagcagctagctgtggactgttgacagtgagcactacagtcggtggtgtccctgaggtgcgtccggatgacatgatagtacttgcagaaccggcgcctgcagatatggtaagagctgtcaagaaagccatcgacatgctacctggaatagacccccagattatgcatcttcggatgaaagaactttatagttgggacgatgttgccaaaagaactgagattgtttatgatcgtgcaatggaatctccaacaatttttttactagatcgccttcctcggtatcttacttgtggatcttgggctggaaaactgttttg

SEQ ID NO: 275086 - DNA, 670 bp, Zea mays
tatgaaatctgtgctctttttaacagaaagtgggaaggggcaaaggctgagtgtacttgtgcaaaatgttttttgaaggaaaaggatagtggagatattcaggcactggagtcatccactgttcttggggcacaggagttacaaagaaccaagctaagtgatcatattgagcaaagactttcagagaggcttgagcaggacaggcaacagagggcgagcgcctctggaaaagttgctgaagaggtaccaggtgtgaaaggccttacagttagagtagtttcttcagccgaaagattactgcaagtccaaccacgttttcgtggtttttttaaacaaggaaagtatcctggggaatttccatacaaatcgaaggccattctcttgtttcaaaagatcgaaggtgtggatgtttgcctctttgccatgtatgtacaagagtatggctcagattgcccaccaggaggtcaaagacatgtttatcttgcatatagggagggtgtcaaatacttccggcctgaaatcaaatctgcaactggagaagctctccgcacctttgtgtatcatgaaattttgattggttatctggactactgcaagaaacgagggtttgtaagctgttcaatatgggcttgcccatctacgaaacgagatgattattttttatattgcc

SEQ ID NO: 275087 - DNA, 1291 bp, Zea mays
gaagtgagtactgatcaatgcattcacagttcgtgcattacgtgataccttccctccggccagagcagctggaatcatggcactgagtgtcactagttcatactatgaaatgacagagattgcaactcgcatcctgcctaacattgttgtgctcacatttgacccaaatagtgatgtccgaaccaaggcttttcaggctaccgatcagttcttgcaaatagcaaaacaacaccatgaaaagcttaatacaggagacaacagtgtggctgaaagtactggtgttaagttaaagcctggaaatgcaggtttacttgggtgggccatgagttctgttacacaaaagggtaaaccttctgaccatgccccaatatctactgcaaatgccaataattctcaagcatcaacaacctcgactgccactccagacactcaggcttccacactagcgtatgcaccatccacatccacctcgcttgatcaagctgcatcagcatcagcaaggtcgtcagtagatgggtggggtgagcttgaggatggtaatatccatgaggagaatagtagcgataaagatggatgggatgatgtagacccatttgaggacaagccatccccatctcttctatccaacatacaggctgctcaaaaacgtccagtggtgcaaccaaagcaaccggttgcaaactcatctaaatccaacccactaaaagcgccaaaatcagaagacgatcctctatggggtcctatagctgctgcaccacccaaaagcgcagcaaaacctgcagacatcaagccatcaacatcacataacgatgaggatgacctgtggggttcaatagcggcacctcctccaaaatcatctggaaagcctttgaagccagctgcagcgaatagtgacgacctatggggtgccattgcagcacctccaccaggaaccaaagccagacccttagcctcgtcaggtaggggccgaggaacaaagccagcgcaaccaaaacttggtgctcaaagaataggaagaacatcttcaactggaatgtgacgtcttatgatatcaagtgttgtacaagactgcaaagttttccttttttttcccctgccttgcgttgagtctgtccaggatgacattctttgtaaactagtaaaaagatttatgtatatgagtacagttttgaccaattattagtattattttaccattgtgtattaaaatagatccggaggatttttgtacatcacagctgcagtcatcttgtgtccatattattaatatattgctatgtcttagtttggc

SEQ ID NO: 275088 - DNA, 856 bp, Zea mays
ttgacttacttaacagattatcacaagggtgttggcggtgatccacttctagagctacttgcggtcgattggttcaaagttaatgaacgctttgattcagttgccttacatcccaaaagccttgtccgatcagaagctgcaaagaaacttcctttcatattggttataaatttgcaggtgccagcgaaaccaaattataacttggttatgtactacgctgcagagagaccagtgaacaaagattctttgttgggtagattcattgatggaactgatgcataccgagatgccagatttaaacttataccaagcattgttgacggttattggatggttaagcgtgctgtaggaacaaaagcttgccttctgggcaaagcactaacgtgcaattatcttcgccaggataactttctggagatagatgttgacatcggttcatcatccgttgcccggagcattattggtctagtattgggatatgtcacaagcatagttgttgatcttgctattcttattgaggccaaggaagagaaagagctccccgagtacattctgggcactgttcgtctgaaccgtgtgaatcccgacagtgctgtatcaatctaattacgtttctagccgatctatgcaaatttactcttatcctcttttattctgagagaaacagcgtggcattttgaaaatgtgaaatagcattactatttgctgatccccaatcgagggtaacatatgtaaattggcatgaggcatgactacgtgacgcctttcgtaaatagaataaatcaatggttatgtaatattaatatcccatatacgcgtgtcaaaatataagtaaataaaaaaaaaaaaaaaagaa

SEQ ID NO: 275089 - DNA, 697 bp, Zea mays
cccacgcgtccccccacgcgtcggcggacgcgtgggcggcagcaaagcaacacgcgcctcgatcctcctcgcccctccggcctctcctcccctccctgcacccgcacctgcggagagcgccgcaagctagctgcagaggagcgagacagtagcaggaggaggacgagaggaagaagagatggcgggctgtgatggagccaagtcgtcggcgtccatggaggaagaggcatgcgcggagaagaagtacggagggatcgcacccaagaagcccttgatatccaaggaccacgagcgcgcctacttcgattctgcggactgggtgctgggcaagcaagccgcgaacagcagcagcagcacgaggaccgcagccgcggtcgagtctctgaagcccaagctgaagagaacgccgcaccaccagctgccgcctcgtaagcccacctgcgcttccagttgagacgcatggccacgcgtcgcagctgctggaggaggagctcggtcagagtcaaggactgaggatgccgacgagctcgagctcggataaatgttttagctggtccggaatcgtagggacgacgacgagccagaaagatccgaatccgagatgccgtctggcttcttggcgagcagcgcctgttattgtgtgtcataaagaacggatcaattaattatcaattgtctggctgaattctggcctggc

SEQ ID NO: 275090 - DNA, 414 bp, Zea mays
cacgcgtcagccaacgcgtccggagatttaaaggtgaatggatagttaaagaagaaaacaagaagatcaaaggacacttagacattcccgagttctcgttcggtgagatcgatgacctggggctgcaagtaaggttcagtgacgacaagggccgcgcgtccgacgacaaggcacggatctgcaaggatctcaagtcctttatggccccgattcaggagaaaatgcgcgtgttcgaagaagagctcaagggtagatagcgagcattagcgagaatcggcagtgctaggtgggcgctgccgtgcccgtgctggaatgatgagtattacatgttgacgtcttgtggtgtctccacgttctaaagtcgtcttcggatgactgggactgtctgtgtactgatgcgatgcacttccggag

SEQ ID NO: 275091 - DNA, 455 bp, Zea mays
ttctcattgggcgtttcagtaacaaccaggagagcgctgaggacaagctgcaaaggatgaagcgtctggtcatcagaatccacagcgtggtagaggaagcaaaggggcggcagatctcaaaccacggcaccctccagtggctctccgatctcatcgacggcgactaccagggctgctatttgctcgactccgtcgggtgcggaggtgaagctgacagagatgacgatggtaaggcaatcccccaagtttcaaccttgtccttgtttaatccagcaaagcgcgcgtgagacttgcagcatcgtcccggcgccatgactatacgggcggtgttgatgagatctagagggtgctccagagactgtttttcatgtctggtgatctgagggagttcatcctgctcttgcaaggctgcaagcccatccgccgccctctagccactagcatcttccgggacg

SEQ ID NO: 275092 - DNA, 648 bp, Zea mays
ttcataggttgcatcaacttatctgggaccacttgctgccaataacgaagctctactgaagcccttgaaggaaacattggtgacactaattcatcccaatgaagatgtagtcatgaatgcattgtcattgccagtacttgccagttctgtccaggttgcaatgagcagaaggcttggtattgaagagcctcagttaatgaagatagtcagaacaacaatccatacacacactgaatggtttaagcttcagatgtgcaaggaccgttttgagcacttattgaagattgattctctaaaagaggttgatccatcattggggagtcaccgtaagtccaaggtccttacagatgaatgtgcaaatggatcatctcaaatgacaacatgttcaagtggcaaggtgccagatgaaggtagtagccctcaagtctcatcagaagttgcctgtgatgaaaatgctatactgaaggttatggaattccttgcgttgccaagggcggacgccatccaactcctcatgcagtacaatggaaatgcagaagcagtcatccaacagatcttccaatagtgcttactgtattttttttactagtctgcttgctttcaaacgtaattatttgttgatacttttcttgccctgtacagaacatt

SEQ ID NO: 275093 - DNA, 1225 bp, Zea mays
gcgttctttatgctgtggaacctaaagatgctttcagttttttgagagcgaaagcgattcaaggctctgtctcaccttttgcgttgattataagaggcggttgccaatttgatgacaaaattagaaatgcacagaatgctggattcaaggctgctgtagtatataataatgaagataatgacatccttgtttcaatggctggaagctcgcttggtgtccagatatatgcagtgttcatctctaaggcatcaggggaggagctgaagaaatattcaggccaaactgatgcagagttatggataataccaacatatgagaactcagcttggccaatcatggcaatttcattcgtatcactgcttgctatgtctgctatcctagttgcatgtttctttgcgaggagacaccagatcagacgggacagggcaagacttccccgagctcaggagtcccatggaatgagcagtcaattagttaaggcaataccaagccttattttcacaaaagtgcaagaagacaactgtacatcagcaacatgcgccatttgcttggaagactacagtgttggagaaaagataagagtgctaccttgtcgacacaagttccatgcggcttgtgtggacctatggctcacctcatggagaacattctgccctgtatgcaagcgggacgcaagtgctggaacgtcagacccccctgtatcagagtctacccctttgctttcatcatccgccacacgcttgccggaatcaactgtgttggcttccttgcggtctacagcagcagcgtctccccccaggacgatcagccggcatcctttgttgcggtcaatatcccgcaattactctgtttcaggttccagtatccttcgcacccccgactctaggtttgatgcaaactcatctatctgcacaagtggaagcaacttggaccttgcaaatgtaccatccccatggtctggcacttggcaccgtgcgtctgctcactctttgtgcaggggctacttgtccccgccgatccgcatcaggaatacctctgcagcgcacgtctcgcgctctgcctatggatctcccagccgttacgtaggctcgtcgcacatgtcccgtggatctccgagttgctactaccttggatcttcttcagggcagcagcatccttacctgaggcactgcaccttgtcaggcacgagcctgttcaccatggtgccccaatcaccgcaacagaa

SEQ ID NO: 275094 - DNA, 722 bp, Zea mays
atccccatggtctggcacttggcaccgtgcgtctgctcactctttgtgcaggggctacttgtccccaccgatcggcatcaggaatacctcagcacatgtctcgcgttctgccaatggatctcccagtcgttacgtaggctcatcacgcatgtcccatggatcttcagggcagcagcatcctcacctgaggcactgcacattgtcaggcccgagcctgttcaccatggtgccccagtcaccgcaacagaaccagttgcagcatggtggatactcggaaacaaatctgtcggctgccgcatcggctcaatcattccgtcagctctacctgcagcattgccctgattctgacacgtcgtctcagtcacttccagggtgctgatctcttgctgcaatattcactgattcttgcgcccatgagaaatcttgcctggtgctgaattgacatgtggattttgagctcgtcagcatagttcaccatgatgataaaaaaaagagaaagaagtttggagtagttttacatgtggaaacaaaactgcttgtaagaagagagaatgtgcagccccagagtgtgagcaattttacatgcttgagtgtacaggggtttggagtagtcttggacttgcttattttgaggcatgtattgcagtcataggttacttctgctcaaaaaaaaatacaaaacatgaaagaaaaaaaaaatataaacaaacatgaaataaaaa

SEQ ID NO: 275095 - DNA, 395 bp, Zea mays
agcagcggccgtttgcctcgatgaggtcctctgggttaccagcctcgtgcacgccttccagtgggccctgcctgacggcgcggcggccgtttgcctcgacgaggtcctcaagctcggggtggagatgaagacgccgctcgtcgccgcagccggcccccgcaccgcctgatccgtcctgccgccgacgcgtcacgtcacgcgttgtttgcatggatgatggtatctttgtctgtctgtgtggtcttcgctaaagtttgcttcttctcgatcgtcggttcgttcgtgcctccaccttagcctagggtttggtttcttgcttggtactgagtgtgtcttagtctcaccatcaccggggctccaattttggaaagctgcgtgttaggagttaaccctag

SEQ ID NO: 275096 - DNA, 756 bp, Zea mays
ttgtggacgcgtgggcgcgcgcgcgggagctccagcacgacctcgccacgctgatcgacctgctccccgccgcggagctcgggctcgccgacgacgtgtcggacctcctggcgctcgcgtcgcggcagtgccgccgcgcggcggccccggagctggagctgaaggcgggcgtgctcgcgctgatccaggaggtggagcgggagatcgtgccggagcgggagaggcttgagggtatcctggaggacgtgggcatcaacgaccccgccagctgcagcgacgagatcgagaccctggagcgggagatcggcgaccgcgtcgccgagaggtggacgtcgtcgatgatcgccctcgtcggcctcctccgctacgccaagtgcgtcctcttcagtgccgccacgccgcggcccgtggactccaaggtggatctcgacgacgcggacgcaccgtcgccgccgccggacttccggtgccccatctccctcgagctgatgggcgaccccgtcgtggcttctagcggtcagacgtacgaccgtgactccatcacgcgctggttcggctctggcaaatccacgtgccccaagaccgggcaagtgctgctgaatctggaactcgtgcccaacaaggcgctcaagaacttgatatcgcggtggtgccgggagaacggcatccccatggagagcagcgagtccgggaaagccgagccggcggctgtggtaggcgcgaacaaggccgcgctgaaggcggcgcgcatgaccg

SEQ ID NO: 275097 - DNA, 547 bp, Zea mays
tcaagaaccaaatgcggaaactgtggcggagaaaactgagccaccagttgcttctagcactggcattcaagaggcgcgggggcggtcaagcatacaatactggaatgacagatttaatcggttacagacatatttggagaactgtgatcattcaacccaggagggttatttgcgagggcttaggtccctttcggctgctgggaggggcatgcatgcaattgagctggagaaaagggcaatacatctcctaatggaggaagggaaagagctccagcgaatgaaggctttgaatgttcttgggaaggtttccccaaatgcttcgtcgaagctgacaccttcgcagcggtagtctctacaatgagatgactgtttatcatcacgagggctgtaatactcaaatacattgcagaaaagacatgttgttcctgtgttacacctttccttttatttcctttgatgccctgcccttttgatgtaagattgttgtaatgctatgtaaccagccgtacatataaacctgccattcttagtcctaaacctgactatt

SEQ ID NO: 275098 - DNA, 397 bp, Zea mays
gcgtccgcaaacacgtccggcaacagcaggaacacagttacacagaggtcctcggccgtggcagcacgttcacgttgaccaccagagctcaaacgcaacagccgcccatcatcagccagccgagccatcatcaggagagttcaggtcgtgcaagagctgcgggtgaaacaaaacgcatcgatccatccgtcggtcgcccaatcatgattctgggcttgggaggatgctgcggactgccgccgccgccgccgccgtgtcgccggctgccgtcggcaagcaattgggaggccatctagaggccagtgagcggcagcagttgttgcggggggcaagtgatgagcacaagatgaacaagggaggcgagcagggagcggcggcagcagctgggggtaaggag

SEQ ID NO: 275099 - DNA, 429 bp, Zea mays
gatggtgttttggttactaatgaaacatgcaaccgagtgtggtttggaaacaaataggggtatctcacttgatgtgtcaacaaggtggaattcaacttttctgatgttgagggatgctttatactataaggatgcttttactcttctcaagcttgctgatcggcgtatgtatgaacacatatctccaactcctgaggagtgggacaaggcctaaatgttgtttcatgccttgaaaatattttatgatctgactgagcttctgtccggtactttatatccaactggcaacttggtctacaaaagcttttgtgagattagaagtttgcttggtgactggtctactagtgaagatatcaatattcgtgaaatggctatttccatgagcaaaaaatttgagaaatattggaacaaaagcaatgttgctcttgc

SEQ ID NO: 275100 - DNA, 506 bp, Zea mays
cccacgcgtccgcccacgcgtccgcgcgagtgacgccgtggcacgacagcggggcgccgccgcctcgcgtcctcatttcccaccgcccttctgatgccagcggtcaagggattgttctgtcacttcaacatccaagatcaggagatgaagtagggtatctatttattgatggccaactacaagagatcaactggtttaaggagcgttatggtgcttggttcttgggagattatgtttgtgaagatcgtggcctttattattgcacccctgttgatcccatcttcattttcctaccaacttttgaagctgcacgtatgtcgaacgataaggatccaggaaaattcagacaattggatgaaatattgtatgttgagggatatcctggttatcagcagctaatgaatgtagctaaccaccatatggaattggtttgtgaagtaaaagaagtatctaacatgaagttctttaggctggacaactccaaggtcttatcttggttgtgctgc

SEQ ID NO: 275101 - DNA, 436 bp, Zea mays
atttcactgaatgctgctgatggtcgactaaagcagacaagagaatagagggaccagtttcagggagcatacgttgatattttgttttctgcaccagcacaggagaatgacctgtcaaaatctattgactcatgtaacatggaggccagtgtagtcaagacttgggtaaatttcctcgaggatacatggcaacttcagttgtcatacaatgaacagaaggaaactaaaacgaatgacgagctggagagatgcacaagcagttttctgaagttgaccaagcatcatctttcctatatcaaggaagttcttagcccatcaattgagcggatacgcacatacgtggataattcggcagtcttaaactctagggaggagtcaatagaacatggacgggatgatgagatttctgagcagacaagtccacaaaagtcccttg

SEQ ID NO: 275102 - DNA, 777 bp, Zea mays
ctgttctacccatggcttgatagtaaatggatgcctcagcctctaattctccgcgctgaagtgtacaaggttggtgtcacacactacttttcgttcttgaaagctagagaggagctcggctacgtgcccattgtgaggccccacgaaggcttggccgcaacgatctcgtactggcaagagcggaagagaatggagctggatggcccgaccatattcacttggctggccgtaacgatcgggatgctggccgtgttttctgccgcctgcctcccgccagtcggcccgttgaaatgggtgctcgacgtgcacctgtttgttttccgctcgatgctcgtgatccggctggtcttggtggtagcgatcgcactgcatgctggcgaagccgtgtacgcctggttcttggcgagaagggttgacccgaggaacgctgccgggtggttctggcagaccttcgctctggggtacttctcacctccggtaccttctcaagagaggcagagcgtgtattcgtgtgtggttcacgtgtacgtacactgcggatcctgtaacagtggttccaacttccaagcttcatgcttggtttttattgaggaggaggcgtcaggcgtatgagcatccccagatcgtatccctcctgacatgcaacggagaggcctgtggtcggatgtactttgtggtgatgctgtgaactggtgaaagtttaacaggtcgctttcttggatgagctgtaatgtaactagccattgttagatccaaatgcaacggatgctccagcag

SEQ ID NO: 275103 - DNA, 653 bp, Zea mays
ggcggtgcggacgtgcccgatcgacacgctgaagctgaacgcgtgcgtggacgtgctgagcgggctgatccacctggtgatcggtcaggaggccaggtccaagtgctgcccgctggtgcagggggtggcggacctggacgcggcgctgtgcctctgcaccaccatccgcgcgcgcctgctcaacatcaacatcttacctccccatcgcgctcaacctgctcatcacctgcggcaagcacgcgccgtcgggcttccagtgcccgccgctctacgactgatgaacaccacccaccagccaacacttctatacgcgccgccatgcatgcatgatgtgatggcatcctgtgcaagctagcgctagctagtagtagcatgtctaccatttgctccgtgatttctctagttcttgctctcgcgagtatgcgtacgtaatgcgttgcttctcgtcaggactcgggaacttttccaactccgatgctaagcgtgtagcttgcttaatcagtcgatgtaccatgttaatcaagtgctagccctttctctgctctgtcgtcgaagttcttcggtcttcacttcttgatctgcagatgatatatgaaaacgttatacgaaatggaatataatattctatcttgttgacaaaaaaaaaaacaaaa

SEQ ID NO: 275104 - DNA, 768 bp, Zea mays
cccacgcgtccgcagttttggcgttctcttgttagaaactgtgacaggaaggaatcctgttgactacagccgatcttccaatgaggtcaatcttgttgaatggcttaaaacaatggtggccaatcggagggcagaggaagtggctgatccaagcttagaggctagacccagtatccgggctctcaagcgggctcttttggtggcactgaggtgtgttgatcctgactctgaaaagagacctaagatgggccaggttgttaggatgcttgagtcagaagaagtaccataccgggaggatcggagaaatcgtagaagtcgcactggaagcatggatattgagtccattgcagagggttccaactctgcggagtttggaaagaaggtagaaaggactggaagctctatatctgacagatctcaaccatgaggcctggaaatctaagctatatcaggaactgtctcagaaacgatgttaatcaccaaggtgattgctgtcctgataggggatgctggtaggtgacagaggcaaggcaggcccaggtattactgcctaagtattaggctttagttttcaggtgcagtagaagcattcttggatgaggaacctcctggtctcctcttatttgtataggtatatgttggtgcctgaggaattcctcttggtttgggtgtttaacatttgttcggttcttttatttcttgcattgttgccttcttaaatcagtcccccttctcctttataaaatccccaacatgaggttgtggact

SEQ ID NO: 275105 - DNA, 515 bp, Zea mays
gtaattgacatagaatgtggcacaccagttgaagttggtggatttgatttgtcaaagtgaaaaaataagatggtatgctctagcatggatagcatcatggaccctggcgatggaatacatacggatgttattcctgttgttcaagatggctacagccttgcattttcagattttctcagttctgatataccatgctacccgtcaatgcaatcagatcttcatgctggaataagtgccaacgactcagagggtattaccgttatggatgatcctatatatgggtctctcgctgatattggtttcatggacatgtgggggcagcccactcaagactacgacaaattcttctaggctgccgccgaaggccaagttcatgaatttgacaaggaaaattagttgagttagctcagtacaggcgacaataaatagatcgggttatatcagataaattagttgagtttagcagcaagatcgccgggccaatgcagcccgcctctccgacttgtcctcggaca

SEQ ID NO: 275106 - DNA, 441 bp, Zea mays
gtaaatggattgttgttccagctacctttatcagtgctgcatcgctattctgcatcgaggaagtgggtgttctaatcgaagagccgttccccatgctagctcttgatgccctgtgcaagcagctccacgacggtattaaggatgtgatggagatgcagaactcggttcactcgcgactagttgccaagactgctacggaccacaggggcagtaggcgcgagaacaatggttggcctagctccaaaagagaaggagccaagattgattgagcacgcaaggtcggtcgggtcgttgtgaatttatttgaagatagcattgcaagcaatctgtggcaaccagatatccatgaacgaactggagaacttgtggaccccatttccttctgcaatggtatgtacctgtcctatgtaaaatgcactcgctactgcttggatagctact

SEQ ID NO: 275107 - DNA, 467 bp, Zea mays
caaacataaaggttcggtaaatgctgttactctcaaggttgctgacccatgcacgactagaattctcaatgatgactgccctgattgtgatgagtttcttgctgccgatactttggagggtgatgttctggaggaaggtaaaggccatttggatacttatggatcttgtgcatccataaaggatcaaatttcaaaactgggtaatcaaagtactggctgtgccataggtggcacaccctcaacttggcataatagaaattccgagaagaaaagcataacgtctgtcaacttgattcctaaagagagccacaagagggataaaaattcactgttgcaatgtgaagggattataaaatcggaaggtactatccttcggcctgctgaacttgaggataatacaaaacatacgactcctgagcatgacgagtcctctgaaactataagcaaccatttaaactctgagaagg

SEQ ID NO: 275108 - DNA, 998 bp, Zea mays
agaagctgtggcttaaggttgctaaacatgtcatcgagcaagagaaaggtgtcaagagagagaatataaagaaagcaatagaattcctttcggagaccaataacttgttaaagattgaggatatcttaccattcttcccagacttcgtattgattgacgatttcaaagaggaaatatgcaaatctctgaaggactacaacagccagattgagcagctcaagcaggagatggatgatgccacacgtggggcagataatatcagaagtgatattggtgccctcgctcagagatatacagtaattgaccgtgagcaggattgtggggtttgccggcgcaaaatattgactgttggagggttgcaccaggtaggaagaagctatacatctgttggacacatggcccccttttatgtgtttccctgtggacatgccttccatgcaaattgcttgattggacatgtgactcgttgcagtaaccaggtgcaagctgagagaatattggaccttcagaaacggcttagcttgatggacaggaaagcagcaaaagacaatggggcaagtgttaatggcgaacctattacgagcacaaccccagttgataagctgagatcacagttggatgatgctgtagcgagcgagtgccccttctgcggtgatttgatgatcaaggagatttcacagccgttcattcttccccaagagtcggatgaaaaggcatcatgggaaatcaaacctcaaccaacgcctcaaaagattctcccgatgaccatgtctatttgatgctacggacagtacagcctaagatggatttggttttaaatttttatattgtttttgacttttgacactccttttgaccatgttttaatcctttttatgttgtggtatatggtattcaatatcctactgctgttgggttatcttgttttatatttacccaacttgtaaccctagaacaatgtagtcatcaatcgcttaccttgtggttgtggttcttgt

SEQ ID NO: 275109 - DNA, 354 bp, Zea mays
ctgaagagaaaattgaagaggacatgtcagacagactggcacgagaaagggctgaggaacaagctaggcatgaggcattgctcagaaagagatccaaagtgttgcagaggagtctgcctaggccaccggctgtttcagtagagattatccggcaatctcttattagaagtggagaaagcagaagcagaagcacctttatgcctcctacatcacttgaacaagctgatgaactaataaatgaggaactccttaggcttcttgagcatgataatgcaaaatatcctcttgatgaaaaaactcaaaaagagaaaaagaaaggaagcaagcgtcagcaaaatggaggacctcttgtcc

SEQ ID NO: 275110 - DNA, 384 bp, Zea mays
gcaaaaggtctttcttcattttctgatgaactccttcctgtgctggagagactagagcatttgaaagaggacaaagttggacgtagtctgaagttgttccacagatccattgcttcactaaaggagatgaccatcagaaccataaccatctgaaggccgcagcctgttcggcggacgcgtgggttaggatagtacacctcgctagatttgcagatgtaaaacattgttgtgtaagctctcatatatatatatacacacttttgccctgaggcaatgagctgtatgtcatgttttaagagtaaaatgtgatttttgaggggtttccatctaggaacattaacatttaaactgtatttttttggcctataaactttcactggagat

SEQ ID NO: 275111 - DNA, 398 bp, Zea mays
cccacgcgtgcgcaaccctgttatggtggccatcaacggagtatgcacaacggcgacagtcgcacagcatgaaagtgtctctgataccaattgtcgtgcccgtggccgcggtgatcgccgacgacgtgagaaacggtggatcggggacacacaagcacaatgagcttgcgagtgctggctgaagaaacagaaggatgtcatggcccctgctgttattgctaagggggaggacgtcatgtggacttctggtctaatctttggaaaaggagaggggattgtggggcttgaaacaaatttagggacacttcatattcaattgctgcctggttgcccgccccgttcagtggaccacttcattgagctcctgggcttgcgcaactgtgctggatgcagatttt

SEQ ID NO: 275112 - DNA, 702 bp, Zea mays
cccgactcggactccccaagggaggggagggagccggagaaggggagggaggctgggtgaagggcatggagcacatggcgatgccctcttccccctgcctctgcggggcctggtgtgtgagaggcggcgtactggacacctcggcctcctcctcctcctcctccgggtcgaaggtgatgaagggggcgcgggcgagaaggtcttcctgcgaggcggagatgcggaggaagtccgcctccgcatccgcggcgtaccgagcggagacgaaggcaaacgagggcatgccgccgaggcaccaacggtggctagggttggatggaacagcgcgtggggactgcagccagatggagaggctggctgagtgctgtggctccgccggccaatgcggaaggaggcgtagcgtcgggtgtgggccgaaatttactgggcgggaggggaccaatggattggatacggaaggaggcgtagcgtcgggtgcgtgcttggatggacatggactatgcacccatctctgccccatgaaccgttggtgtgctttttcgtggacaagcactgtagaaatattgcagaacagaagtgataatataatacctgaaaattgcaaaaaaaaaaaaaaaaaaaataaaaataaaaaaaaaaaaaaaaaaaagaaaaataaaaaaaaaaaaaaaaaaaaaaaaaggggcggccgttttaaaggtt

SEQ ID NO: 275113 - DNA, 571 bp, Zea mays
  unsure (1)..(571): unsure at all n locations
cgtccgaattccggtcgaccacgcgttcgccagcgtncgccagcgtncgacgcagaattcggccaagatgcaaaagccgcacagggggcatcagagaaagcagtggacaagttggcagccacataccaaaggccagcatcctcgtcgagaaagagccgaggctttcctcttttggtccaagccagagagatgggaagtcagcggtgaggaaagtgtccggggcaaccgtcgcgtgcatcccgctccgagttgttttcagcaggatcaacgaggcgctgagcttctcagttaatgagaatgccctagctgggtgtgggactgcttcccggctgaggaatacttggtagctaggttttgctgtttgttgttcaccgcttgctttttttgtagccatgccataatagcattggtaaatgtttagtgtggcctatcacttggagcatggtaataggtgatcatgtatcgtcatcttggttgtgagccacatcacacttcactcacagtagaggcagtagaaggaagaactgggcttatgccccccaatttcccaaaaaaaagaacttttgatggg

SEQ ID NO: 275114 - DNA, 351 bp, Zea mays
aagcaacatatgaagctgacacggaaaaggaaaatggatgatctccttggttatgtttccctgtcttgtgcatgctgcatttcctgctaccgtgaagaccggggtccaggagagtaggagactgaaagcactgtcgagaagactgaaattatcacattgacatgaagaccaaagccatctcttacctacttatctttgtagcttacgtttctattttattctgtcatgaaaactaaagtcttatgtatggtcattatgtactattttggttctgaaaatatttgtttatgttatgaaaactattggttgaaagaatggtgattacggttttggcttgaaggttcagaagtg

SEQ ID NO: 275115 - DNA, 669 bp, Zea mays
aaaatatgttgctttggagtgtggccatgtgtgcgatgatttggtgtaaattgatttcttcctaatcctagctgcactaaaatatgttgctttggagtgtggccatgtgtgcgatttaattgctgggttgcccttttaatttatgttttccaatttatgacatgctaagttaaatcatgtgacttgtctagacttataaaattactacatgtttttaataaatgtgtcaagtaactattatttgtttttgcacctcatgcactgacaaattatgttcttgaaaaataagattaatgggagtagaacttataattagaagttagaaccattggttgggtcgctctgggcttgtgtgttttacattctatctttgacatcttgtagaagaggaaaaaatggtcagtgagcatccatatctactatattaaaatgtgacacagccattaccattccactatattcaaatttctaagcttctatttgatcatgctctgcatacctgttgagtgtttaatcaatcccggtgctgatttgttagttgtctttgagagggagttgccgagctttctcaacaatagcgaccgtggaaggcgtcaaccagattgtggatgttgaaactattctatctgcttttggatttaagttataggatatttaaacatgtttaat

SEQ ID NO: 275116 - DNA, 1375 bp, Zea mays
  unsure (1)..(1375): unsure at all n locations
gaacacaccacccctcgtctccgcacggaggccgtcctctcctctcctctgcgtccgccactgcccaccgctcgcccgcgcgcgctccattacctcggcgggcgatggccgacctatccaacaccggctccacctaacacgagcagcgcccccgcctaggcggcagctggctggtcggtcgtcgagcagctagcggcggcagcgcccggaggccggccgtctcactctcctcgtcggggcggcaggagatggaggccatcgtgggcgtccgcgcgccgccgcgtggccgtgcctgggccggcctcgagaagccgccgcgcgccgcttgccgcgccagagtcccgacggcgaggctcgcggtcgcggcggacaggccgcggaggctggtgctgctgggcgccgatacgcggagggccgcggatcctgccctccgttgcgccgcgcaatctgcaggaacaggaaaggtccactactctgctgatgacgctctcatactacagcaaaaagcccaggatgttctgccttacttggatggccgttgcgtttatcttgttggaatgatgggttcaggcaaaactacagttgggaagatactatccgaagtgttaggttattcgttcttcgacagtgataagttggtagagaaggctgttggtatttcatctgttgctgagatctttcagctccatagcgaaacattcttcagagataatgagagtgaggtcctgacggatctgtcatcaatgcatcggttggttgttgcaaccggaggtggtgcagtgatccgaccaatcaattggagttacatgaagaaagggctgaccgtatggttagatgtcccactggatgcacttgcaagaagaatcgctgctgtaggaaccgcgtctcgaccactcttgcatcaggaatccggtgatccttatgcaaaggcttatgcaaaacttacgtcactttttgagcaaagaatggactcgtatgctaatgctgatgccagagtttcacttgaacatattgcattaaaacaaggccataatgatgtcactatacttacacctagtaccatcgccattgaggcattgctaaagatggaaagttttcttgccgagaagaccatggtcagaaactgacctcttgaatgagagggaaaggatgctgacaacatgtggcccttgtttgtttaattgtacatatacctttgcattattgcctaaactctttctacagtgttgttggattattgtttgtgcagcatgaaagaggaccgtttgagtttgtatttatgcaaatgaataagtaaataactttcagttaaaacaatgaccattcgttatttttctcggnnnngggaaaagaaaaaaaaaannaaaaaaanaaa

SEQ ID NO: 275117 - DNA, 362 bp, Zea mays
attgttggaatgatgggttcaggcaaaactacagttgggaagatattatccgaagtgttaggttattcgttcttcgacagtgataagttggtagagaaggctgttggtatttcatctgttgctgagatctttcagctccatagcgaaacattcttcagagataatgaggagttacatgaagaaagggctgaccgtatggttagatgtcccactggatgcacttgcaagaagaatcgctgctgtaggaaccgcgtctcgaccactcttgcatcaggaatccggtgatccttatgcaaaggcttatgcaaaacttacgtcactttttgagcaaagaatggactcgtatgctaatgctgatgcca

SEQ ID NO: 275118 - DNA, 428 bp, Zea mays
  unsure (1)..(428): unsure at all n locations
gttaggcgctagccaggtgttaggctactgaccagcgtctaggaagtttaaacgtagattaagcatgcttaatcattcttttgtagattttgtgctgctgagagcaaggtcagtagtaagtactaagtaataataacacaactcttgctgttgctgcacacctggttttgacataagttgctttcctccttggcttcttgcatccaacagcagctgatcatctatgagggatatctcaatattgtacatgcacagcgaagcttccaaacaacagggcagcatcacaaggcaaaggatcacaagaaaatatacacaaaaaaacactcacagttcatcacatgccttaatggtttaagttattccaaagaataggtctatagatcctngtcccttgtatgggagaagagttctttgatgattggtgggag

SEQ ID NO: 275119 - DNA, 526 bp, Zea mays
ctcattttaactccaccactccattgtccattctccctggctgcctctcgttgctgttgttgttgctgctcttctctagcttgctttcccccaattggcctcgctgcactcttgagcttctttgccttgttggacttggtagctgtggcgttgccgaaatgggcgctccctaccacctccaatcaccaagaaccatcataaccaaggtaatgagcatgaagcagctgccaccggccctgccacagctgccgccgccgccggtggatcagtccgaggtgaccgagcagacaccggtgctgccacggtcgcagccggtggatccacccacgataaccaggcagccacaggcgccccggcagccagcgcgggcgccttccaaggtaatcctgcaaccgcgccagcggacctcgccggcgatgtggtgcgcggccatcgcctgcttcgccttcagcatccttctcatcgtcgcaggcgtcgtcaccctggtcgtcttctggcggtgaagccgaggccgtcgtctttgacg

SEQ ID NO: 275120 - DNA, 998 bp, Zea mays
tcggtaaacaggagctgatgcgaggaggaaggtctctccagatgtggccagcgggtacgcgcacagcttgaccttcaaggatctgcttgtggcaactggctacttcaacgaggccaatttcatcggagaaggtggattcgggaaggtgtacaagggcaagatcaacggacagatggtggcagtgaagcagctcgctcgagacggcgtgcaggggaggaacgagttcttggtcgaggtgctcatgcttacagtgctcaaccatcgcaaccttgtcagcttggtcgggttctgcgcgcagggggacgagaggctgctggtctacgagtacatgccgttcggaagcctggagagccatctgtttgacgtgcctctcggcaagaaaccactcgactggaacacgcgcgtgaggatagccgtgggagtcgcggaaggggtttcctacctgcacaacgtagccgacccgcctgtgatctaccgcgacatgaaggccgccaacattctgctgggcgaggacttcagcccgaggctctccgacttcgggctcgcgaaggtcgggccggttggagacaggactcacgtgtccacgagagtcatgggcacctatggctactgcgctcctgactacgtcgtgagcggcaagctcaccatgaaatccgacatatacagtttcggcgtgctcctgctggaactgatcacggggaggaggatctacgacgcctcgaggcctaatccggagcagagtctgttgacatggtcgaggccgttcctgcatgacaagaggaagttctacaggctcgctgacccggctctgctgggctgctacccgtcctcggcactgaaccagctggtcgtgatcagcatcatgtgcctccaagaccagccccacgtccgcccgatcatctccgatgtcgtcataggcctgaaccacgtcgcgagccagccatacaccgctgagcgcccgccgcccgcgtccgtgagctccccggtgggcagcgggt

SEQ ID NO: 275121 - DNA, 561 bp, Zea mays
caagaagaacgtggtcgagatgcccggcaatggcgacgtgcccttcacccacgccaacatcaccctcgccaggcagcagctcgggtacaagcccaccaccaacctcgatgtcggcctcaagaagttcgtcaagtggtaccagtcctactacggctacaccaggggatccaagaactcgcgacaatgatccatgctaattcttccttcttcctttctcgctttggcccggccgcggccacccactctcggatcaaacattgacattcttatcaggatttttttggtggaaatatgttatgttagggtgttcctttattaagtagagaaataccggggacaaattctttgcttggtgaggagatgggaggagagtgctggaggaagaaaagcaatcgagggctggaggaagaaaagcaatggggagcaacctttactttttctcttttctcctcctgtgtctttcttctctctgtgtaaattggtcggcgctctacaggatcttaatccttttccgctccatcaatccttttccggattccgatgtgctgagcctaatcaaaa

SEQ ID NO: 275122 - DNA, 748 bp, Zea mays
cccacgcgtccgcccacgcgtccggcacctacagcaaagtgctttttgaggagatttgctcgtgctgcacaagcgtgtgatgaggatcctgctttgcatctggagttcctcgccaattacatcgctgagctatcactactggagtacagtctactctcttaccctccatcactaatagctgcatcggctattttcttggcgagatttatactacagccaacaaagtatccttggaattccacactcgctcattacacacagtacaaaccgtccaaactgagcgaatgtgtaaaggcattgcatcgcctttgcagcgttggttctggtagcaaccttccagcaatcagagaaaagtacagtcaacataagtacaaatttgttgcaaagaagcagtgtccaccgcagatccctactgaattctttcgggacgcgacatgctagactagaaacccagaagtgattccagttgcttactggattcttcttgatgtgtcttgaatgcccagtgtagcacagcacaactatgcaagtgctgataacccccaggttgtttcaggtgattacaggggtgtaatcaatgtttgtggtcatgttaggtcattggtgtggtttttcttttcctgcttccagtctttctgtatgtagatcagtgttttcaggcgcttgtaaatccgagttctgtagtagagcacaatatcttgtaagttaactgaagaaatttggtgatcaaccaaattacccccccctt

SEQ ID NO: 275123 - DNA, 491 bp, Zea mays
ttgacatccaaaggtgtggagaataccatgctgctcaagaacctgatggagtcgcagaaggttgactacgattttgagtactacaagctggaaatggcagctgatgtgcagctactcactctctctgaggggaaatcaaacatccttccttcagatttggtagtgcctttccggccatcctctgttcccacaattaatgcaggtgctgaggaaactgagagctggaggtggtttttgaccacagtaaggtctcttcctcagtccactgaacctgaaacttaccagatgattcaggatgaaatggtcagtgccatgcgtgatgataggagcttgggttgttctgaacttagcagatggctaacaatggcacaaataatggcctccagctttggcgagaagagtctttctttggagcactggcagatggtgaaggagcttgagaggcttagaaagcagaggatgcaatgagatgacttaccattagcatgtgt

SEQ ID NO: 275124 - DNA, 468 bp, Zea mays
ccacgcgtgcgcgcacgcgtccgcccacgcgtccgcaagcaacatagtattgtggaatacagtagcaacaatagagcaacaatggcggcaaagatattttccatccttatgctccttgctctttcttcatgtgttcctaacgcgaccatttttcctccatactcacaagctcctatagctgcccttcttcctccataccttccataactgaccgcttcagtatgtgaaaacccagcccttcaaccctataggctccaacaagcaatcgcaacaaacaacttacctttatcacacctgttctttcaacaatcgccagccctatctttggtgcagtcattggtacaaaccatcagggcacaacagctgcaacaactcgtgctaccagtgatcagctaagtagctctagcaaacctttctccctactctcagcaacaacaatttcttccattcaaccaactgtctacactg

SEQ ID NO: 275125 - DNA, 411 bp, Zea mays
  unsure (1)..(411): unsure at all n locations
ccgacaccgccagccacgtcaaggactacgcgcgcgagtacggcggatacctgcgcacccgcgccaaggacgccgcgcccggcgcgtaggcgcgcgccgtccggcgtgcatgtgctgcaacccccgtccgtggtgccgctagctataggtcatcattgctgtcgtcgtcgtcgtcttagttcctcttgcattgcgtgtgcgtactctgctccaatcatcccccgcccgtgttgtcaagcaatttctggtcctcttgcttgctttctctaggagatgctgttcatttcgatctcttggcgcaatttgatctttcgcttggtgtaatgagggcattagttaaatcataagagactcgtgttcatggtctntctcacaaccttaaaaaaaaatgtaaaatggaaaaaccacaaa

SEQ ID NO: 275126 - DNA, 445 bp, Zea mays
  unsure (1)..(445): unsure at all n locations
agaaaaatgtcccactgatgacgcgggacgccggagcggaagggagggcccaccatgtcagcgccgccgccgccgccgccgtttctgtcctattctgctcttcctgccgatctgtgcgccccctcttcttcatcccgtccctagcagccgatcccaactcccgatcttcggttcctttgaggtatgactctgttttcgcctgttgggggatataatcaatttgggtgctggctcctttttttaagcgtttctgatagagatgacggaggtgaaaaaatactccagcataattggttccttgcttatggagtatttgttaattttgtactatctaagcatcgaattccaggctgtaacttttgctgcatcgggcaaatggttttgatttgctcgatagaactgtcagtttaggaaccactangcgtcgttacatactgtacgctcg

SEQ ID NO: 275127 - DNA, 513 bp, Zea mays
tttctcctcctcttctatagtcaaaccacccccctccttccacaaaccttcgcagaaggggcacaccggcaaggacgcagctttttcccgtctccttctgggttctacacttctacttctttccccacctcgccttcgttccgcccgccaccaaatcgcgaggcagcggagccagcgacgccgttcctttcgttgtgcttccttgggttcttgctgccggccgccggcgatttggcgaggtccgtttgggcggcaggtagaggtaggtagaggcgcatcgcttcttggcgcctggtggaatggatagccacgccgctgtgtcgagttccgtcggatccggggatggcgccgcgcagcccaggaggaactccaggaagcccaagtattccaagtttacgcagcaggagcttccagcttgcaagccgattcttactccaaatgggttatttcagtatttggtcttgctggtgtggattttgtcccgatcggtattgcttcgctgcgagcttcaca

SEQ ID NO: 275128 - DNA, 413 bp, Zea mays
atccttagtattttgacacatattctaagtattctgttataagtggcacaaagcgctcttgaaaccggtttaacgaggtttatgcatgaaccatgatatattcttgaatacacagactttttgtgtcctacaaatgacgatagaaatgtacgtgctttgtttgagagggcactgagcttacttcctcccgaggaatccacagacgtatggagacgatttgcacaatttgaacagaactatggggatttatcaagcatgcttaaggttgaacatagaaggaaagacgctctatctaggacatctgaagatgccttatctgcatcggaaaacacacttcatgacatagcttctcgatacagctacatggatctttggccatgctcatcatacgaattggattatctaacgagaca

SEQ ID NO: 275129 - DNA, 431 bp, Zea mays
atgcattaattgcatgccacgtatgctttatatcaatgctcctgttgtgttgtcaactggcttctgctgatgaatctgaactaactcaaaacattaaccgagtttgtcatactcttgaatttcattgctgttgtccttgtcgtagtaagcttttaattctcgacaggctgaggatgatgatgaccttgatctttttggtgatgaaactgaggaggacaagaaggcagctgatgagcgtgctgccgctgccaaggcctcttctaaaaagaaagaaagtggtaaatcctccgtccttatggatgtaaaaccatgggacgatgagactgatatgaagaagctggaggaggctgtccgcagtgtccagatggagggtctgacttggggagcatcaaagcttgtgcctgttggatacggcatcaagaagatgacta

SEQ ID NO: 275130 - DNA, 812 bp, Zea mays
caagcaaggggcttagtgatggacatttcaagaggtggtattgtgcctcctcaagggttccgtgagtctgttgttaactttttcaaggaggctggtcgacaggaagaaattgagaaagcttttgaagaaaaacctatgccaacacctcagtctagaacagagtatcagcctaggactgagtatcactctcgcaatgcagacggtactgctcaaataaaacaacctggctttagctctgctccagcggtgggacctgaatttcttcactctcagccacaacaatccacacttagtaacactccaaatcagcagcctgagtttggctcatctcgatcatggaattcaggtttcggtgctcctcaagcgcacctggatatggtgcacctcagcctgtacagacaccacagccacagtgtggtgcttctcggggtgaaccaggatatagcagcataggaaatcagcatgttcagtttcgctctccccagagagaaccaaaatttagcaaccatccaccacaagttgggtatggtgcccaattgcctcagtcaggatatcgttttgagctccaacaagaacaggttggatttggaaatcaagtagcacaacctgcacatgtggcttcaagacaaccctcatatgacacccgctggagctcgagagattatggatcaacccaagggcaactgggatatggtggtcctcaagcacagtcatatgaatctcagttaccacatcaccagggaagttttggtatgccacatgtccaaaataacaatggcttctatcgatacaaccctggatattgcccatct

SEQ ID NO: 275131 - DNA, 573 bp, Zea mays
gcgcttgcccccccaaatcccatttccctctccgatcaaatcaaatcaaactcaaaccggcacgggacccacgccgcatctccgcctccgcagatcgccgccggctactcgcgcccctccgcgcgccgatggccgccgcggacccgccgccgcgcggggaggccgcgcccgcgctgaagcggagcgccagcatcgaccggataccggcggacgcgcgccgcatcctgcaccgcctcgccggggacctctggggcggcgacgtggaccccggcgcgctggccgtgtcccagctcaggggcgccatgaccaacgaggtcttccggatcacctggcccggcggcgaggccgagggcaacggcccgcgcatggtgctcgtgcgcatctacggccggggcgtcgaggtcttcttcgaccgcgccgacgaggtccgcaccttcgagtgcatgtcgcgccacggtcaggggccccgtctcctgagccgcttctgcaacggccgagtcgaggagttcatcaacgccaggaccctcttagctgaggatctgcgctacacggatatgtgcgcgctgattgcca

SEQ ID NO: 275132 - DNA, 452 bp, Zea mays
aaaagcaagcaagaaatggttgctctctctcgttgggttaaccacaggctggtgcatacccgtgctaaatttgcaaacgtggagaattacatgctgatagttcagcgtatatagactacgggcaaactataatatcaacctcttacagctatcccaaagagtaggttcattcaagctagctaccatccgcggaggtggttaaccagaacgtgataagcaacacggacatccaacatcaactttcatgtcagcaaattgaacgcacgatgtgtcaaccatcacattttacacggtaactcagcgccgcatcatgtcatccaaacatgtcaaagccttccccgtgttggagatgggagaagctccgggagctctccaccttccccgggaaatgatcgattcttggattcggcatgatgtttccgtataaaggcattttgccaggaattttatac

SEQ ID NO: 275133 - DNA, 873 bp, Zea mays
ggcgctgaaaaggaacctggaaccaatggccccaggcctgatccatgtgattatgggcaaggaggttaaggttggttgaagttccagggaaaagaacctcttttaccggggtacccaaaccttcaaaataagaattttctggtagattgcaagagaatcacgagaacacccagccaagtaataatcataacgattcagtaggtcagagtcaactgcccccttcttcaagccctactgagagtacagatgaaatttcatcagaagacgaagaaaataatgataaagagaacatggatccaagcgctcagaataatgatgtacatactcttgaacacctccaacaagccatcggaggaaactcacgtccagatgatgctatcttaaaggattttctagatgatgaagctgaggaagaggatgatagtgacaatgacatgactagatttaaggacaatgaagaagatgatggaagcgatgaaaacgaggtgttcaatgacctaatagcagctggttatgaagaaaaagaagtagatcacgagaagcgtaatgaacttccaccaaaagtggcttcaacaacaggatgctgctgaaacaaataatgttatccaaaggctgaagtttggtcaccgggagcaaaaagaatcagcatatgaagatgaagatgaagacgaagacgaagatgaagatgaagatgaagatgtagctgattgtgaggaaggatcacaaaatgaagatttaactccagcaaatattgtgcgacaaaattcagagaaggcaaaacagatgattgcaaagatgtttgaagatgacaatgatacttatgagcactcggatgatgaggaaatagaagagcatttggctcgtcagcgcatt

SEQ ID NO: 275134 - DNA, 487 bp, Zea mays
tccacgcgtccgcgcagcgtccgcgctgtctctgtcctcacctccgcgaagacaggctaccgccgccgccctacgccaggtgccgaggcctctctgtctcttcgccggcgacgatccaatagccagcagcagcaggaggacactatgaagcttgacgtgaatgcccttcgctacctcgccaaggacgacttccgcgtcctcaccgccgtcgagatgggcatgcgcaaccacgagattgttccagcagaacttgtcgacaggatcgccagactgaagcatggaggcacatacaaagtgctgaggaatcttttgaagaacaagctagtgcatcatgatgccactaaatacgatgggtatagactcacctatctaggatatgacttctcttgccatcaagactttggttaatcggggagttattgcttcagttggacgtcagatcggcgttggaaaggagtctgatatatttgaggttgccacagaggat

SEQ ID NO: 275135 - DNA, 510 bp, Zea mays
cccatccgcaggttcgtccggggacgcgtgggcgccctccaggactccaggccttcactccacgcaacctgttcgcaccggccacagccgccaccggccttcgccgcgagcccgcgacgacgcccagacttgttgccttactaccacggagacggaggcaccaccgcatcaggcagggaccggacgacgacgcccagacctatttcaacctgccggtctccccaggcccccagcccccagcagcaggaggacaccatgaagcttgacgtgaatgcccttcgctacctcgccaaggacgacttccgtgtcctcaccgccgtcgagatgggcatgcgcaaccatgagattgttccagtagaacttattgacaggattgccagattgaagcatggaggcacatacaaagtgctgaggaatcttttgaggaacaagctggtgcatcatgatgccactaaatacgatggatatcggctcacctatctgggatttgacttccttgccatcaagact

SEQ ID NO: 275136 - DNA, 489 bp, Zea mays
gccgccctttttttttttttttaccaaggccaaaacatttttaaaatagtaaaacaaagcgggaaaattggaacatgaaactcaacttgatatggggcttcaatgaagcatctaatctatgctatgagaagaatcgacgtaaaaagaataagaagaatcaacacaatgagtccatggagccaataccattttgggtggaagccggaatcatcatgactaagaacctatactgccagggcgccagaaacccttggtggcaagaagaaattgatgtttgacaattgtagtcttgtaatgcaaagacctgagaacagggtccatctttcttatcatgtctatagtgtcttgcagcacaaaccatctaccaggtctaagtattctgtcaatttcagctgcaacttcaatgatgtggcaccttttcgtaaggggccctaagagataactcatgtgaataagatcataagttcgtgggtatgtgttaaaagattc

SEQ ID NO: 275137 - DNA, 561 bp, Zea mays
gtgatattttctgtcttccatatctccccagaagtcgctggacatctcctaaataatcctcagccgttacttctgctagtccgtgccatgcttatactggtgatcaagatgcctatgtctccaccaccgtcgctcagctgcttgcctctatgttggctggccggatctactgtccgacgcgccactgtttgcgctgtgcttaaggtcctactcaccggtcttctcgtcgacagtgccagtcgtgtctcccgctacgccgacactttttctccatcgctcgactccgtgctcagcgctctcaccatcaccgcgcctctcctcgccggtgttcgccgggcatacgctcaacctcgccaccgtgggacttacctcgccttcaaaccgtgttcgccgcagcccagccatcgtctacctctacgctcagcacgaaaccgctcgccctacagcctcgtcgcgtcaccattctgcaggcagtgagcttcacccacctcggtgaaggccaccgtcccctttttcactgtgcactcagcatcagcttcctggtgcacaccgacacaacgc

SEQ ID NO: 275138 - DNA, 386 bp, Zea mays
ccatctcgtgatattttctctcttccatatctccccggaagtcgctggacatctcctaaataatcctcagccggtacttctgctagtccgtgccatgcttatactggtgatcaagatgcctatgtctccaccaccgtcgctcagctgcttgcctctgtgttggctcgccggacctactgtttgcgctgtgcttaaggtcctactcaccggtcttctcgtcgacagcgccagtcgtgtctcccaccacgccgacactttttctccatcgctcgactccgtgctcagcgctctcaccatcaccgcgtctctcctcgccggtgttcgccgggcatacgctcaacctcgccaccgtgggacttacctctcctccaaaccgtgttcgccgc

SEQ ID NO: 275139 - DNA, 602 bp, Zea mays
gctgccgaggcggatgcggatgacccctcctcctccaccccctcgcttccgatggctgtgctcgggggcggtggcggggagggccggagcggggtgccgaacaagctcgtggtggcggccctcgccaccggggaagaggccgcgccggctctctcccccgatacggtggtcgaggtgaatagtgaggaggaggtgccgtacagaatggccgtccacccgcgtggcgatggcgtgttctgtgccttccccaacggctgcaggttgtatcgatgggaatcacaggaaggagagggaccacagaggttggctttggagccggaccaggatgctttagcagagctgaaagatgtcggtttgcagttggccgtatccttcagtggagaaggttcaatacttgctattggtggtgaagatgggtatttaagagttttcaactggcctaccatggggtctgttctcacagaaatcgatactaaaacatcgattaaggatcttactatctgtttggacgagaagtttcttgctgagaataggagcagtggcccatgtagagtgggtggttagcagtcatctgaagttgtagccagtctgccaagagatac

SEQ ID NO: 275140 - DNA, 432 bp, Zea mays
cccacgcgtccggttcggcattggtggaatatgtaactcctgtgttgatcctgcaaatgctttaatcattactcagtgtggtggaatcccattggttatacaatgcttatcgagcccagtgcggaatactgtgacttatgcgcttggggctttgtattacctttgtaacccttcgacaaagaaggagatcctgaaaccagatgtagttagtactataagagagtatgcttcagctggaactgtgaataacaactttagcaatctggctaatgctttcttggagaaacatgttgatccatgatatgacaattttacagggtagactaaagcttacacatttcgtgtacctgtggtgttttcatattctggatatgaactaaagaaactagagcttagatctcatgccgtctgggacacgccctattacaaaaa

SEQ ID NO: 275141 - DNA, 792 bp, Zea mays
gaaccgaaagttcgaggtgtatgagaagcagatgaaagcggccaggaagtctgggagcaaggccgcacaggataaggttaagggccaggcgctatcaaaggctgctaaagaggccgccaagaacaaggggaaagggaagagtgctgcagatgacgatgatgaccagaaacaggtagctgtgccgcggaagtggcgtgactacagtgttgagttccatttcccagagcctacagagctcacaccacctctccttcagctcatcgaggtagggttcagctaccctggcaggccagacttcaagctctcaggtgttgatgttggcattgatatgggaacacgcgtacctattgttgggcccaatggagctgggaagtctaccatacttaatttacttgccggtgatcttacccctactgaaggcgaggtaaggaggagccagaagctgaggattggacgatactcgcagcattttgttgacctactgacaatggaggaaaatgcagttcaatatttgttgaggcttcacccggaccaggagggaatgagcaaagcagaggctgtccgcgctaagctcgggaagtttgggttacctggacacaaccatctcacgccaatcgttaaactatccggcgggcagaaggcccgagttgtgttcacctctatatcaatgtctcagcctcacatactcctgctcgacgagccaacgaaccacttggacatgcaaagtatcgatgcattggcagacgcgctggatgagttcacaggaggtgtcgtcttggtcagccacgactc

SEQ ID NO: 275142 - DNA, 929 bp, Zea mays
  unsure (1)..(929): unsure at all n locations
catttgaactcatctggaggaagttntgtccatatatccggatgatgtatgaaagtttctctggtgtgatgattcctgttctctatgtaatggaatgcgcaatttcagggaagattctatggtcattgacgttggagaaccaaccgactgggtgaaaatcaatgtgcggcagactaaagattgctttgaagtctatgcactagttcctggacttctacgtgaggaggtgcatgttcaatcaaatcctgctggacgtctggttatcacaggggatccagagcagcccgataatccctgggggatcactccgttcaagaaggtggtcaacttgccatcaagaatcaatcctcaccaaacatccgctgttgtcacgcttcatggtcagctgtttgtgcgtgcaccatttgggtctcctgatatgtagatatgacatcatttttagttcagttttgttgactgtggcacctcttcaccggtgatattccttgatatcactagggtttatgtcagttctgttgaggaaataggatttcatttgagcagatacatgatgtcaagctgacttagcagaacccttctgtggttggatgcagaacccttctgtggttggatgctggttgctggtgttgcgatctgttgccaccttgtttattgttatagtagtggccataaaattagctggttcatgtgtgtattccagtttcatagagaaaggacatgttggtcgtagtagggctaatttgacattatggttactaattattctttaaactatttgagtacacgtgtgttacaactgggacatataattacataataacttatattctaaatgtgtcttatattgttataagaaaatggttcataatccatttggtatccttgccatacattaaatttggtttttaaatttagttgtttcacttcct

SEQ ID NO: 275143 - DNA, 488 bp, Zea mays
  unsure (1)..(488): unsure at all n locations
ncggtgatgttacatcattgggctcactgaatgacttcctgagtacttcaagatcacatgatgaatatttacagctccagtcagatttttccaaaacttccaggttccgtgcctcggctgctagtgcaattaagccaagctctgtctatcaagccagcctaagtccgagatctggcacttttaaagatggggtaccaagggcttcatgtgcaagggttgttgggagggacaagctgaagcgtcgtgtggaatggttaggcccgttaactgctccgcttgatacgaatcctttgacaatcaaccctgattctgccagtgagaagtgtgatgcagattgttcaaagaacaatgttagctcagttccgttggacctgcctctttcgtttcccctgttgccttctatttactcccttggcactcgtcccgttcctgaggtttctttggagaaaccagttaagccttactattgctggtgcccaccatgccca

SEQ ID NO: 275144 - DNA, 745 bp, Zea mays
  unsure (1)..(745): unsure at all n locations
caactggcagcatcagaaatggcagttgcatatagctcctcgaattgggtattattagttgagggatgacatccatctactgctgattccaagaacggaagcatttatctgatgtcctgttaagtgtgtgcaaggtcattggatgactgcattccatttggcttatcgattggttttattttgcacaaaatcggatgtcattccatttggcttattgagagccctgaagcaagattctggtatttcaacttctggaccaatcagctcagtctcttgttcgtgagcaaaataaccttcagttggcacatcttccagcactacaagattatcagaatatgcatactcatggaatatagcttcaatcctttgccttttctaacaagttgggttaacacttgagatatcatcatttaactgggaagggccatcgtctaaccacttataactgccattttcaggataatgcatttgcttataccctaacttgtaatcaatactggcaacattgtcatctgggcggcatgaattagtgatccttccagagaaacgaactatgcaaaacaaatgtcatattaataatctagaaacatgtttgagatgggttttatctattgatgaggaacctgttaagaaatgtttgattcgcctgtagctgcaaggaatgctaactttnttttggttggtctctgcggaggatgccattgtcagttgtaaatattggcagcatattaggaaacatattatc

SEQ ID NO: 275145 - DNA, 420 bp, Zea mays
ttctctttcacgcgtccgcatccatctactgctgattccaagaacggaagcatttatctgatgtcctgttaagtgtgtgcaaggtcattggatgactgcattccatttggcttatcgaagccctgaagcaagattctggtatttcaacttctggaccaatcagctcagtctcttgttcgtgagcaaaataaccttcagttggcacatcttccagccctacaagattatcagaatatgcatactcatggaatatagcttcaatcctttgccttttctaacaagataatgcatttgcttataccctaacttgtaatcaatactggcaacattgtcatctgggcggcatgaattagtgatccttccagagaaacgaactatgcaaaacaaatgtcatattaataatctaaaaacctgtttgag

SEQ ID NO: 275146 - DNA, 628 bp, Zea mays
ctcctccagagccagccgccgtgcgctctcgctctccctctgtctgcgacgagacttggtgggctaccgccgctgcgcttcgccaggtgctgacgccttcgccgatctcttcgccggcgatagcactcaccaggaatgggcctgtggacattgctggagggttttttgcttcttgcaaatgcgttagcgatattgaacgaagaccgcttccttggtccaaggggatggagcatgtctgaagtctcaggaaacgggcaaaccaagtcgttcaagggccagatcgtggggcttatctacgctacgcagtttctgcggatgcccttaattgctctcaacgttctcatcatcgttgtcaaattggtgtctggctgagcctgatgaattggtatctgttccacctttatgtaagagctgagagatcccaaatttaattgtactcaaggttgctgtaaatatgctgcttctgttgattctaatgtggatttctgttattgttgtcgtaaattaatttggtcagaaaatgactgtcgacattcatactatccaagccggcactttattgggggtgtctttcttttgtacattaatgaattcaagacatatttgcaacgtccttgtatgttttgtg

SEQ ID NO: 275147 - DNA, 326 bp, Zea mays
gccgctgcgcttcgccaggtgctgacgccttcgccgatcacttcgccggcgatagcactcaccaggtagtcccaccctcattctctcccctgtctgctgtgcgaaaccgagatcccaaactgtcttgatctatcttctatctggctatttgatctgatctctacttatttctaactgtttgcacaaaaaggccgtacatgtgtgcaccacgtccctttactagatccgcccctgatttgaacagacatagctataatctgcaggaatgggcctgtggacattgctggagggttttttgcttcttgcaaatcgttacgatattgaac

SEQ ID NO: 275148 - DNA, 1514 bp, Zea mays
ttgttttcagcttctgccagacctatgcgggcgccgccgtcggcggggccgtcaagctcaaccacggccatgacatcgcaatcaactggtcggggggcctgcaccacgccaagaagtgcgaggcgtcgggcttctgctacgtcaatgacatcgtgctcgccatactcgagctgctcaagcatcacgagagagttctgtatgtcgatatcgatatccaccatggtgatggagtggaggaggctttctacacaacagatagggttatgactgtctcgttccacaagtttggtgattatttcccaggaacaggggatatccgtgacattgggcactcaaaagggaagtactactccctgaatgtccctctagatgatgggattgatgatgaaagctaccagtccctttttaagccaatcatgggcaaagttatggaggttttccgccctggtgcagttgtgcttcagtgtggtgctgattccttgtctggggataggttgggctgcttcaacctctcaatcaaaggtcatgcggaatgtgttaggtatatgaggtctttcaacgttccattgttgctccttggtggtggtggatataccataagaaatgttgcacgctgttggtgttatgagactggagttgctcttggccaagagcctgaagacaagatgcctgttaatgagtactatgaatacttcggtccagattacactcttcatgttgcaccaagtaacatggagaacaaaaatacacgacaacaactggatgatatacgatctaaacttctggataatctttcaaaacttcgacatgctcctagtgtccactttcaagagagagttcctgacacagaaatacctgagcaagatgaagaccaagatgatccagatgaacgacatgatcctgactctgatatggaagtggatgaccacaaggctgtggaagagtcatcgaggaggagcattctaggtataaaaatcaagagagaatttggtgaaaatgcgaccagagtacaggatggtggcagggtcgcatctgaacatagaggactggaacccatggcagaagacatcggttcctccaagcaagctcctcgcagatgccagtgcaatggccatcgatgaaccaagcaatgtcaagaatgaacctgagagctcaactaaattgcaaggccaagcagctgcgtaccacaagccatagctgcgaccatcaagagttgctgggtttctgctaggcaacttcctgcttgatttggacagtccagaaaacagaagtgaatccgcaatacgtccctgccatttcaaatttgacttggttacacctatctgtgacaatgttaatgtaatgagatcccatggcactagtgaagttcccaggtgtccacctgggattgcttgcggttgagagagacgatagtctgatgacccatgtatacatgaagcccatgatctcagttgtacagtcattagccaatacaaatatgcagtggactaaagggtgattcattgcgtgttctt

SEQ ID NO: 275149 - DNA, 701 bp, Zea mays
cgagaatggtgtgacagctcaagatattaatgcagcaatgttcaataaggagccagggaaagttgtcgatgaattcaagctgcgtgtggtttatgtgccaacaactatgcccaacccaatccctgaagaatctgaactagggagttccactccctcattttcacaagaaaacgggatcgatcattccatgacgccactatctgtatctagatcgtctgctgaaacagcaaaggagaagccctctgaggcaacttctgtgatctccaagctaactgaggagaaaatgtctgctgttcagcagaaccagaaattacgccaagagctggagcttctacggaaagagagcagcaaaaccggcggcggtttctccatcaccttcttgtttgtcgtgggcctcctgggcatcgtcgttggctacatcctcaagagaacatagtggaacggtgtctccagcagatctctactactcccattaaaggacacccacccaccccacaggtggggtggtatgcctctctctccccatgtgttttcgctcctaatcggagcgccctgttctaacgtgtaacaacagcagcactcctagaggctagaggcctccggtctgtgtacatcattatggtggcccatacttattctctttcttccagaattcatttcggagttggtagacttgctttaacggaaatgtatgaactgat

SEQ ID NO: 275150 - DNA, 520 bp, Zea mays
caaaggggggcgaacaaaattcgtaccttgccgagctgttgaggttggaagaagttgccaaactacagggtgttggtcgttggagcaaggaacctggtgctgctgaagagtcaataagagatcttccaccatccgcaattggtgaaggaagtggttttgatgcaaagggttttgcggtttccaataaaggcaagagtttggaggccattgttgaacaagttcgtgatggcagtactgttcgtgtgtatttactccctaatttccagtttgtgcagatatatgttgctggagtacaggctccatcaatgggaagacgtccatcggtacctactgtaattgctgaaactgatgataatgctaatgtcgcgaacgctgaagatcctgagggaacacctgcccaactgactacagcacaaaggcttgttgcatctgcagcttctgctgaaatttcaccatataggtatggaagataagcctatgcactttacataggctatagttttcaacatatatttgcgta

SEQ ID NO: 275151 - DNA, 1794 bp, Zea mays
cgaggagattgaagggagtggcgatgaggaggcgatcggcgatagggagggcgatgaggacgggggtgacgagaagggaggaggcgagctgggagaagaggatgatgcccatgaggaagaagatacggtcgatcagaatgacacgagtggaccagttgatccttctaattttttctcttcttcggatcgggcatcatttcatgcaaattcattccttgagcttaacttgtctcgtccgctagtgcgagcttgtgaagcacttggctaccagaaaccaactccgattcaggctgcttgcattcctctggcattaactggaagggacatctgtggtagtgctattacaggatctggaaagacagctgctttctctttgcctgtgttggaacgtctactttttcgtccaaagcgtgtacctgcaattagggtgcttattcttactccaaccagagagttggctgctcagatccatagtatggctgagaagttagcccaattcactgatatcagatgttgtctcatcggtggagggtctttcaactaagattcaagaaggtgctctaaggtcaatgcctgacatagttgtagcaacccctgggcgcataatagatcatctgcgcaattctctttctgttgggcttgaagatctagctgttgtgatccttgatgaggctgatcgcttgcttgaattgggcttcagtgctgaaattcaagaactgattcgtatgtgtcctaaaaggaggcaaactatgcttttctctgctacaatgacagaagaaattgatgaacttgtaaagctttcactaaacaagcctgtacgccttgaagctgatccttctctgaaacggcctgcaacattgactgaagaggttgttaggatacgacgagcacgtgagtcaaatcaagaagctgttcttcttgcactctgtttgaagactttcaagcgaagtgttatcatttttagtgggacaaagcaatctgcacacaggttaaaaataatatttggtctctctggcatgaaagcagctgaacttcatggcaaccttacacaggcccagcggcttgaggctctggaacttttcaagaaaaaagaagtagattttttgattgcaactgatgtcgctgctcgtgggattgatattgttggtgttcagactgtaataaatttcgcatgcccaagagatgtgaaaacttatcttcatcgtgttggccgcactgcgcgggcaggaagagaaggctatgccgtgacatttgtaaccgatgatgatagatgcctcttgaaagcaattgcaaagaaggctggttcacagctgaaaagtcgcattgttgcagagaaacctgtggctgagtgtgcacgactgattgagcaactagaaggccaaatttctatcatcattcgagaagaaagggttggaagagaagcaagaaaagctgaaatggaaatcgcaaaggcagaaaatatgatagctcataaggatgagatatactcacggccaaagagaacctggtttgctactgaaagggagaagaaacttttggcagcagcggctaaagaatctttggatcacggtaagagtacctctggagttattagtgctaagaaggccgaagaccttcgtctaaaagagaaaaggagacgagaacatgagaagaatctaccaaggaagaagcgccgaagattggaggcccagcgtgagatgttggaagatgaggatgacgagaaaacaaaggaaaatgatagagggaagcaaccaatgaaaggccaatctctagtggatgctgcttaccgaaagg

SEQ ID NO: 275152 - DNA, 479 bp, Zea mays
cccacgcgtacgcccacgcgtccgcggacgcgtggggggaggcagcagctgttctggggcggcgtgattggagatatgaacaaaatgaaaatcgatggcgacaataactttggggagcagaagagccatcaccgatgcaggcgcaagaagcatgatgtgaggattttggatcccctgagttgaagagcttcataaggctaaaagtggtgaagcgtccatgtgttggttgtagtgttccttcactagcagcagctatttatcgatagcatgtctttgttgcagcatccactgatagagcagacaactagttactagtgtttcgacattttgtatggcacagatgtttcataatagttccctagtatctgggcgagaatttccatgagtttatctatgacggcttcaaagtgtagcttatgtgctaagaacatgtgtcttcttggttgtttttggtacacttgttagcatcgctgctggtc

SEQ ID NO: 275153 - DNA, 448 bp, Zea mays
gtcgacccagcgtccgcccagcgtccgtcggaaatctccatcccgcatcgctgaaggagggccaggttgggcatggcaaccttctcgaggttgacgctgaggaggttgccgttcatcttgacgaaccgcaagagctcgtcgaaggagccgaagagcccaagccagaattcaaaattgcggaggaacgaggggctgcggaaccggatctgggcggcgatgactacctggccgacctggtggcttgacaggccgaggctgcggagctcggcgacgcggagagacagggtcttccccacgtcggtgcaaaggagtctgggatcattggcgatgacggttgtgaggtcggtgccggagatgtcgaggcccgccaggaaggcgaggacgacgtcgggcttcgagggagacctgaggtcgaggatccttttgattttggatgccttgaggacct

SEQ ID NO: 275154 - DNA, 427 bp, Zea mays
cggcaagctagagacgaggctcgatcagtccactacgctaaacgaggcagtctccgtggagaacaaggggaagccgcagccccagcgtcagcgcgcacctgagcaggaagctccgagcggcttcgtgctccctgacctcaacctcccggcagacgtctgacggctgcctgaatctgtcggtcggtggcgccatcttcagatcgagctatagcacgctaacctcatagctaaactgtacatagaagaagaagctgcgccagaaggaggggggtggggttctgaacggccacacttaccaggatactgaggcagaagaagaacggaggttatctttgtgtcataagttgtcgacgtttagggtttagagccgtcgtgatcgtatcctccggcctgaacaacgttgttttatgttcagagcggaggaccc

SEQ ID NO: 275155 - DNA, 1291 bp, Zea mays
cggctcgagccgaaccattcaggaaaccttacagtggactttctccagatagtatgatgtgccaagaaggaaaaccccaggctgccgttgatagaactcttgacagcaaggttttcacaggatgggttgaaactgacaatccgtggacatctgatgacgagactgataataatgagatgacttacgtgaatcttcaactgaatcctgaacgatacactggctatactggtgattcagcaagaagaatatgggacgctatttacaaagagaactgtccaaaatatccctctgaagaactgtgccatgagaagaaggcattgtacaagcttatttcaggattgcactcctcaatttcagtgcatattgcttatgattaccttcttgatgaatctactaactcatggggacaaaatcttcctttgttgtatgaccgcgtcctgaagtacccagaacgtgtccagaatctgtacttcacctacctgtttgttcttcgggccgtgacaaaggcagcaaattatcttgagcaggctgagtacaataccggcaatcctgaagacgacttgaaaacagaatctcttgtgaagcagttgctttacaattccaagttaagatctgcatgtccattgccttttgatgaagccaaactttggcagggcgaaaatggtcctgagctaaagcaagagattcagaagcaatttagaaacattagtgcaattatggactgtgttggatgcgagaagtgccgactgtggggaaagctccaagttcatggtcttggaactgcactgaaaattcttttctctgttgatggggacagccatatgaatcagccattgcagctgcagcgaaatgaggtcattgcattgttcaatcttctgaacaggctctcagagtctgtcaaatttgtacatgaaaaaggatcatcaattgaagaagtcattgaggaacagatcccttcaacggttcaaaagagtgtttccatgccgaatcttaaactggacttcctctgagatgtatgagagtaatttgtagttatacaagattgcaatgacatgctggaagattaacatagacatgtacggatataacgaaagattaacatgtgctggaagcagtttcatacatacttgtgttgcagctgtatttaagagaatgagagatacagatacttttgagctaaatgcgatgacacagttaacatagcccccccgcacctcaaacttttccgtgtatagggttcctccgctgtaaatcaaaggatgtcacccctctgcactcgccatgatcaaga

SEQ ID NO: 275156 - DNA, 639 bp, Zea mays
gatcgcgtgcggccgcccttttttttttttttttggtccgacctgccggatggcttggcgatgccgatggccaattcaccactcgccattgtagaagaaggatcagtaccacatagttgggttttcgagcattcaattgtttcatcatcacatgcttctaaggcaacgcatggctttccattatcaaagaaaaccaatggaggcaatgcctctgtgccttctcatgtcatgtcatcaactatgtttacaagtgtgaaaggtccagttgcctctgcttctgagacaactaactcccaacaacgcaacagtaacgctaaaagctgtcagtttccaggatgtgtgaaaggagcaagaggggcatcagggcgttgcatagcacatggcggcggtaggcgttgccagaaacctggttgtgagaagggcgctgaagggaggacaatctattgcaaggcccatggtggaggcaggagatgtcaatttctcgggtgtacaaagagtgctgaagggcgcacagaccactgcatagctcatggtggtggccgccgttgcagccatgaaggttgctcccgagctgctcgtggaaaatctggccctgtgtatcaagcatggtggtggcaaaaggtgtcagaaggagaactg

SEQ ID NO: 275157 - DNA, 492 bp, Zea mays
aacaaaactgtggaattctataatatatcggaagttaacatgtttcaggattcgtccggcgctaagattgcaccggggctgtatttaccagcacatccgtgcttctacgtaaacactatataacaattataagcagtttcaattgcaaccatataaacactttgaaggagcgtcagtgccttcaactaggtcactgacccatcttgatctttatttcagctgtgcagatatctatatttgcattactccaaagtctcgaacaaactccaactctccatgtttgcctccaaattttccatagatttcgagtcatcagagaatcgagctccatatgtcgactctgaatctcctctcttttgggtgcggcgtgcattcgccttttcttcataaaaatcaaaatcatccagaattgatgttccctgaggctgttccttgaaaattttcaacatttgcacaccttgcggcaacccaatagtagcaagagcccggagc

SEQ ID NO: 275158 - DNA, 560 bp, Zea mays
cccacgcgtccgcggacgcgtgggcggaccgtggcggacgcgtgggccgtactccgcgctacaccctctcatcttgccctccccgaacccgcgcctcttcctgaacgcccaagacgctaactctctccctctcgtcctcctccctcacctccatgtcctcctcctcgctgcccgcccccgtcaccgatgtctgggaggtcgtcacccccactgccccacctgttgaccacgtggacggcgggcttgatgactgcgccatcttcccgccgcggctgcatgaggggctgggcctggacggcgagcccgaggaggtcccgccgatgccagcagtggcgaaggaggagaacgaggaggatggtgaatacgagggggtaggacgatgagtggctgtggggatgggagaggtgcagcttggcggcgaggcgcgcttgggcggccggtgtcgggatcgttcaggagcgggtgctcgagcatggcgcgtgtgggtgcccggcggtgaggctcgccgtgtggtacattgcggtggctgctgctgtgggggggacacttctgtacgcccg

SEQ ID NO: 275159 - DNA, 640 bp, Zea mays
gtgtgtgcacaggattcttgatcatttcttggcaatggaccaagcaaatggtggcgagtccccatgcttggatgatgtcatggcatccccatccttgacaccgatcacaagtgttgccaagctaattgacggctatcttgcagaaattgcaccagatatcaatttgaagcctcctaagttccaagctctggcctctgctattcctgaatatgcccggccactggatgatggcctttatcgtgccattgatatatacttgaaggctcattcctggctgtcagaagctgaaagggagcagttctgccggctgttggactgccagaagctctccctggaagcatgcacccacgccgcccagaacgagaggctgccgttgcgcgtggtggtgcaagtcctcttcttcgagcaactccagctaagaacctcgatcgcagggtgcctgctggtctcggacaacctcgaaggctccaggcctctgcggagcggcattgccacatccggcgaggctggaggctgggccacggctgtccgagagaaccaggtcctgaaggtcggcatggacaacatgcggacgcggctggccgagctggagaaggagtgctcgagcatgcggcaggagatcgagaagctgggcgggcgc

SEQ ID NO: 275160 - DNA, 469 bp, Zea mays
ggagggcaccaagctaatattccagttgcaaaaggagccctaggaggaggaagcaacgagccatggcctccggtggcccgaaacccaaactggcctacatcatcttgtacgtgagggacgtggagaaggccgcctccttctacgacgccgccttcggctacaccgtccgccgcctcgaccagtcccgcaagtgggcggagctggagagcggggcgacgaccatcgcgttcacgccgctgcaccagcgggagacggacgagctgtcgggggcggtgcagctgccggactcgtcggccgccgggaggggctccgtggaggtctgcttcgcctacgcggacgtcgacgcggcgtacaagcgcgccgtggacagcggggccgtggccgtgagcgcgccggaggacaagccctggggccagaagtccggcttcgtgcgggacatggacggcaacatcgtgcgcatcgcgagcta

SEQ ID NO: 275161 - DNA, 332 bp, Zea mays
gggcgccaagctgatattccagttgcaaaaggagccctaggtcctaggaagaagcaacgagccatggcctccggtggcccgaaacccaaactggcctacatcatcttgtacgtgagggacgtggagaaggccgcctccttctacgacgccgccttcggctacaccgtccgccgcctcgaccagtcccgcaagtaaaacacgcgcgcccgcctgatccggatgcgcgcctaatctgccgcatctgcgcgcctttctgggttttactttgcaggtgggcggactggagagcggggcgacgaccatcgcgttcaccccgctgcaccagcgggaga

SEQ ID NO: 275162 - DNA, 428 bp, Zea mays
cctacgcgtccgcccacgcgtccgcccacgcgtgcgggaggcggatctcgagctcgagtccttcggttacgaagaccatgaccacggccaccaccaccaccaccaccatcaccacagccacggcgacatggagacatcgcccatgggcgtgtggctgagcgcgatggggtgctcgctgctggtcagtatggcgtcccttgtctgcctcgtcctcttgccggtcatcttctttaaggggaaaccgtctaaggccatagtggattcgcttgcagtgtttggggcaggagctatgcttggagattcatttcttcatcagctgccacatgcttttggtggagggcattctcactcgcatgatcatgagggtcatgatcatgctcatgctcatgagcatgcacatgcacactcactgcaagatctatctgtgg

SEQ ID NO: 275163 - DNA, 697 bp, Zea mays
atccattgcgtgttccaaatccgctggcgtacgtagaacacagcatctccggtagcgtcaccgtaggcctcgcaagtaaactgacctgccttctccgctttcccctccgtctccgtcgggagtcgagacaaagggagccagagttagtcccggcgccgtgtcgcgagcggaaggagaaggactgaaggaggcgacgatgcaggtgaagcagaaggtctacgagttctacaaaggcacggtggagcgggtcacggccccgcgcaccgtctccgcgttcctcgagaagggcgtcctctccgtccccgagttcattctcgccggcgacaacctcgtcgccaagtgccccacctggtcctgggaagcgggcgatccaagcaagaggaagccgtatctccccgccaataagcagttcctcgtcacccgtaatgtgccctgtttaagacgtgccatctcggttgaggaagagtatgatgcagcaggagcagaggtggttctcgatgaggatggcgaaggctggcttgcaacacatggagtgcaagcatcaaagacagaagaggaggaagacattccctctatggacaccttggacatagggagatctgatggaataaagtctatcccctcttactttagcggtggcaaggatgaagaggaggaagatatacctgacatggatacttatgaagacacaggggat

SEQ ID NO: 275164 - DNA, 459 bp, Zea mays
ccctctcgtccgcaacgaccgaagctttttttttctttcttttcatcgccgccgctcggggttcaaggttcagcgcgtccccgaatgacgggcacgtacgaggcctccgaccgtcctcctcctcccaactccgccggctaccggaccgacaaagtccggcgaaagccgctgacggcgcagaagaggaaagagatcaaggaggcgttcgacctcttcgacatcgacggctccggtcggtgacgtgctagtgatgtagcgtttatatatacaaacacatgcgcatgtgttcgcccatggcggccgctgtgactttcacctttcacctgcttgcatcctccaggcaccatcgatgcaagggagctgaacgtcgcgatgagagcccttggattcgagatgacaccggagcaaatcgggcagatgatcgcggaggtggacaaggacggcagcggcaccatcgac

SEQ ID NO: 275165 - DNA, 511 bp, Zea mays
cgccggagttactaccccgagttacctcgctctctttgtcaggcacttctactcgcagctatcatcgagatctcggagctggcgtccagttgcacaacggcgatgacctcgcctacagttttcgcgccaagaaggccgtcctgttcaaaccagataatgggttcctaggtctgaaccttaaagggcgcctacttaccgataaagagttgaagccgacgaagacaactggatccgttgaactggcatggaccatacttgacttgaaacagggccaagacgtaaggctcaaagttggttacgaattgtgtgacaaggtgccttatttccagctcagagagaacggttggacgctgaatgcttatatggatgggaaatgggatgttagatttgaaatgtgaatccacttgctcagtagtgttaccaattctacttgtctgtactgcacttggaactgttgatctggtaatatgtaaactggagagctttccatattcatctagttttgaagcgt

SEQ ID NO: 275166 - DNA, 1088 bp, Zea mays
gtctggaagttgtttttttttctgaaataagtatgagggagatgttagttgtaaactgcacaatcgcctgctggcaattgatagttggctatttatctaaattccaagcatgccaataatctaatgcctcttgataagtgcttctgttaagttcgtgttattatttgttcaacacgccaggaggcagaaaaagaaaagctgatgcagtgaaggaagaaaatacagagacacctaaaagtgatgctgttgatcatccaaagaaaagaggacgtccaaaaggtgtaagatccagcaatggcacacctagtaactcagctactccgagcacaaaggggaaaactgccggcaagaataccaaagaaacaccaaaaactggccccaatcttataaaggaactcgagaagagctccaaggacaaagctagtgtatcaactgagacaaaggatgaattgcctaaagatgacaggagtgcaagcagacctaaggaggctattagcaaaggcaaggattcaaaagacgaaggcaagtccactgaaggaaaagctaggccaggtcggaaactaaaaaatgctggtactcctgcgggtgacgctgacaaagagaaggggaaggagaaagaagttaaggcagctgaaatagagcaggaggcaccaggaaatgcttccacagggaagacgcgtaggaggccggcttgaagttagcgctgatgaacttctcttgtaaatggatgtgctccctcctaggtttgctcctttaggaccttgtattattgagtgttaacttggaatttcgtctgattggtccctagtagttagttaggtgtggaaccaacctttgctatagccgtagtgttaggagtaccatgtgttcgttgtggtcaggtccatggtgcattggtgctgagccttaagcggaatgaaccctatgctcgctgtgaggcccatggcatcgtgttgtcgggtggtgttgtagcttgttgatgccctattttatattattataagcgattgaagcagtggattttgtagccaactgtagaagaacctattttaagttttttagacgaaaagagaaccattggttatttt

SEQ ID NO: 275167 - DNA, 1237 bp, Zea mays
ggagaaccatctaagaagactcaaaagaacaatttaaaacagcataagggtgaaactctttctgaggatgatcctgccaaggatctgagcttaaaggaaatgatatcgctgaaatcttcgaccaagggcccaggtagaaccaaagggcaaaccacagagaatagcacacctaagttgaagcaagaacaagaaactgatgagcctccacgttcaaggaaaaacaaaggccttgatagaagtctagttggtgcaaggatcaaagtttggtggccagatgataagatgttctacaatggtattgtggagtcatttgatgctgtttctaagaggcacaaggtagcatatgatgatggggatgtagaggtactactgctgagggaggaaaagtgggaattcatcagtgaggagaaggaagcttctatggcatctgaaacgccacgaggcagaaaaagaaaagcggatgcattgaaggaagaaaatacagaaacacctaaaagtgatgctgtggatcctccaaagaaaagaggacgtccaaaaggtgtgggatccagcaatgggacacccagtacctcagctactccgagcacaaaggggaaaactgccggcaaggttaccaaagaaacacctaaaactggccccaaccttaaaaaagaacttgagaagaactccaaggacaaggctaatgtttcaactgggacaaaagatgataaggtgtgtgagcaaacctaaggaggctattatcaaaggcaaggattcaaaagacgaaggcaagtccactgaaggaaaagctaagcctggtcggaaaccaaaaaatgctggtactcctgcgggtgattctgacaaagagaagcaggaggtagaagtcaaggcagctgaaatagagcaggaggcaccaggcaatgcttctacaggaaagaagcgcagaaggaaggcttgaagctacccctgatggaacttcttttgtaaatgaatgtgcaccttgtattattgagtgttaactcgcaatttcgtctgtttggtctctgatagttaggtgtggaatcttcttttgcaatatctgtaatgctaggcttttcatgtgttcgttgtggtcagatacatagggcattcgtgttgagcctttaccgtaatcaacccaatgctccctgtgaggccctgggcatcgtgttgtcaggtgctcatgtgtcttagggatgttccaatttccctcgcttgtctcaaaagtggcctttgtagc

SEQ ID NO: 275168 - DNA, 387 bp, Zea mays
agctgaaatagagcaggaggcaccaggaaatgcttctacaggaaagaagcgcagaaggaaggcttgaagctaacactgatggaacttcttttgtaaatggatgtgcaccttgtattattgagtgttaactcgaaatttcgtctgtttggtctctgatagttaggtgtggaagcaacatttgctatagctgtaatgctaggattaacatgtgttcgttgtggtcagatgcatggtgcattggtgttgagctttgagcggaatcaacccaatgctcgctgtgaggcccatggcatcgtgttgtctggtggtgttgtagcttattgatgttctatttattagaagcaatctaagcagtggattttgtaccacaaaaacaacaatttggat

SEQ ID NO: 275169 - DNA, 956 bp, Zea mays
cagcatctgccaaaagttcccctatttggtcaaaaagaaattaaaggaaggggaggaggttagacgagttgctcaacttgaatggaagataattgagagtgatattcagaaaccattcacaacttcagggctagagtttgttcccttgccggtgatccatggcgaagactacatttgtctgggcttccttttcggaaggaaatcataagttgcttacatatcagatgtttcacggtttcccccaagcacagaatatgcaatttcaaaatctggaggagggcaacttgatttgctcatcttggattgcctatacaggacgggttctcacaatgtgcacttgtgttgggaccagacactagatgctgttaggaggaattgccccaaaagagcactgcttattgggatgacccacgagatggatcatcacaaggacaaccaaacattggaagaatggtccaggagggaggggattgacgtgcagttagctcgtgatggcttgcgtgtctacattgatctgtagccgtgaaaggaaaatatgccatactcagcgaaccgcgccaggctttctggctgatgtaacatccattcccacttgtgaagaaagtgcaaactgactaaaaaggcgagcctatttggtgcatcattttacgtttcgctagtttatacgtgaatcgctgaataaaaaagagaaaaagaaaagaaaagagagagagtagccacttgctagtagctggttcagtgccccggcaaattaatggccatctccctggtaaaggtagtcgaatgttcttgtaatcttgtcaattggaagctacactgcactggatgcatgcccaccagtcgaactgagcatgcgattttttccctcggtcgcgcccgggtcatgtattgtagtactcctcagtgtctttttatttattgctgaatagtgcaaaattatgctatccagcgacaaa

SEQ ID NO: 275170 - DNA, 569 bp, Zea mays
ctctctgcctgaaagttcctcagcctatcctggccactgatcgagtcagaaggccttcagactgcagtgagttgaagtacaaatccaggtcacagttcggtacaaaggtgatcttgaaagatggacagattagtttaatgggcgagggctctccaagcattgctggatcggtagctgggaagccatccgatggacgcctggtaaatagttacaattgtgacttggaagatctcccaatgatgcttctgcagcaggttgccagccaagtaatccactggctccacgatgaagcggtggtccttgggatgaacgtgactagagatttcctgtgcctgtacttggaccttgaccaaggtgaaacactaggcctggtggcacacgttgacccggatgacacctacggctgcgtctcatggtacctcactcttgatcacccaacggaggaagggaagatgtcagcgggtagtccggagccagaggagcgcaggtttttggggtacctttccccggaagtgctttactctaccctgatggacctggtaaaactgtgcagcacaggtgtccaacgc

SEQ ID NO: 275171 - DNA, 749 bp, Zea mays
  unsure (1)..(749): unsure at all n locations
gtgcgcctccatgaggaacggcggtgccaccgaagtcgtcgccggggatgagtcgtcgtcctggccgtgggcaggcgtgttcagggtccccgacgggtggacggcggcgcggagcgagctgggcggggtcatgaaggccaccaaggccgtggccatgttccaggcgctcgccgtcaagagaggcgccgtcctcaaggacaggactgaggtggtggacatcacctcctccaagcgaggtgaaggagaggggtcaatcatctcggtgaggacgtccagcggcgaggagttccacggcacgaaatgcatagtgacagtgggcgcatggacgagcaagctgatcaagtcggtgaccggcctggagctgccggtgcagccggtgcacacgctcatctgctactggaaggtgaggcccgggcgcgagcaggagctcaccccggaggccgggttcccgacgttcgccagctacggcgacccctacatctacagcacgccgtcgatggagttcccggggctgatcaagattgccatgcacggcggcccgccgtgcgacccggacggcagggactggtccacgggcgcgggcgacctggtggagccggtggcccggtggatcgacgccgtcatgccgggccacgtcgacaccgccggcgggcccgtcgtccgccagtgctgcatgtactccgtgacccccgacgacgactacgtcgtcgacttcctcggcggngagttcgggaaggacgtcgtcatcg

SEQ ID NO: 275172 - DNA, 720 bp, Zea mays
cccacgcgtttgccaaagtccagttcacccacacgcgcgctcaccggccgcctagcgcgctctgccccccacggaaatctgcagcgaatagaaaggatttccatcctttccaatcccttccaattctttacggcgtccctcaatccccctataggatccaggttgacccgcattgcccgagccagtcggtttccgtttttggaatttttgtttccacgtgctgccgccgccgctcctaggttcttgttacaagcgtggaagacggcgagctatatggcgtgcaatcgcggcgtgaaggagcaggaggaccccagcgcggcgtctgcagccccagctccggcggctgtggctagggcgagggcggcgcggcctccgaggccaaggagccgcaaggggctcggcgtgcggcacctgctgaagccctgccgattccttgcagctgtccagagggcgaatgccagggtgagggaagcgggggaggcgaccctcgtggcagcgcttgcggcggcccaaaaggagagcgagagggagaacgaggtggtggccgatgtatgcggcgggtggaagagtgaggggggaagtttaaatttgtggatactcaagcattagaggcagaagggtaaacatggaagacttctatgacataaaatcttctagagttgatgataagcaaataaatttttttggagtatttgatggtcatggaggtacccatgctgc

SEQ ID NO: 275173 - DNA, 541 bp, Zea mays
aaagactggaactcctattgcagtgcagcatgcgccacgccaccagcagaaaaaccgcgtgtcgccccaaagcctccgactccagcaaccacaagctatgctgatcggccatatgtctgcccctatgaaggttgtgacaaagcatacattcacagttacaaattgaaccttcatctaaaaactcagcaccctgaacacgggcaagaggaaaacggtaaggtcggtgcttctggtgggcagcatgctgcgaacgaacacacttaccagtataactatgccgaggttggcgagattgcaccaaaccccaaaaggagcaagacgaatcatgggcacaaggtccactcatccaaagcctacaatgccaaggtttcgagagcaatgccttctgacattggcgtcaggaaccagtggccaggtaaagctacgtaccaagatgatagtgaagagacggaagaagatggaggcaacaacattgaagatggctggagatatggcaacaatgatgacgatgaggaaacaccagatgaagattgacctttat

SEQ ID NO: 275174 - DNA, 491 bp, Zea mays
cccactcgtccgaggagaggagcttggagcaacatgctatgaacaaattggttgaaagagcatacagaaaactcaagggtgggcggattggctctagtcacaaggctggtgtcagtaaatctgccaacaaagctgcaaaacagctagccttggcttttgccaaacgcactcttgttcgatgccacaaatttgatgaaacagggaaaagctgcttcagcgagccttctctttggagtatcctgtctgcacccttgccaagcagtgattcaaaatgcacagagggtgtagagaggctgaagcatcaaaagcttgacagaactccattcgaccaaggtggtgcaaaatggaaaaaggtcgacagggaacgggaccacaacagggatgcatccgcgaagggctccggattgaaatcgggacgtcattcatcaggtggtagcggcaggagcggcgagcgcataaacaagacaaagccaaagcaaaagcttgcacag

SEQ ID NO: 275175 - DNA, 716 bp, Zea mays
cgcacgcgtccgcccacgcgtccgcccacgcgtccgcggacgcgtgggagagatatggttgttgaatttccaaatagccacaatccttacactgtcaacagattcggagaaaatgaacttcaagctagtgccataacatctaattttgggctgagcgtggatttcgtgcactcaaacagtacttctgtggtacatcagagcatgtgcaatggttttacagcttcaagcaatttcattaattcaaacagtgaaaattcagttcatagtgagaatttatcagacggactaaattttacagtatacccagaaagtggccctttgcatgacttgataccactgactccacggcaatgtcaaaatccagggaaagatttccctttgtctccatatgagtatcaatatgggcagatgtctatggaagataagattttaattgagctgcaaagtattggcatttgtccagagacagtgccaaagctagatgacggagaagatgaggacattaataaaatgatttcagagctgaggaaaaggctgcatgatcaggtgaaccagaagaaatgcagattacataagctagataaatcaattcaagatacaaagaatattgaggagaggagcttggagcaacatgctatgaacaaattggttgaaagagcatacagaaaactcaagggtgggcggattggctctagtcacaaggctggtgtcagtaa

SEQ ID NO: 275176 - DNA, 720 bp, Zea mays
  unsure (1)..(720): unsure at all n locations
gcaattcatgtctgctttgcaagcatttangcggcgtgttgcatactccaatgttggggatgatcatattgttgggtggagaacatcatctatcagaaaagattctgaactacccaagtgggttgattcaaccaacaagatttacccgcatattgtatatgaggaactatccaaagcagaagctcctgatcaatgtgctgacacagataactgcacactagaagaacaccttttacaaggacttaagcgcgtttcatgggaaaaggtggatgttagtttccacaatagtaaagtaagatctgcagcacatagtgtgattcaggtaaaagatcctgtgatgcatagcgaaggtgccgacgtcatacagcatatgattgaccaatttattctatagtaaaagccctggtctttggaaacagacctggaccaggatacgtcatttgctaactgcgggctgagtcaccagcctggtgagcacgtttatggaaatcccaggtataagacttagtctctgaatggtggatcaggtatatagttatagagggtggaaccacgtgcgcatgcctgttggttcatttagtcatatgtgatcatatacatgttgtacggtgcatgtaactttagtactatccttgtcattgtaaatgctcatttatttatagtattggtctcttacaccgttattttgtgagaatattattagaaaaaaccggatgcttt

SEQ ID NO: 275177 - DNA, 1259 bp, Zea mays
gaaggtaatttttttctgctagtcaagccagggatagggctgcagctgacagagctgctgcggagagagctcagcacgaagcgaggaagagagctgaacgagcagcagtggaaagggctgctgctgaggctcgggaaagacaggctgctgctgcaagagataaaacgagcaaaccagatgatctagagtccttctttggtatgggtgctcgagctaatagtgctccgaagcaaagggctccgactgtggactctatgtttcattctcaaacgcaaaatagagggacttccacttcgacatcaatgaaaaaggcatcatcaacaacaaatattgctgatgacttgtctgcgatatttggaggagctcctacatcagaagaatttcaagaagtagatggggagagcgaagaaagaagacgcgctaggatggaacggcatcaaagaactcgtgaacgagcggcaaaggctttggctgagaagaatgaacgcgacatgcagcaacaaagagagcaggctgaaagacataggcttgcggaaacactggactttgagattaagcgctgggctgctggaaaagaaggcaatttgcgtgcattgctatcaactttacaatatgttctttggccagaatgtgggtggcaacctgtatccctcaccgatttgatcactgctgctgctgttaaaaaagtgtacagaaaagcaacactgtgtatccatcctgacaaggtgcagcaaaagggtgcaaatctccaacagaaatatatcgctgagaaggtttttgatctccttaaggaggcgtggaacaaactcaactctgaagagctcttctaaacagcctcacgactgaacatagcgtcgcccctcagggtctgcacaaggtactctcggaagaaactcacaagctggagtggcttgaggttggtcggggggaaggggaaccatgaagcgaccaagcgaaacctgaactatggttgtaatcacagttgttttgtttcactcccccaattttctttcccaactatctgttgattggatgacaactcacagcgacatgtggcagctgcccaagctgaacctcatccagtaggtgcacattagtgccctgttttgtactgtttgtcctcggctgtatgtaccgtcagagctgaggcttctgaggtcagcgttgtgattttggattaggtacagggcttatttaccatggagagaatgaaaacaatagagatgacccagaataatagattgattgattagagatct

SEQ ID NO: 275178 - DNA, 450 bp, Zea mays
ctcggaagaaactcacaagctggagtggcttgaggttggtcggggggaaccatgaagcgaccaagcgaaacctgagctatggttgttgtaatcaccgatgtttgtttcactcccccaattttctttcccaactgtatgctgattcaatcacaactcacagagacatgtggcagctgcccaagctggacctcatccagtaggccagaaggtgtagtatttatcctgggctgtatgcaccgtcagagcgggggttttcttaggccagtgttgtggttatagattaggtacaggttttttttaagcatggagagacgttttactagataatgatgaatgttgcttgtctgatgccattggcatcgtggcaagttcggttgtcttgtttatagtcaatttctggaacatcacttgcccccaacagttatgcctggcctctcctacttgtggccc

SEQ ID NO: 275179 - DNA, 454 bp, Zea mays
ctctgacaaagaaaatatagaaaatacagctttgaagcatgagcatgtcacaagcaaacctccatcgatactcatggtagaggcacgggtgctcgatttcaatgaatgctccacacctgtgaggaagaaagacgataagaaagtggaaatggttttaggaggacctgcaacatcccctgttacttcctcgcatctttggataaatatgcggtagccctttgaggtgagtgggagtggggatgcttcgcctatgctgttcagtatgtacatgtctgttattcccataatttccaccgttttgaaatacacattccaattagtactttattctttgtgcttggtaccctaaatgtcaattctaaatggaaatacatttttttgtagtgttaagatttgtaatgtgtcatttgattatgttaaatattaaacaaggccatatatttaaattcagagt

SEQ ID NO: 275180 - DNA, 1636 bp, Zea mays
tcaacttctgtaaggtagtggctgtttctgggagtgggcagcaacatggcagtgtttattggaagaagggcagccatgctgtgttatcctccttggatgctagtaaaagcttgttatctcaactcaaggatgcattttctacaatgaactcaccattatggatggatagtagcacaacaaagcaatgcagagaaatagagaatgcagttggaggtgcactggagttagcaaaactgacaggatctcgtgcgtatgaaagattcactggcccccagataaggaagatctatcagacagcgcctgatgtttatgaagataccgagagaatatctttggtgagctcgttcatggcatctatccttgttggaagctatgcaagtattgatgaaactgatggtgcggggatgaacttgatggatatcaagcaaaggacctggtcaaagtctgctttagaggcaactgctcctggacttgaagcaaagcttggaaatctagcaccagcatattcagctgctggccgaattgctccttattttgtagaaaggtttcagtttgataagaactgtttggtcattcagtggtctggagataatcctaatagccttgcaggtttaactctgaatacccctggtgatcttgccattagccttggtactagtgatacagtattcgggataacaacagaagctaaaccaagccttgaaggacatgttttccccaatcctgttgagcctaatggttatatggtcatgctatgctacaaaaatggctccttgaccagagaagatgtacgaaatctctgtgcagacaaatcatgggacgtttttaacagctatctggagaaaacgccccctctaaatggtgggaagttaggattctactacaaagaccatgaaatcctccctccacttccagtgggtttccatcggtacactgtcgaaaacctcaacgacgtctcatcagacgctctgttggagcgtgaagtggaagaatttgacccaccgtccgaggttcgtgccatcattgagggccaaatgctgtcgatgcggggccacgccgagaggtttggcatgccgaaccctcccaaacggatcatagcaaccggcggggcatcctccaacgaaagcatcctcaagtcagtcgcgcagatcttcggctgccctgtcttcacagtccagagacctgattcggcatcgctgggcgcagcgctgagagctgcccacgggtggctgtgcaacgcgcaaggtagcttcgtccccatctcgtgcctgtaccagggcaacctggagaagacctcccttggctcgaagctggcagtcccggccggcgacaaggagcaggaccgggagctcctccagaagtacaccatcctgatgaggaagagaatggagatcgagagacgcctggtggagaagatcgggcgatcgtaggaaaaaaaactcatgaagcgctgctgaggctggcaggaccgaataatttgtgaataaatatggattatctcgatcgtaggaaacaaattcatggcaggaccgaactattcgtgaataaaagtggattatcttccattaaaaaaaaaataaaaaaaaaaaaaaaaaaaaaaaaaaaaaaaaaaaaaaaaaaaaacacccaccgtccg

SEQ ID NO: 275181 - DNA, 505 bp, Zea mays
gtcaaggatgtgatagatggtgatctctgcgagcagtatccctccctcccagccgatatgcaaaggaagattgctgatgagctggacagaactccgggtgaaatcctgaagaagctagaagacatcaggaacaaaatcatctgaaacagcggcttagtgtgaagaaattaggcagggcagtgccggtgctctttgctttaagactgtatccagttcgagctgttgccgcacttcaagatgtgacagcagcgcatccaacaagtttggagcacgctgatctgtacgatctttcctgatgctatctggtccagtcggcgatttattgctgagatagagcatgtacggcaccagaatgagtttttttgtatctcgtagaagtgatttagctgatgtcgttgactgtttacttggcttgatgtaattgagtgaagttattcatgttggattattcgtgtaggacggggttaccttggtaatgtactaccccaagggcttggttgctagg

SEQ ID NO: 275182 - DNA, 811 bp, Zea mays
  unsure (1)..(811): unsure at all n locations
gcaggaaatgaccaaaagagaatacgtcgaagatcaagatgctgaagatcctgatgacgtgattatctcccttacaactcagattgcacgacgggatgaagaaatggctccttatatcacggaatcagaaaggaattacatatttggtgggatttccagtgttgctgctaatgcatcaataaaggcacttgctcaaatgaagtcaataaacttgttaggagtccagcaaatatgcaggaattcgatagctctggaacaggctcttgcagccataccttcaatagatagtgaagcagtccaacagcgattggatcgcgttcgaacgttctatgagttgttaaatttgccttttgagtctttgcttggattcatcgcagaacatgaatatttgttttctgctaaagaatacctgagtgttctaaaggtcaatgtgccgggtagagaaatacctgcggatgctgaacgacgcatctcacagattttgggtcactagatctaatcagacacaatggtgctatttttgactggttatgccttatgtgggctttggctaccaaatggttctccacctgtttccatggcggtgtttgtgtagatttagctggtttttgctatttagtaattttgtttccttttgtatttcacgtgatatattcttttgtatgtcttatcagttatcattgattgtaaatttgtagtgttccggataaaattttcattattgattattggaaatgtgttatctgtctggatgcgatatttaataagctcatcagattcagtgtccaaaaaanaaattnanntaaaaana

SEQ ID NO: 275183 - DNA, 741 bp, Zea mays
acgcagcacacagaacatgctcgctgatactcaactaagtcagtccaggattaaggatgctctaatgcgcaaaaggatcactggtggagttctcaatagtaatagcttaaggacactaaaagacaggagagatttgttttacccattttctcatatcttgcacaattcgaaaccagttgggcatcaggatcttgttggtttggtaatctcaatactgcttcttgcagatttcagcttagttttgcttacttttctccagctgtattcatattctatggtcgatgttctcttggttttgtttattctaccgcttgggattttgtcgccttttcctgccggtataaatgctctatttagtcatggaccgaggcggtcagcaggccttgctcgtgtgtatgcattgtggaacataacttcactggtcaatgttgttgtggctttcatatgtggttttgtacattataagtcatcaaccaaaacacacccgagcgtgcagccctggaacctgggaacggatgaaagccggttggtggctcttcccaaccggactcatgctgttgaaatgcattcaagcaaggcttgttgattggcacgttgctaatttagagattcaagaccgtgcggtatatagcaatgacccaaacatattttggcagtcatgacccctgttgtaactgagggtccttctgggaagctttttacaactcgattttttgggagttgataaaaggaaagtgcggc

SEQ ID NO: 275184 - DNA, 555 bp, Zea mays
tccctcgcgtccggttttggttattaaagcagggttgaggaaggtaaaaattctcacagatctggtgtcgacacgaaggcctaagaagacttgccagggaggtggcgaagataagttctgtgttaacagtgatagtgttgaatatccatgcgatactgagtctcttgatgacgatctagatgacagagttgaggaagatgaatttggagattcaactatcaggaagtctttcagttatgggtatctgcaatctgtcaactatgttggtggcctagtttatgcccatgcaaagattgatggggagcatgaggactggatatattatagtaaccgaaaaactgatgtcggtttccatgtagagaaagtattgccatcaaccacagagaatggttgctaactgctaagcgcagtatacttccttggagaaagaggaaactgagtttacggtcgctgaaggctaaaggtgaacctctcttgacaaaggcatatggggaagagggaagtgatgatattgaatatgatcgacgcttgctaacatcatttgatgaaatctgt

SEQ ID NO: 275185 - DNA, 565 bp, Zea mays
cgcggcaccgcgggacccgggaggagcgccggtggtggtggccggcccgatggagtgggggtcagcggcgtacacggccgcgacgctggtgtgcgctgcggcggcgagcgtggtcgcgctcacgcacatctaccgccacctcctccactacgccgagcccatctaccagcggttcatcgtccgcatcatattcttggtcccggtaacgctctccgcccgccgctcacacccacaacaaaccctcgtggccaagggcgccctcgcgccagatctgtcgcctgccttcgctgtagcttttccgtatcggatgagctcgaggggtacggcccggtctgggttagtttcctggagaggttcccatgaatgttaggttgcgactgcgatggaattgaagtacaagtactcggtggaaagctttgctggtgcatgtgattctgactagaaggcgaatatagagccaccaccgtgcgctttgatgcgtgcaactgaattcactgatgttctgcggaggcgcatctgatcagtgtggatttctgcaacttgtagttttatcccgagtgttatg

SEQ ID NO: 275186 - DNA, 414 bp, Zea mays
ctagttctagatcgcgagcggccccttttttttttttttttttttttttttttttgacacgcaaataccatacatgtacatatagaaagttgcaaggttctcacaacacagcacaatacaatgcactggagttcttaagctaaccattacaatcaggcagctaatcattggtgcagtttcagcacatatatagttccgcttccgcataccgcaggaaactatatgcatgcatcgacattatttggggggcatcggaccggagcatctcatatccatccagaccgaccgtgctcgtcagggtccgccatgtcctcgttcagctggtccatgtaggcctcctgatggtaccgcgtctgcagggaaggatcattgccatggtactgaaggagtccctggaacggaccaagaacacta

SEQ ID NO: 275187 - DNA, 832 bp, Zea mays
cctatgcgtccgcccacgcgtccgcccacgcgtccgcccattcgtccgcccacgcgtccgattcaaaatagagcggatatactgcagaacgcagccttgaatgctgctctgaacactcaatttcttttccagattggtgtatttactgctgttcccatgattcttggtttcatccttgaatcaggtgttttaacggcttttgttcagtttattacaatgcagttccaaatgtgctctgtattttttactttctcacttggaacaagaacccactactttggccgtgcaatattacatggaggtgcaaagtatagagcaaccggtagaggttttgtggtacgacatatcaagtttgctgagaactaccgtatttattctcgaagccattttgtgaaagggatggaggttgcacttttgttggtgatcttcctagcgtatgggtttaacaatggtggagcagttggctatattttactctctataagcagttggattatggcattgtcttggctttttgctccctatttatttaacccatctggatttgaatggcagaagattgttgaggatttcagagactggacaaattggctgttttatcgaggtggtattggtgttaaaggagaagaaagctgggaagcttggtgggaagaagaactgcaacatatttacagcattcgagggaggatactggaaaccatattaagcctgaggtttttcattttccaattcggagttgtttaccacatgaatgctagcggaggaagtacagctttattggtgtattggatttcttgggctgtgcttggtggccttttcatcctcctcttgg

SEQ ID NO: 275188 - DNA, 648 bp, Zea mays
gttatgtgacattaggacagcgtgttcttgctaacccgctgaaagtgagaatgcactatggtcatccagatgtttatgatagaatgtttcatataacaaggggtggaattagtaaggcctctcgcagcatcaatatcagtgaggatatatatgcaggattcaactcaactctgcgtcaaggatgcataactcatcatgaatatattcaggttggcaaaggtagggatgttggacttaatcagattgcactatttgaaggaaaagttgctggtggaaatggtgaacaagttcttagccgagacatatatagactcggacaactttttgactttttcaggatgttatctttctacgtgacaactgttggattctacttctgtactatgctaaccgtgctgaccgtgtacatatttctctatgggaaaatgtatctggccttatctggtgttggagaatcaattcaaaatagagcggatatactgcagaacgccgccttgaatgctgctctgaacactcaatttcttttgcacattggtgtatttactgctgttcccatgattcttggtttcatccttgaatcaggtgttttaacggcttttgctcagtttattacaatgcagttccaaatgtgctctgtatttttcactt

SEQ ID NO: 275189 - DNA, 1360 bp, Zea mays
tggtggttccaatctcggcagggatttacccacgcccaaggagatttgcaaggggctcgacaagtatgtgattgggcaggacagagccaagaaggtgctatctgttgcagtttacaaccactataaacggatataccatcaatctttacaaaaggggtctggagcagatttgggtggttttgatggggaagctgatgacgacgacaatgtggaactagagaaaagcaatgtcctgttaatgggacctactggctctggtaaaactttacttgcaaagacattagctcgttttgtgaatgtaccatttgtaattgctgatgcaacaacattgacccaggcagggtatgtaggagaagatgtagaatctatattatacaagttactcacggtggcagattttaatgtgcaagcagcacagcaagggatggtgtacatagacgaggttgataagatcacaaaaaaggctgaaagtcttaacatcagcagagacgtatctggtgaaggtgttcagcaggcattgctgaaaatgctggaaggcacgatagtcaacgttcctgaaaaaggagcaaggaagcatcctcgtggtgataatatacagatagataccaaagatattctttttatatgtggtggcgctttcgtggatttggagaaaactatatcggagagacggcaggattcttctattggcttcggcgcaccagttcgtgcaaacatgagggtcggtggcacttcaagtgctcaagtgacatcgtccttgttggaatcggttgagagtggtgatctaatagcttatggacttatcccagaatttattggacgtttccctatccttgtgagcctaaccgctctaaatgaggaccagcttgttcaggttctcactgagccaaagaatgccctgggcaaacaattcaagaaattgtttagcatgaataatgttaagcttcactttacagatggtgcacttagaataattgccaaaaaggcaatgtcaaaaaatacaggtgcacggggtttaagaactatccttgagaatattctcatggattctatgtatgagatcccagatgcaaaatctggggagaagcgaatcgatgcagtggttgtagatgaagatgcagtaggatcagtggaccaaccctggctgcggagccaagattctttacggtgacggtgctttggatcaatatctatcccatataaaggtggcgggagatggagtcgcaagcgaaatggatggagaagctgagctttcaccatcccgagccattggcatgtgattcctggctctgaccgcactagtgtaacctgtaaaatctaatcccagttgtatccatgtaagtagcagccttgtaaatga

SEQ ID NO: 275190 - DNA, 898 bp, Zea mays
tcggttctcttggatggcagcccagctccacggcttaagatatgtgattttggctactccaagtcatcagtactacattcaaggccaaagtcagcagtggggacaccagcatatattgcaccagaggtgctttctcggcgggagtatgatgggaagcttgcagatgtatggtcatgtggagttactctttttgtcatgcttgtgggagcctacccgtttgaagatcaggatgatcctaaaaatattagaaagaccattcagcgaattgcagcaattcaatataatattccagacaacattcgcatatctgatgattgcagacaactcatttcacgtatctttgtcagcaatccattaaggagaatcaccatgagggaaataaaaagccatccatggttcctaaagaacttgccgagggagctcacagaggcggtgcaggtatcctacttcaggagggacaacagtgtctctgcattttcagaccaaacaaccgaagaaatcatgaagattgtcaaggaggcaagaaccttgccaaaatcgtcgagatcaggctatggctacagtgaagaatgctcagatgaggaggaaaaggaagtggagagcgaacccaaagaggaggaagaagaagctgagtgtgataagacagttagggaggttcgcgagagcggggagctggatatgacctcactgcacatctaaatgctgcctgtgaggctgtgacgtgtctgtagataattggctttattgtctgctgaatttggtagaacttatgcaattctggcgtcagatatagtggtctatataagccttttccatcctgtaatatatttgttttgttgaactgtatgtgtggtactccgtatatgggtttgttctaagggagcaaggctttgtacag

SEQ ID NO: 275191 - DNA, 410 bp, Zea mays
cggacgcgtggggcgagcggccgccctttttttttttttttttacagggtgaacggagtcgttacagcagcaggtaacatgacaacgatatgtagtagtagcagcagtagcaatctcatttttacagtggctaaaccagtcaatcagccgaccggacgaaggggactagggggaggaaggtcttgtagcagcgatctcgctcaccattctcaccgggacgcccgcggaatcctcaaatccacccgaaccggtcaccattttttttcctgagatactttggacacctttcctttgaccactcaatcagcgttccttcccctgctccggtccgacgaccgatgtggcggtcaggcgcggccggctccgtcgtcgggcggcagcggcggcgggccgaagaaaaaaaacgcgtc

SEQ ID NO: 275192 - DNA, 874 bp, Zea mays
aaaaacaagaacaaaagtgcttctgagggtgataccagtgagcaatctgctaagaacaacaatatcaataaagacactgaggaggcaagtgcgcaggaggccaatataaagaacaagacacagaaggcacatgatataagcagaagtgaaagtcaggcaggaactggacttggtgagtcagatagcaaggaaccactccaaacacggacgtttgccaatggtatgatgattcaggagttagagatgggcaaacctgatggtaaaaaggccagccgtgggaagaaggtttctgttagatatattggcaagctaaagaatggcactattttcgactccaacgtcagtggaagaccttttgagtttagactaggtgttgggcaggttatcagtggctgggacgttggcgtcaatggtatgcgggttggggacaaaaggagactcaccattccaccttccatggggtatgggagcaaaagagtggggcagataccacagaactcaactctcatcttcgatgtggagctggtgaacgtaaaatgaagtgagaagatccacgagaaactgcggcagtttcacaaattttgctacgcatcattttccttgggcaatgctgtttcgtaggcataggggcatgttaagtggattcatctctgtcgctatcatactttcgaactgagtttcagaaggaaaaaaactgtggactgttgccatctgggataattcctgggctgcagcattcgccatccttctcccggttccttcagggtcattttgacattcttgtgataccctcagaaccttttgaactgatgaaatggttaaggtggagtaaaaaaaaaaaagagaataaaaaaattccaaaaaaaacaaaaag

SEQ ID NO: 275193 - DNA, 599 bp, Zea mays
accaattacccaaccgatttcttccaaccaaccttcccaacttccacttcaggaccgatctgcatcacattgtcctccctatctccatgagtcacggcatcagcatgccttgaaaagggccaggggagctggaggtcggtttctcaactcgaagtcagatgacaaggaagagaactccgactcgagtcacaaagagattcagaacggagttgcgccccacaggggcggccaaccgtcaacccctccgtctcccaacggtgcgtcgtcagcttatcagggcagcctagtcgtgaatgatggatgattcggaactcacagctgaagagatttcagcccctgacgctagttgtggcagcagctttgtacagtaagtgctagcgggcagcagcgaaatggtgtcatagaaaaacgttgacgagtcagacaggttttggagtcttggttttttttcctctgtttattttacctgtctgcaattttagtagctttgtgtcccttcccctggatagttttttggtcagcgcttaagaaagtttaagggctgatttgttgatcggggatcccgaggggatccatgggagaaaaatcgtcttgctatt

SEQ ID NO: 275194 - DNA, 523 bp, Zea mays
cggactcgtgggcggacgcgtgggcggacgcgtgggcggggtcgcagtcgcagcctcgctccggaggcggagcgccggagcccggagccccgcccgcctcccctaaacggccagggcctgaccacccccacctcagtccctctcctgtgggcggcgtcctcccgcgcccatggggatctcgcgcctccagcccgtcctcctcctcctcatgctccgggctctcgcgtcgcttcccacgcaggccgccgcgagaggcggccacgatccgtcagatgatggagcccacgggccattttcacgtaaacttcttgaagataagcctcacatcacagaagaaatggtccgtggatatatgagcaacactgagcttgagactgctgtacatgcctttggaagtcgatgttacaatatcttcagggtgtacaggtacacgatgtataatgctctacttctgtgataattacatttggagcttctaaacaaacttttaagaccatcagtttttaaggacatgtaaatgact

SEQ ID NO: 275195 - DNA, 621 bp, Zea mays
gtggtagggcggcgccggcatcctgtttagggcgcctgcggtggcggcggcgtgtacggattcatctgcggcgggtagccgccctgcggaggcggcggtgcgtacggcctgtaagacgccatcgcgcggcggctagggttcctcggaacccgagccccagcacacagacaccgcgccggcggacactgctcgctcccccttctcctccgtcgccgccaccgcagaagcctctaccactgcacgtccgaggccaccgacacatattctaccaaatctatgggagcgcgaggtagtcggcgtctcggcgatttggcgaggagctggaaggaaggaaggaaggggcgatgagaatttcacgacagcttgtgaatcctcgcctaggatgccgacgggcacggcgcccacggtggtcaccttctgcgcctcttcgaggtggtgctcatcggctccatagatctggcaccatgcttagccgaccatggcgaggccatcaaggaggacaccggccacgatccgtcagatgatggagcccacgagccattttcacgtaaacttcttgaagataagcctcgatcacgatgtttagaataaaactttaagtttttgatgataaaatgaaac

SEQ ID NO: 275196 - DNA, 323 bp, Zea mays
acaacgaacacactcagccgtcctccatccagctcgtccccgttctgttctagagttgagctctctacttctcttcctgttctgcaaagacggccgcagccgtatcgaagtgccataccatgacctctgagcagtccggaagcgatgcccttcaccttgctaaaatcttccaggaccacttgctggacgaacttcatggagtcctgggacttgtcgggctcggaggtcgggtagcggccccagcgctcggggtcccagagcacggagctgttgaaggcgaagccgtggacgtccagctcaccaggcctcgccgtggatgcgga

SEQ ID NO: 275197 - DNA, 865 bp, Zea mays
gacaagaagacctatcctgccatgcactcatggtttgctttaaattctctcagtcctgctattgttgaggtgaaaggtgttcaccaatttgattggttaacaaaagaaaatgttcctgtacttgaagctatagaaactcagcgcactgctagagatcgttaccatggaagtcaccgtccaagaaccagtgctagtgataacccaagggtttttgcggccaagctgcaggcaggaagtccaacatacactaatgtactcaatcatattcgaatatacttgcctgagttgttcccaagcctcaacaaggtcgtatttcttgatgatgatgttgttgtccagcatgacctatcaccactttgggatatcgatctagctgggaaggttaatggcgctgttgagacttgcagaggtggagatagttgggtgatgtctaagaggttcaggaattatttaaacttttctcatcccctcattgcaaaaaactttgacccttcagagtgtgcttgggcatatggtatgaatatttttgacctgaatgcatggaggaagacaacaatcaaagaccagtaccatcattgggtcaaggagaacctgaagtcaaacttcacactttggaggctgggaacattaccaccaggccttatagcatttaaaggccatgttcacccaattgaaccatcatggcatctgttaggtttggggtatcaggaaaagacagatgtcagtagcgttgaacaagcagcagttatacattataacgggcaaagtaaaccgtggctggagattggttttaaacatcttcagccattttggacaaaatatgtgaactactcaaatgaattcataagaaactgtcatataatgg

SEQ ID NO: 275198 - DNA, 937 bp, Zea mays
gggaaaaggagcaatgctctaatttctggaatggagaatggaaatgaaactggtactagaaaccggccatttgcacagaaacaatctcattctagtcaggtggacgagaaccagggaactgctgactctcctgataacttgaagccatcattgctcaaactcaagtttaagcgtccacattatgagcagctaaacacccaggcctctcaaccagaggagccgacctcctgggtttctcagcaagaagaccagttcaatgttgctaaaggccagagatcaaagaggaagaggccttcgatggagaaggcagatggtttggacggtataactccagccaagaggcatcagcagagcacagatgaagtgatggacgcaaactggattctacgcaagttgggcaaggatgcgatcggaaagaggattgaggtccatctaacttctgatggcaaatggcatcaagggatggtgtctaatgtcatgggtggcacgctgtgtattcggttagataatggcaggtctgagaacgtggagctggggaagcaggccatccgcttgattgcttcaagatcgaagggcgggaagcgatgaaaccttttccccataatatgcagcttaggacctgttctcgctcaatacattgcgccatgattatggcaggtagagtcctcccccctgaggtttgacatccgctggagcacagcctctcagcctgtgctgactggacgagatactgagcgcaacgtccatctgttgcgccatgtttcgctagcctagcgtggaacagacatcggtttgtggtggtggatgccccattggctttcgactagattctggtaaggtagggaatgaggttttagatcaccttggatgtaagagaagcaggtagcgccgtgtctggagtgtttagtatgtttagttatccgacgagtttctcgac

SEQ ID NO: 275199 - DNA, 427 bp, Zea mays
ttctcgctcaacccattgccgtgattatggcaggtagagttctccccttgaggtttgacatccgctgaagcacagcagtgcccccctgctgttcatgtggggaaacgcgttgcctctcaccctttgctgctgactggacgaaaccccgagcgcaacgtcatctgttgccatgtttcgctaccctagcgtgtaacagactttgttgccggaagcccatttgctttccattagaatatgctaggatagggaaccccaggaggttttagattcccttggatgtaaaagaagcaggtagcccccctgtatctggggtgttttgtacatgtggttttccaaatattgacttatttggtggcgttatttgctggccactggccgggattttgttttcttgttacataccctgacagtaataatttgtctactt

SEQ ID NO: 275200 - DNA, 380 bp, Zea mays
cccaagcggccgcccaagcggccgggttgcctctggagaagtccgggcctatggatgatgatcttgataaaataaagaataacagccacacgagtgaaattgtagactcacgggaattatggaattcattcagattgctatgtgaccatagtagccaactatgtgtggcactcgatattttgagcacctctgccatcaataaactcattagcaaggtggtttggagagcctgtatgggctgctattctgcaaaccgaggcttttcttacaaatgcaaaaggatatccttgtttatcaaagcgccatcagagtctgctaactggattttttaaacattttgttcaggtgataatatctgggagatcaaatcacattgtttt

SEQ ID NO: 275201 - DNA, 739 bp, Zea mays
  unsure (1)..(739): unsure at all n locations
atagaatgctaatgcaagcaattcttgaatcactgaaagactatgaacagtcgaatagaaaggatgtgcaatccactgcatctgatcctgcatctaaagccaatggtactgtaaaagactgcaatggtgttgctgcagcagcattggagcaagatgcatcctcatttgatgctcctgacaagcatacgaatgtccccaacagtggagaaaaagtcagcgaagggcaaagtacagattgcaacgccggaaagagcagtgcttcggtctctgcttctggttcctcagagcccctggcaccaacacagatggtgaatggacaacctgcttcggtagactcccagaaagtgacccagaatgccaatggagaggatggcacaagagcaactttggtagttcagaagagccggacaggcggcctgatagaaaaatggggttccttcttcaagaacaacgactaaggcgaggaaagatagacgatgacacctttgacaatacgtgttccgttgtgttcatagtcatagaatcgccgttggctgatgtccagcttgattggttttacgtgtaaaatggaaaggaaacaggtgatttcaggacgttcgtgtgtatatagaaggaattgtagcgcccccattgatttataccatctctcaacttccactcctttcggttgcggtcacgggccaaacccttaaatctccccaaaaaaaaaaaattaaaaaaaaaaaagataaaaaanaaa

SEQ ID NO: 275202 - DNA, 458 bp, Zea mays
tccgggctagacgtacgcgtacgcactctcttacgatggcatgtgtaatgtcgtgaaggatattttgttgcaatgcgtgcgggagaaagggagtgcgtggaggctcagctgaacctgaatcagatattgtgcaggcttgcagaagctttctagatcaacagcagtgcattaatgtgtggcgatttatctaaactatcaacgagagaaaagacttgacagagaacctgaagcagctacagtgcaggacactaatttttgttggtgagaattcccagttccatgctgaagctgtgcacatgactgcaaagcttgataggcgatatagcgctcttgtggaggtacaagcttgtggctccgttgtgacagaggagcaacctcacgcaatgctgataccaatggagtactttctcatgggatatggactgtataggccaagacagataaactatagccctcgt

SEQ ID NO: 275203 - DNA, 605 bp, Zea mays
cccacgcgtccgcccacgcgtccgcccacgcgtccgcccacgggtccggataggatttgtctcccctccactgcgcctctccgtttccgccatggctccggccgccgccttcctgtcggcgtgcgccgctggttccattccccgtgcgcccttcctgatcccgaggcctcttcttctcccaattccgctctcccctgcgcgctgggaccgctcccgcagctgcagcctctttggcgtaggcgccaacactcgccgcgcgccaacccttcgacggaacgcctccacggagacggtggttccctacgtgccgggctctggcaagtacatagcgccggactacctcgtgaagaaggtgtcagccgaggaggtgcaggagctggtgagggggcagaggaaggtgccgctcatcgttgacttctacgcgacctggtgcgggccctgtgttcagatggcgcaggacatcgagatgcttgcagttgagtatgaggacaatgccctgtttgtgaaggtggacacagatgatgaatatgaatttgcaaaagacatgcagtccagaccaaaacaaagatgccatacgcaccgaggggctaattcctatggatatg

SEQ ID NO: 275204 - DNA, 540 bp, Zea mays
ttcacgcgtccgcggacgcgtgggcgcgcggggcaccaagccggtgtcgctggcgacgcccgtctactacgccgacctcgcggcctaccgtggcaggctctactacgaggctgccatgatggcgtcccaggcccagcgaggggggtcctttgacgtcactaacttcccgaggctgcacaaggatgtggaggacaacatgttcttcatctgacaccagttttttttttttttttttgccggtgtcgtggcgcaagttcgggtcgattttgctgtgtggcaacgtcgcattgtttttatgctgttgcctttttttgcttgctggtcgtagtgccactgtgtgttgttgaagtcgctggtttgaaactgcagtcagttaactgtacgcgtcctgctttgtttttgtttgcgcgcgtgtgaaacagacaaccagtctgatgatttggtgtgttcagggttgtaaacaaactttattagattctcactggattatactgcatgactgtagttgaaggaaaagaagcaggtttgagttgtgaagat

SEQ ID NO: 275205 - DNA, 1244 bp, Zea mays
ctctcgcgttgcttccgcacgccgcccatggcgagcctgtcgtcgccgagtctcctctcttccttcctcggcgaccgcctcgcactctccactaggcctctccttctccgctccgctgtcccaggcagcaggcggctggcgtatcaagcaacgagaacgctatgcaacttggtggatatcctatttaacaggagaaatcaggatgatgcaccagaaaacaaccctagacgcctgcgtcctgggaaagtatctccacgccttagtgttcccaatcatatacaacggcctccatatgtcaattctcgtcaacaacgacctggtatgaataatggacctgaaatacatgatgagaacgggatcgagtgcatgagagcttctggaaagcttgctgcacaggttttgaaatttgctgggactcttgtaaagccaggcataacgactgatgaaattgataaagcagtgcaccaaatgataattgataatggagcatatccttcacctcttggttattgtggatacccaaagagtgtctgcacttcagtgaatgaatgcatctgtcatgggattccggattctcgtccccttgaggatggagatatcatcaatattgatgttactgtctacctcaatggctaccatggtgatacatctgctacatttctttgcggtgatgttgatgacgaagctaagaaattagttaaggtgacaagagaatgtctcgacaaggctatatcgatttgttcacctggggtggagatcatacaaagtggtagaactatacaggatcatgcagacaagtttaagtttggtgtagttagacagtttgttggccatggggttggcaaagtttttcatgctgagcctgttgtgcttcatttcagaaacaatgaatggggacgtatgatgttgaatcaaacatttactatagagcccatgctaaccatagggagcatcaaccctgtcatgtggtccgatgactggaccgcagtgacagaagacggcagcttgtcagcacagtttgagcacacgatacttattaccgaagatggccctgaaatactgacacagtgttaatggaaggccaaataacaaagaacaatcgttagtcagctggcaagatcctgcatttctttttggggactaattggtccaacctaaactctgatgcaaaatggcaaactcacattgtaatctcggttcatcggtacaccgatatatgtatagaaattgtactattttcgaag

SEQ ID NO: 275206 - DNA, 249 bp, Zea mays
ctcgcccgccggcacgcgcccggacttaactggctggacccacccaggcgcctttcttgggctcacgtctgctttgatttttcatacgaatgtgctcgtttcatggtatatagattattgggtattcctactgtactgtttctgcccctgcttccatttgatgtcactagtggtagggagtgtggcataatcatgtagatgtacctgctatgcatacatcgttttaataaatggcaccattgctctcag

SEQ ID NO: 275207 - DNA, 573 bp, Zea mays
ttgtttttgttgcatcccaccctcatttgacgctgatgataaaaaggccctcgcggtcgcaccacatacaggcaaccagcctcttgatcacttgatcctcctgcacaccagagtaccagacaccactgcgcatcagtgcaaagaggtagctaccctatctgccatggctcaagagctccacgaaacgtcctcttgctctgccaccaccacctcgtcgtgcaccacatcctgctgctcgtccactgtcacagactcgtcctcttcgcccccgtcaccggcggcggccaatgccgcgcccgcgacacggaagcggcaggcgttggaggccgaggccgaggccgaggcgggcggtgaggaggaggaggaggaggaggaaggctgtgctggtaataaggcggcgccggccaagaagcgaccgcggtgcagcgaggggaagcacccgacgttccgcggcgtgcggatgccggcgtggggcaagtgggtgtcggagatccgcgagccgcgcaagaagtcgcgcatatggctcggcacgttccccaccgccgagatggccgcgcgcgcccacgacgtcgc

SEQ ID NO: 275208 - DNA, 858 bp, Zea mays
cccacgcgtccggcagcagatgccttcacaagcgccacagttgctgcttcaacagcaggcagctttgcagtctagttatcagtcttcacagcaggcgatttatcagcttcagcaacagctacaactaatgcagcagcagtctaacctaaatcagcaaccctctgcgctggttggttcatctgcagtttcttcaacacccccactgcacagagcatacctcccctgaaggttttaagtactactacaatagcattactcgtgagagtaagtgggagaagcctgaagagtatgtgctgtatgagcaacagcagcagaaactgcttttgcttcaacagcaccaacagaatatcgctgtacagcaactgcagtcaccgccacagggtcaatcacttccatccatgcaaccgattcaacagcttccccaggcacaaggacaaacacaaatgcatatgaaacagcaggaattaaattattctcaatttcaggcagctggttccattgatcccaacaggattcaacagggcattccagctgcgcaagaacgtgcttggaaaaattaagtctgcaggtcgcaataataaagcgctagtcaaagactggggaagtgtacaagcccttgtgctgcccaatttcagtgccggcccagccttttgccaacgttgatgagtgtaaccccggatttaaatttagcctgatacgtaaatggtagatcccgtatgtggacattgttgcaacttaggtcagggacccgggtatatttttcagcgggctcccgtgctggtgtccggccccagttggtaaaggtcgccccttgtgttttattttcgcctggggcataatttgttatgttcggccctt

SEQ ID NO: 275209 - DNA, 354 bp, Zea mays
aaaatatctatattttgcttaagtataaagtataaaacacacaaaaagtgttttttttttgctaagtgagtgcgaatgtatgtttgaaacccctatttgttgtcgttctttacagtctgctctctcaattctactactgcaactatcaacctgtattccaccagcattcctaaacaacatgcacacatactggtagacaatgaggcacaacatgaaggaaccagggggcgggcgactatttcctcatgtcgtcaagaaaagacatgcatgcacttggcgcctccctgcatcgttgtaccacagacgcgcaggctccctggatgcctcaccgaattttgtagttctagatcgcga

SEQ ID NO: 275210 - DNA, 1916 bp, Zea mays
caccggttctgaaggagctatccacgggaaccgccaagatgcggcaagaactcaaggaggtaacccaccaggtttcctggctgcaacacgtggattgccaaccagaacagttgttgctgctgttccagcacggtcctcaggcgaggctccaaaccatatctttagtgttatcctacctgttcaactgaggggtcaagttgtagtgcctaatcagtcctctcaaggttctcaaacagcagtgggcaatggagctcaaggcaattcaacatctgctattccacaagcttctgttggcggtgtttctggtgttcctcttatagcggcacaggtagccaatgcattggcaaatgcaccaagccaggtttctttatctacacaaagtgcagcagatcagggatttcacctgactacagacaacagagctgatgttctgagttcatcaacaccagccactacaccacagaatggtccctcaggtacttccggttccagtttgccatctcaagacaggaatactttaaatgttcccagtcttgatagtatacaacagcatccacaattgggagatacttgtgcagatacagctgacttatcaggagacgccacagccatcagtactcatgatgctccttcgaacccatcagttgacagttctgtgctgaagaacaaatcctcggatgaagtaggttcacagaccactgagccttctgcaagtggcagtgctgaaccattaggtcttggtggaggtctgattccaattccaaagaggcggagcaaagcagtaaagccatctgggagcacaactgatcctagtagggatttgtcctcagtcagccaaaaccaagatcctatttcagtagcccagcagtttctggaaggttttgcttcccgaaatactaatggtagcagaagcaacaccctctcctctggtcctccatcttctgtgccacaggctactgaagttcctccgagaagacagggtggtggacaacctgatattggcagcatgatatctggtatgctcaacaacccagttttcagcaacatgttgtcgaatgtggcaacacagccagggggctctagtgctgatttgaagagcgtgatggaaggattacaaagccctgctattgtagatacgataagcaatatcgtgcagaatgtggatgagcaagacctgggggccatgtttggttcaggcagaggacaaggtggcatggatttgtcaaggatgttgcagcaaatgatgcccgttgtatcccaggctcttggtggtgcaggggggcgttctgctggtgcaaatggtggacagcataggtcgcggcctcagcgcattgacggtgaaggaaatgcaccagccagcagttctcagattgatctccatgaagctcgtcaaagcattgaacagcatgaatccccagagaatatcttccgcgctgtccttgaaactgctgctcaggcccatggtgaagataacagcattcagggcatggtcgaagaacttgccactgatcaagagcttgccgatgactacatgaaacttttgatggaacaagttcggcagaggatacagtcagagtcgcagtcggggagccagccttgaaggattgggcggcagggtcgtgtagccagccattcgctctgcgatatttatctatgggaaagaacagaaccaaagctgttgtctgggcgttttcatgattaggtgcccggtgtacatgtggcgttgtaattttccgagataatgtatctgcagcagcatatctcgtactctggttagaactgtttttttttacgaattttgctagaggtacatacaacgagttttaaaggtggtgacgtctgaatttcgtggaattgacaatgacatgtctgtatgattggtgtcgcaactctccagttcggaaatttgttagcac

SEQ ID NO: 275211 - DNA, 1028 bp, Zea mays
gcttctccgccacgtgacaccgtcgccgccgccgccgccgccgccaccggggtcgccgtcgatgggattttgacggagttccccttgctctcggatgactgcgttgcgacgctcgtggagaaggaggtggagcacatgcccgcggaggggtacctccagaagctgcagcgacggcatggggacctggatttggccgccgtcaggaaggacgccatcgattggatttggaaggtcattgagcattacaatttcgcaccgttgactgccgttttgtctgtgaactacctcgatagattcctctccacgtatgagttccctgaaggcagagcttggatgactcagctcttggcagtggcttgcttgtctttggcttcgaaaatcgaagagacttttgtgccactccccttggatttgcaggtagcggaggcaaagtttgtttttgagggaaggaccataaaaaggatggagcttctggtgctaagcaccttaaagtggaggatgcatgctgttactgcttgctcatttgttgaatactttcttcataaattgagtgatcatggtgcaccctccttgcttgcacgctctcgctcttcggaccttgtcttgagcaccgctaaaggtgctgaattcgtggtattcagaccctccgagattgctgccagtgttgcacttgctgctatcggcgaatgcaggagttctgtaattgagagagctgctagtagctgcaaatatttggacaaggagagggttttaagatgccatgaaatgattcaagagaagattactgcgggaagcattgtcctaaagtctgctggatcatcaatctcctctgtgccacaaagcccaataggtgtcctggacgctgcagcctgtctgagtcaacaaagcgatgacgctactgtcgggtctcctgcagtatgctaccatagttcttccacgagcaagaggagaaggatcactagacgtctactctagttgtggtatgcttcaggtgtgctcctcaacgttctaggagtttttgattgggt

SEQ ID NO: 275212 - DNA, 555 bp, Zea mays
ccaatttccttccacttccagtaagaatcctgaagtactaaaaagagaaggggaggtggaatttgagttgcaactggaaatggctctatcagctactgctgctgacactcaaaataataaactagctactcacatgaatcaattgactgttagcttacaagattctagttcacctttgaagtcattgcgtcaaaatgtggaagctttatccagctcaagtgcagtttggtcaagaagtgctggagctccattatattgggctgaggtatactgtggtgggcaagcatcaacaggaagatgggtacatgttgatgttgtgaataatctcattgatgctgaacagaatgtagaagcttcttctgccgtttgcaagaagcctttaagatatgttattgcttttgctggaaatggagccaaggatgtaaccagaaggtattgcttgcagtggcacagaattgcacaaggcagagtgaattcagagtggtgggataatgttttggcgccactaatacagatggaactggcagcaacaaacaactatgaagacatggaact

SEQ ID NO: 275213 - DNA, 484 bp, Zea mays
gacgcgtgccaaataaaaggaaaaagtgaggcatccccagaagaatgtgatcaggctgtggagtgcctcagcactgcaaaagctaaggctaaagctaaacaggtacaagaatctctgaaggttggccaatcaattatacagaaattttgggcaagagtcctgggtgtgggccctgctcttcgtgctgttgcttcaatgagcagggctgattgggcagcaaaacttaagcattggaaggatgaattcgtttgtacactgcagcattactggttagggacaaaactactctgggcagatgttaggatctcatcaagattgctggtgaaacttgctggggggaagagcctttcaagaagagagaggcaacagctgacacgcacaacagcatatatcttcaggctggttccgggggctgtgttcatcattgttccattcatggaattcttactgccagtcttttttaagttatttcctaacatgcttt

SEQ ID NO: 275214 - DNA, 447 bp, Zea mays
acgataagttagttctatatatataacagttatatttcttagaagtcctggtgattgcaaattttccacatatttgtcttccgtcacacgtgtataccttttgaacctaaaaaagaagaaaaaaaagaacccatgactgcaacgttcctgttttccaacaagttgtcacttccttgagctgaaccatgttgaataaaggaaccaagcgatccacaatggagaaatgacaataagatatgccaagataaatgtaactggctcgttcgacaaaccacaactatatttgttggattccatcacatcacgtataaaacattgggccttgtaatgaaacttccgtgccaatgagatgaaaatcttgaattggttatatggaagagaaatgtttgatcttgaaatggtaccacccaaaaagaacacatcaggcttgttaatatcagatgtata

SEQ ID NO: 275215 - DNA, 536 bp, Zea mays
ccactccccggcgcaactgttcctggtcgatccagcagaggagaagccgacgtggaggatcctgaatgttcccggcaaaccccccaagttcgcctgggggcacagcacctgcgtggttggcggcactagggtcctcgtcctcgaaggccacaccgggaaggagtggatactgaacgagctacatgagctctgcctggcaagcaggcccgacgacgacgacgatgaccgctactgactagtttcgttgcacatggtgttttatatgcttcgtaactacatccagtctgttgttgggtaatcggtatgacaaaaaatagcggaaaattaattaaaaaagttagcctagaagatttcagtgtattttatcggtctagatagattctatggtctatatatttgtatattttttgtctaaaagatcaaaaaaaactgaaacaactgcattgtagattcgcatggcaaagtcgccagttccaatgtcttgtactcttatttttaatcatatgtaaaatatagcgctgcttcagtttgtaggt

SEQ ID NO: 275216 - DNA, 1118 bp, Zea mays
tcattggcatatcgtggacgagcaatcgtttccgctcgaaatatcttcctacccaaagttgtggaacggcgcttactcttattcagagagatatacagttgatgatgcactcgacatcgtacagtatgctgaaaaaagaggcgtgaatgtcttggctgagattgatgtacctggccatgctctttcatggggtgtcggatatccatcattgtggccatcagctacatgcaaagaaccgcttgatgtcagcaatgaatttacatttcaactgatcaatggaattctttcagatttcagcaagatttttaagttcaagtttgtccatttgggcggagatgaagtaaacacaagttgctggagtaccacaccacacattaagtcgtggttgatgcaacatagcatgaatgaatctgatgcctacagatattttgtactgagagctcaaaagatagcaatatcgcatggttatgacatcattaactgggaagagacatttaacaactttggagacaagctggatcgcaaaacagtggtgcataactggcttggaagtggagttgcagagaaagtggttgctgctggtttgagatgcatcgtaagcaaccaggataagtggtacctagatcacttggatgctacatgggaaggattttacacgaatgaaccactgacaaatatctacaacccggagcagcagaaattggtacttggtggtgaggtatgcatgtggggcgaacacattgatgcatcagacattcagcagacaatttggccacgtgctgcagcagctgcagagcggctatggacaccaattgagaagctggcgaaggacacaagatcggtcactgcaagattggcacgcttcaggtgcttgctgaatcaaagaggggttgctgctgcaccactagctggttatggccgctcggcaccatcagaaccaggttcctgcttaaggcagtagatatttttcatagaggagtttattttacataattccaggcatccaatttacttctctgagcgattaaaaatagctcggatcgatgtaaggcgaacccgcagaatgttcctatttttctgaaaaaaaaaaaaaaaaaaaaaaaaaacggacgcgtggg

SEQ ID NO: 275217 - DNA, 445 bp, Zea mays
ttgctttttcccccacgtgcgccgccgcgaccttcctcgatcccatctcccaacgcccccgcctcgcctcgggatcccgccgccgctccatctgcctttgctcccccacccgcaggcagcgagcgacagcgacggcgagggatggccaaggccaggtcgttggcgaagcagaagcaggcgcagcaatcaaacggcggcggcggccacgcgctgtcctccaagctcgcccggtacctcgacccggaggcctccttggacaaggaccaactgctggacgcggtgcactggatccgccaggcggtggggctcatatgcggcctgctctggggagccgtccccctcgtcggcgccgtctggatcgcactatttatggccatctcgactggcattatctattggtactacacctacttgctgaaggtcgacgaggaggaatatggaggcc

SEQ ID NO: 275218 - DNA, 217 bp, Zea mays
cccccgcggcaccagcatcagcaacatcatcatcagtagcagcgcagcaccggcctgggcagcaccagcttctccagttcctgcacacacaacagcagattctccagaagcaccagtttctgtttgttcttctgttttttctctcccagcaccagcttgtactgcacttacagttaaaagattattactaacgttgtgtgccaaaaaaaatacaaaa

SEQ ID NO: 275219 - DNA, 324 bp, Zea mays
cctcgtctaagaaaagcgggcagagcagagacggcggcggcaggccatcgcggactcccgctcaccctcgtctgccaccgcctcccaggtcctagcacgcaggggccgacggcgacgcgtcgggaggggcggcagaggtagtccgaggggaggctgtggagcgaagggcggagagaggccacgccgtccggagtctccagttccgtcgccacagcttcctgccgcgccggggccgaggtaaacgagagggatcgaggaagaagtatcccccggagccccttcccccgaacccgaaggctccggaatggcgcactgggttagcga

SEQ ID NO: 275220 - DNA, 1065 bp, Zea mays
gtttgttcgtctgacataacaatagatgacggcatgcaggaaaatgtgacaagtggtgctattgtaccatctcaagttcatatactagattcgaatccttccgctacagcacatgaagtcaacattgtcggtagcataaacgatgatgacgaaaagagtcaggatggaaaaagcagtgcagatcttgcttcatacgaggtaaaagagatggttgtcaaggataactttgaagaaaagcagcagaccgaagaggtcattgtagatcccactccacatgaagccaacaactttcccagtaccgataatcacgaggaaaatgagcagaacaaagaaattgttgcagacaccacttcacacaagataagtgctgtacaaagcatgggtagtactgaagaaaaggaacatattgaagatttcattgcgaaactggcttctgaagagatcattgttacaagtaacagagatattgtcgagcagcaggatgagactgatatgaaaacaaactatgaaatagacagggcacgcaacttagaagctactgaagaaattgctgctggtggtgagagtaacacgggaaccatcacagatgttgttgaagacaaattccctaatgaagaaattactttaggcactatctctcttaacatggcagacagcagcgttaaggaggaaaagatgcatgacgaagaagtgaacgaggatctagattctcgtgatgatattatggtacatggtcctgataatgtcaaagagaagatgtgtgaggagaccatgtcaggtcccaccttagacaagttcagtttgcctacatctactgacagtcctgaagagggtaataaggacgaaagcacgcgtgcagaccctatgtcgcacgagaccaatgtggcgcaaaccagcgatggtgctgatgaagagaagaagatcagggagcttgctgttcaccctacttccagcattggtaccatgggcaacataggcaacgctgaagacaagaagccgagtgaagaaactacaacagatcctagacctgttgagaacaccacaacacaaggcacagaggacgcg

SEQ ID NO: 275221 - DNA, 816 bp, Zea mays
ttgtcgcgtgggtctgcccctccaacctctcctcttcctctggtctctggacaaccaagccagagaggagcagccagcgacaacctcctctcctctcctcccctcttattccgcgcccagcagcgaggcatggtggagaaggcgaggaccatggcgcgcaggctggagatcccccagtggaaggccgacggcctgccgtcgccgacgagcccgctggaccgcgcgtcggcgtcgccccgtgggtggcgccaccgcgacgccgtaggaggaggcgtggggctcgggatcctggcggcgctcgaggccgagggcccgccgcagcccgcgccgagggtgtccatcccgcggcgcgcggcgcggctggaggtgtcggagctcgggtgcagcgggcgctgcgccaccagcctgtgcggcggcgtcggcccggcccccgcccggcccggcggcggcgcggcgttccgcgtcgcggagttcctgtcgtgctgcgacatgtgccggcgggcgctggacgggagggacatcttcatgtaccgcggggagaaagccttctgcagcatggagtgccggtaccacgccatggtgagcgacgagttccagcaggagaaggagcgcaagcgccgcgccgccgtgtcccggacttcggccgcggagatggccgggtcgccgtgcagcggcggcggcggcggcgggcagatcttcttcaccaccggcatcgtcgccgcctgatgggcgggcgggcgggcggatacggatccgtcttctctggtctagtgatacaaaacaaaagaaaaaatatccagctagaggaaccgccgc

SEQ ID NO: 275222 - DNA, 583 bp, Zea mays
caacctttcctgatctcctcctctggtccgcatagaggagcagcttgccagccaaggacaccggagcacgggcacgggcgcacggccagcgcgaacctcctcccctcccctcttcttccgtttccaacagcgaggcatagtggagaaggcgaggagcatggcgcgcaaactagagatcccccagtggaagcacgacggccttccgtcgccgacgagcccgctggaccgcgcgtcgccccgtgggtggcgccaccgcgacgccgtcggaggcgtcgggctcgggatcctggcggcgctggaggccgagggcccgctgcccggcgccggcgccgccgccgcgccgcgggtgtccatcccgcggcgcgcggcgcggctggaggtatcggagctcgcgtgcagcgggcggtgcgccaccagtctgtgcggcggcccggtgtccggccgggccggcggcggcggtggagcggcgttccgcgtggcggagttcctctcgtgctgcgacatgtgccgccgggcgctggacgggaaggacgtcttcatgtaccgcggggagcgcgccttctgcagcatggagtgccggtac

SEQ ID NO: 275223 - DNA, 657 bp, Zea mays
cagacacatgggcagatccaggagtgtttcctgtattcgatgaataaacgagagatggggaaccatccatctttgatgaggaattcactcctagcagtgaggtacaaaagaacttggatgatgactatgatggcgattgcatgcaagaagacggtgaaattgagggagattctagctgctatcgtgttctatcaagcaaaacattagcatatgttgtggaagcacttattggtgtctattatgtagctggagggaaaattgctacaaaccatctgatgaaatggatcggtattaatgcagagttggatcctcaagagatcccatcttcgaagccatataacatacctgagagcataattaaaagcatcaattttgacacattagagggtgcattgggtatcaagtttcagaataaaggcttacttgttgaagctataacacatgcatcaagaccatcatcaggtgtttcctgttaccagcgcctggaatttgttggtgatgctgtattggaccatctcattacgaagcacttattttttacttatacggacctacctccaggccgcttgactgacttgagagctgcagctgttaataatgagaactttgcaagggttgcagttaaacataagctacatgtacatcttcgccatggat

SEQ ID NO: 275224 - DNA, 1546 bp, Zea mays
  unsure (1)..(1546): unsure at all n locations
tccaggatctatctttgggtgacaaacaaggagacagataacctgacaagccacatagatgctcaatgcgagttgcagataaaaagcgcagtgcatctgaaaagaactttagtctggatgttcttcgcaaatacttctctgggagcctgagggatgctgcaatgagccttggtgtttgtccaacgacattgaaacgaatatgcagacaacatggaatttcccgatggccatctcgaaagataaacaaggtcaatcgttcattgaagaagatagagaaggtcattaaatcagttcacggtgtggatagatccttgcagtacgatcctgctactgggtctcttgttcctgcaacctctcttccggaaaagatgccattctctgcttgcgatacattgcctacttcatctcttgggagagcagtggaggaaacatgtagcccaaaatcagaacaagatttctcttcgcctgatgggtggcaaagagaaactagccaatttcatgtttctggtatacctaaaaggggaggcgatgaagttcggacgttggcaaacaacaacaaaggcagaagaaactatgtttctggtattgcaaatatcacacagcattcaaactctgaaggcacacatggtccttcatatcccaatcccattggtgctgttaattctctgcatactggagaaacaggcaacatcgattctctgacctccctccacccaagcatggatggcattgaaggccaaacaacagtaaggaactcaccatttgtgcaacaagcagatgtcactatggtcgatggtcatgacaccaaggagcagacactcccttccacctctggcatgaccgattcttcgagcggcagcgcctcaagcgagcctactttcaaggggaacccaggacgtgccctcaaagaccgaagcagccctgcactgaccgtgaaagctacctacaatggcgacaccgtccggttcaagtttgtgccagcaaggggctggtaccacttgctggaagagatagcaaagaggttcaagctgacggctggagcattccagctcaaatacaaggacgatgaggacgagtgggtgatcctggcgaacgacgccgacctccaggagtgcatggacgtcctggactcgatcagctcgcgcaacatgaagctgcaggtgcgcgacctctcctgccacgtgggcagctcgggcagcagcagcagctgcttgcaggtggaagcgcatagctcgtgacagaacagaagcctaggttaccgcccgtagcctgttgtagtaggcccagtatcctgttgtcgccatagaggttccttgtccatgttcacgccatgtcgtcgtatggaatgtacaaatggcgagtgtagaaaaggaataaagtgtcatactcttcgcacggttgaaacgaaacaatgccgtgaaggtttttgtcataatctgttgtttgttcacgaaagtcgtttccctcctctggtncccataaaaaaaaaaaaaaaaaaaaaaaaaaaaaaaaatatatcaaaaacaaagtacnctttactgttact

SEQ ID NO: 275225 - DNA, 1022 bp, Zea mays
cggtgctgttaattcttcgcgtaccggagaaacaggctacatcgattctccaacctccctgcacatggatagcgtcgaaggccaaacaacggtgagggactcaagatctgtacagcaagcagatgtcaccatggccaccaaggagcagacccttccctccacctctggcacaaccgattcttcgagcggcagcgcctcaagtcagcctgctttcaaggggaacccaggacgtgccctcaaagttagcagcagcgatgcactgacggtgaaagctacctgtaacggcgacaccgtgcggttcaagttcctgccggcaatgggctggtaccacctgctggaagaggtagcgaagaggtttaagctggcgacaggagcgttccatctcaaatacaaggacgacgaggacgagtgggtgatcctggcgaacgacgccgacctccaggagtgcgtggacgtcctggactcgatcggctcgcgcagcgtgaagctgcaggtgcgcgacctcccctgcctcgtcagcagctcgggcagcagcagctgctgcttgcaggtggaaggaagcgcgtagctcatgacggcacgacggaagcctgggtcatcgcacgttgactgttgtagtaggttttagccttctgctgtcgccgtaatggatccatgtctacgctcaatacaaaatgccgagtgcagaaaaggagaagtgtaatactcgtcgcacggctgaaacaatgctgtgatggccttgccataatctgttgtttgttcacgaaagtcgtggcaataatctgttgccatgaacatgggaggttttaagacgcgacaccaagtttctgagcttgctgtgttccgaattttcattatctagttctctccggatcccgtcggtctgtatgatcggcgatttgcggctatggtatagcctgcagcgtttacagaaccatgtggacgtgatgcagtttggagtcggtttcgagaaatcttttctccgatctcctacgactacgagtgacagcctgacattttgg

SEQ ID NO: 275226 - DNA, 216 bp, Zea mays
cgtaatggatccatgtctacgctcaatacaaaatgccgagtgcagaaaaggagaagtgtaatactcgtcgcacggctgaaacaatgctgtgatggccttgccataatctgttgtttgttcacgaaagtcgtgtccctcctctgttcccataaaaaaaaaaaaaaaaaaaaaaaaaaaaaaaaaaataacaaaaacaaagtacactttactgttact

SEQ ID NO: 275227 - DNA, 727 bp, Zea mays
acgccgtgttcctccatatcccagacaagcttgtttggactgggcttgagaggcttgcggggaagctgaggccacatagaggccggatttttgtctcacataacattaagttttgctcaagactgggaggcgatgagtgcacacgacggcttgccaaattgggccttgagtatgtggggaagcacactcatgatagcttgttgtttaaccactacgaggtctggtttgaattccgcaggccaaaagtttagatcttgatggtacagaaagagagagtggttggcttctgtgatgcaattttggcagtttcaagcacagattaagccatgccttgtactgtttgaacactactgggacctgacttgagattgagattgatgttcgctcggtgcctaattcaagcatatgcatatacaccaaaagtcatgattgagcaatgctgtggtgcttcagtgtgtcttcccagtttcattcggtgagtggtggatgaaggctttagtttttattagcaccgattactgtatgttctataacttcagtaacatttctggtagaaactatgtgggtagctgatgtcaaagcagtaggatacatgcttctattccgaaagctacctctgtgggctgtggccaaaatagactcttacgagcacacatggttttgtaagctgtaacaaggataactttggttgtcttgtttttgcattttatagagcatgcacattttt

SEQ ID NO: 275228 - DNA, 1838 bp, Zea mays
tgtaaatttcctgcgtgccacaggcgtcgacaggccctaccggcaggagctcctgtccaaaatggaccctgatggaaataaggttgtcaaggaggtgatttttggcccaggggacaaaaagtatcgttactgcaagcacatctcaaagcaacatctcccaaatctgtcaagcgacctcatgaagaagggaaaacatttcatattgatacggaaccctctagatatactgccatcttttgataaagtcgttccaccatccttcatggagcttggcataggcgaacttgtctcaatatacagtgaattatgtggacttgggagcccaccccctgtgatagatgcagatgatctgcaacaggatccagaggccgtcctgagtggactctgtgaggatctgggcattcctttccagccacaaatgttgaaatgggaagctggccccaaggaatttgatggtatatgggcaccctggtggtatgggagtgtgcacaagtcttcaggtttctctaagcctcgccaatatcctctgactttcccattcgtgttttatgacctgcttgagcaaagcttgcctttctacaacatgctgaagcgccaaataaggaagataagaggaccgcagcaaccaccattatcggaccctcctctgcctgtccctgcaaataaaaacattcttgtttgggttggagatgaacttttgccccgtaacagtgcaaaggtttcagtgtttgattcagttgtacaaggaggagatgctgtttgggaaggtttacgtatatatgatggaaaagtattcaaattagatgaacatttggacagattgtttgattctgcaaaagctatggccttcagcaatgtgcctactcgtgattggattaaggatgccatctttaagactctgattgcaaatggaatgttcaacaatgctcatataaggctcacgctcacccgtgggaaaaaggtgacatctggaatgagtccagctttcaatctttatgggtgtgccttgattgtgcttgcagagtggaaaccaccagtttatgataactctcatgggataaaattggttactgccaccacacgtcgaaattctccaaatagtatagattccaagattcatcacaacaatcttatcaacaatattctggcaaagatagaaggtaatcttgcccaggctgaggatgccattatgctagataaggatggctttgtatcagaaacaaacgcaacaaatatttttatggtcaaaaagggaattgtattgacacctcatgctgactattgccttccaggcattacgcgagcaactgtcatggatcttgtggtgaaagaaaactttgtgttacatgaacgacgcattagtctgtcagaattccatgctgcagatgaggtatggacaaccggaacaatgggtgaaatcacaccggttgtaatgattgatggacgtgaaatcggcgacgggaaaattggtccagtcactagacaaatccagaaggcatacaagatcctgacagcagggcaaggagtaccgataccgggggttgctgaggtgtaattgtctaagatgcatccctttatctagttaggatcagtcccccaaggagctcaatgatatcaggctagcgcaccaataaattaataatctgcattgatcgctgatgttccaacacaccatgctcccgtttggctcacatatttgtaacgtaatgggtaagtgataacgttaaattatgtttgttttagtccacccgtaatcagatatcatactaaaaattgataccgaactattcaaacttgtttcggccagtaatcgagtgtaaaccattaccctttccgtt

SEQ ID NO: 275229 - DNA, 471 bp, Zea mays
gtacatcatccttatggcttatctggaaatggattgccatgtttctcaattctctcccagctactacaagtctacaacctacccttcacgctttcctcaaggtatgaatctgcttcaggacctcctatttatgtgccattggttaattagagttcttatgttgttttagatggctggttctgctttcctgtttacgaattatgcgtcgtcgatagggcgtccgtaagggcgcctctgaccacctactgtgtgcttcgctacattttcagcccaccgtgtgccagcccacgcatgcttgtttaaaacgcgcggcgggtgtgcgcgttagtcgttggtttcttgtgcgctgtgctgccgcgcttgcatatgctcagacttgcaggcaatctgtcgtgtgcgcggctgggctggaccttcaaatgcagatgcacagcagacggagtgtacaggtaagtgtatatgctgtgggca

SEQ ID NO: 275230 - DNA, 907 bp, Zea mays
  unsure (1)..(907): unsure at all n locations
atatccaaggtaggcaccaaattgactttatctattctccgacacacctatagtctttccatgccttttggtagtcttggtgtgctggccacggacaagtagaccccagtagtgacaaaccatagtggttcctggtcttcttcagcctagagtcatccctaagctgagcttcttgtcaagggcgttggaaacaacctgagagaacctaccatccttgtagtactttttcctgttgaggaaccagctagggaccttgaactggtgggggttggaattcaaacgacgattgtcaatcttgaggccacaatggagttattcgtggagcttcgagttattggaggtcgagctgtaaaaagctagcgttttttgcatattgtacacagtatcaggaggatgagccagaagcacaagaatgggctgatgagctatcccctgatgagcttgagcgcctcttgaatcatgaccatggttggttgattgccaacccccaccagttcaaggtccctagctggttcctcaacaggaaaaagtactacaaggatggtaggttctctcaggttgtttccaacgcccttgacaagaagctcagcttagggatgactctaggctgaagaagaccaggaaccactatggtctgtcactactggggtctacttgtccgtggccagcacaccaagactaccaaaaggcatggaaagactataggtgtgtcggagaatagataaagtcaatttggtgcctaccttggatatttattatctgtaggatagatgaaccgttctggtttatgaaacttttgttgcgtattccaagctggttgaattgaatgttcttaagaaccaatgtcattagaaaagttaaaagattcaataatttgaaatggttttactaataaaaaannnnnaaa

SEQ ID NO: 275231 - DNA, 488 bp, Zea mays
ttggccgcagtcaaaccctaaaccctggcgagccgcggctacggtatagccaccgcaacaccgcatctcaagcgcaagacctcctcgcggctatggcgaagcgtctgatcccgtcgctgaaccgggttctggtggagaagctgctgaagcccagcaagagcgccggcggcatcctcctcccggagaccaccaagcagctgaacgccgctaaagtcgttgctgttggccctggtgatcgtgatagggatggcaagctgatccctgtatctctgagcgaaggcgacactgttctgcttccggagtacggtgggacagaagtgaagcttgcagaaaaggagtaccttcttttcagagagcacgacatactggggaagctcgaggagtagctctggactgttaaaatggagttgtttgaaagtaggtatgcaagagttttgccacggcttatcttttttttttttgtacgggggaacaaatgaaaaacacaa

SEQ ID NO: 275232 - DNA, 591 bp, Zea mays
cgccacgcgtccgcggtaccgtgggcgtgcgacgaagcgatacagaggtacgggcccgaggagcacaccattgtcgaggcccacccggaggtgtacgagcggatgctcacgctccgatggggcgacaagaagaacgtcaggatcgtgttcgggcgatggcaggacgtgatgccgcagctcggatcttatgacggcatattcttcgacacgtacggggaatactacgaggacatgagagagttccaccagcaccttccgaagctgctgaagcccggaggcatctactcgtacttcaacggcctctgcggcgacaacgcgttcttccacgccgtgtattgccagctcgtggcgctggagctcgcgaaccttgggtactcgacgcagttcatccctctgccggtcaaagattgcctggcggaggaggtctggaagggcgtgaagcggaagtactggcaactggacacctactacctccctgcttgccagtcagaatcagaatctaccatcagttagtgatgagttatttctagtctgcgtctgaagttggttgtagctaagtacatttttgttcagacatgctgtgttatgaat

SEQ ID NO: 275233 - DNA, 469 bp, Zea mays
cccacgcgtccggtgggcttgagctgcgtgctcgagctcacgttgttttagcaaagtgccatttatccgatctgaaattctcagttctcgaagatcctgaagctgttttggatcctctgaaccaagccactgaagacctgcaagcattggagtaccacgagatggcagcagaggcgtactatctgaaggcaatggcatacaaccatctcggcaagcttgatgagagggaggaagccgcggctcgtttcaaggatcacgtcactgcccttgagaccccgcataacgaagaggactcgcttaagtactgagacccaagaccatttgttattggcaagcacgccccactgccagagactaaagagggcgtggtggccttctggacccgcatggtggcactggcaggctacaatgctacactgaggcgaatggcgcttgctgccatgcggaggcactgccactgactgtgggc

SEQ ID NO: 275234 - DNA, 407 bp, Zea mays
ctcgagccgcgtcgaaacactggatgaagccactgaagcgctcaggaggataatcagcaactctaggtggcacacaaagagctcagtcataggacgcccttgaaagctgaagctggaggctctatagaacagtttgtacagtgcggcagcagtctctactatggtatgtgccaataagaggaactccgttccagagtttcgtctactgccaagggcctcgtgtttgtgggtgggttgaataaacacgcaatttgagatgacgctgttttgaccatgaatttagattgaacgcacaacggcaaaaaggattttatgtgaagttgtcgatgggttgaaaaagatgtgaccatctctgacggtctgacctgcttcattcatgaggaattgaggataaagcacatttgaac

SEQ ID NO: 275235 - DNA, 552 bp, Zea mays
tgaagagttggcatacaaccagggtagaggcaaaagttcagttattattgagggggttgaagaggatgacaaggctgctattgctgaagtgcagagggcaacgaagaagaagcaatgccctgaaaatggtgatgagtctcaacttcaacttgctgtaagaaattcacctactgaatccttggaaagtgaagatgaagatggtttccctgtatcattttctgaatcaaagaagagttctgagattatttcaaacaagaatgtgggaaaagacaaggagactagcaacaaagacctgaaaagaaaaagtggagccattagcgaccgtggtgattcttcagggggggtaaaagctgagattgatggggcatcaaagaaaaagaaaaagggcaaggacaaaagcactgctatggacacaggaaaagtaaacaacgaagaaaaggaggttaagctacacgattctccagctgatcctgccggtccaaaacagaggatatagaaaaacatgaacacaagtgctttctgggggtgataccagtgagcaatctgctaaga

SEQ ID NO: 275236 - DNA, 756 bp, Zea mays
aattgacggatgcacccacgcgtagcgagcacgcgtccagcggtttttgcagtgcagatcaacttacttcggtgggtgccattgttgctggcgtggtgggcgtacacgttcccgatgaccggcgccgccatcgcgtccatccgctactccaccgaggtggacaacaccttcaccaaggcgctctgcctggcgctgtccgtgatcgccgtgctcacggtgacggcgctgttcgtcaccacgctggtgcacgcgttcgtgctccggaagctcttccccaacgacatctgcatcgccatcacggaccacaagatgaagcccatcatggagctgcacgagagccatggcgaggacagcagcaccaacagcaacgacatcgagaccggcgccggtggcaaacagtgagggacgcgacgcctagctaggaagcatgcataagcaatgcacgcgcgcgcacacccaagtcgccgagcttcacgcacgccaagcgtggggggatgacgcgaccgagttcttgcttggattggattggatctttctataggattgcctacttggttcgatggcgcacgctgaggacctttgatggattgcatctattagttactctatctactactagtcagtagagaactacttgaatgtacagagtgggctacgttgtatgaaacgcggctgcttatttatcgtggaaacattatgcatgcagagtggctttaaccccccagccaaaaaaaaaaaaaaaaaaaaaaaaaggaa

SEQ ID NO: 275237 - DNA, 652 bp, Zea mays
cccacgcgtccggtcagcccgcaggccgtcggcggcgggcagtgcccggcgctcgggggccccgtcaacctcaactgcgactgccctccccagaaccgcaccgccgagggcgccgcgtgccgcggcccgccggagtacggcaagaaccggtgcccgctcaccaggaccacgcccaccgacgtcgagcccgtgccgcagagctcccgcgccccgggggagctcaaggtcatcttctgccaggcgaccatcgtcacatgcggcggcgaagcagagcgcaccgtcctcgccgacagctagacagatcgagccgtccagctccactcgcctccaggctccgctgaatccttacagtaattgtcatgctttcttttgctccatgtgtttgttagcgtgggcttcgacgcgcgtgtactccggtggttttattttagaaatcagcagtgaagcaaaataattgtcttcggatatgttaaactggctgagccattcaaaatccacgaagcgcgagtgaggtgcatctgaatgtggttgtggttggcgaatggggacgatgaaaacgcttacggccgtgctgtagcaagttttggcatatattccttgtttctaccgagagaaaaattaaataattattaacacatagacaattataatg

SEQ ID NO: 275238 - DNA, 621 bp, Zea mays
gttctctccaaccagaagtcgacctcgttgtttcccccctcctgtcccaaatctcacctccttccagttccagctaccgctgctcgcgttgactcgcctcttcctccattcagtgactccttggatcggctcagggacacgcaccagcgtattgtgtcggcgccgaatcttgcgcgcatttcgcgctattgttgccccggaggagtggtttggatccaagaaagtgatcggccttcttggctggatctcctcccgcaatggcggcgctcctggagctgttcctgggctcctctcccgcgccggtggactgggaggcagaggtctacccggcgtacggggacttcgccgtactccccttactcgtcgccttcttccccgccgtccggttcctcctcgaccgactcgtcttcgaggttttagcacgaaaatttatatttggaaagggacatgataagctttctgaaacagatgacagtagaaagaaaatcaataaatttaaggaatcagcatggaagtttgttttttttctttctggcgaactgctttcactatctgtaacatacaatgagccatggtttaagaacacaagatacttttggataggccctggtgaccagatct

SEQ ID NO: 275239 - DNA, 1382 bp, Zea mays
gtcgttaccgttgatcctgcgcccgagttcgtgaagaaagttaccaagtttgccagggagacaggagacatccaaacgctttcacatgttgatatcaagattattgctttggcttacatgttagaagctgagatccatgggagtagccatttgcgggagcaccctcctcctctgcttgaggtgaatgtcagaaagctgtcagaagctccactgcctggttggggctctaatgtgcctaacctgaaagagtgggaagaattggatcagatgtctgaagctggtggcgatatcaattctcgaatacttcctctgaaggacattgagaatcaagatctcccgatgagcgagaccaacagtgtgtgtgaggcacaggaggatacagaggaccagccttcagagaaggatgcacctgttgcatgggaagaggatgagaataatgtaggttggatgcctgctgttagccgcagcacacacagaagatatttgcggaggaaggcaaggcgtgatgccctcaaagaatctggacaaagttttgagacgagttctgttgctgcatcaattgatagcgataaagttctctctgaaaatggagggttggagcatggtctgacttcaacaggtggcctctcttctgtccctgagaaaatcagtgcaagttctgatggtcttgaacttcaagcagatgctgaccctgaaattgctggagaacagttgcattctgaccagctatcttatggtgatgataccgatgcatgcgccaaagaattggataaactagatataaaaggtgaggatgagggaggtgatgatgcacattccgtagattatgagagcagcgaacagagttgggccctgaggtccttatctgaatcaactatagcatgtgttactagtgattacgcgatgcaaaacgtcatcctgcagattggcctccggctcatagcaccgggtggcatgcagatacgccagatgcataggtgggttttgaggtgccatgcttgctataaggtgacccaagaggttggcaaaatattttgtccgaagtgtggcaatggtggcaccttaaggaaggtctcagtaacagttggtgaaaatgggatcactatggcttcacggcgcccacgtgttacacttcgaggcacaaaattttcgctcccaatgcctcaaggtggaagagatgccataactaagaaccccattctacgcgaggaccagcttcctcagaaggttcttcatcctaaattgaagaagtccagcaaggcggatgatttcttgggcgttgaggacatattctcgcacagtggtgataagaaggcgtcactgaaacctccagttggcaaggcactggcaatgttcagcgggaaaaggaatccgaacgacaa

SEQ ID NO: 275240 - DNA, 1183 bp, Zea mays
ccctctcgtccgctgggtccgctgccgtggtggccgtccactgggcgagtcgtcgaggtacccaatttctgccatggcgatccgcccggaccaatggtcgattctccatctgaccatcctcagtaagcctcctgccccactactgccctccaaagcggcgcgcgcgccaccgtcatcttcacccacgcccaccttgctgccgtggccgccccataccgcgccctcgatctgaccccacggggcaggatggacaaagggaaatcggtggtggccgagctgtgcggcgtcgttcagcgatgtccttgtcacaccgcgcgagccgccagaaccccaagccaagagctttctaccatcgccctccttctttactaagtttgccagggagacaggagacacccaaacgctttcagatgttgatataaatattattgctttggcttacatgttagaagcggggagccatgggactagccatttgcgagagcaccctcctcctctgaaaattctcgaatacttcctctgaagaatattgagtcaagatatcttcatgtgtgataccaacagtctttgtggggcacaagaggatatagagctctagccatcaaagaaggatgcacctgttgcatgggaagacgatgagaacgatgtacgttggatgcatgctattagccgtagaatgcacagaagatatttgcataggaaggcaaggcgtgatgccctcaaggaattttgacaaaatttttgagacaagttctgttggtccaataatccgatgatgataaggattctctctgaaaatagtggattggagcatggtctgacttcaactgatggcctttcttctgtctctgagataattagtgcacgttctgatgattttgaacatcaagcagagaatgacactgaaattcctggagaacatttgcattctgatcagcgagcttacggtgatgatgctgatgcgtgcaccaaagaattggaaaacctagatatagaaggtgaggatgagggaggtggtgatgcacatttcattgttgatgagagcaacgagcagagttggaccctgaggtccttatctgaatcgagcattccacgttattcactatgcaaagaaagagacgtgaacttgaagtatgagaaacataaaaggtttaatgctactctttgcacttattgcaactat

SEQ ID NO: 275241 - DNA, 686 bp, Zea mays
gtttgtgcctgacccaagatttgaggaggttaaggaatttgtccgcagtggtgtctttgggacttacagctatgatgaattgatgggttctttggaaggaaatgaaggttacggacgtgcagattatttccttgttggcaaggacttccccagctatattgaatgccaagaaaaagttgatgaggcgtaccgagatcagaagttatggacaaggatgtctatcctcaacacggctggctcatccaagttcagcagcgataggacgattcatgagtacgccaaggatatctgggatatcagccctgccatccttccctagaccaggtggatatcaggttctttcgcctatatttctgtgaaccctcaggatcaaggaacagttggtgacgacattaatttgcctcagccccttagcaggaagcgctggtcacctcagttttgtgtagacaaaatctaggcatcgataaatgatgggggactatgcatggtgttttggcagcactgttcagtaccttgccttctaaatctggtttttggtgtgtgtgtgtaagctaataaatgtcgaggcaggattgtaggaacaccattgatcatttggctcgctggtgacctggtgacgtatggtgtaattagtagttgtttgcctcctggagcttgctggcttctgtaatggtattttcgtaacg

SEQ ID NO: 275242 - DNA, 541 bp, Zea mays
gtggcgggtaccggaccctagctgatcatcagcaagtttacatccacccgagcagtgccctctttcaccagcagccacagtgggtgatctaccatgaaattgtgatgacaacaaaagagtatatgagggatgtcacagcggtggacccaagatggctactagagttggcaccgaggtcgtacaagtcggtggacccaacgaagatcagtaagcggaagcgccaagaaaggattgaacctctctatgatagatacaatgaacccaactcgtggcgcctgagtaagcgccgctggtgatttttcatcatgtcttgcaggtctttgatgtaatgttattgtagtgtatatattaaggtgttctttcaatgcaaagactgggataattgcagcgcagtgatacatgtatagttttctcttaaatttggaagacttataaggactatcttttcccttttgaactggatgccaactaatgacgagtttatcagcgatttgcttgaaaaaaaaaaaaaaaaaacccacgcgtccgcccacgagacaag

SEQ ID NO: 275243 - DNA, 411 bp, Zea mays
cggacgcgtgggttgatgatggagaaactttccaatggagtaaggttacaagaacagttaacaaccttatccttggtcgagtatattgccatcaccatggcacaatgaacataagtgggaatagacgatattcatgcaaactgacgtttaaagagcagtctttccttgatcggaatcctcgccaggttcaaggagttgtcaacgatgctgatggaagcaaggtcgcaacattgatggggaagtgggatgaaagtatgcattatatcatcaacaatgatgcctccaagaccaactcccatggttcacatgagggttctggtgccactttgctatgggagaaaaacgagcctccagtcaatcccactcgctacaacttgtccacatttgcaataacattaaatgagttaacac

SEQ ID NO: 275244 - DNA, 1416 bp, Zea mays
cccacgcgtccgcccacgcgtccgcccacgcgtccgcacacgcgtccgcccacgcgtccgcacacgcgtccggtgaaaaggagaaagaaaaagatagagaacataaccgcagaagggagatcctgaagcaggaagatgagagcgacgaagaggataataggaaaaggaagcgaaggagtagtagttcacttgaagataggaaaagaaggcggcaacgtgaaaaggaggaagatttggcagataaaataagggaggaagaggaaattgcagaagcaaggcggcgggctgtagagttgcaacggcaagcagatgaagcagctgcagcagcggctgcagctgctgaagagtctgctacacttatggaggttgatgctgacgacgaaaaagaaacagatgcacaaaacgagccgtctgttgtggaagctgataacatcccgagctttgctaatagtgttggtgctggtggacttggtaaggaaaataacagtgaggaaataagcatggtacctagtcataccaagcaaaacaacaatgtcccagtaaagaaactgggttttggtttgattggcttgggcaaaaggacatctgttccatcagtttttgctgaagaggatgatgaaaataatgttgataaaagcataagacctctagtacctatcgactacaatgaagaattacaagccgtacaggctaattcttcgactggggcaaatgtcgcagcagctgctgagtttgccaagcgcatctcagtttctaactcaaaggaagagaaggctgaagctgagaaggataggaataggagatccagtgaagctcgtcctaatgatgagcgaagagagaagctacatgatcgcgagaaggataagcccaagtcagagaacaagaagattctggatgcaaagcaactaattgatatgatcccaaggacaaaggaagagctttttgcctatgatataaactgggcgatatatgacaagcatgagttgcaagagagaatgaggccttggatttcaaaagataattgaatttcttggcgaggaggaatcaactttggtggactatattgtttcctgcaccaaagaccatgttcaggctgaaaagatgctagatcttctacagtcgattttcgatgttgaggccgagatgtttgttctcaagatgtggcggatgctgatatttgagattaagaaagtcgaatctggactatcaggaagagcaaagtaatgaagctaagcctgttaccttgtatgacctttgatttacatcactcaactgtggtcatgcttgtaaggtcatactgtactaaacaagcatcagaaaccatttttaatgatgctgagtggacggttttgattctacacttcccttgtagaaatgtatacgagaattaatgacagactgcgtaattattttgat

SEQ ID NO: 275245 - DNA, 761 bp, Zea mays
  unsure (1)..(761): unsure at all n locations
tttcttgagagagaatatcagaggtctagcgaaaaggagaaagaaagagatagtgatcatacccgcagaagggagatcctgaagcaggaagatgagagcgacgactaggataataggaaaaggaaacgaaggagtattagctcacttgaagataggacgaggaggaggcaacgtgaaaaggaggaagatttggcagataaaataagggaggaggaggaaattgcagaagcaaggaggctggctgtagagttgcaacggcaagcagatgaagcagctgcggcggcggctgcagccgccgaagagtctgcatcacttatggagattgatggtgatgacgaaaaggaaacagatgcacaaaacaagtcggctgctgtggaagctgataacatctcgagctttgctaatggtgttggtgctggtcgacttagtaagggaaataatggcgaggaaacatgtatgacacctggtcaaaccgcagatactacgcaaaacaacaatgttccagcaaagaaactgggttttggtttgattggcttgggcaaaaggacatctgttccatcagtttttgctgtagaggatgacgaaaataatgttgataaaagcataagacctctagtacctatcgattactccactgaagaattacaagctgtacatgctaattcttctactggaggcaatgtcacagcagctgccgagtttgccaagcgcatctcagtttctaattcnaaggnagagaaggctgaagctgagaaggatag

SEQ ID NO: 275246 - DNA, 524 bp, Zea mays
aaaaaagataattgaatttcttggcgaggaggaatcaactttggtggactatattgtttcctgcaccaaagaccatgttcaggctgaaaagatgctagatcttctacagtcgattttcgatgttgaggccgagatgtttgtcctcaagatgtggaggatgcttatatttgagatcaagaaagtcgaatctggactatcaggaagagcaaagtcatgaagcgaagcctgttaccctgtatgacctctgatctgcattactcatcaactgtgaccacacttgtaaggtcatactgcactacaagtatcaaaaaccatttttagtgacagagttgatggatctttttacttgtttcttgtacaaatgcatacgagagttaatgagatactgtgcgtaatatttttattttgatagattgcataactgtgtttggcacagttcacacaaaacaactgcctacttttgcttaacttgttctctggtgaacgaagaatgtcaatgctggcagtagccacaagtgatccct

SEQ ID NO: 275247 - DNA, 583 bp, Zea mays
accacgcgttcgtccacgcgtccgtagtcgggtcttctaatggagacactcattggtgtcacacccaaggatccactctatgtaccttcattaggaccacttgacccagactgcaccaaagaaggtttgattctctgtgacaaagagaggatgaaaggacagcaaggtgtaagcttagatgcattggtgggaatatttacccgtctgggtagagacatggaggagattggcgttagcaaaagctataagttggctgaaaaagttgcatctataatggaagaagcacaacctcttcttacacggattgaggctttagctgaagaaatgcaacctttgctctctgaggttaatgatagtgatctgctgaaggatgtggagactatagctaaaggcctggccgacgcgtctggtgacctaagaaggctgaagtcgtccatgcttaccccagagaacacagatcttattaagcagtctattttcacccttatatttaccctaaagaacattgagagtatcagctccgacatctctggtttcacgggcgatgagacgacaaggcggaacatcaaacttctgatcaagt

SEQ ID NO: 275248 - DNA, 503 bp, Zea mays
cccgaattcccgatctccggccgacgccatggcagcccccttcgcggccgtcataggggtgctcgaactgctcgtcgagaggtcctcgggcgcgcgcctcccaggccgcggcagcaccacccggggagctgcgctgccgcgcgggggagcgccggccacggcggtgttcgcgctgggaagcttctggcggtcggaggcggcgttcgggtgcctcctcggcgtgatccgcacctccgtcggctacgctggcggctccaagtccaaccccgagtaccgcaacctcgccgaccacgccgagtgcgtcaaggttgagtatgatccccggttgattcactacaggcaacttttggatgtgttctgggcaagtcatgacccacgtgaggtgtttgggcaagggccagatgttggcaaccagtatagatctgtcatcttcactaatggaaccatcgaggccagattggctggtcttagcaaagaaaaagaacaagctaaagaccgtagca

SEQ ID NO: 275249 - DNA, 690 bp, Zea mays
gtttgacactcataacaagaaagtcagtatgaaatatgatggatattttagaagcatgaaccatagtagttgttggtacagaaacgatacttttattttagcagcacaagcaactgaggtattttatttgcaagacatcaagaattctggaagctagtagattgatcaaaaatttacacataggcacttgtggtgtgtggctgaaaatgacattgatgaaagacctagtttctcaggactatcataccaagatgatacatgtgttggttctgaagtgcaagttaatgaaggagatatggagataactggacatcaggatgctgacgaatctattaatgtcagtgcaagtgtggttgatgaatttcgggtgcaacgagaagaggaagtggaagagtatgagacaagcgacaatgaagatgaaactggatggcaatatgctagtgacaacgaagaatcaataactattgtcaatgacgatgatgatttcagcgataacgagtagcatgttttttgtttgatctgagagaagtgaactctatgccgtattttgtttgatttttaagaagtgaactagctactgttatttgagagaagtgaactgtatgctacaatttgtttgatttttaagaagtgaactagctactgttatttgagagaagtgaactgtatgctgcaatttgtttgattttt

SEQ ID NO: 275250 - DNA, 506 bp, Zea mays
gctctcgccgctcctcgcgggcgtcgggcagctgtacctgaacaacaaccggttcagcggcgaggtccccgcgcggctggtgcaggagctggtgggctccggcggcctgcaggtgctgtacctgcagcacaacttcctgacgggcatcgagatatcgccgtcgtcgtcgctcccttccacggtgtcgctctgcctgatgtacaactgcatggtgccgccggtgtacgcgccgtgcccgatcaaggccaggtcgcagaacacgcggccggccgaccagtgcccggagtggaggggctgagacgccaatgccaaataccggatcaccgcagaagaacgacggatggagattgcgaaacggcggtctctgattctttgattgttttttgtccagttgttactagtgtttcttactattcttttccggtttggggaaggaggatagttacagacatgtaagtgccttgatagccgtgatctacaggtgtaagtttttttagttggtttat

SEQ ID NO: 275251 - DNA, 714 bp, Zea mays
cggaggcccggcgtcaagcctcttgagtacttccgcgccgcatacggggatgagtacgaggggtgccgattccaggaaccaggactcgaagcagaatttgctacgtttgacttgaagagtttctgtcacattggcattgactcttcgggcaacaggttcttcagctatggaccttcgaaaaatgcaaacttacagtaagcaaatggtgctaccttcttggctatctgaggaagatgtcagttaccttgcaagtgtgtactcaaaaactggatttgctggtggagtaaattactatcgctgcttggacctgaactgggaactgatggcgccatggacaggagcaaaggtgcaagttccaaccaagttcatcgttggggacggtgacctggcgtaccatcaccctggagtgaagaggtacatccacaagggcgggttcaagagggacgtgcccatgcttgaggaggtggtggtcatcaagggcgctgggcacttcatccagcaggaaagagcgcaggaaatcagtgagcacatccatgactacatcaagaagttcgaagcttgtggtctgccgccactgagagtttcaaagctgtgagagacctgatggcttctgtacataactcaaatggtctgggagctattgtagttgtttgtagtgctgcagatctatatattatgaatggtatgaagtactgacgatctattcaagggccc

SEQ ID NO: 275252 - DNA, 697 bp, Zea mays
ccacgcgtccgcccttgcccatgccattgctaatgagactggcgtgccgttctatgagatctccgcaccggaagtcgtatctggagtgtctggagcatctgaggaaaacatcaggggcttgtttcagaaggcctatcggactgccccctcgattgtatttattgatgagatagatgcgattgcatccaagagggagaatctacaacgagagatggaacggcggatagttactcaattaatgacatgcatggatcaattccaccagaatattggatcgggcagtggcaatttggaagctgaatcatctgaaaagaaacctggttatgttattgtcattggagccacaaataggcctgatgctgtggaccaagctctgcgaaggccaggcaggtttgaccgagagatatcacttggtgttccagatgagaatgcacggaaacaaatactgaagatgcttactcagcatctccgacttgaaggcgaatttgacttgttcaagatagctagggcaacaccagggtttgttggtgctgacttgaaagcattagtggataaagcaggaaatctagcaatgaagagaataattgatgaaagaagggctcggtgttgcattgagcaggacggtagtagcaagcatgactggtggagacaaccttgggatgaaagtgaggtggacgaactacatattaccatgatt

SEQ ID NO: 275253 - DNA, 721 bp, Zea mays
  unsure (1)..(721): unsure at all n locations
cgacgcacgcgtccgatcacagcgcccacctttcaaccggacttgtgtcacttgactccgccgcggattcccctccagatctcattctcgcctcaaccctaaccgccgacggtggccatgatggccaccgagcccttgtccccggggaatctcgtcgaggacgtcgaaacactacccctggactcctcctccactctcgcggctacgacggacccgctgctccgcccacctcccccctcgtccaccttctctcccaccgccggtgagaaccatggcgcgtttctggacgaggaggatgaggacgtggtggatgacttcacgcctccgctggctccccatgccgctacggccgcgacgaagtcccgcgaggcgtcaccgtggttcgctgagatcactgtctccgagcctaggaagcacgcggagcccgcgaccggagccgtgggcgtcattcccggctcggccagctacgtctcctacctcatcgccactcaggtgcccgacggaggcgagttccgcgtgcgtcggcgattccgtgacgtcgtggcgctcgccgaccgcctcgcggagacccaccgcggcctctctgtaccggcgcggcccgaccagagcatcgtcgagggccaggtcatgcagcggcacgacttcgtgaaccagcggtgcgtcacgctccagcgctacctccgccgnctcgccgcgcatcccgtcgtcggccacaacccca

SEQ ID NO: 275254 - DNA, 412 bp, Zea mays
caaaagcacactctgttcggcttgccttgtcctttttccttgccatatggctaccaagatggtcctgtgtcgctttgtagccctcgcggctgtcgccttgctcctccggcctggcccggcccgtcaggctcaaccgaaggttttccggttggtccaacaacccggccccgacttggtacggcgcagccaccggcgctggaagcgacggtggtgcatgcgggtaccagaacgccgtcgaccagccgccgttcgcgtccatgatcgccgccggcagcccgtccatcttcctgaacggcaagggctgcggcgcctgctaccaggtgaaatgcaccggccacgcgtcgtgctccggcagcccggtgaccgtggtcctaaccgacgagtgccccggcggcgcgtgcctggacgagcc

SEQ ID NO: 275255 - DNA, 936 bp, Zea mays
cttgtgcttttagtctcacaagcaaagaaaacttggggacattgaacctttccttatgcatgctggaaaaccatggcgaaaaaataaggagcccatcaaaactgatcaagatgagaaggaaacatgcaaagagcatcaaaaacaagttcaacgatctcgtgtcaagccatccacctctgatgccatggaggcaggaaatttagaatcagcaaacaaatgtttttctccctcaaaaataaagcaatgggccatggatgatttggcacacactatgtcatggctggacagccaagaagagaagccagagccaagtgaactgacggctatagcctctgaaggggtaatcacttgtctgcaagatgccatagaatccctcgagcaaggcaatgatatcaagggagttgcagagcagcggagcttcgtcccccatgttgtcaacgagctgttaaaactagatggaggcggaaaaggtgcggctctgcccaaagagcagctacgtcaactagcaggcaagtgcaagaagatctaccaggccgagtttgctcgcgcggacatgggcgacaagaacaagggtaggcatcaaaatgacccacatgtgaccgagcaccgcaggaaggccaatgccaaatcagaggatggcccctacgatagcgatgccacgatagaaatgccggaggaagagattgatttcgcgtgcagacggctccctgggctctatgcggatgatacatgatactatctagttgagatgtcaggtgtgtgaggaaggctctgttaggttgttccggattggggccctggattaattcctagccggattacttctctaatttatatagattttgataagctggaatgaatcatggctcattccggtacccccgaagaggcccgaagggtacttgatgtcaggtgtgttgccgtcggttgtttgat

SEQ ID NO: 275256 - DNA, 1563 bp, Zea mays
gctctaactcttccgatgcgcttacctggctttggttgttgacgttcaggtgccggccaagagatttctgcctcggagaacagccgctggtgctccggctggtaacttttttgtgaagagagatattatatataatagaagctaccaccaattcttaccattgaagcatataggaggcttgcaagcagcagtacttccagttactccaccactattagatggtgaggggaaaaagaaacaaatggctgaagagtatgggttcacacaaattggagatgaactaccagatgatattactcttagagatgtcatggatactttacctaaagaggtatttgaaatcaatgatgtgaaggcttggacatcagttttgatatcagttacttcttatgcgctgggtttatatttcattgctaagtctccatggtatcttcttcccttggcttgggcttggacaggcacagcagtgactgggttttttgtgataggtcatgattgtgctcacaaatcattttcaaggaataagttggttgaagatgttgttggaaccttggctttcatgccattgatatatccttatgaaccgtggagatttaagcatgaccgacatcatgccaagacaaacatgttgatagaagatactgcatggcaacctgtttggcaaaaggaaattgaatcatcaccttttctaaggaaggcaattatttttggctatggccctatcaggccatggatgtctattgctcactggttgatttggcactttgatctaaaaaaattcagaccaaatgaagttccaagggttaagataagcttagcatgtgtgtttgcattcatggcgattggatggcccttgatcattctcaaatcaggactagctggatggtttaagttctggttcatgccatggatggtttatcatttttggatgagcacttttacaatggtacatcacacagctcctcatataccattcaagtcatctgaagaatggaatgctgcacaagctcaattaaacggcacagttcattgtaactatcctcaatggatagagatcctttgccatgacataaatgtgcatgtcccacaccatatttctccaagaattccaagctataaccttcgtgctgcttatgattccatcaaacagaactggggcaagtatgtcaatgaagccaactggaattggcgattgatgaagacgatactgacgagatgccatgtgtacgacaaggagagatactatgttccgttcgatgagctcgcgcctcaggagtcccaaccaatcaaattccttaggaagttcatgccagattacgcatgatgccatcatcacagctgttgactagttgagattattcagtattgtcggcacaggtggacagtcacattttcagtgattacgcatgtcccaaaattttgactggaatactccatgttacactattattcgtgcagtaggaaagcacgtagcgtaccaaaatatttatacttcaggaaatagacaaagacattggtgatgaaaacggacagaatcgtgtggaaaacatctcttctcttgtc

SEQ ID NO: 275257 - DNA, 487 bp, Zea mays
tcctcgcgtccgcacaagttcatgacccggcccggcacccttagaggcggtggcggcagacccgccgggcagctggaccgagccgatcggtccggtcccatctcagcggcccgcggcgcctgcccaccctctcagccaaaagccccctgcacccagtccatccaaacctgtgtccgcagctctcgccagccagtcgccgccacgagaggggatgtcgacggcgagcggcgtatccgctggctccgtgctccagctgccctcctttcgggtgccggccaagagatttctgcctcggagaacagccgctggtgctccggctggtaacttttttgtgaagagagatattatatataatagaagctaccaccaattcttaccattgaagcatataggaggcttgcaagcagcagtacttccagttactccaccactattagatggtgaggggaaaaagaaacaaatggctgaagagatgggttcacacaaa

SEQ ID NO: 275258 - DNA, 1319 bp, Zea mays
ggtgagggagtatgagagcgacatggggaagctggaggagctgcttgctaagctgaacccctcggcggaggagttcgtgccgcagtcccgccgccgcgtggacggcggcgctccccgcctttcggccgacgcgcccgtgttcgtgtcgccggcgatcgactactacgcgcgccaccaccagctcccgccgccgccgcttctgcagcagcagcagccgatgcacgtgctgcagtttgtgggtggcgtcggcggggttggcatgggtggcggcggggggatggactccagcagcgacggatccgccaatggtcagccgaatcgacggagaaggaacggtttcatccaggggaggagaaggatgatgggtgcccggcctcgtcgagctgacagggaggatagtgtgcggcggacagtctatgtctctgacgttgatcagcatgtaactgaacagaaacttgctgaagttttttcaacctgtggacaggtggtagattgccgtatctgtggtgatcctaactcagtgcttcgttttgcttttatcgagtttgctgatgacgttgctgcacaagcagcactagcacttggtggaaccgtgcttggcttttatcctgtcaaggttctgccatcaaagacagcaattttacctgtgaaccctaaatttcttcctcacactgatgatgagaaagaaatggtatccaggactgtgtattgtactaacattgacaagaagatcgcagaagatgaagtgaagcaattctttgagggaacatgtggtgaagtttctcgtctgaggctacttggtgattatgtgcactccacatgcatcgcttttgttgagtttgtccaagcagatagtgctattctcgctctgaactgcagtggcattgttcttggaacgcttcctgttagggtgagcccatcaaagacaccagtccgctcgcgatcgccccgtgtgacgtcatactgaattcggctcatctgaagccgtcgtccagggcagcaaatttctgggcaacaaagccctagtcgtgtggccttagagactgccgcatcgcggataagtaattgtcgttgagcagagttctcgttggttaaagtccagtctagtaggaggcgcagagacccgtctgtatggtcgctgggagatctatcttgacctcctttttctgttctttttggtcttagttatcgtggttggattctatagcagccttgacaggcattcgaacaacaatgtttatggttatcctatccgctttggactcttaagcatgttttcccagtctttcaatattaaaaaaaagttgggtaccacacat

SEQ ID NO: 275259 - DNA, 477 bp, Zea mays
ttcacgcgtccggccgtcgacgctctgtccatatgcatgtcaattaacgggtggcagatgatgattccgttggcgttcttcgccggcccccgagttgcgtgtggccaacgagctcggcgcggccaacggggagggcgccaggttcgcgaccatcgtgtcgacggtgacgtcgctggtgatcgggctcttcttctgggtgctcatcatgggcctgcacgacaagtacgcgctcatcttcacctccagccccgtcgtcctcgacgccgtcgaccacctctcggttcttctcgccttcaccatcctcctcaacagcatccagcccatcctctcaggtgtggccgtcggctccggctggcaatccatggtggcctacgtcaacatcggctgctactacctcatcggaatccccatgggcatcctgctcggatggctattcaaccttggcgtgctggggatctgggcggggatgatcggcgg

SEQ ID NO: 275260 - DNA, 422 bp, Zea mays
gcgccgaggtcgaaataagctgctgcgggctgaccgtgaaccctgggcaacctgggcgcggcttggtggagcggtggctgagggttggcccggcgcgcccgctgcacacggtgatcggctcctccgggggagattatgtgatggtgataagctatgggcggcccaagtccgcgtcctgttaaaaccatatcaccatcgacggcctggcgaggtcgattcctagttcgaacaagggttggtgccgccgccgctgccgccgccggggaagaggccgtcgacagataaactcaagcagcggtagcgggctgctctgccgcagcagctcgtcctctcaccggcgtgttctttaaagatctggtcgttcggtcgttggtgtcatacatgcacatgtgatggaagtcgctataatttggtagtacttg

SEQ ID NO: 275261 - DNA, 508 bp, Zea mays
cacccgtgcctgtgtctcaccagcccactttccccagtactctactcacccacccactcacggactcatctactgagcagcgcggtgggcatccgagcgagagggcgagcgcggaaggatcggaattccgaaggttgggcatggaggcgagcggcgagaaggctgcggtggtgcgacggctgatggaggcgaaggaggtgtccgggaagaccttctcgggaatcgccgccgagacgggtctcaccaacgtctacgtggcgcagctgctgcggcgccaggcgcagctcaaggccgacacggtgcccgcgctgagggcggccctgcccacgctcacggacgacctcatcgaactcatgatgcagccgcccttccggtcctaccaccccaacatcgtccacgagcccgccatttacagattgaatgaagctgttatgcattttggagagagcatcaaggaaatcatcaatgaggagtttggtgatggaatcatgtcagccatagacttcta

SEQ ID NO: 275262 - DNA, 612 bp, Zea mays
  unsure (1)..(612): unsure at all n locations
ggatgccccccatggaaggaggcctcatttagccttggccggcgcctgttttccaggccctgccaccatcctatcctatctggcaaaagttgggtttgcactagctgtaaaaatttccatctatgtgacaagtgtcatgcagaggagcagaatacagcacagaaggacaggcatccggccaccacaaaacagaagcatgcattcgaaagaatggaggtacaacctcttccagagactgatgatggagatccgacaatggaaagtaagtattttgacagcaggatcgatttcttgaagcactgccaagacaatcaattccagtttgataccatccggcgggcaaagcactctacaatgatgattctgtattacctacacaattcaacctgctctgcttgccatcgtgccgtggaccaatgcttggtgtggccgtgcctagagtgcctgggctgcaccttctgtggtcaatgctataaacaaaatggtcaaggcttgcatattcatgaattaaggcagattgacactagagaaacttcacagaagcacactctacagcaggactacattgatggcctngtgcatgcatcgaggtgctatgatccacgtaactgc

SEQ ID NO: 275263 - DNA, 687 bp, Zea mays
gtcacatgctactatgcaaaaaagtttgaagcactaagaaggtcttgctgtccatctgagcttgatttttttagatccattacgcgtgggaaaaaatggggagcacagggtggtaaaagcaatgtgttttttgcaaaatctgtggatgatagatttataataaaacaagttacaaagacagagcttgaatcattccttaagtctggcactgaatattttaaatatctgtcagagtccataagcactggaagccctacatgcttagcaaaaattttggggatctatcaggttactagtaagcatgtaaagggtggcaaggagtcaaagatggatttgcttgtgatggaaaatcttttgtttggacggaatattaccaggctctatgatctaaagggatcttcaaggtcaaggtataatgcagattcaaatggtagcaacaaggttcttcttgaccagaacttaattgaagcaatgccaacttcaccgatttttgttgggaacaaggcaaagcggctactggaaagagctgtttggaacgatacatctttcctagctggaatcgatgtgatggactattccttgcttgtgggagtcgacgaggagaaacatgaactggtcttaggaattattgattttatgaggcagtatacatgggacaagcaccttgaaacatgggtaaaatcttct

SEQ ID NO: 275264 - DNA, 972 bp, Zea mays
gcatgctcgagtgcctgcacggctgcgccgagctggagaggaagcacctattcggcgctgccgacgccgacgccgaggacgagcccaccgtcgccgccgccgcgttcatggcgtacaaggagaggctcgccaacctcaccggagtcacgcgcaggttcatcgggaacctcgtcagagcgttcaagaccaacctgccggaagtggtggtgacgctgacgccgccggcatccgacttgcaacacatagtgaagagtggaccaacgacggaaagacaaacggttggcattggaggcatcctttctacagcaactgtgacaccacctgtttccaacgtgtcttctttacaagggacatcagcactgcgaccttcatcgtcgtctctactagtctcacaggaaacggacattgcaaatgatagcgtgcaagaacgacacagccctacaagaaaccttgcccaggcccagcatccagttcgtcctggcggtcatggcggcttcctcagcaatccatacccgagtttctttggagaggctacctcaaccgcgggaccattgcaactctacatgccaaacatggtggcgtcaggtggcacgacatcgacgccctctctcgccttctctctgtctgcgcctggacagcctattacgagcacagctcttggcggctcctttggctcaaacactcgcactgcatggggcaattcagatatggctgctgcgtcgtcctctcagcctgaccgcatgggcatggatcaacaagcaggaaccgggtctgccatgaatctggccattgggctgcatccctctgcccagcagccaccaccagaatatgtcaaaactgggagggtgacttatacgggtccaggctagggcagcctgtgtttattagtaaactcgaaagttgccgaggattggccagaaactatgcagattgttcgcctcatagcccaggagcatatgaacaagaaatatt

SEQ ID NO: 275265 - DNA, 2099 bp, Zea mays
  unsure (1)..(2099): unsure at all n locations
ttattaantttttttgatgtaaagccgcatcagcttaacatactttgtcgacaatagccgaactggtttacacagacaatggataacatattctgttgacagaaaaaaaaaactggtttcaccaaaccgaaggacaacatactctgttgacagacacgaaactggtttcacaaaaacaaaaaacaaaaaagaggcaaatgtgcggcgaagtaaataacaaaagggccatatgcaagttcagttttcagctctgtttgctgaggaagatggcgatggggtcgccgggtgatggtgggttcttctctagcagcgaagcatgttcaccagccttagcgcgagcagcttcgtcggaagcggagagcacctcgacttgctcaaggcccagctgcctcttgatcagctccaagttctcccggagaacatccatctcaccgaacggaagcttcaagtccagcgcctgaggaccaacctcctttgcctcgtccttcttcagcttgatgaagggcatgcacagcttctgaacctgcttcaggttcatttcctgcccgatggggcactccttcagagcttctgctatttcctgatcgggtgagaaggagcggctttggctgtcgaacttggactgcagcaccctcaagcactgctctttccatccagagtagtgctcgttcacatatatgagaccaatgctcatcttcttttcctcggacggaggtgccggtgcagctcccttcttaggcttcttagaaccagactcttgcttctgaagcagtttcctcatcaaaactatggaatcctgcaggtatttatttgcaattctcagtgtaggatccggggtgtccgcgactggccagccagcttttattgcaaagccttctttcttcatgatcttctgccacacgtgctcggcatagtgtgggcaaatgggggtgataagcctggtctggacatccataaatcgccacaacagatcacggttcatgcctgctgcaccacaagagagcctgtactcatctctagccaattggaggtcatagaacccagacttcagggcgtctctgaacatgaaagcattgtagctcttctcagtttctttgattgcaatgttcatctcgtttgaaaacacacggtcagcatatgtagtgggcggcccagttcttaatttagattcagcagctgtaacctcctccatccatgaaatttcttttgtaagcctcataacagcagaatttgcagtttcagtgacaaaatttgcatcatccataccatcgccagcatcagcaagggcaaatctagtggcatcagaagagtacttttttatggcatcttccagagttaggaaattccctgtggacttggacattttctcagagttaagcattagatgcccattgcagcggaaaccaataggccagtggtgctcaggaagaagtgctgtatgattgtatatgcagaatgtcaaatggttttgaataaggtctttaccagacacacggatatcaaatggataccaatacttaaattcatgtttcatcttgttcaacagagcggcagggatctcgctttttggtgccgggccatcacaaaacacgaaatcccagacttcatctgtcatttcttctggccttactgaagatatttctttcccatacatattaccattttgcaaaaggtgtgcaactgtataataagccatgtatagggtagaatcagaaagagattctacaaggaactgctcatcccatggaattcgagtaccgagtccaaatgaacgtgaacaagcccactggttcagccagcccagcgtatgttcaaaaccattgcgggtttcagttgagaatgtattcatgcggtccaaacatttgactgccttctgcttccattcagcctcgccataagttatataccactgatcagtgagggcaacaacacattcatcaccagatctagacatgaccttcttctccggctcactatacaacacagctgtgccttcttccaaaagcttacttttaatcagcggtttcgcttcctgaacctttctaccactgaactcacctacaatcattgttccatcagtaaatcccttcagatatgac

SEQ ID NO: 275266 - DNA, 449 bp, Zea mays
acctgtactggaaggctagtgtgaagaaggacaggggctggttctggtgggagaagttcaagtcctacaagtatgatggcaggagcgaggagttctaccgtcttccttatggcttgagcaggtacttcccctcgctctaggacgccgggaggaagacgacggacccaagttctatgtagctgctcgagcgtagaagctgaacatcagttgaaggcaacagaaccatatgttattttcatatatcaagcagttgggagggagcttgatgttttgatttaccttgtaaaacattttggatgataaacttttgcaattactgggagagtaggatcaaccaggggagaattctgcaacaattcagtcaccgtttttgcttcagattcgaaacagaacacagatgccttcacaggcttcgattaaaaaaaaaaaaaaaaaagggcggccgctct

SEQ ID NO: 275267 - DNA, 544 bp, Zea mays
cccaggcggcccatcgtagccgtgctcgatcttcttcgctccgcagcacaccactcgtagccgggggcagggcgactgacctctttcctgctgccgagcgccatcgtctcctcggaccatctcacctcagagctgctgcgaccgccggccaacccgtctaggtcttgtccctgccgcttcctgagcctagaacatctttgcattttggagagtctccactcggagctattgtacagtctccatccctttcaacgagatggcacgtcagtctgctctctcgcttgtgagggatcgagcaaagacgggagcgctgaagcgtctgactctgagttcatcgaagacggctgggaggaactcgtctgggcgcatcacctctttccaccgtggtggaggggccaagaggttgcagaggaaggtcgatgtgaaacgcgacgcctgttccacgggtattgtggagcggatcgagtacgacccgaatcgctcctcgagccttgctcttgtgcgatgggtgcaaggggtgcatttccgccgccccaagagtcca

SEQ ID NO: 275268 - DNA, 957 bp, Zea mays
ctcattttgctctgagaaagaaaattttctctctggttcacttgcccgtactgatctcttataaggtgaacaagctgaaaaatcacagggcttactgcgtgtgcaagggaggcctgcagtttcatatgacgatcagggcatggtatttgcagttgcctatggtggtcacataaggatgtttgatgctcgaaaatttgaaaaggggccttttgagatcctctctgttggtaataacgattcagaggcccatgtcataaagttcagcagtgatggcaggcggattctgttaaccactaaagctggacgtgtccatgtgctagattcattccatggcaatagcattgcgtcgtgcaatgtgaagccagtggtaaccaactcaacactggaggcgtcgttcagccctgatggaaaccatatcatatctggctccggtgacggtagtgtttatgcttggaatgttaggagtggaaaggtcgcgcgctggggaagcacagacgacgaaccgccgctggtaaggtgggctccaggatccttgatgttcgtgacaggatcatcagaactgtcatgctgggttccggacctgtctaagctgggatcctttaccattagcaagtaggtgaaaatgatgagaggtggactgcccttgcaaaccctgttcgtccctgtatggtatgtcgtgtggctggttgaagcgactcatcctttagccaggtggccgtggtaaacttgcaacctgttacaattgaatgacttgtatagagcatcggctgtggcgatctggcttctgaagccagcggctagccaatgaagatggatccatgctttagttctgtaaaccggagattgtacctgagtattgctgtatctctttgtttctggaaggcgtcttggctcgtaaagattctgcaactcagagcagatggctaatatatagagagagcaaagaacccctggttt

SEQ ID NO: 275269 - DNA, 603 bp, Zea mays
tgatgctcctttgtgtggtttcagtgcattagcagtgaaggtcctccagcaatatggtgtccccatcagtgctagagatattctttcagatctaaagctcaaagagagtgttaaagcatacagtaactggcctacgtttccacaaatatttatcaaaggagagttcgttgggggatctgatatcatactcaccatgcaccagaagggtgaactgaaggaactgcttggcgatattgcacaaaaagccgaacaaagtggttcttcatgaaacaagcatcagtatttgtgatgcaaacttcccggactggatgttccttctcagaagattttaggtgatcttgcattgttgccctgtggcttcggatttgaatacgttctctgttttgttctgttctgttcttgccagttgtgatggaagatccactcaaggccgaattgcaggagtaaccaaagttcttgttctcgataaataaatgccaatgctcgacactattcttttatgcatctagctgcctgccttagcttaagcttgggtgctttaagttgcttttaaactgaacggtgctgttgaaacatgtaattagtatgtgacatgcttataac

SEQ ID NO: 275270 - DNA, 394 bp, Zea mays
  unsure (1)..(394): unsure at all n locations
cgattccgctggggggttggatataggnatcctcccggttactccgggccgggaatcgaaaaggctgccgtgttctccacttctccgccttcccctgctctcctggaccttcgacgcaccccaaacaccgcagagatgcagaaccctagcggccaccacaccgcgacggccgccccgtcgtcggcgccgtccaagggcaagtcgtcggcgccgaaccctagcggcaaccacgctgcgacgccggcgccatcggggacgccttcaaagggcaagtcggcggcagcgcaggccgcggctttgggccacggttcctcctcccaccaccactctgccggcggtggcggaggtggcgctgacgcgtccgccaccatcctcaagcgcaacgcggcgtctt

SEQ ID NO: 275271 - DNA, 498 bp, Zea mays
cgttgtattgcaaccaaggactgattcgttagtttgagcacagcacaacccacccagttcaacgataacgcatgtcaatgtaagccacgcataccatatagtatcatatcgtcgagtattgttcgtaccacatcttcctcccagttgatctccttgggcaaggtaggcccttccctggacagctcgttgggcatcttgttgagcatgctctctgctctgtacctgaacgctggagtccacgaacagactgctctgagcggcgtcaatgtggataggaatgtaatcggacggatatgactggttccatgtttgttttcatattttctcattgatattaatgcaaatattatcgagttgggcaaaaaaaaaaaaaaaaaacaattaaaaaaaaaaaaaaaaaacaaaaaaaaaaaaaaaaataaaaaaaaaaaaaaaaaaacacaaaaaaaaaaacatataatctaaaaaaaaaaaatcacagcacgtatcattccaaca

SEQ ID NO: 275272 - DNA, 481 bp, Zea mays
aggcaattgaggcccgggacagagattatatctgtacagagtactggcgatcaaggccccatgcaacaattgagaatcgagacaatcagaatatgtctccgcaggatccaccccttgttgcactgagggggctcttccagcgggctaattgtgatgaactgcgagcactacgcagtttgctgatgagcaatagaattctgggcgacaattctaggcagcaggcttgccaaatccttgatgaggagattgcgaagcaatggcactgaccagcgtaaatacaggatgttgtactaaccaattgtttggcatgattttgttttgacgggataaatcagttttaaggcttgcttcttccgttgcccttgtgcccattcttttcattcttgtgaccatacccaattctttattgcaagtggtgtcaacaagcatgaggctacagctgcatcacctgcaaggaagtcaaaagtaagaggcacatgca

SEQ ID NO: 275273 - DNA, 547 bp, Zea mays
gggcgacaccccgttctgcagcgaggactgccgctacgagcagatgcaccacgacgcggcggcggcgacggcctacgcgcggcagcaggccagcagccggcggaggcagcagcggagcaggggcggctctgtgtccgccaacgaggcggacgtgtacgtggccagctagtgtaagagcaagcgcaagtgcaagcgcggcgaggccgaggatggtgaaggccgtgcgctgcctggttcaagcaagagaatcccgtcggtggaggtggaggcgcaggcgctggcgctcccggttggctgcccgccactgcgccgcacgagctttgtgagcggggggtggatctgaaagagtcgacagtcgaaagctgaagaaggcgagtaggagacagatccagacaacccgcgggttgaaaacttggatatcgacgccatacgtgctctgcgcctctgctcctcttgtttctgttttcccttccctgatgggatcttttgggctgtgagtgggttagaggttgatgaggcctgaggtgtaaatgtacacggcgtttca

SEQ ID NO: 275274 - DNA, 282 bp, Zea mays
cggccagcagccggcggaggcagcagcggagcagtgggcggctctgtgtccgccaacgaggcggacgtgtacgtggccagctagagtaagagctttgtgagcgggggaaggggatctgaaagagtcgaaggctgaagaaggcgatcaggagacagatccagacaacccgcgcgcgggttgaaaacttggatatcgacgccatacgtgctctgctctgctctgctcctcttgtttctgttttcccttccctgatgggatcttttgggctgtgtgggttagagg

SEQ ID NO: 275275 - DNA, 1257 bp, Zea mays
ctacgcccaagcaggccaagggcgccgtgcccattggatcagagacggcggcaggcctggcggtggagaagaaggcgagtttggcgcggacacctgttgctcgccggccgatgcttgttaagtctggatcagtggatgcggctgccccaaatgacacagttgttgctgtccaagagtcagatgaaaatacggacaaaccattgaaacaaacacagccagggaaaacagaggatgatgtgcgctccaccacatcaagtaccaatactccccgtgcagcagctcgcaagagtgctgctgctgctgctgctggttttagtttcagattggaggagcgtgctgagaagagaaaggagtttttccaaaagcttgaagagaaaatccacgcaaaggagctggaaaaaacaaatctgcaggagaaatctaaggagagccaagaggctgagatcaaactgctgaggaagagcctaacatttaaagccacacctatgccaagcttttacaaggagcagccacccaaagttgagttgaaaaagattcccccaacacgcgctaggtcgccaaagctcggccggcacaagccagccaattctgccactgctgcttctgcggatggttctgtatcatgtgagagcccacggagcactgcaaattcgggcaaggtaaatgaagcgatggaaaacaacaaacctcatgcccctgctagaaaacctgttcagaggccagtcgtgaaagctccatcacaggcgtctgcgaccacaaaggctgaagcaagacccgtggtcacaaggccaaagatctcaaactcgaaacctaaggcttcaagggcaaaggttgcgcgagcgcaagaaaccccagctgaagcccctccttcagaacctgctgctccagaagatttcacggttgaacatggcgttggagacgccacaggtcctgatctgaccgcgcaattggttgcttcgaacgaagtcccagtccatggttgatcagctgagcattttgcatatttattcccttcttgcagttctgtgaatagcgagggtgtgtgcttcattggaagttgaatcgctcgaagtgtcatggtttatcgtttccggagtagacatccattttgtttttcagcttgtcatcgggcatgccatgtatattgcttggtattgtgttcttgtttaaaatttccagtcttgtgtatattggatttgtttgtcgctggagatcctaggattgttgcaataaaaacgtcaatgcaatttgtgcatt

SEQ ID NO: 275276 - DNA, 948 bp, Zea mays
tttttgcaagatggtgtgatagtagtgatctgggaatttgcacaatggcattttctatgagacacaagtttgataaatattgggaaatgaacaatttagctttggcagtgggagcatttcttgatcctagatacaaacataggatgattgagctatatatgtctaagatgtatggcagtgataaagccgagttagagaaattagtattcatgaatgttatcaatgaattatttgcatattattcagcagtcatcaatgcaaaatcaaccacaaaaggttctagttcaagagagagtgagtttgttccacataaaaatacttgtttggtggatgacgaggaggatgaggttgatcttgatgagttgtatgcaacaacaagcaatgacaagaaggtgtcagagttagatttgtacatgagcgaggacctagtgaaggtcaatgacaatgaagcaacatttgatatcctatcatggtggaaagggcaagtcacaaattttcctattctttctacccttgctcgtgatgtgttgtctatgcaagtgtctactgttgcttcagagtctgcatttagttcgggtggacgcattgttgatgcattccgttcaagactcaaaccagaatttattgaggcattggtttgttgtaaagattggaagattgcttcggagaaagatttggagattgaaattaaaaccttaagtgaacctatgaatgacgttgacttggaggatgctgctgcaattggaacttgagaagttaaagttcaagttaccatggatgatgttgaacttgttacttattgttgtaatgttgtggagcggaggtttgctggttgtttggttgttgcaactttattttcttatttgcacttcttcacttgaacatgttaattaatgtcaactatctcctatttgttataaaaaaaaaaacaaagaaattattaagaga

SEQ ID NO: 275277 - DNA, 546 bp, Zea mays
ggaccaagccttccgccaacccatccaacagcgctctctaactttgcacacttgaacctcccgattgctgcggggggcaattcaactagaatcccagttgtgatgccactttcagccgcgatggcagcatgctcgcagttgctggtggccaggtatggcgagatgagtgacggtctcgtgacgaggaaagatgctgaggttcctggttcagtggcggtccggccggagcggaagctagaccacgcgtggatggtgtattcgtcgctgaaagaagagtctggggatcaggcggacacgtcgcaggtatgcgaagccctgctgactctacttgtcgaggttgcacaaaagaggaggcatgagatggcaatgaaagacgagtgaaagtagcttttggtgttggctggcgatagtgggatgtatcctcctgtaatcgtagactggcctgttgctggctgtacagagttgtgctgctcaaagtgctttgggacctgtttttgtttggttgacagaaacttgtgttgtatagcatgtgaagttcagaggtgg

SEQ ID NO: 275278 - DNA, 600 bp, Zea mays
cttcaaaacgagttgacaatgcgggtttcaggcagtccagcaggttggggccatggcgccgccagatcagatccccctcttcctcactcaaccgcagtgttctcgtcggagcaggcgatgcaaccacccaccattgcaagcgttgtattcccgttgcagcagccactggcaccatcagcaatgaccaaaccacctcatgctgcaccaccactcgaactgaagctctttccagaagtggcatctgccgaaggccatcagccctgtgaagaccaccaagctcccaaccatgtggcacgaccacaggcaaggtacccaacgcaatcagcctcatggcccgtaaacctgttctctggccttccacgaatggaagatgagcaatgcagtagcagcacaagcggcagcagcagagaggataacacagatatagaatgagtggatcagctcctacaatcaaagagtctctgttttgagtctagtggttgtaaatttgaatctcctttttggatttcagaacgatagattatactctgttggaaataggacccctcccattgcaaatctttgttggaatctctataaatgcgaatcaatcttactggc

SEQ ID NO: 275279 - DNA, 605 bp, Zea mays
cccacgcgtacgaccacgcgtccgtccactcgtacgctgatctgcaaccataatgctgtgaatagtatttctcagcgacatatctctgcacttcctgacacaattcatggctgcaatccatatgaaaaaaatattacagaaagatgtatacagcaatcatgcaaaacattgcaagttgtaatctcagagtggatatcaaaatttgacaacatggaaattgatcgttcaaggttgcaattgaataatgtggatgcaattacttccaggacatatatctgcaaccattgctacagcaagttggctgatttcctgctctactggttccgtgtatcattgccccaaaatcttcttccacgtgatgctgcggagagggagagctgctggtacggtttcatgtgccgcacccagcaccatcggcctgaccacgccaagaagctgaaccacgtgtgtcgcccgacaagaggcaaccagccctagtgagacttgactgtttctgtcaccattgtcatcaccatccattgtatgtgtgtgtcatcaaaatggtcaggaagtgtggcgcgtccatgtttggaaccctttttggtttcatcctggctggacctgac

SEQ ID NO: 275280 - DNA, 301 bp, Zea mays
gattgatgtagatcgttcaaggttgcaattgaataatgtggatgcaattacttccaggacatatatctgcaagtaatagctttttctgagttcagaagatttaagttatgttatattaactcactttatgaattcaaacgaatgcagccattgctacagcaagtttgtcgatttcctgctctactggttccgtgtatcattgccccaaaatcttcttccacgtgatgctgcggagagggagtgctgctggtacggtttcatgtgccgcacccagcaccatcggctgaccacgccaagaagc

SEQ ID NO: 275281 - DNA, 417 bp, Zea mays
cgactgcagattggagaactcgacaccatgaacgtgctgatcgttgcccttgctctccgggcgctcgctgcgagcgcgcgcctccagtacaagcggcggctgcggctgccagacaccaccgtttcatctaccgcctccgttctatatgccgcctccgttctatctgccgccgcagcagcagccgcagccatggcaataccccactcaaccaccgcagctaagcccgtgccagcagttcggatcctgcggcgtccgcagcgtcggcagcccgttcctgggccagtgcgtcgagttcctgaggcaccagtgcagcccggcggcgacgccctacggctcgccacagtgccaggcgctgcagcagcagtgctgccaccagatcaggcaggttgagccgatgcaccggtaccaggcgacata

SEQ ID NO: 275282 - DNA, 426 bp, Zea mays
accggtattgcctgcccggccggacccacgcgtccggagagtggaaaccagcatcagcattggtgccactgaggcgaccctgatattgacctgggttatgctccatgctgtttctacataccttgctgacgccacaatgctccctcaatgctaacacgctcctatagctatcattattgcgccataccttccatacattatagctccaatatgtgaaaacccagctattcaaccatatctgctgcaacacgcactcgccataagcagcatacctaaatcgcccttgtggacacaacattcgtcagtcctatctttagcgcaggcatcgggacataccatcatggcacaacacctgtaccatctcgtgctacctctgatcaactcaagtagctctggcaaacctttctacatactgtcagcaacgac

SEQ ID NO: 275283 - DNA, 471 bp, Zea mays
ctgctatgctgcacacgtattgcaagaggctccgtatcattcagctttttttatcgatcattgcaggtatggccacaaaggaaataatctgtttctaggcgactggaccggttgttctgcttgaaacccggtctgggttaagctgtgaagctcctgcagccgcttgctcctgcagttttgcgtcaagtgtctaccaactctagcatatgtagtgctgcgtaagatgtcggcacctcagatagacagaggcgccatatttcttgctcatgtaatgttatttgttgtatgctcgtttgtatgtactgcatgaagcattgtaaaattgagcaacagcaaccagagctcgagaatcttaggcgcaaccaaccaaccccgtatcgatgaattgacaataaagctgaatattttaggtgtttagaaagtattttctcttagatttttggggagattaggatacaaactctctgattc

SEQ ID NO: 275284 - DNA, 1336 bp, Zea mays
gaggcctctcaagcgagagctatcccaagctccaggatttctataactccaccagttacgttgatgagcttctatgggcagcgagttggctctaccacgccacaggcgaccagacgtatctcagctatgtaactgtacagaacgggaaaagttatgctgattggggaaggccaacatggttcagttgggatgacaaaaatccaggcacacaggtgcttttgtccagactaaatttcttcgggtccaaacagatatctaatgccgaaaatgaggggttgaaaatgtatagagatactgcagaagctgtcatctgtggtctgattccagattcgcctcaagccactgccagcagaactggaggaggcttggtgtggataagcgggtggaattctctccagcatgccaccaatgctgcgttcctatctgttgtgtacagcgactacatgctctcgacgcggacagcggcagtgcagtgcagcgggaagtactacagccctaccgatatacgcaactttgctgcatcacaggctaactatatcctgggagacaacccgatgaagcttagctaccttgtgggatatgggagcagctacccaaagcaagtgcaccacagaggggcgtcgatccccgcggatgcgaaaacaggctgcaaagggttcgagtatctccactcgcccagcccgaacccaaacgtggctacgggcgccctggtgggtgggccattccagaacgacaccttcgtggactcccgtgacaacgccgtgcagacggagtccagcacctacaacagtggcaccctggtcggcctcctctccggcctcgtcaccacttcctccgtggtacagtcgttcacctagagggctcctcctatgttctggcctggagcgatgcatgtacgagtacgattgcagtttttttgcttggcgtggctgatggtgatgcgcgatctgtgactgtgagagagaaagcttggttgccaaccgttcagttcagacggatggcatatgcaggatgcagcagtagtttagtagtgcccacgcgtttcttctgttgtgtgtgtacaatgacggtgctgctcctgcagtgcagctatagtttttcaccgcgtgctcctatctggtttgctggtgtgcctgtaaggctgtagctacgagtaatgtattagactatttgtaggtcgtatttcatttgttcattctgtggtgaggtagttcagcagagctttgtactgtaccgatgaattgccccgtctcccaactgaaatgtgccttgtggattcccagctggaggtgaatggcaggcattcgtgcggctcttcgctccatgtttttttttt

SEQ ID NO: 275285 - DNA, 556 bp, Zea mays
  unsure (1)..(556): unsure at all n locations
atccgagtgtcctgcagagcccatcctgttcctgtcnccctcgagcaatcgagctcagctgcacgctcgcttacgcggagacacagacgctgagacacacgcaggtcatgatgctgctcatggactcggggagccgcggtgactgctcaccggtctgcttggacctcagcgtcggcctttcgccgccgtcgccggggagcggcccggaaacgacagctgacgctgagagactcgaccgctcccgccactggctgctgggggccacggacatcgtccctggctgacgggcaggaggaggtaactaactgaccgacgaccatttcctcgccgctcggtttccacaatctatcggcgtcgtcgtcgtccctgaaatcctgaaaatctatcggcatcggtggccacaatgctgtgtgatgatgacaggccaagaccctggaggccaggctcacccaggtcagcgaggagaaccggcggctcaccgagatcatcgcctacatgtacgccagccaggtcgccgcgcagcggagtcccgacggcaggaagaggagcagggaca

SEQ ID NO: 275286 - DNA, 1392 bp, Zea mays
cccactcgtccgctttgccatttagcaagcttacattacacaagacagagagtccattggaactttcagagtgcccttccaaaggaaaacaaatcaaccaagggtcccttagcgatgatgagtttgatgatgtaaaaaaggagaatgagggcgttggactagatgacttcgaagttctgaagctcgttggccaaggggcatttggcaaagtatatcaggtgagaaagaaaggtacatctgaaatatatgcaatgaaagttatgaggaaggacaagattgtggagaagaatcatgctgagtacatgaaagctgagagagatatacttacaaaggttgaccatccttttgtcgtgcagctgaggtactcctttcagacgaagtaccgactttaccttgtcctggacttcataaatgggggccatctcttcttccagctttaccaccagggtttatttagggaggagcttgcacgcatctacactgctgaaattgtatctgcggtcgcccacctccatgccaacggtattatgcatagagatttgaagcctgagaacatcttactggatgctgatggtcatgctatgctgactgactttggtgtggcaaaagaatttgatgaaaacactagatcaaactcaatgtgtggtactgttgaatacatggccccagaaattgttcagggccgaggtcatgataaggctgcagactggtggagtgtgggagtccttctttttgaaatgcttacaggaaagccaccgtttgttggtggaaacagagacaagattcagcagaagatagtaaaggagaagataaagctgccaacatatttatctagtgaagttcactcaatgttgaaaggattattgcacaaagaagctggcagaaggctgggaagcggaccaggcggcagtgacgaaatcaagaaccacaagtggttcaagtctgtaaactggaagaggctggaggcccggcagatcgagccaagcttccggccgaatgttgctggcaagacctgcattgcgaactttgacgagtgctggacgaacatgcccgtgcttgattctccggtggccagccctgttgcggccaacagcaactttgtggggttcagttatgtgaggcccgcaccgttcctccagaagccgagtccccttggctaaagaactacttccgtgatctgatatctaccccagagttcaaataactatctttgagtccgaatcctatgtatttcttcaagacattagtgatgggaatctaaccttattgttgtgttgtgggtaggccagccaagcgcctattgcttgagaacaacagcttggcaagtgacaatgtgcaatattgccagaagttcttcttgaagcgccataattattctcctacgtcaatttg

SEQ ID NO: 275287 - DNA, 1067 bp, Zea mays
gacatggcgtggctctccgtcgtcgccgcggccatgtcgttctcgtacgccttcatcggcctcggcctcggcctcgcaagaaccattgctaacgggacgatcaaaggaagcataacaggtgttcggatgaggacgcctatgcagaaggtttggcgcgtctcgcaggccatcggcgacattgccttcgcgtacccctactccttgatcctcctggaaatacaggacaccctgaagtcaccgccggccgagaacaagacgatgaagagggcgtcgatgatctcgatcctcgtcacgacattcttctacctctgctgcggctgcttgggctacgccgccttcggcagcgacgcgccgggcaacctccttaccggcttcggcttgtacggtccgtactggctcatcgacttcgccaacgcgtgcatcatcctccacctgctgggcgggtaccaggtgtacagccagccgatattccagttcgcggagcggctcttggcggagcggttcccggacagcgggttcgtgaacggcggctcctacaccgtccggttcgcgtgcctgcgggcgtgccgggtgaacccgctgcgcgtgtgcctccggacgctgtacgtggcctccacgacggcggtggccgtggcgttaccctacttcaacgaggtgctggcgctgctgggcgcgctcagcttctggccgctggccatctacttccccgtggagatgtacttcatccagcggaacgtgcgccggtggtccgcccgctgggtcgtcctgcagaccttcagcgtcgtctgcctgctcgtcagcgccttcgcgctcgtcggctccatcgaggggctaatcagcaagaagctaggctaggctagtccgatccagtggaacaccctatctgcaggtctgtcagagagtggcagcgggctcggttattttcacagtgttgccttcctcctgcgtcgggttgtaagttgtaacatatatgtcgtattgatactggcgagttcagatgttcagaagaagtagaccgcgtgtgtcgtttctgtgttgctgaatgccgcctatgtagtttcagttcc

SEQ ID NO: 275288 - DNA, 726 bp, Zea mays
gaaattagaggacaataacactgaacaaaacgacagacaaagttaaggtgtcaggtaaaagaacgtttgggcctaccaaaaatacgcacgaagagttagtgaagaggaaaaaattacaagatactgaaaacagcagtgatagcgagtatgattctgagccagcccagcctttgagcaataatgaagtaactatgaaacatgatgatacccaatttgggagtgcactactggatgatgaaccacagaatgatatatacagaaactttactgatatcataaaaaatcctggtcctaagacaactttcgaagttggaatgttagctggtgattcatggaagaaggtcaagagcgacaaaggaaaggaccagagcaatgccaatgacattaccaataaatccaaaataccggttccttctattgtagacccacagcctaagcaacaggatcacaattccgattcagattctgaggaagagatggttgaaggcaacttgaccatccctgacagaaaggagagctatgaacttccatcgcaagctgatctcatacgtcaggcttttgctggtgatgatgttgaagctgaatttgcgaaagacaaaatggatgctttaaatgaggagaatcctgaacctgaaaagcctgctacttgttcctggctggggccagtggacagacatccaacagataagaggacttccctcatggatgataaaagaacatgaagtt

SEQ ID NO: 275289 - DNA, 401 bp, Zea mays
ctcgtgctcggcaggggaacggtgcgaagcggaggagcggcgatgcagatccgggtgcagtgcgcgtgcggcgagtcgtcgtgcccggaatgggccgtcgtggagctgcagggcgtggtgcagccgcaggcctccttcgccggcgacatccggggactccacatcggccgcctctgctcctccccttccccagcctccgcctcgtccaaggcagggttcaccttcacggtggggtaccacgagctcgccggcacaaaggtgacgctcaagaagcccctgctggtgctcaggaagaagaaggttaatgctggtgctcaggaagaagagccaccgacggcggcggaggtggagctggaggtgatcggcatcatccggcacaagatcctattcaagggaccgcc

SEQ ID NO: 275290 - DNA, 749 bp, Zea mays
gcgtttcaagaaagcagatgctggcgaggctggatgtgtgcatgggaggaagagtgggtgaggagcttatatttggggaaagcgaggtaaccaccggttcctcgtctgacctaaactacgcgactaggctggcaagagccatggtgaccaagtatggtatgagtaagcgtgtgggtcttgtttcctacagtgagaatagtgttagcggccaaacaagtgtgattgataaggaggtgaaggaaattctggagaaggcgtacaataacgcaaaggcaattctgacaactcacgataaggagcttcatatgctagcgaacgcccttcttgagcatgagacactgtctggagcgcagatcaagaaattactgccacaggtggacaatagtaacaataagcagaagaaggctgccaaggtgccgcagaagacaccggcagccagagccaagggagttgcacaagaggcggcagggaaagccaagggagttgcaggtacagcagcggtggcacaagaagcggcaacagcgaacaccgagggaggtgcaggtacagcagcggtgccacaagaagcggcaacgtcggtggcagcgaaagccaagggagttgccggtacagcggcggtggcacaagaagcggcaacagcaaacaccgagggagttgcaggtgttggctcatagtggcattggggagaagcacaagtcagcgttttgtgcagccccaactagatgagcaccaagtgtgattagggcaac

SEQ ID NO: 275291 - DNA, 563 bp, Zea mays
  unsure (1)..(563): unsure at all n locations
gcgccatggtcgccgcccgcgaccgcgacgactggatcaacagcgtcgtggccgggctaggcaccggcgcgctcttccgcgccgctaacgggccgcgctcggcggtcgtcgccggggccgttggtggggttcttgctggcgccgccgccgctgccaagcaggttgggaagagatacctccccgccctctaaatctgattgcggtacttgtctctgccctgccatgccgtgatcaagggaaatcatttcgtcgcgtggatgttatttcttcgttctcgttaattatttgggaagagtcatgttcttctcgacattcctatatattgttgacatccatatgctggtactatatatgtcaaagaacgatctgatctcaccagatcacgaaatttttggtccacattgcaatgtaacattagacgctagctggtatcgacacaataatactgctttttccattatgctggagaacccatgacattgtgaaatgtaatgctgagtgtagcgccgttttgctaaaaagtcnacattttcctatatctctttaaaaaaaaaatgataaaa

SEQ ID NO: 275292 - DNA, 410 bp, Zea mays
  unsure (1)..(410): unsure at all n locations
acactccactgcatccaccacaccaccagatctgctgccgtccgcgcagaggacgagagcaacttcatcgcgatgggggcggtggtgacggcggtgatcgcgatcgccgcggtggtgctcggctggatcaccatcgagatggcatgcaagccctgcctcgagaccggccgacgcgccatggaccgcgcgctcgaccccaaccacgacccggactcccccaccaacgccgccggcgcctccgccaacgagccgctcctcgccgacctctccgcctccaccgcgccacccgcaaaggccatctgaatctcatcacctcccagagcgagccagaggcggaccacccttttcccctcgccttgtaatcttgcttctttctatgtcattntgtgcttatgagtttgctattaatg

SEQ ID NO: 275293 - DNA, 445 bp, Zea mays
tccagcttaactaaatggtcaaacaaatgacgtcggaaaacagaatggcacaaagatcagacttgtcagtccgttacgaaaaaaataactcgagacagtctgctggcctgctatagcttcattcaaaaaggaagaaggaaagaaaaaactcaacggttacatcataaatgatccctcacagactgttccttgttctgctctgaataaaaggttggagtgatggttctcttcctaggtagtccgttattatctccaggggatcttttgagcctcctggaatctttctttttttcctttttgaatgaagctatagaaggtctgctgactgtctcgagatatttacttttcgtaacagactgataagtctgatctttgagccattctgttttccgacgtcatttgtttgaccatttagttaagctggaatacaaaagatatcgctaac

SEQ ID NO: 275294 - DNA, 527 bp, Zea mays
gcactccgccaccgccctctacacctcgcgctcccaccgcccggtgtcagatctcgccgccgcgatgggctccgcccactcgtccgtctccaccgccggcggcgaagacgaagaagacgacgaggatccgtccgcggcagccgtttcctccgcgggcgcacaggcgccaccgcccgctctgtcgccgtcgccggtccgcgtgcccccggcctccgcgtccaaagtgctggagcaggagcccgaggtgctgccgtgcctcgccgcggactcgccgctctcgccgcagccctcggcggcgggcaccccgcgcctcctcgcgggtcccggcatcaaggtctgggacccctgccacgttctcctgcccccgccgccgccgtctccgcacgcagggaggcaggttgacgccgcggccatcgaggtcgttgtggtcagccacggcgagtgcgcagccgcgatgcgcccggaccttgtcggcggccggtggccggccacggcgctcacgagcgcgcgggagcgtcaggcgcgcg

SEQ ID NO: 275295 - DNA, 593 bp, Zea mays
gcgtggaagccaaatcaagaggtgatgatgtcttcagaagaaaggactaccttgtaggggggcatgcttatacgcaggctacagagttggacccaactgatgcaacagtgctctcaaacagaagcctgtgctggctgcgggcagggcaagctgagcgtgctctggaggacgccaaagcatgccgtgcattgagaccagattgggcgaaagcctgctacagggaaggtggcggcgcatcgtctgttacacaggtttgaggaagccgcaaacgccttctatgagggggtgcagcttgagccggagaacacggagctcgtcaacgcattcacggaggccatcgaagccgggaggaagttccatggcgtcaacacgccaaactcaacacaatgagactttgctggttgggtggataggtagatgatgaggcggatggacatgaacgttgtcttagttggaatttggtgagatgatgaatgagatgatcatgaaatttgaaagagcgaatttgccagatttattttgtgttttgtgattgtttcttaaacttgtttcttgcgtcgtccggtccagtgtgcgtctttctgaatgcattt

SEQ ID NO: 275296 - DNA, 683 bp, Zea mays
accagtagttcattcattattagtacggtaccgggttggagtaattaaaaggccaccctccactcgcaccaccacactttagctccccactgctataggcagcccacatgcgcgcacactcctaagctagctatagcagcaaggcagccagctgagctcagagctcccagtccagcgccggcgccaccaccgcagctgctcgctggtcaccatgagcaaggagaagcaccaccgcgactggatcctccggcgctgctgcggctccatcgccgcctgcatcctgacgctggccgtcgtcgtaggcttcatcgtgctcgtcatctacctggcgctgcgcccctccaagccgtccttctacctgcaggacgtgcagctgcgctccatcgacctcagcgacccggcgctctccctcgacctccaggtgacgatcgcgtcgcggaacccgaacgagcgggtgggcgtgtactacaagacgctggacgcgttcaccacgtaccgcgacgaggcggtgacggtacccgtgtcgatgccggcgatctaccagggccacaaggacgtgtcggtgtggtcgccggtcatgtcgggcgacgcggtccccgtggcgcagtacgtggcggacgccatgaagcaggacatcgaggcgggatacgtgctgctccacgtcagggtggacggccgcgtca

SEQ ID NO: 275297 - DNA, 568 bp, Zea mays
tcttgtacgcgtgggcggacgcgtggggtggaccttcggtcgccgtcctcgcaagcagacccgccgcgcccagcgcggagggatgctttggatggctcgaccgtagcggctacgctggcgcatgagttgtcttggacccgtgactgcttggaggacccccgctgccgtgcggccgactcccggcgcccgtgtcccatcgctcgtgcgggcatcccgtgcctgctgcgttgagaagtgcttgcgtgctgctacccgtcccacgggaagccgtgctcgatacacgttgccttcgtcgagctcaccccccggggtgcggctcgtcggctcgagagcgcccgcggcgtttgcctcgtgccgccgtcggcctatggccggcggcaccgaggacacctcgctggcgcttttggtctcggatgtggctcacgctgaaggccggagacgcgttggcgtcacgcgcccaagaatcggtccgcccgaacgaacgacggccagcccggcacgacgccttcgcgcgtaggccggcgctggcccgtttgcgaggacgtgctacctggttgatcctgcccag

SEQ ID NO: 275298 - DNA, 733 bp, Zea mays
ccagcgttcgcggcgcgtgggtttgtctgcataccccctgcaattattattgaaggaccgcaattagtgcagcatggttttaaagatgcaattgccaaagttggattaacaaagctgatttctaatttttttgtggtgggcttattctatcacctttataaccagtatgctacaaacacattgtagctggtagcccctttaacacatgccatcggcaatgtgttgaaacgtgtcttcgtcattggcttttccatcatcgcattcggcaacaagatcaccacacagactggaatcggcacttccattgctgtttctggcgttgccctctactcatttataaaggctaagattgaggagaaaaagcaaataaagagtgcataaggtgttggctgatgtggatgcggttggtttgtcgctttgatggacctctattctctcggtgaacgaacaaacttgcaagatggataaaatcttgctatctcctagtacatttgattgttattcccagtctggtactgaggtgtgcggttgttgttggctaacttgtttatttgaagcaaatttcagcaatgctcagtggcatggaatttccatttctgttttccttcgctcatttattctgacttgacatggtgctattgtaatcttaagcagtagtgtctctagaatgttttccccaaggagatttcagtaccaactttccacaatcctcaaactagaaattttgatatcc

SEQ ID NO: 275299 - DNA, 216 bp, Zea mays
cccacgcgttcgggtaattcagccgtatgttgctatgctggttgagatttactcgtgagccagagtttttctatcttatatcctgaatttgttatcccaaagtttcctggctttttaactattttgttgttacatgttgatattgctttgttcaaaaaaaaaaaaacaaaaaaactacaaaaaaaataaaacgaaaaacatatacaaaaaataaaa

SEQ ID NO: 275300 - DNA, 614 bp, Zea mays
gggccactattttaagtctcattgttggagatgcagcatccgcggatgaattccgtgtgtggttattttacacatggcgccagaaataagagatgacgtcaattgcctacctacctagctaaaaactatacggtacgggtttgtttgggagcaaggatacacaatacgtatggactcaattcaaaggacaattactcgccaaaaattgaatctacttgatagatgcaagttctccctacgctaaggcaatgtttctgtgtacaggcacccaaaaaaaatctacctggctggccctggatcttgaaaacctgcaggaccccgctgccacgaatgggtggtcccctgagcacgatgggtaatgacagaagccccctcgatttgattgttaacgaaagccttccctcgagctattttgcaatgctgacgtggttttccaaatcccataccacgaccttaccatccaatcctgacgtgctgaatcgtttgatagtaccatcgcttccttttctaaagggtacaatacacgttatgcaattctcatgggccccaccacgagctttcgatggtcaacagtgtcgctactagccccctgctttgattgtccatatagcttt

SEQ ID NO: 275301 - DNA, 378 bp, Zea mays
actcgccaaaaatgaagctacttgatagatgcaagctgtccctacgctaaggcaatgtttctgggtacaggtacaacaaaatctaaaaattaaaaaaaaacaatctatctggctggccctggcatcttgaaaacctgcaggacggctggtaatgacaggagttccctcgatttgattggggataaagtctccctcgagctattttgcaatgctgacgtgattctccaaatcccataccaccgatcttaccatccaatctctgatgggctgaatcgtttgatactaccgtcgcttcctattctcaagggtacaatacacgttatgcaattctcatgggccccaccacgaggttttgcccacgcgtccgccacgcgtccg

SEQ ID NO: 275302 - DNA, 700 bp, Zea mays
gaaaaccgaaatcccccactcttctcacccgtttccccactcgctcgctgacacatcgcacattcgcaccataccagataccaccgccgctgcacacaaacccagaaaccaccggcaataaacaactcccgctcccagtctccgatccgaggaagccggaagaggggatttcgagccgcggcgatcggggctagagtggccctcgacgcgtccgcgggtggaattgccgagaagccgagagagagggcttggagcggagttgcgggaggtgggagagaaggcggcgatggggcgcctgttcctgatgcacctggacggcaacgtctacagctgcaaacactgcaagacccacctcggcgttgccagcgacatcatctccaaggccttccagtgcaagcacggcaaggcgtacctcttccataaggttgtcaacgtgacttctggagtaaaagaagaccgcatgatgatcacaggaatgcatactgtttctgatatcttctgtgtcgcctgtggatccatagctggctggacatatgatgcctttacatgataatgtccattcttacattgatcgctcgtttttctcttcctagcttccaagtgtctttccctttaccttatgccaatcttgcttcccttcactttcttaccttttccttcttctcctctcatttctattttatttctattcccctttccc

SEQ ID NO: 275303 - DNA, 516 bp, Zea mays
tgcattggtttggccaggatacagtacagcccctcctagctgtaggttgcccatggagcatgaagcgcctccggtgttccattagaggccaaaaactgaatcaaccacagtgtactatgtaagtcttgcggattgactactcgggtgcattagtttggcagataatcttaaagaaggctatcatgtgggtgcaagaaacattcacacttcatatacatcagctgcggattaccgcgtaccgcgatgggttcaggactcagggagaatgctcattgtgaccaatctccagcaacgtcatatatatccgttctttacagttttctctaaaagtttttgtcctctatatctcttctctcttcaacaatgttctctatctcgttctctatacataaatacatatgttctatatacataaatgcatatgttagagatatattttgctttaatttttttgtacgtgtgtatttgtcactctctcaaatatattatatatattttaaaaaaaaggaggaaaaa

SEQ ID NO: 275304 - DNA, 723 bp, Zea mays
aggaatgagggatgtgatatttgctgatattccaaagctcattccatttattgatctggaggatatgagcctattcagttgcttctacgattttgttttcttcatctgccgtgaaaaggtcaaaagagtgtcactattcagagagctgtagcagcatggaggattgttctaagtggaaggttccgtttgcttgatcgatggtgtaacttcgttgagaagtaccaacgccataacatatccgaggatacttggcagcagctgctagctttcagcaggtgtgtaaatgaagatctggaaggttatgacccacgaggtgcttggcctgttctgattgatgattttgttgagcaaatgcacagaatttatcactccactgactgcagcagtgcgatggaatcacagtgtaacatttccagtacccttaaaggactggatcctcaacctggatcaaagaggaaatgcccacacctcaaatccaatgaagaggatgtagagctttcggatagctttacgcgctctgtccatcttacaccaataaagcgactcaaggatagccatgacgccagatatggagcgggggaatccgccaaaactacccatttctctaatagttcctctggtggttaccacgaggatatgaatttacacaactcaagaggttgccttcagaactccccctgtaatgttgaggatgccctgtccaaagggtttgagggttgtatt

SEQ ID NO: 275305 - DNA, 630 bp, Zea mays
caatgaactgccatctaaaaagtcatttgctgagccaactgagatgggagcaatgaaagagttgtcatcaaaagaatgttttggagaacttcgtgtcctagatacaaatggacacactttcccacaaccagcttccacttgtcatgtaaaaacttctgctgtgacggggacaggattgcaagagttgttagcattgatagagaggaaactgactgaacaacaaactgtcgtgcaaagaagctatggacctttcgacagaaaatggagacctacctctatggattgtgaaaaggctgcagagccgtaggtatgggattcctccttcccctcttctatatgggattcatccttcccctcttctatatgctgctgagatcagtagcagtaaccagtttctgagtttgcatccctagagatggaaaccacacaatgtgtttgaatatgcgcttgtgcatgatgtatgatgtatcattcaaagagtatcttgatattctttctgcagaacatgaagaaactgtaggaagggaccgtatgagttttgatcaatgtcagtcactttaacagacattttgtactcatgcttcatgttgctagatatcatcttatctttatcttatattctgatgagtc

SEQ ID NO: 275306 - DNA, 641 bp, Zea mays
gcgtccgccattggcgcaaacacacccacacccacacacacattcagctactgatacccgggagcttccggccggtcgaggagctagagcagccgaggtgggcgtacgtggtgcagcgcaggcagcaggcctcagcagcattcagcaaggccggggtcgaaaggaaggaggagcgaggaccggaaccggaggcatgaacgcgggcaccagcatctcgccgcggccgggcacggactggggccccatcatcgtggcggtgatcctcttcgtggtgctctcgccgggcctgctgttccagctgccctcgcggacgcgggtcgtggagttcggcaacatgggcaccagcgccatcgccatcctcgtccacgccgtcatcttcggctgcctgctcaccatctttgtcgtcgccatcggcatccacgtctacgccgcggtaggcgtacgtagcccagccatgctaggtagcttatgctccatacgttcgactggcttgcttcgcttcccacgatggtggtctctttgtaactttccaggtcttttgagtatgtaggctacggatggcgcaagatttagttgctcatctgctatgttgtgtagtgctcggcttttcactacaggaaacgcctaaattttcatgggcc

SEQ ID NO: 275307 - DNA, 897 bp, Zea mays
ctcctgcagttccgcctcgcctacgtctcccgcgagtccctcgtcgtcgggtgcggcaagctcgtctgggacgcccgcgccatcgccgcgcactacgcccgctccgtcaagggcctctgcttcgacctcttcgtcatcctccccatcccgcaggtcatcttctggctggttataccgaagttaattagggaagaacgtgttaggcttatcatgacgatactgctactcatgttcatatttcaatttctccccaaggtctaccatagtatacacatcatgaggaaaatgcagaaggtgacgggttacatctttggatcgatatggtggggatttggtttaaatctatttgcctatttcattgcttctcatattgcaggtgggtgctggtatgttcttgcaatccagcgcattgcttcctgcctccaggaagaatgcaagaaaaacaatagttgtgatctgatatcactagcttgttcgaaggagatatgctttcaccctccttggtcttcgaatgttaatgggtttgcatgtgatacgaacatgacctcctttagtcaacgaaatgtgtctacttgtttaagtggtaaagggtcgtttgcttatggaatctatttgggggctcttcctgttatatcgagcaattcgcttgctgtcaaaattctctatcctatattttggggcctcatgacactcagtacttttggtaacgatcttgccccaacaagcaatggtattgaggtgatattcagcataatcaatgtcctcagtggcctgatgctcttcacattgctgatcggaaacatacaggtatttctgcacgcggtcctggcaaggaagcggaagatgcagctgcggttccgggacatggaatggtggatgaggcggaggcaactaccg

SEQ ID NO: 275308 - DNA, 1806 bp, Zea mays
cccacgcgtccgcccacgcgtccgcggagcagccatggacgcctccctcctcctctccgtcggcctcgcgctggtgctgatcccgctctccctctcgctcctcaaccggctgcgcgtcggccgcctgccgcccggcccgcggccgtggcccgtcctgggcaacctgcgccagatcaagcccgtccggtgccggtgcttccaggagtgggcggagcggtacgggcccatcatctccgtctggttcgggtccggcctcaccgtcgtcgtctccacctcggagctggccaaggaggtgctcaaggagaacgaccagcagctcgcggaccggccgcggaaccgctccccccagcggttcagccgcaacgggcaggacctcatctgggccgactacggcccgcactacatcaaggtgcgcaagctctgcaacctcgagctcttcacgcccaggaggcttcgaggcgctgcgccccatcagggaggacgaggtcaacgccatggtcgagtccgtgcaccgcgccgccactgccccgagtaatgaaggaaagccaatggtagtgaggaagcacctttctatggtggccttcaacaacataacaaggctggcatttgggaagcggttcatgaatgcaaacggtgacgttgacgaacaagggcgtgagtttaagactattgtgaacaacgggatcaagattggtgcatctctctccgttgctgagttcatttggtatttgagatggttgtgtccacttaatgaggagctttacaaaactcacaatgagagaagggaccgcctgacaatgaagatcattgatgagcacgctaagtctctcaaggagagtggcgccaagcagcactttgtggatgcactcttcactctcaaacaacagtatgaccttagtgaagacacagttattggacttctatgggatatgatcactgctggaatggacacaacagtcatctcagtcgagtgggcgatggcagagctggtcaggaaccccagggttcagaagaagctgcaagaggagctcgaccgtgtggttggccgtgaccgcgtcatgctggagaccgacttccagaacctcccctacctacaggccgttgtcaaggaatcactccggctgcacccgccgacgccgctcatgctcccgcacaaggccagctcgaacgtcaagataggaggttacaacatccccaagggcgccaacgtgatggtgaacgtgtgggcggtggcgcgtgatcccaaggtctggagcaacccgctggagtacagaccggagcgcttcctggaggagaacatcgacatcaagggcagcgacttcagggtgctgccgttcggtgctggccggcgtgtgtgcccgggcgcgcagctcggcatcaacctcgtggcctccatgatcggacaccttctgcatcacttcgagtggtccctgccggagggcactagaccagaggacgtcaacatgatggagtcccccgggctcgtcacgttcatgggcacaccgctgcaagctgtcgtcaagccgcgcctggagaaggaggagctgtacaatagggtcccagttgagatgtgaggtgcctgctgccgctttgaattcactgctcgatttgtgtttttctcgctgctgctgctgctgcttcttctttcagctttaagctgttgaactgagttgttcgtgttgtaaaatatgaggtgctagatgcatttcgaatctcataaaattgttacatgtagtttgtcatagacttgcacaatgtgtctttatacaatagtataacacgattcaacaattccccttcgaactg

SEQ ID NO: 275309 - DNA, 925 bp, Zea mays
cggcctccttcctctcagtggcgctggccctggcggccctcgtccccgtctcgctgctccttgtgaaccggctcctctacggcaaactgcccccggggccgcggcggcgtcccgtggtgggtaacctgttcgacgtgcagcccgtgcggtgccggtgctaccaggagtgggcgcgccggtacgggcccatcatgacggtgtggctgggcacgtcgcccacggtggtggtgtccacgtcggagctggccaaggaggtgctcaagacccacgaccagcagctcgccgaccgctgccgggaccgctccaccgagagcttcagccgaggcggccaggacctcgtctgggccgactacggcccccactacatcaaggtgcgcaagctctgcaacctcgagctcttcacgcagcgccgcctcgaggcgctcaggcccatccgcgaggacgaggtcaccgccatggtcgagtccgtctacaaggccgtcaccgcgcctggcagtgcagggaagccgttggtggtaaagaaccacctctcgatggtggccttcaacaacatcacgcggctggccttcgggaagcggttcgtggacgcgaccggccagctggacgagcaagggcgcgagttcaaggggatcgtccacaacggcatcaagatcggtgcgtccctctccatcgcgcagcacataccgtggctgcgctggctggccccggtcgacgagcaggccttcaaagcccacggcgaacggcgcgaccgcctcaccgtgaagatcatggaggagcacgccagggccctcaagcagcgcggcgcccagcagcacttcgtcgacgcagctcttcactctcagggacaagtacgacctcagcgatgacaccgtcatatgcctcctctgggacatgatcaccggcggcacggacacgacggtgatct

SEQ ID NO: 275310 - DNA, 522 bp, Zea mays
ctacaaaacactcccttgctctaagcacaactgatggaccactacaaaacactcccttgctcgaatccgctaagcacaggcccaaaccgtccacttggaaactcgaagcccatcctgtctttcctttgcgtcagtcgtcttcgacgcaaggagaattgggaattcaggaatcaggatgcggctctccttcccccttgtcgccggcgccgtcgtgatcggagtgatttctgggaatgttatatttgggccaccgcttcagaagtactgggcagagaagcagcagcaagaggcagcaaaagaaggccaagctggttcaacctgacaaaatgtcctccccttctgcagttacacggagaaatgtgtactcctcggtcctgaactagcatcggcttttgttagcattggttacatttagttgcccaagtttttggcgctggaagaagacaccgtgcaatgcacagaaagatttgaaaaacgtttaaatgctggttgatctcattctgaaatacagtacctttgatg

SEQ ID NO: 275311 - DNA, 1327 bp, Zea mays
ggaggttgacaggagattgcaagaatatgagcaaggaaggacagagtttgcaccagaagaggatgctcatgttgttggtgactgtgtaaaacatgttctccgggagcttccatcttctcctgttccagcttcctgctgtacagcattattggaagctttccgtctggacatcaaggaatctcggatcaaatctatgcgtgcagcaatatctgaaacatttcctgagcctaataggcggctgcgacagagacttttgaaaatgatgcataccgttgcttctcatactgccgagaatagaatgactccatcagcagttgctgcatgtatggccccactcttgttgcgtccccttcttgctggtgaatgcgagctggaagatgattttgacatgagtgatgacagtgctgctcagcttattgctgctgcaaatgctgctaacagcgctcaaggcattgtaactactctattagaggaatacgagagtatattcaatgatgagcactttaggtgctccttatcacctgattctcaaacaggagatagtggaagtgaagaatcaactgatgacgaaactgtggataccaagggtaatggatttcatgatgcggaaaatgatgtagatcaagaattagatgatgccgagcgaatgctgagtggaaaattcactgaaaccagtgcaagtgcttgtgctgacctccatgaccacaaggaagttaatggcaatagttcagacactgagctctttgttgaggatcacacatttgaatcaaatgtagatttaaatgatgctcccctaagtcgtttaacagaaaatggaaagggtccatcaaatctgatgtccgctcatgaaactccattatcagtgggagagattcttctgtctttggatgctggaattccattaccttgtcgtgcagctgaatattctagcaaacccaatggaactcagcagcatgtgaagcgtactaacttatggggatggagcaatgtgagaaagggccaacgatcggagttagttgatccatcaggtgaagaagagcttgctattcaacgacttgaggtaatgaagaatgacttgcagatcaggattgcaaaggaggctagaggcaatgcaatcctacaggcaagtttggaaagaagaaaacaagcactacacgagcgtcgtgtggctctggaacaggatgtgtcaaggttgcaagagcagctacaggctgaacagggatcttagagctgctctggaggcttgggctaagcatgtcttcttcacaatttccctgctctctcctcagcaagcaagtgggaatgttgcaagtgtgtgagataacaa

SEQ ID NO: 275312 - DNA, 419 bp, Zea mays
tcgcggggtattagtatttgagttgatttgtggaactcacgaagctgtgtttgcttagtgtcggggaaatacgagaagcgctggggctttggtactatatactcacccaaattttcatgtgtgcttgacgcgtgataagttcggagataacacgctcatagtttaagacctgtctgactactggcagaacatgacatcatttgattttctgttcatagttgggaaatcttgttttgtttcggactaatgcttgttccatggatttttaacgaatacatttagggtctgttcttctaatgttaattcatgtggattggaagaggttgaggccttccgtttctccagcattagatccagaattgttccagctgatcaaatcttatatattttagataagcaatccggctggtaaatcgttt

SEQ ID NO: 275313 - DNA, 509 bp, Zea mays
gggtccacacaagcctctatactgattcgtatgacgaagatgatggttcaagggaacatcaaggggactgatatttacagagacctgcatcactacaaggaggcccaaagagtttctgggttcttgatcttggccattgaagcaccgataaacttcgccaactccaactacctgaatgaaaggattaaaagatggatagaggaagaatcttttgaacaggataaacatactgaactccatttcataatcttggatctgtcagctgttcctgcaattgacacaagtggcatagcgttcctcattgacataaagaaatcaatagagaaacgtggtctggagcttgtgcttgtcaatccaactggagaagtcatggagaaaatacaacgtgcaaacgaggctgaaaactattttaggccagattgcttgtatctgaccactggcgaagcaatcgcttcactttctgcacttgccaagatgacaaaaccctaaatggattgctgaattgtcat

SEQ ID NO: 275314 - DNA, 423 bp, Zea mays
tcgcgggacgcgtgggggcaaaatttatatgtttgatctagacatggaaaaaatattagaggtgccgaagtaggatcatgtcagtgtatgagctagaaactacgaagtaatcacatggctaactatgtacacttgagcatacctttacgggccagaaaactaagtggaaagactaggcattggacttcagatagtggattttatgttttagagaaataagtaaagatcttttgacttgagtcagcaagtgtctcatgtttcacctgaaatgctctctggctgtgcatgtcctaaaaactattaatgattttaacttttacctttcaatttttcatttactagttcgctgtccacagattattttggcccaggttgtttctttcatagattcaataacttgtattccaatattatgacctgatg

SEQ ID NO: 275315 - DNA, 538 bp, Zea mays
gttggagcatacacaaagacattcatgctaggtgtttaagatggacaatcagtgatgtatccttatcacctgatcagcggtatcttgcctactctagtctggcacctattatccatattgtcaatgttgggaatgcggcaagagaatcctatgctaacgtcactgacatccatgatggattggatttttcacagcatgaagatgttcaatattcatttggaatattttctgtaaaattttccgctgccgcgcgggcgcttgttgctggcagcaatgatgactcattatatgtctatgaccttcatgcaagcaaagtgacattacgttgatctgctcatacatctgatgtcaatacagtagcatttgctgatgaaaccggccatctcatatattctggaagtgacgacactttatgcaaggtctgggacaggcggtgtttgtccgcatgacaggctgccggagttttgactggacatttgcatgggataacacatattgacagtcgtggacatggacgaagtctcatatccaatggaaa

SEQ ID NO: 275316 - DNA, 822 bp, Zea mays
gcctttataagcgccccgatacgcggcgccggcgcaggcgtgcagccatggcgatgagctggatccgatcggttgttaggagggccctcatcgctccgaagccgcggggctcccgccagtttactgtcaccgccgccggcggcggcgcgacgcagaccgaaagggtggcggcggagatggtccgctacgccctcggcggcgccgtgcaccggagctcgccagaggaggcgatgcggatactggagcaaggcgcctcgaacctgcagggaggaggcgagggcagtgccgaagctgttgggttgctcatgctcgctatgtccacgctgctttaccggagtggaagacgtcaagacgcagtggaaaagctcaaagcaacccaacaagttgccccttctgcagtttttagagttgcagcgtgggaagcactaatgggattacacatggaggcagggcaggagatgtcatacttgatttccccaaatgattcagttgatctgtcaatcaaatatgatagcaaatggtctgatcaggaccatcttaaatttcggcttaatgctgtcagaggacttgttacacttctgaatggagaaacagaatcagctgcccagctgttcgatggttggtgcagagacttttctagaggcgaaaaccaaacagaaaatgctgtcgtttcatacggtgaatatttgcattgtggtggggattttcaaatggcagcacaagtgtatgagaaaattctcgaggcattttgcatggatgatatgtctggaaaccttttagcagctggaaacatggtttccgaggaggcttttcttggggcca

SEQ ID NO: 275317 - DNA, 524 bp, Zea mays
atagatggaagcaaatctagtgagaggaattctgtgcaaggtgatgagcttgatctctcctgtcaagatatactacaaacggagactggtggggggcacagtagcactgtagtggaggaagattcaggtagcaaggatcctactgcaagtgacggccaagaaatcctgatcgaggaaactgaaccaaatcagcagagcaagcatgcgttaactggctcatttgagaaagtccctgacattgagtctgttgggtcttctgctgagaaatctgtcggtacaggtgatgacttgcttcaatctggtaaaggtgcttgccactcagaaataccagtcgatatcatagctcagctgcaacttgaccctacctctggaacggcagatcatccggcaatctccaaaggggcagacaattttgaaggacaacattatcatacaacagatgaaagcatcggagcaataccaagtacatttgaacctgctgttggtgccaaagttgtatcagttgatgtcactgctgaccttac

SEQ ID NO: 275318 - DNA, 465 bp, Zea mays
gacgtacgcgtacgcgcacgaccacgcgtacgaccacgcgttcggtctggaaggccagatatgcggcagaggtgaaggtaatgcctggttcccgagtatcattactacagctctgttgcaagtctggaaggccagatatggcggcacatttaggtagtcagcattgtcgaggaaccctactaatgtctaatacttcctctgttttttatttgtcatgttttagtaaaaaataaactagcgggcgataaatattcgagaacggaggtagtattttttatgtacaggttcggctgcagtttcttgtatcacttttgctgtgttgtgttggacatacggtgttttgcttccaatgaattaggaaaggtgttagaggcttagagccaccgtgttactgattagcgttatgggctgtgtcaggtgcattatgcaagtgttgtttagacctaggtctaatcccctcttatt

SEQ ID NO: 275319 - DNA, 445 bp, Zea mays
cggacgcgtgggcggacgcgtgggtccgccgcctcgacatcccctccgcgcgacccggcgccatcctcaactccgccacggggctgggcggcggcggcgccacggccggcgcggcgggtgagaaggcggcggcggcagctgagaagacggtcttcgagctgcggctggaggcctacgatgctgcgagcaagatcaaggtgatcaaggagatccggtcattcactgacctggggctgaaggaggccaaggagctggcggagaaggcgcctgcggcgatcaagggaggcctatccaaggaggaggctcaggcgattgtcgagcgaatgaaggcagtcggcgccaaggtcattattgactgatcagaacaagccttttcagtggtgaggtcctgcaaatttatgcttcgtatcggatcaactgttaaagtgcaagatggatgagtggc

SEQ ID NO: 275320 - DNA, 619 bp, Zea mays
attcagagatgatgacttacttgatcacaggccatacagaaatgacaggagggtacctgaaagacatcgagcactaaaacgatctagtccagctcctgtggttggatatgcatcatctgccaagcgtcgcagaggaggagaggttgagctctccaacatattggaaaaagtagttgatcacttgcggggtttgagtggatcactgctgtttttaaaaccagtgacaaagaaagaagcttctgattaccttgatatcatacggtacccaatggatcttggtaccatcagggacaaggtgagaaagatggtgtacagaaacagggatgaattcaggcacgacgtagcacagatacaactcaatgcacacatatacaacgacactcgctatcctcacatccctccgcttgctgacgagctcatggaggtctgcgaccatctgctttacgaaaacgcagatctgctcaccgaggcggaagatgctatcgagtagcaatataaaaagctagatttagcatttggatcttgctatatcctaacatagatgatgtatctatctgctgatctgtaagaggggaaaaggttgtacattttttgggcctagcagcaatctacatgtgat

SEQ ID NO: 275321 - DNA, 743 bp, Zea mays
  unsure (1)..(743): unsure at all n locations
ggaagatcagatgatgggggtcctctggtcaccaatcagatatatgtgcacagtaaattgatgattattgatgatcgcatggcattgattggctcatccaacataaatgatagaagcttgctgggatctagggattctgagattggtataattattgaagataaagaggttctcagttctataatggatggaagaccttgggaagctggaaagttctccctcagcctacgactttctctatgggcagaacaccttggtcttcttccaggagaggttagttgcattatggatcctgtggatgattcagcgtacaaaaacatctggatggccactgctaaggagaataccgtgatctaccatcaagtattctcatgtgttcccaacgatcacatccattctaggtatcaatttcgccaaagttttgctcatcgtaaggagaaaattggccacacaaccatagacttgggtgttgccttagaaaacctggaaacgcaacaggagggagacctggcatgtgccaaaccaatggaacggttgcaggacgttcggggtcatattgtttgcttccctttggagttcatgtgccaagaggacttgagacctttcttcagtgagagcgagtattatacatctccacaagttttccattagggcttgttcggttatttcaatttcatgtggattggtgtgtattggagtgaattaagatgaattttgacttgctatgggatntaaactgactc

SEQ ID NO: 275322 - DNA, 808 bp, Zea mays
cggaaaaaccggggcgacccacgcgaccgcggacgcgggggcatgcccataggcatctcccaggcggaggcgccccatggccccacccacctattctccctgccggcggcagccttaaccctaatctcatcgcctcctcttccttctccagttcctcgaaggcccagcagacaacagcccctctttcttctcagccatgtcggaggacgaagcgaacgctgctgctgcgccggcagagggaaagaactggcggcggaaggggaagcacgacaagcccaagccgtgggacgaggaccccaacatcgaccgctggaagatcgacaagttcgaccctgcctggaacgagggcggcatgctcgaagtcagctccttctccaccctctttccccagtaccgagagaagtacctacaggaggcgtggccggtcgtgaagggcgcattgaaggagtacgggatctcgtgcgagctcaatttggtggagggatccatgactgtgtcgacgaccagaaagacaagggatcccttcgctattatcaaggccagggaactaattaagcttttgtccaggagcgtccctgcacctcaggcaatcaaaattcttgatgatgagatgaactgcgatattattaagattggtggtcttgtgagaaataaggagcggtttgttaaaaggagggaacggcttttaggccctaacttgtctacactcaaggctattgagattttgactggctgctacatcttagtgcagggaaatactgttgcagccatgggcaactataggggaaggggactggaaaccaagtga

SEQ ID NO: 275323 - DNA, 678 bp, Zea mays
tagtggacaggtcatatcagaaattgtggaggcctgccgctcacatgatataacagatcttattctagtccatgaacccgtggtcaacctgatggtttgattgtctcccatctaccacatggtccaactgcatactttgggttgctcaatgtggactgccgtcatgatatcaaggacaggaagacgatgggcaaaatgtcagaagcttacccccatttaatactggacaacttctcaacccagattgcagataggactgcaactattctgaagcacctctttcctgtcccaaagccagattcaaagcgaataattacatttgctaacagagacgattacatctctttcaggcatcatgtatatgaaaaaccaggtggccccaaatcgattgacctgaaggaggtcggcccccggttcgagttgcggctgtaccagatcaaactaggaaccgtggaacaaaaggaagcgcagagcgagtttgtgctgcggccctacatcaatactgccaagaagcaaaagacgcttggagcgtgagctacactgcagtacagaacttaatttttttttgggtcttcatcgtttatgctgtagtagcaacattcacagggtgattagatcaatatctgtcaatctaatagaagccgcaatgtacccctgactcgaacccaagctggctga

SEQ ID NO: 275324 - DNA, 521 bp, Zea mays
cgcgtttatcgcgtgcgcaactctaggtcggccggagtatttagcttgcttcaggggggcacgtggcggtggaagcttccctaggggtggcggaggcggtggtggtgcttggttgatgtcgatggcgcaggtctgctgtgactcggccgtagcggcgacggctgcaccggtggttggtgcggaggcggaggccagagccagggcgcgcgccgagaggcggagccgtgccggagagtccggggcgtggaagcgcgcggcggctgctggcacggccgatgccacgaggaagcggagtctcggggcgggggagctgctggtagcgcggaagcacggggcggcgtcggtggccggccgcaggagggagatggaggacgccgtgtccgtgcgcgacgcgttctgcgcggagggcacggccgacggcgggaggcgcgacttctacggagtgttcgacggccacggctgctcgcacgtggccgaggcgtgcccggaccggatgcacgagctggtcgccgaggagctcg

SEQ ID NO: 275325 - DNA, 1845 bp, Zea mays
  unsure (1)..(1845): unsure at all n locations
gcgtttttcatttgtctggagatgggtcagaacactcagcataccattatggtgagcagagtttagcatgtacaattattggaatggctcagaactttgttggcagcaataacatcaaacacttatgtactcctagaaggttaagttagagaccagagctcaggggggcaaggacgctgctagtcctcggtacatcttcaccaagctgtctcatatcacacgttcaattctcccgacggatgacgatattcttcttaattatctgaatgaggatgggcagtcaattgaacccacctggtatatgccaatccttcccatggtattggtcaatggaagtgaaggaattggaactggatggagcacatatattccaaactacaatccaagagacattcttgctaacctcaggcgattgctgaatggagagtctactgtaccaatgcacccatggtacaggggatttaagggctctatagagaagacagtcaatacaaaggtagctggttccacatatactgtcactggaatcattgaggttcttgacaacactacactgaggatcactgaattgccaatccgccgttggactcaggattacaaagattatcttgagagtttggctccagatactaagaacaaggacaaagtaccattcatagaggatgtcacatgtcaaggtgataatgaagatgtttacattcagttcacattaagtgagaaaaatatgaatatagctatggaagaaggactagtgaagaagtttaagttgacaacaacaattgggacatcaaatatgcacttgtttgattcagatggtaaaattcggaagtatgacactcccgagcaaatacttgaggagttctgtcatttaaggcttgaattctattgtaagagaaaggaagcattgttgaaaagcatcaagttggacttaaagaagcttgaaaacaaagttaggtttatccgctgtgttgttgataatgaaattatagttaacaaccggaaaagggcagatctatttttggagctccggcacaagaattttgaccctttcccaaagaaaaaaaagaaggctgaaccaactgctgtaggtgctatagaagaggaggaaaatgaagagtctcctgaaactgcagcaggagtggatcctagtgactatgagtatctcctctccatgtcaattggtaccttgactttggagaagatacaagagctcaatgctgagaaacaaaagttggtggacgatgttgtggaactgatgaacacatcgccaaaatcactttggttgaaagatcttgatgcttttgagaaagaactggatgtgcttgatcaaatggatctagcagaggaggtgcaaagggaaaagaggataaaggaaggcaaaaaaggcggatcaaaagctgcacccaagaaacaacctaaaaaggctgcacctataaagctggaaagcagtacagaagacaatgctgctgaaccagtagtcgcaaagcgtggagctcaacagaagaaagcacccaaaaaggctcccgtggacgaagaggaagttgatatgccttcactgaaagaccgtcttgctgcctttaatataaatgactcatctcctcctgatcactctgctatggaaactgaaacaacagaacagccggctcagaagaaagggagaggaaagaagcctgccgccgccgctgtgaagccgaaggctcctgccgccaggaaaagggcgccgactcaagggggcaaggcaacgcagaagaaatagatgagatgctcaaggtcactgaggataacaccagcaggctttgtccctgagagaaggncggagatgagcctctccctcacagaaagtgc

SEQ ID NO: 275326 - DNA, 605 bp, Zea mays
ccacgggtccgccaacccgggggggatttttgggaggttggcccctctttaccaaatactggaggagttctgtcatttaaggcttgaattctattgtaagagaaaggaagcattgttgaaaagcatcaagttggacttaaagaagcttgaaaacaaagttaggtttatccgctgtgttgttgataatgaaattatagttaacaaccggaaaagggcagatctatttttggagcttcggcagaagaattttgatcctttcccaaagaaaaaaaagagggctgaaccagctgctgtaggtgctttagaagaggaggaaaatgaagagagtcctgaagctgctggagcggaacctagtgactatgagtatctcctctcaatgtcaattggtacgttgactttggataagatacaggagcttaatgctgagaaacgagaattagtggatgatgttgaggaattggagaatatgtcaccaaaatcactatggttgaaagatcttgatgcttttgagaaagaactggatgtgcttgatcaaaatggatctagcataggaactgcaaagtgaaaagaggataaatgctggctcaagaaaaacctcttatata

SEQ ID NO: 275327 - DNA, 514 bp, Zea mays
acgggacgacgcactgagatcgaaatgcgctaggatacgagatctgaagctgcctcacggctccggctccgactgcaagtatcgggcttacatcgtcagcagcatagccaactcgggctctgattttgaggttgatatgtatgatgatctgctggatgtggtcactgaagatgatgatgctgatttcgatgacatggatgatttcgatgatacagtctcagatggaggcatgtacgatgatgacttggatatctgaaattaggaatcggttcaaacagcttttccgtggaccatgtaagtgctgttagctggaatggtttcccatcccttttctttgagattcgggtagctatgatggaatctccctgatgttcatacttctgcgcctctccatttgttaagaagctggagtagctgaactggttttaatcgatgtacaactgttgtttttttattctgaacctttgttaattggtattttaataataacctaagccaaacaatgtgtatatat

SEQ ID NO: 275328 - DNA, 1590 bp, Zea mays
atctgctcaagcactccgacaaggacagcctcaccaggaagaacaagtccggattcgatgctctgcacgtcgctgcaaaggagggccacagagatatcgtgaaggtacttctggaccatgatccatcccttgggaaaacgtttggccaatcgaatgtgactcctctcataactgcggcgatcagaggccacatcgaggtggtgaacctactgctggagcgagtttctgggttggtcgagttatcaaaagcgaacggaaagaatgccttgcactttgctgcccggcaggggcatgtggaaatcgtgaaggctttgctagatgctgatacccagcttgctcggaggactgataagaaaggccagactgctctacacatggcagtaaaaggtactaacccggaagttgttcaagcgcttgtgaatgccgatccggcaatagtcatgctacctgacagaaatggcaacttagctctgcatgttgcaaccagaaagaaaagatcagagattgtaaacgtgcttctgcttctcccggatatgaacgtgaatgcgttgactagggaccggaagaccgcattcgacatcgccgagggccttccactatcagaggagtcccaagaaataaaggagtgcttgtcccgcgctggcgcggtcagagcaaatgagctgaatcagcctcgggatgagctcagaaaaacagttacagagatcaagaaggacgtgcatactcagcttgagcaggcgagaaaaaccaacaagaatgtctacggcatcgcgaaggagctaaggaaactccacagggagggcatcaacaacgcgacgaactcggtgaccgtcgtggcggtgctgttcgcgacggtggcgttcgcggcgatcttcacggtgcccggcggcaacgccaacgacggcgtggcggtggccgtgcacgcgacggccttcaaggtgttcttcatcttcaacgccgtcgcgctgttcacgtcgctggcggtggtggtggtccagataacgctggtccggggcgagaccaaggcggagcggcgggtggtggagatcatcaacaagctcatgtggctggcctcggtgtgcacgacggtcgcgttcatctcgtcctcctacatcgtggtggggcgccacttcaggtgggcggcgctcctggtgaccctgatcggcggggtgatcatggccggcgtgctcggcacgatgacgtactacgtggtgaagtccaagcgcgtgcgcaagatcaggaagaaggtgaagtcgacgaggaggagcggctcgaactcgtggcaccacaactcggagctctcggattcggaggtcgaccgcatctacgccatatgagggggccggtgcagctggttccttccttcagaccgtctggccgtgatgcagcacggatgcatactgtaaacatcgaatcacggcccttgagatggagatgcgctagggggtggttaactctgtacattccaataagctggtgtaaactgccattccccttgttcatggatcgggcgggaggcgactgtcttggctgtatactactcacagatagatttgtcatcaggttatatatagtgtattatatatgggc

SEQ ID NO: 275329 - DNA, 448 bp, Zea mays
aagtgatctggactcagagcgctggccaaactcgcactggcgttctgtgaaggttgggggggatgagtctacagctggtgataaacagccaagagtttcactctgggagtttgagccactgacaacctttccgatgtacccaactgcttttccattaaggctaaagcgtccgtgggcttcaggactacctatgttcaatggtgggaggagcgacgagttcgctcgttattcttctctcatgtggcttcgagatggaaaccgaggggctcagtcactgaacttccagggacttggagcatcaccatggcttcagccaagaatagattatccattgttgagtctgaagccagatacttaccagcagatggctgccgccgcactggaagaaattagagctggggatcatttgaagcagatatcttctctcctgccagtgcaacagccacaa

SEQ ID NO: 275330 - DNA, 295 bp, Zea mays
ttgttcaaatcttctgatggacgtaaaaaaagcttccctccaaggaaaatatggaatttcatctgatgtcgaacattcccaatgggctctttggacactcagtttttattttggtaattgttgatataatattttgtgatcctatatcgttggacctaagcagagctcataaactgatgtagcaactccttcgcttggatgatctgtagcagttgtgatttgtcttttccagtaatgaatgtaaactttgattgatggacaactaacgttatgaactgactttatctaaaagtct

SEQ ID NO: 275331 - DNA, 418 bp, Zea mays
ccgctttctcttgctagggtttcagctctccgtcaccgtcatgagtgcctgcaggccggatcaccgtcgccgccgcccggcgttcctgcgggacctctcgtccccgatctcctcgtcgtttcgcctcccaccggcctcgatgcggcgagaggcgcaggcctccaccccgccgccgcctccgccgctgctctccctcgacgacctctcccacctctccccctccaggcagccggccacgcctccgcaggcgacgacgaccccctcgcctcagcccccgcgtggagccgttctcttctcctcgccgctgccgtccaacggctcgccggggccctcggcatggtggaccccctcgagggaggagaatccccgggagggatcaccgatggatggcgtcgtgcagtaccagcagcagtccccg

SEQ ID NO: 275332 - DNA, 482 bp, Zea mays
aaagtaactgaggagtgataaaacgacaattttgagcttcaacgctttgctaggttggcgatcttcccggagcggcagagggcggatttggtggcggcgactgtgaggcgggcgagcgaggtggtcattgggctcgcgccggagaacgctatgatcccgctgttcgagacggggggcgtgcagctcgagctcatacgggatgccgagattgagccgtgtgcctacgtgaggtgggagcaagggaggccgagaggatccgcttcatgagttggatgcacacgagagacggtggggatcccagcttcccaatgcgggagatccagaagagtcaacggcggatcgatcaagtggattagcactctcccctgtctgcgtgatctgtagaacaaggataagtcggggacgctgttctgctttgccgcgatggaacatgtgttccaatccgagaatttcaagctggggcggttgggatgagggggaag

SEQ ID NO: 275333 - DNA, 595 bp, Zea mays
ctcgagccatcgacgacgacccgttccagagtgggtcttaccgcgtcgagaatcggcgacccggcccctgccggcgtcgtcctgcccaaggaggaggtggaggacttcggcgacctcggcggcgacgactggctcgcgggcatcaacctcgacgacctgcagatgccgggggatgccgccgatttctacggctccatgctcgtctcgccgatggccgccaagatggagccggacggcggcttccccttcttctgagatccttcggcgactccggggaccggatgcagcgcaacgcaaactgtgtatagttcagattttcttcatggaaccaacaacaacaaaaaaaaagttcttgctaatatcttgttctagtggtgtagtgcagaagtagcagcaggcatgattgaagttccattgtagtactgatgttcatcgccacttgatctgtgacaagtgacggcattctttcgtttcttggctgcaaattcttcgttgtccagaatataatttcagatgggtaatgccaattcgggccgtgttaaaaagaaaaaacacatacattctagataaacaaacacgaacaatgagcagacac

SEQ ID NO: 275334 - DNA, 463 bp, Zea mays
gtttaggagtgccgggcgtgcgcgcacgtgcctcttccgggtccatcgcagagcgccgccggcgggtagcgctactgctagaggagaggaagcggaaagggcggcggcggcgctcgtggtcagtcaaagatccaacctccggactcgcgatggggcggcggatcctcaacgatgctctgcgcacgatggtcaacgcagaccggcgggggaacgcgtcggcgcttctccgacccatctccggcgtcatggtctccttcctcaacatcatgaagtaccgagggtatatcaaaaactttgaggtcattgatgagaatagagttgggaaaattagagtggagcttgatggacgtcttaaagattgcaaagctctcacctacaggcaagacctcaaagctaatgagatagaacgatacagagttaggatgctcccaacacgccagtggggctatgttgtgattactac

SEQ ID NO: 275335 - DNA, 1292 bp, Zea mays
ctcaatcgcgatgccaccaatgatgaggtcaccgtcgagagtgccgaggctacattgaagtataatgttgctgttaagtgtgcaacaattacgcctgacgagactcgagtaaaagagtttaaactcaagtctatgtggcggagtccaaatggcacaataaggaatattctaaatgggactgtttttcgtgagcccatcttgtgtaaaaacatcccaagaatcctttctggttggaagaaacctatttgcataggaaggcacgcctttggtgaccagtatcgagctactgatatgattattaatggtccaggaaagctcaagatggtatttgtgcctgatggagctgaccctatggagctggatgtttatgattttaagggacctggtgtggcattatcaatgtacaatgtcgacgagtctattagggctttcgctgagtcctccatggctatggctctttcaaaaaagtggcctctttatctcagcaccaagaatacaatcctcaagaagtatgacggcaggttcaaagacatcttccaggaggtatatgaagagcaatggaaggagaagtttgaagaaaactcaatatggtatgagcacaggttgattgatgacatggtggcctatgctgtgaaaagtgatggtgggtatgtttgggcttgcaaaaactatgacggagatgtacagagcgattttcttgcccaaggttttggttctctgggtttgatgacttctgtgctgttgtcttctgacgggaaaacattagaggctgaggctgctcatgggactgtcactagacatttcaggctacatcagaaaggacaggagacaagtaccaacagtattgcctccatattcgcttggacccgtggacttgaacacagggcaaagctggataaaaatgatagtctgctggatttcacacacaaacttgaatctgcatgtgttgaaacggtggaatctgggaaaatgactaaggaccttgcgcttcttatccatggccccaaggtaacaagggagttctacctgagcaccgaggagttcatcgatgcagtcgcgcagcaactgcgaggaaagattcaactaccaactactgtgtaatcctgaacctgaagcctgaaaccgaacgaactggttcattgtgcattcggcgcacattttgatagggatggcgagatggatcagatctcaaaacattcttttttttttgcttcagccaaacatttcatggttgggtatataatgacccgttgatcaatgtattcagagcgatattgagttaaattattact

SEQ ID NO: 275336 - DNA, 689 bp, Zea mays
agcaaatactgatccttgttattctgcatttcacgatgaagagtggggagttcctggtcacggtgacaggaagttatttgagctgctagtactgtcaggggcattagctgaactgacatggccagcaattctgaataagagagacatattcagggaagttttcatggattttgacccagtatcagtctcaaaattaagtgagaagaagattatcgcacctggaagccctagcagttccttgttatccgaacagaaactgcgcggtgttattgaaaacgcacgccaaatactcaagatcatagaggaatttggatcgtttgataaatactgttggagcttcgtgaatcacaaacctatattgagccggttcaggtactcccgtcaagtgcctgtcaaaacatcgaaagcagacgccataagcaaagacctggtccgaaggggtttccgcagcgtcggcccaacggtcgtttataccttcatgcaagtctctggcatgactaacgaccaccttatctcctgctaccgttttgctgaatgcgtggcctcctctgctggtgccgctaaacttaccgatggaagcctagcagatgcaagtgatagcaaccatgccacggcggagcagaaggtgaacgggacgaatgacattgaactgtccagggctatagacgagctcagcatttcatagcggt

SEQ ID NO: 275337 - DNA, 617 bp, Zea mays
gtgccgggatgatactgctggggggtgatagtactggtcacacgactattgcggcgggccatgtcctgccggcgtcgtatctgaactcccaagacgccgccgccgtcagacagtacatcaacacgtccagcaagccgactgcctccatcgtcttcaacggcacggcgctgggcaccgctccagctcccgtcgtcgcctacttctcatccagggggcctagcactgcgagccctggcatcttgaagccagacgtcattgggcccggcgtcaacgtcgttgcggcagtggccgttcaaggtcgggccaacaacaaacaccgccggccgtgaccgtgacgacgacgaccaacatggagcagcagcagctactttcaactccgtatctggaacatccatgtctgcacctcacctcagcggcatcgcagctgtcatcaagagcgcacaccctgactggtcgccggcggtgatcaagtcggcgatcatgacgacggcctatgtcgtgtatggtaacaacaaaaaccagccgatcttagacgagcagctcagtccggcgagccatttcaacgttggggccggacatgtcaacccttcgcaggctgtgagcccaggcctggtgta

SEQ ID NO: 275338 - DNA, 2457 bp, Zea mays
  unsure (1)..(2457): unsure at all n locations
tcgggaatcttcattgtctgctgctgataaacaaacacatggtctgttaaaatcaactaatcataagcatcttctgagtgtatcggacaacccaggagcctttgatagacatgacagtatggctggaaaattagatttgatggctgcagaggtgaaaaaagctgatgtcgtgggcaatagtagtgtattgcagaatgacactgaaaagaaggaacatgtttctccctcttcggctgatgttccaaaactagtaccagcagcgtccccagttggtgtggcaaatgggaataatgagatgaaagaatcaaacggcagttcaagtgaatccaatagccatgtaaaatctgaaggtgtcaattctcagcaaagcgagcaaagtgcaaagcagcgttcaaagaaatccagtgatggtgtgtgcggaaaaagaggaccatgtcggatcagtcgaagaaggttctgctctagccgctcacaccaagtcaaatgctacagccaagcttgatttcgacttgaatgaaggactgcctggggatgatgggcatcagtctgagacaactgcctcacctgttgtatgttcctcagcaatccatttaactgggcttttgccattcacttcgcctactacaagtgggttgccgccagctccaataacagtagctgctccagctaaaggaccctttgttcctcctgaaaacctactaagagcaaagcctgagatcgggtggaaaggttcagcagctacgagtgcatttcgtcctgctgaaccaaggaagattttggagattcctgctgctgcacgcgacattccagtatctcatgctgctgggaagcagtctcgtcccacgcttggttttgatttgaatgttgcagatgaccaagctctcgaggaagatatcccacagagttctgcacagactacctgttctgaatctggaaatacgagaagtcgagatggctcttcacgaagcgctggtattgaacttgatctgaacagagctgatgaagttgcagataatggccaatttgtgccaagtgcttcgcacagagttgaagtgccattgttgtcaacaagatcgttacatggagttttatctaatgctggcgcaaatagctcgagggactttgatcttaatagtggacccgacctttatgatgttggcactgaacctgcaccaaggagcctaccttctaaaaatacaagcagtattcaattcctaccacaagttcctgttaggatgaatagtgatgccatgagtaataatatatcaccatggcttgtctctaccagtccttgtggtccagtagctatacagtcttttttaccatctagagaacagccttacccattggaggcagcacctggagcccagcggattattgcgcctacagctgatggtggccaatttggaggtgatccctgcaggcctccagttatttcaacgtctccagcgatggtttttcatccgcctgcatatcagtatgcaggattctctttccctccaagtgttcaccttcaaacaccggcattttcaattggatcagcaacatttaataattctgcatctgcaggagttccatattttccaactgtctccccctcttttgttgggccagccggagcgttaactccccaacatttaaggcagtatgctataaaccttgctgagggtagcagcagcagtggacgagacagtaatcgtaaatgggaaagtcagggccttgatcttaactcaggccctggaagtatagatttagaaggaaaggatgaacgggtgcctttaccagtcagacaaaatttgatcccacccccacacggctttgtggaggatcaaggaagaatctaccagatgccagttgtaggaacaaagagaaaggaacctgatggcagctgggactcagaaaggtctacatacaagcaattatcatggcaatgatggctctgaagatcattctgcaccggactggtctgcgacgagcatgtacctgcatgtagaacttgggcggtgtgttcttcagtcactgcactatactcgggggattgattcagcccatgacgatgatgtgggatcgaggaaacgaaaacttgctgtaattgttgtagattttttccctagctgttaggcttttggttctaatttactcaggagggggtatggctgcggaggaggaatctttgtgatcctgagctctggggctactgtaattagaccgtccgctctgtttgttggtgatatactgttgatcacatgctgcagctttacataagaatttagatgtgaccttgttccttgttggggaagcgttacgtcagctgaccatatatatacactggtgcaacgtacagctctagttgctacaccatgtatcttgggttgcagtgcagctgtatgtataagaattctagcagatcagccagctatatttttttgctgggtgaatacaaaaggntaaggacga

SEQ ID NO: 275339 - DNA, 502 bp, Zea mays
gaaaatctgatgtcctgggcaatagtagcatagtgcagaacgaggctgaaaagaaggaacatgcttcttcctttttgcctgatgttcccaaactagttgtagcagcagcatctccagttggtgtggcaaatgtgaataaggagattaaagaatcaaaagacagttcaagtgaatccaatagccatgtaaaatctgaaggtgtcaattctcatcaaagcgagcaaagtgcaatgcagagttcaaagaaatcctgtgatggtgtgagtggaaaagaggacgaaaaagaagaccatgtcttatcagacgaaggttcttctctagccgctcacaccaagtcaaatgctacagccaagcttgatttcgacttgaatgaaggaatacctggagatgatgggcatcagtctgagccaactatctcgcctgttgtatgttcttcagcaatcaatttaactgggattttgccattcacttcgcctattacaacggggttgcagccagcttc

SEQ ID NO: 275340 - DNA, 1138 bp, Zea mays
aggccaaggaggcggcggttctggccgccgagctagtgcagctcagggcgaagatctccgcgttagagtctcgcattgcagagcagaacctggagttcaagaccaagaatgatgcaatcgaaacactgaatatgattgtcaaggaaaagtcacagaagattgctactatgcagaatgaagtaacttccctcggggccatagggtctttagctgcagaggagcaggcaagcaaggccaatgcactggctattgagctcaagaagcagaccgagaacgctcaagaaggatattacagaacaaaaaattaaaaaagcagctctggaggctagggctggcaatgctgataagaaggtgcaagagctaaatatgaagctggagaagctccagaggacaagcagtgatcaaaagcgcaggattcagaagactgaacatgctcttaaagctgctgaggaggagctgatgaaggctcagttggaaacaacaacaaaagtaaaacagcttagagaggttcatggagcctggttgccaccatggttagcgacacatgcagcccgctctatggaggtgatgtcaaatcactggaatgaacatgggaaacctgcctttgacagcttcttgcagaaggcatctgaaaaaacagtgcagacaaagaaatgggctgagcctcatctggaaactgctaagacaaaatggatgcctgttgctaaagaaaaatgggttaccttgaagaaacatgcaaagccctatgtccaaatggtctcagagaaatcattggaggcttatcaaacatcaagtgactttgtcaggcctcatcttgtaaatgcacatcaagttgttgatccctatttccaggaagccaagaaattatccaagccatatgttgatcaaattgctacagctactaaaccacatgtcgagaaagttagaactgctctcaagccttatactgaaagagcacgacatgtatatggacagtttcttgagacagctactacatatcatccagcaggctcacgcaactatctcggattaccttcaccggcatgagtttacaaaacagtttgtaactaaagagttggtgtggtatctggcttctgctttattggttacacccttctttgttttgtacacactccta

SEQ ID NO: 275341 - DNA, 410 bp, Zea mays
gagcaacgttgcctctgagaaaatggacgagaacgccaagagaaagagggagatatgcaatgctctggccaaaaccacctcgagacggatcaagaagcagccctagccatcttccatatctttcactcgcgtcctctgattgtttagaagttctttttttgatactagccaccagctttgtgaaacgttttcctgcatttttttgtgatgtgtatatagtagtatagtgaactgtccagtccagtaacaagtgatttcgtgtgtaaccatgagctggtcgcattcgcgtcccctctgatccaacaacaaacattgtctcacaatgtgattgattgtagaagcaagcttttgtcacagggcgatgttgctcacttgtggaatcagatgatgcatacatttcgtaactgttc

SEQ ID NO: 275342 - DNA, 665 bp, Zea mays
gccacaagcatcaccaggttcgcgacttgctcgtgaactttggcaagtttgatcccaagcgcctggagagctcggagccggatgatatcctcaaacccaccgtgcagtgtgacgagatattccggtacaggaacaaaatggagttctcgtttgggacgaagagatgggtgcaaaaagagttgaaggacaagggtgaggaggtggaggtgaagcaggaaacgaatgaaactgatggatatgcgcttggactgcacgcaccagggttcttcgacaaggtgctacatgtgcggaaatgtcttctgcagagtgagccagcagataaggttcttgcagttgttcaagaaacctggatggatcctgccataggcctcacaccttatgatgtccataagcatgttgggtttctcaagcatctgatgataagaactggaagaaacatcagcactggaactccagaagtaatggtcaattttgtgacgtcatgttataagccagatgtattgatgcctcttgttgataaaatcacaaaaatacctgaagtggttagtgtcataaataatgtgaactcgtctgttggtaattcatctgtgggtgaacaagaatatactttgtacgggaagccaaacattacagatatgttgagaggacttgcgttccagatatct

SEQ ID NO: 275343 - DNA, 499 bp, Zea mays
ttctcacttgcggcagaggcggtgaaaaaattggctagtgttgcagcatcgcatcggaaattcttttccattgagttagctggtgttgctcagagtttaagttcttctgccgttgaggagcttgtaaccctgaagaacactcaaatgcttgggctcagtacttgctctatggctggagctgcgattttgcggatactgcaagtcctatctacactaacttcgtgtgtgatggatagtagacatgagcaagatttaggacaggaagagcagtcttttttgtgggatctgaatgctggtcttcaacctttgtggcaagagttaagtgattgtataagtgccacagaggcaaaacttgtacacaattcatcattcgcttcccatgccccatcggtggatgctttagcagttagtgcttcatcatctgttgcttcaccgcttcctccaggcactcagcgcttggtgccgttcatagaatcatcctttgccctatgcgagaagc

SEQ ID NO: 275344 - DNA, 395 bp, Zea mays
cctcaagatccagtacactcgggtgccgtgcaactggcgagggctggacatcgcgttcaaggtggacgccggctcgaacccgaactacttcgcggtgctcatcgagtacgagtccggggacggcgagctggagtccgtggagctcatgcagcgcggcggcggcggcggcggggcgtgggcgccgatgcagcagtcgtggggcgcggtgtggcggtacaactccggcgacaccctgcaggcgcccttctccgtccgcctcacctccggctccggcaggacggtcgtcgccagcaacgtcatccccgcggggtggacgcccggcgccacgtaccgctcggtcgtcaacttcgacaactaacgaggacggacggacggaccgaaattaacggacgccc

SEQ ID NO: 275345 - DNA, 480 bp, Zea mays
tcctcacgcgtccgcccacgcgtccgcgccggtgttcgacgtcctgcgcctcttcccggacgactgcgcgttcccgacggtgtgcggcgcctacggcgtgtgcacggacatgcagtgtagctgccccgacgcggccaacttccgggcggtggacttccggaggcccaaccgcggctgcgtcacggtggcgccggttgccggctgcggcggttcgcaccccccggcgcggctggtgtcgctgcccgggctggcctacttcaacgaccccgccaccagcctcagggcgctggagagggtgagcgacgccgcgtgcaggaaggcgtgcctggacgactgcgcctgcgcggcggcgcagttcgtctacggcaccgacgccggcgacggcttctgctacctgcaggcggaggtgctgtcgctggagacgtcgcggccggaggtggtgcactacaacttcaccatgcatctcaaggtgcgggccac

SEQ ID NO: 275346 - DNA, 430 bp, Zea mays
aatgttaataagccgctggagggtttcttttgcccatggaaaggaccccaagtctgatcgttggggctcgtctgatgctattgcaattgctaccccacctccttctgatgatctccgttatttgaaatcatcagccctggatatttggttacttggatatgaatttccagacacaataattgttttcatgcacaagcaaatacatgtgttacgcagtcagcagacaggcaatcttattgggaccctcacgaaggctgcaaacgaggctgttggtgttgacattgtgttgcatgtgacaaccacgaatagtgatggtgctgacttgatggatgacatagtgcatgctgctcgtaatcaatcaaaatcagataagccagttgttggacacatagccaaagaggcacctgagggtaagcttcttgaaacatgg

SEQ ID NO: 275347 - DNA, 476 bp, Zea mays
cgagattcgagagaaatggcgatggcgacgccagctgccaaacaatcacttctcaccgtccaaccgtgcacaatgaattgaagcgccacgcggttccaatattctattgccacgggcaggtgcgtcgcgtcgattcctggtcttcgagaggagcggaggaggagggcggcgagtgcggaggagaggcgagttcagctgtagcgtttcgcttcttgcccgtggcggcggcggtgccacctcgaacgctgctccctgttctggggcttactgcggatcctgatctgagcatcattcagagaggaagaaatatgtttaggagaaagcatggcgctgatgtcaactcagatgatgctgagcatagagaagcacagattagtgaactgaaagctgctcttgggactttgtctgcccgtggcgagaagtactgcagtgaagcatgcttgagaagatatctgtgagcccgcaactggaatgtt

SEQ ID NO: 275348 - DNA, 515 bp, Zea mays
cgtacgctttccacaacagcctggggatgaatagagccaagacatgggggtaatgaacaaagctgcaagcatcatgaaggcagaaccaaatgaatctattctgagaccgatcctgtgtgcacatgggattgccttgcttggctattgtactggcccagtacggcctcgagccaccagcatcggggcggccgtaccctgataaaacatatatatctggagttgtgtttgctgctactgggggagttcggttatgcgccatagtttgttcgctatatattgggttgtgcgggattttgtagcaatgtggtttgtgtgatgctcatttggagcgtttgagagctctcggctcgtatttcttatcaagatagtatttaagggcgctgtttgggattttgaagcaatgctctaactgtctctgtacacgtcaaacatggaggcttgctatatttcatgaatctctcgtttgctgctatcaatcactgatgcatactagtaaaaaaaaaaaaatccatatt

SEQ ID NO: 275349 - DNA, 440 bp, Zea mays
gttaagtatgttatcagctatcttttcttggacactgtacaatacttggatccggtgggaaaagtttgtacctcttatacgtttctatttagtttttttctgccaatctcttcaagctaactcatgtacgtgtatgaatcacattgttatagtagctaacaatgtcagtagtgtaccaatcaataactgtattgcagtcaagaaaatagtaatttccttgactgattttgacatccccatggctttaacagtttaaaaactgaaaattgattctactatatttgtgttttaaggccttagtgtaggcgtacaatctacgtcgacgccaaaattaaatcaccttcctacatccatagttgatatgaactggtgagattcttactgatgcactaaatttcaatcttaggatactctttaattgatgtatgcttttcttcaat

SEQ ID NO: 275350 - DNA, 529 bp, Zea mays
cccacgcgtccgcccacgcgtccgcccacgcgtccgcccgcccccaattccaaatccggagtgcccgcggccacagaccgacccccatcacacacgcgcatcgcgccaccccatccgccgccgcccgcccgcgagcacccatggcgaagggaggaggtggaggccagcgcgagggtagcgccctgaagagggcggcgatcgtcgcaggggggctcgcgctggcctgggtcaccgtggagaccgctttcaggcccttaatgggccgcctccgcgctgccatctccagctccaccgacaccgcccgcgaccccgaccaggaggagcctcccgcgcctgcctctgcggcggaggcggagaaggcgtccgcaccagaggagcctgccgcggtggaggagaaagtcgaggagaaggtggtcgagttggaggagaaggtggaggaggccgccgccgacaatgccgagtgaacgcgacggccacatggcgccctgtctggctgctcctctgaacgggttcttgaggttagccggga

SEQ ID NO: 275351 - DNA, 1284 bp, Zea mays
cggactcgtgggcggacgcgtgggttcggccgcggcgtggtgattggcctcctcgacaccggcatcctgcccagccacccgtccttcggcgacgccgggctgccgccgccgcccaagaagtggaagggcgcctgccagttccggtcgatcgccggcggcgggtgcagcaacaaggtcatcggcgcgcgcgcgttcgggagcgcggccatcaacgactcggcgccgcccgtggacgacgcgggccacggcacgcacacggccagcacggcggcgggcaacttcgtgcagaacgccgacgtgcggggcaacgcgcacggcacggcgtccgggatggcgccgcacgcgcacctggccatctacaaggtgtgcacgcggagccggtgctccatcatggacatcgttgccggcctggacgccgccgtcaaggacggcgtcgacgtgctctccttctccatcagcgccacggacggcgcgcagttcaactacgacctcatcgccatcgccacgttcaaggccatggagcacgggatcttcgtcagcgccgcggcgggcaacgacggccccgccgcgggctccatcaccaacggcgcgccatggatgctcacggtcgcggcgggcaccatggaccgcgcgatacgcaccaccgtcaggctcggcgacgggcaggtgttcgacggcgagtcgctgttccagccacggaacaacaccgcggggcgcccgctgctgctcgtcttcccgggccgcaacggcgacccggaggcccgcgactgcagcacgctggtggaggccgaggtgaggggcaaggtggtgctgtgcgagagccgctccatcacggagcacgtcgagcaggggcagacggtggccgcgtacggcggcgccggcatggtcctgatgaacaaggcggcggaggggtacaccaccttcgccgacgcgcacgtgctggccgcgtcgcacgtgagccacgccgcggggtcgaggatcgcggcgtacgccaggtcggcgcccaggcccacggcgtccatcgcgttccggggcacggtgatggggtcgtccccggcgccgtccgtggccttcttctcgtcgcgcgggcccaacagggcgagcccgggcatcctgaagccggacatcacggggcccggcatgaacatcctggcggcgtgggcgcccagcgagatgcacccggagttcgcggacgacgtgagcctgcccttcttcgtggagtccgggacgtccatgtcgacgccgcacctgagcggcatcgcggccgtcatcaagagcctgcac

SEQ ID NO: 275352 - DNA, 1143 bp, Zea mays
cactggaatagcgaggaaggtgcgtgctctggctctctgcccgaattcccgagttcttctcctccgactccgagatcccgtcagccatggacgggctcctgtcgaagctccgcagcctggacgcgtaccccaaggtgaacgaggacttctacagccgcaccctctccggcggcatcatcacgctcgtctcctctgctgtcatgctcctcctcttcgtctccgagctccgattatatctccatgcagttactgagacaacactaagggttgatacttcaaggggagaaacacttcgcataaattttgatgtcacctttccagcccttcaatgttctataattagcctggatgcaatggacatcagtggacaggagcacctagatgtgaaacatgatgtattcaagcagcgaattgatgcccatggcaatgttattgcgactaggcaagatgtagttggtgggatgaagatggaggcacctctacaacatcatggtggaaggcttgaacacaatgaaacctattgtggctcttgttatggtgcacaagaatctgatgatcaatgttgtaacacatgtgaagatgttcgtgaagcctacaggaaaaaagggtggggtgtatcgaatccagatttgcttgaccagtgcaaaagggagggctttcttcaaagtataaaggacgaagaaggcgaaggatgcaatatttatggttttattgaagttaataaggttgctgggaatttccattttgctccagggaaaagtttccagcagtcaaatgtgcacgttcatgacttgctcccgttccagaaggacagcttcaatgtcagtcataagatacgcagactaagttttggagaatactttccaggtgttgttaatccacttgatggggcaaattgggtgcagcattcatcgtatggaatgtatcgatacttcatcaaggttgttcctacagtctacacggacataaatgaacacattattctctctaatcagatctctgtaacggaacttagaaaaattggtgagagtggtcggatgcaggcccttctggtgtgttcttttttatgacctttctccatcaggtcacattcacggacaacatgtggtattttacacttttaactaatgttgcgctattgtg

SEQ ID NO: 275353 - DNA, 313 bp, Zea mays
tcttccttgacggaggtaagagctattattatgataataatacagtactagtatgtagcatatgggttgcggaactcgatcacactagcgtgtttctgcctccctagaacatctcaaactggatgggattgggagtttgttgtagcaaaaaaagctgtagccatcacccacccagtcatttgtaaatctgcgcgacttaaaaagagcttttctgtgtggccccgagacagaaagaccagcttgaatcatgctggagtactagctaataaacaaactacacctagctgagtcaagactacatgcaacaacaaac

SEQ ID NO: 275354 - DNA, 649 bp, Zea mays
  unsure (1)..(649): unsure at all n locations
atcatctataaaacctgaggtttgcagctacccattcacaacaagaggtaantctaatgtgtcacattgtatctaatcaggaacgttttcagcttacggacactacaggactcctgacaaggcatgatgatgacagaaataacatagagcgattgacactagctgtcctttcttatctacctagcgctgtcctgtatgtgcatgatctatccgaagactgtgggacctcagtggccgatcagtacatcacgtacaagcatattaaggacagattccgtgaccggctattgcttgaaggtaatttccaatgccaactttgggaaagaagagccataagtttcacgatgctgatgaagatgtagcacggtacagaagattgnngccagaatgcgcccttcaagtatctgtgcagaccgaaatcggcgtcaaacagcttaaggaaagagtgcatgagctgctgacctctcagatggctcggatccaatctagcaaggcggagcatgaaacacatgaagtagcgactagtgttgtttactgaagtttgacaataataaggattcgaatatcatgctgggtgtccgcgtaaacattcaatgtcgatgatggtaacacattccatcagttgtccttttgtccatttggaaagggt

SEQ ID NO: 275355 - DNA, 805 bp, Zea mays
aaaaaaaaaaaaaaaaaaaaaaaaaaattaaaaaaaaaaaaaaaaaaaaaaaaaaagagaaaaaaaaaaaaaaaaaaaaaggccaacagcctgctcctccggttgaagagcgactggcctgctttctcgcaactagtcgcccgccttgaccccaacgtctttcgtgtccataaagtccggttcccgccatttggtcccaaaggggctcctaaaacccccagtgaactaaaggatgcctcatcctcgtcacggcttgaaaaccccgtcgttctacgtgctttgtcagcttcacctttcaaagactaccgtgtctggtggtctctttcagattcaaaatatgctgggacagctatgtttataaagaaaaagtttgagcctaagaaggtgtctttcaacttggatagaacatcttctaagcatgaagccgatgggcgtgttataattgcggaatttgaatcattccttttactgaacacttattctccaaacaatggatggaaggaggaggaaaatgcatttcaaagaagacgtaagtgggacaagaggatgctagaatttgttcaacacgtggataaacccttaatctggtgtggggacttgaatgtcagtcatgaagaaatcgacgtcagccatcctgatttctttagcagcgctaagctgaatggatacaccccacccaataaagaggactgtggacagccaggattcaccccagcagagagacggcgttttggcaacatattattccaaggaaagctggtagatgcttacaggcacctgcacaaagaaaaggacatagacggtg

SEQ ID NO: 275356 - DNA, 428 bp, Zea mays
ggcgtttaaaaaatgggcaccatcagagtaagaatctggttacacttccaggatattgggtttctggaaccattggtcataagttgatgtgtgggaaacctacaagggttgattacgaggacactcatattgatgtcagatgtcagatccatcagctagcattcagtcctcatacagactccaaagggattatggatctgacagaattcctgtcacccaaacatgtaattctcgttcatggtgaaaagcctcagatggcttttcttaaggagaggatcgaatctgaattggggatgccttgctactacccagggaataatgaatccgtctccattccgacaacccagaaccttaaaatgagtgctacagaaaggttcattacaagctgtgctgtggagcaaggtaaacgtagcctgcacaagcggaac

SEQ ID NO: 275357 - DNA, 2048 bp, Zea mays
cccggggccacgcccacgcgcaactccattacttcgctcgcagccagatctgagtgctcactgtgtctcttcctcagtcccggcatcagcgctgaaaccctaacacgccacgcgatcccgatgcgcaggggtctgggcagcgaggcatcgttgcgccggcggcgcgggccggcgcggctttgggtggcagtggcggcgctggtggtcggcaccgtgtgcctcttctcctcctcttcggtcggcctgttgggcgcctcttacagggtccaggatgttgatgtaaataagttgtggagaactgcagattcaaatggttggagagcatcttctgcaccacgcacctactggcctcccccaccaactgaatctgagagcaatggctacttgcgcgtccggtgcaatggtggcttgaaccaacaacgtagtgcaatatgtaatgctggtggtgctgcacggatcatgaatgctaccctggtgctgcccgaattagacacacattcattctggcatgatgaaagtggctttgtaggtatttatgatgttccccacttcatcaagacactgaaatatgacgtccgaattgttatgagcattcctgaaatcactacaaatggaaagaccaagaagctcaaaggccagcagcttcggccaccaagagatgcaccggtatcttggtatgcaactgatgctttggagacgatgaagaagtatggagctatatatttaagtccattttcacaccgtttggcagaagatattgataatccagagctccagagattgagatgcagagtgaattaccatgcactacgattcaagccaaatatcatgaaaacaagcagtgagatagtgaacaagctccgctcagaaggccatttcatgtcaattcatcttcgatttgagttggatatgcttgcatttgcagggtgctttgacatattcaaacctcaagagcaaaaaattctgtggaagtacagggaagaacattttgcagaaaaggaacttatccccatgaaaatcaggctcaaaggaaagtgccctttaactccagaagaggtaggttttattctacgtgccatgggatttgacaatagaacacgcatttaccttgcctctggcgagctctttggagggaaacgtttcatgaagccattcaagaccatgtttccacgcttagagaaccacagcacagttggacctggaaagctggaagagaatacccaagggctagcaggatcagcagttgactacatggtttgcctcctgtctgacattttcatgcccacatatgatggcccaagcaactttgcaaacaacctcatgggccaccgtatgtactacggtttccggaccacaatcacgccgaacagaaaggctcttgccccgatactcatcgacaggatggaaggccgccacattggctttgagagaatcaggagggtgatgtccaacacccattttggtgccccccacaagcgcgtccatccagagtctttctacacgaactcatggcctgagtgcttctgccagacggatgccaagaaccatgcagaccggtgtccccctgataacataaatgacgttctggaaagccagttccagagcgaagaagaaatggaagaagcaagagcctctaatcagactgacccatccagccaaatagaagagctgacgatttaactgatcaactagggattactgctcggaagcattttgaacacttggaatggtcatcagagaaatccagatacaactatattcaaggaatgtattaattgatggctcaaactggagcggttgacatgctgaggtgtggtatctggtggtattcagggagagcattgaaccagattttgaataggtctggtcatatatggttttgaggagaaaacaatatgtatgtcaatagttttcctcattgaagagtgaagttgtgcgggttgtgtaggtggcagtgacaaaagtgagaaacctttgcgcaatatggtaccatccggtgtataaaggccccggttaggctggtgccagtgcaccctttgtctttcgtc

SEQ ID NO: 275358 - DNA, 497 bp, Zea mays
taccacggccatcttgccaggtctgcaaaaaatatacgcgcgcctacttacattgcctggtcacaaaagatgctatgggttctcagctgctgtcatatcataacttatcatttatgatgcgggggagtagagacctccacatgtctattcttgaaggacgatttccagaattcgtgccaggattcttgagggtgccgtttccaaccggagaacgttccgcagtgggttcgcaacgcgatggaggtcgctggcattgcatatcgatgctgggctgcaccatgtctgacataacgtcaggggccacctttaactgtaccggttgactgcaaatggagttgtgccgagttaaggctcttcgcctctccggcaagcaaaagacgacgacaggctttcacaaagaagttttttttccgtcatacatgtagggtctcactcacaccgattcagcataggattttccaatagtatgctgaagcttggcgacaggttttgttagt

SEQ ID NO: 275359 - DNA, 1032 bp, Zea mays
cacaaacagagacagcgttatggccatgatggaggcatttgtacatgacccgttaatcaattggcgtctgttcaatttcagtgaggttcctcaagtgtcgaactatggtaatgttcatgctcacacggttgtcagtagtgaagaagcagtggctaaccgagagctcatgcaacctcagcgaggagcacgtgagagggaactgctacaggctgtcaatcaactcggtgatgccaatgaggttttgaatgagcgtgctgtagctgtgatggcacggatgagtgacaaactaacagggcgtgacttctcttctgggtcagctttggctggagcaggtagctctatccaacatggcagtgagcatttggcttcaggagatgcccgggatgcccaacctggtctctcagtgaaggttcaggttcagaagctcatactccaagcgacttcacacgaaaatttgtgccaaaactatgtcgggtggtgtccgttctggtgagctctcttggaaacagtagcagtttataacatgtaaatattgtgaataccgtgtgcatagaagtttcgtggtgacagtttgtatgtgcagctttgtaattagcagaacttcaagatgccttggaccatccttttgtcagtttcttagaccgtgtttagcagttcacccttatggccatccaaaacactgtttttgtactgtagattgtattgtttgtagattgtactgttcgcagggtggatttttgaatatgagtataagaatgtgtaagctgttgaagatagccttaggttttctttcgtgccacttgagggtttgttcgattagctttcagtccatgtggattgagtgagatcggattggtttaaatcccaagcaagttaaattttcttcttaatttttctaatcttatcaaatccatgtgtaacgggaataaccgaacaaggtctgactggaaatgttaagagggcgtcggatcctctggaccaaagtttagtccgggtttggatactaattaagactaaacatgtgcttattat

SEQ ID NO: 275360 - DNA, 495 bp, Zea mays
cccacgcgtccgcccacgcgtccgagaactgccaataatgcggtattggatatcgagagccttcctcaaccgcctgataaatgctgctctgggagtccgaagatgatcagggccttgtcgcgtaagggttcgaaccggatggagaggaggggcggcggcggcggcgagcaggagcaagaggatttggcgaaaaaacttgtcatcaaagttgtgccgtctcaactggagcagcagcccctgggtcagaacaaggcgctggtcgctccacactgcacacctgttcttgttgattctggggaagggaggagcaaaagattcattagccggttcacgtccatcaaccctcggaagattctcctcttgttcgcaacgctgtcgagcgtggggacaacgatactgatctacttcacgctggcgatcaacagcaaagcggaggcctagtcgcctggagacacccaccagccaccaccaccatttgcgtcggcgggcgggcgg

SEQ ID NO: 275361 - DNA, 1730 bp, Zea mays
cgcttcccccttccacccgccgatcgccctccgctcgctccaccgcggcgggcgatcgctcatctccccctaacctcccccgctcgcgattcccgaggcgaggtgccacccaccgcagatttcttccgacggacggttggctcgctcaccccctacttcgctgatcggatcgcgtgctgcccgaggtagaggtgatgataaggcatagttgtttgacttagcctgccttagctatttcttgaagctaagggaaataataattggtgttatggcatttagaaatatggtttgtactccccaagtcattaatcttacatcagactcagagagagggcaagctcaaggaggcaatgagtagtgagatatctgagcaaggtgcacaacatgctgtcagagttgtaggaaatgcaatgaacattggtctctctggtgtgcgaagttactatgatatgagcataaatcatcaccatcagtctgtgcatagcccacccccgaatttaggtgttgattctggttttgtcttcgcatcaaatatgtacaatccctgcatgtcatcaacatcaatgaacagacatgtttctcatgctcagagctctggatcacggaatcaagagttgcctcaaaaccaagtcccaggaactatggatgagagtagcagaaatgacagtattggtgaaagtgctcgagagcatattacaaggaaaaatgctgcacttgctggaagctatcattttgttaatggatttcccgcctcgggccctgcttctcatgcacctcacaatcctatgcttgggccttgggacccttcttttgaatcaactgtttcttctaatgttgcaccattcaacccatcagaatatcatggacacaacaacagttggccgtccttagaaggatcttccataacaggaagtaatggattcaactcaatggttgttcatccagactcagtacagcgtgggaactatacatttccacccactcatattagccattcatggatgtcccatgctacaaatggtattgctgatggagttccccagtgggaatatgccaatgcaactgctaatattcaaggcagatttgcccattcaggagccacagaaatcgcaaatgttggttttcatgaatatcagaatggcccttcaactatttgtcggggaccagtaccttatttccaccagcatgcgatgcatggcatgcaagctcttgatcctactcaaatgcaagttccttatcaacaatgccacagtaatggtttcttgcatggtggtattaattaccctggaaaccgtctccaattaggtccacgaaatccagttctcttcaccagttctgaacgtgcttttgggcctccacagcatccgttcctggcaaatccagttaaccaccgcaacataaggattctaccacccgagcatgctacaataatggatttttcgagattgtatgaagtgtcaaatactgtagatgagcatagagatatgcgtctagatatagacagcatgacgtatgaggagcttctagcattagaagagcagatcggtgatgtcaatactggcctgacaaaaagtcacatcgtagataaatcgaggactagcctatatgctccaggaatatcgagcatgtctgatcagccatctaaatcttctctagagaatgatgcttgcataatatgccaggaggagtaccaggctagagactgcgttgcacccttgactgcggtcaca

SEQ ID NO: 275362 - DNA, 673 bp, Zea mays
ctttgaggcaactctggcatcagaagcacttctaaatgaagaggcggtagtagcagcggcagccgcagaggctgttgctcttgccagagcagctgccgaagctgcccaagaagttgttcagatagtacaaagaaacaaccatcagccggtaattagaccaaaaaagtgtgtggacaactacttggcaaatgaaatccttcgcacagagatgcgatcgagcagtcctgacatgtatgctaataatcctttgatggagtatctggactcttatggtatcatggatgctgaagatgaattagatgcttatgcacagtatactgagaacatagctgggaaatctgctcgtcaatctgagagaaaagctaggagaactagagcagcaataaaagctagcacaaccctccatgcttcacaaaaggttgcattatcctcaaagaagaagcggtccaagggttcctcgtctagtatgaatcctttaggttcgttgtggaagatgaccggtaggagacttcttacagccaaggaagaggttgaattctcagaaggtattcaggatcttttgaagcttgaggcgatccaagctgagcttatagagtacaatggcggtcagccaaccttctcgcagtgggcaacagcagctggagttgatgaaaaaactttgcgcaagcgcttg

SEQ ID NO: 275363 - DNA, 440 bp, Zea mays
ctttagcagtagtttccaaccagaggcaggcacctcgagaggcgggtgaacatggagggcgataagaaggcgggcgccgtggcagagaagaaggcggcggcggcggatcagagcaaggaggtggccgctggtgatgtgagcctgaaggagctgtccaggaggctcaacgacttcgccaaggagagggactgggagcagtaccatagcccccggaacctgctgctcgccatgatcgctgacgtcggggagctgtcagagctgttcatgtggaaaggggaggtgcgcaagggcctcgcggactgggacgaagcggataaagagcaccttggcgaggagctctccgacgtgctgctctacctggtccgcctatgcgacatgtgcggcgtcgacctcagcgacgccgccctcaggaagatcgtcaagaacgccgtcaagtaccc

SEQ ID NO: 275364 - DNA, 620 bp, Zea mays
cggacgcgtggggcacgcgaatgctaaaagagccaggagtaaaatcaggcaaaatggaggagtgcaactgcttctacctttcctgacagaaaagaatgtgggtatcaaaatcgccgcgttgcacttaatgttccatttgtcgaaagactcttctcaagaattggctgagcagttcagggagacccatctggatatttttgtgaagatcatctcttcccctacttctcgagacgagaaggctgcagctgtcggtatcctgagcaacctcccagcgacagacaagaaggcaactgagattctgatgcgggcaaacttgctccctattctgatcaccttgtttgaggcaaacatcgccgctgccgtgacacctcaaagaatgtggttgcttgagggcatcgctggtgtctttatccggttcacagtcacctgggacaggaagctgcagagttcagcagttggacacggggtggttccttgccttgtgaagttgctttcacaaggatcggtggacgccaagtctaaagcggcaacatccttggcccaactgtcacagagcacgatggcgctgcgcaagtcagaaacgccaaggtggtctgcgttcttcatcggccgaatctact

SEQ ID NO: 275365 - DNA, 485 bp, Zea mays
tcgctggacactctagtaaagtgaaaaatacacttatattcaacacatttgtattgtgccaggtgtttaatgaggtcaattctcgtaaaccagaagaactgaacatcttttccggagtttcaagaaatcatcttttcttggcagtagtgagcataactgttgtgatgcaggtgataattattgagttcctcgggaaatttacatcaacagtgagactcaactggaagctttggcttgtttctgtagttattgcttttctaagttggcccttggcttttgttggaaaattcattccagttccgaggactgaattgaaggatctcattgtaaggtgttggcctaaacgtggcgagagtgcagcacaacagactcaggatgacagaatggaagtaccagtgtgaagctgttcttgagcaacttctcgaaattatcagatgttagtgttggtgcacatagatgggtgttggctaattctgggtgctgat

SEQ ID NO: 275366 - DNA, 726 bp, Zea mays
caaaaatgtatttacagtagtcaattttgacatgcctctggatgctactgggtatgttcacagaattgggcgaacaggtagagcaaataagactggtgcatccatatcgcttgtttcaccaaaggaggatagtacttttaaagagattgagcatatgttgcaagatgtcgaaaagaaagatatggactgcatttcacctttcccattacttacgaaagatgctgttgaatctctacggtatagggctcaggatgttgcaaggagtgtgacaacacgcgatgtactggaagcgcgtcgacaagacataaagaatgaaatcctcaattctgagaaattgaagtcgcgttttgaagagaatccaacggaccttgatttgctcaaacacgataagttgctatgcaacatggaaattcctgcatacctgcgtgatgtccctgactacctaattgatccgaaaacaaaagaagccagcaatgctgtcaagctttccagggctgctatgcatatcgacaagccccaaaggcggaaaaagcaagggtttaagggaagatcaaggaaaagcagagaccctctcaagacattctctgctgaaggcaaactaaggaaacggaagaaagaaagggaaggagaaccaaatagaagaaagaagagtaagagggcggaagttgatttttcaagcagtttgctatcaagctcgcccaatttgtaggctttcttgtttgaagc

SEQ ID NO: 275367 - DNA, 1168 bp, Zea mays
cggttttggacaacgaagatgaccaacatgtgcttgtgcctcttgtaattggaaatatagaatgcagtgttgtggaagaaggaaagttcaggtactacaaattttcagttgaaggaaatgtgagtgagaaagtagcttctgggcatgcaaatatcgagattaaaatagatacggacgcgagcggtggtgacactgatatctatgtttcaagacatcctttagtatttccaactcagcaccgacatgagtggtcttctcatgaaatgggatcgaaggttcttatactcaaaccacgggatgctacattggtcagtggtgtttacagtattggagtttatggtttcaaagggacttctaagtaccagctctctgtagctatcaaggatgttagtggccaaaggattggtgaatatgctagtgcctcgggaagtgttgattttgattctgtgctgtgtagaaactgtaagcgccatatagccagccagtctgctcatcttcatgaggcatactgcatgagacacaatgtagcctgctcacatgatgggtgtggagttgtccttcggaaggaagaagcagcagatcatgtgcactgcaacaagtgcggacgagcttaccagcagagagaaatggaaaagcatatgaaagtcttccatgaaccgttgcagtgcccctgtcgggtggtcctggagaaggaagatatggttcagcaccagtccttgacttgccccttgcgattaattgtgtgccgcttctgtggtgacacagtccaggctggtggagagccttctgatgttcgtgacaggatgcgaaacatgtctgagcatgagagtatctgcggatccaggacagcaccatgtgactcctgtggacggtcgatcatgcttaaggagatggagattcatcttattgctgtgcatcagaagagctaatcacctactgacgctgggctggtctgaacttgagcctctattgtcatttggtcaacagaagctgtgaactttaatgtgccattccagggttgttggattgaaaactaccccttgggactgggagctatatgtgattcgtaattcgtggtgttccatgggattaaacatactggtgttatctgtattttatttctctgtatacattatttataaatctgattttacattcggtatttcct

SEQ ID NO: 275368 - DNA, 439 bp, Zea mays
caattacttaaaagcagccatattttcgtgtaaagaattgttttcgcttcgtttgattgtcagaatttggcagcgaagaattgaatcgatgttgaataccaaatcagtttagatattgaaatgggcatcaaatcaaattcttgtttggatggacaagaatttggtatgtaaaatcatagggaattttccaattccaatggatgggctagacaggggtccggcgtgaactgcacgattggaaaaaggtcagccgattccacccaaaaggagtgcacggcctctgaattgtgcgcggccatggctactaaaatgaacagtagtgtggaattggattgcaatgtattgcaattcagaataaaacatcagcatttgcttcagccaataccatttcctggattctgagtgccaatcatccaacggtgtgttaatatgctcctgt

SEQ ID NO: 275369 - DNA, 349 bp, Zea mays
aacaccaggctccagattatggtcaacccgtcgtgcggaaagggcaggggctcctgcccggtcccgccgaggccgccagcggaggacaagaagccctgcaacaggaccagcagcagcaggggctccctcgtgaagcggatgcccttcttccgccgcagcaggtcgcgtcctcgctcaagggcggcgtcctccaaagatgggctcatcgtcgtcggtgacgggaaagagagcgacggcgacagcgcggtggcggatccagcgccgccgccgccgccgatgggcctcggccagatgaagcggttcaccagcgggcgctccgcgtttaaggacttcgactggcggaaggagg

SEQ ID NO: 275370 - DNA, 1218 bp, Zea mays
aacgaggccaccgacgtctggagcgcgggggtcatactctacatccttctgagcggcgtgccgccgtttaggggcaagaccaagtccaagatcttcgactgcatcacgtccatggagctgcagttcccttctgacccatgggacagggtttctgattccgccaaggagctcgtcaccgggatgctgcggcgcgaccctaggctgcggctcacggccaagcaggttctagagcatccgtggatgcaggaacacgcggacccacaagactcgtgcgggcagtgccacgagaccggcctccaacgggagggcgccggctcgtgctccttctccacgccgttggcgtcgcggagcatggacgtgagctttgacacgcgtggccccatcgcgtggaggggtgggggcgaggacgaggcgacctgctgctcgcccacgttcgccgccgtctgcaggtcgtcgttctcggcgttcatcaccgacccggccccgccgccctgctcggcctcctccgccttgggtggctctggcttctcgttcggtgagccctgcgaaccacttgacggaggaggaggaggagggttcccgatgcccatggcttccatgccgagcttctcgttcttctgcgcgcgggacagcagcgagccagctgagccacagccggtcgctgcctcctcgactccgaggacggcgaggggatccacgccacggggcgtcaacggcaggcggaaccacacgatcggcggcggcgggcgggagcacctggacgtggcggtggagtctgtcatccgctgggcgtcgtgcaccaacttctccacggcgccctcacttcgggcctccctcgtatgctagcactagcaacgtcgttccgcgcgccggcgccgccaacgccgggctgagggtgaggaggagaattccgacgagacgagcggtagagagtgtgcagtagcctcgaattgtataatatatatacagacccagtgctgttatagtggtgatgatagattagagagtgaaggtgaagttgctacggagggatggatgcatggagatggagagcgagtggcagagctggaactgatgtgttttattcttcgctgtcacgctgctggtcagataagatttgggaacgctgctggtcagataagatttgggaacacacctggcgacggaaaaagaaggcgtctgataatttgatatgaacaaaaagccacaatgttcagg

SEQ ID NO: 275371 - DNA, 981 bp, Zea mays
tccacgcgtccgcccacgcgtccgcccacgcgtccggagacgtcctcgagtccccctcccctcccctcccccccgccccgccgaagaggagcagcgcagccgcgatggaccgcgtccagctcgtgctcctcggcctccccatcctcctcttctgctccgacgtcgtcaccctcttcgcgcctctcccgccgccgggccccgggcccgacagggacccccacgcttttcagcccggcgccgaatcctcctcgccgccgacgcttccgcacatgtggagccacaggtggacggaactggctccggcaccaccgtcgacttcaagttctgcgcctcctgctcgtacaggggaactgcaatgaccatgaaacggatgctggaaacctcctttcctgggatccatgttgtcttggaaaattatcctccgccgttccccaaacgcgctctcagtaaagctgtaccccttcttcagttcggcgcgatggcaacattaatggccggtgatcagatcttccccaggtttggaatggtcccgcctccttggtactactcactccgcgctaatagatttgggaccatggcgtcaatctggctgtttggcaatttcgcccattcatttctacagagttctggtgcctttgaagtttattgcaacgggcaactggttttctccaaactgtctgagcagaggtttcctagtgaacttgagctacaggagctcattggcagtaggataccggattctcagattgtagaaaatctggaaaaagatctggtcctagaaaaagatctggtcttagatgatgttgatgccgatgatgccatgagagactagcttcgcctgtttgtttgttactaaatagacagaacttgagagtttcacaacttaattgtcaaaaacatattgccttataatttgcactttattttcctcaattatgtacatattcataccatagttatgtaatatctgttgaagtcgtc

SEQ ID NO: 275372 - DNA, 765 bp, Zea mays
tcaagttataccgccttgcttcaatgggctgggcaacatttggtgccttccttcttgcaaagcgtgcaatacagcattttctagaaagaaagcgccggcatgaactgcaaaaaagggttcttaatgcagcagcacaaaggcaagctagagaagctgaagggagcattggttcatcggacacagagcctaacagtaaaaaagaccaattagtgttggacatatgtgtcatatgccttgagcaagagtacaatgctgtttttgtgccgtgcggtcacatgtgttgctgtatggcatgctcttcacatttgacaaactgcccgctttgccggagaagaattgaccaagctgtcagaaccttccgccattgatggtgatatatgatgcaaaaaactggcatggtaccaccacatgtactgcttctgaaaccaatttgttcttggaacttggaagtgctggctgctatcaaccaacgacatgaactgcaatactgggacgaagcagcttcaatgagtttgctttttgaacagaacagtgagtgatgcaagttgcaagctcataattggcagttgagatactctcactccctagatagtgccaatgggtgctcttgcctgtaatgtactacaactctgtacaggacgctcttgtgtaagtgcacatagattagcagcttgcttattgacaacatcgatgccggtaatatgtactgttgcccatcgggcatttgtgcaaaggaataacaaaatcagctcgtttagttgtgat

SEQ ID NO: 275373 - DNA, 658 bp, Zea mays
aacccatccaacttcccaaacgaaccacgaaccagtcctataaaaaacatatggacagggatccaaagaacacaagtcaagcacacgaatccaaagaacacgaaccggcagttcagcttcctgtccgagacctcggggaggcctgccctctcggctctcgcgttaccgatcgaggcgtggagagaaatggcggcggcagcagcaacaagagcaggagcgtggggcgtggcgtggctcctggcggccaccgtggcggcggcgctgctggcctcggcgtcggcgcagtccgggtgcacgaccacgctgatcagcctgtacccgtgcctcaactacatcagcggcaacgtgtcggcgccgccgtcctcgtgctgctcgcagctcgccagcgtcgtgcagaccaacccgcagtgcctctgcgccgcgctcagcggggactcctcgtccctcggcggcgtcaccgtcgacaagacgcgcgcgctccagctcccccaggcgtgcaacgtcaagaccccgccggcgagcaagtgcaactctgctggcggcggcagcgctccgggcgccgcgaagccggctacgccgtcggccggcgtaccatcgaccgcacgaaccggcactggatcgaaggcgacgccgacggccccgttcctgacgtccggcg

SEQ ID NO: 275374 - DNA, 531 bp, Zea mays
taagagtgcagccgattatagtagatgctggagtgtatttggcagggaggaatcagttcttccaagccacagagaaacgggacactcctgatagtttcaaatttttcacaggttctccatgggtcattttaaacagacgctttgttgagtattgtatttttggctgggagaatctccctagaacactcctcatgtacttcacaaacgtgatgctacctctagaggggtatttccattcggttgcatgcaactcggacttccgcaatttcacagtgaacaacgacttgcggtatatgatttgggacaatccacctcagatggagccccatttcctaaatgttacacattatgatgagctagtagggagtggggttccttttgcccggaagtttaaggagaatgaacccttgttggacaagattgatgatcaagtgcttcgacgatggcaccacagacctgttcctggtgcgtggtgcacaagcaggaagaggtggttcagagatccttgctcccagtggagcaacgtcaaca

SEQ ID NO: 275375 - DNA, 845 bp, Zea mays
tccctcgcgtccgcggacgcgtgggcggacgcgtgggcttactcttgggccgcgatggctctccgcctcctcgtcgccctcctagacgcgttgctactgctcccgctcgcccgcgcggactcctcctcgtacccgcccgacaccaccgcgtacgacgagctccgcctccggggctgcccgcgcggcctgctcccggccaacgtgcgggcctacacgctcgactccggctccggggacttcgccgtcgacctccgctccagctgccggatcgtgctgcccgcggggagctacctcgccgccttcagcgaccgcctcacgggccgtctcgacgaccgccgcatctcgggcctcgacggcatccgcgtcagggccttcttccgctggtggtccatcacggggatccgcgccgatggggaccagctcgtcttcgaggtcggctccgtctccgccaagttccccgcgcgggacttcaacgccagcctcgactgccccgcccaggcggcgtcctaagtcaaggaggtatcctgtcgcatgttccatgacatgtgacattctaaaggggcagttggaagccaagcacatcaatgtttttaatttcatctgtctttactgtaattgtataagtttacaatagatgcatagaacagactggatcgataaaagcgccttcacagaccaaaaacccggtatcacggtactggttcgtgcatttcgttagaaatgccctacgtcttattttgaaaagttgtgcttgtatatcttacttattgacaatagctgtacttataagactacttgcataaagaagaaaagtgaggtgcaaggccgaaaggcccctatgcgct

SEQ ID NO: 275376 - DNA, 470 bp, Zea mays
ccggttccgggctcgagccacgcgttcgccgccgtgcgcacacgtctctcctcttccgttcctctcctgcctccagctctccacggtctctgacccgcacaactgaacccgcgatggcgcgccgcctcctcgtcgccctcctcgccgcgtcgctcctgctcccgctcgcccgcgcggactcctcctcgtccccgcccgacaccaccgcgtacgacgagctccgcctccggggcttcccgcgcggcctgctcccggccaacgtgcgggcctacacgctcgactccggctccggggacttcgccgtcgacctccgctccagctgccggatcgtgctgcccgcggggagctacctcgccgccttcagcgaccgcctcacgggccgtctcgacgaccgtcgcatctcgggcctcgacggcatccgcgtcagggccttcttccgctggtggtccatcacggggatccgcgccgat

SEQ ID NO: 275377 - DNA, 426 bp, Zea mays
agacaattctctctcgtcgtctcctcacatgccacgttcggctcttgggcacgcagcctccatctccccacgcttgcttgagcagcagcgctcggccacgccggctgctactcccctgctcagccacgacaagccgtcgaccatgtgccgcgccctccctgctcgtcggccaccaggacggcatctccacgcgccgagttcctcccatggctatcccaaaccctagccgagatcccctcctgtgttggccactgtctccttcaccaggcgtcctcccctatccacgtgctggcagcacatggcgagctcacccccctgtgccagacgagttcatcacttcccttagagcaacaccttcatccatggtgcccagctgctccttggagtctactgtggtgatctctaaatccctttggtggtttacta

SEQ ID NO: 275378 - DNA, 881 bp, Zea mays
acgcacttcgacctcagcggcgccgcgttcggccgcctcgccgtggccggcgccggcggccagctgcgcgaccggggcgagatcaacgtcgtgttccgcaggacggcgtgcaggtacgggggcaagaacatcgccttccacgggaacgagggctccactagcttctggctctccctgctggtggagttcgaggacggcgacggcgacatcggatccatgcagctcaaacaggccaactcggcgcagtggcgagacatgcagcacgtctggggggccacgtggagcctcaccccgggcccgctcgtcgggcccttctccgtgcggctgacgaccctgtcgggcaagcagacgctcacggcccaggacgtcatccccaagaactgggcccccaaagccacctacacctcccgcctcaacttcgcgtagaggccttctgccttggcccgccgcgtatttatcgttctgtgcagtttgatgtcgcgtgaaggggataagctggtatagtagtggataaacctggtgttcagggcccaggtagccctctccgaactggagagagagcgtctgattggtcggcgtgggccgcatgcttcctggaggctggaaatgggagctcgatccggtgaagagcggctggggaaccaaaggcgtgagcgtgacgtgactcctcttcgttttcgatggactcatgcagtgcttatttctgtgttcttctctcttaacttatctattgttgttgttatattttcgtgcccttggtacatgggctgtaacttgctggcacctatgcgcaccgtaaactataataatcatgtattgttcgttatgttagtcatcaacgactgttccccctacaaaaaaaaaaagaagcaaagaacgaa

SEQ ID NO: 275379 - DNA, 493 bp, Zea mays
ttggttattacccaaaggccatcactgcctagcaatgcagcttaccgcagaatacttttcgttagatcccactaaacgtgaattccctaaaagagacaacattcagttgggtggttattatcattatgcgatgttctctgacaatgtgcttgcaagtgctgtggttgtcaactctacaattgctgcatcaaaggatcctggaaggatattattacatattgtaactgacgcgttgaattatcctgcaatgatgatgtggtttctgacaaacccaccaactccatcagtaatccaaatccagagcctagatgatttgaaatggttgcctggtgatttcagttccagattcaagctgaagggggttcgggatccgagatacacttctgcactcaaccacttgcgtttttatttgccagaagtgtttccatctttgagcaaggttctactcttggaccatgatgtggtagtacagaatgacttgtctggattatgg

SEQ ID NO: 275380 - DNA, 526 bp, Zea mays
cggaattcggcactgcggctcgaggagaagaggaagaaccggctcaccgcggcagatccatacccagcagcggcggcgacggcggcggcaagcgagtcgtcgactaagcctccggcagtgaaagacgagggcgcgccgtgggtcggcgtgaactcggcgctcagcctcagctgaacaatctcatcgacggcagcctgcctacctatcgctatagggaaaaactagctatttcccggccgtaaaaatatgtacgtgtttggccccccttgacatttacaccagttaatggctgcttcagttcaggggaattattagctgggtagctaattaccatggtcggtttaattagttgtctgtttgagaattctttggccagaaccaagaagaattctttttttcttccttgctgatattcatcatatctgcgaggatacgaactgattaattagatctagtcgaactcatatatatatatatatatacccagtgtgtctttacaaatcacccgatggaacaggttatatgc

SEQ ID NO: 275381 - DNA, 457 bp, Zea mays
gctgctttatggtcggatatttcgagcagttcttgttctttcagagcacagcaattctgatcttgctgtggaattcggcaacttgacactcgcctactcgtacttgccgatagtgcttgatcggtttggtggtgcccaaggatttctgttccttcaagatcgcatggtcttcaattactggtccctcttgaatgctgataaggctaagctctggataaccaaccaggtgaaggaatcttggtcggatgtgcctctacatggtaacaacattgagtggtttgtgaaccaaggggatatgattaaaaaggcggtcagcaattgtccatctcaatatcaagataactacaggagaagtgtacgtgaaaataatctgattcgttgcagcagtgagatattttacgtacctcaacggtacacccgtgatttctcagatcttgtaaaaagtattgggagctta

SEQ ID NO: 275382 - DNA, 1665 bp, Zea mays
gcaagtcaaccgaacagacattcgctggaagctctgctcggagtgaggtcgctgcgcatctaccacacgatgccgccgcctctccgctgtctccttctcgccttcgtcgtcgtcctctccggcttcccccgtctcgcccaccccttcacggctctcgagtctgaccagatcgcccgcttccaggaatacctccgcatccgaactgcgcacccatcccccgactacgccggcgccagcgccttcctcctacactacgccgcttcgctcggtctccacaccaccacgctccacttcaccccgtgcaagaccaagcccctgctcctcctcacctggcgaggctccgatccctccctcccctccgtgctcctcaactcccacatggactccgtccccgcggagcccgagcactgggcgcaccctccattcgccgcgcaccgcgacccgaccacgggccgcatctacgcgcgcggcgcacaggacgacaagtgcctccccgtccagtacctcgaggcgatccggggcctgcaggccgcggggttcgctcccgcccgcaccatccacatctcgcttgtccccgacgaggagatcggtggcgcggatgggttcgacaagttcgcccgatcggaggagttccgcgccctcaacatcgggtttatgctcgacgaggggcaggcgtcgccgacggacgtgttcagagttttctacgcggacaggctggtgtggaggctcgtcgtgaaggcggcgggggcgccagggcatgggtcgaggatgttcgacggcgccgccgttgacaatttgatggattgcgtggagaccatcgctgggttcagggatgcgcagttcaggatggtgaagtccggggagaagggtcctggggaggtggtctcagtcaaccctgtgtacatgaaggccggcataccaagccccacgggtttcgtgatgaacatgcaaccttcagaagcggaggtcggctttgacctccgccttcctccaaccgaagacatcgagcagatcaagcggagggtcgaagaggaatgggcaccatctcacaaaaacctgacctacgagctggtgcagaaaggtccggcgacggatgtgtccggacgtcccgtatccacagcgacgaacgcgtcgaacccgtggtggctgacgttcgagagggccatcgcctccgcgggtggggagctgtctaagcctgagatcctgtcttcgaccacggactcacgctttgcgcggcagctgggcatccctgccctcgggttttctccgatgaccaggacgcccatactgctacatgaccataacgagtttctggaagacagagtgttcctgaggggcatccaagtgtacgaacatgtcatcagagcactaagctcgttccaaggctgattcgtaaaaaaaaaagaaaagaagaaggaaaagtggcagtgctgttgcgtggagtgtaacatagcaggttttgtaataattggttcagtcacaaacacgccaaaggaaacattccgaaactattgggatctgtgaaactgttgttgtgggaagaagactagcagctgggtcgtgtgatgagctgattgatgttcgggcttgttgcttgatatatctccaataatgcgtatatcccagacgttcaacacttgaaagtgcaagcgcggcttaggcctt

SEQ ID NO: 275383 - DNA, 547 bp, Zea mays
ctgagatcctgtcttcgaccacggactcacgctttgcgaggcagctgggcatccctgccctcgggttttctccgatgaccaggacgccgatactgctacatgaccataacgagtttctggaagacagagtgttcctgaggggcatccaagtgtacgaacatgtcatcagagcactaagctcgttccaaggctgattcgtaaaaacaaaaagaagaaggaaaagtgttgttgcgtggagtgtaacatagctggatccccaactctcatctgctgaatgaaggtgagagagttgcggcctagccagtacaggtttgtaataattggtccagtcacaaacacgccaaaggaaacattccgaaactattgggatctgtgaaactattgagttgaagcgcttcctctcgcccgccgtgtttcgggggcggaggtggatggatggctgtcgtttgttgtgggaggaacactagcagctgggtcgtgtgatgagctcatgttcgggcttattgcttaatatatatctccaatgcaatgcgtatcgcagacgttc

SEQ ID NO: 275384 - DNA, 589 bp, Zea mays
tcgctggaactcaaaattatttcaccggagggggaaaaattaaaggagttcccttgatgggtgtgacattattgaaggtggcattggtagtgatagtgttgtgaggtatgctgaagagcagttgatgatgagaaatcagcatcgcatcatccactggcaagcaaggctctgcaagttgaatgacatagttaaaaggggcaacaagtgtgatatcatcctcaactatcacaatttgttgttccaaaggatcatcttaaacatcagtgatacatctagcatatttgggaacttttcactgaatggcaaccaaatcgcaaagacatttccaaatttggatgcatctttggcattcaattttgttttcgaagccgaggagaaccaaagagttagtgatttacagtccttgcagaagaagacaatggaaacaagcttgctgcttggaaatcttattgatgttttagaagaaatcaaattatctaagttggagttagtaaaatctttacctccgctgctttttgttttggagtcccagacacgaaaacttggcctccacctgtctttcatgagttttaagagtggcatgaagatt

SEQ ID NO: 275385 - DNA, 674 bp, Zea mays
ggttcttgggtttcaactgaacccaactccaatgcacatgcctgggcttataataccatcatctgatgactcaaaggtatttctcacttactacaacgactccctagtgagagatgggacttcaggccgggtggttagctttgccggagttgctaaaatattagggggtctaaatccaaattatggaaattctgctccgaaagtaatgttctattctgctaggggtcctgaccctgaggacaatacactgtcaaatgctgatatcttgaaaccaaatctagtagcaccgggaagttccatttggggtgcttggagttcagttggattggattctgctgaatttgctggtgaaagtttcgcaatgctctctggcacaagtatggctgcgccccatgtcgctggcctcgccgctctaatcaagcagaagtttccttcttttagcccagcagctatagcttctgcactgtccacaaccacaactcttagtgacaggcaagggaaaccaatcatggcacagcgaacatacagcaacccagacttgacgcagtctccagcgacatcttttgatatggggaatggcttgtcaacgctaccgctgctttagacccggggctcataattgattgcagctatgatgatctcttctcctttctttgcggcataaatgggtctag

SEQ ID NO: 275386 - DNA, 638 bp, Zea mays
caggcgctgctgaaggcatggctgaagagaggaaggtatatgcttctgcagcggcatgggtcaccacagcaaggtcgtctcaggctacctctttgcctaacgactcggatgagaacgagtgcgtctgggacgcttcgctccctccgagtggcaatgttagccctcacagtagtattgacagcatgggtgtcgtcactgctatgagcaccctcaacagctgcacgagcacatatacaagcgcgaccatagctggtgaagcaatgctcaatgcggagaggaactgtgagagtgtcaagggtgttcgaggtgacttactagaaagcgcactagccagcatgagtccagcaagtgatagcactggtgttagtgatgacagcagctggtgccacatcactggacgtgccagcaagcctcacaaggggaaatgatcctagatggaaggcaattcatgctgtacgaactcgtgatagcgtgcttggaatgagccattttagactactaaagcgtcttggttggtggtgacattggcagtgtttacctctcagattaagtggaactcggtgctactttgcaatgaggtaatggaaaggcatccttggcagtaggaaaaagttaaaagggctcaaactgaagggaga

SEQ ID NO: 275387 - DNA, 481 bp, Zea mays
  unsure (1)..(481): unsure at all n locations
tgtaaaaacaagggagaacctcaatttggatgtccatattctttcctattgctggtgtgcagcctttgcattgacatgccttcatgcagccggttgtctagatggtttgaacatacattcaaatgagtttgcctttgaggattctgtttcaactggtgagatcgacagaaagatgcagtctccgctagacaaagttgaaaagttcaagagcatcagaagtgacgtggacagtacagtgccattcctatctgtttatattggagactcggttggagatttgctctgcttattggaggctgatattggtatagtcattgggtcaaccacaagtttgcgtagggtgggcaaacagtttggtgtttcttttgtcccattgttccctggtctagtagagaagcagaggcaactggcggaggatgatgcatccgtattcaaggcacggactggagtcctctatacggnttctagctggtcagaaata

SEQ ID NO: 275388 - DNA, 655 bp, Zea mays
tcttcaaaagaatcaaaatcacctgattattgttaaccggtttaagggcctgaagttccttcctaagttggaaaaggctccaaattctagggttgtcgactctggtgtcctgaggggaatgaatttagaagacatcaggaaagctggggagcggcttattcttcagggtggctgtaaaaatttctttcagaagattgtaaaaacaagggagatcctcaatttggatatccatattctttcctactgctggtgtgcagagcttataagatccgccttctcatcagccggttgtctagatggtctgaacatacatgcgaacgagttcgcctttgaggaatctgtttcaaccggtgagattgacagaaagatccagtccccgctagacaaggttgagaagttcaagagcatcagaagcgacgtggacagtacggtgccattcctgtctgtttacatcggagactcggtcggtgatttgctctgcttattggaggcagatatcggtatcgtcgttgggtcaagcacaagcttgcgtagagtgggcagacagttcggtgtttcctttgtcccgttgtttctcggtctagtggagaagcagaggcaactgacggatgaagatgcgtccgcgttcaagccgcggtctggagtcctttatacg

SEQ ID NO: 275389 - DNA, 388 bp, Zea mays
  unsure (1)..(388): unsure at all n locations
cgctgctcctggtcctggcggcggcgctgtccatgtccgtgtccgcggccaggctggggctcgccgtaggcgccgtggcgctggcggccgtggcggccgtcaacgcacacgacctcgccgcgcacctggctggcgtcgactgccgcgtgggactggcgaggtacgatgcccagctcgggctcgtggagttcctcgtgccggccgtgcacgcagccgggtgcgcgctcgccgccgccggcctggcgctgctggcctncccccactcccactcccagtcccagcagcggcacgcggcgaccatgctgctcgtcgcggcgctgctgtgggtgctgggctccgtgctcaactcctgccaggtgtacgagcgcgccgactgccgtgcgcagct

SEQ ID NO: 275390 - DNA, 697 bp, Zea mays
aagaagggagagagaggcggcggcgacggctagggttacgcccgccgaagttgcccacgcgggaggctcttcaagcttatgttctataacatggaggaatccagtttcagcaaaccaactgtcaaaagacttttggaggacgagctacgaaagctaaaacagctgaagcttccaaatgatgaggttgagagaatattagctgacctgggacatggtgcctgcctggacaaaagttcaacccagaacagcaaagcgaagaagggagaccaaaatcacatcagaggtatcaccaccacggctgctccatctggatctttggatcccactgcttccaactgcatgaaagaagcagaagaaaatgagcttgaatttgccttggcagatttcttaggacggattcatagaaattgcaacaataatggggagttatgtacggagatgaaagccctaatccaaacaaagattgcagagctagataatcctccgtgcacatttgcttatgagcagcaaacttcacggggtgacgaatatgatactgctggtggcaaacatcgatgtagcaggagtaaaactcagcccaaaaaattcagagatgcgctggagatgctaagctcagacaccgaactttttttttaagaagtcaaattcacgtattttggagagcgcccaaagaaaccaaaacagactgatagggagc

SEQ ID NO: 275391 - DNA, 517 bp, Zea mays
gggttattccgcttcctcgtttacatcgccgcagccgccgtaccatcgccaccatggcctccgcctccggcacccccaacccagtcgtgctagggtgcggcggcatctccgtcgactacctggccgcggtggcatccttccccaaccccgacgataagatccgcagcctcgccctcaaggtgcaggggggcggcaacactggcaacgcgctcactgcagctgcacgcctcggcctccgtcccaggatcatttccaaggtagccaacgatgctcaaggaagaagcatcctcagcgaactccaaactgatggcgtggacacatcctacatcctggtcgcagagaacgggaactcacccttcacctacataatagttgatgaacagacgaaaactcgtacatgtatacacactcctggttctcctcccatggtgccagaagagctcacaaaggcaaacttgtcgtccgctttagatggcgtggacatcgtctacttcgatgtacgattgcatgacattgc

SEQ ID NO: 275392 - DNA, 1088 bp, Zea mays
tttcctctcacgcgtccggcctggatatataccgggggcgatgcattcaaaactcctgtggatgaccaatcccatctctccctcttttcccggacatcgatcccagtctcttcttcaagcaagagatggagctttccttggtcgggctccaaaatgctaggaaaacatcacttgcagcagctcgcagcgacacccccgcctcctcatcatggaagctacaagaacactttgagtaggtgaagaggatttgcgacactaccacattgtctttggccatgcatcatctcagtgataagataacaagccaactggatatttcaaaattgactgacaagctacggtaagggaaggtagactcaagtgcactgacaccaaaggagaagtacgaaacctgggaggagattaaaattatgagtttcacaaagacagtttcttcaatgtgggcaatgacattgcttagcttgtatgttagagttcaggtcaccatattaggcaggcatctctacttagattttgcccagggtacaaatggtgcacagttacaggcagaatctgacacctttagtgaaaatggacacaggagctttcttgcaatggctgattatcttgtcactgacaaaatcactgcattcctagcgcaaatgcaacgtgcagcaactgaagtccttaaagagaagcaactgaaagaccgtatgaacatggaccaagtattgcagacagtattacaaatattggacatgttcatggccctttctgaagataactcatggataaattatcttgtacctgagaatccccctgtttatgcacagttgatggctgtgtccagtagtggctttgatgattcatcactcctaaacgatttcagaaagctagaccaactaatgtctgagacacggatagtactggcaagtgatgatttcagaaatatcatggagaggtcattgaggaagatagcagaagtggtggtaggggacctggctgtgcagactgtaactccaggatcgggattgcccttagcaacgctcgtgcccaaagttggtcatctgagttccccggttgcttgaggagccaaacaataacaaata

SEQ ID NO: 275393 - DNA, 501 bp, Zea mays
gataattttgtggactacaaagaccggaaaattattctttcttcaggcagtgaaaagaagcttgaagaggctgcccctgggcttattttacggaagagaaagtctgctgacgagtcagttgccagcgaggcaaattcatcttcggttgaaagtgaagcatcagttgctgatgctgtggcccttctgcttaagcataaacgtggtctacaaacctcagaagaaatggagaatgagactgaaccatattctagcaagaccgaagggaagaagtcgaaacaaaaacgtgtattgggcccagcaagaccagatttccttgaagccagacaagactctgaaacatgggtgccacctgaaggtcaaactggtgatgggcgcactgcattgaatgaccgtttgggttattgaaaagctcttccagcaacagttcccttgtggagaagtgcagtatcgtgcctatggttttgagcctgtttggggctccatattctgtgaagacaacgc

SEQ ID NO: 275394 - DNA, 351 bp, Zea mays
aaatgcaataacattttgtacctgtgaaaaggcaaatcagagaaggctagtggccgaaacataaaagcaatagtcgcactcttgttagggctctgatctgaatgtctaatcccacaggacacattttgtaaaaaggcggtagcttctttagccttattagactgttaatacactcaactgaatgatgtccagttccatcaacaaggcttcaccgagactgtcgagtgactgatcaggatcatgttttttttttcacagtcttgcttctgtgcagttgcctaataaacccattcgttgtaaacaagccagttctaactttaaaataaagggcctgtgcatggcgctctaaaa

SEQ ID NO: 275395 - DNA, 619 bp, Zea mays
  unsure (1)..(619): unsure at all n locations
cccaactcttcatgacagctactcaagaagggaaaagatcagaatcgcaaggccagattcttagggtggaatgctatagcttaatgccctaatctttatatgcctcttcttatatctgcacttccatgggcaccgggcgacactaaattcacaagaatacccctccacctcaaggtggtacggagttctgtgtatcacaagagacatctaggttgacctcactcttcttagtgttcatgcccactacgcaagacaacaccgcaacgccgatggagttggaagatttcatcagtttcgattggatctggatgagatggactctgcttgtaaggagagagagagagtgcatggcttgggaggagcatatttttgttcatccttttcatgagtcatgttacctgccatgtcagattatgtaacttcagatatttctgtttttgttagaaaagtaccaaaatagtttcacttcatggctactctcagatgtgttattgctgctgccactaatcatataagggtaacattgtatttgttagccaacaatttttgagatattaaagttggtgataatataattgttgtttgcttctaaaaaaaaaaaaaaaaaaaaaaaaaaana

SEQ ID NO: 275396 - DNA, 411 bp, Zea mays
ctccagcaaacttttcatcatggatgaactggatgaacgggagttggtttttgcatgggaagataaagacaccatcattgatcagcttaacaggattgatctctctgacagggaggaccatgaatcgagccaggaacttggaggctcgttaacgagatctccagatgcagcgatcggtattcttatgcgcgtcctaaagaacgccccaggcctcagggaaaggctactgacagtccccagtgctggcacagttcctcaagaaccttcttcactccagagggtaatgaccgaggaacatggcagcggcgcatcaagctctgcaggggtgccttcttctcttctgaggtcaaggacagcggcggacacgctggaggagctgaacaagtacaaagagattagagaatcaatact

SEQ ID NO: 275397 - DNA, 1185 bp, Zea mays
agacgggttgactctttctagccgcatcaggagcggctattcttcttgtccggctatccgttccaggacttcggattaagaggcgacgagatgatgcgacgctgcgtctcggcgttggcccgccgccgccgtccagatcgcacggttgatactatgaaggcacgattccaatgtttggttaacatttcctcttcaataagggacactgacagccaaaggtgctcaagtacgtgtgctacttcctgtgctaccgatccagatgttttatcgagagaaacatcgtcatcagaaatgcttgttgattcatttgggaggttccacaattacttgaggatctccttgaccgagcgctgtaatctgaggtgccagtactgtatgcctgctgaaggagttgaactaacaccaaagtcagagcttctgtcacatgatgagataattcgaatcgctgacctttttgttacttctggtgtgaataagatccgactaactggtggagaacctaccgtacgaaaagatattgaagatatttgtttgcatctttctagattgaagggactgaaaactcttgcaatgaccacaaatggaattgttctttcaaagaaactcccaaagttgaaagaatgtggactcaatgctttaaatataagtttagatacactagtacctgcaaagtttgagttcatgacaaggcgtaaagggcactcaaaggtcttggaatcaatagatgctgctgtagaacttgggtatagccctgttaaggtcaactgtgtcatcatgcgtggtataaatgatgatgagatctgcaattttgttgaattgacgagacacaagcccatcaacgttagatttattgagtttatgccatttgatggtaatgtttggaatgtgaagaagctagttccttatgcagagatgttggacaaagtgcggcaaagttataaaggagtagagagacttcaagatcaccccacagacactgcaaagaatttcaggattgatggacatgttggcactatttcatttattacatcaatgacagagcatttttgtgctggctgcaatagattacggttattggctgatggaaacctcaaggtgtgcttatttggcccctcagaggtaagtttgagagaacccatccgtactggtgttgatgacgctggactgaaggagataattggtgcc

SEQ ID NO: 275398 - DNA, 473 bp, Zea mays
  unsure (1)..(473): unsure at all n locations
cccaactccctnggtgaaccacctatattagatgatgctgatgtggcgccctcgcgtccgcgctttgttgttctacgagggcagtgtttatactattatctgaaatgtacagatctgagcccacaggaatctacactcttatgtgatgttgttgaagtagggcagcttccagactttgtgccagaagatgaaaagacgagatatgcgttttacctgttgacccgtcaagggttgaggtttgaatgctccagtacctccgaaatacaggttgattcatgggtaagagcactgtcaagtgactgcaaattgcaggatggcgctggtgatgataagatgatgaatacgaggagtagccaagtagaagctgggtcatcatggtagacgatgtatggagtgctgtacagtacaatagtcaatgaaatgtacatacattacatgcatgtaaagggagcaacatatgtacgtagtagacg

SEQ ID NO: 275399 - DNA, 1035 bp, Zea mays
tttctcgaaacctttgttggttcaatgtcatcaggtgtgggagttggatttatctctgctcttctattcaaatatgctggattggacgttgataatctgcagaacttggagtgctgcctttttgttctctttccttacttttcgtacatgttagcagaaggacttggcttgtcagggattgtttctatattattcacagggatggttatgaagcattacacatattccaatctttcagacaactcacagcgctttgtttctgccttttttcatttactatcatctttagctgaaacatttgtgttcatctatatgggtttcgatattgccatggaagagcatagctggtcacatgttggcttcatcttcttctcaattatattcatagttgttgcaagggctgcaaatgtcttttcttgtgcatacttggttaacatgtctcggccagaacatcgccgtatacctgtaaaacatcaaaaagcactttggttcagtggtcttagaggggccatggcttttgcacttgctctccaatctgtgcatgaacttcctgaaggacatggaaaaacgatattcaccaccaccactgccattgttgttttgacggtacttctcattggagggtcgacaggaactatgcttgaatctttggatgttgttggagatgaaaacacatcaagagaaaattacgaggacaacaatggttacatgcctccaagttatgaagaaggaacatcctctggaggaggattgagaatgaaactcaaacagtttcacaaaagcacaacatcattcactgcccttgacaagaactatctcactccattttttaccagtcagacagatgatgataacgatgacgacttcagtcagcaaccccaaaaccgaagactagctttttatgatcaatagcggaatttgatactctacatatcaagctaaatacacggagcagaactgacgtgcatgactatgtctatgtgtgattgggtcgaacaaaatatagcaagagcatacttagttgagttgcatatg

SEQ ID NO: 275400 - DNA, 675 bp, Zea mays
aacgcgtgggcggacgcgtgggcggacgcgtgggcggacgcgtgggcggacgcgtgggcggacgcgtgggcacaaacgcgcctccgtaccatccgtcgccgccggcgcaccgcgatggctgcctccgccacggccgcgaggcctctcgccgggaccgccgtccctgctcccgctctcggcgcggacgcggcctgccagggtcgccttgctctccctgattcctcctgctccggccctgcgccttgctctcaggcgcggcgcgtggctcccactcccggagcgcagccggtcggtgcggtgcctggcggctatgagcccggagatgcgggcgacgctggacaaggtcgtaggctccagcaaggtggtgctgttcatgaagggcaccaaggacttcccgcagtgcggcttctcccacaccgtcgtgcagatcctgcgctcgctcgacgtgcccttcgagacgctcgacgtgctcgccaacgaggcgctccggcaggggctcaaggagtactccagctggcccaccttcccgcagctctacatcgacggcgagttcttcggcggatgtgacatcaccgtcgaggcatacaagagtggagaactgcaggaaactctagagaaagcaatgtgttcgtagaaaaaaatgaacaataagcagatggcatacaattaatcaaa

SEQ ID NO: 275401 - DNA, 385 bp, Zea mays
ctttattaaagcagtagcagggcgccaggctgtttgctgcatctgctgcaatctggtagcataccatctgggttaaagctggatgattaatcacaaattgcagaaaacaaatgtattccaaaccaagtgcactgagcatttggtcatggattgcctacaacttcggtatctccagctcaacattgcatgaattgtacagcaaatactataacattctgattaactgtatgtcgtgcactcctggttctaatgtcttgtctctatgagcacattgctttctcaaggagtactccagctggcccaccttcccgcagctctacatcgacggcgagttcttcggtggatgtgacatcaccgttgaggcatacaagagtggagaactgaa

SEQ ID NO: 275402 - DNA, 419 bp, Zea mays
cttcgcccacgcgttcgcgcacaccttcggccacgccttcgaaacatcttcgcttggttgaggatggaattgccccacttcctaattccggtggtttttaatatggccattctggacctgttgggttataccctaccgctggatctaggactaaagccccgtttgtttccttccaagattatataatccagctcgtggattatataagcacctattgacctgcttatagattatcataatctagatatccggattatataattcacctaataatctatattgcttgtttaactctcaatttatttaagctagattatataatatagatggtaaacaaacaacgactaaaacatattttctgcaacataaaatttctgagttcacaagttcaacacagagtacagaatattatatagatt

SEQ ID NO: 275403 - DNA, 1066 bp, Zea mays
cccacgtgtccgcccacgcgtccggcgcggccagcgtggcgggagcagctgcggtgaactccgtggtcccagaggtcgccgccgtggggctgcacaattacgtcgcgggccacgacgaccccaccaacctggacaacggcgaggtggaggcaatcgcgaagaaatatggagttagcacacaggatgacgccttcaaagcagagctctgtgacttgtatgccaggtatctttactcagtacttcctccaggagatgaagatctcaaaggtacagaggttcaggcaattataaaatttaaaagtgctcttgggcttgatgatgtagatgctgctaacatgcacatggagattggtagacgcatatacagagagaggttggaaacaagtgatcgtgatgctgacatggaacaaagacgggcatttcagaagttaatttatgtgtccaatcttgtctttggagatgcatctgtattcctacttccttggaaacgtctgtttggggtgactgattctcagattgacattgctatgagggaaaatgccaagaatttatactcggtgcagctcaagtctattggaagaggtcttgacataggcacactcattgaagtaaggagagcacaacttgcatataaactttctgatgagattgctgctgagatgttccgtgagcacgcgaagcagctagttcaagataacatttcatcagcattagacatcttgaagtcacgtattccggatagtctaactcaggctgtggaagaagtgaatattgtaattaaatttaatagtttgcttacaacattaagcaaacaccctgaagctgataattttgctcgtggtcttggccctatttcattagctggagaggatgatcacgataggagagctgatgatttcaagatactctataaggcctatgctacagaagtagctttcagatggacttgtggatgataagaagctttcccctctggatgaactgagaaacatatttgcgactggggaagcgggaagcagaaggaatacttatctgatgccaaagctcacatatacagaaggacact

SEQ ID NO: 275404 - DNA, 541 bp, Zea mays
cccacgcgtccgatatgatcaaaacgaatacgaagagttgtggagaaaagcgactgaccggaagcctgtgagcagacaaagacacttgcgaagtgcatcaaagcgctatgttacagaggcaatcgggctgtcatatctcgattattaccctgatctagccgtacaaataaagtcatctgatcgtgataagagactgagcctactacgaaggttcttcttctggttggagaacttgtgccatgagggagcctacatgccctggatctccaaacctctagcttgcaaccccatttcaccggatggatgaatatgaaccgaccgcccactctcatcctcaagacacacgaagatgagccctaggggtgagcggttagcagagatttgcttgcagcatccctgcatctctgatgctacttgactgctccttgtttcgatgcgatgcaaagctgagtctgtaatcttcagtgtctatgcagtactgcagttatttttctgcaggctaaattatacaacatggcaacaaatacagcacggatattgc

SEQ ID NO: 275405 - DNA, 777 bp, Zea mays
atgcgttcgcgtgggcggacgcgtgggcggacgcgtgggcgcggcccgcccagacccgcggtcctccccttaacgcacctcatcgagtaggggtcctatcatcgaggcatcgttcagagacagaggctggtcgatcgtcggtgactgatggcgatggcggcggcgcaattggaggcggaggaggagctgcggctggaactggaggcggtggcggcggtgtacggagacgacgtccgcgtgctccgcgacctcccaccgcaccttcttcgtccacgtgcggccccgcaccgccgacgacacctcgcagcagttcgtggagctttttcttggcattaaagcatcttcacagtatccggaggaaccaccacatatttatgctgtggaaagtaagggccttgatgagaaccgacagatatatcttatcaccagcatccagaacaaggcaaacgaactttcaaactgtccaatgcttgtgacgttatgtgaggaagctggagagatcctctcgaacatgaatcatccagcaggggattggccattgtgtctatatcctttaatgggagaggataaggttggctcggagttgccatttatgaagttgatgtcatgctaccattgcttccacagggactgcattatgagatggtgggaatggcttcaacatggtgacacacacccagaggagcccactactggagctcatactagcattataatgtgaatcatccaagacgattttgtactgtatgccgcacagtgttcgatgagaaggatatt

SEQ ID NO: 275406 - DNA, 627 bp, Zea mays
cccacgcgtccgaaagcattcacccgagcaaagcagtgcggagagacgatccagcggcatttcgcattcgacgaacgaagcgccgccatctgatccgacacgcagcgcaatggcggcgggactgaagaggccgtcgttcgggacgcgggcgtggcggctgctgcggctggcggtgctgtgggcgcggaagggcggcgcggcgcacagcctgcgcctgcgcctgctccgcacgctccgccgccacggccacggcctcgccggcctgggcggcgcgcgcggcgaccggctccgctgcggcgagcgcgagtactccatcgacgagacgccggcgttccggttccgcaccccgtccgcgcgcgtgctccgcctcatcccctgcatcgcgccggccgtgccggacacgccgggcctctacggcgacgaccgctacttcttcagcgccgccgccgccgcgtgggagacgggcgccgccgccgggtgctgctacgccgacgacccacggagcgcgcgccacgtcgaggaggaggaggaggacgagctgagctgctgtggcgatgacgagcagctgctggagcgggtggtggcggaggcgtgccacgcgagcaccgcaggtacggtggcagggga

SEQ ID NO: 275407 - DNA, 547 bp, Zea mays
gccacgcatacgttcccctattgtatggcttcatccaaagccactactggggagtgggtttcttgaggtacttccaagtgaagcagctgccgaactttctcttggcctcaccagtgctttctctcgcggtttattctattgtccattacgcaaaactgcttcaccggtgtttccagagaactagcgtccacacgcagattatcactgctctagagaaaaggccagttgtgtcgtatagaagatcagatgacgcgacaattttgagtgaacctcctgctggactcaccaagaaagcacaagggagctctaaggctaaacagagaaaaccagttgctaccgagatagctcctgcgacattccatgacagtaccacgccagctaaccaaaacatcgaagaggatcaggacacgtgcttcatactactacttccattcgttctgcatctggccttcatggcattcacagccttgttcgtgatgcacgtccaggtgtccacacggttcctatccgctagacctccggtttactgggctgccgtgcacgttct

SEQ ID NO: 275408 - DNA, 536 bp, Zea mays
aagcattcggatctgaaatcctaaccggaggtgagacccccaatcggtgatccaccgcttgcccgtcggtaccatgtccgctggaagcgagaggccgtacgccttctcgcccccgtcggcggtcccgggccccttctcccgcggctccggctccggctccgctcccaccacggccgcgacagatagcactgggaggagctcgtcctccgtggcgccgacgaagagccgaaagccaccgttccggcccgccgtggacgacacaaagcccgtcctccgcgatccgatatcacgctcggacctggcggtcaccgagcaggtcgtgctgcggctgccgccgttcccctaagttcgcgccacccaatgttctttgctcaaccatattaatctaaagatggtgcccttcctgcgcatgttcgtcaactcgtcagtttgtcaattggaaactttgcccgtctaattatggttctggaccattagtggtttttgtattcaattagtaaactgagttatatagaagtaatgataattggttatct

SEQ ID NO: 275409 - DNA, 477 bp, Zea mays
gattgggacagtggtggcacagaaggaatctgaaccagagaaacaggagactcgccaacgggttgaggaggacaggaaacctcagatcgaagcagccattgtcaggatcatgaaatcacggagggtgttggatcataacagcattgtagctgaggtcaccaagcaattgcaagcccgtttcttgccaaatcctgttgtcataaagaaacgcattgaatctctgattgaacgagagttcttggaaagagacaaagtagatagaaaattatatcgttatcttgcatagaaaactgtcatgagataattcattagcagttggcatccttctgctcttgtaaaacggttttctttatgctcgagttctcttttatcagttgcatttggccgctgggttcatagatgttcaaacattggttattgttgaccgcgaactgaagtggtgattgtattgaagtggttcatagatgttcaaccctt

SEQ ID NO: 275410 - DNA, 620 bp, Zea mays
cccacgcgtccgggtccagcttcgactggctcgcagtggcaactggcaggtaggcacacgcgaagcgataaggtcggttaagccgtaacagtcgttgatgtcgccgccgccgtcgtccctcgtggtgctcccgctcctcctccccctcctcctcgccgctgtatcccacgctacggctaatgcggccggtgccggcgcccctcccccagtgccgacgccgtggccggagcagttccacgcggtggtcttcaccaatctcaccgagagcggcggccggctgcagctgatcgacctgtactacgactggcccaggggccgcaacctcaacctcatccgggaccagctctccagcgacccgctctacgacgtcgagtggaccaacggcacctcctacttcttcgactccgggtcctgccgcaccatgcgtttccccgtggggatcctgccgcctgactggctcgccgccggcgccgtctatctcggccgcgagcacgtcgacggcttcgactgccacctgtggaccaaggtcgacttcgtctggtactacgaggaagtcgccaccggccgtcccgtccgctggaatttcttcaatgggatgcagcagcatgtgatgagctttg

SEQ ID NO: 275411 - DNA, 380 bp, Zea mays
ggcagttgctgtagagcgatgagcactcaggtaactggagaccaggtgcaggagtggagaactaaggatcaggccaggaaggcaggcaatccatggcgatcgacccgggagaagttacccaagtgtgagcaggtcgactatggaagtgaagttgaaggctgcgcagatgatgagaaccctggcaagagggctgctttagttactttgggtggaaatgaatactgcggcgacgaggatgagagagttcaagtgctcaccattgtcaagaagggcgagcatgcagatgacattgtcgaccggattaatcctggcacagttgcagggtacagtgaagtgaagggtgctgtaggtgcttctgccgtcactttttgctgtgcgac

SEQ ID NO: 275412 - DNA, 772 bp, Zea mays
gtttgggagcaccaccggcggaggggccgctgctgctgccgcggcggcggcggtcgttgacccgggtgcacccgccgctctggtcgggccgtccctccaagtcctatcagccctgtcagatcagaacaacaaaagaattgtccttgcattgcaaagtgggttgaagtcagagatactgtgggcactgaatgcccttacagtactctcatttaaggagaaggacgacctccgacgtgatgcaacacctctcgctaaagttcctgggctcctagatgctcttcttcaagttattgatgaatggagcgatatttcaatgcctaaggaccatacgaaaccacccagactaagaactttgggtgccaacacaacactctcgggctttggccaggagaatatggaaaaagtatactctgacactgccactacctctaatgaccaatccaaggcggaagattccagtgtcacaaagaagcgcgctgcaagcttttggtttgatgaggatgggttgtttaacaacgatgatgaagggagggcggaaaggcagcagtgtgctattgcagcctccaatataatccgcaatttctcttttatgccagaaaatgagattatcatggttcaacataggcattgcttggaaactatatttcattgcttagaaaaccagaatagaggtaaatattgaaatattgtcctgcgtctttgttttcttagtttatagattaacttggtgatggtcaaatgaggctatgtgaatgggtttggcacttcaaat

SEQ ID NO: 275413 - DNA, 1850 bp, Zea mays
gaccggtccttaattcctggttcgtcccattcgaacgatctgcttaccattgccaaactgtccgtgcgcctacactggactaacaatagaaatcgtgccgtcttagctccgattgttaagcttcaaccgttacctattgtcccttgatctgtttctgccgcctacactggacgacgcttcatgcatacgagatcgaaggtgacaggggaggaaggaagaggctgaaagggcggtggagagagaaagactataagggcgagctgagtcccttgaggatgccgtcaagaaaccgcgtggagaggagggcgatgagatgagggatgctggccgcggtgatggactacttcagctcctgctggggcccgcgatcgggcgccgggcaccggggcaagggctccgacgccgccggccggcaggacggtctcctctggtacaaggacgccggccagctcgtcactggggagttctccatggccgtggtgcaggccaaccagctcctcgaggaccagagccaagtagagtccggatcgctctccctggctgacccgggcccacagggcaccttcgtcggcgtctatgatggccatggcggcccggagacgtcccggttcatcaatgaccacctcttcaaccatctcagaaggtttgcaactgagcacaagtttatgtcagcggacgtgatccggaaagctttccaagcaactgaggagggctttctttctctagtcagcaaggaatggtctttgaagcctcagattgcttcagtgggctcctgctgccttgttggtgtaatctgtgctgggactctctatgttgcaaacctgggcgactcacgtgcagttcttggaaggcttgttaaggcaactggagaggttgtggccatgcagttgtcatcggagcacaatgcgtgctatgaggaagttagacaagaactgcagtcatcacatcctgacgatccacatattgtggttctcaaacacaatgtttggcgagtgaagggtctcatccagatctcaagatctattggagatgtatatctaaagaaaccagagtacaacagagaaccacttcacagcaagtttcggcttcgagaaaccttccagaggccgatccttagttctgaacctcaaattactgaacatcgaatacagccaaatgatcaatttgttatatttgcttctgatggtctatgggagcacctcagcaataaggaagcagttgaccttgtccaaagtagtccccgcaatggaatcgctcggagactagtgaaagccgcgatgcaagaagctgccaagaagagggagatgagatactcagacctcaagaagatcgaccgtggtgtgagaaggcatttccacgacgatataacggtcgtcgtggtattccttgatttgaatgccatgagcaaagctagctggagcaaaagcccctcggtttctctccgagggggcggtgtcaccgtccctgcgaagtccctcgcacctttctcagctccggcacggctgaacagcacctactgaagttgctaccactcttgaaaggaagaacacagtgcagatctgcagtggtgagagagaaaaaagaacagcaaccaagtgtagcgttacacttacacctgctgtgttgttgctctttgcaaaactactgtctagactccgcctggtaattagtgtactgatagcgaggtaaaaaaagttagattatttgttagcgacacacatcctttcaccttctcttctctccctcgattcctatcccttttctcttcatccttgagagaacaggtggatgtaaattgttcagaacatgttttcccttatagtccatcatatcccgctttttttgtcctg

SEQ ID NO: 275414 - DNA, 654 bp, Zea mays
  unsure (1)..(654): unsure at all n locations
tcgtccacgcgtccgttattagggttttttttgtctccccagatttgcgcctgttctcacctgtgcgcatactagtctctgcatcagagagtagagacctcggagccgatcttcaacacgcagattgggcagagctgcctgccggagggagagtggagagagagagagagagagagagagagagagctcaaggggggcaaaaggagtttttttttatccagcttgttagcttgattctctttgatccgggagagcagccgccagtccaactaatcctagctattggtgtgccggggctttgattgctctccagatccgagccacctgctgggtggactccaggaatccgagcacgaagttgacaggggagttctcagggaaaagttgcgcaggggaggaaggaagagcctgaaagggcggtgcggagagaaagactataagagcgacctgggtcccttgaggatgccgtcaagaaaccgcgtggagaggagggcgatgagatgagggatgctggccgcggtgatggactatttcagctcctgctggggcccgcgatcgggcgccgggcaccggtgcaagggctccgacgccgtcggccggcaggacggtctnctctggtacaaggacgcccgccaggtcgtcactggggagttc

SEQ ID NO: 275415 - DNA, 753 bp, Zea mays
cgggctcttctattactattgggggcttaccctcaatctctacccttggatttgcgcttgggctcgtctggccgcagactagtatccgcaccagagaggagacacctacgactccgacctgctcttgcatatagattgggcagagagtgacagagccccccccccctaaagggtcgccaaaaggaaatttttttttaaatccagctcttaagcctaacggtctttgatcccggagagcagccgccagcccaactaatccttgctgctggcgcgccggggctccgattgcgctccagatctgaggcacctgctcggtggattccaggaatccgagcaccaactcgacaggggagttctcagggtaaaggaagaggctgagagcgcgttggagatttggactataagagcgagcgagcgagctgggtgccttgctgccttgaggacgccgtcaagaaaccgcgtggaggggggggagggcgatgagatgagggatgctggccgcggtgatggactacttcagcacctgctggggcccgcggtctcgtgcggggcaccggggcaagggctccgacgccgccggccggcaggacggcctcctctggtacatggacgccgggcagctcgtcaccggggggttctccatggccgtggtgcaggccaaccagctgctcgaggaccagagccaggtggagtccggatcgctctccctggctgactacggcccgcagggcaccttcgtcggcgtctatgatg

SEQ ID NO: 275416 - DNA, 535 bp, Zea mays
tttttattaggttttttttgtctcattggatttgcgcctgtgctgctcacctgagcgcatactagtctctgcatcagctgcatcagagagtagagacctccgagctgctcttcaacacgcagattgggcagagccgcaaggtgcctgccgggagagagtgaaaagtgagagagcgcgcgctcaagggggccaaaaggaatttttttttatccagcttcttagcttgattctatctgatccgggagagcagccgccagtccaactaatccttgctgctggtgcgccggggctttgatcgctctccagatctgaggcacctgctgggttggattccaggaatcctagcacgaagttgacagtggagttctcaggtaaaaggggaggaaggaagaggctgaaagggcggcggagagagaaaggctataagagcgagctgggtccctcgaggatgccatcaagaaaccgcgtggaggggagggcgatgagatgagggatgctggccgcggtgatggactactttagctcctgctggggc

SEQ ID NO: 275417 - DNA, 496 bp, Zea mays
ggaattcccgggctgaagttgctaccactcttgaaaggaagaacacggtgcagatctgcagtggtgagagaaaaaaaaaacagcaatcaagtgtagcgttacacttacacctgctgtgctgttgctctttgcaaaactactgtctagactccgcctggtaattagtgtactgatagcgaggtaaaaaaaagttagattatttgttagcagcggcagtgatttgacatctaaggaacaacaacacggtgtccaccgattctgctatcctgatggctcgcggcagcctggctggtcggcacacgacacgaagtgaagctgttttactggcggcatctggctttgttatctcatgggacagtgatccacaagagtaagggatcagctcaatccaaagtcaatagatgttccttataaaacatagaggtacagatgttctcatcggctatgtgtatttggggaaaaaatcaatataagccgtgtttggtttttagggcct

SEQ ID NO: 275418 - DNA, 568 bp, Zea mays
ccacgcgttcgcaagaagctgccaagaagagggagatgagatactcagaccttacgaagatcgaccgtggcgtgaggaggcatttccacgacgatataaccgtcgtcgtggtgttgctcgactcggatgccatgagcaaagctagctggagcaaaagcccctcggtttctcttcgagggggcggtgtcacccttcctgcgaagtccctcgcacctttctcagctccggcatggttgaagagcaccaactgaagctgctgctactcttgaaaggaagagcacagtgcaggtctgcaggagagatgaaaaaagaacagcaatcaagtgtagcgttacacttgcacctgctgtgttgttgctcttcgcgaaactactgtcttgactctagactacgcctggtaattagtgcactgatagcgacgcaaatcctttcacattcttttctctccctcgacatgagatgagaattgagatactccattcatccaggaaaataggaccgattatggagaaaagacaaaatttaaccaacaattactcaatgtatgtgtaagtttaggatacccctt

SEQ ID NO: 275419 - DNA, 473 bp, Zea mays
acggacgcgtgggcggacgcgtgggcggcgtcacccttcccgccaagtccctcgcacccttctcggctccggcacagttgaacggcacccactgaagctgctactgctcttgaaaagaagggcacagtgcagatctgctagagatgatgagagaagcagcaatcaagtgtagctgttgctcgtacacctgctgtgctgttgctgtttgcaaagctgccgtcttgactccgcctggtaattagtgtactgatagcgaggtatagaaattaggttatttgttagcgacgcaaatcctttctttttttttcttctccctctgttcttatcccttttctcttcatcatggaggaaacaggtggctgtaaatttgtccagaacgtgttttccctaatagcccatcatatcccgctatttttcttgttgatatgaaggctggcagcatcactgctcaagataatgtttggggcgcatga

SEQ ID NO: 275420 - DNA, 736 bp, Zea mays
cgcacgcgtccgcggacgcgtgggcttacgcgtgggttccttcgtaagatggtgtgcgctaattgatatagagagctcattgatttattatccaaacacaaaaacgacctggaaggattcatgatacatgtatatggaaatggcgaggactctgaagctgtccagaacgctgctaggaaatttgatttgaacatcaattttttcaagggaaaggaccatgcagatgattcactccatgggtacaaggttttcgtcaatccaagtgttagtgatgtgctatgcacagcaacagctgaggcccttgcaatggggaaatttgtagtctgtgcagatcatccatcaaacgatttttttaagtcattccctaactgcttaacatatagaacttcagaggaattcgttgctcgtgtcaaagaagccatggctacggaacctcaacctctgacctcagagcaacggtacagtttgtcatgggaagcggcgactgagaggtttatggaatactcagagcttgacaaagttctgaacagaaatcgtcaccctggacgaaatgggaaggttaacaaagcaagaaagataccgttacttcctaaattgtcagatgtggtggatggtggactggcatttgctcatcactgcctgactggtaacgaaatcctcagattagcgacgggagcaattcctggtacacgtgactatgataaacagcagtgcatggatctgaacctgctgcctc

SEQ ID NO: 275421 - DNA, 429 bp, Zea mays
cggtccggattcccccacgcgtgcgcgtctttcgaggttcatgggaacaattttatggccttggtattggtctcagtggagcaatcggttggggcttgtggacctatgatgtagttagcagaacatgtgagctccgggtatctattgcctttgttttgttaagccattgagtcaagctgcaattcttaatgaccattttacttcaatcccgttttcttcagttctgtgtttgttctgactaacgatttgtattcaatgtttttttctgtctttcctaaagctcttaaaggcaagaaaaaattgcacaacgaaaagcacaagtctcgatctgaaaggcctcaccgccaatctaatatcaccgaactggataaaggcaaaaaacgacctgcacaatcctccaaatccgatctgcctaataaaagatctaag

SEQ ID NO: 275422 - DNA, 949 bp, Zea mays
gacagatcccgcaatactcacagggccctcttctctcatctctcactccctcgctccgtctaccagtaccaccacgtccctcctcgtcgacgatctcgtagcggcggcgcacatggcgagcgacggcgcggcggctacgccagcgaaggttaccccaaagaaggccaatctcctcgacccgcactccatcaagcaccttctcgacgagaccatctccgaggtcgtgaagagtaagggctacaccgaggacacgcggctgggcaactggaagctggggatcggagccgccgtgattgctgtcgccctcctcgctcagttttaccccaagaagttcccgcagaaccgcgatttcctccttggctgcatcgccctgtatgtggtgctgaatgtggtgctgctgatccttagctacaccaaggagaaggatgccatcctattcacgcaccctcctatgggttctttcagcagcactggcctcactatttcttctaaattaccaagattctcggacatgtacactctcacaatagcaagtgcggatccacagtctatctctgcaaacaagccagttcatttcactaagagcgtaacaaagtggtttacaaaggaaggagttcttgtggagggcctgttctggaaggatgtcgagaagctgattgatgactacaacagtgagcgcaagagtaaatgaattggtagctcgtgtctctggccatctggggagacatcgctgtctagagaaatccgtcaaagtttagcttaatctgaacaggcatttttgctatactgtaccggttgaccagtgaatgaatgatgttcgtctagacattaaccttggttcaaagctttctgtcgtgcccatggataactatccgtccgaatcctagaaacgtggtccgtgcttgtaacctgtttgttctggtgcttgcatacgcctgagcaatttttg

SEQ ID NO: 275423 - DNA, 872 bp, Zea mays
cccactcgtccgcccaaacaagtatacatctaagatgctcctggctgcaattgatgagcttcacagaggaacttatgacttcttctacctgccaattgatttcaagaacaaatgcaatgttggatacgcgttcattaacatggtatcgccggtgcacattatatccttctaccaggcttttaatggtaagaaatgggagaagttcaacagcgagaaggtagcctcgttggcttatgctagaattcaaggacggtctgcactgatatcacattttcaaaattcaagtttgatgaatgaggataagaggtgccgccccattctttttaatcccaatggtcaggagtctgtgcaccaggaagcatttccaatcaatggcatatgcatccacatgcttccggaagatgattaccttgacaatgaagatggcaagagtctgaacgagaagactggagagagctcgaccgatatggccgggagtttgtgacgtctgcgatgatagcagacaggatcagaatggccatacatataaatctaactgtctagagagagtatccaccccccaaattgtataaaaagcgaggaaggttgatggttagcgctgaattttgtggtctggtgtggcatggcacgtcttttggtttcagatgtcgccccggcagtggaaatgggagctgaagctcaagcgatcgagcttcgaactggagctgggagcttgcttgtagaatccccccctctgtagatagagatgtgggggtggaaccgcccaaaccgctgcttctcatagtcgtgcttgtttttgattgcttgctgtaaaaaggtgaactgaactgaagaaaaaaaaagccaaactgtccagtttagaacttttgtgc

SEQ ID NO: 275424 - DNA, 519 bp, Zea mays
  unsure (1)..(519): unsure at all n locations
ggattcgaaatatttgcggcgacacacatagtggtcagctagaagctggccattatgtgacatatctgaggctaaacaatcattggtacaaatgtgatgatgcctgggtaaccagagttgaggagcataccgtcaggacttctcacgcatacatgctcttctacgtgcagaagacgttctactacaaagcttgcgaaagagcagccacagtctgatctgaagcagacattgatgacacaactccagaccaccataaatttatttgtcaccgaatcagatacacatgtagtaagtagttcgtcaatcaagagggaaaacgggcgccgtatccacagcagcacagccatggcctgtcaaatcttttcgttctccactgacctatagttccaatcagagagaagctttttcggcggattttttctttacagacagacatctgcccaagcgaagatgctngaatatatgcatttgagtatattgtgctggctaatggatatgttgtggcgatttgcttaatac

SEQ ID NO: 275425 - DNA, 615 bp, Zea mays
cacatatggacattacaatgaagagacgcgtgcagttaccttcgctagagtaccacgacagaccaatgttcccagaagatgtactaccaatagacctgcaatacgagggccatttaagctgtatgatacagataacaatgaggtgactgcatcaaagcttcggggaaagtggaatctgatgtactttggctatacatcatgcccagatgtgggtccagctgaagttcagaagatagctgatgttcttaaactgttagagtcaaagtacgatatcaatattacaccactctttgtcacaattgatccacaacgtgattcacctgctcagcttaaggcataccttactgagtttgacccaagaatagtaggactaacaggccccatcagtgcagtaagacagatagctcaggagtaccgtgttttctttaaaagagtagaggaagttggtcaggactatcttatagaaagctctcacaatatgtacttgctagatccatgcttggagacagtaaggtgccttggaagtgagtacgaggcatcagaccttgctgaggctataacaacagaggttcagaaagcatctgcctcatcaacaaattagtctagcggtatggc

SEQ ID NO: 275426 - DNA, 1058 bp, Zea mays
gcaaagagtgggccgggtggccaggaccaacgacttttccatagtcgtgctcgtcttcgtccacctcccgacccgactgagtagcaagcaattctccaaattagggtttctttccgcttgctttccagtttgcggcatcagtcggtggcgcctgcgatggagtctctgttcggccaatcgcagcggaggaggagggcgggcggcagcggcttcgaatcgctcaagcgtctgggtcacatctcacccgctgtgcagtcccacctcaaacatgtgtacctcaccctatgctccgcgctggccttctctgcactcggcgcgtacctccacatcctcctcaacgtcggaggcgccctcacgaccgtgggatgcgtggcctccatcgccttcctcatctccctgcccgcttcacgggaccaggagaggaaccgcttggcgctgctcatgtctgccgcgctccttcaaggcgcgtccgttggtccgctcgtcgaccttgttattgacttggattcgaggattctcgtcactgcgttcgtcgggacggcagttgcttttgcatgcttctctggcgctgccatcatcgccaagcgcagggaatacctgtacctcggcggtctgctttcatctggcctctccattcttctctggctgcagtttgctacttcaatctttggccacaccagcgcgaccttcatgtttgagctctactttggcctcctggttttcctgggatatatggtgtttgacacccaggagatcatcgagagggcgcaccgtggggacatggactacatcaagcacgcgctgactctcttcaccgactttgtttcggttcttgttcgaatccttgtcatcatgatgaagaatgcacaggagaaatcccaagacgagaagaagaggaagaagcggtagctgctgaattaattggatgacgtatgttgttgtggtcactacttcatagtaccgtgtactcctatcctattgtactaataataataatagtaagacgaaagatgactgctgggaatgaatatttggttctggtatttttggggtgaatt

SEQ ID NO: 275427 - DNA, 685 bp, Zea mays
cggacgcgtgcgtacaacctgctgacgatgcccagccggggacggcatgggccgcgcaagttcctcggaggtagcggggatcgccactcaactgcctcgttggggtcaggctctgattcggaccccgcgaagcggttccacgttgcgcttaccgcgacggacgcactgtacagtcagtggcagtcgcggataatgcactactgctataaggagatgagggaccgacctggttccgacatgggtggcttcactaggatccttcactcgggcaagcctgatggattgatggatgagatacccaccatggtgggtgatccccttcctgaaggcaaggatcagggatatattgtcttaaataggccttgggcttttgtccagtggatccagaaagcaaagatcgtagaagagtatatattaatggcagagccagatcatgtctttgtgaagcctttgccaaacttatctcatggtgatgagccagcggcatttccatttttctacatcaaaccgactgagaatgagaagatattgaggaagtttttcccagaagaaaaagggcctatttcaaatattgatcctattggcaactctccggttataatcaagaaggctcagcttgagaagattgctccaacctggatgaatgtttcattaaaaatgaaagaggatcaggagacagacaaag

SEQ ID NO: 275428 - DNA, 423 bp, Zea mays
accgcaagtatgtggaaccatttggatcctggaagcgtttctcacatgtttacacggcaccagtggagtcggatgacgacgactccatcgtgaccggggcgcagttacatgtgagcagccatgggttgacgaaggtcctcttcctccgcctccaattcgccagagtcagcaatgctgcgctcgtcaagaatcccgagtgggaagggtcaccgaatttggggcagaaatctggcctcatctcgacgcttatcagcacgcatttctccatggcggctcagaagcctgcccctcgacctgctgatgtgaacatcaactcggctgtgtaccctggcggtccgtcaacgccagtgcaggcaccaaagctactcaagtatgtggacacggcagagatggtgcgcggaccacaggacacgccgggatact

SEQ ID NO: 275429 - DNA, 479 bp, Zea mays
ggaaggtcatttacacagatgacgaggatgatacgatgctggtcggggacgatccatggaatgaattcctcaggatggtaaaaaggatatacatttactcttacgaggaggccaagtctttgactcgcaaggcgaagccgccggttgttggtgacaccatcaagccagacccaaacaaattgccaccggaatctgacgtgccacatgactcaaacaacaatgctcccgttgctgctgattatcaggactgatggatgctaactgggctcctaccttttctttcccctctgggatgtcggtcatgggaggcaatgcacgctccttgggacttgtaagagttatctgttttgttgcttcgcgggcccaaaggacgcttccctgcaccatctgcctttgtttggaacggcttggaccgccgtggtccttttacctgcagcaaggaaaggaatggctgggagggaatggatactggtatcgtt

SEQ ID NO: 275430 - DNA, 538 bp, Zea mays
aaaggaattgacggaaggcgagcacgaggagcagcagggagagggcggtggtggctgtgatggcagcagcagcagcagccccaagcaggcagtcaaccctggggaagaggaggtggtggaatctggtcctgtgacagcgacgcccaacgctgcttgtggattccaagaaagcagctatggcgtggtggaggtggagctcgtcttgcctgacagccccttcgcgccccccaccaaggaggaggcctcatacgctgatgctgtcactgctgcagccgctcggaacggtagcaccagcagcagcagccctcgccatgtggcccttttcgcacccgcgtcttccaccaccctcgagctgcccccctacagctcctcctgcttctttcaggtgcccaggttttctcctgggcatgaagccattgggctgtgatgtgaggtgcacagaacaaaaaatggggagggggccccctccattcctctaatctgggaggactaatggctatgattggccccatcaaccaggcgtagagaagctttgaca

SEQ ID NO: 275431 - DNA, 559 bp, Zea mays
cagcagtggagtagactatgatgatgagattggagagccagaggaggctccgcgtggatatcgtggcagagggaggggccgtggagggcgtggatcttttgcagttggaaggggctatggtggtgataattatgcgatggaagaagctggtagatatgatgatgatggatataacgcaccacctatgcaacgatatgaaggtggcagaggaaggggcagagggcgtggacgcggtcgtgggcggggaaggcaaggccatggacctcctccgcagcagtagattggttggcacatcacctttgggatgtcataacctccatttctttccataagataaatgttaccgtccattatattttttatctggttattaggttcatgttgaaagttgacatagtgactctagtgtggaggatgcggctagttaagatttggtagctaggttgttcgtccatttgcctatttattatctcagatcagacttggtgccgttccagttgtgcattgtagcctctttttaccatgaaagttagttcagaagattcttttatgttgttgc

SEQ ID NO: 275432 - DNA, 533 bp, Zea mays
cccacgcgtccggtgaagataattatggacaggatatcaaaaaggtcaaaaggctatgccttcgtagaatacactaccgaggaagctggaggtgctgctctaaaagcaatgaatggacagatcatccgcggccgcgtgggagttgttgatgttgctaagacgagatcgagagaccgtctatctgggggacctaatcaagcatttcgaccacactatcaggctagatgactgttatatgtacagaacttacagctgtagagtagagataagcacgagagcgaggaattgctgggggatgccgagccgcctgatctgattgtagttcagtgcccttgtcttgtgctaattgctagaaaatgaatactcccagcaaaaaaatatgtaaatgcagctgaagtgtacgattactaacttctacttaattaaatcattctcagatacaggctttttcctgctcgtaagtttgaatatatatttaaaaaaaaaaaaaataaataaaaaaaaaaaaaaaaaaaataaaaaaaaaaataaaa

SEQ ID NO: 275433 - DNA, 1056 bp, Zea mays
ctcctactgacaagtccaggttttattctctttgcaaatctttgtcaaaggagaatctccagcagtttcctgtagatcatgcttacatgtctggagtgatgaacagactctcacttgctcggcagattgacaagattgcccgtaaaacttcacaggaaaatgctaacaaatcctggcttcaaaggaatgctgaatctatgggattgattttggatgctagtgacagtgaagaagaccatgtgcagggacacaagaaacgaaaggctacttctgcacatctccaaaagcttcaacaggagttgagtgatctcttgcaatgcccattgcagcctaagactttttctcgacgctatttggctggggctggtgtctcgccattacttcagaagcaactagaagagttggccaagagaaacgcaagcaacaatagcagcaagagtaagaataaaggatctgggtttgttgttattggtcaggatcgtgtcgagcccttgcaagcacttcaaaattctgggcaagaggtctgtgtgaacatagacaaagaaagggaaaagcgaagagtcgctgagaactggaggcggaagaagcacgaagaaaagaaacgtacacgagagcagaagcgaaaggacaagagaaaagctaaagagatggcttgatgacacatgggatagctaggggccttcaaggggtttacggaagctctttaagctcgcgtcaatcctttcagaaaggaacggaatgcattcatcaatgtttttgctgtaatacaatgcgtgcgctaagttagcgcttgcctttaacagattggaggtggtagtttgattttgttttgcggctgaagaaaataaacttagaatgcacgagcactggctctggatgagaaaagaaattaagcagatagctcacgtataacctcattggatctgtaatatgtacgcctatcagatttaaggtacaaattaattttattagggatgggaatcgactgacctggcctatctttggacttggacctggcccattgccttaaggccaattttaggagtgatggagatt

SEQ ID NO: 275434 - DNA, 753 bp, Zea mays
acgttgccttcgcgtacacctactccatgcttctcatagaaatccaggacactgtgaaggcaccgccatcagagaacgtgacgatgaagagggccagcttctacggcatcagcgtgacgaccatcttctacgtctcgctcgggtgcatcggctacgcggccttcggcaacgccgcgccggggaacgtgcttaccggcttcgacgagccgttctggctcgtcgacgtcgccaacatcgccgtggtcgtccacttggttggggcatatcaggtgtacgcgcagccgatcttcgcgtgctacgagaagtggctggggtcccggtggccggactcggccttcttccaccacgagtacgcggtgcgcctgcccggctgcgcggtgcggttcacgatgtgcaagctggtgctgcgcacggcgttcgtggccgccacgacggtggtgtcgctgatgctgcccttcttcaacgccgtgctcgggctgctgggcgccatcgccttctggccgctgacggtgtacttcccggtgaccatgtacatcgcgcaggcccaggtggcgcccggcagccgcaagtgggtggcgctgcaggcgctcaacgtgggcgcgctcctggtttcgctgctcgccgccgtgggctccgtggtcgacatggtgccagcgctgggccatgtcaccatttttcagacgcagctctaaaaaaagtattcagatcttatgcttggggacgcgcttgcagaggcatgcatcatacatatgc

SEQ ID NO: 275435 - DNA, 1082 bp, Zea mays
atacaggacgatcaaaagttcttcaatttgttgtatactttccatctgcaagggaatgcccattatatgtacaacttcctgatggtgggctttcaaaaaccaatgcatttatatcccctatgtggggaggtgttcttatctggaactcaccggactgttcacttggttccaagaaaactcatggtacccagaagaaaatgtcatctcaggaccttatgggggcactcgaaatatttgttggacaactaaggcagctgtttggtctaaaaccatcttatttctcacaagatatggacgttccaactaaatttctagttagtgaaaagggcttcacagaatgggagttagatttattatatcggcaccatgcacgttccaatctgctgtcatgcctcaccacattggagtctctatccagtctggtccactctctccctaggatgattgtcatggatgaaattggaagacaggttgagctttctcttgaagctgcaaatttagcacagggaaatgcaactctaggaataagtgactcttcagcagtatctgcaacaagagccagggcactggctgaggatgcatttttccatccatccattatgtcaatcagttatgcttcagtagagcactatttcgccatttacatgccatttttcgcaccagtttccttgcatgtgctgctggcggcaatcaaagagctgaaacgttacaaggcagagcgagcaaaatattcggcatttcttgcttcccaggcgacatcctcctgatctggtgatgattagcacggatttgcaccagaaaattctgaacgtttatatgaagctgatggccactattggtactgcacatagtggagactggagagtaagcaacactgcagcgtcacttgttctaatgctcacggaagtggttaggatgtccaggtgatgtcaggccgagagctatagtcgaaatctctaccaattgagcagttcttgtaacccagattttgttcctagatacctcatacgtactcacattgaagttttttttaatttaaaaaaatatatattcagaaaggacagacattaagattccgccgc

SEQ ID NO: 275436 - DNA, 810 bp, Zea mays
gcgcgagagggatccatctccgttgagtcgaggcggctccaactccggctcgtggcctcgcggaccaacatggccgccccttcgccctcgccggtggaggctaccctaccgcctgaggccgcggctgccgccgaggaagaccagtgggatgctgacggatatgttattcctaatttgcccactcaagataatgatgtggctgagcctagtgtccccaaagaaaaagatcctgagcctctacaggcaagcgatgagaaaatatatctgggacctcatggagctccaccatctcaagcaaagcagcaggagctgaacaccgttggccgcaagcagcggttccggaacaaactgaaggaagcagataggaaattctccggcaatgctcaggagaacaagatggagagcctaagggagctgctgggtgctagaggtggtactggtaccagcctgccaaagagttctcctcgtgattggctcgaccctcactgccatgaatctgaattcgacagaaaaccaactagatgaccggcaaacgatgcagcgtgcgtttacctgaaggttgattacgctgtagcactggtgcgaggtgttattcgccaataacagatacttatggttgactaatagatgaagcaaagcaaaagggtttcctgtggtgtaatttatcggagctctactgttctccatgtcgcgtaaatactcttaattctcggttgtgcgcgtgtgtcgttgcatttgctatttacattggaaaaatatatggaaacaagttgctgttgcgtaactagtatgtaatgtctgatgatatgc

SEQ ID NO: 275437 - DNA, 943 bp, Zea mays
gaaggtccagagacgatcgaggactttgctcatatgcaatcacaggagattgaagacaacatcatgagccgacgcaacaaaattttccttctgatggaagaggttagacgcttgcgagtgcagcagcgtatccgaacttctgaaagcaaagatgccaacactgaaggaaatgaaatgcctgagattccatcaactattccatttatgcctgatgcgtcaccaaagactatgaagcaactctatatgacatcgttctctgtcatatctgggataatcatttttggaggcttgatagccccagtacttgaactgaaactagggctgggtggcacatcttatgaagatggtataaggaccttgcacttacctcttcaattgagtcaggtagatcctatagtggcatcattttcaggtggcgcagttggtgttatctcagctttaatgttggtcgaagtgagaaatgtcaggcagcaagagaagaaaagatgcacatattgccatgggactgggtacttgccatgtgctcgctgttctgctagtgggatgttattgaacacaaagcagttttcattattggggcataatatgtggtcaatgaaaggaaggtgtcagaattgttctggagctggaaaggtgatgtgtccgacgtgcttgtgcacaggaatggcgatggcaagtgagcatgatccacggattgacccttttgattagtttgatatgacaatacgctttttgtctgtttcgtggaaaatatgttgccgataacagcaataaactcatgtttgtatgtacgttatgtttgttactacgtgatcacttgagaggagttgagtgcaacccttgtccaaaagaggacactacaaatgtaggcttgtctgaaccacagaataaaaatcgtctgtctcacccgtatttttaaacccacgcgtccgcccagcgtccg

SEQ ID NO: 275438 - DNA, 586 bp, Zea mays
ccaacctgggcccgataggagttccgtattaatggtggaggcagccaaaagcagcctgggaatgttaagtctaattaaccatggcaccactctctgttattccattagccaaattgggagcgagaagtccaatcagttggagatggacagtgtgatccctttacctgagggttatatttactttcgcattcacggttcatatgaaggacacattctcatatttggatacgcatttagtgaagacgcatgcttcgcacttgagatcaagactatgaagattgagagagtctgtcggaagtggcgtggtttctgtccttattttgtgttcctgccatccatgtcacaaaggaggatataatgtggactgaattcacatccaggtttggggcttcttccaatccattctgctggtgtggagttgagctaggtgatggcacaggccctcatgtagatgtagcacatctgcaacactgtcccatgttatcatcctagtctgtcgtattatctaggcatctagcttacattagtagctactgaaactttagttatatctatatttttaagttctcccgactgtaatttaaga

SEQ ID NO: 275439 - DNA, 724 bp, Zea mays
gcgtggagcgcacccgctcggtcgactcgagcaagccggtctcgaggtcgctggctgctgagttcgaccaggaggctgacggggaggaagaggacaatgctggagagaccagcgatccagatgacggcagtgtgcagtacctgaggaggaggctcaaggaggagatgctgctgaaggaggttgcgctcgaggagctggagaaggagaggcatgccgcagcgtctgcagccgacgaggccatgtccaagattgcgtgcctgcgtagcgagaaggcgctggtggagagggaggcgcggcaattccaggagatgatgcagcagaagcagatgtatgaccggcaggtgatcgagtcacttcagtgggtgatcatgaagtctggaatgcaaggctgggagccagaggccataactgatcgagccttgtcggagacaagcgaggatgacagagataagacgtagctagctcttggttattggacttgaatggaaccactgaggaaggccctgttgtttgctttgagttcatcgtcctctgatcagctcgtagtaaccaaacagagaatgccaagttacgaaaactcggatgttccttgaccatgcaaagctcttcaggggaaatatctgaaatccacctgtaaatataccatcttcttttaaactacctgtgtacttatctaataagaacaacatctgtacttgatcgctctaccttgcaaatgttcatt

SEQ ID NO: 275440 - DNA, 1073 bp, Zea mays
gtcaagcgacgcaagggaaggatgtggttagctagcagcctgaaattctccgcccatcaactcagtcagcaggaagcaacccgcctagcgccctcgatccaaggacctcagagattcggccgtcgccactccggggccaagaaatgctcctcctgctcttcttctctgtcctcgccgccgttgccgccttcctcctcttcaagttcgccaccgtcgtcgatggggacttgacgctcgtatcccgcggtccgccgctgcgggagagggtcgacggcaaggtcgtgtggattactggagctagccgcgggattggggaggttcttgcaatgcacttcgcaaatttaggagcaaagctgatactatctgcacgtaacaaggacgcgcttgcgagagtgaaaaaaaacatcctcagcaagaatccagattgcagagttgaaatgttacccatggatttatcagctggtgaagaatctctgaaagaagtcgtacatgtggcagaatcatttttttctaatgcaggcgttgactatatggtccataatgcagccttcgaacgtcctaaacggagggctctagaagaaagtgaggaaggtcttaaggctacattgaatgtcaatgtcttcggaactattactttaactcgccttctagcaccttacatgcttgatagagggatgggccattttgttgtgatgagtagtgctgctggaaaggttcctgctcctggtcaggccatttactctgcctccaaacatgctcttaatggttactttgcttctctgcgatctgagttgtgtacaaaaggcattaaggtcactgttatctgccctggaccgattgaaacactacaatcttctgctgcagcttcttcatcgcaaacacattctgctgagaaacgtgagaaacgtgtttcggtggaacggtgtgttgaactgacaattgttgctgctactcatggactgaaagaagcatggatatcatatcagcctgtgctgactgttatgtacttggtgcaatacatgccaacaattggttattggctaatggacaaggttggtgcaaaacggctggat

SEQ ID NO: 275441 - DNA, 788 bp, Zea mays
acgcgtcaacggacgcgtggggtcgccagttgaggttgttaaggaacaagataaagagtttaataaactggcaactgatgccataattccttctatgcctggacatgtggttcaagcttttacattgctgaaatcaagcacagaggctcagagtgttgtcgcctcccttgcatcagatagaaatgtctgggatgcagtattgaagaatgagaaggttatggaattttataagactcaccagacaactccagttcagacatcccctaacgaagcagccacagcagagtcgcctgggaagctgaaagatgccacctctgaaaatgcatccaacagcgaactccccacgggctcaggcgcaagtttcgcagatttcgtggacaatgcgaagaagaaagtgatggatgtggtccacaatataaccgactttttcagggacttgttcaatgactcagccgaggcccagaccggagcaggcccttcagctgagaagggcttttctgcaacagagatggctgtgggaggatccttcatggctctgaccatagcggtcatcctagttgttctgttcaagagggcatgatagctcaagagtcatgggtaccttctgggacccatcgtgctttaaatctgtcgaaaattactcgtctgtcgtatggtcaataattccgaatgcaatgtatagcttgtccgtttctttggaaacagtacaataaaggatttatctagagtatgctcctatacaaaaaaaaaaaaaaagggcggccgctcgcgatctacggacgcgtggg

SEQ ID NO: 275442 - DNA, 875 bp, Zea mays
gttgaggttgttaaggaacaagataaagagtttaataaactggcaactgatgccatgattccttctatgcctggacatgtggttcaagcttttacgttgctgaaatcaagcacggaggctcagagtgttgtcgcctcccttgcatcagatagaaatgtctgggatgcagtattgaagaacgagaaggttatggagttttataagactcaccagacaagtacctcatgagactttagacagttaaacttatcgtattcatcgtctctaccaacttgtttgaccattgttgatgtcctctgctatgacacagctctagttcagacatcccctaacgaagccgtcacagtagagttgccggggaagctggaagatgctgcctctgaaaacacatccagcggcgaactccccgctggctcaggcccgagtttctgcgatttcgtggacaatgcgaagaagacagtgatggacgtggtccataacataaccgacttcttcaaggacttgttcgacgactcagccaagacccagactggggcaggcccttcagcagctgagaagggcccttctacgccagatatggctgtcggcggatccttcatggctctggccatagcggtcatcctagttgttatgttcaagagggcatgatatagccatgagtatcttctgggatccacggtgctttaaatctgtcgaaaattactcgtctatcgtttggtcaagaactcctgactgtaatgtaatgtacagcttgtgtccttgtccttggaaacagcacactaaaaggctatctatgatatacaacggtgtgtatcttggcttctccaaaaaaaaaaaaaaaaaaaaaaaaaagggcggccgctcgcgatctagac

SEQ ID NO: 275443 - DNA, 437 bp, Zea mays
ttgcttgttagattgaaagggtttccacaccttgaaggttatgctgaaccatacatgaggcaactgtcagtcagtgatgttgtaactggtcctctacagacattcaatggcatagagaaggtcggccatatagttcatgtcttaaagacaactggccacaacggtttccctgtggttgatgagccaccattttcagatacccctacattgtatggtctaattcttcgagaccacctgcttgttctattgaggaagaaggatttcatccgtagttgcacagcgtctacactgaatgctttaaaccatttctcacatgctgagtttgctaaacgtggatcaggaaaacatgacaggattgaggacattgaattatgtccagaagaactggaaatgtttgtagacttgcatccattcacaaacacatctccatatactgt

SEQ ID NO: 275444 - DNA, 1136 bp, Zea mays
ctccactcaaatctgttgtacatacaaagatatagacggcaaacaagattggtgtcagaggctcaatacttccttacaaacatattgtctgctgagtctttcatatggaacattgatggggaatcattatcgaggaatgaattagattttcaaaggagaatggattcagcaagggaacgcatgttggggttatcagctgactcagaataccaggataatcaagccaatcctgatgtccaagatcgtagatcacaaagtcttggagctaacaggaattctgatgccagcttatctttgaaagaccacgtccaaggttcagggcaggatatgagaagggacagtgatgtgactgtgagtggtaaacaagttgagcaggtgcaatctatttctgatttagagaagaaaggaactgcggaactcctcaacgaggatgacttgaacaaaaaattccaggagtacccgtttctgtttgcccgtgctggtgatctgactattgctgatgtagagagcctattgaattcgtacaagcaactagtacttcggtatgtagcacttgcacaaggtatgggtgtcagtcctgaaaccactcttactcagaacgggcagacatctgatcttgtagtatctgaggagccagaaaatttgaatagcgtggtaaaggacaacgagaacagtgcaataattaacaaaaatgttgatgatgttataagcttaaaccatcgttcagaagcagttgacacagaagcatctgaacaaatgaaccagagaactgctgttgattccagtgatgatctgaaggcattgggtcagcctgagaatgcatgacctgttggttaagccaagatgaaatggccatacatggcagaagtagtctgaagtttgttcttatacctatagacgacaatgatcacaaaacaaagtgcacatttccctgagtgatatgcagcagcttctcgaaccacaattttgtatgctggaggcttgaacgtcaacatagtggaaattaatctactcgccgaagctgttcttagatccaaatgttcattgcattgaagttcctggactcttggctctgttgtaagtccaatttgtggtgaacacaccctttcgtgtttttatgtaactataatttccgc

SEQ ID NO: 275445 - DNA, 585 bp, Zea mays
cgaggagtccatcgtcaacctctgataataatacaaatcaaaacaacatgcttcctccgacgactaaagcagccgagaagccactaaacggcactgcgacagagcagccgcagccgcagactcgcctgcggacgcttgggtccctgacgacgcggacgagcagtaccggcgacatcaggaagctcatgatggaggacatgccgatggtgtcgtccaaggtagaggggcctaacgccaggaggatcgacggcttcctgtacaggtacaagaagggcgaggacgtgaggatagtgtgcgtctgccatggcagcttcctcacccccgcggagttcgttaagcacgctggcggcggtgacgtatcgaacccgcttcgacatatcgtcgtcaaccctgcgccgttctcgtgaagagggagggttacgctcctgctgctgctgggatcgatcgtgctgtaacatgttgtagtaggctccttgtttccgggagttcaatggaaggtctctctctatatttgacatggattgagtgtgacagcaaatccaagagaaacatcatctacaaatgttagacttgtctacaaattga

SEQ ID NO: 275446 - DNA, 424 bp, Zea mays
tcaagacacggaagggcagcaccagtgacatcaggaagctcatgatgaaggacatgccaatggtctcatccaaggtagaagggcccaacgccaggaggatcgacggcttcctgtacaggtacaaaaaaggcaagaatgtaaggatagtgtgcgtctgccatggtagcttcctcactcccgcggagtttgttaagcacgcggggggcggtgatgtgccgaatccgcttcggcatattgtcgtcaaccctgcgcccttctcgtgaagagagagggttacgctggtgctgctatctgctgtgctgtaacatgtaggctcctttgtttctgggagttcaacggaaggtctctgtatttttccatatatcgagtgtgacagcaaattcaacagaaaaaaccctcatctgcaaatgttataggcttgtct

SEQ ID NO: 275447 - DNA, 419 bp, Zea mays
actaagcagggcttcgcgctccggtgctgaatgatcaagtaaattcgcaggaacaattagcttagcctgttgcaagaatcgatatgatttatcctaaaagaaggtgttaagatgatgggacatggctttcaaaactttcagctgttgcctgctggtagccaagacacactgaatccgaaggaaggcgttgaagggtagctgttagtgattttgtgatataaagagtactggggcagttagcatcggcatttttagcggatttaagttcttgttatgtatatctgtcttctgtcttcatcagtagtgctgcttagtacctcactctctcgtcagcaggatatttctatatattgtctgtacttggtagatatatgtattggtatttatatatatatctatatatatatatatttatatat

SEQ ID NO: 275448 - DNA, 282 bp, Zea mays
gcatctgggaagctgaattatgacctctagttggctgtgcaaccccagaagataattggaaggaagatgtaagccgcacgatcttggttcagatcaaagggtggggcatataagatcctgttgtcatgaaatccaagatccatggaacgctgctctccaccccatgtcactatgccagcgctcaaccgtacatacacgaggccaggctatcacaaggtgttccgtaatcgcagcactttggcatgtgattgtacacttgtacacagaggtgatgcgcgatga

SEQ ID NO: 275449 - DNA, 505 bp, Zea mays
gggaggaaggaggcgatcctgctgctgaatgcggcggcgaggagacggaggtggagggggcggcggcgaagaagccgaagttggaggaggccaaggaggcggagaaggggagggtagaggagacggcggaggggaagacacaggaggcaaatgaggagaaggcagtggaggcggaggacaagcctgtgacagaggaggcaaatgagaagaaggcagttgaagcggagggaaagcctgtgacacaggaggcaaatgaggagggcgccgcgggcgcggagggcaagcctgtgaagctggggcctacagaattcgcctcggccaccgatatgttcaactacttctacgctctgctccactcctggacgccgcagcttgagttcaataagtatgaacaaatggtgctggaggatttgctgaggaaaggtcatgctgaacctgctaagaagattggggcaggagtcgaagcatttgagataggcaaccacccggtgtggaaaagtcactg

SEQ ID NO: 275450 - DNA, 598 bp, Zea mays
tgctgagtcaagaatatgccatggaatgaatgggcagtatcctcatgaaccagtcatcacggagcttcagggtcggattacgaaagctgaggctgtattgagggacaaggaagaagaaaatgtgatgctgaaacagcaattggaacagtatgagagtaaatggtcagaatatgaggccaaaatgaaatctatggaagaggcatggaagagacagctctcttctctgcagctgagccttgttgctgctaagaagagcctagctgctgccgatgtggctactagaactgctcagactgattttactccaacacatgcccagtacgactctgaagacacgttgtccactgggacccatacacccgaagtgacagagtcgaggcaccgcaaccacaaccacaaccctgaagctaaagtttcagcaggaaactcggataggcgagtaaacgctgtgaaccacctagcgaaggagtttgaagacagacgacaggtgttcgaagacgatgcgggcttcctagttgcagtcaggtccggtcagattggttcaaatatgaacccagacgaggaactccggaagctgaaggaccgctttgcgacatgg

SEQ ID NO: 275451 - DNA, 398 bp, Zea mays
  unsure (1)..(398): unsure at all n locations
ggaagaggcagctctcttctctgcagctgagccttgttgtcgctaagaagagccgagctgctgatgatgcggccactagagcagctcggactgattgtactcctacacatgcgcagtatgactctgaagatacattatccaccgggactcgtacacctgaagtgatcgagtcgaaacacgacaaccacaaccctgaagctaaagtttcagcaggaaactcggataggcgagtgaatgctgtgaaccacctagcaaaggagtttgaagacagacgacaggtgttcgaagacgatgcgggcttnctagttgcagtcaggtccggtcagaatggttcaaatatgaacccagatgaggaactccggaagctcaaggaccgctttgcgacatggaaaaaagac

SEQ ID NO: 275452 - DNA, 720 bp, Zea mays
  unsure (1)..(720): unsure at all n locations
cggacgcgtgggcggcatcgagggttacggcgacatggtcagcggcgtcgtcctccggtacccttatttctgggggaaggagccgctgggcgcggagcccacggatcccggctaccgcgcaatgttcgatcccacttgggaattcatctgcggcggaaagttcggcctcgaccacccctacgtcaacccaatggcatcgccggaggagtggaggcagcttggttcccgccgcgtgctggtgaccacggcggaccagtgctggttcgtggagagggcaagggcttacgcagagggaatcaagaagtgcggctgggaaggggagctcgagttctacgagaccaagggtgaggcgcacgtcttcttcttgcctaaacacggcagcgaaaaagccgtgaaggagctcgccctcgtggccgaattcgtccggcgctgttgaggtgcctttcgctttgtttgcccggacctggtgagtagttcagcgagagaaaaaaaaatcgcccaattagtgacttttattcatattgcaagttaagcacagaggttcagtctcgattcagaatcctgatcttgaatttctgttgtgcatcgaaatttatcctgaacagtacacactgtaattccgaagtgcaggctagcgagtggctaaatgtattgtatacttgaaaactgtccgatgtattgtatacttgnaaaaaaaaaaaaaaaaaaaaaaaaaanaaa

SEQ ID NO: 275453 - DNA, 1839 bp, Zea mays
tggttagggccgggggcgagccctggggaggggtttaattggagttggtggcactgatatattatggggactcccatttgccgaagcatttgagaaacaaccaattgaacttctacagttgctttccctgaaagctcaggattcttttgatgaagcgaaatttctagtggagacacacatcatgcctgcatctagcattgcgagaattctagctgattcgttcctaaaggggcttttggccgcacatcgtggaggctatttggattcccaaaaggaagagggtcctgcacctctattgtggagatcaagtgacttcttaaagtgggcaaaactatgtccatcagaatcagaaattggccatgctttgatgcgtttggtaatgactggacatgaagtaccacatgcttgtgaggttgaactcctaatattgtcgcaccacttctacatgtcatcttcttgtcttgatggagtggatgttctcgtcacatttgcagcaaatagagtggactcatatgttttagaggaggatttttcttgtttagctcgtttgatcactggagtgagcaatttccattccttgagcttcattctttcaatccttgtagagaatggccaattggagttgctgcttcaaaagtattctgccactgacacagccacagggacgcttgcatcggttcgaggatttaggatggctgttattacatcactgaaacagtttatcccgaatgatgacgacgctctctctatggtatacaagcactttgacatgaagcatgaagctgcttctctccttgaatcacgtgcagagcaatacatgaacagctggttatcacgatatgataaggaacggcgaaatgatgagcttctggacgctatgcatcatcttgtagagacagctgaggttctttcaactattgatgctggccaaagaacacatcgtgcttgtgcccgtgcttctcttctgtcacttcagggccgggtaccagatcttttgtggattggtctttctgagacccaatgcccggcggatttttgtggaacaatctaggttccaggaagctcttattgttgctgaagcatacaacataaatcaacctatagaatgggccccagtcttttggaatcaaatgctaaaaccggatctaatcgagcaattcgtggctgagtttgtctcagtgctgcccctgcagccaccaatgcttctcgagcttgcaaggttttacagggcggaggttgcagccaggggggagcagtcacacttctctgtctggctttcacctggaggcttgcctgcagagtgggtgaaacatcttggtagatccttcaggagcctgctgcgtagaacaagggacatgaggctgaggctgcagttggcaactctggcgacaggcttcattgacgtccttgttatttgcaatagagttttggacaaagtcccggacaatgctggcccgctgatcctaaggaagggacatggtggagcataccttcctctcatgtagatatttcccttctctttttggtgcattggattcagaacttaattcttggcagttaggctatatattgaaaggcagatgaatcttgcaaatattatatgtatcagctttctttggttcagcatctttaaagtcaagcttggctgcagtcttggacatggattctcatcgatgatgccatgaaagacttttgtgattgtatgtgcagcattttgagcggaaaagctggcagaaatgggatttttgcagcttcatccggcaggtgttttcgcacccatgatatattgtatgttttgcatgtacgaagatccgccccgtatttgttttcctctttttt

SEQ ID NO: 275454 - DNA, 440 bp, Zea mays
ggggataatccacatgtattgaataggattgagccggtttaaatccataacaagtcaaaatccatcctaatcccacctaatacactccaatacacatgtaatatcaataaccgaacaaggtcttatgattcttttaacttcaaaggcccaaaccatgcggaatgaagtaacaaacacactaaagtaatcccaggaagtggatcatcccactgcaggctatacacatgaacataaccgatgcctcagtgtacatacactggagcagagccgataatcgccgctagatatgttacgcccccaacgattattgcggaatatctcacaaggactattgcagaacatctcacatggctcacagggcaaacctggtaggtcttgggctcttggcaatccatggcagcgctgaaacttcacaaacgatgaggaacaggtggtctagt

SEQ ID NO: 275455 - DNA, 422 bp, Zea mays
ccttgatggcagtgccatgtggatctcaggagatcactatcttgcctcaacagggaggagaaccttgtgtgttgcctcaacagggaaaagaaccgtctgtgttgcctcaaccgggaaaagaaccgtctgtgttgcctcaacagggaaaagaaccttctatgttgcctcaacagggaaaagaaccttctgtgttgcctcaactgggaaaagaaccttctgagttgcctcagcagggaaaagaatcttcaggagatatctctgtgaatcagaaggaccctcttaaggagatgaatggctttcctgaacaggaaaaaggacttgttgctggagaacttgtctctgcacatcataaggaccctctaatggatattacagatgcatttgaaatgataaaaaaacatcctgccagagagccttcctct

SEQ ID NO: 275456 - DNA, 837 bp, Zea mays
cagagggtcaaaagttgctggaagatttaccagtgcaggcgatgttggagacgtctcacatggagatacgagaaggaattgttacacccaattcaaaacctgttcagtggagaattagcccgtgctatgcttattcagattcaaaagcttaaactggaccttgaatcgggactactggaaatggatcagattctaagggcaaatgctataaactttgctgttcttgcagcgcttcctgcttttggtctttcacttctgttgcttgtgttactgcgagcatgggttcagcgtgaccatggtgctgagggaagaggtaatattgcacgatgtcaacggaggctgcttcttgttgatgtagagagaaggcttatggagtttcaacattacagggataatggaatggaggaagaggcacggtgcaagtttggcttagtactttacacgcttgatagactctgcaaagctgttgagtcacacgcaaaagaaacaggcgaatggttaagcttgagacaagatatttttgatctgtcgaagctcgacatgggaatgccagataagatgattgtcgtttcacggttgaagtggatgtataactgcttgcttccattctcatcgagccgtttgccacgcctctagagcagtgagcaactggacgtcgtgtgttgcattttggataaagattttgacacggatacctggaactctgggtcggttggtgggtccctatgtcggaaggatggttctttcatgcccacaagatgttctgtagattttagcagagctggatgaagcatatcggaagggggcagattgggtggatgcagtatccaccgagcc

SEQ ID NO: 275457 - DNA, 1057 bp, Zea mays
cccacgcgtccgattttttctgttaagatgagtcatttgtatgcactgtggcatatattgtaaaattcttgtttcttaataaattgcagccctttgttgtgttcttggccagcttagttgatttgtagttaagcttcttcacccttagttgtgtttatgctctgcttagttgatccattactgcaggtcttggctgaacttccagctccagttctaaatggtacaatggttacagtcgaggatttgcatcaggaactaaaatgcagtatcaacatcaaacacagggatgagttcgatgaagaaaaggagcctgacagaatggttcttgttgggtggtctggcccagttgataagcaaaccactagtaatggtgagactaaatcagttccatcttcatccaatacagaagatgtggatggtactgccgaggacatatcagcaacttctggaatgaagcgtaagctgaacgaaatattagagacaaaggagaattttgatgctctcgaaaatctttcgggtgttgattccagcagcgctcaagttgttgaagatgacaatgacgatggccttcttatgtttgatgaggacccaaggcaaagtaagaagaagagattgcagtagcatcctgctgcggcgataacagctcttgactcccggcatcgtggctaacacattgttcgatcgtaacatctttgataacttatttatgcggttatgtaccaggttgatgttgaaacattagtaacaatgcccagggcaccttttggcctcagatagtcagataccctgtagggttgtaatttgtaggatttaggaacaagagcaactaatgctcagctgacagcctgctgcgagatagaatttgtatctcaagagccaaggtactgttttggttatgtttttgttcagttgaggggtgaccgggtgaaccaagctctgtcttgttagctgccattcacagggtctggaaatatgtactcatcctgtattcttgctaaggttatggatcagatggtgtatatatccgtgcaaaatactaatttatagttttgccctt

SEQ ID NO: 275458 - DNA, 1403 bp, Zea mays
ttgttctgaatggtcttgataacttggatgctagacgccatgttaatcgcctttgccttgctgctgatgttcctttggttgaaagtggtactactggttttttgggacaggttactgttcatgtcaagggtaaaacagagtgctatgagtgtcaaccaaagcctgtccctaaatcatatcctgtctgcacgaattacaagcacaccatcaaagtttgttcattgcattgtttgggcgaaagatctgctttttgcaaaattatttggtgataaaaaacaggataatgatcttaatgtgcacttcaaagatgataccagttcaaaaacagatgtttttgaaaggagtgtagatgaagatcttgagcaatacacccagagaatatatgaccacgtatttggttacaacattgaagttgcattggataataaggaaacttggaagaatcggagaaagccaaaccctatttacattagagatgcattgcctgaagacgctgttcaacaaaatggtcgctctcaggatcacgtgaatgaggagcaggatccttctgctatggtatccctaggccttagaaattcgcaagagacatggagtcttgctgacaattcaagagtgttcttggaggctttaaaattattttttgagaaaagagagaaggaaatagggagccttatttttgacaaggacgaccagttggctgttgagtttgttaccgctgcagcaaatatcagagcttcctcttttggaataccactgcatagtctttttgaagctaaaggtgttgctggaaatatagttcatgctgtggcaactaccaatgctataattgctggtctaatcgtcatcgaggcaattaaagtgctcaagggtgattatcaagattatagaatgacatattgccttgagcatccagcaaggaagatgctcttgatgcctgtcgagccttttgaacctagtaaatcatgctacgtctgctctgagaccccacttgttctggaggttaatactaagacaacaaagctccgggaagtcattgaaaaagttataaaaagcaaacttggaatgaacctccctttgataatggttggtgccacgctagtttttgaggatggtgaagatttggaagaggatgaaattgcaaattatgctttaaacctcgaaaaggtcttggctgaacttccagctccagttctaaatggtacaacacttacagtcgaggattttcatcaagaactaaaatgcagtatcaacatcaaacacagggacgagtttgatgaagaaaaggagcctgacggaatggttcttgctgggtggtctggcccagttgataagcaaattaccagtaatggtgagaatagatcagttccatcttcatccaatacagaagatgttgatggtactgc

SEQ ID NO: 275459 - DNA, 575 bp, Zea mays
ctccagaccccaatgatgaagatgctgttgtggcatacaatacagtacttaaccgctatggtattagtaaatctgacatattatccagttccaaagattcttcagggagtgccagctctggtgcaaatgatgataaacatgcagttgaaaggcccttgaagagaagtaaaaagcgcagagtgtcatttagagatcaggctggaggtgaacttacccaagtggttgggatttcagatggtgcagatgttgaaactgaaccgggccctataggtgtaaaggaaggcagtcttgttgggaagtatgaatctcttgttcaggttactgtcataccgaagggaaaggagcaagcatcacggaaagagaatgactttacctctacctcaccgagtggggtaacggataagctacaagaggtgcttaaaagagtaaagagcgcgaccaggcctggaatctacgacgacctttatggggattctattgcgacaaaagtgggctcatcttgggcgtacaaatcagatgatctgtcagacaaagcccagcctgttgaggagaagacacttggcatggattcaaac

SEQ ID NO: 275460 - DNA, 636 bp, Zea mays
tcgcggacgcgtgggcggacgcgtgggcggacgcgtggggtgccatttaaaactgtaaaggtgtgcactaaaggtccatcgggagaagaatatgcatggtaccagtgcacagtgaatggtggacgtgatagccgagctataggagcatatgaactagcaaaagctgtggaagaattgggcgcaggagaaatacttcttaactgcattgattgtgatggccaaggttgtggatttgacatagatttggttaaaatggtttctgatgctgtgacaatccctgtcattgcgagcagtggtgctggagctgttcaacatttttctgaaatttttgagaaaacaaatgcttctgctgcccttgctgctggcattttccaccggaaagaggttcctatactagcagtgaaagagcatctggtcaatgctggtgtggaggtcagggtgtagcagggagatccttcggtttattgaaatattcttgtttgatgtcgcaactgctatcagttctgtttttctgatgtcgcaactgctatcagatctgttggtggcagctggcagtgcataggcccctgtcgagaactgcagtttggtaataaattaataatgtgatgcttaacagattaagcatccgcttctttt

SEQ ID NO: 275461 - DNA, 575 bp, Zea mays
acgagacttcacagatgcaaatggaagatactactcaagtttggaggtagcatcagaatatttcaggtccggtgctgacaaaatttcaattggaagtgatgctgtttatgctgctgaagcctttttacagactggtgtagagacagggagaagcagcttggagcaaatctctagagtatatggcaatcaggctgtagttgtcagtattgatcctcgacgggtatatgtcaaaagtcaagaagatgtgccatttaaaactgtaaaggtgtccactaaaggtccatcgggagaagaatatgcatggtaccagtgcacagtgaatggtggacgtgatagccgagctataggagcatatgaactagcgaaagctgtggaagaattgggcgcaggagaaatacttcttaactgcattgattgtgatggccaaggttgtggatttgacatagatttggttaaaatggtttctgatgctgtgacaatccctgtcattgcgagcagtggtgctggagctgttcaacatttttctgaaatttttgagaaaacaaatgcttctgctgcccttgctgctggcattt

SEQ ID NO: 275462 - DNA, 447 bp, Zea mays
agaatacaaggaagtttcaaatatttatgatcagatgcaaagagctggtctgaaaccagatgttgtgagctattccctgctcatcaaagcttatgggaaagccagaagggaagaagaggcattggcggtttttgaagagatgcttgatgctggagtcaggccgacacgcaaatcatataacattttgcttgatgcatttgcaatatctggattagtagaggaggctaatacagttttcaaggcaatgagaagacacagggttgagcctgacctttgctcttatacaactatggtcttagcttatgtaaatgcatctgaaatgaatggagctgagaaattctttcgtaggattaaagaggatggtctgaagcccaacgttgtggtttatggcactctgatgaaaggctattcaaagttaaataatcttgagaaagttatgcctgtgta

SEQ ID NO: 275463 - DNA, 455 bp, Zea mays
gactagtttagatcgcgagcggtcgccctttttttttttcttcttttaaatcctgaaatcaaaatatatagcaaaggtctagacaccatacacacaggccacaacaacaatgacgctaataccaccagcgttatttatgttacatgcaccactgctggtccgtacccggtagcgtgatcttcaccgacaaccccacgcgaaaaaaagaattcaaccactaacccaaaagccacacaaatcgcagagctagacgacgcgcttaaccagatcctaatggcgatgacggcctgtctgtaaagcgggccggggcgctgggcgcgtgctcacggggaggagccgagctgcacctccctgctgcgcctgccgcgcaccacgtacgccacggcggccgcgatgccgaccacggccacggcagccacgccgcaggccacgccggcggccacggacacggacct

SEQ ID NO: 275464 - DNA, 650 bp, Zea mays
gcgacgacgagcaagcaaaggaggccaagagccccaagagagcgcccgcggatggggcggcgcgcgcatctacgcccgtgaagaagaagctgaaggaccagaaggcggctgcggcaaacatgggtgtgtgcagcttctccatggcgcgggtgcggcagctgatgcgggccgaggaccccaccatccgcccttccagtgaggctgtcttcctcatcaataaggcttcagagttcttcttggggaagtttgcagaggatgcttatcacaatgccgcgaaggatcgtaagaaatccattatttacgataatctttcaacagctgtttccagccagaagactttaaagttcctttcagattttgtaccgcagagagttgcagccgaagatgctttgaaggcaatgacgagcaacaactcgtaaccgattatgctagactagattgcagaacagctgatgcaccgtaccctgtggtttctgtccaatttatgatttattaccccgagacctgtattagtccatagataagagtggattcaaatgtttcgtgaaaggatttatttagagctcatgaaggtatatttacctatgatttaagacaactgtatcaaatatttattatttcttagtaataaaaagatagaatcatatttg

SEQ ID NO: 275465 - DNA, 462 bp, Zea mays
tttgatctcactgaagcacttaggctccagttggaacttcaaaagcggcttcatgaacagcttgagatacaaagaagtttgcagctaagaatcgaggaacaagggaagtgtctgcagatgatgctagagcagcagtgcatacccggggcagaaaaggcgcaggatgcttcaaccgctgcagatgaattgaggtcaccttctgagattccagaatcttctaccgtcaaggaagttccagaaaacagtcaaaatggatcaaccaagcaaacaaaataagctaagggccgatgaagttgcaagcatgaaatgtgtttcatgatccgattggctgtttccaggcttaaatcaagtggtttttgtcctttcttgggaacagatttactctatagttaattttcttgctaaatctgtctagttctatttactaggtatttatttttttttttcttttctttatttttt

SEQ ID NO: 275466 - DNA, 429 bp, Zea mays
ataataaacaatacagacttagctactagtgctgtgctactgtaacattgtttgatcaaatcctgtaaacgtcagcaagggatggatgttcttaaacatcccgaattgtcagcctttataagtcataatatgtaagcagaactttttcgtactctatcgttttgaaataataaatttcattaatgactattaaataattataaaattattttaatattaattattataattaatttaatatattttaaattatataatatattttatattttatattttttcttattttttttatgggttttttatttttttttttttttttttttatttattattataattttttttttattttttatttttttattttttttattatttctttttttatatttttaatatattttatatctttttttttatatatat

SEQ ID NO: 275467 - DNA, 573 bp, Zea mays
cccgaggtcgacaagtccatgagaagctttattgagacattctgcgaacagagctcctgatccagagaaggatagtactgctatccaggagttcctggaaaacatggaaggggctttcagagcccacaccccttgggctggcagttcagaggaagaactagagagtgctggtgagggacttgagaaatatgttatgacaaagctgtttaatcgggtattcgcatcagtcccagaagatgtgaagagtgatgaagaactttttgagaaaatgtctttgctacagcaatttgtaaggcctgaaaacttggatataaaaccagagtaccagaatgaaacatcctggctgctcgcacagaaggagctgcagaaaataaacatgtataaagctccaagggataagcttgcctgcattctgaactgctgtaaagttataaataacttacttctaaatgcttccattgtgtccaatgaaaccccccctggagctgacgaattccttccagtccttatctacgtcaccataaagcctcatcctccgcagctccactcaaatctgttgtacatacaaagata

SEQ ID NO: 275468 - DNA, 755 bp, Zea mays
  unsure (1)..(755): unsure at all n locations
gaccaaaaggtgtctataaactttgattcctcggaatatancaaccgngaggggagggaagattcaagtgctgactctacaaaaactgcacatgaattaaaatcggaaatagttgtcctacctgtcctgtgtgatactcatgacaataatactgtggaacagaactcctcatgcaaaaagcaggatcttgaagataacaatactacagatgtatctaccgagtctaatgatgagggattaaatcccaaacaattaccatttcatgaagttgcacaagattaccaggaggttgatagtgtcatttcggagagcaatgaaaatcaggaccgacttttcactggagatgcaacccatcagggacttgagaaatatgttatgacaaagctgtttaatcgggtattcgcatcagtcccagaagatgtgaagagtgatgaagaactttttgagaattaacttgtacgagaatgaaacatcatggctgactactggccagccactacattcgcgtattactcttccattgtgagtttttgctcttcactatccgatgcccaccaatctaagcagccaaggcatgcatacctaaccttctcgaggacaattcaggaggtttgcttttttcctccctgttttatactggcatactactatatacttcattgatttttttagcagggtaaaaaaatataaagatagatttttagaaaataacatatagttcataaaattatttcagctgatgaaccttttagagt

SEQ ID NO: 275469 - DNA, 455 bp, Zea mays
gcgcacgcgtcggaagataacaatactacagatgtatctaccgattctacggagggattaaatcccaaacaattaccattgcatgaagttgcacaagattaccaggaggttgacagtgtcattccggagagcaatgaaaatcaggaccggcttttcactggagatgcaacccatcaggtttcatcgaatgattgctatgaagctggaattggtatcgcgtcagaggccagtaacatcattcacactgatttaccagtagaatcagccgctgctgatttcccggtggtgatacctgaggaagttgctgtcactgcaacattgggtatggaaggatccaaccaagttaatcactataaccctttcattgcctatggatcgcttgacgagacatgggaacccaatctctctctcgttactactgtggatgccgattctatagcacccatctgtcctgt

SEQ ID NO: 275470 - DNA, 778 bp, Zea mays
ctgaccgtgggcgcgacgcgtggggtcggatgggcaggccggcccaagcccaagggcttttcacatagctgttgtcattgactgcaacatgttcatctttggtggccgatctgggggcaagcgtttaggtgatttctggatgctagacactgacttatggcaatggtcggagatgactggctttggtgatttaccgtcaccacgagagtttgctgctgcttcagccataggaaacagaaagattgttatgtatggtggatgggatggcaaaaaatggctttcagatgtatacatcatggacacaatgtcactggagtggacagaattagctgttactggatctgtgccacctccaagatgtgggcattcggcaaccatgattgagaagagactccttatatttggaggcagaggtggagcaggaccaataatgggtgatttatgggctttaaagggtattactgaagaagacaatgaggcgccaggttggacacagttgaaacttccagggcaatctccctcaccacgatgcggtcattcagtaacatctggtggaccttatctcttgctgtttggaggacatggaactggtggttggctaagtagatatgatgtgtactataatgaatgcattattttagacagggtatctgttcaatggaagcgcttaccaacaagcaatgaaccacctcctcctcgggcatatcattgcataacttccatagggtctggatttcttttatttggtggctctgatggaaagaatacatctggtgat

SEQ ID NO: 275471 - DNA, 373 bp, Zea mays
acgccgcagtaccgtccggaatccgggtcgccacgcgttccaatttcaaatccttcgatcgcgcagccgcccgccctctcgcagctctctccgatggcccgcacgaagcagacggcgaggaagtcaactggcggcaaggcgccgcggaagcagctggccaccaaggcggcgcgcaagtcggctccggccaccggcggcgtgaagaagccgcacaggttccgccccggcaccgtcgctctccgcgagatccgcaagtaccagaagagcacggagctgctcatccggaagctgcccttccagcggctggtgcgtgagatcgcgcaagacttcaagaccgaccttcggttccagtcctccgctgtcgccgcgctgc

SEQ ID NO: 275472 - DNA, 588 bp, Zea mays
cgtacgcgtgggcggacgcgtggggtgtcgggagggatacccctcttgatagagcacaaaaagcacaacaaagctatctagaagcctacaataagacaaaggcaattgcagaaggcgacgacgtgaagagcaaaaacccggatgcttcaatcgtagataaatacaacacctccaaacgatcagtgtcgcttgtgcagaagcaccgagagagcaaaaaggagaaaaagaagcaaaagcagcacgagaaagaggaatgggagggaaaccacccatggaagccatgggaccgggagaaggatctgtctgctgggcgccagaatgtggccttagacgcagagaacatgtcgcaaggattatcttcccgtttcgcgtctggtgctgttcagcggaacttcctgtgagctgtgtggaaagatactcctggagcatggtctaatcgatgatcaatgtccagttattacatcctggtccgcagatggcaaagataatgctgacatataaaaccgagttatgttcccaacatttgattcaagcttctgcacaaagtatattttctgaacatttttgttcaaataattcagttaggct

SEQ ID NO: 275473 - DNA, 1068 bp, Zea mays
ttcttcggtgttcaggtggcttctgcagtccggtggctttattgagcgccttctcgccgacgacctcttcctcaccaaggtcgccatagagtgcggcgttggcatcttcactaagactgctgcagagtatgagaaaaggagggagaactttgtcaaagagcttgactttgtgattgcagatgtggtcatggcaatagttgcagattttatgcttgtatggcttcctgctccaaccgtgtctttacagccaccactagcgatgaattctggagccattgctaagttcttctacaactgcccagataatgccttccaggttgctttgtctgggacatcatactcacttttgcagagagtaggagcaattttgaggaatggtgcaaagctttttgctgtcggaactagtgcctctctgattggcactggtgtgaccaatgcactgataaaagcaaggcaggctgccagcaaggattttgccggtgaagttgagaatattccaattttatcaactagcgttgcatatggtgtgtacatggcagtttccagtaacctcaggtaccagattttagctggagtgattgaacagcggatgctcgagccactactgcaccagcacaaactagtattgagtgcagcatgttttgcagttcggacagggaatacgtttttgggttccctactgtggatcgactatgccaggtggataggcgtacagtaggctcaagcatgggtacacaaatgcagttgctcggagttccagcaatatgggttcttcgtgattttatattaccacgcttcctccaactggcaagtactcgtttgcttcatgggagactcttaggacagattttgatatcattctttaaacaatgccttgaggaaagcgtgatttatcgaaattgttcccgcaagcaagagagtgaatttgttttgagggcttaaggttgtgttgtgcgtgttggattggattgattaaaattcgtagtttcgtacagttttgtcattgtttgtgaaaaaaaaaaaaaaaaaaaaaaaaaaaaaaaaacagaaacggaaaaagaaatacaa

SEQ ID NO: 275474 - DNA, 606 bp, Zea mays
cttcacgactggaagaatggcctgatcgactactgtcccgccattctgtagagggaagcatagattgaacaagcagccagaattaaacagcatgatgctcgtttccctgcatcattgttacctgtctcctggcataatactatgtgaaaatgaacatgatttgtttttgagtcttttgaaattaaatatccttttgtaaggactcgatttggttggaaacaattttcacctatgaactgagatttggaagcccagctcttgtgatcatgcggctgctgagaaaactagagtaggtcgagaaggattgattatagattgtttagaaggtattgccgtctaaggaacgaagaggttggccagaagcaacatgctctgagacagctataaacatctggattgtaatgactactattcttccagacttcatagacattttcataggaattactctttccattccagaaaacaggacgtataaatttttcacgaatattagtgcaggtatcgatgctcagtgataaaataatgtataagtggtgtgcaaatttttctcgatcaaaatattattttattatttttatttttatttttttttttttttttttt

SEQ ID NO: 275475 - DNA, 530 bp, Zea mays
ggagttcttctctccttccgctcgaagagaagagaaaaaagaacggtccgtgctcggctgccgtgaatctctctcacctccccgaagcaagcgagcggggcagcgcgccaggaaggatcggaggagacgccatcaatcagcacttgcacgcgcgcggtcggccgcaggtggaggaagaagatgggcctgtgctcgtgctgctgccggtgcctggagctgctgtgctcggtcctcctcccgcccctcggcgtctgcctccgccacggctgctgctccatggagttctggatcagtgtgctgctcaccatcctcggctacctccccggcgtcctctacgccgtctacgtcatctgctccgtcgacccccaccgccaccgcgacgacgacgactacgtctacgtcgcatgacagatggaccggtccccgtggtgctctgatttcagggtaccttcacaaaatcaaaataattcagtggaagtcttggaagcatcggacctgcatgcctgatgcaataaggaacgaaacgtcac

SEQ ID NO: 275476 - DNA, 457 bp, Zea mays
gtgtgctgctcaccatcctcggctacctccccggcgtcctctacgccgtctacgtcatctgctccgtcgacccccaccgccaccgcgacgacgacgactacgtctacgtcgcatgacaggtggaccggtccccgtggtgctctggtccgtgtctctgctgctacctccgtccgctgtgctgtgtgcatctttttgtttggtttagtaaactaaatccatcctgtggccttctgtaaactgtaaattcgtatgtcgaatctgacaatctggacggattcagtccatatactaagatctggtgttgcgggatctgtggagttagttagggttcctttgctacctcgttcagttgtgcttgtgaaatgaaactgcagatggttattaaatcccctgcattttccctaaatatattttttttattttttttattttttttttttattatttttcatctttt

SEQ ID NO: 275477 - DNA, 710 bp, Zea mays
cagcgggcgcgctcgctctctctttctccctcccctcctcgtggcgacgattgggggcagtcgctgccgccgtacgccaggtgcccagatcttcttcatgcccttctccagcgacgagtatcagaaggcttcataagtattattgctttattgctttaatattatcatatgattgagtgcacaatgccatcaaccttacttgatgatctccctaacgaagttgctctccagtgccttgcacgggtaccattcttgttccatccgacgcttcagttggtttgccgctcttggcgagcatcagtttgcagtggcgaacttctcaaaattcgtaaccagattggtacgacagaagagctcttgtgtgtgttggcgtttgaaccagaaaacatgtggcaactttatgatcccctacgagacaagtggataactcttcctgtcatgccatctcagattaggaacatagcccgctttggcgtggcctcagttgctggcaagctctatgtaattggtggtggcagtgatcgagttgatccgcttactggagatcacgacaggatctttgcaagcaatgaggtttggtcttatgatccgctgcaccgtgtgtggtcccagagggctcctatgcttgtggctcgagcgatgtttgcttgttgtgcactggatgggaaaatactctttgcaggaggcttcactaactgccgcaaatcgat

SEQ ID NO: 275478 - DNA, 581 bp, Zea mays
tgttgccagatcccctgatgtttagctttaagcttgttacgaatggaactgtggtcaatgtcgattctccaaaggattctggcaatgttctgaggtgcaaagatcctatatctgctcatgaaatgacccatatggaagttcagattcgcaacaacacaaaggaaatcatccggatgaaccttagcatttcatgcaaagatgttgctggacagaattgcttcgatgaaaatagtgctactgtcctctgggctggtgttcttagcgatattcacctggaagttccaccgttgcaagaggtggtacatcctttttccatgtacttcctcgtaccgggtgactacacgatccaagctgcttctgttataatcgatcccacagacgttcttcgtgctcgcgcaaaggcagagtcaccagatgaacctatactatgtcgcggatccccgttccgtatccgggcagtcggttcagcgtataggcagttcttttgagttaatgtagaggcctcattttgcaccgtgacatttgtaggtgtgaaatttcttgtacaagtgttccctggcaccctgcacgcatgcgatttg

SEQ ID NO: 275479 - DNA, 486 bp, Zea mays
agccactcaaaataaggaacaatccaaaactttgctagaaggaattccacagctgccgaacgcttctatttcaggcacaaataatgcttggaagggtgacaccacagatgatgcacatgagcaaagagccaacagccctcgggctccttatcacaatcttcatctcacctcaatgagccatatccacagacagatgctatgattccgctagtctcaagaccttcaagtttgccaactaacataccaccgaacccaactgtcctacaggaacaaactgcaacactacatagtattcctcagcatcaacatgcatcccagcccctagtcaaaatgtttccacatggacatcagtctgggatcgccgcacaatctccaatgctacatcagccccccgttggttcttctagtgttcctactcaatctcttgtgacctcagtaggcttaacctcacaagttcagctaccattggtgccacagcaccctgga

SEQ ID NO: 275480 - DNA, 544 bp, Zea mays
ggaatcaaaagaactattaactcataaaaaatagaatgttactggagcaacccatcaatcacatcttggcaaaaaaaaaaaaaaatcaatagtctcagtcgcttcaaacgttagtgtaaaagcaaagcaaatctgcaattgaatgcaatccagtccaaaattgcaagtcatccagaagataaacgaacatattcttttgtccggtaatgtaacataaaattctcatctaatgcctggacttcttcttccttgatttggtgctagtttttggctgttcagcatttaccgccggggtctttgatgaattgggggtttggcttccttttgaggatgctccgacattggtggccgatttttttttttactactctctttttgctcctttttctttatccttttattttggggtgtttttctttatctgtttcgtttttttatttttttgttatttttttttttatttttttttttattttttttttttttttattcttttttatttttaattttttttttatttatttttatttttttattttttttt

SEQ ID NO: 275481 - DNA, 547 bp, Zea mays
aggtgataaaaatcctgaacatttcttcgttgccacccaggatcctggtctccgagagaacttacgagagatcctggggttcctgtgatatatggtctgaagaactctttatgcatagaacgggcctctatgcagcaacgcaagtttgctcaattggatgaggagaagcgtctcaatatggatatctctgaatacaagaagttactgaaggctgcatcagaaggaaagacaattgccagtgaaaatggaagtggcgaagaacaacatgagatgcctattagttctcttgtaaaaaatgcacttcatgttactgataaaaccaagtttaagaggaacaaagcaaagggtccaaacccactctcctgtaagaagaagaaaccaaagctccccacggctattcaaaagcaggcaggtacggctgatggcgaggcaaagaggaagagggttcggaagcggaagagaggccaaaaagataacaagcaattggaggctgcgaactagaaggatgggcttgcgtaggaagtttcagtgctcttgctagacatcc

SEQ ID NO: 275482 - DNA, 986 bp, Zea mays
caaatacaggataacttcattggagaaaaactacattcctaaaatgattgtccctgaggatcttgggatacctcttgatctacttgacatgagtgtgtacaatccccgggatgttcagtcgcgcatggctcctgaagatgaagagctattgcgtgatgatgaggtcctcacccctattaaacaagaaggtacaaggaaaagggagaggcccactgacaaaggtgtttcttggttggtcaaaacacaatacatatctccactaagtgctgatgcagccaaaacgtcccttactgagaagcaagcaaaggaaaggcgggaatcaagggggggtcgcaatgctttcctagacaatcttaatgatagagagaaacagatcaaagccattgaagaatccttcagagcagccaagtcaaggcctgttcaccagactaaacgtggcatgcaagctgagtgggttatgcctttgctacctgattttgataggtacgaggagccgtttgttatggtgaattttgatggcgatccaactgctgattctgagcagtacaacaaacttgagagacccgtacgtgatgaatgtgaatcccgggccgtgatgaaaagttttagtgtcagtggttcagacccttcaaaacaagagaagtttttggcatacatggccccagcaccccatgagctcgccagagacttggatgatgaaaacgatgacatccagtattcctggctaagagaatatcactgggaagtgagaggagatgataaagacgatcctacaacataccttgtcacatttgataaggaggagggtgcaaaatatttgcctctccctaccaagctagttttgcagaagaagaacgctaaagaggggaggtctggcgatgaaattgagcattttccagtaccttcccttattactgtgaacaaaacaggtcatgtcggtaccatggatcgcggagaatcttctggcatgcatgtgaattcaaagc

SEQ ID NO: 275483 - DNA, 1575 bp, Zea mays
gcagcctacttctgcaggaccagcgcatactaccggtacaggaaacactgtgggtcctgcagactccccaccatctacaccatccacggatactgctgaggatggacggggaatgggtggtaatatgcgccacgttccaaagaacttaatgatttatggtgcggatggaactgggcttgcctcctcttcaaatcaaatggatgacctggagcagtttggtgatgtgggctctttggacgataatgttgaatccttcttatccaatgatgatggagatcccagggatatttttgctgcactcaaaagaagtcctgcagagcctagcccagccgtttcaaaaggttttactttcagtgaagtcaactgttggcgcacaagcaacagcaaaattgtttgctgccacttctcttcagatggcaagattttggctagtgcaggacatgaaaagaaggctgtactttggaacatggaaaattttcagacacagtatacaccagaagagcatgcccttattatcactgatgtccgtttcaggcctaactctagtcagctggcaacatcttcttttgatagaactattaaattatggaatgctgccgatcctggattctctttgcatacattcactgggcacaacggccaggtcacatcattagattttcatccaaagaaaacagaccttctatgctcttgtgatggcagtggtgaaatccggtactggaatgtgacccagtttgcatgcttgcgtgccataaagggtggtagtgcccaagtccggtttcagcctcatgttggacagtttttagccgcagctgctgaaaacgtggtttccatatttgacattgagacacatgggaagaaatacactctacagggccataacactgatgtgcagtcagtgtgctgggacaacaatggggaatatattgcatctgtcagtcaggacctagttaaggtttggtcaatgtcaactggggattgcatttatgagcttagttccaatggaaacaagttccattcttgcgtgttccacccgagctattccaatctcttggttattggaggctaccagtctctcgaggtttggaacatggtgaaaaaccagagcctaaccgtacaagctcatgaaggtctaattgcggcgctggcgcagtcaccagtcacagggatgatagcttctgctagccatgacaactctgtcaaggtgtggaaatagcagtaacaacgattatgatgcatctaggtagttttttttccagggcaagtgaaatttctcctgctgaggcataaaataaggaagagtagtaaattagatggttgccggtcgcggttcagctgtccaagagcagtgagtttgttgatgggttgtattgtatttatgctgataggctgtttgtgtagctcagaaacaaaaaagaatacattggctgaaaaggtgtccgcctgttttattttttgtttctgccgtatcatatgtaaccatttaacgttccctgttttttaattggaactcgctgcgattggcatctggcagttggttgggcaaaaaaaaaaaaccaatttttttaatctaaa

SEQ ID NO: 275484 - DNA, 778 bp, Zea mays
agaaaaaactcccaaaagtcaggagtgaactgtcgtttgtgctgccttcgaatggcatgcagtgcagcatacagcagtgtaccgtgtgacgctgtggatatctgacccactctcgtcgcacgcaacgcatgtagcatagcaggacccatcctctcccatctctcggtctccccatcccaacccgccgccgccgccgccgcttctcccgtctccagcgcccacagcgccattgtatccgcggggcgagctgagtcaccaagctggtctagggcccatccatttggaaccctcgcgagaagcaaagcgggcggagcgccagcgttcttagatcgattgctcgccaggctgttggcgaggagtcgtcaaccctcacggcagccatgtctggggagctcatcctgtggcttttctccttcgtctccgtcatggtcctcatcggcctcaccgcataccagcttatctgtctgtcagatttggagtatgattatatcaacccatatgattcatcgtctcgcatcaacgctgtggtgctgatagaatactcactccaaggggccctgtgtgcttctttcctcttgacattgcattggttcccgtttctagtcatgacaccagtaacatactaccatgtcaaactgtatttggctcggaaacatcttgtagatgtcactgaaatttttagacaattaagtgacgagaagaagtacaggatgatcaagcttgccttctacttctgcctatttattataactatttacaggcttgtaatgacagctgg

SEQ ID NO: 275485 - DNA, 928 bp, Zea mays
actgcctcagacatgcttaaagcctaccactgttttcttgcagcaagcccatttaagagactttcgcattttctttccaatcaaacaatcttgagtttgactaaaaatgcatcaaaggtgcatatcattgacttcggcatttattttggattccaatggccatgcctaatcaggcgtctctccaagagggaaggtggtccacctgttctgcgcatcactggaatcgacgtacctcagccaggtttccgccctaccgagagaattgaagagactggacaaaggcttgcagagtatgctgagaagttcaaggtgccttttgagtatcagggaatagcgtctaagtgggaaaccatccgagttgaggatctcaaagttggcaaggacgaagttgtgattgttaattgcctatacagattcagaaacctgattgatgaaacggttgctgtagacagtcctaggaatagagtgctcaacaccataaggcaagtaaacccagcgattttcatccatggaattgtgaatgggtcatacagcgttcccttcttcatcactcgtttccgtgaggcgctgttccatttctctgcattgtttgacatgctagagacaactgtcccacgggatgatgcacagcgtgcactcatagagagggaaatgtttggccgagaggcactcaatgttattgcatgtgagggctcagacagagttgagagacccgagacatataaacagtggcaggtgaggaacctcagggctggatttgttcagtctccgttaaaccaagaaatcgtgatgaaagccatggacaaagtagaagacatttatcacaaggactttgtcatagatgaagacaacggatggctcctacatggcttgtaaggaaggatactctatgcaatttctacatggaagcctaggaataactaggttc

SEQ ID NO: 275486 - DNA, 628 bp, Zea mays
cttcaggcctccaagtgcaagacggaggcgcggatggcgacggcgcggatgaagctgctgcggaaccggagggaggcgcaggtgcgccagatgcgccgcgacattgccgcgctcctccgcgacaaacaggaggataccgcacgcatcagggttgaacatgtaattagggaacagaactttatggcagccaacgagatcattgagctcttctgcgagctgattgttacacgccttcctatcatcgcaaaacagaaggaatgtccagcagacttgaaagaaggtatctgcagtttgatatttgcagctccaaggtgctctgaactccctgaacttggtcgcatacgtgacatttttgaaaagaagtatggcaaagattttgtttctgctgcagttgacttgcgcccagatgctgctgttaacaaccttctgattgagaagctgtcgattaagaagccttccgggcaaattaagctgaaagttctgaaggatatagcaaaagagcatcagattgattgggataccgctgagagtgagcaggagcttctgaaacctcctgaagagtgattaagggccagtacatttcttgaagctccaacatgcctgtaagatattctgcaccatatacggc

SEQ ID NO: 275487 - DNA, 1240 bp, Zea mays
  unsure (1)..(1240): unsure at all n locations
tcacggttaactcacaacgaangcaacgactatgcttggaataatcccaccctttgtncgtcaaactccaaagacacgattgtagttggattaattcccaccccacaaccccccaccacaagaacttgttcgatcgaattcttcttcaactacccgccgcgggaacccaaggaaggaggcaaagcaaaggcttctcgcagggtttcccgtgagcggcttctgcggcgggcgccatgaacagcagcaagcaggcgctgatttacagcttcgtggccaagggctccgtcgtgctggcggacacacggccttctccggcaacttcagcaccgttgccgtccagtgcctccagaagcttccccccaacagcaccagatccacctactcctgtgacggccacaccttcaacttcctcgtcgaccgcggcttcgtgttcctagtggtcgccgatgaggcggccgggaggagcgtccccttcgtcttcctagagagggttagggaagacttcatgcagcggtatgggtccagtatcgatgaggaggggcagcacccgctcgctgatgatgctgatgaggatgactttctgttcgaagaccggttcagcattgcctacaaccttgaccgtgaattcggcccgaggttgaaggaccatatgcagtattgtgttaatcatccagaggaaattaacaagctctccaaggtgaaagcccacctatcggatgtcaaagggatcatgatggacaacattgagaagatattggatcgcggggagaagattgagcttttggtgggtaagacagagaccctacagtcacaggcggacagcttccacaggcatggcagagagttgaggcgaaagatgtggcttcagaacctgaggtttaagctgatggtgggtggcggcattgcggctctgatccttatcatttggctgatggtctgcaggggattcaaatgttagagcacaccaagttgctcgccttttttttttcttttcaggcgtttgatatgcacagactttcaaccaaattgtgttttcagtgtcacggtatcgcaatgtagtggacttcaatccccgcagtctttcccatgttccattacttccatatgataatggtaaaaggtaggaagctggagtacgcggtcagaactgtctggaggagatatgacatcacgacttaaatatctgtacattccaaaaatgcaagctcctattatttcggtaccttctgtactgtgtgcc

SEQ ID NO: 275488 - DNA, 294 bp, Zea mays
gattgtagttggattaattcccaccccacaaccccccaccacaagaacttgttcgatcgaattcttcttcaactacccgccgcgggaacccaaggaaggaggcaaagcaaaggcttctcgcaggttcgcatcctccggaaccatccactcctctcatcccgctcggagtttgacctctcccgacctgagatccgattgaatcgggtttcccgtcagcggcttctgcggcgggcgccatgaacagcagcaagcaggcgctgatttacagcttcgtggccaagggctccgtcgtgc

SEQ ID NO: 275489 - DNA, 697 bp, Zea mays
atcatcatatcaggaatgtatgaatgatgaagctgcatactgcaactatgttatgagagatgcttatgatcttgtcacgaagagccaagggcaggatgcattaaggaaagcactgtgggagactcttgaaagtggtgagaaagaattggagagatacctagaaaacgttacccaacatgcaccttatgccacttgaaaggatcactaattaacctcctagacttatctgctaaggatgaacaagatacttccttgttctttcaagatgcattcagaacttctctcaaattgtacatttatagagatgaaacggatgcttgtcaaagatacaggcttgacgacgctgccatgcctgctttcatcttggcgggttacatcgttgagctcgccttctgcccatatagcatacgcctcctcaccatgtacagcatcatccccgataagcagctgtgcatcaggaattcggaggggcaggactaggccaataagaacacagattatggaagtgataacaatgttccagccaatgacgaagagtgtgccagcgatctgcttcccaaactgtgatccaccatcaccaccataaaatgcacctctggagtccgggatggcgaggaagaggttgcagaggacaggctcagcaaagagtccagtagtggcgccgccgaggagcccagtgaccgcatgggtgtggaat

SEQ ID NO: 275490 - DNA, 225 bp, Zea mays
gccacttgaaaggatcactaattaacctcctagacttatctgctaaggatgaacaagatacttccttgttctttcaagatgcattcagaacttctctcaaattgtacatttatagagatgaaacggatgcttgtcaaagatacaggcttgagtaagtttcatgccttcaagtttcctagtaattgttcttgtgattccctgaatttttacatgatctttggttcc

SEQ ID NO: 275491 - DNA, 720 bp, Zea mays
aagccagcaactctgatgatgtggctagatcaatttcaagagagacaattacaaacactacaccatttggagaaatgatggaggattcactggcttgtatactgggttctcccggatgcaacatggaaagcaacaatcccccagaaaagacagctaatgtcctgacgcgaagtgatctgcgagctcgcagaagaggtcgcaggcatcatcggcatgctgatgactagtttcctattgtgaatgttgtgtagaagtgctgtggaataccctagaccattaccattttatttgggcctcatgccccacagttaatctgctgtgcctggtcaaaatttctaggctggacaagagctgcttttgtaagctgggcaatcctgtatcgtgatgtatcccatggcccctgcattcttcacaaagcaaccaataagacggtatagacaagcgaaacgacgctgggtggtgtgatgtttgcagttcgtggtccacaggctgccggagcatacagcagttcattttcaattcttattatcatatattatggaagaagaaatgaacatcttcaggattgaacagtgtcgcgaaattgtagatgatggttccacaatcccaatgggaccgacagacaaagagacatgctgcttcctgctgtgagttttgtattgcagacgacactgtttatgtggagttaaaaaaaaatatatacgcaaaaaagacttggaa

SEQ ID NO: 275492 - DNA, 557 bp, Zea mays
gtagcaattgaggcggtaattgaggatatggtgctgaaacagcaaatattttctgaccttgagaagtattgccatcataattgcatatttgcaacaaacacttcaacaatagacctgaacataattggtcagaagacagcttctcaggaccgcattgttggtgcacacttctttagtccagctcatgtcatgtcactgttggaaatagtttgtactcatcatacttcctctcaagttattgtggacctgattgatttggcaaagaaaatacagaaaacaccaatagttgttggcaactgcacaggtttcgctgtcaaccggatgttctttccttacgctcaggcagcttcttttcttgttgattatggtctggatgtgtatcacatagatcatgtgatcacacaatttggaatgccaatggggcccttccgattagccgatcttgttggttttggtgttgctattgctacaagaaagcaatattaccaaagttatcctgagcgaagttacaaatcaatgcttcttcagattcttgttgaggataataggacaggtga

SEQ ID NO: 275493 - DNA, 617 bp, Zea mays
gtccaaaccaggttcagtaaaggtagagaaattgatgaatatcgaacgatattctcatgtcatgcacatcagctcaacagtaactggagagctacgcgatgatcttacgtgttgggatgcgctacgagccgcattgccagttggaaccgttagtggcgctccaaaggtgagagcaatggagttgattgatcagctagaagtgagtatgcgtgggccgtatagtggtggctttggagggatttcctttcgcggcgacatggacattgcactggctcttcgcactatcgtcttccccaccgcatctcggtttgataccatgtactcgtacacagacagtaagtcccgacaggagtgggtggctcacctccaggccggagctggcatagttgctgatagcaaaccggatgacgagcaccaagagtgtataaacaaggctgcaggtgttgctcgtgccattgaccttgctgaatcgacatttcttgaagactagtctagtctaatgaaggaaatgtatgtttaagttctctgtataattatggattgtcctagaaaacaggctttcttaggccgaataaaaactcgcgtgtaataaagttaataaatggacaccctcagct

SEQ ID NO: 275494 - DNA, 381 bp, Zea mays
attatgcccaagtgcttatgctgccgatgatagagccctagcgcatgtaccatttctggcatattttgcttattcgctaattgctgaatacttgtcttattctcgggaatggtctatatgcagtccatgggacgatgcaaccgttgtcagatgatcaacctatatcagagctcagggcaggtgatcaagtcaaaggaaccgctggcaactttagcatcgtatagacgaagacatggaaagattttgtttggcgtcctgttgaactatgaagatgacatggacggagaagatgatgccattgtagagagatggctcaaagtggggcaagaggtgtacccttcaacataataatgacttccatacctgtgtaccaaaccaaat

SEQ ID NO: 275495 - DNA, 839 bp, Zea mays
gcttcgacgtatttctctctctatctatacgattcccgaagaaggtagagagagaaactcgaaggggagaggacagaagagggagatacaggttaatttttaggtaccagatcatctgatttctcagaagcaaaatgttgtttggagctcagtgacaccatcttgtaatgcctgtgattttacgggaaatggaggatcattctgtccatcccatgtctaagtctaaccatggctccttgtcaggaaatggttatgagatgaaacattcaggccataaagtttgcgatagggattcatcatcggagtctgatcggtctcaccaagaagcatcagcagcaagtgaaagcagtccaaatgaacacacatcaactcaatcagacaatgatgaagatcatgggaaagataatcaggacacaatgaagccagtattgtccttggggaaggaaggctctgcctttttggccccaaaattacattacagcccatcttttgcttgtattccttatacttctgatgcttattatagtgcggttggggtcttgacaggatatcctccacatgccattgtccatccccagcaaaatgatacaacgaacactccgggtatgttacctgtggaacctgcagaagaaccaatatatgttaatgcaaaacaataccatgcaatccttaggaggaggcaaacacgtgctaaattggaggcccagaacaagatggtgaaaaatcggaagccatatcttcatgagtcccgacatcgtcatgccatgaaacgggctcgtggatcaggaggacggttcctcaacacaaagcagctccaggagcagaaccagcagtatcag

SEQ ID NO: 275496 - DNA, 528 bp, Zea mays
gttcactgctcctgacccctcctcgattggtcaggtctgttcttgagcgcactgccaccacagattggacggcttgtctgctctccgttcccggagtggcgtcgtgctcactctgctgggttgctttgccttatagtcttgctctgcggtttgatttgcttcatcttttttttcttcaatcttgtcactcctaaggtttcccccctctggttttcttgattccccgcttgggaatttgtgaagtttaacagggatttttttggctgagcttgcatgtttctgttcttggccatgccccatgctatgcttgcttggataagctttggcttcagcctagctcgcattgcacgatgcggttgttcctagaatcccgatcgcaagtcctatgagctgacccctattttcggggattgccccgggcgtgggctgctgatggtttcggcagtttgcgtggggaaatggttatgagatgaaacattcaggccataaagtttgcgatagggattcatcatcggagtctgatcggtc

SEQ ID NO: 275497 - DNA, 905 bp, Zea mays
ttggtttcgtcgtgctcactctgctgggttgctttgccttatagtcttgctctgcggtttgatttgcttcatcttttttttcttcaatcttgtcactcctaaggtttcccccctctggttttcttgattccccgcttgggaatttgtgaagtttaacaggatttttttggctgagcttgcatgtttctgttcttggccatgccccatgctatgcttgcttggataagctttggcttcagcctagctcgcattgcacgatgcgttgttcctagaatccgatcgcaagtcctatgagctgaccactatttcgtggattgcccggggcgtgggctgctgatggtttcggcagtttgggtgggtgggaatctgcaatcccttttctattctagctaggattagatggcttgaatctaaatcgtgcagactctggtgattatagctgtctgataaagggtcatcttgagggtgcggatatgcatgttagaacttcaggggagtgtcgagtcaggcttatcagtgcctaaacttgttgatacgagctaaaagtttgctgaagcatctttcctgtgaggacctgacaactgacatgcacaaaattagtgggataaaatgctgatccactcttggtaaaaacaaaggttctctatagtgtctcccagcgtccaaacatctgagatggaaaaaaataacttgccattgatgataatgagataatccactgaaagcagataccacttggcactctgcctggatagatgtcaatctggaactgatagagtagggttccgtcaattacccttgttctttagctgtactgtgaattcagctaattcaatgcgggctacttgcacaaggttaatttttaggtaccagatcatctgatctctcagagcaaaatgctgttt

SEQ ID NO: 275498 - DNA, 461 bp, Zea mays
  unsure (1)..(461): unsure at all n locations
cggaccggccggaattccttggctttccacgcgtctttgcttcagaatggatggctcctctgctctccgctgccagagtggcatcgggctcgctctgctgggttgccaattcgccatgccttagcggcttagcctatagccttgcactgcggtttgtttcggttcatctttttcttcaatcttgtcactcacaaggctttcccccctctggttttcttgattttccgctcggaaatttgccatgccttagccttgcactgcggtttgatttggttttcttggccatgcttgcttggataagctttggcttcaggcttcagcctagctcgcattgcacgatgtgtnttgttgttcctagaatccgagcgcaagttctgtgagctgaccactatttcgtgggttgcctggggtggcgcgttgatgtttttggcaggttgggggggatgggaatttcgcattcc

SEQ ID NO: 275499 - DNA, 419 bp, Zea mays
aggacgcgtgggccttgcctcccgtactgtccgactaacacaagaactcgacaagctgggctgtgtccgatgggctttcctggatggacccaacttcggggcttctttaaccacaggaaggggaccttcatctaattcttcatggagcgcctttccttcctcctcttcaaggccgccgtcgtcgcagccgccgccgccgccgtcgcctcctaatcaaccaagtctccgtccatcacaccgtgcactttgtactgctagctagtactatataacatttgtaatgtccagaagctcaaatcctgtacggccagcagcctgtgtaaatacatcgccccatgctttcgctcgttcctcgaaccatctctgcctccgttcgtactgagacaaaataatataaagtcgtaatcacagctggattc

SEQ ID NO: 275500 - DNA, 618 bp, Zea mays
cagagtttgaggagacatgggctcaaatgctctgtgaatttaagttgcaagataacaagtggcttaaaaaattgtataagctcaaacagaagtggtgtagtgctcttaacaactgcacctttgatggtgggatcgagtatgaaccacaatgtgacagtatgagcaacatgtttaataatgtgtctgataagttgacttctctttgtgcaattgctgttgctgtggataaacagactgaagattggagggaaaaagaattagatgaggatgcacggtgtttccaaaggccacctgcttgcatcataaaatacagtgatattttgaatcatgcagcaaaggtttatacacatagaatctacaaactgtttgagacagattttcttgatgggtgtggagccacaaaattcaaagagcttccgtgtcaagataacaatacatatcaatttgagatgactatgcaagggcgaggatcaagagtttgcacagttcatttcaatatgtctatgatgcaattaagttgcagctgcagtaagtttgagacaatgggtttactttgcccacatgctttgaaagctcttagtataaaaaatatatgcaaaattccagaaagctacatac

SEQ ID NO: 275501 - DNA, 436 bp, Zea mays
gcaacatgcagatgtagcaatgcatcgagaggaggttcaacttttgaatctattgaagggccatgatcaagaatacaatgttgatgagatcagcatgaatgacaagctcaccaactgtggccatcagataactattatggaatatgccggatttcctttccccactgttgccttgaaggagggcctaactgcatcaagttagcagagtgttcagcagagctacgaagaccttgaagcagcatttgagccagggaaagaattctgctttgacgcgccaattcgtttaaactaagcttgcccctaggattgatccccagccccctccaatattgtgcccccattagtagttgttaagaaatgtttatcccgtgaagcagaattgtgtaaaatatcatgaggcatgagcgtaatgtatttgtgtggcattaacccataa

SEQ ID NO: 275502 - DNA, 448 bp, Zea mays
ggacaagagtcttctagagttcaccaatcctggttcccttctccctcagtccctcaccgtccgcctgcccagccaaatgccaccgggccaacaaaatctagcggctccacgctccccgtttcctccgtggcttccatggcgaactcaggcctagggcttggacttgcgccaccgggcgccgagccctcttcactccacgcccagtgcttggccaaacggcgcgtcgtgcccgcctcctctcactccaagcgccgcaggcatggcgtcgtagtatgtgtggcgcctccagttggcgtgtgacctccctggggaccttcttcgcactggtgtcgaagcttgacctaacctggccaggccgaaccttaaaccaagtcctggcgatccagatcgttcggtgaggcatgaagaccccaagccaacagccttcggagctagcattggcggtagc

SEQ ID NO: 275503 - DNA, 1381 bp, Zea mays
gcggggttttctagggtttaggggtcaggccgcccggtgttgtgtcgtcaggtagccgcctccccacctcttctgcttgttctccgcggcggcggcttggatcggagcggaggaagaagatggtggcatcgatcagggtgcccaagacccaacgcgccaggcgggagcttctcaagcacgcgcccaagcttgttgagaccagcaagaagacactgatcctccatggtaccaagactagtgctgtgttgaactctgtgctgtcagatatttaccacctaaagcgtgataatgctgtgaaatataccaagaagaatgacaacattaggccttttgaaagtggtggagaatcttctctggaatttttctcccttaaggcagactgtagccttatagtgtatggttctcattcaaagaagaggcccaacaatctgattttgggtagaacgtatgaccaccacatatatgaccttgttgaagtaggagttgagaactacaagtcaatggaatcttatgtttatgataagaagctagcaccattacttggatcgaagcctttctttgctttcataggggaacactttgagagtgctgaagagctgaaacatttgaaagaagtgctgcttgatcttttcagaggagaggtcgtagagaatctgaaccttgccggtgtggatcggatctatgtgtgcactgcaatctctcccactaccgtctacatgatgcactgtgctctccgtctaaaaaggtcaggtacatctattcctaggatggaactggtcgaagttggaccttcgatggatctggttgtaaggaggcacagacttccagctgaaagtttaaagaaagaagctatgaagaccgctgaacatgctaagaagatgaaaaacgtcactaaggatccagtgcagggcaagctgggcaaggtctacatgccagaccagcaggttggaaagttgaccttatcaaacgacgtaaagggactaaagagggagcgccgcgaaccaagaaaaatcaggactcaaagaagcaaaaggtcaaccctgagtaaagagcactgaagtttccctttgtattggatacaggtcaggttaagaaaccctggcttgtatctgtttccaactgctgtgttatccaagtagaagttgctcgctgtcagattagtgccatcttgttaggctaaagatctctgtacgactttcacatcagtattgtgtaccaatccatgttatgacataagcatggaattttgagaatgtgttatcctatcaaatatcaaacgtcttctgaggtctcaagccctgttaaaggaggattgtggtaggcttggtgagccagcgttaaagctagccattctaatggagatcgacaaccagaatgccta

SEQ ID NO: 275504 - DNA, 1189 bp, Zea mays
  unsure (1)..(1189): unsure at all n locations
cgnntccggtcggttcnnttggcttcnnctttctccaatcgaacctaggggttgacctgatgaccagccatgcctccgtgctctgggatgttcattggggtttgcttgcgtggcttactctgtcttcaacgtctttaccaaactgttcaagcggctcagaatggaagaacatcgccttgaggacagccttcactttccctggcagtgtgtttgctatttttttcttcttgaatgctcttatctgggggcaaaagtcctcaggtgctgttccattcaccaccatgtttgctcttgtcctcctttggttcggtatttcagtacctttggtttttgttggaagcttccttggcttcaagaaacctaccattgaagatccagtgaagacaaacaagataccaaggcagatccctgagcaggcctggtacatgaacccaatcttctcgattctaatcggagggatccttccatttggtgctgtcttcatcgaactcttctttatccttacttccatctggctgcaccagttctactacatctttgggttcctcttccttgtgttcctgattctcatcgtgacatgtgctgagatctcgattgtcctatgttacttccagctctgcagcgaagattacctgtggtggtggaggtcgtacttgacttctggttcctctgcactctacctcttcttgtatgcaaccttctacttcttcacaaagcttgagatcaccaagtttgtctcagctgttatgtacttcggttacatgctcattgcctcgtacgccttcttcgccttgaccggcacaatcggattctatgcttgcttcctgttcacaaggctgatttactcatcggtcaagatcgagtaaggtgaagtgcactcttgcctatttctttgttgccacgaagaaagaagtattctatggatagtgaattctacaggactgctgagtttagctgcaagtgggctcgttttgagttttcaaagctggtagttatgatgaagatgcgattcattaccgtatgattccggtattatagctagctcagtatgtttctgtttttcttttgtttttttttgttttcgggctgtgcccgaccgtgaggatatatgcttatcaagagcttgacgctgaaagaattgtatacgggtgctgagtaatctatctcttgttcctctcagnnttaatgt

SEQ ID NO: 275505 - DNA, 315 bp, Zea mays
atgatatcgtgaacggttggaaggcaaaactgcagaggagttctgctggtgaacagaggtgggggctgttcatcgccaccaaatgatgatgcagatgtgagatgtgcgtggacgtgaaaataaagcatccttttactataattgatgtcgcattagttattctgaacccaggtagcctgggtcagtacctactaccctgtttatcataggacgtggagagaactcgtccagttttacattcccgtcactgctttgccggagtgctgtggcaatccataaaatctaataaagtaacaataagctgtctgcaactgc

SEQ ID NO: 275506 - DNA, 923 bp, Zea mays
ctcagatgcatggtggaagcactaagaaatcggcacctgatctatccccgaccaaacagaagaagcaacaggcagttcaagaaaggaaaaggaagcaacagtcaaagaggggcaagaaagtggctggtgaatccctggaaataccccaaacaaattttgaatcggagaatcaacctcataatgacgatgtcaacattgagaaacagacaattacgagtagcacactctcaccaaatggtgccaaggggcaaaagggagctcaaaggagaaaccagaccaaaaaaaggaatcaaagaaaaatccttggagatgctgaccttgcatgccagcctggagtgagaaaaagctcaagaacacgctcaaggcctttggagtattggcttggtgaaagattactatatgggcctatacatgacaatttgcatggagctattggcatcaaagcatactctcctggccaagatggcaagagatcattgaaagtgaaatctttcgtgcctgaacagtattcagatcttgttgctaaatctgcaaggtactgaagccaagattttccaaagaggatcacgccttgtgacctgttgctttgtcacctcactatgggatgttgacatgtattggtagaactgcagtactgcacaacgaaatgcatgttaacttaggcaggtatcaaatggatgagtatctatctagtttggatgcgctactacccattcggctactcgatacgtggagtctagggtgtcaattgacattggtacttgatagtaagacagttttaggttcagactcttgaaaattgattttgtttgtcttctcgttttcagatttaagatgcgataccacagataaaaatcttgggtaattggaggtaaaaaaaaggatagcacacctaaatatcataatgatgttatgattttttt

SEQ ID NO: 275507 - DNA, 273 bp, Zea mays
agttattggcatcaaagcatactttcctggccaggatggcaagaaaacattgaaagtgaaatctttcgtgtttgaacagtattcagatcttgtcgctcaatttgcgaagtactaaacaagcccccttttttttaaaaggatccccccttgtgacttgttgctttgtcccctgcctttatgatgttacatgtgttggtggacccatagttctgcccaatgaaaaggcccacgtcctaccgaatggttgccagtatctatcttgtttggatgccc

SEQ ID NO: 275508 - DNA, 2162 bp, Zea mays
  unsure (1)..(2162): unsure at all n locations
cgtgactcgnggggagctcactccaccacttgactcccgtctcgtctcgtctctgcactggattggaggctggggccgtgaagggtaggtaggtcgcttgatagggacaaggggggagacggcgagaggcgtttcgccgagcagttcgcgtgctcccctccacaggccgacgcggcgacgccgctgtttcagtgcgggtgcattaggctgatatgggcaagtcgccggggaagtggatcaaatcggtgcttttggggaagaaatctaccaagtcaggtcctaccaagtcgaatgaatctaaggctgacaacaacagatactcgaccggggaggaccgcacattgtctgagagttctcctgtgatttctgagccggtactagttaacatccacaagaacgtagctatcaatgggaaggctgcagatgccagtgatagggcacggcaacaagatccgcagagccaaagcgttgttgagtccagatcatcggctccagctgctcagctgggagaagatcaagctgcagcgaaggcacaggcagcctttcgtggttacctggcacgaaggtcattccgtgcattaaaaggtatcgtaagactccaggcgctgattcgagggtatcttgtaaggaggcaggctgtatcaacccttcgcgcaacatggttgattgtgaagtttcaggctctagttcgtggaagatatgttagactctctggcagtcgcatgcagctcaatgtgaagtttggtcagagtaactttgggggtgttagatcgtctgatgcatggaaagagaagctatcttcaaatgcttatgttcggaagcttctgtcttcaccaattgttttagaacctcttcacttccagtatgacaagagggatcccaattcaacctataactggtttgagagatggaccataggttgcatctggaagcctgcttttcaacccaaaagagttgctgatgggaaaccactggtaaagaaggctagttatgcaatggaaactcaatcagccaagttaaaacgcaacattcggaagggttctgctgctatcgctgggagtttccatacatctggtgaatctgataaagtaaaaaggaatccaaagaatttctctagcttccctgctgattcagtaccagatagccagttatctgaacttgaaaaggttaaaaggaacctcaggaaggtaactgattcgatgggtgaagcctcaaagatatctagtgccagggttgattcctcgaaggtatgtaattctacagctgaggttccaaaggaatctaatcctgtggcagaaatctcaaagatacgtagtctcctgaatgggatctctgaccatcaggatattcaatgtgagaatacacgtgaatcttcatttcctcttggaactcaagaagactctgacaatgatcatctattgcgatattcaaatatggatagcttggacttggtacctggtttgaaaagtgatcaggaaattcagctggattcggtttctataggagaaaatgttgatgatcccactgttgttgctccagcagttgaagaaatgtcaccgcaaaacattgatacggaagacaatgttttatgcaagaaagaggaagcaaggtccaaggaagagcacttgtctaatggaagccttagaactagcaagaggaagtcttcattccccaacaaatcagaatatgtagaaaatgggactcacgctactcctgttcagccaaggcagccaagctatatggctgcaacggagtccgcaaaggcgaaattgcgagcccagaattcacccagtctggattctgattcagcggcagaaaagaatggtttcacccgacgccactctcttccttccagtacaaagagtagagcacttaaagctgaatggaagcgctgaagaggcaacccatcgtccacttgaattgaattgtgcactgctctgaaacttcgctggatgaactcgaccggtcttgtcccatgttcttgctgtattgaacaaccccttgtgaagttgcgattctggttcagtttgtcgtaggttcatgtgcaaccactagtgccttgtgtcgtatattgcatggttcttgtcgaaggaacaatgcctgcgaaagctgatgttaggactgcattaactgaataacatcacccagttgcccaggtcttt

SEQ ID NO: 275509 - DNA, 714 bp, Zea mays
cattcatcaagaggtatgcaggaactgaagtggacttggcagcatatgtcaaaagtgtagttgacccaacagaaaggctaaagcaaatagctgagatgcttgctatacattactacctcttgtttaatggacctgatgggatttggcatcatatgaagacattctacatggaacaatctactttcagtttctcagagaacgtgtatgttggccagaatgaaatttttgatattttgtcaaatataaggaaaaagctaaaaggtgataggcctcgagagaaaattgttcatgttgtcgagaagctacattgtcgtgcaaatggtgaaactggggttgcaattcgtgtgtctggatctttcattgtgggaaaccaatttcttgtatgtggcgaggggataaaagctgaagggatgcctagcttggatgagctctctattgacattccaagcaaacgcgtaggccagttcagagagcagtttatcatgcaaccgggaaacttaatgtcatgctattacatatcaaagcaagatctgtacattatccaatcctgattgaacatattatttgtaagattattctctgaagcacatgtatagaggatttagaagaattcctttcggacctggttttgaatcttatttactttgtggaactgaaattttgggccaaacctctgacaagaattgaaaagtttaagtcttcaactatgaaaca

SEQ ID NO: 275510 - DNA, 448 bp, Zea mays
cgcctcgcctcgcctcgcccctgttctgtttgcttctggccggaccccttccccttctccggtgcgcgccactctgcaacccccctcctctcgagcagagcagtcgagcagagcggcagcctcggcgcgcgccggcgccagccggcatgactgccggtcagtgcggcaacatccaggaccaggaggcagctcctggcgccgacctctacgccgtgctcgggctcaacagggagtgcaccgacgccgagctcagggtcgcgtaccggaggctcgccatgatatggcatccggacaggtgctcggcgtccggcagctcggcgcgcgtggaggaggccaaggagcggttccaggagatccagggcgcctactccgtgctctccgactccaacaagcggctcctctacgacgtcggcgtctacgacagcgaggacgacgacgctgacctgtc

SEQ ID NO: 275511 - DNA, 719 bp, Zea mays
ccgcaacatgacaactgtattgacaagggaatacttggatgtgaggccggatggatggttggattatgcagctaaaaggatcgcacagcttggtgctgataaatgttacaaccgcactctctgtgatgagcttcttagcattttactgcctgctaaaccccctttccatccacgccagttcgcgacatgtgcagttgttggtaactcaggagatctcttgaaaacagagtttggacaagagattgatgcgcatgacgccgtgtttcgggacaatgaggcacctgtcaataagaaatatgcaaaacatgttggattgaaaagagactttcgactggttgtccggggtgctgctcgaaatatggcaccaatactgaagggctcctgtaatgctgtaatcctgatttcttccaatatactatttgtcccttttatataatatgctgtaatcccgatttatataatatctaactacattcgtgttaacaaacaaatgcaaacttattatcgtttttacaagttccatttatggctgaagttaatgttatcgaatagagtttacatgggtggtaaatatttctgttatagcacatgtgggctgcttttgaaacaagatgtgactatcttgctttccctgcagccgatgaggcacttatcattaaaagtttgacgcacaaagaaatcaatgcggtgataaaggaacttccaaatcctgtctacct

SEQ ID NO: 275512 - DNA, 537 bp, Zea mays
gccggatggatggttggattatgcagctaaaaggatcgcacagcttggtgctgataaaggttacaaccacactctctgtgatgaacttcttagcattttactgcctgctaaaccccctttccatccacgccagttcgcgacatgtgcagttgttggtaactcaggagatctcttgaaaacagagtttggacaagagattgatgcgcatgacgccgtgtttcgggacaatgaggcacctgtcaataagaaatatgcaaaacatgttggattgaaaagagactcttcgactggttgtccggggtgctgctcgaaatatggcaccaatactgaagggctcctggaatgctccgatgaggcacttatcattaaaagtttgacgcacaaagaaatcaatgcggtgataaaggaacttccaaatcctgtctacctttttcaaggtatagttttaagaagaggtgctaagggactggcttgaagtccatagaacttgcccttttcatgtcggatattgagcatgttgggtttacaggtgatcct

SEQ ID NO: 275513 - DNA, 675 bp, Zea mays
cccagacgacggaggtggcgacaacagctcaagccacgacaccgacttttctgctgaccaggagccggaaggatgggttgctcgacccatcactcgcgacgctgctcgcgggtgtcacttccacgatgcgctcgacaccctgctacgtcgggcacttgaccggcatacttggtctgtcgagtatcgctgtgtggtctaccagcatagtcgcggggtctacccggaccgctgggaggcgacttgcttggtgcgctgcccggaggacagtctccagggtgcagaggcctgctcagagcactattctatctctgagcgggactcagctgaggcagccatgcaagatgctgcacggcgtgcgctttcgcactactgctcggttttcggtggggcagctgacggtcttgacctgaagtattacccccgccgttcatctggcagcacaggaggcgtgattgtctcacctgtcggtgagggcaatcctaggctgagcagcacagtcaacctagccgccgtgctaaacacggacctggaccatgcattagatgagctgagtagggctcgctctgagatcgcccagctgcgggctgagcgcgcggaacgtcgttatctggatggtggttcccccggtcccgtcgggactcagcactcgtaccgctcacctcagcgtggacacca

SEQ ID NO: 275514 - DNA, 697 bp, Zea mays
  unsure (1)..(697): unsure at all n locations
agctgagagacgatagaagcacgcagcagctgaaacggaggggaactaggaatgaaggggagcaaggtccacgagcacgaggcagacgtccccgcctccgacctctgggcgatctacggctccctccgcgccgcggaactcctgccggagctgctcccgcacgtgcttgccaaggtggagctcgtcagcggcgacggcggtgttggtaccatcttgcagctaatatttcctcccgggattcctgggctacagagttacaaggagaagttcatcaaagttgacaacgagaactatatcaaggaggcagaagccattgatggcgacattttgaagctggggttcgaggcatacatgatacggtttgagatcattccaaaaggggccaattcgtctgtcatcaggtcgactatcgagtatgtgattgctgatgcgcacccggagctcgaagctatggtgagcacagcaactttggctgaaactgctcagaagttttccgagtttgctaaggcgaagtaggtcccataaggaatgtcttgaaatatatatatatatatctcgagagcggagtttatgtttatcatgaaacaagtgaaatacagtttcagcgctttcgtgttgcgcctcaatatatgctcctacattgcagtgacatgggaatctgatcccacaaatcacaatatttttctntgctntgtct

SEQ ID NO: 275515 - DNA, 777 bp, Zea mays
taacttcaggcatataaccgctatggtaatgatctggagatggtttgcgctgtcttgtgcgctgggctgtacccaaatgttgtgcaatgcaaaaggcgaggcaagaggactgctttctacaccaaagatgtgggaaaagtggacattcatccatcatcagtcaatgcattcgtaaaccaattcccgttacctttcggggtttacagtgagaaggtgaagactgctagcatttatgtaagggactcgacaaatatatcagactatgcccttctactctttggtggttcgcttagtccgagcaaaactggagaaggcattgagatgcttgggggttatcttcatttctcggctccaaagcgtaccatagagttgattcagaaattaagaggtgaattggacaaactccttcagaaaaagattgaggaacctggactcgacatcttttcgcaaggaaagggtgttgtggcggcagctgtagaactgctacacagtcaaaatttcgaccattagatgccaaatattacatgttatcaggacaagtttcacactagacgaaagcaaaatcagcgtattcttttgtaaatctcacctctgcgtgttagcatatttctgttgctttttttagaaaccagaatttgagcccagcaacaaccacaacgatatcgttgcggagaaaggacttatacaaggtgattctctgtctccgatcctctttaatatcgttgcggacatgttggctattttaattgagagagcaaagaataatgttgacctagt

SEQ ID NO: 275516 - DNA, 328 bp, Zea mays
gaaagacgcagcaatatcaccgcgatcacgaaaacactggacagattgtacaatctggattggtatagcagtgctgctaagaacgaatgtacggctgccgtggggctgaaatggatgctcaatcagggtctaatgaagcaccatcaagagatagttgaatacttcaaccgaaggggtgtttccgcaatttttctactaagaagaaatcttcttcggcgttacgtctctatattagcaaatgctcatgatagtgccatgaaacagttgaatggaactcataaagctcatgtgcactccatacatatggcttgaaatactttctcaatat

SEQ ID NO: 275517 - DNA, 549 bp, Zea mays
ccaatccttccggaaaggatttccagttggacgtgccggtatactacaacgcaagaagggtggaaggacaggagatgacaaaggataaaaatggtgatccagtgacagggtatgtgaggatctcacaccaggtttacaatgtcacagaggactatgagagactgagggatgttgtcaataaacttgtttctgaagggttcaccagcagcaagttgcggccttctgagaagcaagaagcttaggtgtaatgaccttccagccaggtagcatccacctgaaggcgctgtggccgactacttaggtgtggaccggatcagcgcagcaagtacggcttcgtgatcgtgacgttgaagaatgtagtgtaccgccaggaactgacatgtgttgtatttggcgttcagtgtaagtaacaataatgccctggcatgttgtcttctctcacattttgggagctgctgtaacctcagaataatctggaatataaggatatgtacagctgctgtaaaaaaagaaaaaggaaaaagaaaaaaaaaaaaaaagggagaaggg

SEQ ID NO: 275518 - DNA, 471 bp, Zea mays
cctccaagctactatgggcgtgatgacctcgaaaccctgatggtctcagattcagcagctgactggataaggatctcagagatgttgcttggcaaagttccagaagggtttaccttcgcaccgaagcacaagtccaatgcctatgaccgagcagaaaacggttaaacctttgttccgttgttcgtcagggcaggaactcagcaacaccagtggtgggttctcttgaggatcagagacaactactgaggtccatgctgcttgaacccatcatgttgtgtaacatgattttatatttagccaaatggtgattgtaccaatagtttaagtatagactatagagcacctgataattgaattgctcaattctcctctattcatgctagctctagcatcttacttatccatatacctatatttaaacttactctatgaacaatgcagtttacagtgcaaaacattggtttgagtggc

SEQ ID NO: 275519 - DNA, 430 bp, Zea mays
cctggtgaagcagcgggtgtgctccaagattgcgagcgccttaaggaattggtgttgtcccacgatgctatcttcttgttgaccgacacaagagaaagcaggtggcttccaactctcctatgcactaacgaaaacaagattgctatcactgcagcattagggtatgatagttaccttgtcatgcgacatggggctggccctggcataagttgtgaagcttccagtgtggtcactgccatagacaagatgtccacggaggatgcccttgggcgtcaaaggctggggtgttatttctgcaatgacgtcattgctcctgtcgactcagtttccaatcggacactggatcaacaatgtacagtgacacgaccggggttggcctctattgcatcaggacgcgctgcagacctcttcagaagaatgttacaccatc

SEQ ID NO: 275520 - DNA, 443 bp, Zea mays
atctcattggctgaaaagatccgatcatgcgatgaagcagactcttgtagtgcaaaatgtatttctcggctccagcctttgaagtcacaaatgccaaaatcgctaggcagctgttgggccactgttcacgagcaaaggcctgttgttggcagggtggttgacgtctcggcgacggatatgatgatctgatccacatggcatatccttgtagaatatgcaggaaggactaccgagtgcaactttcatggcctgaaccacatcctggatgaaagattgctgaaggtgaccttatgattcttgaaacagggatgtttgacaaatttgtaatgtacttttgggctttaagtatcttattatcttaagctacctagtaatcagcacttgtaccttaaggtgtgcgttatggcaagttcttttagagggcttgtttggactagcaccat

SEQ ID NO: 275521 - DNA, 498 bp, Zea mays
cggaaatgtaaagacaaaggctcctgtgcctccgcctctgccaccgcgccgaccgtactgcactgagaagaaaccgaatgtcaacagttcgcctgttggtggaagaaagacaaaggcctcagctccacactggcactgaccccattatctaggatcctgcagcataactctgaagccgtgaaggtaaaagctatgcgtctgacgtgacctagaaggctgcatccatcaagcaacgattgatgttatctattgtagcttaccagcagtcttgtgacttgtcacctgtgttagaataaccgtagtagttagtgtatgtagcaacgcgtagcatatatatatatatatatatccactaatgtctaattgaaccgtagtagaactgccctggatttaactagaacattgtatatacctggaataattggagcttgagtatcgaaccaggagttatccgcacatgaacttttgggctttaagtatcttattatcttaagctac

SEQ ID NO: 275522 - DNA, 1529 bp, Zea mays
atctagtcaccatatccgcggtaaggtagtttctaaaaagactttttcatcccctcgccgcccgccgcccgccgcgagtcacccccgccaggccgccacgcccgcagcccgccgacgcaaagccgcgcgcgaggcctctcccctgcgtacgcggcgatgaagatcgtccaccgcgacctcgttcgcaacgggcctggctccgtcaagttggtgccggaggaggaggacgacttgtggcacgcgtacaacctcattgccattggtgacagcctccaggccgtcaccgttcggaaagtgctgagagatgtggcatctggaggacgtgatgccgagcgtgtgaagcttaagttagaaattgtagtcgagtctgtagactatgacaaggagggatctgttttacgtgtgcgtggaaaaaatatcactgagaatgaccatgtgaagattggccagttccacacgttagagcttgagctgaagagaccttttgttctacgaaaggaaatttgggattggttagcacttgagaccattcagcaagcatgtgatcctgctgcaagtgctgatctagcagttattctcatgcaagaaggacttgcccacctattcctcattggcaaaagcataacagcaacccgggcacgtattgaaacatcaattcctaggaagcatggccctgcaattgctggctacgagacggccctcaagaagttctttgagtatgctttgcaagcatttctgaaacacattgattttgaagttgtccagtgtactgtaattgcaagcccaggttttacgaaggaccagttccgcgattatttgtttcttgaagctgcacggcgagatttaagagtaataattgagaacaagcaacgccttgttctggcgcatgcaacatcaggttacaagcatagtttaaaggaagttttggacacaccaggtgtgatggcactgataaaagatacaaaagcagcacaggaggtccgagctctgcaggatttcttcaatatgcttactaatgagtcagctcgtgcttgttatggaccgaagcatgttgagtttgcactgcaacagtttgctatccagactcttttaataactgatactttgtttcggaacgctgacattgctacgaggcaaaggtacgtgaagttggttgaagatgtcaagaaaaatagtggcacagtacacatattttcctcgatgcatgtctcgggcgaacagttggcgcaactgacaggaatagcggctatacttcgttttcctcttcctgaactagaggacatggagctgtgatgaaaccaacctttttgcttctcgataacattctttttggttgtgatctgttagcatactacctgtatcatgtgtaacgttatggagctatttgatattgtataggcaaccctggaacggaatgctggtgttttttaaggtatatcctattcgttgtaaatggttcatcgtgcgttgtttgccggttctttttctcattaagtctggttattttttaagtctggttatttttcaca

SEQ ID NO: 275523 - DNA, 531 bp, Zea mays
ctcttctcttctcttccctggacttgtctctctctttattcctccctcacttccggccttccccttttcctccggtcgacgcgagggagcgggaggttggcctctaggcagggtggcgggcgaagatgttggacatacagaagcggcgcgtgcggctgctgctcttcatcacggccgtcctcgcgctcagcatcaccgctgagaagttcagggaacttgttggaaaggaggctgcatcaaagagtggtcaattcacattcatgaactgctttgacatgggctctggcagccttgcgtgcactgcaaaggagggtgtcaagttgtacgtcaacaacatccgaagtgcacacttggaaatggtgcggcaacgagccatggagaaagctttagctgatgctgtgacggaaggcctaacacctagtgaagcagccaaacaagctcagaagattagtgcaaaagcgactaaacttgctgctcgtcaagccaaaaggatattgggaccaataatttcttgtggttgggacttcttcg

SEQ ID NO: 275524 - DNA, 485 bp, Zea mays
cggtctggacaaccgggtcgaccccagccttcgccccgccctgcccgcagtgcaacgtcggtatgttcacgcgcgccgagctgctggaggccagcgtggagcttcgtcatcacgccctcggctacgtcaagtccacggccctccggtgcgctgtcaagctcggcgtcgccaacgccatccagcgccgtggcggcagggcctccgtcgaggacctgctcaccgagctctctctggacgcaagcagactccgctgcctgcacagcgtcatgcgcgcgctcgccgcgttgggcgtcttcaaggaggggagcgacggcgagtaccggctcactgccgtttcctctctgctcgtggacgacgacagcagcgtccgacgtagcctccggtcgatcacgctcttgtacctggagcctgcattcatggggccagtgctcaacctggcagattgggcccttgctggtgtcaatggtagccaagacgacaacaac

SEQ ID NO: 275525 - DNA, 453 bp, Zea mays
gctagctgatgaacgagatgacgggggagagcgagctagctagcacagcacggagcgagcacacgcacatcttcctccgtgtgacgcggtcgaggtagccgagggcgtcgccgtcgccggggaaccagctgtggatggtggaggagacgttgacgatgcggccctggacgcccgtggcccgcgccgtgtccgccatcttgtccagcagcagcctggtgagcaggaagtggcccaggtagttggtggcgaaggtcatctccacgccgtcctccgacacggcgaaacggtcggcgtacttgccggcgttgttgctgcacgtacgtacgcacgcacgtgaaccatgtgtcagtccatgtaagttagccgcagttgttgctgctgctgccttggcaggtggactgctcactgatggatgcagcagcagcaggatgaagaaagaaagcaagaaagttg

SEQ ID NO: 275526 - DNA, 540 bp, Zea mays
  unsure (1)..(540): unsure at all n locations
cccacgcgtccgcggacgcgtgggcagcagcaatgacacttccctgcgccggcggctgcgagatccaagccagcggcattaactaccgcatcgccgtctccacccgacctctcaaggtctggagcagatcagacgacgacgtccattcccaagaccaccacagcgtcgtccgccaggtgctccgggacgtctcctgccgcgcgcgccccggcgagctgctcgccatcgtcggccccagcggcgccggcaagtccaccctgctcgagatcctcgcggggcgcctctccccgtccccgccgccccacctgctacgcatcgacggcgccgccgcccacagcgccgacctccgncgcgtctccgcctacgtcacccagcgggacgtcctcttcccgctgctcaccgtgcgcgagacgctgctctttagcgcgcgcctncgnctaggcgcgcgcctgccctncaggacatgcacgntcgcgtcgaggcgctcctcgacgacctcacctgcgccgggttggcggcccaggatcaggacctcttcgc

SEQ ID NO: 275527 - DNA, 1669 bp, Zea mays
ctgctccggtcgctgctgaacgccgatctgattggcttccacacttttgattatgccagacacttcttgtcgtgctgcagcaggatgctcgggctcaagtatgagtcgcagaggggctacattgctctggagtactatggccggacagttactatcaagatcttgcctgtgggagtacacttggagcagctacggtcagtcctcaacctcccggagcttggggtcaaggtggccgagcttctgaaacagttctgtcatcggaaccgtctgctgttgcttggtgttgatgacatggatatcttcaaaggaattagcttgaagcttttggcgtttgagcagctcctaatgcagcatccggagtggcgcggaagggtggtgcttgttcagatcgccaatccagcaagggggcggggaaaggatgtgagggaggtacaggaagagagcgatgcaatggtgaggcgcatcaacgacgcgttcgggcagccaggttaccagccggtgatactgatcgatcagcctctgcagttctatgagaggatggcttactatgtcgtcgcggagtgctgtttggtcactgcagtgagggacgggatgaacctgatcccatacgagtacgtaattgctcgacaagggaatgagaggatagatagtattctaggccttggtccggcttcaaggaagaagagcatgcttgtcgtgtcagagttcatcggctgctcgccctccctgagcggtgctatccgtgtgaacccttggaacatcgattcagtagccgacgcaatggactacgcgctggagatgccggaaggggagaaggtgttgagacatgagaagcaccacagatacgtgagcacgcacgacgtcgggtactgggcgaacagcttcttgcaagatcttgagcggatttgcctcgaccataacaggaggcgttgctggggcataggatttgggctgaagttcagggttgtggccctcgacccaaacttcaagaagcttgcggtggagcacttggtctcggcctaccggaggacgaagaagcgtgtcattctcttagactacgatgggacgctgatgccgcagacttcgctcggtaagagtcctacctcaaggacgatagacatgttgaacagcctttgccgcgacaggaacaacatggtcttccttgtgagcgcaaagagccggatgactctgaacgaatggttcttaccatgtgagagccttggactagcagctgaacacggctgcttcctcaggctgagaagagacgcagaatgggagacatgcgttccggtgatagactgcagctggaagcagatcgcagagcctgtgatgaagacctataccgagactacggacgggtcgactattgaggacaaggagactgccatcgtgtggtgctacgaggacgccgatccagatttcggatcctgccaggccaaggagctccacgaccatctggagagcgtgcttgcaaacgagccggtctcagtgaaagctggacccaacctcgtcgaggtgaagccacagggcgtaagcaagggcctggtggcgaagcggatcctgtcgacgacgcaggagcggggcgacgccgacgacctgccggacttcgtgctgtgcgtgggcgacgaccggtccgacgaggacatgttcgaggtgatagccgcggcgc

SEQ ID NO: 275528 - DNA, 781 bp, Zea mays
gcaagagtctaggaggtcattgcaaagcgagatcaccaagctattacaatcgaactctgttctatcaaatgaactaaatgattccattgaaaaacagaagaggtttgaacatgatttcagcaatcttgttagtgaagcagttagtaaagatatcctcagtgtgatctttagaagccttcatgaagagaggacattgcagctgaagtctttgcataataactttggctgtcttcaaacagcaggcggtgagctttatcaggagatcaagatgatgaacaagaggcttggagacatagaaatggagaacaagtaccttggcaaagaactaagtagaactatgagtgtttatggtggatctattgtgctccccccacccggccgaggaaatccagggcgaagagatgccaaccttctgaattcaaacaggaaaatccaacaagattgtcatgtaaatctggaggtggaacaagaggaagtttgcaatgctgattttcaggagtcaaatgaaacactacaggatgaggtccgtaagttaaggagcgaagtggaaatgcttaggagcaaggagaaggctgtgttcaacatcaaatcctgtgatgaagagatcatgaaattgctggctaacatgcaaatggctatcatgaatgcagctctgttcaaagagaaggttcttgagctcatcataacatgcgagagttttgagataagtgccatggtacagaaggaggttctgaaggaagaaatcatacaaagaaattcatatgtagatgagctgaaggac

SEQ ID NO: 275529 - DNA, 426 bp, Zea mays
cccacgcgtccgcaccacagccgccggaagctcctcctcctcctccatgagagagatctagcatagcatagcctccttcctgctggcgggatctccttttgattcgtaacttataacagaagaggaggaggcacagcaccttgtcaaatgatgaactctcagaagctgcagctgcccgttcaggatctgatgagtctgagagggagatcattcatcatcagcaaggtgatgatgcaccagtgcactgcagctgcttcgtcgtcgccttcacctgctcctgctgctagaggcctgcaagttgctgcccatcccagtcccagcaagaggcggcgtcctcgtggcctcgttgccgcggacggcagtgacgacgacgaatgcgcttcagatggtggtgagtccgagtcgtagtcgtctggcgggaaagac

SEQ ID NO: 275530 - DNA, 326 bp, Zea mays
caccacagccgccggaagctcctcctcctccttctccatgagagagatctagcaaagcatagcctccttcctgctggcgggatctccttttgattcgtaacttataacagaagaggaggaggcacagcaccttgtcaaatgatgaactctcagaagctgcagctgcccgttcaggatctgatgagtctgagagggagatcattcatcatcagcaaggtgatgatgcaccagtgcactgcagctgtttcgtcgtcgtcttcacctggcctgcaggttgctgcccatcccagtcccagcaggaggcggcgtcctcgtggcctcgttgc

SEQ ID NO: 275531 - DNA, 445 bp, Zea mays
gccagagtgctaccagaacggcgtgtttggcctgccccgggggaagatggatgtggtggagaagatgcggccaggtgctaagctgttcttgtatgattttgacctcaagctaatgtatggggtatacaaggcagatacaaggggaggattggatcttgtgcgacatgcctttgatgggaaattccctgcacaggttaaatttagtgttgacaaggattgtcttcctattcctgagagtagtttcaagcatgccattaaggagaactacagctcaaaaggcaggttcacccaagagctgaactctaaacaagttcaaagactattggcaatgttcaagcctatcgaccttcctcaatcagctccacaacatatcgaggaagtgcgacaatcacatatcattgaagatattagaaacccgagtgactatgaagatagaagacgattg

SEQ ID NO: 275532 - DNA, 1073 bp, Zea mays
ggacctgggcaaagttgtcagagacggcgagagtagggggtttccaggaagcttcgccagggcgccggtaagttgactggatttgctgctaggcagtcaggcaagctcgagttttgccatttgagaaggagagggaaaatgatgacctcgtggcttctgggccgccggggcccctccggcttctcctggagttccaccgccgaccaagtcacgcagggcatctccgccgccggcctcaccgccatcgtcactggggcgtccagcggcatcggcgcggagacggcgcgaacgctggcgctgcgcggggcccacgtcatcatggccgtcaggagccttcccgctgcccaggccgtcaaggacgccgtcctcgcccaggcgccgggggccaagctcgacgtcatggagctcgacctctcgtccatggcctctgtccgcgctttcgcgtcccaattcatcgacaggggtctccccctcaacatccttatcaacaatgcaggagtaatggcaataccttttgcgctttcaaaggatggaattgagatgcagtttgcaactaatcatgttgggcatttcctgctcacacaccttctattggataccatgaagaggacctctcatgaatcaaatttggaaggaagaattgtcaacgtgtcatcagaggggcacagacttgcatatcgggaaggaatccgttttgacaagatcaacgatgaatcagtgtatagtagcattggtgcatatgggcaatcaaagcttgcaaacatattgcatgctaatgaacttgccaggcgatttgaggaagataatgtcaacataactgcaaattctcttcatcctggttccattatcacgaaccttcttcgctaccacagtatcctagatgttctccatcggacgctgggtaaattggtgttgaaaaatgctgagcagggtgcggcgctttttggtaggcaaagcaaatcgatgtgcctgtgctgtgcaacttaacagcccgctgtacagctacaaccccactccactagtgcttacgaaagtttgtgatctgatctgtgccaggttgactggctttgtgg

SEQ ID NO: 275533 - DNA, 624 bp, Zea mays
cctagatgttctccatcggacgctgggtaaattggtgctgaaaaatgctgagcagggtgcggcaactacatgctatttggcactccacccgcatgtgaagggcgtgtccgggaagtacttctgcgactgtaacctgtacgagccaagcgcgaacgccaaggacatggagttggccaagaggctctgggacttcggcgtcgagctcatcacctagctcatgcttcttgttgttagcgacttgttttcagacatggatgtaatgtaaatcccttgacagatggtaaattctgtaggccctcgaggagctcctgtgtggtaaactcattcacctcaatctatctacgtgtattaaggtggattagggtgtaaattaaattaatttacactccaatcgccctcgaggagctccggggtggataatgctttggttggatattttagtattcacctgaatttacgtgtattaagatgaattagggtgtaaattaaattaattacactccaatccatctcaatatatatggattaggtcgaatactagagtattgtaatacttcaaaatcctattttggataaattagtaaaacgtaaaaaaaaaaaaaaaaaaactcaagactagttctc

SEQ ID NO: 275534 - DNA, 555 bp, Zea mays
gttcgttgcaagtcgcaaaggtttgcgccgcctgccgggcgtcgtcggctcatcgccgtcggcggtaggcttctgcctcccccgtctcgatacctctccttcggcgaagactcgcagggaggtccccacttcatcacctccgtttcctaccggaaaaggcaacttctgtcggccatctcagtactttttttggaagatggatccagaagactctagtgactttgaagaggaggacgacgaagaagaagatgatgacttaatgatattcatattgccagcgctatatctagcatctactggaattggaactctggatcaaacatctatggttagtgatggtactgcgattgaaactccaagtcaagtatcaaagtttaacgatgcagaaaggatttgtaaagtgcttgaagatgacagaggccaaggctatgataaacttcgtgtggagccccatgttctcctcgaactttcacgctatctgaggtcaaatgatcttttgaaaaataccagaggtgtttctgaagaagagaaaattggcatgtttattacatgcta

SEQ ID NO: 275535 - DNA, 389 bp, Zea mays
ctctcattctctcgtgctctccacccgtttcccgcaaaaccctagctctgcgacatgcaccgcggcggcgatcgctccggcggcccctcgagcggcggagaccgctctggagcccggttccagcggggtccctcccgctggtctggcagcagcggcggcggattagggggtagcccgcccaatcgctactcctcccgcggcgcggcagatggaggtggtggaaggggcggtggcagtggcggtggcgggaggttccacccttaccgtggttcttccgactattctagcggcggtggagggtacagaggcggtagtggcgttggtaacgacttcggcgaccagaagcaacgttacggcggcggcaacagaggcggaggccgtggggattt

SEQ ID NO: 275536 - DNA, 1518 bp, Zea mays
cttcagagttcggcgaggcgaggcgaggcgaggcgtggagggattgggaattttttgggaggggaggaggcgtgagcgggaggaaagtgaagagagagtagcttccgatctcgattaccccggtctccgtatcgggaatccaattcggttccatccaacgcctgagatcggattccaacccccatttcggaccgatcgctttccgcagaccgatcggctttgggggattttttttcccgagcgatttttctggaggctcagatcgggtcggtctgagtttagttgatcgcggagcgatgctaatcgaggagcttccgggcgatccgggtggaggacgaggtgagggcggggaggatgagctgctgctgccgcgtcgcgaggatggcgacgccgcggagggcgagagtggagtggtgatgcgggtggccgtcgacgcgaagcgcgcagcggtgggtgtaagcgctcggatgcttttctacccgacgctggtgtacaacgtcgtgaggaatcggttcgagaagcacttccactggtgggatcagatcgacgagcatgtcctgctcggtgctgttccattccctagcgacgttctccggctaaagacgcttggagtttgtggtgtggtgacacttaatgaatcatacgagaggcttgttcccacatccctgtacgaggctcatggaattgaaaatctggtgctaccaacaagggattacctttatgcgccttcatttgttaacctttgtgaagctgctgactttatccacagaaacgcttcatgtgggaaattgacgtatgtgcactgcaaagctggacgagggcgtacactacagttgtcatttgctatttggtgcaatataaaaatatgactcctgctgaagcttatgaacatgtccgcttgcgtcggcctagggtattattagcttctgcacagtggcaagctgtgcaagagttctaccaactaacagtgaagaaaacggggaggtctacttggctggacaatcctttaatcaaaccacctttgttccttgccactcgcaaacttgttgcctttgatgatagcgcatttgtgatggtctcagaatcagacctcgaagggtataatgcagatgcactggcacttaatatgggcagtagattgtgggagataagcttgatataccgtgtccagtttgcgagcaagacagcatttgctgggttttcgtatctgtggcttcgatgtcgtgcctgcaaggaggctctacctgagaatctggggagagatagctgttctcttgaggttgaccagctaacaactggtcatccatgtctactgcaaggtgtcgtggttaatccatgactgctgagtctgtgtttttgccttgcgcttgtacatattaaagagcctcaatgtgaatctgtaacgtgggtctgcagcaaccaaagagtgaagttgctcgggtttgtatatatgacatgtaataagttgactgctacgtgtacgatgttcaatgttaaaacacaactctttctgatccc

SEQ ID NO: 275537 - DNA, 1225 bp, Zea mays
atctttttgttaggagtaataggtaacatgcgggtgttatgcattagtaaactgccttttgcttgtaagttgcaaaggatgcacactatttttaatgtgcaaagtggcatgctgctgatttcagtttattggtgcaaaattagccatttcgggttgctgtaggtcagcatggtacaagcccacaaggagaaagggtatccaaaaaacaaggtgagctgctgcagcatgagccagaagttggttatgatctaccatataaggttcccttccagaggctcccatgctatagcgcgaatgttcccaagcaaagcacctgccaggcgccaatatgccaccggggtagccattaaaatacttaaaattaactccaaggctcatcgaacgttatccagtgcttcaccgtgtttctgaactccctaaagcagatgttgtcatgttggtcagtttggtgttggtttaatttctacgggtgtcgtatatcagaggtaaacaatattagatgtttatttatttgtttggaggtatcagttttctatgaatgtacaactgtttgctttgtgctttatttagacttctaatttatatcgatatttatgacatgtgtttacctgttttgtaagtcaatcaaaaagtttgactagcaactaatggtgcctatacatgtatttatggagcttcttctggtcatatgtgtagtggatctctcctcctgttgttcccttcaatcatgtccaaggtcaagaaccattcaggtcataaacccctacgacaggggccacgagggctcatcttcgccactgcccctactcccaccttctgcatgtcctgctcggtgctgttccattccctagcgatgttctccggctaaagacgcttggagtttgtggtgtggcgacacttaatgaatcatacgagaggcttgttcccacatccctatacgaggataaaagaagtaggcgcaatgaggagtcatgttcattcacaagctctaacagagaaagttggggcagatgttcatctctaggtgcagccagtgatgaattattctcaggcaataataatgataagcagatatgagcccttgggcctccagttcgggcaacaagcatatggcaaagagagtgagggggcatgatattgttttccaattccaagtactctatgtttgggtttggtcgattctgtcaagattcatttctacattttatatgttctatagtctcac

SEQ ID NO: 275538 - DNA, 958 bp, Zea mays
ttgttcatttaaagttggtaacataaccaatgagaagttcttttttgaaatcatcactggtctacggccagcaaacactgcaggttgcagttcatcaaccgatgcacctaacatcccacatgatggcacatctgtaattgaattggggtctgatagcatgaaccaactgtccattaagaatgagaatcacttgctgcaggactttcttttagatgaaaaccacagcctgccagagattgatagtgatagtgttggatcacgattgcaggataaaagaagtaggcgcaatgaggagtcattttcattcacaagctctaacagagaaagttggggcagatgttcatctttaggagcagccagtgatgaatcattctcaggcgataataatgataagcagaatttgacagtcaaggctttggctacgcctgtaagacaaaaccagaggcaaagccagaggaaaccgattgagaaagctaagcagaagaagattcaagccctatggaagaagattaagcgcgaaaaggtggagatgggggacagcctatcttcgcgtttgaagatgtgcctagggcaatctccgcagcacaagaggaatagatcgtctggaaccattacaacttcatagctctgacaactctactgaaccactgattgtccaccatagattctcccttattctgacctactcattgccacgttgtaacctatataccctaggtgaatatatgctacatgaccgcattgtagcatgccaggatgttcgaaagctgagaaagcacttgtatcatctcttgtaattgcctgaaacaagtgtaattgccatctctggctcgttgtcgcatgcaatttcctttcccctcttgcatcctgtgggccctgtatcatctcctgtaattgcctgaaacaagtgtaagagccatctctggttcgttgttaaaagaaaattctttttcttgcc

SEQ ID NO: 275539 - DNA, 452 bp, Zea mays
  unsure (1)..(452): unsure at all n locations
cttgctggaaggggtgacatgaatgtaactcttggtataccccggctgagggaaatactgatgactgcatcagataatattaggacgcctgttatgaagtgtcctttgctcgaacatatttctgaggatgatgctaaaatggtggttgcaaagcttaggagggttcgtgtggctgatgtagtggagaaaattgaagtctgcacagttcctttttacaactctaatgggcgtgtttcaaccctgtacaagttacagatgaaactctatccacaagaccagcttgagtcaggtcttactatagatgagtgtcaggcaaccttgagaacagtttttgttgaggcaatggaacatgcaattgaaaagcatctagatctgctatacaaaataaatgaaatccgtgctngtaagatggaagattcagagggctcattattaaatggtgatgaagaatc

SEQ ID NO: 275540 - DNA, 802 bp, Zea mays
cggaccgtgggtgccgctgatgcttcgcgtctcctactccttcctgcttccacctattaatccaccccactctcttccctccccgttccacccgcctctaccgccgcgagatccggctccgcttccagaagcttctggaacgcccgttccatgagcgtctgatcggccgccgccatgggctgcgctggatccacccccaaagtcgacgagaacagcaagaaactgaaaaggcctaaggcttggaagcatacccaaccaattacaccggcacggctgaaacagatgcgtgatgagttctgggacacggctccgcactacggaggccaaaaagagatctgggatgctctgagggttgccgcagagtccgatctagcccttgcgcaaaccatcgtggacagtgctggaatcatcgtctcgaaccctgacatgacgctctgctacgacgagagaggcgccaagtacgagctgcccaagtatgtcttgagcgagccagcgaacctgatccgcgacgggtgattctggacccccagaaggttttgcagcacgacacagggccacgtgaatttatgtggatgggttctggatttgtaactttcagggacagtgaaagcttgtttcagcgctggatgttgtatagtgatgttattggacacgatgtgtagtctctagacctgctactgctgaactcggtcattcagggacagtgaatgcagtgtcgtttaggctatatgctgcaggcctgcagcctcctctcttatttcagactccactatatctatataaacagtacagtttgcaatgc

SEQ ID NO: 275541 - DNA, 566 bp, Zea mays
gcccttgcacagaccatcgtggacagtgctggaatcatcgtgtcgaaccctgacatgacgctactgctacgacgagagaggcgccaagtacgagctgcccaagtatgtcttgagcgagccagcgaacctgatccgcgacgggtgattctggaccccaaaaggttttgcagcagcacgaaacagggccacgtgaatttatgcggatggttgattcggtcgctggttctggattgtaactttcagggacagtgaaagctcgtttcagcgctgtatgttgtatagtgatgttattggacacgatgtgtagtctctagacctgctactgctgaactcggtcattcagggacagtgaatgcagtgtcgtttaggctaatatgctgcagccttattcatccctcctcctatcctatttcagactccgctatatctatataaatagtgcagtttgcactatatctatataaatagtgcagtttgtaatgcaaaacaatgtatgctcagagtctgagagctcagcttgcaaagaaagagacatgtcacagaatcactgaagtgaaaatgtctgg

SEQ ID NO: 275542 - DNA, 611 bp, Zea mays
tccactcgtccgccaaggtgttcacacctttcatgcaggctgatagttcgacttccaggacatatggtggtactggaattggattgagcatcagcaaatgtcttgttgaactaatgggtggtcagataaactttgtcagccgaccacatgttgggagtacgttcacatttactgcggttctcaaaagatgtgacagaagcgctattggtgacagtaagcctgttatgttgcatcctcttccatccagtttcaaaggtttatctgcactattggttgatagaagaccagtaagagctactgtaactaagtatcacttgcaaaggctgggaattgcctgtgatgttgttgctaccattgaactggctcttggtgtgctgtccgggagaaatggcagttccctaaccagtatgaagcaaccatgcatgttattgatcgagagtgattcatggggcttcaatattgatgtttctttacgatctagactcctggagatgaagcagaatggtcacacacatgtattacccaaaatcatccttcttgcagctgcagaatcgggcaaactcaaagaacactatgcagttgattctgtgatcacgaaacccctgaaagca

SEQ ID NO: 275543 - DNA, 576 bp, Zea mays
ctcagtttgcgcacgacagcctcatcttcctcgcgcgcaccaccggagccccctcctgttcctcgcgcacggcggcttcctctccctctctaagccgccgccgcccaccgcctcggtgcgcgggcgattcatcttcctcgcgtagaccaccggaaccccctcctcttcctcgcgcagagcaccggatccccctcttcctcgcgcagagcacgacacataggagatctgcaaagcctcatcaagatggcaggagatctacaaagttcaaatcagtaactatctgctgtgtaacaggtgcaagcataagttttttcagaagatcaaaggttgctcttctatggagacttccaaagaacaggcttccaaggactatgctgatttcgagaaaaaagttaagaggaccatatatattgaccacctttctcctcaagtaaaggaatcggccatcaaagctgctcttgcacaatgtgcaaatgttgtccatgtggagttcatcgtcaattacacgatcccatataaagatattgcttctgctgcattggtggaattggatgatgacgtgcaggctaaggctgc

SEQ ID NO: 275544 - DNA, 466 bp, Zea mays
aaagtggcaaacgccaaatcgacaaaccctaatgacctaatccccaacccccagccggcagccgccgagcaaaccagctcatccggtcggtcatccactcatcctcatcccctgcccatctgatccgatcggtcatctcatcctcatcccctacccgatcggatcccctgctcatccgccgagcaccaccaggcagcaggctccagtcatcgagcaccagcaggagcacggcgcgctgcccagtaggagcacggccaagaggatgacgcccgcatcctgcctcttctcctctgctactggagcctctactgctaggagcacggctaggaggacaacacccgcatccagcaggagcaccagcaggaggaggacgcccatgctgctgccgttgagcgatgatctgatgcgcccccatcatggctcttctgcttcctcgcgggctcgccttgatctactgctgctggtg

SEQ ID NO: 275545 - DNA, 481 bp, Zea mays
ctcgagcgcagccgacagccgccgagcaaaccggctcctccggtcggtcatccactcatcctcatcccctggcccctgcccatccgatccgatcggtcatcccctacccctacctgatcggatcccctgctcttccgccgagcaccaccaggcagcaggctgcagccgtcgagcaccagcaggagcacggccaggaggacgacgcccgcatcctgcctcttctctgctgctggagcttctgctgccaggagcacggccagaaggacgacgcccctgctgctgccggttgctcttctatggagacttccaaagaacaggcttccaaggactatgctggtttcgagaagaaagtcaagaggacaatatatattgaccacctttctcctcaagtaaaggaatcggccatcaaagctgctcttgcacaatgtgcaaatgttgtccatgtggagttcatcgtcaattacacgatcccctataaaga

SEQ ID NO: 275546 - DNA, 439 bp, Zea mays
cgccgtcgtctaatctaccgcgcgcaagccttccctcggggctagatctccgggctccgcttgcccaacttccaccactgaggcgatgcaggaggccaagcacctcaccacctcaaagcttccgccgcaatcccaatcctcatccccatccccttcggctcccgccgcgaaccctcccccataccatcacgactatggtacctttcaccggccgtttcagccgacgctgcccgtcgtaggccccgcctaccatgactaccatgcctctcctatcgggttcggcagccaggggttcgttgcctccccgggcgccgtccagcagcaggtcttcgtggagggcatccccgtccgagagccggccttaccgttctgcggcgtcggcgtcggctggtttttgttctaattggggttcttcttggcggcaatcccctggtatgct

SEQ ID NO: 275547 - DNA, 714 bp, Zea mays
gccactttgacgatgaaaggggtggaagatgatgaagacgatctgaagacgctaaatatggagcttaagcgggactggtccagagggactaatgcgttcgagttggctttccgtagaacaaagagatctctgcattcttggatcagagggaaaggaccaaagtgccggctgatacttcagtttctgctccagaagctgaaagctatcaggaggaagctgctccagaagatgagggaagtagtgaagaattgagctctgtgtcagaagtagcaactgatgtttctcctcctgtatctgatgcctcctctcaggtgggaattcaggattctacttctgtggcaaatgctgctgaggaccaaactgtaggatctgaaagttcacctacaattagtgttgaactgtcctccaacgggaccccagatagctctattgtgtcttcagtttcagaaactgcagataaacctactgaacctgaagaatcttcagcggtagaagaggttcttgtaactgcaagcagcgaggcagggaaagaaccagctgctgacactgaggctgtaccagccttgaatgagaaaactggtgccgaggttgctgctgctgctggagttgcacaagcaagcaccacgacagccactatttctcctacccttgtcaagcaattgcgtgaggcaactggagcaggcatgatggactgcaaaaaggctcttgctgaaa

SEQ ID NO: 275548 - DNA, 834 bp, Zea mays
cggacgcgtggtggacgcggtggagagcgagtggggccagggcgccgacctggccgcgctggagcgcaggctccgcgaggacgcgccgcggcacgccatcaaggccgtggccatcgtgcacaacgagacggccacgggcgtcaccaacgacctggccgccgtgcgcgcgctgctggacaagcacgcgcacccggcgctgctgctggtggacggcgtgtcgtccatctgcgcgctggacttccgcatggacgagtggggcgtggacgtggcgctcacgggctcgcagaaggcgctgtcgatgccgacggggatgggcatcgtgtgcgccagccccagggcgctggaggccagcaagacggccaggtccgtgcgcgtcttcttcgactggaaggactacctcaggttctacgacatgggcacgtactggccctacacgccctccatccagctcctctacggcctccgcaccgcgctcgacctcatcttcgaggaagggctggacaacgtcgtgaggaggcacaaccgccttgggacagccaccaggctcgccgtcgaggcgtgggggctcagcaactgctgccagaaggaggagtggttcagcgacaccgtcaccgccgtcgtcgtgccgcccaacatcgacagcgccgaggtcgtcaggcacgcgtggaagcggtacaacctcagcctcggcctcggcctcaacaaggtcgccgggaaggtcttcaggatcggccatctcggcaacctcaacgagctgcaacttctgggatgtctgagcggtgtggcgatggtgctcaaggatgtggggtacccagtgaaactaggtagcggcgt

SEQ ID NO: 275549 - DNA, 1856 bp, Zea mays
cccacgcgtccgcgctgcaacagatccttgctcgagcagttggcgatgacgctatattgaatggaagccatgtagtcgattttacagatgatggcagtaaggttactgccatattggaggacggtaggatatttgaaggtgaccttttggttggtgccgatggaatatggtcaaaggtgaggaagacactattcgggcactcagatgccacctattcaggttacacctgctacactggaattgcagattttgtgccgcctgatatcgatacggttgggtaccgggtatttctgggccacaaacagtacttcgtctcttcggatgtcggtgccggtaaaatgcaatggtatgcttttcacaaggaagaggctggtggcactgaccctgagaacggcaaaaagaaaagattgcttgagatatttgatgggtggtgtgataatgtcatcgatttggtaaacgcaaccgacgaagaagcgattcttcgccgagatatatacgaccgcccacctactataaattgggggaaaggtcgtgtcaccttgctcggcgattctgtccatgctatgcagccaaatctgggtcaaggtggctgcatggctattgaggatggttaccagctggccgtagaactagagaatgcctggcaagagagtgtcaagactggaactcctatggacatagtttcctccttgagacgttatgagaaagagagaagggtgcgtgttgctgttatacatggactggcaagaatggcagcaatcatggctaccacctatagaccgtatttgggtgttggtctaggacctttatcgtttttgaccaagttgcggataccacaccctggaagggttggtggcagattcttcatcaagtatggaatgcctgctatgctgagctgggtgcttggtggcaacagctcaaagctagaaggaagacctttaagctgccgactttctgacaaggcacatgacgagctttatcggtggtttgacgatgacgatgcgctggaacaagctatgggtggagaatggtacctcttcgcaacaagtgaagcaaacaacaatagcttgcagcagcccattcatttaattagggatgagcagaggtcactctttgttggaagccggtcagatcctaatgattcagcttcttccctatcattgtcctctccacagatatcagaaaggcatgctactatcacgtgcaagaataaagctttctatctgactgatctcgggagtgaacatggtacctggattaccgacaatgaaggtagacgttaccgcgtgccaccaaacttcccggttcgtttccatccttccgatgtcattgagtttggttccgataagaaggctatgttccgggtgaaggtgctgaacacgctcccatacgaatcagcaagaagtgggaagcagcaggggctgcagcaagagcaagtcctccaggcagcatgaatggagacaccagtcaccatcccatcatcagcgacactgtactgtatagcaatcgggagatacacgatactccaacgcgtaaaaaagcgtaaaagatacgtcaaaacagatgtgatttttgcatccatgcagatgcgaaacaggattttgaatcctagcacctaacggatttaaatgatgaagtttcagttctacgagaggaactgagttgtacgatagggataacttagctgttgtcggactgtgtacattgttggtatcatcacccaaaatattgtacatctagaagccatattgtaattacggcacgtatacagtaacactttgatcatgtaatacagtatacagttgtttacggcaaaaacaagaacgacaaacaagacagcgatgtaaccctgacag

SEQ ID NO: 275550 - DNA, 370 bp, Zea mays
cagggtttaaacgatcttctcatgtgttgcattgtacaaggccttgtatccgtaaactgcttgtaccagtcttcgttgtctggtcttgatgcagatatcagaaaggcatgctactatcacgtgcaagaataaggctttctatctgactgatctcgggagtgaacatggtacctggattaccgacaatgaaggtagacgttaccgcgtgccaccaaacttcccggttcgtttccatccttccgatgtcattgagtttggttccgataagaaggctatgttccgggtgaaggtgctgaacacgctcccgtatgaatctgcaagaagtgggaatcggcacaacagcaagtctttcaggcagctgaattggaga

SEQ ID NO: 275551 - DNA, 490 bp, Zea mays
tcccatgcacgcatcggcatatatcaatggcgagctcctcctcctccgagcaccgagctgaaacacacatcaagaaagcaagaaagaaaagactgtagctagctagccaccgcgcgcgcgcacgagtagtctagctagaatacactcgcgttcaaaacaaacacacagcgtcgtgctgcgtgatctctgaccgcgtcgacaactaccgcagcaccaagcagctgatggcggccaccgtatcttcctgcctgagcctcgtccccaccgtgcaccaccgggccggcgggttccccagcagtgtggcactgacgaacacgcttcagcgccgtcgtcgttctcgccgctatcttgtcgtcgcctcggcgacgagagccgaacaggaggccgcccctgtgacgatcgaggacgtggacctcagctctcatcaggccgcggccgacgacggggagctcgccgcgcggtggcgggaggtccacggcagcaacaactg

SEQ ID NO: 275552 - DNA, 665 bp, Zea mays
tttttattgaacgcctcagagaattgacacgattgcgcttgttggatatcaactataataggatatctagaattggccatggtgcagaggatgctaggaaaatactcaataattatggtacatgtccaattctaagtatggtatattgtgctctaatatttttaggcatcattgtttctgttaaatactttgcccatggttaaggttatgagtgcattggttaatgaaatgtatgacattaaacggtggctgcgtggtgttccatcgtttcgccttgagccattatttaggcgaagaggtccacaattgcatactgcacttgaacatatatagtactcatgaagttgttctacatcatattggatttcaatgcttttttatcagtgacagttttctcttttttggtgagtacagtaattgtatttttatcttgtaatagattagttttattcatacgacaagcactatgcactgtgatatttgttgatttttcctttacctgccccccttgcactttctaattaaatgtttgtgactatggaatggatcttttccattccatgtggtttgggggacaattgatgtgctttgctttgaagacagttgtagtggtcatctgattgtgaatttgtggtgcacaagttggctatgtgttttttccaaga

SEQ ID NO: 275553 - DNA, 569 bp, Zea mays
  unsure (1)..(569): unsure at all n locations
cccactcgtccgggtctttgtaggttcagcgttcaggaactaagtgcaagaggaccataccatgtcgcccgtgtttcacgccttgacatgacaaagactgaattggagcaggcagagcaagacccagatcttatcgctctttctaggcagtttaaagctactgccatggaactaatttctgttctagaacagaagcagagggcggttggtaggacaaaggtgcttcttgatacagttcctgttcacaggctagctgattttgctgttgctagctttgagataagttgtgaggagcagctttcgatgctggattcagttcacttgaatgttagactctcaaaggcaactgaacttgtagacagacacctgcagtccattcttgtagctgagaaaataacgcacaaggttgaggggcagctatcaaagtcgcagaaagaatttctactgctccagcagatgatggccataaaagaagaacttggtgatcacgatgacgactatnatgatgttgctgctgttgaaagaaagatgcagaatgcatgaatgcctgctaatatttggaagcatgc

SEQ ID NO: 275554 - DNA, 389 bp, Zea mays
cccacgcgtccgcggacgcgtgggcgaaaattctggggcctcagcacacctgagatggactgggcttgggcagctaaccggttaattgacaaggatgaggcagaaactccagacgatgctcctttaaattatttgccgcggaagaggctaattttgacaagccagttgatccagcaacttctccctgctataccagcgaccattctgagagcacaagctgtgtctgcttacggaagtgcgacatacactctatcaatgttgacactaagggatgcatgcagcatggcatcatcatcatcatcatcatcatataactcttgctcacctgtggaggatgaaaataacccatctgaacaaccgagtgctaagaaaatggaagacagagtgtc

SEQ ID NO: 275555 - DNA, 292 bp, Zea mays
tgcgattctgctattttagttcttgtccatattggtccaagggatttatcttgatgctaaactaggtgctggaataggatgaggcataaactccagacgatgctcctttaaattatttgccgcagaagaggctaattttgacaagccagttgatccagcaacttctccctgctataccagcgaccattttgagaggacaagctgtgtctacttacggaagtgcgacatacactctatcaatgttgacactaagggatgcatgcagcatggtagcatgattatgatctcatat

SEQ ID NO: 275556 - DNA, 271 bp, Zea mays
accgcactgagaaaccaaaccagcaagcgaagcccagcaagaaaaccacatgccccacctcgccgccactccccccacttcctccgccgccgccgtccccgccgcgggccgcatcgcgttccggcgcccgtggaacacgccacagccggaagcgctgcgcctgcgcctccgcctgcgcgcgcggggcgttcggcatgaggacggcggttgcgtgcgcacggtggagcatgagcagacagtaccgcggacgttctacgacctgctcgggatc

SEQ ID NO: 275557 - DNA, 542 bp, Zea mays
ggccatcaggttagcaagaccaacaaattcttacactgatacgttcccttcgaagttcgggcccacctcccatggccaccgtcgactgccccctgccctctcccgcggacctcgacgacaacggattcccggctctaccctcatcccccgctgcctgtagcagcggcttcgcggaggacttctaccgcagcggcaccgactggtcctccttacgcgcccctccgccgctggggccgcccagaagggcacccggtgtgaaggagagaggaggcggctcggccgtgcagagcagcctcttccaggcgtgggggatcgagaagccgcggcgggacgggcgtggggctggggattcatcgcttgtgcagaggagcctcttccaggcatgggggatcgagagaccgcagagggagggtctcggggctggagattcctccccctcctcctccctttccggttctttgttggcaaggaagcggaggcgaggaagcaccgaggaggagcgggtggcggccaagaagcccctcgcgtgccccttctacaag

SEQ ID NO: 275558 - DNA, 851 bp, Zea mays
attggaagtgggaggtgggtatccttcctccactgtcctttttcatctctctctctctctttgctctctctaaaagactttgctaattggcctgctagccggtctccctcccccggcctctttccctttcagctggaggagatagatgagagagaggatcagaggaagcaggaaggagagagggatatataggccggtgtcttctgtagagagagagattgagagcaaaagggaaataaaggagctctcgcaggcactcggtactgacatgagtgatctcatgctcttgataccttggtactcttacatcaccccttcttcaccttcttcttgttcttgctcatccctcctctccggccctctcttcctcctgcctctctctagctaggacgatcttcaacaaccctctccccctctaattctctttccccatatccagagaataaaggagagagagagagaggcgaaggcaggcagctaattttcttttgctcaagggaaaggacagcacgtgccggagcgagctcataagctggtagctgcatcaattcctgaggcaaatccacctgcttacgatcttgcagtcatcagcacgctattagttgaggataatttcgcgcacaagagcacgacaagccgagatttttgggggcgtcggcgtcgacctgtaggcgatggcggcgtactaccacggtggcgccggcacggacatccaggccagcaccgacggcctgcagacgctgtacctcatgaacccgagctacgccggcggctacgctgacgacggcggcgcgtccacgccgggggcggccaacatgatgctcctcaactcggccgtgaccaccatgacg

SEQ ID NO: 275559 - DNA, 686 bp, Zea mays
cggacgcgtgggttccatttcttttcttcttggaaatggttcaaacagtggttacatgtctcctgaatatgctatggaaggctcattctctgtcaagtctgacacctatagctttggtgttctactactggagattgtaagcggcttaaagattggctcaccccatctgataatggactatccaaatctcattgcttatgcatggagcttatgggaaggttgaaatgcatgggaataggtggactcgtcggttctggtgagttgtccacttcaggaagctgtacgatgcatccacttgggtcttttatgtgtccaagacagtccaaatgcgaggccgctcatgtcatccattgtgttcatgctagaaaatgaaacagccccggttcctaccccaaaaaaacctgtatattttaccagtaggaattatgaaactaatcagtcagatcaatacatgcgaagatcgctgaataacatgagtatcacaactctagaggggcgttaaatgtttagtttcattgttcgctattttggtaaacttttgtttaatgtgtgccattaaacaattacattaggtttgtattaatacaattacactagccgttcaggtttgtacatagaaaatgttccattaaatctgttgtacaccatcggttcggtgggttgtattgatatattctccagactgt

SEQ ID NO: 275560 - DNA, 1631 bp, Zea mays
cggcggccggtgccggcagccgggggacggtgagatggaagggggcctgcttctacgagaacgaggcgtggctgatgttccacaacgagaccgggtccaagtacggcggcggcacgctccatatcaagacatccaaagcgcacagctggacttgcatagatctgtatgtatttgcaacaccatacagagttacatgggattactactttttggggcgagagcacactcttgatatcaaagaatgggaaagcgaggctgagtatgagtatgtgaaacgtaatggtgtgtccatcttcctcatgccatctggaacaattggcacacttcgagcactctgggatgtcttccctctgttcacaaatactgcatggggtgagaacgcgaatcttgcttttctcgagaagcatatgggtgccacctttgaggaacgcccaaaaccttgggtctcagagttaaatcctgatgatatccactcgggagatttcttggtgggcgcgcgcgtgcgcgggcgttggggtggttttgaaacactggagaagtgggttactggcgcttatgctggccatactgcggtttgcctgagggactccgatggaaagctttgggttggggaatctggtaatgaaaatgaacagggagaagatgttattgctatcctgccctgggaggaatggtgggagtttgaagtgacaaaggatgactcaaatcctcagattgcactgcttcctttgcatccagatctgcgggcaaaatttaatgagacagcagcttggatttatgcaaaaagcatggaggggaaaccttatgggtatcacaatatgatatttagctggattgataccatcagtgataattatccaccaccattagatgctcatgtggttgcttctgttatgactgtatggagcaagcttcaaccagagtatgctgctaatatgtggaaagaagcccttaacaaacggcttggaactaagggtcttgacctttctgaaatcatagtggaatcagagaaacgtgggataacatttgacaagttactaactgttcctgagaacgatagctgggtctatgaagatggtcagtcagcatcttgtgtggctttcgtccttatgatgtacaaggaggctggactctttgaccctattaccagctctattgaagttactgaattcacaataaaagatgcttatatcctcaacttttttgaggacaactcgacccgacttccggagtggtgcaacaaggatgacgatgtgaagcttcccttttgccagatcaagggcaagtaccggatggagctgcctggatacaacaccatgaaaccctatgcccacatgaacgagagatgtccatccctgcctccagattacaacaggactaagggctgctagtgctatccagatatgcgtgtgcattttattcacgctcccttgtagccattgcttcagctgtaaatattatacatttatactagtataatagtactatgggggtatgtactgcttgcccttgagaagcgtgtattgattgtaggcaacttatgtgagacttcctcgaataaggaagaacatgaatcacacaaatgtacagtaaccatgcttgatctttttatcagtgtttacttatgtaac

SEQ ID NO: 275561 - DNA, 435 bp, Zea mays
  unsure (1)..(435): unsure at all n locations
tcggtagaatgcatctctgttttgctaacaattgttagcgaaatagctgagaagaagctaataagccaatcagtgataaagcattgcattgatttattttttcagtacccttataatgactttttgcatcatcatgttgcgttcattattgtttcttgccttgaggttaaaagaaatcaattgattgaccatatgcttaatgactgtggtcttgttggtaaagtccttgccgctgaaaaaagttcttctctggcagtggagtctaatgggccaacattaccatcagaagggaaagatccttcaagaattgggaatattgggcacataactcgaatagcgaataagctcattcaatttggaaatagtaacagcatgatccagagtcacttgcangagaacagtgagtgggctgtatggcaaatagatgttctgatc

SEQ ID NO: 275562 - DNA, 1008 bp, Zea mays
cccacgcgtccgaggagtagtagcacttggacgcagcacctcctgctgctgttcttcctcgtcctcggcgtcgctaccaacagcagccattcttccaccatcaacatcaccaaccgatgctcctacacagtgtggccggccgccacaccagtgggcggcggcatgcagctggagcctgggaagacctgggtgcttcaagtgcctggctacacgcatagtggccgcgtgtgggcgcgcacggtctgttcgttcgacggccccggaaagaaatcctgccagacgggtgactgcggcggcgtgctggcatgcactaccagcggccaaccgccgatgacgatggcagagttcaccctgagtgactccaacaacatggacgactacttcgacatcaccgtcgtcgacggctttaacttgcccatggactttctgccggtgccgtcgtccaaggggtcgtcggggtgcagcaggggtccacgctgcgccgccgacatcacgtcgcagtgccccgatgtgctcatggtgccagggggttgccgcagcgcgtgcaacggatcttcctgcgacgccagcacggtaaacagcaacacggttttctacgctcggatgtgccccgacgcctatacctacgccactgataatggtcccgttacatattcgtgtccgtcaggaacagattaccagatcattttctgtccccccgtcgatcttgtgtcattgtctccacctccaacttcaccattgtctccgcctccaacttcacctactgcaacaaatggaacaagcagcatcacatcctcatcaaaatccaagaggccaagaatatttggttatgttctaggtggttcaataggtggcttcactttgatcgcatccttggtctttttcttcgtcctgcatagacgacgattgcatcgacgccaagagatgcaagaagaggaagaagcagagtttgtgaggctaccaaggatgcccagacggttcacatttgagcagctacaggaagcaact

SEQ ID NO: 275563 - DNA, 1125 bp, Zea mays
tcggaagagtgcaatgtatagaaggtgtgaatcaaccaaggttgattctgtaattacacatgcatcatgtcatacaactttaagttaaaccccctgcgtagctattttagtgtatgaatcatctaccttgttcatacatctttagtgaatagagtgtatctgttgcccttctcgatagatgaatcaacaagaagcccctacgggagttggagagtttctacgagattttggtgttccagtggtcctgtggcgactacttcaagaagtcggatataccgaagcacccaagtaccagtggccacgcacggttcttagaggacaaccatggtatgaggtagtagtgcatattccagaacgtgctagaaagccatcttggccacattggatgttccatgctgaaggaatgactccttgggaaggtgctcaggtagctgccttatgaggcgctaacaaccatttgttaccagtaatgggttgaaagacaagccacatctatgaggttgttcccagcagttgccttaagtgacccatttgtgtatcatcaccaggcccgattaatggaaagcattcctattgggcaggattctgttgaatcggcatctgctcgagttttgatggccgtgctagagttgcaacttactcgagggcacagtcgtcaaaagtggcagcagttgtacaccggaagttatgcagcatttaagatgatggaaatggccaagaatagggcttgtacccaggcacaagaacgacttgaggaaacaaaggttcaagcagaacaggttattggactaaagcatcaggtgatagaacttcagacgcaacaccaagctgatcagaatcgcattaaggcgcttgagcatcagctagctaatgctcattctaaatcaaaagttctgagtcagcaacaagaagaaattcgcttgggtgctattgctattagcgaagaccttaaggaaaccctaagcttcataagccatcaggatcaggcgatccaggaattgaatcgtgctcatccaatggaatttcaagtagcgcaacggcttgtcaaccatctgcagcaagcagtgcatatgctcaatgttgccttttatcctactccggcatcagcggactaagggttccttg

SEQ ID NO: 275564 - DNA, 661 bp, Zea mays
tgttgctagagctggtcgtcttcctcttcctcttcctcctcctgcctcgatctgacgagagctcagccttgccttagtctcgccatcgcagaaggcagaagcactagttcctgagagccacaaaaccaaccaaaggcaccaaaggccaagctaccgtgaggcgagggaaagggaaagatcacatatcgcctattcgcctacctctgcgtgcatcagaagatgatccccttcataaagatgaaacattcccattccctccactagaagctccgggaggacgcagcaagctcaccgaagccagcaaccgatggatcagaggcgcgtcacggcgaggttcggcagcaagacgagctcggagcggaggatgctgcggcgagtgaggctccccttctggtcctgccctccaaaccggcctccaggcacctgagcgcctcgaatcctcgatagaacagctggtctcgtgctcccctcccccctgtctctctactctgactttctttctttctttctccgctccgctccccgtgcccctcctgctccttggaccctgcctgttctgtcagtcagtctccctccctagaacggcatggctctgcgttttgtgtgatctcgtcgcgagcctgtccgccggtgccggtgcctcaatccccttgggagaagc

SEQ ID NO: 275565 - DNA, 563 bp, Zea mays
ggtttctaagctgtggagtcgtgatgagcaactaaagttcgacgcacttgagcaattggttcccgttatggatcaaaagacatattgggctgttgtgtcgaaaaattttgcttcaaagcccaggatagatttgataaagtactatctgaatgtgttcctgatgagaagagtgttgtaccagtgcagactcggtcttctggaaattgatagtgacgaagatgacgtggaggaagaagaggatgaagatcaacctgaaggatccagctctcttcagaggactcaagatgcccaagacttgaagaaggtgccatgattctgctgacaacaatctgacatgcttttttgcatgtgccttttgttcaagtttatgctgagacattgcatcaagtgatgcaccattgctccgagtgattgcaagtctaattttttgcagattttttggttgagggttgcattcactttggttcagccatcttttgtggacagaaaactaagccgagtgttaaatcatccccgcgcgtctatctaggcacgcgaatcaatacttcaacctcaccagatcc

SEQ ID NO: 275566 - DNA, 718 bp, Zea mays
  unsure (1)..(718): unsure at all n locations
cctccgcttcctcgccaggttcctcctcgtcgcactcctgctcggcaggcgttcgcacaccgtcccgcgtctcgcctcggacatacgcacgctcttagatgactccaaaaagtccttccaggatgccgaatacaaggagtggaagcatgtcgtgcaagagatcgcgaggttcctgcgagctgactcaccatttatgaacatgaggccgctcaggtacagctatgcattcgatccgcccccggacacgcttcgtactatgccaactactatcaagaagcgaggtctcgtcttaagtgacaccatactttgcagctactatcctaacgaggtcaaatttacagacctctccatagatgtattcagaatggttcagtgcctcgaatgggaaccatgtgggtcatttgcgctaaacgatggttacagcgcccatgatgaaagtggacaaaatcaacccaatctattgaaagatttaagagatgctgcactgcccccgaatccacttaagacaattctctatcgcccttcagtaacacatttcctaacggtcctttccacaaaatgcgaggagcttccttcaaatggtatcatgttaatatatctttcagctacaggggagatgggaacttctggattttgtcctgatactggtgaaaatgttttgagcaactttaataagtttgacatatccagtcttagtcatactagntcaaaagaaaac

SEQ ID NO: 275567 - DNA, 323 bp, Zea mays
cccacgcgtccgcgagcggcgccgctcgttggcgacgagcagcagttgcggcggaggctgggggaagcggcgctcctcctccgcaggatcaaagggcttgtgcgctggatcgtcgaagaggttgccgccggccgctccccgtctatagtgctccaccgtgcctgcagctacgacatccccgtcggcacggacgtcctctctctgctccacaaggactaccacacctcccgcctcaatgtgctcctgagggtgctgtttgtggtgcattcagtttctgtagcagaacaagcactgcttcaagagggacatttactacatgtacc

SEQ ID NO: 275568 - DNA, 513 bp, Zea mays
atccttttgcgcggaggctgttggagcgttggatagtgcgcggtgccggcgaggacacctcgcactcgctcgcagtccaagaacgaaggcagcctctgtttccttccgaccggcgatgaggaacccgccgggcaggcacctcctctgtctcagcagccgcgccgtgcgctcttcctcctcctcatcggcgctcggccccggacccggcgctgttacctccgccgcgtccccacgcccgcgcgccatcgcgcccgggcggcccctgcgcgccagttccccatccccgccttacgcagtcgccgccgccgcgtacgtggaggacggggactgggaggaggtcgtcgctggggggcctggtactggggagatggaggaagaacaggactacagggtggtgttctggtccccgccgaccatagacgaggttaccggcgcagtcaccagcatccagcaagtatttgagaatcctcttggactggattcagatacaactgacagacagacaacactact

SEQ ID NO: 275569 - DNA, 860 bp, Zea mays
gccaactttgcatagtcaaggtaaaagagaattgcgatgaggaaatggaatcgccaacaaagaacaatttgaatagcaacaatagcatcaaagatatttctcaagagcacaagaaattagcaaatggattcaaccttttccagaaggagctggaaagactgaaagatgagaatctgtctcctcttcttcccctagacgtcaatctaactgacccatcactcagtggtttggaaaggacattgtcacaactcgatatggcaaatgagcatttgcaaagtatttttccatcatttaaagagcttcctggttctggcaatgctttggaaagattactcgccttggaactcgagcttgcagaggctctccaagcaaagaagaaaacaaacatccttttccagagttcattcttgaagcagcacaatgatgaagcagcgatcttccaaagcttcagggacatcaatgaagtgatacaagatacgatcgagctgaagaggaggcagatggcggtagaaaacgagctaaaggagatgcagggcaggtattcagagctcagcgtgcagttcgccgaggtggagggcgagcgacagaagctcgaaatgaatctgaagaaccgaacaccatggagatcatagggaaccaccaatcaaagcgaagaaaactaacgagagaagaaaaaaaaagtgtcagccagctgcaggctttgtatacaatcttgtgcgacggcagtgggatacattttgtagtgtatatatatcagctgtatcgattgtagagttgtagtgagcgagtgatatgcataaaatgtaacacagcaccttgtacaagaaacaagccttgttatctgattgttccttgccaac

SEQ ID NO: 275570 - DNA, 385 bp, Zea mays
cgaagattttctccaattagctattggccaggagtgttcgttgtgcctttcgcttgagctctctggacagaacaataatgcaggaacagtaggacagcaagatcatatggatacaaattatcctggaaatcttgcagtagccactgtaaatgggaaggagtcctcaaataaggatgtgagagcggttcctaaccccaaaagcttagaaatctacctgctccatatgttccatgaaattcttaggaaactcagggagaaatctcgtcatgtggttcgctaccagagttctgctcaagctgcacctgacgattgtggcctgctaagccatttttgcatgacagtagctcacaggatattgtctaacaaagtacatttggagctggaa

SEQ ID NO: 275571 - DNA, 476 bp, Zea mays
cgtcggggttgttaagctctcgctaaacctatacgccgggagcacaacacaagtgctcggcgaaatgactagcgccggggcggcgacaggcgccgcgctaggcgcgcggacggcgcggtcctgcgacggctgcatgaggcggccggcgcggtggcactgccccgccgacgacgccttcttgtgccagacctgcgacgtctccgtgcactcggcgaacgcctctcgcgcgccgccaccacacgcgtccgcctcccctctgcgtcctgctcctccccaccgcgcgacccggacgcgccaacgtggctccacggcctcaagcgacggccacgcacgccacggtccaagccaggggggagcacgagcaacaagcatgaggcgactcccagctttatcgccgcggctgcgtcgtcggcagcggtccccgacctcgaggcggaggagtccggctccggtatcctgggcggtaacgacgacca

SEQ ID NO: 275572 - DNA, 935 bp, Zea mays
gttttacagacagacagcagcacctgctcctccgtctggactgactgactagtgactcagctccacccacatcccccttcgtcgtcttctccctccctgctagctgacctccaatccacgataaggcaagataagctagctaggaaggcaagggatccgatggacaagtacgagcccgttcgcgagatcggggcgggcaacttcggggtggccaagctgatgaggaacaaggacacgagggagctggtggccatgaagttcatagagcgaggaaacaggatcgacgagaacgtgttccgcgagatcgtgaaccaccgctccctccgccaccccaacatcatccggttcaaggaggtggtgctgactcccacgcaccttgcgatcgtgatggagtacgctgcgggcggggagctgttcgagcgcatctgcgacgccgggcggttccacgaggacgaggcgcgctacttcttccagcagctgggttgcggcgtcagcttctgccacgccatgaacatctgccaccgggacctcaagctggagaacacgctgctggacggcagcccggcgccgcgcctcaagatctgcgacttcggctactccaagtcctcggtgctgcactcgcgaccgaagtcaacggtgggcacgccggcgtacatcgcgcccgaggtgctgtcgcggcgagagtacgacgggaagcacgccgacgtctggtcgtgcggagtcacgctctacgtcatgctggtgggggcgtacccgttcgaggatccaaaggacccaaagaacttcaggaagacaatacagcgcatcatgtcggttcagtacaagatccccgagtacgtgcacgtctcccacaactgccgccaccttctcttccgcatcttcgttcagaacccgtacaagaggatcaccatgagcgagatcaagacccacccctg

SEQ ID NO: 275573 - DNA, 781 bp, Zea mays
accataccggcggctctctgtttctcgaatccccgatcctatctcatcgaatagaaactgttccgctcccactccgatcggattcggtgggacggtggcatctatgcgcccgcggcaccgtcgctcaaactgtataaacctgcgctcgaacacttcgagctcacccgcaacctcctccgggaagcgcgatcgccatctcgaaggagctgagatccaagattccaagctcttctgtcacaggttctgggaagttgaagcaaaaatgttctacgggggatatgcttaccatggcaactcgtttgagcaaacataccgttgttatccagcatcgttttttgataagccacacctggaaggcggtgataaagtaataatgccaccttctgcccttgatcgtcttgcttccttgcacatcgagtaccctatgctatttgagctgcacaatgatgcaacccagcggatttcacactgtggtgttttggagtttgttgcagaagaaggcatgatcatcatgccctattggatgatgcaaaacatgctgcttcaagagggtgacactgtccatgtaaaaaatgcgactcttcccaagggcacatatgtgaaattgcaacctcacacaactgattttctggatatttcaaacccgaaagccatcttggaaaaaactttaagaaatttctcctgcttaaccacgggagacagcatcatggtagcctacaacaacaaacaatattatattgatattgttgaaacaaagcctgcttctgcggttagcattatt

SEQ ID NO: 275574 - DNA, 510 bp, Zea mays
ctccgatcggattcggtgggacggtggcatctatgcgcccgtcgcaccgtcgctcaaacggtataaacctgcgcccgaacacttcgagctcacccgcaacctcctccgggaagcgcgatcgccgtctcgaaggagctgaaatccaagattccaagctcttctgtcagttgagggaagttgaagcaaaagtctaagcaaaaatgttttacgggggatatgcttaccatggcaactcgtttgagcaaacataccgttgttatccagcatcgttttttgataagccacacctggaaggcggtgataaaggtaaggatggggtcagtttggcttgtcatttttttcatatataaaataaatatgacatacatctgatattgtattaccattgtcaaaagtagtaataatgccaccttctgcccttgatcgtcttgctttcttgtacatatagtaccctatactattttagctgcacaatgatgcaacccagtcgattttacactggtggtgttt

SEQ ID NO: 275575 - DNA, 807 bp, Zea mays
  unsure (1)..(807): unsure at all n locations
tttgtcttttccacgcgtccgaatagaagctgngcctnccacccttgcctcacactgcatggtatcccgtattcgtacgggagactttntttatgatgatcgtaccatgttggaaattaaaaacccctctagattagccttccaaaatctgggtgacctggagaatttgatagctaaggatccactactcttttcatttatggaccttaaaaagctacattccttgagacgtatatgggtcaatagatgcgatgaaacatttttgagaggactggatgatggtgttgcgatacccacagtccaatctctcgaacttggacaatttacacctaccaaaaattctttgtcaaatgtattcaaatgttttccagcactttcttctttggatgtgatggcatcaccatcagatgaggaccccgaggaagtggtactgcattttccaccctctagctcgctgagagatgtcaccttcaaagggtgtaagaatctgatcctacccatggaggaaggagctggattctgtggcctctcgtcgctcgagtcagtgaccatacgcaaatgtgacaagttgttctctcggtggtccatcagaggacgagcagctcagactcagactcagagcatcatcaaccctctccccccctgcctgaggaaactctccctttattatatggaaactctgcctcagaaagctctgctcgcaaatttgacatctcttgaagaactcacactacgtaattgtcttggctgtgagcaaagcaccgagccgatggctctgcccgcgaatctaacatctcttaccattct

SEQ ID NO: 275576 - DNA, 380 bp, Zea mays
tcgtgggtcgtcgcaagcctctacagtgactcgtagaaaaactgaggagcatcatctccgatgtacaggagaacaacgggggtgactctgagctgcaatgcgggcgcatgacagcctgcgtggaacgcccatatgggcatgaatcaccctaccacttgatgtacgagaatctcgtcttggtcgcaggaggcattggaatatcgccattcttggcgatcttgagcgacataatccacaggatcgaggagggcaagcaatgcatgcccaagaacgtgctggtcctttggtcagttaagaaggccaaggagctttctctgctgtccgccgttgatgcccagaccatcagctcatctgtctcggacatgttgcaactggatatc

SEQ ID NO: 275577 - DNA, 481 bp, Zea mays
gaggttgcaagattgatttggtctcaggtcacttgcgtgatggggactctaatcaagatgtattcgctaagctacctggctgtgttaaatcagatatttgtaaaagtgttgtctcaatttctttgtgcaatggagacataaccttattttcttgctcgggcatagctatagcacacaagggataccaccttacaatgtgtctgacttctgcaagtttggttagggcttttgatggcaaaacaaacgaacaatattatgaattaaagattaaagtgcgctgtgaaggcaatgaagtgtacaagggttttttggctgaatatgatttagatcataacttcgctgttgtcaacattgatgccttccttggtgttcatgtgggaagttcccaatgtgtgctggaatctgtgctccgtggtgaggcatatgtagttgggcgtggtgtctctggtgacctaatatccaggagtgtcgaattgggctg

SEQ ID NO: 275578 - DNA, 483 bp, Zea mays
caatcactcctggccgcgctccccgccgcgcagcgctcgcccatgggtcccatggcaagtactacaagctggcactcgacaacgacctcaccgtcgccgtcaagcgcctcgaggcggccagccgccccgaggcctcgccgtccatgtccccgagcgcgtccaagtcggacatgaggagggtgcagaggccgcttgaggcacttgctcgggtcaggcaccagaatgtgttgtcgttgaaggcatacgttcgcgaggcggaccgcctctcgctcgagtacgacttcgtccatgggggcagcctcgttgatctgatgaagagggtgaggtgctagcaagtcagcctcggttgggatgcgaggagcaggattgctgttgggattgccaagggactgaggcacttgcattttgagtgcgatccgatgatagtccactgcaacctcaagccgtccaatgtgatgctagacgaaagtttggagccattat

SEQ ID NO: 275579 - DNA, 660 bp, Zea mays
tccaactccaaggatggccagatgatggccatgtgcgagtggccgcacctctgtccccagcagtgcgactgctgcttcccgccgcacagcctcatcccctggccgaacgaacaccatcaacagcagtagcgaaactgcacttgtgctgctacgcaatgtaagccgtcgtagctagactactagaactagcgtgttgtttggttgggtacgtagctgcaaccgcgcgcgtgcagtagtgtggcgccaacaccacaacacctgcatctgcatgcccggcccgcgctgcctattctttaattggtagcttagcttagctcgttcagctccacttctacaagctcttcgtctttggatcggaagtactccctccgtttcttcgtttctttttagttgttgctggatagttcaattttgcactatccagcgacaactaaaacaaaacgaaagaagtagtagcttggtcgaggtcggagatgaacatggtcttgtacatatagctagaacacttgatctctagatggaaaacctgcacgtacacacatatgttgcaggcaaagtatcatccgaagtattcttgaactggaagtcctagatttgtgtagtggtgtacaaaattggatatggttaattgtttgttcgaccgtaccatctttggtcaaa

SEQ ID NO: 275580 - DNA, 306 bp, Zea mays
cgcaccggtgtccccagcagtgcgactgctgcttcccgccgcacagcctcataccctggccgaacgagcaagacatggccaccgccgccggccaggtccgacagcagtagtgaagctgcacctgtacctgtacgtacggaggaagagcctttgccgcagctaataatacactactagcgcgttgtttggtttgctattgctagatgcaagcgtgtgcgtgcaccgtgcagtgcaggtgtggaggggcgtcaacaccttgcatgcacgcgctattctttaattggtagcttagctcagctcagctca

SEQ ID NO: 275581 - DNA, 366 bp, Zea mays
aaagcaggttgagagaatgttaacggaagtgcatgagcaagcactggtgtcatgtgatgctatgcatcgtgagaggagaactcttcttaagcaggaaattggaaggatggttttacttttcactgatcaacctagcctgctagcacctaatattcagatggttgtttctgctcttgctttgtctcaatgcgaggcgatttggcactttcaacatgtgcggattgcatcatcaaaatctactcgattgaaaactggtgacattgattcgacagacccaactattggtttcttactagatggaataagcaaactttgttgactggttcgtaaatacataacagtgctggaagaataccgttcttactt

SEQ ID NO: 275582 - DNA, 638 bp, Zea mays
cttagaaaaaaattggaatttatctattcctggtttctcacggggggataagaatcctcaaagaaattctgcaaagcaactggtagatccccaacattcagaaagtgatgttactggtatcagaggcacaagcaataaacttggtgctaatatctcggttggaaatcatcaaatacgacctccgatggcagaaccttcatcaatgccaacaatgggccctctatcgaaagcccctcgcttctaggggttatgctgctcttccctatcgaaggaaaaattcctgtttcaggacaatctacgtcgaaaacagcccataggctctaactcaaggattgctagcaagtggaagcaaaataaacccacgagcgtctgtggcaaactgcagatgcttgtgtcttacaggaaagcagttgctgacttaccaatcgtctctggcagatcctctctacctggggtcgtatgtaactgtattttctttttgtgcccgtaaatgcccccatccgttgtatataaatgtttttgcaatgggggcattatcgtctccagttttgatgttgctatgtaggcgaacaaatactaaagtggaagttaatgaagtgtaagattgatgtcgtttaaaaaaaaaaaaaaaaaaataa

SEQ ID NO: 275583 - DNA, 429 bp, Zea mays
cgttaaactaatgatcgtagcctacacttttccttctaatgctatctatatatgcttgagtgtgtgtagggttgtctccagaaagcttgcttgttacttatatcccacacacttgcgcgcacgcaacccggcctttgtccctctcttgcctctcactgctgctgcccctcgctattcttctctgatcgatttctgtcatggcttcattctggttcagctgccgctgtagcgggatgacccaggtttgccgcagatgacccaggtgggactatgcggtggccggcagccccagatttggtgggggatgagataggaggtggctgcatggcctttcttgttggttttctatcgatttcctatgttgtgctctctaatcctctcagctctctacttttggctaggcgtcaaggacgcccacgcgatgcctta

SEQ ID NO: 275584 - DNA, 577 bp, Zea mays
tcgccgcgcccgtcccacgcctcgcggttcttcacgcccgccccacgccttcaagttgtaggcgatgaagggcggcgacatgagcagcgtcagcccgctggtgtccttcgtgctgggcgccgccatggccaccgtctgcgtcctcttcttcatgtccgccgcgcccgctcggcgcctcgtcgacatcttcgccttcacctccaactccaacttcaccgccgacctccttctcgactcctccacctacttcgactcgccggcagcggcggaccttgccgaggcgactgcgccggctcccgcgcccgtccaggccccgccgtctccgtggggcgacctggaggaggtgctggcgcgcgcggcgaccaaggaccgcacggtgatcatgacgcagatcaacgcggcgtggacgcgcccgggctcgctgctggacctcttcttcgagagcttccgcacgggggaaggcggcgtggcgcgcctcctggaccacctggtcatcgtcaccatggacccggccgcctacgagggctgcagggccgtgcacagccactgctacttcctccgcacgggcaacggcgtc

SEQ ID NO: 275585 - DNA, 446 bp, Zea mays
cgtggagcaccagccgagctcctcccctgcggctcgcctccctcacggcgccgcctgctccccattgccgacctccactccagcacctgagcaagcgctcctgaggtcatcttccccatcccctccccatcttcctctagtgccggccgccaggtcgtcttccccatccctcccatggcgccctcacctctgctcctcccagcgccctggctctgctcgaccttcacagtgagctcgccctcagccatggcgggtgccgcctccacctcccccttggtgctcgccgagctcgccctcagccctgccgcgcccctgcttcctgttcccagtgtgccctctgttctgttccaaccgttctccacgccgtgttccccccatggctccgcttgcctctccggtcagcactagcctgaacggtacagcagcataccggtgccaaacccgtg

SEQ ID NO: 275586 - DNA, 557 bp, Zea mays
  unsure (1)..(557): unsure at all n locations
tgctactcgtccggcctccgccatncctggcaggtccaattttcatccttccatcttccgctcccttccctgcttgcgctcggcacgcaggcgacctcggcggcgctcgggctcggcctctcagcgacggcgtcagcagattcccctcctgcctctcgccagtcccctcgcctctggtcctctgcgaaccggccggtgactctgcgaaactattccagcacaggtacccaagtatggcggcaagacgcaatgttcggtactcgcctcttccttcagaggacggggatgacagcaattttattaaagaagatgttgacctccgatacacttacactccgaaatcgtacagaaggatcccatggaagtcaattgccctggcattgttcctgctcctcctaggaacgtcacttctctttctttcttacttcatattcacaggtcacatgcagggtgataggtctcacgcatatgggctcttgttcctgggttccctgtcctttcttactgggatgtgattccactgcctttctgaacggttttcatttcgcgatttcact

SEQ ID NO: 275587 - DNA, 413 bp, Zea mays
cttcgcttgaacacatacgtggcgaatgtaacataccgagaacactatcttcggtgtcgaaaggctttatgctcaatgcaaggaatagggaaatgttgaagacttgcgcactaagaaagaaagagaaaaggcaatgttgcccctgtagtacttaagattcatatgtgcaagcttcatgggcattcttgtaatttcatacataggtatatctcgcccctataaatagagaaacagttctatgcataaattcaccttttccagggttaacaacttcatttaactcagtattcgaagtaccttcgcgctgtttcttgtgtcaagacgaaggctgatgcaccactggctaacacatccatatacgtagagtatatccatagggcgatgcatggaagtgacacgggtgcatactacgc

SEQ ID NO: 275588 - DNA, 466 bp, Zea mays
cccacgcgtccgggagcgagaggcgaagcagataaggaagccagccggcaaggggagccactccggcgtcgagaaacctagggcgagcgcctcgacgactcctatcaccccatggcggccttcgctacgggcagcaccacagcgcgcgcgacgctggcatcgccgacttcgtgccagccggccgcgcgccgggcgccggcccgatggatgccgctgcgctgctcgccgccggccctgggcctcaggggaggagcgcgttctcggcggagcgccacgctacgggtggaagctaagaagcaaactttttcttcatttgatgagttgctggagaagtctgagaagccattgttagttgacttctatgcaacttggtgtggtccatgccaatacatggttcccatacttcaagaagtgagtgagaagttaggcgacaaaattcaagttgtgaaaattgatactgagaagt

SEQ ID NO: 275589 - DNA, 354 bp, Zea mays
gatcgatcgaccaataattgcctgatcacgcaggtgggcacgtggacgcaagagaagctcgccgttggcggccaccgggaagagaagttcgatacctcaccagcctgcgcgcacggaacaatggcgcacgcgaaggccgtcgccgtcctcggcgccgtggtgatcgcgtcgctcctcctcgcggctgagagccgccacattgcccgaaaagacctgggcgtctgccttggtgggggcggcagcggcggcggtggcggcagcctcggtgtcggcacgggtggtggcgtcggggttggtacaggcggcggacttggggttggcacgggtggcgggctgggtgtcggctcagggatc

SEQ ID NO: 275590 - DNA, 369 bp, Zea mays
cggacgcgtggggttgcacaggccactccaccggttctcctattcttcctagcacaaaggggaggaagtaaagccttcccctcgccggagatgctgccgtcggcgaccgggtacactgccggcgacgtccactcggcacgcgagatgttccatcccttctacctctgacttcttgcgcacgcggcctctagtagatagtaattggacacttcatacttggattggatctctagatagcctagaaggtgagcgggcgtggaaggagaaatccgggaagcgatgagctttagcgccgcaagagtctcggagcatggcggctagttcgaagaggcaagggggaatgccggcagatgtgagctgggagatgct

SEQ ID NO: 275591 - DNA, 274 bp, Zea mays
actgcatccatcatcctcagctcctaccatgagtacacggattcacccttcgtcttcggacgctgccggccgtgcccatcgtcgtcgtcgggctgctgctgctgaacgggaacgccggccgccggcggtgtacacggtgtggaagaggtccagcatgggcttgcagggcaccgacggcttctgcgtctacgacgacgccggcaggctcgcgttccgcgtatacaactactcccgccgctcaaaagctctgcgcctgcgacctgctgctcatgga

SEQ ID NO: 275592 - DNA, 506 bp, Zea mays
ccctcccggccccccgcgtctctcccagtgtgcgcgctgcccttcttctccaggccgccgactcctgctcgtcgaatcccctctactcaccagggcgcttggcttcctccttccctgccgcaccgtgctcctctgctcctccctgctgccagctcggccgtgccctggccatgctccctgcgctcgccagccgtgcgcatctccctctatgcacgcgcgcctgcgtcctgcgccgcgaaccccgccgtggagcttcctcgagctcgccccatggcgcccggccgagctcctccctgtcgtgctcttgcttggcgtccaattttcctacacgtcgcggtcttcctccccgagcttgccctagccccttgtatcccccatggccggagcttcttccagctccagctcggctctctctcccatggctccctgcacgcccatctatctcttgcggagctcccagcggcgcgccccgtccactctgcttgctcgacgcccgtctcctatgg

SEQ ID NO: 275593 - DNA, 490 bp, Zea mays
tgtcttgcatccggtgcctggctgccagccccagcgcgcgccttcctcatcttccccggcgtttcctcccagctccctccaccatgccgctgccatggaactcgctgctcggccgcgccctggccatgctccctgcgctcgccagccgtgcgcatctccctctgcgcgcgcgcgcctgcgtcctgcgctgcgaaccccgccgtggagcttccccgagctcgccccatggcgcccggccgagctcctccctgccgtgttcttgctcggcgtccagttttcctgtgcgccacggtcttcctccccgagctcgccccagccccttgtattccccatggccggagcttcttccagctccagctcggatccctctcccatggctctctgcgcgctagccgctgcgcgcccatctatctctcgcggatctccctccccagcttctctctgctcgtgccgtcgcccagcctgttggcgcgcgcatgctccttacgcc

SEQ ID NO: 275594 - DNA, 429 bp, Zea mays
tcgctcggcccttcttcaagggtcattcgttgcattgtacctgaacgctggacatgtgctgtactcgaatcatcgcatcacttacgattcatcctcgaattgacatgtgatctgaaaagacagggtgcattgtacaatccatgacgtgcgtgggtcactttcatagcacgagggcgatcgacgcaagcgctgtgccacctggatcttgagctaccggtgagcacatacctgcccaacttaagcgccaggcagcgcatgtcgaactgaagatcacgatagcaccgcgtctccgctagtaagacagtgcactatctcgattaccaagtcttgattcacgatactctcaaggtaaaaggtggagacaagaccaacacaatccacattttgctgcgacttcgctggatgcgcagtgctgtattcactaattgc

SEQ ID NO: 275595 - DNA, 958 bp, Zea mays
ctctgatcttatgtaacatgtcacacccgagtggcgatgggaggttttttgcatcaagggacagcgagccacaggccagcagcgccaccagccctttcgacaggctccaagtccaaggtgatggaagtgctccgatgtcattctttcccacggcttcagctccgaatgtccagcctccgccctcatctggaggccgggaccgggaccagcagaaccatgtaatcagggttgttccgcgtaacgcacagactgcttcagtcccgaaagcccaacctcagccgtcatccggaggccgggaccaaaagaaccatgtaatcagggttgttccgcataacgcgcagactgcttccgagtcagcagcgtggatcttccggtcaatacaaatggagaggaaccaaaatgattcgtagctggttaccatactttcgtgtcatccgatggcagcttagtgcagcattgcagtttacagggctacccgagctgcagattatggtggctcctgtattctgaccactgattgcgctttacccgatcgtcatacatattggatgatatgatcttgtgttctatgcagagttgtaagccaaagttgtgcccctgaagactgaagtgacagccctgaagttgggaagtccttcctgattgtgctatgactggaattggtatatatataggttacttgaacggtttcactgtgttgagctcaccacacggccgcgcttctgtaacatacaatacaatagactatgagtggtacagtaggaagcagcagtcagaaaatgactgctggtaccatgctacggggtcgctatagattgatgtgtaccggtactctggttctggtagtatatgctgctgtataattcagtgtttaattatctatatattgtacattagctgtcaagcctgtaaggcattgcattgtgggccataaatttggccccaaatgttcgtgttt

SEQ ID NO: 275596 - DNA, 422 bp, Zea mays
ctatgcagagttgtaagccaaagttgtgcccctgaagactgaagtgacagccctgaagttgggagtcctgaagttgggagtccttcctgattgtgctatgcctggacttggtatatatatataggttcctcgaacggtttcactgtgttgagctccccacacggccgcgcttctgtaacattcaatacaatagactatgagtggtccagtaggaagcaccagtcagaaaatgcctgctggtcccatgctacggggtcgctagagattgatgtgtcccggtactctggttctggatgtcgatgacctgaatcaggtcggttatgtttcctttccttgtatgtcggtgcttggttgcttttgcgactggtacgtacggttgtatttctgttatgcaaatcacagaaatggaggatctctgcccc

SEQ ID NO: 275597 - DNA, 825 bp, Zea mays
ctggaccgaatcgtcagccgtgcgtgccagggaacactaacacgccatgaaaaaactggcagagctcatgctcatcctaggtggagctttgcgcgtgtgccatgtgttgctggtggtgctgctgccgctgcctggagtgcatccataacatcgtccctcccctcagcagccttcccttcctccgcttctccggcccagctctcccaggtggaggtggaggtggagcagcggcggcggtggtggcttctccacctgtagtctccatggcgtccatctcggtccccagcccggccccttccgcgaccgaagacgccgaaaacatcaggaaagcagtgcaaggatggggcacggacgagaaggcgctgatcgagatactgggccaccggacggcggcgcagcgcgcagagatcgccgtggcctacgagggcctctacaacgaacccatcatcgacagactccactccgagctctccggcgacttccggagcgcgatgatgctgtggacggtggacccggcggcgcgtgacgccaagctcgcccacaaggccatgaagaagcagggcgagcggtacgtgtgggtgctgatcgaggtcgcctgcgcgtccgcgccggaccacctcgtcgccgtcaggaaggcctaccgcgaggcctactccgcctccctggaggaggacgtcgccgcgtgcccgctctacaaggacccgctcctcaagcagttcttggtgcggctcgtgagctcgtaccggtactgcggcgagctcgtcgatgacgagctggcgagggcggaggccgcggagctgcacgacgcggtggtggtccggaagc

SEQ ID NO: 275598 - DNA, 883 bp, Zea mays
tcgggactgtctacattatgagctatcctgagtctgcacgggttgttccgtgtaagagggttcacacaggatgatgcccacatattttgtctggaggaccagataaaagatgaaatcagaggtgttcttgatctaactgagcaaatacttggacaatttggttttcggtattatgagataaacctttcaacctccccagaaaaatctgttggcactgatgacatatgggaaaaagcaacaattgctttgaagaatgcattagatgataagggttgggaatacaaggttgatgaaggtggaggtgctttttatggtccaaaaatcgatctaaaaattgaggatgctcttggaaggaaatggcaatgttccactgtgcaggtggatttcaatttgcctgaacggtttgacattacctatgtcgattcaaactctgagaaaaagcgacccatcatgattcatagagctatccttgggtctttggagcgcttctttggtgtcctgcttgaacactatgctggtgattttccactttggcttgccccaacccagacacgtattctacctgtgacagacaatgagttgcaatactgtaacgaggtggcctccgaactgaaatcaagagggctacgtgttgaagtctgtcatggagagcgcctaccaaagctaataaggaatgctgaaacacaaaaggtgccactcatggcagttgttggtcctaaagaagttcaagccaggaccctgactatcaggtccaggcacaacggggagatcggcacgatgcccgtcgatgaattcatcaccaggcttcaacttgctgtcgcaaacaaatcatcactatagatccgttggtccgccaaatttcagtccagaatgtagaacattt

SEQ ID NO: 275599 - DNA, 681 bp, Zea mays
cggacgcggggtttccaagcaccacgccacccgtacacggtttccagcatagcattccggaaggagggggcgcgatgtggcacgaggcgcggcggtcggagcggaaggtccacgacctcatggacgcggcccgtcgtcgggcgcagcgccgagccgtctacctcgcccgccgccgcggcgacccgcagcaggcgctccaggtctccggcacgcggtgccgcgttcaccgcgacgacgccctgtaccaggccaccgaggaccagcagggattgatacaatggaatggaaagcaagatgttctgattgacagatttgatggccgtgcattgcttgattttatccgagactcgagctctcgcccttttcgagtccaagggaaatctgaagaagaggaagagttagaggaatttgttaattttgaacgttaccgggatttgattaagcatcgtcgcagaggatgtccggacctggccggtttcccggttctacttgctgttgctgtagaaatttcatatcttgcatccatttacatcacttgagggattgtcctaatgcacactttaattgtttctaaattggtacagaaaaagggtgctatttcttaattcaaagcactagttaactgaacatttacctagcttcttttcacagtttctgatgaggccggtttgcagcatgttg

SEQ ID NO: 275600 - DNA, 403 bp, Zea mays
atcctgctctgctagtgccaggattccgccctatccatcccatcaacctcagctaaggtccccagcggcggcgaggcgatggcggcgcctgtgacggtgtacggaccgatgctctcaccagctgtggcccgcgtggcggcctgcctcctggagaaggacgtgccgttccagatcgagccggtggacatgtccaagggcgagcacaagtcgccgtccttcctcaagctccagcccttcggacaggtccctgccttcaaggaccacctcacaaccgtctttgagtcaagggctatttgccgttacatatgcgaccagtatgcggactctggtaatcaggccctcttcggcaagaaagaagacggcgcggttggccgcgctgccattgaacagtggatagagtctg

SEQ ID NO: 275601 - DNA, 635 bp, Zea mays
tccggtttcggattccgggccgaccacgcgtccgcccgcgtccgcgccggggccgttcgcgttccggcgcccgtggaacacgccacagccggaagcgctgcgcctgcgcctcgcctgcgcgcgcggggcgtccggcgtgaggacggcggcggcgtgtcacggaggagcaggagcagcagcaccgcggacgttctacgacctgctcgggatctcagcggatgggagccccgatgatgttcgggcgtcctacaggcggctggcgctaaagtaccacccagacgtgtcccctccgggcgccgcggccgagaacacgcgccgcttcatcgaggtgcaggaggcctacgagacgctctccgacccaagccgccgcgccagctacgaccgtgcactcgcccgcggcgtctgccgcctcgccttctccgggcgccgttcccaatcccaccacgcctactaccattaccaggaccagggagagggatctgggtggagaaggtcctgggaggaccagatcgcagagctgcagaggaggaccgtggcgaaggattcagaagagaacctgtcgtggggcgctcgcatgcggagaagggccgaggcgtcacagcggcgtcactgcgacaggcgagccttccaaatgc

SEQ ID NO: 275602 - DNA, 437 bp, Zea mays
cccacgcgtccgagcccgccagagagacaagcagccaaatcaggcctttatttacgatccggccggccggaatctagaccacctctctctctctctcctcgtacgtagtcgttgagtctttgaggtcgaatggcgcccgtctacgctgccgcggaccacggcaccaacggcggctccggcctgaccctgaacccggtggcggcgcgccgggcgctcagcctcgtcggcgtcgcccacgccgtcgtcggccacgccgccggcgtacgggagcatcgtcaccgtgctcagcatcgacggcggtggcgtgcgcgggatcatcccgggcaccatcctcgccttcctcgaggagaagctgcaggagtacgacgagcggccggacgcgcggctcgccgactacttcgacgtgatcgccgggaccagcaccggcgggctggtca

SEQ ID NO: 275603 - DNA, 580 bp, Zea mays
gaagaagattggtaaccgcagcaccgcctgccagctcgcctctgttggccctgtccctggtggtgcgcccaacagcgctgcaccagccccggttcaattgcagttgccaccagtgtcagagtatacacaacgaaagatatttgtcagcaatgttggtgcagatatcgatccgcagaaattgcttcagttctttgcgaggtttggtgagatcgaggaaggcccgcttggtcttgacaaggtcactgggaaacccaagggatttgctctttttgtctacaagaccattgaaagtgccaagaaggctcttgaggagccacataagcattttgagggagtgatgctgcactgccagaaggcgattgatggaccaaagccgaacaaattaggaggagctggaggttttttcggtgctggaccttcaagtggggccaaggggttggctggttatggagcttcctagtcattctcttgcccggacctgttggtattggccagcccatggcacctctggcacctggattggcttcattgcctggtgggatttctgctgccccaagtgtggattctggttttgggcaag

SEQ ID NO: 275604 - DNA, 453 bp, Zea mays
ttcccctgctcggcctctgaggtttcccagtagcggcgcctagcatcttctccgcgcgcagcttgcttcctccctctgccgctcgtctccatctctccatctcccaaaagaccgcgcctagctccagccatgagcgccgacgtcctctctctgtgcttgatctcccagtcctccgctccctgaaaccttcacccacatgtttgtgaaggtccggtagtggagatcttgcgaggtccactgctctgcgctcctattccacctgtctcatcccctcatcatgctcgacacttgctccctggcagcatgccgtagcagcatctgtgcttggtccatgctccactgtgccgtgctgtttctctgcacgcgtcaagctcacgcgctgaatccagccccatgttgacgcgttcatgttccagcttgtcgtgccgcgtcgtcatcactttctgtcacgag

SEQ ID NO: 275605 - DNA, 723 bp, Zea mays
cccacgcgtccgtttacgcgtccgcccacgcgtccgcccacgcgtgcgcccacgcgtccgggataagtggaaagctgcaaaagaggaacttcgcgacgaagacgaagaggagcctgaaagtgctctggaggcattagaaaggaagcggcaaaaggaaatagaggaatggcggaaacaacagatagctagtggagaagctcaggaaaatgccaattttgttcctgttcgtggtgattggcgtgaccgtgtcaaacgcaaaagggctcaagcaaaaaatgagtcaaaagatgacattgttgctgcatctttaggtagttccgaacagcataaaggacctcctgatctagcagagctctccaaggatcttcctactggttggcaggcatacttggatgagtatactaagcaagtctattatgggaacaacctcacgtcagagacgtcctgggagcggccaacaaaatgaaaatctacagccttgtgcggtcacgaacagtaggactaagggcatgtttgtttggaattctaatgtgttcggattatataatccaatatattttgaactacttaggctctgtttattgcccgtctagattatataagctgaattatggtaaaaggttaagagggtaaaatagcacattgggacataaataaactaaataactactcatactagctattcacttattatggtctgcaatatatttatctctacctttc

SEQ ID NO: 275606 - DNA, 573 bp, Zea mays
cccacgcgtccgtctagcaggtcgatcaccttcgcacatagctgttggtgcaaataaaaaagcttcaaatgtgggacatattaaagatgggtctaatgtatccaaagttgaagatggtcatgtcgatagaagtgttggtgtgaagaagcccagatattctgcagatgaaggcccttcgttgactgaactgagtggatacaatgcaaagagacacgagtttgacccagagtatgataatgatgccgaacaagcgcttgctgagatggaatttaaagaaactgattcagaaactgatcgtgaactgaaactccgtgtgctgcgtatttatctgtccaggcttgatgaaagaaaaaggagaaaagagttcatattggaaaggaatttattgtttcctaatcccttggagaaggatcttacaaatgaagacagggaagtttaccatcggtataaggtcttcatgcgttttctttccaaggaggaacatgaagcccttgttaggagtgtcattgaagagcgaaaaattcggaggagaattcaagaactccaggaatgtcgttctgctggatgccgcac

SEQ ID NO: 275607 - DNA, 568 bp, Zea mays
cccaattccccattcaccaatccccagtattgtagtaggggggaaaaacgagagaaaagaaacagcagtagcggaggcaagacgaaatggtggccgccgtcgcgtcgccttcgtcggcggcaccctccgccggccgtccccatccgacatacaaggagatgatcatgcaggcgctgacggagctgcgggacccgagcgggtcgagccgcagcgccatcgccacctacatcgccgaccacttctccggcctccactcgcgccacgatgccctcctctccgtccatcttcgcagcctcaagtcccatggccaacttcgcctcgtctctggcaactacttcgtctccaccgccgctcagcggcaggggcgaggctccaacatcccgcccaaccccaagcctgctccggggcagaagcgtggtcgagggcggcctcgcaagcacgcagattcagccccttccgcttcgaccccggcgtttcagggcgccaagcgagggcgtggacgccacgcaaacgcaagagcgcccaggacccggtggcttcgtccccctccccttcgccgctacaggga

SEQ ID NO: 275608 - DNA, 455 bp, Zea mays
ctcgagccgattcggctcgagcaagaacaaccagagacgcaagcaggggagaatcgcggaggtctgggaaacaccatcctgcagagatgacagtgctgctctccccgagctcctccctgttcctcgccaaaccttctgccgtcgccaagggcagggcggcggctgtgacgtgcttcagcgggccctccctgtcagtggggcgtgaagatcaggagggtgtagcagtggtggtggggaggcgtgcgttggcttccgcagcagctgtcgcctcagtgcttgggtttgcaggccgtggtctggcggccaaccagggcctgctcgccgggagggtccccggcttgtctgaacctgacgaaaatgacaggttggagaacgtaccgcatgccagacgacaaggtccggggccacggaattggctggagccccatcattccgtacagcttcaaagttccaga

SEQ ID NO: 275609 - DNA, 425 bp, Zea mays
cgccacgggaccttcaggatgaacgcgctggcgtacttcacgctcctgtcggggttctacatggcgtggaacatcggggcgaacgatgtcgcgaacgccatggggacgtcggttgggtccggagctctgacgctccggcaggcggtgctgaccgccgcggtgctcgagttctccggcgcattcctcatggggacccatgtcaccagcaccatgcagaagggaatcctggttgcgtctgcgttccaagggaaggactctctgctcttcgctggactcatatcctcccttgctgctgccggtacatggctgcaggttgcttcgtcatatggctggcctgtctcaactacacattgtatcgttggggccatggttggtttcgggctggtgtatggaagggtggatgcagttttctggagttctttggc

SEQ ID NO: 275610 - DNA, 140 bp, Zea mays
atctgtggaacctgaataataataatacagatggtttttatccatgtcagtggaacctgaataataataatacagacatctgtgaaatagtttgctcttgtgctgtactacaactcaaacgtaagaaatggattcgatct

SEQ ID NO: 275611 - DNA, 603 bp, Zea mays
aggttatctccactccttggtgaaggaaagatgacagaatgctctttgaagattctacggaacttgagtgacgtgaaagagaccgcagggtttataatcagaacaggcaattgcgtcagctccatttcagatcatctggacactggaagccaaagcgaacgtgaacatgcggtggtcatccttctaggggtatgctcccacagtcctgaggtttgttcactttccatgaaggaaggcgtcatcccagcccttgtagacttatcagtcgagtggaacacacggtggcatgggattgctcggtcaagttgcttcagcttctgaggaacttcaggcgatgtgaccagttcagcagttcatgctcacgagagcttgctgtcgatcatgtttcagagatcactcgcaatggttcaatttgcatgcagctcgatatcgaaagtcagtcccggtatatttcaagaaagctcaaccttttctcaaaacctcgggcgctgaccctggcttgagaaatggaaggggtcggttggatcgagccctattccgcagcgctaactgccagatgtacagatagtagcaggtcgcgttcgtcgcgatgaaatgtttgtg

SEQ ID NO: 275612 - DNA, 452 bp, Zea mays
ctcagagctctacttcttggtcgacgtcgtgagcctgcgatacgccttcgcgccgctgcggtgggtcggcatgaacgcgatgctggtgtacgtgatggccgcggaaggcgtcttcgagggcttcctcaacgggtggtactacgagagcaccaacaacactctggtttactgggtgaggaagcacgtgttcgtcaaggtgtggcactccaccagggtgggcatcctcctctacgtcctcttcgcgcagatcctcttctgggcgctcgtctccggcgtcctccaccgcgctcgcctctactggaagctctagcgagcgaacggtggcatagcatgcttttgtcttttgaactgcacatgatacacacgacacctcaaactcgaaccccaagttagtttgaagaactcaaatcccgggcaaaatggaattccccgagcggatcgaattcatcatt

SEQ ID NO: 275613 - DNA, 535 bp, Zea mays
  unsure (1)..(535): unsure at all n locations
cttctgcattgcctgggattccaaaaggtagtgcaaggcaactgtttcagcgccttcaaggaccgtttgaggaagggactctcaagacacactttgagaaaataatattgcttggtcaaaaattgcatcaaactcgtagaaaggatgagatccatgagctgaggcaaaaaaatccacttcatacttctcatggttttgcactttctcaagcatgtccagggaacttatctggtgtcattttgacgccacttgacctttgcgatggaccttcgaactcggatgcactttctattggttatacaggatccaacacaagtgggttaggtcttccaaacaataactgctctgttggtgctactcttcctacatcaaatatgaacttaagattaccaggttctcctggtatggttttgggaagcaattcaccattgcctttgaatgctcnctctagggatgttcagaggtatggtgtgcctaggacaacctcgatacagggtgacgagcaatcaagaattcattataaccagatggtaaa

SEQ ID NO: 275614 - DNA, 445 bp, Zea mays
acctccttgcagaccaacgtaagagaatcctgaattttaatcaacgtatagtgattgcccttgatgttgctattgcattgacttatctccatttgtgttctggggacgctttaatctgttacaacttgaggacgtcaaacatcctactgacagagagctaccgagccaaagtgtgctgttctgaactgtcaaaaagtggtaatatcgtgctattaaagggaacagggggctacattgatccagagtacttggagacctcagagctcactgccaaatctgatgtctactcttttggaataatactcttagaaatcatatcttctcatgggccacaagactgggatgtattgatgaaaccaccggcaaagcagtgttgtacaatgggctcttgagaaattctatgacgacctcatgaatgagatattggattaccgtatggaggatc

SEQ ID NO: 275615 - DNA, 491 bp, Zea mays
ggatgctggcggacgcgtgggcttccattccaatttccacacacacgtctcagctcactccctcctccagtttcgtcagctcatcataaaccgaacacagagctctcgattccattccaggatgctgctgaacccggcgtcagagacgtcggtgctagacaccatccggcagcacctcctcgaggagccagcggcggcggaggcgcggccggccgacgagagcttcgggagcctggtggcggaccagtggagcggctcgctcccgttccgcaccgacgacgccgacgacatggtggtgttcggggcgctgcaggacgccttcgcctacggctggctgcccgacggctcattcgtgcacgtgaagcccgagccagtgcggtcccccgactcgtcctcctaccacccctgctcctacgacggctcaccctgcttcggcctcctcgacccggagccgccgctgacgcccggcaccaccacgcccgggagggggc

SEQ ID NO: 275616 - DNA, 306 bp, Zea mays
ctcgatcacttctttcccttccacacaacacacagcttcctccactcccctcccgcttcgtcagctcatcatcatataccaaacagagagctctctctcggtcgttccattccaggatgctgcttaacccggcgtccatgctggacaccatccggcagcacctcctggaggagccaccagcggcggccgacgagagcttcgggatcctggtggcggaccagtggagcgactcgctcccgttccgcaccgacgacgccgacgacattgtggtgttcggtgcgctgcatgacgccttctcctacggct

SEQ ID NO: 275617 - DNA, 449 bp, Zea mays
gctcggtggatggacgactgaggctgtggcggtggcgctagccagcctcgcatgcgttgttccgggccggtgatggcagtgcccgcacgcgcctgctcccagacgacgacggcagccaccccgcgcgcctgctttggggccgcggcatggccagagcgcgtgctcgcctacccatggcgatgacgcagcccgattccgcagcgtggccagatcccgtgctcgcctgcttgcgcggcgggggcggcccgcgcttgaccgcatctgctcgaccagcgctcacatgcctgctcacggcggtggcggggacggcctgcgcgcctgctcgcatgctgggcggcaggggcgctcgcccgcgcgctcgcggccatggcggtgctcgcacgtgtgcttgtctgcgacagcacacgcctgcgcgcttggttgtggcgacgcccgcttgcgtttcgtgc

SEQ ID NO: 275618 - DNA, 696 bp, Zea mays
cccacgcgtccggcgtcagtgcagtgcgcgtgtggtcgggtagcgatccgaggagcgcgcagcgatggcggcggcggccgtggcgactgtggcctccccatccctcacctccaggcggctgttcccctccgccggcccgtctcttctccggctcccaaggtcgaccgcgcggctcaggcgcgccctgcggttcgccgctgcgggggatgaagcggacgtgctgcctggcccgggggccgagggggaggccgtggtgcccgggaggctggaggagcagcgggacgagcagctgggcggaagccagctcgacatcggagggctcgccttccagggcgacgtgggcgggggcttcaccggcggcggtgcgggctccggggcctccggcggtggcggcggcaacaagatgctggaccggggcatcaacacggccatcgtgctcggggccagcacctacgctctcaccaagctgctcaccgtcgaccaggactactggcatgggtggacgatcttcgagatcctgcgctatatgccggagcacaactggtccgcatacgaggaggccctcaaagccaacccggttctagccaagatgatgatcagcggtgtcgtctactcccttggtgactggattgcacagtgctacgaaggcaagccgatatttgatttcgaccgtgctaggatgttccggtctggcct

SEQ ID NO: 275619 - DNA, 426 bp, Zea mays
gtgtctggcggcgcatagatagatagccatggcgaagaagccagtggaggaagcgctcctcgcagcggcggacgagcacgaggaggagagcctgagcgtgcgcgaggagctgaagaagcagctatggctggctgggcccatgatcgccggcgcgctcctgcagaacgtgatccagatgatctccgtcatgtacgtgggacaccttggagagctgcccctcgctggcgcatccatggccaactccttcgccaccgtcaccggcctcagcctgctgctaggcatggcaagcgctctagacacactgtgcggccaagcgttcggcgcgaggcagtactatctcctgggcatctacaagcagcgcgccatgttcctgctgaccctggtgagcgtccctctgtcagtggtgtggttctacaccggcgagat

SEQ ID NO: 275620 - DNA, 409 bp, Zea mays
gggaggcagctcagcatacccgcctcggtcttctccgctgggacggtcatggactcgggcacggtcatcacgcggctgccgccgaccgcctactcggcgctgtcgtcggcgttcaaggccgggatgaagcagtacccgccggcgcagccgagtcgccatcctcgacacctgctttgacttcagcggccagtccagcgtcagcataccgtccgtcgcgctagtcttctccgggggcgccgttgtcagcctcgacgccagcggcatcatcctcagcaactgcctcgccttcgcgggcaacagcgacgacagctccttgggcatcatcggcaacgtgcagcagcggacgttcgaggtgctgtacgacgttggccggggcgtcgtggggttcaaggctggggcgtgctgatcg

SEQ ID NO: 275621 - DNA, 551 bp, Zea mays
gaggagctcacgagcatgaaacgaatgatggttgaattggaaaaactacgcctgttgtgtgagaggataattaagagagagaaggtgaagagagagacggttttgtgtgatcatgatatacttgccaagactgaggacactgttattttctcctaccttgcgtgcggagcaagctcagaatctgcaactacttcagttaataacaggtcgtacagtggagcagcacaaagatctgatgatgtcacagtagatagtactatttctgggaagaaaaccataaggttttctctgaataacagaggtgctgatagaaacacagctgacagctcgaggacattgctatcattcaaacgcaagttgagtgagaggggaccacgagctggtaagcaacttccgcagaggccaactattgctgcagagaaattagaagatgaagacaagaagacaactgataagaagataactatgcaacagagagaaatgtttcaaaaggagctcattatgacatctgatcaagcttttacacagaacctacgccttcctaaaggata

SEQ ID NO: 275622 - DNA, 676 bp, Zea mays
cggacgcgtgggcggacgcgtgggcgcgagcaaaaggcggcaggaatggcagccaaaacaggcggcggaggaggaggaggagacgtccggtgccgtcccaacggaggaggaggagtcgtatccgaaaagagatgaggccgacggcaaaccgtctgcagaggcagagacgacgacgagcaaggccgtgtgcaacacggacggccccgtgtccgagacgtgcgacctggacggcgacgtccgcacgaacggcagcgccctatcggtgacgttcgtcccggcgagcccgtcggagcggcgggagtggaaggtccggccgtactcgcgccggaccatggtgggcgtcgacagggtcaccgtgacgcggctggggtccccggatgacccggcggcgccgtgcgcggtggcgcacagcgtgccgggcgtgctgttcgcgctcggcgggctcacgggcaactactggcacgacttcagcgacgtgctgatgccgctgtacgccgcgtcgcggcggtacggcggggaggtcctgttcctggtcagcaacatgcagccgtggtggctgggcaagtacgaggccgtggtgcggcggctgttcaggtacgacgccgtggacctggaccgggacgcgcgggtgcgctgcttccgacgtcttaccgtgggcctgcgcctgcacaaggag

SEQ ID NO: 275623 - DNA, 770 bp, Zea mays
aaaatggaaataaaaatatattacaaggtatggacaaatttacagagtagaatctgattcttaagttacaatactctttataaagggttaatacaagagttttcttagaattcttccacagctaggtattcgagcttcatcaccatctgttgagcttcgaattgtctgctaagcttcgactctgtgttcttcggcttcgtcatcctggacttatcactgcgttagtggggaaattcaagtttcaaggaaaaggtaagtacaaggtatgattttattaccggcttgaggtgacttcgagcttcgtcaccagctaggcttcgcccaccctttgcccatatttgctttataaatctgtttcctatgcttcaagctaggctggggatataaatcagatctgctagtgataagctgaagtttggtctattaacaatctttccatgcgtgcaaccagatttcatgaaggcaacagccgtgcctcgagaagctagcagggcacagaaatcaccgtgtccggctataacttcatcaggagcatcaacttcgcccttaatgtgtttgaaggtccctggcaagtcctcaatcgaaggaatgaatttctcagagctggctccaaccgagttgaagatctgccttaaccgctgcacgcatcggttgctgaactctagacatttatcttgaagttctttcaatgatttttgcaaatttgaacttttttttgacctcagcctcaaacttcatatcaaatctatgtttttcttcggaagagaggg

SEQ ID NO: 275624 - DNA, 437 bp, Zea mays
tcgcatacagatacagatagtttcttcggctctaagcatactgcttcaaaaagcagattcgggcttcgttgtgtacgaaaagaacggagggtgtttttcaccttcggctcaaaaaatacaagtttcgtccacatcaaagcatttcatacatcgatggaaaggtaaaaattattttacatggtgtgcacaaagttacaatattctttataacggataatacaagaatttttcttagaatctttccacagttagatattcgagcttcatcatcatctgttgagcttcggattgtctgctaagcttcggctttgtgttcttcggcttcgtcatcttgtacatatcaaagcattataaggaaaattcaagtttcaaggaaaaggtaagcacaaggtatgattttattaccggcttaagatgacttcgagcttcatcaccag

SEQ ID NO: 275625 - DNA, 748 bp, Zea mays
actgaacccatgccccctgccagcaacaggacgggtcttggagcctctgttcttaatgatcactgggtatcagtgacatccggaagtgaagattattcatttaagcacatgcggaagaatcagtatgaggaaagcttatttagatgcgaggatgacaggtttgagttggatatgctgttggaatcagttaatgcagcgactaagcgtgttgaagagctgatagaaaagatgcaagacaactcagtcaaacctgagagtccaatacgcatggatgagcatttaactccgttgaacctgaggtgcattgaacgactgtacggtgatcatggtcttgatgtgatggatgttctacgcaaaaatgctagtgttgcattgccagttattctaactaggctcaaacagaagcaggaggagtggtcaaggtgtcgatcagatttcaacatagtttgggccgaaatatatgccaaaaattatcacaagtcacttgaccatcgtagtttctatttcaagcagcaagatacgaagaacctgagcacaaagtctctcctgacagagataaaagaaattaatgagaagaaaaggaaggaagatgatgtgctccttgccattgctgctggaaataggcggcctatagttcccaatatgtcattcgagtatatagactcggaaatccatgaagatctacataaaatcattaagtactcctgtgctgaagtctgcaactcttcagatcaattagattaagtga

SEQ ID NO: 275626 - DNA, 486 bp, Zea mays
ttctctttgcctcgtcctccctcctcctgcttcgtgcttccccttccccttctcgtctgcggcgccaagctcgagctcatcgccaccgaggtcgtttcgatctgggttttagcctatccgcgaggaaggtaaactagttggagacttcgtgatggctgctgcgaagtcgggcgtagacgtggaaacgagggacggcggcggcggctccttcagcgaggagaggtttgttgataagctcaacaagctcaacaacacaacagcgagcattcagacactttcacattggtgcatttttcaccgcaagagggccagaaggattgtggacacatgggaaaagcatttcagtactgcaacaaatgataagaaaatatcattcctgtttctatcaaatgatatcttgcaaaacagttagcgcaagggaggagattatgtgcatgagttctggaaggttctacccagattattgaaacatttttacgaaaatgg

SEQ ID NO: 275627 - DNA, 415 bp, Zea mays
cgaatatttgcacgcaaggctggctcgatcttgggttttggtctatccgcgaggcaggtgaatcagttggagaccgcgtgaactctggtgcgaaagccggtgtagacgtggaaacaagggacggcggtagcggtagcggcggtgccggtggctccttcagtgaggagaggctcgttgataagctcaacaagctcaacaacacagcggcgagcattcagacactttcacaatggtgcatttttcaccgcaagacggccagaagggttgtagacacatgggaaaagcagttcagtagtgcgacaaaggataagaaaatatcattcctgtttctatcaaatgatatcttgcaaaacagcaagcgtaaaggaggtgattatgtgcatgagttctggacggttctacccagatcattgaa

SEQ ID NO: 275628 - DNA, 846 bp, Zea mays
cccacgcgtccgcccacgcgtccgattgctttgatatggaatgtatatcgtctgataaggatgttgaaggcaaacaaaaggtgaatcatgtgactgtttttgagcgccctggtttgcatgagttcttgcggaaaactagtgaatttgcagatcttatcctttttacagctaggtttagaaggttatgctagacctttagttgatcgaatagatgttcacaatagattcagacttcgtctctatcgcccatcaactgttaccacggaatacagagaacatgtgaaagatctttcttgcgtgtcaaaagatttcggcaggattgtcattgtcgacaacaatccgttcagtttcattcttcagcctttgaatggaataccttgtgttccattttcagctggacaacattctgatgaccagctcatgatggttatatttccactcctgaagcatctttctctccagaaagatgtcagacctgtattgcatgaaaggtttcatatgccagaatggttccaaaagcatgggatcccccaaactaatcagtctgtgtaagttttgctgcccttgttttgatgaacgctgtgcctattatgctataagccccttaagggagagcacttgtatattattatcaatattcatttagggttcttgataaaaccgagtcactgtttatatggagttgtcacatccaaagatacggaaattgtaatctagcataatgtcagatttgtatctgtgtagtggagcattttatatcaattagtaactgttgtatatcaccatctgctgtaaaactcgattgttgacagttaagatagtctaatgaatagttcgtggcccatc

SEQ ID NO: 275629 - DNA, 457 bp, Zea mays
aaaggccaaaaccctaaaccatacgcgcctaactccgcgtcctcccccccctccctcgaagcggccaaggcggcggcagcagtgccggcatgggcgcaatgtcggcttcgatttcgtcggtgaattggctagtcgaggatgacatccttctcaagaacgccgtcgaggctggtgcttcgttagagtccttagccagaggagctgtatgtttttcccgtaaattcactcttcatgaaatacaggaccgctggaattcattgctatatgacccagatatctcaacacaagcagcttctcggatggctgagtatgagaatgaactttctacttccgatccagccaaggcacataaacttttcaactcaaaagcaaaggatttttcatttcagaaacggaaaatagacagtgtaaaagatctatattatgcgatgagaaaaagagtacgcaatgatccacg

SEQ ID NO: 275630 - DNA, 432 bp, Zea mays
  unsure (1)..(432): unsure at all n locations
attcactatcacccactagcacttcaagcgatcactcaataacagataaaagaatataccttttaggttcccgctccagtggtttggtaaggtgtggtattgcggatgaatcctcaaatgaaggccaaaattctgtacatgaacagtcttgtcagagccatgactctgttaaagaaattgatgggtatggtcagccagataagaatacaaacacaggagatgaggataatctttgtttcatatcctccaaatcccttcagagaacaagaaagaaagataccaaacagcagaaacactacttcacaacgaaaaatgcttcacaggctccattgtcattttggcctcactgggcttatgagatgtatgattcgtattcactttccaggagagctgcaggaaaactctatatctntatattatagagagataagt

SEQ ID NO: 275631 - DNA, 817 bp, Zea mays
gtccctatcccgaaagttattatagactcaagactcagatccggatgcaaccattgtagaaataaccttgggtgatcgtcttggcgatctccttgatacgatgagtgcgctaaagaacttggggctaaatgttgttaaagctagtgtctgtctcgattctactggcaagcatatcaagtttgctataactagagcgttcactggccgtaaaattgatgatccagagttgttagaagcagttcgactgacgatcattaacaacatgatacagtatcatccggagtccagcagtcaattggctatgggggcaacttttgggccagaagcccctacggaagaggttgatgtggatatagcaacccacatagatatctatgatgatggccctgaaagaagcttacttgtggtggaaacagcggatcgtccagggttactggttgaccttgttaagatcatctcggacatcagcattaatgtccaatctggagagtttgacactgaggggctcctggctaaagcaaaattccatgtcagctacaggggcagaacactgaccgaggctttacagcaggttctttctaatagcttgcgctatttcttgaggcggccgacaacagaggacgccagcttctagccagatagatgatcatgaagcctcccaactttcttatgtggtggtattcacatgaattgaataccatcgtcaaagcatttgaaacacgcacaataatttgttaagatggggggaattgtacttgatgttatggcaccacaccaattcgaagtattttttgttccaaggcatgggaatctgttg

SEQ ID NO: 275632 - DNA, 514 bp, Zea mays
cccacgcgtccgctggccgtaaaattgatgatccagagttgttagaagcagttcgactgactatcattaacaacatgatacagtatcatccagtaactactttaactttgtttttccttttgcttttataatttacaacagcaataaatgaataaatgttgttaatttggtgccaggagtccagcagtcaattggctatgggggcaacttttgggccagaagcctctactgaagaggtattacctaaactatgtcagagacatcttctaaatgcttaacatatggactgaaaacttctcagttctctaaagagatttatgaaaccatcttatttggctatatctatcgtgagacagaattagtacacaacggtgtacaaagcacacatatctttaggatctccaagtttgatgtttatttcctttgtctctgcttcattgcaaaacttattgtatcaaaattcttatctggtattgccttattgctggatgctggatcttcctatcgtagaaca

SEQ ID NO: 275633 - DNA, 1102 bp, Zea mays
gaattttctgcagattggggagaagattgcatctggatcttccggggacttgcatcgaggaacttatcaaggtatggatgttgcagtaaagttcctcagaaccgaacatgttaatgactcgtcaaaggtggagtttttacaagaaataattattctaaagagtgttaatcatgataatgttgttcgattctacggggcatgcacaaagcagagaaaatatgtcatcgtgacagagtatatgcctggaggcaatctgtatgattttcttcacacgctaaaaaatactttggatctcccaacggttctcaggattgctatcggcatctccaaggggatggattatttgcaccaaaataacatcatccatcgggacttgaagactgccaatttgcttatgggctctgattatgttgtgaagattgcagactttggagtctcaaggaatccatctcaaggtggagacatgactgctgaaactggtacctacagatggatggcacctgaggtaataaaccataagccgtacgatcacagggcagatatcttcagctttgctgtggttctgtgggagctggtcacttcaaagggaatgcggttggagatcccgtcatgggtcaatccacaactgtctaaactgattcagcgttgctgggacgaaaatcctaacctgcgcccctctttctcagagatcactgcagagctggaaggcatgttaagggatcatcaggcctccaagggaagcaacaaacattcgaaggcaaaggcacacaaaaaatcgcagagagaggcagaataacgaggttgtcagttaccaccttgtgaaaagcttagtggagcttggctatcatcgtccaagattctgaggctactacaaagatgctgctagtgtacaattgtcaaatattgtatatgattggtgtgtgtgtgtgtttctattactcccaaaaacactatatacgggagaagcgtcgacaatacagcgggacaagcaaagacacggaatccttgtacaaaatggcttgcaagcagcataaaatgccctctagtttttgtatacaaaacatgaaaaatatatgtgcatgaaccgtgcgtgcttcctgtg

SEQ ID NO: 275634 - DNA, 578 bp, Zea mays
  unsure (1)..(578): unsure at all n locations
cgattctacgngggcatgcacaaagcagagaaaatatgtcatcgtgacagagtatatgcctggaggcaatctgtatgattttcttcacacgctaaaaaatactttggatctcccaacggttctcaggattgctatcggcatctccaaggggatggattatttgcaccaaaataacatcatccatcgggacttgaagactgccaatttgcttatgggctctgattatgttgtgaagattgcagactttggagtctcaaggaatccatctcaaggtggagacatgactgctgaaactggtacctacagatggatggcacctgaggtaataaaccataagccgtacgatcacagggcagatatcttcagctttgctgtggttctgtgggagctggtcacttcaaagataccatacagaaatctgacacccttgcaagctgcactgggagtaaggcagggaatgcggttggagatcccgtcatgggccaatccacaactgtctaaactgattcagcgttgctgggacgaaaatcctaacctgcgcccctctttctcagagatcactgcagagctggaaagca

SEQ ID NO: 275635 - DNA, 452 bp, Zea mays
tgagtaattccttcaattggtacaatttcacattttcatactttatctgtaccaaggttcaaattgtagaacttaatcccctgacctcacaactccaagtgcataggctaaacaagtattcatcacttgtatgcacacatttagggggagaatggtctataatttgaatctttgagactaacttcatttccaagtctattatgtgtgtagtctcaaattagaaaggaatcttcgggcaaagacaatcgcttccactgcaaattttgatgggtatcaaagattctttgctccaataaatgtatcttttatacatttcataagggaatgggtttctcttttatatgctactccaacatcatctaaaattggtaaacatgtatcacatccttttggattgcaaatgtctaaagtagcatagcttataaattctcctatttagaacttaattgatt

SEQ ID NO: 275636 - DNA, 773 bp, Zea mays
  unsure (1)..(773): unsure at all n locations
cacacacgtacgcacacgcatacgcacacgctgtgagctgagctgagctgagctcaccaccaccacacacgggagatagctatagctagcatagcaagccagccagtcagcgacttagcagcagctagctagccatgctgccgtccttcgtgtcgccgacggcgagcgccgcggcctcggtgacgcctccgccgcggccgataccaggcagctacgggccaccggtgctgggcccgctacgggaccggctcgactacttctggttccagagccaggacgagttcttccggaagcgcgcggcggcacaccgcagcaccgtgttccgcaccaacatcccgcccaccttccccttcttcgtgggcgtggacccgcgcgtggtcgccatcgtggacgccgccgccttcaccgcgctcttcgacccggacctcgtggacaagcgcgacatcctcatcgggccctacaacccgggcgccggcttcaccggcgggacgcgcgtcggcgtgtacctcgacacgcaggaggaggagcacgcgcgcgtcaagaccttcgccatggaccttcttcaccgctccgcccccacctggtccgccgacttccgcgcgagcgtcggcgccatgctggacgccgtggacgcggagttcggcaaggacgacggcagcgacaagaagccctccgncagctacctcgtccccctgcagcagtgcatcttccggttcctctgcaaggcgttcgtgggcgccgacccgtccgncgactggctggtggacaacttc

SEQ ID NO: 275637 - DNA, 282 bp, Zea mays
gcacgagcaaaacacatagaagctcaagtaagctgaggcaagcccagaagaagggaaaagaagcctagaaggagagatgggaagaagcgaaggcagcacaagcccagcgcctgggggagccgcctgcgcgtgcgcggtctgcggcggcgccgcggtggtgtactgcgcggcggacgctgcggcgctctgcagcccctgcgacaccgctgtgcacgctgcgaacctgctggcgtcgcgccacgagcgcgtgcccctttccatggtgactgctgcatccggcgt

SEQ ID NO: 275638 - DNA, 588 bp, Zea mays
gacaataccagtttggattggtctatacagagctctctcaaatgtagctaatgagggacttctgactgaaggctttttttggataccttctctggctggtcctacaacaattgctgctcgacaaaacggccaggggatatcatggctttttccttttactgatggccatccacctcttggctggtcagatactttggcatacattgtgttaccagttcttcttgtcatttcacagtacatatctactcaagtaatgcagccaccacagagcaatgatcctaaccaacaaggtgctcaggctgtaacaaagttcttaccattgctaattggttattttgctctttccgtgccttcaggactaagtctgtactggcttacaaataatatcctcagtactgcacaacaagtgtggcttcaaaagcttggaggtgcaaaaaatcctgtcaaagaatctatcgacacgctttcaagagaagaaacgactactggtcagaagaatgattctactgttcagagtgaacctctctctaaacatagtaaaccccagcctagccaagagccgaaaccaagtgggccacaacgtggtga

SEQ ID NO: 275639 - DNA, 673 bp, Zea mays
  unsure (1)..(673): unsure at all n locations
gcttttcattcttacagctggtgaagcatccatgggaaaggttgcataaataatggtgctgggaaacatgtccctggtgacatttttagaagcaagaagcaaggaagaaatgagtttgttatacgcctccaaccatcagaagccatgtacatgaaactaactgttaagaagcctgggttagaaatggctactgaacaaagtgaacttgatctgtcatatgggatgcggtaccaaaatgtcaaaattcctgaggcatatgaacgccttatcttggatacaataagaggtgatcagcagcactttgttcgcagagatgagctacaggctgcttggaagatcttcactcctttgctgcatgacattgacgacggcaagctgaaggccctcccgtatgaacctggcagccggggacccaaggaagccgacgaattgagcgcgagagttggatacgtgcagacccacggttacatatgggtaccgccgacccttgcatagaagagaatacgaattgtttgtacctaggaagatccgagtgtcctacaataaagctgtgcgtatatgctcattttcgctatatcgcctgccgttgtaataatgttgtgctggatatgaaataaaattgcgtgttccattcagtaaaaaaaaaaagaagaataaanaagggcggcaaaaa

SEQ ID NO: 275640 - DNA, 1450 bp, Zea mays
actctctaagcgacagacgggcagcgtggggaggccgccgccgttgcggtatataaacggacgctcgccgttgggggaccaaccgaagcagcgacagagctcttccctcccacacgctcggcgctctgtccgccagaaatctcgtcgctgcaggtagaagagaatcgtgccatttgtcatgtcaggaggatcttcaccatcatcaaggcgaaacagctttaattctttgtctaaggacctagaccttccttcagagcaaggttgtctctccattgttgtacttggggcttctggtgaccttgctaagaagaaaacattcccagccctctaccacctctttgagcagggattcatacaatctggagaagtccatatatttggttatgctagatcaaatctttctgatgatgggttaagagaacgcattcgtgggtatctcaaaggagccccagaagatctttcagaatttttgcaactaataaaatatgtcagtggttcctatgatactggagaaggatttgagaaactgaacagggcaatatcagagtatgaggtgtcaaagagttcaggaagctatcgcaggctcttttatttggcattgcctccatctgtctacccttcagtgtgcaaaatgatcagaacatattgcatgaatccatcttctcaccctggatggaccagagtcattgttgagaagccctttggaaaggacttggattccgctgaagaattaagtgcccaacttggggagctattcgaggaacaccaactatacaggatagaccattacctgggaaaagagttagtccaaaacttgcttgttcttcgttttgccaaccgattgttcttgcctctttggaaccgcgacaatattgataatatacagattgtattcagggaagactttggtactgaagggcgtggaggatattttgaccaatatggaatcattcgtgatatcattcagaatcatttactgcaggttttctgtttggttgcaatggaaaagcctgtctcccttaagcctgagcacatcagagatgagaaagtcaaggttctgcaatctgtgaaccctattaagcctgaagaggtagtccttgggcaatacgatggctacaaggatgaccctacagtgccagatgactcgaataccccaacttttgcatctgttgttcttcgggtacacaatgaaagatgggaaggtgttcctttcattcttaaagctggtaaagcattgagttcaaagaaagcagaagttcgggtgcaattcaaggatgtccctggtgacatttttagaagcaagaagcaaggaagaaatgagtttgttatacgcctccaaccatcagaagccatgtacatgaaactaactgttaagaagcctgggttagaaatggctactgaacaaagtgaacttgatctgtcatatgggatgcggtaccaaaatgtcaaa

SEQ ID NO: 275641 - DNA, 738 bp, Zea mays
cggacgcgtgggcgcgaagtcaaatctcacttcaccagtggctgccttctccgctccgcgcggcgcctgccccaaagcttcagtggctgctgcgacccttctgttctccgctcttggtcttgggtgatcgccggcggtacttgtagcgggcctttgtaggtatttatctgagggaagaagaaactatacaattcatcatgtcaggagggtcgtctgaatcttccccgttatctggacaaaatagccttagttctctatcaatttccaaggacaatgaactatcttcagagtctggctgcttgtccattgttgtactaggcgcttctggagaccttgctaagaagaaaactttcccagcgctctttcaccttttccagcagggatttctgcaatctggagaagtccatatatttgggtacgcaagatcaaatctttctgatgatggattaagagaacgcattcgtggatacctcaagggagcttcagatgaacatctttctcagtttttgcagctagtaaaatatgttagtggctcctatgataggggggaaggatttgagttattaaataaggcaatctctgagtatgaaacttcaaaaaacaatgactcgggaagctaccgcagattattttatttggcattgcctccatcagtctacccatcagtatgcaaaatgataagatcatattgcatgagtccatcttcacacaccggttggacaagggttattgttgaaa

SEQ ID NO: 275642 - DNA, 440 bp, Zea mays
gctttctctggagcagaaatcaaagaccaactgttacgcatgaagctgcaagacactgcagaggagattgctaaaaggcttggacaatgccctttggcagcaaaagttcttggttcccgaatgtgcaggagaaaggatattgctgagtggaaagctgctctaaagcttggagatttaagtgatcccttcacatctctggtgtggagctacgaaaagttagatccacgtctgcaaaggtgcttcttgtattgcagcttgttgccaaaaggtcacggatatagacctgatgagttggttccccttggggtggcagaaggatttgttggttcatgcaatttgagtaggagaacagttgaagatggttgggatggattacttcaataaaatggtctcggaatctttcttccaattggtttctcaaatgtattgtgattcgtcct

SEQ ID NO: 275643 - DNA, 604 bp, Zea mays
ccatgcatctggggatctccctcgtcgtccttctctcccctccataaaatccgatcggcaggtcctggccgctgcccactcctccccgctctggctcttcctcgcgcctcgcgcgcccacccaccttcacgcgctctcccagctagatcgaccccactggcaatcgcgcaggctcccctatcccttcctgttccttcaaaaagactggactggatcttcccagagttcccgttcggagagccgccggatcttcttcgacgaggcttcgatctgctgctctccgtcggcgtgttggggacttgcaccttatccgaagatgtcttttcggagcatggttcgtgatataagggaaagttttgggaatatatcgaggcggaactttgaggtgagaattcaccacagagggaagtctcttgggtcttcaggtgacttgcaagacaggcctgctgaagttcagcaaagcaggtgggctagccttcctcctgagttgctctgcgatgtgatgaaaaggttggaggaagatgacagtagctggccggatcgcaaggatgttgtttcctgtgcatctgtttgtacaacctggagggatatgtgtaaggatatt

SEQ ID NO: 275644 - DNA, 531 bp, Zea mays
caagcttcctccgcggcctcccgtcgagcaaccatggcggcggcggtaaccctcctccgccttcctctcgcccgactctcctaccacctccgctccgtaccttcctctcgtctgccgtctccgcgcctacgtatctttgcctcccatcgccttttctcctccctggaccatgtctccgcctctgcttccgcctccgcggccgtggccgaggttgtaggcgtgccggacgcggaggagtcggtagaggaggaatctgcggccgaggcggaggcggaggcggaggcgcccaggtcgttcgtgctcccacggctgccgcggccgaagctgagcgtgaaggagcggaaggagctggcctcgtacgctcacggcctcggcaaaaagctcaagtcgcaacaggtcggtaagagcggcgtcacactcgaaccttgtactccgccttcagtgacaacctcgcgtccaacgagctcctaaagctaaaacttcatgggaactgccctggggagctacctgatgtgatactgcaacttgagg

SEQ ID NO: 275645 - DNA, 433 bp, Zea mays
aggacgcgtggggcaccgaccagcaatggccacgttcctgggaagctcaccggcgctcctcgcccgtcccatcgccaagccccacatctcctgcgcgcagacaccgcgcccgccaagcgcccagaaccagccgccgtccagcgagcaaccgcaagcacaaacacagcagcagtccgtgcaagcgcagccacagcaggcggcggcgaggccgaagcgcgcgggcggcgcggactccacggactgggtggcctcgtcgctgacgcggcggttcgggatcggcgcggggctggcgtgggccggctttctggccgtcggcgtcgtgtccgagcagctcaagacccgcttcgaggtcgcgcagcagcaggccagcaccaacgacgtgggacaggagcaggaggtcgtcctgcccaacggggtccggtactacgagatg

SEQ ID NO: 275646 - DNA, 645 bp, Zea mays
cccacgcgtccggtttggcagggctctacttggacggggtgaggagaggcgaggagagcagagcaggcagccgacgacttccccacgcggaggcgttgcttcccggtcgtccaacgcctggcatcccttccttctcctcacccagcagcagccggtcggcctcggctagatctcgccggccgcctccaattggttgtccactgtggccgggccgaggggtacttatctataggcccgcagatctgcgcctgcgcccgtgggaatctccgcacctcgctatccgtctcttggatagatcgatcttccgtcgctggttccccttcgccccacacgagtacttccaaggaactggaacttccagccggcacggggattcgagcttctgctctatcagcaactccactgggcgctgagggtctgtagcagagcggtgcgatcggggcagaagggagccatgatgagggggcaggcgtggctggcgctgctggtcgtggtggcgctggccttggcggacgcggcggcggggaggttcgtggtggagaagaacagcctcgaggtgacctcccccgacgagctcaagggcaagtacgactgcgccatcggtaacttcggggtgccgcagtacgggggcacctgcacggatgg

SEQ ID NO: 275647 - DNA, 448 bp, Zea mays
caagtgtggagagtagggtgctgtggacgaggcgagctgaggaagggaagggaaccctcttgaccgccggcggcgaggggagatgccgccggagaggacgaggaagtcgaggacggaggagctgtgggagcgcgaggtcggcggtctcccacccaagcgcttcgccaactccgtcatggcctccaaggagtttgtgcagtctctcaacatccaaaagcggctacggaagcacaggagctgcgtcaacacgataagcttcagcgcggacgggaggctgctcctctccgggtccgacgaccggaccctcgtgctgtgggactgggaggaggcggcgccggccttgtcgctccacactgggttcagcagcaacgtgtaccacgcgctgttcatgcctgtctccggtgacaggagcatcgtctcgtgcgcttgctgaatgggatgtgatcca

SEQ ID NO: 275648 - DNA, 532 bp, Zea mays
actcatcttccccggggggggggcctcggatgagaacccccctttcccgccagctagtcaccgccagcccacgccatggcttgtcgcgccactctcctgccgctcttcctcttcctcttcctcctcgtggcgcccgcgcctgcgctcgccacatccggcaccatcgtcttcaccacgctgggccggagccgctacgcctttgacgtcttcgcgctcccgatcgccccgctctccgccgcctccgcggagctgcgcctcacggacggcacctccgtcaactacaacggcaacttcgggccctcctcctccggaccgccctccctcctcttcgtctccgagcgcaacggctcgctcaacctctacctcactgccggccccacatcccccttgcgcccgacgcccggacgcgctgggggaggaggacgtcacggcgccgcccacgccagtgctgccgtgggaccccatcgcgctcaaggaccagccttcgctcacccccgacggcgcccacctggtgtacgtcttcaccgcggag

SEQ ID NO: 275649 - DNA, 433 bp, Zea mays
ccattccctactcgctccgtggttcccccagctccctcttccatgggcggggtctgcggctcctggcgcatggcatgggcacctgcgcctcttccccagaagtcgccatgacctcaccaagaccccagccgagctcgcccccggtcccttgcttcccatggcactcgccctcttctccctgacacgcgccctcccagccgagcagctcgccctcgctccctcaaactcgccgcgcgcgccctgctccctgcgcgccgcggcttcctagctcctctccagcgtctatcacagtccgagcctcctccacgccggccggacctccacctcgcccatggcggcttcccccgctcagcgtactccctcgctggtggtcgggcagcagtcgcagctgcaaccgagtggagaaacccagggtgccgttgaaccccatcct

SEQ ID NO: 275650 - DNA, 433 bp, Zea mays
caagcaaagagtggtgcagcttgtcaactcaacatcggatgaggacctattaagtcagggccttacgttgaatgatgatttacaacgtgttttagcaaagcacgatgcaattgctgctggcatagccattcgattacaaaaaccaaaatcagccccggcccgcgcagacagttctccaacgaagcctgagccgacaaaggaaacagaacaaaggtctgctaaagttgccagtagtgtgactccatttgagcagttagcacttcctgcaccaccatcatcaagtgcttcaaagtctcatggagaatcagctgttagcccaaatattgatttgcttagtggtgatgagttttttaaaccagaacctgttcattcccaagctcttgttcctttagtcactcaggcttcagcttcttcaagccccagtactttagac

SEQ ID NO: 275651 - DNA, 609 bp, Zea mays
cagcgcaccgctgaagcctaaactcgcgcaggttgcagccgatgagaatcgagcgtgatctccacatggccacaggggacggagaaactagctacacgaaaaattctaggattcaagagaaaactatgtttcagatcaagcctgtccttgaggaggccacaagagcagtatacacagctctccaccctcaaaccatggttgttgctgacttaggctgctcatctgggcctaacacactacgcttcgtatccgaggtgattggcatcatagctcgccattgcaaagaatatggccgacaacatgaccacacacagcttcagttcttcctgaatgacctgcccggaaacgacttcaacaatctcttccagctgatccagcagttcaataagtcgacggcaataaaccacaagagtgaggcagctgaggcactacctcctccgtgctatatctctgggttgcctggctcctactacactaggatcttccctagcgaaagtgttcaccttttccattctttgttctgccttcagtggcgctctgaggcaccagagggcatcaaataaacatgcctagatatctacatcacaaagactatgtcaccgtcgatgg

SEQ ID NO: 275652 - DNA, 801 bp, Zea mays
tggagatgggttacaagaatcccattctactactacatcccttaggtggttataccaaagcggatgatgtcccactgccagttagaatggaacaacacagtaaggttttagaagatggagtgcttgatcctgagactactatagtgtctatatttccctcaccaatgcattatgctggtccaacagaagtgcagtggcatgcaaaggcacgaattaatgctggtgccaatttctatatagtaggccgagatcctgctggaatgggacatccaacagaaaagagggacttgtacaacccagatcacgggaagaaggtcctgagcatggctcctggtttagagaaactcaacatactgcccttcaaggtagcagcttatgatacagtagcaaaggagatggccttttttgatccttcacgcagtcaagattttctgttcatctctggaaccaagatgcgcacttatgccaaaactggagagaatcctccagacggtttcatgtgcccgggtgggtggaaggttcttgttgactactacaacagcctgcatgctggagaagcgactccagtccctgtatgaggcaagctactatttgactaagagattattcaatggcggggaaacatacaagcaagtgatcagatcatttgagcttttttccttattgattctttaggttagtagttgattgatatatgatcagatcttttcgattgtttgtttgtcttaaatatgagactctgaagcatggaaaaactaaagatctgcacaagttgagccaaaacagcatggccattgttct

SEQ ID NO: 275653 - DNA, 656 bp, Zea mays
cccacgcgtccgctttccattgctgtgttcgtgggcccacgcgtccgcaagcaactgcaaagcagcaagctctactcttcttctgtactgaacgtgtgactagataacaataagcgtgaaccatggcggacgagtacggccgcagcggctacggcaggtccggcgccggcgacgactacgacagcggctacaacagcaagtccggcactgatgactacggccgtggcgaaggtggctacaacaagtcgggcggcgatgacgactacggccgcagcggcggcgatgggtacggcaggtccggcggcgacgactacggccgtggcaccggcggcggtggctacaacaagtccggcggcggcgatgactacggccgtagcggcggcgacgactacggccgtggcaccggcggtggcgggtacaacaagtccggaaacgacggctacgacagcgggtacaacagatcgggcaccaccaacgacgacgaatacggccgtggcaccggcggcgggtacggcagcaagccctctggcgacgacgcgtacgccggcggcggcggtggcgggtacggcaagcagtccggtggaggcgcggactagggcggagagtacggctcctcccggacgactcgagaagtacagaggaggagaggagcacag

SEQ ID NO: 275654 - DNA, 488 bp, Zea mays
cccacgcgtccgcccacgcgtccgagcaactgcaaagcagcaagctctactcttcttctgtactgaacgtgtgactagataacaataagcgtgaaccatggcggacgagtacggccgcagcggctacggcaggtccggcgccggcgacgactacgacagcggctacaacagcaagtccggcactgatgactacggccgtggcgaaggtggctacaacaagtcgggcggcgatgacgactacggccgcagcggcggcgatgggtacggcaggtccggcggcgacgactacggccgtggcaccggcggtggtggctacaacaagtccggcggcggcgacgactacggccgcagcggcggcgatgggtatggaaggtccggcggcgacgactacggccgtggcaccggcggcggcgggtacaacaagtccggcaacgacggctacgacagcgggtacaacagatcgggcagcaccaacgacgacgaatacg

SEQ ID NO: 275655 - DNA, 756 bp, Zea mays
tcgttcacgcgtccgcccacgcgttcgcccacgcgtccgaagacaaggctgtagctgacaacgaagggaatgtgctgccgacgctggtgtacgtggcacgagagaagaggcctcagtaccaccacaacttcaaagccggcccgttggacccgctgatccgagtatcgtccgtgataagcaacagccctatcatcctgaacgtcgactgcgacatgtattccaacaacagcgacacggtcagagacgcgctgtgcttcttcctcgacgaagaaacgggccacaggatcgcgttcgtgcagtaccctcagaactacaacaacctcaccaagaacaacatatacggcaactccctcaatgtcatcaaccaggtggagctgagcggcctggacgcttggggcggcccgctgtacatcggcacgggatgcttccataggagggagaccctgtgcggcaggaggttcaccgaggactacaaggaagactgggacagaggaaccaaggagcagcagcagcaccgccaccgcgtcgacggcgagaccgaagcgaaggccaagtcgctagcgacctgcgcctacgagcacgacgacgacacgcggtggggagacgaggtggggctcaagtacggctgctcggtggaggacgtcatcacggggctggcgatacactgcagagggtgggagtcggtgtacagcaaccccgcgcgagcggcgttcgtcggcgtcgcgccgaccacgctcgcgcagaccatactgcagc

SEQ ID NO: 275656 - DNA, 764 bp, Zea mays
ctggcgcggaggacgcaccagctggacggccatcgggatccggcggatgtccagctggcgcggaggacgcaccgtacgatcgtcgtcaacatcgtcttctcggtgatcaccaagcttgcgatcgtcgggctcgcgctcgccgggcatccgctcatctgggcagccgtcctcgcggacgtctgcacatgcatgctggtgatcatgtacagcatgctgctgctgagatcggactcgaacggccgccggaaggtgaagaagtgctgtgcctcgtcgcagcatgggtcacactcacacgccaggaagaagcattgtgtctcccaccactgttcagatggcccgcgcaacaagtcgacggcaggctgttcccaggaatcgccgtctgctggtaagcatgctcgcagtgatcatggccatgcccacacccactgcaaagagccgagcaaccaccggccggaaaggcatgcctgtcatgatcacggtcacagccataaccactgcaaagagcccagcagccatgtggttacagaaaagcatgtctgccatgaccacggcaacacccatagccactgcgaagaggcaggcaaccagctgctgcttgttgagagccacggttgctatgaccatggccatgggcatagccatgaccgctgcatagagctcagcagcccgcgcttcaccagcaagcacgagtgccatgaccatgagcatagccactgcacagagcccaagactccgtgtgctgacagtgaggctgcttgccatgg

SEQ ID NO: 275657 - DNA, 631 bp, Zea mays
cctgagcaaaggagggaaaattactcatatgatattacttatgtcacaaacagtgagcttggttttgattatctaagagataaccttgcaatgactgtagatgaacttgtcttgaggaacttcaattactgtgtgatagatgaagttgattcaatccttattgatgaagcaagaacacctcttataatatcaggcctagctgaaaagccaagtgatcggtattacaaagcagcaaaaatagctgaagcttttgagcgagacattcattacacggtggatgaaaagcagagaaacgttttacttacagaagaaggttatgctgatgctgaagaaatactggacatagatgatctgtacgatcctcgtgaacagtgggcttcgtatattctaaatgcaatcaaggctaaggagctcttccttaaagatgtcaattacattgttcgtagcaacgaagtgctcattgtagatgagtttactggcacagttatggcgggcaggcgatggagtgatggtctccatcaagcaattgaagccaaagcaggtgtaactatacaatatgaaaccataactctcgcatccataagttaccaaaacttctttcttcagatccccaaactatgtggcatgactg

SEQ ID NO: 275658 - DNA, 560 bp, Zea mays
cccacgcgtccggaatttccttctttttttttccttccccaacttctccctgcgtcggccgaggctgcggcgactgaccacagttttcgaccctctccagtggagggaacggggttagcgagcggcctccgctgcgacggcaacggcgtgggagggccatggcggcccccgcgctcgccttccccatgttgctggctgcctcactgctctccgtcgccgctcctgcgctggctcgaaggccatcttgccctgatggttggcaaggcggccctgttcagaacagatgcttcatgtacatatcagcctccctttcttgggatagatccgaggctgtctgccataactacagcgggcatctcgctgcagtatcatcaatccaggagctaaacttcgtgaagtctctctgtggatcatcatccacaggatgctgggttggagggcatcactacagcactagtaccggtaacggttggaaatggtctgatgattcctctgtttggaatgagactgtcttccttggtgagccattgcctgccaactgcagtgatcctgcatgtaaa

SEQ ID NO: 275659 - DNA, 645 bp, Zea mays
gtcgtcgcagaacgaggtgctgctccgggagaagctgcccaccagggagctctacctgaacctgcgctcctccgacacctgggtcgccgagtacaggaagtggatggacagggcgggccacggcatgccctactacttcggccacagcaccctgtcgccgccgcccgtgccggccgtcgtggagcaggcgcccgcaggggccgtcgcggggatctcggcctcgttcccggccaagggcggcgtcggcatggtgcacgcgcccaacccgaccaacaggtacttccgccacgtcgtgcactgcaagggttgcagggcaaccgtcaaaaagtacacctcgttgaagaccgtgttcgcggccctcgcggcggcggccctatcggccgccatcctggcggcgaccaggcactggaaggccgtcttggtggcggcgtcggccgtgctagcccgccgcatcctacgcgtgtgacgcggtgctttcgttgatcaccaccaacttcatcagaacacacaggagactgtacttaatgtgtcactggccactgacacgggagcgttctctgtacatttgtattaccgtaactgctggcctgcggctgttgtattttgtatatttgcagtaacgttttgcatgtcaaaaatccgaaa

SEQ ID NO: 275660 - DNA, 638 bp, Zea mays
cttcaaccgccgccgcaaagaacggcgcacttgactacttgaggttgagggtttcttctcctcgtgcgcactcgcgtttcctcttcaaccgccgccacaatctttgcggcgccctcacacaccaccgccgccggctagagcctagggccgtaatcgtaacagccacccctgagactgagatggatacagcggaggaggctgggcaggaagtagtcagcgctgttggggaggatagtatcccggaagctgccgcctgcagcagggaggagaggaaggaggaagaggaggaagaagtggaggtgagcttcgatgaacttggcctggacgagcagctgaagagggcgttgaggaagaagggcatcctcaaggccaccccgatacagcgggaagccatcccgctcatcctggaagggaaggatgtggttgcaaaggccaagactggctctgggaagacctttgcctatcttctcccacttctgcacgagctactgaagttgtcctcagaaggacgtatacgaaaacctgcaccaaatgctttcatcctggttcctactcgagatttatgccaccaggtgtataatgaggcattatctctccttgagctctgtacatgcaaattgagggttgtgcaagtttac

SEQ ID NO: 275661 - DNA, 577 bp, Zea mays
gctggaacaaattcgggtaaggtgacgtggtgagctgctgtctgtagtgtgtggacaactgcagtagtaccatggttcacacgcagtgacaagcttcttaagcatacaaaccaaggacgatcgacacaacctaacaaggcgctgccagttttctccactacaaattattgaccacacttggacgttagggtgtcgcaccattgacaagccatgcgaatgagatgaaggtgatgatgatgaggggtggtcacttgtacagtcatcctgctatatatgcctttcgccccccatggagctagctgatagacatgccgtcctagtttgctcgtgtgtacacagctgggagggagctattatatttagtggatcgggtcagggttgaacttgagagactccttccagatgagctcctttatagcttcttcggtgagcgatggctgctcgaagtcgaagctgaaaggcgccggacagatgggctcgtcgtttacctcgtgaagggacgccaggtatgggtggcacagagcctcctcaacagtaatcctcttgctgggatcgaacacgagcatcctgtcaagca

SEQ ID NO: 275662 - DNA, 768 bp, Zea mays
cgctgactgtacctcacatgatgaggcagccactggcggaggtcttacaactacagactatattccgaaatccaagtgaacttaagtcatatgtgcttccacattcagatcgttgcaatgttcctgccagtgctatgcttggatcaaacgactctattgtagttgttgatgtaaatgccccagcagcacatgtggcacttcaccaatggcaggctaatactccagatggtcagggaacacctttccttttccatcatggtagaaattccacaaattcaaccagtggcgcactcatgcgcattttcaaaggatctgctggttctgcggaagattatgggttcccaagggctatagcatttgctgcttctgcaatccgcagttcagcagttgttgctgtgacatgtgacaaagagataattactggtggccacgttgatggttcattgaagttgatatccctagatggagcgaagacaattgaaactgcttctgggcatattgctccagtgacatgccttgcgctgtcacctgatagcaactaccttgtgacagggtctagagataccacagttatactctggaggattcatcagacaggctcctcacataagaaaaatgctcaagaacctccaccgactacaccaacgacaccacgcagtcctctctctggcagcactagcaccatgagcagcctctcagaaacaaagagacgtcgcgttgaaggtccaatgcatgtaatgagaggacatccttgggaagtaacctgct

SEQ ID NO: 275663 - DNA, 591 bp, Zea mays
  unsure (1)..(591): unsure at all n locations
tcctctcnccgctccgctggtcgccttctcncctccccgcgaactcgggctcaaagcaaaccaaaccccttctagggtttgcgctccgggcatgatccccttgtagccaccgcctcccatggccctagccgtgtcctgctggccatgaccacctcggcttccccactcttccccaacccgcgcaagcgccacctcgacgcctccccccttccccgccacttccacggcccgcagagccaaacccgcctaagccagcgccaccgtcgccggttcttcttgccgctaccaccgaaggcgcggtccttcgcttccgacatgggaaatcacatgtccagtgccttcggttggcccagtgatgacgggcgggggctcctctgttgctggatcggcaaggcgcggggtctcacggtggccatggatgtggaggcggcgacgggactgcatttggtggaccggctgagggttaccgatttgaggaagactacgttgaacgaggaggcagtgaagcctccctcatggaagaaaaggaggcccttttcaatgaggcgtttgaggcagcagcgacatattacgatccgaggctggaggcat

SEQ ID NO: 275664 - DNA, 536 bp, Zea mays
catcaggcatccatcggcgagagcgagagcgagagcgttcgcagcaagcctacctcacctcaccttgcctgcctgtctgtctgtctccagagctgctcttgtccggagacggagccgactgaacatggccggagatccgggggacgcgccggaggtgggaggcggcggcatacgctccgtgctcaccacggcctcgctcgtcgctccctccggggacgaggttcagtttcgggagatcgacggcaagatcatcggcctctacttcgcggcaaactggtatccgaaatgcgaggctttcaccccggtgctggccgcggcctacgagcagctcaaggagcgcggcgccggcttcgaggtcgtgctggtgtcgtgcgacgaggaccggccgtcgttcgagcggttccacggaaccatgccgtggccagcggtgcctttcggcgacctcagctgcaagaagcgcctcagcgagaggttccaggtggagggcatccgcgcctggtggtgctgctccggacggcggcgcggtggtacaccgg

SEQ ID NO: 275665 - DNA, 955 bp, Zea mays
agatggacaaagctagtttggaaacggatacttgtccttttgcagagcaaataaaatctggaactatttcactacaggaggcacacatgaagactgaggtatcctgtacactaaacagcagtgtcattcctgaaggccataaaagctcactaagcttgccagttccttctggccactcactttcttccaattttgcgacaaggtctttaagtactgcaggagaatctgtgaaaaacacatatgacttggtagtatttaaagggagtagagaatcttcgcgggctggagactgtatctcttcgcctggtgtgcatcataacataccgccaataatgattgatcaaggaagcaacatgaatcctagtatggagagctcaaacaattcacataggctgatggcatctaacactaatgcaactcagttttactcttacaaggaccaaatgcatgtaacaccagagactagggcctcagtgatgacagaaaaagatagcagtcaagcttctgctgcatcaagtcagccctttgcgggaactgttttaagagcacaaagtgtatctcaggaagcttcacctagcgtctttacttcaaagcctctcatagattcttcacttgtgaaaaatacatatgttggtttaagttcaggcggtgcccatattggacatccaaattttggtaaccagcaaccaagtgacgaatgccttaaaagaaaatctgaatctctatctggttcagaagcaaggggtcattcagctgcattggtgcaacctgctctaggaaatcataatgggagtggaggtgcacacaagggccttcggatggctaacgttgtacatcgattcaagagcttagttgaatctttggaaattggtgttgtgctatctgggaggttgtggtcctcaagccaagcaatcttcccaaaagggttcaggagcagagtaaaatacttcagcat

SEQ ID NO: 275666 - DNA, 500 bp, Zea mays
ctgtcccgtgcgcgagaacaccaccacgaacaagaaagaaacacggccgcggcggggcggggcggggcggcttctccttttccaactcgctgcccgttgcgtgattccgccgcgtcgcgtcgcgtgtgcatttgcgcgcgcgcgcaggagccgccgctccgatcgccctgaaaaaggtgccaattgttactgattccagataaggtgttcctacgctggcactaactgcgccgcgaccttcttcagcaatcttatgctcatgtctcactctcaacagatggctaatagtaggaagcctcctggcctcaggttactcggaggcgccggctcactgacaacgtaccagacactagtcctggtcctcacgttcttggcatacacatgcttccacatgactcggaagatcccaagcatagtcaagagcgctctggacccgcagacgaaggtggtgttctcgcactggggacggttgcacgccagcagaaacgctcttaccaccg

SEQ ID NO: 275667 - DNA, 707 bp, Zea mays
tgataatggaatcatacaattatcaaaaggctgcccaagcttgcaaaaactggaggtgaggggttgtgtctttagtgagcatgctttagctttggctgcactacagcttaagtcactgaggtatctgtgggtacaaggattcaggtcatctccaactggaactgatattatggcaatggtacgccccttctggaacattgagtatattgttccagatcaagatgaaccttgcccagagcataagagacagattctggcatactactcccttgctggcaggaggacagattgtcctccatcagtaactctgctttacccggcattttgagtgtagatacttgctttttgccagactgaatctcatggtactaagttccattggtcccactatctgtgaagtaaatggtccctgttcttccaattgatgaggacatgcagacgttccagtgcaaagaaccccaaaggtaagctttaagcaggacggccagctctgaactgaggctagctgagaacaatcatgaatacctgaaggcagcacttatgtcagcttggcctagctgtccagtatgggcatgtaagctttaccatcttttgtagttttggagaaacaattttgcaataactacccttgtttagtgtatattatcgattttcgttcatatgctgttgtattgttgccttgaccaattatgtcaaccccttagtct

SEQ ID NO: 275668 - DNA, 283 bp, Zea mays
gctgtccagtatgggcatgtaagctttaccatcttttgtagttttggagaaacagggaccatttacttcacagatagtgggaccaatggtactaagttccattggtcccactatctgtgaagtaaatggtcctgttcttccaattgatgaggacatgcagacgttccagtgcaaagaaccccaaaggtaagctttaagcaggacggccagctctgaactgatgctagctgagaacaagcgtgaatacctgaaggcagctcttatgtcagcttggcctagctgt

SEQ ID NO: 275669 - DNA, 532 bp, Zea mays
agtcgagctcgagctcgagccccagccaccgcagccatgctcctcacgaaaccctacctctccaactcgctccttccagtcccatccccgccgccgtcgggccctactctcagctccaaccatgcaagcccccttgccgcccctacttgccgtcgcagccgcctccgcatctccgccacatccacggctgcgccgtctccttcgtcggctgccgctgccaccgcgtcgctgagtcgagtggacgtgctctcggaggcgctcccttttattcagcgattcaaaggcaagacggtggtggtcaagtacggcggtgcggcgatgaagtccccggagctgcaggcgtccgtgatccgcgatctcgtgctgctctcctgcgtcggcctccgccccgtgcttgttcacggcggcggtccggagattaattcctggctgctgcgcgtcggcgtcgagcccgcaattccgcgacggcctccgcgtcacggacgcgctcaccatggaagtcgtcgagatggtgctagtcgggaaggtcaac

SEQ ID NO: 275670 - DNA, 426 bp, Zea mays
ctcttcttctcctcctctttcttctcgaaccatcatcatatatatatatagaatcaatatggaaggagcggccgaccataagcggcaggtggacgacaagccgccgtacgccgccgtggacgacaccatgaccaccaccacgaagaagatggtggaggagcagctctcagacgacgccggcggcggcggcgagctgccagagcagaactaccgtggatggaaggccatgccctacgtcatagggaacgagacgtgcgagaagctgggcaccatcggcaccacggccaacctgctggtgtacctcaccaccgtgtacggcatgtcgggcgccagcgccggcaccctgctcagcctctggtcgggcaccgtcaacctggcgccgctcctgggcgccttcctcagcgacacctacatgggccgctacgc

SEQ ID NO: 275671 - DNA, 909 bp, Zea mays
tatatttgaccagatgttcaagcctggctggaaggacatatttcgaatgaatcagagtgaacttgaggctgaggtgcgaaaggtttcacgagattctacacttgacccaaggcggaaggcgtatctaattcaaaatctcatgacaagccgctggatagctgcacagcagaagttaccagaaccaaattctgaagaatgtaatcacgatgccagtatacctggatgtgcaccttcataccgagaccaggagaaacaaatttatggttgtgaacactacaaacggaactgcaaacttgttgctgcatgctgcaacaagctcttcacatgcaggttctgccatgataaagttagtgaccatacgatggaaaggaaagcaacacaggagatgatgtgcatggtatgcctaaagattcaacctgttggttcgttctgccaaaccccatcttgcaacagactatcgatggcaaagtactactgtaacatctgtaaatttttcgatgacgaaaggactgtgtaccactgcccgttttgtaatttgtgtcgtcttgggaaaggtcttggtgttgatttcttccattgcatgaaatgcaactgctgccttggaatgaaattaactgagcacaaatgtcgggaaaaagggctagagacaaattgtccaatatgctgtgacttcctgtttacatcaagtgccgcagtcagagccctcccttgcggccacttcatgcattcagcttgctttcaggcatacacttgtagccactacacttgccctatctgctgcaaatccctgggagatatggcggtgtattttggcatgcttgatgccttgttggctgctgaagatcttccggaggaataccgtgataggtgtcaggatatactgtgcaatgactgtgagaggaaaggcag

SEQ ID NO: 275672 - DNA, 957 bp, Zea mays
cccacgcgtccgcccacgcgtccgcactcgctcctcctccctgcttgcctcccgctgatatgatatccgtccattccaatccccctcttccgctccgcctccctctagctcctctccctctcgcagccatcctcgtccccctaagaacccggacgtcgtttgtcccctccttttctgggcgtttacatctttaagctcaaagagaaaggattatgaaaatggcgcacttgatcactaattgcagctttcagacattctcgagttctcctaattactgccgcaatattgggcaactacagaactcaaaatcttcaaatctgtccctcaaatcctgttccaggagacaaaagaagtcatatgttacctgtgctagcgctgccgtacaaggacagacacaaacacctcttactggtagccagcaagcttatgagcattcatcctccaaacctaaaaaggtaatggttattggtggagatggatactgtgggtgggcaacagcacttcatctctcaaacaaaggttatgaggttgcgattgttgataatcttgtccgccgtgcttttgataaccaactcggtcttgattcccttacccccataacctccatccagaatcgtgtccgtagatggaagtctctcactgctaagacaatccagctctttattggtgacatatgtgattttgaattcctctcagaaaccttcaagtcttttgagccggatgccgctgtccactttggcgagcaaagatccgcgccatactctatgattgatcgttcgcgggcagtctacacacagcataacaatgtcattgggacacttaatgtcttgtttgccataaaggaatacagtgaagagtgccatcttgttaagctaggaactatgggtgagtatggaacaccaaacattgacatcgaagaggggtttatcactattactcacaatggaagaacagaca

SEQ ID NO: 275673 - DNA, 593 bp, Zea mays
ggacgcgtgggctagcgtcggctaccgcgactgcagcgtcggcggctgggaccagcggatgtgcgttcctctctctagaagctccgtccgtcttcacagccttttcctcccaacaacgcataatattagctagggtttcaacacatctgacggcggaagctagggcgtcgccaccgtcaatgtcttggcactcccgctctgttcatcaatcgcatcgacaggtgctccatgattctctataatatccgaaataaattaggattaaagcaagaataggaagttattcaaaactcaaaagtaaagggtttccggtcttccagttaaatgaccaaatgacctgtagaatgacagcaagcaagcaaaataaacggcagacaaattgcaccaactcagagcagtgcaggccagggaagaaagcaaaatttgacacatctcattgtctagtaagtttgaagcctcatatcagtcttaaatgggatcaatatctgaggaaagttgtgccagagagagaacatgttggaattttgtggtcagacttggcccctttcatggaaagccagaaacactgttcaggccttgcttgatgtatgtat

SEQ ID NO: 275674 - DNA, 618 bp, Zea mays
ctgatgtttgcccttggaaccggataaaaggacttaaagctgtagaactttgcaaaatacagggtcttgattatgccacctacagaggatctggtgaaagctgctgtaaattaaccattgaatttgttgattgcacgtccagtggatttggcggaacatttatgatcacgttgcgtgagctggtcaactttccagattttcttgtggagagaacaaggtacgaagctgctatggagcggaactggacccacagagacaagtgcaaagtctggtggagggacgaagaaggacaggtaggaggaacttggtgggagggacgggtgatggcagtaacacctaaatcacctgattttcctgagagtccatgggaaaaatatgtcatacagtataaggaggatggttctgatcacgctcatagcccctgggaacttcatgagacaggcagtttatgggatccatggaaacatccacatatggatctcacggttcgagataaattgttatcagaaatggaaaatttacaggaaatgtcacacagggatcaggatcattatggtgttttaaaactggacaaggttgcagaaaagtcagatttcatcaacaggtttcctgttcaat

SEQ ID NO: 275675 - DNA, 653 bp, Zea mays
gcagtttggggctgatgttgctagcttggtatctggtgtatcaaaattaagctacataaaccagctacttcgcaggcatcgacaaaaaaatactggtgggagcactcttacttcagaggaagcaaataatctacgtgttatgttattggggctggttgatgatcctcgtgtggtgctcatcaagctggcagatcgcttgcacaatatgcggacaatttatgctcttcctgtacctaaagctgaagctgttgctcaagagacattggctgtctggtgctcacttgcttctcgattgggagtctgggctttgaaagctgagctggaagatttatgctttgctgtcctccagcctcaaatcttcaagaaaatacaatctgaacttactttaatgtggaatcgtaccggaaaatctaaaaatatgagaagatcatcaattcgaaacgaattacttgcttcaatgaaagatgggaatatggcgcccatcaatgatttgtttagttcatgtaaccaagaaagaccaaatatgaaggacttattgcaggcagttttgccatttgacatctttttggatcggaagaggcgttcatacttccttagcaatctcaatagtaattctggagaatctataccaaatcctaagatagttgacgatg

SEQ ID NO: 275676 - DNA, 534 bp, Zea mays
  unsure (1)..(534): unsure at all n locations
acctgcatctgagttttttntagaaacttctcgggtatatatagccattgtgcctacgtgtacatgcacgggatgaacgcaactcactgccgtgtagtattacttttcgttattaccgtggcagccgtgtttgtgtgttctcccagtttcccgcgcctatagaagcagccagcaaacctcactcctcaagacctcaacaaagcaagcaatcgaacgggcacggctggtttccgacgagttctgtcgtgccatggatccgcgacgcgcatgctgggagagctcgacggaggacgtgacgaggccgctgctgcccgtgcacgacgacaggcctgcgggacgctgctcttgctccgggctcgggtccctgctcaccaccaacaagtacctggccgtcgcgtcgggcccgctggcgtgcgcggtgatctgcgcgctgggagacttcggcggccacccggcggcgcgcaacatgctcggggtgctggcgtgggtgttcctgtggtggatcacggacgccgtgccgctcggcgtcgcgtc

SEQ ID NO: 275677 - DNA, 545 bp, Zea mays
tttcccattcgtccgcccacgcgtccggtgcacctggacatggtgactggtcaacaaatctggagaggtacacactatgccaggatgggatatttcataagcaagaccaatttgggagacttttacctacatttattcaaataattgatttggcggaagaggaagaggaagagtattggatggttgtatctgccatattcgagggaaaggaaacttgcagtctaccatctgaatcgagttatgctgataaatcatcatctgaacctccaagttctactccattaagcgaccccatcaacaataaggtgcatttgctcagaaccatgcttcaatgggaggagcaagttcgccgtggcgcatctttggcagagaaaagtctcagtgcaagcatctgcacaaaggcaatcctgcgtgaggtggccataatattctggcctaatggcaagattatgagaatgagcactggtagcacagctgctgacgctgctagaagaatgggcgtcgaagggaagctgctctgggttaatggccaactagtgctgccc

SEQ ID NO: 275678 - DNA, 436 bp, Zea mays
agcaataggacgatcgagcaagaagcaagcagcagtaacaagaaaccatcatcgatccatgtatccaccaatggcggcgctcggaggacggcggaggagggcgtcgtcagcggccctcctgctagccttgttggcggtggccctggtctccctggccggcccagccacggccgcggggaacaagaccgggcaggtgaccgtgttctggggccggaacaaggccgagggcacgctgcgcgaggcctgcgactcgggcctctacaccatggtgatcatgtccttcctcgacgtctacggcccgcagcgcggcggctaccaccagtaccacctggacctgtcggggcacccgacggccggcatcggggacgacatcaagcactgccagttcgtgggcgtgccggtgacgctctccgtcggcggcttcggctccggctac

SEQ ID NO: 275679 - DNA, 381 bp, Zea mays
cggtcctctcggctctcggtgtgggaagggaaccaaaccgagacggaggcggagtacgacgcctgccttccctcttccgccgagcgcccgctgcgtcattctcgtccctcctcttcatcttcatcggccaaccgattgccgctgaccccggccatcggcgactgtcccccggtttttctttaacgatttccgattcgattccatggccggctggaccgattccaccggcagcggcggccgaggatcaggaggaagaggcttcacgacaccccgctatactactaattccaccaatgacatgatccatggaagtaccagcggcggaagcggaaggagcggcaggtggaaaagaagcaagtcaagggggtggccggccccgga

SEQ ID NO: 275680 - DNA, 1364 bp, Zea mays
cccacgcgtccggtcgtagtcaccgcgttcgcttcccgagcacgcaaccatggctcgactgtcagccaccgccgcgctcctcctcctcgtcctctccctcctcgccgtcgcgcactgcggtgccctcgcagtcgcagcagagcacgacaccgagcccgaatcaaccgccgccgtggccgtcagcgacgacaacgtgctatccgaccccacggtccacgctgaggcgggcaccgccagcgccactgaagaggaggccatcccggcggagcagcagcagcatgggttcgaactcctccgcctgccgtctcaccggctccaccaccaccaccacctctggtggaagcgccaccacgggatctaccgtgacgcgtcgcacaagttcccttgttctggccacggcgcgaggcgcgagcaggcagtgagccaccttgccatcttgcccgcatccgcagaggtggccagggaggcgggggaggagatgcccgtggccgagccggacccggatcgctccctcccggacagcgacggagagggggaggtggctattacaagcgagcagccgtcgccgttcaccgacgccgacgggcacgacgacgagagctcggcggcagtcagggcgtggaagcacgagatgctgcggaggtggttccacttccaccacgacatgcgccgccaccgtctccaccacgtccaacacgaggtggaggaggaggctaccaccgccccagagacgacagggagtatgggcatgaagcggcaccggttccacttccaccaccacgacgacgaggacgaggagaagaatatggcggcgaggaagcggctccgccacgctgatgagcacgacgaggacagcgacgacgaggaggatgagcaagtggaagagatggtccggcgcttcaggaaggcgatcatgaggaggaggttcggccacggccacggccatggacgccgttcccgcttcttccaccacatccaccgccacgccgaggaggccaagaagcaggcagatgttgaagaagaggagagcggtgtcctggcctggatcaagggcctcatgaaccggttctagagctgcctcattcgagcgatccgtccactcacagtcacagccatggctgcttgcctttttactatttgccatcggccatcccgcgtgcatactgcaggcacggctgaatttacttggtgttattagtgtgtttctatccacggtgtgtcgtcttatatacgcacttgtatcacagattcacagtacgtactacctgcttgtgtgcttgacattgtgttgtttcatgtaattctgtgcagttatatatgtgccttttgtttttcataattgtcgagcttgtcagacgtactat

SEQ ID NO: 275681 - DNA, 643 bp, Zea mays
ccgccccagagacgacagggagtatgggcagtggtagcctcctcctccacctcgtgttggacgtggtggagacggtggcggcgcatgtcgtggtggaagtggaggctaccaccgcgccagagacgacagggagtatgggcatgaagcggcaccggttccacttccaccagcacgacgacgcggacgaggagtcgaatatggcggcgacgaagcggctccgccacgctgatgagcacgacgaggacagcgacgacgaggaggatgagcaagtggaagagatggtccggcggttcaggaaggcgatcatgaggaggaggttcggccacggccacggccatggacgccgttcccgcttcttccaccacatccaccgtcacgccgaggaggccaagaagcaggcagatgttgaagaagaggagagcggtgtcctggcctggatcaagggcctcatgaaccggttctagagctgcctcagtcactcacagccatggctgcttgcctttttactatttgccatcggccatcccgcgtgcatactgcagtgtcttggcacggctgaatttacttggtgttattagtgtatttctatccacggtgtgtcgtcttatatacgcacttgtatcacagattcacagtacgtact

SEQ ID NO: 275682 - DNA, 481 bp, Zea mays
cccacgcgtccgcccacgcgtccgcggacgcgtgggttgcgctgctccataattacttgtgctctaagctttgatccaaatccacacacattgatctaaaggccaggttgcagaatggagagaacactgatcacctctaacctctgcttgagtgcacacgcttcaagatcgtcccggagggttcactacatccctccttccgcctctgctgctgcacacaactccagctacaggaagaagagtgccccgtctctgccgccgtcggccgccgcatctgccactgttgtcaccgcccctccgtccactgacaatgtccagtccactgctccgaaacagaccgggcgacaggagctggaagatctcgtggccgccaagaccagcacttcaagaactgcacgtgcgccgagccaggctcgggctcgggctcgggctgagcctcgccgccggcctgccccggcagccacgtccctgccaatggcgt

SEQ ID NO: 275683 - DNA, 419 bp, Zea mays
cacaaatttggtgagcagattcatccaagtctatacacatcgatctacaacaagttgcacaatggacagaacactgatcacttctaacctctccatgagtgcacatgcttcaagatcgtcccggagggttcactacatctctcctgcggcctctgctgctgcacacaactccagctacaggaagaagaagaagaacgccccgtctccgccgccgtcggccgccgcaactgacaccgttgtcatctcccctcctgccactgacaatgttcagtccactgctccgaagcaggccggccgacaggagcttgaagagctcgtggccgccaagactaacacgttcaagaattgctactgcaagaacaagtgccccgagccagtctcgggctaagcttcgccgccggcctgccccggcaatcacg

SEQ ID NO: 275684 - DNA, 345 bp, Zea mays
cggtgtttcctgtttcggtgtttcctgtctctggtggcgacgactgggcggccgacgctgccaccgccctacgccaggtgaccaggtctttcgtattcgggatcttcgccggcgtcgagcacccggccattggcggaaatttgatgagttagagcttattactggtctcatactcctatacggtgtcactggaactgccaattccgcaagggctctccttcttaagaagtgttggatggtttgaggacccgaaggttgattcagcagccaaacagcagttatccccaacgttgaaactccagacagataaggagacgtacagacctgggattcagtcactgtgac

SEQ ID NO: 275685 - DNA, 463 bp, Zea mays
cccgctctcgagggccgtgacctgattgctagagcaaagactggaactggaaagacactggcctttggcatacccatgatcaagcaattaagcgagcgggacgatggtcggattacaaggagaggtcgtactcctcgggttctggttctagcacctaccagagagttagccaaacaagtcgagaaggaaataaaggaatcagcacccaagctcggcacagtgtgtgtttatggcggagtctcatataatgtccagcagaatgcactctctagtggtgtcgatgatgctgatggaacacctggccggataatcgatttgatcaatggcgtaagcctccagttgggagaagtccagtattaggccctggatgatgctgaccaaatgctcgcagtggggtttgcggaagatgtaggcacaatattacaacagctttctgcacgctggcaaagcatgtcgatctctg

SEQ ID NO: 275686 - DNA, 395 bp, Zea mays
aggacgcgtggggtagcaccagagagaggccaagggagagaggcagaggggcgaaggaaggctaggtaggctagacatggccgccaaagctcacgtgctggtgctgccgatgccatgccagggccatgtgacgccgctgatggagctctcccacctcctggtcgaccaaggcttcgaggtcaccttcgtcaacaccgacgtggaccgcgcggccgtggtagccgcgctggaggcctccggcggcggcggcggcgtggcggcgctgggcggcggcatccacctggcgtccatcccggacgggctggccgacgacgaggaccgcaaggacatcagcaagctcgtcgacgcctacacgcgccacatgcctggctacctggagcgcctcctcgcccaca

SEQ ID NO: 275687 - DNA, 426 bp, Zea mays
gcgccggctcctcgcccaccaatctgtacacactccgacgccgacgcgaaatcgagaggaccaccaagctcaaaaaagcgccgcccggcgccgatgttgctgcggcggatgcgatggatgtcggagggggacggccggtgggagctggatgcggagaccccggtgacgatggagggcacggcgcgccccgtcccgggggaccccctgccgctggggctctcacggggctaccgcatcacccgtcccaagcagctagacttcttccaccggttcatggcgtcccctctggtacccaccttctccgccatgcgcgacggcctctccgtcaaccacgcccacattttctacatgacagacaactggtcttctaccatcttggagaaaatcaatgttaagaagcttgtgtctgtcgtgaaagagaaatta

SEQ ID NO: 275688 - DNA, 489 bp, Zea mays
gcccggactgactggctggacccacccatgcgttttttcgggggcggacgcgtggggccggcgccgctgctagcttgctagcatacttcccctacacgcgcgcgcaaccgcaagcagtcgatcgtcgcatggcgccaggaggcagcggcgagcggtggagcctggccggcgcgacagcgctggtcaccggtggcagcaaggggatcgggcaagccgtcgtggaggagctggccaggctcggcgcgcgcgtgcacacgtgcgcccgcagcgcggcggacctggaggagtgccgccggcggtgggccgagaaggggctccgcgtcaccgtctccgtgtgcgaccttcgcgtgcgcgccgaccgggagaggctcgtcctggacacggtcagcgcggccttcgacggcaagctcgatatcctggtcaacaacgcttcgctgctgctgctcaagccggcggcggaatgggccggggaggactaccgcggtcatg

SEQ ID NO: 275689 - DNA, 407 bp, Zea mays
ttcgcttatatgggcaggcactagctcgctaggctgctaagagccaaagactgccggcaccgctgctagcttgctagcatacttccggtcggcaagcagtcgatcgtcgcatggcgccaggaggcagcggcgagcggtggagcctggccggcgcgacagcgctggtcaccggtggcagcaaggggatcgggcaagccgtcgtggaggagctggccaggctcggcgcgcgcgtgcacacgtgcgcccgcagcgcggcggacctggaggagtgccgccggcggtgggcccagaaggggctccgcgtcaccgtctccgtgtgcgacgtcgccgggcgcgccgacccgcagaggctcgtcctggacaccgtcagcgccgccttcaacggcaagctcgatagcctggtcaac

SEQ ID NO: 275690 - DNA, 412 bp, Zea mays
ttacgtgtccggctcgatccccactctaccgcgcccgccaccaaccccgcccgcgcctccgctactaaagccgaggcctcacccaccaccccaccgccatgctcctccccctcctcagatcccacccgctcctccaccacgccgcgcgcctgtcctccccacgcacccgcctgctcctccgccgcgacgcaatcccgctcgcacgctccccgcctatccgcatggcggcctcgtccggctccggcgccagctcccctgcctcggcgccgccagctgccgtggtgcacaagtcaaagatcaaattttgccctgcttgtggaagtccaacgaaactggccatacctgatggcgatgagaagatgagggctggttgttcttcttgtggaggaggtcactacgaaaacccaaaaat

SEQ ID NO: 275691 - DNA, 863 bp, Zea mays
gtcaccccaaagctccgcctccgcaccttctctcactcgcccagccgcggctatggcggccaccacatccacggcggcggcggcagtatccttctccctcccctcaccaccgcactgccgcggggcccggcgccgccgcgcgccttccctcctccgtgccgcctgcaccgccgcgcccccctcccccgacctctccatccagctctcgccccgcgcgtccccgcccgcgtctaccaacggcgccgtcaccgcgcttggaccccccgtgtccgcctcctttgcccgtgaccgcgccgaggacctgcaggccgaggcccgcgcgatggcccgcgccgctggcgccacagtctacagtcccgagctcctcgccgcccgctacggctcccgccccttcaaggtggcgctccgggcaggggaggtgctgtccaagttggcgtcgttcggggtgaaggtcctactggacgagcggagaggggagtcgtcctcggagaggaggcgcgccagggcggtggagttgcgcaccatcttcactaggctcggcccaaccttcgtcaaaattggacagggcctgtccacgcgccccgacctctgcccggccgagtacctcgaggagctcgccgagctgcaggattcacttcccacatctccggatgaagaggcatttgcatgtattgagagagagcttggcttcacgcttgattcaatctactcgacaatttcaccttcccccattgcagcggctagtttaggtcaagtttataaagcacggttgaaatactctgggaagctggtagctgtgaaggtgcagagacccagtattgagaaagccattgggcttgatttttatctacttagaggacttg

SEQ ID NO: 275692 - DNA, 572 bp, Zea mays
cccacgcgtccggtcttgtcaacactcccaaatgttgcttctgaagtcctttcaccctcccttggtgttgtttatggtgttgcttgtgattcagtgacttccctgttccaagcgatgcttgatcgtctcgagtcatgcatcctgaaaatgcatgagcaggactttgcaggtcagggaatggatgcatcaatggataacaatgcatcagctgacatggaagagcttcagaaatgtgctgtccacttccgcagcgagttcttatcgaagctgttgccttcatcatcctctcgatcagaaaccatatgtaccatcatggttagaaggatggcctcaagggtactcatattttttataaggcatgcttctcttgtcaggccactctcagaagcagggaagttgagaatggcacgggacatggctgagctggagcttgctgttggtcagaatctgtttccagtggagcagctgggggcaccataccgggcactacgggcattccgtcctgtcttgttcctggaaacatctcagcttgacaagtttccgctccttcaggacttgccgcctagtgtgat

SEQ ID NO: 275693 - DNA, 422 bp, Zea mays
  unsure (1)..(422): unsure at all n locations
gcgggttgctgtcactcgctctgaggcctcgtcgcgctgctagctgagagccgaaagagggaatcctcggccggcagcaggagaggagagccaccgtttgatcagcgaccgggcaagagcaggccgcggccggccaccccgcccgtctctgtccgaccccgcaccagcgactcgccgagtgcaggcacaagaggggggctccatccatgaggcagccatgctggtgctcatcaacaggtatttcaggagcaggaacagcagcccggccggaggaggcggcgaagagatggcgccggcggcgacttccagcgaccacctctgtttgccgggctgcgtgcccgtgcgcgccaagcgggcctnctnctccgccgccgccgcggccacggccaccacggcgcgggcgtcgcggcacaacttcgtca

SEQ ID NO: 275694 - DNA, 377 bp, Zea mays
gacaacatcatggcgaggattccccaggttctggcgccgctcctcctcctgctgctccccgccggtctccgggagctgatgatcgaccgccggcccctgccggaaggcgctgccggcggcgaggtcctcctccacccgctggtgctggtgcccgggctgacgtgcagcgagctggacgcgcggctcacggacgcataccgcccctccgcgccgcggtgcggcgccatgaaggggaagggctggttcggcctctgggccaactgctccgacctgcccgcgcaccactacgtccggtgcttcatggagcagatggccctcgtctacgaccccgtcgcgaacgactaccggaaccttgccggcgtccaaacgcgcgtgcg

SEQ ID NO: 275695 - DNA, 556 bp, Zea mays
  unsure (1)..(556): unsure at all n locations
ctgttcactgttctactgggacgaccccaaatccccaaatcgaaaggagccgtccggctcagggtttctcgacggctccttgccctctccgccatggacgcacagcgagccctccttgacgagctcatgggcacagctcgcaacctaacggaggaggagaagaaggggcacaaagagctgaagtgggacgatccggacgtgtgcggcccttacatggttcggttctgtcctcacgaccttttcgtcaacaccaagagcaatatcgggccgtgctcgaggatccacgatccgaagctcaaggaaagctttgagaagtctcctaggcacgatacttatatgcaaaggtttgaggcagagcttgcacaacaatgtgagaaattggtaatggacttagatagaaagataaggcgtggtcgagaaaggctggctcacgattctgctgtgccaatgccaatccctggaaaattagctgagctgctttcagtgcgaaaagaacaggtgaagaagctgctggagcacatngaggagcttggtgaggctggtaaagtggatgaag

SEQ ID NO: 275696 - DNA, 517 bp, Zea mays
tctttgcgtccgcccacgcgtccggtaatatccaagctctgtttgtcttagtgagtcgaccacatgaatgcctattatgttctgccacactcaccttcctgttccattagctgctagtgccaactgccagctaaatcctaagcgtgtgtttggaaaatattgaacaatagtgtaaatgcataaagcttgaacctttttttactgttgatggtactgttacatgattctgcattggctcaaccatataggcatgaacaagtatgagatgaagctgggtagaatcgtagtaaaaaattaactgattagtgttttatgcctgaggtgttccagtaataagattgatagtatagaagtagggaactgtcactgtcttgaatcaaagaaactgcgtgaaagataatggtttctctttgctgtaaaagggtattgcttgcaccacaaaagtaaagttactatgcgactggctctataccaggaccataatattatcaatcaattcatagcatgttcacagaat

SEQ ID NO: 275697 - DNA, 694 bp, Zea mays
aagcgccgaccgcacaccgcagcacgggactacgggagcagccgaggcccgaccgcccgagaaattcaagataaaagattttgaagcattttcaagtcttaagaactcggaagataaatttaccttgcatcatcatctcatgaacgagaagcatgcagtcgtgtaagtcctgcgatcctaactgattatgcactccaatgggctgcggagcacaaaggggagaaaaacaaaaacgagtgggaggtggccgtgggccatgttgctgctgctgacgaggcggcgcgacccatagtaaaggcgtacaacagctcacctccctcgtccagctccagccgccgtcaggcttccgacgcaacttctaactccgttcgcctccaggcgacaccgtcgcccgctggcacgccgccacagcagcaggttaacacaatttggcccggagcttagttgaatcctgcttccgccactgcggacaaccatggcgtcgtcgaagctgcagctgcctgctgacgacagcgtcctcctgctcatcacccactccaatctcaccaccttcgcagcggacatccgcgtctcgcaacagaccaccgtggaggcgctcaaggacaagctctggcgcaagaccggcaccgccgtcgcttccatgcgcctccagctccgcgacgactccggcaccaagatcggcgacctcgacgac

SEQ ID NO: 275698 - DNA, 670 bp, Zea mays
aatgcgaataatttcatcgcagcgttgcaattgcaagctagggcaatgatcagcttacgagtgcaacacagacgttagcttttcttacacgcggtctgggaagccacaaatcaccaataaacaaacacaagatcgacgctgcagaggaaggcatccggcgggtggagcgtggacatataatatactagtagggagacgtagctcgtggtcgtcgctttttttttcgttttaagatcacttaattaaccacggcttaaccttaatcaagcgatcgtgacaagtacctaaaacaaacagcctagggtagcaggtacatcatcatgctcgggtccggcacgtccgtccagcagctcccggcgttccagtacgccgccgcggccgacgcgtcctcgccgatctcgaacatcccagcggcgtccagggacgcgaacggtgccatgtcctcggatactgaggagtacggcgccgcgaagccagcgggggtggaggacgtttcctccttagcctgcgccgccacgaagctgaacgccgggagcggcggcggcggcggaggcgcgaagagagacgccagcgccgccgtctgatcggagaatatcggccccggcggcggcgccaccacgtcggccgtggaggaaaaggcaaaacctttgggcgtggggctcgctctgcc

SEQ ID NO: 275699 - DNA, 675 bp, Zea mays
agagattccgcgaagatggcaggaaaactactctacggctggttgatatggagtctgcgatatttgactgtggagttcttccgcaagctcccacaggaagttgataagactggaactggaaatcccagaaatgccaatcctcctgctccttcggacgatcgttacaatgatgcacatttcaggacgattgcttctaacgtgtcctcatacattggcatggtatctgaaacgctgaagaatactatccccaagtctgttgtccactgtcaggtccgcgaagctaagcggtccctgcttaacgatttctatactcaagtgggcgggaaagatgctaagcaacttgcagtactccttgacgaggatcctgccctcatggaacgcaggctgcaatgctttaagaggcttgagctgtacaagtctgctcgggacgagattgatgccgtgtcgtggacaagatgctcttgcgcgctctgttgatgtgacccttttggtgcgtgcgggaaatcgtcgcctgctggccatggattcacgctttctagaggacgtgtgttgcccgccgtgcgcccttccatgagttccccgcatagaacaggtcgtcttactggacagaaaggcgagcgcgtggcgagctgtcctgattttgacgagtccatgcatcttcagcagattggactg

SEQ ID NO: 275700 - DNA, 582 bp, Zea mays
acgacgccagtagccacagtcctggttctttcagcaatggcaggtgctgcattattacacctggccctgaaatctaaatacgacgacgagatacacaggaaagtggagatgttcctcgagacctacaggacgctgaaaccgagaaggtacacattctctgaagtcaggaagatgacaagacggttcagcagcagacttgggcaaggcgggtttgggagcgtgtacaaaggcgagctgccgaacggaggagtgcctgtgcctgtggcagtcaaaatgctggaggactcaacgggggaagaggagttcatcagcgaagtcgcaaccattggaaccatccaccacgccaacgtcgtccggcttctagggttctgctccgagaggtcaaggcgtgctctggtatacgagttcatgcctaacgcgtcgctggagaagtatatacgctgctcctcccaagaacagtcgttaataacaacggccagtaagatgctggaaatagcgacagggatcgcccgaggaatcgagtacctgcaccagggctgcgaccagcgcatcctccatttcgacatcaagcctttcaacatt

SEQ ID NO: 275701 - DNA, 1113 bp, Zea mays
tggatatatacaaacatttcagcgatctgacagttgacaatatagcctacgccatctttggaagcagctacaagttaggcatacaagtgttcgaggcacaaactgagctgctggggatcaccatggctactttccttgacgtgcccataccaggatccaaataccttccaacccaagcgaatcggcgaaaatggatgctggagacgaagctcaagagcttactcacgcggatcatacagccacggttagcaagcggtgagcacggaaacgatctgctgggcgtgatgctggactcctgcactgagaccaagcaaggagggaagcagcagcaagtggatcgtctgcgtcccggctcggcccgggaggagatcatacacgagtgcaagctgttcttcctcgctggccacgacaacacagcccttctcctcacgtggtccgtgtcatttgctcagcatataccccgagtggcaagaaaggctccggaaggaggtcttgagggagttcgggagggacgctcctaaccccaacgcgctcaacagattgaaagagatgacaatggtgttgttcgagaccttgaggctctactcgcctgctctcttcatgcaaaggaagaccctggccgacatgaccgtggggccaataaaactgcccaaaggcactgcaattgtgatacccattccgatcatgcatcgagacaagcaggcatggggcgacgacgcagacgagttcagtccgatgagatttgcgaatgggatcacgggagcagcgaaagttcctcacggcctgctggcgttctcgatggggccaaggtcttgcatcggccagaacttgtcgatgctggaagccaagtcgacgctggccctgatgctccgcaagttctccttcgctctctcccctgactacgtgcacgcgcccgtggatctcttcactctcaaacctaagtttggccttcccgtcattctgaggccactggataatgttttgatttgagttgggcatatagtacaacaggaagtaacctaggtacatatcaaatttgctagctggtcaaaacgttatatgatggtctcaacccttcgttgtctatatcgttgaaaacaagtattttaattt

SEQ ID NO: 275702 - DNA, 443 bp, Zea mays
ggccgccctttttttttttttttaacctgaagtccagaacctctgttggagtgcaatgaagccgcgcacccaaaaagtctgtgacgaccagcaacgagatctcaaaatgcgcactgttactgatcagacacaactggagcacgacaacaagaatgcttggagcttctgcctgatgggctatagtctacgttcaagtggaagcagcatcctgcgtgtcccctggttttcctggagctgcctcgcggatgatcctgagggactcggcgaagtcgtccaggagctgacggccatccggaaactgcgcttcgtctaccgacaggactagcttcacggagtttatgtagctctggtagtgcacagtcagggcatgtgggtggccgtaggtgctgggcgcgatgtagacgatggggttgccgcagaacagcacctgctcagtcggcccg

SEQ ID NO: 275703 - DNA, 730 bp, Zea mays
tgtctttatcttatggtctctccctcaattctctggtgtacttcgcaatatccattagctgcatgttagaaaatgatatggcggctgtggagagggtaaatcagttcagtattcttccttccgaggcagcatggaaaatagaagagcatcttccttcttcaaattggcccaatcatggggacattgacattaaggatataaaggttaggtatcgatcaaatacacctttaattctgaaaggcattaatataagtatcagtggtggagaaaagaaggcagctgtgggaaggacaggcagtggcaagtcaactttaatccaagctttgttcaggctcgtagaacctgcggagggaaaaatgatcattgatggaatagacatatgcacactcggtctgcatgatctcagatctcgctttggcataattccacaggaaccagttctctttgaaggaacaattcgaagcatcattgatccaattgggcagttttcatattcttaattattgtttgtctttgatcgttttcttcttttatttttattatttttattttcttgtatttttttttttatttatctttttttttttttttatttttgttattccatttatttttttttttttttattttatttttttattatttttttatttttgttttttttatttttttatttttctttttttttttttatattttttttttttattttttcttttatttttttttt

SEQ ID NO: 275704 - DNA, 438 bp, Zea mays
aagtcccagcgcgcggtgctccagtggcgtcttctccctgctgtgctcgccggagctcctccagctcgaccgctcggcttcccctagcctcttcccctgcgagctcgactcctgctcgcctatggagttcttccagctccctgctccggtgactagggctcggcgtccggctccctggatgcttgccctgctcgccgccatcctgctcggccagcgcagtcccttctctgctctctctctctattccctgctcattggcagccgactccctctacctcccatggacgccagccgcgcccctggttcctgcctctgcttctgctcggaattcccatggccagagctttcccctagcccggatctcacccagtcgcccagcttggctctatccatactccagctccccctctgtttgttctcgctactgggtcgggtctg

SEQ ID NO: 275705 - DNA, 1063 bp, Zea mays
cgcatcagatctagcgccgcctccttcatcccgctggccggcgagctcctcagcacgggggataggaagaccaaggttatagtttgtgttgctgctgcacataagttactgtcaatgatggctatgattattcattctaaataaagaaaacgaaatgcaaggaggatagggattacctatgcaccaatgcatgaaagagatagaattataattgaatatctcaacacatagatttggagggatgacacttcaatcataaacatgattagaatgaaaagggcttgtttctttcacctaactaaacattttagagagcgtggtttactttaggacactatccatatgtgtgttgaccaacaagtggccatgtttctaaatacaattgggcataaccttagaaataggttgattggcacgaattttggtagatctggggaaacatgttgtcgttgtttcagtaaagtattttgtgctaatggtatgctatcgtggtatcttttttggtctccatcattgtatcttctacctacttttttttggtactacattattgttttctctattttttggaaagtttcttcttttattttattttctcataattttgtctttttttgttttattgtttttttttttgtttgttttctgttttctccttatttttttttttttttcatttaatatttttcttctttttttttttttctgtttatctttttattttttttttttcctttttttctttacattttttttttctttctcttattattttatttcctttcatctttctttcttttgttatcattctttctttgttatgtatatattacaacttttacttatatttttttttattaattttactcattttctctcattccatatttatcttacttccagtttttttactcttttgttatcttgttattttaatttcctttattttctatttttcttctttcttttggatttttcccttatttttcttttctaacttttctcttattatcttctttttattctgttttttatcttcttttttttctttttcatttttttt

SEQ ID NO: 275706 - DNA, 345 bp, Zea mays
gacggataatatcgtccttctcgggacaaggcacctcacgagcccttctcatccgcatcagatctagcgccgcctccttcatcccgctggccggcgagctcctcagcacggtgagtcccctttgccccctcttactctcctcttcccctatgctctccgcgtcctccagcctgctgaccggcgagctgctcagcagggtgcggtgagtcgcctatcctctgctctcattttcctcctttatcccgctagccggcgagctcttcagagccaggcgcggtgagttcctttccactctgctctcttcttcccctctgctttccctctaatcccctctgctctcttccg

SEQ ID NO: 275707 - DNA, 669 bp, Zea mays
cttcattgctaagccttatccttcagctagcacatagccaccgtttggttgatcatcgcactgatcaggcagccatggctaccaaagccaaatcaagctcctcgtcatgtctctccttcctgaaggacgccctgctccttccaaccaagaacgccaagctcttcgtccctgtcttcctcctggtaaccgctcccctcattcttctccagatcaccaatgtcttctgcatccagccgcgcacagccgacatgctgcaccacatcaacgagatcaagaacatggacccctcaagcgccgattacgccaagctcatggtggagatcatgaaggaagccaaggagcttgccatgatctccatcgcgctcctagtcatcacctttgcaggaagctttgctaaacagatcatagccttcttcgccacctccactacctacgccggtgaccgctactcgttccctgagctcttcaccaaggtgatcatgaaggggcgtcacctcaggggccctctcataaccgtcgccatggtgggcgtcctcaacgtcgcatgcgcgctcctcctcgccgcgctgctccagctcgcgatgcgccagtagggggtgctgtacacggcgatcctcttcgtgctcccgttcctcgcgttcctctacctcgacgtcgtcttctttgtcg

SEQ ID NO: 275708 - DNA, 595 bp, Zea mays
attgaccttctttatgccagtgtctccctcttagtagtaccagctgacttggatatctcccaaggatcagtgctttatgatgttgatgaagctactgtccgtagtcttaatgggtgcagagtagcagaccaaatcattagacttgttccaaattttgagaattttcgcacggcattaagatgtttgaagtactgggcaaaaaggagaggtgtttactctaatgttactggctttcttggtggtgtcaactgggctttactggttgcgcgtgtctgccagctctatcccaatgctgtgccaagtatgctggtctcacggttttttagagtttttacacaatggcagtggccaaacccggttatgctttgttccatagaagaggatgaacttggcttccccgtttgggatccacgtaaaaatcctcgagataaatgtcatcacatgcctattataacccctgcatacccgtgcatgaactcgagctataatgtttccacaagcacgctgagggtcatggtggaacagttccattttggtaataaaatttgccaggaaattgatatgaataggccagctggtctgctctgtttgagcc

SEQ ID NO: 275709 - DNA, 264 bp, Zea mays
aaccatggcatctatatacaagtttttcactatcagtcttgattttgccaaatagtttctttgtcgtgtccttaaatttatgcataaagatttgcatgtgagtcctgcatcatgccgtattatgccattttgttccaagagatacatatctagttaacatgctactgcaggagttggatatctctcaaggatcagtcctttatgctgtcgatgaagctactgtccgtagtcttaatggttgcagagtagcggacgaatcattag

SEQ ID NO: 275710 - DNA, 1441 bp, Zea mays
tcactgctgcctaacactaaacaagatctctctctcaggcccccgaccccgatggtttcctcgcacacccatcacatggccgcctcctccccttccacctcctcccctaatggcagatgctaggcggcggcgcccctcttgagaagtgaaagggaaagatttgttttgccgcccgcgccctgctcaggcgctccgcctcggtcgggccacacaaggtagcgccttccgcctcgttgcctgacccattcctgtttcgttcgaagcactgaagcagccccagaccgacgccaggcgcccaggccagtggtcgacgcctgtggtgagctgataggcgatgtcgtcaccgtctccggtgctggcaagggctgcgcgtctcacgtgtaggttgtgatctttctgcccagagatgtgcgatttgtcttcgcttgatctgagtgacagtaaaacggagaccggctagttgttgttcctgaaacctgttgatttatggggagccagacaatcgcatcacaggctgggggaggtggaagaggcatgggtagtagtggtggtgccggtgcagcgcaacgcgggcagatgcagagtctggcaagacaagggtctctgtataaccttacccttgatgaggtgcagagccatttgggagaacccctacacagcatgaaccttgaggagctgctgaagagtgtctttcctgatgacctggaccctgatggtggcactaccagccaatatgagcagagttcgggcctcttgcgacagggaagtatcacaatgccgcctgagctcagcaggagaactgtggacgaggtgtggaaggacatccaggatgcaccaaacagaaatgttggggagagtggtcggcggaagcgggagcggcagccaacgcttggagagatgacgcttgaggatttcttggtgaaagctggggttgtcgccgaaggatatctgaaggacttgaatggcataggcagtgtggaacaggttggtagcactggggctgcgggtttgacagcaggggcacaatggttagaccactatcagcagcggattacagctatcgagccccatcagcacaggcaacatagtttgccaggtgcttacataccgggtcagttaagccttcagtccctgaatgttggaccaagtgctattttggagtcatactctgatggccacatttcttcaccgatgatgggtgcactttctgattctccgatgcctggtagaaagcgtggttccccaggagatgtggctgataagttggtggagagaaggcagaagaggatgatcaagaatagggagtcagctgctcgttcaagggctaggaagcaggcatacactaatgaactggaaaacaaggtttctcgattagaagaggagaataagaagctaaccacgttaaaggagttggaaaatatacttttctctgagcctcttc

SEQ ID NO: 275711 - DNA, 672 bp, Zea mays
gaaagctcattttttgggaagggtcaagaaaagcgaggaagcagcgagccaccttctccaactaacatagccagagcattctaccgtccgtcgtagcagcgatgatggctgtgacgtctctgcagttgcgcccaacccctcgtctccttccggcgagaaatagctccacgggcactgggccgcggatggccgccttgagctgcagacacaaccagtccaccaatgtccaaggacgaacagggctcagaagccacgtaacgacgcgcagagacgccctgtcattcgtgtcatccgcgctgctggcagcgttgttcgtggtggccggtgcagcagaagctagaacttcgaggttggagaacaaaaagaaagccctggagaagctccgggagaaggcgttgggccgaaaggaggagaacggagccaccggtggcaagaagatgccgcctccgacgaacttgctaatccgataatccctcgtccggccgtcgtggctaaaggcactttgccgaggggccctttgtgttgatggcgatgctaatgtgagtttgtacgttgttggagtcttgtatgactgccaactggaatctgagttttcagtctacattttcttaagcattgctgtactgtttcctcatcaggttatatgcctgcaaatccaattgttagaactgc

SEQ ID NO: 275712 - DNA, 521 bp, Zea mays
  unsure (1)..(521): unsure at all n locations
cccacgcgtccgcgcccctgtccatccgctcggccgagcgctccccgagcacggcagctcgcccaacctccctgctctctgctccaacttcctggttgccgcgccctgtgtcgcgtgctccctgccagccgtcagccgagtccttccccatccccatggcgcccagcttggtctgcgtgacgctactctcacacatgggggtcaccgtcgagtcttcccttggctcgctcctccataacttgctcctgcgcgctctgctcgtcctatggcgctcggcatccagttttctgcgcgccgactccttgttcccatcctgtgtgcactacaagtttctttctccaatcatcgcgcagctccctcgagctctgtccatgccgtccctcgagctctgtccatgccgcgtcgtcgttcgtcgtcacgtcgttcgccatcaagcctcactgtcattcctgttgtgcctcgcttcggatgtgttcgattaaatgtcggatcaagaatccaagatgtcgctcctnctcgct

SEQ ID NO: 275713 - DNA, 633 bp, Zea mays
cccacgcgtccgcttggccatcagcgttcaacggccgtcacgacatccccagtctatcgcgtcatgctccggtcgtcgatcggctgaccgtcgtcgtcgtgttctctgcttccctcgtcggtcaacctcgccgcggctaagtccatccgccgtgctatgtgctgtggtctctggtcgagggacatcaatactctatgtcccttgctcacctccctggtcgtgctcgccgggacactattctctagccaactaccgtcggtggaagccctgccatcgatatcgcatgatattggttgtcttcttcgaccacgtcattgcctcacaggatttggacaccttgtcgacactcgaccacgtgttcgctcgttaccacgccatcttcagcatcatggttctataagactccgcgcactcatcggcacccggctgtcaatctccaccacgcagcgctgcatcggacttaccctgtatgatgttcgacgacaagcccaaaccagaatttatcaatattctcacaagtattgagtcacgtttgaatgctggtaagcaatttatttgcttagtaattttagggctttgccggtaggcgctatcggcattttatgcgagaaattttagttgtggagtgaagtc

SEQ ID NO: 275714 - DNA, 596 bp, Zea mays
cccacgcgtccggagatatggtggggaacaatactgttgcttccctcttctactattctttgctcatcatctgcgccgctgcttggcacgcggatgcgtcccaagcggatcgactgagagaattcatcaggtctaggaggaacagtcctagtgaggctgctgataagggcacgtttgaggttgccaacatggggcacagcgtagctagcagcctcctgagcacaagctactccgacagtgaacagagcgccctgaaggcagccgacaagatcactgcgctgccggggcaaccggacggcggcgtcgacttcgaccagtacgccgggtacgtgactgtcgacgagaagaatggccgggcactcttctactacttggtggaggcaccacaggatgcctcggcaaagccgctcctcctgtggcttaacggagggcccggatgctcgtcgcttggctacggagcaatgcaagagctcggtccgttccgcgtaaacagcgacaacaaaacgctgagcagaaacaaggcggcttggaataacgtggctaatgtgatcttcttggagtcgccggcgggtgttggattctcctactccaacaca

SEQ ID NO: 275715 - DNA, 760 bp, Zea mays
caactttttccacccgccggaacactggtaaccctcacgccggcgcagccgcagccgaggcgccgtgaacaacctccggaagcgcatgatctcccttctcctccgggcacctggatcaccatacgtcccttgcccccacttcttcccgctcttctatccccaccgcctcctctccgccatcaaatgcgtcgctacaaaaccattcgccgtcgaggactacctcgtcgccacatgcggcctcacccaagcacaggccctcaaggcgtcgaagcatgtctcccatctgaaggatccctcgaaagccgacgcggtcgtcgccttcctctccaatctcggcctgtccagcgccgagatcaccgacgtcgtgaccagggaccccaaagtcctctgctccgacgtggagagatccctcaccgctcgcgtcgccgagctcaccgacctcgggttttcacgtccggagatcgtccgccttctcatcgttggcatgaaccacttccgccatagctcgcttcgcctcaatcttgagttttggatctcggtctttggctctctcgacgagctcattcgggcgctcagaattaacgccgctctcctcagcacaaggattgaggaggtctgcaagcccaacttggagctccttcaagagtgtggtataaatgtttctgatctccaacagcttcatgtcccgtgtgctcaccagggaccctaagagcctgcaggaagctttggctcgccttcatgagttcagaatccagccggg

SEQ ID NO: 275716 - DNA, 525 bp, Zea mays
  unsure (1)..(525): unsure at all n locations
cccacgcgtccgaccaactcgagtcatcgagttccacagctctcgcgtcgcgcgcagccaatccctctccctccggcctacacagcccacaactcccttctccatctctctctctctctctcgcccgtgtcgccccctgtttgcgtacaaccccatggcgacccacgccggcgagaacggcagcgggcacgagaacggcggcgggcacgcggagtggcggttcgcgcgggcggcgaaggagggcgcgctggccgtggcgggggacaagatgagcatccgggcggtgcggttcaagatcagcgcgagcctggacgcgcgcgacccgcggcccgtgctgccgctggcgcacggggacccctcggcgttcccggccttccgcaccgccgccgaggccgaggacgccgtggccgccgcgctccggaccggcaagttcaactgctaccccgccagcgtccgcctncccgaagcccgccgtgctctggcggagcacctgtcgagcgaccttccatacaagctgtcgagcga

SEQ ID NO: 275717 - DNA, 873 bp, Zea mays
tgcggcgtggaggtggagcagtgggcgctacagccgccatcagctagctgccttgccgtgtcctcctcttcctcctgtcggtggcgatctctgcggaaacccgagcttcgtccaagccgggcagtagtgcgcgccgcctgggcgtaattatggattcttttgagggctctgatcatataactcaaagaaaggttgttcctgcaaaacatattgcattggtatgtagatttgaaggttgatggaaagaatgagcctgctgtagaggggttgcctaatggttggctgaaagaatgcaggcctagaaagaaccgatatggatccagagtcaagagtgacacgttctatattgatccaatcaatggatacgaatttcactctctcaaggatgtacaccgctatcttgaatctggagacatcagtaaatgtattagattgccaaacaagagaaaaattgaggacctgcatactaaagaggaccaatctcatcatacaggaaaactatcagatcatacccagctggatactgctgatgagtctaatcgatatgatctaccggaaggtaccaatgcactgggatatgctctgcaaaatccagaaagcggagagaataatgaaaacattgcactgtccaagcctgacaatataagctcaatccaaattgaagctggtcaggttgaagctacagaagataagagcatccaatcaggctctatagaatacactccaggggaagctaaatctgtcactaggaaaggaatagatgtgaaggagaaaccgaaggggaaaaagtacaaaactaaacatgccaaagggattgctatacctcttagatcgtcacctcgtttagctgcactgaagattagccaggaagca

SEQ ID NO: 275718 - DNA, 422 bp, Zea mays
cggacgcgtgggagaaagctgcggccttttctgctactcctgcctgccagcggcctgcctgcctgcctactagtgcggcgtggaggtggagcagtgggcgctacagcctccatcagctagctgccttgccgtgtcctcctcttcctcctggcggtggcgatctctgcggaaacccgagcttcgtccaagccgggcagtagtgcgcgccgcctgggcgtaattatggattcttttgagggctctgatcatataactcaaagaaaggttgttcctgcaaaacatattgcattggttgatggaaagaatgagcctgctgtagaggggttgcctaatggttggctgaaagaatgcaggcctagaaagaaccgatatggatccagagtcaagagtgacacgttctatattgatccaatcaatggata

SEQ ID NO: 275719 - DNA, 459 bp, Zea mays
gaattcagagggccgcacacgttccctgccgctgcctctacccctctccgggctctcgctccccgggtccaccgtctctacaccgccgccgctcacaccccaattcctctcgccccattgccggccgtctacctccgtcctctcgcctcgctcgctgcaggttcaatcgccgccgccatttctgcagtttttaattcccacgtcctgttccggcccggccgtgcactccaaattcttccaacaaggccagcccacgccacccggccgggatcccagaaaagttgcgctcggccttcgcgcgttacgtctcccacccagcccttcgatcccgtgatttcagaggcgcccctgtaccgaaagcctagctcccaatcttccttggattcgtcttttttttggatcttggggactgcactgcacacagtttgcctctcttacctttttttggatcttggtggt

SEQ ID NO: 275720 - DNA, 661 bp, Zea mays
cggacgcgtgggttcttgcactcgagttcttcagttcttaggaatagtcagacggaacaactcgagtttgccatggtggtgatctggaaccggggtgtgctgccccctctttgattccctgattggtctcgctccagttcgacgcgggatttggacgggacgggcggaagttgggagagctgtgcggccggcatgtgtgggtccagggtccaggatgaggtggagatgcagaggaggcctaacaacaggatctttcccgacgagagacagaatcaatctaagtcattgtatcaaactacacgggctgacagatttggcgcacatagaatagatctgaagaatcctgagaagcttaaggtgttaaatgaaagcaacaaaccctggcaccagcgtattctagaccctggaagtaatattgtactgagatggaacagggtgtaccttgtggcatgtttgtttgctctttttatagatccttttttctattaccttccattgattagacaaaatggcaatggatcttcatgtgttgccaaggaccagggactgagcataagaatcactgtcctacgatcacttgctgacttattttacatgtggaacatagcaatcaagtttcatactgcatatgtggatccaaagtccagagtccttggaaagg

SEQ ID NO: 275721 - DNA, 699 bp, Zea mays
cccacgcgtccggaaaacgacgagaacttattcaggagtctgtgcattctactgaacccaccccctgctgttgcacagatggcgaaccgagctcgatggtccgtcatgcagtcttacaacctcctgaagtggcacaagaaagctcatagagccgcagtcaaggcgctggaagacgggcacagtctcagcgttgtgatcagaaggatagaagaagccatcgcttctgacagcaaataaatatgaccgttgatcctttacatgtgttcttgtcaaccaagctttgttggcagcttccacaggacgcggaagaaggagaactttcttaattcgcgcgaagggttagtgtgtgttggaacatgagtggcgcttttcaaagaaagaaaggcagaagatccttggagctggagggaatagcggagaccacgaccagggcgtctgatggacggactagatcgagtgatacatccgttggagattttaaggaagtcaaaaggccgttgtgaacttgtgattagtgtcgatgccagatatggcagatgtgcatagggagatatgactatatgatgtcttgatgagtatgcagacatgagctattttgcaatggatggataagtaccgttggtacttgaggtaaaaaaaaaaaaaaaaaaaaaaaaaaaaaaaaaaaaaaaaaaaaaaaaaaaaaaaaaaaggggggcc

SEQ ID NO: 275722 - DNA, 296 bp, Zea mays
cacgttgtagggttttgcttgcttcgcccggcggtaaagctgagcgcggcgagagccggagaccgaagaagcgccgcgcgcccggtcatggagatcggacagtaccccgcgagcggctgctccaaggagcaccagaagatctaccaggagtggttcgcgctcgcggacgcagatggggatggccgcatcacgggccccgatgcgatcaagttttttggcatgtccaagctctcccgccctgacctcaagcaggtctgggctatcgcggacaccagaaggcaggggtatctgggttt

SEQ ID NO: 275723 - DNA, 337 bp, Zea mays
gagaaggggaaacaattccagtggccaatagtttggatgccagcaggatatgatgcaccaaaccaaaaggctaaagatatgaatgacacagaagagaccccaaaatccccaaagatttctgaagtgtctcctcaatcacccaagatcattcctctgtcttggtttgggaatggtcatcatcatgatcagaaatcggctgccagaaatggttctggagaccacaacaacggatcagcagtgaagaaccaacctgtggttactgaccatcaagacagcatgatactggaaggaaaccctaaaatcacatcaacttgtcccaaaaaccttcccctttgga

SEQ ID NO: 275724 - DNA, 611 bp, Zea mays
aaaaaactatttagtatagcaccgatatttggagtatatttatttatttgctaattaattggtaacagagctgcacatttgattactgatgtgctgaatggactattcctccataattcgttttttttgtggcgctgcagagacttcatttcattttagaattccattatcttgcttgcttgtatgagtgccatcatttgtacccaaatctctcattattgacctctactatattatcgtcaggattcaaccaccactacagcaacactgtttccatatatatctagcttatcaaggtcgttctgcatggacctcctccagttctttggtgtaaagtggtttggctgaaatattttgtttactgcagttctagtatttagtgccagttgcattgattgcaaatttcaggatggcgaattgatgatgtttgaaagtggacataagagaggaatcttgttacaatgcccttaccattgtgatgccgatttcaatgattggctccataagaaacttgagttaaattttgttatagtagatgtacccttttatgtgtagcttactcactggacacgccaaccttttgtgttcctgcagtttgactggtgggacgg

SEQ ID NO: 275725 - DNA, 389 bp, Zea mays
ctgataccgagcgccagttgccagcacgtagagtaggagtcgggatcgacgagtgagggaaactgaaacacgaggaggagccatggcgaccccggatgaccgcggcagctggttgctgtacctgtccctagccgccaaatgcgccggcgaccagccttaccgtctcgcgggcttcctggccgtctgcgccgtggccttcgtcgtgacctgcctcctccactggtgcttcccgggaggcccggcgtgcgggaggtggtggtggacgcggcggctcggtgccggtgccggaggcggcgcgacggcggtggcggcggccctgccggggccgaggggcctgcccgtggtccggagcatgtggctcatgacgggcctggcgcaccgcaagctcg

SEQ ID NO: 275726 - DNA, 603 bp, Zea mays
accacgagtcctcgcttgcccaccagcgactcccgtagctggaactcgctcgtcaaaaggaaaagaaacacttcgcttcagctggttgacagacgactcagagcaaaatgggtatactggtgattacggtggacctagactgctgtcgctgcagagccaagatcaccaaggtcctggactgtctcaaagaggagttctgcatcgagaaagtggagttcgatgacaagaaggagaagaaggtggtggtggtgcgtgggaagttcgacgccgagaagctctgcaagaaggtgtggtccaaggccgggaaaatcgtgaaggggattgtcatcgctgaggtgtggccaataccagccccgcccaaggagtgcaagcctgaggcaccgaaatgttgcgactgtgagaagtgcaagccgaagcctaagccggagccaccgaaatgttgcgactgtgagaagtgcaagcccaagcccaagcctgagccaccgaaatgttgccactgtgagaagtgcaagcccaagcctgagcctcccaaaccagagaaatgctgcagtgcctgttgtcactgcaagcctaagcccgatcccaaaccgctgatatgttgtg

SEQ ID NO: 275727 - DNA, 1533 bp, Zea mays
tcctcgcgtccgctagctgtatcattgcaatcatcgtctgtgtttcagcatggtggttggtctgggacacctggtcagttgtcgatggttgacattgtgaaaatggggccgccctcagggaaaggcttctagcagacctgtggtcacagctgacagaggttatgctggacagtacccatctttgccaagcacaaaccagaacctcaaacaatctggaagcatggttcccccagcagagcttgacaaggggttacaacctgcccacgattcggttcaggttaaggatcatggtcattctactgctgacagcaagctcccatatggtactgactggtctccacaagacggcccgacatctgcgaaccaatcttccctgcctgagccatctggtgatccatctttgtatgaatcatcatttcagtcatctacattggttactgatgtagttaattcacatgaaaattcacacttggagttggatgaaaacagcacctttgcaatgagagcaacacttgcctctgagagacacttggaacctagtgacagtattcctgaatacaatgatggaatattgaacaactcaagttcatatcagcctcataattactcttacacagaacaagatgttgaggattccagtgctgatgtatcagcagcagcagcaaacttccagagtttaagcctacataatgatgagttagctgcaaaaaagtctgcagaagataaccctgcagtgataattcctgaccacttgcaagttacaaatacagaatgtgttaagttgagctttggcagttttggatctggtgcattttctgggttactcccacaaaataccactgatagcaatgtggaattccctgctcgagaggaatctgcaccagtagatcaaatagatgccaggaatcaagattactatgaaagtggtgcagtaacttcaccagcagacgaaaatcttgaggccatgcttggagctaacatggagaatgtagatgcgccttctgtttcacaggctaatgagctcaggcaggacgtacttgatccttctgaacttcaatatgacgtcccatcagttccaagtcatgcttattcaaacacggacactttacagcctaccacaattgaggagccacaaggaaacaaccaagcacatactctttcccatttgtcaaacttaatgcaagcaaatcctttgagcaccagcagcctattggggtcaaatcaaaatcatgcaactcttcatggcttagagtttgatttaccgccttatctgggagcaaaatataacgcaggctcaactacaaattctagaccacccatatccatgcaggaggcactgaaagcaggggttttctccaacgcccagtctacacagagtctttcaagtcctatcattcagacggggctttctctgccacagcaattagcacatgacccttactctcagccaactttaccaatcacacatttttcaaatatggttgggtattctgatttgccacaaaactatgctacttacctatcttcaggcac

SEQ ID NO: 275728 - DNA, 644 bp, Zea mays
ctgtttctgctcctccgttcaggctcctcaggtccggccgtcgccctgctccctggcgctccctgctagtggacctccgccaccatgccagtctggccatgtgttggccgccggctccctggaaccagcgccccagccaccaacctccgctcacttcgacgacggaccgtgccgctggtccatccatggccgtgagtccacctccgccgagctgctagtctctagctcctccgaccattctgctcgcccgacaacttgtcacaactgggtctgctccatcggctcctcgtccggctttaacatcaccgtggccagcagccacttcaaattcgttcattccctacggggcatcacagtttgcgctaagcacgattgattccatctagttcacttgcactccaggtgtttgatgaatcatctgaaccgggactcgttgtcgtttccccgacttctgagtcaatttagtattagtgagcccgtttgttaattctctagctagtttgatgtatgaatgtgttcgatatatttattggtttagtatattaattgcgatagtttttgtgtcatggtgcagatgtgtcgtgattgtattagatgtttgctaatgtcccccccatgagatgtatgttccaactggtgccgtg

SEQ ID NO: 275729 - DNA, 491 bp, Zea mays
tcctcgcgtccggcacagaagtaccttttgaagggtcagaaaaatggaaccagcgaacatgtcccacctccacgaccaaagcgaaaagctgcccatccatatcctcagaacatccatatcctcagaaggcttccaagaatgattcatcttccatccataggaactctggcatgaacgtgcctgtttcttcatgggctcatagttccatcccacaagctgttgcttcatcaatggtgaaagaagatttaggtgctggaacaccaggttcaaacaatttttgctcaagtagtactgaaggccttccaagaacttggcaacctggtgaaacaaatgatccaataaatcaaattccgtcactccgccttatgccagattttgcgggagtgtacagcttcttaggtagcgttttcgatccaagtacaagtggtcatctgcagaaacttaaggagatgaatccattgacgttgagacggcactggtgttgatgagga

SEQ ID NO: 275730 - DNA, 434 bp, Zea mays
ctccacgcgagcggacgacactaagcggccatagccgcacgttgggatcctctccgctacgcctgtcgatggtctccgccagcgcgccgccgtcgcaggcccagtccgacgcggccggctcggcggaggaagcgagcaagaaggtgcggaagccgtacacaatcaccaagtcccgggagagctggacggagcaggagcacgacaagttcctcgaggccctgcagctctttgatcgtgactggaagaagatcgaggctgtcgatggctccaagactgtcatgcagattcatcttacatccataggaactctggcatgaacgtgcctgtttgttcatgggctcatagttacatcccacaagctgatgcttcatcaatggtgaaagatttatgtgctggaacaccaggttcaaacaatttctgctcaagtagtactg

SEQ ID NO: 275731 - DNA, 744 bp, Zea mays
ttcgtcacgcgtccgcccacgcgtccgcccacgcgtctcctcttcttgccggatctccacaccccattccaccccgcccatgggtgcccccacccctcgccgctgacctgtgggtacactgccccctgctcccccgccccgctcccgctcgcccacgcgaaccctaggcagctaggctttgctgctagaagagctccagcgaccgacgaggagaggagaataaagctcaaatcttggatgcgcccgaaccgatggcgacacctgccgcagagaagccggaagatgtagagatccgtgaggtttgggcggacaacctcgagacagagttcgccgtgatccgcgacatcgtcgacgactatccgtatgtggctatggacactgagtttccgggcgttgtgtgtcgtccgctcggcacttacaagtcggcggccgagttcaactacgccactcttaaagctaacgtggacatgctgaagcttattcagctcgggctcaccttgtccgacgagcatggtgggctgccggcgctaggcccagacggtcgtccctgcgtctggcagttcaactttcgaggatctgtccctcgcactgatgtggctgcagcaggactccatcgatcttctacgccgtagtggtattgacttctctcgccatgctgctgatggagtcgactctcgctgctttgctgaactgctcatgtcctccggcgtagtattgaattcaaatgtgcattgggtgactttt

SEQ ID NO: 275732 - DNA, 714 bp, Zea mays
tcgtggggggccaagttccgggattttcttggcccggacacattggttcgggctcttcttatgtgggatacccggagggcggtcttttccttcccgggcgagttttttttaaataccttagcttccgaacctggcaattgtcactgatgccattgcatgtgtacctggtttaagtgaaggtttccgttcaaaagaaacctgacaggcaaagaaggaggaggataagaagggtgaagacaaaatgcttggaggggggggctttgacgataagaagcggttgattcctgctacaggaattttaaggcacatgttcactcctgctgagctgagagctgatgaagagcttcttcctgagcttgaggctgatgttagagaggaatgcatcaagtttgggccggtggataatgtcaagggttgtgaaaatcatccacagggtgtcattttggtgaaattcaaagatagaaaagatggtgccaaatgcatagagaagatgaacggtagatgggttgctgggcagcaaatccatgcgagtgaagatgatgggtctgttaaccatactcttatccgtgataacgatgcagaggtggcaagactggaccgacttggagaagagttagaagaacccacataaaggatggattaatatacctgggatcgctgcctcgtatgataagatagcacaggagcttagttggattttggccaatcataggt

SEQ ID NO: 275733 - DNA, 436 bp, Zea mays
tcgcggacgcgtggttagggggggagcgcatgtgcctgaagtaagcctaatcctaaccgccgccgtcatgacggcgcccaagctcaagctcctagctcttcctactctgctggtcctcatcctcctcctcctcctctccgccgcccggcggcgcgtccttctggagacgctcctcctccgcgccccggtcctcccgggcgacctcctcccgctcctgccctggcccgtggcgcagccgctgctccgccgcctcgcgctgcggggccccgccgacctgctcccggctttcgtcggggccgcgcgcgcgccggggtccgacgacgcctacccggtcgccgagtggaagggcgcctgcttctacgagaacagggcgtgggtggagttccgcaacgggaccggcggtgggctcggaggcggcgtagtccatgtggagaca

SEQ ID NO: 275734 - DNA, 439 bp, Zea mays
  unsure (1)..(439): unsure at all n locations
cccacgcgtccgcgtcgtcctcgaaaccctaggccagaccacagctgaagccgagcggagttctgctcgccgcccatcgaatccagcttctccaagtccaaggcaccgccgcgacccccatcgtccgcacgacctggatctgacgcgcctccccctgccgtcgccgccctccgcctcgtaccttctcgcggcgaccgccgtgctcggactcctcggcggccttctactctacatgcttccccggaagcggggggtcgacgccggcgaggtccaggacttgcacaacaaggccccccgcgccgccgccaccgtcccagtccaggactaggactagcaccaggaggaggctgcggaaatggccggcagggcgcccgagatcgatgaggacctncacaggcgacagctcgccgtctactgacgcgagactatgaagcgcctt

SEQ ID NO: 275735 - DNA, 458 bp, Zea mays
cggacgcgtggccaggaagagattacaatgcaccgtgtgcaacaatctcgtccgtgtggacgacgaacatcggaggcacttcaagcagcatgagatcacaatgtcaccgtctccaagaatctccccctgcctcctagatcccaacctgttgcatcatgttcacttttcaggttttgtacaagtggacgctgaggttagagcaatgtcctgtatataaactaaaatccagaagagcgccacagctggttactgctatggccatgcacgctgcactgtcgtgttcattgtttatgtttcgttgttctttcccttgagtatgacgccaccttgatagcccggggtagaattacctgcctatatttatcgtccttgtggtctgcaagaatcatgacgttattacttaggcacttattcatcttactatctggaaaagggcggctgttcgcgaccagcgtccg

SEQ ID NO: 275736 - DNA, 447 bp, Zea mays
gatttctgtgtgagaaactactcacctgtccctacaatcaataacagcattaagatggaagtaggaattgaggattgcttacatattgagtttgaatacagcaaaagcaagtaccatctcaatgatgtgattattgggaagatatatttccttcttgtcagaataaagataaaaaatatggaactggaaattaggcgtagggaatcaacaggatcaggctctaacacatatgttgaaactgagactcttgcaaagtttgagttgatggatggtgctcctgtgagaggtgaatctattccagtgaggctgttcctgacaccctatgagttgaccccgacttaccgcaacataaacaacaaattcagcgtcaagtattacctgaatctggtccttgtggacgaggaagatcggaggtacttcaagcagcaagagatcacaatgtaccgt

SEQ ID NO: 275737 - DNA, 599 bp, Zea mays
gaaggtaaaagatgcaagattattggaggaagatcttgtcagggctgcatgcaagcttgagttgtcaatgatgcaaacatgcaagctaactgcagacaggcactcgcaaaacaatcttacacatgacatgaaggcaattcagaaacaggttattgatgatcaaaagcttttacgtgataaggttcaacacctgagtggcgatgctggccttgagcggatgaactctgctctttccgatacgagatcaaagttctttgaagcaaaggagaatgggagtccattgacagcacctgttgcaaatgtgtctacccctttgagcatcaattcgtctgggaaagcaccactttctgaggttcctgaaagttccaggacaaatgttgttgggacaagctctgtagtccgttctttgttcagtgcttcttcgtcatcagtcagttcatcaccagaaaagcagccgacagagaatgaaaaaatggtcaatgaaatgcttcatgaggatgccagtgcttttgctggcaggtctgatagtgctagtactgctgaggaggagttccagaacaaagtgagagaaaccatggagaaagctttctgggatatgg

SEQ ID NO: 275738 - DNA, 422 bp, Zea mays
  unsure (1)..(422): unsure at all n locations
ncagccaggcggtttggtcctgccagcattggccccaggcagttgggccccaaaagagcaactgcaaccgaccaagggccaatggcccgaaccgcggcgccggccgcgggctacggagaggacggagtgtaccgctccccgcgcccggccgtgcgcatcgagtccgacacaggcctctccctcaacgacctcctcttccgccgcgccgacgtgtgcccctccgctctcgcgctggtcgactccgccaccggccaatccctcaccttcgccgcctttcgctccgccgtcctcaccacggccgtcgccctctcctcgcgcgcgggcgtccggcgcggcgacgtcgtcctcttcttcgcccccaactgcttcctctaccccgtctgcttcttcgccgtcaccgncctcggcgccgtcgctaccac

SEQ ID NO: 275739 - DNA, 478 bp, Zea mays
cggacctggctacgaagcgcaggcagtacagacagcaccgcctggtttgagcggctgccgccgctgcatatactccctccctgccttccagtgccaggggtgaccggcgtgcgtgccattccacgctctcgcggctcgtgtgccagcggtgaccagcgctcgtgctcgtccagtccaccaggcgctgctgttccggcaagccagccagcagcagccgccgccgccgccgtctcggagctcgagctcctagtcccccggggccgaggcgccggcgccatggaccagctccggcccgagccggccgcgggcgcgcacgagatcgagaagacggcggcgccggacgtggagtcggagcccgcggcggcggtgccggagccggagcgcgtgccgccgtggcgcgagcaggtcaccgcgcgcgggatggtggcggcgctgctcatcggcttcgtctacacggtgatcgtcatgaagctgagcc

SEQ ID NO: 275740 - DNA, 713 bp, Zea mays
ggtacactctgatccgaacaatggacgcgacgcaactgaaccgatcgatggacgccacgccgacgcggctcttccttggcgcgctcctcctcctcgtccccgccgcgctcctcctcctgctccgcgcgcggggcaggcgccgcctccccccgggcccgccgtccctgccgctgctcggcagcgtggtgtggctcaccaactcgcccgccgagatcgagcccctgctgcggcgcctcttcgagcgttacggccccgtcgtggcgctccgcgtcggggcgcgcttgtccgtcttcgtcgcggaccgccgcatcgcgcacgaggcgctcgttgaccgcggcgcgacgctggcggaccgcccggcgctcgcgtcggtcaagttcctcgacgagagcgacaacaccatcacccgcgccagctacgggcccgtgtggcgcctgctgcgccgcaacctcgtcgccgagacgctgcacccgtcgcgggtgaagctcttcgcgccggcccgtgcatgggtgcgccgcgtgctcgtcgagaagctcggggaggccgggcccgacgccgtcccgccccgcgtagtggagacgttccagtacgcgatgttctgcctcctcgtgctcatgtgcttcggcgagcgccttgacgagcccgccgtgcgcgcgatcgcttctgcgcagcgggaggcactcatctaccgctccaagaacatgcaggtcttc

SEQ ID NO: 275741 - DNA, 521 bp, Zea mays
ctcagtccttgcttgtcctcccatcccggagatcgacggctgcttgccgcactcgctccagcggccagccggccacaggcaactatggccgcctctgccgccgccgcggggcctgctacctttctcccgcgcctcccctcgccacggtctccgtctcctatgctccctcctctcggacggagagcccatcccgtcgccgctccgctctgtctctccgccaagcgccgcgcctgcgccgccatgggctccagctcctcctccaactcaggaaatcaaacgtcactgatgctgccgttcagctttacattcgatgaagattcttctagttccagaaggctatatagatggaaaagggtattgctcaaagtaagtggggaagctcttgccgggaatcacacagaaaacatcgacccaaagattacaatggctattgcaagagaagttgcttctgtcaccaaactaggtgtagaggttgctattgttgttggcggtggcaatatcttccgtggggcctcttgggc

SEQ ID NO: 275742 - DNA, 405 bp, Zea mays
gtttattggcccattataaaattgtacaaagcttctccaaatatgccaattgatccattacaattgtttcataactactgtttatggattttgggactgcagaactgatggattctaacagatgtaacagacctacagtagggatgctaggccaaggagttaaaatatatccacatgttagaatatttcgtaactgtagtaacttcaacattatatagattaatcatgaacttttagttgtattaaacaaataagctctgtatgttcattgttgtagaactaagtttattgtgaatttgtgaacacatatatttgttcatgaaactgcattggatttggactaacaaagtttgtgtatgtgatatgtttttagtctggatctgcccttggtcaagattcaaatat

SEQ ID NO: 275743 - DNA, 444 bp, Zea mays
ggctcacgaggtacggcacctcgccgtggcccgcggctgtttccgaggcaagcggactcaccggcgtcctgcgcacgcgaggcgagcagcggctccgtcgacctgcgagccaatccgtctttatttctccaccccaatatccaaacataagataaaaatctatccaacacaccacacgcacgcacactcccccactccctctccaccctgcttccgtttccggccggcgatggcgacgaccgccgccgcatccacgtcgctccggccgctgtcaccgtccccacctcgcatcgcgagtttgccccgtcggtggtgttggggaatcccggtgcagtcctccgggcggaccgcattccatgctcaacggcggaggcggagcactttattatgcgctgctgataaagctcctgaagaatccctcaaagacattgaagtggataggct

SEQ ID NO: 275744 - DNA, 443 bp, Zea mays
agtccctgctatacagctctcgtcggggtcttctcccccttcggcccttcccccctccctgcgcgccatggaggcccaggagatcgccgctgcagcgcgccacttctgcgccatggttcgaatcgtcggtccggaccccaaggccgtgaagatgcgccgccacgcctttcattttcaccattcggggtcgaccacgctctcggcgtcggctctgctcctgccgcggggcgctttagcggagccgccgctacttctcgaccatatctgctcggcccacgggcacgcggcaggagacgtcgcgctcacggctgcttccctcgtcgagccgttcctggtcgcggagcagcgcaataactccgggcgacgagctctcagctcgtgctcggttccggagacgcgccctgatccgcttggtgagtatgagtcggggaatgctcaagatg

SEQ ID NO: 275745 - DNA, 858 bp, Zea mays
ctcttcctctctcctaccacatctccagccctcttctcggcccgtcccccttccaccccctaccctcttttcccgccggcgccggtccttcctctgcggtagccccgcgcgaagcacacggcggtggtcctcgtcaaccaaatcgtcgccacatcgcgttctccccggcgaggatctgtaggcgagctcgccgtccatatccgcccaagccacccccagctcgtcgcagtagcagcaacacaacaaccatgagtcttgcttgtcttgtatgccatggcatgagcagctcctcacactctcttagaagctactcggcgtcaagttcagaggaggaaagccgatgtggagctgctgtggcctgcttagctcgaagagtaacaccagctggaacctctactagcgctgggacatcgaaagtgaccccctttccacccgtggtgagtggtcaagctggcacggagggcgctcctcgacttcaacgcagccgtgctgtgtccagggaccttgttagagactggaacttcgacgaagtaatcgccgcaaattagggtagccctcaacagtcgtcagctgggctctgtgctctacttatcagggaggagattccttcattcgatgtaaaattttcatagtagacgtctggaagtccatgtcaatacttgatcacttgatgaggaaatgctcgagagggatggtacctttcaggagcaatatttggactgttgcagtcatatgtggtcacgtacctgtgtagctaggataaatgttttgagtgtgttttcctaattttcaaacgtgtataagttgtcatgtacctttatgtatattacgaatgaatcctaaataaaacccccccct

SEQ ID NO: 275746 - DNA, 730 bp, Zea mays
  unsure (1)..(730): unsure at all n locations
ccctcgcgtccttccacgcgtccgcccgatcgagttccagttctggtacatgtttgcagagcgcgcaattggtcttcttcttcagcttgtctgattcctgttccagcggtccagccactgtttttattttcttcatcttcttcttctttctgtttgattcttcttcttctcagcgatccgtctgtgactgtgtgtcctgttttaattcaggttgtggcgctgagggtgtcgattcactgccaaggatgcaagaagaaggtgtagaaggtgctccagaacatcagcggcgtgtaccgatgcgaaatcgatgcccggagcaacaaggtcgtggcgacggtctcgacggagctcgacccctacatgctggtcgccaagctgcgcaagtccggcaagcaggcggagctgtggccggagcagccggtgcagcagcaggagcatgtcgcaccagtaccaccagctgagagccaaaggcaggaggagcccaagaacaaccagcctgcggagccgggcagacccagcgaacctgccgaggagcgcggngccgccgccgacacggtcgaagccgccgcggccgagccgagccacccgcaacctttgccgccggagcccaagccgagcgccggcggagaaggccccaatccggcggcccaggacagcaaagagaacgccagcgccgatgacgtcggcgggggcgacgagaccgccgcagcaccggcaccggcaccggcgc

SEQ ID NO: 275747 - DNA, 529 bp, Zea mays
cggacgcgtgtccaggaggggcgcacttgactttcccctcctcctcctgcgagcaccttcctcgcctcgctctcatggcctcatcagagcctatagagtgccaggttgtggcgctgagggtgtcgattcactgccaaggatgcaagaagaaggtgaagaaggtgctccagaacatcagcggcgtgtaccgatgcgaaatcgatgcccggagcaacaaggtcgtggcgacggtctcgacggagctcgacccctacatgctggtcgccaagctgcgcaagtccggcaagcaggcggagctgtggccggagcagccggtgcagcagcaggagcagccggcaccaccacctccagctgagagccaaaagcagtaggaggaggagcccaagaacaaccagcctgcggagccgggcagacccagcgaacctgccgaggagcgcggtgccgtcgtcgacacggtcgaggccgccgcggcggagccgagcaacccgcaaccttcgccgccggagcccaagccgagcgccggtggaga

SEQ ID NO: 275748 - DNA, 435 bp, Zea mays
cgcgtttggattttgctcctttgctcccttctgaaagggtcaccatgtctgcctttgtggggaagtacacagatgagctgatcaagaccgccaagtgcctcgcaacgccgggcaagggcatcctggcctccgacgagtcgacgggcaccatcggcaagcgcctgtccagcatcaacctcgagaacgtggagtcgaaccggcaggcgctccgcgagctgctcttcacggcgcccggcgtgttcgactacctctccggggtcatcctcttcgaggagacgctgtaccagaagacctccgacgggaagccgttcgtggacgtgctcatcgcgggcggagtggtccctgggatcaaggtcgacaagggcaccgtggagatcgcgggcaccgacggcgagaccaccacgcagggcctcgactccctgggcgcacgctgcg

SEQ ID NO: 275749 - DNA, 468 bp, Zea mays
gacgacgctcgtacgtggtctcccactgcacccagtccactcgcagtcgcagctagtccggtccccggtccgacctatcccagtgacaccatctatcgtcggtcggggacgatgaggccggccgcgctcttcctcgccgcggtgctggccagcgtcgtcctcctcctcgccgccggccgcgccgcgggcgacttctcggccctggcgccgtgcgatgtgacgcagctgaccccctgcgcgagcgcgttcgcggggaaggcgtcgcccacggccgcctgctgcgccaagctcctgtcccacgggcccggctgcctgtgccggtacaaggacgacgccagcctgaagcgcctcgtcgacgccaggcacaagcgcagggtgttcaccgcgtgcaaggtgcccgtcccgagttgctagccgtactcctagtcctccaagctcatccgtcggccgtcggcgcaagcagccacg

SEQ ID NO: 275750 - DNA, 438 bp, Zea mays
attgaatcagataatccggacgccgtccccttgcacagcaaacatccatggcgactgcccgcttgccctctcgctccctcctgtccccggctcagcaatcctatccacggcttcccgcctccgtccgcctctgcctctctcatcacgagcaacctcccaccggccccaagcggcaccgacgcgccgccacttctcatcctgccttttctgcagccgcgcggggtcgtgccaagaagattcccatcgcggacaccgatgagcccgccgccggagtccgcgtcaccgatcacggcatctcttaccgcctcgatggcgcgccatttgagtttcagtatagctacactgaggccccacgcgcacgccccgtagcgctccgtgaggccccgttcatgccgttcgggcccgaggccacgccacgcccgtggacgggaggaagcc

SEQ ID NO: 275751 - DNA, 702 bp, Zea mays
  unsure (1)..(702): unsure at all n locations
gcttttcttttgaagaaaagaccaacattaactgacagggaattgaaccctgagtttttccaaaagcttgagacaagacaaacagatgacttggcagttgaggttgactacaccctcaagactctacaatctcacttgcgaggtgaagatgaaacagaagaagatgatgatcctgttggtccagctgacagcaatggatcagctgaagatgaagcaaatctaactcaaatgcgtgctagctttaattttcagaatatccgggataaatgggctggccaaaggggaaatagaaacaaaattacaaaagctaggacaactgatgttgaagataggggcgaacccagtacaaaagattccactgctgcagcaatgaacatttctggagaaggccctttcataaataataaaacaaattggttagcaatacagaggcaattgtcacacttggagaggcagcaaactagtctcatgaacatgttgcaggatttcatgggagggtctcatgacagcatggttacattggagaacagagtacgtggtcttgagagagttgttgaggaaatggctagagaaatatcactctcctcaggcaggagaagtggtggtccagcgttgggctttgattcatctnctggcagatcatctaaacacaatggtttccatgaatattctaattcgaaatatggaaagaagtgtgatgga

SEQ ID NO: 275752 - DNA, 584 bp, Zea mays
cccacgcgtccgtttttctaaattaacaagggggaaagggaaagattagcttctccctcccttcccctcccctcccgtacagtctgtcacggagcagcgggcagcggcggccggcaggcaatgcaatgaagaaatgctcggcgttggcctcggcgtccgactgatggtagctgttgcccctgcgcctccagttccagccccaccaggcaaaccgccccttcctctctgctcctctctccgccaccgctcctccggctggtggttctccaacggcgacgcccatggaagagacagcaccaccgccaccacgagcagcagggcgacgaggcggaagtggtggtccgaccccgacggcagccaagaagactacggttcctcttctctagaggaggacgagtacggttacggttacgactacgattacgaggatgaggctgcgttccccggatttggagggcctggggggatgttcgacgagccctggttctccaggtctggtacatacgtattgtgtaaaatttctgctcctttccttcctttctggtaccctctgtcaatatgccatcaataatttctatttttct

SEQ ID NO: 275753 - DNA, 543 bp, Zea mays
ggtacccttccctcactctcccggttctttcccggcgctggattcagatccgcacgcttctccatttccgtaaagctccgtgcctcctcctcgtctcttcactccaaatccaccgaggccatcgcctgggccccggggaaacccctcgcgctcgtggccctgtgagcagccgcagccatggcgcagccgctcgtcgtgaagaaagacgacgatctcgacgaggaagagtactactcgccattcctgggcatagagaagggcgccgtgctgcaggaggcccgagtcttccatgaccctcagctcgacgcgcggcgatgctgccaggttatcaccaagctcctgtacctgctcaaccagggtgacacctttaccaaggttgaggctacagaggtcttctttgcaacgaccaagctgttccagtctaaagatgcgggccttaggaggatggtgtacctcatgatcaaggaactctcaccttcagccgatgaggtcatcatagtaacaagctctttgatgaaggacatgaatagcaaaactgatatg

SEQ ID NO: 275754 - DNA, 898 bp, Zea mays
agcccatgtaagagtgtgcctgcaaaatattctagcactgacaagagacgcttagaaggaatggatgcttctgatgtgaaatcgaagggtccctcaggtatcaaggagaaagagccagtacaagtgaggatagacttggaagacaaagagacaactccgtcatttcaagtgctaaacgacaaaacatggagtccagacccaaagttatcttcgcacatggacaggctgaagaagcaacatgctgaagctgagagttatcagataaggaccaggaatgagaatgctgtcgagacccaaagccctccaaaaaatggagtgtcgttgttgtctaagccatatgttgataggagggaacagaatggtgattctgatctattggggcatggcctaagagagacaggtgtgaagaggaaaagatcacatcatgacgtggagcaaaacgatgatctgtctgattcctctgttgaatctttgcctggaatggagatttctccagatgatgttgtcagtgctattggtcccaagcatttttggaaagcgagaagagctattgtcaatcagcagagggtatttgctgttcaagtattcgagctgcataggttgagcaaagtgcagaagttgatcgctgcatctccacatgtacttattgagggggatccttgccttggcaaatccttggcggtgagcaagaaaaggctggctggagatgtggaaacacagcttgaatcagctaaaaacgatgatggcgtgcgaccaacgcagctagagcactcgaaagagaaaactgaaccaaaccaaccttaaccatttaaagacaaacaggccgaacctaatggtgactttcttgcctcaatccttaccctttccaccaccaaccagaaaacttgtgcctttcttg

SEQ ID NO: 275755 - DNA, 422 bp, Zea mays
tctcccctccgaatctccgatgggtcctcgggggcgacacgtacgccgatccggtcgagtgcggaaacgaaccttcaccggcggggaagctcaatacaggcacgatgcatccaggcacaaatcgatcgatttagaaacaagaatcaaaggtgtgcgagccgagagacgaacacgagagcaaatccttccttaatattcatggacagcgcaacgctgacctgcaacaaccgaagccgaccacaggcatccgcaagacagcaagtgaagctcagatcggcgaactgcggccttctgcgcttcgcctaggagcctacggagtactgagaacagagcagcggaggatcatggcacaccttcaattcttgcggcgccagaagcagcggagcttgagccggcgcgctaggacattggcgatcgcgacg

SEQ ID NO: 275756 - DNA, 740 bp, Zea mays
  unsure (1)..(740): unsure at all n locations
ttnnnnnntttttttttcctnccngaaacatagactatttgcactagagaacagtagttcatttcacaaattacagtttcaaacaagttcacgtatcggtacacactgcacttcacatattacaatttcagtggccagattacactttcttcttcttcagggtgatttttaactaaacatctaacaatgcgtggagacgacgttgctcctgctgaaatagtactaccatcttctgtcgtagcaatctgttatgagacaaccccagccctccagtcaccacttcttcaatccttgtcattgatgtcggtaccagtccttgagtaacttcggctcttgaattaggaaccacttcatcagtatgttcttgcatcaggaaccactttcatcaatatgttactgtcatatagcccgaagctctttaggaaccacttcatcagtatgttgcccgtgaactatctcgtgtacatgcaaccttcaattcttgcggcgccagaagcagcggagcttgagccggcgcgctaggacattggcgatcgcgacggcagcggcggcagccgcggcggcgtcagcgacggggtcgagctggcctcccgtgacgacgcggctgccgatgaggcaggcgacgaggagaaggggcaggcaccagagcacgaagtcgagcaccgagtcgaggtcgacgtcccagtcccactcccacaccctcagcatggccattgcggacgcgtgggcggacgagtggg

SEQ ID NO: 275757 - DNA, 515 bp, Zea mays
tggggggccgtggtgtcggactcggacggcgagatggtcgcgaacggcggcgagccaggaggtggcgggagcacgagcacacgggctcctctccccgatcccgatctgtgtgcctggctgcttgcaacctccgtgggatggaggcggcgcggcagcagcaggaggagtgctcgtgcggcggggccgaggccgctgaccagttcgagcggctccacgacgcggtgctgctcgacgtcctcaatcgcatcgacgacgtcaaggcgctcggccgctgcgccctcgtatcgcgccgcttgcacgcgctcgtgccgctcgtcgactccgtcttcgtccgcgtctactgcgtcatacctgacgacccgccgtcctcgtcctcctgctcctacttctcctattgcgccgcaccatgcacctccgacgaggaggcgccagcctcaaccgcgcgcgggcgcagcgcgctagcgcacatcgcgcgcgtgctgctcagcggcatcggcaggcccatgcacgcgctc

SEQ ID NO: 275758 - DNA, 474 bp, Zea mays
taccggtctcggagattccggggtaggcgtacgggcaccatcgaccttcaagtctcgctacgtagcagtgcaataaaaaaagcagccgcaatggcgagcagcaccatggccctctcctccacggccttcgccggcaaggccgtgaacgtgccgtcgtcgtccgccttcggcgaggcccgcgtgacgatgcgcaagacggcggcgaaggccaagccagcggcggcgtccgggagcccgtggtacggccccgaccgcgtgctgtacctgggcccactgtccggcgagccaccgagctacctgacgggcgagttcccgggcgactacggctgggacaccgcggggctgtcggcggacccggagacgttcgccaagaaccgggagctggaggtgatccactcccgctgggccatgctgggcgcgctcggctgcgtcttcccggagctgctcgcccgcaacggcgtcaagttcggcgag

SEQ ID NO: 275759 - DNA, 487 bp, Zea mays
cagatggatatatccgactggcaagatgatattcatgaaaacaaacatgaacaagaaggtattgaggctcgtgacagaagcaatgacttctgagacacatcggaattccctatcatttgctgaaaaggaaattaaggctgaactcctcgtgaatttgccagataccctacttctgaactggcttttccattgcttatcggactgctatactgtaataccagcccttgtgaagtactagattattggtactatttcataagaactgaaggcttctgctgcccaccatgaaaggggacaatatgtccatgcttgaagagaatgatctatcagagaaatcagtcttggctctttgattcatctgtgatggatgactcttcgttatgttggtattggcagtcaggctctggcaggccaaagcaagcccatacacactactgctttaggaaaaggtccgccaaaattgtcaacattacaagcatacttcaat

SEQ ID NO: 275760 - DNA, 481 bp, Zea mays
cgtcctctctctctctcgtggcgacgactgggcgacctccccgcccccgccgctctacgccaggtgcccagatcttcgtcgggcccttcgccgaagagcagccaacaggtatgcgcaccccttctcttcctttcccgctgtgcgaagctgaggacccaaaccctagctgacactgttttggctatttgcgttcggatcggatctaatttcaggtgtataatgtagtattatgctttctaacttgattttcttgcaaaataaaaacatgggtccgctcatctcccctactgggttcgcatggcatatgtaggaattttagctatcttttagccgattgaatcaacttctagaatcactacataaactggtattcgctgagatttacttctttaggttggcgacatattttgccagattactgggtatattgacagctatattagtctactaatggattttgccttgaaaaactgacacaaaa

SEQ ID NO: 275761 - DNA, 551 bp, Zea mays
cccacgcgtccgcggacgcgtgggctaccggtgacgcacgcaccccatctctgatctgatctgatctctccccctggatctcgacctccgcctggctgctccgctctgcgtcgctcgccatggcgtcctcgacggggagcttggagcacggcgggttcacgttcacgccgccgcccttcatcacctccttcacggagctgctctctggggcagcagcggacatggtaggagccgcgggcgccgatcatcaggagcggtcgccgagggggctgttccaccgcggcgccaccagaggcggcggcgtaggcgtgcccaagttcaagtccgcgcagccccccagcctgcccatctcgccgccgccgatgtcgccctcctcctacttctccatcccgccccgggctcagccccgccgagctgctggactcgcccgtcctgctccactcttcctcgaactttttcgcgtcgcccaccaccggcgccatcccggccaagaggttcgactggaagcatgccgccgacctgatcgcgtctcagtctcagcaagacgacag

SEQ ID NO: 275762 - DNA, 381 bp, Zea mays
tctcccctctcctcgactcctcctcacgtcacgcaccccatctcttctctccccctctcgtctcgtccagtcgtcgcagtcgtcccccactctacccagctgccctgctctgcgtcgctcgccatggcgtcctccacggggagcttggagcacggggggttcacgttcacgccgccgcccttcatcacctccttcaccgagctgctctccagcgcaggggacatgctaggagccggcgccgatcaggagcggtcgtcgccgagggggctgttccaccgcggcgccaggggcgtgcccaagttcaagtcggcgcagcctcccagcctgcccatctcgccgccccccatgtcgccttcctcctacttcgccatcccgccgggg

SEQ ID NO: 275763 - DNA, 689 bp, Zea mays
agaaggatgattaccaaccttgtgatgtaacattggaaatttctacatcacactacgaccgcagacctagcaaagataagcatacttcaccaaaacaactgtctgaaaaatctccatcttcaggtgaccataggttttcaggtaggcttagtggtgggcgtagtcttgataataaaggagaaagaaagagccttacgaaatacagagatagagatggtgacatagcccaagagcgatcacatcatcaagatcgaatgccagctaaggttccattcagggagccaacaccgtcaaattcatccataagtagaggtggtcattttttgggcagttcaccaaataatcctttgccacctgcacggaacggtgacccttccttacagggtgcacatgatgatgaccgtaggcctcaaaatggagataggaggttccatggtcatcaaaaaaggaatgacatgaattctgatctaggacatggacatggctggaacagccagccaaactggccttctccagtttctaatggtttcgtccccatccaacatggtggtgctcctggttttcatccacctgtccatcagtttacaggcccacctatgtttaaccttagacctcaaatgaaattaaaccaacctggagtttcatatcctatgcatgatgctgttgataggttttgacccacatgcgcc

SEQ ID NO: 275764 - DNA, 438 bp, Zea mays
  unsure (1)..(438): unsure at all n locations
ttgactcgtgggattctttcttccgcgcgccctctctctctctctctctctcctgccttctgcctgcggccggcccatgtccgtggcgcccctcctgccctgcgagctgcttctccagcgaaaaggctgctgcgccttgacgcagcaccgatccaccgccgcccaacccttgcgttctgtccggcagctaggtagcgagctgcgcggtggctgcgaccggaagcagggaggggaacagggcagcgaacgccgggcgattgccttgcttgcctgtgtgctccgcccggcgcgagttggtcggtcgttccatgcatggatgacaaggaacttatctcacagtccgacctgcagtcattctaccagcagcagcagcagcaccaccgggccttcggcggcggcggcgggcagcatagcccgtnctcgctggccgggatgcac

SEQ ID NO: 275765 - DNA, 420 bp, Zea mays
ctcgtgggtcgtcgcaagcctctagagtgctagtgctacagctacggcctagctacctaacctactacggcgcagctagcagcggcggccatgaccgacgggcgcgaggagagcaccagcagcaggtggccagagctggccgccctgcgcgcgctggcgcgcgacgcggcggcccgggccgggagggagacggcggggtggcgcgggcgggagcgggaggatcaccgccacggccacggcaagacggccaaggtcatgcacctgctgctctggggacccaaatgaggtgaagtgaagcgctgctgctgcagcacagcacctgcctctgcctcgtggcccgcgcgcggcgtcctcgcttccttctccgtccgctgcccgcacgggttgtacttgtacatgtaccactggtagactagtact

SEQ ID NO: 275766 - DNA, 386 bp, Zea mays
  unsure (1)..(386): unsure at all n locations
aaccccgggccgacccacgcggccgaaccgggccaacactnncacgctcaggcgctcagctctagcaanggcggcctccaccacggcgagctcctgcacggcgatggccggtacccccatcaaggcgggctccttcggcgagggccccatcaccatgcgcaagaccgtgggcaagcccaaggtggcggcgtccggcagcccctggtacggccccgaccgcgtcaagtacctcagccccttctccggcgagcccccgagctacctcaccggcgagttccccggcgactacggctgggacaccgacgggctgtcctgcgaccccgagaccttcgccaagaaccgcgagctggaagtgatccactcccggtggggcatgctcggcgcgc

SEQ ID NO: 275767 - DNA, 517 bp, Zea mays
  unsure (1)..(517): unsure at all n locations
ttctcgcgtccgcccacgcgtccgcccacgcgtccgcccacgcgtccgcggacgcgtgggtcaatttagacgacaaaaagtatgagaatgaaagtatgcacccaaaaaatacttcagatcctgaacagattgttcgagcaatttatgacgttgaggaagctacatctcatgcattgcagataattttggagcacaagatgatcaaaccagacactcgtgactcgcttattagctttttacaaattttggtggctcatcatccatcaaagaggtgtcgaagaggatctgctgagctacttattgactttgatgatcactggcatacaaacctctcattaagtttggaagacagtactacactgttgaaaggtgcaggagagaaagtatgtggaaatggagtgccacgtggatactggattttctgccgaggaagtaaaaaggaaacaagaggatttagctgtggcctatgggttttgctgcattcactaactgtncgaatcggagattgagagagcca

SEQ ID NO: 275768 - DNA, 435 bp, Zea mays
atgctgcacatccagggactgttgtgatggcacgagttgattgtgcatcaaaggtgaacgtggatctttggacaaattctctgttgaccattatccttacctgttgtggggtccgccaacaaaattcaatttggttcagtggaaaccaaagcaagagaatagtgaattggaactaattgatgatggaagaacagcagatcggttactgaaatggataaataagaagatgggaagctcattcaatttagacgacaaaaagtatgagaatgaaagtatgcacccaaaaaatacttcagatcctgaacagattgttcgagcaatttatgacgttgaggaagctacatctcatgcattgcagataattttggagcacaagatgatcaaaccagacactcgtgactcgcttattagctttttacaaattttggtggctca

SEQ ID NO: 275769 - DNA, 512 bp, Zea mays
  unsure (1)..(512): unsure at all n locations
tcccgttgttcaagcagccgcgcgacggtcacacacactttgcacgcttgtctcacgtgtttaggagccaaccggctgccgagccatgtcgtcgccggctgcaggcacggcagcggagccgcacgtcgtggaggactgcctcggcttcgtgcagctgctgagcgacggcacagtgaggcggtccacggactactccatgctccgtcccatcggccgcgtgccgtcggacacggacctgcccgtgcagtggaaggacgtggtgtacgaggacacgcgcggcctccggctccgcatgtaccggcccactggcgccgcagccggggagacgaagctgccggtgctggtgtacttccacggcggcggcttctgcctgctcagcttcgaggtggccagcttccatgccggcgcgctccggctcgccgccgagctcccggcgctcgtgctgtccgcggactaccgtctccccgcggcgctggacgacgccgagtccgncttcgcctggctccgcgccc

SEQ ID NO: 275770 - DNA, 843 bp, Zea mays
ccaaacgcccccgtgccccgtctgcgtcgcgtagggttttggctacttgcacgtacgagagcgtccatggacgacggcagcggcgaacaaggtggttgaggacgtcgcggaggaggaccccggccgccgcggcggtccatggaggacggatgaggccgacgccaacgagaaggcgcctcgcccgagcaggcgggtcgcttccctcgacgtcttccgcggcctcaccgtcgcgctgatgatactggtggacggcgccggcggcgagtggccggtcatcgggcacgcgccgtggaacggctgcaacctcgcggacttcctgatgcccttcttcctcttcatcgtcggcatggccgttcccctggccctcaagaggatcccggaccgtggccgagccgtgaggagagtggtcgtaaggacgctgaagctgctcttctggggcatcctgttgcaaggcggttactcccacgctccggacgaactggcgtatggagtcgacatgaggcacgtgaggtggggcggaatcctccataggatcgctcttgcgtacctggtggttgcggttctagagatggtgacgaaagacggcgccaaggttcatcaggaccagccgccaggttcttcaggccgcttctcccgtgtattcagaatgtatctctcccagtggatcgtcgcgtgctgcattctggtggtctacctgtcccttgcctacggggtctacgttcctgactgggagttcagagtgcgaaacgctgacagcccagactacggcaaagttctaacggtgaggtgtggtacgaggggggcgttggaccctccctgcaacgccgtaggctacatcgaccg

SEQ ID NO: 275771 - DNA, 446 bp, Zea mays
gcgccatacccgtgcagtctactccatttttgttcccctctccggtggcggcctagcgggggtggggtcttcctcgcgtcgcctcccctcgctctcatccggtcatcagtttgaggtttcgacctatttcaccagagctgatgggactcatggatgggaacaaagatgaggccttgagatctgtcaagcttgcaaaatctgcatttgcatctggggataggcagcgcgcagaaaaattaattaaaattgctcaaagattggaccctggtcttccacttgatgattggctgaccccagttgaaaaggttggcttcctgaatatttctactggcaaggccaggactgaaggaggccaggctcttttttccccaaaaccaccataggattctgtgggtcctttaaaggtggataaggcttacactgaggagatttttaaagtggtccag

SEQ ID NO: 275772 - DNA, 454 bp, Zea mays
gagctgttttagcaacctgagatcccgggtggatccggcccaatccctaccggtgagttcgccgcacggtgatttcgctgagcacgagcactccctcgcacctgcgtgctcagtgaagcaccggagcttcctcgcgcacggctgcctcctcttcttcgcgcaagcaccggatcttcctcctcttctttatgcaaggcattagatctcccttctcttctcttctctggagagctttttctggagcttgggcgtgaggatcctgcaggccggtggcgtggagcgcgcgttccggcgcgccttgtcagccgagaaagtcgagctggtgaagtccctccactctacaccaccggcgggcccatagcacggcagcctcagcccccgcgcggtgagctaatctattgtcggcatggatgtagtcactccacttcagaaaagagtcagttgcatggctcct

SEQ ID NO: 275773 - DNA, 862 bp, Zea mays
caaaacttatgactatgttggacgaggtggataggaagtacaaacactattatcatcagatgcaacttgtaatgtcatcgtttaatatggttgctggtgctggagctgccaagccttatactgcagttgccctccagacaatctcacggcatttccgatgtctaaaggatgctatcaatgatcaaattagtgttatccggaagaaacttggagaggatgacaatacatccggcaaagagggcaaactaacccgccttcgttatattgatcagcaaataaggcaacagcgagctttccaacagtatggtatgctacagcaaaacgcttggaggccacagagaggactacctgaaaattcagtctcgattctccgggcttggctttttgaacacttccttcacccgtatccaaaagattctgaaaagctaatgttatcgagacaaactgggttgacaagaagtcagatttcaaactggttcatcaatgcccgtgtccggctgtggaagccaatgatcgaagacatgtacaaagaagagattggtgaggcggagctagactccaactcttcctccgacaacgggcagcgaaacaaggacaaagcaccatctcccgaagaaaatgaggacctgcagaccccaacaagccaggcttgccaaaccagccagctcggccagtctaaagccatcgttggtggagtgatgggctttagtggagtgctagccggcggcttccacaccgaggccaaccccgacgacagcttcatgagcctgatgctaaaggcccagagacctggtgaaaccgaaggcaccggtctactccacgatgccgtcgctcaccactcggacgacggcgcccggttcat

SEQ ID NO: 275774 - DNA, 467 bp, Zea mays
gtaggatttgcctcttccatatgccgatcccctcctccccgtggcctcccgctgccggagcgccgccgccgcagcagcgagcggcgcagggcacggtctccaccgtggcgccggagcgtctacccgtcgagggttcccgatctgggccagcgaaggaggaggacacggctcggcttccgtctgccgactactactcagagctaaagaccctggagcatgccgagaaaaccaaaaaatatcagggtaagcttgcagcacggttgaaggccaaatatttttccaacaagacttttgaagaaggatatgtgtttgaagaaattgttatagaatcaaagaccgtccggctaagcaggtggccgtttacaaggttgtttgcagatccagcaagactttgccgagaaaagagctctaatgagaagggcatttctccacctctggctggtgaagccatgtcagatgactaagca

SEQ ID NO: 275775 - DNA, 437 bp, Zea mays
aacagttccgatcctccacaccagcacccgccgccgccgcctcttcccttgcgcacctgctgctgtgcggatcggtgaggcggaggagtaggatggcgagcgcggccggaggcggagcggcgggggaaggggagtggcttaaggtatcccagctcaggcccatggtggaagcgcaggaccccaacgccaaggcagtggacaacctgacgctgcgtcggttcctgcgcgcgcgcgaccacgacgtggacaaggcctccgccatgttcctcaagttcctcaagtggcggagggaggcggcgcccggcggctccgtgccggaggacaggtaaggaggagctggcgcagggcaagctgtgcatgggcggcgtcgacagggccggccgtcccatcctcgtcgccttcgcggccaggcacttttccgtcggccgtgacatggc

SEQ ID NO: 275776 - DNA, 385 bp, Zea mays
cggacaggtcgacttctactacaaacagttcccggagaacatgcgcacgtcgcgggggccatgctcttcctggcattcgccatcgccagctacgccagcggcctcatggtcaccgtcgtgcaccggaccaccggaggccccgacggccgccccgactggctggcgcaggacctcaaccagggccacgtcgacctctactacctgctcatagccgccatggcggcggtcaacctagtctacttcgtcgcctgcgcgcgctggtacaggttcaagaacccggccgccgccgacgtcgagcagctggagctggagttagagggaaaggccgcagcgcctcctgtctgaatactgaagagctattttcttttcttcctcctcatcaatc

SEQ ID NO: 275777 - DNA, 772 bp, Zea mays
cggcacgcaccactccccgccaccattaccaaccaaccaaccaacccgcgcacccccgaatgagaagagcgggggtcggaggaccgaggtcggagctgagcgcgcccccatctcccgtcggcgagaagagctttgtctgtttcagcttcatgagttctgggatagcactggcatccaacatctcttattcaacagtgaacagcagcatcatctttctctgccttttcgcgggatacttgggaattcctggtggaagcttcgctggagggagcgaatttagtcttcactgtagtagaagtttggcctaagagtttgtaggctttcaagcttcagaaatggtttcttctcagccatcctctctgactgcaattctcgcacagggccccaaccactgcccagtcaatatactcctcccaatggggcccccagatgtcgtctcctcagataatgttgagtacgatttctctgatgtttttggttccaccccggtccaaacaccaacaaacctttgtggttttggtccggagagtcctgcacctactgttgagtccaatgaagaattttacagtgatcctgttgtcatcatcaaccgatcccattctctggtcggtccaacatcacttgtcagtcgctccttgcaactaagcaagccttaatcttgaaaaaaccagggatccttcggacttggcaaaggcctttcaaaaaaaaaaggaagggacccaaggcaacttaatggttaagaatctggttatgcttttaccagggaatgggg

SEQ ID NO: 275778 - DNA, 469 bp, Zea mays
gctgaagaaggcggcttgccctgcgcccctgcccgccgccttggtgccgcgcgcgccatggccaagagcaagtcgtccgccaaggccggccccccgctcctcggcaagtacgagctcggccacctcctcggccggggcaacttcgccaaggtataccacgcgcgctgcctcggcggaggcgaccccgtggccgtgaaggtgctggacaaggccgggctggccgccacgggcatggcgtcgcggctcctgcgcgaggtgtccgccatgcgccgcctgagccaccccaacgtgctccgcctccacgaggtgctggcgacgcgctccaaggtgtacctcgtgatggagctggccccgggcggggacctcctgtcccggctggcgtcgttgccgtcccgcaggctccccgagcacgcggcgcggcgcgtgttcctccagctggcgtcggcgctcatctacagccacgcgcgcg

SEQ ID NO: 275779 - DNA, 250 bp, Zea mays
ccaaggtcttcccgtgcgcgctatcctgcgctcgcaccgtgacctgctcggcctaatcgtcccggttaccgctccctcagctcgcccgagctcctgccctgctcgccgtgctaaccgtctatgtcgtcgccggacttgtctcctcgaccatcttggcgttgatatttcctgctgctccatgacatcgtccagccattctcagttgctcgccgtcgaagctcccctgttggctgcgtcctgctcgcctttg

SEQ ID NO: 275780 - DNA, 552 bp, Zea mays
ccggattctcggtactcatgccgtaaacctctaaaagaatggtaatttacatcggcagaggttgaggcttctgatcaagtgcctcttaacagggttgaaattgattcatcggtcctatgggaggagggcttatttattctctacaaaggcatcagtctcttgtacttgaagaaccaaatgaaggagcagaagatgaaaacgcccaccactgaagtaattacaaggacccactggaatgcattctctattttgaaaactgatgtctcaaagttcatcccaaatatcccagcaaccactccaaaaatggccacaacaaatgttgcagtcgttagcagcaactcaaactggatcagctggttccgcacgttgtccagctgaatgttgatgaagtcttcagtgtcatcgatgtactctttaagcgatgtcagcttgttgagagtgctgtcgataacaacgaaataagcttccagtaacatcttcaactcttggatatgatctgtcgttgtgttatcggagctctttgtgctgtcatgcctgcttttacacaaactg

SEQ ID NO: 275781 - DNA, 633 bp, Zea mays
ttccgtccttctcctaagcaaagccccctcgcttttggcgtatgcccccgctggcgcgcccatgattcccgccgattcctccgcccgttcagtccagcaacccttgctgctgcagtgctgcggctagttcggtggcggggaaggaggaggaggcgagatcttggagtggggcgaagcggagatgtcgttgccgtcgaacaaccggaggacgtgctcccggagcagctctgcgcggtccaagcacagcgcgcgggtggtggcacagacgcccgtggacgcgcagctgcacgccgagttcgagggctcccagcgccacttcgactactcctcgtcggtgggcgccgccaaccgcccgtcggcaagcaccagcaccgtctccacctacctccagaacatgcagcggggccgttacatccagcccttcggctgcctgctcgccgtccacccggacaccttcgcgctgctcgcctacagcgagaacgcgcccgagatgctcgacctcacgccacacgccgtccccaccatcgaccagcgggatgcgctcggcatcggcgtcgatgtgcgcacgctcttccgctcgcagactccgtcgcgcttcacaaggccgccaccttcggggaggtcaacctactc

SEQ ID NO: 275782 - DNA, 446 bp, Zea mays
atggtgcatggcttctgccgcttgcactgataccttttgtggggccctcactgtatgttctagtgcgcccatcactttcttccttgctggaagcatctgcttcagcatctgatgagttcaaaaaataattggtatctaactcagaactgatggagaatttggttgtgagcacatgacatgggtagagaaatggttatctggcaactgcatttgttagcccaaatgctatgtcaattgctgatttggaggacatccacactcttgcatgcccacctccctgtccaaaatgaagggccccattgggatccggccaatgaggatattggcaggattatcatcacccgggggcctcaacaaatttggtcaggggtatatttatgggtaatccacaattttttaatcactgatgaagcagtgtaagtatgcaacaaactactaggatatta

SEQ ID NO: 275783 - DNA, 550 bp, Zea mays
atgggacttatgatgaactcggtcaaagtttatcttaggaattgatgcggtagtaggtgacatagcgaattttggccaaccgttctctatatgtggactacactcttccttatactgagtcaggggtacgcatgctggttccagttcgggaccagagacagaagactgcatggacatgcctagaacctttaacagctgatctatggtttggaactggatccttcgttgtcttcacaggttttatagtttggtttatcgagcacaggacggaatcaggaattcagaggaaccgccagccagtcaaattggatcaggcttctacttctccttctcaacacttggatttgctcatagggagaggattgtgaaccatttatcaagaattgcagtagttggttggctttttgtggttctaatattgcagcagagttataccgcaagcttaagctcaattctcacggtagaacaacttcaaccaacagtcaccaatttagatgaagttatcagacgaggggattatgttggctacctcaatgattctttcatgcct

SEQ ID NO: 275784 - DNA, 470 bp, Zea mays
tgatcgtctgcgagcaggcgcggcgggcacagttcttcgggtacaacctcaccttctggagccacctccgcttcggcttgccgtcgacgatcatcatcacggcgatcggcctgctcatcgtcgccagttactgaaccccacacaagctagggtctcggcctcgcacaaacggcggggtgtgtagccagatggcaggcagaacgctgcagaaaacagcatgcagcactgcctgacatcgaacgagatgttgtactgattggcctttgtttgtacgttgtaacagtttttatgtcgttcgtgtaagtctgtacgtttcgcgcaaccgatgccggaaggcgccgggttgcccatctgctaaagcaaaatatgcgcaagactagtagatggcatggagtatagaaggccggcaccactgttctaggaaggcaaaaacttgctctagctagttcaggtaggagagccggcgaaaa

SEQ ID NO: 275785 - DNA, 407 bp, Zea mays
  unsure (1)..(407): unsure at all n locations
agccgtccgtccgtcgcctgaacaggaagtgttgctccggagcaccggctagccgccctagaggatcgacaagatggtgccaattccagtgactccctgaaattgggatgttggatcagatcgatccagtatggcaacacagggacaacatatatcctggattcaagtgcaagtactgcaaaaaacagtggaaggatgtggtgctatacgtttcaagcaacaccttgcatcgtgtggggggaatgtgcaaggttgtcgcatcgttccaccggacactgtcgattactttcagcaggagcttgacaaggtccatgatgctagtggtggtggtgcttgtggtagcggtgttggtgctagtggtgcttgtgcttgcngtaaccgttgttgtggcagtggtggtgcttggg

SEQ ID NO: 275786 - DNA, 477 bp, Zea mays
gctcctctcggcactcgtctcagcacttcttcctcaggccgcaacccttctctgccatttgtgcttggctcccagaagcggccgagctagactcctcgtcgtgcgctgttgtgctgctccatgtccgaccgttcgtctctagctcgccatggctgctccagatcctgctcgcgagtttcccagcgccgtcagcttgccggcatccagctcgcctgtatcatggccgtcgcgccgtctttactcgttggccgtgcgttgccgcgcacacgcgcccgacaccccggttcctctgtacgccttggttgcgcgcgccgaactgcgtccttcgcagctcgctggctttagctgcaggacaccaccagccgtgccttcgtatcctgtgtcctcgactcgtccacagtgtcactcgcgaggtgctcgaggtaatggcagaattgaaaatcgtagctgtgctcatggccttcaagacatattaag

SEQ ID NO: 275787 - DNA, 365 bp, Zea mays
cgcttccccttgctgtggatgccatcggggcgctcaccgggacaacatactcctcgacagcgacgccggggcgcttccttgaggaaagctcgtagctgcccccgcgcaaagctccggtctttcttggccctgacccctcctccccgccgccggcgccgcgtgagcacgccgcgcttggctatggtgctcgacttctgcgcgccccacgggcccgccaagctcccggttgcgtctgtcgctggggtgcgagtcgccggcaggtggttgtggcgatcggcggccgttggggcggtgcgccatggcgtcttcgcgcgggcctcatccttcggttcccggatcgggctcgattcttagaattttcacac

SEQ ID NO: 275788 - DNA, 590 bp, Zea mays
gccaatccgatgacaggctaacacctgcaaagccactcttgcccaacgaggtgctcatctcaggcggtggtgtctttgctcttggcttcttctccctgaagaactcttcaaggtcctatgtcggcttatggtacaacaacattcccgagcgcacatacgtgtggattgccaaccgcgacaacccaattaccaccaatgtgcctgggaagctagtttttaccaacagttctgaccttgtcttgttagactccacaggccgcaccatctggacgacgacaaacaactataccgcaggaggaggcggtgaaactgcttccatcctgctcgactcggggaacttggttatccggttgccaaatggcaccgacatatgggagagcttcagttacccgactgacacaattgtccccaatgaaaatttttcactgaacgtaacttccagcgctacgctccttgttgcctgtaaggggcctgatgacccatccagtagtgattacttcattgggtggcgaccctagctcatgtcttcagattatcgtttgaatgggacacatccttactggaaaaaaccacatggggtggtgaactgg

SEQ ID NO: 275789 - DNA, 525 bp, Zea mays
  unsure (1)..(525): unsure at all n locations
ttggacgcgtggggcctctcactctccctctccctagcggtctccacatgtgagaaacgcctctctagtaattaagcagcatggcagagaagatgtcgacgctaatcatcgtggttgaccttgattgccgcaagtgctaccacaagatccgcaagattctctgccaactgcaagaccatgagaggatccgcaccatctccttcgacgacaagagcaagacggtcaccatggtgggcccgttcgacccgcagcggctcgcgtgcaagctccgctgcaagggcggcaaggtggtgcgggacgtctacatcgtcgccgccggagacagcgccgggacctccgacgcccgaggcgatgatctcgtcgtgcccggtccacgtccaccaccagccgccttcttcgcctgaccgagggatggggcggttggtgccccagccgcagtacgtggagcagaggcccgccagagcggagctggagcctnagccacccatgtcgcccccgcccaggagatgaggccccccatgacct

SEQ ID NO: 275790 - DNA, 519 bp, Zea mays
ccactgaatttattctggaaactttggagcaaagtgatccacgatcattgatacaatctcttgcttaccaagatttgtgtgtggcatctgagtgtaacttggaaccgtggcgcagagctgctttctttgaggaatctggtgaaacttatagaagaatcgtgacagcttgtttgaagccacttgaggagtttacttcaaaaattgctgaagcccttgaaggtttttctagtgatcagccagaattgatgctacaacagtccagactctgtagtgcatttgatgattcccagatatgcgcatggtgtgctcggacactggctgggttaactgcgcgctcacgcaaggaggatcgatatggtgttgctcaactgactggctgcaatgccgctgtgatgacaacattgctgtctgccctagtagcaatcgagacatgtttaggaaagaaaacaaacccacagcctgtgcgctcactgggaccttgaaacattaggtggactaaccttttcacaggacgaaaag

SEQ ID NO: 275791 - DNA, 683 bp, Zea mays
agactggtaggttggtagctgttactgaaaaactaagagaaggcaggacggggaaaggagatggagctcaacagcatcccctatattgcgtcgtggtcttcctcctcgagctgcttctactacagctacagtcgctgcgcctgcagaggtacaagagatgggaagctggtaacaaaagcttctgcagctggtcgtaagcgtgctgctgattcagtatgttcacaactctctgagcagggaactgaagattccatttcaggtcctagatcttcctggcgtataaggaggagagaccttgcttctgccattttactcccttttctgattcctcgtgttaacatctctatcgcggctgagatatacgacgcatcaattattcgaagtggtgtgaggagtgttttaaccaagggcaaggctgctggtgtgcttcggttggttttccatgatgcagggacttttgaaattggggacggatcaggtggcatgaatggctctataatttttgaagttgacaggcctgaaaacattggcctaaatagatccataaagatactaagaaaagcaaaagaaggaatcgacaacgttcagaaagtgtcgtgggcggatctgattgccgtggctggcgctgaggcagttgcgctctgtggcgggcctgagattccagtaaggctaggaagagtaga

SEQ ID NO: 275792 - DNA, 539 bp, Zea mays
gcaggtagtaccttggccaaaacgacttagctatcaagctcgaccgacgaccgaagctaagctaccaagctactagtagtcttcttggtcacgttgttgattgcagcggtcgagcacacacaagctagctagctagccgctagagctagggtcgtcggatagatcgacatggccggcagggacagggagccgctggtggttggtagggtggtcggcgacgtgctggaccccttcgtccggaccaccaacctcagggtcagctacggggccaggaccgtgtccaacggctgcgagctcaagccgtgcatggtggtgcaccatccaagggtcgaggtcgggggacctgacatgaggaccttctacaccctcgtgatggtggacccagatgctccgagcccaagcgacccgaaccttagggagtacctacactggctggtgacggatattccgggaactactggggcagcattcgggcaagaggtgatctgcctcgagagccctcggtcgaccatggggatccaccgcttcgagctggtgct

SEQ ID NO: 275793 - DNA, 498 bp, Zea mays
tcaccttcttcacgaatatgatgatggtaagaagagctgccgatcacgtcggacacaacataatggaaggagaaggaaagttcaaccgcaacctgctgtgaacgggaattccatgaatgaagatcagtctctaagtagcaccttattccttctgttaaaacaactttccgggctcgagtctggtagctcttctgagcaaatcaaccatcctaattctttggttaaccttttgaagaaccttgctgctattgctagcacacatgcatatcaagatgttctaaagaatgcaacttcaatatcatcaaatgatggtaataatgctgcaaatggctctataatgcatgagcaaaccatacggtcaattcctgtcaggagagaatcattagcagaagagcctgcggtgaaaagacgagtacaggactttgatttgaacgattcatgcattgaagaagccgagagccgaacagataaaattgggttcaaactctttggaaagag

SEQ ID NO: 275794 - DNA, 752 bp, Zea mays
cagacacgcaaacgagaggactcgatagagattccgccgccaccaccgccgggtcggatgccgccgccgcaggcgggcatgaccctatgccgccttcccaaggccacccttggccttcccctttctctgccctctttgctatatcgacccaccctgtccatctccgcacgtcgcaccaaggccgtctactccagggcctcctactactctccatcaccggactcttccttcggatcgcggatggaggattccgtcaagaatacggtggccgataaccccgatgtcatctactctaagtcatggcgctcatattccatggacctgaagtcactcttcaagcggatcggtgtgcagccccacgtcatcgagctcgacaatctcggagctcaaggaccacaactacaaaaggtattagaaaggctgactggacagtctactgttcctaacgttttcatcggtggaaaacacgttggaggctgcacagataccgtgaagctgtatcgcaagggggagctagctagcatgctgtcggacctggatatcaacattgacaactcatgacaagctatgttctgcaaggattgggcgagacttgggcagcactgtattgagtttctttttttaacatgtgcgatgacaaaaactggtgtcatttacacattttcgtttggtactccgattaaatcattgaattttgaccaccgtataaaattaaaaaatataattaaactataaatatattttataaataa

SEQ ID NO: 275795 - DNA, 680 bp, Zea mays
tcgcggacgcgtgggttctcctggtcgatgggctgcctgtgatcggcttatcccctcctgatggcattctcaccgagcttgtgtcaatctgcgttcgcggcggcgtttcttttggcctcgcaagccgcggacgaggagagaattcccgggttttatcgcaaggacaacacctatttgatgctttctggaactagaccatacaacctgatggtaaaatgatacttaattatgacacggaaaatggtacaagacaagagttcatcacaagacacggtacagaaaagtgggcatgctgtacttgggaatgtttcttatgacaaggatgttgtggagataaaactggcagacgctattgattccgataactacgtcggtaattttgtcaggatgtctgtgtcgatgacggagcactgcttcatcggacggcatcagaagaaaaaccagtagacagaaggtcatccctagatctcagttgccaaatgatcggtgcagatagtgacataagctactacgggaaggaagatcattctagaacatctgcgcacgaactaaaaccagaagcagttgcacttgcacctctttgtaacatcggtgcagatagtggcagagagtatgatcttgaagatcggaccggtactggttccatcgcaggcagtcctggtgagaagaagataagtttg

SEQ ID NO: 275796 - DNA, 1394 bp, Zea mays
ctaagggggtggcttggcttggctggctacaagtcactcaaattgaaataagactgaaacggacaaaggcaaacacagcaagcaaagcaggaatcggaggtagacgacgaccaccacggggataacaaccaaacctcccaaataccatccacgaacgaaagggaagggaaggtcgtttaggcggcgcgccgaggccgtggctatggaccccaacggcggcggcgacaccatcctcggcgatcccctccttcccctctcgcagtccagcaagcagcagcaggatcctctcgccggcgtctccgactaccttgggcggtccgtgcaccgcggaagctccgggggatggagatccgcgctcttcgtcgtgggcgtcgagatcgccggtagcttcgcctacttcggcatctctgccaacctaatcacgtacctgactggtccgctacgacagtccaacgcctccgccgccgcctccgtcaacgcctggtccggcacggcctgcatcatgcccctgctcggcgccttcctcgccgacgcctacctgggccgctaccgatccgtcatcatcgcctgcaccctctacgtcctgggttatggtatgctgacgctgtcggcgacggtgccggcgctgcagccgtcgcacatgccctgcagggaggatggcgtctcgtcgtcgtcatgccaacccgggtggccgcaggtggccttcttctacgtgtccctgtacctgatcgccatcgcgcagggcgccgacaagccgtgcgggctggctttcgcggcggaccagttcgacgcggagcaccagggggagcgcgcctcccgcgggtccctattcaactggtggttcttctgcatggccatcggcatctccgtgtcagtctccgtggtgggctacatccaggagtacgtcgggtgggggctcggcttcggcgtcccctgcgccatcgtgctctgcgccttcctcgtcttcctgttgggcaccccgacgtaccgcctgtacgcacccacgccggaagccaagtccccgttccgccgcctggcacgcggcctggccgccaacgccaacaaaacaggaggcctctccgcctcgcattcggaggaagcggtggcggggacagctggttcgccgacaacctcaaccgcgcgcacgtcgactacttctactggctgctggcggggctcagcgccgtcgaactcgcgctcttcctttactttgcgcgctcctacgtctacaagcccaagcccaattaatcctgctagtgcagtctgtacagatgaatggaaagcagatgcaggcatgcagcccgtggtcttcatgttttacttgtccttgtaaaacaaggcaaactcagctcaaagtcaaattcagattctagccaaaaaaaaaaaaaaaagga

SEQ ID NO: 275797 - DNA, 462 bp, Zea mays
gtggtgggcctgcaggagctcttctacgaccagatgcccgacgggctccgcagcctggggctggcgctctacctcagcgtcatgggcatcgggggattcatcagcagtctgctcatctccctcatcgacggcgtcaccggcagcggtggcggggacagctggttcgccgacaacctcaaccgcgcgcacgtcgactacttctactggctgctggcggggctcagcgccgtcgaactcgcgctcttcctctactttgcgcgctcctacgtctacaagcacaagcccaattaatcctgctagtgcagtctgtacagatgaatggaaagcagatgcaggcatgcagcccgtcgtcttcatgttttacttgtccttgtaaaacaaggcaaactcagctcaaagtcaaattcagattctagcccccccccaaaaaaaaaaaaaaaaaaaaaaaaaaaaaaaaataaa

SEQ ID NO: 275798 - DNA, 452 bp, Zea mays
accacgcgtccgaacacacggttcaagcacatcgacacacacgagcacagaagagaaacgggcacacgcaactgatcaaggcaaccaatattcaccgtcggcaatgggcgacctgatccctgggctgccggatgaagtggccagggagtgcctcgtccgggtgggcttcgaccagctgccggtggtgcgccgcatctcgcgccagtggaagtcggaggtggagtcgccggactaccaccgccagcgccgggcggaggggctggcgcgcccggtgctcgcgctggtccaggcgcagccgacagcgccgccggatgacgacgacgacgccggccccgcgcacaagcgctcgacggcggccaactcgtaccggctggtgctgctggaaccggccgagggacggtggacgccgctgccgcccccgtctgggccaagccagagcctgcctctgttct

SEQ ID NO: 275799 - DNA, 1194 bp, Zea mays
ataagatcatacaatactcatgtaattgatacagaggataactgttcagtgaagattgcaatgcccgagagtgggggtcttttaaaacaggattttttttccttgacgataccacaggttggaggtggagaagatatatttgccacaatcagatggtcacaaaaattgctatacgacaacggacaattttctgtcgaagtaccatttcgtttcccgcactttgtgaaccctttgccaaaggttttcatgaaaaaggagaaaatacagttgattgtgaatagtggtgtgactaaggagattttattgcagggaacaagccatcccttgaaggaaaaaagtagacaaggtgagaagttgtctttcctgcatgaagcagttgttgagaattggtcaaccaaagattttaccttcgcatatactgtttattctggtgatttgtctggtggagttcttgtgcagccctcaaccttgcgtgactatgatgacagagatatgttctgtctttttcttttacctggaaataacgagaacagaaaggtcttcagaaaggctgttgtttatatcattgatacaagtggaagcatgcaaggaaagcctcttgagagtgttaagaatgccatgtccactactctctctgatcttattccaggagattacttcaacataataacatttaatgatgagcttcactcattctcatcgcgtttggagcaagtaaatgaaaaaacaattggaaacgctattgaatggatgaacttaaactttgtcgctcagggtggcactaacatcatgcatcctttgagtgaggcaatgactttgctgtcaacttctcacgatgcgcttccacaaatctattttgttactgatgggtcagttgatgatgaacggaatatctgccatacattgaaaactcaacttattaaaagtggatctaagtctcctcggatttctacttttgggctaggttcatattgcaaccactatttcttgaggatgttggcatcaattggtaagggtcactatgctgctgcatttgatacaggatcaattgagggtcgaatgcttcaatggttccagaaagcttcaagcactatagtgtcaaatgtttccattgatgccataaagcatattcaagattttgaagtggattctgtatatattccagacatttcagcaaaatatccattgtgtgtt

SEQ ID NO: 275800 - DNA, 800 bp, Zea mays
  unsure (1)..(800): unsure at all n locations
tcgtactcggttcccggaatttcccggcggaccagagatatgtgtctggtgctttttctttttaaacctggaaataaccgtagaacagtanataggtcttcagaaaagggcgtgggggtgttatanntcattgatatcatagtcggaagccatgccaagcgaaaggccctcttgagaagtgtctaagaatnngccctgtccactttactctctctgatctgtattccaaggagattacccttcaacataataacatnttacatgatgagcnttcacttcattctcatncgcgtttggagcaagtataatgataaaaacaanttggaaaccgctatctgaatggatcgaacttaaacttntgtcgctcaaggtggcacctaacatcatgcatccctttgagtgaggcaatgactttgctgtcaacttctcaccatgcgcttccacaaatctatgctggcactgatgggtcaggtgatgatgaacggaatatctgccatacattgaaaactcaacttattaaaagtggatctaagtctcctcggattactacttttgggctaggttcatattgcaaccactatgtctcgaggatgttggcatcaattggtaagggatactatgctgctgcatttgatacaggatcaaatgacggtggaatgctttaatggtttacagaatgtgtaagtcatgtcaactcttaccattccattcagctttcatggagattgtgctcaattcagtccacaaaggaacaccgggggatttattttgtgacacactgaataatttaactttgctgc

SEQ ID NO: 275801 - DNA, 844 bp, Zea mays
cgaattcccgcgggacccacgcgtgcgcggtttcagaacttcatcaagcatcttcgagagatgggcgatgaggtatcaactcggtcttctttgtctaagagagagtgctatactatatgtatgagtgtttcttcaagaccatattattattccagaattcgcgtttagtgcagtatatgtatgagattttgttcatgaccatatttccacccacaattcacttcatctgcactttatggtcgtcatctgcgcttcttggtttaggtattggtggtgactacacacaagggagctcctgacgagttccatggtgcaaaggtcattggctcttggagctttccatgtcctctgtaccaaaatgttccactctcgctggcattgagccccagaatattttctgaggtgaataaattcaagccagacataatccatgcgacatcacctggaattatggttctcggtgctctggctatagctaaaatgatatcggttccaatgttgatgtcttatcacacacatcttccagcgtacataccgagatacaatttaaattggttacttgagcccacgtggagttttataaggtgcctccacagatcagcagatcttactctagttccttcgttagctattgctgaagactttgaaaccgctaaagtagtgccagcaaacagaatacggctttggaataagggtgtagattctgaaagctttcattctaaatatcggaggcacgaaatgcgtgtcagattgagtgggtggtgaaccaagaaaacccattggtaatacatgtgggttcgtttgggacgtgaaaaaaatttggattttctgaaggggttatgga

SEQ ID NO: 275802 - DNA, 609 bp, Zea mays
gctaccgccatctctagcgttagcttctgcgtgtggccgtgggtgcccgcgcgcgggatgacgaccgccaccgccatcgtcgccgggcatggcctcgcgctgcgtcggagcctccccctccccaacccgccagggcgagccaccacgtcggtctccctctccgcgcgccccgtcactccagcccgccgcatgattgtcccggctagcccgtcgccgcggtcgccgcgccggtgccggtccatctactccgagagctccaccgaggcatccgctgcggctgacatcgccgacgaagaagtggaggccgagaacaaggtggacccgcaggcggaggtgtgctacctggaccctgacgtggaccctgagtcgatccgggagtgggagctggacttctgctcgcggcccatcctggacgcgcggggcaagaaggtgtgggagctcgtggtgtgcgacgccacgctgtcgctccagttcacgcgctacttccccaacaacgccatcaacagcgtgacgctccgcgacgctctggcctccgtgtccgaagcgctgggcgtgcccatgcccgaccgagtccgcttcttccggtcccagatgcagaccatcatcaac

SEQ ID NO: 275803 - DNA, 426 bp, Zea mays
cactacgcaaaacggctgcgatgcggcttgtctcggcgactgcaactgcccggcctactccttcagcaccgatggcaaatgctctgtctggaatggggacctgctcaacgtggaccaggccgacagcaccataagctcccaaggtgttctttaccttcgtctcgccaagagtgatttccagggtttgagcagaggcaacaagaggacaccgacggcggcgatcgctgcaggcgctgttggttctggaatactagtgctcgccgtgctagcgctcgtaatctggaggtgcaacaatgtgccgccgccgctacacgccggcgtcggagacggtggcggaatcatggcgttcaaacacaccgatctatgccgcgctaccaagaacttcagcgacaggctcgggggaggtggttcggctccgtgttcaaa

SEQ ID NO: 275804 - DNA, 563 bp, Zea mays
cagcgcaaacacaatggttgccctagagagtggcaacgagagtggaatccaaaatggtgacaggtctcgccgtgaagctgcgttgatgaagtttcgcatgaaaaggaaagatagatgcttcgagaaaaaagttaggtatcatagcaggaagaagctcgcagagcaaaggccaagagttaagggacaatttgtaagccaaaagctgaactcagctacaacaacagacgcagaagctgactcgtgaccggcgtcaagtcatcactgtaacttattcttcccttcccaccaggtgtgggcaatcggacttgtaagactgaaggctggcagaagttttttcccttccatggttagcctttctgcacaacgggtgaactcttgtgtcgggtgtttggtgccgttgtggccttatttttgtaaagtgcatcaaattgacaaatgttcagaggggaatgggttgggggtttaggaaaacggtgcagctgccagatttcgcctctgtacttagatgtttgtgggggtgagaaagcagagcatgtacagcttattcacccattttgttgcca

SEQ ID NO: 275805 - DNA, 426 bp, Zea mays
acaagatctttcatcaaacaaatttagtggtgaaattcctggaactttacgacagcttgagacaaatacacaccattcaaatggaccaaaacattcttactggaaacattccgcccatatttagtcgactatatagcttgaacttgctcaatctttcccataacaatttatctggccccatgccaacttttctaagtggtctaaatcttagtaaactagatctatcctacaacaattttcaaggacaaataccaagaactggtgtattcaataatcccacaattgtttcactagatggcaatccagaattgtgtggaggagccatggatttgcatatgccttcgtgccatgatacttcaaaaagagtaggtagatcaaacttattgatcaaaatattgatcccaatttttgggttcatgtcactcg

SEQ ID NO: 275806 - DNA, 794 bp, Zea mays
ccctcttgtccgtagaggagcacaagtgagctagctagctctagctaggccacgcactgctgcctccttcatcatcaggtcgtgctagctagctagctatagctgggccgggggacgtacgacatcagcgcgcggccatgggcgtggggaagctgatgaacgacgtgaagccatacctggcgatggtgctgctgcaggtggggttctccgggatgtacatcgtctccgtcgcctccctcaagcgcggcatgaaccacttcgtcctcgtcgtctaccgcaacctcgtcgccaccgtcgtcatggcccccttcgccctcctcttcgagaggcgagtgaggcccaagatgacgccgctcatcttcctcaagatcatggggctcgccgtgctcgagcctgtgctcgaccagaacatgtactacctcggcgcgaagctgacgtccgcgaccttcgcctcggcgctggtcaacatcctccccgccatcacgttcctgctggccctcgccctgaggatggagaggctgaggctccggagcctccgcagccaggccaaggtcgccggcacggtctgcaccgtcgtgggcgccgtgctgatgatcctgtaccacggccccgtggtgccgttcccgtggtccgcgggccaccaccaggcctcagccgccgccgccgccgcggcagcggagagccagagcagcgcatcctggctcaacggcatcgtcatgatcatcggcagctgcctgtgctggtccggcttcttcgtcctccagtcgaacacgctgcagagctagcccgggggg

SEQ ID NO: 275807 - DNA, 356 bp, Zea mays
  unsure (1)..(356): unsure at all n locations
ttcgaggagaggagcagcacaagtgagctagctgttcatctagctacgccactcctgcctccctccctccctcctcagcacgtcgtgctagtaatcgatcagaggggggcgtgacgtacgtacagcagccatgggcgtggggaagctgatgaacgacgtgaagccgtacctggcgatggtgctgctgcaggtggggttctcggggatgtacatcgtctccgtcgcctccctcaagcgcggcatgaaccacttcgtcctcgtcgtctaccgcaccctcgtcgcccccgtcgtcttggcccccttcgccctcctctttgagaggaagagtgaggccncaagatgacgccgctcatctt

SEQ ID NO: 275808 - DNA, 467 bp, Zea mays
tgcccattttaagttgtaaagtgtttcaaatgacgggtgcttatgtggccgtgccatatcatgcatgttgtagcgtgtgggtttgtgtgtgttgtgacttccccccctctccccagccgtattgatggtactgtagagggtgttatcgctaatatataccctaccgacttatgtattgcatcgctgtttcaaagcagtctgtcatcataagtgcacacaggtggaatagggcgaggatggtctggtgcaaaggtgaaataatggcacagattgtgtatgtgtgtgtcctgtttttcagaagttttaccttgcggtaggccagatttgtcgattcttagtcgtctgtatttggctgtattcaattgaaattgtgaaatgtatcagttgaagttatgcgtagacattcacttcaaaaaactatgacacaaaatggtgctctcatcatgattttgcaagtgccaagtatg

SEQ ID NO: 275809 - DNA, 1001 bp, Zea mays
tgtttatctcattgactaaggaacttgttgattaccttgaagtgagtgatcaagatttcaaggaagacctcactgctaaaatatgctcaatagttgaaaagttttccctggacaggctatggtacttagaccagatgttcagagttttgtctctggctggtaattatgtaaaggatgatgtatggcatgctcttatagttctagtgagtaatgcatctgaacttcaaggatattcagtcaggtcattatataaggcattgcaagcatctggtgaacaggaaagtttagttagggtggccatttggtgcattggtgaatatggagaaatgctggtcaacaatcttagtatgttagacatggaggaaccgatcacgagattgctcttcagcgttactcggcggatgttactaccagggctatgtgtcttgtctctcttttgaagctttcctcccggtttccaccaacatcagagagaataaaagaaatagttgcgcaaaataaagggaatactgtgcttgaattgcagcaaagatctattgaattcagttccattatacaaagacatcaatcgataaaatcatctttgcttgaacggatgcctgcattggatgaagctaattatttggtgaagagagctgcttctacacaggctgcagtttcatctgtaaattctgctcctgcagtcacttctggaggcccacttaagcttccaaatggcgtagcaaagccaccaccagctcctttagctgatttgcttgatttgggttctgatgatgctccagtgactacttcggcccctactacatcacctaatgattttctacaggatctgttgggcatcggtttgactgattcgtctcctataggtggagctccgtctacaagcactgacattctgatggatcttctatctattggttcatctcctgtacaaaatggcccaccaacgtcaaactttagccttcctggcatagagattaaacctccccctgttacacctc

SEQ ID NO: 275810 - DNA, 708 bp, Zea mays
  unsure (1)..(708): unsure at all n locations
aaaacccgnccgaccgacgcgtccggaaaggttttccctggactttctatggtacctagaccacacgttcacagttttgtctctaagtggtaattatgtaaaggatgatgtatggcatgctcttatagttctaatgagtaatgcatctgaacttcaaggatattcaatcacgtcattatataaggcattgcaagcatctggtgaacaggaaagtttagttagggtggccatttggtgcattggtgaatatggagaaatgctggtcaacaatctgagtatgttagacatggaggaaccgatcacggtaactgaatctgatgctgtggatgccgtagagattgctcttcagcgttactcggcggatgttactaccagggctatgtgtcttgtctctcttttgaagctttcttcccggtttccaccaacatcagagagaataaaagaaatagttgcgcaaaataaagggaatactgtgcttgaattgcagcaaagatctattgaattcagttccattatacaaagacatcagtcgataaaatcatctttgcttgaacgtatgcctgcattggatgaagcaaattatttggtgaagagagctgcttctacacaggctgctgtttcatctgtaaattctgcttctgcagtcacttctggatgcccacttaagcttgcaaatggcgtatcaaagccaccaccagcttctttagc

SEQ ID NO: 275811 - DNA, 455 bp, Zea mays
  unsure (1)..(455): unsure at all n locations
agaaggccgacgcgctgcagaaggtcatagtcgacgcagggtacaggccggttcctaacgcgagaggcgaggaggtgctggcgaagaagtacaggatcaggctgagggggatcgatgcgcccgagagcgcgatgccgtatggcaaggaagccaaggaggcgctgctcaaacttgtccaggggaagagcttgaaggtctacgtgtacgacgaggaccggtacggtagatgcgtcggagacatctactgcgacggggtatttgtgcaggagcaaatgctgaagaagggtttcgcgtggcactacaccgcctacgatcaacgcccggagctggccaagtgggagaaacaagcgcagaccggccggaagggcctgtgggcggcgtcgaagccacagaaaccatgggagtggaggaaggacaagcgcaacgggacagcatgaacaaacccncccgtgcat

SEQ ID NO: 275812 - DNA, 554 bp, Zea mays
aaagacacaatggtgggtctcacaccaatgagttttgcccgctcatatgcatgtgcggctgcattggatggtcacatatttgcttttggtggtggaggtggcaagtcatcatggtataacacagttcgaggaataacgagtggatagaatgcccctcgttgaaccgcaagaaaggaagtctcgctggtatcagtcttaatagcaaaatatatgctattggtgggggagatggaaatgaaactttttcagaagttgagatgtttgatccataccttgggaaatggttatgtggtccatctatgctgattcctcgatttgctcttgccgtggctgaattgaatggaacaatctacgccaccggtgggtatgatggaagcatgtacttacaatcagcagaacggtatgaccaaagggagggtgtctgggtccgtcttccaagcatgaacacaaagaggggatgtcatgcccttactgtcctgggagaaagcctatatgcaatgggcggatacaatggagacaagatggtttctagcgttgagatcttcgaccctcgg

SEQ ID NO: 275813 - DNA, 542 bp, Zea mays
ccgcccgtcccagccactcaccccgtccctggctcctgcacccgtcacctccatctccaccagaccaccagaaatccagaatcaaacaagtgaaagcgcaaacccttgctccgattcccctctcctcggcctcctcgacggaagtagcagagcaggggccgtggcggagcccatgtggcccggctgcggtggccggttttactgggcgccggaatcggcgccgccggggcaggccaggggcgtcgcggtcctgttcgcgtgggtgtggagcgacgagacgcagttgcggccgttcgttgagctgtactcctcgctcgggtggcgctgcctcgtctgccaccccgatctcgtcgcactatatctctctgagaaagcaatatcgctggcaactggtgttataaatgagctggttaaggaactgaaaataaaaattgtgccaattgttctggcttccttttctggcggctcaaagggatgcatgtattaggttattcagttactagatggaatatgtgaaggagatgcaatcatgaaggactatc

SEQ ID NO: 275814 - DNA, 1081 bp, Zea mays
ctcgagccgattgttcatttgttctgtaatttcctcactctggactttccatctgacgcatcttatcctttgtggaacaataaccaagaaagattctgctgcttctgttcctgccaaaagtaaatctgtctgaacaaacttgtttggctgaactattgttgcccttgattacacaagcctatgtgactgtcttggggatgcaactgtggagtctttgagatggaactgtccttttgtggaacaataaccaagaaagattctgcttcttctgttcctgccaaaagtatatctgtcacaaacttgtttggctgaactattgttgcccttgattacacaagcctatgtgactgtcttggggatgcaactgtggagtccttgagatgaaactggagtccttgagatgaaactggatttacacaaaagtaaatcctttgtggactagcagtagttgcatatacatggatgggttgaagtttagccatcctggttcatattcatgtagtgcagatcatattcatgttgatatgcaatacaggttggtgtaggttcaacttgaatgcaagctaggatcggttgcttctatttatgtaactctgtattatctccagattagtatattcatatattcatcttgttatatggtgcactaggatcttgaacaataattttattggagctggttcttgtggcaatggagcatcttctacctaggccaaatgagatggagtcgcgggcatgttttggtgtgagtccggtcgttccatgatttttattggagctggtctttggcaattgatgagcatcttcttccttggccaaattggatggactctagttttggtttgagtccgaccatagaatgatttttattggagctggttcttgtggcacttgggcatcttctcccttggccaaataggtggactcactaattttgttggacgagattaactgtggaaggtttcgatgttttacaattggacccccttctttgttcattccccagtatttaaacgcgatacttcagataccttctcgtactagatttacttattgatcataaaaaaattcctgttttttt

SEQ ID NO: 275815 - DNA, 595 bp, Zea mays
  unsure (1)..(595): unsure at all n locations
ctatttccaagaaagattctgctgcttctgttcctgccaaaattaaatctgtctgaacaaacttgtttggctgaactattgttgcccttgattacatatgtgactgtcttggggatgcaactgtggagtctttgagatggaactgtcctttgtggaacaataaccaagaaagattctgcttcttctgttcctgccaaaagtatatctgtcacaaacttgtttggctgaactattgttgcccttgaagacacgagcctatgtgactgtcttggggatgcaactgtggagtccttgagatgaaactggatttacacaaaagtaaatcctttgtggactagcagtagttgcatatacatggatgggttgaagtttagccatcctggttcatattcatgtagtgcagttcatattcatgttgatatgcaatacaggttggtgtttgttcaacttgaatgcaagctaggatcggttgcttctatttatgtaactctgtattatctccagattagtatattcatatattcatcttgttatatggtgcactaggatcttgaacaataattntattggagctggttgttgtggcaatggagca

SEQ ID NO: 275816 - DNA, 1602 bp, Zea mays
gtgcccgcgtggcgtgtctactagtagtatcctccttcttcttcttcattcattcatcctggtggtgtactactagactactactagtagctcacgcgcgcggcacatgtagatgtagcctctaatctcaccgttgctgccctgaaactcaaaacgaaggtacgtggaggtggaggaggacgccggcgtgtgagctcttctactacttcgtccaggccgagtccggcgccgccgccgccgccgatgacacccctttcctcttctggctcaccggcggcgaccgctgctccgtcttcagcggcctcgcctacgagatcggtcccatcagattcgtcctggaaccctacaacggcaccctgccgcgcctgcgatacaaccacaactcgtggtcaaaggtgtcacatatcctcttcgtcgattcaccggttggagctggattttccttctcgagagatcccaaaggctacgatgtcggagacatctcggcctcactgcagctacaggaattcctcatcaagtggttcagtgatcatcccgagtacctcgcgaatcctttctacattggcggggactcctatgtcggaaaaatcgtgccgttcctcgggcagatgatttcagaaggtattgaacttggaagaagacccttccctaacctcaagggctatctggtgggtaacccaatcacgggcgaaagtatagatttcacttccagagtgccctacgctcatggagtcggtatcatatcagatcaattgtatgagacgatattggggcattgccaaggagaggactacactagtcctgcaaacgctctgtgtgctcaggctctggacactttcaacaatctcatcaacgaagtccagaacgcccagatcttactggacacgtgcgtctacgcgtctcctgcgccaaacgttctcagcagaccggtggacggtggtagaaggatcctgagggcggcggggatgggaggaggggcgacgctgaaccatccgccagctcgtcctcggtttggctgcatcacctacggctactacctgtcgtatttctgggcgaacgatgaacgcactcgaacagctcttgggatcaagaagggaacagtggacgagtgggtgaggtgtcacgacgcagacctgccgtacacgatcgacctcaagagcgccatcaagtaccaccggaacctgacgtccagaggctaccgcgccctggtgtacagcggcgaccatgacctgctggtgccacacctgggcacccaggcatgggtcaggtccctcaacttccccgtcgtcgacgactggagggcgtggcatctcggtggccaagccgccgggttcacgataaattactcaaacaacatgacgttcgcgacgatcaaaggtggcgggcacacggcgccggagtacgagccggagaggtgtttcgccatgttcagccgctggatactcgaccgtccactctaatctccactcgtacattgccggattcttgcaccatgaccatgattgatggactgtgtggattgcagttcataggtggaataaaatggatgatttctgtgaatggataggtctgccaactaggcaactttgtgtaaattaacta

SEQ ID NO: 275817 - DNA, 516 bp, Zea mays
  unsure (1)..(516): unsure at all n locations
ctttaactcgcctttcctgggggctcgtcattaatgtatccccccctttctcccgcccaccgcccgctccgaaatctgcgcgccgacgccgccggctgcccgtggagagcctcgaattagagcgcgttccgtcgagaggttttcaagcaactatgtttgagtttggttgatatgatactcattcacgttggggatgcagaccccccctctgtgggggttgattgaagaagttaactgtacacttaggagaacttgtgtcctactgaaagtttcttggtttcgaggtgctcttattggttattggatcgctgcgtgtaattctgtttctttcccttggagagcctttctagttttcttgggcaggctcttgagctaccaagcatgtcagattcaaatgtgaagtggattgatgggctccagttcacatcattgtactggcctccacccctcgatgcggagcagaagcaggtgtctatcttgcttattgagtttngtgactatgctataatttcatga

SEQ ID NO: 275818 - DNA, 450 bp, Zea mays
ctgaaagtttcttggtttcgaggtgctcttattggttattggatcgctgtgtgtaaggtgtttctttccctttgagagcctttctagtttcttgggcaggctcttgagctaccaagcatgtcagattcaaatgtgaagtggattgatgggctccagttcacatcattgtactggcctccacccctcgatgcggagcagaagcaggcacaaattttggcatatgtcgagtactttggccagtttacagctgacaccgatcaattccctgaagacatagctcagctcattccaaggtcctatccatcaaaagaaaaatcgcttggtagaatgaagtattggcaacttttggtcttcatcatccggagcatggtcatgcagttgcacatccaattctttcacgcatcatagatgggacgctgtgctatgatagacatggtcccccattcagtt

SEQ ID NO: 275819 - DNA, 558 bp, Zea mays
cgtgtaccggccgtttgacgaccgagccctccccctgcccccattttccagttttcttctcccttcctgccgctacggcggtgggggtaaggactcgcgcgggccggtcctaggttctcccggagcgggtgggcgggcgggcggttcggcgggatgggcacgccggagttccccaacctgggaaagcactgcagcgtcggcgactgcaaccagatcgacttcctccccttcacctgcgaccgctgcgaccatgtcttttgccttgatcaccgaagttatacatcacaccaatgcccaaatgcaaacatgaaagacgtcactgtcctcatctgcccactctgtgctaaaggtgttcgcctcaatccaagtgaagacccaaatatcacctgggatactcatgttaacactgattgtgatccatcaaattaccaaaaagtgatgaagaaaaagaaatgccctgttcctgggtgcagagagacactgacattttccaacaccatcagatgcaaagattgcaccagagaacactgcctaaagcacagatttgggcctgatcat

SEQ ID NO: 275820 - DNA, 427 bp, Zea mays
  unsure (1)..(427): unsure at all n locations
aagtcgagcttaagctccggctttatggctccaaatccgtcgtcaaatacccccggtgtagcctcataaggcattcaacctacgccgacgccgaggaggaccaatcgatgttcatggcgttatcaagcatctggatgctgctcctcctgtttggtacctctgcaggtcttgttcctactctgtacactctgagcatcgcgttcggggatgtgtttggtgcaaggcaccttctgtacggtgaaaagtccctcgatgcggtaacaagagttaacgacttggctttggttggattggggtatctggttggctatcccatcgcatctgcgtccgttggcgcgctgcaaggcttattgtcaaacaatttggttgccctaaaagggtcctgcccaaattgtggcgagcangtatttgcattttgtcaagatgg

SEQ ID NO: 275821 - DNA, 725 bp, Zea mays
  unsure (1)..(725): unsure at all n locations
ggccgccctttttntgtttttttttttattaggtcagcatacggggtttaattatctataccagccgagttcactagttgtaatcatgtatttttgtggcctttttttcttctttctaaagcccaagtgtggtgaaggtgaagccatgtattgaagaattgcgatcgtccgatggtcgaggttgtacctatatacaccgctggtagcagagtatccatcgagtacctgctcacccgaggataactctgatctcttctatgctgctctcggcggtcttggtcagttcgggatcataaccagagcaaggattgcacttgagctcggattttgaaagcttcaccgaagaccaggagatgttgatcatggcagagaactcctttgactacattgaaggttttgtcatcataaacaggacaggcatcctcaacaactggagggcgtccttcaagccacaggacccagtccaagcaagccatttccagtcagatggaagagtgctatactgcctcgaactaaccaagaacttcaatagtggcgacactggagtttttggacagggtgcacacctctgagctgaagctgagggcacaaagcctctgggaagttccacacccttggttgaatcttctgataccgaggagctcaatccgcagatttgctacggaagtctttggcaggatcctagtgggattcctttcttcagcaccgtctcacacaggtcacgg

SEQ ID NO: 275822 - DNA, 727 bp, Zea mays
gaaagcttcaccgaggaccaggagatgctgataatggcagagaactcctttgactacgttgaaggttttgtcatcataaacaggacaggcgtcctcaacaactggagggcgtccttcaagccacaggacccagtccaagcaagccatttccagtcggatggaagagtgctatactgcctcgagctaaccaagaacttcaatagtggcgacactgataccatggaacaggaagttactgtactgctatctcgacttagattcatacagtctactctattccacaccgatgtcacgtacctggagtttttggacagggtgcacacctctgagctgaagctgagggcacaaagcctctgggaagttccacacccttggctgaatcttctgataccgaggagctccatccgcagatttgctacggaagtctttggcaggatcctgaaagatagcaacaatggtcccatattgctttatccagtgaacaaatcaaagtgggacaacaaaacgtcagtggtcataccagatgaggaaattttctacctagtgggattcctttcttcagcaccgtctctctcaggtcacggcagcattgcacatgcgatgagcctgaacagccaaatagtagagttctgtgaagaggctgatattgggatgaaacagtatctagcacactacaccacacaggagcagtggaaaacccactttggaacaaggtgggagacatttg

SEQ ID NO: 275823 - DNA, 388 bp, Zea mays
  unsure (1)..(388): unsure at all n locations
cgagctctactcattcagcagatcccgtcactcgctctccacaagcagagcaccgcagcagaacgaggaaggatgctggccatcttccagaagcaggtggcgcacgcgccgcaggagctcaacagcccccgcgccggcgcgtcgcccagcaagccccggaaccccgacgagatcctgcgcgacttccacgccgcgcacgcggacgccgccttctccgactccttcggcggcggcgccgcgctcgcctgcgtcggcccctcctccggcaccgacgtcggcaccggcaccgacacctaccagcggatgttctgcggcctgtacgacatctactgcgtcttcctgggccgnctcgacaacctcagcggcctcatccgccagtacggcctgt

SEQ ID NO: 275824 - DNA, 404 bp, Zea mays
tcgcccgcgtctcgccgcgtagcggcgtatgcgccacagaaactcgcacgccgcgccccgccgtccggcccgagtcgccgtcgctgccgaatccaatccatggctccgcccgccgcacccaccgcgctgcaccaccgcacgcccctcctcctcccccgccgcaccgtcgccttgggtgccaccgccaccgcgcgcgccgccagggccgcttctctcgccgtcagggcccagccggacaccaccgccgcagccgtctccacctccgcgcctgagccggcgcccgagttcaagcctgcgccggggttcaaggcgcccgagcccaagaggtacgaggtcaagtccggccaggtgggcagcgtcctcggcgcctcgctcgccatcccccttcgcctcggcaccggcgt

SEQ ID NO: 275825 - DNA, 591 bp, Zea mays
tctctcccctttccacaaacatcaagtcaagaagtcagctccgcagagatcaatcgatggtctctcattccaggaaaagcacattaagaagccaattgatggaaatggagaagatccaggtttttcatcctgcaaaagacgcatcgaggatcccttttgcacaaatgttgaagatgcaagcttctcatctacgaaaaggctgtctgagaagcccatgtctgagaagcccatcagtataaacaaagaagaggaccttgaccattgccaccaggaatcatctaagaaacctagttgcagagttgagcaagatggtcatggttactcatgcgatgaagaggctgtgaaaaagccgggttgtatggatagccacgatgcccaaggttcagatatctctgctgccactattgcttctgtgggagatggctctaatgggttaagcatgccacagcctaatgcctctgaacctactggttgtcctctcgccaatggggttatagacaaagacatcagctctccactagatgaaataagatctgagaagactgacgatatgttggccaaacctagctacaagccaattgtggtagacga

SEQ ID NO: 275826 - DNA, 513 bp, Zea mays
tctaagcatctcctgttcgcgtcccctctctctcgttcagttctttctcccttcccatgtcttcctctgattccccacgctaacaattggtatcagattcgccgttccttggcgattctcaatctggagcacggctacttcacgcgttcgcagcgacgcgcgggtgtgatggatcccaatgtcctgttcatcgttgatgagatggagaagtttgcatctatggatgtcaagtgggagaagcgcttgtcggagctggtggcagctaaggaggagcgcctgatctccctcgagcgcgtcagcggggagttggaagcatggtagcccacggtggatgtagcgatggatgataccaagttgcagctccgcaaggtgaatctgcagttggatcatgccgttctggaggcggctggcggagattctagtctgttggggaacccggatccatccttcggcaaatcggggtcgatcctgcattaggaggatccgatcagtgaggatttcactctaggcgct

SEQ ID NO: 275827 - DNA, 638 bp, Zea mays
cccacgcgtccgccaatcccgtcctacccgcatggttcctgcctgtctgtcgcctcgtgacgtctgtccaagaacactcgctccccacctgttcgctgcttcttcttcttgccaatctgctccttcttctagctagatcttggatggagctggggatgacgatggaggtagcgaagatcatcgaggtatgtagagtacgcggctgctagttagttcaccaggccagcaagcgagctccagcttcgtccgatcgatagatgcgagctgtagcagcgtggcagccattcatcagttgtcagatcttagattccccccatccccgctactagttggtggttagcaaatcccaccaagcaggaagcagccgcgagcgagccatggccatggatcccgttctgaaggtggccctgggctcggcggcgttcgccgtgttctgggtgctggcggtgttcccggcggtgccgttcctgcccatcgggcgcacggcgggctccctgctgggcgccatgctgatggtgctgctgggcgtgatgagcgccgacgacgcctacgccgccggggacctgcccatcctgggcctgctgttcggcaccatggtggtgagcgtgtacctggagcgcgccgacatgttccggcac

SEQ ID NO: 275828 - DNA, 661 bp, Zea mays
gtttttatgtatttacagaagaatttatttacaaatattttgaatgaggaagagttttggacacacacagatagagcgattataaaagcgtatgaaaaaacagaccaagctattctgtcacatactccagatctgggacaaggtggctccactgctgtaaccgccattcttgtgaacggcaggaagttatgggtagctaatgttggcgattcaagagctgttcttttgaaaggtggtgagcccatacagatgtcgatagaccatgatccgaatgttgagcgcagtgtaatcgaaaataggggtggttttgtttcaaatatgccaggagatgttccccgagtatgtggtcagttggctgtctccagagcttttggagacaggaatctaaaatcactattgagatcagagcctgatataaaagtcgaagacatagatcacactgccgagctacttgttcttgcgagtgacggtctatggaaggtgatgaacaatcaagaggttgtcgatttggccaaaaggtacaaggatccctatgctgctgccaagcaattaaccgtcgaagcacaaaaaagagatagtaaggatgatatatcatgcatcgttgttcggttcaaggtgtaaatcggtctcgaaggattttcatcgagagcaaaaacaagtg

SEQ ID NO: 275829 - DNA, 330 bp, Zea mays
cgcgttcgcgagaggagtccctacgcccgcctttccatttcctccctcgctcgcgaccaccgccggcggcgccgccgaggctgacccgcctctgtccgatgcccccacgcgcgccgccgcgccggcggcctgctcccgccgcgggaggccccggcttcggcgactccgcgcgtgtgctgctcgcgctggccgcgctctacgccgccatgtcgctcctcgcctaccgcgtcatccacatgcgccacgtcgcgccgctcggcgccgacgcgccgcgatgaaacttctccgacggacgcgtgctacatcacctccgacgcctcgctgttgaca

SEQ ID NO: 275830 - DNA, 391 bp, Zea mays
attccgggctacggcgtacgctcgagctctaccgctacgacccatgggagctcccagcaatggccgcgatgggcgggaaggaggggttcttctacgtgccgagggaccgcaagtaccgcaacggcgaccgccccaaccgggtgacggcgtcgggctactggaaggccacgggcgccgaccgcaccatccgaggcggacaacagccgccccatcgggctcaagaagacgctcgtcttctactccggcaaggcgcccaagggcgtccgcagcagctggatcatgaacgagtaccgcctcccgcccgacgacaccgaccgttaccacaagaccgaaatatccttttgccgcgtgtacaagcgcaccggtatcgacaacggcggccacgggcatc

SEQ ID NO: 275831 - DNA, 445 bp, Zea mays
  unsure (1)..(445): unsure at all n locations
attgaggtcctttgaggaagttgactcactataagaatccaatgaaatcaacgaggatgaggagcttgcggagcaaatccagagtgaatttgctatgaagatatcaaattatgcaaacattgttctcttagcgttgaaggtatacgctacaataaaaagtggatcaattgctatagctgcctcaacactggattcactgcttgatctcatggctggtggtatcctttggttcacacatctgtcaatgaagagcatcaatgtctacaagtaccccattggcaaactgagggtacagcctgtaggcattatcatcttcgctgctgtcatggccactttaggctttcaaagtatntattcaagctgttgaaaaagctggtaagtgaatgaggcttcagaataactgaaccaaagtgcaaataatggtggctatattccaatcatgatc

SEQ ID NO: 275832 - DNA, 712 bp, Zea mays
  unsure (1)..(712): unsure at all n locations
atctcggcttgagcttgaactacggattgattgattgattgggttcctggcgttagtttgcgcggttccggcagatttggtccaacaattctttgtttggccgcttgggctccggtctctcgattcttcgtagcttggtgggagggcgccggatccagcggccatcatggttgtcgacacggtcagcgcgagcacctccataatagccccccacctgttcgaccacaggtccaggggcgccggcgcttcccaccaccacctccgccggacgttccatgtcgtcgcctgccgacacctgcccaccgccttcgccggccgccgcctcgtggcccgggtcaccaggcagccgtcgtcgcgcctcgccgattggccggtcagggcgctggctatgggggtcacgaaggaggtcagggccagccctcgcagggagtaccgggggatccccggggatggtggagacatgggggacgttggggtcaccagccccacgccgtcatggcctccgcggaacagggcagatgaccccaagctgcataacccgctgctccgcctcgagcgcatgggctgcgggtggctcggcgtcatcttcgagtgggacggggtcatcgttgacgatgatgccgaattggaaacgcaggcgtggttgacgctggcacacgacgacggcaagtcgccgnctcgcgcttttgtgttgccgagagtcgaacggatg

SEQ ID NO: 275833 - DNA, 560 bp, Zea mays
agcgaaccaaaagggagaaataacataaaaagaatagagacacacacacacagctctgttcttcttattccaatcctctctcatcttgctggttcatccttgggatcggctctgtcgtcccctagctagttcgttcggtgctgtggtttctgccgctatatccaagaactcttgctcttgctgagtctggactctgggacttcagttccttgcagagccaggctttacatatcttgggtgccgcacacagtatctatgcacctttgacaacaccaatctgattctgatgacaacaacagccactatctcccgtcatccttgcatcgatctgtcagctggcgtcgcctcgtgcttctgaagacgatggccacattcttctccacttccacgaaccagagggacctcgccggaggcggcggcgacatgtcgtcgttccaccactacgcctactcggacccaccatccggctgcctcatgcctttccccgccaccatcgtgtcgtcggaaggccacgtcgcgcacggcggtgacgactgcggcatgggcgcgttcgtggacgt

SEQ ID NO: 275834 - DNA, 559 bp, Zea mays
acgagcacagacactcaagcactgagcaaagcactctagtcctagcagtagcgacggccctggcgggtgcggctcatctcccgccgacggtggtggcggctgctgctcatctacggccattcgtcggcctcgccgtcggcctcaagcccgcctggagcttgtctgcctacccgaccagagtacccggtgctgctgccgatccagcgcccttactgcactataggaaaaaggcgcactagattaataacaccatgggtccaagaaacataaggtcatgaagaaacaagcagaggtcaacggcatctataaatgaaaaagaactaggtgaagatgacaacaccaatgtgaatgcaagtgagaacgtacaggctaataaagaagcatgtggtgcagataatgatgtgactggatctcataccccaataggagaaacttgatccaccaaactcgggcgtacaaagaagagaacctcaggagtttaggatcactacaatgatttagtcgttgaagaaaaggtgggtgacatggttgtcaagaagccaatggcagcatgcaagta

SEQ ID NO: 275835 - DNA, 912 bp, Zea mays
gttgatttgactttgtctaacagagtgagaggttctaataggcacaagaacaatggaaaagatagttcagcagtgtggcagaaagtagaaaggaatgacaagatggtatctaaagcaggccatccgagcgatacacctgttcatgataagggtgcaaatgaagttggtaagaagggtgtacaggaagatccaacaagaattcgggcaaaacataatccgaataagaaagtgtgcaaacagaagccttcaaatggagcagttgaattggagcctgccaaaggagaagatgcattgaactcatgccatacattttctggacctttctacacgaagcaagcaccctttctacgccagcaaagaaactctttttcgaaacaaggttctcagtcattgaaaaactactgtgctcctaggaatggtatccccaaggtggcaaaggattacttgcagcatgaagaattacctatgttggtgctagttcatgccaagaacaccagtgataaatcaagctcatattcaagttcagctgatgaagtgggcctaactggagtcagcagcagctatccaactgagggaaatgagagttcacaacctgatattgaggtagcagcgtcagtatcttgcaacttggttccagatttggctccacaagctgcttctgatgatttccacatatcagatcctcactctttacgtcctgaaaacaagggtgcatccaacagtcggagctccaataacttgtgcacagatccttttgctgcagaagcaaaggaagctcgatgtgtgaagctactaacagagaataattcccaagaaccctgtaagtggtattctgctgctggacacttgtcacagaagttgggttcctgttggaaagaaagagacttgcaatgggatctgtttagatgtctc

SEQ ID NO: 275836 - DNA, 394 bp, Zea mays
  unsure (1)..(394): unsure at all n locations
atgcgctcacatggagactcccacacgaactcgaatcacctccgcctcgccacctcttcatcttcttccccagtagccgctgccgccaccactgcagcagccaaaccacgtgacacctcccgcgccgctcaaccccacagcatccgctgccaccgccgctcacctccccggcgctcccggctacaaccactgcaagcatgaggcagccaaccagcgcgggcggcgacgctgggttcttgcgcgcggaccagatcgacctcaagagcctggacgagcagctcgagcgccacctcggacatcccgcggagcgggtagttggcccagtctctgggacagggagccgncgcggcgaaacggccaagctgggtccggaagagctgacgccactgcaacg

SEQ ID NO: 275837 - DNA, 703 bp, Zea mays
gcgatgtgctcatctccctcctatcctctgctccccagctccgatccagcgctctgggctgtgctccctctctcctgcatgcgtgaggtgccagcggactgaccttccccatgcagctccttcctctcgctcccgctccagcttctctacgctgccgccgttccctcgcgcagcgtcgtcctagacccggctgggcgcgctcgggtcttgttggcgcggcggcggcgacccctgtggccgcagctcactcccggtgcttctctccctgcttcaatttttttccagccatggtgctcgcgccggcgtcctcgactcctcagtctggcgcgctgttttttggtccatgtccctgtgcgcgagctgattcagcttgtcggtcatccactggctcctcggcgctccttgctcggcctccgacggctgtcgtccctcgccacgccctggccgcatcgctggctcccctcggttccagccatcagttgccgcggcatcctctcagttctcggtcagagaattcgcgcgccctcaagcgtcagccgcgtcgacctccctgctcgctgttctccagctcgctctggccgcggacaccgtcgagtcgtcgaaccccgtcctcctctgctcgactcccaagcaggctccctgatccacgtccttctcgccgtcgatttcccacgcctgtggccacggcactcgctcctcggat

SEQ ID NO: 275838 - DNA, 1702 bp, Zea mays
gatccactcgtggcgccgcttgcctcttgcgccttgcctgctttcttgcctccctgctccctccctcctgctcctcgtcgcctcttctctggttcttcctggtgtttgccggagcgaggctaggcgcaaggggagggagctgcgctcagccagagctcatcggcgctacgcaagcgcgctgcctggtgtgctgcattgccgaactatcaggggaaaacactgaaataatggaaatcagcttattgcataatgaatctgatgcaggaagcaccagtttgctaccgctgccattgttgtcatatggtccaagatcaatggttccaatacaagtaccaccatcatcagactttgagagtatcctgtcaccagagccaatctacagtgatcttcagttgaaagagatgaactacaatgcagcagcaatggatgaaagcactgagttccttcacttgattcttagtggcaatgatgaaggatacaataccacaactgaattacaagtttgggatgttgtggacttctatgtctcagaaaacttttctgctctccaatttgatagtttgatgggttttacaaatgaagttagtacttcctacaatgattgtatgaatttagttgacatggtagagcggcccgtggctcgtctgtctctagatgatacaccaaaacccagtaacagtgatgatgcggttccggcagacaatgtcacaatggaccctgatgaaacatccttataccttcagacaaaaccaacagattcagaaacagaaagtagttctgccgcaggagatgttgaaactgaatatctagatctaaagctactttctagatgtatgcctgatttaatggatgttgactcgcccaattgcttaccgaaaacaccagtgaaaaaaaagcatgtgactcttgtgcttgatttggacgagactctggtacattcaacattggatcactgcgacaatgctgattttaccctagaagttttctttaatatgaaaaatcacacagtgtatgtgaagaaaaggccttacctgaaagtgtttcttgagaaggttgctcagatgtttgagcttgtcattttcacagctagtcagagagtctatgctgagcaacttatagataaacttgaccctgatggaaaatatatctcacggcgtatttatcgtgaatcttgtgtattctctgacggttgctatacaaaggacctgacaattctggggatcgacttggcaaaagttgcaatagttgacaatactccacaggttttccagttgcaagtggataacggcataccgattaagagctggtttgatgacccctcagatcaggaactgatcgagttgctcccgttcttggagagcctcgtggattcagaggacgtgaggccaataatttcgaaggccttccatgacaaacctgagtagaaatagttctagaggcatacggatgtatcattcagtgaacctctcgctgaagttagcttcgctccacacggtgcaggccattcttgggaagttaggtataggatcaagattcaccatttatgttatgttagctgttacaaatagcaagcataaactgcggtcgtcgatgaaaatggcttgtgtgtgtatgtctcttcggtgttccgtgtcacagatcattgtacagaaacgaacaatagtgctgaataaagtgatctgagtgcaattttgctcagtac

SEQ ID NO: 275839 - DNA, 469 bp, Zea mays
ccctcgctcccggccacgcgtccgcttgcctcttgcctctggcctcttgcgccttgctagcttgcttgcctccctgctccctcctcctccctcttcctcgtcgcttctctgattcttcctggcctttgccggagcaaggctaggcgcgaggagagggtgctgtgctcagccagaggtcatcggcgctacgcgagcgcactgcctgtttggccttttcctactggaactgcagtactttgaacatgctttttgcaaatacttgcactaaggatgaataaaatgttaagcaacgactgctctagggacacaggaacctcatacattttgcaagaccactgaaacactggaacattcacaccctcaagaggttacggctacactcgataaaaccgtggcggggtcaacgctaataagtcatcaaaatgtgtgctgcactgccggagtatcaggggaaaacgctgaaatcatg

SEQ ID NO: 275840 - DNA, 453 bp, Zea mays
cttgcctcttgcctcttgcgccttgctagcttgcttgcctccctgctccctcctgcgcccgcttcctcgtcgcttctctgattcttcctggcctttgccggagcaaggctaggcgcgaggagagggtgctgtgctcagccagaggtcatcggcgctacgcgagcgcactgcctgtggacacaggagcctcatacattttgcaagaccactgaaacactggaacattcacaccctcaagaggttacacttgataaaacggtggcggggtcaacgctaataagtcatcaaaatgtgtgctgcactgccggagtatcaggggaaaacgctgaaatcatggaaatcaccttattgcatgatgaatctgatgcaggaagcaccagtttgctaccgccattgttgtcatatggtccaagatcaatggtttcattacaagttccattcattattttgacc

SEQ ID NO: 275841 - DNA, 565 bp, Zea mays
cccacgcgttcgatagtgacattggttccattggcaaagttacgcgcccaatttttcgtgagacgacattgaccaaacctggaacccaaaagcaaatggtctttaaacttctggcagcattacggcactcccaggtactggatgcagacgctgttacgcgagtctagtggtgctatgttccatgcaacgacaatcagctccagctactcaggttcacttgcagcgtctgcgattacctggcaggactccgagaacagcttcctaagagtaaaggtcataaacttcgggtcagatgctgtgaccctgacaatctccacaagtgggctccaggccagtatcaacgctctgggatcaaccgccactgttctcacatcagcagatgtgatggatgaaaactccttcagcaacccaaccaaggttgtgccggtaaagagcgatctgagcaatgctgcagagcagatgcaggtcacgctggctcctcgctccttcagctcgttcgatctcgccctggctcagtccaagcttgtagcggagatgtgagctaggctggtacactagtatacaa

SEQ ID NO: 275842 - DNA, 538 bp, Zea mays
cccacgcgtccgcccacgcgtccggttgtcgccgagaagactccgatccagcacgtccttcagcccccgacgatcgcctctttgcttgccattgccatcggcatggctcctgtcctgaaagattttgttttcggggctgatgccccgctctcgttcttcaccgacagtttggagatcctagccgctgctgtggttccgtcggtgatgttgattctcggaggcatgctcgcggaaggcccaaaagacaacgccttgggcatgaggactatcatcggtatcattgtggccaggctcttggttctcccatgcattggcatcggtgttgtgaccctggcagacacgttgcatctgctcctgggaggaaaaccatatggaccgctttgggctctccctgcagtactcccccccgagtgctatcctgcttggagcgatcgccagtctcagaggctatggcgtcaaggaagcatccgcccttctgttctggcagcatatttgtgcggtgttctctctttcactctacctggttgtatacttcaag

SEQ ID NO: 275843 - DNA, 527 bp, Zea mays
  unsure (1)..(527): unsure at all n locations
tcctcgcgtccgggtgacgcagcgccgaccgcgcacacactctccagactccgcagggacccaacgcagcggtcaaacaaaggcagcggcagccggccggcagcggcaacggcgtaactcccaagtcacctccgcctcgggctccaaaaatccccacccgacctcgagactgagcggaccgacggtgatgtcgtcgtcggtgcccccgccaccgccccagcaggagctggagtcgccctccgccggcggcgacaaggtcctggccgcagcgcagcacatcgtcaagtccctcgccacctccaagaacgccgctgacgacatgatccgcatactctccggcttcgacaaccgcctctcctccatcaccaacgaccacctcttcccctcccccgaccttaccgncgactccgcctccgagatctccgccgccgccgcctccttcgacgccgccgaccagctcatccagctctgggacgccaccccggacgcgctcgtcttcgaggcccccgaggacgacatcgcgcagt

SEQ ID NO: 275844 - DNA, 383 bp, Zea mays
atcattatccccgttccctctgccgtcctcgttcccggccgtccgtgccgaaggaagcatcggctgacccagcccatgcccatccacctcgctccctcgaccgacccacccagcccagcgcgcgctcgcatggcgatgctgctccgcaaggtgtggggctccgtgctggcgcgcgccgcagcgccgggggccgacccgcgggcccgccgcgcgcaggcgcatcgcgcggagcagtaccagtaccacggctcgctgtcgctgggcgcgctcgacgccgtccccaccgacgtgctcgcccagatcctgcgcctgctgggcccgctcgacgccgcgcgctccagcgccggctgccgcgcctggcgcgtgctcgcctccgacaacgg

SEQ ID NO: 275845 - DNA, 534 bp, Zea mays
cccacgcgtccgccaagtctgtcgctttggaaaccgttggtgacaccataaccactcctgttcgtcgtgcacccacgcgggcgaacagtgaaaggcatcgtctcgacgtctcgtgaccgctggactcgccgccgccccaggctagctcgatgattgggtgcgccaagccgctcgcggcgccgctgcaggcatgggctcgcccgccgtctcccgccggtcgccgcctccccccctcgttctgcgcccctgacacctccccagctctcacccgcgccgtcgagagcccaggccagtctcagtctgacgacgccccgccaccacgctccggtgaggccgcctcgtccctggcgccgcgcgcgagctcgcatctcgaccgatggtcccggtcgcgggcgctgcggtcgggccaccggccggcgctgaaccgcgcggctctctcctcggcctcggtctcggcgccgccggtgatcaagtcgccgcggcccgaggacgctgccgtggcggcggaagatggcgaggacgacgacgtgtgcc

SEQ ID NO: 275846 - DNA, 550 bp, Zea mays
aatgattaatgtctgtggtgaaggtggagaatatgaaacactaactcttgactgccctctatttcgtaatgcaagaattattcttgatgactctgaagtgatactccactctgctgattccattgcttctgttggaattcttcatccacgggcgttacatcttgagcagaagccagattcatctgatagaattggggatgggtctgccgtccaagagagtcctagttgcgtatatgaggttgatgaagttaccactcacgatgatgtgggagaaaaacaggccctggggccagctgctgatgcttacaccaatgttgacctatgtatctcagagacagggaacaatttgcgttcaatgagctgttggattcaggatccatccagagctatcggaaggcctgaaggcagaccttatagcagttttgagcagaattgaaaaccagctcaaggaagaagggttaggttgggtgaatgttttgtacgttcacctctacatttcaagcatgaaggaatttggattggccaatgaagtttacgttagctttattac

SEQ ID NO: 275847 - DNA, 487 bp, Zea mays
gaaaaagaggagcaccactcgtggggtggttaaaaccccgagaacaaacttgggagtagcagctgccagccggaagcgagcggagaccgaggggagagggggtgaagaagcaacgagacgcagcgagcaagcgaaagcataccagagcaccaagcatagggacgcgcgcgcttctccagttctccctccctgccctgcaaggcggctgcaactgttccagctagcccctctcccagcctctgcgtcgtagacgtggtagtagcagccgcagcagcagaagcggcggcgagcatgctcttggcacccctccccggcgccgggcggatctgccggagggcggcggccggggcgcttggagcgcggcgctaaccgcgttcgacggacctcgggatctgacgccgggcctcccctaatcggtcgactccatcggtggcggcggcggccgaggcgccagcagccggatccttaggcttcgggacaagggaaa

SEQ ID NO: 275848 - DNA, 534 bp, Zea mays
gtgctgtagatacgagatcccgcagcgttcgttgttgcaccggccggctagctgctggcttgcgacaggactaggactaggaggaggaggaggtgtgtgactcctgctgccagaccacacaagctcctcctccgtgagccaccgcggcagcaagaataaccttgacgatcaagaagaagcagaggagcacgacctgctgcctccgccaggaggggacgacgtcgttgacgcgcacgacgacgagtgcaaggacatcggcgtcgtgccggacgacgaggccaagaagtcctcctccgtcgcgcctagcgctggccggcggcgatccgacgatagcctcatccgagggcgccgaggaagcgaaggagccgttccagagccctgctgacgccaaggccaccgccgacgacggcggcaagtttgctgctcaggtggagcaggaggacgaggcggaagatgtcatgaaggagaaggacgacaaggcggcgcgtgcgcccagtggcgtggtgttcagcggggggaagctgaaggtgaacg

SEQ ID NO: 275849 - DNA, 874 bp, Zea mays
attagcctatgctgtggaccaaggttttcaaaggggaggtgaaccaccgtaagtgtttaaggcgcctaatggctaatttcaggaaaaaaatcaagggtgatgtgctgaagtatatgtggccttgtgcatgggcatgtacagatcatatgtatgatacactaatggagaaaattgcagcatctagtcctaaagcaattcactttctaaacaataaccacaagctaaaatggagtagatctaaattctccaaagaatgcaaggttgattatgtgaacaataacatctcagaatgcttcaacaattggattaaagattacaaagatctcccagtcgctgatctaatggataagattagggagaaaattatggagaagatttatacaaggcaagagatagccaatcgaatggaagggcgtatcctacaaagtgtgatacgtgagttgaacatgaagagcagaggattgcactatcaaatcgtgaagagtggactgttgtcagctgagatatcaggaataacaaaagaagggaagaattggagagttgcagctgacattaagaaaagaacttgtggatgtggacagtggcagatttctggaaaaccttgcactcatgctatagctctattcgggaaacgtacaaacctgtaacattgaggactttgtggatgactactattcaattgagaggttcataatggcttatcagtttgtggtcgctccgatgggtgacaagactcaatggccaaaatttgaccctgagtttaaaatggttccttcaaagctagaaaggcctgctggtagaccaagaaagaaaagaatcaaggctagtgcaaaagcaagaaaaagacgcccatatcagtgcaaaacgcgttttc

SEQ ID NO: 275850 - DNA, 383 bp, Zea mays
gtgcgcgctggcgtcaagaacgccccgttgggtttgttccttgtggctaaaggagaaggaccggcagctgtttaacctggtggagtgtgacctggagaagagccgcaggaaggcatcgtttcagccatcggcaatgcttccttggtggtgtgctccatcggtgcaagcgagaaggagatcctggatgtcaccggcccataccgcatcgactacatggccaccagcaaacttgtacaagctgcgactgctgccaagcaggtggagcacttcatcctggttacatccctggggaccaacaagatcggcttccctgcattcctcttgaacttgttctggggagttctgttctggaaaagacgagctgaagaagcactcatcgcaag

SEQ ID NO: 275851 - DNA, 602 bp, Zea mays
caaatccagcacctctctcccctcccccttcctcccgtccccgtcgaccgtcgcatcggaccctatcctccccagtccccaccactccaccaccctctccccgcctcccgctgcgaccaccgcacccgcgaacttggcgggccgctcggcgctgcacaccaagccggggatggccgccgcgcttgcgagctcgccgcttgttcacctaactacctcccgcctccgcctccccaggccccaggcctccgcttccagttcgggtccagtctgctcgatcggcgtgtgcttgggatggaggctcaaggtcgggtggagagccctgaggcggcgcgaccggcttcgatgcttctccaccgacgggggcggcggggaggagggggaaaagcgtggcgaggaggaggcatcggcaacggcggcggcatccccggcctcggttccagcggagacacaggtgggcgctggggaggagctgccgtccgagcggagtcggtcagggagcttttcttcctcgtcctcgtcgtccgggactactggtgtattatgtgagccaccgctgttgagttttagtggtgataatatcgatccagtaaaactgttggact

SEQ ID NO: 275852 - DNA, 607 bp, Zea mays
ggccttctttggttcaagaagggaatgtaccccaaccggaccaagaaccaggattcggccgctttccgtttcctcctccaacggtgcaccagtgccatccctgacaacagattcggagaagaagggcccagtgataatggaaattccactggaccaaatccggaggccactgatgcgaacgcgggccaatgatccagtcaaggtgcaagaactcatggacagtatccgtgtcatcggccttcaagtacctaatgatgtgttgaagtccatgggtctattatggctctctggatgccaccgctacgaggctcaccagcgcccttggtctcccaaccatccgctgcaaagttcgccgtgggacaaaggaaacactgaggcaccatatgcgatgagttatattttattcagttacaaagtgatctgtgtatctagagctaaaacagaagcttccatggtcttttcgtcgtctcgtctgcaattctccatacctgtaaatgttgtccaaacagagtggtgaatagtacttctgtacccagcagcatcagaaaatgttaattttgcccacaacactcttttcgatcagtggatggatgagtaccacccgctc

SEQ ID NO: 275853 - DNA, 403 bp, Zea mays
ccgggcagcagcacggcagccatggcgtcgagttcgaccctggatttggcgatgggccccggcgccctcctcccccgcagcgcggtcccgtacgcctccttcgctccaggaaggggaaggagcgcgagcggaacgaggagcaggaatctggcgctctccgcttcctcctccaacggtgcagcagtgccatccctgacaacagattcggagaagaagggcccagtgataatggaaattccactggaccaaatccggaggccactgatgcgaacgcgggccaatgatccagtcaaggtgcaagaactcatggacagtatccgtgtcatcggcctccaagtacctattgatgtgttggaggtcgatggggtctattatggcttctctggatgccaccgctacgagg

SEQ ID NO: 275854 - DNA, 834 bp, Zea mays
ccttgatgaaccaaagtcagttttttatgatacacgtgccgataatgatggtgaaccgttggagttctgttctggagaaggcttggtaccagagggttttgaaatgtgtgttcggctaatgcttcccggtgaaaaatctattgtcacgtgcccaccggattttgcatatgataagttcccaaggccagcaaatgttcctgaaggagctcatgttcagtgggaaattgaactacttgggttcgaaatgcccaaggattggactggcttaactttcgaagagatcatggatgaggcggacaaaataaagaacacgggtaacagactgtttaaagaaggaaagttcgaacttgcaaaggcgaaatatgataaggtgcttagggaatataaccacgtgcatcctcatgatgatgaagagggaaaaatctttgctaattcaagaaattccctacatctaaatgtagctttttgctaccagaagatgggtgaatacagaaaatccattgaaacatgcaataaggtgctggacacaaatcctgtgcacgcgaaagctctttaccgccgaggaatgtcctacatgttactcggggaatttgatgatgcgaggaatgattttgagaagatgattaccgttgacaagtcatcagaaccggacgctacagccgccctccttaaacttaagcagaaggaacaggaagccgaaaagaaggcgaggaagcagttcaaaggactctttgacaagaagccaggagagatatccgaagttggtgtagaatcagatggtggaaaggatgcgggtgatgcaagaggcaacggtggtgaggcaacgagtgctga

SEQ ID NO: 275855 - DNA, 496 bp, Zea mays
gccgttacctccaccagtctgtcccgttccccaccggggcgggttttattatatactcgggctacacctgcgaccactgctcacccgtcgcggccatgactcccgcatccacctcccctctcgccgccgccgtcctgcccacgaacttatcttccttctctcgctgcccacctcgccgcctcccgcgcatctcctgcctggcagcgcccgaacgcgggggcaacaatgcgtcgaacgcctcgccggcaccgcagcagccgaggtggggtgccgcggtatccgccgcgctcgcggcggccgtggttgccgcctctatgccagcttacgcggacctgaacaagtttgaggccgagcagcggggcgaatttggcattggctctgccgcgcagttcggctcggccgatctcaagaaggctgtccacgttaacgagaacttcaggcgggccaacttcacatccgctgatatgagagagtcagatttcagtggttccacatt

SEQ ID NO: 275856 - DNA, 342 bp, Zea mays
cctattttcatggtctgatctacacatagaacactttcatatttctgttgttgttgttgttccagggagccaagggatggaactcttgagcactaaacacaagttggtcgaaggaaaatcatgatgagcaaagtcattgttgtgttaacgttttgggcatgccaagaactatttttttggttatgagtttgtcaaacatatgttgagtttgtcgctcatttcttaagagctatttctgtgatcgaagaaatttgtttattttagtggcatgaataaaaaacccaagcaaatccttggtcccacagaaagaaataaaaaacaaaaaaaaaaaaaaaaaaagaa

SEQ ID NO: 275857 - DNA, 318 bp, Zea mays
cggagtttcggacttggaggtgatctgacctgtgaagggctgagggcggaggatggtggcgggacgaggagggatgggtcggcggcaggagcggcaggccatgatggtgacgttcgcgcttcggcgctgctcatgggcaccgccgtctacttccgcatctgcgccccgccagtccagcgacccctccttcaccgccgacgaccgcgaggagctccggaggcaatttgaacaagcaaacctagaagccatggatgaatctgccgaatggaggatgaaatatgataaagaaatagagaaaaacaggcagttgcatgatga

SEQ ID NO: 275858 - DNA, 390 bp, Zea mays
cccacgcgtccgatccttgttcagggttccgatttccgccccaccatccgccgccgccgacgatgcttcgtcggtccatccttcgcagcccttgcactacgtactatcgtagccctcttttctttatagctggtgttgtctattttgattcggtaattcaggccccggagaatgttttcttttgctttatgcatgcaaaggtcgatttggtgataggagcggggatgattttgtggactagagtttccgatactaccacggtagtatttgacgaccaaacccttggctgtctgagctcctaaatcacaggcttcgaccacttcgctggttatatatatacatgcgagatctgcggtctttattttcttctgcaatgcaatggtatgatga

SEQ ID NO: 275859 - DNA, 454 bp, Zea mays
cccacgcgtccgcccacgcgtccgcatcggtcatctactccagtctcccactcacctatctcgcagcgcccgagcaatcgccacgcccacgccccaatggaagacagcgccaccaatggccatggggttgtgacggctgtcccggcctcgtggaacttcgagccaaacgagaccctcctgggtcttccggcgctctcggttcgcggcgtgctgaccagagtcatggccgggatgttgcccgacggtgggcgggcggtggtccggttgggcagcggcgacccgacagcgttcccgtgcttccggacggtgccagagggcgtggacgccgttgtcagcgcggttcaattcgggcagtacaactcctattccactagcgtcggccttgagctcgcacggaggtccattgcttagtacttatcctgtgatctgccatataaactgtcacctgatgatg

SEQ ID NO: 275860 - DNA, 444 bp, Zea mays
cggacgcgtgggttccatttcttatcccctcctcctcccagtcccagccatcgcctcccgatggcgtccctcgtcacgctccccgccatcgccttctctaaccccgccacagcctccggcgctgtccgcctacgcgccgcggccttccgctgctgggcgctccggcggcgcgggtgggcggtggcggctgccgtggcctcgcccaactccgtgctcagcgagcacgccttcaagcggctccagctcgggagtgacgacgaggacgaagaagggccgtacgggagcgacgccgacgaggggttccagggggacgaggaggagctcgccattgccaggctcggcctgcccgacgagctcgtcgccacgctcgagaagcgcgggattacgcacctcttccccatccagagggctgtgttgattcccgctctcgagggccgtgacctg

SEQ ID NO: 275861 - DNA, 789 bp, Zea mays
aatcctatcggccacagcacagaccaggccgccgccgccgccgccgctctgccttgttcgcagctctcttggccgctcgctttcgcaacaggattatacccacccaatcgaccgacgcaatcgaaaccgcctcccatctcatccgtctctctcgaatcccaccgtgcgctcactgcgatggacggctcatccaagcggatcggcggtggcggcgacgacatgcccagccccgaccacgaccagaacgccagccccaacgtcccgccgtccgccgctggtgacggcggcgcatcagccactgcggcggcagcgcccgccgccgggaggcggccgttcaccagcctcagccaagaggaggccgacctcgcccttgcccgcgtcctccaggagcaggagcgggcgtacatgatgctgaccggcggcgagtacgcgatctcggacgccgagagctacgactacgacgaggaggaagacggcgatgggagcgactacgaggaggaaggcgaggcgctcgacgaggacgagcaggttggggacgcggaagcggagggggctgagggggacctggacctggacccttctcagtacgaggacgacggggagggcgacgtctccgacaggctcatggcgctcgtcgggatcggtgattggcgagcaatggagcaggatgatgctggggacgaggaggacgacgaagatgctgaagttcatacacagggtgcatgggaagatgttgacccagacgaatactcttacgaggagctaattgcgctgggtgaagttgtcggt

SEQ ID NO: 275862 - DNA, 450 bp, Zea mays
gaactgccgcctcgacccacgcggccgaggtacttgatgaatcctctttattacatcgcacaggcgaaacatactgaactgcgtggtgggctgtccatggagtttaagaatgaggaagctacaggtcctggcgttctaaggcaatggctctgtctagtgtgccaagctcttttcacttcgaagcaagttctcttctcaccctgtccggaggataaaccaaggttctacttgaacgaaacatctgctgtggatccactgcacctgaagtacttcacttttgcggagcgcataattggattagccttgatgcataaagtacaagttggagttgtgatagaccgtactctgttcttgcatctcgctggcagaagtattaccttagaagatatttctgctgcagatcctgtcaaatatgcaagctgtaaaaaaattctagagatggatgctgct

SEQ ID NO: 275863 - DNA, 693 bp, Zea mays
tcgttgacgcgtgggtcaaatgcaagtgatggtgctcaagaaaactgggttgattttgattctgacgtggaaaatgctagcatcaatgaaaattcacacagtgacactgatgagaaggaatttgaggagccagtttctgattgggaagatttggatgacaatgctcttcaataccaattcagtccttattcaaattcagatgaggtcagtcaaaactcctcatacaaaacagtttgccaagaagtggagcttgctgaatgcattcctccagttgtcaatcctgcgagtgaagaaaaactcaccatgcttgtacataatgagcataaagctgctgtgtgtattggcaaaatagagagtgaagttaacagtatcatggatggtgttgggctacagcctgaaagacacactatcctgaaaaggctgaaagagttgttttccatgcgacagcaaggggtttcttcgcaagattgtgttgagtcaagcccagatcaatgtgtacctgaagaaacaaaggtcaatacaaacctttcctgtgacccattagatgtcactgtggaagacaaaacctcttttcaggaacaccatggagaatttgatgagcttcgacaaatcattgctgatttatccaagagggctgaagcattggagaaaaagcagaaaggatcagatcaagatctactttttttgagggaa

SEQ ID NO: 275864 - DNA, 524 bp, Zea mays
  unsure (1)..(524): unsure at all n locations
gtcggccaacaaacgtttaagccaacctccctggcaagcaccgactgctcctgctatatactctgcctcacaagatgatagagcaactactcgctgcttttgtgattgccaagtgacaggacattcgttgaggaaaaatatcacacctgtagtgctcttcccgtcatttgcatctccaccatggtcgctgtcactgtacccagtcagacttagttcttcacccatcttgttgtacacaagtccatggttcactgtccctgcaatgtatctgagaactcgcttcatagccaccaagtgttcttgtctgggatcctgcatgaaacgactcaaatatccaactgagaaggcgagatctggccttgtgttcatcagatagcgcagacttccaatcaggcttctgtacttggttgcatcaacctgaggtgaatcactgtccttcagcagcttgagccttgttccattggtgntcacttgngtacaggtgctcagtcctgcattctccaatactttcacagcataggatg

SEQ ID NO: 275865 - DNA, 591 bp, Zea mays
ccaccacggcaccaccacactgtgcagcagcctcctttcgtctcgtagttggctggggttgccaacgcgacacctcgtcggaatccggtcgcgcgacctccacttctcgccggccggagcgggtgcgccatcaccatggacccggaagcggtacggaaaagcctggagcccaccgcaactgtcgaaaaaatcaccggctccacccctgcgcggctccacttctacgaccccttcgtcctcagcggagtcagcatcgaagccgccgagcacggtcgcctcctctgctcctttgtcgtcacccctcgccttgcgagtcccgcggggtacctccgcagcggtgtcacagcgacgctcgccgaccagctgggatcggccgtgtttttctgcagcgggctccccagcagcggggtatccctcgaaatcagcgtctcctttgttgacgcggctgccgtcggggaggaaatagaggtcgagggaaagctgttgcgtgccggcaagtcagtcggtgtcgtctctgtcgatttcaggaagaaaaagacaggaaaactgatggcgcaggcccgtcacaccaagtatcttgtggcatcaagc

SEQ ID NO: 275866 - DNA, 692 bp, Zea mays
agaagaggagatgagggccaagaaggaggagctgtactgtgtggcgtgcaataaagagttcaaatcggacaaacagtggaagaaccacgagcagtcgaagaagcatagggataaggtttctgaactgaggatggcctttagggaggaggagtctttgaaagaggcagaggagggggaaggtgattggaatgaagttgatgtggggtttgattttgaggctacacaggagtcagatgatgagagtgcattttcagatgctgcagaagagttagctgaagaatttgaggaaggtttggaggtgcatgataaagagaacggtgataaggatttcgatagtgcagagcaggaggttgggtcatatgatgaggcaagtgtattggaggcaatgctatcaagctgcaagaacagaaagggtggttatgtggctcctccagaggaggctttgcctggtactgctgaggatgacgatcatcatagaagttctgaagtttatcatgcaaaaaggaaaggacgcaggccacgggcagcaaagaaggagcaagatgaaagtaattatgctggcaatgagcatcatggtaaatgtgaggtttcagcctgagggttcggtccatggtaatgatgttgatgatatcatggaagggccatccttttctaatgtcaacaatggttcagtaagcaaaggagataagcag

SEQ ID NO: 275867 - DNA, 679 bp, Zea mays
atccgttggaattgaagctatgagccgaggatgttcagaggcacatttcgttgagatggatccttgggtcatctctgaggtcctcaaaccaaatttggagtgtactggatttcttgacgtgtcacacatacatatgctccgcgttgaaaatttcttggccaatgccgaaaaatctcaaggtagatatccttcctttgattacattagtgtaacaccaccatatctggaggtcaactatagcacgctactcggccaacttgcaaggtcaccattggttggaaaagactgcttcatcctagtcgagtacccgctgaaaacagacatggctgaatcctgcggaaaccttgtaaaggtagctgacaggaggtttggtaggaccaacttgctgatatatgggccaacttggtcagagaaaaagaagaaaagatgatttctgaagggggggttcaggtgtaatgataatcacggttgggaacggttaaggtttcaagatttgcacaggggatacttggcctagtgtaaggcataagaaggtggttgatcttggttcactgggcctatccctgattaacttgcacagcacagagagctcgcatttcgctttcctttgtggtcagagatccacatccgagaagaggggggaaaccaaaggtcctctaccttccaagaatcaatatcg

SEQ ID NO: 275868 - DNA, 833 bp, Zea mays
ggagaagagagaggagaattttcaatgcccccgcgcaccgtcatcactagctagtggaggggcggacgagaaggcgaggagctgaggggagagaggcttcacagagcttgcttgagcctggagggggctgccgctgtttgtctctccactccacccaccagcagttacctcgggagggcatggcaaaatctggtgcctcctttccggagtccagttggatggagagggatttcctggccgcgatcggcaaggagcagcagcacccgcacaaggaggaggcaggcgcggaggaatctgcttacttcggcggagcaggagcagcagcagcagcccccgcaatggactggtccttcgctagcaagcccggcgccgccccggcgttgatgtcgttccagtcagcttcgttaccccagatctcctccttcgacggggccaagaacccggcccctcgtatcctcacgcaccagaggtcgttcggccccgacagcacgcactacgccgctcgcgcaccctacgcagcatgcgctgaacggggctagagtcactgcggtctcgtcgccgttcaaccagaacactccgatgttcagggtccagagctcgcctagccttccgaacggtactgcgttcaagcagccgccttttgccatcaacaacaacgctgcggccagctctactgatggtttctatggaacaaggtactcctagtttatctgctgttaccacagtgacttataaaagtggctgtggaattagtatcgactgaaacattgctcgttttgcctgtgaagggatgtggtgaggccaaagacagtacaattgacgatcctgtatgc

SEQ ID NO: 275869 - DNA, 400 bp, Zea mays
cgacggtcttccctcacaagattggcccagccgaggagacattgatgtgaaagatctgaaggttcggtatcgtcaaaacacgcctctaatcttgaaaggcattactgtgagcatcaaaggtggagaaaaggttggagttgtgggaaggactggcagtggaaagtcgactttggtgcaggctttattcaggatcgtggagcctgcagatggccatatcatcatcgatggtgtcaacatctgcactctggggcttcgtgatctgaggtctcgcttcggtgtgattccccaagaacctgtgctcttcgaaggaactgtacggagcaacatagacccagcacggcggtattccgaggctgagatatggcaagccctcgagtgctgccagctaaaggatatagta

SEQ ID NO: 275870 - DNA, 643 bp, Zea mays
ggagagtggcagtgctaggtttgggcttgaggacgtcattaaggaggttgtgggaagccagagaagggcagatggatctggtgagcccggggatagcatggaggtggacgagcagaaggcaaaagaagttgggatagagttgcctcacgcaactgatgtgctgcacaaaaacgggtcagatggactagaaatgaacgatgtttctggattgcgcactgttggaatcctgaatacatcttctgcgaaggaaagtgacgttcatagtttatccaataagatgaaacatcctaatatttccagagagcagcaaacaaggacaagtaacagtaatgctgctcaccatgcaacaaatagtattactgatcaaaccacagctttgccagatgctacaattcgcatcatcaagaaccagcttacgacagcaaagatgtaccttggattgtttgcttctaggggtaatcatggcttcacaagggagctccgtgcacggatgagggatatacaacgagcactaggcgatgcaaggagtgatcggcaattacctcataatgtccacagcaaaactagagcaatggagcagacactggtgaaggtcaggaaaattcatgatggctgctcaagtgctgtgaataggctccatact

SEQ ID NO: 275871 - DNA, 296 bp, Zea mays
tcgtgtagctcccctctccctgtctcctcgtctgtgactgtgcgccgccatcgcccgtcgaccagcgccgtccgcccgctcgaaaactgagacgcacgctgcccgcgcatcgccgtggcctgctccagtctgtggaaaagtgacgaaccaactcgtgggaattctactctcgaggccgccacctccgcctccgcctccagccctccaccgactactgtctggaactggaagtgtaccactactattcaattggccctagccctcgcatagcacgatgccgcgccgctgcttgagtt

SEQ ID NO: 275872 - DNA, 516 bp, Zea mays
tcgaacattggccaaggaaggagggcccctttttagtatctccttggcaattgaatgatgaaatggagtaccaatacttctttttaaagaaatcttttgatgatggtggctcatgccttggcccttttgaaccttcacccgtaataggggtggtaatggatcgcgatccaaatgttccttcacaaattcttaggtccttaaataaattttagttcaaaaatgaatagaaatagagcccgaacctaatccgagccttaaattttatagtgtaaaatttagagtccattgtcacccctccgtacacagctattactaatttgttgctgtattgatcatagcatgttttgacctcaggctatgcatgaataattgttctgaatcttgtgcatgttttgacctccagcagaggtttgtaccactttaatttagcagtttattctacatttgcttatgaacggacttggatagctattgtgtaggaggagattagcatggtgtaagaggctgattttaatt

SEQ ID NO: 275873 - DNA, 1148 bp, Zea mays
caccgccctccctcgcagggggggatttttacagagccagagcctttctttccagcactgcagcagccattgtactcatcacctccttcccacgcagcgagaggatgacaccacgaggcaaataaacccagacgtagttcagctagccgcttctacctccctctccccccccgcctgcgcgctgccgcgagagctcgttcctgatggggaactgcgccggcgtggaggggaacgccgagatcaacccttccttcagtgcccccaattcctcagggaccgccggttctaagagcgtcagcaagaacgcggccgacaccggcaccttcggcaccaagacgtccggctcgtcgtcgtcggtgccgccaacccctcgtacggaggcggagatcctggagtcgtcgaatgtccgcaagttcagcttcggcgagctcaaaggctccacgaggaacttcaggccggacagcctgctcggggaggggggcttcgggtccgtgttcaaggggtggatggatgagcgcacgctcgcgcccgtcaggccgggcgccgggatcatcgtcgccgtcaagaagctcaagctcgacagcttccaagggcaccgggaatggctggcggaggtcaattacctggggcagttatcccaccctaatctcgtgaaactcatcggctactgcttggaggacgagcagcggcttcttgtgtacgagtatatgccgagagggagcctggagcatcatctcttcaggaggggctcgaacttccagccgctcccatggaacttacgcatgaaggttgctctcgaggctgccagaggtcttgctttcctgcacggcgaccaggccaaagttatctaccgcgatttcaagacctccaatatccttctcgactcggagtacaacgcaaaactgtctgatttcggtttggcacaggacggtccaagcggtgataagagccatgtttctactacggtcatggggacacaaggatacgctgcccctgaatatcttgcgacaggccatttgacagctaagagcgatgtgtacagctaccgagcggatcttctggagctgctgtctggtcagcgcgctctggacacgaaccgtgcgaccggtcagtacaatctggtggagtgggctagaccttacatcacc

SEQ ID NO: 275874 - DNA, 1030 bp, Zea mays
cccacgcgtccgcaaaaaagaaaaaaacctcaaagagattcctctaaccaccaccaaccgtagacgatcctcctccgccatgatgcgggacggcgtgcctccgtcggtggccggctccggcggcgcggcgggcggcgacgggcccaggcgatgctcgcagtgcgggcaccacgggcacaacgcgcgaacctgcacggcgcggcccgtcaagctcttcggcgtgcgcatcggggacaagcccatccggaagagcgccagcatggggaacatcgcgcacctcgccgcggagggcagcggcggcagggaggaagggtacggctccgacggggagcgcccgcacaagaagcgaggtgaggcatggactgaagaggagcacaagaagtttctgcttgggttgaataagctagggaaaggcgattggcgtggtatatcccgtaaatatgttggttcaaggacacctactcaagtggctagccatgctcaaaagtatttcaatcgccaaacaaatgtgcatagaagaaagaggtgatcaagcctattcgatatggtgattgatgacccgtctgatcaacttccgctctcgcgttcatcttcacaagaaatggagcagcaacatttagatgatccacagcctgttgcagccctgcctgcacctgtggtctctccagctactgtggtacctcctgtgcctgtggaagtgtctgcttcagttccatcgccagttcaggtcccagttccagtttcagccccagtgatgacatctcagcctatggaacaggactcagataccacaagttcaattgctggagaggcaggaacggtgatgccaggagccatgcccccctatctttatccaatgatgattcctcctccatactaccatactgcttttgtaccaatgccctgctacggttatgttcctttttactgtgagccacaaggtgctgcacaggctccgcatgaggttgtcaagccagtggctgttcattcaacgcctccactgaatgccaaagacctttacaacatgtct

SEQ ID NO: 275875 - DNA, 602 bp, Zea mays
gcccggtcgagtgaattcattaaccggatttagctcttttccagcacccttggcaccaaaggtccgggttgagtccatccatatcccaaaatggtaactgatgaaatcatagagcccattaacatgtatcgtaagttcgtatcaattgatggaacatggataaacgaagctcatagctcctataatgaacagatacacgcatagtacatagacatcataggatccatatagtacactcttaagcacaaccactgaaagtaggcacatgagctatattacagcacaggagccatgctctttcttatcagagttcagcttcttatgacattctgctagaagatatttgagaaagcattccaaacctgcagaagcagagcaaatacctcagcgccccctttcaaagttgatgcgggacctcccagatccaccatcataatcatccctcattgaggacccaccactcgccttcatggttcctccacctccaatcttctccacagctttcttacccttcttcacctcagtcaagacttgatccagaccaaatggatcattttcttcctgcttatcgaactccacaggccctcgagccgctcgagccg

SEQ ID NO: 275876 - DNA, 554 bp, Zea mays
  unsure (1)..(554): unsure at all n locations
tttttctgtaagaatcaatcatgattctattttttatgaaaacaatgcaaaatatctaaggaaaatctggagtatgtcgcccctaactgcacgcgcggcctagccactgacgcggctccagtgcctataggtgacgccggtcataacaacaatactcaagggattcattgcttcagctgcacaccatatggatccttcattccctgcagcttgtaaaaccttgtttagtttaggaaacactccattgataaaactagaccgatcctaaaaggaataggtggctttattatatcagtattaagaagaaaataagcactcaaattcacctctaggacttgaacctaagtgttgtgggcgttcacaccctcaaccagctaggctcagcttccttgtctctttcgtgggctctatgatattacttattccataatattgtgctcagtggttagcgttgagtcatggcacttggcacttaatttgnattggtgtggccacttcagtctcatgctgggtaatatattagcataacanatcttaccatgaacttcaagatg

SEQ ID NO: 275877 - DNA, 525 bp, Zea mays
agtttgtttggatacagctcctgccactgcaacaatagtggttacagcatttgatcgctgggttttgttcttatgttaaattttcagaacttagtttgtacgtaacttattggataggatgttctagatctccgagtcgactgccttgcaagccattcatcagctggagttggacggctgtgttactttaacttataatatcagtgaagcggatgcagtgatcgcgttacattcaaagctcaagaagaactctcagattcaggctgtgctgaaatctcaagatataccggttttcctcgtaaagacaaactccctgcctcaaaataccagggcactccgggctcttgtccaccatcacattgaccaaattatagaataccatgattaagaagaagccaggtcattaaaagaaacccatgcttttgaagaagcaagggttgcaattcaaccagtagtgattcccaaaggccaaaaccttcaactacttgccaagccattaagccttattttgttccaagtgggtct

SEQ ID NO: 275878 - DNA, 486 bp, Zea mays
  unsure (1)..(486): unsure at all n locations
ccacgcgnccgggagcacagggaagtgttttgtcacttgtccttgctgttggtcacccggtactgtttcgtacatacagaattgtgcacagttataaatttctaagttgcttgtttttttttcttgcagtattttctcaatctatttttgaagttccttcctgtgcagaatgaatttctggaggatgttgtattggaggaaaaccatggtttgccgtgcttcttatttgggcactccacaggtggagctattgttttgatggccgcgctggatccttctgtagaacttcatgtagaaggtgtggtcttaacgtcgccagctattcaatgttaaccatctcatccaatcatcaaagttgttgcaccaatattctccatgttagctccaaaataccgcgtcagtgctttgcataagagaggacctcctgtttcccgcgatccagaggctctgaagatgaaatattcagatcccctggtgtatactgga

SEQ ID NO: 275879 - DNA, 840 bp, Zea mays
gtctctacggtgaggcgggagctggcgatccggagactgcgagaggaggccgaggaggaggcgaacgaggcggggacgaggaggaggagcagcagaagggatttcgccgtgttcgagaccgccaggggcgacgcgctcttcacgcaatcgtggactccggccgccgacgatcgcctcaagggcgttgttatactgctgcatggtctaaacaagcatagtggaaggtacagccatttcgcaaaactgttgaatgatcaagggcttaaagtttatgccatggactggattggacatggtggaagtgatggagttcatggatatgtttcgtcacttgatcatgctgttggtgacttgaaagaatttctggaggatgttgtattggaggaaaaccatggtttgccgtgcttcttatttgggcactccacaggtggagctattgttttgaaggccgcgctggatccttctgtagaacttcatgtagaaggtgtggtcttaacggcgccagctattcatgttcaaccatctcatccaatcatcaaagtaagcaatagatgtttgtcttcaacgaaacaataccctcgttgttttctgggtgacgccatccttctacacgaagtccatgaaggagattggcttgcatggtcaatttggtccttactttaatgatgaaatggaattaaccagcctttttaacctgccattcaagggaaaattgaattttccatgattcattaacattcctggttctattagatccagaaaccattttgtggtaagtcttacaccagaattgcttgttgacttgagcacaaaacccattcatttaatggtcctctttaa

SEQ ID NO: 275880 - DNA, 553 bp, Zea mays
ggcagggcacgctggggccgcgacgcgctccagctctgggacaagatgagggagctaaagctacccgccgatagcatcctctgcaacacgctgctgagcatgtgcgcggacgtggggctcgtggccgaggccgagcagctcttcaacgagatgaaggatccggagtgccgcgacgtcccaaagccggacaagtggagctacacggccatgatcaatatctacgggagcaacggggacacagacagtgcgctccagctgttcgcggaaatgctgaagggcgggatagagcccaacgtaatgagctacaccattgtcatccaatgcctcgggaaggcgcataggatacagcaagcggtggaggtgcttgagtccgggctggagaagggtctcaagcccgacgatcggctctgtgggtgcttgctctctgtcatcgctctgagcagcgtcgaggagatggaaatggtgctttcctcactggaaaaggtcaaccagaacctgggcaagctgatcagagcgctcggcgacgcccatgtcgactgtgacgatatcacaa

SEQ ID NO: 275881 - DNA, 560 bp, Zea mays
cctacgctttcgctgggttgtttaacacgacctccacagcacaggacaggcgagcattgctgcaggagatactcaggagaggaacaagctcactgggaacggatatccccagtgaacgtgagataaaccgcttggctgctcgaaacgatgaagaattccggttgtttgagaagatggatgaagaaaggaggctaagggagaactacaaatctagacttatggatggaaatgaggtcccagattgggtgtttgccaatgataatgaaaccttacgcaagaaaaccgtggcagatgaattccggaatataattgttggttcaaagagacgtagaaaggaggttgtctattcggactcttttggtgatcagtggatgaaatccgacgagggatttgaagagattgcaaagatgactccaagggtgaagcgaactgcttattcgcctgacattcaagttgagtacaatgaaaggaggaaaaggcccaagtctgtggaaaacagcgcagatggcgcaggcaacccaacacggacacccgacaaggaagggctgagtttcatatac

SEQ ID NO: 275882 - DNA, 501 bp, Zea mays
cccactcgtccggtggaatctcttccctcgcaggataaggtgcctcggccgtaaacagagtggttgttccgcttcgtcccagcctctagttcttcctttcctccagagtgatggccaaatgctactcagattggcccccgattccgcctttccatccatcgcgaagaacgccgccgcaatcccacgcctccccgatcacgatcaggcggcagctcgcgtccttcgtgctccactgctccagatcctgcgctcccctcctcgagcccaagaacctgcccgatgagttcgaggccgtgccggcgacgacgacgccgccgctgccggacgccgccccgaagctggggatttctaacaagttcatccgaggcctctgcggcgacccgcagaccgagcagctggccttcgagggctacaggagggcgctgctgcagcccgagttccggctggagaagaagacggccaacgcgctgaccctgcagctgatcagggagaagcagtggg

SEQ ID NO: 275883 - DNA, 1022 bp, Zea mays
cccacgcgtccgtcccatccaataggccgttcctctcccgtgtgggtgcattctccccacctccgccgccgtttccccgcgtgctttctctctctctctcgatctcgagcgacgactcggttacagccgccgtcctacgccaggtcccaggtcttcgtcgggcccgtctccggcaacgagcaccaacaagatttttgtgtgtaaagatttgcgagcaccattcactttttcatcagtgtgaaattaaaacacttcaagcatgagctctcaccgtgtgaagtggaatgaggacaatttgtatgaaattgagtcaaacaaaccggtgaggcagaagataacagagccaaagacaccatatcacccaatgatagatgatgatggatcattgtcgccaacacgtcctttcgacaaatgtcttgatgagactgtccaggctgaagctatcttaacagccttaaatggtgtggcttcttcaagcattagcatttcaaaggatgatggttggggatcgtcagatgatgatacagatgccatagatcaagatgctgaccctgaagctgacacgacaaggttgagtttcaaggagcatcgccgtgcccactacgatgagtaccgcaaggttaaggagctgatgaggactggatcccttactgctgaggaggccgatgaggataacagagctgccaccagctccgaagacaaaggtgtggggaaaggagggccgaatgataacatgaagccctcgcctcaaacatgaggagttcatatgaaggttctgattcctctgttatttattgtatcattgtatgcaatacagttgttactcttgttttgttttgagatgctggtgtgccaaaatggatttgatgaccgataattgtattggtgttggctacctggtcgaatggtcgtcgctccattttgttggtgacttaacaatttcaattgagaaaatatgtttcaaaccgagcaaactgcttgatgctgaaatcagttacccgccaagagtgaatcttcctatc

SEQ ID NO: 275884 - DNA, 997 bp, Zea mays
gaagctattacagaagctgtctctgtggctgaaaggattaatacaaattatggttccgcaagttacaagcctgtcgtcctaattgatcaccgcataccgttttatgaaaaggttgcattctatgccgcgtctgactgctgtattgtaaacgctgtgagggatggcatgaacttagtaccatatgagtatactgtttgccgacagggaaacgaggagatcgacagagtcagaggccttgacaaagacacccatcacacaagcacacttattgtttcggagtttgtgggttgctccccatctctgagtggtgctttcagggtaaatccttggagcgtcgatgatgtggcggatgccttgtgccgtgcaactgatttgactgaatccgagaaacggctgcggcatgaaaagcattatcgctatgtcagtactcatgatgttgcttactgggcgcacagctttgctcaagatctggaaagagcatgcagagaccattacagccgaaggtgttgggctattgggttcggcctgaatttcagagtcattgctctttctcctggcttcagaaagctttcttcggagcactttgtttcttcttataacagggcttctagaagggcaatatttctcgactacgacggcacacttgtgccccagtcatcaatcaacaaagctccaagtgaagaagtcatttccgttcttaacaccttatgtaatgatccaaagaacattgtgtttatagtaagtggacgaggacgtgattcccttgatgagtggttttctccgtgtgagaagcttggtctagcggcagaacatggctattttatcagatggagcaaggaagccgcatgggagtcaagctattcaaggccgcagcaagaatggaagcacatcgctgaacctgtcatgcaggtatacaccgagacaacagacggatcttcagtcgagtcgaaggagagcgctctagtgtggcactatttggatgcagaccatgatttcg

SEQ ID NO: 275885 - DNA, 439 bp, Zea mays
ctcagagctagaccaaaagggaaggaattagtgcgatatgaatcccctattgaacactgcccgagtgtagatgaggttaagcgagtgcttaatggaactgcaaacagcttcagtataattgatgcttacccaaggtactttcgagttactggatcaggtgaagtccggcgattagaagcagcgatagattcagtaagtggcgaattgctattaaataatggcactccttggtggtcattctatgatacaaacccatcagatttggcaggctgtcaagggctgaatggtcccatggctataagttgtttctgaggagacacctcatggcattattggcgaaacactcagtaaatttagcatatggagtttatatattacttttgttctagctgttgcgagatttattatgcttcagtgctcatacttgagaatgagaata

SEQ ID NO: 275886 - DNA, 625 bp, Zea mays
gtgcaatcaatcactcttcccgtacttatctcgaaggcataaagtttggtgattttggctacaccgagaacaatttcagccagaaacttaatggattggattcatctgatgcacatgcattaaccagcagtgatatgaatgctcctagatggaccagcacttgtaaaggcgctccctacgcaaaccacagctatcaaactggaaaacaaaatccgctacatgtgtcgccttcagatgatctgcaatttgctcatagagatcacgctgcaggaacagagaagccaaattttgagaaagttggcagtggtgcaataccatcagcggatttgtgcatcaaggatgattttgataaaaggtttcaagaagatcttgatgaagcagtgcgccaaagccttggatacgatgcttatcctgctggtacaataagcacttcaaatgggacagaagtgtatgggactggacttaaaaatgctgctggtgaatacaattgttttttgaatgtgattattcagtcattgtggcatataaggcggtttcgggacgagtttcttaaaacatcattactgcacaagcatgttgaagatccttgtgctgtctgcgctttatatggtatcttcattgacct

SEQ ID NO: 275887 - DNA, 723 bp, Zea mays
cttgattgttgccctcttgttcctgtgaccgagacaaattcaatagaattttctcctaagctatttaaaggacaactatggctacaattcaagatataggactctctgcggctatcaacataatgggtgctgtactgttcctagttgcatttgctttccttcgactgcagccaatcaatgatagggtttacttcccaaaatggtacctcaaaggtgcaagagagagtccaagtcatgggggtacatttgtccggaagtttgtcaatttggacatgcgttcatacttaaaatttttaagttgggtgcctgctgctctcaaaatgcctgaggatgagttgattagccatgccggtctggattcagctgtgtatctgaggatttacttggtcggacttaaaatatttgctccaatctcagttctagctttcattgttcttgtccctgttaattggaccaatgatactctgcaattctcgaagttagagcacagcaatgttgataagctttcaatatcaaacataccagttggatcaaaaaggtttatagcccacttggcaatggcgtatgttttcacattttggacctgctatgtactgttacgtgagtatgaagtagttgcaaagatgagactgcgatttctttcatcagagaaacgcagaccagatcagttcacggtccttgtgcggaatataccgcctgatccagatgaatcaattagtgagc

SEQ ID NO: 275888 - DNA, 690 bp, Zea mays
  unsure (1)..(690): unsure at all n locations
gttctgcatgtcttcaaagggttgtgaccccatatagccggatgtcagtcaattcatccatggcgatcaatccattcctcgagcaggccaaggttcttctctgggttttgaggaaggacccatctgcgatgctcatctaattaaggttacctggtcatcttgctactcggtcgcctacaggatcggatagcttactctatctataatcacaccgagcaaactgtccatcctagctacaatgggtagcacgcacaaggaagaagtaggtgtcctggaggaaatacttgacgggagaaaagagccgaggaagctatctttatcagttctaaaacacatcacaaatgacttctcgcacgagcgaataatcggttatggtgggtgcgcagaggtttacaagatgaacagggcatcctgcaaaacggaagcgtcgctgtgaagaaaatcttcagcaacctaaatgttgaagataaggaatttgatcgagagattcagagcatgatgcaggtgaagcatcaaacgatgtgcggtttattggctactgttctaacacagagcatgaactgatgagaaaagaaggcaagtatattaaggtcgaggtgcgagaaaggctgctctgtttcgagcatatcagcaacggaagcctncgcagccacattacagaggatactgcgctccagaataccaatacca

SEQ ID NO: 275889 - DNA, 623 bp, Zea mays
cgaagagggccttcttaaaaatcttccaaaggatcttagaagagagataaagagacatctttgtttgtcacttctcatgaaggttccaatgtttgaaaacatggatgaacagctgttggatgccatgtgtgatcgtctaaagcctatgctctacacagaaggaagctgcatcattcgcgaaggtgatccagtgaatgaaatgctcttcatcatgagaggaacactagagagtaccacaacaaatggtgggcaaactggttgcttcaactctaatgttctaaaaggtggagacttctgtggtgaagagctcctcacgtgggcccttgaccccacttcagcttcaaatcttcctggctcaactaggacagtgaagacgttgtctgaagtcgaagcttttgctctgagggctgacgacttgaagtttgttgccacacaatttaggaggctccacagcaaacaacttcagcataccttccggttttactcacagcaatggaagacctgggctgcttgcttcatacaagcagcttggcacagatactgtaagaagaagctggaagaggctttatatgagaaggagaagaggttacaagcagcaatttgtagtgatggcactacttcgc

SEQ ID NO: 275890 - DNA, 441 bp, Zea mays
tttacttcgtgcggcaaacgcgccattgacgcgcactcgtagtcttgactcttgcgtgcttccctcgtcttctcggacgttccgttccatcgccatggcggaccagcttagcgaggagcagattgccgagttcaaggaagctttcagcctcttcgacaaggacggcgacggttgcatcacaaccaaggagctcggaaccgtgatgcggtctctcgggcagaaccccaccgaggcggagctgcaggacatgatcgccgaggtggacagcaacggcagcggcaccatcgacgagcaggagttcctgggcctgatggcgcgcaagatgagggacgcggagtctgatgaggagctcagggaggcgttccgcgtgttcgacaaggaccagaacggggtgatctacgtggacgagctccggcacgtgatgaccaacctcggtgagaa

SEQ ID NO: 275891 - DNA, 404 bp, Zea mays
tttatatgttcaaggatatatgctatcaacactccaggggggcctcattacttgcacagagccgcatcaccaccaaggagctcggcaccgcgatgcgggctctcgggcagaaccccaccgaggcggagctgcaggacatgatcgccgaggtggacagcaacggcagcggcaccatcgacgagcaggagttcctgggcctgatggcgcgcaagatgagggacgcggagtcggaggaggagctcagggaggcgttccgcgtgttcgacaaggaccagaacggggtgatctccgcggccgagctccggcacttgatgaccaacctcggggagaagctgagcgagcaggaggtggccgagatggtccgtgaggccgacgtggaccgcgacggccacatcaactacgac

SEQ ID NO: 275892 - DNA, 605 bp, Zea mays
ggatttttggatattttttttgatttggcattattcaacaagaaaaaaaatttcgacgaattcctttttttttgaaaattatgtgataattatgagaaccaatcctactacttcgcgtcccgggatttccacaattgaagaaaaaagcgtagggcgtattgatcaaattattggacccgtgctggatatcacttttcccccgggcaagttgccttatatttataatgctttgatagtcaagagtcgagacactgccgataagcaaattaatgtgacttgtgaggtacaacaattattaggaaataatcgagttagagctgtggctatgagtgctacagaggggttgatgcagaggaatggaagtgattgacacgggaactcctctcagtgttccagtcggtggagctactctcggaccaagttttaacgttcgtggggagcctagtgacaatttgggtcctgtggatagtaatgcaacatttcgtattcatagatatgcgcctgcctttaacgaattagatacgacattatctatctttgaaacacgtattaagggggtcgatcttttaactcctaacgacgtggacgaaaaatcagactgtttg

SEQ ID NO: 275893 - DNA, 572 bp, Zea mays
tttcatgtattggcgaaccatataatgtgtagcaactggagtcaggagacaacagtcatggcagaagtgtctgtgtgatgtgtgcgcttcttgtcgcattaggattggctgaagattggaaagctgctgagcaaatgatccatgagaagcgaccttctattagcatgaacactcttcaccgcaaaagcttggaggaatggtcaaaacatttgctcccctctaaaagaagtggggaagcagatgtgagttctgttatccattcggattataaccggaaataaaattagaccagcaagagacaggcgtgttcagatatttaagatgcattgtacatttggttgtattgtttgctcctgtcctagtgaatgcctatggttcattctaagttaccattttgtggtaattgtgttgtaaaaactatatgtatcgaattatattaggactgtagctttacactgttagttctttacggaagatttagtctcctggcctccttttttgtaatataacagtcctatcattgaatgcttgtcagggaagggctgttgcctaacctttggggcttgttttgg

SEQ ID NO: 275894 - DNA, 495 bp, Zea mays
gatttgtgaaaaacgagcccttatacactgaggttgcagatggagtgtttgttggaggatggccttcttcggttgaacacctgccaccaggtgaccctgcaatcatagattgcacgtgtgagttgccaaaaagctcaactatatctaacaatgcatatctgtgtgttgctacctgggatacgagggctcctcaaccatcacaaattgagtctgccgcgcgatgggctgtgagacagcggtcacagaacaaacctgtctatgtccactgtgcctatggtcatggcagaagtgtctgtgtgatgtgtgcgcttcttgtcgcattaggattggctgaagattggaaagctgctgtgcaaatgatccatgagaagcgaccttctattagcatgaacactcttcaccgcaaaagcttggaggaatggtcaaaacatttgctcccctctaaaacaagtggggaagcagatgtgagtactgtcatccttccgattataaccg

SEQ ID NO: 275895 - DNA, 443 bp, Zea mays
caccttcttaaaggttcaacagttcaactcagagaggagagaaagatccccacccccaggcgacgcgaccggcgagccccgaaaccctaggtcgcgcgacccgggcagcgcgcttctgcgtgactgcgtgtctttcggggaggggacagcgttaggacgcgacgaggttagcgaggccgtctggccgactataagcggaagaatctcctccgaagccttcctagagctgtgaagagcgcgtggatctcctggatttgcagactcgaggggagctgagacaaggtcatggcagaagtgtctgtgtgatgtgtgcgcttcttgtcgcattagggttcgctgaagattggaaagctgctgcacaaatgatccgtgagaagcgaccttctattagcatgaatactcttcaccgcataagcttggaggaatggtcaaaacattgctct

SEQ ID NO: 275896 - DNA, 410 bp, Zea mays
atcatcgaggccgggttcccggcctcctcccccgacgacctcgacgccgtgcgctccgtcgccatcgaggtcggcaacccggcgccaggacccgccggggaggaggacgccgtccacgtgccggtcatctgcggcctctcgcggtgcaaccggagggacatcgacgccgcgtgggaggccgtgcgccacgcgcgccggccccggatccacaccttcatcgccaccagcgacattcacatgcagcataagctcaggaagacgcccgaccaggtggtcgccattgccagggagatggtggcctacgcccgcagcctcggatgcactgacgtcgagttcagccccgaggacgccggcaggtcaaatagagagttcttgtatcatattctaggggaagtcataaaaactggagc

SEQ ID NO: 275897 - DNA, 504 bp, Zea mays
atcagacccgtccatccatcggtggtggtggtggtggctgctgttactcgctatcaccatctgctgctgcctgctttagtcttttgcttcacttctcttctttctatccttcctccccctgtctgtttgtctgtcttattgccctccctgttcttgttgctgcttgcattgagaaaagagagagagagagacagagagagatagaaagtggttgctagttgtatggtcgtccggtgggcgcgatgaccatggagcacggcgaggattgctgcgtcaaggtggcggtccacgcgcgccccctcatcggcgacgagaagctgcagggctgtaaggactgcgtcgccgtcgtgccgggcaagccgcaggttcagatcggcagccactccttcaccttcgaccatgtctacggcagcacaggcacgccgtcggccgccatgttcgacgagtgcgtggcgccgctggtcgacggcctcttccagggctacaacgctacggtgctggcat

SEQ ID NO: 275898 - DNA, 610 bp, Zea mays
ccgcgcgcctactcaaccgaggccaacaagtcaaggcgagtgcggagtagaggcacaaggtcggatgcctagagagatttcccggtcgcctccgccattccgccggcgaggctcccctcctctgcggtacgctagccggagaaacagacgagatcggagccgctccccttacgcctctcggcgaaaaactcgttctccttctccactatgggacaggagcaactcaccaagtccaagaaggcatagaagcccactatctccaaggagacacagaagacagagaagtcggagcactacaagttcattagagaataacccatccagtccaagtcacgcatcagagaaaataaattcatctgtaaaacaaaggctggaagaagaaaagaaaaggcgtcaaaaggaagctgaatttaagttactggaagaggagcttgctagaagggtcgaagaagctataaggaaaaatgtcgaggaacgtctgaaatctgaagaggtgaaacgtgacatagaacaccgaattgaggagggtattagaaagttatttgatgaggttgacgctcagctacaaaaagagaaagaagtggccctttagaggccaggcagaaagcag

SEQ ID NO: 275899 - DNA, 1142 bp, Zea mays
gctccgcacaaggcaacagaacattgctgagataactgaaatgattcatgtcgcaagccttctgcatgatgatgttcttgatgatgctgatactaggcgtggtgtcagttcattgaatctcatcatggggaacaagctttctgtgctggctggtgatttccttctgtctagagcatgtgtggcccttgcagcacttgggaacacagaggtggtttctctaatggcaactgctgtagaacatctagttactggtgaaactatgcagatctcaacaagcagagagcaacggcgaagcatggagtactacctgcagaagacatactacaaaacggcatcattgatatcaaatagttgcaaggctgttgctattcttgcagggcacacagctgaggtctcggtgcttgcatatgaatatggtcgaaacctgggtctagccttccagttaattgatgatgttcttgatttcaccggcacctctgcatcccttgggaagggttcattgtctgatattcgccacggaattattactgccccgatgctatatgcgatggaggaattcccacaactgcaagaagttgttgaccggggttttgataatcctgcaaatgttgaaattgcccttgactatctccagaagagccgtgggattgaaaagacaaaagagcttgcacgagaacatgctgatcgtgcagtcaaggctatagaatctctacctgatagcgacgacgaggatgttctgacttcaaggcgtgctcttattgatatcacagaaagagtcatcacacggacaaaataggaaggtgttcggcgtccataaggtgaatggagagctgaacctcgcctttggcctagtgtttcacttggattttcttttttgtatacttcggttcattgcattcttttcgcagccaaaaccccaagttttgtgtatcattgctgaaatttaggattaagaaatggccctgcatttctgggaagcttctagaggttttggctgcatgtggcaacaaaatatatgtcaccgattgcaatggcaccagatatcgtgtagccatataagtgtgggagcattgtacccaatatacactcccgtaaagactaagatagtactaccataaaatatacgttaaccgttcctcttc

SEQ ID NO: 275900 - DNA, 668 bp, Zea mays
gattcggtcggcctcatcttcagccgctcaccgcttgtaagatcacagccgtcgttcttatcttcttgcgccgctcctctgttgatatttcatcgctggcttcttcttattcctgtacgcgagctcagcttctctcgtatcctccggcgccttccctccatttcgtccttccaaccatggccgcgtgcctcccggctccagtccgcccactcctcacggtgcccttcctctatctcctccctgctcctctgccccagttcgagctgctcccatggcgccgttggccggatctccctggccgtgtgcccctgcgctcggtcgcctctcctgcagctcgctctctcctccctccatctctctcaagcgctagccgccgtggttccctcccctgggctctgctcgccggagcttcctgctcggccacgcccatgcccaacgcctagccgagcggcctcactgcacgttcctcctttctccaagttgagctccatctccctgcgcgcggtactctctccggcgtccagttttctccgcgccgaagttccctccatgtgtttgccagcaccagttcctctgtggccacgcgcatgaatccctgctagccagcatgctctggattcagccatggagcatcttctgcgtctctctctattcgctggccgagatcc

SEQ ID NO: 275901 - DNA, 563 bp, Zea mays
acatgagttcccgttttgctcccgagttctctctcacgtccatccctctctctggtcgcgttctttagcagggccggctggagcgcccactcctccctccagcccggccccagccgcgccgccgcgccggtcgtagacccaacgcccgccgcccagcccagcgcgccctccggccgtgaggcggagaggatcgggcgggcctcggggcgagcgccacgcgtagacggcggttgaggagcctgagaaaacaacggtcctccttcaagatcctgatccctacgcgcaggcgtaggagattgtattccgtctgattaatcggcggagagcaagcgggtgttgcggctgcgcgagcatggcgggcgaggaggctgcggagggcagcggaaccaggaggcacatggatctaaacctgtatctcggcctccctccattgcacgcggcctccagtctggctggacccgacgttgatgcccaacttgaccggtgctgcgccagaagcctccagaactggtgagcctgaggaatcgttggccctgggggcggcagcctattctccgtcgaat

SEQ ID NO: 275902 - DNA, 1073 bp, Zea mays
  unsure (1)..(1073): unsure at all n locations
acctaantttttttttttgcatgcacaaaccaggggggaaaacttatctaatagctcaaactgtctcaaaatctctatgctacaactgagctaatcgttctccgcaggatgggataggataatctgtcaaaatggttgttatagaatttcctatatctatgttcactgcacgaggggcacaaactatgaacacaacggtgagcgacattttaggcgttgaagagcttgcggaacggcccatccttgcgatctttggcggcctctgtcaatgcaaggaacctcttgaagcccgtggtggctgctccgcgcccaagggcggcagctcgggcgaggacgtcctcttggttcgccagtgctcccttcaaggaggccatgcttggtgtaatcgaaacagctggagttgccaccgagggcacaatctggacagatgctgtggcaactggtgtcgccaccgtcggagcaacggcagggtgtttgatggcgggggctggtgcaggggcgtgtttgttgaagtcctccaggatagcttgttgatctgctttcttcaagcccttgaggtcaagtatccgctgaaactcaagaggcgtgccttcgggaaggagggcacggtatgtgttagcgacagaatcaactggcgacaaaatgaccttaagtagagcttcggctttacccatttctcggctgacaaatttcgagtagctagctgcacctgtactctgttttccaagagctgggatgtctaggagaatagtctttactgcttgggtgtccaaaagcatctgctgtgcaccagtttctgatatatgtttgcacttgtatatgttgagataaaaccgaggcccaagagatgctgcaagtttgtccaggaaatactggaagtaggtaggtgaaagcagggtaccaagcacaggaattctgcttgacagaatacagcggagaccattcacatgttctgattgatcaccaacgctttcaagggtagcccatggaacgtgagtcattgcaaccatttcagcatcaaatttggtttcaagtccgtgaacaagagtcattagtgcttttgtaaacacggc

SEQ ID NO: 275903 - DNA, 400 bp, Zea mays
tggttttttattcaatcacgagtatagaatattgggtttgcatgcacaaaaccagtggaaagaacttatctaatagctcaaactgtctcaaaatctctatgctacaactgagctaatcgttctccgcaggatgggataggataatctgtcaaaatggttgttatagactgtcggttaacggtaatggtgtgtacacgatgtggaaaggattccctatatctatgttcactgcacgaggggcgcgaactatgaacacaacggtgagcgacattttaggcgttgaagagcttgcggaacggcccatccttgcgatctttggcggcctctgtcaatgcaaggaacctcttgaagcccgtggtggctgctccgcgcccaagggcggcagctcgggcgaggacgt

SEQ ID NO: 275904 - DNA, 569 bp, Zea mays
cccacgcgtccgcccacgcgtccggtccgtcaatccagtccccatccccacggcgccgacgactcgggggcttcccccccttggacttggcccgggtgggagcagcacgtcggggaagggaagcaagcgtccgcgagtaaggacagaaaaccgaaggtcggagtggagaggaggagcttgcttggaccgggtggacgggtggtgtgtatatagttaagcgggcgggcgggcagccaatgccgtcgggcgcgcagggctaggagcatgggcggagggggcgcgatcgtgcacggcttccgccgctggttccaccgccggagcgaaggctccacctccaactccaaccagccgtccctcgccggcgagggggaagcggacgacggctcatccgatctcgaggtcatcgaggacccggatctcctcggcctccgcgccatccgcgtgcccaagcgcaagatgccgctccccgtcgagagccacaggcaggactcggtggaaatggagttcttcaccgagtacggagaggcaagccagtaccagatccaagaagtcattgggtaagggagcta

SEQ ID NO: 275905 - DNA, 703 bp, Zea mays
tgcacactgaaccttctactcaagaacctgaggctcaatccattgggtggggacaaggtgttgaccatgctggcgagtcagctgcgcaagggaacggtcatggatggcaatggctcaaagatcctcggttggactaccttggttacagaggaatttttccagctgacacgataccacccctagttgagtctgacaaagaagcagatgaacgccattatcaactttggcggatagaaaatggagtcgcagaaggttcgactgagatcccaaaaggcgaagcaatcccgctggagtacaatcttgctggcttgaacgccatttcgttcgagaagggctgctacatcgggcaggagcttatcgcgcggacgcaccatcgcggtgtcatccggaagcgcctaatgccaatgaagttcgtcgacgggaatgggcaagaactcgagcaggccgtcgctccaggctcggaggtcgtggacgaggcttcaggcaagaaggtcggggcagtgagcaccgctctgggctcccgcgggatgggcctgctacggctcgaagaagcactgaaaccgggctcggccctccgcgccggctacaacagggacgtgagggtccaggcgatcaggccggactggtggccagccgagtggacgcaggtgcttcaggaacagcgcgcaccgcttgccagcagcggactgtatgtagtactgga

SEQ ID NO: 275906 - DNA, 408 bp, Zea mays
cctgaggctggtgcccctcctggcggccatgatcgtgccctgcacgctcatcgcgcaggccagcacgctgttcgtggagcagggcacgacgatggaccggcacatgggcccgcgcttcgagatcccggcggcgagcctgggcgcgttcgtgacgctgaccatgctggtggccgtggtggtgtacgaccgggtgttcgtgagggccgtccggcggtacaccaaggacccgcgcgggatcacgatcctgaggcggatgggcacgggcatgctgctgcaggtggcgaccatggcggtggcgtcggcgatcgagagccggaggctggcctacgcgcggagccacggcctggacgccactgtgggccagctgaggctcaccatcttcgcgctgcttccgcagttcgtgctgat

SEQ ID NO: 275907 - DNA, 404 bp, Zea mays
  unsure (1)..(404): unsure at all n locations
gcgcagcacttgatctcctccattatctgtgcgggcttaacagtcggagtagtagccttggtgaaagccaatgggaaacagttttgctctaggccccgtctgtgtggtctaatctaatccttggtcttttcccccccttccctttcatattgccctttgttagaaattgaatgtaaaaggattagaatgttgttttattcgttgcaagagtaaggttaaataaggaggcaggatggcctgccggtcccgtaatctgaagctgctaatttgtaagcctatagtttggatttgcacattctatttgttatactttttatgtatccatgaatagaaaattacgcctcgaaattccaaatttgtaataaatcccagagaccacatatttttttaaaaaaaaaanaaaa

SEQ ID NO: 275908 - DNA, 487 bp, Zea mays
  unsure (1)..(487): unsure at all n locations
gttcatgatattgtctgatgcagttgcaaaagtacatatagtactctaatgctctaagtgtggctccagttgtgcacataacacaacatcatcaggatgtctttggttgattggaacttctcatccttgatgcaacttttgggcaagcttttattgcacataaattgcctctacctgttatggtcattagtggaaaactggctgttgtagttgcttcgtagactgaatatttaaaaagaagctaagatattagtcttcattttttttccaacgaagttacccatgtaggttggactgttgttgctgctggaaatttcccggttagatgatgactgagtgactgacgccatttcagttctcattgtaatatgtattatggcccaattaagcatcaagttgaaacatgattgaatcttatactcacattttgtgttgtacctctattctggtcagtggtatgctntctaatggacaactgacattcagc

SEQ ID NO: 275909 - DNA, 657 bp, Zea mays
caaagatccaagctccccacccttcctcatggtcatggcggcacctcgtgttctaggtctggcttaccccgcccagggccatgtcatccctatgatggagctctcccactgcctcatcgagcacggcgtcaaggtcaccttcgtcaacaccgaggtaaaccaccgtctcattcttggtgccttggcgaccggagacaaagaactcggcggggtcgacatggtgtccataccggacggcctgggctccggcgaagaccggaaggacctcggccgtctcaccgactcgttctccaaggtcatgcccggcgagctggagaagctcattacaagcatcaacgccgatggacgagagcgcgagaaggccagctggttgatcgccgacgtgaacatggcgtgggccttccctgtggcgaagaagcacggcctccgaaccgccgggttctgcccatcgtcggcggcgatgttcgcgatgaggatcagaattcctgagatgataagcgacggcgttcttgacgagagaggctggcccaagcggcgcggcgcgttccaattggcttccgcgatgccggccatcgacactttggagttctcgtggaatcgcgccgccgacgcccaggggcagccgatcatctttcagctgatcctccggaacaacgc

SEQ ID NO: 275910 - DNA, 1079 bp, Zea mays
caagtgggcgacaaggtccgttcaagaaagcttaaaaactcttgcggtcctgaaactatggaaagccctgatggaaccatagttggcattgaggacgatggcgagcgtgacgcttacgttcttgtacgagtccgcgcgctacacaaccctttaaaggttcgcttttcaacggtggagagggtaacatatggttttgctgctggagactgggtgcggctgagggaggaggacaagaagcgctctcaggttggcattcttcacagcatcgaccgtgacggtgcagtggcagttggtctgataggagtggataccccttggaagggcaattattcagacctccagatggctgaagcctactgtgtcggacagtttgtgcgcctgaaggccagcatttcaagcccaaggttcgaatggcagcgaaagcggggtggattagcttctactggccgaatttcacagatacatccgaacgggttgctcgtcgtgaaatttcctggcaagtttaaccttggcgaagtgtgcagttgcctggcagacccctccgaggtggaggtggtgagctttgacaagtgcgaggggattgtgaagaagtacgagcatctcgaggacttccattgggcagcgaggcccctgttcggtgctattggtttcctcacggcgatcaagctgggtgtttttgttggcaagagcatttcgaggccgaggagccggaaggttgccagcatctctgatcagagtggagattattaccaccaccagcaccagcagcagcaccagcagcaggtagtccaacaaagtgctaatgcggcgtggcttcctccaccagttgcaaacatgttcttcggagatagtgttgggacttctggataagaaatcataagtggcccggagttttgcttaaaatagcaatttggaattgtggttcctagttgtgtgcatatttaggcctgaaatggtttatcccttatctaagcatctgtaaatatctgccttatgcaccacaagttctgtaaataaactctagaattatcgtcttaaacatacccgtatgcgaagctatttcttgcttggtggacaat

SEQ ID NO: 275911 - DNA, 497 bp, Zea mays
cccacgcgtccgctccggttcaccattttttgatgagtagagggggctccccgtctcggccctcctgccggttgaggccagcagagtgatgagtgaacggagtcatgcttgtgagattaggctttgtcgttgtagcctccgtcgcagctttaactcttcagagagctaacagtggggccaggcacagcaaagactatgtccaagcaaggaaaaggaaggataaggctaacaattctgaacatggggagaaagaagaagagaaggaagaggttaaaacaatcagcggcataatcaactcagcccgctcgctagacgatgacgacgatgatatgctttccgagatcgaaagcctcctatcaggagacattgacatccctataccaagcgatcgcttcgacgttaatggacggtcacggtacaacaacgcttacatggctaacgaggcctctgagatagagaagctgcgcacgctggtgacggagatggaagagagagag

SEQ ID NO: 275912 - DNA, 1599 bp, Zea mays
attgatttgaggggaatggggattgagtggtaattgcttcaccctagcccctcttgactccacaatcccttccaatccacaaggagattattttatccaaattagccctttgagtttacaagaaggatttaatgtcatgaaagtacacatccttcaagatgggataccattggcgtgttcttcaaaaaaaaacttgactcttcgactctgtgtaggttttattttgatttcagcccaacctatattggatgtggtcttatttgtccgcatattgttaattgttctacacttcttggtgccataatatcgtggggtattctttggccatatatctccacaaaagctggggactggtatccagctgaccttggaagcaatgacttcaaaggactctatggatacaaggtttttatatctgtatctgtgatacttggggatggtctttataacctcatcgagatcatttatgctactatcaaggaaataatgaatgcacgggctaagcaaggaagactgccactagcccaagttcaggatggcgatgaaggttcaaatttatcagctgaggaaaagcatctgaatgagacattcataaaggacagtatccctccctggttggcaggatctggttacattggccttgcagcaatatcgattgcaaccgtcccaatgatctttccgcagatcaagtggtaccttgtcctctcggcatacgttgttgctcccctcctcgctttctgcaactcatatggcactggactaacggactggaatcttgcgtctacatatggaaagatcggcctcttcatttttgcatcatgggttggtcagaatggcggtgtgattgctggcttagcagcctgcggtgttatgatgtccatcgtgtccactgcagccgatctcatgcaggacttcaagaccggttacctcacactctcttcccctaggtccatgttcgtgtcgcagttgatcgggaccgcccttggttgtgtcattgctccactcaccttttggctctactggtcggctttcgatattggtaaccctgacggcgcattcaaagctccatatgctgtaatcttccgtgagatgtcaattcttggcgtggaagggttttctgcactgcctcagcactgcctagcgatctgctcgtttttcttcattgcatctctagtgatcaacctcctcagggacgtcaccccaaagaatgtctccagattcatcccaatcccgatggctatggccattcccttctacatcggtgcgtacttcgccatcgacatgtttgttgggacagttatccttttcgtctgggagagggtgaaccgcaaggagtgtgatgacttcgcaggtgcggttgcctctggcttgatctgtggtgatgggatctggactgttccttctgcgatactgtcaatccttaggattgacccgccaatttgcatgtacttcaagccatcccttagcagctaaagttgggacaagtgttatccattttctgtatatcaaaataggccctaattgggtatatctttaatttactacatgtaaactgttctaggaagaaaagctgtagcctaatgcaatctgttgattctt

SEQ ID NO: 275913 - DNA, 670 bp, Zea mays
gccaatgcatgctcatatcgctcaatagttagtttgactcgcagacacagcacggggaaagaaattctcaccggacagcatggacattttctttactcccttccaggatatgaagcgctacaaacttccgaacacagatgaaagtatcatacagcaagcagtacgctatctttcccagacaaaaagcgacagcacgtgacgaccagctcgtgggcaaaatgggcgtccgagacagcaggacgcagatcccactgcacaagtgaaagaaggcctgaccaaggcagcgtcgctctcccttcagttcagcgccaggtaagtaagctgcccgccctcatttgttccgaactgtctgttccggtggtcttggaggagccatgccagcagcatcagagcctctcatgatcctaagtttccggcaaaatgtggtgaacaagtcccagggcagatcaccaacgagcatccagtcagcatctttatcttcgtaagtaaggacatattcttggtcctgaagggcatcagccctagaaccatcagtgagcctctcccttcttgaagtcttgcacgaaccgctttggccagtgatgaagcaggtgaacattttctccagagcaagcgaaaggtcctcatagctcgaaaaggtcttgaggtccaccttccttaggtatggggc

SEQ ID NO: 275914 - DNA, 498 bp, Zea mays
gcggccgcccttattttttgatggatatatgggcaacatgggctttttttttcttacttccaccatatgaagtacgagcttccaaataccggaggaaagtatcatagaggaagcagcaagcaggctactgccgagtttgatcgttcataacacaaaggcgaccatctacaataacacgtgacaacctcgtgggcaaaatggggtgtcttacagtagggccacacacatctcattgcacatgtgggggttacaaaaaaaaagagagagagagagacttaaccggagcacttcacgtaaaaacaccgctcccttcagcgccatgtaaactctgtcctttcctttcagttcacgactctgcatgccgggcaacgttccttattctggtcccaactatctgctccgggtgatcttggagccgcgccagcagcatcagagcctctcatgattctaagtttcccgcaaattgtggtgaacaagtcccaggggagatcaccaacg

SEQ ID NO: 275915 - DNA, 442 bp, Zea mays
acgcccacgagtccgcccacgcgtccgcggaccaaatacacgctcccgtctcatccgatggctcctctcctttccccgccgctgctcgcggacagcgtcaccaagttccatgcggcctcaacgccagtctcgtgctccggtagcccacaacgctacgtcatcacagggttggctggggccggaaggggagagcacgactggcgtcggaggacgtggggaagaacgaacctgagggtgaaagcggtggcggcagagtcccgcagctcggaggggggaatcgctgaagattattacgctgttcttggcgttatgccagatgcaacgccgaagcagatcaagaaagcatactacaactgcatgaaatcgtgccatcctgatctcagtgggaatgaccctgacgtgacaaatttctgcatgttcatcaatgaagtttacacggtgc

SEQ ID NO: 275916 - DNA, 410 bp, Zea mays
acgccacgcaggcacgcacgcggaggggagcgccggccgtccgcggcggattgggatctccctcgcccgcccgcccgtccactcgagactcgacggcacccgccgcatttgagctgagctgaggaggcgtgggggacggcgcggggatgtggcgcctgcggatcgcggaggggggcggggacccctggctccgcacgaagaacgcccacgtcggccgccaggtctgggagttcgacgcctccgccgaccccgaccccgccgtcgacgccgcgcgccgcgccttcgccggcagcaggggccacctcaagcacagcgccgacctcctcatgcgcatccagttcgccaaagaaaatcctcttgagcttgaccttccagcgatcaagctcggtgagcacgaagacgtaaccgag

SEQ ID NO: 275917 - DNA, 871 bp, Zea mays
acaccgcacaaggcgcctcgagccacttaaacagagcaagccgccgcggcggcgaccggccgaccgacgccgaggctgcgcgccctgcgccgggatcgagaggggaaagggaaggggaccagccggctcgcttggaggctggagctcgccccggcgggcccatggggggacgcctggtgtccatgctccggtggccgccggacctgggcctgcccagcctggccgcgctgctccccgcgccgcccgcgcacctccgggtccaggtccaggagtggtggcagtggcagtggcagcggtcgcggcccgagcagctgggcgcggcggcgcggcggtggcccgagctcgtgcgggacgtcccggtcctggtggacgccgcgctgtggggcgtcgtcacggccgtcgagtccgtcgcgctcgtctccatgatgtgctgcttcttcctctgctgcggctgcacgctctgacgatgggctccgcagtgccgccgcctgccaagcaaagcaagtactgctgccgcctgccagtatgggtgatgattcctccgtccgtccccatggcgtccgatctcttcgggttttttttttttttactgcgtgttggttgtggtggatcagctgtggctaggtggagttactgtcatggcaatggtaactaggatgtgatctgcgattgtatttgggcgccagttctccgccattttgagatctgacttgaagcagggtgctgtagcgatagtgcgggaaggggattgctaataaattggaagtaggtgcgtggtgggaacgcgaaaatatctaaagtatcgagtcagttgcgtaccagcctactactcctgaacctctggaaccgactttgtagtttgtatcagtgc

SEQ ID NO: 275918 - DNA, 463 bp, Zea mays
acagccagtacgtgctccaccggggcatccctacgctcggcgacggcggcaaggggacggcgacggctgccgcgtcggcattggggacggcagaccggttagcggtcaggcagcggtcctacaccgagctgcagctgttcaacaggaggtggaagaaggccgtggcggaggacgggtgctggaccgacccttacccgaacccggcgacgaccaccggctgaccgttggacggagcgaggcagcgcagggaagtacagtagttggtagctgtcagattgaccttgcctagaagatggtagtagatcatacactcgcattaatttacaggttcacagagagctatacatataatgtacagaactacagattgttttttttcctgtctcttgcctgtgatccatacaagggaataagcgtgcatgaataaaagaaattttgaaaatcataaaaaaagagaagggag

SEQ ID NO: 275919 - DNA, 390 bp, Zea mays
tcatcgatctggtccaaagccccaactcaaatttacatccaggccattcgccggagatggcgtcggagctgacgtaccgcggcggcagcgtggcgccaggctccgcctccaacggtggggaatactccccgaagtcctccaagccgctctcctggctcgcccgcgccgcgcgctacgccgccgccgagcaccgccccgtcttcgccctcgccggcatgctcttcgctgccgctatcttcaccttctcttccccctccactttatctccgtccgaacccgccgcgttggtcggcttcaaccaccttgccgtcagcgggcacccgttcttccgcgagtccgtcggcgggaaggttcccctgtggctgcttcggctctcgctgcgggtgctcg

SEQ ID NO: 275920 - DNA, 1075 bp, Zea mays
  unsure (1)..(1075): unsure at all n locations
ttgacgcctgggcggacgcgngggttaacgggctcttctactccaccgccgtcacgccatctcgccgggggcggaaccccgaccgcgagtatggggaacatcttcgtgaagaagcccaagatcactgacgtcgatagggccatcctcaccctcaagacgcagcgccgcaagctcgcccagtttcaacagcagcttgagaaggtaatcgaagcagaaaaggaagctgcacggcagttggttcaacagaagaagagagacagagctttgattgctctgaagaagaagaaagctcaggaagagctgttgaaacaagttgacacatggcaaatgaatgttgaacaacagctggcagatattgaactagcaagtaaacaaaaggctgtatttgaaagcctgaaggctggaaatgctgccctgaagtctatacagaatgagataaacattgatgatgtccaaaagctgatggatgacacagccgaggctaaggcttatcaagatgaaataaatgctgttctgggcgagcagctctcagctgaggatgaagaagctgtcatggccgagtttgaaaatttggaagctcagcttgccgtcgagtctttgccagacgctcctgctaccgaagtaaggcctgaagagaaaacgaaagctccggctgacacagaagctgctcctgaggacatcgatgacgttattgagcttcctgatgtgcctacgaaagtgccagagaggcctgaagctccagaaaaaaccaaagttttggaggagccgctgcctgcataagtggatggagctgagatgagtacggcacacttagtttgcaggaaattgtaacatacccaccatttcattgtactatctcattctcagccataccagaatttcatcgtgtacagcaagaaaaatttgttgtctttgactatcagttgtcactagtttggatttctcagtgcccgtttattatcctatcctacggggtaagcataatatttttccattgtgttcctttgtaaggcagaaatgctgaagtctgcaagcacataccttgttccgtataaatatatacctatgttttttt

SEQ ID NO: 275921 - DNA, 489 bp, Zea mays
gcagaccctgccccggttcaactgccgtggccgtctcgtccccgtccagtccacctttccctcttcctctccgactccgccgccggcggaaccccaaccggcgaggatggggaacatcttcgtgaagaagcccaagattaccgaagtggacagggccatcctcaccctcaagacgcagcgccgcaagctcgcccagttccagcagcagcttgagaaggtaattgaagcagaaaaggaagctgcacggcagttggttcaacagaagaagagagacagagctttgattgcactgaagaagaagaaagctcaggaagagctgttgaaacaagttgacacatggcaaatgaatgttgaacaacagctctcagatattgaactagcaagtaaacaaaaggctgtatttgaaagcctgaaagctggaaacgctgcccttaagtctattcagaatgagatatacattgatgatgtccaaaagctgatggatgacac

SEQ ID NO: 275922 - DNA, 353 bp, Zea mays
cccacgcgtccggccacggccaaagcagagcaggagcaggccgcgcggaacgagggaagcagcaggccgctagactagggagcggtcgccggcctcggcggcggagggatggggcgtgggggtgcggtgatggaggacggcgacagggaggagggaagctatccgacgctgctgcagcggtggtcctcgtcggtgtgggccgtcagcggcagcgggcgcctgctgtgggcgggcaacgaggcgtggcgggcgcacgtcgggatggccctcgtccaggtcgcctacggcggctaccacgtcctcaccaagtccgtcctcaacgtcggcatgaaccagatcgtcttctgcgtcta

SEQ ID NO: 275923 - DNA, 467 bp, Zea mays
ctacgcggacgcgtggtcagagccacgttagccgagagctcctctgctcctctcgtgtctggccgaacaggcagagcgaccagtctccagagcgctccccatggcgtcaggagctgcggcggcccctgtcgttcagactgtggtgctgaaggttgccatccactgccatggctgcaagaagaaggtccggaaggtgctcaggggcatcgaaggcgtgcaggacgtgacggtggacgcctcgcagcacaaggtgactgtgacgggcaccgtggacgccgacacgctcatcaagaggctgtacaagtccggcaagaagggagtgccctggcagtgtcacccgcccgccaagaacagcgagcccgcgccggaggccccgccggctccgcagcctgccggcgacggcggcaaggatgctgctgctgctgctgctgtggccgcggcggacaagaagtccgaggaagcggtga

SEQ ID NO: 275924 - DNA, 702 bp, Zea mays
agctgtttcgcgtgggggccccggcccggccgtgccggaattaccgacgcgaccgacgtgctcgtcttgtgtctggccgaacaggcagagcgaccagtctccagagcgctccccatggcgtcaggagctgcggcggcccctgtcgttcacactgaggtgctgaaggttgccatccactgccatggctgcaagaataaggtgcggaaggtgctcaggggcatcgaaggtgcgtgcctagccgtctagaaacacatgcctcttgcgagtcagcaggttcctgcatacattttgggctgtttttggctgaaccgagcggggtggttccggtgattggtttcaggcgtgcaggacgtgacggtggacgcctcgcagcacaaggtgactgtgacgggcaccgtggacgccgacacgctcatcaagaggctgcacaagtccggcacgaagggagtgccctggcagggtcacccgcccgccaagaacagcgagcccgcgccggaggccccgccggctccgcagcctgccggcgacggcggcaaggatgctgctgctgcggctgtggccgcggcggacaagaagtcggaggaggcggtgaaggagccgcaaggcgagagctccgaggagaagaagaagaagaagccggagcaggagcaggaggacggtgccgcagagaagaagcagcccgaagcagagtcataaaagggg

SEQ ID NO: 275925 - DNA, 294 bp, Zea mays
ctgtttttttttttttgcataatttgcatccagtgctaaatgtgaattcaatcatacagttgttttgtcaattaatcgttgtggtaaaagttcggagccgtaaatttatacactgatgatctgcgtgtaatatggaatgaatgtggtaacatcacctttcgtcaaaatatttgtgcagaacatagttaagcactcgagattttcaaatggcgtcctcaacgagcatctcatctacttggcgatgacaccagaccagattcttctatacataccttactatctgggtgaccactt

SEQ ID NO: 275926 - DNA, 521 bp, Zea mays
ctcatctcttcctcaagctccaaccgaactccctcacgccatcctcttccctggcgttcatccctgcggcagccaccacttgggcactcctctccctacccctcccatggcgtcaaagccccgagccaggttcccagccccctcatggctgcccctctctgctccctcgtttctccccatgccagcagcggcaagcagccatggcgtccagtcccagctcgcctagcccctctctgtttgtggcgtgctccagtttcccatggcgtcggtcctcaactctaggcaccagtcgcccctactccctgctcctgttcctcccatggtgtcccagtcaagtttgccctagccctctccctcttggttctttgctggtcacgctcctctccatgggcgcccaggtctcttccccgtggtggcagaccccatgcaaagctcgccccatgtccgaacttcgaaggcagtcgtctctactcctctccccatggcgacttcgccttcactgcttctatttttccccagca

SEQ ID NO: 275927 - DNA, 322 bp, Zea mays
aagcagtgtgccctcccattcagatttcatcctcggcgtcgtctcctgtcctctccacgccaagcaacctccccaccccgccccaccctccatgctcgcctcgagatcttagcgggcagctccggagagcgccgacgagccccctgatccctcctcgccgccgccgccaaccgaccgggggaggagaggaggggaggggagcgatggagaccgccgactactccgggaagctcttcgtcggcggcatctcatgggagacggacgaggaccgcctccgcgagtacttcggccgcttcggtgaggtcactgaggccgtcatcat

SEQ ID NO: 275928 - DNA, 513 bp, Zea mays
cccttgtttccgcttcttcaaagcccaagcccacaacctgcccaaaaaaaaaacccaccgggagcacacggcgcacccaaacatggccgctccgaccaccgccgtcgacaccaccgccccgcctcctacacctccctcggcagagcccgcggctgcacccgcaccggatcaaaaggtgtctcctcctcctcctgcccctcagcctgataccgctgctcccccgcccgtgcccgcgccagcgccgaggaagcggaagctcgaggaagcggggttccacacctccgaatgctacaagatccgtgccgtcgtcgccgacctgcgtgtccgcttcgtccaggtttgccaagctactgatttccgcaacacggatccagctcgtgagattttgaaagggctggtgctaagggacttgctgcaatctggtcagaaataaatgtggtaatggatctatccaagaaaatgaggctcaagcttggtgctacttctgagcctgtgaaaccactggagaaacct

SEQ ID NO: 275929 - DNA, 497 bp, Zea mays
gtcagcacacggcgcacccaaacatggccgctccgaccaccgccgtcgacatcaccgccccgcctcctacacctccctcggcagagcccgcggctgcacccgcaccggatcaaaaggtgtctcctcctcctcctgcccctcagcctgataccgctgctcccccgcccgtgcccgcgccagcgccgaggaagcggaagctcgaggaagcggggttccacacctccgaatgctacaagatccgtgccgtcgtcgccgacctgcgtgtccgcttcgtccaggttccccaagctactgatttccgcaacacggatcctgctcgtgagattttgagagaaataaatgtggtaatggatctatccaagaaaatgaggctcaagcttggtgctacttctgagcctgtgaaaccactggagacgccttcagctggacttgtgaaggatgagcttgtgaaaccatcagagaagccttcatctggacctgtgacgggggaactgtaa

SEQ ID NO: 275930 - DNA, 431 bp, Zea mays
cgcttacactcgctcgtttcacaacgcgcacgcaacatggccgctccgaccgccgccgtcgacactgccgccccgcctcctcctccctcggcagaggccgcggctgcacctgtactggatcaaaaggtctctcctgctgctgcccctcagcccgatgcgcccgcgcccgcgcccgcgccgaagaagcggaagctcgaggaagcggggttccacacctccgaatactacaagatccgtgccgtcgtcgccgatctgcgtgttcgcttcgtccaggttcccgaagctactgatttccgcaacacggatgctgcacgtgagatgatgagagaaataaatgtggtaatggatctatccaagaaaatgaggctcaagcttggtgctacttctgaacctgtgaaaccattggagaagccttcagttggacttgtgaa

SEQ ID NO: 275931 - DNA, 468 bp, Zea mays
gaacaccgtcaccacacggcgcacccaaacatggccgctccgaccaccgccgtcgacaccaccgccccgcctcctcctcctcccacggcagagcccgcggctgcacccgcaccggatcaaaaggtgtctccgcctcctcctgcccctcagcctgataccgctgctcccccgcccgttcccgcgccacgtccgaggaagcggggttgcacacctccgaatgctacaagatccgtgccgtcggcgccgacctgcgtgttcgcttcgcccaggttcccgaagctactgatttccgcaacacggatgctgcacgtgagattatgagaggtatataaatgaaacctatttctgtcttgttaggatgacaattgttgtccaattgaagggattcgagccaagattggcaattgttgtccaattgaaaggatttgagccaaatcttgggtttaatactggaaatgaatagctttt

SEQ ID NO: 275932 - DNA, 497 bp, Zea mays
gtgattctcctcttcagctcttctcgcccattccagctccgactgcgccggggtggcaccgttcaccccagcggcgccaggcgtccacgggatggtggttcttgtggctactgccgctcggtggcccgggggaagcacggccgcccgggcgcgcccgccggctgcgaggggcagggcccccctccgcgtcgccgccgagcccgagcacaaggcggccacggtcaggtttgaaaaatatagattgttatcatggatgaaaccaataaggcatgacgtcagggcccaaatgtccaatgtaaatgttggggccggaagttatggaggagatgaagcaaatggccatggagaacatttggatacctctgctaccggagaccccaacaaattagcaaaacaactttcaggatctcgttacctgcaacccgttggtgtcatgctatttctgtgtgccctggcaactagttttttcgttttctttaaaggacaatcatctgcag

SEQ ID NO: 275933 - DNA, 578 bp, Zea mays
gacatggagtactccagtttctcgtctggcaccgagcgagctgtcaagacatggcaggcaacggtaggagcttcagagaacgcgggggtgacatcggagctgcttgagtggctattctcggggaagaccggggaagacgtgaaaaccaaagatggcacaaacggagcagcggttcctgctgtaacagggatcgcggaggtacgcaaaactacggttgcagaaaacggtgtctcgggagtcggggtctccgagcacagagtgtttcttctcggtgaaaacaggtgggaagacccaaccagactgacgcataacaaaaagacagccagcaccggcactagttgcatctactaagacttgcatctcctgtcgaggcgaacgccgcctcatgtgcttagaatgtgatggaacaggtgagccgaacattgaaccgcagttcttggagtgggtcggtgaagatacgaagtgcccatactgtgaaggaattggttccattttgtgtgatgtttgtgatggaaagaaagtaatggcaagttaagtaaggcttatagcaagaattccctgccttgtctgtgttcggt

SEQ ID NO: 275934 - DNA, 305 bp, Zea mays
cagatccctctcccgtcccagctcgatcctgcccgatggccaccggatcgtacgcgggtggcgtccgacgctgagcaaccaggacaacgacctccgacgaccccccgagcccccacgagatggtcgcggaggcggcgccggtctcctcatcggcgatctggtcgtgtcaccgcgacgagatcaccttcgaccgcctccacaagttttggagtgccctgtcacctcatgcacgacatgagctgctaagacttgataaacagacccttattgagcatgctcgcaagaatttgcactgttcaaggggg

SEQ ID NO: 275935 - DNA, 428 bp, Zea mays
tcttcctcagtcctataactcttcatctccctatctatacacacatctcattaaactccttgatagtatttattcagcatgacctaacaaatacaaactctaacaacttcgactagctctacatgtactgctactatcttgctgaaactgtcgatttaatgagcgtacctgtgatgggcatcgcaaccgagtctaaagcaacaactgacagcgtatacagtgctgccttggctctgggaattgcgaaccaactcacgaacatactccgggatgttggagaggatgctagaagaggaaggatatatttaccacaagatgagcttgcacaggcacggctctctgatgaggacatcttcaaaggggtcgtcacgaaccgttggaaaaaatttaattataaatcatatcaataaatccaggatatttttttg

SEQ ID NO: 275936 - DNA, 356 bp, Zea mays
agagacttgaggatctgttcacgggacgtccttacgacatgcttgatgccgctctctctgataccatctcaaggttccccatagacattcagccattcagggacatgattgaagggatgaggagtgatcttaggaagacaaggtataacaacttcgacgagctctacatgtactgctactatgttgctggaactgtcgggttaatgagcgtacctgtgatgggcatcgcaaccgagtctaaagcaacaactgaaagcgtatacagtgctgccttggctctgggaattgcgaaccaactcacgaacatactccgggatgttggagaggatgctagaagaggaaggatatattttttt

SEQ ID NO: 275937 - DNA, 449 bp, Zea mays
ctcgtaggacgacgcaagactctaaagagacgtcgtattaagcgtccgctcacacagtgcagtcagtcacacagagcctactagccagcactgccggccagcagttcctcccgtgtgcaaactgcaaagcaagcaatggacatgggcttctacaagcgcgccagcaggggcggcggcatcaagcacaaggcggcggcgatgcccttctaccccaggaaaccggcgcaggtggcgcccgccgcgccggcggcgcagcatgccgtcagcaaggcgaaacagccctcagcgaccaccatgtggtcgattccggcaccgccatcgtcaaccgtggtcgccatggaggttgctggaaacggcatggtgctcgacggcgactccgacgtcgacagccgggcggcctcgtacatatccagggtgcaggagcggctccggcgcaagcgcatggccga

SEQ ID NO: 275938 - DNA, 513 bp, Zea mays
ggaattcccggtctcgtctcgagcgccgcccgaaacccccaacccccaaccaaactctctccgccgtcagcagccatggatcttctcgtcccgcctcgctcctcgtcgggcggcgtggagcccaagatccgccaggtcggcttcttcaccccggatgcctccgcgccgtccgagcccctgccccccgccgcggtggtccaggcaccatcggctcagcataggccggtcacggcgtcgcctccggcgtcagacgacttctcccaggggcgcctttcccctgtcatgatccctcccccgcgccatgccgaccacctcgccctgggcccacaccccccggcggcggccgacgtcgtcctcgccacttctgcgcccgtgcgttcgtccccgcgcctcgacatcgtgtccgagatcggcgacgacgactcctggtcacgcgctccttctgctgtggagctagaagaaaacaagcgtggtttggctgaaatacggaatgagggagctccagcttccatt

SEQ ID NO: 275939 - DNA, 300 bp, Zea mays
gagaccgcgagagacaggcgccgcacttaatggcgacgccaagccggtagggtggggcgcgtctctgctggttcaccccatcgccatcgttggtcccccaccacggcaggcctacggcgccgctgtgccctacaccgccgccaccgtccactgttccagccatgttcttcgattccgacgaggctgagtaccacacaaccctattagtctccctcaaatcgtgtgaacaggcgtatcttcttagatgaagtggcgccaagtcttcataggcaccagtttatcccttctctatgatctggt

SEQ ID NO: 275940 - DNA, 542 bp, Zea mays
gtcaaagaactaggagcacatacgcttgtatgtactgctttatataatgatggtgatggagagcgtaaatatcttccccagttctttaagttctctgtttcaaacccattatctgttaggacaaaggttcgcaccatcaaggacatcacatatctggaagcctgcatagagaaccatacaaaatctaatctttacatggatcaagttgattttgagcctgcccaacaatggagtgctacaagactggaagctgatgaacatccctcaacagtgaagtctgcaataggggatctctgtaaacaaccgatcctcatcagagctgggggaggaatatacaattacctttatcagctaagatcatcatctgatgaagctggtcaaacaaagtctgagggaagcagtatacttggtaaatttcagataacatggcgtacgaacctgggtgaaccaggccgtttgcagactcagaacattcatagcactccgactgcaagcaaagatgttaatctccgtgctgtgaaagttccacctattatatatgt

SEQ ID NO: 275941 - DNA, 665 bp, Zea mays
  unsure (1)..(665): unsure at all n locations
ctctgcccaaaggacgtaagcttttggcacgctatcttcgacttctgttctctggaagtgagctgacccgaatagtctgcatggctgttttccgacaccttaggagcttgtttggtggcttaccgtcagactatagtgctgcagaaacaaccatcgttcttgccaaggctgtttcctcttgtgtgcgccatatggaactcagtgctctcagtgcctgtctcgcagctgttgtctgttcttcgcagcagccacctcttcggccactcggtagtgcctctggtgatggggcctctctgataattaaatctgtgctggatagagcgaccgagctactggcggatccccattccgcagccaactacagcagatcagcacgttcgctttggcatgcgtcgtttgatgctttctttggactgctgacgaagtactgtgacagcaagtatgaaagtatcgtgcagaggtttgccatgcagggatccaactccatgggaggacctgaaaccaccaaagcagtcagcagggagatgcccgttgagctgttacgtgcgagtcttcctcatactaatgagcagcatcgtcagacactgctagattntgctcggaaatctacgcatctgcctggtttcagccctactgctaaccgtggacttgtcaattctgaatca

SEQ ID NO: 275942 - DNA, 543 bp, Zea mays
actgactccacccacccgcccgctgccttttccggatctcgtcggactcggatgcgccggaccaccccgcgccgccgccgcgcagcagcagcagagatgagccagcagctccctgcgaacctagtggagatcatggagcagagaatgaagttgatcgagcagaggagcgcgtacctccaagagcaaatcaaccagacagccagccgcctcgccggaagagtactcgagggctaacaaggagttccgcaagctggagagcaccatggagttgatcaaagacctgagatcgaaacaggaggaaatcgagggtctcaaatctttggtagcaaatgatcatgaagagaaagacatgcgtgagatggcagaagaggagcttcttgtggctgtcgaggaggagaaacgattgcagcatgaactgtttagatcgctgcttccaaaggatgaagcagatgaaaaggattgcatattggaggtgcgggcaggaactggaggagaagaggcttctttgtttgcaatggatatattaagaatgtacgagaaata

SEQ ID NO: 275943 - DNA, 904 bp, Zea mays
aatgtgaggaaaaaagtagaaaccattgtgggcatcataaatcacaacgagaaaatgggggccgtgacagatcaagcagccagtaatcctgataagtacattggactatcatccacaggcataacatataaatcaagctcagcctcatttggtagcaactacagttcaggcgaacgttatgggagtttcagtggtacaaaggaagctgactcatacggtgatagttacagggacaaagaatctgttaaaacttccacaagcaatagcggcagtcggaaatttggcagcaagctgaggaaggatgcgaagcctgataggaggaatgaggattatagttcacccagctctttgagacccccatctaatacaaataacactgaggacgactttgatgacttcgatcctcgtggatcaaatggcaaaacaactgctaagtcaaatgaggtggatctgtttggcccaaacttgatggacgatttaattgatgcatctgcagcaactccagctacagacaatgctgcagaaccacaggttgatctgtttgctgatgcagattttcaatcggcaaccgcaagtacagagacagctgcaaatacagatgtcaaggtcaatgttgacctttttgcggaaaaggcatcttttcctgcagcatttccaccacaggctgggtttattccaccaccaagtgccgggacatcttctgaagtaaatacttccgtatccaagaaggcagctccggaaccttttgatccttttggcgctattccgttgaacagttttgatggacctgacccatttggtggcttcagctcaaatgctggatcatctaccgcagcagcacccacccacggttcaactggaaatttcagcacatcgaaccagaaccttcatgctgcaaccgact

SEQ ID NO: 275944 - DNA, 477 bp, Zea mays
ctttcgcgtccggggcagttgatgacattcttgatcatttttctaagatctcggttctttcaagttttgagtatgttgagcctaatggtaaagacgctggaataaatgtgaggaaaaaagtacaaaccattgtgggcatcataaatgacaaggagaaaataaaggccgtgagagataaagcagccagtaatcgtgataagcataacatataaatcaagctcagcctcatttggtagcaactacagttcaggcgaacgttatgggagtttcagtggtacaaaggtagctgactcatacggtgatagttacagggacaaagaatctgttaaaacttccacacgcaatagcggcagtcggaaatttggcagcaagctgaggaaggatgcgaagcctgataggaggaatgaggattatagttcacccagctctttgagaccccgatctaatacatataacactgaggacgactgtgatgac

SEQ ID NO: 275945 - DNA, 285 bp, Zea mays
ctaccgtgctcgattcttccctgcgcgtctcctccgcttggagcttcctgcgctccctgcgtccctctgtcgccggaactcccttcatggccggagctcggccggcgctcggtcctgccactcccatggccgcgcccccccctgcttctctctctcagcgctcgcggctctttctctcctcctccgtccatggctgtttgcctctgctcgcggcgtccctgctcgcccagccgagctctccactgcccagctccatctcacggcgctctatctgctcggttccat

SEQ ID NO: 275946 - DNA, 363 bp, Zea mays
  unsure (1)..(363): unsure at all n locations
gtggaagacaaggccccgttctcgattaacccaagccaaagagtctgatggagagagatagatatagtcgtattggtcgtcacctgtcgaaggttttcggtgtctcctgagccacagctgctgctgctgctggaaccatggagatggaggccgtggagtcgcacggcggcgccggtcgccggacgcccaagagggatcgcggcatctcctgggcctgcgtcttcatcctggcgagtaactgcttccagttcatcgcctacttcgccgngtcgacgaacctggtgaactacctcaaggaccgcctgcaccagggcagcaaagcccccccgaacggcgtcaccaactggatgggcactagcgcca

SEQ ID NO: 275947 - DNA, 889 bp, Zea mays
aagaacagctatcagaaaggaaagtaactgaaagttctgggggtggcctctcagacaactgcaatatagacgacatcattaagggtagaagttcaccgccgcggcagcatccaatccctgagtgttctgtttcttctgcagatttagtgaattttccattcacagatccacagcatttgcagctacgtgcacagatattggtttagtggagctcttattcaaggaacaccaccaggagaggcttacatggtggcggcttttggagaacctgtaggtggtggcaaacctacatgggaggctgcttggcgagctgcttttgaaagatttcagtatcaaaaatcacctcgtatcagtttagagacccccacaagttcgcgtataggtagttctgtgcctgagaaagctagcaagggtacagcaattacatctgtgccagctagcaaaagaggtggcaaaactgtggcgccagcacatcctgctgtaaccctacactccccaacttctgattttccttttggtagttctacatttaatctgcaacgaggcactcatctggattttagccaggcagtatcaccatttgcgtataattcacacatgagacatccgtctcctggtgttgccccctggtatacgcagagccctggtccacgccctgcagcctggttaattccaccacaaaacttaatatttgattcatcaatgcaaccggttattcctacaaatgaaactgcgaagggtgcatcatccaaaaacatatccgtttcacatactgtttcatctggtgttcttcccagcctggcaccttctattgtttcttctccaatagcagttgtgagtgatggaaaacagaaggctgcttctagctctaagcgtggcacaacatcac

SEQ ID NO: 275948 - DNA, 785 bp, Zea mays
gttgcggttccggcggtcgccctgctggcgctcgctggactggcgtgctggcttctgtgtcgcaagagcgccgttgccaccattgggccttggaagaccgggctcagtggccagttgcagaaagcgttcgttacaggagtaccgaagctgcagcggtcagagctggaacgtgcctgcgaggacttcagcaacatcgtggcgagctacccgcactacaccgtctacaagggaactctgtcgaccggcgtcgagatcgccgtggtgtccaccatgatcacgtcgagcaaggagtggacagagcattcagagagctgcttccggagaaaggtagacgccctgtcgcgaataaaccacaagaacttcgtcaacctgctcggcttctgcgaggaggaagaaccgttcaccaggatgatggtgctcgagtacgcgccgaacgggacgctccacgagagccttcatgccgaggatttcgagcgcatcgcttggcgaggtaggatgaggatcgtcatgggactagcgtactgcgtccagcacatgcacgagctcagccctcccgtggcgcaccctgacatgcagtcgagctccgtactgctatctgaagacggcgctgcgaagatagcggacatgagcgtttggcacgaatgatttctcaaggcaaaacgacgacaaatggtgacgaacaagcgtcgtccgctggcctgctggcggggaatgtgtacagcttcggtgctctgctgcttgagatcatctccgggaagcttccgactccataccccgcacacgag

SEQ ID NO: 275949 - DNA, 610 bp, Zea mays
gggacttccattgacatgcaggtacaattgtttatgtttttccaagtgaacaaatgggggaatgtcaatcacactttttattcaagagtagttcatgtatttccatggctaagatatataggcttacatgtcttcatttccatttccatttccatttgctggattcttactaagtaatatttaaaggggcattgctgtgttttttcgttagttaacaaaagattgtttatatgctcattgatccatcttgaccttttgcatgatatgtagcttctcatccgggagtggcctaatgttctgtcactgttggggggtcttattgtaatcaagacactgataatcaccgcaattgggcctagagtcgggttaactcttaaagaaagtgtaaggatagggctgctactttctcaaggaggcgagtttggatttgtggtgttttctttggcaaacaggctcggtgtcctaccacttgagttgaataaactgcttataattgttgttgtgctgtcgatggcattaactcccttactcaatgaagttggaagaagagtagcagggatgattgatgaaagatctgaagaaaaagaaaagcctgctgagatggtgaatt

SEQ ID NO: 275950 - DNA, 384 bp, Zea mays
  unsure (1)..(384): unsure at all n locations
cagattcttgccaagatcgtggtcggctgcgtcggagtgaactcgccgatcgcgaggtggatgggtttctcggagccccggtacgtcgggcacatggcgttccggggcctcgcggagtacgccgacggccagccgttcgagcccaaggtgaactacatctacggccgaggcgtccgtgccggctttgtccccgtctccgcaaccaaagtctactggttcatctgcttcaacagacaagatccagggcctaagatcaccgaccccacggcgctcaagaccgaggcgctggagctcgttcgcggctggccaatcgacctnctggcggtgatgcgcatcacgctccgatggcgccgtggtgaggacgccgctggtggaccggtggct

SEQ ID NO: 275951 - DNA, 439 bp, Zea mays
gcttggttacaaaggaattaaggtagcacttccccgggaaacaacaactggaaaatgtttcatgcaacattatatagagtctatcctggttttacaagaggccagctgcaaaacggttgatgatgggtgccaaacaaagattccatttgtcattatgacttctgatgatacaaatgcgctaactatcaagcttttggagtcaaactcctactttggaatggaaccatctcaagtgaaattgctaaagcaggaaaaagtagcgtgtctagctgacaatgatgcaaggcttgcattagacccaagtgacaagtacaaaattcagacaaagccacatgggcatggagatgttcattctcttctctattcaagtggcttgcttgaacaatggaagactgaaggacggaagtgggttctctttttccaggatacagatggattg

SEQ ID NO: 275952 - DNA, 389 bp, Zea mays
acccgcctcgcccgcgcccgccgctccccacctcgccggcccgctcctcctccccgtgtccgcggcttccgagtcccgccgcggggcgcagccgctgccgggcacgcggatggtcggcgcgggcgcgaccggcgggggtaacatggccagcggtggtggggggcccgcgttcgtgggccaggtgttcaccatgctcgacccatccgggaacgggctcatggccgttaccacacgcttcgagctcccgcgcttcctcaccaacaggactcctatgtggttcaaaaggatgctatcaccgtcgaagaagactgaaaatagtccagtatttaagttttttatggatctgaatgatgcagtatcctatgtaaagcgactaaatgtgccaagcg

SEQ ID NO: 275953 - DNA, 569 bp, Zea mays
cccacgcgtttgccctcgcgtccgcccacgcgtccgctcacgcccgccagtgctcgatcccagctccttgccgcgccttccagtccctctgccggccatggagctcggccctagctcagattcttgcgccgcgcccggctgtttctcccctgcgtgccgtggctgtgccgttcctgtgtgcgcggctcactgctcggcgtccattcccctgtgctcaccatggtcgtcgttgctccctggtgtaagttgccgcacacgttgtatcccagctcggagctccctctgcacagctcagattcagcccagccgtgctgagttcggcctttgcttgtccctgtgcttgagctccgtcctcccagccatggcgcacacactggttgcctctgctcgagctcgcccggccagagttcccggtcgccgtgtcctgtcgagcttggctccgtgcgtgcgctttttctcccttagctcgccccgatgccgcaccttgaagccctcttgccggtgctcgagaccccttccatgcctgcgcatcctgttgcctgctcgcaccctgctctctctgacgcgcg

SEQ ID NO: 275954 - DNA, 337 bp, Zea mays
gcccaaaagatccttctgtgattatcaaggaggtgcccagcaaaatagttgccgttgcagccttttcaggtttggttactgatgaatgatataaaccagagggagtctaaattgcgcgaatctctccgtaaagataccacatttagagtgatagatgattcggtggtggaagtcgcacagtacaatccaccgttcacacttccattcacaaggagaaatgaaatagcattggaggttgagaggaacgatatagccttatgatgtcctagattaacaaataaattattggcatttgagagtgtatgtaagctgccatcgtccctaatgcatatatgta

SEQ ID NO: 275955 - DNA, 571 bp, Zea mays
cgcaactggtcgacgacgacttcctcgtctctctcctccggcctcgagtcgcctccgatccggccgagaaaacaaaacaaaccgaaagaagaaaggcgacgaggaagagaaggctctccgcgagatctgggggagctcccattctcaagatgcacgacttctgcttcaccatcccctacgggttcgccgtgctggccggcggcgtgctgggctacctccgccgcggcagcaccgcctccctggcggggggcgccggcgccggcgcgctgctcctcctcgcgggcttcgtcagcctgaaggccttcgagaagagacgcaactcctacgtcgccctcgcgctcgagacgctttgcgcattagccttaactgtcgttggggggcaaagattcctcgagacttcgaagattatgccagctggtgtccttgctggcctcagtgctgtgatgtccgcgttttatctgttcaaaattgcaagcggcggcaaccacatcccaccaaagaaagagtaaactggactctaacttgtaaagtatgttcgattgaactcggaagactactagccactgcgtta

SEQ ID NO: 275956 - DNA, 554 bp, Zea mays
ctcgcctcggcctcttttaaatatcgcgcatcccggcgccgcaaatggctcacgcggcgctgctccattgctcccagtcctccaggagcctcgcagcctgccgccgcggcagccactaccgcgccccttcgcacgtcccgcgccactcccgccgtctccgacgcgccgtcgtcagcctgcgtccgatggcctcgtcgacggctcaggcccccgcgacggcgccgccgggtctgaaggagggcatcgcggggctgtacgacgagtcgtcggggctgtgggagaacatctggggcgaccacatgcaccacggcttctacgactcgagcgaggccgcctccatggccgatcaccgccgcgcccagatccgcatgatcgaggaggcgctcgccttcgccggtgtcccagcctcagatgatccagagaagacaccaaaaacaatagtcgatgtcggatgtggcattggtggtagctcaaggtacttggcgaagaaatacggagcgcagtgcactgggatcacgttgagccctgttcaagccgagagaggaaatgctctc

SEQ ID NO: 275957 - DNA, 995 bp, Zea mays
ccagaacagacaacccgtccttctccttcccatcggctccacacaaccagaaggttcttcgcttcactctgccctgcgccgccgccaacgctgcagccgcagttgccgcaggcgggaacttggacgtgctactcgcgactgctctcatctgttcccgcgtaggattcgttcacaatggcccgtgtgtatgtcggcaacttggatgcacgcgtgacttccggggaactcgaagatgagttccgtgtgtttggagttctgcgaagtgtttgggtcgcacgcaaaccacctggttttgcatttattgattttgacgacaggagggatgcagaggatgctattcgtgatctagatggtaagaatggatggagagttgaactatctcgtaattccagtggtcgtggtggtcgtgatcggtatggtggatctgagtcgaagtgctatgaatgtggtgagactgggcactttgcacgtgaatgtcgtctgcgcattggctctggaggtctaggcagtggaagacgtcgcagtcgcagccgcagtcgcagtcgcagccgcagcaggtgccgcagcagaagccgcagccctagataccgcaggagtccaagctatagtagaaggagctatagccctcgttatcgctctccaaggcgccgtagtccttcgccaactcgcgcgcgcagctatagcaggtcaccatagtacaactgcaacgatgcttgttagtgatgcacaggtaatggtggcaggtactggtgtagcaggagctaggcctgaagcccgtgcctgatacttcttggtgtgagaacttagtccttggtttggctgtcaggaacaaatttggaactgtcgtcaactgcatgacttcagttcaggtttaaaaccttatctagcttaattgtgattgccttgattatgccattatagaacttaatatttggatgtattatgcgactaagacatattacctttcttctctgttgaaaaggcatgttctgctt

SEQ ID NO: 275958 - DNA, 857 bp, Zea mays
ctcgttctctccttcctatcggctccacacctccacgcaactggaagcttcgcttcaatctgccctactcctccgccgcctccaacaccgcagacgcagctgccgcgggcgggagcttggacgtgctactctgctctcatctcgtttccgcgcaggaattgttcacaatggcccgcgtgtatgttggcaacttggattcacgggtgacttctggggaactcgaagatgagttccgtgtgtttggagttctgcgaagtgtttggattgcacgtaaaccacctggctttgcatttattgattttgacgacaggagggatgcggaggatgctattcgtgatctagatggtaagaatggatggagagttgaactatctcgttattccagcggtcgtggtggtcgtgatcggtatggtggatctgagttgaagtgctatgagtgtggtgagactgggcactttgcacgtgaatgtcgtctgcgcattggctctggaggtctaggcagtggaagacgtcgcagcaggagcaggagccgcagtcgcagccctagataccgcaggagtccgagctagaatagaaggagctatagccctcgttatcgctctccaaggcgccgtactccttcaccggctcgtggacgcagctatagcaggtcgccatagtacaactgtgacaaatatgcatctccctcgttaacggagtaatgatggcagatactggtgtagcaggagcttggcctgaagcccgtgcctgatccttctctgcgtgaggacttggttcttggtttggctgtggggaacaaatttggaactgtcgtcaactgcatgacttcagttcaagcatgttctgcttaaacgact

SEQ ID NO: 275959 - DNA, 339 bp, Zea mays
gaaacccccttcctctccccgtcccgttcgcccacatcccccacctcccccatccccaacgctgccatggcctcgctccaccccacgacagcaatgctggcccagcgccattcccctgccccctctctcagcgcatcgtcgctctcatggtccgcctccatcgccgtctcccgcatcccgccagcccctggcctcgcgctccacccactagtgaatcctcccgcctccggcaaccgccagagcccggtggtgtgtgcggcgtggacgcggcggtcgcgcggtgaggcggacagcggcccaaccgcaagtcgtggaagcagcgcacgaacatgtacatgc

SEQ ID NO: 275960 - DNA, 359 bp, Zea mays
ccaaagcaacatgtttaagtccctgtggattttgctcgagggtcaggagcgctttcaggaagaggctttagctgtaccaaatcacccaagctcagtgggcgatgatcctcagcaagatgaaagtaaatcttcaagttccaattcttgcatctactcgataaatgcaaaactgaagaagttttccgattggctcctggacatcatagcgacaggagacctagatacattcttccctgcagctacccgtgaatatgctccagttgttgatgagttgtggaaagatcctgccattcaagcaacatacaaaagaaaggatgaattgcattttctccctgatgctgctgagtacttcttgagca

SEQ ID NO: 275961 - DNA, 529 bp, Zea mays
cccacgcgtccgagtgcgtgcgcccttttcttcgctcacattcatcccgcgttcccgcgtgctctctctctctctctctctcgggccgtggcgtcgagtgggcgaccgccgccacccccgtgccgtgcgctctctctctctctctcgtgtcgacgggtgggtgggcgaccgtaggccgccgccgccgcctaggccaggtgcccaggtcgaccttcaacagcgacgagcatccaccagatttctacatgagtgtgatcttcctattgtgaattcagacgcaatcaagtatggcttcaatggcaatcattaggagaaggaagtatttcttggatcatgttaacacacctaccatttcatcgtctgctttctttacattccaacatggaagactcggtttggaggttgagccaagaacagaacagcgatttctcgagcatagttctggggattccaaatgcgagaaggagcaacacaatatgaatttgataaaaaaggatctactaggtcttggtaatgggttttggcaacg

SEQ ID NO: 275962 - DNA, 323 bp, Zea mays
cgcgtccgcccaagcgtccgcagacgcgtgggcagacgcgtgggggcttgcggtggatacctaggcacccagagacgaggaagggcgtagcaggcgacgaaatgcttcggggagttgaaaataagcatagatccggagattcccaaataggtcaaccttttgaactgcctgctgaatccatgagcaggcaagagacaacctggcgaactgaaacatcttagtagccagacgaaggaaattcagaacagtagtgctatgaagagtttgtgcacttcagttttaggacagtcagtacttcaagttctccaccatttcattaaaac

SEQ ID NO: 275963 - DNA, 485 bp, Zea mays
  unsure (1)..(485): unsure at all n locations
accaagacaagaacagaagctcttcaggcaatggaaactcttgttgtcgccttacggtgggccggtagagttactggtattatgtgctttacgttatcagtgtcgcctccttttgcattctcacccagcgtgtacagggttttagtatgttggtctaggttactttgctgatcaaggttcgaatgtatttgttcttttaaacatatgcactccgatctttatatgatggaccatttctttgtgtctgtgacggcgtttttttcatgctcggcatgttgcacagctcttgtttctgtgcaagattcaaaattttacccagcaaattttgttctttgccaactacgggtgacaggtgacagtgtgctctaaattttacactataaacgctagtttgggagccacanaaccggaaaggattgtacaggctaaaatttatttcttatttaaatttgattaagaaagatattttagtccttccaatccta

SEQ ID NO: 275964 - DNA, 381 bp, Zea mays
cctcactcaggaacacacacgcacgcagacggcagacctcccccaaccgctctctctccctccctgtctctctgttcaatctctcggctcgccatggacgctccgagcaactgcacgcgtcctgcgcgcgccaagtgaccgaacaagctgagctctgctgctacagttgcttgcccctgtgccaaactggcaggaggtaggtagcttatagcatagcagctagagctaagctgtggtgcgtagcggcagctagagctagcttgtgcacgcgcaggtgcgtgctagctagctagcttgttagctgtgtactagctgtgtagcagcagcagcagcacagtagcagtagtcggtgataaaaggaatttctttggggacatgtcg

SEQ ID NO: 275965 - DNA, 419 bp, Zea mays
cccgactcgacccacgcctcccatgcgaggcatcaaggtctacttcaagcgctccacagcagagtggagactggagagggttaggaacactttcaagggaatcgagggatcccacacgtggccctttcagattatgtagcatatctcctgagatagtacttcttcaacaacttgcactatcgattgagtacatgccctttctatagtcagattgcaaagaaatggcttgactctcagtttgccagatctaaagcatcagttgaacggtcataatggcgaataaacaaagatctcggccaagcatctctaaaaggttcagcttggttgtaatcaataaactggaggaatgtagataccaatgtcgtcttactccatcagaagctactagcttctaatgaagaaccaaatttctggaaaaa

SEQ ID NO: 275966 - DNA, 554 bp, Zea mays
tgcactgcagggtacgctcgtctgtgtctgcctactccctcctccggctcccgcgaagcgactccaagaagcagcaggagcgtcgagctcgagcagcagccatggatggcgaggaggttggcaggaggggtattcctactctgctgaagccgtcttcctcctccagcgacggcagtgccggggaacaagagcacatcgcttctgacgtcactcagctcataggatggacgccgctggtcgaattgaagcgaatcgccagcgaggctgggatcgatgcgcggatcgtcggcaagatggaggcttaccagccactttgctccatcaaggaccgctctgctttgagaatgatagaggatgctgaggagaggggattgatttcgcctggagtcacaacactggtggagccgacgagtggtaacatggggttagggttggtcctcttcgctattcagagaggttacaggctcattgcagtcatgccggctaaatactcgcttgacaagcagatcttgctgaggttcatgggcgcggagctatacttaactgatccgggc

SEQ ID NO: 275967 - DNA, 540 bp, Zea mays
  unsure (1)..(540): unsure at all n locations
cactattctgcccctccgaccgtgtgcacaggaaggaagggccacaggcagcgcacatcgcggtcgcagcttgccgtgccgagcgaacgtccacaaagcggccagcgaggctctccgacaccgagccgcgctccgtggcgcacgcaacgatgcccttcttgctcacgccgggcgctcgggcggtgccctcaccgtcaacgctctcgcgcctactgcttccgctccacctacaaattactaatggccggcataaccgtcacgtccccgcctcccccctcctataccctcgcctccgcaaccgccgcagacgattcttcgcggcctcctcctcctcctcgcctcagatggcggcgcctgccgacgccgccggtggctcctctgacgcgttcgaagtgatccgcgttcaccaggcaaaagctgttcgtctttctccagctgaagaaatacggaccattatggaccgaagtgtcaaaagtgttcttgctacccattctcaggattatgctggntatccatctgggtcatgggttgattttgcat

SEQ ID NO: 275968 - DNA, 1590 bp, Zea mays
cccgctccttgctcgcctccacccgcggccaccaccgccctgcggcccccgccgctggctagcctccaccgcgccgcgagtcacgccgttcatgcaccggctggtcctggagcacgggaggacgagcatgtcctggttcggccccagccccaaggtgaccatcgtcgacccggacctggccaaggacgtgctgtccaacaagttcggccacttcgagaagctcaaggtcccggcgctgtccaagatgctgggctccggcgtggccagccacgagggcgagaagtgggtcaagcaccggaggatcctcaaccatgcgttccatcttgagaagctcaagcgcatgctgccggcgttttctacgtgctgcgaggagctggtgagcaggtgggcggcggagtcccttggctccgacggctcgtgcgagctggacgtctggccggagctgcagaacctgacgggagacatcatttctcgcaccgtgttcagcagcagctacagcgaagggagaaggatcttccagctacaggtcgagcaagcttcgcttgtcatgaccaacattcggaagatcatgatccccggctacatgtacttgcctaccgcgaacaacaggaagatgcgcaggaacaacagggaggtggagtcaatcctgcgagagataatcgggaagaggatccaggcaaggtgggtctactgctggagacaaacatgagagacgacatggggatgacgatcgaagacgtgatcgaggagtgcaaggtgttctacttcgccgggatggagaccacgttggtgctgctcatgtggacgatggtggtgctcagcatgcacccggagtggcaggaccgcgcgagggaggaggtgacggctctgttcggcagggacgacaagcccgagtatgacggcctaagccgcctcaaagtcgtgaccatggtgctctacgaggtgctccgactgtacccgccggccacctccgtcgtccgacaaacgtacaaggagatggaggtcggaggcgtcacctaccccgccggcgtgatcttggagctgcccgtgctgctcatccaccacgacccggacatctggggaggcgacgcgcgcgagtttaggcccgataggttctccgagggcgtgtccagggcctccaaggaccccggcgcgttcctcccgttcggttggagcccgcgcatctgcatcggccagaacttcgcgctgctggaggccaagatggcgctctgcatgatcctccagcggtttgagttcgggctcgcgccatcctatgctcatgcgccgcataccatgataaccttgcatcctatgcacggtgcgcagcttaagctcagagcaatatgatctcgacacgatgggtgtcccatcgttgatgccattgttatgtataaccttacaattcagataggcattcggccctgttaatgtctgaaataagtatcttcgcgttggcattttgtaatgtgcttttcacgtaccattggtgctttattgccttttgtatataaacatgtggatatatgtaactcatacattacccaacaaaaaaaaaaaaaaaaaaaaaaaaaaaaaaaaaaaaaagggcaa

SEQ ID NO: 275969 - DNA, 799 bp, Zea mays
cccacgcgtccggaagctcaaggtcccggcgctgtccaagatgctgggctccggcgtggccagccacgagggcgagaagtgggtcaagcaccggaggatcctcaaccatgcgttccatcttgagaagctcaagcgcatgctgccggcgttttctacgtgctgcgaggagctggtgagcaggtgggcggcggagtcccttggctccgacggctcgtgcgagctggacgtctggccggagctgcagaacctgacgggagacatcatttctcgcaccgtgttcagcagcagctacagcgaagggagaagggatcttccagctacaggtcgagcaagcttcgcttgtcatgaccaacattcggaagatcatgatccccggttacatgtacttgcctaccgcgaacaacaggaagatgcgcaggaacacagggaggttggagtcaatcctgcgagagataatcgggaggaggatccaggcgatggaacaaggcgagggcccaaagacgactggtgggtttactgtgagacaaacatgagagacgacatggggatgacgatcgaagacatgatcgaggagtgcaaggtgttctacttcgtcgggatggagaccacgttggtgctgctcatgtggacgatggtggtgctcagcatgcacccggagtggcaggaccgcgcgagggaggaggtgacggctctgttcggcagggacggcaagcccgagtatgacggcctaagccacctcaaagtcattgcaagaacgggactgctaagcaagctaagatttcaatggcatattccttca

SEQ ID NO: 275970 - DNA, 1142 bp, Zea mays
cttgaattatttgaagccgccaaaggagcaaatgatctcaatgctattgcagctatattagggaaatatccatatcatccagaatcactgttgacatttgctgagcttttcaaatattctggagagcatcaatcatcagcagatgcagtggagaaatgcctatttgcattggagtgtgcttggcatcctttatttagcccacttcagggcaactatcagttgaaattcaaccatgacacaaataagccactgtttacagcactctttagtcacatgaaaaatctggctaggcgtggctgccatcggtctgctttagaggtctgcaagtttctgttgtcactggactttgatgatccaaagggttctctgttttgcattgattactttgctctcagatcacaacagtacaaatggctggagcaatttgcagaagagtaccagtgtgataactccttgtggttatttccgaatttctcattttctcttgctactgcacggttctaccttgagcgtgatgcagcgtcagagggttctgatgatgctgacaagtcaacatctcttgatctcatgaagcaagctctgatgcttcatcctatggtgcttcgcaagatagttgacaaggctcctctgaaagactcatcatggacccaaatactcggaaatgtattctttggatcagcaaaaccgggaagcccttcacttgagcatatgatcaatatatatgtggaacgccattatatcatgtggagattcccagaactgcagaacttgctgaaagaggctgctcttttggtgattgaatcactaaagcaggataacagagaagccctggactgggcttgtgttagaaaagaagcattctcgtcagacaagaatgagtactctcatctgcttgtttcagacttcactgacacaacgccgtcgctcccaccagaagaactgcgaccatttatggtcggtccaggaatgttgcatgagatgccacctgttgaacaagaagctggacccgagagactccgtgctcctcgtgaagtcgctgggcgtaatcctgcagtagtcttccttgaatcactgctcccatgggtcgactatggtgacaatcatcaaggtgcaaatgacgacgacaacgacgacgaatgatc

SEQ ID NO: 275971 - DNA, 584 bp, Zea mays
gtgaggtacctgatcgagagcatggatcatcgctcagatttgcggaagaagatggcggaggaatctcgtaattcagtaccatccggctcccaggggcaaactgcaaagccaaggccattccccgtgcctgatgggataccgaaaacacaggaagagctcaccgaagaagaggaagcgttgatgccagagtctccatacacaaggttgctgagaaggatgggtagataccctgaatggtacaccccacgccctgatcatgagactgactgaatcaagtcatctaccatccaggtgtcccttttggaagttttgcagcatgataatctgaagctgaagctcgttttatggtatctggtaatattttagtgttgcacctatgctgctttgcagattagacttgtcctcttctacttattaatgaaaaccggtgtgtgcggtttatgctgtaaatacctggagtgttcagaatatgttttgttcgaggttctgtgtactgaagtacggagtactaatgaatttccttgtacataacatcgaataaaatcactgggttttactttggttaaaaaaaaaatgaaaattaa

SEQ ID NO: 275972 - DNA, 393 bp, Zea mays
gctacccggcaccaccaagagccatgtacggcgaccaacaccacaatcacctcgctgctgctggtggctacacttcctattccaccaatgctgctgcaggtaaccatctcttgtaatggccggccgatcgatcgatcgagagctcaacaattcaagtgtcctgctatagctagctactacgacgtcgtgctacgatcgtatcgggttcggttcgttcctacaaatatagcctagagatagagtgtctctgtctgtgtgatcgatggtattgttatgatcatatagaaaagaccagtgtagcatgcatatgcacttgttgcaatggttgctttcaagaagaaactggaaggaggagaggctcggtttggatgctgatcatgcacaaatattact

SEQ ID NO: 275973 - DNA, 1200 bp, Zea mays
cccacgcgtccggcaagtgtttactatgaattagcttgctgtctctgcaataatggaaggtggagagatgctatgttacaggttgagaagctgaaacagcttcccctcacgaaaccactggagtacgcatttactggaatgatcttagcctcatttaatggtggatatatctatgattgcatctcaatatttgaattaatgaaggaccactgcatgccaaatattgggactgtgaatgtcatgttaaaagtttatggacattgtgatatgtttgggaaggcaaaggacttgtttgaaaccaccgaggcttgtttcttaaattctcagacatatatccacgagcattcgtcattcaaagcagacacatatacatacaactctatgcttgaagcatctgcctctgcccaacagtgggaatacttcgaatatgtgtatagagagatggctctgtctcatcactgtctagatcaaagcaaatattcatggttgctcatcaaggcatgcagagctggaaagccatatttgctggagcatgcacttgactcgatacttgaaagaggaagagatccctgatgtacaagttgattactgaatcgatttgccagtctattgctcatagagattatggaaggacgctgcagctcttgaatattatgacccaggcctcaataaaaattaaagaagtcgagtgggattacctactacagcaaaatatgcatcaattcagcattgatgccctcgagggccttataaagtatctcagtactaatggtactaccaatgctgatcctgcagttgatttagtaagagcactgcagtcccaatgccgggacgataccagtactcaacagtttgaactctcttttcatggaagtggaaacaaatattcatgtagcagtctggcagaactagatcagctcacttgcaagaacttgtgcactgatataattcttgacgtccctggttctgatagagagatgcctcagttaggtgtcagtgctctcatgtgcagggacatctcattaaacggtcaacgagtggaaaacaaacatgagctttctgatcttgggcagaggggtccacaggtatctgcaattgacaaagtacttgattccatgaattcttatggtgacaattcgtatggggagatgccatcagcttcaaaaattcttgagctgtgggagcatgagaggtaaatga

SEQ ID NO: 275974 - DNA, 896 bp, Zea mays
cccacgcgtccgggtagctgtgaaggtgcagagacctggtatcgaggaagccattgggcttgatttttatctacttagaggacttggctttcttataaataagtatgttgacattgtaaccagcgatgttgttgccctcatcgatgaatttgctcgaagagtttttcaagagcttaattatgttcaggaaggccaaaatgcaagaaggtttaagaaattatatgccgataagcaagatgtattagtgcctgatatattttgggattacacaagtgcaaaggttctaacaatggagtggattgagggtgtaaaattaaaccaacaagcagttattgaaagtcaaggattgaaggttctggatttggtcaacattggtatccagtgtagcttgagacagcttctggagtatggttactttcatgcagaccctcatcctggtaatatattagcaacacctgaggggaagctggcttttcttgattttggcatgatgagtgaaacaccagaggatgcgacgggtagccattataggacatgttgtccacttagtcaacagggactatgaagcaatggctcgtgattattatgcactagatttcttggaacccgatgtagatgtttccccgattgtgcctgctctcaagaatttctttgatgatgcactaaatgcaacagtgagtgagttgaacttcaagacaatagttgatggcctaggtgctgttctctatcagtacccatttaatgtaccagcatactatgcattgatactgcgatcgctcaccgtgctggaaggtttagcactctatgctgaccctgattttaaggtgcttgctgcatcatacccttactttgcgaaaaggctactgactgatcccaacccatatctcagagatgct

SEQ ID NO: 275975 - DNA, 404 bp, Zea mays
gcgcaccggcgccgccgcatgcctcgtcgcctacttggcgttcccggcgctctgcgacaagggcctcctcccaccgacatccaaagacaagtcccagctggacataccgctagacgggctcacaccactacgcctaagagacatggtgttctcgcccactactacacatgcgaacatgacagagtgcctaaaatgcctggtcgacgcaacgaggagttgttccggcgtcatattcaacaccttccgagacctggaggactccgacctccagaggatcgccaatggcctcgtcggagtgccgatctatcctgtcggccccctccacaagatctctccatgcaccgaggacagcttactggcgccggaccgggcgtgtctagagtggctggacaagcaagaggcgg

SEQ ID NO: 275976 - DNA, 349 bp, Zea mays
aggaagaaacacattggaggggctcatccggttcatctacaaggccatcaaggagcggcgggcccggagctacgggtactactactcgcggtgcaactccaccggctcgtcgcgcggccggctcggggcccgcgtggaggacagcgcgtgggacctgcagcagaagcagtgggagtccgccgccggtggcaaggcgccggcggtggcggcggcggagcgggagatggcgcaggcgcaccgccgccaccgctccctcgacgagctggcgggtgggggtgggcgcctcgccccggtgccgcctgctcgactgctacgagtccctcatgtgcccgtcggtgacactgggcct

SEQ ID NO: 275977 - DNA, 273 bp, Zea mays
  unsure (1)..(273): unsure at all n locations
ttnccgaaggaaacctttggatcaaattatgacccagatccaagcggttttattgaaaagggggaaagatgttaaatctttggaggctaaactttctaaaagtgagcaggcattgaatgataagaagaaatcaatggaaaacttgcacaatgatcttgatgccaaatctaaggctctgaagagttgggatgaatcattgaaaaatgacgagaaaaggttactgaaagaaaagcagcaaatggatcatgaaagagaacaattggagacatacaa

SEQ ID NO: 275978 - DNA, 402 bp, Zea mays
cctggaaccaggatagggacagagacggagccacggtcgcacagagcagtcttagcgccggccacggccaccgggagtagctctggccatgaggacctcaacggctacctgtgctatcctccctccgcctacctgctcctcccgtagtttaccgctccgcagcttcatcggtctccggtggtccgccccccgtttccaggttagggagcgagctggtgcgtccgtagcggttgtcaatggcaagccgggatgcagcttcagactcggagtacctactttaaatgtttgtcaatctcgccaaaggtctgttgtcattagaaatgaacatgctcaaaatgctgaccttccacgaaaatattcaaaaagagagaagaaaccatttcctatcccagtgctggagtt

SEQ ID NO: 275979 - DNA, 770 bp, Zea mays
cacctctgcctgggccctacggctccgtctcgatttcgacaagtttatcacaatgccacgccggatgccaagtctctcaaatctggaatcctttcacgccgccactctcccctttttccttctctcttcgtcgttgtggctcctgccttcctgcctcggcgcatcgactcgcggagagggacagcacagcgcctcctccccatcctttctccattcccagatcgaaggtccataaaaaaccatccttttgcatctgattgagcactgtctttgtgcaagagaacaatttagttgtacatacaaacaaaaagaagtgggagtatttttcagagtttattagaagagactgtttcgaggacccaggtcagagaaaggcgagaagctttagcagcggcaatggtctggtcaatggacccgcaggtgaccgtccacggcgactgggtgtcagccgtggtgccgctgatgaagctgctgtgcctggcggtgatcggcctgctcctcgccaacccgcgggtccaggtcgtgcccagggccaccttcaagctcctgagcaagctcgtcttcgcgctcttcctcccctgcctcatcttcgtccacctcggcaagtcggtcaccatagacaacgtcctgcactggtggttcatccccgtcaacgtgctcatcagcactgtcatcgggtgcgcccttgggtacatcgtggccctgatctgccgaccgtcgtcgcacctgtttcggtttacggtgatcatgactcggttcggtaacacggg

SEQ ID NO: 275980 - DNA, 1140 bp, Zea mays
ggaaattgcggaacttggtttgatcaagctgctgagtattggaaacaagctatagcgcttactccaggaaattatatgggcgcacgcgtcgggttaaagattacgaagcgctttgaatttgaataagaccactctccattttcataaaaagggtggtttggttgaaaatcaaatcaagaatttcattatatccctttcttctaccttcaattttatatcatatttcataaggataaacaatagggataggctctggaccagaagtaataaagtacataaaaatcggcaatctaaatattcctacctaatatatcaggacggtcttattaataattctaatgagttatcttggaattttgaatcgaatcaaaaaatctatattatgctcactcaaggaaagtagatgtagataggggcttataccctcagaaaaaaaatacaccagcttcttaaattaaaacgtaaaaaaagatttttttgttatgtcgggaaataattttccagaataaccaatgtccgttaggcacctaatccttatgtcataatagatccgaacacttgcctcggattgacttcaatatataattgctccagtgaataactaaaaaaaaaaaaatagaaggacggtagagagtagagaaaaggactaatcataatatctatctttaaaagattcaataaaaagacagttggcgggtctctttgtatgtcttgtccggaaagaggaggacttaatgattattcgttcgtcggaaccagaagttaaaattgctgtggatagggatcctataaaaacatcttttgaggaatgggccagacccgggcatttctcaagaacaatagctaagggccccgatactaccacttggatctggaacctacatgctgatgctcacgatttcgatagtcataccggtgatttggaggagatctcccgaaaagtctttagtgctcatttcggccaactctccattatctttctttggttgagtggcatgtacttccacggtgcccgtttttccaattatgaagcatggctaagcgatcctactcacattggacccagtgctcaggtagtttggccaatagtaggacaagaaattttgaatggtgatgtaggcgggggtttccgaggaatcc

SEQ ID NO: 275981 - DNA, 536 bp, Zea mays
tttgcctgtcgcaactcgcgtcctctccaaaaaaacagcccacagttgaagcgaaaacacgaaagctcagtgatatttctctccaggtctgcacactcgtctcctatcgagactgtcggcggccatcgtcgcccacgctgtgctcatgctaagtgtcgaggctcacacgtactactactacccgaccgcgaggccgagacggaagctatgcgcctgcagaaacgtcttgcaagaaaccgccccgcgtgacgcggaggcagatccctgccgccacggcgagaggaagagcaggagaaggggcgacggtgcttattacatcgacaaggacggcggtggcgtagccaggaccttcgaccggaagaaaatatccagaaagaggggtacggtaaatgattatgacagtgtgccagtgtgccacaccactccttaattttagttcccacacaatgctgcagatcaatgcccagtcttagatcttcttcttttttttaaaaaaaagccagacacaaagggtgtcctttttcggattactcact

SEQ ID NO: 275982 - DNA, 1017 bp, Zea mays
gcaactcgcgtcctctccaaaaaacagcccacagctgaagcgagaacacgaaagctcagtgatatttctctccagggctgcacactcgtctcctaccgagaccgtcggcggccatcatcgcccacgctgtgctcatgctaagtgtcgaggctcacacgtactactactacccgaccgcgaggccgagacggaagctatgcgcctgcagaaacgtcttgcaagataccgccccgcgtgacgcgtaggcaaatccctgccgccacggcgagaggaagagcaggagaaggggcgacggtgcttattacatcgacaaggacggctgcggcgtacatggaccttcgaccggaagataatatccagatagagggggggtgctatcaaagggcgcggatggaagtacggctccgggttcgtcgacggagtgttcccagtgctgagtccgatggcgcaggatgtgctagaactcgtgcagacgagggggaccgacgcggccagcgtctgggagtcactggacaagatccctcaagcgcacgatctttgggacgacatcgtcaacgtcgccgtccagctccgcctgaaccggcaatgggagccgatcatcacagtctgcgagtgggtcctgcgccggagctcgttccgccccgacatcatctgctacaacctgctcatcgacgcgtacggccagaagcgtcagctgagcgaggcggaggcggcctacatggcgcttctggaggctcgctgcgtgcctacggaggacacctacgctctgctgctgcgcgcgtactgcggctccgggcagctgcaccgagccgagggcgtgatttcggagatgcagaggaacgggatccctcccactgcgactgtgtacaacgcgtacctggacggtctgctgaaagcgaggtgttcggagaaggcggttgaagtgtaccagaggatgaagaaggagcgctgcataactaacaccgagacctacaccctgatgatcaacgtgtatgggaaagcaaatcagccgatgtc

SEQ ID NO: 275983 - DNA, 283 bp, Zea mays
catccgatgatgctccagcgttattactatactgccgacttctgtagacagcgtcgaccctaccaaacccaacagttcctcgctcgctttcgtcagctgctagttaaagtatagtagcattcactgttgacgttgacgctgactcaggtgcatccatcttctctacctgcaggcactacggccacccgacggtgctgccggccttcacgccgacggcgttcctgttctgagcggcggcgaaccgcaagcaacgcaaaacgtcggcggaccggcggcggtgttt

SEQ ID NO: 275984 - DNA, 440 bp, Zea mays
gtccgcggacgcgggcggtaaagcaaaaaccttcaggttagctagctagccacgcgcacgcggatcagcagatgaagctgttcgccttcgtgaggcgcgcgcgccggccgccgccgacggcgcccgacgacgacacagccacagccgccgccgctgcgaccacggagaagcggcgccggaggctgtcctcgtcttcgtcgtcggggtcggcgtggaagccgacgctgggcgccatctccgaggacgccgccatgacgtccgcgcccgtggcgcaggcgaaggcagcagcggcgccggccagggccaaggcgaggtcgcctcgccgtgccacccgggcggccggctacgacgacttccggcactacggccacccgacggtgctgccggccttcacgccgacggcgttcctgttctgagcggtggcgaaccgcaggcaacgc

SEQ ID NO: 275985 - DNA, 1131 bp, Zea mays
gtggtttgtccgctcgcatccctcccccccttccgccctttcctcccacttgctcgccgaacccagagccccgcccacctcttttcggttttttctcgccggcggttgtgccaggatcgggctttgggctccgtgcatcgacgcgccgccgcctcctgatcgcaaagggtgtttcccccaggctttcgtgctccggaagtggcgagattcgccgagaaaggtcagatccggtggcctggttcgagcaacagtgtgttggcgtatcgatctgcattggatcgtcgggcgattcgtgtgacggagacgacgtcctctgtggtggctccggtttgctcctcagctctagatctggaaggactgggtgatctgctgcctcaagcagcttgaggtgcattggaaagtgaccatctttcccagacatcggcacaacgtaactggacatggaggctcttgtggttttcccggagcagcacagccaccaccatcaccgccaccctggtacccgcagcaagtcatcgggtccatacttttcatcaccgcctaactctcgtggcttccgtggaatgaactgccggtctttccactctggtcgttgcgtcggtgctattccattcccagcacctcctgctcgcacctactcggccccagagcccaagacacccaagcagcaaccacgccatggtggcaagcgaagccggccaatttccataagcctctccacatcccctccctcccattctgagctctgggcaggtccagcattctccaactctccaccacctagttcgcttcccatccccaaattctcgctccgccagaagcgcagcatctctctcgagctgccaccggttgaacgccctgatgatgtggtggtcaggctgcattctaaatcagcaccttcatccccagttgagggatatgggtatgacttgttcaatgaccatgcaatcgctagtgcgatagcaacggagaatctgaggaggattctccagctggatatcgcagatcattgaataatgggaggatggaagggtggttcctgtgtacataggttatctttcactgacagctttctacttgcattggcagggtatagggtaatgatgatagatactcgggggttgcaagata

SEQ ID NO: 275986 - DNA, 490 bp, Zea mays
tcgcccattcgtccttcgagcacacccagcgctcaaaatcctagagagggggaggaacatctcttcttcttcttccttcccttcctactcgagccggtggaggtcagccgggattgaggaggaggaggggaagaggcgaggcaggaaatcaagcgggaatccaagaaccgtaaggatgaccgtggtggagaggaggtacggtccctgtaccagccatggttccttcctcctacggctgctgctgctgccgcccttcttcttcctctgcttcatcgatgtgccgccggccggcgccgccgccaccacacagtcgcctccactagacaacacgcaaaaggctatcatgaacgatgttgcgagtctggtgaactccggatccgccaacaccaggtggaacaccgcggagtcgaatccgtgcaactgggaaggaatcacctgcacaagtaacacttcttcctcggccgtgactcggatcgccttgtcaaactat

SEQ ID NO: 275987 - DNA, 623 bp, Zea mays
ttcgtcctcgcccacgcgtgctcgcaggcgggcggacgaggaggcggatcggggagcagagatcccggccggagggatggagaagggtggaggggacaggggcacgctgctgccggtctcggcggacgacgggaagggcaacgacggagggggaggcggcgacgacgccgtgctgttcaagggttccgccatgacccgccgaggtggcgccgctgcgctctcctacatggcatgctccgtgctgctagtgatgtttaacaaagcagctctttcttcatacaaattcccttgcgcaaatgtcatcacgctccttcagatggttattgttgcgcaccacacctctttccttggcttatttactctacatgctagcttcgatggaatcggtccgtggagttaacgttcctatgtatacaactctacggcgcacaacagtcgtgtttacaatgacaatggagtatttcctggcacagcagaggcacaccccacctataatacgcagtgtggctttgattgtattcggagcattcgttgctggagctcgagacttgtcatttgatgctcgtgggtacgctaatgactctgtggccaacattactacagccgtgtatcttgctactatc

SEQ ID NO: 275988 - DNA, 623 bp, Zea mays
aggaggggctaggaggaggcggatcggggagcggagatcctagccggaggggtggccgaaggccgcctggagaaggggcgcgctgctgccggtctcagcggacgaccggcatgggaaacggccgaggggcaggcggcgacgatgccgtgctgttcaaggggtccgccatgacccgccgcggcggcaccgccgcgctctcttacatggcatgctccgtgctgctagtgatgtttaacaaagcagctctctcttcgtataatttcccttgtgcgaatgtcatcacactccttcagatggtgtgctccacgtgccttctttatgttctgagacggttaaagatcatctccttcacaaatagtgatccatcagtgccttctgattcactattctttgtgccgtttaggttattgttgcgcaccacacctctttccttggcttatttactctacatgctagcttcgatggaatcggtccgtggagttaacgttcctatgtatacaactctacgacgcacaacagtcgtgtttacaatgacaatggagtatttcctggcaaagcagaagcacaccccacctataataggcagtgtggctttgattgtattcggagcatttgttgctgga

SEQ ID NO: 275989 - DNA, 409 bp, Zea mays
gacctcccttccacttaaaccacgccaaaaaccaactcgggaatcctcccactggccggaatctgaccggccccgccatccccaccgccgcgcctcttccgggcagccatggacgaggccttcgcgcgcgcggtggaggacggcctcaagctcaccaagcgcctcgtcctgcccagcgggggcgggatgccgccgccgccgcgcccgcacctggcgatggaccgcgacgaccccgccgcggcgctgcagcagctcatgccggcggcgcccatggcgtacgccgtcgtcgtcgacccggccgccgtcgacagccccgacgtgcccagctaccagccccacgtctacgggcgcctcgacccgcccgcgctcatcccgctccagatgcgggaggtcgagctccgcgtcgact

SEQ ID NO: 275990 - DNA, 805 bp, Zea mays
cttattttctcccatattggctgtggcacatgggctaggcgtctgtctgctgagagtggccagttcactacggtgcaggatatttggaaaagatgttttgtggacacttgttcgatcgcacacatggcacactattgcattccagatagccaaacatgggatatgataccgttatctgctaccttcgattcaacaacggatgcatctgatcctagaaatgagaacgaaattcttctcctatccgtcttttgtggcaggtttgttgcactctccaatctccattaatggtttgatacttgcacattaattcatgccgctagtcagttgatatatgatgctagcttctagctagcaagccaaggcattttgcgcaatgattgattttctccaacatatggcgttcacggttagcagagggcatttaaggcaacgatcgatatattctccccatccacaagttagctctggatactagtttggttgctgtaagactttttcagcattatctgaaacgttaaatgtctttctatattcttgtgctgtcttgctatcatactgtttgtggatttcctacaaaaaatatctggctgaggttgataatgagtactacatccgttctcgaatatttgtcgcccggtagttcatttttgaactaaaacacggtagttcatttttgaactaaaacgcgacaaataaaaaaagaacggaaggagtgtattacagccattagtgattacggattggtcttccgcacatgagttcatgatgatgtgctcttgttgctattctatagcttgtgcaagta

SEQ ID NO: 275991 - DNA, 751 bp, Zea mays
cccacgcgtccgcacaagttagctctggatactagtttgcttgctgcaagactttttgagcagtatctgaaacgctaaatgtctttctatattcttgtgctgtctcgctatcatactgattgaggatttcctacaaaaaaatatctggctgaggttgataatgagtactatctcgaatatttgtcgtccaatagttcatctttgaactaaaacgcgacaaataaaaaagaacggcgggagtatattacagccattagtgattaccgattggtcttccgcacatgagttcatgatgatgtgctcttgttgctattctatagcttgtgcaagtatctcacaattgcttccgggagagcctcggtttttgtccttcaagcacggccgacaactcagatcaagtcttgggatcacgctgttggggtgatctgcgtgcaggaggccggtggtcagaccagtgactggagtggagacccgttggatcttgcagctgacctaacatcgcgcagaatcatctaccctcggggcggtgttctggtgacaaatggtgcgctgcatgacaagcttgtcgaaatgatctcagcaagttacaagtagctgcatagcttcacaggccaacacaccttgtctttttgaatttgaatcattttaccttatctattcgatcttcagtgaaattgtatttgatcttcggtgaaattgtattcgatctgcacattcagtatagaaaccacaagcatgttcacttgttcag

SEQ ID NO: 275992 - DNA, 767 bp, Zea mays
tctggttgctgctcatcctggagggcctccatatcgaggcatggcaccaccaggcccagctgttccattcatcaatggacatgtgtattcctctcccatgctgcacccatcacagcagcaaggtgcgcaaccacaaagtcatcagaagacccagctgccaaacttgcccagttcatcacagaagcaccagccactccattcccaagggctattgggatatgcaccaaatgctaacgcagcagcagctgctagtaattcgcacaattattcaagtggaaatcagcgccctgtccttgcgcaccgacaggagagtgacaaaactggagaagatggtctatcgagtgatgacaagccatcccactctcagaagagcgggtatgaacacaattttgccgttccagtccatctaccgaattttgcaatgatgccagccgctcaacctgctggcagtcagagtgagaagaagttaagtgaccaccagcaccaccagcaacagcagcagccacaagtcagtcgtggccagggtgtgaggattgatcttgcctcttctcagccttttgtgatgccctttggctccattggtcctcctggatctaccccaagtggtcttgacttttcggcattggcgcagaaccatgcagttttccagagccatcaagatgcagcaaggcatggttatccccagcttaattttgctgcagctcaacctgtgcaatccacgcagcagaagccccagcaccaaatgactggagaaaaaaaactgttgc

SEQ ID NO: 275993 - DNA, 627 bp, Zea mays
cattctcttctgttcttcactcttctcttctgttgtgcgtgtgtccactcccttgccaaacatgctggtaagcagaagcatcagaagagccaactgggaaagctgcacccatcacagcagcaaggtgcgcagtcacaaagtcatcagaagacccaaatgccaaacttgcccagttcatcacagaagcatcagccacaacagtcccaaggcttgttgggatacgcaccaaatactaatgcagcagcagctgctagtaattcacaaaattattcaagtgccaatcagcgccctgtcctgctacctggccttgtgcgccggcaggagagtgacaaaactggacaagattgtccatctagtgatgacaagccatctcactcccagaagagtgggtatgaacacaattttgccgttccagtccatctaccgaattttgccgggatgccagccgctcaacctgctgtcagtcagagtgagaagaagttaagtgaccaccagcaccaccagcaacagcagcagccacaagtcagccgaggccagagtgtgaggattgatcttgcctcttctcagccttttgtgatgccctttggctccattggtcctgctggatctaccccaagtggtcttgac

SEQ ID NO: 275994 - DNA, 950 bp, Zea mays
cccacgcgtccgctcgccctgctcctctgcgcgcagccctctgacgcgttttcctccctgccgagctcgtctcgagctcccgcccaccctctggccagccgtcgcttgcccctgccccaacgtcgtgcctctgttatttacggccgtcgctctcccagcccggccggatctcccagcgtcgcgccctgttgtcctccctttcccatggccggcgctccgttttcctgaaccggccgagtctcctcgacatggagcatctccctgcgcgcgttgaacttctgctcggtgtcctgctggccgaagcttcggattgccgcgccgatggccgagcccggcccgcgccttccctgtcctctgtacgcgcgcagctcgccccctcagctcgtcgcgcgcctgggatgcttgccggcgctcagctccaccgcgctgtgaagtctctgcgcgcaagctatctgttggccgcgcgcgaactcctctgcttggcccgtcgtcgttctccagctccttaccgcactcgatcgtttcgtcgtctcgtcttgatgccagtccccacgtgacatctctgacgtgggttcacgccgacaaaagaatcccaagaagatgtagagaagcaagcctttggtcgatgttcaagtggtcggcgaaaggccagaacaagaatcatcaccgtttatgcggagttctacttaatatgaaaagattccaagaattgtggatggaagagaaagtgaagcttcgtgctatactcgtcagctgctcgatcgaagacttcaatcgaagactatcgtcgttcccgccaacactgaatcaatttgataacggtgagccaaatcactatttttactatagattttatgatcgtgaaataagacgcttagtttgcataggaagttaaaattagaaatacccatgaggcgaggtgtgcttcgatgggtttagtggccgaatat

SEQ ID NO: 275995 - DNA, 503 bp, Zea mays
gcatgccccagctgtgtcgtcgccacgttcatgcgttgccattcatgttttatgtttatgccggcaaaagaatcccaaaacagtgtggagaaacaaagtccctgatcgatgccccaagtgctcggcgaaaggccaaaacaagataaagtgaagctctgttttatactcatcaactgtttgatcgaaggttttatttggaggctgtcgatgttctcgcaagctttgagtcagacttgctttggatgagaaatctctgatgttcgagagaggcgagacatgtaagcgctctcttgggactcgaccaaacgcccccggtgctcggccttcttataagtctcagtactcccttatacttcttactgaggatggtcgtttgagctagcatatatttcagacctacacttttgttatcactccgataaaataatataaaatttttgtaacttgtaaacaaagtgccaatggacgtagacgcaaaacggagccgcagcgtctcagtatca

SEQ ID NO: 275996 - DNA, 375 bp, Zea mays
tttcgtcgtctcgtcttgatgtcagtccctacgtggcatctccgacatatattcacgccgacaaaagaatcccaagaagatatagagaagcaagtcaatcatcgccatttatacggagttctagttaatatggagagattccaagaattgcggatgcaagagaaagtaaagctccgttctatactcatcaactgtttgatcgaagattttattcggaggctgtcgacgttctcgcaagctttgagtcggacttgctttggatgagaaatccctgatgttcgagagaggcctgtaagcgctctcttgggactcgaccaaatgactaaattggaaaaccatcatcgccctcgcggatatcgaatccattcggtcttg

SEQ ID NO: 275997 - DNA, 555 bp, Zea mays
ctcacggcagatcaatttgaccgaaaggtggggtaacacacaatatgcttgatgacatccacaaccattggaaacgtgcagaggctgtgaggatcaaatgtctgggagtgccaacgctcgacatggacaacatttgcttccatctcgaggataaaacaggcggcaaagtcgtatcccgcagcataaacatcattatactgtgccgcggtcggaactatgacccccagaaaaggcctggcgtaccattgatgctgtggaaaccgttagctcctatctatcctaagctcgtgcaaaacgttgctgaagggttgactttcgaggaaacaaaagagttgaggaacagaggattgaattctccaccgcttacaaaactgactaggaacggtgtctatgttaatgttgttgataaagtgagagaagcgtttaagactgtggaagttgtccggctagattgcactcatgttgggactactgactgcaagaaaattggtgtgaagttgagggatttggttccatgcattcctatattatttaaagatgaacagattatactat

SEQ ID NO: 275998 - DNA, 508 bp, Zea mays
  unsure (1)..(508): unsure at all n locations
ggagcgcgccgtgccggagccgtggaagaagaaacccccaccatttggaccacgcagggaccgaagggggaccacaagccgaccaagaaccaacccgcaagaagacgacgggcgtcggccgccgcggcggcatgggcgaatcgcttctcaccgcgctctccatggacaccgncacggcccaccaaccgcaccaaggccccttcaacttcctcttcatggacaccgccttccacgacgaacttcgacctcttcctccagccacagggccccttccgccgctgcctacatgccgcggcggtcgccccccctgacatcaaccttcccctagccgccgacccgtctccgccacctctggcgtcgctcgatcgccaacgttgacatgctagatgtcggcctcggcggctcgcagcactacgactcggattcgcccgctgccgctgggccagtctcggccccggcagcagccgcgaccaccatggtcgccgtgtcccacaccaagggctccggt

SEQ ID NO: 275999 - DNA, 468 bp, Zea mays
ttccacgcgttcgcactgatccacctcgccttctccttccttccgcgggtccgcccagcgactcgacagatccattgttcacgacctcaccctattcagatcccaagcggccacgcccaagcccaaaccctacccacccatctcaagttctcaaccagcgatgatggcagcggagccctcgccgtcggttccctccaccgccgctgaagacatggaaaccctcgccctcgactcatcctcttcgtccgccgccgctacggcctccgcctccgaccccctccttcggccacctacctccccgaccgccgccgcgagcgacgaccccttcgtcatcgacgacttcctcgacgaggacgacttcaccgccccggcgcccagcgtcgccggcccgccgaccgccgtgcttggcgatgcggcgtcctcagtgttccccaagatcaccgtatccgatcccaagaagcacgccga

SEQ ID NO: 276000 - DNA, 504 bp, Zea mays
cccacgcgtccgttccctctcatcctctcgacctcgcttcctccctcccaccgtgccctgccttttcctcacgacctcgccgctgattgcggtcccccatggaaccgtcgtcctctcaatccgtccgccgctccatcgtcttcctgtatttgtgctgctgatatgtgtaacttgtgtttctccaggtgaaggcggccgagcacgcggccgagatggaggcgacggtggtcgtcgcggctgccgtggaggccgaggaggaggaggctgctgctgctgcggcttcgacgccgcagcggtctgggaggaaacggccccgcgcgattgggagtgggcggtaccgctcggtgtccaggtgtttctcccaatctcccctgctttcctcatcctgctgccgcttttgcttttaatcgctgtgacagcatagcacccgcctcgtctcgctgccggctgccgctggtgatcctgctccctgtggcattggccctagccagcaggcaggcagtc

SEQ ID NO: 276001 - DNA, 443 bp, Zea mays
tccctctcatcctctcgacctcgcttcctccctcccaccgtgccctgccttttcctcacgacctcgccgccacgctcgcgtctcgccgctgattgcggtcccccatggaaccgtcgtcctctcaatccgtccgccgctccatcgtcttcctgtatttgtgctgctgatatgtgtaacttgtgtttctccaggtgaaggcggccgagcacgcggccgagatggaggcgacggtggtcgtcgcggctgccgtggaggccgaggaggaggaggctgctgctgctgcggcttcgacgccgcagcggtctgggaggaaacggccccgcgcgattgggagtgggcggtaccgctcggtgtccaggtgtttctcccaatctcccctgctttcctcatcctgctgccgcttttgcttttaatcgctgtgacagcatagcactcgcctcgtc

SEQ ID NO: 276002 - DNA, 626 bp, Zea mays
atcgcgagcggccgccatgtcatgggagagccgtctaagcatcgcggttgagactgcgtcggcacttgcatacttgcacttagctgcaaagatgccaattattcacagagatgtcaagtcgtccaacatactcctagatgacaacttcactgccaaggtgtccgatttcggtgcctcaaggccaataccgcacaaccagacccatgtgacaacattggtgcaagggacactagggtacatggaccctgagtacttccagacaagccaactgactgagaagagtgatgtgtacagctttggcgtcgtactcatcgagctactgacaagaaagaagcctatcatggatgatatcgcggaagacattagaagcctagcgctgcaatttagtatgctattccatggaaataagctgttggaaatcgttgatcctgtagtagctgaagaagctggagtcagacatgttgaaacggtttcgaagttggcgttacgatgcttaaggttgaaaggggaagaacgcccaaggatgatagatgttgcgattgaacttgagcactgagaggctgatgaaacacactcatcttgaagacgagtctttgcttaggaagcatgtgcattgaagaatgagc

SEQ ID NO: 276003 - DNA, 476 bp, Zea mays
cccacgcgtccgcccacgcgtccgggccgagccgaacgggcgtgcgccatgcgcatgcgacgctgacgagcaacgacaaccacagagcccaaccggaaggaggatcggtaccagctcacggcggcgccagcaccacacgccgccggcgccgacgcccacccccctcccgacaggcacgcttcttgcgcctcttgtgcgatgctactacggataacgtacgcccaacccacgccttcggcggcggcccagttgaggctccctgggccgcgtttacgccgacgccgcgtcgctgcctccgcggcagactgcgccttcaattcaagctctccgctacattgcgacccttcgccccacgcgtaccttctgggtccgagcgtccaacccagtggctcactctcactgagtacatatccaattacagagaagggaaagccgatgtcttgagtctttccaagtgggcagtactaccgtgagct

SEQ ID NO: 276004 - DNA, 413 bp, Zea mays
aaactcagtgtcgccactctcctctccacacacacacatacacacacgtaacctagcttctacacggatcgggatcccctgcagtactgcatgggccactgccgcgtgggctccgcgtgcgacagggcccacgcgcagtgacccaacggcacggtgcagtacgtcagaggatccgtgtcccttctacaccaccttgcgcaagaattttagctttcagctgcattagcatggaaggagacaaaggcaaccgatatgggaaacaggtcgccgtggtcacaggaggcaacagggggatcgggctagaaatatgcaggcaactggcttccattggagtcaccgtaatgttgacagcaagggacgcggagcggggcgcgggagcagccagcacgcttgggcaacaacccaacgtcgtc

SEQ ID NO: 276005 - DNA, 472 bp, Zea mays
cggagacacacattgccactgcgatggccgcccaccaggactcggcggcagcggggggcaggcctcctcgtcgtcctcgcgtcctcctggcagcctccggcagcgtggccgccatcaagttcgaggtcctctgccgcagcgtcgccgagtgggcggatgtccaggcggtggcgaccgcgtccgcgctggaattcatcgatgtggcctccttccccggcggcgtccctctctacaccgacgaccaggagtggtctagctggaagcgggtcggcgacaaggtcctgcacatcgagctgcgccggtgggccgacgtcctggtcatcgcgccgctctcggccaacaccctcgcaaaggtcgccggcgggctgtgcgacaacctcctcacctgcgtcgtgcgcgcctgggactacagcaagcccgtttacgtcgcgccggccatgaacaccttcatgtggggcaaccccttcacggc

SEQ ID NO: 276006 - DNA, 787 bp, Zea mays
ctccacgcgtccggtgggcgcctcggaggaccaggcgctggaggctaggaactccaagacggtggtggcggtcatcctcggcggtggcgccgggaccaggctcttcccgcttaccagacgcagggccaagcccgcggggccgattggcggcgcgtacaggctcatcgacgtgccgatgagcaactgcataaacagcgggatcaacaaggtctacatcctcacgcagttcaactcgcaatccctcaatcgccacctctccagagcctacgatttcagcaatggcgtggccatcggagacggattcgtcgaggttctagcagcaacccagaggcctggaacggaagggaaaaagtggtttcagagtactgctgatgcaattcggcagttcgactggcttttcgatgatgcaaaatctaaagacattgaagatgtgctgattctttctggtgaccatctctaccgtatggactacatggactttgttcagagtcatcggcaacccgcgcctcccatcagcatctgttgtttgccaattgatggcagccgggcatctgattttggcctaatgaagatagacgacactggaagggtaatttcattcagtgagaaaccaaaaggagacgaattaaaggcaatgcaagttgacaccacagtgcttggcttatcaaaggaggaagcagaaaacaaaccttatatacctccaatggggatctatatttttaagaaagacatactcctaaaccttctaagatggcgttttcccactgcaaatgattttggttctgaa

SEQ ID NO: 276007 - DNA, 534 bp, Zea mays
tccactcgtccgaaacaaataaactaataagctatgaccgcgagccgtcgtcgtcggacaagaagaagaaagcctggtgttgtgctgctgtcgcatcagccgcccgccgagcctcagatccaccaccagcaccgatgccggtcctctgcacccaccacgttcagctccgcctctggtggcgccgtctcggccgacgcagcgccacattcgccctcgcgctcctcgccgtcgccctcgtgctcacgctctcccgctacgccgcaggccctgcgccctccccgcccccgtcctcgtcctacgggcatcgcctcccggccctcgtcgacatcaccctcgtctacggcgccatcgacaagggcgcagtgtgcttggatggtacgccgcctgcctaccacttccttcctggatttgggacggatcccacactggctcctccacttgggagggcgggaagctggtgccgcaattcaatcatgtgcctcccgtagaaaacaatctcggttcctctgcccacatggattctcggctgattcg

SEQ ID NO: 276008 - DNA, 518 bp, Zea mays
aattcggagcagttgggtgtgctggtgtgtgttggaacggttgtccctccggcctggggggtcctcttgcttgctgctatatgatccccacgcctcccgcgccactctaaccaccgcatccactctcgtcccggcccgtatctacctacctgctctctcgtcttctgctcacacgctgacgcgcacgctccgagtccgagctaagcgagctagctagctacttccggcgcggcacagccacagctgtttaggtagtagctagacgtacgtacgtactcacaccacgatgacgaacgcgtggaggccgatgctggcgtcggccaccaagtgctgccccgcggaggacgcggcggtggcccccgacggcctggcgcggtgccggccgcagcagtcggagctctcgcggcggctggcgtccttcaggcgcctgtcgtcgctggccaacagcccggcgtcggcggcgggcacggacaaggacggcggcagcgtcaagcaggccggggagatggcgggcccgc

SEQ ID NO: 276009 - DNA, 470 bp, Zea mays
ggaccgtggcggtctccaaccagccggccagccaccgcagacgatccctagttccgcgtccccgacccgaaccctcgagttcgcacgggctccggccagattcgcgcggtctaagcttcgaatcggcgcatggaggcagcagtagccgccgcactcaagtcgcccaccgccgcacgtccctcgtggcggcccgcggccccgggcgccacctcgctcccctttgaccggaggcgcagctttgccttcggctccatcaagggtctcgggcggcagcagctcacctctaggactaggaggcgaagcagtgtggtcagggcctcctggtccccctcggagtctctgccaccgtcctcgtcgatggcgccgctcaggatggaatcgcccgcggggcagctactctcccagattcttcacacgcacccgcacctactgcctgccgccgcttaccagcagatcgaactgctccagag

SEQ ID NO: 276010 - DNA, 886 bp, Zea mays
ccggaattcctggtttcccacttttccgtcacgcgtccgcccacgcgtccgatttattcatagattcgaggggtacaagtcagaatacatcacaactcagaagaaagcatactttgacctccataagaatgaagattggttaagaaataagtaccatcctacaaaccttgaaaatgtcattgaaagaaggaatgaactggcaagaactactgcaaatgatttcttcctaaaattgcaaagtggagatctggacatgtttgacgggttcggcagtgagcaaatcaggaaataatagcagtaaaaatctagatgctgtggaagggggatggtaaaaaggggaaaacatggaaaggggtttctgatgattcatattatgctgcttccaaggctcacccagttagttccgaggttcgtcgaattcgaattgacattgagcaagctcaaggtctcattcgtaaacttgattctgagaagggtattgaaaacaacatcctctcaagtagtaatcatgaaaagccagacatggataagtcacatggttcagtggggccaattgttatagtacaaggatcatctactgtgaagggtcttgagggtgctgagttgctggacactcttgttacttatttatggcgtatccatggtgtggattattatggtatgtctgagacaaatgaacctaaaggcctaaggcatgtgaaagctgatgcaaggacatataatggggctagctcaaatggtgctgaatgggagaataaacttgattcattctggcaagacagaattcaaggtcaggatccattagaaatgttgaaaggaaaggagaagattgatggagctgctactgaagctttggatccatatgtgaggaaaataggggatgaga

SEQ ID NO: 276011 - DNA, 433 bp, Zea mays
gtggtgtaggaggaaaaggtggtgatggtcattttacgaatcgtgcaccaaattgtggggatgctggacgtggtggatggaatgagggtcctgggaacagtcgtagggaaggactgatgtcatacaagcagttcattcaggaacttgaagatgacgtttcaccagttgaagctcaaagcagatacgaggggtacaagtcagagtacatcacaactcagaagaaagcttactttgccctccataaggatgaagattggttaagaaataagtaccatcctacaaaccttgaaaatgtcattgaaagaaggaatgaactggcaagaactactgcagatgatttcttcctaaaattgcaaagtggagatctggacatcggtccaggtttgacgggttcggcagtgagcaaatcaggaattaatagcagtaaaaatct

SEQ ID NO: 276012 - DNA, 597 bp, Zea mays
  unsure (1)..(597): unsure at all n locations
acgaactggtcgggtttgccagttgcctcaaattggcaaatgcatgggtttgaccgtccagtctacacaaatgtcacatatcctttcccattgaacccaccattcgtgccggctgataatccctcaggttgttacaggacagtctttcacatcccaaaagagtggacaggtcggaggatcttgctgcactttgaagctgttgattctgcattctttgcttgcgtaaatggagtactagttgggtatagccaggatagcagacttcctgctgagttcgaaattactgattgctgccatccttgtgattcggacaagggaaatgttcttgctgttcaagctatgacgtggagtgatggctcttatcttgaaagatcaggatcactggaggtcgtctggtattcacagggatgtgctcctactatcaaagccacagatttttatcacagattacttcttcaaagcaaccttggatgaaaatttcagtttagccgatattgagggtgaggtggagattgactcacacatgcaagaccaggagcacgtnccaactttgtctattgaagcaacactcattgataactctggactatctaacag

SEQ ID NO: 276013 - DNA, 463 bp, Zea mays
cggttacctcagtgagcgccacgaaagtcgagctccagtgactcaccctttcatcaacatgagctcccattcatccaaatttggagcaaccatacccggcctttataaattgagcattccccttgctccgtatctcagttatgaacccagcgcaccactcctcgcctcagatcatccaccatagctcgcgaattccaaattttccccaaatcgaccggaacaccgccgtgaggcatcgcgccgtgtccagccgttctcaggtgatgaaactgctgagctctgctgtttctgttccaaggtggttcccaagcaggaggaggaaaactaaggcttacctgggaaggtgtttttccttccagtgatgtaataataagtttatacccgtatatgtaataatcaactctttctatattttacttatgaatgtgaactatgttattgtaaaaaaaacatcaacaaggac

SEQ ID NO: 276014 - DNA, 672 bp, Zea mays
cttccgagaaattaggggaagtagtcacccatgccgtactgccaccattgctcaaaccacttgggtacaggtagagtctccaacaggcaatgattacatcaatgccagccatatagagattgctggcagaaatctaacgaagttcatttctactcaaggaccacttgccaatacaattgaggatttttggcagatggtatatgagaaccactgtcctgtgattgttatgctcaccaaatttgatggtcttaagtgtgatgagtatctaccattgagcaagggacaggctgtttttggaaaatttaccattaagatcacaaagttcaggaaagatggtcagttattgttgcgtggtgtggagattcgacaggatgagtcagatgaagtgcgatctcttctccacattgagtatccggagtggcctgaccatggggtgccaaacagcagtgctgatgtaagaagaattctacaaagattgtatcacattccaagagagaggccaatagttgcacattgcagcgcaggcattggaagaacaggtgcttataccaccatccataatacaatagagaggattttacttggatgacagggggctgctgatcttgttagaactgtcacaagattagatcacagcgactggaatgtccaacagggagcatagaatgtgca

SEQ ID NO: 276015 - DNA, 443 bp, Zea mays
atgtcctcgtagtacaccgcagccgctaccggaaccttattgttgttcaacacgctgacatcatagagcggaggccagtcttccttctcagctaacaaacaggcagcctcctttaggtctcgtagagcagggatgtcatcgaacatgcaagggaacaccatctctccagtaaagtacacagctcggccttcttctgtagctttaatagggtcaaacaaactcccatattcgccatgaatcttttcagcagaccattttgatgaagagccctcacagtagatagactcgtgcaagaccgcatcaagaggattttgatcaaaatctagccacatttcgaactcttttaagaagtaatagcttatcctctgtttagcttcaacgacgagtacaagattatccacaccgttgactccatcatatctttcgcaaattaaatctactgc

SEQ ID NO: 276016 - DNA, 1003 bp, Zea mays
ctgtgattggactaccgggggaacccaatttggaatcaagatttccatatgcttgtcgcaaatcctcgcaaacagaagtggaccattcaagtgaaggattcaattggtctaactgacatcactattggcaccggagaggtggagctagggtcacttaaagatacagtacctacggacaaaatcgtgactctatatggaggatggggtttgtttgggaagcgagaggctggggaagttctacttcggctgacatacaaggcatatgtcgaggatgaagaggaagaagacgaggcggtgagaagcgagattggtgcgggttacgcctcagacgaggatgtgctggactacgttagtggcatgagcaaggggactgatttcgtgggtaaagaaagggaaactttcatggatcttctcgccgcgctgctggtgagcgaggagttccaaggcatagtgtcatccgaaacaggaagctcgtcaagagaaggtgagcaggcaggcagtggaccagaaggcacagacagcgtcactgtccctactagcgctgcggcggctgatacggaggcatccaccgtgccaaatagctccacagatacggctctggtgtggctggcggccataacgagtgtgatggtgctggtgtcctccaacctcggtggctcaggctacttcaacccgtgaccgtgagtgaaggcaacactggctgtaacttgtaagggtgacaacaagagagttctcttcttgttcttttttttttcttttcttttggaaggctagtgaagagaggcaactgtgtatattcatttttgctgtcacctccttccgatttgctgaacatggaccaggatttctcctgctcgcgtcgcggcaggggtcattgccatcggttactgtttccaaggcaaatgcgattgtagttgtatcgttaaaaaatataccaagaaaatttaaggctgccttgttaggcatcagcttatgattaaaaaaaaaaaaaaagaaagaaaaa

SEQ ID NO: 276017 - DNA, 454 bp, Zea mays
gctagttgtagatcggcgaggccgtctccgttcgcacaagccagacctcttcgcgccggcaatggacaggctcggcgcgaatccggcgaactcgtgcccgctgacgccgcttggcttcctggagcgctcggccaccgtcttcggcgattgccactccgtcgtgtaccacgacacggtcttcacctggtcccagacacaccggcgatgcctccgcctcgcctccgcgctcgtctctctcggcatcaaccgcggcgacatcgtgtccgtgctgttgcccaacgtgccggccatgtacgagatgcagttcggagtgcccatgagcggcgccgtgctcaacaacatcaacatgcgcctggacgcgcgcacggtcgccgtcctgctccgccactccggctccaagctcgtcttcgtggacccggcgtctctaacgcttatcagagacgtcgctgagcag

SEQ ID NO: 276018 - DNA, 495 bp, Zea mays
  unsure (1)..(495): unsure at all n locations
caaatgtcgaaccaggtatacgcgagggatacgcgaggtcgctcatcactcgctttggttcagcttgctgcttcgttgttgctcatctccgtgtcgggtgtaccacaatatcgcagatctatccttgatgcttgtcgtcgatccgtcgcctcgcctcgatgctggctcctacatgacgtctcgaacttgtgtttacactaaaaatccgagaagattaggcgtagaaggaaaaaaatcagtacgcagccggaaaattcttgatgtggatcgagaaggcagtgaagtccgtgtggtgctcaccacgtgctcgacgtaatggcgaaattggaaatcgtagttgtgctcgtggctgtcaagacggattaaattattagtgagctgtcgtcgctctcgctcttcgttttaatatttctcatcagtttagtatacttgcggtgttaatgtggaccgatgatgtgcgcgtaaatcgcactagtgacactacaaganactgat

SEQ ID NO: 276019 - DNA, 590 bp, Zea mays
atcacaggagagggccaaacaactgatgttggagtacgcaggatctgaacggggtcagggtgacacagaccttgatagtgttgtttcttcaatgccttcttcacctggaagcgaagactttgacaacatgtcaattgacagttcttccagcagatacagcttcctaagcaaaaggtctaatctgatccagaaattcaaaagggggggaaggagcaaggttgacagcagtagtttagcctcctccatcagtggctctccaaggaggaaaccaaagggcccactggaagctctaatgctaaaaaacgctggagatggtacagccataacaacatacggaaagagggatcccaatgatgtcttggatgacgaaaatgtcgcgtcctcattccaattgatgtccaagacagttgaaggttttgctgatgagaagtatcctgcttacaaagataggcacaaacttgcaactgaacgggagaaggctataaaagagaaggctgggcaagcaagagcacaaaggtttggtggtggccacagttcagctctaatttcctctccaaaaagtgcactccctccaaaacttgctcaaatta

SEQ ID NO: 276020 - DNA, 923 bp, Zea mays
ggctcgagctcttggagtgggagagggctgctgtacctgcacgagcagtgtgaccccaagatcatacacagggacgtcaaagcagccaacgtcctgctagatgactgctgcgaggccatcgttggtgactttgggctcgcgaactcctggaccaccgggactcgcatgtcaccactgcggtgcgaggcaccgtcggtcacatcgcgcccgagtacctctccactggccagtcgtctgacaagaccgacgtcttcgggtttggcatcctgctgctggagctggtcactggtcagaccgcgctggagttcgggatggcagcaaaccagaagaagggagccatgcttgattgggtgaagaagatgcaccaggagaagaagctggacgttctggtggacaaggggctgaggagcaggtacgacgggatcgagatggaggagatggtgcaggtggcgttgctgtgcacgcagtacctccccggccaccggccgaagatgtcggaggtggtccggatgctggaaggtgacgggctcgcagagcggtggcaggcttcgcagcgcgcggactcgcacaagtccttcaaagtgcccgacttcactttcagccgctgctactccgaccttaccgacgactcgtcattgctggtgcaggccgtcgagctgtccggcccaagatgacaccaaccaccaccaccgtcagtttgcacttgtacagcataaggaccgagaatcatgtgtatattgccatattggagaataaaatgagccatgttagaataactatagtgtgtattagatagatgaactgtacaaaagaagagcgtaaggtttgtacaggtttggatatttacatatttctagcagttgagacagtaataccaagtagacgagctttactttgctggaaaaaaaaaaaaaaaaaaaaga

SEQ ID NO: 276021 - DNA, 407 bp, Zea mays
atcggaaagcaacgtcgttgccccgcccccccacctcgtcacgagtcagagagctacacaacaaccatcctgttcccgcccgcatacaggactctagctagctagctagcgttgttccgttgtggttgctctcgctcgctctcgttcggtcgatcatggagtggagggacagcttcttggacctggcgctcatcccgctcagcctgctcctccccatggcgtaccacgcctggctgtggcgcgaggtccgcctccgcccgctgcgcacggccgtcggcatcaacgccgccacgcgccgcctctgggccatcggcatgatgaaggacaacgccaagaacgcggtgacggtggtgcagtcggtgcggaacgtcatcatggggtcgacgctgatggccacgacggcgatc

SEQ ID NO: 276022 - DNA, 456 bp, Zea mays
ggacgctgactccctgcccaacaacatcaaggatttgctacacgagcacactgttgcagacgatgtcgcaggaagcaagtgcctggtggtgcgcggttgggcgctacacgtggccatcctggcccatcctgccagtgacggcttcatggcgctctgtggatggggctccactctggaggttgttgcagccggtctgcccatggctgcctggccctttttcgccgaacaatttatcaacgagcagctcatcatggacgtgcttggtattggattgtctgtcgctgtgatgaagccaattgaaaatgttttgattgccagtaacatgggtggtgctgttgtgatgatatatgctcctgttttttggtcttgcctgacaagcttcacacttggaatccatggtcaaatagttggggttcttgaaacaaaaaaaaaaaaaaaaaaaaaaaggaaggccgc

SEQ ID NO: 276023 - DNA, 452 bp, Zea mays
atggacgtgcttggtattggattgtctgtcgctgtgatgaagccaattgaaaatgttttgattgccagtaacatgggtggtgctgttgtgatgatatatgctcctgttttttggtcttgcctgacaagcttcacacttggaatccatggtcagatagttggggttctatgtttgccatttctggtaattcaactgaatatcagtatagctgtccagcaaaggttcttgtgggatccaggtggtgatcagtgttgcttactgaatttgtttattcatggcttgggggacttgcagatgcaacaagctagtctgtcttttgtcacgaagacaggatggctggtgattatcctttccttgctgctactccaatgggacaagccaaaccttcggggtcttaacaaatccaagtgcattcagcgtggctttccgcgatgctatgtacatgcttgtcc

SEQ ID NO: 276024 - DNA, 433 bp, Zea mays
gcccgtttcagattcgtgacgtactccctccctccaaccacgcccggccagccaaacgtgccatggcgctgccgtcgtcctcgacccccaccgcgtcggctccggcctccctcggcgagcggtggccgccgctggagtctacccccgcagttttcaaccagttcgtgtggtcgctaggtgtcccggaggacgacgtggagttccacgacgtgtacgggctcgacgccgacgcgttggatatggttccccagcctgtgctcgccgttgttctctgcttccccgatccaccacaggatgcaagttacccttcagaacaactcttaatttctggagaaaaggtgacccaggaccggccttgctttataaaacagatcgaatcattgggaaatgcttgtggaactattgctctactccatgctgttggaaatgcatc

SEQ ID NO: 276025 - DNA, 505 bp, Zea mays
tcgcccacgcgtccgcccacgcgtccggcgtttatccaactcggctctcagcgactgcccaccactgaggattcctcttccggcggcggcggcggcggcagcgatgctcctcctgcgcgccaacgcgctcgccgccgtaccggtgtccttctccataacgccggcggcctcctatagctgcttcccctggccgtcttcatccaccactgccgcgagctgctccgtcggctcctctgccaggctcgccgccgccgtgcagtacgacccgctccgccccggctccgatgcgtgggcccatcccgacggcatggtcaccgcggagggtgacgaggagaaacagcgctatgacacggagggggagtccaacgactgggaaggggaagggccccaaggatcatcagaccccgagggcatcaacgtgccgcgccagcgctacatcgccgtccccaaggaggcccccctcgatgctgtcctctcgcagttcgcgtccgacgacgacgacgcc

SEQ ID NO: 276026 - DNA, 510 bp, Zea mays
ctcagttggaggcttccaagagaggttctgaagcaagtgtgggatttgtctgaccaagacaatgatggcatgctttctttgagagagttttgcatcgctctttatttaatggagaggcaccgagctggaattcctcttcccctagcccttcctgactctcttaggcatgatgagacactgttacgagctacaggcttgccttcaacagcatacaatagtccatcatggcaacacaatcaaggaggattaccacaaagaggccctggagcacctggggtgcctgctggtggtgtgcggccacccttgccatcacatttgcattcacaaactgacggagctagcagaccagggcaaccaagatctcacatgcctgggatggataatcatgtggtaattcaaggaaacaaagatgacaaaagtgcgctgaaccaggctgcacaggaggtggtggatgctcctaagaaggttgaggtggagaagcaggtcctggattccagagagaaattggag

SEQ ID NO: 276027 - DNA, 705 bp, Zea mays
ttgcattccaccatctgttctgtgccggaatgttcgttcccaggaatttccacaaggccaacttctacgcttccgcgtcactcagcccctaaatatcgatttggttggctagttggtacctttgctgcctgctgcaatcagtgatctgtgccgcctggggtctcggaccatcagatctccagctagcttccttgctacttactcccctacccgctgcaccctcgccatggatccgccgagctccgatatcgtagtcgacactccatacttccgcatctacagtgaccggcgcatcgaccgcttggtcggcaccgataccgtgccggcgggctttgatcccaccaccggcgtcacctccaaagatgtcgttgtagacagcgacgccggcgtctacgttcgcctgtacctcccggacacggctacggggtccgatgattccaagaagctcccggtgctagtctacttccacggcggcggctttgtcacccactcggcagcgtctccgccctatcagtccttcctcaacaccctggccgcgaaggccggcctgctcatcgtctccgtgaactaccgcctcgcgccagagcacccgctgcctgcaggctacgaggactccttccgcgcgctcaggtgggcggcctctggtagtggggacccctggctgtcacatcacggcgacctggcccgcatcttcctggccggcga

SEQ ID NO: 276028 - DNA, 444 bp, Zea mays
  unsure (1)..(444): unsure at all n locations
aactaggacgcctgggcggacgcgtgggtggctcggggacgctttgcccatctgatgatctccttctagcttccttcttgctactcccgcagtccccacccgctgcgccctcgccatggatccgagctccgaaatcatactggacactccatacttccgcatctacagcgaccgccgcatcgaccgcttgatgggcaccgaaacggtgccggccggctttgatcccagcaccggcgtcacctccaaagatgtcgtcatagacagcgacgccggcctctacgtccgcctctacctcccgctcccggacacggtggctgccgccgcgtcaccgccgcccagcgttaacgacagcaagaccaagctcccggtgctggtctacttccacggcggcggcttcgtcacgcagtcggcggcgtctacgatctaccagcgcctnctcaacgc

SEQ ID NO: 276029 - DNA, 1189 bp, Zea mays
ttcgtggactgcagggataaactcaaagaggaagaaactgaagagtgctgtcatggtcactatacatatggggatttgggtgacaggtgcttcgggactataggccgatgcttgacagagaccctcgtccttgtttcgcaggctggtggttctgtagcatacctgatattcatcggccaaaatctccattccacattcagccagctgatgtcaccagccggcttcatcttcgccatcctcctgcctctgcagatagcgctctccttcatccgctcactgtcgtccctttctccgttcagtatatttgcagacgtgtgcaatgtccttgccatggcaatcgttatcaaagaggatcttcagctctttgaccaccccttttcaaacagaagcgcttttaatggactgtgggcagtaccattcaccttcggtgttgcagtcttctgtttcgaaggattcagcatgacccttgcactagaagcgtcgatggcagaccggagaaagttccgctcggtgctttcccaagcagttgccgccatcatagccgtgtatgtctgttttggagtttgtgggtacttggcctatggcgaggccaccaaagacatcataacacttaatcttccgaacaattggtcgtctgctgcagttaaggttggcctatgcatcgcactggcattcaccttcccagtcatgatgcacccgatccatgagatcgtcgagacaaggttcagatccaacagatgctttcggaagctcagccacaacgatggcggcgcggagtggataggcttgcactcaagccgcgtcctcgtggtggcggtcctcgactgtggtggcgtccttcatccccttctttgggtccttcatctcgttcgtcgggagcaccatgtgcgcgcttctctcctttgtgctgccggctctcttccatctcagcattgtaggctcgtcaatacccttgtggaggcgggtgctggactacggcatccttctctttggtctggctttcgctggatatggtcttgtcactgctctctcctcgcattgaacaatggcccaaacagtcaaaaaagtgcagagatcacgatatcttgtgatgacaggagtcaaatggatgctaggagcaccatatatcagatagcccggctcggattagtgcgtgattgaactgatccgcttcaacccatatagccgc

SEQ ID NO: 276030 - DNA, 407 bp, Zea mays
  unsure (1)..(407): unsure at all n locations
cggacgcgtgggttggcaggtggcttgtgctggtcggaaggcctattggtgcgagtgagcccagaggcccagggtttcgctgtcaccgcacacctcagcgagtctggtgccggcggctgtgacgaggacagcagcaatgcaatggcgagaggaactggaggacgggtaagcgacggcacgtgaagccgttggacgcagggtggaggctatacataacagcttgatacaattggaagatagcattcggtcacctcaaggaagacgagccagttgtgagctccggaaccgaatcctcttcgaaggtggtaaccaggncgggtnccatccaagcacactgcaacgcgatgaagcaggccaacgcgatcagtatccggcttcagacgtgccgncgatcggaaagaaaaaga

SEQ ID NO: 276031 - DNA, 697 bp, Zea mays
gtccttcagatacaatgttgctttggaatggagtcctgtgggatacaaggcaaccaaatcctgtttatcagtttgaccagttcacagattactgtggtggtggattccatccagcaggaaatgaggtgatcctgaattcggaggtgtgggatctgaggaagttcaagcttttgaggagtgtcccttccctggaccagacagtaataaagtttaacggaactggtgatgttatctatgccaccctgaggcgtaatcttgatgacgtgacatcatccatcagatgctcggagggtcaggcatcctcttttccctgcattccgcacgattgatgcggtgacttactcggatattgcaaccgtccaaatcgaccgctgcgtacttgatcttgccactgagcccaatgattctcttattggggtggttgctatggacgatcaccaggagcttttctcttctgctcgcttgttcgaagttggcaggaagcgaataactcgatgacgattccgatcccgaaggacgcaggtgaaaccgacgatgactccgacgacgacgacggcgactccgatgacggtgttctccttgcgccggtgctggaagggggtacagattccgaagagatcagtagcagcagcagcgatgacggtgatgaagatggtggtgacgatgatatacccagttcggatggcattgaagatga

SEQ ID NO: 276032 - DNA, 783 bp, Zea mays
cccacgcgtccgaaaaaaactgcgggcggaccagcaggctcccgagttccgacgcgtccccggcggccacctccatctccctctctccgctcgccgcgcctccatcggcccccgctgccttttgtatcgagcatgtgctaaattggtcacgcagaaatatcaacaagtatgccgacattagcgctccgaaacatcccaacttgccagcattggtcggggtaaatttgtcaagttatcaattgaagtgtgcttggttattgatttccattaaattgcagcatagcttgctcttcatctgaaagttttcgagggtagatgtttatcgtgcaccatggtcgttggtaatgacatagttgacatggttgggtgctaaaaggacgagaagggtttgaataaacggtccgatgaacattctacttgagcttaagcatctcaagctctttagcatgcccgcaaggcctgtcatctgtaaaggccttctgatagtgattgcccttattttgttgagaagcaattgtatctccttttcttgctatagattcatctgagaagaaagaattttacgagtccacagcccctgacttgcttcctagaattagacgtgacaagttccttgaggtcccacagatcatatgcgggttgaacaatcagaagattgcattcgccagagcatgcttgactgcaagattcctgaacagatcccttctcatgccaagcttgagtgcttctctcttctacaaagaggttgacttgctgcagcctgtcagttttgacaaagtgttt

SEQ ID NO: 276033 - DNA, 985 bp, Zea mays
  unsure (1)..(985): unsure at all n locations
tggtcgcgtgggcggacgcgtgggcggacgcgtgggcgcggagagcgctcgcgcgggcgcacacgcggaggggacgttcacaggagggggagggaggagatgccggggagccagaacggggggccgaggcctcggccggtcaaagtcgagaccatccacgatcttgcgcgcgccggcgacctcgccggcgtccagaggaagctgctggagaacccctccctcctcaatgacaaaaatcccgtgatgtgtcaaacaccacttcatgttgctgctggctacaataatacagaaatagtcaagttcttgcttaaccagcaaggtacagaaacagttgatctggaggcaaagaacatgtatggggagactcctctgcatatggcagtgaagaacagttcttgtggatcaacaaatctactccttgaacatggtgcacacatagaagccaaagccaataatggcatgacaccattgcatttagctgtctggcatgcaattcaagctggagacttcagcacagttagcgtgttactaagctacaaccctgattgctttgtgaaagatgatgaaggcaaaatgcccttaaatcatattccaggaggagctggtagcgagaagctgctgaaactcctcactcatcatatggaagagcaaagaaaacggaaagctctcatgtcatgcctcgaagggaaagcaatgtcagagtttgaagaggcaatgtcacaaattgttggattgcaggagctaaaaatgcaattgcgccgatgggcacgaggaatgttttttgatgagaagcgacgggctatgggcttggggattgctaaaaggagagctccccatatggcatntcttggcaatccaggaactggcaaaactatggttgctcgaattcttggaaagctcctacacatggttggaattcttcctactgacaaagtaactgaagttcagcgaactgatcttgtggagaatttgtggggcatactgg

SEQ ID NO: 276034 - DNA, 434 bp, Zea mays
cggacgcgtgggcttttgtaggctatattgcaagctttttcctcactacagagatctcgtgaggagattgcgttgttagagtcgtatgcttcagttaagtcgaatatggttttgggtcaacagaaaaaccaatcaaggaaaagacgtttttcacgttctagtgatgataccgacaattcagatctaccatgtcctcaatgccgtaatgaatttggtggatttagatgcagcccaggatctgtgcacttgcaatgcagtggatgtggaggaatgatgccagccagatctaacatcagtataccacaaaaatgcttggggtgtgataaagcgttttgtggggcttattggtattcgcaaggtgtgagttcaagtcattgcaatctgatctgcaaccaggatactttgaagagtatttatcagcgacatatctctgc

SEQ ID NO: 276035 - DNA, 574 bp, Zea mays
ctagattttcccgttgcacgattcgaacggcggcgaatcgcaaaaaattgggagggagaggtcgagtgcgaacgcctcctcctcgccgccaccgccaccgccaccgccgccgccaccaccacaaccggcgtctcgtcggctataaaaccctaccccttctagtcttcccgtcgccaccagccgcctcgttgaaaccctaaacctctctccccgttaggtctcccccagcgccccgacgatggcggaggacgcaccgcctgcagcccctgtgatgacgccggaggaagtgcaggctgagaccgagctgcggatgcgcgacataggccagcgctttggtgctatcccagaggaccccgacgagctgctccggttactcgaagaagccgaaatctggttgtccagggtggatcaatctccgcccgagagcatgtacaatgctcttcgccccaccatggctgttttgattacaaatgagctactggagcaccctgatcccaacgtgaaggttgctctcacctcttgcttaacagaagttaccaggattactgcgccagaggcccctatgatgatgatg

SEQ ID NO: 276036 - DNA, 715 bp, Zea mays
gccgcggcgcgtcgcgacccgggccgacaagatagggtcggaaagccccgccgccgacggcgtcggcgacgccgcgcgcaagcggcccagcggcgatgttggccccaccccggggccagccgacaagcgccgccgcccggagcacccttcttcctcctccgcgggctcccgcgaccgccaccaccaccaccacggccgccgcccgccgtcctcggccgacgagaaggtgcgcgcctctcacatcctgatcaagcacgagggctcccgccgcaaggcctcgtggcgggatcccgaaggcgtcgccatctccgccacgacacgcgacgacgcggccgacctcgcgcgcgcgctccgcgaccagatcgtctccggtgaccgcgagttcgaggacggtcgtgccgagaactccgactgcagctcggccaagcgcggcggtgacctcggttcatttgggaggggtaagatgcagaagccttttgagaaggccgcgtttgctctgaaggtcggggagatcagcgacgtggttgatacagagagcggggtgcacatcatcaagaggactggctgactgcacctgctgcagtatccatacacggtggatgccttggagaggctgtatggtttcttgcttcattggtgaatttgtgcgtgttttttcttcttctcttagacggttgtttggatgctcatctcttcacctcaacgcacatggttg

SEQ ID NO: 276037 - DNA, 450 bp, Zea mays
  unsure (1)..(450): unsure at all n locations
gcgtnngtgtttcgtagtttctgcccttgatagtctgcgtttacgttgcgtctctctcatctttgagtttattactgttatgacaaggggacatgcatacccaattcattcccgaagatgggtgacccagttggattcctgaagatgtatttagtatggagcctttcgttcgcaacttttttgagaacacatctacagtacagctcaatcatcgaattcttgccgcaacaacattactctctgtgggtggattatggttggctgcaaggaaaatagacatgcacccagcagtcaagtcactgatcggaagcacgcttgggatggctgctctccaggttacattgggcatatctacgctattgacgtacgttccaacctcgttgggctcagcgcaccaagctggagcgttgactctactgtcacttacgatccttctggttcacactctga

SEQ ID NO: 276038 - DNA, 438 bp, Zea mays
  unsure (1)..(438): unsure at all n locations
tactccccgcgtcggattccctgtgtgctcccctgcgtgctccatcgcgccgccacccagagtccttccccagcgccgccctctccctctcggcgccctgctggccggcgctccctccagcccctccccatggccgagcgcatctccatggtggtcaggagcttgtcccatggctgagctccctctccatggtcgcgctcctcccctgctccatccatggctgccgtcgagtctccctggacgggctcaagtgccatacgccgtcggctctagtctccagctcgcctaggtcggtgttcctctccctctcctaatctccatggccgctggcgctcttgctcgggtccatggtcgcgactcgagtcacccctttgtgctggccgaccatccagccatggtggcgcgcacccttgcttnctacttcactcggcgccccct

SEQ ID NO: 276039 - DNA, 521 bp, Zea mays
cccacgcgtccgcatccggttcggttccgtcgtccactctcgttccccagttcgctggaccatctcaaaatcctatcctcctctccttccctccgtatctcatccggccgattcgaatctccggtcccatcctctacggcttcaccccgcgcccaatccagtctgtacgtgaatcttgacaggggagagaagaatcggataaggagacctgcaccttcctccgagcaaagcaggagaggaaacaagaatagaggaggagatggccatgcccaccttacgccttgctcctgacctgccgcccgtatcccgccgctgcttcgggacaatgacgatgggagagcagagcggggcggcgtgctcgctccgcctcctcgacgccgcctacgacgccggcgtcaacttcttcgactccgcagagatgtaggctcacctgctccctcatctccctgcctcggttcgagagtaatgaaaggaaaggtgtctggaactctggatgcacatttgcaaacatgtttactcgt

SEQ ID NO: 276040 - DNA, 473 bp, Zea mays
cggtcccactcgcaccccccgacgggtcggaacctcagctcagaggaccggatgatcggacgacggcgagatggcaagcggggaagaaggcaagggcgagacggtgctggtcaccggggccagcggcttcatcggttcgaccctcgtccgcggcctcctcggccgcggctacaacgtccgcgccggcgtcctcgaccccgacgacagggcggagacggaccacctcctcgcgctcgccgccggcgccggccgcctcagcttcttccgctgcgacctcctggacggcgccgcgctgctcgacgcggcgcgcgggtgctcgggcgtcttccacctcgcgtcaccctgcaccggcgaccccgtcaaggacccccagaatcagctgatggtgcctgcggtggaagggacgctgaacgtggtgcgcgcggccaaggacgccagcggagtgcggcgggtggtcgtgacctcgtcatctc

SEQ ID NO: 276041 - DNA, 427 bp, Zea mays
gcatcttcctaccccgtcccgatccattcatggcagcccctaccgtcgtcttactgcccgtgtggggtgctggccacctcatgtccatgctcgacgccggcaagcggctgctcacccgcgggggtcgcgcgctctcgctcaccgtgctcgtcatgcgagcgcccacggagcagctcccggccgatctcgacgcccacatacgcagggaggaggcatcgggcctcgacgtccgcttcgtccgcctccccgccgttcagcccccgacggacttccacggcatcgaggagttcatctccaggctggtacagctgcacgcgccccacgtcagggcggctatctccagcctggcttccccggtggcagcggtcgttatggacttcttctgcacggcgctgctcgacgtgacccgcgagctcgccgtgcccgc

SEQ ID NO: 276042 - DNA, 677 bp, Zea mays
tctctatgtatggagatttgccaccagcaattatacttgttgggcatagcatgggcggttcagtggctatacatgtggctgcaagaaaagaaattagaaatcttcatgggcttgttgtcgttgatgttgtcgagggaacagcaatggcttcattagttcatatgcagaagatcttagcaaaccgggcacagcattttcctagcattgaaaaagcaattgaatggagtgtcaaaggtgggccattaaggaacatcgagtctgctcgtgtgtccattccatctaccctgaaatacgatgaatcacgagaatgctatacatatcgcactcctcttgagcaaacagaaaagtactggaaaggatggtatgaaggtctttcagacaagttcctatcttgcccagtgcaaaagatcctgttgttagctggtaccgacagactggacagagctttaacaatcggtcaaatgcaaggaaaatttcaaatggtggtgattcggcacactggacatgctatacaggaagatgtacctgaagaatttggcatcgcacatactcaagttcatatcccgcaacaaaatagggcctaatggtgtcgagatacctgggctcattaaaaaatggcaacagtagacataatgtacaaggtaccgatctggaaaatgttcaggaaaatgatgagt

SEQ ID NO: 276043 - DNA, 531 bp, Zea mays
cgcttgcttttctcaagtcacagggccggcccagcccaaaatccttttcaccgctacgacctgcgtgctccggcgatgcagcggatttcggctacgacttctgcgctcctcctacaccgccgcctccgcctccctctccaccacctcctcctccctccgcggcctggcagtatcccatggcggttggaccacccgaccgtcgctgcagcctccggtgcgaaccgcggcgccggtcgaactcaccaggtggccgccgcggaggggttactcccagttcgcgagcgggttcaccccgctgaagccgaagccgctgggatccatcctcgacatcgaacgcgccaagggcctctcccccgaccacctcgtcgccgcatgggatgactatcatttaggaaggggtcatataggtgcatctatgaaagcaaaactttaccatctcttggaacaaagatcagcttcatgccgtcactttgttattccgttgtggaagggtagtggctacactaactatgttcatgcaagtccagatgc

SEQ ID NO: 276044 - DNA, 442 bp, Zea mays
gaagcaaaaagggagacatctttagggtcaatatcatccaatgtttctgatgccagaagtaatatgattggagagattgagaacagatcaacattcctcttagctgtaaaagctgatgtggagacacaaggagaatttgttgaatctctagcaaatgaggtccgagcagcaagcttcataaatattgtacgacgttgctgcatttgtaaattggttggatgaggagttgtctttcttggttgatgagagagcagtgctaaaacattttgattggccagagagcaaaacagatgcaataagagaagcagcttttgagtaccaggatctgataaagttacagaacagggtttcatcctttactgatgatccacaacttgcatgtgaagaggctctcaagaagatgtattctttgcttgaaaaagtggagcagagtgtctatgca

SEQ ID NO: 276045 - DNA, 622 bp, Zea mays
cacgcgctcaccgtgctgcctccaccatcgatggctctccctcccggcgcaggggcggtggcgccggcgacgcccttcgccgcgaatccgtgccgtctccggcgggcgtctggtcctcctgccgccgcccttcggctcgggccgctcttctggccatgggaaaaggtgaaaatcggtcccctttctgtttcccccatgggttttggaacatgggcatggggaaaccagctactttggggctatcaagaaagcatggacaacgaacttcaggattgcttcaatctggctctaaggaatggcataaacctttttgacactgctgactcttacggaactggaaggctgaacggacagagcgaacggctactcggtaaattcatccttgagtttgaagggaggattaacacaaggactcgaaatggtttcaggaatccaagaagtaaagttcttcctgtcagttttttcagttacagtactgctttaactttgttaccttgtattatgccagggcggattaaatctccagatgatgtggtcatagcaactaagtttgctgcatgatcttggcgacttacatcggggcagtttgtcagcgcctgcaagtattctcccgatttgtttg

SEQ ID NO: 276046 - DNA, 501 bp, Zea mays
gcttgaacatccaactgatccaaccaccgacccgggcgagccagccatctccgtttccttgccagtcccgcgagcaccattcaccacaccagcgcagccgccatggccgacgtcgagaaggccacccccgtggccgcaccggccgagggcgcgggcggcgacgtggccgccgggagaaccggcgcggtggccgccctgctgcggcggtggcggacccaggacctgctggaccggtcggggtccgcgctgcgcgccgcggcgtgggcgttctccctgctggcgttcctcgtcatggcctgcaacgagcatggggactggaggcagttcgaccgctacgaggagtacaggtacatcgttgccatcggcctgctggccttcgtctacacgacgctgcagctcctccggcacggcgtccgcctcaccggcggccaggacctggagcccaagaccggcctcctcgtcgacttcgccggagaccaggtaaccgcctacctgatgatg

SEQ ID NO: 276047 - DNA, 714 bp, Zea mays
cctgagttcctcaccggcgaggcgagctcggaaaaaatcgcatggccttgcagcacgcaggtccagctagctctacgctgaccaccggccgtcatggcaggagcgccgcagccgtcctccgtcggccaccggcgggttctagcagccgtttgagggcgcacgcgcagaaacccgtcgccggatcccgttcccgtggcgcgggagccgagaccgcgacgtccccctcatcctcccgctcggagaacgccgtcctcaaggccgcctggtacggcgccgagctcctcggcatcgccgcgtcgcttctccggcccgcgccgtcgtcgcctcaggagggggatgctggcggtggcggtgacgcagagggcgaagcggcggcggtggcgggggccctggacctggaccacgcgggagtggccgaggccattaaggcggacttcgcgcggtcgtacttcgtcacagggaatctcacgctgagagcttacgaggaggactgcgagttcgccgacccggcgggctcgttcagaggcctgcggcggttcaaacggaactgcactaattttgggtctctgctcgagaaatcgaacatgaagctcactaaatgggaggacctggaggacaagtcgatcgggcactggcgtttcagctgtgtcatgtcgttcccctggaggcctattctgtcagcaaccgggtacacggaatactatttcgatgctg

SEQ ID NO: 276048 - DNA, 1780 bp, Zea mays
ggccagcctcccccgccccactgcctataccgccagctacagtcggaaacggccgcaaggcagtcggaagagggaagccgcagccgggcactgactccgatccccactctagccaaccccacgcggaccggtccacctcggacgaccacgacgccatctcgcacgcgtgcttccacccaaccacacaaatcttctctcccaggcctaaccttcctccccgcgagctgcctctactgattttgcactggcatgccgtgacgcggaaagatgtggagatccatcttggactgatttcttccttactcggtgaggaactccaaaccatccagctaggttattcgccctctgccggcgcaagatccattttagtttgcccccctcccccaaattggactacccaaggttgaagataccttggtagtcagagcatagaataagggtggactgttattaattttccataggatggaatccttgtggaagctgacctacttgctcgagccggcatcacttgctctcattgccacagctatctctgtggcctatgcatccgcatcgcgtgctctagattatggcaaagagatggagagaaacttggatttttcagaggcttccattacattggatcggtcgcaggctctaatgattccccttgcaagctcgtgcagtctgttgctgatgttctacttgttctcgtctgtctcacatctcgtgactgcttttactgctgtggcctctgcgttggcactgttcttttgcctgtctccgcacgtcacctatctcaaggcacgattcaatctaatggacccattcatgtccagatgttgttcgaagtcatttacacggttgcaaggtttgctgatgctcttctgcatagccacagtcttagcttggttggtttcagggcattggatgctaaataacctactggggatttccatatgtatagcgtttgtcagccatgtgaggcttcccaacataaagatctgtgcactgcttcttgcctgcttgtttgtgtatgatattttctgggtgttcttctcagaaaggttctttggagcaaatgtcatggtttctgttgccactcagaaggcatctaatcctgttcacacagtagcaaataagctcagcctgcctgggttgcaattgattacaaagaaagctggagcttccagtcaagcttgtatttcctaggaatttgttgggtgggattgttccaggaagcaatcctggtgattacatgatgcttggccttggagacatggccattccagggatgcttctagctctggtactcttttttgataaccggaagttaaaggatgtgaattttccaccagatgtgtctcccccaaaacggcggaattatgtgtggtatgctgtaacaggttatggtattggcttggtagctgcactagctgctgggatcttgtctcagtctcctcaaccagccttactgtacctggtgccatcgacactgggacctgtcatgtactccctccggtgtaccaaaaactgacgttttggacagcttctcacataccaaggaactaataaataccacactttttcattcctagtcaaatccctttaatagccggagtggtcatcttcactccttcccaggcaggaggcctaggttcgattcttgactcacgcaatactaaattttttaccattttgcatgcaaatgcatggcgtggagaaggccaacggacggctggtgaatttacttcttgctgcgtcaatcgagagttctcctcgctccacgtgaaacgtc

SEQ ID NO: 276049 - DNA, 440 bp, Zea mays
caatcacccctttcgtcttctcttcccgctcccgtcccgaaattagcccaccgattagcttgcttgccctagcagatcgaagccgtagccctagccgaggagcgcccatggccgctgcgatcgtggcctgaggcggcggggctcttcccatggggtgaggggatggaccctagcctgaaggaggaggtgatgaaggcggtggaggaggcgaggtccgcggcggcgccgcggtgccgggtggtgcggatcatcgtgcacgacgaggacgccaccgactcgtcttccagcgacgacgagggagaggaggcgggggagcgcgccgcggcgcacccgggcgcggcgccggcggggagcgtgaagcgcagccgcgtgctgctccagtccgctgggtgcggggcggaggaggacggcgagggggccaggttcacgggcgtgcggcg

SEQ ID NO: 276050 - DNA, 505 bp, Zea mays
agcttggtagctgcactagctgccgggatcttgtctcagtctccccaaccagccttactgtacctggtgccgtcaacactggaggctgtcatgtaattgtcatggttacggaatgagctgtgggagctatgggaagggtctggaactattctgaacgacaaagctcgtttgtgcgaggtctgagatccaagtggccaataagaaggatctgagctccccgggattgaatcttaattagttattaaccattacttgagctcatactgaaagggagtatttataagctgagtgttctattcatgcatgtgagctactatctccgttctcgaatatttgttgcccactagttcatttttaaactagaccgcgccaaataaaaaagaacggagacagtactaagcagttgcccatcgcgaatcatgtaactgtttgtaatagaaaggttcagttcaatgcatttcagctttttctcccaaaaaaaaaaaaaaaaaaaaaaaaattatta

SEQ ID NO: 276051 - DNA, 525 bp, Zea mays
agaacttcagcgacagattgaagagcttcagcaacagaaagtggaatccgagtttcatcgtaaccatccgaatatcaaactgaccagaaaaaacaccgacgaaatggcctcttcatctgactatcctgagcacagagcccaggaaatgatcgtgtctcttgtccaatccttgcaatccagcagcaggtaaacgtgagttgtttaagtacggaagagataggtcctgttcagccagatgattacaagcattcgcagggcttgttagatttgtggttcttagtctaaaatcacattgaacagggagatgaacacatgtgatgctgtttatgtgttatctacatttgtctctatggctgtaagatggccatatatttcctcgaaagtgatcttgattgatcatgtgtgctgtgtatttttttaatgacatgggtcatgtatttccttggaatcggccatgggattggttgtgtatttgcttgaaaaataaaccatggtataatttccttgaaaaaaaaatattaaaaa

SEQ ID NO: 276052 - DNA, 568 bp, Zea mays
cccacgcgtccgttcttccttgctgtgcactacacaaaccaaccataacttctcttgttctcgttctcttccctgcgtgaaccgcggaccaagaagaagcgggcgttggggactttgggatttgaaagcctacatattattatttctctaattcaggcgtggtctgtgctgggagggaagggatctgtggggctgcagccccatccgggctgagggttgaaggatccggccctttggtgtgctcccccaatcgggttattatttctctaattcgggcgtggtttgtgccgggagggaaggaatccgtggggctacagccccatccgggctgagggttgaaggaaccggccctttggtgcgctccccccaatcgaggaaaagggggcaacggatgctttgttgccttcgaccgtcgcaggctcgcagcatccgttacgcgattgggattggaccatcagcaggtcgaaatgactgttctggaacacttttccccccatcccatcaatcctggtacgcacctgctcacccgtttcacctatcatctgtttattctgtacccagttaactg

SEQ ID NO: 276053 - DNA, 598 bp, Zea mays
accgtttctcgctctcttcttccttgcagtgcactgcaaaccaaccataaacttgccctcttctctgcttgaaccgcggagcaagaccgctcttgttctcttctctgcttgaactgcggagaaagaccgaatccgaagggacgttgggactttctggctgggaagactacataccatttctctaattcgggcgtggtttgtgctgggagggaaggaatccatggggctgcagctcgatccgcgctgagggttgaaggaaccggccttgttgtgtgctccacccaatcgaggaaaaggggcaaggattgctgctttgttgcctttggatccgttacgccattggggattcaaccatcagcagggcgaagtgacggttctgcaccacttttccccttatcctaattcgattttatttgaacactggatgtgattataatctcggttgctgttctgtgcggctctatctgagggtttcctccgtcctggatcgggaaggaaggcgcccttggatttccgtctccatggcgcccgccttgtaacccacggagtctaacttttaaatttagtgtaaatattagtggtagcagctgttaaggaa

SEQ ID NO: 276054 - DNA, 442 bp, Zea mays
gcggcacctcttattccttcctctctccgtgctcctcagccgaggtggcgaggaccctccctgtacatcgtctcctccatgtcgacatcttccctcatctctccaacgtcgtccagccattgagcagctcatcggagcagcaacgctcgacactgagtagcccaccgtggagtcacctcatcagcgtctcctcgctcctcgtccgttcgtcgagctcggcaagcccctcctcagccgtgccgagtctccaagccggctgtcgacgctcgcctttgtttctgtgttactggtatccattcttgctcgccaatcgagcaccccacccaccgttccagttccgattccgctagttgtcgttcgcctcgccatcgtctcttgggaaagattataatgtctttggcttaattagttacttcatgtggaggtcttgaagcttagatta

SEQ ID NO: 276055 - DNA, 358 bp, Zea mays
tcttcttccgcccagctcaatggtttgggtgaggattcttcacgaggtggagctctgacacctggccgcagattttgaccataatgtgatttatattaatagctgcatgtgtctagagagcaaagcaaaggaaattaaagtgcggtgtccctttttcaatttttttacatgtgaaagactgtggatgccgctgcattgtacagatagttgactcgttcgccagatgaaaaatgtataacaagagtcgtaggttcaagatagggagaagatgaaaccgtgatgattcatcattgttaaaaagatggactgtctgttggaaaaataaagctgattaataaccgcaataatgtcggtccgc

SEQ ID NO: 276056 - DNA, 490 bp, Zea mays
ctgtggatcagaaactccatccgggacaccgtgaccaggtccggcggcgaagcgagatggtgtcatccaagaaagtgtgcgtggtcggcgctggcgtgtcggggctggcgtgtgcccgcgagctgctccgcgagggccacgacgtgacggtcatggagcagagcggcggcgtcggcgggcagtggctgtacgacccgagggcggacggcggcgacccactcggcgctgccggcgcgcacagcagcatgtacgcctccgtccggctcatcagcccgagggagctcacgggcttctccgacttccccttcttccccagagacgacggcaccggcgactcccggcggtacccggggcacgctgagttcctgaggtacatcagggacttctgcgacgcgttcgggctcatggacgtcgtcaggctcaacaccaaggtcctgcgcgtcggcctgccggcgccgcgtgccgctgatgacggtgacggcatcaagcg

SEQ ID NO: 276057 - DNA, 502 bp, Zea mays
actagttctagatcgcgagggccgcccttttttttttttttttctttttttgttttggttttcaaggaagctagaagcgcgcgctttattgccatgagcgcatcacaccagactagttatttacaaaactctgccacacggcggaacagagcgcccgatcgatcgggccggcggagacgacgaccacaacatcatcacgactaccacgctgctagtacttgcaactcctactgctactaccggctagtataatacacggaggcgcgcgcggggggaccaggacggccgccgctaatcaggcgctggccttgttgaccttcttgccggcaccggaagcggcggcgcgggctggcttgggcttgggctgcgcgggcgccggggccaccttcctcgctcgcttcgcgcgcaccttacgtgcctccctcgacggcgcttcttcctctcgtcaccctcctcgtcgggcttcttcccaacctccgagattctccaccacctccttcgc

SEQ ID NO: 276058 - DNA, 703 bp, Zea mays
ctggggttcactaatcagtcaatcccattgtacctgtccgaaatggcgccaccccaataccgcggggcaatcaacaacggcttcgagctctgcatcagccttggcatcctcttcgcgaacgtgctcaactatttcgtcataaaaatcacagcaggatggggatggaggatatccctgtccatggccgcactgcccgccgcattcctaaccatcggcgcgatcttcctccccgagacgccaagcttcataatccaacgtgacggcaacaacacggacaaggcaagggtgctgctccagaagctgcgcggaacggcctcggtccagaaagagctcgacgacctggtccgtgctagcgacctctcacgagcaacccggtacccattcaggagcatactcgagaggaagtacaggccgcagcttgtggtggcgctgctggtccctttcttcaaccaggttagcgggatcaacgtggtgaacttctacgcgccggtcatgttcaggacgatcggtctcaaggagagcgcgtccctcctgtcctcggtggtgacacgcctgtgcgcgacgtctgccaacgtcgtggcgatggtggtggtcgacagggttgggcgcaggaagctcttccttgccggcggcgtgcagatgatactttcgcagttcaccgtcggcgcgatcctggctgcgaagttcagggactacgaggaga

SEQ ID NO: 276059 - DNA, 466 bp, Zea mays
ggctccgtggcttttgcctgtcctgtggcagcgaatcggagagcggaggggaggggaaagcgcagcaacgccggctagcgagcgggccgttcgaggatcgcaatgtgagcacgagcagggacacacaagatgcttcatcctagctgggtcggtgtctcggcacacgtctcggagtattggtctgtgataatcgccactgttgttttcgcatttgttggcgcggtgacaatttactatacagtcaatcagttgaacaagaacatcagcttgagcctgataagggctatcaaggccagggccaagaggtacaagaaatcgaaggacaaggtgcccgctgcatcccacatctggaggaaagaagttgtctcccgcagcaaaggcctgaaatgctgcgtgtgcttgaagtccgtttcacctcctcagtactctggggggaccatccatcagtgcgatatctgcggggccg

SEQ ID NO: 276060 - DNA, 423 bp, Zea mays
  unsure (1)..(423): unsure at all n locations
gcccggccgcacagactcgatgccgcgcgctgctaccgtggccctcttcgccggtccggtgcgaggacgcctgccggggcgctctcggcggtctttgattccacgcaggaagagccccgcgcggtgcgcgccgcgcggatttggcggcggcctcatggcatgaacggcgctcaggcgatccgaacatcatagaagacagaagcgacacataacaaccggacagggccacaaggaggtctctctctgggataaccacccaaattacaactcaagatgcaaacattattgatcaatacggatcacctcgtctgctagatgtttttatggaaagaaagcaacggccaagttcttggagatggatgccaatgcttccggttntgctgtcggagcgaatcatgaggaaggaaggaaacgcatggattg

SEQ ID NO: 276061 - DNA, 375 bp, Zea mays
atcactttcacgaatggccctcgctctgtgaactcgtcgggttccatggcggcgccgtcgcctaaacccccgacaccacgcgggcgctgccaccacccgcgcaacgccacccgccgcctccacgtcgccacccgctgcttccccgacccaccaccaccacccgcctccatgccgccgaccccgagtccgaaccctgtgctgtcccttctctccgcggtgcccgactgggccgacgccatccaggagcgccgcgtccgcgaccgccgcccgctctacgaccacgccacctggcggcaccaccgcagctcccgccgccacctgcgccacctcctcacctcgctgtcctcccgcgccatcctctccctggcgcccccg

SEQ ID NO: 276062 - DNA, 386 bp, Zea mays
gttcttgcgcgtacgcgtacacagccccgatccgaatcgtcctcctcgcgagcctcgccgatcccccactcccctcccctcgcttcaagatgcagatctttgtgaagaccctcaccggcaagactatcaccctcgaggtggagtcttctgacaccattgacaatgtcaaggctaagatccaggacaaggagggcatccctcctgaccagcagcgccttatcttcgccggcaagcagcttgaggacggccgcacacttgctgactacaacatccagaaggagtcaacccttcatttggtgctgcgccttaggggaggcatgcagatctttgtcaagaccttgactggcaagacaatcacccttgaggtggagtcttcagacaccatt

SEQ ID NO: 276063 - DNA, 946 bp, Zea mays
tcgcccacgcgttcggacagagagcacggctcccatagtcgaagtggtgactgcctcagtatagcgaaacatctggagtctgctaacacaatgttctcatttgtgtggtggataattggattttattgggtatctgctggtggagaagttcttacccgtgatgcgcctcaactttactggctttgcatcgtatttttggcgtttgatgttttctttgtcgtcttctgtgtggctttggcctgcatcattggtattgctgtttgttgctgccttccttgtatcatagcaattttatatgcagtgtcggatcaggagggagcatctgaagatgacattcgtcaaattccaaaatacaaatttcggaagatggaagagcctgaaaagcagtctgttggtgtgcctggatcttctggtggaataatgatagaatgtggaaccaatcaacctattgaaaaagtacttgcagctgaagatgcggagtgctgcatttgcctctcagcttatgatgatggcgcagagctccgtgaactcccttgtggccaccattttcattgtgtttgcatcgataaatggctgcacatcaatgccacgtgccccctatgcaagtacaatgttcggaaaaacagcagcagcagtggcagcgaagaagtataaatctctatatgagaatattgagaattcatacccaacagttctggcttctcgcagcaaattttttatcccataatcccatgagttcgcattcgtatctgtggcagtgtgatgaagaaaatgatccatgtaaattctcttgttcgtaatacggctatagcaataattctgtgtcaactttgctcgtgctgttctcggtgtgtttagatttttatagtatgtgtacgtgttatagaatttctgtagagcagcccgcttgtgtagtctaatgttttataataatcatactagcagt

SEQ ID NO: 276064 - DNA, 384 bp, Zea mays
  unsure (1)..(384): unsure at all n locations
gtgagctccgcgtacggctccggccatcactcctctggttgtgtctctccagcatcgcgactccatcccttcatgctcgtatctggagctcgctcggcctacagctcgcttgtaccccggccgccgtgttgttcctgttcgtcttcagcgccggtcgagcatcgccgcttgggaatggcgcacggccatcccgtctcgacctcctccagctcctccatcccttggtccttggcgctcgccaagggcctctccttcatcttttgtcgcgtctcaactcccatggccgcctctacgcacgagctcgccggacgccgcagcatatgctccctgctcggcctncccggcgtgctgctccctcgacttggcgcccctgcgagctccttc

SEQ ID NO: 276065 - DNA, 781 bp, Zea mays
cggacgcgtgggatgatgatgggtgtttgaacctctgagacttgtatatttgagaaccttatgtcttgaaccaatcctacaccaccctgcgagaaatgagagttcactttgtttagacactaggaattgttttgggtgacatcatttttcttctttgaacttttcaaggttattgcttgtatagatagcaaacgatgacatgtacgttttctttcctttttcagattttcttttgtgacattattaactattatgtactaatgccggatgttgaattagaattagaattttatttgtacttatgttctcaagcttacctgccaggtcttgattctgacaccattcatggttctgaacatgttgacatctcttactgtaacatttgatacgcatgcttttgtgttgtctcggcctagtccacctatactgattccatgacctgatccacaattcaagatatgtatatttatgttgctgcatcctgtctggatggagatgcaatcgtcacctgcatcgaataggacaaaaggatgttatgatacttcacagcagtttttcagtgtagtcttaactctgaaacatgtcctttgaagtgcagagtatacaggcgtaacagaactgagatgcaggcttttggttgaccctacatatttatttgtgattttttgtgtggataatgtcttatttatttggtgttctttatggaaaagggtctttgatgtaaagctttgcgaaacaaactttagagctaatagttagtgtttgaatgcactaaaaataa

SEQ ID NO: 276066 - DNA, 406 bp, Zea mays
  unsure (1)..(406): unsure at all n locations
taactcggaatcggctcgatgtcctctcccgtcatttcatcttctcttctagtcgtttcatctttcccggcagctttggcttcagtcatcggcttcgcaagttcgcatcgaatccgtcgtcttttgcactgtcaccttcatcgttgctccagttgttcgtcccattccctccatggacgcgatgtgactagaggacggcgcgaccgtacaactttgtttcgattcgtcggcgccacagctttctccatgcttgtaatgtagtgcacctgctgaagaaggggaaaaacgagagagagagagaaaagggaaaaaacgagagagaaatcgctccagtagcgcgcccggagaaggtacctngctcgtctcgggcgctcggctgttccgcttgttctcttcttccgtctct

SEQ ID NO: 276067 - DNA, 380 bp, Zea mays
agcattatgatcattattattattcggctcctgctcatcagctgcagcactcgtgctccggaccggagaagtcgaaatggaggagaggctgttcgccacggagaagcacggtggccgggcgctctacaggctccacgccgtcacggtgttcctggggatatgcctggtgctctgctacagggcagacgcacgtcccggctgccggctccggcggcagggcggcgtggctggggatgctcgcggcggagctctggttcggcttctactgggtcatcacgcagtccgtgcgctggtgccccatccgtcgtcgcaccttccacgacaggctcgccgtcaggttcggagagcggctcccatgcgtggacatcttcgtgtgcaca

SEQ ID NO: 276068 - DNA, 422 bp, Zea mays
gtcgacgatagtctcatacagactgagtaaaggttttaccaacactgtacagcacgctggtgcatttagtgaacatctggttggtgaaaagaggcccttatatgactcaagcggtcgatatgtgtaccaaattagccattcatctctacatgttctagctaagggcaaactcaatgaggaaaattttcaagatgcagaatcaactaatcagctggattctcatgctgctgtgccacatcatattagttgggatgctcctaagcctactctgccaactgattgtgaacacgatcctgtcgtaccatgttccgtctgctctgtggatgcgtctcacacggaaactattatcccgagcacacagattagagacattgctagtagtacagagaggacctcccctgacattctttctgaattccttg

SEQ ID NO: 276069 - DNA, 778 bp, Zea mays
  unsure (1)..(778): unsure at all n locations
cccacgcgtccgcccacgcgtccgatgcactgctcagtacgcagccgctcccactactagattcaggtgagctcatcattagtgccccggcccttggtgcggtgcggccaacggccatggcgaacttgccgcgcagctcaagagcaagttctttggcctcgtcggccgcatcaccagctgtggccgcgccggcgccacccacaaggatgccgctggtgcgacagaggccaagtcatcagtgggatcccagcctgttgagatcaggtcaaggggaggtgctcctcccgttgatggaggggccaagggtcacatcaacagtgacaccatctagaggagagggagaggagaagagaagagatcgaagagaagagaagaagctcaccgatagttaccatgtttgaaagaactgaagctgtaaatcacagtcgtcgttgcttgtgtgtgtgtggttatagttcctccatggtttaccatcactttcagcgtgtctagtatatctagtgcgtgctatgtttcataatttcgggctatgttgtttcagtgtacggtatttttgtttgtttccttccacgattatataatctagcttatggattatataagcaactattgacctgcttatggattaccataatctaggtgtctaggttatataatctatctaataatctgttttgtttgtttgcctctcaacttatttaagttggattactgtttgtttcctttcaaaattatacaatccaacttatanaanaaaaaaaaaaaaagggcggccgct

SEQ ID NO: 276070 - DNA, 432 bp, Zea mays
gacagccactactaggaattgccgagcgagcgagcttgcgccgtgcgcgatggagggtgacgagaagtcggcgggcggggcccctgcttactggggcctgggcgcgcggccctgcgacgcgtgcggcgccgaggcggcgcgcctctactgccgcgcggacgcggcgttcctgtgcgccgggtgcgatgcgcgggcgcacggcgccgggtcgcgccacgcgcgggtctggctctgcgaggtctgcgagcacgcgccggcggcggtcacgtgccgcgcggacgctgccgcgctctgcgcctcctgcgacgccgacatccactcggcgaacccgctcgcgcgccgccacgagcgcctccacgtggcacccttcttcggcgcgctggccgacgcgcccaagcccttcgcctcggcggcgccgcccaaagcaaccga

SEQ ID NO: 276071 - DNA, 788 bp, Zea mays
gcgcacctgttcaagaacagctcgggctccaaggtcttgagctggagccagaggtttggcatcgcagttggcgtggccagggggctgtcttacttgcacgagaagtgccgggagtgcatcatacactgcgacatcaagccagagaacatcctccttgatgaggagatgggcgccaaggtcgcggacttcggcatggccaagcttgtcggccacgacttcagccgcgttctgaccaccatgcggggaacgatgggctatctggcgccagagtggctcgcgggcgcgccggtcaccgccaaggccgacgtgtacagcttcggcctgctcctgttcgagctcatctcgggacgccggaacaacggctcctcggaggcagggtccaactccgctgtgtacttcccggtgcacgccgccgtcaggctgcacgcgggggacgtggccgggctgctagacgacaagatcgccggggatgccaacgcgaaggagcttgagagggtctgcatggtcgcgtgctggtgcatccaggatgaagaaggcgaccggccgaccatggggctcgtcgtgcagcagctggaaggtgttgctgatgtcggcctgccaccgatcccgtcacggcttcacatgctggcgatgatgaataaatgtcccgtcggtgggaaaacaaaggttgaaccctgttcaaatagcggtagcaaaatagacccagaagtttgaaggtactacgcaggtccgataggtaattgtagtttcagcatgcgagtcccattgttcatatgcctgtttgccgt

SEQ ID NO: 276072 - DNA, 560 bp, Zea mays
gcgctgcagacagtctaaacacttgggaaacagtacatctgaaacaggaagctttcgcaagctggccagctagctccctaccgactagataccgaggagtgacggatcaggatgggaggggtgacctcgagtgtggcggcgaagatggccttcttcccgccgacgccgccgtcgtacgcgctggtggaggacgccggtgcgggggtcaccacgctcagcggccagccgcaccgggagaacgtcgagttgctgcgctttcgcacccgcaaagggaacacgctggcggcgatgtacgtgcgccacccggacgccgcgtccacggtgctctattcccacggcaacgccgtggacctgggccacctctaccagctcttcctgcatctgtccttcaacctccgcgttaacatcctcgggtatgactattcaggatatgggcaatcatcaggaaaggtatgatcaaacaatacttatgctgacataaaggcatatcacaagtgctctaaaaagaaatttggtgccaatgaagaagaaataattttttatggacaatttgctggaag

SEQ ID NO: 276073 - DNA, 439 bp, Zea mays
ctcgcgggtcgacacaagcctctagagtgagtcctagctagttcctccgcctcctcccgcacagcaaaatggagacctccttcctccccaccacgctccccaccgcaaagcccctcccggcattccgaacccacgctgtagccgcatcgaaacttccccaacagcgccctcgccgctgcaccatacgcgcggccatcacccgtggccgcaaggaggagacggtgaccaccgtccgggagcagctggagggctgctacctcctggctggtatcaagtacgagggcctgacggtgaagcagctgcagggaatccgcgacgcgctcccagagacctgcagactgctggtggcgaagaacactctggtggggaaagccatcgagggcaccccctgggaagcgctcaagccgtgcatgaagggtatgaatgcctggctcttcgt

SEQ ID NO: 276074 - DNA, 444 bp, Zea mays
agcagatcattgtctcttgtgtacagtggaatgtaccttgggtcagttacaggtcttgcattttcccccttgctgatacataagtgcggttggccatcagtcttcttttcatttggatccctagggcttgtttggttcacgacatgggcaaccaaggcatatagttccccacttgaagatcctggaatcagcgctgcagaaaagaagcttattgctagtcagagcacagcaggcgaacctgttaaaacaattccatggagattaatactatcaaaaccacctgtttgggcacttatagtttctcatttctgccataactggggaactttcattttgctcacatggatgcccacatactacaatcagggtctgaaattcaacctcatggaatctggccttatctgtgttcctccctggttcaccatggcggtttctgcaaatgtt

SEQ ID NO: 276075 - DNA, 834 bp, Zea mays
ggatctcaaagggatgttataaacatcaacgaggatgtcacgattgatgatgcaatgaatgataaatctatgccagattctggacgaaaggtgactaatctactaggccaatttgttaattccacttggtctccggtctaatccacgtttttgtcatctctttggagatgaaaatgtgatttagcagcattagcagctgtcatgatcgtcatgcaatatctattttggattgggtagcagcgaacaactcaacaacacttggacatttcaacatgaaatgatctccatgagaagaatgtccgcctgacttcagtagaccaggacaatttagtttgaagatgctggatcatttctgtgatgattaagtctttgtcacttcaataagcgtcctgtatggtgttgcctgtagccctgtatggccgaagctactaaaggtaattagggtttgataaagttaaagcaaccgagtcccaaacttttgatcttgattcgtgcaaacggggacgatgcaacacattttcaaggtattctggacctttatgaagcatgctctgggcaggtcatcaacaaagacaagtcttctgttcactaaaaatacgagaagtgagacgaagatggcggtcatgcaagctctaaatttaacacaagggactttcaacgacagatatctgggcttaccagttcgctttgggcagtccaggacaaaaacttcttagtacttaaatgataatgtgacaacgtattcaaggttggaaagaaaagctgctgtcaaaagccagtaaataagtgctgataaaggccgtagcacaaggattccaacatatgctatgggat

SEQ ID NO: 276076 - DNA, 685 bp, Zea mays
  unsure (1)..(685): unsure at all n locations
cgattccgttttcgacctcgctcccacctcgccgcccgatccgacgggctggatcgccggcgaccgaccgttgtcgatacgaagtgcagctgtaggctcttcctgccgatcccctgcgtttgcgttccataatagcacgaccagcgcatctcaccggctcaagagcatccgtggatctgaccggaggaggccgcggctgctgcttctccctcaccgatggcgagggttcgggacaggacggaggacttcaaagaggctgtccgagtcgccgcactctcccatggatacacggaggcccaattggccgcgctcatgtcttctttcatcatccggaagccgtcgcccaagtcaccgttcactaatgccgcaatcaagacgcttcagagcatcagggaactcgagaggttcatagtgaagcataggagggattatgtggatctgcatcgctctaccgagcaagagagggataacattgagcatgaagttggtgtttttgtaaaagcatgcaaggaacagattgatatcttaaagaacaggatccacacagaagagaagaatggaagtggaaagacatggcttggcactagggatgagagttcacgggtggacttgatagctcatcagcatggtgtggttctaattntgagtgagcgtctacactcggtaactgcacaatttgatcatc

SEQ ID NO: 276077 - DNA, 543 bp, Zea mays
gtggggctagaaaagggaagcatgctgggagagaagaatcacaccgggccgtgccgatgggtgtctacgagtagcagttgtatctcgctgacctcaccgcctgctgggcaccaaggaggagatgacttccccgaagcgggcagcagggcgggaagggtgcggatgcttggccgccgtcgcgcggggcctccgcggggcgtgcttccggccggcggtgacggcggacggtgacggcggcggctcggccaagggcagccacgttcacgacgcagcagagacatgatatctgaatgctagcaatcgggagcttggtgatcattttcagacaaaacgcgatggtgaaaatggtgttgatgcatcaattgagaagagaacacccaagctacttcagtttacctttcaagagttgaaatctgccacgcttaacttcaggccagacagtattcttggggagggtgggttcggttatgtattcaaggggtggattgagccaaacagcactgctccttgaaaacctggcacaggggttactgcggcagccaa

SEQ ID NO: 276078 - DNA, 409 bp, Zea mays
cgcttctcccgtcgtcttccccgctcctacgacctgcgtttgtcgatgctctctccatggcaccctctcctctcccccgttgcacctcctgccatggagctacggtcaccgctgaactcacataactgctcccttacctcctccattagaccaccgccaccgcgctccttggcgcgggcgccccccacgctttccgccaccgcagcggccgtctcgtcgctgtccgccacctcagcggccatctcgtcgccttcctgtccaaagaagaaggttctcgtgcccatcgccatgggtacggaggagatggaggcggtcatcatcgccggtgtccttcggcgggcttccgctgatgtgacgcttgcctctgtggaggacggcctcgaggtggaggcgtcctgcggctcccgca

SEQ ID NO: 276079 - DNA, 389 bp, Zea mays
cgaagtcatgtcccacctcgacgcggcctcgctcctcgccccctcgccgccgctggcaaagccccacccgcgcagccgcttcctctgcctcatctcctccatgctcgccgtcctcggcgcctccctcgcgggtctcctcttattcgcgctccaccccgcgccgaacccggtcccgaactacgcgtcgctctccctctccctcggatccaacgacaccgccgcctcgcacctccgagcgctcactctccacccgcacgtcgcggggaccaaggcgaacgccctcaccggccggtacgtgttcgacgcgctctgcgcgctctgctttcccacccacattacgccttaatccggcctcctgtgctaacccgttcaacggttccttttccttt

SEQ ID NO: 276080 - DNA, 455 bp, Zea mays
gcaagatttgctcagatgatgtggagggtaaatttctttgccatgtcctgttgcatggtccttgacaatgactacatgttgtactatatcgctccgatgcataccctgttcactcttatggtgtatggatcactgtttgttctcaacaagtacaatgagatcccatcagtcatggccattaagatcgcaggctgcctcttgactgtcattctgatatgggaaattcctggtgtgtttggaattttctgggcaccatttacggttctgctagggtaccaaaacccagagccttctaagatgaacctacccctggtacaccaatggcgcttccgctctggccctgatcggtacatatggatcattggaatgatttatgcttactttcaccccaacgttgaaagatggatggaaaagctggaagaatctgagactaaggtgagagtgttaatcaaggg

SEQ ID NO: 276081 - DNA, 414 bp, Zea mays
cggacgcgtgggcgcacgcgtgcggacgcccgtggctgccgacgcggcgctcctcgccatcatcgtcgccttcctcctcccgctacgcctcgtctccctcggcctcagcctggcgtccgggcgtcacggtactagctccagacgcgtccgccgttcctgtgccgctttggccgtcgcagccgcgctcctcgcagtcatcttcgccctcccgcgtgaccacgtccgggagtgcgccgctccgatcgcttctgtctccagtgccggggatgatgacggcggtttccgcgaggagctgcggttggaggtcgagcagcttaagcagcagctggcgcggcttgaatctctttgggatagtaaatcgaaagctgtggatgataaacttgattctttagaggaggataatggccgtgtaat

SEQ ID NO: 276082 - DNA, 493 bp, Zea mays
aaagaaagcttcagtaagtccagaacagcaacctgtcattgcttctcctcagctcaaaatggacatgccgtcttttactcctgccattaagcacacagcaggatttgccttatccggtagcaagcttgttcctaagacgggtgagattgcctctgaacctaactaccaggtcactggtggtatggatagtgagcaaagaatcatcttttcagaaaagatccgttgtgcagtagaacaatcaactgcacaggctaaaggtgcaagccttgactcaatggaggcagttaagcacaaggaaggcgtatggagcaatctatccacaatctcaagaaacaagttatctccagaggtcgaagagaagcttacctcagttgcagcagctgctgaagcagcagtttctgttgcaaaggcagctgcagaagctgccaagatggcgtcagaggctgcattgcaggcgaaaataatggcagaggaaactcttagctcttttaca

SEQ ID NO: 276083 - DNA, 762 bp, Zea mays
cccgaacaataaacaacagcttcaccctcctcctccagtgcaggccgtcggcggctggcggcgtcatttctcctccttcctctggcctgccctgccctgccctgcccgcgcgataaccatctctcgcaactcctcttcgtactcctcgtctccaacgccggcaacaactacagagcttcagcttcccaagcgcgagacatgcgtgcggaaacacagacggcggagtagcgtagcgccacgatgggattgccaagctggtaggtagccaagaagacatgagatgggggcgtccttgggctccgccgccagcaaggaccggcagcaggagcacggcggcgaggctccgcgaccagatccctgcaagaagacgcggctctcgtcccctctctgcactatccacggtagccacggccacccgaggctgatcccagggctcccggatgaggtctctctgcagatcctcgcgaggatgccgcggatggggtacctcaaggccaagatggtctcgcggagctggaaggcggcggtgaccggcgcggagctgtaccggctgaggaaggagctcggcgtggccgaagagtggctgtacatactgacgaaggcggcggcaggtgggcagaagctggtctggcacgctctcgatccggttagcaaccaatggcagaggctgccgctcatgcctgggatcgagtgcaggagtggcggcgtgtacgggctgggcttgcgggacctggtgagcgccggcgtaggtatcttcgacgt

SEQ ID NO: 276084 - DNA, 754 bp, Zea mays
ccccgcccgcctccgcgccccgctcggctccgccgtgcagcagagggagggtgacacggactccgtgcaacggatccgcggaacggtggcgcttggcaggtcctcagagactgagactgcgacggtggcggtggggatggccgacctggtgaacctctggaggctggtggagggcgcggacggcggcccggcctggaccaagatgatggagaagtcgctgcccaccatgacctaccgggcgtggaggagggacgcccagaccgggccttcgcagtaccagagcagcagcatcttcgagaacgccagtccagaggaggtgagggacttcttcggggacgacgagttccggatgtccaacaggtgggacgacatgctcatctaccacaagaccctggaggagtgccggaccaccgggacgatgaaagtgcattgggtccggaagttccccttcttctgcagtgacagagagtacataattgctcgccggatatggaaactggggggcgcctattattgtgtcacaaagggtataccatgctcgtccattccacggcgcaacaaacctcgaagagttgatctgtattattcaagctggtgcatccgtgcagtggaatccaggagagggaacggaggagggtcgacagcttgtgaggtgctcttgttccaccacgaggacatgggcatcccgtacgagatcgcaaagctcggtatccggcaagggatgtgggggtgcgtgaagaggatcgagccgggg

SEQ ID NO: 276085 - DNA, 464 bp, Zea mays
  unsure (1)..(464): unsure at all n locations
agttaatcgcgctcctagattagtttctgaagaccggattgaaagatggcatctctgtcaaatggaggtactcgattgtagcaaggtaccatggccaagctcttcgatcaggaaagcttacaatgtaaatggttgtgggtggccacagcaagaagctgcttacgaatgtaaaatcaatctcttgacagggaaaactcaccagataagggcacagcttgctgctataggcgctcctattataggggattctgcatacatgactgcagcaatggcagcgatggccaacccaagcataaacccattcgctagagagaggctcagttacaacagtgaagaggagaaagaagccgccgtcgaagcatggattgcctcncacgggaaggaaccaaaatccgtaattgggctgcaagcgtcagagatctcttgggatcacganggcaagcaccattcttacaaggctggag

SEQ ID NO: 276086 - DNA, 587 bp, Zea mays
ggcagtttggcgtgctgtgcctcataggaaactgcctcttggtggctgtctatctagtcgtgcaggctccagtgatgataaagtatcctgcgagcttatccgtgacagcttactcctattttttcgccacaacctttatggtgctaactggagtatgtgcgactagtggcttacacgagtgggcactgacaaaagccgaggtcatagctgttctgtacgctggaattgtcgcatcttgcctgagctactcgatcatgacatgggcgaacaaagttcttggaccttctctggtcgccctctacaatccactgcaaccagccttttccaccgccctctcaactgttttccttggcgacccagtttacctcggaagcgttattgggggagggctccataattgctggtctctatctggtcatctgggctcgctacaatcaagggcagcgggcgcctacggatgcttgtttggaccctcttattattgtggataatccaagaatccccaagacacaagaaagtcccttcgtgtagatcctcaaaaaatgtgtcgattatccacacatttgtataggtggtctacagtatac

SEQ ID NO: 276087 - DNA, 866 bp, Zea mays
cgtgggtcgtcgcaagcctctacactgagtcgtcagtaatccactcgtctctccgtccgcatggccacttatctgaacgcaccgccggcagccaccacgacgactgcaagctgccgccatgccttctccggtggcagccttcgtctactccggccgagccgaccgacgctgcacgtgacgtgccaagccgccgtctcctcctcctcctcctcccagccgccgtcgtccccgtccaggaggtcagcctgcctcctcggcatcgcgtgcgccgtcctgctccgcccacgtgccgcctccgcggccgaaactgacgaagagccggccaacaacggctggtggctgaccgagttccccttgcccgtgcccaagatcgtcaacaaggagatcaactacgcggagacgggcacgcgctccttcctcaagaacggcatctacatggcggacatcgggcccagcttcgcggcgcacgcgtaccggctgcgcacacggccttcgacctgctggcgctggaggacctgctgggcaaggacgcctccaactacgtcaacaagtacctccgcctcaagtccaccttcatgtactacgacttcgacaagctcatctccgccgccgaagacaagccgcccttcgtcgacctcgccaaccgcctcttcgacagcttcaagacgctccaggaggccgtcacagccaaggacgacgccaggatcggcgaccgctacaccgagacaaagctcatcccccaggagctcatggccaagatggcctagcagaaccacaatttttcattcatatatcatgatgtgtaaatgaatacttgaaactcacaagccctcctgcagaattcccagagcaggggaataattaat

SEQ ID NO: 276088 - DNA, 555 bp, Zea mays
ggcccctttgcctccgctccaccgtcgcaggtcccttttgcctccgctcaaccgtctcagagtccttttacgtctcctccaccgtctcagggccccttcgctgctggaccaccgcctacgggcccttttgctgctacaccagcaccttttcgccctccaccgtcatcccttgcgcagccacaatctcccacgggaggcgctttgcctgcaccaccaacatatgcgaggccgccaccgccactacagtcacaagggtattaccctggtgcaccacctgcgaaccctcaatacccaatgtcaaggccagcatttcaacaaccaatgcagaatatgccacctcctccaatgggaccagctaccacatttggtaatcaggcagcttatccaagtgccgggcctccagtcggaggcacacttcagagcttagtggaggacttccagtcactgtcactgagctctacgcctgggtcactcgaccctggtgcggatgtaaaagggctgccaaggccactggatggtgacgaggcaccagctaagcttatggaggcataccca

SEQ ID NO: 276089 - DNA, 1027 bp, Zea mays
gttctagatcgcgagcgccgccctttttttttttccctttttttttttttttgaaatagaactatccaggaagctttatatatccacagccaatagccagacatatgcaccacaactggtgtgtaaaagaaaacatgttgcatgtaaactcttcgaattcaaagtagatcatggcaatctctttaaaaagtagaatgaggtgataatcacatatttgcattgcaaggtatatatacccgttgtaagttggcaagctcaaggacagctgtcatgccatcagatgatatgccctcggttaccagaaaacctttatgtaagaggttgtgcctttgtgaaaacaaatattcccccaccaccaactgaacgacccaggagcatatcacgatcaaggtaagacagataatataatcctccaggtgatcgtctttcaggaccactaacaggaacttgagttcgaaaggttttaaggaactgcaatatctgaaggctcaaaaatgaccgaggaagtatagcaggagctattagtgtctgcagttgctcgctgatcttgatattttcaacagcgacctcctcaaattgaagaaagatattccgtttagacaggacaacaaacttcgcagagaccatcagtgttgcaccttcttgctcctccagcaagttctcgatgctccaccttacaacattcctcacagttccaccatctgatcgatctttgcactcaaatttctggtatatttggcccccctgcaggagtggaagcctctcggccgcctcgaacagcacaagcacgtctgatgccgatgtgtaacacagcctccaggtgccatcgagcgccgcgagatccatcggcgttcccttccccgcaccacggtcctccacggccacgacggcctcctcgatggcagcgcgttggtcgggccccgctgcgaatccgcgccgcgtttcctgaaccgcgggcagcagttcgtgcttcctccgctccgtgcccgcggaggtggtgggccaggaaacaaaaagaaccgtggcc

SEQ ID NO: 276090 - DNA, 413 bp, Zea mays
agccattctccaatctgaagcgaatcaaggagtgcacatctttgttgtagagggcagagtttgctcagctgctgctggacattggagagcgcagtggtggttgtacgcctgaaaggaattctttgtaaatttcccctatatctggttctgctatcatcattattttccttgcgttagacaataatgtcggagaacgaattagcagtaataaaaccagaggtacatctgctgttgcacttcctgttaattagagattaaatgttgcattcttatcttgattgcatcatttgggcctaaatcaactaatcaagtttattggtgaactctgacaggcattgaaaacttatatatggcttcagtgctttgatggctccatacaacaagtggaggaagaagttgccatgttctggcct

SEQ ID NO: 276091 - DNA, 227 bp, Zea mays
cgacccatgcgtccggtggttgagtgaattgaactgttgctgcttgatcaatcgtagggtgaaaacattgcctcgaatctattacacatgtatatgactcatcaaggcacatgtgcacacaagaaacatgtgtattttgttgtgtgcaagttgatgtggttacttccctccaaatatgtaaattccatatataactatccaaacaggatattgaatttgattcatgg

SEQ ID NO: 276092 - DNA, 694 bp, Zea mays
cgcttagatttaccaagcattcaaatgcttacatgcttgtttacattcgagaaagtgacaaagataacattatctgtgatttggatgatgaagatatttcagaacaccttaaggttaggttgagaaaggaacatgaagagaaggagtacaagaaaaaggagaaggctgaggctcatatgttcactgcattgatggtggcccgagactttgatattaaagagcaaattggaagacacatgcactttgatcttgtggactttgacagagttaatagcttccgtgcacctaagaacatgtcaatcaacgaagtcaaggaggagctttctaaagaatttggcatccctgtagaatgccaacgattttgggtatgggcaaaacgacagaactgtacctacagacccagtcgtccattaacctcccaggaggaaacatctactattggggttctcaaagatgcaacagtggcgaagttaccgaattctgaagtacgattgttcttggaggttcatttcagacaggagaaaccaaccaattgctccttggaataccaaagaagatatattactttttcttcaagctctatgatcctgaaaaagaagacctaggatatgtcggcaatttttttgtgaaagcatcaggcaaaccatctgatatagtagaaaggctgaatcagattgctggatttctgtctgat

SEQ ID NO: 276093 - DNA, 640 bp, Zea mays
  unsure (1)..(640): unsure at all n locations
gtgggtcctcactcctccccctctctctctatcatcacccttcttccgtccgctagaaggaaaagaagaaaaaaaaactctctttctctctctttcccagctctctcgctgtctctcacccagccgccaccatgtcaggcctctacaaccagggcttctcccctgcaagaaccctctccccccagattaggagcaaccccgacgctgatagccagtacttggccgagcttctcgccgagcaccagaagttggggccattcatgcaggtgctgccgatatgcagccggctgctcaaccaagaaatcatgcgggtgtcaagcatggttcatgaccatggatttagtgatcttgacagacgccggtttagaagtcctagccctatgtcttcaccgattgtccggcctaatctacatggaaatggttttggtccttggaatgggatgcaccaagagagattgggctttcctcctcctggaacaagtatggactggcaaggagcaccaccgagccctggctcttatattgtcaagatgatcatgcgcttggaagttcccgtcgactcttaccctaatttcaactntgtgggacgcattctagggccaaggggtaattctctaaaagcgagtgaatcatcaactgg

SEQ ID NO: 276094 - DNA, 636 bp, Zea mays
cccacgcgtccgcgaaaacccacgtctaaaacaggtggcccaccaacgattcacttccccgatcccagggggcggcgatcggaattcgcaacttctcccacgcggcgaacacggcagagatgatgagctcccgggccggatccatcctcctccgccacgccggctcccgtctcttcaccgcagcggcgatctctccggcggcggcctcgaggccattgctcgccggcggcaatggtgttccggcagtcatgctacggctgatgtccacctcctcccccgccgctcccacggaggcgaaggacgaggcagccaaggcctccaaggtgggaggggacaagaaggcggtggtgatcaacagctactgggggatcgagcaaaacaacaagctagcgcgggacgacggcaccgagtggaagtggacttgctttaggccatgggagacgtacacggcggacacgtccattgacctcaccagacaccatgagcccaagacgcagaaggataaggacgcatacaggaccgacaagtcgcagcgcatccccacggacatcttcttccagaggcggatatggagccgggcgatgatgcaggaaaccgaggcagcggagccatgggaggagggcggcagcagctcca

SEQ ID NO: 276095 - DNA, 1208 bp, Zea mays
cggacgcgtgggcagatttgctgagtgagctgcaggtgcatgttgagtctatcgacatggcaaatgatttgcattctgttggtgggttggttccagttatcaagtacctcagaaattctaatgctcgtatccgagcgaaggcagctgatgtggtaacaacagtggttcagaacaatccgaccagccagcagttggtcatggaagctagtgggtttgaacctctcttatccaatttcagatcagatcctgaccttactgctcggataaaagctcttggtgcactatcttctctgattcgaaacaacaaaccaggagtttctgcatttcgtttagccaacggatatagtggactaagacaggggttgatttcagaaagtgcggggtttcagaggaaagcattgagtctgactcactatctgctcagcgaaagccattcagattgttcagtatttgcacagttaggtttcccccaccttatgatgcgtttggcatccagcgatgactccggtgttcgagaggcagcattagggggcttgcttgagcttgcaagggacacgacacttggaaataggaatctactagcagaacatgacaggttacgaaggcttctccggggacgtatggaaagcataaggaccatgactcctgaagatttggatgctgcacgagaagagcggcagcttgttgactcactttggatcacatgctaccatgaaccctacatgctccgcaatgaagggctccttgttctgcctggggaggaatcctttgagcaacctcctgatgtggctggtagattgttagagccaatgcgccgagcttctgctaggagggcaccccctgctgagagatcacacccaagggatgaaactgggggaggaatggttttgcttttagggggtccagcacaagatggtagatcaaactcccccaatcactgatctttctgggcagtgaggccgtgcgttaggaatggagaaatgaagcaaaccgtactgctgccttgtaataattatataagttgcttcgaacaacattatgtaatgtgtaattaggatttagggacctggcatccagtctcaaataagtaaatactacgttgtgtttatgcttgtatagtattagtggctcccaatcatgttatatacttgtacatgtgtttgttcgacgttgagtaaacagtgtgaatgctaaacattacatccatt

SEQ ID NO: 276096 - DNA, 357 bp, Zea mays
gtgaacagcagggcttgtcttctgcttttgcttcttagcaatggcgaatgcaagcaaacacttgcaaccttcaagcaaatcaggcaatgacagaaagtaccagggcacactggttgcttcacgcgtccgccaacgcgtccggaagtgtgcgaatcacattgttccatcgaaacaactgatcttgggtggggattcaataggccatctggcatcgattctgattaaggtcgttgctctcgaggcagtcagaagagtttctaaagcaagataccccttcatatggaattctatacaagcattgcatattcttgagtgattctccattgagttggatccaaggatgggtaataagaaaaa

SEQ ID NO: 276097 - DNA, 196 bp, Zea mays
agaatagctgccttgcaattcttggtgcttataactgatagtccctccagtcaaatacacatgatattttaaacatgaagattgagctatatggagaactattttcttatctaaaatgtcatgtgaaaatggttggggctagaaacttgtttcacaacaaacaggaatcatagatcaaccattgcaacattgtttg

SEQ ID NO: 276098 - DNA, 981 bp, Zea mays
ccacagcccgcccctgctaccaccaatacacccttccactacaacttctttacatcttatgccctatggacccattacatgctcaacaagaatgtatcctactctacttactctacaccacatgagccgttgcgccatacccacatcccggataagtattcaggttgtgcattcagccttgggtttgactctttcactacgatgtcccttggaccaaatatttgtgccaacatgacgcccatggaaagatctatatctgccaaagaacccgagaattcagaggatttgcctgcaatagttaggagcagtgatgaaatggacactagaaacagtggcaaagttcatcgtgacacagttggcactcttcctgagtcgaagcagagccatgaaagttgtgcttccgtgaataacaagttcaactctggagagtaccaagtcattttgcgcaaggagttgacaaagagtgatgtcgcaaattccggacgaattgtgcttcccaagaaggatgctgaggctggtcttccaccattggtgcaaggggatcctctgatactgcagatggatgacatggtgcttccaattatatggaaatttaagtatagattttggccaaacaacaaaagcagaatgtatatcctggaagctgcaggtgaattcgtgaagacacatggccttcaggcaggggatgcgctcattatctacaaaaactccgtacctggcaaatttattatccgtggggagaagtccattcagcagacaaacctgtagacacaaattgatgtgattgacaccatcagatatggtgctcgaggatacaccatacgttcagaattgagttgttatcgacttctgtaatgtttcaccatcacattgggataagtcgaaaaggagaatcacgagtctgagacaccgcgtgaatggagggaaggaggaagacattggaagtgcgcctaagttcagaacaagtggttcatgtcctac

SEQ ID NO: 276099 - DNA, 412 bp, Zea mays
ccttccactacaacctctcccagtcttatgccctatggacccattacatgctcagcaagattgtatgctactctacttactctacaccacatgagccgttgcgccatacccacatcccggataagtattcaggtacatctcctgcactctcctgctgcaaattctttctctctctctctctctctctctatctgtctaaccctacatgattctacatgcaatcgcatcaggcatcacaccattatcacccttgatcctccaacaaccgtcaggcctattacagcagttacctttggctcatttggtggcacaaaacatcagggcacaacaactacaacaacttgtgctagcaaaccttgctgcgaactcttaacaacagcagttaattccattcaaaccactgggtgtgttg

SEQ ID NO: 276100 - DNA, 909 bp, Zea mays
ctctctcactctcagcctccaagaggtttcaccgattggagcgcgtccaacagtgccttcgccgccgttgcctcacagcccgcacctgctaccaccaatacacccttccattacaacctctcccagtcttatgccctatggacccattacatgcttaacaagaatgtatcctactctacttaccctacaccacatgaggagcatccccacccattgcgccatacccacatccaggagaatccccacccattacgccatacccacatcccggataaggattcaggttgtgcatctagccttggatttgactctttcactacaatgtcacttggaccaaatatttgttcccacatgacgcccatggaaggatctatatctgccaaagaacccgagaattcagaggagccgcctgcaggagttgggagctgtgacgaaatggacactagaaacagtggcgacggtcgtcgtggcacacgtggcactcttgctgagccgcagcttaaccaagactgacggactgataaggcgagactgtagagagaaccaagaacatcccgcgcaaggagttgactaaaaatgacctggcaaattgcgggcgaattgtgcttaccaagaaggacgctgagggtgggctagcaccattggagcaaggagaccctctgatactacacatggatgacatggggctaccgactatatggaaatcaaagtgtacaccatggccaaacaacaaaagacgcaggcatattctggaagctgcaggtgaattcgtgaagacacatggccttcaggcaggggatacactcattatctacaaaaactccgtacctggcaaatttattatccgtggggagaagcccattcagcagacaaacctgtagacacacattgatgtgattgacaccatca

SEQ ID NO: 276101 - DNA, 1178 bp, Zea mays
  unsure (1)..(1178): unsure at all n locations
aactcaaccatcaggtttgttaaggagcctgataattttgtttcccacccngatactgacaaactgaactttggggccctgaaccttgtggtatctgctgaaattccacctggggattgcaacaattccatgtggaaaatgttgatgacttcaaatggttaaactcttcttactgccctgttctgaagcagcttgagtctgcagccatgaaagaatattatttcaaggctgatcgtccgaaaacactctctgctgggtcttctaatctgaagtatcgaaacccaaaatatttgtccatgctcaatcatctaagattttacctcccacaagtctatcccaagctgaataaaattcttttcctggatgatgatatagttgtccagagggacctaactggactctgggaggttgatcttaatggaaatgtaaatggagccgtggaaacatgtggagagagttttcaccgatttgataagtacctaaatttctcaaacccaaatattgctcagaattttgatcctaatgcatgtggttgggcttatggaatgaacatgtttgatctggaagaatggaagaagaaagacattactggaatttaccacaaatggcagaacatgaacgagaacaggctgctctggaaattggggacattgccgccagggcttctaactttttacaagctgacacaccctctggacaaatcatggcatgtgcttggcttagggtacaatccaaccgttgagcgctcagagatagacaatgccgctgtcatccactacaatggtaacatgaagccatggctggaaatcgcaatgacaaagtatcggccttactggacaaagtacatcaattatgagcatccttacattcatggatgcaagttcagccaataggaactacctaaacattcttctgtgatgaacactggagttagagggcactcaaaatatagtcctctcttagtagtataactatcacatgttctttcttcgttttatattaaagcttatcatgtgtatgtagtagtttcatcgcctttagtccgttgtcggttcttgtctttttttttgtcatgaaaaggacgatgagctctatgattctcatcagctgataaatgcaatgtctgaatttctgtcggtgacaaattaatgatcccattcaaacggtatcaagtgttc

SEQ ID NO: 276102 - DNA, 499 bp, Zea mays
aaatcatggcatgtgcttggcttagggtacaatccaaccattgagcgctcagagatagacaatgctgctgtcatccactacaatggtaacatgaagccctggctggaaattgcaatgataaagtatcggccttactggacaaagtacatcaattatcagcattcctacattcatggatgcaagatcagccaatagaaaccaccctcagatattcttctgtgatgaacattgaagttggatgggactcaaaatgaaatcagtataactatcacatgttctttattcgtgttatattagatttgttagttatcacgtgtatgtagtttcgtcgcccttttgtggtgctttctcccctagctcattgttggttcttgtccctttttgtcatgaaaagaatgatgagctctatgattctcatcagctgataaatgtaatgtctgaatttctgtcggtggcaaattaatgatcccattcaaacggtcccaagtgttcgaccatt

SEQ ID NO: 276103 - DNA, 542 bp, Zea mays
tcggatcaatgatattgagccattctgccaagatgaaattgtgctatatcgacagtgtgctgagaaaagggacaaggaaataagagagcggatgcaaaatagtgaatataaattgggtttttcaatgcccctggaagaagcgaaagagagagctactcaactccaatcagaagtaacactgctagaaaggcgcatgattcttgctagtggacttgagggtatggaaggatttcgccagagatggagcttgcacggacagcttgaagacacaaggaaaaggctagaagcactgaaccatggcatggcaaaacgagagaaccaaagttctacggcggagaggacaaaatctccagctgggaagaagtggttcttttggtaggttagtatcattgtttcagacttgagaaatattgtagcctgagttgtattagcggcaatgctacacaccttttaacttccacagcactctgcctccaactagccacttaatttgctaacaagtaacaagcgatttgcttatatatagctgcaattttaaatgc

SEQ ID NO: 276104 - DNA, 272 bp, Zea mays
ctgaaccatggcatggcaaaacgagagaaccaaagttctacggtcggtgaggacaaaatctccagctaggaagaagtggttcttttggtaggtgatggtacggttgcattcattttgtgatttatgacagccacttgccctccccattgttcgagtgcctatttagattatggctatttcataggctcccttcaggaattaacgacagtttgtgttttctatattttggtggagtaagttggctaacacactctacctatgcacattgtgga

SEQ ID NO: 276105 - DNA, 412 bp, Zea mays
agcgaaatcgccgaaggaaaggagaccccgagacgagcaaggcggcgagggagggcaaagaccacgtaccagcgcgcacgcacaatgtcgggagcacagggcgcgcacccggtcggccagacgacgccgacgacgtacgagtcggtgggcggcggggagaaccgcacgcgcacggacctgcggtcgcgggaggaccagggcgccatccagatcgagaaggtgcaggacaaggtcgacgatgccgcggggcgtggggtagaccacagcaccttcggcgccaacaaggagggccgcgacgacaaggccgatgccggagcaaccggcaccggcacaggcccgtgattttgtgccctttcgcagtgtacctgatcgtgtgtgtacgatagctttgggtccggtgcttggctgctct

SEQ ID NO: 276106 - DNA, 447 bp, Zea mays
cccatttgttcggcgccgcaggagcctagcaacggaggcgccagcggcggaccacccagggttcggattgggaggttcctggtctgccccgagagcatgagggagtacataccctgcctcgacaacgaggaggagatcaagcggctgccctcgacggagcgcggggagcggtttgagcggcactgccctgcccaggacaagggtctcagctgcctcgtgccggcgcccaacggctacaaggcgcccatcccctggcctcggagcagagacgaggtctggtttagcaacgtgcctcacacaagattggttgacgacaaaggaggacagaattggattcactcaaggtcaaagataaattcagatttcctggaggcgggactctattcattcatggagcaaatcgattccttgaccagattttccagatgggcccaaatgttgcatttg

SEQ ID NO: 276107 - DNA, 681 bp, Zea mays
gttttacaaaaggcaaacagagcaaagaaattaattgagaaaaggaccgctgcaaatgaagagttaaaacatgattatctgccaagaacaaagcaaggtcctcctgttcctggtctactgacaaatgtggagcatcatcagcttgcgttaaatctctgtcgaacattagctttgctgcagcgatattgggatgcactgcagattatcaaccgaaccctcaaacttggaaatgactgcactcactggtgacaaaaaagaggaactcagatccttgggtgctcaaatagcttatagagctccagatcccagtcatggctttaagtatgtccgttacgttgttcagcagcacccatattctcttgccgcatggaattcctactataaggtggtatcaagaatagaggacaggtttccacatcatttcaaatatcttcttcggacaagagaagcgaatcctgactgtgtgcctccaataatcatatccgggcatcgatttactgctataagtcagcatcagtcagcttgcccgggattaccttgaagcttataagctggacccagaaaaccctcttattaatctatgtgtaggcactgccttgattagtttggcccttggcttcaggcttcagaataagaaccagtgcatcgtccaagcttttgctttcctgtacagaaccttcg

SEQ ID NO: 276108 - DNA, 1320 bp, Zea mays
gtttatgctgcgctagttgcggttgtgaataccaagttccctgagattgggaagttgcttcttgttcgtgtcgtgctccagctcaagagggcatataagcgaaatgacaagccccaattgcttgcagcaaccaaattcattgcacacttggtaaatcaggtggtggcacatgaactcgtggcgctggagcttcttactgtactcctggaaaatccgactgacgatagcgtcgaggtggctgtgggttttgtcaaagagtgtggggcaatgctgcaggacttgtctcctcaagggcttcatgctatttttgaaagatttcgaggcattcttcatgaaggagaaatagacaagcgagtgcaatttttgattgaaggcctttttgcaattagaaaggctaaattccagggtttcccagccatccgtccagagttggatctagtggagcaggatgaccagtttacacatgagatatcccttgaagatcacctagaccctgagaccaatctaaatgttttccaggcaaaccccaattttgttgaagatgagaaggcatatgagaatctaaagagaagcatcctgggagcagagtcttctgaagatgaagaaggatcagatgctgcttctgatgatgatgatgatgatgatgatgaagaagaatctgatgaagaggatgaggaacaaatggagataagggatagaacagagacaaatcttgtgaatcttagaagaacaatatatttgactattatgtctagtgttgattttgaagaagctggacacaagcttatgaaaattaagcttgagcctggtcaagagatggagctgtgcattatgcttcttgagtgttgcagtcaggagagaacatatcttcgttattatgggctgctaggacagcgtttttgcatgatcaataaagtgtaccaagagaacttcgaaaaatgctttgtgcaacaatattcgatgattcatcgtcttgaaacaaacaagttgaggaatgttgccaagttctttgcacatttggtggggactgatgccctcccttggcatgttttggcttacatcaggttgacagaggaagacacaacatcatcttctcgtattttcataaaaatattgttccaagaattatcggagcacctgggcatacgcctactcaatgagaggctgaatgatcctaacatgcaaggttcctttgagtctatcttcccaaaggatcatccgaagaatacaaggttctcgatcaccttcttaaggccatggtctggtgggatctcggggagaccctgagggagtacttgaagaacatgccacgtctaataa

SEQ ID NO: 276109 - DNA, 1056 bp, Zea mays
gccgcggccaacgcggcgctgccgccgggcgcaaagcccttctccacgttccagtccgtgggggcgcacatctggcgcgccgtctcccgcgcccggggcctcggccccggcgacatcaccgtcttcgccgtcttcgccgactggcgcgcccggcttgacccggcccttccggcggcctacttcggcaacctcattcaggcggtgttcacgggcgtgcccgcggggatgctcctgggcgggccccccgagctgcccgcgggcctgctgcagaaggccatcgacgagcacgacgccgccgcggtcaccaggaggctggaggagtacgaggcggcgcccaagctgttccactacagcgacgccggccccaactgcgtggccgtcggcagctcgccgcgcttcagggtctacgacgtcgacttcggcttcggacggcccgagcgcgtccgcagcggcgggaacaacaagttcgacggcatggtgtacctgtaccccggccgcggcggtgacggcggcatcgatgtcgagctggcgctgcagccggagcccatgcagaggctggagaaggacgacgacttcttcctgcgccaggcggcagcctaagcccgagtcgtcgatcgtcgtgtcagtgtccactgtccacccatccagttcgttgatcgtgctttattttagtagtaagtattgtgtacgttcctgcttgctatattattattatactagtgttttgctttgttccttgattaattgtacgagctaggcgtgcgtgttggattacactgtatttgctggactggagctgaataaggatggaccagacttcgattagtttgtgcaagctcacgagtgatcgagcatggtccctatatatgtcatccctcgttgtagtaatgcagtaatgtactcattatattgttatgcatgtacttccccttgtaccataccatggaatcgaaccaatcaaccaatgcaagaatttagaatctacgtgcaaaataaaaaaaaaattaaaaaataaaaaaaaaaaaaccccagctgctgctgctccatccattgaag

SEQ ID NO: 276110 - DNA, 753 bp, Zea mays
agaatctgttttgaccattcgagaatattacagtgcagaagatgaaaaggaggtcgttttgtgtattgaggatctgaatgctccaaatttctatccatttcttgtgtcactttgggtaaatgattcctttgagagaaaagacatggaaagagagttgttggctaaacttctcgtcagcctttgcagtggtcgacataatttgttgagcaagcaacaactcagtgatggcctttcaaatgttcttgcctcattagaagataatctaagtgatgctccaagagccactgagtaccttggacgacttcttgcaaggtttgtggaggaaagcatattgctcttgcaagaggtaggtaaattgattcaagaaagtggagaagaaccagggtacctaatacaaggcggtattgcggctgacatcctaggtgcagtcctggattccataaaatcagacaaagggaattcattcttggatgagatcaagacaacttcaagtttaaagttggttgatttcagaccacaacatcttaagcgatcaaagttggacgccttcatgtaggcacataagttattgttacctggtaagtctgttctagtccaggtgtaaatattgttcttgggtagttatttgttctgaagacatacccttgatttaaatactctgaactattctgatgacagattaccaatgggtgcggtccccaaccagtttagtttctttggaccctaatacccaaacgcctttttgatgtactg

SEQ ID NO: 276111 - DNA, 1010 bp, Zea mays
acccacgcgcccacccacgcgtcagcgtaaataagaagttgtctgagatgaaatcagataatgaaaacaaggacaaagatgcccaactgcgacgtcaggaactgaaggaagtcatagcaaagcaacaagagctgggttttgacccacctgagctaccgcctggctatctatcagaaattggggatcaatgcattgaaaataaaaataataggaaaactcaattcagggattctcattttggaaatcgtttcaataataacaaaagatcaaggtatgagcgtggaggttttcagtctaaaagatctaaggtatggaaccgtactcctcacgctgatcacgggatggtcaagagcagagaaccaaccctcctgcagaagcttcttagctctgatatcaagagggataacgtagactatttcacgtgttcagattcatgaccttgaacaatttctttaaggactggcctgacaggcctttacagtttcctagtgttaagatgaatcagattgaaataggaagcaatattagcacagatgatttggagaatgctgggatgtccaaagacagcatccttggtgtaaacgaaaatggtgattggaaagagttgagctcgattgatgaagaggataccgatagcgccaaccacaatgatgaagacgtcgatgatgacagtgttgacagcagcattgaggatggggccgaggaggacgggtacgaagagcagtttaatgagcctgaagatgatacggcagtctgaaaatttgactgagccgggtatccacatcaaaaagacaaagcgcttctccttgagtagagtttttgcacaacacattctgtagctcttcgcatattccagttataggagagggtctggtgtttaaagaaactttgtactttgttgtagttgaattgttatgttatcgccgggaatatatatactccctacgtttctttttaaaaaaaaaaaaaaagggcggctgctcgcgatctagaactagcggacgcgtggg

SEQ ID NO: 276112 - DNA, 387 bp, Zea mays
gtgattcggaaggcttaggatgtaaaaggcgatggtttcctactatcgcagcgactcggcggccgattctatgttcacggtgattgtgcacggctttgactaaagtgattcttatagaaatgggctgaaaagctggacgtttggcagtctgcagcagaagctgacagaaaactgaaacagatagggcttatgtgtacgtgtggagaacctgagatggtgattgctgggactgaacgttaatgtcttgcagctgcctggcttgttcactggattgctgatgtctgagattgtcatctactgaaacgtgaactttcctctggttcatgtaactcacttatggcagatgattcaacgcgacgtgtgtatgcatctgtgtgttcatcattt

SEQ ID NO: 276113 - DNA, 1631 bp, Zea mays
cgcacagtccgtctcgtctgccaacgccgctactcggcgcaccttggcttgctatttcgccaacagcctcctccctctttaccgcggcgtgccgcgtgcggcgggcgcggatggcaacggccgcctccgcctccccctcccccggcgcgttcggcgccaaaacccctgccccagcccgtgggctgagcacgcacccggtcctgaccccgagccccgcattcgcgaggtcttcgccgcgcacccccgcctgcggcaggtcccgcgccagcctccacctcggcggcctgggctcgaccagcagcagcagcgccgccgccgccggcaacggaaccgggctccacgtgccccccacggtcgcgccgctcgccgtgcctaagatggccggctccatgaagacccataagaacgtcctgctcttctactgcgaggagatgcgggacctcgcgcagcaggtggtcgcccggaacgatgacatcgaactgcgatccatctcatggaggacatttccggacggatacccgaatctgttcatctcgaatgcccataacattcgtgggcagcatgttgcctttttggcttcgtttagctcgcccagcgtcatatttgagcaactatctgtcatatataatctgccaaagttgtttatttcttcggttactcttatactcccgtttttcccaaccgggacttctgagcgcatggaagatgagggagatgttgcaaccgcctttacacttgccagatttttgtcaaatataccaatatcacgaggcgggccatcgagtttagtaattttcgatatccatgctttgcaggagagattctactttggagactcagtcttaccatgttttgagagtggcatccccttgctgaaaagtaagcttcaggagctacctgattcccataatataactatagcatttccagatgacggtgcatggaaacgcttctataagcagcttcaacattttcctatggttatatgtaacaaagttagagaaggggagcagagaattgtacggataaaggagggagatcctagaggccgtcatgttgttatagtggatgacttggtccagtctggcagtactttgattgagtgccagaaagtactggctgctcatggagctgcaaaggtcagtgcatatgtgacacatggcattttccccaatagctcatgggagaaatttcagcatgacaatggagagggtccggagcatggcctgagccacttttggcttactgattcatgcccccttactgtcaaggcggtgaagggcagacgaccatttgaaattctaagtctggccggacctattgcttctgctctccagatttaggcttcttccctccagatttaggcaaatctggtctgctcgatccttcgggatattgtgactattcagttagttcttctttcctttgttgctgttgaggaatttggtgttttcctttctatagctattgagtgtctcgcaatgtatttactagaaaaccataaaatggcatatcttcactgcagggtctgcttggcagaaagcattcgtagtcgtagtattagctgttaataatttgactgagcaagtcaagcgttgatctgtgttctagtataaataaaactctcgaat

SEQ ID NO: 276114 - DNA, 674 bp, Zea mays
cccacgcgtccgctagtagggactggggttccttttgcccggaagtttaaggaggatgaacccctgttggacatgattgatgataaagtgcttcgacgctggcgtcacaggcctgttcctggcgcatggtgcacaggcaaaaggaggtggttcagtgatccttgctcccagtggagcaacgtcaacattgtaagacccggtcctcaagctgagaagttccgaacatatataaaccagattatggaagaatcaaagtcaagcaacaactcttgcaagcaatagcggtagaatccgagcacgaggcttcacttcccgcagttgaagcgttgagcttgtctcattttgcgccgaggagctctccatgtctcgagcacttcctggcatctgcttcaggagcaagcatttttgcacctgttgtatgaactgaacacacggccaaggtgatagatggatttattctttccagaatttttttgggtgacatggcttcaagggcttagtgcacactagtgttgttggaagccaagaaagcctactgtgggaatacagaagctactagtcattgtaattagtagcagcgagtggaatggcctgtgcctttgttcatagatctgatggaattgttggtgcttccatacaaaattgcgaaaatgaagagcgggggaatgttatcc

SEQ ID NO: 276115 - DNA, 396 bp, Zea mays
ggtcaactctgtattgccaagggtgagttgcaaatggcgtctgactcgttcaagattgtgttggatgaagatgagaacaattttccagctctacttggtcaggcctctgtttactttttgatgggcgaagcagagcagcaacacaaaaaatcattggagcattacaggaactcattagatctctacaagaaagctcttcgggtctattgcaattgtcctgctgctgtaaggcttggtatagccttttgccgatacaaacttggacaagtggaaaaagctcgtcaagcttttcagcgagttttagagttggaccctcagaatggtgatgctccgggcgtgagcagcagatacggacgatctagattggctgaaggcagaaccaggggaggcagccta

SEQ ID NO: 276116 - DNA, 1102 bp, Zea mays
ggacctggttgccctcgtgcgagactctggtactcaatttctgaaggtcgaggcgtgaaagaaaaactccggaggtcgaaatggcggcggcggtgcggcgagcggaggagctggtggagagggagatgggcgggcgcgatgcctcccacgacgccgcgcacgcgctccgcgtccgagaccttgcgctctcgctcgcagccgaagagggcctctccgctcccgaccgcctcctcaccgtggaactggccgctctcctgcacgacgttggagattacaagtataccaagaacaatgtggaggatataagcgtcgttgagatgtttcttcaagaggtaggattggatgaaggccaaaaggatgaaatagtggcaattattaaggggatggggttcaaaaatgaagtttcaaataaatctattgttgagcccactcttgaatttgcaattgtacaagatgcagatcgcttggatgcaattggggcaattggtattgcaagatgttttacatatggtggtagcaagaacagcgcattacatgatcctagaattctgccacgtgatagcttgtcgaaagaaaagtacatgtccaaggaagagaagcagacatcaatcaatcattttcatgagaagctttttaaactgaaggacatgatgaagacagaggccgggaaaaagagagctgagaaaaggcataggttcatggaggaatttgtggctgaattctacgaagagtggagtggcagggcttgaggttgaacaaccaggttttgacttgagcctatgtcaaagtgtgcagttggcgaaccatttctcaacaacccatgatgatgttgtctacctgggcctactttttgccgatgaagccacgcaaataaacaatggaaagcctatttagattggctggacaaatcatacggttctgtgataagcaatcaacccactaccaattccgtggatgaagctgaatttttttttcaaacagatgacatggcatcttgctgctgttgtattgaaataatactgctacaatattaccggttacatcacctgaaggtcaagcgttttgccaacacatatacatatgtatctatacatatatatat

SEQ ID NO: 276117 - DNA, 787 bp, Zea mays
aaggtaggggcgttttaagggttttgttaagtcaattcctggaatttccgagggtgggaagtggaaggaagttgaactagagttagtggaaccctttgtgctgtagagactgcattagttatagactgttgactgtgttgaggagcgagtttgattctttcatatgtaatgaactgattacttaagtggatgttgggtaggaacaatgtggaggatatgagcgtcgttgagatgtttcttcaagaggtaggattggatgaaggccaaaaggatgaaatagtggcaattattaaggggatgggtgagctattcacttattcagttatccatgtttatgcatcttcatttctgttcgaagacatacctcattgggggcacactctagtttaaacattgcatttatgttgtttattcctctttgatatgcatgtgcccattttacttcatccctgattattgatcttcatccacttgttccttcactttactgctgcaaagaattgaaattcgttatgccatttgctaaggtacctgttttgttattacttcatctgaataacccaagtaattcacaggaaaaagcaacatccataagtatgcttattgtataattgtttattcctagcgaattattcttgcaattatgattgcaaaatgtccttctaacccctttaataaactgcagggttcaaaaatgaagtttcaaataaatctattgttgagcccactctctgaattgcaattgtacaagatgcaaatcgctagtatgcaattggggcaattggta

SEQ ID NO: 276118 - DNA, 331 bp, Zea mays
ttgtggacgcgtgggtccgtgttagctttgccctcgtgcgagactcgggtattcaatttctgaaggtcgaggcgtgaaagaaaaactccggaggtcgaatggcggcggcggagaagcccgctgcggtgcggcgagcggaggagctagtggagagggagatgggcgggcgcgacgcctcccacgacgccgcgcacgcgctccgcgtccgagaccttgcgctctcgctcgcagccgaagagggcctctccgctcccgaccgcctcctcaccgtggaactggccgctctcctgcacgacgttggagattacaagtataccaagaacaatgtgga

SEQ ID NO: 276119 - DNA, 498 bp, Zea mays
tcgctgcttgtagatcgttagcggctgcgcttgctcttcttgtttttgctctcacaattggttgggttccaatttaaatttagacttttgatcatttgttattcagaacgagcacgagtgtcacgttatgacgacgtgaccaccttgagctcgaatttctcgacgacgaccagcgacaacccctccacttgagcggcgccgagtgctccgtgcctttgataccctagcgtcgcgccagtcgagttggccatcttaacgccgttgacatacacggcgaactgtaccggcggcgccagcgagggcagtcccaggaacatcaccttgccgatgaccagcttccggctcggcccgtgcgcgtcgtgcaccacgtgcgacatgagcttaaccccgtcgcgcccctgcgtgcagctgaaccgcaccagactccactcgccccgcggcccggccatctccggcaagtcgccgccgtcgaggaacagctccccggatgcggatccg

SEQ ID NO: 276120 - DNA, 559 bp, Zea mays
acggattattcaatgcaagtccagagttctgggctctgctaccaagtgcagctgggcagaagggacggcatggtgtcgcaggcgtccatggcgagcattctgccgggccccaacgtcgacgtccccaccgtcatcgatctgttcgcgcggaagggcctcaacagcttcgagatggtcagcctcatgggcgcgcacacggtgggggtgacgcactgctcggtgatccacgaccggctgttcaacttcaacggcaccgggtcgccggacccggccatggacccgatgtacgtgtggatcctgacgacgtacgcgtgccccaggggccaggccttcgacaacatcgtctacctcgacgacccctccagcatcctgctcgtcgaccggagctactactcccagatcatgaagcgccacggcgtgctgtccgtggaccaggccctcggcgacagcagcgccaccgcgtggatggtcaagttcctcgccaccacggacttcttcccctccatgttcagctacgcgctcaacaagctcgccgcgtcgacgtcctcaccggcaccga

SEQ ID NO: 276121 - DNA, 535 bp, Zea mays
tggcggttaagtagataatctggggtactgatgtctaccgaggaaagagtgaggaaaagaaaggaatccaatagagaatcagccagacgctcgagatacaggaaagccgctcacctgaaagaactggaagaccaggtagcacagctaaaagccgagaatgcttgcctgctgaggcgcattgccgctctgaaccagaagtacaacgacgctaacgtcgacaacagggtgctgagagcggacatggagaccctaagagctaaggtgaagatgggagaggactctctgaagcgggtgatagagatgagctcatcagtgccgtcgtccatgcccatctcggcgccgacccccagctccgacgctccagtgccgccgccgcctatccgagacagcatcgtcggctacttctccgccacagccgcagacgacgatgcttcggtcggcaacggtttcttgcgactgcaagctcatcaagagcctgcatccatggtcgtcggtggaactctgagcgccacagagatgaaccgagtagcagcag

SEQ ID NO: 276122 - DNA, 590 bp, Zea mays
tcgcagcgactgggttaccgacgcagccgtactcagcctggtgcgcgcgtcttctttgggcccttcgctggtgacgagcgcccactaggttggctgtgtgctgatgctatttgtgtttaagtacttccacctggtgttaatcttttgggagtggaatctctgagacctctgaggtgtgcctttctggcatcaagtttaactgcaacgatcagagggtttctggtgcctgctcattctgaatggcagaccttacggacatcggttgctgcagttgctttagctttttaaggaagcccagtgtacctgtacgtcaacatcaggatgctgatggcatgttatctgaagatttactgaagcgtcaatcagctgaagatcctgatggaagtttctacactggggatgatcctgatgtaagcttttataacggggatgatcttgatagacgcttctacaatggagatgatcctgatagaagcttttacgatagagatgatactgattatattgagggaagcgatgatggaccaccaaggaagagttctgaagatattgtacagttaagaactcaaaatggctttgcatgtagagaa

SEQ ID NO: 276123 - DNA, 661 bp, Zea mays
  unsure (1)..(661): unsure at all n locations
tcctcagcttgtcaaccgtcgccccatctttatactccaccacggtcatcattaacatttgttgtccattcttttcaggaccgtcgaggatcgatcaggcgggcagaagcggtcgtcgccggacaagacgcataggtccaccatggatggcgtctaccaccatcaccaccaccaagagtcgccgttgacgggcaacggcgtcgccaccgccggtgagaagctaggcgtggagcggttcgagctgccgctgatctacatctcgctgtcgcggaaggagaaggaagacgatttccttgcgatgaagggcaccaagctgccccagcggcccaagaaaagggctaagaacgtggacaagaccctccaatttgtcttcccgggtatgtggttgtccgatttgacgaggggacggtacgaggtgcgggagaagaaatgcgtgaagaagaagcgaagagggctgaaagggatggagagcatggacagcgactcggagtaataaggtggaggcgcggcgcagccatcttccatgggggtgggagtcgaggaagaaggggccctagagaaggaggaaaggaggagacgttgagggcaagagtgagcggtcgcgcctgctcaccttgagccgccgccgcgctggaagcgtcgnagnacgncggtgcttgcc

SEQ ID NO: 276124 - DNA, 527 bp, Zea mays
ggccggtcttctttggttttggtgagctgtaccgccacatctttcagcaccgagcaagagcggtgctttgctgagtccacctttgttgaggctaagctgagagtgtaggagtgaaggctcagtgctctctggaccgtcgaggatcgatcgggcggcggcgccgccgtcgtcgggcagaagcggtcgtcgccggacaaggcgcacaggtccaccatggacgccgtctaccaccaagagtcaccgttgacgggcaacggcgccgccaccgccagcgccggcgagaagctgggcgtggaccggttccagctgccgctgatctacatctcgctctcgcggaaggagaaggacgacgatttccttgcgatgaagggcaccaagctaccccagtggcccaagaaaagggccaagaacgtggagaccctccaagtattaaacacctggcctgagatcgatttgatcctctatttctaacccgatccaaatcgatctctgctctcaaaacttaaacatgtgccccttgctttttt

SEQ ID NO: 276125 - DNA, 395 bp, Zea mays
cgcaccgctactcggaccgccacgactgctgcttcgactacagggccgccggccgcgacgccatcgccagggacaaccccgtcgtgcgcgccgccaagatcgttaggttctaggcgtctcggatccggccggaggagctagctagctagctagctaggggcgggcacacacacacacacacgcggtgatgggcgccgagatccgtcgccggtcctcatcgccctctaatctgtagtccgtcccccttcctctcctctccctctttgattgtcctctccttttcttctactgtcatctatttttattgcgagggggaaaaatgattcgatggtcaccgatcgatccgtccatggagggtgttggttatgtgttgatcgccatgctgttctagaaaa

SEQ ID NO: 276126 - DNA, 1233 bp, Zea mays
ttctatcccgtcaaccacatgggggcattctgtcaaacaccgcgattgcgcaatccgtccaaaccccgtcaacttcccgattccctctcccggagccatcgacatgctctcctcctccgtcagctcagctcccgccgcgactgtctcgcgggatacctctacaagaaccatgccccgcctattgtttcttccagctccaccgcctcgcccctgtctggccgactcggtgcgccggccaccgctccccaacaaatatcggttcttcctgccccggacccggaggcggccaagtccgcggcttggcgacggcgtgcgaatggcggagatgaccaaggttgggagcgccggggaaccgcccgaggttggggtttccatggagagtgacccgattgtcggaggggaggcgccgtcccgcccggggtgggaagcgagccggtgggcgcccgtggaggctgcgctgaatcggatgagtaaatggctggtggctggttgttttgcttttgcagctatttggaagcgtgatgctgaaatcatgtgggttttgctgggtgcggttggcaactctctgctttcgttggttctcaagaagatgctaaaccatgaaagacccgcaccagctttgcggtctggccctgggatgccatcgtcccatgcacagtccatattctatgctgcgaccatcctggctctttcattgtactactggcttgggacaaattatctgaccatgattcttgggcctgcaactctgtcggtggctgcctatctgtcttggctacgggtgtctcggcgccttcatacactaaaccaggtcatggcgggagctgttgtaggatctgtcgtcggtgctctatggtttgtgctctggcattcgcttgtgcaggaggcctttgcttcttctctgctggtcagggttgctgtcgtccttggatcatcagcattttgtgttggctttgtcgtctacatgattcgtcactggctcaaggatgagtaatgtacttcttagccgcaatgggagatcgactgataggcacggtgcgtttggatgagtgaatccgttccaattgttatcagaatcgcttgaaatggtgtcaaatgggttgtgagtggagcgattcccgagtgaaaccatttttaattaaaattcaatctagtagttaaatgatttcacgaagtgattctagttcgtgatcagaaacatttcaagaatttagatccaaaatgtttctatac

SEQ ID NO: 276127 - DNA, 404 bp, Zea mays
ggaaatcaagcaatcatcgtaaccatacacaagcgtataaataaatgttaccaaaatatccctgctatttatatgtgtgtgtactgtcatgaaaacttcttcatcgccatcataataagaccaccacttatttgctgtgactgaacaacatgcatggatggatcctcacgaggaggagttgtcaactgacggacttttgacccagtgaacacactcaccgcaccgcgtcggtctctctgttctttttgtagacatatagtagatatacaaattcgaaaggaaatggaagaaaagaagagagaatgtggcgaaaagaaatggaaagaatccacagaagaaacaatggcactactgatgagagcagggaagatccatggacaagggaggtaggtaccgtctgatcg

SEQ ID NO: 276128 - DNA, 439 bp, Zea mays
ctcttagttcacacacgggtcacggccgggacaaccatggcggcggctgactccactaagctctccctcgccttcgtcctcctcctctccgcgctcgtcgtgctcggcgaggtcggaggaagcatggcagccgactgctcgacgctccggtgcatccagggcggctacatcacctgcgacaactacccggggaagcagctggacgggtgcgactgcgtctgcgcgcccgacaacggccggaactgcgttctccacctccagtccggctccacctacaactgcagccgcagcaacaagggatagctagctagtcgatctcgaccagtcttcgacaataataatgcttcaagctgtacgctgtcgaatagtaacagttgtgctgaaacgaccgggtgatgcgcaaataatttgcaataaaactatttctctgttgtgtttt

SEQ ID NO: 276129 - DNA, 403 bp, Zea mays
ggggagcaccggctggaggttaagcttatgccgcagcggccggcgtggagcgggcgcgtcaagaacccggatctaaaccgggcgcccagccccgagagctccgacgccgagtgacatgggaagcgagcgagcagcagcagcagccaccgcaaaggctcaacgtcaaagacgacgtccgttgttgcgacggcgcccagcgacagcatgccgctgtcgtcttcgttcgtatccacgtacgtacgacggcccagctgacccccctgcctacccgtccgttctctgcgactggatggtcggtcggcgggcgtcgcggcgagggctttcggtacgtcgtggataagcacgaggggagggcggtggtgggcgggaacggaggcggaggcggcggccccaagtggcggtc

SEQ ID NO: 276130 - DNA, 791 bp, Zea mays
ccgggactccctggcgtcctttcccttctatccgcgcagatgctttgcgccggcggcgaaccggatccggccgctcgcgccttctgcgacgcaccggcctcgcgcgcggatgcgggggccaacgggacgcccagcccgcaggatcacgccgagaaggatccgcccaatgtgctagacgttgctatcgttggtggaggcatgatgggcttggctgttgcttgtgcaatgtgtagggattgctgttcgtgtgctctgacctgttttaagccaatatgccgttaacgaaacaccttagagtcgctattatcgatagcaatccagcgctgaagtcaaggagttacctgggcaaaaacagtatacccgattctagggtcagcaccgttacccctgcaaccatttccttcttcaaggatattggcgcctgggagcatgttcaacagcaaaggcatgctttctttggtaaaatgcaggtgtgggattacactggacttggatacacgaggtataatgctagagatgtgggcaaagaacaccttggatgtgtggtggagaacaaggtgctttgcaactcattgctcttacgtttacagattggtgtctcttactttcccgttgaagaccagacaagcaggaatggaaccattatctgttggtcatactacagaagagttccatcacagtgatttagttaaacttgatctcagtgatggacggagtttatattccaaattggtgataggagctgatggttcgaagtccaatgttagacagattgcaggcataaaaacaac

SEQ ID NO: 276131 - DNA, 1618 bp, Zea mays
  unsure (1)..(1618): unsure at all n locations
ggctgctggccgnggtggccaccgcggcggtgctggccgtgtgcgccttcacggcggcggaggggttcgacatcctgcagatcctggggaagcacgacgagttctcgcagttctgcaagctgctcaacgagacgcacctggccggcgacatcaaccgcgaccgcacaatcaccgtgctggccgtggccaacggcgacatgggccacctcgccgccggccactactcgctcggcaccatccgccacatcctcgagctgcacgtcgtcgccgactactacgacgacaagaagctcaagcagctgtcgcacgccgccaccgccgcgtccaccttgttccagcgatccggatttgcccccggcatggcaggatacgtgaacataacgcagcaccgcggcggcaaggtgtcgttcatcgtggacgacgcggcggacagcgtcaagcccgtcacctacgtgaagcagatcgagagccaccgctacgactactcggtgctccaggtcagcggcgtcctgtcctccccggaggccgaggcacccgtcgccccgccggcgcccgtcaacctcaccgacatcctctccaagaagtactgcaagagcttcgcgggcctcctcgccgccgaccccaaggtcttcgacaccctcaacggcaccaaggacaccgcgctcaccgtcttctgccccgtcgacgcggcggtggccgccttcatgcccaagttcaagaacctcacggccaaggccaagacggccatcctgctgtaccacgccgtgccggactactactccatgcagttcctcaagtccaacaagggcaaggtcaccacgctcgccaccaccagcgtcgccaagaaggactacacctacgaagcggagagcaaggacgacaccgtcacgctcgacaccaccgtcgtcacctccaccatccaggccaccgtcagggacgacgacccgctcgccgtctacgcttgctccaagttcctgcagcctaaggagctgttcaaggccaaaaccgctgatctcgcgcctgcgccggctccacaagggcccaagaagaagagcaagaagaagcccaccggcacttcggcggcctccgcgccctcggacgatgaatctgcagatggcccgtctgccgacgacgactcgtccgatgatgccgcggacaaggctgccgccgcgccgtcgtacctgtccgctcgatgggtgaccgccgcagtgacgaccgccgtcgcgctggcgctggcggcgtaaggtgtgcgctcatgtgctatgttttttttataacttattggaccccctatcttcttttcttttgtccaagtcgtgtcccttccttgttggtgaacaaaataagaagggctatttttggttttttatatttattaccgcattccattaaaaaaaattagaggtgtgtgtgagtgatgtaagtcttgattttgttcattgggttgtggtgatcattttgtaatggtagtggccaatggaattggagagtgggttaagttttcacatatgatactatatataaggcatcatatggagtttagaggtgcagcagtgtttgttgtttacacatgccttcaaatgttagactatataagattttaccctgtacgtaacct

SEQ ID NO: 276132 - DNA, 535 bp, Zea mays
gtggccgcggtcgcggacgggatgaaggcgtgggaggtcatgcggaagcgtgcctacgacttcgacctcgtcctcaccgaggtcgccatgccctccctctccggcatccagctgctctccaggatcgccgccgccgccgagtgcaagaacatccccgtcatcaacttcactattattagccaagctgtaacttcaagcaagcgactgtgatgtcatcccaagattctattggcacggtgctcaagtgtatgcagaagggtgcggtggacttccttgtgaaaccagtaagaaagaatgagctgggtaacctgtggcaacatgtgtggaggaggcatgcaatgaattgccagacaaatggatcagaaaataatgcagccagcaatcatgtaagtaccaatgtcgctaatgggtcaaagacaggagaaaacaatgatgaggaaagtgatgcccaagtgctccaagtgaaagtgagaagaatgtgcgttccaatgccttaatggattacttctgcaaggtgctgagcaataatggatat

SEQ ID NO: 276133 - DNA, 624 bp, Zea mays
ctttcttgtggatcaaatcgcccctgggaatggattagacttcactattattagccaagctgtaacttcaagcaagcgactgtgatgtcatcccaagattctattggcacggtgctcaagtgtatgcagaagggtgcggtggacttccttgtgaaaccagtaagaaagaatgagctgggtaacctgtggcaacatgtgtggaggaggcatgcaatgaattgccagaccaatggatcagaaaataatgcagccagcaatcgtgttagtgccaacgttgctaatgggtcaaagacaggagaaaacagcgacgaggaaagtgatgcccaaagctttggtagcaagagggatactgaaattcatagtgttgaggcggtacaagatattcgtagagatgaagtggctggctcatccaaaaataacgaactacaaaataagtcttatgatggagtaaacacaaaagtggatgtgtcaaaatataccaatggtgctccaagtggaagtgagaagaatgtgcggtccaaatgccttaacggtattacttctgcaaaggtggctgagcaaattatggataatgccttgaggatcacggatgcaagttcacgccgtccaacaaatcttggcaat

SEQ ID NO: 276134 - DNA, 1674 bp, Zea mays
tttccttagacgcgtgggaacgagccttgttccttccgaatccctccgagaaaaggcggctccaaaaaccagatctcatcagcaaaatctgtacaagatccgcccttgatttggataacacgagctaacgtgtggtgggccgtcgagtgaaacaagattcgccatgcggcggaacaggaaggattccggctatccgacggcggctctaggggaggaggatgaggcggaggaactgactgaggagggcgacgaggaagaggaggaacagacggaggagggatgtggtgaggaggatgaagttgaagcggagacgccggcgcaggaagctgtggagccgccgaagctggctgagggctacttcgagatcgaggccatccgccgccgccgcctccgcaagggccagctccagtacctcgtcaagtggcgtgggtggccagagagtgctaacacatgggaaccccttgaaaacctgaaggcctgttctgacattgttgatgctttcaataagcggtcaaggtcgcccagatcctgtggaaagcgaaagcgcaagactccaacaactccaacatccgatcctaacccttctcgtggcaaacgtggtcgaccacctcggtcggaggcccggagcatgcatagcatacatgcctcagaagtgaagaaactgccctgcaggacaagtagtaggagagcaaataataatagtaacaagacctcacctgggggccttggcgcagcagtgaatttgcttgggcaaagaatagtacaggagggtagttctggtgtggtctcagttgggtttccatctcaagaggctcccttatctgttagcttgactgatcaacaagatgcgcagcaccctgctaatggttcattgaagatggacaatgaaatacgagcaatcacacctcagggtggacaggtgacaggtgctaagaagcgcaagtctggatgtgtaagaaggttcaagcaggatgaagtaacacaggagcaaggagatatccgtgatcgaacaagtgacaagccaggcaacgagactgttgattccacagaaggagatcctcgtgataagaacaaaggggaggactctggtaaccaaattcatatgcctaagatcattaagatcattaagccagtgcgctattttgccacagttatggatggtgtgcagcaagttgcaataacattcaaggctctcaggtctgacggggaaatggtattcgtggccgataagcagttgaaagctaaggagcccctggtgcttattgattactatgagcaacaccttcgctacaaccccccctcgtgataaggatgcattgacgctgctgggtttcagttgcatgtgctgcccctatgtttggaacaaatggaaatgtatttaaatgtagcattttttgtgctagatgcatttgtagtattatttgagtaagtagataattagtaagtagccaatgctgagtgcaagtgaaacatgatagcatggtttgtcaaactaactgcccgatattgtcactgttttcaaattgtcttattaatcgtgataatcatgattaatcgttcaagtcgatttggaccaatcatgattaatcgtcaaagtcatccgactaatggtgattaatcatgattaatcgtacaaatcggttagctagaatgactagcaagttgtacgacttc

SEQ ID NO: 276135 - DNA, 575 bp, Zea mays
tcaacagagcagctatccagttgcagtgctcacttttaccgtaacaaactcaggacatacaggtgctgatgtgactttgctttgtacatgggctaactctgttggtggaaaatctgaactcaccggatatcattccaactccagtatgatagaaaaggatggtgttcatggcatactattacatcacagaacagcagatggtcaaccacatgtaacttttgtgatagcagcacacgagaaagaggatatccttatatctgaatgtccttactttgtgatatctgggagctccgcatctgatgaattcacagctaaagatatgtggaattctgtgaaagagcatggatcttttgatcatcttgatcccatcaagacatcgatgtgctccagaccaggatcatcaataggggcagctatcgctgcttcagttaagctggccccaaggcaacccaggatatttcattttcacttgcatgtgcttgtcctgaagtgaagttctctagtgggagaacctatcataagcgttacaccaaattctatggcacagacggtgatgcagcagcagcccatgctca

SEQ ID NO: 276136 - DNA, 488 bp, Zea mays
tttggttcgatttgcctatctgatactatgtgccttagtaagtatatagaggaaattgtggtgtctgcagtttcgtatcacttgatgaataacaaagatccagagtatcgaaatgggaaattagttctatccacaaagagcttgtcccatgcattggaaatttttcaaggcaacaagataagtgataaggacagcatgaaattggaagcgacagatgacgccttaaaggctgctgaaaaggcaactgctccaaccactgcaaaatcggaaacaaaatcagcaacatcactgccacctgctcgggctccggctgctgctgctgctgctcccgctagtgcccctgctcctagaattgagagcaaaacagaacttgaaaagaaggataatccacctccagttgcaaaagcaccggaagtaacacccgataatgagtttgaaaagcgtattagaccagaagtgatacctgctaatgaaattggagtttcatt

SEQ ID NO: 276137 - DNA, 903 bp, Zea mays
gtgcccgattcatggatagatgcaagctaaaatctctggcagataagagacgagctgccttgcccagatgaactgatagccttcgaaaaagttatctgtaacgtctcaaccattttgacagagaagactagcataggtagtgaccagaaggaagttgagggaaaatattgtttgattgcgaaagatgtagtaaagcttagaagatgtggaaacggatggcacatgactgaagatgatgaaagtagctgtgcatgttttgaggatgagcactgtttggtacctgttctgaacccaggcttttcatggattgaggtctcctatgccaggccatactctttgagatgtttacaaaaaggaggaaattctgttatcatcacatactgcaaatagtaactttggacagagtccttgtgaaggatcttttgtttatgtgggatgatctgtcatcagcagcacgttcggttaggttatcccgctaccgacctcgatgggcacttctacttttcattgcagacatcccatatatcttggaaaatggtttaagtagcttgcttcatgcatctgcagcattggctgtaatcaattgcctaccggtgtattttctggatggtgaagcgattctggagactaccttaagctatgtagcttggtttaccccaagactgcaacgcagaattctaaaagtatgcagcgtggtgtggacgggtttattagtcattactttctcaagtatttgttattccacagtgctacattatggcgtatagcaaataacccatgtaattttgtcttgaacaaagagaagatcattttaatggaacatgccaactgtactctgtccattgtaaattataagttgttttgacttttatataaaaataacttttgttaggctaaaaaaga

SEQ ID NO: 276138 - DNA, 659 bp, Zea mays
ctcgccgctgcctcctctcttctcctctagagaaaccggccgaacattctcggcaatcattaaggaaagcaaacagtccagcctgcctgtgcctgtttcgtgtgtctgaggatctcctgatctcctcctcccccctcccctgctccctccccatcgtcatccacctcctcacacccatcccctcctcgctcgctctctcgcggcttccctctcctcctctgacctgcgcatctgaagcatagatagcaagcaaggaccctgctcagtgctcacctcgccggaggtgctgctgctacggcggcggcggcgtactactactactacgacgagactctgcgcgcgcacaagcccacaggagtgcagaattgaccgcgcgcacgacgacgacgaccaccaacagcaacaggagagaggaggagatcgataagggatggagggcggcgagacgacagctgtacacgggcttcggtcaggtgccggggacccccggcgtggacaccaaggtgctgcacgcgttccagaccagcttcgtgcaggtgcagacgctgctggaccagaaccgcctcctgatcaacgagatcaaccacaaccacgagtccaaggtgcccggcgacctctcccgcaacgtgggcctcatcagggagctcaacaacaacatc

SEQ ID NO: 276139 - DNA, 672 bp, Zea mays
cccacgcgtccggtagtcctgatgagtttagctgcaaccagatccaagctgaacaaatgacagggcaattgagatcattgactcaatatatattgaatggcgcagttcttgctctgtgtccctatctagatcgttatgtgttggcagctgctggtaatatgatttatgtatttggtttcacaaatgaaaatccccacagaataaaaaagtgtgctgttggtaggacacgatttacaataacttgcctgaagacatttgcatcacgaattgctgttggtgattgtcgtgatggtgttctcttctattcttataatgagagtcataggaagttggaattggtctattctgatcctgctcatagattggtgggtgatattgctcttttaaattgtgaaactgctgtggtatcagatcgacgtgggagcatatctgtattatcatgcaccagattggaagtttcagaaagtccacagaagaacttagccgtgaattgttcattttatatgggtgaaacagccatgagcattcagaaggctgcattcaggtatcggcttccaattgatgatgatactgacccggtgcttgagacagtttacaactgtatcgtggcaagtaccatgttggggagtctctttggtatgattccactttcaagtgaggagcatcagcttt

SEQ ID NO: 276140 - DNA, 313 bp, Zea mays
ctcgcttccctccccgctacacggtcgctcaccagtcaccacccaccactgcttccatgctcctcgcctcgtttccagctcgcgaaacttagctccagatcctcgcccccccatccaccgcgccgcattaacctcagatccacccggcgagctcatttcagatccatccatgcgcttcccgttccttttcgccctccagctggtcgccttggcggcggcagcgtcggcggccgaggtcgcggtgacgcgctcttcgaggatggtgcaccgtctgtcagacgaggcccggctggaagtaagcccgccttttggg

SEQ ID NO: 276141 - DNA, 675 bp, Zea mays
ctgagcccaagaaacccttgactgcacccagtgacctcgtgggtcatatcaccaagagttttgctgagggtgtgcggcttggtgaggccaagactgtaagccatttgactgacaaggtttctgggggtgatccgtctattcctgtgaagcatgttgaagttaagcacagtggtttatcttaggaactcttgatcgatgtgaatgaactgtaccaaaaattcacccatacgcttcctgatcaaaatgtcgggaatgcatatgcagatggatgatgatgaaacccaagacatcggcaaaagcatgcatgcacactagggtaggtctttgccaaccttggaagcatagtttcttgaatagtttctctctttttttcttctttcttcctagtattttctccccttctcttcgcatcatatgatgattccttagtgtctagcctcaaggagagttgctgtttttgtgtaaacctctgtaagtttcctgttccatcacatatgagtaaggcctttttgtttctttttatttaagtaaaagatccatcttttatgtactgtcgtggcagttttattatactatgtctgaacaaggcctattcactatgtaagccaaacataaacactatccaggtgacctggttgtgatgactacagtaataagtaactgaataattttttt

SEQ ID NO: 276142 - DNA, 704 bp, Zea mays
  unsure (1)..(704): unsure at all n locations
gtttcacgcacattcgnctgnnctccgctagtggtttattttttgacttggtctagggatctgcccagcgccccgagaaggccctccgcccctgcacgcgtccactgaccagacctggccagcccaggcgtggaggtgctcgtctcctccgccgcgccgggaccggcgatgaacggcgggctccctggattccacaatgcgccggcgtcaaaggccgtggtcgtcgccgcaggtctcttctccgtcgcctttggcttccgcggccactccctcaacctcggccttgcctaccagagtgtttatgaaaagctgagtgtatggagactgatcacctcattgtttgctttttcgtcaacccccgagctgatctttggagcagccctgctgtactactttagagtgttcgaacgccaaataggttctaacaagtatgctgtcttcattatcttctcaaccatggtgtcagtactgcttcagatcctttctttaggttacatgaaagatccttctctaaatcctttgacatcaggaccatatggcctcatctttgcatcttatgtgccattcttctttgacattccaatctcaatgaagtttcgcatatgtggactgagcttcagtgataagtcattcgtatatgtggcaggactccagctacttttctcatctggaagacgttccattgtgcctggactttctggcat

SEQ ID NO: 276143 - DNA, 599 bp, Zea mays
ggaattaccggccttagttctgtgctagaaccagaaggccaaagtgcatgaatttttcatttgcagacaacatagaggcaaggaaaacgagtcagacagccatatagctgacttgagaaggaattatggacaaggcacattgagacaaggatgccattacattgcaattaacatattcagtttgattattgtcctactgatgttttggtgtcttaaatggaccctgttagaagttcaaaaaaattccaactgcgaataactggcccttcggggccaggaagatatgtttgtggatgaacactcgcgaggccacatgactgttacttttgtttcttcccctttttttttgtagaaaaaggtcaaggctatctaaatgttgtccggcaattgttggagttgatggaggttctgattcgtttggtcaatctggccagtcgatcgtgtactgcaaacccatttgggtactgtaaatgttatgttgataatgctacctcagttgctgtacaagttgagttggcggtatttagccaagcgtttccaggaaaaaaaaaaaaaaaaaaaaaaaaaaaaaaaaaaaaaaaaaaaaaaaagggcggcca

SEQ ID NO: 276144 - DNA, 643 bp, Zea mays
ttggtttcaggcagcagcccacggagtccggcccccccccgcggccccaccaaacaacgctcatccctccctccgtctccgccgcctcctcctcgcctttcctccacgccgccaccacagccccggctccgggcggaggttcctgcaccccagccttcctgcgaggcgcctctgccatgccgtcggacgcgcaccaccggagcagccctctggacgatggcaggatggacgcgctgaagtgtaacaacagcgtcctgccggaggagaccgccgcggacgccgccggggcgttcgtggagaaagacggcttctcggtcgaggacctgcttgacctggaggagttcgccgagcctgacaaggacgtccccgaacgcgaggatgacgacgcgccgccggcagccgccgcggccgaggagaggtcgaaagcggactcgcagccgtcgtcggtcgtgaagtacgacctccctccgctgctgccgccgccgccggagatggttgacctgccgtcgcacgacgtcgaggagctggagtgggtctcccgtatcatggacgactcgctctccgagctgcagccccaggcgcagccgaagccggccgctgctgtggtcgcgtcgtctgcagcgcggccccctctggcgcagca

SEQ ID NO: 276145 - DNA, 598 bp, Zea mays
cacctgacatcaagagggagatgcagatggagatgcagcccgcaccaccaccatctgctgcggcgtcggcatcgcagacggcgtggccgctggattggccggtggacgggcgctcgctcaatcctccatcgctgcccactatatcagtccagtatgtgagtcatattagactgttattagcgattttatgcgccagttcttgcctcgactaatgggtcctcttccattttgtaatcacctctgcatgtttactgtatcactttggtagattactattgttccatgttgtcttccacaacatactggactggttcagtggttagtttcctattcaaccatttcataatgaaggatgtattggtatttaggtaaataattatttatgattgtgctggtattatctcaatagactggaaaattttaaataacctcatatgacataaatctcaactgcccatgcactcttagttgttgttttgaacaggtctttcattgttttcttttcaccaaaaaataaaatcttgatgatgtgtgacacacctgtttggttatatcatgttatctatgtagttcggccaattaaactatgttatcaggt

SEQ ID NO: 276146 - DNA, 396 bp, Zea mays
atttcttgcagtagagcgctaggtatgctcgctatgcctacgatgatttatatgaggatgacttagataaggaggtggatcacatgtcagtttccagcaaggtgtttggactggaatgcgcacagtctgttactttgatggcaaaacgcaacgaagtcccatgggtaaggatgtgctggagaatgaaagcttctgtcttaaaccaataggatacaagaagcttgcaagtggttttgtgaaggcttttgtgaatcccttgaatcattagttcttttaagaatggttttgtaaagcgttagcaaatatgtgtaaaacaccaataagatgtgtggcaaagtcagtgatctagttgtccagttttttatgtaaacccgatatgttcaaatttccctgccc

SEQ ID NO: 276147 - DNA, 950 bp, Zea mays
cttgccttcccgtgactacctcgctgtcccctctcagtgtccaagcgacgacaccacgccgccgagatgtggatctcagattccgcctttgtggagccctcatcttcctccccatccgcctctgcctccccgccgccgagcccgccaccagcacgccttctccgccaacgcaaccgccgccgacgccgcaacagccggaaacagggcagtgccagcgccgtcgacggcgtcgccgaccccgaggcggaggacgtgtggcgtggggcgcagtgggaggcggcgtggccggcgaggcgggactcgaaacccgtcgtgctcgcgggcggagacgacgcggtggggcggtccaggagcctcacggacgacgacctcgaggagctcaagggatgcgccgacctgggcttcggcttcaactacgacgagatccccgagctccggagcaccctgccggcgctcgagctgtgctactccatgagccagcgcctccagctggacgacgagaagccgccgcagcagcacgagggcgccgcaccagatgccgccacgccgtcgccgcctgtcaccaactggtagatctccagccccggtgacagccctgacgaggtgaaggcgcggctcaagtactgggcgcacgcggtggcgtgcaccgtccgcctttgcagctgaacggcgccgatccatgcgcgccattcttcgccgtctggaagcacacaccataccggtatgccggccgccaccacacacgaaaccggatgaccagacctaatcgcgaacacgttgctgctgctgtaaagtgatccaggtgcaccgtttcagctgcgacggcgggcgttggcagctgccatgattgcagctgcagagtttggtggagcatcgttggtagtcgtgtagcagcacacataggggctgggtaaatgggttggttgcccaaccgacatgctgtgctctct

SEQ ID NO: 276148 - DNA, 600 bp, Zea mays
aaaaatggaaattatgggcatgaacctgaattattcgtccatgatctgaaactgttatgggaagatcttaaagtggctggtcaagatattgttcacctagcaaataatctatcaagcctcacagaggactcatatgaaaagctggttggaagagagagaggatcagatgatgatgagctcaatgaagctgtggtggccaggtctgaaccgaaaaacctagttcaaccaaatgcatcggtacccttgacctcacaaggctttaaccaattattggatcaacccgggccttctgatccttctgttgtatacaaggacagtatctgcaaccgatgtgggaaagtagcaggagctggtagcgttctcaaatgttacaggtgcatgctaccttgccacatttcatgcattgaggctactggttcacccatttcaactggaaagtggtgttgtaaaaactgcagcgctggcactaaggaaccagttgaaggagacatggtcttagcccatggcaatccaaattgcttgcatgaaagttgtgtcgtctgcgacagacttgcggcctgcaggactccaaaatgtgataactcaagagcattggttatt

SEQ ID NO: 276149 - DNA, 1039 bp, Zea mays
  unsure (1)..(1039): unsure at all n locations
cccacgcgtccgataacttaagaccatcgacatttatttatccgagtgatgagcgtatatgtggaagcacctgtgttttcgttgctttacatagctcaatgttacgtcttggaaggaagaggttacttcgtctggtcgtcagtttgaaccgcctggcatgcacatgatctatcttccatactccgatgatattagatatcctgaggaagttcatgtgacttctgatgatgcaccgcgtgcaacagatgaacaaatcaagaaagcttcgaatatattcaaacgtattgatctgataaatttctctgcatgccaatttgctaacccagctttgcaaagacactatgggatcttggaggccttagctttaggcgaagatgagatgcctgatataaaggatgagaccctgcctgacgaagaaggcttgtctaagccaggggtagccaatgctattgaggaattcaagacttcagtctatggtgaaaattatgaccaagaggaggcagaagcggcagcagggaaagcttcccgtggtaatgcttcaaaaaagcggaaggaggtcactgatgcagctgcgcagataagtgctgcttatgactgggcagaacttgcagacaatggaaaactgaaggaaatgaccacggtggaattgagatcctacctgaccgcgcatgatctcccggtttctggtaagaaagaggtacttatcagcaggatcttgactcacctgggtaagtgaagccgggtatccgaactgttagtttcctgagacccgactgacatctgtagtgctgtctcgcggatccttgtggaccgtaatcctcccccgtgcaggctacgtgccgattttttgtatagcgacaggacagcaccagttgccaatgtaacctgtgttaagtttcgtcttgtggtatcatctgcttgtcattgtcaacatgaaacataatgtaattctggatacttagacccacaactccggagcatacctgaataaggtctgttaaagcataggccctctttagcaanaaaanaaaaaaannaa

SEQ ID NO: 276150 - DNA, 629 bp, Zea mays
cgtatatttggaagcacctgtgttttcgttgctttacatagctcaatgttacgtcttggaaggttaggcactattattgtcacatcagcctttttcacaaatgtataaggaaaatatcctgaatcaggaaaactaaatactctggatgtggataaagctgtcctgaatcatcttagtgcattgtaaattgttattatgcttttatatgacatttttgcagtagctttgaatcatgcaatagcaatacacacagtaaaacatatcacatcaccaccctttgtctcgctcgaagtcaaggaactcttaggtgggcaaggtaaggtagccaaactttatgctagaccagtagagggcttgaggcaagagagccaaacatggcaaggtgatccataactaaataaacttacttaaacaatcatctatgtaaaatatagcatgtgtatggtttcaggtttgcacttgcattttatgggaatccaactcgaccacaactcatagcccttgttgctcaagaagaggttacttcgtctggtcgtcagtttgaaccgcctggcatgcacatgatctatcttccatactccgatgatattagatatcctgaagaagttcatgtgacttctgatgatgca

SEQ ID NO: 276151 - DNA, 435 bp, Zea mays
gcgtcggctgtgttagccggtagccctccccccgtccgaggtccgagtccgaccgaaggagagaggcagcagccatggctaagggcgggctgagcaagctccggtgcatggtcaagaggaggtggcactcgtcgagccgcatcgtctcccgcgccccgtcgccaccggctcacgccgacgccgtcgccgtcgccgccacctccggccacgcgcgcggcgcgtcgttccacggcgcggacgaggcgcccaagggcctgcacgcggtgtacgtcggcaggtcgcgccgccggtacctcgtcgcgcatgagctcgtgggccacccgctgttccagaccctcgtccaccgcgccggcggcgccgggggtcccgcgggtaccgtcatcgtcggctgcgaggtcgtcctcttcgagcaccttctctggatgctggaacacg

SEQ ID NO: 276152 - DNA, 982 bp, Zea mays
cttcgtttaaacccaaaccctaattgcgacctccgttcccccaaaaccctacggccatggacggcggaggcggtggtgtagggggaggcggagttggggcaggtgtcatggtgggcggcggagtcgggccgggcggcggcgttggcggcgacgtggagctcgtcagcaagacgctgcagttcgagcacaagctgttctacttcgatctgaaggagaacccgcgggggaggtacctcaagatctccgagaagacctcggccacgcgctccaccatcatcgtccccgtcgacggcgtggcctggttcctcgacctcttcgactactacatccgcaccgacgagcgcgacgccttcagcaaggagctgcgactccagaccaaggtgttctatttcgatatcggggagaacaagaggggccgattcctcaaggtttctgaggcctctgtcaaccgaaaccggagtaccataattgttccagctggcagctctggtgaagagggctgggaagcattcagaaatgtactgttggaaataaataacgaggcttccagattgtatgtcctaccaaatcatccaaatcagcaacacatggagccgccagagcgtcttcctggcttgtcagatgatgtgggtgccggatttatagctggacatggtagccagtctgcttctgggccagaggtagatgtcgaacgcttggttgatctgcctcctcaagaagaaattagtggcatgggtatgtctaaggtgatcagggcagatcagaaaaggttcttcttcgacctgggcagcaacaacaggggccattatttgaggatttctgaggtggctggagctgatcgttcgtctattatcttgccgctctcgggtttgaagcaattccatgaaatggttggtcactttgtagatataatgaaggacaggcttgaaggaatgacaggagctaacgtgcgcactgtcgagcccagccagagatgattacc

SEQ ID NO: 276153 - DNA, 892 bp, Zea mays
gctctgaattgttctccatttgaggtgttatatggacagccccctcggcacttcggcttgcaaccagggagtgcagtgactgtttcagatctgtctacttggcttcacgatcgtgaggtggtatccaagttggttcagcaacatctgttacgtgcccaggaccgcatgaaacgtcaggcggataaacgacgttctgaacggattgtcagcgtcgacgatcaggtgtacctgaagttacaaccgtacgtacaatcatcagtcacaactcgggccaatcaaaagcttgctttttggttcttcggcccctacaaaattttacagcgcatcggcccagttgcttacaagcttcagttgcccgcttcctctcagattcaccccatttttcatgtatctcaactcaagtcggctgtcaaccgtccacaacacatcattccattactacctgagactaatgattcacttcaggtgcccatacaggttcttcaacgtcgattaatccggcgtggcggttctatggtgactcaagtcaaagttgcatggtctggaatggacaccgcaatggctacgtgggaagatgttgatgcactgaaggcgcgttttccttatgcaccggcttgggggcaagccgcgtttcaagaccgggggaatgtcagctctgctgtaccggaagacacaagaaccatggccaagaaggatctgacggcgaagacagaaggaggcgatgtctcagctcggcctcgacgtatcaagcgcggcagcgtccgagtaactgggccggaatgggccaattgatggctggctgggccggtctgtaatatgggatatagacatatgctggaaccgtgaacagacatcgaaaatctgagaacaaacagagaaacatttcgtcgct

SEQ ID NO: 276154 - DNA, 942 bp, Zea mays
cggacgcgtgggcggacgcgtgggcggacgcgtgggcggacgcgtgggtggacttctggttgcaggcgtgctggcggacgggttcatggcgcgtgacctgacgatcgggaacaccgggggccccgacgcgcaccatgccctgggggttccgttccacggcggacggaccggtgctggacggcttgaacctgttggggcaccaggacacgctgtacgcgcacgccttgcgccagttctacacccggtgccgcgtggcgggcaccgtcgacttcgtcttcggcaactccgccgcggtgctccacgacaccgtcctcgtcgtgctgccgcggcagctgcggccggagaagggcgagaacgacgccgtcacggcgcagggccgcaccgacccggcccagcccacggggatcgtgctcagccgctgctccgtcaacggcagcgaggagtacatggcgctgtaccgcgagaggcccggcgtgcaccacgtctacctgagccgcccgtggaaggagtactcccgcaccgtgtacgtcgggtgcacgctcgcggagatcgtgcagccgcaggggatggatgccgtggaacggggacttcgcgctccagacgctctactacggcgagtacgacagcgccggccccggcagcgccgcgggccggagggtggcgtggagcagccaggttcccaaggtccacgtcgacgcgtacagcgtcgccagcttcatacaggggcacgagtggatacccagagtgtagtgcagtaccgcgtaacaactgtagagaatgtatttaccagcaatcgtgtcccacaattgacacggtgtccctggtgttgagcttgagcattgcagttactcctaataatacggagagagcaagtcaaaaaaaaaaaaaaaagaaaaaaaaaaaaaaaaaaaaaaaaaagggcggccgctcgcgatctagatc

SEQ ID NO: 276155 - DNA, 286 bp, Zea mays
aacaaagggtggtgtggagcaaccaggttcccaaggtccacgtcaacgcgtacagcgtcgccagcttcatacaggggcacgagtggatacccagagtgtagtgcagtaccgcgtaacaactgtagagaatgtatttaccagcaatcgtgtcccacaattgacacggtgtccctggtgttgagcttgagcattgcagttactcctaataatacggagagagcaagtcaaacacatgggaataataaacctaccgcgataacgatcgcaaaaaaaaagaaagaagggg

SEQ ID NO: 276156 - DNA, 455 bp, Zea mays
gaattccggggaggaactagtcagcgaactagtagctagcttgcttgaaatataatgatttttagggtgggaaatgaaggcagattggtatcctactacgtgatgcagatgacctgacgtatcccactgacgacctagctggaggtgcgtgggcattcggccctctttccgcgtggcgtttcttcgtgcctgaggcgacgacggtttggcaccggctctctgccgtcgagagaatggcaccagctcgtatcaccactgctggcataggtggtctgttcctcttcagctcgctgcttatttaagaaaccgtgacagagaatgcctgaccttaaatctgttgaaccaatgtaccgggggaggtaaccagtgcatcagtactccctgtacacgcctactccggcccctcagctccacttcagatcagatctcctgaattgcacgtttgagatcgagat

SEQ ID NO: 276157 - DNA, 609 bp, Zea mays
taaggagggcatttatagcatccttggatactggggtatgtttctaattggtgtttctttgggtttctatctgttttttgacactagttcaaagggcaagaacaggaacactcaagtcatgaaaatctgggttcttgctgcgttgttttggattttggcaatcatctttgatagctatattgagagagtttctcggcgaatgtgcaactttgcttatgttatgcttgtttttggccagaattttcaggttttatgtatcctcccattagctgggttcgtctcatataaaaagaacttggttcttgaagatgcattcaatcaaaatatgctcggctccttccttctggcaaatatccctactggtctggttaatctctcagttaacacgctctttgcctcttccttcactgccttcatgattctgtcagtatacgcctttactttatgcatggttactggccttacccatttttgtggtgttaggatgaaattctggtgaattgtaagctaccatttgatatgatgtattcattcattaacttgtcaacaaactggtagctagcttgcttggaataaaaaaaaaaaaaaaaaaaaaaaaaaaaaaaggaa

SEQ ID NO: 276158 - DNA, 944 bp, Zea mays
gaagatgcattcaatcaaaatatgctcggttcattccttctggcaaatatccttactggtctggttaatctctcagttaacacgctctctgcttcttccctcaccgccttcatgattctatgacctgacgtatcccactgacgacctagctggaggtgcgtgggcattcggccctctttccgcgtggcgtttcttcgtgcctgaggcctgaggcgacgacggtttggcaccggctctctgccgtcgagagagaatggcaccagctcgtgtcaccagtcaccactgctggcataggtggtctgttcctcttcagctcgctgcttatttaagaaaccgtgacagagaatgcctttgaccttaaatctgttgaaccaatgtaccgggggaggaggtaaccagtgcatcagtactccggcccctcagctccacttcagatcagatctcctgaattgcacgtttgagatcgagatctatcaggccatgctaagagagtaagacgtgatcaaatgacagtactgaaaagtgtagcaacaaccacgcttgcttgtgtgtgatggtggagtgagagacaaggagagctggatccaccaccctgtcctctggagacttgatgagtcgaacgcatcaaattgcgttgcgtgatcggacgggtccaaatggtattaactcgcagcccatggattgcgagccttcatggaatcatttccggatcacgatggatcaatcgttcatcgccgacgagctagtacgtggtatttgtatttcaccgaccttgtgtggcccgagtcactcataagccatagtactacttcctttagggctagtttgggaacactaatttcccttagaaaatgaaaatcccatggaaaattagtgttcccaaactagtccttaacatgttttcggtactctcgtttctgaaattgatgttgctaggttattct

SEQ ID NO: 276159 - DNA, 695 bp, Zea mays
gaagaacagtacagtgaccggacatcgaagatacttgctgctcaccatgcaaaatccatggggttagttgctgaaaaccggaatggagatagaaagagcaggagatctggtagatggggcttgttagggaataacttcacggtcgctctcatggttcaactgcgtgacccactacgtaactacgagccagtgggcacaccaatgttcgcgttaattcaagttgaaagggtttttgtacccccgaagcccaaaatctacagtaccgtctcagacaaaggcaacagcgagcaggatgacgaggaacccaaggccgaagaggttccagacaaggcattggtcacggaagagaaggctgaggaattagaggatcccgttccccaattcaaggttacagaagtgcatgtcgctggtttcaagagcgaacctgagaagaagaaaccatggggcaatcaaacgcagcagcagtctggctctagatggttgcttgcagctggaatgggcaagggaaacaagcatcctctgatgaaatccaaagctatagtgaagccaaccaaagaggcagctggtcaggcaggagacatcctctggagcatttcttcacgtgttcatggagccgggaccaggtggggcgagctaacaggaagcaagagtcattcacggaacccaaatatcatgcttcaaaaggacaagagatt

SEQ ID NO: 276160 - DNA, 409 bp, Zea mays
  unsure (1)..(409): unsure at all n locations
ggtggagatgctggggcgcgccggggaggtggaggaggccgagcgactcgtggccgggatggaggcgcgcccggacagggtcatcttcgcggcgctcctcgccgcgtgccgcgtgcacggccgggttgacgttgccgagcgggtggccgggctcatgcgccggtatgccgttgcgtgaaaactcgcggtctgactaatgcatcatcagttgaagacttgaagcgcagttcagacctctgatctgaaatgatcatccatcgccatgcatcttttgggtggattgcttgcttggacacgaatcggactaagaaatactccatagctggcaatgtggtagcgttgcttgtaagtgcattgtatgttttcagtcattcatgcagcangagcccctcctggctagtaaaatcag

SEQ ID NO: 276161 - DNA, 497 bp, Zea mays
cggctcgagctctctctcttctctctctctctctacggattgcctcacgcatctcgcgtgcaattcaagcgaaactttctgaatatcaaagtggcatagagctccacttttatggccatccctatgaagccctctccgggttcctgatatagaggtttcctggttctgaacatgaaaagttctcaggtactccgccgttgatgaactgcctccacacctgcagcgacaagaagacgctgaagaagtggtttttcatcgacaagacagtaggctaaatccagtcccagagaacaaattgaagcaccactccccagtaccgcacagcagcacagctcttctcttcaccgatcccgatggatatgggcagcggctcgtcacctgtcatcaccgatccgatatcgataagcccaccgctgctgggacgcttgacgtcgaacctgatgccgttctcggtcatgtccggaggctgcttcctcagtcctagcatgagcgccagc

SEQ ID NO: 276162 - DNA, 624 bp, Zea mays
  unsure (1)..(624): unsure at all n locations
agcatacactagtgcttttgctagctacttgtgcgagaagagagagcgcacggcgatagatatggcgcatagcaagcgcgaaatcaagcccgggagggcgcataccaaggtggccggcgacgacgagatgctgcggaccgggttcttcgacggcacgccgctggagggcggcaagatcgccgactcccagcccgtcgacctcttcgccgctgcccgccgcgtcgccgacgccccgtactcatcgcagcaggaaggaccacacgaggaggggaccaacaagaacgccgtcatcgcggagtcggagcccgtcgacctgcccgcgagcgcgcggggcgtggcggaggtgaaccgtgctgggccggaggagcagacaggccgcggtcggcagggcatggccgagcccaccgccggtggacgtcgcttgggattaggtcgcccggccccggcttaacgatccagatcaagcagtactcgactaccgccactacactacctgctctgctcgtgtcttgtttccagttttctttctctgtaagcggtgtagggtttgccaaacttttatgtacgaattatgaatatcaataaagtcgatctgctgctgcgttaaaaaaaaaaaggtgnttg

SEQ ID NO: 276163 - DNA, 551 bp, Zea mays
tttttaacactggccgccagctccagtccggcttccctttctctattttgttctttttttcgtcgcttggcaaacagcttcgtctggcttccttgcctcggctaacggctaaaaaaaccagcgagcacgatttctcctctctctctaactggcgagccgtggacgctcggccagctctgctggccgactaaggagggcgtcgttgggcctcaccgccgccgagtgcgtccctgcgggtgggcacactgccgtcggtcgggtccgtcggttgtccagcacagctacaagtcgaggagctctgcagtaaaggaagtgtgtagtcaccatggtccatttcaagaataggtatatggtggtggagatctttatagatgcaggtagaggtgaacaggaccctataatcctcacccaatttaatataacaaaagttataaaagacagcattcagctcaactttggtgagtgtggcctagctggatctcttggatcattgcaagttaagcatgtcaatcctgtaacgaatctctgcattgtccgcgtgtctcgcgaag

SEQ ID NO: 276164 - DNA, 275 bp, Zea mays
cccacgcgtccgggacgcgtgggtgttttttttttacgtgctctcttgtctgcggccaacatacagctaactggcgagccgtggacgctcggccagctctgctggccgactatggagggcgtcgtgggcctcaccgccggcgagtgcgtccctgcgggtgggcacactgccgtcggttgtccagcacagctacaagttgaggagctctgccataaaggaagtgtgtagtcaccatggtccatttcaagaataggtatatggtggtggagatcttt

SEQ ID NO: 276165 - DNA, 543 bp, Zea mays
agacaggatgcggccggaggacgtgggcctgagcccggacctgagcttcttcagagctcgagacgccacacgtggcggtggcaccccgaccataacgcacacgacgatatacaaatgcccgaatttctcgatggtcatcctgttactgccgcgaaacgcggtgatcccgctccacaaccaccctgggatgacggtgttcagcaagctgctcctggggtcgatgcacgtcaagtcgtacgactggctcaacactgctgaccccgatccttcttccgccacgagcaccaccagcaccagttcttcgtcctccgatggcccatgcctgaggctagcggaactggtggtggacgacgtcttcacggcgccctgcgacacctccgtgctgtacccgacggcgggagggaacatgcaccggttcaccgccatggcgccctgcgcgatcctcgacgtcctcgggcccccctactccatagaggaggacagggactgcacgtactacgcggaattaccgtacgcaaaccactcgctggtggctgcgggcga

SEQ ID NO: 276166 - DNA, 919 bp, Zea mays
gaaaacccgaaccttcggagacaggattcctgggttccgctgaggaagaatatggggggacaaatgatcgttcaaaccatctcatttcttatgagaagaagaaggtgagtttcagtactacagatgatcggccatacgctgcagttgctgacgagaagagcgtcccagagactccagagcaaggattcagtctaactgaccatcgagatggagtagctcctgacgccactaacatttcagagaccagagaagacgaggaacaagacagtgcagctcgacaggcctacgtttcagtcgccgggaaggcaaaggtgtacgacgaagatggggaggatccagaagtgaggtggaaggatctttcagccgaggaggaggacgagctggagtcgctgtgggagcaccaagacctgatagagcagctgaagctcgagctgaaaaaggttcggtccatcgggctgcccacgatcctcgaggagtcggagacgccaaaggctccgatggaggacctcaagccatggcggatcgatgccaagttcctgcgcgaagaccccatggacgagctgaacaagttctacaagagttacagggagaggatgcggaagtttgacattttgggctaccagaagatgtatgcgatagacttcctacagctcagaggcccccagcaatccagcaactctctaaagtccctgtcgcccacggtggcatccatcctgtcgcacaatttccggtcatcgcgtcgcagatctccggaggacccgtcggagcggttcttgagggagctccgctacgatctggagacggtgtacgttgggcagacgtgcctgtcgtgggagttcctccggtggcagtacgagcaggcccgcgacctcccggagtccgacccttaccacagccaccagtacaaccaggtggccgg

SEQ ID NO: 276167 - DNA, 376 bp, Zea mays
gacaagtctcgtcccccgcccccttattccattacgagcaactccgccgccgccgtaaagccatctcccccatccgccgccgccgccaccgctgctggtgggacgggccgtgcgtccgttccagcgaagaggagcagcgggtcggaggagccgccggcgaggtcgggccgcgggggatcgagatggtgctgtgggagctcacggccatcaccgcctacttcctcgggctgaggcgcacctaccgcctcgcgctccgcatccagcgccgcctcatcccgcccaaccaccccaggatccgggacttcgtctacaggcgcacacgggatgtcttcaacgtcgcagtgtcggtccacaagaacattcagcagagagacat

SEQ ID NO: 276168 - DNA, 1267 bp, Zea mays
  unsure (1)..(1267): unsure at all n locations
tcgtccacgcgtccgatcaggagcaagatgggagggaacaggatagctcggtgttcggtcacctggaggggcagccaacttgatgtggatgcggatccaagttgtaccgtgaaagagtttgcgcaactgttgcaggacttgaccagtgttaagccagagacgttgaagctcattgtcccacaatctacaaacaaaggctccaagctgatcatgccattttcggatgcacattcgagattgacactgaatggagcgggtattagcgagggaaaacctatccgaatgatgggagtttatgatgatgaaatcgaggaggtatccaacaatggcaaaagacctgaccaacgcattattggatttgatgaagaagaacagcggcttaggcaaagatcattaggcaggccacagatttcactcaaacttccccagggacaatacatcttctgcgattttcggacgcttcacttacctgggattgagctgaatcctccaccttccgaagctctgaaacgaatgcacatgcttgcatgcgaccctgggtgtaattgcgatcatgaaaaagcataaatggagagtcggaatcatgactgagatggctcctgttggatatgtaggcatcagtccaaaatgtattttaggtttcaataagaacatgggagaggagatatctcttcgcctgcgaactgatgatttgaagggatcagngaagatggaaagtatcaagaaaactctacttcatgagcttgcacttatggtgcactctgaacatgatgcaaacttttttgcccttaataagcagttgaacgaggaagctgcttccatggactggaccaagtctacaggtcatatgttgagtggtcgtaaaatcttcgattcatatgaagaggaatttgttctagaaccagagataactgttgctggtcacaggctcgggggagagtcaagttcgcttgctagcgctcgtgcgttgtctggagctgctgcttaccagcgttttctgaatgcatctgcaaatgtggatcatgcttcaggcactaaaatcgaatatagttctgatgatgttcctcgaggttttgttcatgaaactgtgaaggtagagccagatccagattatgctatgcatgtggattcagcagctgggctatcatttgcagggcagcatactattggttactctgatcctaatcctgacgatgttggcaagcaaagttctgatagatgcctagaacctgatcctgatgattcctcaaatgctaataatctgaac

SEQ ID NO: 276169 - DNA, 527 bp, Zea mays
cgaccaccccttcggccctgggtgcgacaccatgggcatcgcctatgtctcgttcgcgcagtgggttgcggtcattcttgtgtacactctggtctaccacatgatggagccaccgatgcagttctacgagatcgtcggggaagggaatgagatacagcaggaacccgagctggtcagcaactacagtaggtccctgcttcatgaggcggagtggccagggatggtcgacaaggaaactgagcattcgaagacaccgttcatcgcgagagttttcatgagcatttcaggttcctcacagaacacgttccctgacatcgatttcaccgaagaaggaacttctgcagctggaccaagcagtcctaagtcgctccgatgtctggcagagccaagagtggtcaggaggattagggttgtcgccgagaagactccgatccagcacgtccttcagcccccgacggtcgcctctttgcttgcccttaccgtcggcatggttcctgtccttgaagaattttgtttcggggctgatg

SEQ ID NO: 276170 - DNA, 1255 bp, Zea mays
agttggtggtggtgcgggaggtcctgggcctggatgtcgtcgacgaggtggaccagcccatcatcgactacatcgccaacgtcctcgtccggccgacgaggacttcgacttcggggccccggaagggcacggcatcttcgaagcgctcggggagctcctcatcgactctgggtgcgtctctgaccaggagcactgccttcaggtctgcagtaagctttgtgaaaagtttggaaagcatggtctggtgaaaccgaaacaagctatgcgcagccttgtcacaccattacgaatgaatgcggggatggacgatgatgtcgctcccaaaaagccgcagcctgaagtattcgatggaccactgctgtcttcgcgcgataaagccaagattgaacggagaaaaagaaaagaggagaggcaaagagaggttcaatatcaaatgcatgttgcggagatggagacacttagggctggaatgcctcctgtttatgtaaaccacagtaatgatggtgggccagctgttagggatatacatatggagaacttcagtgtcactgttggtggtcgtgatctaattcaagaagccactataacacttgcttttgggaggcactatggacttgttggaagaaacgggactgggaagacatcttttctcagagcgatggcattgcatgcaattgatggtattcctaagaactgccagatattgcatgttgagcaagaggtcgtgggtgacgatacgacagctttgcagtgtgttctgaacgccgatgtcgaacgagttcaacttttgcaggaagaagctcgtcttgttcaacaacagaaagatttagagattgaggctgagtttgggcagagctctgacaagggcaaggatggttttgacaaagattctatcagcaagaggcttgaggagatatataaacggcttgagctcattgatgcggatgcagcagaggctcgcgcagcatcaattttggcgggtcttagttttactccagaaatgcaacgcaagcgtacaaaacaattttctggtggatggcgcatgagaatagctctagcacgtgctctgttcattgagcctgatttgctactacttgatgagccgacaaaccatcttgatcttcatgctgtgctatggctagaaacttatctcctgaagtggccaaagacattcattgttgtatcacacgcaggggagtttttgataccgatgcaccgatatccttcatctgcatggtaggaaactacatgctac

SEQ ID NO: 276171 - DNA, 1127 bp, Zea mays
ctatcatgtagataagccaagcaaagaaaaagaccggtgttattgctccaaaacgttttgttcagagagtgaagaaacagaatgagttgtttcgcagctacatgcaccaggatgcacacgagttcttaaatttccttttgaatgaacttgttgatattctggaaaaagagtcaagtgctgctaaggactcaccccaatcatcatctccagaaaaagctccaaatggcccagttcaacctttagccaatggagttaaaaaagaaccaccagttactctggtccataaaaatttccagggcatattgaccaatgaaacaagatgcctaagatgtgaaacagtaactgcaagggatgaaacgtttcttgatcttagtgttgacattgaacaaaatagttctatcacaagctgcctgaaaaatttctgttctacagagactttaaacgcagaggataaattcttctgtgacaaatgctgcagtttgcaagaagcacagaagagaatgaagatcaagaaggctccccacatactggtgatccatctaaagcgtttcaagtacattgagcagcttggccggtataagaagctttcatacagggttgtattccccatggaactgaagctcagtaattcatccgacgatgtagacactgagtactccctctttgctgtcgtggtccatgtcggaagtggcccgaaccatgggcattatgtaagccttgtcaaaagccacaaccactggttgttcttcgacgacgaaaatgtcgagatggttgaagagcagaccctacaaacattcttcggttcctcacatgaatactcaggcaacacagaccatgggtatatcttgttttatgaggggcttggtgggaagagttagatgggtttattcatcttccttgtttcttttctccttctctctttggagcttgcaaattcactcttgtgcctacacagctactatttcattacctccatgggaaacgggtcaatcgaaggggtgttgtatgaggtgaggacgccagattttgggtggtttcagtgtacaggggataatggaatctagctccaacgatgaaataaggtgtattttttttaacttctcagggctaaagagttggcctttcct

SEQ ID NO: 276172 - DNA, 832 bp, Zea mays
cccacgcgtccgcccacgcgtccggggaaagggaacgggagcgggaggggaatccaattgcgatggcctccgactcgggcgatttcggtggggagaacaagtcgttggaaacggcgaggcggctgctggaggagaccttcacgagtgaggcagaggcggaggcgctaccgagcttgccctcggggttctacgacgccttcgtcctgaggggaatccgcgtcgtccaggccctccagcccggcacactcctctgccacttcaacgtgccctccagactactcaactcgggcggcttcctgcacggcggcgcaaccgcctccctcgtggatctggttgcctccgccgccttcgccactgccgggctacgcaccaggggctcaccccttgagatgaacatctcctaccttgatgctgcttttgctgatgaagagattgatatcgaggcgaaggttcttcgcgctggcaaggcagtaggggttgccgttgtggaactgaagaagaaatctggcaaaatcatcgcccaagctcgctactccaaatatcttggtgttagtaaactctgaatcatgatgctgcctcccatatatacggggatatggtagcagcaagcaagcagggtgtggtttggttcgacagcaagtgttgttactactctacattatatcttggtgttagtaaactctgaatcatgatgctgtattactgttactcaaccatcatctcagctacttattattcttgtgttatgagtcttcctcggattgcattaagctaaactacagtatacagcaaatacttgtatatatgtatgagcctgagcttcaggcattgc

SEQ ID NO: 276173 - DNA, 589 bp, Zea mays
cccacgcgtccgcccaggcccgcgtcacggcgcaccctgtgaagctggccgccctctccaccgcccaccaatccgtcaccaaggccatcgacaaggccggcggcatgctcctgctgacgtcgctgctcggacccttcacgtcccacgccgtggggaccgaggcggtcgccattctcgtcagcggggtgccgcttgacgctgacacgaaggccgcgctcatgcagccggcgaaggtgtcgctcgtggtcgacatgctcaacgagggcgcggcggacaccaagatcaactgtgtccgcctcatccgcatcctcatggatgagaggggtttccggccggagacggtggcgagcctgagcctcttggttggtgtcatgcgcctcatccgggacaagcggcatccagacggtgtggtcgcggggctcgagctgcttaattcgatctgcgcggtgcacaggccagcgaggtgtatgattgttagcatcggtgcggtgccgcagctggcggaattgctgccggagctagcgacagagtgtgtcgagccggctttggacatcttggatgccctggctgcgggtccagaggggaggat

SEQ ID NO: 276174 - DNA, 795 bp, Zea mays
gcccgaaccagcgctcgggatcaacttcgccagggacggcatgaggcgtcgcgactggctctcgctcgtcgccgtacactctgacgcttggctcgtctccgtcgcattcttcttcgccgccaaactcaacggcaacgacaggaagcgattattcaacatgattaatgatcatccatctgtgtatgaaataatggctgaccggaagggaagggagaataatcctggtgttgataacagcagcaaatccaggcactcaacgaagcgatcaaatgatggaaagataaagaactcaagagtggcagttggtgaatgtaggtatgagaatgatgaagaccacagcgaaaccctttgtggttcttgcagtggtctctacaactcaagtgagttctggattggatgcgacatttgtgagcggtggttccacggcaggggtgtgaggataaccccagcaaaagcagaacagataaagcactacaagtgccctgattgcagctacaaaaagagcaggcaataaaatcttggagctgctggcctcctattactgactcagctgatcaaccaaacaatacttttcaatttggccgtagatgttaactaccctaggcatttctttgttgtggtacatgctggaaaaagacatacaggatagttgatcttacagtctggtcaattgcttttgtgcttgttttaatgacatctgtttacgggttatgtcttcaaggtggatggtaatcctttgcgttgtgggctctagcaacgtgatgagttatggccattatcgaaatttgagattaa

SEQ ID NO: 276175 - DNA, 1146 bp, Zea mays
aagatactccttgtcccctggaccatgtagttagagtggcctatgaaacaatgtataggcgggacactgctgcggctcaaaggatccgtcagaaggatgtttttgagaagcagaaagcgctcattttgatcggagagagattgcttcttacaactattcgatttgatttcaacattcagcatccttatagaccacttcttgatgccatgcaaaatcttggcatcaatcaaaaagaagtgaaacaagtagcatggaactttgtgaatgactggcttaaaacaacattgtgtctacagtataaaccccagtacatagctgctggttccctttatctggctgcaaagcttcacaatatcaagcttcccttgcatggagcgcatgtttggtggcaccaatttgatgttgcaccaaagcctctggaagccgtcattcatcaaatgatggagcttgcggctttgaacaagttgatgcctgctcgacccaatccggttaagctgaaggaaactttatgtgaagctaaactgagcttatctaatagcccagactctgtgttgaatcaatcaagcttgttaataagcagctcaagtcctgatattggcgagcccagtgacaaagtgcaggtggattcctgccaatacttgataagcagtcacatgggtgattgtagggtctcaggtcctgacagcagttcgttgaatacttgtgctaatagaaatgtctcttgtaaagcacatgatgaagagagcttggatcaggccttaataatcaaacatgacagtgggatgatgccttctagtaatcagacatcattatatgctactgtaggcactgagggcagtgctgaactgaagcaggatgtaagccattgtaatgacttcaatatcagagtcaatgacgaaagcttgaaccaggtgttaagaaatcagcatggtgatgctatcccattacctgacgtggtatcgctggatgccaaggtggacaaggaaaggagttgctgtgtggaaccattaattgcaaactctgattgttgtactgacagtgttaatgtggatagcttgtgcactgatcacagatcggctgatgctgcttcaggccccacagctgatgcaccatccatgctgggcgaagaagaattttattctttta

SEQ ID NO: 276176 - DNA, 454 bp, Zea mays
gcacgcgtccgggacctggagcagctctagtcctgatattggcggggccagtgaccaagtgcaggtgagattcgtgtcaatacttgataagcagccatacgggtgattgtagggtctcatgtcctgacaacagttcgttggatacttctggtaaagctcatgatgaagagagattggatcaggccttaataaccaagcatgacagtgggatgatgccttctactagtaaccagacatcattagatgctactgtaggcactgagagcagtgctgaatatatgaagcaggatgtaagccattgcgatgacttcaatatcagagtcaatgaccaaagcttgaaccaggcgttaagaaatcagcatggtgatgctgtcccattacctgacatgggatcactagatgctaaagttgacaaggaaagtaattggtgtttggaaacattgattgcaaactt

SEQ ID NO: 276177 - DNA, 421 bp, Zea mays
  unsure (1)..(421): unsure at all n locations
gcgtatgattgagaccagcaagcaacatagattgtagaatccattagcaacaatagagcaacgatggcgaccaagatattttcccttcttatgcttcttgctctttctacatggggtgctaacgcgacaattttccctcaatgctcacaagctcctatagcttcccttcttgccccataccttgcatcaattattgcttcagcatgtgaaaacccagctcttcaaccatattggcttcaacaagcaatcgcagcaagcaacatacctttatcggccttggtgcttcaacaatcaccagccctatctttggtgcagtcattggtacaaaccatcagggggcaacagctgcagcaactagtgctacctgtgatcaaccaagtagctctgggaaacctttctncctactttcagtaccaacaat

SEQ ID NO: 276178 - DNA, 1480 bp, Zea mays
aattgtgcaggttaggagagggtatctgcctaaagattttgttgttccaaagtctccagaaagaatattgttttgtggttggcgccgtgatatagaagatatgataatggtacttgatgctttccttgcgccaggatcagagttgtggatgtttaatgacgtccctgaggttgacagagaaagaaagctaattgatggaggtttggacttcagtcgcctcgataatattactttggtgcatcgtgagggaaatgctgttattcgccgtcacttggagagccttcctttagaatcattcgattctatcctgattttggcagatgaatctgtagaagattcagcaatccaagctgactcaaggtcacttgcaactttgctgctgataagagatattcaggcaaaacgtcttccatgcaaggaatcattgatttcacatgttccccgagggaccttttctgaaggttcttggataggggagatgcaacaagcatctgataaatctgtcataatcagtgaaattttggaccccaggacaaaaaatttgttgtcagtgtcaaaaattagtgactacgttctttcaaatgaattagtgagcatggcattggcaatggtcgccgaagatcggcagataaataatgtcttggaggagctcttcgctgaacaaggaaatgaaatgcaaatacgaccttctgatatgtaccttagagaagaagaggaattaaatttctttgaggtcattctgcgagctaggcagaggaaagagattgtcattgggtaccgtcttgaggcagctgagcgtgccataatcaatccaatagacaaagtttcaaggcgaaggtggtcacccaaggatgtttttgttgttatatccgagaaagaatgaggtttatcagatcacagttgacacaaaagcaagctcctgaccagtgaccacacctaatgaagaacaggcagctgcgccgcagcacacacacacacaccgaccagcgcagagagctatttgattcagatgcgcatttggctgattcagatgcgcatttggcagaaggcaatcgctgagcgcgaaggagtaaaagcatgatcagatattcagatcttggatcagtctagactgacaccttaggtcgccctttacaaatatgacttaaaaaggatgtgaacagagtagtacagcacatgctttggaagtttggatattcttgtccgtgtaacttcccacatgaacaacgagcaaagcatctcctgcatatgcatcaattaatggcttaaagctattgagtgctgatactgagcagttttccagtgagcctgttacacccttcctggctatagagcgtaaacgacaacgacagttcagcattctgtacattgcataggcgcattctgttgccagtccatgtaaacaacatgagatgtcggccagtccatgtaaatatgtaatctggaagatcatctgtaggtactgttgcggtgttggatc

SEQ ID NO: 276179 - DNA, 449 bp, Zea mays
cagctgctccgtctctcatttcaaactttaccgtaaatggttcgttctacagtatttccccccgtaagaggtgtatacggtgccagatcactaaccctgttggcgtgcattgacatacaatcaattgcagaacagcacaccgcacgtattttgtgcttttgccgcagaggatcctggggctttgcgccctgcttcagcctacaaagaccccgcgcacccaggctgcgtcctggtccttgctcttatcctatcctgcttttcttcgcttctctcttccccgctctctcattcttctcatacaagtctgttgttggagggacacacgtatccagcccaccaaagatttactcaatttatcccagacgagacacacactcgcaacgaccggaccgtcgaatctcgcgactccggcgacatgtcgacggcggtggcagaggtgcggccgctct

SEQ ID NO: 276180 - DNA, 898 bp, Zea mays
atactcgtccgcccacgcgtccgggagagagtgggccactagaagatgatatggtgctcccagataacgaggaacctactgcattgctgaaagatgtagggcagccacaagcaaatgtggttcctattccaatccccggtgatggcgttgggcactgttccgaagaaaaacatgagggtgcctgctctgagagcaaacgggaggacacacatgctggagccatcagaacggctgatctgttggcctcagaagtcgctgggagctgggcagtggaaacagctccgtctgtcaatggggagaacgaatctccaaggagcttgggcgatgctacagagcacgatgaagctggaggcagcgtggcaggcgatgctttggtaactctggtgaactcagagggccaggcggctgggagccagaacaacgttgagcgtggcagctccaaaataacccatcatcatcgtcatcaccatcgtgttcttagtgccatgattggaattgttgatcctgagttcaggaagcaaatgtccggcagaagcggagttggaaacgaggaacccatgtctgacgccgagacgggtgagggcatcgaggaaggcgattcagattcaggttcagacggcagtgacagcgaggaggctatggttgaggattctgtcgtttagcttaaacagaagtgactgctcactgtaaatatacctcaattcgttttgtgtacctttcgttgtatcatcatgcgtagcgtaagcccctcgtgtgcgtttgattattttattcgttaagtgtcctcagcagctcgtggtgcatgttgtacgaaatcgaggccttttggtcttcaacacaaataaatatatgtactcacttggtttacaattataaaacgttttggtttttttaaaga

SEQ ID NO: 276181 - DNA, 1144 bp, Zea mays
gaagtctacttccattcctctccttcctaaccccgcgtcgcccacgagctcgccgtgccggcagaggcgaggacctcgccgaagcagaggccatggggccaccgcagccagccaggcccggcgtcatcaacatcgaggcctgcgcgcggccgatcgccgtcgaccaccgcatcagcctcccctactacttccgcatcgcgggcagcctcctccgacaggctaatatatatcggaacgagagtaacttgctcgacctgtatgtcatccttctgagatactcgagcttgctgtgcgagacgattccgaagcatcgtgattaccatgccttttagttaagagaaaaggcattttttgataaacttattgatattatcaaagagcttgagacattgaagccagttgtgcagcggcaggttgttgagcataacagaggaagtactgtggaatttaatactaatagtctaaatggaaactacggtacaactcgtaggatagagcagtgtactccaagctcttatactccacagacatttgtaggcagcagtaatggagcattgcaaaaacccttccatgctgggagacaagtggcatcattatcgagtgtacaggaacaatttatgaatctaccatatccaaaagaagaaacactagctagacactccatattaggacctaatggtcttaatggccggtggaatgggcctgttactggaattaaggttcagtatccaagcaattttgaattaacacaaaacgatataacaagtttagtgccatccatcttgaaccaagatgatccgcaaggtcccagtactgcacctccacctccagatagcccctccaatgacaatgacgatatgaaatctgttctctctcttgatgatggtcgatggtctgtatcagcagacgaacacacttcatttacttctgctaatttggaagaagagttgttacagttgaatatcaaacaaccttctcctccaccagttctggcagaggtacatccaccaatttctccatcaagagttgctgatccaacaccaggacttccgacctcgggaactgcccgttttcagaacttgcatgttccgatcaagttgatggattgtttactaagggttgccgagtcaaacaccaaaagaag

SEQ ID NO: 276182 - DNA, 605 bp, Zea mays
cccacgcgtccgcccacgcgtccgagccaacgtgatcagagagggatatatagctagctagctagcatagcatggcgcttgtagccgacgacgacgccgagctcaaggccaaggccaaggccaaggccgaggtctactacggcgacgaggcctgtcagctgtgcgcgcactcctgctgagggaagcaggcctccccaacggcctgctgccgctggaggacctgacggagtgcggctacgtccaggagaccgggtacgtgtggctgaagcagggcaggagggtcgaccacgtcttccggagcctcggacgcctcgtctcctacggcgccgagatcaccgggtacgccgagaagggccggatcaggaaggtgaaggggataaagaccagggagctcatgctgtgggtgcccgtcgaggagatcgccgctcttggcgacccggcggctggcgggaagcttgtctgcaagagcgttgctgggatcaccaggaccttccctgcgtctgccttccatgtccctgagaaggcggcggcggcggaggaggtgaaggtggactgtgccagggcgccgcccgccacaccggtgctcgtcctcatggacagatcag

SEQ ID NO: 276183 - DNA, 399 bp, Zea mays
  unsure (1)..(399): unsure at all n locations
ggtgatagtaaatgatcaatggggagacagccggctgtgacaggagggggtgaagcgagggccatggacagcggaggaggacaagaagctcattagcttcatcctgacacatggccggtgctgctggcgggcagtgcctaaactcgcagggctgcttcgttgcggcaagagctgccgtctgcggtggactaactatcttcgccctgacctcaagcgtggcctcctcagcactgccgaggagcagcttgtcattgacctccatgccaagctcggaaatagatggtcccagattgctgccaagttgcctgngagaacagacaacgagatcaagaaccactggaacacgcacatcaagaagaagcttgtcaagatgggtgtcgacccggccacacacgagcc

SEQ ID NO: 276184 - DNA, 364 bp, Zea mays
  unsure (1)..(364): unsure at all n locations
cgcacaagcagggacaaggaagtgcaccggcggcgtcgccatcgatcgagtagatactagatagtgtgtcaggctgctgtcagctagagccatggcgtccatgcagaagagccgcgagcagcgcgcccaggccgcggcgcagaaggcggccgacgagctccacgcgtcgaggcaggacagagtccccgaggaggcgcccgtcagcccccgcggcggcggcggcatcctgggcagcctgcaggaggggaaggcgaacgccaggggcgtggcggacgccgccatgggcaaggccagcgagacgaaggacgcggcggcggacaaggcgggtggcgtcagggaccgcgcngcggacaggacggggaat

SEQ ID NO: 276185 - DNA, 531 bp, Zea mays
gatgggtcccacctcccttgtcgtccaacagaagccctgaacgtgaaaaggaatctacatttgctgctggtagaagcaggcgtgttgaagtggagcgtacattgactgactcacagcgtgatgaatttgaggacatgctgcgagctttgacattagagaggagccaaataaaagacgccatgggatttgccttggataatgctgatgcagctggcgagattgttgaggttcttacagaatccttgacactcaaggagacgtctattccaacaaaggttgctcggcttatgctagtgtctgacatccttcataacagtagcgctcctgtgaagaacgcatctgcattccgaacgaagtttgaagcttctttgccagatgttatggagagctttaatgacttgtatcgcagtatcactgggaggattactgctgaagcccttgaaggagagggttatgatagttctacaagtttgtgcagactggttcctggtttctgatgcatttcttaatgggctgagggctacttttctt

SEQ ID NO: 276186 - DNA, 631 bp, Zea mays
gacctttacagcagctaaacttacaagatatctccgatggttaggtcatgaaacaaaacacttcaatgttggaaagtaccgccggctcaagcatggaactaatcagactgctgatttctttcgtggagataacagggagggtgtggaggcacgtaacgaggtggctgcattagcaatggaagatatgctatcttggatgcaggagggtggtcaggttggtattttcgatgccacaaacagcacaagaatacggaggaacatgctgatgaaaatggctgtaggaaaatgtaagatcatctttttggaaacattatgtaatgaccaagatgttcttgagagaaatatacgattgaaagttcaacaaagtcctgattatgcagagcaaacagattttgaagctggtgtacaagatttcaaagagcgattgacctattatgaaaaggtctatgaaccggtggaagaaggttcttacataaaaatgattgacatggttagtgggaaggggggccaactaaagattaatgacataagtggttacttgcctggacggatcgttttcttcttggctaactgtcatctgacacctcgtcctatactgctaacaagacatggtgaaagtatggataatgtc

SEQ ID NO: 276187 - DNA, 471 bp, Zea mays
cggctctactcgcttctcttgttcctttcttctctctgggctcacctaccggatcatcctccatggccaccctcgccttgccgccgaccaccaaagctgccggccaggacgccacccaggaaaaaagcctagcagagaatcctgccaaggacgccgcagatccgggcggcatggagtccgagtgggttcttctcggaaaatcggacatcgtcccggcagatgtggctgccgccgccgccgccgcggggcaccaccgcctcaacttctcgccgctgccgatgatccctatctgggtgcagatggttctcgggggcgtggtttacacggctgtgccgttctacaagagggtgctgaaggtcgaaggtgaaacgttggccaatgtagaaactgcagtggaggtcgtggagcatgtcgccgaggtgacggagaagttggctgcagatgcggccagttccctgccagagaacggat

SEQ ID NO: 276188 - DNA, 445 bp, Zea mays
  unsure (1)..(445): unsure at all n locations
caacgtgccaaaccaccagatgcgaaacactctcccggacataatgcagcaagagtctctcggacggctgcagggtttggacattgggaaggggcctctggttgtcaagtcagagagcagctcgatctctgctagtgaaagcagcagcaccttctaacgaggcctacaagtgaaaacccaccgtttcagtaggttccattgttcatagtagcctgacatccttgtgctgcttcctgctctgtaagcccatttgttatttaattcattcatttagttgaaattatacgctgtcgcactggctgatcaatcatgttgtagaatggtccaggaacccttcaattatgtttgttttgggctcgtttcctggttctgtgactggtatcatcaaggcatttgggttttggagtgaaattctctaatggtactttntgtgtgttttaactat

SEQ ID NO: 276189 - DNA, 386 bp, Zea mays
  unsure (1)..(386): unsure at all n locations
gcgagaagcgcctgccctaccggtgtccgttcccgcggtcacgctccgtcgtttcgagcgcggcgacctcgacgcgatgctggagtgggcgtcggaccccgaggtgacggcgttcatggcgtgggacgcctgcacgtcccgggacgccctcctggcgttcctgcgcgacgcggtgctgccgcacccgtggttccgcgccgtctgcctcggcggcggccgacactgccgccccgtgggcgcggtgtccgtgacgcccaccgtcgacgcctgccgcgccgagctccgcgtcgtgctggcgcgcgcgcaccgggggaagggtgtggccacagcggcggcgaagcgcgcggtctccgcggcgttcggcgacctcnccggcgtggagcgcg

SEQ ID NO: 276190 - DNA, 1298 bp, Zea mays
agagaatgaagtcagtgtttctgaaaaggaattgcttgatgagattactgaattggaaaagcaaagagatgagcttgaggcacagctgaagaaggttaatatatcactaaatgctgctgctggacggctcaaacaaactagggaagagagggaccaatttgacgaagcaaacaatcaaatcatatttagcttgaaaaaaaaggaggatgacctctcaaaatccattgccttatgtaatgtggaatccaatgttgtcaagatctggatcggtttccttgaggactcgtggaagctgcagtcctcatacaatgaacagaaggataataaaacgtgtgatgagctggagaaatgtgtgagtgattttctaaagttgacaaaacatcatctttcagcattcaaggaagtcctaagccaattgattgagaatatcgaaacatatgtcggtaacttggctgtcttaacctcaagggaagaggaaaaagaacatggggatgatgaggcatctgagaggacagatccacgtaaatcccttgaagaggaatatctagaaacagaaaagaagattataattgcgttcagcatagttgatcacataaagaaattgttttattctgggcaaggcgctgattcaaggagagatgacccagaggtcaagagcttaattgaggagattgagaaaatgagggaatcgttcgagtctatagaaaggccaacactaagcatagaatctgagaaagcaaaaccactacctgttgagggatcgaaactgagtccttcacctcttcaggctcctgctaccccaaaagctgcacacgttgactcaccaaaatctcccatgaaacctgagcagcatttcgattcagatgcggagcttgcaaccctgggatcagagatcgggaaagaagacaaagagtactcagttgaggagataagcgggtgggagtttgacgagctcgaagaggaccttaagagctgacacaaagaatcgacaaacagaacacaattcgatttggttatcttcactgacatgtattatttgtctgggccttgcgtgggcaagaaatacacactggttgatatgtacatagtgctgtttgattgtgtattgtcgcgcactcgcgctgtcaatttgtcactgtcttaagatatacggactgagctggtgtaacttgggcgaggcatttgctatttgtttgctcttgccgcgaatatttttatcttacatgtataccgaaccctgttgtaacagttgtaaacccggaaaccaaaattcgaacatttggcagaatttgctccgt

SEQ ID NO: 276191 - DNA, 656 bp, Zea mays
tcggctcgagctcatcctgacaccgaggatatatacgtagtgctgcatggattatgcagaagagctaaggttgaaggttatgctccattgactgaactagtaacaaaagatgtctccgaagaggaaagagaagaaaaccttaccttccatagtgagaagctagcagtggcttatagtgtcctgaagactggtccagggacagaaataatggtttcaaagaatttgcagatttgcagtgactgtcatgaatggatgaagataatctcaaaggtactttgccgtgttattattctgagggatagagttcggtttcaccggtttgaaagtggatggtgctcctgcaaggattactggtaggcctttcctggagcaatacagatgtgatccagctaatacaaaacgagcagttcctaggggatacatctgacctaattactttctccatctggagaatttggtgctggttctgctgctgcatagcaatgaaatgaaatatttggacatttggttactagtttagctctttggcacagcacagggaaccaaggaaaggactagatgaccgacacatgcacgtgtattgtacactccaaagcaatgcaagtgattagtgagaaaaatcaagagatcaaaatccccccgttggatttgtgttt

SEQ ID NO: 276192 - DNA, 669 bp, Zea mays
cccacgcgtccgaagatacttcaaggagcttgtgaatagaagcatgatccagccgatagagggcgtatatgatccgtttgtacaagagttccgtattcacgacattgtgtttgacctcatctgtaagttgtccaaggatgaagacttcattacccttagcgggcaacattcatctcaggatagtttaaggagagagaagaaaacaggtgtgcctcgctcagactgcaagctacgtcggctggccgtccgaaatcaacgtgtgcagcgcttccctgaagaaaccatggacatgccagaggtgttgaggtcacttagcattatagattgtaatattgcggttatggccccaattgatagcttcagggtttgccgtgtgctgcgtctgcggaagagctacatacccatcagcctaaagcatctggggaagctgttgcatctcaagttcctagagatatttaacacgcctattgatgagctccctaaggaaattgggcatctgaggtctcttcagacactgatattagtccgtactggactaggcgagctgccaccggctgtttgctcgcttacacggctgatgtgcctgatagccctggggttcgaaaggttgccagctgacaggatggggaacctaacgtccctggaggagctacgactacattgggttgt

SEQ ID NO: 276193 - DNA, 764 bp, Zea mays
ttctaccccagaccgctgcttccattccatctcccttctcgcgccttctgcggcactgcagtgctctgctgcctcggcgtctccacctcctcccggcgacggcagggcatccgatacgacgccgcgcttccttccgaatcccaagccgcaccccgcaccctcccggtcgccattcccgatgctggtgttctcgagcgacgacgactgctgcggctcctcgtactaggggggcaggatcgatcggcagactcgcagaactataggatatcacagaacagttcttgaggtacttattgcagcctaatagtacatggagcgatattcagatatgagaccaaaggcagaagtttcatatctcggaaggggttccagattctcttctagaaatcaaagttcagaagagaggactaaccatagcagcgataaaccgggaagcagcacaagattcaatcctacgaaagcgagaattggcggtaatcaagggaggccaagatatgtatgcgattcatttaaatctccaagctcaaaggtgtcgcctgcaggctcttccaaatttccacttagcaagtttgaggagaggcgaagacagccttttgtgccagggtttgacattgctgaaagtagtagaagaaaggctgatgccaagcagctacagggtagtaagaaaattgctgcagagaacgacagttcagacaatctgcgaggtgaatcagaaggttttactactgaacaagtagtaaaaccagaaggctctcatgttgtcg

SEQ ID NO: 276194 - DNA, 1001 bp, Zea mays
aattaattcacaaaagctgagaagacggggggtcacacatcatacttctttcgccatggcaatggaaaacaactacgcatgcccaccacccagcaagggaaacctgatcacagtcttgagcatcgatggtggtggggtcaagggcgtcatccctgctaccttccttgcattccttgagtctaaactgcaggtaaactctacacgctcattggtccttgagcctaaatgcatatatacatgcaagtttgagtgccatttattcgttggtgttcttctacattttcctaggagcttgatgggagcagcgcgcgcatagctaactactttgatgtcatcgctggcacaagcacaggtggtcttattgctgcaatgctggcagctccgtcgctgagcaatgccaagcaaccatgctatgaggccaaggacatcgtgccattctacctcgagcacagtcctcgcatcttcccatgcagaactgggattttgggctggttcttcaagatcctacaaacagttaaggtgatgatcaggccaaaatatgacgggaagtacctgcacatagtgaccagtgatctgctgggtggtaccagagtggaagagacgctgacaaatgtcgtcattcctactttcgatgtcaagtgcgtaaagccaacaatattcagcacattcaaggcaagatctagtgccttgatgaatgctcgtcttgctgatgtgtgcattggcacgtccgcagcaccgacggtcctccctgcgcactactttgaaaccgtggatcaccgcactggcgcatcgcgtagcttcaacgttatcgacgggggcctcgccgcaaacaatccggcgctggtggattgcttgcttggttatagtagtagttatttttctttcttctggctgggttttgacgactagcatgaaatcatgtgcgtatgttgctatgatctttttgtccctgtccctgtcctgtcctgtgatctgacagactctggtggcgattggtgaga

SEQ ID NO: 276195 - DNA, 257 bp, Zea mays
gacggggggtcacacatcatacttcttttgccattgcaatggaaaacaactacgcatgcccaccacccagcaagggaaacctgatcacagtcttgagcatcgatggtggtggggtcaagggcgtcatccctgctaccttccttgcattccttgagtctaaactccaggagcttgatgggagcagcgcgcgctcagctaactactttgatgtcatcgctggcacaagcacaggtggtcttattgctgcaatgctggca

SEQ ID NO: 276196 - DNA, 650 bp, Zea mays
atcgcgagccgctgcccttttttttttttttttttttttttttttttttgcagatcggcaaagccatagtgtgttccgacgcagcggcggaggcggctcgctacggcttcactgcagtggaccgtccggaagggtacctggtcctggcggtggcctctctgggagaagagatcgaggaagtcaccggaacaccaggggaccaggaggcacgagtcctggaagagaagaaggtgggcgtgaaaggcgtcgggaggaagacgaccgacgagtcggagcacttcagctggagggacggcgtcaaggtcccctgcggcaagctggtgccgtcggcgaacaaggacggcccgctcgagtacaacgagtacgccgtgtacgaccccaagcaggtgagcatctgcttcctggtcggggtgaagtacgaggagcagaacatggaggtggtgccgccggacgaccagtgaaggagtcgtctcgtggagtgtcctagggcagggcagggcaggccaggccaggaggtggtgggacccattttggttagtggaatcggtagacgcgagccttggccgtcgggtggaataggaacgtgtagtgttccagcacatcctgggctgcctaccgacatgtggatttgtgtccagtgccgtatctgt

SEQ ID NO: 276197 - DNA, 463 bp, Zea mays
gcttcgagcagatcgccgacaacgtagcatcaggtttcgagacagtgcgcgatataaacgacgcgtctcgtctcatcggggatgcgttccgctcgacactactggatgacccactctctgaatgctacaagaagctcggttgttgtatcagtgctgtcgccgagggctcggaagactacaagatggttctcaagtacctggagaagacgtacgagcctgtcgaggtggaggatgtggtctatggtgtgtctgtcgagaggatatatgctgttgaatccagcgcattccctttgtacgaggaaatcaggaacctgccaaacaaaatccttctctggtgtgggactagaagctcgaacttgcttaggcacctccacaaagggttcctgcctgccgtctgccatctgcctgtgccagggtacatgttcggcaaagccatagtgtgttccgacgcagcggcggaggc

SEQ ID NO: 276198 - DNA, 477 bp, Zea mays
ctttatatgttttttgaatggacagagagttggatgaaaaggttcgtgatgcacttcatctttacattgaagcccgcggcataaatgagaagctcttccgttttctccaagcttggctttatgtaaaggatcaccgcaatcttgtacgctggttcaagagcgttggttcattcatcagtgaccaaagccaaagcaagatgtcaagaaccccgcgctgaagatgatcatctgaaaggcggtcgtggagcagttttctccaggatggataattgtcctaggataaagtgaattatatgcaaagtcgcgccagcgaggagttttggtttatctttagtttttattcgccggggaatcagtggtctggtggctgaattaggtatcattagtccttgtgatctgctaccctatcatgctgaggtgcttgtcagattctcaattattcaaacttcacattttccatcgaagaatgcataaaaa

SEQ ID NO: 276199 - DNA, 822 bp, Zea mays
agcatattcccgtggcccgcccccttacgctttgcttgccggggcgcccaaggtggaaagaagacggcgaccatggcgaagcagcagaatcctatccccatcccgatgccgctgtcgctgtcgctgcccctcgtcctcgtcgcgctgctcctgccggccgcccgcggcgccgcggagacgccgcagtacacgacggtgcacgcggagtcggacttcgaggtgcggctgtacggcgacaccgtctggatgtccgcccccaccccggacatcccttccttccacgtcgccaccaagctcggcttccacagattgttccagtacctgatgggcgcaaacctcaactcttcgaggatcaggatgaccacccctgtgctcacgagtgtggttccaggtgcagggcctctgcgctcctcggcctactccgtccggctgtacctgccggcgaagttccaggcttcccctccggttcctctcccggagctgaacctgcatccagatcggtggccaggccactgcgtcgcagcgaggtagcttctcgggtcgtgcacgggacaagaacgtggtcgaggaagccgagaagctcgccatgagcctgagccggtcaccatgggctaactccacagactactccagcaagagcgcttactcggttgcacagtacagcagtccattccgcatcattggccgtgtcaatgaggtgtggttcgacgtcaactgcagatctacatctactgctgctggtggtgagtcctactgaaaaaaaaacctgccagatgtgatggataataataatttgcatgtaaacacaagctgtgctgcttt

SEQ ID NO: 276200 - DNA, 663 bp, Zea mays
gtctgagtcatccagaggtgtgcaagaaaactgccagtttaattggtgtgcaaggaggctgggagtttattggggtttaatggttttgttggttatgtgaataagtttaatgtgataattttaatgcagcattaggttcagcttacttccattgaatcaacacccctgccactacttattaactggcttgtgtgattagagcaatcctatccaacattgtcaactgacttgtgtggtttaattctataaactatgagtatggattttccttagattagaaaaaaaggtgaatcatttcttagtccactgtctgtcatacacagtgctagagagtagagagtagagacactgtctgtcatacgcactgttcattatgtatgtgaattcgccaggagggtcaatgacagcttgtaataccttatctaacatagtatgtttgtgttagttgcttcaattagtgctaataggattttgccgttgttctagttaggagatggctatatgttgtgaacataaaaattagtaatctggagagggatttacaatattgtactattttaacctagacgagcaaaactgaagctaaagtgttctactcgtttagtgcttttatctaacctattttactaatcattctggtttcttatggttatagcaaagttt

SEQ ID NO: 276201 - DNA, 829 bp, Zea mays
tgttcatcgcctcattacgcccatccacgtgctcgcctcgccccatcgcggacctttcctcggcggcgtcgccatctcatcggcggcgggcgtgcggccggtggccggagcccttaggcgatggcgacctcgtctgtggcggcggacatggagctggaccgcccaaacctggaggactacctcccgcccgactcgctcccgcaggaggcgccccggaatctccatctgcgcgatctgctggacatctcgccggtgctcaccgaggcagcgggtgccattgtcgatgactccttcacacgttgctttaagtcgaattctccagagccatggaattggaacatatatctgttccccttatggtgctttggtgtagtaataagatatggaatactcttcccactgaggtccttaacgcttgcaataggatggttagcattttttgctgccttttttcctgtccatttcctattgaaagggcaagacatgttgagatgtaaaattgagaggaagttggttgaaatgatgtgcagtgtttttgttgcttcatggactggagttatcaagtatcatggaccacgcccaagcacacgacctcatcaggtattcgttgcaaaccatacatcaatgatagatttcattattctggagcaaatgacagcatttgctgtcatcatgcagaagcatcctggatgggttggatttattcagaagactatcttggaaagtgtcggatgcatctggtttaatcgtaatgatctccgggaccgtgaagttacagcacggtagttacgcgatcatgtttaacaaccagacaacaatcctcttgtga

SEQ ID NO: 276202 - DNA, 353 bp, Zea mays
cgaacgtacgcgcctcattacgcccatccacgtgctcgcctctccccatcgcataattttcctcggcggcgtcgccatctcaccggcggcgggcctgcggccggcaaccggaggcgatggcgagctcgtctgtggcggcggacatggagctggaccgccccaacctggaggactacctcccgcccgactcgctcccgcaggaggcgcccaggaatctccatctgcgcgatctgcttgacatctcgccggtgctaaccgaggcagcgggtgccatagtcgatgattcattcacgcgttgctttaagtccaattctccagaactcatggaactgggacatgtatttggtcccttt

SEQ ID NO: 276203 - DNA, 633 bp, Zea mays
agtttcttttcttttccttctccccccgcccgcggaatcaagactcgacagctccaggttggccatcgcccacccatcgtcgccagcacggaagaggcaactcgctaggcggcggcggagaactggccacgacgcgtccccggaagggccggttgcttgactgatcctcttcttgggcggcacggtgtcctgtgccgtgccgcgtgaaagattccaccggcatccccaatccccatggcctaccgccggaagcagggagtcgccgccgccgatcaccggagctcctatccccaggactccgcctcgtcccacggctacacgtcgttcaaaagcatagatgagcccaagctcgggctgtggcgaactctggctaccaaagccaaggggatcctcgacgaggacgggttggcgcataagttcgaagacttgcggaaagaacggcctcgtagcgacgccacggcatccagcatagatcaggctcctaactctcgctggtcatttgagaaccactggaaggccggagacgccatgtcacggatcagacccgaggctctttctgcttctgccaaccagctcagtggaaaaatgaagaatgctttggcagaagggctcacgatcgtggataacaagacc

SEQ ID NO: 276204 - DNA, 681 bp, Zea mays
  unsure (1)..(681): unsure at all n locations
cggacacgtccgcccacgcgtccgaaataacattgatcaaaagcaatatgttcaggcacagaggggccttcaagaagcacccagtacatctgtggattccactgctcaaactggtcatccaggcataggtgatttgcaagaggagttatatcaaatgattaagagtttaaaggaccaatactttgtggaattgaatgaattgtacaataaggtatctatcaagatacaacagattgacaaccaaatgcctgctcaaaagtcagcagagcagtatgaaaagatgaagggctttaaaggaatgctggagcgcactttgcatttcctgcaagttaacaagagcaacattcatccaggtttgagggaaaaaatccccatttacgagaggcaaattctcagtatcctaagttcacaaagaaggaaacctgtgcaggcacctgggcagcaaacgtttcagcaatctagtgggcaagctcctagctctaacatttcacagcagcttcagacttcccaaggtttgcagcagcatgatagtcatactagtcagatgcctcaagcaagtttaccaagtatgaacacaggagtacaaacctctggagcacctgcgcctcaggaacaaactttggtgttccacaacacacnaaatgtcacaaatgcccacagctggctctatttggagaatgc

SEQ ID NO: 276205 - DNA, 303 bp, Zea mays
gaccgtcgaaactagtatggatcagtatacagagtaaggtaatgggaattacatctatctaatacactattagagacatattatttagcatagattatcacacgaggaccattcgtgtacatgcctatctcacacacatgatacgtcacacgtacgggcacatcccggcggcagccgctcactggtactgtccgccggtgccgtgcgcctgcaagaagtcgctgccgacaagcgggttgtgctcggctctgggccgagccgtgccagtgcccttagcgactggactggtcttgcctacaccgg

SEQ ID NO: 276206 - DNA, 624 bp, Zea mays
ggggggcacctttccggattccccgggacgtttccacgcgaccgtctcatactcatgaagaaactcgccaaatatagggactacttaagcaaacaaaaccactttttgccgcagatattgctctcctactgcaaagaaatgaggctcttcgggttgctttcatacacgaagaggaaatcatatcaagggatggtaaggctacaacaagagagtattattccaagcttgtgaaggctgatgttcatggcaaagaccaagaaatatactgcattaaattgcctgggaaccccaagcttggtgaaggcaaacctgagaaccaaaaccatgccataatcttcactcgaggagatgcagttcagacgatcgatatgaatcaggataactacttggaggaagcaatgaaaatgagaaatttacttgaagaatttcataatgctcatggaaaacatggcatacggaagcccacaatcctaggtgtgagggagcatgtattcacggggagtgcctcttcgctggcgtcatttatgtccaaacaggagactagttttgttactttggggcaacgtgttcttgcttacctcaaattcgaatgcactatggacattctgatgtttttgatcggat

SEQ ID NO: 276207 - DNA, 481 bp, Zea mays
tgggggtattgaagatggaaattctgcatcagaatatattgacactcaaggctatgagttatcgcctgatgcacgggcccaagcagatataaaatttacttatgttgtttcttgccaaatatatggactacagaagcaaacaaaaaaacaagaggctgcagatattgctctcctactgcaaagaaatgaggctcttcgggttgctttcatacacgaagaggaaatcatatcaagggatggtaaggctacaacaagagagtattattccaagcttgtgaaggctgatgttcatggcaaagaccaagaaatatactgcattaaattgcctgggaaccccaagcttggtgaaggcaaacctgagaaccaaaaccatgccataatctttactcgaggagatgcagttcagacgatcgatatgaatcaggataactacttggaggaagcaaatgaaatgagaaatttacttgaagaaatttataat

SEQ ID NO: 276208 - DNA, 498 bp, Zea mays
cccacgcgtccggcgacttttttttcaagaagacaggagaagggagttgtagtgagttttaagaatggcgagtgcacaggcagtggggcaaggagaacgaggccacttcgttctgaagagcggacacaccattccggccgttggtctaggcacttggagggccggctcagataccgctcactctgttcggaccgccatcgccgaggctggatataggcacgtggacacagctgcccaatacggagtagagaaagaggtcggtagaggacttaaagctgcgatggagggcgggatcaacaggaaagatttgtttgtgacgtcgaagctatggtgcaccgagctggctcctgatagggttcggccagcactcgagaaaacactcaaggacttgcagctggattacctggatctctaccttatccactggcccttcaggctgaaagacggggcgcacatgcccccggaagccggggaggtgctggagttcgatatggaagg

SEQ ID NO: 276209 - DNA, 1002 bp, Zea mays
tggagattgaaatcattgataaattaatctccattccgtacgtcgaaatgacattgagattgatggagcgttttggtgtgaaagcagagcattctgatagctgggacagattctacattaagggaggtcaaaaatacaagtcccctaaaaatgcctatgttgaaggtgatgcctcaagcgcaagctatttcttggctggtgctgcaattactggagggactgtgactgtggaaggttgtggcaccaccagtttgcagggtgatgtgaagtttgctgaggtactggagatgatgggagcgaaggttacatggaccgagactagcgtaactgttactggcccaccgcgggagccatttgggaggaaacacctcaaggcgattgatgtcaacatgaacaagatgcctgatgtcgccatgactcttgctgtggttgccctctttgccgatggcccgacagccatcagagacgtggcttcctggagagtaaaggagaccgagaggatggttgcgatccggacggagctaaccaagctgggagcatctgttgaggaagggccggactactgcatcatcacgccgccggagaagctgaacgtgacggcgatcgacacgtacgacgaccacaggatggccatggccttctcccttgccgcctgtgccgaggtccccgtcaccatccgggaccctgggtgcacccggaagaccttccccgactacttcgatgtgctgagcactttcgtcaagaattaataaagcgtgcgatactaccacgcagcttgattgaagtgataggcttgtgctgaggaaatacatttcttttgttctgtttttctctttcacgggattaagttttgagtctgtaacgttagttgtttgtagcaagtttctatttcggatcttaagtttgtgcactgtaagccaaatttcatttcaagagtggttcgttggaataataagaataataaattacgtttcaaaaaaaaaacaaggggcgaccgcgatc

SEQ ID NO: 276210 - DNA, 803 bp, Zea mays
cggacgcgtgggcggacgcgtgtgggacgagcccacgggcagaacccgcgcagaaaagcaaccacctccctccgcctcccccgcagggctgggccgcaccgcatcaccctcgccctcgcgagatccccaattcgccgcaggttcctcgccggagcgagcggcccccattgtggcgtggggctgccggttccgcggccaacagtccccctcctccctgctgctggagctgccttgagtcccgcgactcgactcgagctctgctgccgtggaggcggccaaggccaaggcgcgcgcattgcgagggtttttgctacctctcggattcaagggtattttatagatgacgaaggcagcaactatttatgggagcaagacacagagcgatgccttgcggccagggccattgcgtccagcaaatattatcagaaataaatttcccacatacaagaatggttcaaatggtatagtaatcaagctggctgatggtcccgaaataccacctctcaaggagatagttgcaaaggagactgcagatctacttgatcgtagtcagcgtctctctgtccgtgaacttgcgatgaagtttgagaagggtctcagcactgccacattgctgtcgaatgaggttaaatggagacaagtagctttgatggagcgggatatccttttgaagaatctaaagagtgtattatagtcactgagaggtcaggtgacaggcaaaactaacgatgaaatccaggagtctatatctatggtggagatccttacggttcagctctgcaaaagagaatctgagttggttc

SEQ ID NO: 276211 - DNA, 734 bp, Zea mays
agaaaatgctcgactactcaatcaaatagaagtaaatattttaacatctcaggctcatgacaacattaatcttttccatcacataagaaggaatattaatggtcttctacaaagcatgtgccaaattcccggaataatgagcaagatgcccccattgcctatttcggtggatgaaaggctagctagctacatactccctcgtgctcctacggctcaagttcttggcagcagtcatttgaaagaagaacgaagagtatggtaggccactgctagacagggaagcagctcaattttcagcagcagtttgaccaaaaatatctgaagagccatgtgcttgggagtctgcatggagaagcataggtgaaagaacgatctggcttttctgatggtctcaaagctacagaagcaacatgatccaccacttcaccacatggccttaaagaacgctgtctagcttgccttgtcaggatgctctgtattagtgatcaacaaatttgagatagggagagttttccgtaatctgcagttttcctcaccttggttgcacatatcgattctttttgggttttgtcctggtgatcgaggttaacagaagtgtagcgtagaaattgaactttggtatgaataattagcaggaaaagcgtagcctttttgtcagttactacaatggtaaccaacctcctgtgtatctagtattctagttctagtatgatgcatatgcaagcctggttaat

SEQ ID NO: 276212 - DNA, 939 bp, Zea mays
tttcgacttatgcgaccggaaaatggggaccacgccgagaagtccaggatcatcgtgggggttttctacgcttaagagggcaggttccgacggcgaaggcctcgtcaccatcaaagacctaggtgacacggagactgcgctgagggacaagtcaggaccatgcagccttgttcttgagagaccatttgctccttttccaatccatcagttgcatcaaaatgaagattaccacattctatttaacagaggacgagctgctgtggcctcttggaacagtgctgtttggtctacaaagatgaacgaatcttctactggggatggaaaattaggttttgctgtattctccccaaggttgctaagttctcaaggatgggctcttctgtccaatgagaaaggtggactcaatcagagtagcactaaccttgccaatcgcgtaagtgagattgttggtttatattctgatgaagacgatgacaatgctgagtgggcacatggtagctttcctttggaagagtacattaaagcactagaccgtgctaaaggtgaactgtactataatcattcactgggtatgcagtacagcaagatatcagatcatatatttgttgggtcatgtatacaaacagagaaagatgtgacgatgttatcagaaactatgggtattactgctgttctgaatttccaaagtgaaagcgagcgcattaactggggaatcaattctgagataatcaacagttcctgtcgtgagaataacatcttgatggttaactatcctatacgagaggttgattcattggacctaagaaagaagcttcctttttgtgttggtcttctgttgcgtcttataaggaagaactaccgcatatatgtgacttgtaccactggatatgatagatcaccagcatgtgtgatatcatacttacactgggttcaagatac

SEQ ID NO: 276213 - DNA, 433 bp, Zea mays
  unsure (1)..(433): unsure at all n locations
gttctatggtgatgatgacccanaagagcggctgcgcattctaagtgaataccttgaccagtttgtagccaaccctgctcctaatgaatcgaaggtttggccacagaggctattcaaggaacctgtgagggtcgtagagaagtaccctgctggtcaagaaggtgatttgacaaagaaatatatggtgtgcatcaattggcttttgtcagaagagccattagatgtagaaactgagcttgcacttggtttcctggatcatctattgctggggactccagcttcaccacttagaaggattcttcttgaaagtggtttaggagaagctattgtgggaggtggtgttgaggatgagctccttcaaccacaatttagcataggcctgaaaggtgtatcagaggataatattgaaaaagttgaagagttggttatgcaa

SEQ ID NO: 276214 - DNA, 553 bp, Zea mays
cccacgcgtccggggcagatacggttcctagtatatactttggagaatgcaatcttgagcctgcctgaaggccaagaaaaaatggtatggctgattgatttcacaggatggacagtgtcccatgcttcgccgataaagacttgtagagaaactgcaaatatactgcaaaatcattttcctgaaaggctggccattggatttctatttaatccccccaaagtatttgaagctttttataaggtcatcaagattttcctcgatccaaaatcagtcgagaaggtgaacttcgtgtacgagaaggatgaggagagcatgaaggtcatgtacaaatacatcgatccggaagtccttcctgtagagtttggagggaagagcaatgtggtgtacaaccacgaggagtactccgagttaatgagacaagatgacatcaaaacagcaagcttttgggcggttgatgcgaaaactaaccatgctaaccctgccatcaatgggaccttggttcctgaggttgcgccacagtcgtcgcaggcagctaaagctagttgaagagtat

SEQ ID NO: 276215 - DNA, 550 bp, Zea mays
gggttcggctttcctctcgtaacgcgaatcagtgccacccaggcagccatcgccgcggccctcgtgcctctgcatcgcggcgcgccttggtgctccatccacgtaatccctgaggtgcggcacaggcgtggaggtatctcggcagtcggcagggcggctggagttcggtcccagaagagatggcggggggccctgatgtcgcgggcttgatcgaggatgatgcggtctccgtcatcacggagggcttagtggtgtgtgacatatgtggcagtggtagtgcccctcatcttattgcaaactgcgctcggtgcaatgcgcgtgagcacgggtgccgtcgcgacgggttgacgttcctgattccgctcatatggttttgtaatagatgccaacgcaacgccaacagggcacccagatcctaaccaaggttctggagatggtgttgggcgccaaattcccttgaggaaggtagcagctagtgtcgtgtgagaaatgttggcttgtttttgtggttgtgtgtattggcaatcgctggagcctggagctgtgtgta

SEQ ID NO: 276216 - DNA, 620 bp, Zea mays
tacccagctttcgtcacgcgtccgcggacctctcatctcgcagccgcagctagttacagttcagagagaagaaagagaccgagatctcgccgatagctagcatcatggcgtccaaggcgctcctcgtgctaacgctcctgctcgccgccaccttcctcgccgcctccgctaacgagcaagccaaggcggccaaagaggagaagaaggtggaggtccaagactggcacggcggcggcggctacccgggtcacggcggcggcggcggcggcggctacccgcactgccggtggggctgctgcaaccgcgggtaccatggcggctgccggtgctgctcgcaccctgatcagataccagagcccatgtaccgtcctgagctcgtcgaggtccacaactaaatagtatacgggtacgtatgccccgatgggaatgaatgggaagcaagagcacacgcgtagtacgctcgtcgtagtagtcaataaaagtttggttccatcaccgtcatgaaataaaagtaaggaggttgcacgctttgtgtgcgtgcttggaaacgtcgactgtatctcatgcatcgaataaatagatgttaatgaatatcattgggacaactttttacggaacat

SEQ ID NO: 276217 - DNA, 690 bp, Zea mays
tggtctcgtgggtcgcccacgcgtccgcccacgcgtgcgcgcagctagcttttcacgtacacagttgcagttcagagagaagagaaagagaccgagatctcgccgatagctagcatcatggcgtccaaggcgctcctcgtggtagcgctcctgctcgccgccaccttcctcgccgcctccgctaacgagcaagccaaggcggccaaagaggagaataaggcggaggtccaagactggcacggcggcggcggcggctacccgggcggcggcggcggctggcacggcgggggcggcggctacccgcactgccggtggggctgctgcaaccgcgggtaccatggcggctgccggtgctgctcgcaccctgatcagataccagagcccatgtaccgtcctgagctcgtcgaggtccacaactaaacaactaaataacgagctgcgctgctacgtatatatacgtacgtatgcccgaggggaagaacgaagaagcaagagcacacgtagtacgctcgtcgtagtagtagtcaataaaagtttggttccatcaccgtcatgaaataaaaagtaaggaggttgcacgctttgtgtgcgtgcttggaaacgtcgactgtatctcatgtatcgaataaatagattttgtccccgagtttttttcccctaaaaaaaaaaaaaaaaaaaaaaaatataaaa

SEQ ID NO: 276218 - DNA, 635 bp, Zea mays
cccacgcgtccgcccacgcgtccgcccacgcgtccgggggaaagagaccgagatctcgccgatagctagcatcatggcgtccaaggcgctcctcgtggtagcgctcctgctcgccgccaccttcctcgccgcctccgctaacgagcaagcccaggcggccaaagaggagaagaaggcggaggtccaagactggcacggcggcggcggctacccggggcacggcggcggcggcagcggaggctacccggggcacggcggcggcggcggcggcggctacccgcactgccggtggggctgctgcaaccgcgggtaccatggcggctgccggtgctgctcgcaccctgatcagataccagagcccatgtaccgtcctgagctcgtcgaggtccacaactaaatagtaatgagatgcgctgctactatatatacgggtacgtatgcccgatgggaagcagagcacacgcgtagtacgctcgtcctactagtcaatacaagtttggttccatcaccacgtcatgaaataaaagtaacgaggttgcaagcttctctgtgcgtgcctggaaacgtcgactgtatctcatgcatcgaataaatttaatagattatgtccaacacgtagcaaaaatggcgctcgg

SEQ ID NO: 276219 - DNA, 829 bp, Zea mays
gggtcgtcgggcagggcctcggaggaggggtgacggtggcggctccgacgacgccggtcgtgttcaacgggttgggaaaggtggaggcgggtgatctgtcgtcgctgtcgccggtgccgtatccgttcgacactgcgctgaggatgcggaagggacccaccgtcgagaaggtggtggagaggaggcagcgccgcatgatcaagaacagggagtcggccgccaggtcgcgtgcgaggaagcaggcgtacataatggagctggaagctgaggtggcaaaactcaaggaccagaatgaggagttgcagaaaaagcaggttgaaatgctaaagaagcaaaaggatgaggtcctggagcgtatcaacagccaacatggaccaaaggcaaagaagctttgcctgcgccgcaccctgactggcccatggtagcctgctgaagcttgcacaaaattgaccgaagtcaagatcgtcgggccagatgtgcccgtgtgtatatatcagatgaagtcaagagtactgagtaccccgttacccctgtagaccgccgctacttcagagctgccgttcttgttctgtgacgtgggtagtctgcgcctgacagttcgctgtttaggttcggttgcgcgatcctcacatgaacaatgaggcgtgccatctaatttgtttattaactcactcctatctatggtgagataatgcaagtaacctggagtatgtttggttgatttgccgttttgaaaaatatgctgtgagctgtgtggaaaaacagcggtggcccgtgtggaaaatagaagccgtttgatttaaaaaaaaaaaaaaagggcggccgccga

SEQ ID NO: 276220 - DNA, 454 bp, Zea mays
aattaggtggcggagaggaggcagtgccgcatgatcaagaacagggagtcggccgccaggtcgcgtgcgaggaagcaggtggagcctttcttctttcagtggatctgctatgctgtccgttaaccatactgcatctttggcttaattatagtaaaaacttgtcgcaaatggaactccatggtgactatatttggtatgcctctcgattatgttgtactttattcacttgatgtgatctgccacttccagtttagctcttcgatgttaatttagtgctaagtagcctctacaaatagcaagttgccattgtataatactcttatcttatcttcatctaaagaggtatgcctctcgaatctgggaatggagccatggttcagcttgaccatctcagattcagaaaggctgagacactggataagtttgttaatttgggagatggtggtacacattc

SEQ ID NO: 276221 - DNA, 528 bp, Zea mays
cccatttgtccgcccacgcgtccggcgaaccattctggggcctgcaacccgtggcgccgccgccgccgcatcgcattgcccggacgccaaaacctagctcctgaactctcctcggctcctcgcccacctctcgctagccgttcccgctctgcagtctccgtggccggacgccgcggcgacatggcatcgacctgtttccgcgccgccgcccgcgtggcctccgccgccggccgctcggcggcggccacccgatcggctccctccgcggcccgtgccgccgacgccgcccaccgcgcctcgtccttctccaggatgccggtggagctcgggtgctgcgcgggattgtcgctgctgccgctgcacagcgcggtggcggcggccaggctgacgtcgcggctgagcacggcgtcgagctgccgggctctctctcagggtatcctctggtgcacctatcccgggctttaacatcagatgggtctatccggtcgaaggtgataaaaccctgggagacttgctcatggcatgctg

SEQ ID NO: 276222 - DNA, 851 bp, Zea mays
cccacgcgtccggtttatacagtgtgcttgataaatcatttgatttacgcgatgcaaactcgcttgtcctttttggtgaaattgtgctggcccagaagattatgtatgaaagatttggggaggaattcattatgaactttgtagctaaaggtcttcctgaagttcactgcccaccggacctagctgaacagtactaccagaagttaaagggaaatgatatcaaggcattcaggtcattttatcaatcacttgttgagaagataagaccacaaggaaatgggagtcttgttttcagatagcatcattctttgattttcaatatgtcttccaccaaaagactcctcaactgtgttattcaattataggctagttgtgccatcaatgtacatagagctataatttctgagattggaagacgtattactgcggcattatctttaccaagtctggcaaccatggtggcgtccttattcattatattctatctgagatgcaggggaattcatcccacaacagtttctactaagaaggaaatacatggttctactttctcatcttggcctttctccccaaatcggactgttctgctgtctgggcctgaaattttgcatggtatttcctgtgaactagttgtgtataggggcaaaaagagtgtcgtgtaggctgtgttttttcctgacgaaaaatgtcgcaccgcctgttgtgttatgagtcgggttgtaccaaattttgcgaaacggcagcggtttttttgcaccccccctgttgccatctggggtgatgtacatatttttttttggcattccccattttaaaaaaaaaaaaaaaaaaaaaaaaaaaaacttggacta

SEQ ID NO: 276223 - DNA, 460 bp, Zea mays
cgtatgtttgtgtgtgagttgggaggtggagaagaaaggaactctagtgcatcacacaccttgtgcttgacgaaatgtttgaatcagaatttatcatcgcatccgcaatttggtttaatcatgcactacggcatgattaatggagttactgaagaagggcacccaattcaattgcccccggttgctgatcggacatttcatttgctcaaacagaagttggtccaagctcctgttctaggtcttcctaacgacttcagcaagggtttcgtgctagaaacagctgtcttcatgcaatcgaagaatctcgtggcttatttgaataagcacctttgtccaagaaaccaagcttcatcgaggagtgtttggcaatctttatggcaattattgacgaatggcggccatacttgcagcaccgtcaaatcgtgattgtactccatcttactgagcagagggtgacctt

SEQ ID NO: 276224 - DNA, 268 bp, Zea mays
tgcctgcagaccgctcccttgctcctgcagctcgccccatcccctgacttgtcgtgtcttgggccgtcacggcactctcatcttgcgtcgtcgccttattgctgttctggtggagaagaaaggaactctagtgcatcacacaccttgtgcttgacgaaatgtttgaatcagaatttatcatcgcatccgcaatttggtttaatcatgaagttggtccaagctcctgttctaggtcttcctaacgacttcagcaagggtttcgtgctag

SEQ ID NO: 276225 - DNA, 416 bp, Zea mays
accttcacgatagatgtgtacctccatagagcctgtgtagcttcagaataaagtcgtaccatttgaaatcttgaagaataacaacctcaaggttgccactaaacggatcagctgttggagttatcttcataccaccaccgaagtatttggcattccctatgcacagggctgtcacgttatggacggttctccattctcccccatttacctttattctcatatcttgattattatgtcccccaaaggctcttaaagctccaaagacatagcataagttgccagatctcttgtacatagaagcaaaatagcctgccttagcactcctgcaggtatatcgttgttcttctcttcaattcgtgtaccgaagtaaatagttcatattgctacctttaacctcgagccgaattcgctcgagt

SEQ ID NO: 276226 - DNA, 414 bp, Zea mays
ggcgcagcttccgctgccccgctacgacaacacctcagaggtcggcaacttggtgtgcttccagcggccgaaaggtgggaagcaggtgcccgtgccgaagctgatcttccacctggcgagcgcggacatggatttgccccgggagaactacatcccggaggacacggacagcggggtgatgtgcctgatgatcaacggcgcggaggtcgacatggtgctcataggcaacttccagcagcagaacatgcacatcgtctacgacgtggagaacagcaagctgctcttcgcatctgcgcagtgcgacaagatgtgacgaactcatcacttgctagcttgtgcgtacgtacgcgctgcacgtgtgcgtgtgtatgactgtatgcatgcttctacggctctacatatgttgttagtgct

SEQ ID NO: 276227 - DNA, 425 bp, Zea mays
ggcggagggcacgcggccaccggcatgcccgccggccacggcacgcgtcccggcgcgacaggcgtagctggaaccggcggcgcgttcccccatgcagctgagcacaagacgggcggcggcatccttcgccgctccggcagcagctccagctccagcagctcgtcatctgaagacgacggcatgggtgggcgccggaagaagggcctgaaggagaagatcaaggagaaaatgccaggaggccacagggaaggccagggccaggcgacggccaccggtgcgtacggcgggacagggtacgtggctgggccgacgaccggaggcccccacgagaagaagggtgtggtggagaagatcaaggagaagatcccaggcggccacaaggactacgaccagcatcagcacaccaccgcggcaaccggtggcgg

SEQ ID NO: 276228 - DNA, 691 bp, Zea mays
gcagaagacgcgcaagggacgcgggatcggctccggcaaggggaagacggcgggacgcggccacaaggggcagaaagcgcgaggcaccgctaggttcggcttcgagggtggccagaccccgctccgccgccgcctgccccgccgtggattcaagaaccccttctcactcacatttcagccctgtggactggggaaaattgcaaagctcataaatgctgggaaaattgattcctctgaattgattaccatgaagacactaaaggaaacaggtgccattgggaagcaaataaaagatggaattcgtttaatgggccgtggagcagaagaaatcaaatggcctattcaccttgaggtgtcaagggcaactgcaagggccaaagctgccgtggaagctgctggtgggacagtaaggctggtgtactacaacaaacttggattccgggcactcctgaaacctgagtggtttgagaagaagggccgcctgttaccaaaagcagcaaggcctccacccaagcagcgagataaggtcgatagcattggccgcctgcccgcgccgacaaagccactccccttcacggcagacgagctggagtttgcagcccagcgtgaggctgcccgcgtgactgcattaagatgggagcacgttggcaacacctttatttttatgaaagcatgcgccactggatgtgta

SEQ ID NO: 276229 - DNA, 652 bp, Zea mays
  unsure (1)..(652): unsure at all n locations
tgaccacggaaccacacccccagagaaaccattctacatattctcatatacactcatgagcacatagcgctaggcgccataccaaccatgagcgacctgttatcctacatttccaaggtcatgtgcatcaaggcaagatcggaggcaacacaagccggcgaggacagcggctgcccagcggacgagtgccgcgtctgcctgtccaagattcggctcggcgaggctacccgccgactgccgtgtcgccatgtgttccaccgggactgcgtcgaccggtggctctcgtcctgcaagcgaacctgtccgctgtgccgagtttatgtggccgatgggaacaagcagccggtggcggcaaagcacaccagccgtgaagcacaggcactcgccgacgaccttgttatctggttctccaccgtgcttgttccccgtttctgatgcctaattccttcgtctgttcgttcgtttgaaaaagcttgattggtgtgtattttttttattagttgcatgatacatgtacgtactacgttactgttaattgtacttagaacagtttctagaaaatctgtgtgtatgtagcgtcttgttgcatgaactgattggaacttctgtgtttgcagctgattacntgaaataagaagttcgagcaaatata

SEQ ID NO: 276230 - DNA, 440 bp, Zea mays
  unsure (1)..(440): unsure at all n locations
atgttggttgccggtgccccctgctagagggtttaggtgaatacatacatgagacccacttgaagtgcctctcaacaaggaagtaatggaaagaaaggcaagctaaagaccagcttaacaatgatggtacacatgagaatgttctcttctgttcagaagttatttccaatacaagatatccagttcggagcaaagatagacgcctgtactgttctgaagttattcctataccaaatagcatgcttcagaagcacacaaaaaccacgcccgtccgcccggtggtccctgtgcccgttcactaggagcgagatntggggatcttgagtaccattgcatggctgntgttaggctgttagcccatcgctatcgtgccgggnaattaactatggtgaggctaggagaaaatgaactgatgtggattggacacgcgcttttggaaa

SEQ ID NO: 276231 - DNA, 1823 bp, Zea mays
aacgaaaaaaaaaggttaaatgatatgaaactcaaaatggatgaagaatacaagcagcagctggagagtcttgagcgcaaggtaaaggctttgagtgatgatatgtagcacaagcaaatggaaaatgatgaatttctgaagggagaacgtgctgatgttcaacgtaaattgcaactccaaacggcatgaattggcgatggagatggagcaaaaacaagccacgaaggagaaggaactggaagaaaaggaaaatgagttaaataagaaaatagattttgtggaaaataaactccgacatgcaattgagttgaatgagtccaagattgagaagttattattggagaaaagggaggtgcagatgggaagagaattactgctggaggaaagaaagaaaacggagactgacaaggcagatattagaagggatattgagagtctgcactcattgagcaagagtttgaaggaacgtcgagaggcatataacagggacaggagcagactcatcgaactatttgaaaagtacaaggcgtgcaaaaactgtgggatttctatttttgagggattggattctctgctgcttaaagacagtgctgaaattgagcatccaagtttggctgttgagggagatgatcatgccttgaccaccgatacatcaggtccagatacaggaacccttgttaattcaggtggtcgtttttctttgttacagaagtgttcaaggcttttcaagttctcccctagaaaaaagggtgagcagtcatcagaacaaccatcagagaggaatatatcttttggtgcaagactcgaggaagcaacacagagcgatggagattatgtgccaactcctgtctatgagatagcccacgattctttcaatgcagaggatgagctcccttctgacggtgaaacagggagaatgaagagtctgaaaggcatgacatagctgataatgcccagatggagtcttctgttggtgtagcagataacagtatagatattctcggtactaagtcatttgatggtgctaacgacatggcagttgaagcaactattgtctctgttgatcaaaatggcgaggactctgtagttcctgctgaagcaggtgtagagcctgaaacatcagagcaaggtcggcgccagcaaaaccagagaggcagaagaaaaggtggtatgaaaagaacacggtctgttaatgctgtagttgaagatgctaagatgatacttggcgaggtttttgaggagaagactgatgatcagggagatacagtcaaggtgggtgctacacgaaagcggcggtttgctggagctacaataagtgaacaagatgaagaagggagcgaagcacattcagaaagtgtttcacttggagggcagcgccgtaagaggcggcaaactgctggggcagtgacagatgccccaggagaaagacgttacaatttgagacacagtagagctgcaaatgctggcgctgcaacagcccaagcagacaaaaaaaaatcttcaaaagcaagaaataaacatacagtagaagcttctgctgatgacaccgaaggaacatcaaaggttgttgaggaacctgcccctgagagcaagagggtatctgaatctgcagactacgatgcatcccagttgcatgagttttcccaggttgaagttggtgatgcccatgctgtagacggtgagggtgctggtgaggaagatggtgatattttggatggccaagatgcactgcctgatgtgccaatgacaccttctggaagcgagtttggagcggaacaggaagatgaggacgatgatgattcagagaggcgaaaccaatcaat

SEQ ID NO: 276232 - DNA, 462 bp, Zea mays
gattagagaggctttcagcagcatggtcgacttttactccttcaggtctggcttttgggcgccgccaggccagacattttgttgcaggtcgatgctcgtgctggtcgccgaacaaagcatgcaggggtagccatgtccaccggcccgaaagcacgcaggcccagccggggatacatccaatgaggcaacgcgcttgagaggctttccagtttggtcgtgcatgtaattggcagtgtctgatgcctcaaccaccgtgagcagacgtctggataattggaggctagcacccggtctcctgctgctcagtggggtaccggggttcatggtgccctaggggctgagctgcaagacgtgaagacgacggtgggataacgcgaggaaaagaaaaatcttgggccttctggcggcgtgagcttgtcgtggcaggagggaaagcacatgtcaagatgcactagcatgact

SEQ ID NO: 276233 - DNA, 878 bp, Zea mays
tcttcgcgtccgaacgaacgggccgccggctcggacccggaggctgcagcggcaccgggatctgggaatctgcacggcctggagcctccagcgactggccccaccaccatctgcgcgcgcgcgcgagggaccggccggcgaacagaggcgccactgagctctgagcgggtgcggccggcatggcgacggcgctggcgcggcggggcgccgcggccctggcgcgatggcgcgggatgtgctcgagctcggcgtcggcgccgcggagcgccgcggcgctgtcctcagaggagctcatgcggatggaacaagactgcagcgcgcataattaccatccaatccccatggtgttttccaaaggagaaggttcacacatagtggaccccgaaggcaacaaatacattgattttctctctgcttattctgcagtcaatcagggtcattgccatccaaaagtcctgagagctttgatagaacaggcagaaaggcttacgctcagttctagagctttctacaatgataagttcccaatctttgcggaatatctgacaagcatgtttggatatgacatgatgttgccgatgaatactggtgctgaaggagttgaaactgctatcaagctggctaggaaatggggttatgagaagaaacatataccaaagaatgaggctttgcttgtctcttgctgtgggtgtttccatggtcgaactcttggtgtcatttccatgagctgtgacaacgatgcaactcgtggttttggtcctttggttcctggccatcttaaagttgattttggagatattgatgggttaaagaaaatcttcgaagagcttggagatcggatttgtggttttttatttgaacctatccaaggtgaagct

SEQ ID NO: 276234 - DNA, 416 bp, Zea mays
atgatcattccttttcaatagattcattaaatcctaagaagttacgttcaagtgaagccaatgacacatctcaaattccagagtctggtggattttcagtatctcctaatgattggacggccccgaatcttagtgtccccttgtttcatcttgttgatgtggtctttcagctccaagatggaggctggataaggcgtcaagcattttgggtagcaaagcaaatactgcaattgggaatgggagacacgtttgatgactggcttgttgacaaaatccaattacttaggaaagggaggataattgcttttgctgttaagcgcattgaacaaattctctggcctgatggaattttcatgacaaaacatccaaagagaaattcggcttcaacttctcttggtgctcagagcaatggcatg

SEQ ID NO: 276235 - DNA, 520 bp, Zea mays
  unsure (1)..(520): unsure at all n locations
ccgattttcgtcacgttgaatcatttaagtgaaggaacttattctgacttcacatggaggttgctccaatctggtgcatctggagttgttacatccttagctggcatggaactcctcaatgacgatcttataaaaaaagacttcacaaaggtgggctcagctgaggaactcccacaagcgagttactcttctgctgngatgctggaagatgttaataatgtaatggtcctaactcgtgattgcgagaagactaaagttgctggatttacaaaattggatgaagaagtgataaagttgatagaaatagaaaagcctattctgaacgaagctatcactattatccgcaaggcagcaccaatggtggtcgtcgttgagcttctagtggatgctgcttctcgcctgagtgagccatttttgttggttattgtgggtgaatttaactcaggaaagtcaacttttataaatgctttacttggaaggcagtatcttcaggagggagttgtgcctacgacaaatgaga

SEQ ID NO: 276236 - DNA, 423 bp, Zea mays
cctctccttctctctcccataccacgacgagacgatcccatcggcgcccgcgcgggcccttcgatccaagcaagcgtagtcccttgttcctagtataacctctagatgattccatgggaactccaaacgaaatgatggcatactcttccctgtccaaaatggacaccagccagaaccacggagctgctctgtccaatgtagttgctggaaacaactatcctgttcaggattatctttatgagcaagcatccgaaccagacttcccagagtatgattcaagggatgacctgttcgctccaacacgagctagtccaaaagtcaatctaaatactgttctaggtggtctggtttcgattgttacaggtgtaaacaagagtgaggatgatgcatcgcagcatgaaagttttagcacagacatatcat

SEQ ID NO: 276237 - DNA, 563 bp, Zea mays
tgacaatccaacaacaacgaagaatgttgaagggttccaagttgacaatccttttagagatatgcatgaaatgatgccatctcatctggattttgaggaacagaagactgaagagggtagggctgttgggccagtcatggatgcttcctttaaagacaatgattttgaatacttgcagattataaagaatgaagaccttgaagagcttagagaacttggttcaggcacatttggaactgtataccatggaaaatggaggggcagtgatgtagccattaagagaataaagaaaagttgcttcacaggacggtcttcagagctagaaagactagcacacgaattctggcgagaagctgaaattctttcaaagcttcatcatccaaatgttgtggcattttatggtgttgtgaaagatgggccaggtggtacattggcaactgtgactgagttcatggttaatggttctcttcgacatgttttgcagcgcaaggacaaatatctcgatcgtcgtaagcggcttatcatagcaatggatgctgcatttggcctggaatatctgcact

SEQ ID NO: 276238 - DNA, 620 bp, Zea mays
gatttttcaccgctgtatttcgtcgcaccctggagtcagcatctaggcatgaggagatgcaacaaaagacaggattggtggaggctataattgttgagatacaggatagaggcaaaattggaggttcatatctgcactctgatgcaatatgttgcacacctgagcttgataaggagaaatcttgtagagtaggtgaggtgatcatacgtccggatcctgagaaccccgactggcctaagaggatccagacattctttgatggtaaaaatgaagaaaccactatggtaactcaaattgtgtcgataaacaaaactgggatgtattacctctattttatgttctgtgatcctcaacttaagggattgaagattacaggaagaactgtttggagaaatccacagggttaccttcctggtaaaatggctccaatgatgacattttatggtttcatgtcacttgcatatcttgtacttggacttctatggttcattcagtttgtgcgatgctggaaggacattttgcagctgcattaccatataacagctgttattgctcttggcatgtgtgaaatggctttttgggattttgagtatgctaactttaattcaactggaaccaga

SEQ ID NO: 276239 - DNA, 436 bp, Zea mays
agacaaaggagctgataaacagacttggtgctggagttaatgcagggcgtgcttccggcgagcagaagaaattggagaagcttgaaaaagaagggttgattgagaaacctttccaaaggaagcagctaaagatcagattccctgagcgtggaagaagtgggagaactgtgttgacgataaacaatcttcaattcggatttgagaataagactttgttcaacaatgctaatctgatagtagagagaggtgaaaagatagctattattgggcccaatggttgtgggaagagcacactgcttaaacttatgttggggatggagaagccacaaggtggtgaggtgcttcttggggagcataatgtgttgccgaactattttgagcagaatcaggcagaagctcttgatttagagaagaccgtgttagacactgtagcaga

SEQ ID NO: 276240 - DNA, 370 bp, Zea mays
ggatatcctgaacgctgaaggcgatgagatctatattaaggaaattgggctgtacatgaagggaggagagaaaatatcattcttggagctctctgaaagagcagttttacgccgtgaagttgcgattggttacatcaaggacggcaagcagcatattaatcctatcaacaaatcggagccgctgtcccttgaaatgaatgattcgctcattgtgatatcggagtttgaaggtggacaaccaattatgatgggcggagaatcttcaggatgaaattttcagccttatatctcctcacagaaactctaacaactgttgctaccatgaagagataacatataacctgtttataaccatttctttttgtacaag

SEQ ID NO: 276241 - DNA, 508 bp, Zea mays
acgcgtgcgcccaccgggatacaatgcagagagtgcataagctgctgaaattgaagatgaggggaagaggtcggatccaggtgacatgggttctgcatctgcaagtacctcttcaataccggacaagggacctgaaaaggctaaatcaggcgcagataagaaaaataggccaaaagatgtttctggtcggccattggcaacagaacatgaatttgaagttctcatgaatgctccaaggttagacacaggtgctcctgcacgggtcaaaccatttggagttgaagttcgtaatgttagatgcttacggtgtggaaactatggtcaccaaagtggtgaccgggaatgtcccttgaaggatgcaatcatgcctaacgaggagagtctgttgaaaagagacgatccacttacaactataatggcgcatacggattcaagtgagcctttgaagtgggaacttaagcagaaaccatgcatgagccctcctcgtggtggatttgacccagatgat

SEQ ID NO: 276242 - DNA, 546 bp, Zea mays
cacgccgggacgggaggcacaggtgcggtctgcgtcgagagttggtccactggcaggccggaatgaagaagtgcgcgtcggagctggagctggaggcgttcatccgggagagcggcgaggacgcccgcgccgccgccggaggtagcagtccggggtgcggtggatcaagcgatcccggagggagcggcgtcttctcacccggcttcggtttcgccgactcggaccttctcgcgcccgagcaggacaccatggatggaggcagttggtggtacgggaacgtccgcacgccgaacccagtcatgtcgcaggcggcgtccatatccgctagccccgggctaaccacctcagccaatcatgctcttgaaagcgagtcagactccgacagcgaatcactgtatgaggtagagggagttccatacgagcgaggtaacacatccattgagacgaagcgaataagaaggatggtgtccaatagggagtctgcgcggcggtctaggaggaggaaacaggcacagttgtctgaccttgagtcacaagttgaacgac

SEQ ID NO: 276243 - DNA, 315 bp, Zea mays
cacgccgggacgggaggcacaggtgcggtctgcgtcgagagttggtccactggcaggccggaatgaagaagtgcgcgtcggagctggagctggaggcgttcatccgggagagcggcgaggacgcccgcgccgccgccggaggtagcagtccggggtgcggtggatcaagcgatcccggagggagcggcgtcttctcacccggcttcggtttcgccgactcggacaccatggatggaggcagttggtggtacgggaacgtccgcacgccgaacccagtcatgtcgcaggcggcgtccatatccgctagccccgggc

SEQ ID NO: 276244 - DNA, 1377 bp, Zea mays
acctctctctttgaccctaagaacaaggagcagatagagaggatgttagccaagatcaaggagactacccttgccacctgatgatgagatatcacggaccattgttggccttgctcgcactcgccctgatatttttggaaccactgaggaggaggtgtctaacgccgtcaaggcagaaattgagaagaaaaaggatgaacagccaaagcaggttatttgggatggtcattctggtagcattggacgcactgctactcatgcattatctcagcctcagggtggtgaggaacagtttgatgctacgcatgttgatgggaggcctgttcctggtccagctccacttgtccgacctggcatgccgttgcctcgacctcctcagccacttcctcttgttaatgttcctcgttttatcgctccaccagcaccatactctgttccacccccaggttctcatatgcctggagttccacacatgatgcctcacatgcatctgcctccacagcagatacctggccagccgccgatggttaggatgccaggtcaaatggttcatatgccaaccagcattcctccgcctcctggccaaactcagtttatgcctggtccaccacgcacatttgctatgcccccatcatcgcacatgccacccatgatcaatcccattggaatccctcagcctccagcaccgcctctgcctccacagcctcctgctgaagagcaaccacctccacccgatgaaccagaacctaagaggcagagaacagacgatgcttctctcatcccagctgagcagttccttgttcagcatccgggtcctgctagcatctctgtatctgtacccaaccttgatgaagggaacttgcgaggccaaattttgcagattcctgtccaatcactgtcagacacagttggtagtctgaaggagcaaattgctggagagttgcaactccctgctaataagcagaagttgagtgtgaggactagtttcctcaaagacaaccttactcttgcttactacaatgtgggtcctggagtggtgatcaatctaacactaagggagcgtggtgggaaaaagaaatgagtcttttggttctcagttggcagtttaatgcttacaactataattcagcagctatcatggagaaccagttcgtatctttcatattattttcttttgtatgctatatgcaatcatttgtgttatgtgaacatcgtactttcctctatattatgatacagttaaatcttgtgagtggttctgcctagtatgttacttgaggttgctaaatgctaatggatactttcttggccacttaaaaaaaaaaaaaaaaaaaaaaaaagggggggccgccgataattaacctcgtcaccccggaa

SEQ ID NO: 276245 - DNA, 567 bp, Zea mays
ggacaggtgctgcgcgctgcgatctctgtcaccgcgcaacatggcggggggtgccacgccgccaactggaagcccgggagtgcgccgcatcggcccggcgtctcgagaggaggccaggaagatgttcccgcaggggttcgaaccgccgacctgccctccaagaagggctacctccgtttcaccaaggtttagctagccgacgtacggcacggacatctagctcgtctgtcagtccgcgtcgaccggggtgcgcggatcttttgtgcctgctggtggtttctctgactagtactagtatatatataggctctatgtatgtgcgtactatgccgtgccgtgttgtctcgtgtagtggtggcaaccggttcgtggcactaccgcgctagtattgtccacccatatcaatgtcctcttctgaacttagcggcgcacatgtttgtgcgtgtgtgtagcatctgctagtgcaattgcatgatgcatggccgtgcgaaaaggccctcggcgctacgacagcagccagcacggcacgtttcaaagtatgcctgatactgtacgatgtcttatagc

SEQ ID NO: 276246 - DNA, 825 bp, Zea mays
ctgatgttgtgttctggcatttcacctggaactgagccacacctgaaagcaatgctgttagctataaggtcctcacagctgctaggtcttttggagaagacaaggatttttgtgcccaagggaaggtggttgatgggctgccttgatgaacttgggatccttgagcaagggcagtgctttatccgggcatcatctccatcactcaataattgtctggtgaagtatggatcaagattgtctgcagcaaacacaaatgcagagaccattctgggtactatcgtaatggcaaagaatccatgccttcatccaggggatgtccgaatccttgaagctgttgatgtgcctgaactgcatcaccttgttgattgcttggtcttccccaagaaaggtgagaggccgcacgcgaatgaagcatctgggagtgatcttgatggggatctatacttcgtaacatgggatgaaaaccttataccacctggtaaaaagagttggaaccctatggactactccccagctgaagcaaaacaactgccacgcgcagtatcccaacatgatattgtggggctcttcttgaagaacatggtaaatgagaaactgggtccaataagcaatgctcatgttgttcacgctgatatgagcgagtatggagcaatggatgagaagcgtattcaattggcagaactatcagcagctgctgctgacttccccaagcacaggcaaaattgtgacaatgccagcattccttggaccaaaaatatatcctgacttcatggcaaaagatgatgctatctgctatagatcagataagatccttggaaggcttta

SEQ ID NO: 276247 - DNA, 1081 bp, Zea mays
attcggctcgtgcagggagcacctgcctgctcctgcgcggcggcggttggtaagccccatctccggtcccagcctggccagacttctgcccttctcctccgcctctctaatggtgattcgcagttactcttctttccactgtgggttgctggcggccggtgcggcgtggaggaggcactacccgttcttctgggctgtcaggccttccgtaccgccgccgccgtcgccactcccactcccacagccgcgcacgcgcttctcctcctcctcctcactgcgctccaccaagagatccgccgcaaagacgtcaatggactcgtcttcagtcggtgaacccttctacgtcgtccgcaagggggacgtcatcggcatctacaaaaccctcagcgaatgccaagctcaagtcagcaattcggttcgcgacccttctgtcaccgtcttcaaaggctactcgctgcgtaaagacaccgaggaatacctcgccgcgcgcgggttaaggaacgctctctacgccattgatgcaacagatgcacgagatgaattgttcgacgatctagttccctgccctttccagcaacctgatggagctgcatcgtctactctgaaaagatcacaggagattgaaatcggaccatcaaagaagcatcccaaagttgatgagcaggtaccattacctgatagtcatctctcttgtattcttgaatttgatggtgcctctaaaggaaatccagggaaagccggtgctggagcaataataaggcaggtagatggttccgtgattgctcaactacgtgagggtctgggcattgcaaccaacaatgctgctgaatatcgtgcattgatcctagggctaacatatgcagccaagaaagggttcaagtatattcgtgctcaaggcgactctaagcttgtttgtaaccaggtccaagatatctggcgtgttaagaatgataatatggctagcttctgcaagatgagtgaaggagctaaagggaacatttcatttatttcaaatcagacatgtttggagggagtatatttcgcctgttgttgtcaatgcaaccttgcagtaggacttcct

SEQ ID NO: 276248 - DNA, 1213 bp, Zea mays
ccaaggcgtcctcgagcgggagcacggtgtcctgcgatcagggattctgcgcggccacctatggggggaagctgccagggtgcactgccaatgtgccctgcgagtacagcgtcatgtacggtgatggtagctcaacgactgggttcttcatcaccgatgcgctgcagtttgatcaggtgactggggatggacagacacagcctggcaatgctaccatcacattcgggtgtggtgctcagcaaggtggggatttgggcaactcaaaccaagctcttgatggaattcttggttttggtcaggcaaatacgtcaatgttatcacagctagctgctgctggtaaagcgaagaagatatttgctcattgcttggataccataaagggtggtggaatttttgctattggaaatgttgttcagccaaaagtaaaaacaacaccgttagtagctgacatgccgcactacaatgtgaaccttaagtcaattgatgttggtggcactacattacagctcccggctcatgtttttgaaacaggagagaaaaaaggcaccataatcgacagtggtactaccttgacataccttccagaattggttttcaaacaagtaatggatgtggtatttagcaagcatcgagatatagccttccataatttgcaagattttttgtgtttccaatattctggaagtgtagatgatggattcccgaccatcaccttccattttgaggatgatcttgcactgcatgtgtatccacatgagtactttttcccaaatgggaatgacatatactgtgtgggattccaaaatggtgcattacaatcaaaagatgggaaggacattgtgcttatgggagatcttgtgctttcaaacaagttggttgtctatgacttggaaaatcaagtcatcgggtggactgactataactgttcgtcgagcattaaaattaaggacgacaagacaggcacaacctatactgtcgaatcacatgacatatcctccggatggaaattccactggcacaagtccctggttctgttgttggtaacaatggtgtggagctatttatagtacgctaactctattgtacaacacgaacacgcacttaccgaaattcatttgattcgtattcttttcacaaaaaagaatatctagggttttaacttgtgttctctgaccacggaaaacgatgaaaacaaaaacgttgtgtgccatac

SEQ ID NO: 276249 - DNA, 384 bp, Zea mays
cccacgcgtccgggacctcccaagacctggcatctccagtgaatgcgacgccggggaccgccggccgtgcgtcctctctcctcgtgcgcttcgcccgtctccacagttggtgcagaaacagtgcaacagtgtttacggggtgaactgctggagttggcgttagatagtcgatggtctactgccgccgtgctctctcactaccagtgtcccaccaccgccatgcatgttttgcggcaattgccggctactatactcctccgtctccaatcatcaggcaccagcttgcgacgcaacttggattctctcctctcctctcctctcgttgcaacaaggcagtccagtgaatgagacggatggccccaactgtgcctgtagctgatgcat

SEQ ID NO: 276250 - DNA, 348 bp, Zea mays
cccacgcgtccgcccacgcgtccgcgatttcttctcggacctcccaagacctggcatcgccagcgaatgcgatgccgggaaccaccggtcgtgcgtcctctctcctcgtgcgcttcgcccgtctccacagttggtgcagcttgcgacgcaacttggattctctcctctcgttgcaacaaggcagtccagtgaatgagacggatggccccagctgtgcctgtagctgatgcatgatggagctgagcctgtgggtgggaatctcttctctgctggtggccactcgcctagctccaaatacacacacacactctctgtctctctctctctctctctctctgtctatctctc

SEQ ID NO: 276251 - DNA, 741 bp, Zea mays
cccacgcgtccgctacccctcctgctaaggcgaagaagggagagaagctggcgcctgatgcgactcctgcaggaaaggcaaagaagggcaagaccgagctagagacactggcgcctgatgccactccagcaggaaaggcgaagaaaggtaaggtcgagaagacagctcctgaggccactccctcaggcaaggggaagaagggtggggacaaactggagaagccagcagcgctcgatcgctcaccttcagacagcaagtctgaaaagcttgcacatttttcccgcacatgggagaaagatgatgagatgaagatcttggaggctctcgcggcccatgtcaagagtgagggcgtgctgccgaagactgattttcttcttgctagtgttcgtgaccgccttgtcaggaagaactgcaactacacggatatatatgagaaggtacgaaggctaaaggagcgctatgaaaaattggtgagcacgggcactgtaccgagtaaagaagatgagctccagatgtataatctctctaaaacaatctggggagagaagtcaaaggaggctactgctgccattacgtctcaaaaaggtggtgctgtgacaaagcgtaagaaggggcaggctaacaaagagaagatggatggaaatgcaaagagtggtgtggcaaaggaggctgcccatagtactgccaatcaaagtggcgattctcataaaggaagtaagaaagggcaagccaggttgtcag

SEQ ID NO: 276252 - DNA, 452 bp, Zea mays
caaagataacctacaaactatgaacccaattgaatgggggccgtcctatggtggcggggctattgagttacaaaaattggctaaacgttggggaagtctttgtgcgtcttcatcaggttgtgaacgcaattggagtacctttgaatttatccatacaaagaaaagaaaccgattgttgcataagaggttgaattctattgtcttcatttcctacaacagaaagatgaaagctaggttccaaaaactacgccagaagaaggggaaaaactttgatccattggttcatgaggacttcgactgggacaatgagtgggctgattctttgcatgtagtccctgaaggtgggccgtgggtgtgagtgtgaccttacatgggaccttgtggataatgccattggagcatcacagcacttcgtggccgaaacttaccaagaagggcccataatgtgtatt

SEQ ID NO: 276253 - DNA, 393 bp, Zea mays
agccacgcgtccgggtcccgcagcccgcccaggccggagtacgcgttccaccagatcctcaaacggcctcgcgcgcaagcgcccgcacggggaccgccgtcttcctcaaagcccggggacgagagggtcctcaactggaccgcaggaccgcctggcgacctcaagccttggtagcatcgtacgttcgtgcgccctataagttaccatggctgcatgcatatacactgctgacaacaagccaattaagtgtacatttttttggtatcttctttcttccttccttccttatatatagctgcaataccgtatacgttcatctctctctctatctccttatatatagatgatgagacccatgtggataccgtagtcgaaatctacaacagtttcctt

SEQ ID NO: 276254 - DNA, 902 bp, Zea mays
cggacgcgtgggggctgccgcctgccgcatcctcccctcgcccaccgtcgacgacttgatcccctcccaccgttgaggccgcctcctcacggcagcgagccagcgactcctctcttcgtctcctacaagtagccagacaccactccgactttgccggcaacccgtcgacagcgacgaggcgcagcataaggcatacgggcacggcggccatggcgaccagctccaaacccgccgcgcccgtggaccccatggtcgtgctcgcccacgagttccccgaggtgtcattcgactacgacgagagggatgtagcgttgtacgcgctcggggttggtgcctgcggcgatgacgccgtcgacgagaaggagcttcacttcgtgtaccacagggatgggcagccacacattaagacccttcctacttttgtttctttatttcccaacaagaacagcaatgggcttggatttgttgatgtgcctggccttaactttgatgcaagccttctactgcatggtcaacaatacatagagatctataggccaatcccttcgtatgccagtgttgtaaacagggttaaagtagctggcttgcacgacatggggaaaagcaactattcttgagctcgaaactaccacaagcctcaaagagtcaggggaaattttatgcatgaacagtgtgtaatgcaggagtactatctacttgcgtggtgctggagggttttcagactcttcacggccatactcatatgctacctatcctgctaatcaagtttctcgcatttctattccaaattcggcaccttctgcagtatgcgacgaccagacaaagcaatcccaggcattgttatacaggctatctggggattacaatcctttgcattcagacccagatattgcacagcttgc

SEQ ID NO: 276255 - DNA, 512 bp, Zea mays
cccacgcgtccggcgtcaacaacgagctctaagcagaggagttgacttagggcaaattaatagtaaattgaggaaaatggttgtggatcaggttgacatgttatgttttcatccaatgcactctcgagactgttctcaggtacaacgccttgcatctatttatcaattgaagagcgggtgtcaaggttctggcaagaagagatttgtaactgtgacattgactgggcactcttccttgccatctgcagatggccaagttcgacttgaaaagcttttggggactgaatctgagaactctgtctcgagctctaaaggcccagcacgactgaagggccattctgctccaggaaagtgtgtaaaacactgggaatccagtggagcataaatctaccaagaaacaggtctccttcgcagagcgtccagtatcttttgtcaagtgtggaaccattgtggactcccttactgaggcaatagctggcccaagtggtggtgatacctcgtgtgttaaacct

SEQ ID NO: 276256 - DNA, 572 bp, Zea mays
ttgcaggtgataccactccaggcgtcaggtgtgtgctttcaacacagaatcagtctgtaaacactattcatggttgaacaagtttaaagtttggacagactacactgctgcagtacaaggattggaccctctgcccactgaagctgttgggggcattataattggggccccacctttttgtaggtgggagacaagtagcatgtaaacttgaatgtgttgctgactcaaacagaacagtgctctgctctggctaagcacctggccatcttacacatcgtgtacgccccatagtaacttgaatgtgttacacatcgtgtgcctgtctttgctatccagtctttacacagcatttcaggaaacagaaagtgcttgaaagtgtaccaagtgtggccgtgtggggtttcagttcgcccatgatattgtggcaagtcgctttcttgtgattgatggtgatggtgccctcaccagcgactaatttgtcgccaaatggcatgtgttttcttcttatgatggtgacttgctgtccagctataccctgtgtggttgtgatttgtggtttatattcaacgtcc

SEQ ID NO: 276257 - DNA, 972 bp, Zea mays
ttgtgccattactatggccggacaatccttcatgggggtgcaaaataccgtgctactggccgtggttttgttgtgcagcacaagagttttgctgaaaattacaggctgtatgctaggagccacttcataaaggcaatagagcttggaataatattgactgtgtatgctgcacacagtgttattgccaagaatacacttgtttacataattatgaatatatctagctggtttctggtggtatcatggattatggctccatttgcttttaatccgtctggttttgattggttgaaaacagtgtacgattttgatgatttcatgaactggatatggtatcctggtggtctcttttctaagcctgagcagagctgggaagtgtggtggtatgaagagcaagatcatctacggaccactggtctttggggaaagattttggagatactgttagatctcaggtacttctttgtccagtatggggttgtataccagctgaagatagcaaacaatagcagaagtattgctgtctatctgctttcctggatatgtgtggctgtgatttttggtctgttcgtgctaatgtcctatgctcgagacaagtatgccgcaaagcagcacctttactaccgggttggtcaaactggttgcatcactcttggaatgctagtgctggttttggttctgaagttcacggaatttcaaatcattgacatcttcactagtcttttggcatttattcctactggttggggcttgatttcgatcgctcaagtaattcggccattcatcgaatccactgtggtctgggacagtattatttctgtggctcgtttgtatgagatactgcttggagtgttcattatggcaccagttgcattgctgtcctggttgccgggatttcaagaaatgcagacaagggtacttttcaatgaaggtttcagcaggggcctccagatatcccgtattcttactggg

SEQ ID NO: 276258 - DNA, 489 bp, Zea mays
cggacgcgtggggtgttctttgtgttttcatgtgcttcaaggtgctaggtaagaatgcagacgaggaaaccataaagacaacctacagccaagttctatcaccctgatggcccagaactcatgttttgctaagtcttctccacctaagtcctcaaaaatttgaacaaggccatattatcagataaaagcagatgtagctttcataggacttagttccagcaaagcaaaggttgacattgcaccaaacaatagcgtctatacttcattcttatggcttggagaagcctatgcaacatgacaagccagatgacatgtagatgagaaggttctgcatcaagagaaaccaaagcaaaatctttgcatcaagagagcaccgatgaaaagctgatgtagaggccagttgacaaacttatggaagaccagctgaccaaataattgaaaatctattgaactatgtatcaagttcattaatttgtgtaattctgaatg

SEQ ID NO: 276259 - DNA, 528 bp, Zea mays
cgtttttgctggtgccctggtttttggagtgcaggataacgcaagaagtatattaagaacaaggccatctcagataaaagtagatgtagctttcataggacttaattccagcaaagcaaaggttggcagtgcaccaaacaatagcgtttatacttcattcttatggattggagaagcctatgcaacatgtcaagccagatgacatgcagatgagaaggttctgcatcaatagaaaccagagaaaaatctgtatgtgtctgtatgacatctcagataaagcctgatgatcagcatgatgaaaggtggggagttctatagctggtttaagctggagctagcttctgaagtccggtcaggtgtctgtatgtgttgcccctttttatttcatttcatgagaaaagattgttatttgttccttgaactgtacttggtcgtacttgtgaataaatattttagcatggttgttcgacttctcataatgtttattcgacatcagttcatgatattagtgttacgtgatattttatc

SEQ ID NO: 276260 - DNA, 378 bp, Zea mays
gctcgttccaggacgaggtcgtccgccccggctacgagaaggtgatcgccggcgagggcatgccggtccccgggcagaagggcgcgcgcggcgacctgagggtcaagttggacgtcgtcttccccaaggagctcacccccgagcagcgcgccggcctcgccgagatcctcagagggtcctgctgatccatcggccccagttccaagcgtatcaagttttcttggccgtgtccgtgtgttaaattttaatatgtatactcatagcgcgtgtgatgagtatataagtacataaagagagaggggagggggcgtcgttgtacatacaggtcgtttatatattatatatgtaaggatataaagaaactctgcaacgtgagcc

SEQ ID NO: 276261 - DNA, 296 bp, Zea mays
gaaaaggaatcaatccgaccatccataaaaaggacggcgacgcggtcaccactgcggcaccgtcgccgccgccatcctcgacccctgaagtgaggaggcaacccgaggacgcctctcccatccacgcgcgaatcctaccgccctcccactcccaaaaacctagccgcgcgcgccacctgcatcccatggcggcaaccgcggccgtggcggggaccgggtcgtccctctcctcgcgccgcagtcgcagcgttgtctcctcgtccttccgcgcagctgcctcgcgcttccgctcgccg

SEQ ID NO: 276262 - DNA, 747 bp, Zea mays
gccgggtacgcaacatctattttccttttgacattgaggctgataccgcactaagtgttgctactgaaatggtagctgaactcgatataactgaccatgaagttactcggattgctgacatgattgatggtgaggtcagtgcactggtaccagattggaggcctggtccgggcatagaggaggctcctgacacttcatactgccataactgtggatccaacgtctcatcgtgcggttcactttacgcctacatgtcatcaggccgtcgaggttgccaatgtgcagagctacatgggcggtttgaggagatcacgttccaagccgatggagagcggtgtgatttgcaggaatctgcaggcagctctgatgatggaggtggccaaacagagcactatgtcaaaagcaaggagtccactcatgtgaatggccttctacagatgggtagaagagatctttctaatcagctttgcttcagttcattccaagagcaatcatgttcatctaaccattatgagaacgacactaaccatcacacaaatgggttcgacatgaagcatgatgtaaagattgccaagtacaaagcacggaaaatggcacagttaaagagggctatccatccatctcttgacttcgacaatgcaaatggagtaaataggatgaagccttcactgaacaagctgcaatctttccatattggaaagaaccacagtttccgtgtaccgaccggtgaccgaagcccgtgtaaaa

SEQ ID NO: 276263 - DNA, 659 bp, Zea mays
ttcgtcacatttcaacttgaaaagcaaagaagttactatgagtctcttctactagaagccaaggaggaaaccgagaaagaaatttccgcggctactgagaaagccatgagcacaaaactccaaaagttggaagtaaagcttgacaagtgcatggaagagaaaaaatttcttgatgaagtaaatggcaatcttgtcaagaatcaggagatgtggattgaaactatacgaaaagcacaagcaagggagcaagctgcgctcagattaaaagatgagaagatcgaaaaacttcaggaagagctaagaggtttgatagcccatttcgactgccaaagtgacactgcacaagcttcaaatgcgatctcgagcgatataccagggggcatgattcttccggtagcatcagaatcgtcctcgagcggcggcgttgttggtggcactggaaacggggagcaaaattgagtaaactgcgccctgtataaagcacgtttggatcttagggacctaggtatattcttgcttccaaacccccaccgttgtatgttcagttagggtaatacacacttgttagctgtcacctcactgcccctcgattctactgtcactagccgctagtagtgtggtactagggatgaaaacgatttcatttttttttggttttt

SEQ ID NO: 276264 - DNA, 586 bp, Zea mays
ggtgcgcctgctggagccgctcgggcattaccgccgggtcgaacgagtcctgttttgatgcgaaaggggatgtcatacagctctgcggaacttatggagataagctttgaagaggtcaagaacaaggaagtagaacctgatttagttgatcgcattgctgtttcaaataaatcagtagcgaaggtctacatcaggaattcacctcatccaaagagccaaggccaagatagtgatatccatattactaccactgatgctccaggcaagcctgctcccagcagatgcaagtattacttcaatattggtagtgttgatttgtttgaagagaagttagaggaagcccaggaagctttgggaatagatccacatgattttgtcccagtaacttatgttgctgaagtaaattggttccaagaagttatgaggtttgccccaacagcattgattgttggtctattatatttcacgggaaaaaggatgcagagtggtttcaatattggaggtggtgctggcaaaggaagaggaggtattttcaacattggaaaagctacagtgatgaagatggaaagtactccaataataaggt

SEQ ID NO: 276265 - DNA, 765 bp, Zea mays
cccacgcgtccgcccacgcgtccgcggagatatcccagagtggtgtggccgccgccggcggcttctttctccccttccattccgctccccgtgacgtcaccgaccaggcaagcactccgctccaccagagccgcctcgcctgtctgtccgacccacacacctaccggagcgcgcgtcccgaggtcggcggagcagggtcgggaggagggtatggcggtggtgggcgtcctcgcgctgcagggatcctacaacgagcacatggccgcgctgaggaggatcggggtgaagggggtggaggtgcgcaagccagagcagctcctcggcatcgactcgctcatcatccccggtggcgagagcaccaccatggccaagctcgccaactaccacaacctgttccctgcacttcgagagttcgtcggaggtggaaagcctgtctggggaacctgtgctgggctcatctttcttgcaaacaaagcagtagggcacgcgtcggggcggcaggaacttgttggaggattagattgtgcagtccaccgaaacttttttgggagtcagcttcaaagctttgagacagagctttcggtgccaaagctttcggagaaggaaggagggaatgatacatgccgcggtgtatttatacgggcacctgctatattggaagtaggtccagatgttgaaatattggcggattgccctgttcctgttgacagacccagcattacaatatcatttggggacggtactgaggaagaagagtattcaaaa

SEQ ID NO: 276266 - DNA, 239 bp, Zea mays
ctgcgcttgtgcttgcatgcattgcgccttgtctctcacacatcagcagcggagcagatcgagccatggcgcgtctctcgctcctcgccttcctgctggcaacggctgcacccccggccgcagtcgccgccgtgggcaacgcaacatacgacggcagcaagacggacgcgtccccggcggtcctatgcaacggcgaggggtgtgagccaccggcgcagccgctgccgatctacgggtac

SEQ ID NO: 276267 - DNA, 563 bp, Zea mays
ctcgactccagcatcaggaagctgcacagaattttaaggcatatgagccagattctggttatgggatgtcatttattactaaagttgatggtgaagcagcccaaggtatagcttattcatctgaggctatggttttacattctgtaaatggctatcagttacctgcatctacagcaactcaacaaccagtgccccagatgttttctcaacaattccaagcacctcagtatccaaactttttgccatatcggcatgttttctcaccacagtttgggtctctaatggttgttccaaactattcaagcaaccatgcatttcctcagttgccacatgccagcagctatctggtaatgccaaatggagcctcacaactagctgccaatggcatgaaatatggatcaaaccatcagtataagcaagtatttcaaggagcccctgctggatatggctacggaaatcataatgggtaccctaacggtgttattggcggcacaggtgctattgaggatatgaatatgagtaaatataaggacaactgcctctatcacccaatccacaggtgg

SEQ ID NO: 276268 - DNA, 855 bp, Zea mays
tttttcttttagttggagtatgtacagaggagcaacaatcacttattgttcagaaagcacatagcacaatatcttcaatgctctcactcccaatggaattgatgacagaccgtcttttgcctgtagatgagttagttcctttacattctgtttcagaaacagctctcatcagtatgttttcgtcgattataataggccttcggcctcaaacacctgtaccagatatgatggtgatgattaaactctttactgtcttcctactaaatgggaaaatgccagctgcttatgcattagcttctattttcaataaatatctacataatccagagttttctcatgagaatcagatggataaaatacttgatgatattcttgagaggtcgtttctcaactgtattagccaacagctgctcaaagacatctcaatcttgtgctggcacttcaggatgttaatttctcagaatgtttcgtctagaaacaagctttctaagattaatatcttgtctagcttggcttggattggcaaaggattacttatgagaggagacgagaaagtgaaggacatttcaatgtttcttcttaagatcctatgctcagatgagattttgtctacagttccatgccaccaggaagaaccttatggcggtgattcatcagatacttctcttgcaatatctgcagctagtgcattccatgtgatgatgagtgattcagaaatgtgtctaaataaaaaatttcatgcaagaataaaaccattatacaagcagcgtttcttctcaataatgatgccgatcttcctctccaaaattagagaaacaactgtggtcacgacaaaattggcactataccgagctt

SEQ ID NO: 276269 - DNA, 421 bp, Zea mays
acaacaacgacccccgcttcaccaccaccagcagctccgccctccagctgagactctcgagctccgagtcgtacgtccctgcgcccggcgctcgtcgtacgtactacgtcacgacgcgcgagcgcttgacgcttgacacacgaccgattcagcacgcatggcgatgaagaagggcggcggcccggcggggctgaagcagatcctgaggcggggctcgaccctggggcggcgtcagcggcccggcgggaccgggtccgaggaggaggccgaggcggcggcgacgggcctgccgtccgacgtgccgcccggccacttcgcgggggacctgggcgagcggcggcgccgcttcgtggtgcccatcgcgctgctggaccgccccgagttccgctccctgctgcgccgcgccgaggaggagttcggg

SEQ ID NO: 276270 - DNA, 791 bp, Zea mays
  unsure (1)..(791): unsure at all n locations
ccaacttagaggttgagaaccaagttcttcgtcaacatgcaacttcaactccaccgtctacgtgctaaatctccagcttcacgctcaaagatctcaaggatccatagaagtccagagaatggccatattttgaatggtgacattaggcaaactgaaatgaagccctcaactggcacatcagcagcaattacctcagtagctaatgttcctgacttgggcgaccaaaaggagtttgaacatggagaaaaactgcaaagaataccaaaacagaaatatcagccttcccataaccagcagccccaagacgatcagcagtggctagtcacttgtatttcacaatatcttggattttctgggagcaaacctgttgcagctctccttatataccaatgtcttctccattggaaatcatttgaagccatgaagacaggtgtcttcgacagcattttgcatgctataaactcagccacagaggctcaaaatgacatgagaacattggcatattggttgtccaacttatctacattaacagttctccttcaacgatcattcaaaactactaggacggcaatctcaactccacaaaggagaagattttcatcggagaggatctttcatggaaatcaaacttcaaatgctgggcttgcttatctcagtggtcaatcagttgttgggtctgctggactgccccaagttgaagcaaaatatcctgctttgctattcaaacagcagctcgtggatctaanttgaaaggtttatggcatgataagtgacagcgtgaaaaaggagct

SEQ ID NO: 276271 - DNA, 560 bp, Zea mays
atgagaatacgacaacataatccaaggcacctaaggatgatgtatggaaagctcacgatagggatcctaaggacaagaaaagagagaaggatgtggatgcaggagactggcttgagcaacgaaacaaatataatgataaggaattagatgacaatgccattgaaggagatatggagaaagataaggatgtttttggaagtgtccaaccaaggaggatggtgcgaccaaggggaggtagtcaagtatctcagcgtgaacctcgattccggtccagaatgcgtgatggtgaagggtctcaaggtaagtctgaggtgtctgccattgtttataaagctggggagtgcatgcaggagcttctgaaatcatggaaagagtttgatgtaactcaggatgctacaattgctgaaagcctacaacatggtcctactcttgaaatccgaatacctgcagaatttgttacttccactaaccgtcaggtaaaaggtgctcagctctggggaacagatatttatacaaatgattcagatcttgtggctgtgctaatgcatacttgggttact

SEQ ID NO: 276272 - DNA, 787 bp, Zea mays
cggacgcgtgggtcctgccccgccaccacgccgcggcagcacaactgcacaagccctcctcagatctcaatcccggcgctccctccctccctccctcctcgcctcgggacagcgagcgccgccgtccgccgtccatggagcacgacgccgaggcgcgccgcgggttcgccaggatgggcttcgggtgcaagcactaccggaggcgatgccggatccgcgcgccctgctgcggcgacgtcttccactgccgccattgccacaacgagtccacgaaagacgggcacgagctggatcggcacgacgtccaatcggttatctgcctcgtctgtgacaccgagcagccgatcgcgcaggtgtgctgcaactgcggcgtctgcatgggggagtacttctgcgcagcctgcaacttcttggacgatgacgttgacaaggagcagttccattgcgacgattgcggcatctgcagagtaggaggaaaggagaacttcttccactgccaaaagtgtggatcctgctactcgacgacccttcgcgacaggcactgctgcatcgagaactcgatgaagaacaactgccccatctgctacgagtacctgttcgattcgctgagggagacgtcggtgctccgctgcggccacaccatgcacctgcagtgcttccacgagatgtttgaagcacgacaagttctcgtgccacatatgcgccacgctcatcttcgacatggacaagttcttcaaggccctcgacgcagagatggaggcaagctacttgtacacgggaaagggat

SEQ ID NO: 276273 - DNA, 813 bp, Zea mays
gtttgccagcagtgtgaatcttcatactaagggggagtttagaaacataaatcctagagattgagtggaaattgactaatatcgcactcaatccccggaatcccctatgttctggaactagccctaaatggtttatatgaatattctgttctaccgagttgtgaactgctgaactctagttctgtgtatttgttacgacacctagcactagcaggcatcagaactctataggtgtgacacttgaaattgttacagattaagacgcactgacggtaccctgcgctcagttgctcgatactcgaggcttgtaggtgattgtatccagtagtttgaagaactggttatctaattatttatgtaccgtggatccaccattttggatacgcttcatcaatataaaagagctccaattatgaaagttaggagaaaatgacgatctctaaactattcttgagttgtcgtccagctgccaagactaatggaattgcagtttaatgtctctgatatattgtaacgtgtcatctcgctccaagcttatacgttggtctgctggtacatgccagttctgtaaggagaaatggcaccgattactggaaattttacaaattggccctactacttgtttagattggacaagctctctcctcgtctctatttaatctcttcctctgattttctctatttgccccttcgttcactctttctcctcccttttcttgtctcgttatcgcctgctacgccaaaccctagccccaaatcagtagcttgaagctgcccacagcgctccaaattgggatccacagattctgcatt

SEQ ID NO: 276274 - DNA, 340 bp, Zea mays
ggattttaataaatggaagggaaattagttcgttttcgttttctcaagggaaaatgggaatcccttggaggaattgagtttccaaaatagccctggtacgatatttacatgtgcttgccagcagtgtgaatcttcatactaagggttagtttagaaacttaaatcccctttccgattcctagagattgagtggaaattgactaatatcgcactcaatccccggaatcccctgtgttctggaactagccctaaatggtttatatgaatattctgttcttaccgagttgtgaactgctgaactctagttctgtgtatttgttacgacaccttagcactaagc

SEQ ID NO: 276275 - DNA, 424 bp, Zea mays
gctgaagaaggccagcggtgacaccattgagtaccaaaggctcgtgagggaagaactgcggcctgcgctgaaggatatggtctgggcttggcagagcgaccggcaccagcagcagcagcagcggtgcgagcagtctgtgcaaggagagcagcagcagcagcagcagccgttgtcgtctttgccgacgcagcagtagtcactgcaccaccagttgcgaccgccataaccagatcacgtcaaaactgcaccaagccgcacaggactagtaactcccacttgcatcgacgcttatgtgattgcggaattgtgtttcaggttacctgcctgctgcggtaggacctaaagcgcctacctggctaccatttggcatttttttgtatactgtacgtacattagagtaataaacaaacatgcttaacttttc

SEQ ID NO: 276276 - DNA, 986 bp, Zea mays
  unsure (1)..(986): unsure at all n locations
cttagtgttagagatccctttttaacccccttcgataagaaagatcttgcagagtcagctaagttgcagttttcatgccgggactacagtgatcatcttgcacttgttcgtgcatatgatggatggagggaggctgaaagagaccgtgctggttatgactactgctggaaaaattttctttcggtgcaaacattgaaagcaatagattctcttcggcggcagtttctctttcttctgaaggatactggtttggttgacgaaaacatgactatgtgcaataaatggagtcgtgatgaaaatctagttcgggcggtaatttgtgcaggactgtatccaggtgtttcctctgttttgaacaaggagaaatccatctccctcaagacaatggaagatggacaggttatgctttattcgagttcagttaatggtaaagaaaccaagattccattcccctggctagttttcaatgagaaggtgaaagtgaattctgttttcctccgggattcaactgctatatctgattctatactgttgttattcggaggctgcataaaacaagggggcttggatggacacttaaaaatgcttggaggttatcttgagttcttcatgaatcgcgatcttgcttcaacttatgtgagtttgaagagagaacttgagaatttaatccattgcaagctccaaaacccaaggatggatatccaaacgagtgaagagctgctatcagccatccgtttgctggtgactgaggatccatgcagtgggcggttcgtgtacggccgacaggagccaagatcaaagaaagcaaagacgatgctttcgccatcctctctgagtgaggctggtggcaacggaggggataatgccaagaaccagctccagacttacctgacccgggccgggcacagcaaccncacctacaagacgaagcagatcaagagctatctcttcagatcgacgggtgagttcaacggcatgcagttcgt

SEQ ID NO: 276277 - DNA, 877 bp, Zea mays
ctcgagccgttcggtttccggatagcttacctcacatcgacggtcggtgagccgttcgtgagtggcgaggcagtgcgtgcgctgcagcctgcagggcaagaacaggcgacgaagaagatgagcacgctggacacgcggacgctcaaggacgagctgacgagcatggacaggaagtgcctcgtggacctcggccacccgctgctcaaccgcgtcgccgacagcttcatccgcgccgccggggtcggggcggccagggccgtctccagggaggcctacgtcgtcaccgtcgaagggctttcaggagactcgtccgggctggacgccgacggcggcaagcggagccatttctccagcatcagaggcgacgacggccagaggtcgctcgacgcagtggtaaaaacggccggcaaggaggccttccagtgggggttggcagccggagtctactctgggctcacgtacgcgctgcgggaggccaggggatgccacgactggaagaacagcgccatcgcaggcgccatcgctggggcggcggtagcgctcacgggtgacgccggcggccactccgacaagctcgtcaactttgccatcaccggcgccgcgctctccagcgccgcgagcttgctctccggcatattctgattggcccccagggctgcacccgcctgacacgggttcgctgcccggttgagcccttcatccgaggggttttagcatgaaaggttgatttcaggccagcaatgaaatatgtattcctagggccctgccggtctagcactgtgcgcttccagtgtaatcgttgcttcgtgtacgagtttcacacatttcgaaatatcttctcccagttccggtggtttgacaaaaaaaaaatataaaa

SEQ ID NO: 276278 - DNA, 547 bp, Zea mays
agaagatgagcacgctggacacgcggacgctcaaggacgagctgacgagcatggacaggaagtgcctcgtggacctcggccacccgctgctcaaccgcgtcgccgacagcttcatccgcgccgctggggtcggggcggccagggccgtctccagggaggcctacgtcgtcaccgtcgaaggtaccgcgtcccggccgagtctacctaactagcgagcggctggtgctcacccgcccgttgcaaatctatctgcagggctttcaggagactcgtccgggctagacgccgacggcggcaagcggagccatttctccagcatcagaggtgacgacggccagaggtcgctcgacgcagtggtatgtcacaaacatagctcagagctgcgattcgttgtgcagattcattaatggtttctctctcaccccctcttggacaatttgcaggtaaaaacggccggcaaggaggccttccagtgggggtagtgggtgtgattagtctgttcagatctaacggtacgttggaggtccacaagtagtataaccctgtt

SEQ ID NO: 276279 - DNA, 953 bp, Zea mays
gttttatagttgatcctatccaaggtgaagctggggtagtaatcccaccagatggctatttgaaaggtgccagagacttgtgttctaaacacaacgttttgatgattgctgatgagatccaaactggcatagctagaactggtaaaatgctggcatgtgactgggaaaacatacggcctgacatggtgattctaggcaaagcactcggtgctggagttgttccagtcagtgcagttcttgcagacaaggatgtcatgctgtgtatcagaccaggggaacatggaagtacattcggtgggaatccgttagctagcgctgtggcagttgcatcactgaaagtggtcagagacgaaggtcttgttgaaagggctgcaaagttaggacaggagtttagggaccagttacagaaggtccagcagaaattccctcaaatcctaagagaagtgcgcgggaggggtttgctgaacgcagtggatctaaacaacgacgcgctatctcctgcttctgcatatgacatctgcatcaagttgaaggagagaggcattttagcgaaacccacacatgacactataatccgacttgctcctcccctcacaatcagtcctgaggagcttgcagaagcatccaaggcgcttagtgacgtgctggagcatgacttgccacagctgcagctgcagaagcagataaaaaagccagaatctgaggcagagaagccagtctgtgacagatgcggccgggacttgtacggatgaatgaagcctccgaacagagataacttcattttcgtaggcacccatctcgccccagaagaaataataacagagcagaggatgccagctgcctagctacttgggttaccgtaatgttatgcgacttgttgcatcgtataccaagtatatgagctattgcaaccttggtgaatatgtcaaataaatggcagcattcacatgctc

SEQ ID NO: 276280 - DNA, 756 bp, Zea mays
gacgcgctatctcctgcttctgcatatgacatctgcatcaagttgaaggagagaggcattttagcgaaacccacacatgacactataatccgacttgctcctcccctcacaatcagtcccgaggagcttgcagaagcatccaaggcgcttagtgacgtgctggagcatgacttgccacagctgcagctgcagaagcagataaaaaagccagaatctgaggcagagaagccagtctgtgacagatgcggccgggacttgtacggatgaatgaagcctccgaacggagataacttcattttcgtaggcacccatctcgccccagaagaaataataacagagcagaggatgccagctgcctagctacttgggttaccgtaatgcgtatatgaaccattgcaaccttggtgaacatgtcaaataaatgggcagcattcacatgctcaaatatgggcagcattcacatgcactgtgaatctaccatcaagccatatgattccacttacctcttctttgcaacgttttatcaagtatccgaaagttccaacaggaagttggtcacagaatatgcaatcttaacgatcgataatcagagcaaagaaaaatgtatgatctgctgaatcaagatactgctgagtgatgacataggatctcattaaggctagtataggaatcatattgatctatagtagttttatctttccaaaggaaattagctcatgttgatttgggaatatgaaaatctcaaggaaagatgag

SEQ ID NO: 276281 - DNA, 829 bp, Zea mays
cccaaaccctttcgatctgctcaactaccaaactctgctcctccctgcttccgtcacgcgagagcactccactcccacgcgaaccctagcagtggttctccctcggggccccgctaagcagcttggttccaagctgtagaagcatctccgatcccatccgcggcgggttgaggccatcagctccggtttctgcagccggatttgggatccgcgagatgtcttggtccgcgcccgacgacatcctcctctccacctccctcgccggcttcttggacaagaacaaatgttgttcttcagggtgcttgtgaacgagtgattgtgggggaacaatattgtgatgttcctcttgggctgtacgtaatccggggagagaacgttgttttaatcggagaattggatcgcgaaaaggatgaactccctgctcacatgacctgtgtttcagaagcagaaataagaaaggctgaaaaggcagaacgggaagccagagatctgaaagggacgatgaggaaacggatggagttcctggacttcgattaacaccgtcaccgcggccgttgccgctccccattgtggcggaatctttagtggcggcctgtgtgccatacatgcctggtgaccgcgccggcgcaccttggattgctggagggtttagcgaacagtttctttttaactagcagtgctgctgtatactctcgtggccacagaccctttgagcgcctcctgatacagctttgtcaccactctgatcattgcctcgatgaatttatatacctgacgttatggattaaaaagaatgaaagatgtgatcttgagtgtgtgcacacaacaa

SEQ ID NO: 276282 - DNA, 477 bp, Zea mays
caactaccaaactctgctcctccctgcttccgtcacgcgagagcactccactcccacgcgaaccctagcagtggttctccctcggggccccgctaagcagcttggttccaagctgtagaagcatctccgatcccatccgcggcgggttgaggccatcagctccggtttctgcagccggatttgggatccgcgagatgtcttggtccgcgcccgacgacatcctcctctccacctccctcgccggcttcttggacaagaaacttattgtcctgctaagagatggacggaaactgcttggcaccctctgctcatttgatcagtttgcaaatgttgttcttcagggtgcttgtgaacgagtgattgtgggggaacaatattgtgatgttcctcttgggctgtacgtaatccggggagagaacgttgttttaatcggagaattggatcgcgaaaaggatgaactccctgctcacatgacct

SEQ ID NO: 276283 - DNA, 534 bp, Zea mays
gaactggagttggagtcaaaaatgaaaggcagaagtaaagatcatggtgattttagaggtgagaagcacaaaagtgaaagaatccatagctccagctcaaggattgaacaagaagggaccacttatgatacttcatactcagaccaggaggatggtctcagggatgatgaaattgaaagatttctttattcaagggcgaagcgaggacttggggctgttggttccaggatggacgagcctggtccataccttgattctctgtcccatcatcaggacaatggacctagcccggacatacgtgtggaagaaaaatgggaacgcagagtacaaggcccagagaagcctccattttggggatgcaagtctcttgatggtcattggcgcttgggcacattggatcgaaggccatcaagctctgaacctcagagcaaaaaagaaaagacaagtaagttggataaaaaggataagatagagacaaggaaggaaaagggcaagaagacatccagacatcgccaccaccgccatcgcagaagc

SEQ ID NO: 276284 - DNA, 827 bp, Zea mays
atgaaatctaagaaagagcgggtggttctttacagcaaccgagctcagtgctaccttctcctgcagcagccatcggctgccataagcgatgctactcgagcgctgtgccttcatagccccgtgaatcgtcacgccaagagcctgtggagaagagctcaggcgtacgatatgctcggctttgcgaaggagagcttgctggatacgatccttttcataaacgagtgttcgcagtcgaacgatcctgacctatccctgaagcagaacaaagtccctgattatgccgagcggctggtgaagaagcagatgcgcgccgcttggctgttcagggaagcagccctgaagcacgggggcgtccgtcgcgcgggggatgctagcgacgctgcgtttggccaggaggccgacgactccgagtgggagacagcaatcgaaaccgacggcgagaacggtgccgccacggggggagaagcagacggtgagactggatggaagaatggtggccgccaggaagatttctgtgagaaaagctgagcaacaggtccggactgtttacgtgctattacgcgaatacctttgcgacaagaaacgctagtcctcttcgaaaagatagtttcagccactgacagttccttttctctttgcaagatcctttgctgtttatgtttcatatttttgcatgtaacatcccttagcaatctgttttttttttgtttcttcctgtgcagccaaatgtgtattcagagtctcaaactgagctgctacagaagcagatgctgggccttctgcggtcggcacactatgaagcatcaaatctttctaacgaaacgatc

SEQ ID NO: 276285 - DNA, 637 bp, Zea mays
tcggtttctgggttggctctttgacattggagctgggattggtgaacgggtgacaacatggtggattggcctgctgcttgttctgttggtgggttggttgtgttctattataaatgggggagctttatacagaagaaagagagtgagcatgctgatggccctgtccagctttccaagtttcttggacgggacaaagaaaaggaagaaggtactcaacggagtgcaatctctggtaaaaagataatgatgaagcttgagaagacaaaggaagacaaggcagcagagagcaagcgaaacgaactgttgaagtttctgaatgccagttacgattgatgtgttcgaatcgctggcgcagaaagtgcagaatgcccttttttatcgtctttgcactggtgcttttggtgatacttaagttataaacgttttgtttcttgtctataacttggccaccaaagttttgttatgcttaactagtgactgagtgaaggtctacatgtaattgatttgaattctgtgttgccagtcatggatttgcagcttttaaacccatcctttttgtgattgctccttgtctttgtcaatgtcaaactgtttcactggcgattcattgttcttggcggcccactgccgtggatat

SEQ ID NO: 276286 - DNA, 1312 bp, Zea mays
tttccctcctttcacagtttccctcccccaaaactactttcccacaaacccagaccagagcagcttgcgtctatcgtttcttttcttgttggccttctccttgccttgcttttgcttgctcgttgcttcttgagctcgagcccgccccttctgcgccttgcccaagtctctgtgtgttttttataggcttgagagcttggaatagcggggggtggaggaagcggaagaggagcttcgttttgtgttctagagggagtcatgttccatggcggcaggcctctgtccctccgggggtctctcaaggcgcttgaagctgatatccaccatgccaacaccctggcgcatgctatacacagggcgtatgggggtgcctgcgtgcagatgaggctgtcctacagctccatggctccaatctttctcaaccttatccaatggatggactgcagctgctccctgtcatacacgctccctagctaccttggcctgctcgaggttctcgtctacaaggtttatgtcgatgaagatgcctccatatccaccatagaaaggagggcgagcctgaaggaattctacactatcatataccctttcttgcaacaactggaggacaacttgatggacaaggactgcaaggacaaagggtggtctgctgctgccggcggcggcggcggcggtcggaagcttgttgccgaagatgacagggaggatgagtgtggcatttgcctggagacctgcaccaagatggtccttccgaattgcaaccatgccatgtgcatcaactgttaccgagactggtacacaaggtcccagtcatgcccgttctgccgcgggagcctgaagagggtccggtccagagacctgtgggtgctcaccggcgacgacgacgtgatcgacacggtgacgctggagaaggagaacgtgaagcacttcctcagcttcatcgacagcctgcccctgatcgtccccgacaacatgctgctggtctactacgactacctagtctagcaaggctcctccccccaccccccactctgaagctctggaagaggaagggggtctgggaagaagacgcggcgtacaagcgacaagggttacccgcagccgaccatcctctgcggatcgagttggcaaagcgaagccgttgccgaccaacagacgatactctcgtgggcatgccacgccgttgcgctggctttattgcatggtggcgttgctcgctgtaatggttgtaaataaagaaggaaaatgtctcgggttttatatctaatagactagcttgacatttctcgtctggcgaattgccggactgttc

SEQ ID NO: 276287 - DNA, 444 bp, Zea mays
tcgcgggacgacgcacgcgtctaaacagagtcgaaacaaagaccatatccttccacttgctatggcggcggcggcggcgacggcgaccacgacctctccggcgagggcttcgtggcggcctacggttcccgcgacctcggcatcggcagcaggagtctgcttccgtgttggagcgaagcgcttcagtccagggctccgaacggcaagcacctgtcggcaccgacaccgaggcagaacaaggctcacaacagctcacgtcaagagcggggaagccgaggggcgtccaagcacggaggagagcgcaactggcatcggcggcccggacgaggactccttgcggcgcgagctcgaaaccgcgatcgaggaggaggactacgcgcgcgccgcggcgctccgggacgagctgcgcgtgctccaggaggactgccgggcccgcgtgctggc

SEQ ID NO: 276288 - DNA, 433 bp, Zea mays
cgcgtccggtctggctgcagagcactagagccctgctgcctacccttgcgtattgtgtttacacttcacaatatggcaagagctcttgcctacggtggagcagctgccgcagctggcttcgtctcgccgtggcttgccgtgctcggtgtggccatgctctccgtctgggccatcacgctcgccatcctcctctgtggcgacagctcagacaacccgagaccaccaagatacaatcctgccgttagtgcggctatagcagctggtggcggagggggctgtggtggcgggggcggtggtggtggagggggctgtggtggcggaggcggtggtggagggggctgtcgcggccgcggcggcggcggatgctagagttcatcgcatgcatccgatgcaccagcggcatcagttgtgctggtctgcagaagctaagatg

SEQ ID NO: 276289 - DNA, 620 bp, Zea mays
cgcaagtgcatcagcctgaacagcgttggctttgatgtgaagcgggagatcttggtgggctctaagatgtcgtcatctgaacggcggtaccttcgaaagagattccgggcagagcttgattcggtgcgggatctcctcaagaagccagagtttgcagcccctgttcctctcaatcgggcacctgctttgtcatcctcagctgcacctcgagctaagaagccacagaagtctcagcgtggtgggaccaatgttatacgtggtgcaaagggacgattcttgcctacaaaaccgcggccggagacttccactgtgttatctgaagctgcagcgtttaagcagtgtgaagctattttgaagaagcttatgactcaaaagtatagtcatatattcaatgttccagttgatattgtgaagctgcaaattcctgattattttgacattgtgaagaccccaatggatcttggtactgtcaagaaaaagcttgaatctggttcatacacaagtccatcagattttgctgctgatgtccggctgacctttaacaacgctatggcttataatccgcgggggcatgctgtgcacgacatggccatccagctgaacaagatgtttgagagtcg

SEQ ID NO: 276290 - DNA, 1199 bp, Zea mays
gttgatgtgtggtcagctggagtgatactgtatgttttgcttagcggggtgccacctttttgggcagagacgcaacaaggtatatttgatgctgtcttgaaggggcacattgattttgactcggacccatggcctaagatatctgaaagtgcaaagaatctcataaggaagatgctctgcccttgtccttcagagcgtctgaaagcccatgaagtactacgccatccttggatctgtgaaaatggagtggctactgatcaggctcttgatcccggtgttctctctcgtctcaaacaattctccgcaatgaacaaattaaagaagttggctctgagagtgatagctgaacgactttctgaggaggagattgctgggttaagacaaatgttcaaggcagttgacgttcaaaatagaggcgtaattacttttggtgaacttagacaaggtttaaaaagatatggtagcgaattggagaatagagaaattagtgatataatggaagtggctgataatgacaataatgtgaccatcaattatgaagaatttatcgctgcaactgtgcctcttaacaaaatagaacgtgaggagcacctgatggcagcttttacctacttcgacaaagatggaagtggttatatcacagttgacaagctgcaacgagcttgtggagaacatgacatggatgacactttccttgaagagataattttagaagttgaccaaaacaatgacggtcagattgactacgccgaattcgtagcgatgatgcaaggcaacaaagttggacttgggtggcaacaaatggaaaccactctgaatgtaaccttgagagatgcacctcaagtacactgtcactgatgcgctcgccatgtacagattttgttctcttctcgtgttcatcgtttctccacacgacctgagagttccggtcgacatgacatgtatcacgaggagagagcaaatcaatcgattcatttagtggtatttatcccaaataaagtgtgggctggcaggcagaatatggtttgtcatgagagacactagtatgggtttatatgtataaatatatagcagtggtggtatattggtttatgtagcgggtgatcctgtcaagcgatccaatcgaaataccaaaagtgcgttcagtttgcccgttttgttacgggtttcatgaagatgaatgtgattatgttttctcc

SEQ ID NO: 276291 - DNA, 433 bp, Zea mays
gcaagttcactgcagcaacttttgcaaggaccttttctggtttacatgctagaggaatcgagcctggtgttctttatccagctgtctctgttgagcagtttcacgaaccccatgcttataagtaacttcatgcttgcatatctccttacatttaggttgaatttcctatcaatcaaccggtttgagaggaaaaagaatcttgatcttgccatttcagcatttgctttgctccgttctgctgcttggactctacctggtgatgctctacaagaagcaacattaacagtggcaggtggctatgataagcgtctcaaggaaaatgttgaataccttgaggaactcaaaagactcgcattgacggaaggggtttctggacaggttaattttgttacatcttgctcaacatctgaaagaaacgagcttctctccaact

SEQ ID NO: 276292 - DNA, 565 bp, Zea mays
cccacgcgtccgggtggccaaccacagcaagaggaaccacacggacagctacttcagtggcaaggccgtcgccgtccccgccgccgcggccaccagctcggaggagttcggcagcatgtcgtcgaagaagccgaggaatgccagccccagactcgcgcccgtatcaccaaaggagaagaaggacaagatcggcgagagggtcgcagcgctccagcagctcgtgtcaccgttcggaaagaccgacacggcttctgtcctgcaggaggcgtcggggtacatcaagttcctgcaccagcagctggaggtctctactattttcggcgaccaccgcaccgcaacgcttatccttcgtttttttcccgctagctgatgatgtccatgggaatccttttgctgcaggtcctgaagctcccttacatgcccccttctcccggccgtggcgctgcgcctgaagtattaactttcggcggccctcgtcttcgtcttcactgatgaattcttgacgcaagcctgtagaaccctaaacctcgtcttcatacatatatacctacaccatctactactt

SEQ ID NO: 276293 - DNA, 587 bp, Zea mays
  unsure (1)..(587): unsure at all n locations
caaggccgtcgccgtccccgccgccgcggccaccagctcggaggagttcggcagcatgtcgtcgaagaagccgaggaatgccagccccagactcgcgcccgtatcaccaaaggagaagaaggacaagatcggcgagagggtcgcagcgctccagcagctcgtgtcaccgttcggaaagaccgacacggcttctgtcctgcaggaggcgtcggggtacatcaagttcctgcaccagcagctggaggtcctgagctccccttacatgcgcgctcctccggccgctggcgctgcgcctgaggacccccagcgctacagcctncggagccgcgggctgtgcctggtgccggtggacctgacgctgcagctgacccagagcaacggggcccgacctgtgggcgccggcgcacacggccaggcgaaggtgaggactgaggaggagccggtctgtctgtccggagggaaccgcgcaagtgctgccgcgtctgcgtgcgcgccgtggagttgagtttccaggcgcctgactgacccgattcgacctcctagcaagaaactaaagcaagcgtgcgtgtccgtatcagccgccttgt

SEQ ID NO: 276294 - DNA, 1628 bp, Zea mays
ttcgtccgtccacgcttccgcccacgcgtccgcggacgcgtgggctcgcggataatttttcaggtcacctctcgtctctcccgagcaccgcaaaatccatcaatcgaacagaccaacacaaacccaacctgcccccggccgatcgcgcaaaccctagcgccgtcgcctccctctcggttctacaccgtcctctccagcctcgcccgcgtgcaccgcagatcaggggacgtacgtcgcccgcgcgcaccgcagatcaggcaacgtacgtcgcccgccggagatcggaattctgtatttttccttccgtgctcgcggctgctacggcgatggcgggcggcgggagcaggcgcgccggcgcggcggagcagccgaagatcggcagcggcaacgtcttcgccgcgctcgagacgcttaagaagaagaagaagccggcggataagggggccaagcccgccgccagggaggaccccaagccagaggtcttctgggcgcccgcaccgttcaccgccaagtcctgggccgacgtcgaggacgacgacgatgacgactatttcgccaccaccgcgccgcctcccaggcccgtctggggggacgcccaccgcgacgctgccaaggaccagcacgacgcgcccgcactggaagaggagattgagagtgaagatgatggccttgatgatgaggttgatgatgacgctgatgaggaccatgaggataaagcagatgatgctgtccctgctgaaccaaccgtgaagaatgcgacagctccacctgcaccacccaaagatactgaaagacaactttccaagaaggaattgaagaaaaaggaactcgctgaacttgatgctgttctggctgagttgggccttggcacatcaaacaattccatacaagaggaacccaatggtaagaaaggtgcagatcaagttgcagatggagagaaaaaggaagatgcacctgctcctctagaaagcaagaactcaaagaagaagaaatctaagaaagaaaagtcttcaaaggagctaaaggaagcgcaggatcaagccaatgggtcggaagcagcagctgttgcagaacctgatgaagatacagcctctgcggatgtcaaggagcgcataaagaaggtagcctcgatgaagaaaaagaagtcaagcagagagatggacgctgcggcaaagattgctgcatccgaggccgcagcgaggagtgcccggcttgccgctgcaaagaagagagagaagagccactacaaccagcagcctgtgcggtgaactcccctgatctgaggccgcagcgaggagtgcccggcttgccgctgcaaagaagaaagagaagagccactacaaccagcagcctgtgcggtgaactcccctgatctggtgtctctagaaaccttttgagctctgatgtcccctgttcgttttggacctgcaataaaacttttgagactgttttttgacatggtggaggtgccgtctgatgctcgttttgggaatttaattacatataggtacataggggttgtcttggccctggatttctgtttggtgtaatgagctatgacctgttcgtcaaccgtcatatgaaccctgctggctatttatataggaaatgtggcatatttgatgcct

SEQ ID NO: 276295 - DNA, 392 bp, Zea mays
aatgattcagttcttgcaagaatgacatgattttgttactaaatagtgttccttttatgcagatatgaccaagacagtgcgaagtgcttaatgaagcaagctggcaggaaacatttaaagctctttggatttccacccttcgtcttgtacaacgggctagagaacctcttgaaggaccgattcctcatctagatgcaaggttatgcatgttgttagctcttataccattatcaattgctgcgaatcttcaagaggaaagtgatatgtttggagttgaagggaacaaaattcttccacatatgacaagggcttatatcatctctccagaatctgatccaatattcaggacttcttgtaccaccttcatcagtggtgaatgcagctaatgttgc

SEQ ID NO: 276296 - DNA, 458 bp, Zea mays
tttccatgcgtccgcttcctcgccccttcccttgcacgactccactaccaccaccttcaccttgtctcccacaaccgccgcgcgcgagccctagcccgatctcgccggcgacagacaccagatctcgccgcccgttgcgcgccgatacgcgccccgccggattcaccgctcctcgcgctgcagcacgcccgggcctgggttactgcgtgacatgtagtattgtataattggaggttgtcaccatcaccacaaagcatatgttgtgatttgtcgatggcgaggagatgaaacaggtgtaggggcggagcagcaaggacatgacagccatgccgcatccgcgccaccgaggcgctgctaagaagcccatgtggatcatagcgctattgtctttggtttgtgttgcacttatgggggcctatgtctacccaccacggcgctactccgcatgctacttcttt

SEQ ID NO: 276297 - DNA, 450 bp, Zea mays
tgttattatgcctaattcgctaggcatggcatttcctccgcgaccagctgatggtggggcacctccaatctataatcctgcactcaatcctttgatggcccggcctccaatttggcctgctgcaccagcgcaacttggtatccgcaacaagcagcatatccacaacaatcagctgtttcagttcctcccatagttgctgggctcccaccacaacagccactattcccaattcagaatgtgcctactcctatgacatcagcagctgctaatgtacttcaaacatcgtttcctatggcccctccaggagtaccttcacctgttgcccctcatgtttcccagcctttgtttcctgttaacacttcagctgtcaatggagctgtaaattccccatttttagcatctgttgcacctggaaccattccagcaagctctccagcagcagtcggtgtt

SEQ ID NO: 276298 - DNA, 970 bp, Zea mays
  unsure (1)..(970): unsure at all n locations
tcgcccacgcgtccgcgcccgcttcccgtccatttattaaactttcgcaagcgcaggtatctccccacagggcagcgcgtgcggaaaccctagtcgccgccgatgtcggaccctttctacccgtactaccgcggagccttcccgggcggcgacggtgcgcagccgccgccacgttactcggattttgaggtcgacctcatcgcggcccgttacgccggcaccctattgccttatccatcctctgccgacgtcggcgccttcgactcgtatgtcggcgcgagacgatccgcggaagttctctatcaccaatcttttatgggaagtcatagtactgttggccagaatgaggctttatattcatcgaatactatggctaaacgccctaggcttgaaagcagccttcctatatatccacaacgaccggggcaaaaggactgtgccttctatatgagcactggaacctgtaagtatggagagacctgcaaatttgaccatccacaacgggttccagagggtggggttccaaactggaaagaggccccgaatgttgaagattcttatcctgagcgaccaggggaaccagattgtccttatttattgaataatagatgtaagtttaaatctaaatgcaagttcaaccatcccgaggatatggtgaatgcattaggaacaggaacaaacaatgaatctctaattgctgatagcgctgtcttaccagtgaggccttctgaacccatttgtgtgttctatgcaaaaacaggcaaatgcaaatttggtgccatttgcaagttcaatcatccaaaagatattaagacatcacctttgattgcaaaggaaaccatatatacagcaacaactgatgcagcagatgccccgaccgaggcgtgtaacgcanaggggcttcctataagacaaggtgaagtggattgctcgttttatatgaagacaggcagctgcaaatatggttcta

SEQ ID NO: 276299 - DNA, 451 bp, Zea mays
taaacatttcttcgacattgttatccctggccttagcatgcggtttcctaaagcctccttccaatcaagttcatcctaaaattcatggagacacccgattttatccatacttcaagaattgcataggttcaatagatggaacccatgttccagtatcaatgtcacccgatcaagccgcaccattcaggaataggttgggagtagttgtacttggttccctgcagctgacaggaaatattggtcatatggagacagttctgcacagcgttctgagtgccgatatgagctatatatatggtgcatttctccatgtttgggctcagcatgtaatagaactgaaggaaggttgttgtgagccttgtatgacatgcttaaatttctggataaaatctagcatataataagtctattacatgcttaaatttctagagaaatgacatgttctatgttt

SEQ ID NO: 276300 - DNA, 785 bp, Zea mays
cgacgccacgcgtccaggccacgcgattctaaaagaacaagtgaacaccacaagaatggattaggaaggtattattgggcaaccacaagaagaggattcaagattggaacaagatgaagatcctataattgaaatgactgaacagagggtacatgtaacaacaagaaggtctactgcatcaataatcaatcaagataaggaagcaaagaggatgaagaaggattctttggaaggacttgttgggagatatctagatctaaaatcaaaacaagttgaggatgaggttacacaaatggctaaaggaaaagaatctgctcaaggcaatgacttctccatcatgagatgcatttctgttcttagatccatgaacgtgacagcagatgagaagataaaagcagctgaggtgttcgacataccaaacaacagagagacatttatcagttttagtgttgatgaaccagaaactgccctcctatggttaagacggaagattgataagctctaagacaggaaatattggtcatatggagacagttctgcacagcgttttgagtgccagtatgagctatatatatgttgcatttctccatgcttgggctcagcatgtaatagaaccgtaggaaggttgttgcgagacttgtatggcatgcttaaatttctggataaaatctagcatatactaagtctattacatgcttaaatgtttgaaaaaatatgtatcgagaattggatggaatgcttatatttctagagaaatgacatgttctatgtttaaatttctggag

SEQ ID NO: 276301 - DNA, 582 bp, Zea mays
  unsure (1)..(582): unsure at all n locations
cggacggtgggcatgaatggtctggtctttgatgttcgtcctgcacagggttttactctggaggaaagcaatggatttgagtccacaacttcctttaagcaagaagaacaagatccccagtcctcagtattcacatcaagagatcaaaggcctttgcatgaagttatatttgcatgtgacgataagccaaagcttctgagtcagttaacctctctcctcggggagcttggtcttaatatccaagaagcacatgcatattcgacgagtgatggctattccttggacatctttgttgttgacggctgggagtatgaggctgacattctccaaagtgcattgagggaaggcgttgataaaataaagtacagagcatggccgttggtaccgtcgatgtctgctaggatggatcaccaaccattggaggtttctccttcatctgactttgtccagataccagctgatgcagctgatgtttgggaagtcgatctcaggcttctcaaatttgaacaaaaattagcgtctggatcatttggtgatctataccatgggacgtactgtagtcaagatgtagctatcanagta

SEQ ID NO: 276302 - DNA, 540 bp, Zea mays
accaagatcaccaagcgggaaacgatcgaaggggaactcggtcggttccgcttcgcaaaggggaggagccacaacacatgtacaatcggctcaagaccttggtgaatcaagtgcgcaacctcgggagcgcaaagtgggatgaccacgaggtggttaaggttattctggagagcccttattttccttaaccctactcaagttcaattgatccgtggcaatcctagatatacacaaatgacccccgaggaagtcatcgggaattttgttagttttgaatgcatgattaagggctccaagaagatcatcgagcttgatgagccttccacatccgaggcgcaacccgtggccttcaaggcaacggaggaggagtctacaccaagtagacaaccaattgacgcctccaagctcgacaacgaggagatggccctaatcatcaaaagcttccggcaaatcctcaagcaacggaaggggaaggactacaaatcccgttccaagaaggtttgctacaagtgtggtaagcccggtcactttattgctaaa

SEQ ID NO: 276303 - DNA, 491 bp, Zea mays
ggcgtccacatccattatcgcgctcaggctcgtgccgctcgtggtcgtacgctgcagcaggcgatcggagcaaactaagaagcgaacaggccgcccgtcgacgccatggcgccggatctggtgaacggcgtgctcaactgggtggggacgccggccatggtggccagcctgctgctcttctacccgccctactatctcttcaagacatgctactccttcctttcctggctcttccccgaggacctcgccggcaaggtcgtcctcatcactggcgcttcctccggcatcggcgagcaactggcctaccagtacgcgctgaatcgggcgtccctcgccctcgtcgcgagaagggagtcgagcctccggcacgtcgccgaccgagcactacgagctcggcgcgcgcgacgtcgtcgtcctcccaggcgacgtctccgcccccgacgacagcgacaggttcgttcggaccgcgatcagtcacaacgaccgattgg

SEQ ID NO: 276304 - DNA, 585 bp, Zea mays
ctgaggttgccaaagaggcgtctgacatggtgttggctgacgacaattttagcaccatggtttctgcagtcggtgaaggaagatcgatctacaacaacatgtaagctttcataagatacatgatttcgtcaaacattggtgaagtcgcttctatattcctaacttccgccctgggcattcctgagggtttgattcccgtccaacttctatgggtcaatctcgtcaccgacgggccccccgcaactgctctaggtttcaatccgcctgacaaggacatcatgaagaagccacctaggaggagcgacgactcactgatcactccctggatcttgttccgctacctggtgattggcctttacgttgggatggcgaccgttggcatcttcgtcatatggtacacacatgggtctttcatgggcattgacctgaccggagacggccacactctggtcacctactcgcagctttcgaactggggccagtgctcttcctgggacaacttcacggcctcgcctttcaccgccggagccagaacgttcgcgttcgacgacgacccgtgcgactacttccacgcaggcaaggtga

SEQ ID NO: 276305 - DNA, 801 bp, Zea mays
gaccagacgcagagcgttcttcttccccgacggcccgggccgacggctcgactccactagtcgctggaaccctctgcaacaaagccgcctccacctgaccacctcccttgagctcttccccttcctcgtgggttgtgcgagccctctaccggcgcgcagtacaggggctgattgggtgatcaaacccgcaagatttgggtttgtgatttgggagcaggaggcggtggcaatatggaatataaggcgagatctactggaacttcaggaacttcgtctaaaagtttccgtgatctgtacaatatgaagtactcgagctacttaaacgacgaaccaatgccggatgctacatcggaaaaggagcagggaaatgagtatttcaaacagaagaagttcactgatgctattgaatgctactccagaagtattgggctgtctcctacagcagtcacatttgcaaatagagctatggcatatcttaaactaagaagattcatggaggcagaggacgattgcactgaagctctgaatctggatgatcgctatattaaagcatactcacgccgaattactgcacgaaaagaacttgggaagcttaaggaggcaatggatgatgctgaattttctatcagtcttgatccaaacaattcagagctaaggaagcagtattctgagataaaagctttgcacatggagaaaatggctaaaaaggttccagtgccagctaaacgtgcagtttctggaattgataaaactgcagatgtcaattctcacccaccgactatctcccagaaggacaatatt

SEQ ID NO: 276306 - DNA, 539 bp, Zea mays
cttctctcttagattcttacattttcgcaaatttattagagatacacatttttttcatgtcatcagttgtctactgcgaatttttgtttggtgatccatactttcgagtgcatccccgtgccggaagcggtcccctctaacgactccgccacgccgactgaggccgacctgttagatccctccatcgaggctcctactgagatgactccggtcgcgaagaggagcccagttgagctccttcgcgtgttctacgtcaaattcaagagggatctgtagaggtttaccaacgttatcacttcagcacctgctgggacgaagtgggtgtcgaatgagcttgctatggtggctgagtccaaggaggttgatggagatatgatcactaaggctgtgcttgatcaggtgagtgacctacaaaattttagtttcgtggattcactcaagtaaatgcttcatttggatataagattgttaacttatatatatacttacattgttgctgcttcaatgtttaatgaattcgataaaggtgaatcttaact

SEQ ID NO: 276307 - DNA, 1011 bp, Zea mays
acatgatgctgaccgagcactgagtctcttgctaataaggcaacatataattaaggaagttgtggtcacaactgtactcagcgacaatatattttgaagtattttgccaaaacaatccacacaaatctatgtgcagtagcattttttctagatctttgtttccttgtttgtcctgtttgcttctctactacaccataagtagctaccgagggcgttcaccaggcaccatgcccccgccagtccgtcaccatcacgcggcgcctccaactacgcccgagccatcagcgcgcccgctgccaaccacgccttccatcaacgccgcgcctccactggagccatcctcgccccaaatcccaacgcccttccccgaatcctcgccgcagtcgacgccgtgtctcccatcaccatacgtccaccggcgtcaccatgcctccacccttgccctccccgccccctcgccaatcgcgcagcggcacgccatcctagctcggcaaactctcttcccgcaccacatccacacccgagcctgcctccctcgtgctccctactgacgcctgcctcatgctcctggtcgcccgtcactccctctcctccatcgtcgcctctcgcacacgcacagaggtgagtcccccctccccctgctaggtctctgattcttcttatcgacgagcaagtacggaggagctagcggagcccacaagctcgacccgcgaccgaaggtacaagagacgctgatgttcaggctcttcatccgcgcgtagaaaggatggcggcagcggcagacctactcggcgtcagttgcgttgtctactgcgaatttttgtttggtgatccatactttcgagtgcatccccgtgccggaagcggtcccctctaacgactccgacacgccgactgaggccgacctgttagatccctccatcgaggctcctactgagatgactccggtcgcgaagaggagcccagttgagctccttcgcgtgttctacgtcaaattcaagaaggatctgt

SEQ ID NO: 276308 - DNA, 322 bp, Zea mays
cacacccccagcgcagcagccctgcccagccgcgcgagctagaggccgaccagaccgaccgacaggagctcgctcgctcgcaactccgcaatggcgtccatcatcgtgcaggcggtggtgatcctcctggacgtgatcgccttcggcctgggcgtcgccgccgagcagcgccggagccgggccaccgtcaccccggacgccgccaaggagtacgactactgcgtctacgactccgacatcgccacggggtacggcgtcggcgcgctgctcctcctcgccgccgcgcaggtggtgctcatggtcgccagccgctgcttctgct

SEQ ID NO: 276309 - DNA, 776 bp, Zea mays
  unsure (1)..(776): unsure at all n locations
nccacgcgtccgcggacgctggcgaccgtggggtgagctcagaggttgaagtgatcctaaacaacgtgagattagtcgcattggctcgagcccgggggaatgtcctttttaaggcaggcaagttacctgaggcgtcgctagcctatggtgaagggctgaaatatgagccttctaatccagtgctatactgcggccgggcagcttgctggtcaaagctgggtcggtgggcaaaagctgttgaggactgcagcgaggccctaagagtccagcctaactacacaaaggctctgctaaggcgtgcggcgtcatatgcaaagcttgagcgctgggcggactgtgtgcgggactacgaggtgcttcgcaaggatcttcctggtgacactgaggttgcagagtccttgttccatgcccaagtcgcattaaagacagcccgtggagaggtggtatctaatatgaagtttggaggggtagttgaagaaattatcagcttagagcaactccaagatgttatccgttcacctggtgtatccgttctttacttcatggctacaatgaacaagcaatgtgcacaaattaccccgtctgtggactccctttgctccgagtgccctgcattgaatctcctgaaggtaaacgttgacgagcgccctctggtagcaagcgcggagaacgtgcgagtagtcccaagcttcaagatttataaggacagcacgagagtgaaggagatggtctgacctagcttgcaagtcttgcgctattccgtgaggcactatgct

SEQ ID NO: 276310 - DNA, 426 bp, Zea mays
gcccaagttgccccagagcttgtagtttactcggagctacttagtacaaagaggctatacatgcacggtgtaacgaccgtaaagccagggtggcttttgaagtatgccagttccctctgcaccttctctgcgccgctggaagatccgaagccgtactatgacccactgaacgaccaagtctactgctacgttagcccggtcttctctcgtcataactggcagcttccgttgcacagtttacctatcaaagacggtgcgagccggctgcaggtgtttgcatgcgcgttgcttaaaggggacgtcctgccatgtctacgggacgccaaggatttcctcgcgctgtcaccatccgctgtgttggggcctggcatgccacgtaaagtgggagaccttcttagcaggatgaagatcggtccgaagttagtc

SEQ ID NO: 276311 - DNA, 1779 bp, Zea mays
  unsure (1)..(1779): unsure at all n locations
taaactggaaggcaccacacgcagtgctccacaagggtcacctggtgcctcttctggaattttagctaataacatatgttcaggggcaaaaactgcacctcaatcagccattaacgagtctgagaagatctggctgtacatggatccttctaataaaatccaaggtcctttctcaatcatacatgctgcggaaatggaacagcaatggctacttccctcctagtttggaaatatggaaagctagtgagaagcaggacgattccattctattgactgatgctttggcagggaagtttgagaaagaccttcctccatgggaaccgccacatgttagtttggttcaaattaacaaaacccctcttgagcaaagcacaatagctggtgaacaaactccaaaatcagtagttgcaaagtctttctcaagtagtaatcaaagacatggttatagttcaacaaaccttggaacaaccatgatccattctggcacacaaggttattatggaatgcaaaattcccatgcagcatacacaagccagcaatctcttactgggagttggaatgccacgtcaagtcagtttggggttgcaataagtcctttgacacctacccagcctgccatgcaaagcctttcaggacaaaatattgtggctgcagaaaatatgggtcatttaactactggaatggctcctgcaactgcaaatgcagaaatggttaattcagatttgacttcccagaaccaaatgtcgtcttctttaccgcaaacggacggcagattagctgatgacattgaatccaaatcaggagaagatgtttcacatggaaaagtgagctcttcagccaaagcaattggaccactgggtgcacagcttggacaaggacaactgaacactcagcaacatgaagacacaaaaaaccagatgtcatcaactgatgtctccaactcgacgatgccatcacagatgatgtcagcaccatctgctgcatcagtacagccttcattgacaaccactgctcgcagtgataatcaaagcagtgggtgggctgtacctgcacaaatggcgaacacacctggccagtctcagataactggaaatctaacctggggaaatacacctcagggtgacgcaagcttaggttggggaatggtgggacagagcaatatgaatatgccttgggtagcatcagctcaaggtgcttcgggctacaacatgggtgtagccatgccgacgcagccaaatgcagttccaaacatgggctggttaccaaatccaggaaacaccagcatgaacatgatctgggctgcaactcaaggccaggggactccaaatgcggctcctatgatgggaggtcagatgcaaggagtcccaatggccccttggggtggtgttgcagcaggaagtgcaaattcttatcctgcctggggaaaccaacaagctggaaacatgaaccaaaatgttggctggagtgctcctgtgcagggaaatccaggtcaggcaaataacaacatgaactggaacgcaccaaatggtaatcctaattggaataatcaacagagagagaatgggggcaggcactctggacaccgtggtgcttttagtgctggcgactcaggcagaaagtcatggaagccacgctctggtgccgatggggggtcatgggggacatanaggagtctgctatacatttcttgaacgcggngactgctttaaagttgactgcaaattcgcccattcaacanacacaganggatatccatccatccaggattcgggcaacgag

SEQ ID NO: 276312 - DNA, 842 bp, Zea mays
cggacgcgtggggcgctgaagtgcagaatttaattcaacgcctccgtgtgatggagcagaaccagcagcagatgatggcacttttggcaattgttgtccagaatccagacttcctgaaccagctcgtgcagcagcagcgcaggagtaactggtggaatgatgatggtaacaggaaaagaaggttccaagctctggaacatggtcctgtagatgaccaagagacttctggtggaggcgcacaaattattcaatatcgtcctcctgttcctgaaagcttccaatcagccaataccagcaaatgaagctttctattcaacccctgcacaaccagcttcaagccctgcacttgagatgcccatggatgtagagatgacttcaaacaatgttgatacctttgattcaactggcaatgattttactgacacctctgctctatgtgaatgggatgacatggatatatttggtgacgaacttgagcacattcttcaacagccagagcaggactttcaagtggaccctcctttaacagttgaggattatggttatgatcatccacggttagagcaggactgtcagatggaagcacaacagaattgcaaaaatcctcaatatgttgcctgtgtcttgaagcaaagggaaagccatgcatctaatgtccattagtactgatcagtttgagctgatgtcataactgaagcatgagccgtggtcccccagaatgttgtccagtaacattagtggatagatatcttgtgatgaacagaatcgtgagactggcaggttagccaccattgggaacctgaagaccggcggggttgctcagttttctgtatactaatact

SEQ ID NO: 276313 - DNA, 444 bp, Zea mays
cccacgcgtacggcctctgattgctttgtcttctccagttgcccagcttcgtctccggtaacgcactcagtcgatggcctcacccgcagccgcagcagcaccggcagagttcacgcagatggaagccgcgcgccagtccctcatcgcgatctcccagtcggtcccggaggtcggggcgcccgtcgtcagcccgcccagcggcggcggcggcggcggccgaggcatggatgagaacgggcacgaggacgtcgcggagcggaggtacagggcgaagcttatctccatctccaaccagtcgcccgacgcgcggcctacgacgtgccctcgcaacaacggcgccgcctaaagagccgcgtttgtgtatcgtaacgtcgccgcatgtacgtgtacgtgtacgtgtactggacttactgagtgtgtccgagtgtccctgtgtgttctgca

SEQ ID NO: 276314 - DNA, 858 bp, Zea mays
attcgttgaacaggagtgcaagaaacttgtcattgttcacctatccgagagtattttgttgttctaaggaatttaaaactgcttgttgttccactatttgaactctgcaacaatgttcaggtgatgcagcattcatagtctcgttgtcgatggtgtccggctgaaactttggaaactttacacatccattgagttctcgatctgggagcagtaaatttatcttttttgaagtagagattgtacatggcattcttgttttatctattttgtttcgattaaccttgtttgtcttaaactgcttacattccatatataggttactgcctccattctacagggtattgctagtatgatgattgaaatacacaatttattgatattcagacttaatatattcttgtgagcctttccagccataactgttgtacatggttttccttcttttgtttggccataacccgtggtgtgccaataattgtatattagtgtcatgccttccaagttccaagaatttattaagatttggtttctaaagcctgtttcatgtacattgatccagcgatacgggtctgccatctctatatgacatttggctgtaaatggattatgatcatagttgaataagttggagcgtcaggtcaatggtccccccaataattaaactagatggtggagtggagctttgttttgggatgatgcaagcaacttttatgtttcagaacattgtactcaactgatgcttgtggccgttgaacctattctacttacttttggatttaagttaaggatagttaaaaatactgatgtttacaaaaaacaaccaccccgacaagggcggccgctcggacgcgtggacga

SEQ ID NO: 276315 - DNA, 255 bp, Zea mays
tcgcgtcaggtcaatggtccgcccaataattaaactacatggtggagtggagctctgctttgagatggtgcgggcatcttttatgtgtcagatcattgtactcaactgatgcttgtggccgttgaacctattatacttacttttggatttaagttaaggatagttaataatatttgatgttgaatacttgtgttggatgtcatatgtgtcaattctatgtcgatgctacaaaagttgtgtaagaaacataccttt

SEQ ID NO: 276316 - DNA, 454 bp, Zea mays
gtgatttcaggtggcgcgcctggcaagcataaaatccagggagtaggcccagggtttctacctgaagttctggacacctcggtcatcgacgagaccgtcaccgtgagcaccgaggaggccatggcgaatgcgaggaggctggccagggaagagggcctgctcgtgggcatttcttccggagcaaacctggcagcttgtttgaaggtcgcttcgagacaggagaacaagggcaagatgatcgtcactgtgttcccaagtggcggcgagagatacatcaactccgacctctttgcacatgtgcgagaggagtgcattgccatgacattttgatcttccttttttcttttggacactttggtctgaatggtgtcagcattctccacaccacacagacatattttcaggacatggtgttgtaaatttagagaaatatgtgacatgctttctacatatt

SEQ ID NO: 276317 - DNA, 676 bp, Zea mays
tggttaaaacgcttcatgcatcatagaggaggcgagagcggaccatggagatggtgcatttgtcgaaacattaccaacacaaggggacgaaaagacggaacatgcaaactcaagtgcctcaggttctggagtgccagaacgggtaaaaccaaaagcaagcgctgcatcaggtccatctctagatgggagcacaaaagctttgggttggcaactgctgggctcatctctagaggggagtgcaaaagcttcaggctggaaaccgccagctttatcgattgaagggattgctaatgcctcaggttcgcaagcattgtatccttctacgcaagggggcacaaaatcttcaggttgtcagcgatcaagttcatccccagatgggagtagaaaagcctcaggttggcaacagtcaagtacatcaccagtggggagtggaaaagcgcatggctggcaacgatcaggatcttttacccaggggggtacaaaggctgcaggtcggcaaccctctcgttcctgtacagatcggagtgcaaaagttgatggctggcaacgaacaagttcatctccggagggaagcagaaaagcttcaggctggcattcgtcgggtcgtgacagctcaaagatcgcatccagtgccagcgaaaaccgtaaattgtcttctagtcaccaagcgacgaca

SEQ ID NO: 276318 - DNA, 631 bp, Zea mays
cccacgcgtccgcaatctccagcataacaaattcgcgaatccgactctcgagcgtacctaccatggatccaaaaatcttagggatacccatggcctaaacttgttgctgaatccccgctgcctccacggcgtccatgccctagctatttgatgcttgcttcagcccagggttttcctccgaatcccccttctccagcctcagctcccctctccaatcgcagttgcagttgcggctgggctaggctttcgtcagcagcacggtcctcccctcggctcttgacagatcgaactgcttccatcagcaattcaatcgggagatggccaccactcagttcgccatggttgaggagctggcctcgctcatcaaggacaacctgcacagcaagcatctcatcctctccaccgaggagtccctcgtcgcagccctccaggagctgcactgccgtgaagaggacgacggcgcggcggatacgatagagctccagcctgccggggcctaccaccgccttctcttgcatcgccttgctgaaatttatgggctcgcgcatgaatcggccggtgaaggcgaagatcgacatttggtcctacagcgcttccccgaaacagccattccatctggtcttggtagtga

SEQ ID NO: 276319 - DNA, 425 bp, Zea mays
cctgatctcatttccattcagcccggcgccctggcccgaagaacgctaaccctagcggctgctccagtgctcccccgtgccccgtttccgcttccgccgccggccgctcgcccgcaggccgcagcgcgctccgtgcctccctccgcgctgtccgcggaccgcggtcccctgcagccctgctctgtcgtccgcccccagccccctgctccgctgcgggctgcggcgctgcctgctccctggctctcagcctgccgcttctcagtccacttctgccgcagcccctcttctctcggtctagagatccgtccgggcgcggcaagctcgctttcgtttcgcattcagtgaacgcattggctatatcaaccctgggggcataactctagtagaaaaagggaaagaagccaggatctaaggcaagggttttc

SEQ ID NO: 276320 - DNA, 654 bp, Zea mays
  unsure (1)..(654): unsure at all n locations
acggcgccgagcgcatcgccgccggcccctccctccctgcgcctgttctcagcccgccgcttctcagtccacttctgccgcagcccctcttctctcggtctagagatccgtccgggcgcggcagcctcgctttcgtttcggcacggagaacaatcactttagaagacttgtactccttggcgtgtcatactctttgtaacaatcttaccattcttgagaagaggtacatctgtccgtcagcaatgtccatagaagagaggaagataagtgtgataagcaagagcactgcgctaaatccaaatgcagaggaatttgttccttcatcccttagatctgtcaatgattcctccaagagatcatatgcaactacggttgtctcagggatatctaaagaatccagcactgacaagccagagtcaattttacgaagtaactctgatgaagaagcacatcagtactggcagcaacagctccctgacgacattacccctgatttcaaagtcatgggacaagatgaaagtcctggacctgacagtctatcactcacagacctgtccataaatgatggcattggcacatcaatattttctccgaaccagacactgagcatgcagcaccgtgcttcgccttttatcagggacaaactanatacac

SEQ ID NO: 276321 - DNA, 275 bp, Zea mays
gttctcagcccgccgcttctcagtccacttctgccgcagcccctcttctctcgggctagacatccgcccgggcgcggcagcctcgctttcgtttcgttagtcgtagatttgtgtgctgacggatgccctgctaatccaatacatcgatccgtggcctgtctagatttctgttcttgaaaacgggcaaggtcgccatgagttcacagtgtacgagttcttgctttcttgttatctaatcaaggtgttggtgcagcttgtttaccaaaatttagggg

SEQ ID NO: 276322 - DNA, 707 bp, Zea mays
cccacgcgtccgtggcggcggtggcggccacgtgggggcccatgaccgacggcgcgcgcgtcgagacggcgcccaggctcgccccatggcgcgtcgacccgctcccctgctacacctaccgcaagtcactccccttcctcatcggcctctggcactggtgcatatctgtggagagcaataacaggcagacctgtgttaagctctttgcagagaatacaagttctctcaagaacggttcctcagccccaatagcttcctttatcgccaaacttattgtatctcttccacctaatcagcagaccatagtccacccaggaatttttgacaaacagctgaaataccacggttttgtgtggacaatcgatagcaccgtcactgggaggtttgtgattgagatagagtttcgtgacctgaaggtcgctgatccgtctggccgcgagccggcctcgatttgggcctcccgccaggtcaagcagtgctcggacagcacggccctgtcgtccctggctcggatgctgcacgaggacgtcctcaccgacatcaccatcaacgcggcggacggcagcgtgggcgcgcaccgcgcggtcctggcgacgcggtcgccggtgttccggagcatgttctcgcacgacctgagggagaaggagctctccaccgtggacatcaccgacatgtccctggacgcgtgccgcgccttctcagctaca

SEQ ID NO: 276323 - DNA, 521 bp, Zea mays
tgcaattttaggccataccaatatgtcattgagttgcttggcacactgctactgaggaaaaagaccaggtcaaccacttagcctagctttagctccaccaatgcttacaaaagttagaaatatacagctcattgatttatgtatccatgccaaaaaaaatttgtaactaaaaatataattatacaaggttcgccacaccatcatcatgtgccacggtatgaacagaaaaataatatacaatggataaaagcaccaaacgttatggtcaaatgaacttaaccaaaagcaggcataagtgtttggatgcaaagagaaggattagagaaatggtatatcctatttttctgatattccaatactctcgaaaaggttgaatatccaaacttcccacttgcttttactatttcatgattattgcaaactaaggctgccagacttaaaggacttctgatctcacatgtatccattagaatccacagaaactacagtggaaatcattgttaattgatctattgccacat

SEQ ID NO: 276324 - DNA, 435 bp, Zea mays
agcagccgcagtccaccgaccccgccgtcggtcgccctccatctcctcgccgccgggcgccctccatctcctcgccgctgcctctcggttgtatcagtttatcttgcctcaggagctttgttaattaagaatttgacatcattggcatatggcgtcccagaagagttgtcttctgatcactttctcccacgagattgtagatggggtgcctctgtctgtttcatcaaactgccttcctgtaaaagctttgaaatatgaacctgctggttattcgttccatgctgcggcaatgaagctgcttggtcttgcggagcatgaagatatagaaactgatgatcacagcgtttcatcggatgacaaaagccaagattttaatactgcttctgatacctttagcagcaaaggggaagaagaagtcatctggcagtcaacagc

SEQ ID NO: 276325 - DNA, 1095 bp, Zea mays
  unsure (1)..(1095): unsure at all n locations
ttcgttttgctagcgttcaacgaataggagaatgaccgcaacatgcagattcaagcatccattgctgaggcttttcggaaacaatcacaggttattgggcggaagtctactgccaaagctactgctgctgcatttgtaagaagatcacgccgtaacattcggcctaatgggcagaatacctatttccgtggccgaggaaaagccagttctgatgacgttgctctggcctgttctgaagatgaagaggatggaaacggtgaaagctgtagcaaagaggcctcatctgcggaggagagttccccagagaaaaagcagaaacgactgccaaaatggccaacaccgcgttcttcacctgcccgagcatgcaatgatgaggttgcttctgatgaaaaggatgatgtaggaatatccagggaaaatttcagcacatctcctctacgagcatggggaaagaatggcactcgcagtcagactcgccacagtagcttcagtggttcaaatggcaggatggtcaagggtgggcgcatgatcaagttggttgagtgcttgcgaaattctgacgacaatgaaggcgagcgggacgcccatctttgtctgcttccacttgatggacaaacggcaccaaatctggagtcatatctgtgttgcggcccaactctgtccatcaaacaactttgtcaggtcagtacttgttgaaacacttgtgtccatcgtcagaaatcagaacttacagacgaatgtctctgtgtagtttgtcgccagtcagacatctcacanagatgaagaagttgagatgtatgcgctgaagccttcttgtagcaagcctgtcagcactaatacatgcngtcctgacaaagcaaggctcgctggggaggaacgcctttcagacttgcgctcctcgttcacatttcctaatggggttctggagctggtgtatgccataaaagtggctaactagatgctgagtgaaggcccattagttcaaatggaagtgttttttgtttatacatatcttcatcgtgatcccttgacgaaatgacaggtttgggctcttgaatacaacttggaaggaaaaaaaaacgttgggggagacta

SEQ ID NO: 276326 - DNA, 830 bp, Zea mays
ggaccgtaggcggacgcgtgggcggacgcgtgggcggacgcgtgggttggaattctatggttacacgatatcagaactgatgggtgaagacactgcactgtgcaatacaatatggtcacttagagatgcagctcagcagacattcttcaatatcctgaagagtcgtggagagaagttattgcgatatcctccactagttgcagttgatctctctcctccaccagctgtaagagaaggaatttctttgctgcttgagctcatagatacctacaatagcatgatggttcctgcctctggaaaaagaccaaactttgaccctgttatttctgcattattggatccaataattcaggtgtgtgagcaagctgcagaggcacagaagtcaaaaggatcacttgcgcggcgtggtagaacaagctctgatcctagtggaaatagcagggattctatatcagttgatgctattctgtctaagaatttatctacgtcgattctgagtgccgaatcttcatccaaagtctacctcatcaactgcttgtcagctattcaggagccattgatgggccaggaggtcgctacaagctatgtaaacaacctgcgctctatgattgaagcacatatttgtgtccttgtcgataaagaagttgactgcattcttaggaaatgtggactatcaaataagatgccgtacataaaggagtatggtagcaaggctgatgcaaggcctctggcagatattatcgagacgtcgccacaaatgcttatggaatgcttgaaggcattctatggtattgtgactggaacagaaggttccttgcctgaatttgagc

SEQ ID NO: 276327 - DNA, 1404 bp, Zea mays
cgacccacgcgtacgcccacgcgtccgcggtcgcgtgggcatttcacttaccgatgtgagtcttggccggctggttggtgggatccggcggacagcgtcgccaggctgtgttccccccaccctccagccagcctgactcggggtctcgggcaggttccgccgcatcgtgtcgtttcttccctttcccgtttcccccgttcagttcagcttcggttggctcgccgtactcgggtttgttcctcgcctcgcttcgcttccttcctccgcagtcctcgtctcgaattcgctcgcggtgggagaaatcggggcgcgaggatgaccgtgatcgacatcctcacccgggtggacgcgatctgccagaagtacgacaggtacgacgtcgacaagctcaacggcgcgaacgtcgccggcgacgacccgttcgcccgcctctacgcgtccgtcgacgcggacatcaaccaatgcgtcgataaagcggaaacggcgaagcaagagaagaaccgggccgcggtagtggcgcttaacgccgagatccggcgcaccaaggccaagctcctcgaggaggacctccccaagctgcagcgcctcgccgttaagaaggtgaaagggctgacaagagaagaaattgcgacccgtagtgatctggttgccgctttacctgacagaatacaatcaatcccagatggtagttctactgccacaaagaaaaatggaagttggggagcctcaggatctcgcactggaggagccataaagttcgactctactgctgatggaaactttgatgatgagtactttaaggggacagaagaatctaatcagttccgtcgggaatatgagatgcgcagaatgaaacaggatgaaggtttggacgttattggtgaaggactggaaactttgaaaaacatggcatctgatatgaatgaggaattggacagacaagtccctctgatggacgaaatggatgataaggtggatagagccaatgcagatttgaagaataccaacgtgagactgaaggagactgttcttcaacttagatcaagtcgcaacttttgcatcgacatcatccttctgtgtgtcattcttggtattgcggcctacctttacaatgttctaaaaaagtgaggtgggcgtgggttgccttggaaccgctcatgtcgtggtccctttgtcaccatggttctacccagttctttgagcgatttgtggcttgttttgtcttatatctgtattattatggtgtccaagttgaaccttgactaggcttgttgaagagaacgctggtaacatgtttgctatatatctggggagtcgatttcgtagtgaggaatgattacacggcaccattcttatcgtcttatcgaaccacgggcttatgtatattcattccgtcagggcttt

SEQ ID NO: 276328 - DNA, 612 bp, Zea mays
agggaatcctgtttcttggagtcttacccaaatcaaagcatacttcggtttatctggagggtaataaattggataaccaaatgaagtggtatctagtaacgattagatataacagtaaggattaatgatggatttgaagtacaatttcagcataatggaaggagaggaatcattgtcacgttattctcctgaaattgttgcaaagacgtcaagtgctgaaaccatagctcttctgcctcttgttgttcttatgcatggaactgaagattattcaataccatcatcttccagtcaaacttttgttgacgtcctccaacaagctggtgctcaagcaaggttactattgtacgaagggaaaacacatacagatatctttgtacaggaccctctaaggggtggaagagatccattggttgaagacgtgttgtctattattcatgctgatgatgcaaatgcatgtcaaaagattgctttagcaccaactcctaggagattagttttcgagtggcaattaaagttggcacgcaaaattagtccattctagcaggtatgaaccatggtgaagtagtctgtgtgcaaaatatctagtatgaaccatggagaagcttggag

SEQ ID NO: 276329 - DNA, 919 bp, Zea mays
gcgccattgttcaacacccgttcgttcaagatcgcctacgtgccgaacggcaagggctacgccgagatcgtgtgcccgcaccgccagtcgcagggcggcgagagcgagcgcgacgcgacaagggcaggaggagcgaagaagaagaagaagaatcgtctgaggagcaggaggaggccgggcaggggtaccacaccatccgggcgcggctgtcaccgggcacggcgttcgtggtgcccgcgggccacccgttcgtcgcggtggcgtcccgggacagcaacctccagatcgtgtgcttcgaggtccacgccgacaggaacgagaaggtgttcctggccggcgccgacaacgtgctgcagaagctcgaccgggtcgccaaggcgctgtcattcgcctccaaggcggaggaggtggacgaggtgctcggctcgcggcgcgagaaggggttccttcctggccccaaggagagcggcggccacgaggagcgggagcaagaggaggaggaggaacgcgaagaacgccacggcggccgtggggagagggaacgccacggacgtgaggagcgggagaaagaggaggaggaacgcgaaggacgccacggccgcgggcgccgcgaggaggtggcggagacgctcatgaggatggttaccgccaggatgtgaggccgccgcgctcgccaaaacgagcaagaagcaacaagagggtggcgcgcgaccgacgtgcgtacgtagcatgagcctgagtggagacgttggacgtgtatgtatatacctctctgcgtgttaactatgtacgtaagcggcaggcagtgcaataagtgtggctctgtagtatgtacgtgcggatacgatgctgtatgctactgaggcaagtcccataaataaataatgacacgtgcgtgttctataaaaaaaaacaaaaa

SEQ ID NO: 276330 - DNA, 416 bp, Zea mays
cgcgcgacgcggacggtctcagccgcaacgtggcgctaatccgggagctcaacactaatatcgcccgcgtcgtggacctctacggcgacatgtcagggtccttcgcccgcgccgtcgccgccaagaaagacgccgcaggcgacaagtcgggccctaagaggccccgctccgccggcgctggagggcagcagcagtagagccggcgtcttatccagttaatccatcagaggaggctccgtcgtgattgacggcggcggtcaggaaacttcggggttggggtgggtgcactgcattggaaacctcctttttttttttctccgtccggtgaaaggtgacttgaatgatgtactgctggattaactagtttggtgttgagaattgagatggacatggcgtggacaccttcttgttgtcaa

SEQ ID NO: 276331 - DNA, 497 bp, Zea mays
cccacgcgtgagaaaacctcgccgtcaatgtcagcgttcgttcccaagggcgctagggtttaaccccccaactgttcggtctctctctctccccgaatccaattcagcgtcatctagtccgggagcctgcgacatggggtacctccaggaggcccgggagaatcacgtcaagaagaaggtcgaggaagctctgaggagcaaaatgaaacaaaaggctcttcaggaatgtgatttctattgttcaaaatatgctgagtgtgcacgaggaagaacattttctgtggtatggcaatgccgcaaacaagcaaaagagttgaatgagtgccttcatcaatacacaaatgatgcaatcctggaagaaatgaagaaggcttatatgattgagcaaaagagcacaggagatataatcacataagcaaaaatccattgcacaatgtgcatcacgatcaccctggttgtatggatactgttggctttgatagaaactattcatgggt

SEQ ID NO: 276332 - DNA, 839 bp, Zea mays
ccatgccggttctgaattatggttttgctgatgaagataatccctttgatcgtgtcgcaattgaggcatctttaaatacagaagatcctcaataccaagaaaagagaatggctgctcagaggaatggaaaacttgctatccaaaattttaatgtctatgtaggtaaagagaaacaaactgttgcagaaatgctgccttatttgagactaggttacatatcaaatcctgatgaaatgcagtctatactctcttctgaaggagatacatgtccagttagtccatgtacagagcgagctgtacttgatcaacttggtggttacctggaatctcgattggctggatatccaacaactttgaatgaagatgaagctatgttggcagatggcagtttggaaccaaagcaggaagttgctactaggcttgtgaggttggagaagaagatgctccatgcctgtctccaggccacaaatgagtttataactgacttgccagaccacacagtatcaccttgccctgctcaatatgcccctgaaatgaaatgaggttgcatgttgttttctttcccaaatggtcatatcattaagaatgtcacaatttgatcaatgtgcatatctttttgaagaccatatatgctgcaaggtggatataatatttgaaagaatttgctccttgttttctttagagattacgtaaacgcaattgcttgctagaaggtaaatgaggctgaccgaagttgtgttacattgtttcatgccaaaaagcgcgatacgtaatacaaatgtattgttcattgataaaaaaaaaaaaaaaaaaaaaaaaaaaaaaaacggacgcgtggg

SEQ ID NO: 276333 - DNA, 549 bp, Zea mays
atcctcctcactgaaagtggagacgtgaaggttgcggactttggtgtttctgcacagctgactaaaacaatgtctaggaggaagacatttgttggaactcccttttggatggcacctgaggttattcaaaattctgaagggtacaatgagaaggcagatatctggtctttaggtatcactgccattgaaatggctaaaggtgaaccccctctggcagatattcatcccatgagagttcttttcatcatacctcgtgaaaatcctccgcagcttgatgagcatttctcgaaaccaatgaaagagtttgtctcactatgtttaaagaagaatccagcagagaggcctagtgccaaggagcttcttaagcatcgtttcataaaaaatgcccgaaagactccaaagcttttggagcgaataagagagcggccataatttgcagcaaaaagcatggatgccacacaaaatgggcaaacacatgatgaagaggaggattttggtacaggcactatcaaggtcaataggacaaaagatacagctccatctttgagt

SEQ ID NO: 276334 - DNA, 492 bp, Zea mays
gggttcaaagcttgtcggatgtggatcagccatcccaacacttggcgtttcaaatgatgacctttcaaaaatagttgagacgtcagatgaatggattgcagctcgaactgggattcgtaacaggcgagttctttcaggagatgaaacattgcgggggctctcaataaaagcagctcaaagggcacttgaaatggccaaagtaaaagctgaagatgttgaccttgttctcctttgtacatctactccagatgatttgtttggaggtgccactcaggtgctgacggacgtggggtgcacaaaggcttttggatttgatattacagctgcttgcagtgggtttatagttggcttaatcacagctactcgttttatcaaaggtggaggttttcagaatatcctagtagttggtgctgatgctctttcaaaatatgtggattggacagacagaggtacatgcatcctttttggtgatgctgctggtgctgtgttggt

SEQ ID NO: 276335 - DNA, 353 bp, Zea mays
cacactgccactcatcacattggcacccctccgacacgggccgggacttctcggactgcaggcagccaggcacgcaccagcaacaccccccacccgccggctcggagcggggccccacccgaatcacacagatcgggacgccggaggaggagcaacgccgtcccgcatcaccggagcaacgcgtgcgcggagaggccagccagcgcaggcgcagttcaagctttggattcccggatcccacaccaccggtctctctcggggagtgtaatccagcgagcgttgagttgaaagccgcgcaagtggagatgagtactctgaagaaatccgacaagaaggctgccctcgacttcgca

SEQ ID NO: 276336 - DNA, 1163 bp, Zea mays
agcaacacgcaaacaacacggtgttctcagacgcgatatcagccccaagtattccagcccggcttcagcagtaagaagagttggttgggattcagcaaaaacccgagatcgcaccccttcgcgtggcgatgcgtggaggagacgtaacagcagcggaggcagggtccccgcgctcgccggacctctacgatctctccgacgactccgactacgccgccgccgcttctgaccagacggcgatgcggaccgatcccgcggacagagcctcagaggagactgcgagggtggatgtggtatatgagaaggagcgtgtgaccatccacccgtcgcagtatggttccagtcgtatcagcgggaagctgcgtctgtttctgcagcagggatcattgttcctgagttgggagccaaacgaaggagccggctctttgtcaaccagttcagtcggtgtggaagtagaaaaatatagaaatctgtacactatcaaggccttgcctttaagtgatgtacgcttcatccgtaagtacaccccaacgtttggactggactacgtaataatcgttctctcatcaggcctggctttccctccattctatttctacaacggtggaattcgtgaattgtttgcaacactgaaacaacatgtattcatcatcaggtcggatgacgatcctaatgtttttctcgtcaacgactttcaagatccccttcagaaaagcttgtcatccttggagcttccaggagtagcctcagtagcaaatgccatgtcaagacaaaattcactcagttttactgggtcaattgatgagtccaggcatggggataatgttagacatggggcaacttctagcatgtctcagtatagctcaaagcaaaatcacaaatcaaatgatccaggtcgtgatctttcaattcaagtcttggagaaattctcattggttactaaatttgcacgagatactacatcaagcctttttcgagacaatagtggtgctcatgcttatggacgccaacaacatcaatacattttgggataataaatccactaataaacatgaaagtcagtatgtaacaccagaaaatgctcgggcacctcagcaacacgcgagtcagatccattactctcgtatggggaaacgacgagatccccggtaagtgcgaagagt

SEQ ID NO: 276337 - DNA, 427 bp, Zea mays
ggagaaagtagtgtgtatgatgagaggctacctaagagaaggaagcggaacattatgaatagtgagcaaatagatgaattagagaaggctctagtagatgagcctgagatgcacaggaaccctgttctattgcagggttggtcagagaagctaagtctgcagggcccagagatcacatcatcacaacttaaaaactggctgaacaatcggaaagctaagcttgctcgcattgcaaaagaaagagggacatttgagggagataatgctgataagccatctacccctcatcccggcgagtcttccgaaagtgctggggaggacaactatataccccctgcaagggtgatgactgctccatccaaaggcagactggtgagcccggacggcaatgagaaaacatcgcaggcagagctatccccaaacacga

SEQ ID NO: 276338 - DNA, 542 bp, Zea mays
cgaaagtaaacagaggtgaagacaaagtggctgtacccgttccaggttcaaggaaatgcgcgagcgcaattccagcctgccgtcgaggttttgtaccgtacaagaagtgcacagctcggagcaaggtgctggcgctgcagcctgtggcacctggcgaggaggcagatagagagctcacaaggctgtgcctgtagaattctgggcccttgccacccacctctactctgtggataatttttgctgctactcgaacacatatgactagtacagtacagcagtgcagtactgatgttttgcaggaagaccattctggttctctgctgctacttatgagaggcggattggaactgaagcacccttccccaaatggaggcgactgtgggttccggtctgccattgtatagttcgggactagtgtttccattttcatctcgagtgttgtaattttcccctagctgtgcaggttcagaggtcaatggttgtcatgtgctgtagcaagtaatgtaatagttgtagtacaagccccccttgtatgacctaac

SEQ ID NO: 276339 - DNA, 426 bp, Zea mays
accgcaccgccgccgccgtctcgcacacggggcacaggacgcgcgcgatcccctcgagtccggattgccatggccaccacggcgttcgccgccgccaggttcttccccgcccacctcgactcctccccacgcatcgcgccccaccgcgtcgggcccaccgcgaatctctccttctcaccgctttccgccaactcactcgtccctgcgccgcctccattccccctgcccatccggccccgggggtaggctgcccccgccgccgcgatacgtacggcggcgccggcggatctggcgacgccgcgaactccggtggccgcgaatgccgccgcggaggcatcctcgggctcctcctcgccgggtgggccgtccgcgtcgctgcggacccgcagttccctttcaaggtgctcatggaggagctcgtcggcg

SEQ ID NO: 276340 - DNA, 519 bp, Zea mays
cgtgaccacagacagccagacggctgagagcctgagacgggcgatgaccgcacgcccgcacaagctgctccgggctccgctgctaggctagggtttggactttggattggagccgcaccgccgcaccggcaccgcagccgccgcagtgccgcacagccgccactcccgtcttggtcttgcggccagtcgccctcgggcctcggccatcggcccctcgcccgctcgccgagacgccgagtcagcgtcgaccgtcgtcgctgtcgtcaccgaggtccagcgcccaacagcccagcttcaagcctccagccatcggcgcccgccctcctccgccgagacgccgagtgccaagcgcccaagcaccccagtccccagcgcccaacaggctagcaggctgcaggtatgcgctctttgttgatgcgtccaaggagttgagctgaatgcccagaaggctagcaggctgcagaaactgaaggaaaaggcggcattcaggaacccgggatgagtctattttaaaatgat

SEQ ID NO: 276341 - DNA, 550 bp, Zea mays
tctcacgcgtccgcggacgcgtgggacttcggctaccccaccggcaggtgctccgacggccgcctcgtcgtcgatttcatcgcgcaggagttgggcctcccgctgccgccgccgtccaaggccaagaacgccagcttcgcgcagggcgccaacttcgccatcaccggcgccaccgcgctcgacaccgacttcttccggaagcgagggctcggcagcaccgtgtggaactccggctccctccgcacgcaaatccagtggctgcgagacctcaagccatcgctctgcagctccgcgcaaggcacacgatgcaaggagttcttcgccgagtgcctgttcgtcgtaggcgaattcggtgggaacgactacaacgccccgctgttcgccggcaaggacctcagggaggcatacaagctgacgtccaccgtgatccgagccatctccgatggagtcgaacaactgatcgccgaggtggcaaagatttgatcggcccggtgtgatgcctaagggtgctttccgtctacctgccatgacgctgccccaaggaaggcat

SEQ ID NO: 276342 - DNA, 566 bp, Zea mays
gcagtccggctcgtcactcgctgcactgcagcagctccccggcgcctgtggctgccctgcctgcctggcctacaactacaagagcgagcggacaagcgccacagccacgggcatgccaagccagttcacgagcccggccaagaacccaagcacggccaagccaaaccgcccttctcctcctcctggctcctcgtgcctcgcttgactcctcgcgccaatttcgggaaacaggccatgccgggagacgggggagcagctggaagcgcgaggtgggtttgcgcggtcctttcggtgttcccgccgccgtccaaggccaagaacgccagcttcgagcagggcgccaacttcgccatcaccggcgccaccgcgctcgacaccgacttcttccggaagcgagggctcggcagcaccgtctggaactccggctccctccgcacgcaaatccagtggctgcgagacctcaagccatcgctctgcagctccgcgcaaggcacacgatgcaaggagttcttcgccgagtgcctgttcgtcgtaagcgaattcggtgggaacgactacaacgcccc

SEQ ID NO: 276343 - DNA, 591 bp, Zea mays
ctcacgcgtacgacgaggtatacaagatatagctaaaaaggattttgagaatcttaggcaagatagtgatgccagtgggccagaaccggaaccagaacgagaacccaagccggagcccgaaccagaagaaccaaagccacagcctcgccggggcaggcctccaaacaagaataatgccaaacagaaagttgggaagccaccaacagaacgtgctactgcagacttttctggtgcaacgcttgctactgccgcaaatattggacgccatgcacaggcagatgttgatctgtcacgaagagcaatggataaagcgatgattgcggatgtgctgagagcttcttttgccaaccgaaggaatgagcataattggtctggcgagcggaaatttgaaagatttgaagagtgctcaggttataggggtacatggtccgcaaaaatggggaagaggccaattctgatggaagatagtcgccgaagcacatattgtgagactcaaccatccaattcaatatatgagctgccggtatcgtcatcctacaatgggacaaagaagctgctagtaccagttggggttcagttacagcagtccta

SEQ ID NO: 276344 - DNA, 725 bp, Zea mays
aacggaaccgtcaatccgctacgccacagcaacgaccaaccggagccgccgccgccgccgccgacggggacggggacagggaaaccaccaccaccaccaccggccatattaacagctgcgcgtgcacggtggagttctacttccgcccgcgattcgactcgactcgactgctcgttccgtctcgaccttcaggcgggtaagcaggttgaccgtccgcgaattcaccgtatcccgggatacgtatgggttccaaagcgtccttccgcgtcacgctcctcttgctgctcctcgccgccgcctggggacctgctgcacaggccgacgacgctgctgagctcccggatcatagagctattaccttgaaggagcaggtttcttcgaccaagattcctgtccgtctcaagagtggcagcccgctgtgctcagcctgtgaaaacttcacgggcaaagctgtcagttatatcagtgagaaacagacgcaagataaggtcatgggattccttcatgacgcttgctctcagtcattctcggttgaacagaagtgcgatgaaatgatggactcttactcaacccttctgtttgccaagatcacggagatcaaaccagaagcgttctgcaaacaggatggcctgtgcaggagcacaggtgcttgctctggtgtgacaagtgacaggccatgtgtgttctgccaccaactgcttgatgaaggtatggtcaaactgaaa

SEQ ID NO: 276345 - DNA, 325 bp, Zea mays
cggacgcgtgggccacagcaacgaccaaccggagccgccgccgccgccgccgccgccgacggggacggggacggggacagggaaaccaccaccaccaccggccatattaacagctgcgcgtgcacggtggagttctacttccgcccgcgattcgaccgctcgttccgtctcgaccttcaggcgggtagcaggttgaccgtccgggaattcaccgtatcccgggatacgtatgggttccaaagcgtccttctgtgtcacgctcctcttgctgctcgccgccgcctggggacctgccgacgatgctgctgaactcccagaccataga

SEQ ID NO: 276346 - DNA, 517 bp, Zea mays
gtgtttcccgtccggaggagccagagccagccagccagccaccgcccacggcggccacacaacctcggtcggcgcggcggctcaacccaatggctccttcctccccccgccgcccgccgcgccaccacccgtctcccctcgtcgtcctcgccgtcgccgtcctcctcgtctcgctccgaatctcgcgcaccgccgatgggctgccggaggcgggaggaggaggaggaagcggcggtctgtaccgggagattctcagggacgagaccgtgcagaggctcaaggagctgggcaagatatctgatggggatggctaccttgaaaggacgtttctgagtccggcttctatcagagccactggtgtcatcgtcagctggatgaaagacgctgggcttacgacgtgggtcgatcagatggggaatattcatggtcgatatgagccggcaaattctaccagagatgccttgttgattggatctcatatggacactgtcgctgatgctgggatgtacgatggagc

SEQ ID NO: 276347 - DNA, 1016 bp, Zea mays
gtggctggtcaatggttttatttaccagtttaggctgacaaaaaggagggtggattctgggtagcactagatacacgagagctattttacagttttcatactgatgatgtgcctgcagaatcagttatgcacaaatgtgtggtccatttcattcctcagcaaaaacagattcccagtcgaaagcagcatccgggatttattgtccagaaggtctatgatgcagttgagaagaaactgtggaacctaacagacaaggactatgaggataacaagcagcaagagattgatcttctggttaagaaaacaatagaaccgtattgggcagcttcctgatctcgaacctgaagagacacctcttgagaacaattatttgtcaaataaacgaggcctgcgtaagaaacctgttaaccctatagatgtaacaagagaacctccagttggcaaatccgagcagtttgcaaaagcagagacacctggaagtgataagatacggaattatgatacccttgttaagtataaagtacttactggacattctcatcgtgataggtggctcgataaattgatagaaagtattccgcttgcatcaaaggagaatgctggaacatctgctgatgctaattctacagccaaaagttcaatcagtggttcacctgcaaaggatgttggttctgctgaaaatgaaaaatcatatgggactcgatgttgttgttgagataatgactgcattagaaagatctgcatatgaagctcttggaacagattttgggaaatataaccagaaactgcgacaactacagttcaacatcaacaatatctctaaacttctcaggaggctgatggacaaggagcttgatcctccagttcttctaaccatgtgccccgatgaattacaggctggcttgacttcagcagagaaaacatctgaaccagaagaatcaaggaaatctcagatgactgatactggatgtcaaagatgcagcgaacagaaagttggcatatctcatattatccat

SEQ ID NO: 276348 - DNA, 518 bp, Zea mays
ggcgcactctcctatatccgccgccatcgtctcgggctctcatctctaatcttcgggttcgcgtcgcagtgtcttccgcccgggctaccaccatgccgaagcagatccacgagatcaaggacttcctgctgactgcgcggcggaaggacgcacggtcggtgcggatcaagcgggccaaggacgccgtcaagttcaaggtgcgctgctccaggtacctctacaccctctgcgtccacgacgccgacaaggccaacaagctcaagcagtcgctcccgccaggtctgactgtccaggagatttaaggtatcaagccacaaactgtgctttttttgcggtgtcagggacgtttgctccagtgttactttagtttgtaggtgggctccattgctgtgtttgaatgaattatgaagtttgagtttgggatgcgaatgatgtgtcgaacctatgagcctgtgttgtaatggttaccccagaccgcaaaggatggcaatctatcataagttaaactgatttccgtg

SEQ ID NO: 276349 - DNA, 485 bp, Zea mays
tgttgtaccgcatcactccgcctcgtcccccacttctcgcacttccgcttcagcttccaccgtgcccaagagtcacgaggcggcggcgggtcacgccgacgtactctcaggtgctgcggtgggactgcccctgctgctgccgcgggggcggcggaggggaggatggccgcggcgacggcggcggacatggtgtgggtgagggtgcttgaggatggcgtgttccggttcgacgcgtcggaggcggcgcgcgccgccgcggggcccagcctctcgttcgcggacccgcggcggcgggaggcgccgcatgacggggccgacatgcccgccgttgtcccggtatgcgaggtcgcggcggggggatcccagaaggtcgtgataaagcttcctcctgggacatctttctatggtactggagaagcgagtggcccacttgaacggactgggaaacgagttttcacatggaatacagatgcatggggttttgg

SEQ ID NO: 276350 - DNA, 557 bp, Zea mays
acctcattgccatcatctctccacacaactaagaagccagcggcagtaacaggagtgaagcaaaaaaatggcatcatcaacgggatcagagatgagcgaggaaatcgatgtccagcttagtccagaggagaaagaaagtttagatgagatcatcaaggaagctgagagcgacttggagtctgaggaagtcctggatcaatcccttgccattgttgccgagaatgaaggtctggacaaggacgcaactgcaaaactcacaatttacactgtaggtggtgttttgaagaatctgacagagggccccttgagtgttatggataagcacatatatgcaggacacactgtcaaaccatttcccagcctgattgaagctggaaagactggttgtttcatcatctcaaatatatttgctaaaggtgttgaggctggagtggtgtacaccggcaacaacaaaaataaagttccatgtgcatggctactttgcttcatcgaaaacaaggctaacgtgaggatttatggagagtgtggaaacaaaaataaattcatcaatgtcgact

SEQ ID NO: 276351 - DNA, 536 bp, Zea mays
agaccccgcatcggactacttcgaccacaagtaccctggcggggttttctcgtgtcatcgtgccatttgatctatgcacgctggagcatctcgtcgagcaattggggaaggtccgtaacaagatctcttggctggaggcaaggttgggcgcccgcgacctgtgtgatgacattgtgcacgataacgacgacacagtgcagtcagaagagcattggtttgtgcgaaggtgcagagggctgtgggcaatggcaggggagaggctagggttcactgacgaggagagattgaggaagttgcagactaagaaacttgtgctcgcaagcaggctatctgattataaggaggggtgcgcccctggcgctggtgtagcttttgtggtgtttaaagatgtctacaccgcaaacaaggcggtaaaggatttcaagatggagaggaagaagacaccgattggtaggtttttcccagtgatggagctccagctcgagagaagtcgatggaaagtggagagagcaccaccggcatcagatatctactgg

SEQ ID NO: 276352 - DNA, 470 bp, Zea mays
cggacgcgtgggcggacgcgtgggcgcccacccaagtctcttcatttgcagcgacaaaaataggaacggagcaaaggtccggcgagccagagcaatagttaacaaccatctccacaaacaggctaccacgtagctacgtatatgccggaactgaactgagctgagaaagctcaggcgtgaactgaactagatggtgtttcctgccatcctccccaaggtggccgtgcgattgctcttcacgttctaccgcgccgccaggaagctcaggcgccacgccttccagctctacaaccgtaggaccgccgccaagccgccttcgttctccgtctcccagcagcaggccggtgccgccaccttcaagaccgacgccgccatccctgacgccgccggccggaccgtcgtctgtgacgtgcacggagccctgctgcgctcctccgcgctcttcccctacttcatggtcgtggcctacg

SEQ ID NO: 276353 - DNA, 537 bp, Zea mays
  unsure (1)..(537): unsure at all n locations
tttcgatccagactctacatctgcagcgacaaaaataggatccgtgcaaaggtctggcgagctaccaattaactaccatctccacctaccaggccagcacgtagctatatgccagaactgacctagctagtagaggatcgatcgcagatggtgtttcctgccatcctccccaaggtggccgcacgatggctcttcacgttctaccgcgccgccagaaagctcaggcgccacgccttccagctctactaccgcaacactaccgccggcgtccgggtgatggcgttcgtcaccttcgcggggctcaggcccagggacgtggacctcgtggcccgcgccgtcctgcccaagcactacatggagcagctcaacgcgctggtgtacggcagcctctggctcccggcaggaagaagtnnggcggtgaccaacgcgccgcgggtcaatgtcgagtggttcctcaggagtacatggccgcgacgccgtggtcgggctcgagctgagcacgtcaacgatgggcgccgccgtacttcactggttgct

SEQ ID NO: 276354 - DNA, 439 bp, Zea mays
  unsure (1)..(439): unsure at all n locations
aaaaggctttagagctaatgataaacagcacgaaggaaacgactccacctccgcagcgaaagatggagagattgcaaagttttgaggaggaacacaagaatgctctccagagagcaaagaccctggatgttcctcatgctgcggacctgtctgaagaggagattcaggaggatagcactgcaccaccctctgatactcatagcgaaacaaccacggaaacaaaatctggaggtagaacgagttgggacgaactgatggagaagcttttcaccagggatgaagatgggagacttgtcgtgaacaaggacgcgatggcgagggaaattgttgtcctgtaacgagtgccgagactgctctgtccgtggtagtttattctattagcgaactgtataaaaagagtagcttgcggtgtgatatatntaaaactgttttcaacaac

SEQ ID NO: 276355 - DNA, 434 bp, Zea mays
  unsure (1)..(434): unsure at all n locations
cgacccaattctcctcaatcaaagaaagtccccacgcagagcaagccaagatctgcgccgcggcgaggcgaggcgaagcaaagcaccggctggctcccatggccgtggacctgatggggtgctacgccccgcgccgcgccaacgaccagctcgccatccaggaggcggcggcggcggggctccgcagcctggagctcctcgtgtcgtacgctgtccacgcacgccgccgcgccgcacagggccgcggctcaccagctgcagaagccgccttcgcagccgccgatcggcgagatcgccgacgcaggccgtctccaggttccagcaaggtcatctccatcctggaccgcaccggccacgcccgcttccggcgggggcccgtcgtcgagccgncaccggtgcctgctccggccgtcgccgctcccgctccggccccc

SEQ ID NO: 276356 - DNA, 866 bp, Zea mays
aagtcacactcgtagaaacttgcgcaatggctcaaaagcaaatgtgcatacgggtgctcctcctccctggttaaaagctaacgaacacgatccaaagaatttgtcactcaaaagctgtggtctttcttcccggaaagggaaattgaggaaactcaatccaaacagggttggtgctgcatgggcagaaagaagaagagctgatatggaaatggataagcaaggtgaaattgttccagcaacatctgattctagttggctgcctaattttggtagtgtcttgcaaatctgccccagggaaggaatcaagggaaggatttgggaaaagccacaagattcatgacacgaagagcgaccatgacttatccttggagataaaaccatatatcagcaaacggatgcgtgtaggtgctgagaaagcttctgacaaagctgaagagcttggcagccacctaccgcagtaaacagatgtacaacccggtggatgtcgtcgcgtgggcgtctctgcggaaaaagccgccagggcgcgcggcttgattagcgattggtttggtttccatgtcaggtcgcgcctgggaagcccgccgcgagtacggaatgccaagccagtagtagtttttgttctcggcacgaagccatttgatgttcgttttgtgcgacggtttgcggcttgatcgcgattggcctcgtagcctttttgaccgaacgagagaagcagcagctctgcaaagctacctccaggttcattcgtgacggtaggctgggagggatagcgtcattgcggccaatggttttcggttcttttccacttgtgcacgacgtcataaacccgagaaaatgtttacagcctcacagggcacctctcagag

SEQ ID NO: 276357 - DNA, 436 bp, Zea mays
  unsure (1)..(436): unsure at all n locations
cccacgcgtccggacagaatggagcacgtatcgggggcaagttcaagctcgggaagaagatcgggagtggatcatttggggaactttacctcgccgtgaacgtgcagaatggcgaggaggtggctgtcaaactggaatcagtcacatcacgacatccacagcttcactatgagtcaaaactatacatgcttttgcagggtggaactgggattccacatcttaagtggttcggggtggaggggcagtacaatgtcatggtggttgatctgcttggtccaagtctggaggacttatttaactactgcagcagaaagttctcccttaaaacagtactaatgctngctgatcagatgatcagtagagtagaatacatgcacacaaaggggtttctacatcgtgacatcaaacctgattattttctcatgggtttaagacg

SEQ ID NO: 276358 - DNA, 875 bp, Zea mays
cggaggaacaaactttagagtgttaagagttgaagttggtgctgggtctgtggtcacccgtcggaaggttgaacttcccatccctgaggaattgaccaagggtacaattgaggagctattcaactttgttgccatgactctaaaggaatttgtagaaacagaagatgggaacgatgaacaacgagcgcttggtttcacattttctttcccagttagacaaacatcagtatcttcggggtcattgattaggtggaataaagggtttttgattgaagatgcggttgggaaagatgtggctcaatgcttaaatgaagctcttgctaggaatggactaaatgtgcgagttactgcactggtgaatgacaccgtggggacattagctctaggacattatcacgatgaggatacagtggctgctgtgatcattggtgctggcaccaatgcttgctatatcgaacgcactgatgcaattattaaatgtcagggtcttcttacaaactctggtggcatggtagtaaacatggaatggggcagtttctggtcatcacatttgccaagaactccttatgacatctcccttgatgatgagacacaaaaccgcaatgatcaggggtttgagaaaatggtctctgggatttatcttggggaaattgcaaggctggtgctgcatcgaatggctctagaatcagatgtctttggtgatgccgctgataatctatccacccccttcacattgagcacaccacttctggctgcaattcgcaaggacgattcaccagatctgagcgaagtcagaaggatattgcaagaccatctgaagataccggacactcctctgacaactcggaagctagtcgtcaaagtctgcgacatcg

SEQ ID NO: 276359 - DNA, 563 bp, Zea mays
  unsure (1)..(563): unsure at all n locations
cgtgggatacgctgacagacggacaggctgaggcaaggccgcctgcgggcggcaggaagaaaagcgaagctgctgcgccctcccctcccccatctccgccccccgcctcacccaccagacgagagagcgagcgcagttcggccgccggtcgcgtccgactccagcaaagccgagcgcccaccccctcaccctattaccttcctctcgggtccaattcggtgcctggctaactccgcacgtcttccccccttttccctcccccgaccgacgaccgtccgtccaccaccggatccaggagcgaccctccctcgtgctcgtcgacgatcgaccggccgccgatcgtccaggaaggatgtcgagcctcgaggagccgctgggtctcggagacctgcctaagttgagtattaacagactcgggcggttcgtgtcgctgggcgctcggaggccaccggccgacgacgacgaccacagcactggcaaatacagcagcagctcctgcaacaatggcagccctcagatggcattccatcatggcagcaactcctnctatccctggcacccgc

SEQ ID NO: 276360 - DNA, 953 bp, Zea mays
tcgtatgaactctttctactcgtgctagaatagaacctggcttcactactttagtatggcagaaacttgaagaagaaaactccgagttctttagggcttactatatacggttgaagttgaaaaggcagatcatcttgttcaatcatttattgcaacaccagtacaatttgatgaaatatccagcacctccgaatattccattggctccaatacaaaatggaattcatcatatgccagttagcaatttaccaatggggtatccagtgcttcagcagcctatcatgcctgctcccggccagcctcacatggatccaatggcctgcggtctgtccagtggtcatgtggttaatggaatacctgcaccaggtggttatcatcccatgcgcatgaactccggaaatgacatggttttggacaatggagtgcctgaagcaccacatgctggtgctaccggtagtgctatgtcatctgagatggctgtgagtccctcgtcggcggcttcaagcaaccatgctccttttacgccgtcagatataccaggcatgaccatggatgtatcggccctagactcggcatttgggtgtgatgtggggaatcctggatctctgcaattgggaccagatgggtcgtcaagagactctattagatccttagggcagctctggaatttcagcctctctgatctaacagcggatttgacgagtttgggagatctggacgtgctggagaactacactggcacccctttcctgccatcggattcggacattttgctggattccccagaccaagatgatatagtcgagtattttgctgacgccatcaacgggtctccgtcagacgaagagaaaccctagtttttccggggtggcgtgccggtgcctcgcattcaggttcatcatcaggcagggctgccatctcatctcatgtagtgtaaagcagccaatctaact

SEQ ID NO: 276361 - DNA, 581 bp, Zea mays
actagttctagatcgcgagcggcgcccttttttttttttttttttgtccgaaacatattactcaacaaactctgctaaaagctaagccacagttgaaacacaacgttcttcaacatgtacagctctacagctgattctattctcaactgttgcaaggtttccagatagcagggcacacaccattctgacacacgcaaattttgcttgttaagtgttacatgatccaggggcctaacaattgtcaagatccaaggagtttctagttcatctaccaaggttctatatatcctgattgaatgaagtccgatatgacatatggtgaaggagatatcagcctgattggatggctgcgcgtctatgcgcaggctgccgccgtcctggtcagccagatacgataattttaaacacgataattttaaacgtatgggtggatgcaggttaataacattaaaatgacttattttgcatccactcatgcaggttgtgactcccacatataagcacccaaacataatctcccctaccgtcgacgcatacggtgacccaagatgagatggtgcgggtaacaacccaggcgtccg

SEQ ID NO: 276362 - DNA, 1014 bp, Zea mays
  unsure (1)..(1014): unsure at all n locations
gcaatcgtcggcgggggaggaggggagagattgctgctcaagtttcaggctctgttgtttgaaacgtcaagatggttaatttcggaaagaaattgatggctgatcaagtggaagaatggaaaggatactacatcaattacaagctgatgaagaaaatgttaaagcgatatgtccaacagactcaacatgatgggaaagaccgcgaacaagttcttaaagacttttcaaggattcttgatgaccagattgaaaggattgtgctttttctgctacaacaacaaggccatcttgctagtaggattgaggaattgngagaaaaacgcactgttcttctggaagagtatgacatatcacaagtttatcagctgcatgatgcatacagggaagtcgggcttgatctcataaagcttctccgctttgttgatgtgaatgctactggtatacgcaagatactaaagaaatttgataaacgttttggctacaagttcactgattattatgtcgccactcgtgcaaatcatccttattctcagcttcagcaagtctttaagcaagtgggaattgtagctgttgtaggtgcattatcgcgcaaccttgaatatctgcaacatcatgaaggtagctttgtatccatctatgatcgtccagcagttaccttgaaggaccctattatagaccaagtaaaccatgcagtacagaaactcacgcatgccacgaattttatgcaattcttgggacagcacgcgcttattgtccaggaagatgcacaaagcgagtcgcaggatcttgttggtgagcagagcctaccatttcatgtccctggtgcttaatctagtgaacacattcctttacatggtgaatacatatatcattgtgccgactgcagatgactatgcagtaagccttggggctgctgcaactgtatgtggtataattattggatcgatggcagacgcccaagtattctcatcagtctactatcattgccttgtcaaataagtactacttcaaacc

SEQ ID NO: 276363 - DNA, 479 bp, Zea mays
gtcctgcgccacacgccgcggccgtctccgggcaggaaggaagggggcgggaagatgatgatgacgcgggcaccgatggggccgatggagggcgcggcggtggacgagatggtgcgccgcctcgtggagggcggccgaggcgggcgccaggtgcagctgtccgaggcggagatccggcagctctgcgtagagggcaagcgggtgctcctctcccagcccaatctcctccgaatccacgccccagtcaagatctgcggtgatatccatggccagtttgtcgaccttctgagattattcgatttgggtggttatcctccagcttcaacttacgtattcctcggagactatgtcgatagaggcaaacagagcctggagactatatgcttgctgctggcgtacaaaatccggtaccccgaaaatattttcctgttgaggggtaaccacgaggatgcaaagatcaacagagtctatggttttta

SEQ ID NO: 276364 - DNA, 601 bp, Zea mays
ccttgcacacttgcacttggttggagctcctctaccttttccatcgctctgctctgctccgcgtctccgtccgccccggcaaaagcaaaacacagccatggaggggtacgaccgcgagttctggcagttcagcgaccagctgcgcctgcagacgaccgccttctccggcctctccctcggcgactccatctggtctccggccaccggcgccggcgggcggcgcaacaacaacaccgacctactcgcggcctccgcgtcggcagccgacgccggcaagcacaacggcgtgggcctcagcctgaatgatggagggcccggactcattggctccgggaagctcgccttcggcggcagcaaggccggccgctacaacaacctcccatccgagaaggccgcgcccgtctacaaccacagcggcgccacgatcaacggcggctacgccaggagcgacaacgccggcctggcggcgttcaacaagatggggagctacttccacaacagtaacggcaactgcggcggcggcggtgaggtgaagagctactttaacaagtccgccggacgggcggcgagcaacaacagccacgggcaccgccgcggcggc

SEQ ID NO: 276365 - DNA, 903 bp, Zea mays
gtagagctggccagctgggagactggtagtacagtggttgcccgtgtagcatgcatgcatgcctgtgtgggtggaccacgacagggattggactcgccgaacaccattttcctgggtacccgagtttcttgacagaacaaccgggatcaactttctctttttgtggcctagcctagaaccgtacccacaatatattttttttataaaaaacgggcagatttcgggtatagtcgtgtttctttttttccatgcttggtcttcggtctccgggtttaattttttcggctcgccagtcgcctctctctatatcatctccttgctgtgtatcatcactagttactccatccgtttatatactgctagctggttccgagtgattacccacagcaacagaagcagttctccaggcaatagactagctagatgcgcatcaccaaagagtagctttcggctagaacgaagaaacaccccccactagctacatggccgcgctcagttcttgtgttgcttctggaggcctggcacttcaggccacccttgtggtttctcttcctcaccgccgcgggactccagtcgtcatctccgtatcatctcatggtcgccgcccaagtcttatcggctcaaccatgaatccttcaggcatggctccgatcaaaagaactacacgaattcgtgcggttgatccaggccctgcaaattcgttaggaggaagcctcaccatcatcccaatacctgacctgctttcatcatggtgagtgaaaattaaaagctcaaacagatacacatccatgctttgcttgttcattgctgttcagatgcgatttccaaaaaaaaaaatcgttcgattcccttcgtcgcgttccaaaacggcctacgtaccgtgtccgctttgtcaggcttctg

SEQ ID NO: 276366 - DNA, 906 bp, Zea mays
cagaagcagttctccaggcaatagactagctagatgcgcatcaccaaagagtagcttgcgtctagaacgaagaaacaccccccactacatggccgcgctcagttcttgtgttgcttctggaggcctggcacttcaggccacccttgtggtttctcctcctcgccgccgcgggactccagtcgtcatctccgtatcatctcatggtcgccgcccaagtcttatcggctccaccatgaatccttcaggcatggctccgatcaaaagaactacacgaattcgtgcggttcatccatgccctgcaaattcgttaggaggaagcctcaccatcatcccaatacctgacctgctttcatcatggctctggatgttcggagcggccatagctgcagcagtgcctctttacagaaggttcagagcattagaagataacgtagagaagacggcggaggcggcgatcgaggtgatcgactcggtggcggaggcgaccgagaaggtcgccgacgaggttgcgcaagcgttccccggcagtgaaactctcaagcaggcagcctccaagattaagacgatcgcggatgagatcgaggaagatgccgacaaagctgaggccctgattgagaaggttgacgagattaagaaagaggtggattcaatcgtcgatcctatactcgacaaggtcgccaaagacaagtcctagagaaagagcccaactggaggagacaaataaaacatccagtaaattagtttaagaagcattagttgagcagtaaccggaagacactacgtacgggggcaacatgacacgtcgggtgtcatcacctatttctctcatcgattcattgctttcagtttcagtcacgtgtttgttcagttttagtgacttcctccctacgaaattctatgagagaa

SEQ ID NO: 276367 - DNA, 822 bp, Zea mays
tctttcctcatggctggggagtatgcactgacaactaaactcaagactaatcaaaatgaactgatcaagtaaagcctgtagctgcctgtagtttactgacagataaaaatgaatcgaggaatgcgttcaaaaaaatgaatcaagaaagaaattggcaccatagtaatacgagagcagctgtcgttcttttttttattccatctgattttgtgttatgtcacagtttatgatggtaagggaacccttgaggaaggggaaaccgctgaagcgcgtttcattaagatccaagcagcgtatgagctgttgattgatggtgaaaggagaagagcatatgatagagagcatcatgtgaatccgatgaaggcttctcaagcatggatggagtgggtaatgaagaagcggaaagcttttgaccaacgtggtgacatggctgtggctgcttgggctgagcaacagcaacgcgaaatgacgctacgggcacggcgtctctcacgctcaaaggttgaccctgaggaagaaaggaagctatttgccaaggaaaagaaggcatctatggaattctacagcacaactctgaagagacatacccttgtgttacggaagagggatattatgcgcaagaaggcagaggaggagaaggataaggagatcagtagactcctagcggcggaagggcttgagttggatacagatgaagatgaaaaccagacttttctggggtaacgcttttgatacttaccctaattgattctcttcctccattccagcaatcgttcaagatgcagcgacaacgagtgcacaaggcgagacagttgggctcgt

SEQ ID NO: 276368 - DNA, 853 bp, Zea mays
agccgccactcacgcctggaagcatctggaggcgtggcacggcagccgtcgcccgccacaccagcagcgaactgcttcccggtgcccgcggcggcgaagcacaggagagaggcggcgagtgaaaccgatgacgccgccgatggatccgcccgacgtcgagatggagatggagcccgcgccccagcctccggctccgacagcggtcggggaggggtggagcatgctgtcgcgcgcccgcgggctgctcgaggagggcaaaccgtccctcgctctgcaggcggttctcttggccataagatctcaaggcggtgaacaagctctcatgcagacattgaaccgtgcacgtgaactctatgcacagagattgcaggccagtcctagtgttgatgagcttgcctctttgcttgcccaatgtgccatagcagaggctcagtcatcaaatactaaccctccacaagggcctgggtcagaccctgtcaatatgctgaattctgatgaggcctgcattcttgctgagagtggaaggaagcagatcatcctggacgcatttgccgacgggagcagcttcatttgcttgaaatgtggggggctctttagcacatctcgcaaggatgagcacttagcctactggtgcgggactgcatgatcctggttacgtcttgctgtggtatatccatggtcacacctagcaatgaaccgatgatcatgatacccgtgagattttgtataaactttgttctgttccaatccgattactgcttctttactgcggggatgccagaggcacgtctgttaagtcgtagtaaatacatttgccgatgacaaactttatgaacgaaagtttccatctttt

SEQ ID NO: 276369 - DNA, 541 bp, Zea mays
cttccggccctgtccttctatcgggaaccttttctcgcctccatttatattccttccgccgtctgcccccacggaatcaagaaacaaacgaagccagccagccagccgggtcctcccgcgtagctagcgtaggcgtaggcgtacgtagcagcgtgtgcgagaggggaagaaatgctggaggggagggcgcgggtggaggacacggacatgccggcgcggatgcaggacgcggcgacctccgcggcctcgcgcgcgctcgacctcttcgacgtcgccgactgccgcgccatcgccggccacatcaagacggagttcgacaagcggtacggcgtcgggtggcagtgcgtggtgggcgccaacttcgggtgcttcttcacccacagcagcggcaccttcatctacttctccatggagcgcctctccttcctcctcttcaaggccgccgtcgtcgcagccgccgccgctgccgtcgcctcctaatcaaccaagtcttcgtccatcacaccgtgcactttgtactgctagctagtatctatctata

SEQ ID NO: 276370 - DNA, 1051 bp, Zea mays
ctcagagcgaagctcaggtagacaaggcaatatctttgaagaatttcagccatcagcagatagcacctcccaagccagatatgctcgagcttcagatcgagatcctggtgatccttcaacaagtggacctgagaaagagctgacctctgaagatgaagtggctcgtttactgaactgcactgaccactattcagcattaggtttccgtcgatatgagaacatagatgtatcatctcttaagagagaatacaagaaaaaggctatgttagtccatcctgataagaatatgggcaatgataaagctgctgatgcatttaaaaagcttcaaaatgcatatgagattcttcttgattcactgaaacgcaagacatatgatgatgagttgaggagggaagacctcttgaactacttcaggcagagtgtttctcaaaagaatggaagaaacagtactttccaacatgggttcagcccttcagaaggtgttgatgaaggtccttatggtctttccagaagaatagcttgtaaaaagtgcagcgactttcatctttggatttatactggaagagctaaatcacaagctagatggtgtcaggactgcaaggagttccatcaagctaaagatggcgatggatgggttgaacagtcctttcaacctgttctatttggcatgctgcagaagcctgatttacctcatgcatatgtttgcgcagaaagctacatatttgatgtcactgagtggttcaactgtcagggaatgagatgcccggcgaacactcacaaggcaaccttccatgtcaatgccaacatggcaaagcagagcagtggcaaggcgagtacctcaacgcagagggctggtaaggccccaagtggtgtaaacatggatggaggaggactcaacgaggaagagttcttcgagtggttccagaatgcagtcaactctggaatgtttgaaactacattcggggcacaaggcgacccgacttctcctggtaacggaagcaatgccaagagtagcggtagcagcagcagcaacaacaatagtaggaaaaag

SEQ ID NO: 276371 - DNA, 484 bp, Zea mays
gaaaatagaaaataatgaaattataattgacgcaccagatgagaaaacagaaaataaagcagatgctgacacaccagctggggagaccaaagaaggtgaaactacagtagaggaaacagatgagaaaatagaatctaaagttactgctgaacctgtaatcggggagacaactgaaggtcaaactgcagctggagaaccagttgaagaagctagaacagctgaggacatggtagaagatgttaaggtgctagatgataaatctacagcagctgagaaacctgtagagaatgccacagttgtggcacatgagaattcgactacagttgagaatactctgaaggatgcgattgtcgcgccaccagatgcatataccaccatcgccggaaaaactgctattggtgccacaattgaagcactaaatgaggatgctccagcggagaggactatagaggatacctcgggtgaggcaccagatgtacaagca

SEQ ID NO: 276372 - DNA, 436 bp, Zea mays
  unsure (1)..(436): unsure at all n locations
ctccattccatccacgtatgtagctagagctgccaatcggagatacgtacatggcccgtgtcgcgtcgctgctgctcaccgtcatcgtggctgcggcggcgtcgctgctgctgctgcttgcgccgtcggcggcggagctgacgcgggtggagcacccgcccaagaacgagggctcgctcgccatccttgcagttggcgactgggggcgccgggggcagttcaaccagaccctcgtggcccagcagatgggagtggtggcggagaagttggacatcgacttcgtcatctccacgggcgacaacatctacgacgacggcatcgncaacaccagcgaccccctcttcaaggagtgcttcaccaacatctacaccgcgcagagcctncagacgccctggtacatcgtnctcggcaaccatgactacacgggccacgcgct

SEQ ID NO: 276373 - DNA, 619 bp, Zea mays
cccacgcgtccggcgaaggcctttgtgattcggacaatgcgcggtgaagggcataatgacgaatatcaagacgaatggagcgagagcatggtgaataccttttgcgaggcagcttacaatttacaaagccaagaagctcatacgaaggaagttccgtccaagggtgcaaaagaacccaggtctgtcgatgcaagattcactcccatctagtccgcgggaaacaactccatatcaaagtgactcctccaggtcatcttacgaggacttccatgagcagtaaaacaatctggtgatgctgctttcagcttctacatttggtcgataagatgcagccatttatattggttatagtagggtgtatgtatatagtaggatgtaccatcaaaatccaatgtatcatgtatagtggttaggcaatactccgtaattatgtgcttgtaagttaataagaggccagctcgtactcctagaaaacaaaacccgtgatctatggcatggggcattctcattcccttgtacttcaggactagtatggattgtaaattcaacggtgaaggtgttgcaacatttattcagtaaagtatccttgttgaaaaattttgaaacacttcaataatat

SEQ ID NO: 276374 - DNA, 770 bp, Zea mays
gcccaatttgcagataataggatgtctctatcttggaaccaggaagagaaagataaccgcaacttgcatcaaagaaacttggaaagggctcatagcctttcagatggtgatactaactatgaagatcacatctcttctgtgaatagtggatgccattcagacaatgaggtcaataatagaggacatacttcaaatgatgttgagcacatcgaaacatgctctagtttggataaacaagccagcgaccaaattaggaaaacctgcaaaggaatattctgattcttcaaacatgtcatctctaaatgcattcgaggatccaacaggaattcctcctgagtggatgccaacaaatgttagtgtgcctttattgaacctggttgacaaagtattccagctaaagcgacggggttggatacggagacaggttctatggatatcaaaacaaattttgcagctggtcatggagagatgcactgtggctgaatggatcataggacaaatcaattggctccgaagagaagatgtcattgtacaaggaatacattggattcaagataccctttggccaaatggtatattcttcaccaagttggatgaatataaagggaatgcaggcacaagtgaatttgacaagcagtcattagggagtcccacactggctgttggcaataaaaagggccgcacaagctcttttgaacttcatcttgaggcatccagaaatgccagtgaggtcaaaaaacttattttagatggaactccatcggccttgg

SEQ ID NO: 276375 - DNA, 727 bp, Zea mays
cggacgcgtgggtccacggccgcgcctgcgacacccatccgccgccacgccatggccaagtacaacgtggtgcagaagaacaagcgccagtgcaatcaggaccgcaagcgcgccgcgcatggggagcccgggaccggcaagctcaagcagcggaccgcgcccgtctccatgtccggcaagcggaagaagaagctcgagcgccgcctcaaccggaagcagaaagaggctgcgatgattaaggcgctggagaacaacatgggggatgtcgacatgatctcagttgaagggtcttcagaagctgcaaagggcaagtcccaagtgaagttcagtgtgaagaaaaactcaagaatacagataaagagattaaagggcaaaggcaggaagaaagccaaaaatgcaaaaccacctgccaaggagagagttgatgccatggtagaatgacagttgatgccatggtaccatgacggacaagactacatacatccctttgtatgttttctcagagtttgcagcatggaccgacctcaccgaacactggcgcgtgtctcttgcatcttctgcctgaatgttaaatagaagctacttaggcctggtgttaatgtacttcaaacatgaatctcactttaatagtggactatgcgaatttgttcaaaaaaaaaaaaaaaaaaaagggcggcagctcgcgatctagcggacgcgtgggcggacgcgtgggcggacgcgtggg

SEQ ID NO: 276376 - DNA, 749 bp, Zea mays
cagacgacatggagatataatccagaggacagtaggcgggtactatattgtacagggaagggcggatgacaccatgaacctcggtggaattaagaccagttcagtagagatagaacgggtgtgcaacagagctgacgagtgtctgctagaaacagcagcagttagcatcaaaccttccggtgggggaccagaacatctagccatcttggcggtgctaaaagatagatcggcccagtacgacgtgaatcttctcaagaggaagttccagactgccattcagaagagcctcgatcctctcttcaaggtgagctatgtcaaagtcgtcgctgagttcccgagaacggcttcgaacaagctgctgagaagggttctgggggatcagctcgcgcaggaactctcaaatcgcagcaagctatgacctttgagactgttctgcctttgtttcagcatcaaagctatcgattttcttgttccatttcaataaagcactgcttcaatgaaggaagcataccaagatgatcctacaaattccccccgcccctgtaaaacttcaaatctggttgtccttttgaaaagggaaccgtagtccagagaacgtttgtaaaggtctgtacattttatctgatcgttacagtgctgatgaacaaactaggcgcatgcatagttgtgtcacttagtatgtaccaatcggtggtaattgcatcaaatcaaaaaaaaaaaaaaaggacggccgctcgcgatcataaaac

SEQ ID NO: 276377 - DNA, 524 bp, Zea mays
cttctttcccgcccacagaaaagccgttctcccctctttctcgattcgacgaggggaagactcgtcgagccgccggccagcccatctcggcgcattcccggagaatccctccggaaaccggtcgatcctgggtcatccaacacacagcacttcgcttctcccgcgtccccgacccgcgcgcaagccctcatgcggttagggctgtaacgatctcgtctcgctaccggcggccggctgcggaacgggccaccccacgcgctcctctgagttcgttcgactaatctaccgctgactgtactttgggctgtcgccaccagaaagccctcacgagtcctttgcctcctcactccgtcaggctcgtcgccacagggttttgttcctaacttttgagcttcaatttttgtcttgaatggcaacacctctggatgttccactggatgatttgattaagagcagagctgggaggggaacaggaagaggcaggggacaaggagggggtcgaggcaaaggtgatggccaaaggt

SEQ ID NO: 276378 - DNA, 725 bp, Zea mays
cttaggaaaggactgtggcatgagtttcccaacggcacatgtagaggaaagctggcagatggctgagttctataataacaaggttcttgtggagtacagaaacaaagaccctgatcatgttgaatgggctaaagcattgaaggatctatatatgcctggtttgcgggattatgttaaaaagcactaccctcttggtcctgtctggggtcctgctggaggcgctgttgtttctcaaccaaaggctgctgctcctacacctaaagctccagcggttaaggctccccctccaccagctcctcctgcagcgcctctgtttagcccacagaaggctccacactcttcttagcctaaagaagggatgtctgctgtcttccgagagattagttcaaaacctgtgacttgcagggttgcgaaaggttaccgatgacatgaagtctaaaaaccgcgctgatagaagcggtgttgtcagcagcactgctcctgctcctgctgcagctcctgaaaagacttcccgtgcagggtccttctctttcaaatctggaccccctaaactggaacttcagatgggacgcaaatgggtggctgagaatcaggttggcaagaagacccttgctattgatgattgtgattccagacaatctgtctatgtgtatggatgcaaggattctgtccttcaagtaaacggcaaggttaacaatatcactggtgacaaatgcactaaagtt

SEQ ID NO: 276379 - DNA, 978 bp, Zea mays
ttttgttcttgacgccttgtacttcgttattgtcacagtgactcggttggctatggggatcttttcccacgcagtgacacaacaaagctgcttgcttgcgcttttgtattcacaggaatggcgatcattgctctcttcatcagcaaagcggcagattaccttgttgagaaacaggaggtgttgttcttcaaagcactgcacatgaatatgaagggcagcgaggccaaaatgctaggagcaatggaaacaaataggataaagtacaaattctacactgtcgctctgcttcttgcaatggttattgttgctgggactgtatttctgtggaaggttgagaagctcagccttgttgattccttctactgtgtctgtgccacgatcactaccctgggttatggggataaaagcttctcgtccaaactggggcgtgtttttgcagtgttttggataaccacaagtactctcatcatggctcagttcttcatgtaccttgctgagctctacactgagcgccggcagaaaatcctgaccaaatgggtgatcaacaggaggataaccaccatggatcttgaggcagctgatatagatgacgaccgacaagttggtgctgctgaatttgtactttacaagctaaaagagctgggcaagatcagccaagaggagatatcttgttttctcgaggagtttgccaagcttgatgttgaccagtctggcacactctcaacttacgaccttactctagggcaaaccagtcaatgactgatgatgcgtatgtgattttgctgactggatgattttgtttgatgtcgttagcatttctgttgtccatatgtaacgctgtaatgttgtaaagatgtaaattgagatgattgagaaattgtgccccaccttttctccaaagcaacttgaatcaaggctgtaaagaacaaatacttgctggagacagaaacgacacacctgcaaatttatgattggttt

SEQ ID NO: 276380 - DNA, 680 bp, Zea mays
gcccaaaccaaatccatgactgaacaactgacgcgggagttcgacatcggctacgagatcggccgcgggcgtttcggcgtggtccggcgctgtgtctcccgcgccacgggtgacgccttcgccgtgaagtccgtggaccggtccctcctcggcgacgacctggaccgcgcgctggcggagctggagccgaagctggcgcggctcgcggggggcgagggcgacgggaacccgggcgtcttgcaggtgcgcgccgtctacgaggacgacgcctggacgcacacggtcatggacctctgcacggggcccgacctgctggactggatccgcctccggcgcggcgcgcccgtgcccgagcccgacgccgcgcgcgtcgtcgcgcagctggccgaggcgctcgcgggctgccaccgccgcggcgtcgtccaccgcgacgtcaagcccgacaacgtgctcctggacgtggaccccgccggcgaggcgcccccgcgggtccggctcgcggacttcggctccgccgcgtggctcggcgagggcgcgcggggccgcgccgaggggctcgtgggcaccccgcactacgtcgcgcccgaggtggtggccggcggcgagtacggcgagaaggtggacgtctggagcgccgggcgaatgatgtacgcgctgctctccggcggcgcgctgccctt

SEQ ID NO: 276381 - DNA, 404 bp, Zea mays
tcggtttcttggtttttcctctttcccctccggcctccttcctctcgctcgctcccctcccctccccgccccccctccccctcctcctcctccctttcattcctacctccgctcgcgccactctcctccgaccgaggggcagggaccggtgcccgcccgcccgcccgtccgcccgccatggtctcctggcgccgcagcgcgtcctggctgtcgtcggcgtcgcgctcctcgctcggcgccgccgtcggcggggaggccaaggtcacgccggaggcggatccggcggcgcagcccgacgacgccgtccaggagcgctggtcgcgcctgctgccggagctgctcacggagatcatgcgccgcgtcgacgccagcgccgagcgctggccgtcgggccgggacgtcct

SEQ ID NO: 276382 - DNA, 1418 bp, Zea mays
acgcaaaaaaaaaagaagccgttggagcgcctccctctcaaacggcactcttccccactggcccgctcctccgctccctcccgcatacaaatcgtccgccaacaatcccccaaaccctactccaccacgcgatcaccgaccgacgcctctccgacgagcaactcaaccccccaccgcgcacgcgagagccggatccccacgatggcgacgatccagcaccaggcgaaaccggcggtggcggcggcgccgagcacgactactggcggtgggcagcgcgcgatggacctctacgagaagctggagaaggtcggagaggggacctacgggaaggtgtacagggcgcgggagaaggcgacggggcggatcgtggcgctgaagaagacgcggctccccgaggacgacgagggcgtgccccccaccgcgatgcgggaggtctccttgctgcggatgctgtcgcaggacccgcacgtggtgcgcctgctggacctcaagcagggcgtgaacaaggaggggcagaccatcctctacctggtcttcgagtacatggacaccgacctcaagaagttcatccggggacaccgcagcaacaacgagaagatccccgcggccaccgtcaagatcctgatgtaccagctctgcaagggcgtggccttcgtccacggccgcggggtgctgcaccgggacctcaagccgcacaacctttctcatggaccgcaagaccatggcgctcaagatcgccgacctcggcctcagccgcgccatcaccgtcccggtgaagaagtacacccacgagatacttaccctgtggtacagggcccccgagattctgcttggagccacgcactactccaccccggttgacatatggtccgttggctgcattttcgccgagctggtcactaaccagccacttttccctggcgactcggagctgcagcagctgctccacatcttcaagttgcttggcaccccaaacgaacaggtgtggccaggcgtcggcaagctgcccaactggcacgagtacccccagtggaagccgacgaagctgtctgctcttgtgcccggcctcgacgctgatggctacgatcttcttgagaaattgctggaatacgagccggcgaagcggatccccgcgaagaaggccctggagcacccctacttcaaagatgtgaggaagggagatgcgcactgactgaagcgatccaccaagggcccgccctcacgagttgacatatatatacgtgtgtgtcgtcgtgtcgagcatgattgccctgaagcaattcttttgctaccagggcacagcctactttctgttctctagctgatgttcgtgtcgtgtgtgctgtgaaccgttcgctttggctggtgatggatgaaaccgcctatgtttctaggattcccccccaaactttgatgtc

SEQ ID NO: 276383 - DNA, 585 bp, Zea mays
acgctctcctcctccttggacctcccatcttccttcctcttcgttcgtttctccaaccgaagctgaccggcattcgctcctggttttccggccaagaaccgatttttttccggttccggcgtagcagcaggcagctagcttgccaccagctgattcattgcctctactagtgtttttcctgagctcggtggggtgatcggtcgatcggccgccgctcgagacacgtacgtacgtacgtacccgatcgagggtcgctccaagatgatgatgagcgggaaccggaagcagagggtggcattgtcgccggtgaaggaggccgccgcggtgcccaaggaggaggtgtgggaggtccggcccggcgggatgctggtgcagaagcggagccccgacgcggaacccgcggctgtgcccaccatccgcgtcaagggtcaagttcaacggcgtctaccacgagatctacatcaattcccaagcatccttcggcgagctgaagaaactggtgtcggagaagacgggccttgacccggacgaccagaaggtggtgtacaaggacaaggagagggacttcaaggcgttcctggacat

SEQ ID NO: 276384 - DNA, 560 bp, Zea mays
cggacgcgtgggtttgaatcctaattctggattccgcagctctcgggatgttttctaccagaaagtgcaatcaacattgaagctttcaggcttcaagatggaagtcattgaaacagcatatgccgggcatgcaaaggttctttcttctactggtgacctcaaaaaattccctgatggtattatatgtgttggtggcgatgggatcgtcaatgaggttttgaatggattacttagtagagacgattttgacgtggcaattcgatttcccattgggataatacctgctggttctgataattcattggtgtggactgttcttggcatcagggatcctgtttctgcggcaatcgctttagctaagggggatttcacaccaatagatgtgtttgccgtaaaatggatccaagctggagtgactcattttggtttgacagcttcctactatggtttcgtagctgatgttctgcaactgtcagaaaaagttccgcgtgcaggctcggtcccttccgtaccgttgttgctggccttctgaagtttctttcattaccccagtacagatt

SEQ ID NO: 276385 - DNA, 617 bp, Zea mays
tggaacctctgaaagaagagcagtactatgaggttagggagcctttctccgtcatgtcacttttgaagagccccatggggttgatggttggttttatggtcttaatggtccttgggaatgcccaagatgatggagaacatagatcctgaggagatgaagcaagctcaagaacaaatgaggaacaaccccgtatcattgtctggcttgctagccagagcgcagggctagaagtagcacatgaggatgctgcaagggtctagattctataatgtgtttaagggcagtactgaagtgcttgacatgccatgtcactcggagtaatttcctggggacaaggtggaaactctttcccctgtttttactgtattttaacctgcagtttttctgttagggcttgttcggttattttcaatccatatgtattggaggggattgatacggattggaggggattttgactttgaatccccctcaatccatatggattggggcagaaccgaacatggccttatgtagaaccttctgaaacctctagctgagctagtcatttggcacatcatataaccacacattgagatattcttgttcaatttgtattgtatgaatcagctgaatct

SEQ ID NO: 276386 - DNA, 369 bp, Zea mays
gaacatagatcctgaggagatgaagcaagctcaagagcaaatgaggaacatccccgtatcattgtctggcttgctagccagagcgcagggctagaagtagcacatgaggatgctgcaagggtctagattctattatgtgtttaagggcagtactgaagtgcgtgacatgccatgtcactcggagtaatttcccggggacaaggtggaaactctttcccctgtttttactgtatttgaacttgcagtttttctgttaatgtagacccttctgatacctctagctgagctagtcatttggcacgtcatataccacacattgagatattcttgttcaatttgtattgtatgatcactgatctacacatgata

SEQ ID NO: 276387 - DNA, 387 bp, Zea mays
cttcatgtatatgaaaccagaaacaaaggactggagaaaattattggtgtttagagaggagtggcaaaggtatagagggcacttctacaagcgttgtcaagtgcgcatacatattgaggctgatccctcattgaaacaaaagttggttgtacttgctagaaaagttaaaaagatagatgatgaaatagagaagtacatggaactcttcactgagctcagagagaaccctgctgatattaatgccattgttgcaagacgacggaagaatttcactggggacttcttccgccatcttaatttccttgtgaatgcttataatggccttgatgagcgagatggaatagtcaggcttggggccaaatgcctgtccgcaattcatgcatatga

SEQ ID NO: 276388 - DNA, 641 bp, Zea mays
acgctccatatattttttttccttttaaagtttccagtgcagagaaggttctcgtgaattgtgcacctgaagaagagactgaaatgtcaataagtgcaaaatttcgtgctatacagccaagttcttcaatcctttcatatgtggaagatcattgactaggtcgtaggcgcttaattgagataaaaaatgctggctacaatgtcaagatttctgctcctctggataacgttcccttctcaaccagcacagaacgtgaacgcatagaagacattgcgttcagaaataagctggaattctttgctgctgcaaagatctcttcctcattccccactccaacactcccagagatagcatttgcaggtgtatcgaatgttggtaaatcctcactcctaaattcacttacaagacaatggggtgttgtgcgaacatcagataagcctggacttactcagacaataaatttctttcaacttgcttcaaagctatgtcttgttgatttacctggatatggttttgcttatgcaaaggacgaagttaaggaatcgtgggaggaacttgtgaaagagtatgtttcgaccagagttggcctaaaaagggtgtgccttcttgtcacactaaacgaggaatgaaaccgtggacta

SEQ ID NO: 276389 - DNA, 414 bp, Zea mays
gacggcggtctgctcctaaccggcacgccaaggacgaggccaccatcgccgcgcactgggacgacatcggcctccccgccggcacgcccgtcgaggccagggacctgtggctgcacgagacgttggacgccacgttcacggacaagatgagcttcgacgtcgcgccgcactcgtgcaggatgctcgtcctcaagcccaggatccagatccagtgaactaccccaccgctgccgcatgggcgcgcgtacgtgcggccctcacgacgtcaccacgcgtcgattcatttgtactgcaggctactaattgcagacacgtggaatcaaaatcaccaagaattgttcgtttctgctggaacagaccaggattaattccaaatctccaaaacttatagtaattattgaacgaatccaagcc

SEQ ID NO: 276390 - DNA, 549 bp, Zea mays
ggaacatcaaaggcgcttggatgaggtactaattattgtgaactacgacagcagtctatataggctgctgtagttcgacactattgatgatcacacaagagagtcagggacattagggcacttgggtcctgaatacgcgatccgaggccaagggacgaagaagtccgatatctatagctatggggttcttcttttagagattgtaagggggagatgcagcaccaacacgagactacctagcgaggaccagttcctccttgagaggacatgggcactctacgagcaaggacgtctagaggacatcgtggacatggacatcggcggcgaccgggacgtcgaggaggcgtgccggttcctgaagatcggcctgctgtgcacgcaagacgcgatggcgcgccgtcccaacatgaccaacgtcgtccggatgctctcgggggaaaagaagatcagcgtagagaagatcactaagcccgccatgatctccgatttcgcggagctcaaggtcagtaacaaggagcgaaggccgggcgaggcacggtcgcccacgac

SEQ ID NO: 276391 - DNA, 519 bp, Zea mays
gcaggtttttaaatagccgcgccggggcggggcagaggtggtgctcctcacaccggcctcggcgcctcgcaccacaaccacctcctaccccttctcttcttcttctccccccttgcgaatcggagaccaagtgcaattgcccacccaagacccggaaccgggagccaagagcagtacaaggggttggtttctgcgacggcgaggacgcgaagcggattcggatcgcgccgccatgccgctcgacgagctcgccgacaaagggccgtcgtcctccgaggaagttcagctcgcgccgtcggattccaagttccggagcctcagtcctgcgccgattccgctcccaactcttccgagcatcagatcattggtccactcggtctctgatgagagtgtgaatgtagatgtcgcggcctcacatcagagtgaaaatggatctatctctactgtgagttcactagaatcagagagggcagcatatgaatttctggctcacactccgtgcatgtcaactgatgcaca

SEQ ID NO: 276392 - DNA, 904 bp, Zea mays
gtttggttcttcgcgaatgctggtcaagtctgcagtgctgcttctcgtctactgctgcatgagaaaattgcaaagaaattcttggatagattggttgcatgggcaaagaatataaaagtctcagatccactggaggaaggctgcagacttggttcagttatcagtgaaggacagtacgagaagataaagaagttcatctcgactgcaagaagtgaaggtgccacaattctgtatggaggtggccgaccacagcatctcagaagagggttctttcttgaacctacaattataacagatgttagtacgtcaatgcaaatttggcaagaggaagtctttggaccagttatctgtgttaaggagtttaggacagagagtgaagctgtggaacttgcaaatgatactcactatggtttagctggtgccgtgatctccaatgatcaagagaggtgtgagcgcatttcaaaggctcttcactctggtattatttggataaattgctcgcaaccatgcttcgtccaagctccttggggagggaacaagcggagcggttttggtcgggagctcggagaatggggtcttgataactacctgacagttaagcaagtcaccaagtattgctcggatgaaccgtggggatggtaccagcctccatctaagctgtgaaggggcattcactccagggaatgtaatgcatcattaactgacagcatcagtcctgttaatggacaggagctcgtgtacagtacagtgctcgtaaaaaaagctctttgatggtaaagttgcttgctgctatcactactccagaccagaattcaggactggagagtacgatgtcatgagttgtactacttgttagtctggactctttatcattcgaagtttggcagtggtgtgtaattgcact

SEQ ID NO: 276393 - DNA, 619 bp, Zea mays
aaaatgactcaaacgagaagagtgtacttgagggccgtgctatggagctggagcatgttcgcaggcagttagaggattcaagggctgaggctagtctgaagctacaaactacaattaagaacctgaatcaagttcttgaagagaaagcagaacttgagaatcgtatgaaggatgcggagcaggcaaccagcgacctaaactccctggtcggttccctcgacggcaagctgaaagccacagaggcgcagctcgaacagcttcacgcggagaaagcagaagcgatcctcgagagcgagaaacagatatccgagctgaaccaagccatcgcccgtctcaagacgcggctggagctgctgtcttcggagaaggccgcagtcgataccaaggcgtccgctctgctgaccgacgtcgccgtccgcgacgagaagctgaaggagacggaccgccacctgcagcagctgcacctggagcacgtcgagctgatcggagcggcggacgcgcgcggaaagacgcgtcggggctgcgctcacgcgtgcgcgagctcgaggtggaggtcgagaggcagaggctcatggtggcagacagcgcggaggggaagcgcgaggcgatcaggcagctg

SEQ ID NO: 276394 - DNA, 184 bp, Zea mays
agcagcggtgcttactcactagtcactactgcttggctctagcctctagctagtcaactcctgcgtggcccggcatggggagggcgccgagcggtgcgtggaacatggcgcttctggggctggccgtcgcggtggttcttgcggtggccgtcgaggcgcggtccttggagaagctgaacctatg

SEQ ID NO: 276395 - DNA, 442 bp, Zea mays
ccgacctgcgccacctccgcgccgtctcgcccgaggacgcggcggccttcgccgagcggcacggcaccttctccatggagacgtcggcgctggacgccaccaacgtggaccgcgccttcgccgaggtgctccgccagatctaccacgtcgtcagccggaacgcgctcgacatcggggacgaccccgccgcgccgcccaggggcaagaccatcgacgtcagcgccgccaaggacgaggtctcccctgtgaacgcgggcgggtgctgctcgtcggcttagccctggtcaaacatacgctttgctgattaaggaagacataacgtgatgacaatctttgttgacttcgtcaagcggttgggggtggttggcgctcgtgatgtgtttgcagactagcaatcgctgtcctcgattgtatttttcgggctattttttgattgatgcac

SEQ ID NO: 276396 - DNA, 476 bp, Zea mays
gctcattttgttagccatgttgctcaacattgcaacatcagtggtggtggtcgtggtcgtacttatgacgatgtgcatggcttggaggatgcatcgatgggagtttctgatacagtcttgggaggtgcctatagtagccgtggtggtcatggtggtcgacgtgcacgtggtcatcatccagccccccttcaacaatgccatatcgtgcacctcgcacaattggagatcgtggtgctgctgtctagtctgtggacgacgacactgagggtgatgaattcaatgaccaagatgctttggggcatgctgaatggaggaagttaaaatatggaccaccagaaaaccttgataagcttgagataatgtttgagcatatagctatgaatggatcaacttcctgcacaccaggacaaaatattgatatagaaggacctgatgttgaaggagtagaagctgcaatagaagacagtccccgtagt

SEQ ID NO: 276397 - DNA, 1422 bp, Zea mays
tcccacgcgtccgcccacgcgtccggtgagcagaacaaaataggttttgattcagccaatgggaggactagagttatccgggtcatgtccaatgatgaacttgttatgtctggagaagggagaatctatatggattgcgaaatgaaggagattgaagctggtggaggaaggtacaggagagggacaggtgacgactacatggtttatggtcagggatgtcagatagacagacattgtttgttggatcctcttgcagaggcccagtacaagaatcctgttcagcaggacaataataggaatggtgttacggatgagtcctttatgatccctcttaggtccagctcacaggataatatcggagcagaaagcagaactactattgacatagatgttgagcttccttctagaattcataaagcatcagatgaaaaggctgggcatcagcttttttacgaacctgacgaattggtgccagagcgtggatctgaagatgtttcatttggatatgatccagcaatggattatgatagccacatgcagactactgtgaaggtggaagatgaaaaaacagaggatgacttgccagttgctgacaatgatgtacagaaggtagagaaagagaagctaaggaatgcaaaggatggttcagataaacgaaggaaagatgccttattgaggaggttatcggcgccaaggaccccactgaatgatgcacaaaaacgtgcacagaacctgcgtgcatataaggcagaccttcagaaactgaagaaagaacaggaagaagagcaaataaagcgattggagaggctcaaattggagcggcaaaagaggatcgccgcaagaggtaatggaaagggtccagggaatggttctcctaaagcgaatggtacgaatggactcagtaaatcagttccaaccttcactgggttgaaaaaggagaaaaatggaacaactgaatcactcagcgatcgactgaagaggctttctgaacccaaaagcattgctggggcagagcattccttgaatccaaagtcaactggcgcagaccattcacgaagaagaagcatggcgtgagacggagaaccgagcatcttgaatccatcgtaccactcgctagctcagcaaccatgaatggcatatcaaaaggcttcttgtacagaaagaggaaatggctggcgctgtagcactgcctgcttccaagatttgtgatggaaaatcaagttaccttttcaatggcatggcgttgtacttccaattttaacataattatttcattcttttattgaggatggcttgtaatagctgtaaacctggatttttcggcgacgcggagctatattttggtttttggctgtatttatggaatggattgatcgttgtttgagataaaaaaaaaaaaaaagggcgcccgccgattagtga

SEQ ID NO: 276398 - DNA, 602 bp, Zea mays
cattaagccatcgctcacacagtcagaccgacggactcattaacacacacacacggacacacaacttctccatacacgccgtagccatggcttccgctgcgcagaagaagatggcaattgtttgcttgatgctgctggccgtcgtcggccaaatcgtcgctgatgctgatgttaccgtagaacatcccagccgcatctgcaccgaaacggtgattgatcctcgtgttcccaacaacgagtgcatctgctccaagaactgcgcctgtgccggcaagtgcatccttgagtcggctgatgctgtccagacctgctttgtcgactgcgtcctcaagaacgactgcatctgcagcagcaagatcatccccggcgctgacgacccaaaggctaatgccaagtgaagtagtactgctatcatcccgaataatgtcgtacgtatagtacctgctgaataaacctcccatgcaccaacagggagagagtctgtacgtcttctttgtaatcatgaaccgcttgtacgtgtaatatataataaaccactctccaccttacacataaaataaaggtggcctcgtatcggattagccattgaattccgatataaa

SEQ ID NO: 276399 - DNA, 567 bp, Zea mays
tgtttcgcgtccgcgctcacacagtcagaccgacggactcattaacacacacacggacacacaacttctccatacacgccgtagccatggcttccgctgcgcagaagaagatggcaattgtttgctcgatgctgctggccgtcgtcggccaaatcgtcgctgatgctgatgttaccgtagaacatcccagccgcatctgcaccgaaacggtgattgatcctcgtgttcccaacaacgagtgcatctgctccaagaactgcgcctgtgccggcaagtgcatccttgagtcgcctgatgctgtccagacctgctgtgtcgactgcgtcctcaagaacgactgcatctgcagcagcaagatcatccccggcgctgacgacccaaaggctaatgccaagtgaagtagtactgctatcatcatccccaataatggcgtacgtacctaaataaacgacctcccatgcattgcaccaacggggagagttaagtgtgtaataattaacgggccgtatgtctgtacgacgacgcgtcttgtttgtataataaaccccttgttttgacgtgtattat

SEQ ID NO: 276400 - DNA, 861 bp, Zea mays
ggaaacagtggagatggaggaggagcaggagtttgtttggaaatctaacctgctcccctacaaggacgatgatgctttcgttcttcctgagagtagtaaggaggagtacgcatcaacatcaggagacacagctccgtctggcaaaatggacccgaggatggaaaggtctggaagcaatgggacaagcaaggtccctagactgggttccatgcttgggacagccagcatggctggatttggcaaggcagtggagattctagacacgttaggctgcttgatgacgaccttgagctcagatggtggctttgtttccaggaccaagaccaaaggatgcaagatatcaattcttgcttttgaggttgccaacacaatacttaaaggtgctagtattatgcaatctctctcggaagacactgtcacatacttcaaacaggttgtgcttccttccgaaggtgtgcagaatttggtgtccagtgagaggagtgaactgatgcgaattgcagctaacgacaaaagagaggagctgaaaatattttcccaggagattgttaggttcgggaaccgctgtaaagatccccagtggcataacctggatcgctactttgtgaagttagaatcagagagtgcgccccagaagcagttgaaagaaacggcaatagcagagatgcaaaagttaatgagtcttgttcaacgtacaactgtgagcactctgttgttctctaaagatatcttctaagccacaaatgcccgtcatttcgtttttttttttggctttcttttttcaagatttgtatcatgagctgcatgcattagacagatttgagcaagagtactgctctaagataaacggaaagggtcaca

SEQ ID NO: 276401 - DNA, 324 bp, Zea mays
gtgaattgatgcgaattgcagctaacgacaaaagagaggagctgaaaatattttctcaagagccggttaggttcgggaaccgctgtaaagatccccagtggcataacctggatcgctactttgtgaagttagaatcagaaactgcgccccagaagcagctgaaagaaacggcaatagcagagatgcaaaagttaatgagtcttgttcaacgtacaactgatttgtatcatgagctgcatgcattagacagatttgagcaagagtactgctctaggataaacggaaagggtcacacagatagaattgaacaaggaggcaatattc

SEQ ID NO: 276402 - DNA, 457 bp, Zea mays
tttccgctttacctccctccgatcccccaaatcccgaattgaccaacccaaagccggcgccccgcatggagtggacggccccgaagcgcgccgcctcgccgccctcgcctccgctcctctgggactggggaggagaccacgccggcgccacgggctcgggctcgggctcctccggcgacgccccggcgcggcgcggcgggagggagcgggaggcgaagcgcgccagggccgacgacggcgaggtgaggtgccaggtggaggggtgcgggctggacctcagcagggccaaggagtaccaccggaagcaccgcgtctgcgaggcccacaccaagtccccccgcgtcgtcgtcgccggtcaggagcggcgcttctgccagcagtgcagccgatttcatgccctgtcagagttcgatcagaagaagaggagctgcaagaggcgcctgtctgatcacaatgc

SEQ ID NO: 276403 - DNA, 1260 bp, Zea mays
gatgaagttgagaacacaaatgagcaggatgaatcgaaggagcaagagaaaggtgcttcggctgagcaagaggaaaacgaaggaaaagaaacggatgctgatgagaaccaagaagaagaggaagcagaagaaaagggttctgctgatgagaaagatgaagctgaagctgaaggtgacaagaagacggaagagaataaggagactccaaagaacaagaaagcaaggagtgccagggatagaagccagggaaaagataaggagcaggatggatccaaatccaaggaagccaaaagtttgctgaacactccaagcccatatggtaccaatcgccctcaacgtgaaaggaaaacagtggagaggttggttgaggtgattgataaagagccaaacaagaatttcgtggttgagaagggacgggggactcctctgaaggatataccaagtgtggcacacagaatatcaaggaagaagccttctgatcttaaatttcttcacagtattctttttgggaggaaaggcaaggctgtcgattttaaaggacatatactccagttctctggatttgtttggcatgaaagtgatgaaaagcacagagtcaaggcaaaagagaagcttgataagtgtgtaaaagacactctgctggacctctgttggacccttggtattccaactccgaaagcaaacattagaaaggaagatattgtgtcaaagctgttggacttcattgctgaacctcactctgcagctgaatcttggggctctgatgatcagggatcaaattctaaaaaacgcaagagaggaggtgaaagtgcaagtaagacgcctgatggcacacctagtaggtcgaggaagaaatttgtcgatgacggtacttctagtaaaaggcagaataaagcgctccagtatgatactgatgaggatgaatccatgaagtcagacagtgaggaaaacagagatgaagattcagatgaagctggtgacaaacaggaaggtgactatgtatctgggaaagaaaaggcagggaagttctcagaggtaaaagaatcttcaggcaaaaagaaggcaaacacagggagtggccaccaatcaggtcctccaaagaaaattatcagaagtccggtaaaaaaagtatcatccaagattcatgaggaaaaagaaagccccaataatagtgcaaaggttttttctaggaagaagacacccacagcagaaaaggagatcaaagaaaaagagtcatcagacaaaaaggtgacaagggta

SEQ ID NO: 276404 - DNA, 415 bp, Zea mays
cgcagttcggcctgtccaactcgtccctggagctgcccggcatggacgactacctgcagctgcagcaggactccgtcgcctgcagagtgcgtgcgaggcgtggctgcgcgactcacccgcggagcattgccgagagggaaagaaggacgaggatcagcaagaggctgaagaagcttcaagacctcgtgcccaacatggacaagcaaacgaatacgtcggacatgttggaccttgctgtggattacatcaaagagctcaaggaccaagtcgagaagcttaaacacgaccaagcaaactgctgttgcctaggcaacaagagctgctgctgatgcttgagaggcagactgaagaaggtttttatgccgtaacaatgtgactgttaaaccagagctgttgctttaggagaccatgccgt

SEQ ID NO: 276405 - DNA, 575 bp, Zea mays
ctcacgcacctccgtccgtcgtctagtatgcttcttgccttccgcctgcttcctccgccgcccgcctccggggcggccggttcctgctcatcctctctgatctgcaggttctgacgaaccgaaccgttggggtttcaaatcttcttttgcagactccgatcccaactcaaaacacagagatctctgaaagctaatcggcattggataaccacatccatagtcagccagctgctaacctctactaccagttcggcatggggactgagcagcaatacccaccaccgttcgcctcgctgttgggcgcctcatcaccaccatccaccaacatctcgcacatggactggaacccggccacgatgctagacaacctcaccttcatcgaggagaagatacagcaagtgaaggacgtcatccgcacaatggtggacaacgccgggcaggttcagtgccaccaccaagcaggcgagctgctggctcagaagcagaagcagcagggtggtcaacgcggacctgacatgccttatagttcagctcatctccaccgccggcagcctgctcccgtcactgaagaactc

SEQ ID NO: 276406 - DNA, 408 bp, Zea mays
  unsure (1)..(408): unsure at all n locations
gccaaaacgcagaatctgcactgcatacatcgagctaactatctgcagcgatgtctcgctcctgctgcggcgccgtggcggtgcttctcgctgtcgccgcgacagccagcgccaccgcgccggcatggctgcacgaggaggccatggccacgggcccgctggtcgcagagggtgcaagggtggcgccctccgcgtccacctgggctgccgacaaggcgtcgccggcgaggccgagcggcggcatggccacgcatggcgacgaccagagctcgtcgggcggcagtggcagcagcggtgagcacggcaaggaggatggcgagaagcagggcaagagctgcctcaccaaggangagtgccacaagaagaagatgatctgcggcaaggggctgcacgctctcggcgcacagc

SEQ ID NO: 276407 - DNA, 450 bp, Zea mays
cccacgcgtccgcggacgcgtgggtgactttgcatgccatgcccatgacacccctcgggtgcgagtgcgacatggcccctgcagcttctcgccagtcgtggcctctccctcgctgcggcctgctggtcttggcccttgcactggcgacgaccgccgcggtgggcagcgcgcagctgtcgtcggagagctactacgacgcgtcctgccccgccggccttctcaccatcaggaccgccgtctcgacggccgtgctgctggagccccgcatgggggcctcccttctccgcctccacttccacgactgtttcgtgcacggttgcgacgcgtcggtgctgctagacgacacggcgagcttcaccggcgagaagggggcggcgccgaacgcggcgtcgctcccgggcttcgacgtgatcgacgacatcaagatgctgctggagctgctgtgcccgc

SEQ ID NO: 276408 - DNA, 916 bp, Zea mays
taattttgctatcatatggacttatcttttgtggaaggtgtttacttcttgtatccattgtctggtgtattaattcattaagaaaagttgggggttctttatattttggtattctgattttgccatttttgcagcagtttgaatatattggttcctgattattgtgcctcgtcatggatttattgcgttcattgaaccagaaaattgcatcgcagtgtctacatttgtattcttgtttaccaagatatcttcaatgggtgatattgatgacaagagagatctcactcctgaggtacacaagatcgatggagacattgttgagttgaatcttcagcttaaaggagatgtactgtagagatattcaatgggtgatattgatgacaagagagatctaatcctgaggcacacaagatcgatgaagagattgttgagttgaatcttgagcttaaaggagacttcgtacagtctaaccatgatcaccgaccacaaaagatgggaaattgacagaaacagtgaaaaagtactagtaggaggaagaagggtacgtagatggaaaataaaccggtcaagctgatggattaagaagaacaacctcttatccactccaaatccacccatgaaatggagaagattaatgctaagccactccaacagtggcttgtgtcaagtcgttgattctatattttttatgtactggtaaagggaatacggagatacattttgagaagaaaaaggcaaggagctaagccactggcttgtgtcaagtcgttgattctatatacttttttgtactggtaaagggaatacggagatacattttgagaaccaaaaggcaaggatatgaccctcggtgttttggctttcgtgaaaaaaaagaactgagcgaatgatgaatgtcacatgattatatttagct

SEQ ID NO: 276409 - DNA, 508 bp, Zea mays
aatcaacataagataaattgttgtagctcaatcctatagtcatactgagctactgattaggatgttcaggaatgaaccattagatttcctgtgctaaaatgaggattgatcataagactaatgacgatcaagactatcaaggcccctacaaacaaagctcatgggaaattagaaagtgaaatgaaataccatgttgaaaacagggccaaagtagctagcaattcaaagaggcaaaatgctgcaaaatataatgcttcatgaggtcagtaaatacatatttggtaattccatgctaatacactgatgctttaagatgcctgagacatctatcttctttgttagttgttttcggtgttgtcaaaatctcacgtgccacaatggatgaaagaacaacatgtataattgggttccaaagagacttgagggctaattcatcacaacctgtaactgaagatcttgtataactgactacatcaccatgcaagactaatgtttatattttattaag

SEQ ID NO: 276410 - DNA, 930 bp, Zea mays
tcttcatcgttttctctacatgtttctgtatatatatatatatggggatttggcgtcttctctgtagtcgacaataatcctttcccgtctaatcgagcagggaagcgaagaacagggaagcaaggacatggatgctttcagtgcagtgatggacaaggtaaagagccacccagaaatgatggagaaggtaagtgcagtgatggacaaggtgaagaagagccacccagaagcggtggaaaatgtcaaggacgaggtgaagagccttgctgacgctctccacctgcggagacatggatccaaagataaagaacctgagtctgaagagaaggccgtagaaggcgaggcagcgcagagcgtcgaggaggaggagggtacctctgctgacaagactgcagaacctaatgtgttggagcaggccgtacaggagattcaggctgtcgccgcagctttgcagcagacagcacctgaaactgaaactgaaattccagttgagactgctgctgctgctcggtcctgaaacttcggctgaaggagacaagcctgaagaaacaaacagggatgtggagaaagacgacccaaagaagcggctcgatttcgccgggttcttcgccatgctgtttgagaggttctgctccccggccaacaagaagaaagactgagtgattgcaggtcagctgtggatttctcgttttgtgatcttggacgtggaaattacagggagtgcatgggattgtgggtggtgtacagtctgcacttgtgttctattaagataaatctgctcttgctttttttactttcttctgtgatgacagggcaatgattacattttacttgatgtatttattgtcgcccttgtggaattgatttagtttacgtgaacgattgatttattttgggttaagataatgcagtgagtgtgtgatgccttgt

SEQ ID NO: 276411 - DNA, 532 bp, Zea mays
cccacgcgtccggacacaggctgctgcgccgtgcaaggcacgatcgtcgaccaaccaccatgaatgcctgcagtttgcttgcgtccatttcgctgtcactctgctgcactgtcgccctaccatgtagtattatgatgcatggtgctccagtttgtcattagtccatgacaaggggctcggttagtccacagccctagaggctgcagctgcacacttcccttctctgttttcgccggttaaactttccccacttgttgctggccttcgaatctgcggtttgtttgagcttagcagggaagcgaagaacagggaagcaaggacatggatgctttcagtgcagtgatggacaaggtaaagagccacccagaaatgatggagaaggtaagtgcagtgatggacaaggtgaagaagagccacccagaagcggtggaaaaggtcaaggacgaggtgaagagccttgctgacgctctccacctgcggagacatggatccaaagataaagaacctgagtctgaagagaaggccgcagaat

SEQ ID NO: 276412 - DNA, 458 bp, Zea mays
gggctcggttagtccacagccctagaggctgcagctgcacacttctcttctctgttttcgccggttaaactttccccacttgttgctggccttcgaatctgtggtttgtttgagcttgtaaggatctcttcttcttcactctagcagggaagcgaagaacagggaagcaaggacatggatgctttcagtgcagtgatggacaaggtaaagagccacccagaaatgatggagaaggtcagtgcagtgatggacaaggtgaagaagagccacccagaagcggtggaaaaggtcaaggacgaggtgaagagccttgctgatgctctccatctgcgtagacatggatccaaagataaagaacctgagtctgaagagaaggccgtagaaggcgaggcagcgcatagcgtcgaggaggaggaaggtacctctgctgacaagactgcagaacctaatgtgttgga

SEQ ID NO: 276413 - DNA, 462 bp, Zea mays
  unsure (1)..(462): unsure at all n locations
ctgctgctgctgctgctcctgaaactttggctgaaggagacaagcctgaagaaacaaacagggatgtggagaaagacgacccaaaaaagcggctcgatttcgccgggtttttcgccatgctgtttgaaaggttttgctccccggccaacaaaaaaaaagactgagtgattgcaggtcacctgtggatttctcgttttgtgatcttggacgtggaaattacattttactgggtggtgtacagtctgcacttgtgttctattaaaataaatctgctcttgcttttttactttcttctggggcaatgaccacagtttacttgatggatttattgtcgcccctgtggaattgatttagtttatgtgaacgattgatttattttgggttaagataatccagtgagtgtgtgatgccttgtttccccccnaaaaaaaaaaaaaaaaaaaaaaaaaaaaaaaaaaagaa

SEQ ID NO: 276414 - DNA, 397 bp, Zea mays
agcccccgccgcgcggcaggcgcagtagtagatcaaaggcggcccaggccagggtcgtaggtgccagtgccacccccgacgtcggatgggaacgcacccgcttcgggagctggcttacaggggctgcgtgcaagcgctggtggcgcgtcagccattggctgtagtagctgatagctaggtagtcttgtagaagaagtatcatcaattagtaatcttgtagctgtgtgagtatgttcatatgcggatgccggagaggtggcgatggcttgtaatcaaggatctgccgccgtacgtcccttgacgactcctcttcccgtggtcggaggatgagggatcggccaagaggaaatgtttccattccgaaagcttacacgcctaatgctgcttcatccacaac

SEQ ID NO: 276415 - DNA, 445 bp, Zea mays
gcggagctgtacgaaacggcatctgggagacgcacacgcccgctcgaagcggcgaagcctcgaacggggtgaaaggcatactgtgagaccccccgcgtcgcgtgatctccgagatggaggcggcgctagtggagcggctggaggccgcggtggcgcggctcgaggccgccgtggcctccggcgcctcgctcgcgtcggcggcgccgcgcgacctcgacgctcctgaggcccggttggatccagccatcgcggcctacgacgagttcgtcgcggaggccgtcgggcggctcacggctgcggccgataagatcggcgggaaggtgcttgacgccacccaaggcgctcgccgaggcattggccgccgtcaaggaccttgctcctacagcccaagcagctcccgaaaccagcttccatggctgatgcacagggcatttttaagcccctc

SEQ ID NO: 276416 - DNA, 706 bp, Zea mays
cccacgcgtccggggaaaaggaacaagaagtatttctgggtgcctgctatcgctcctgtaacttcggttattcttgccacccttttcgtgtacctctttcgcgctgacaagcaaggtgaacaagatcaaaaagggcgtcaacccgtcatctgtgcacaagatctacttcaccggtccattcgtcgcgaaagggttcaagatcggcgctgtttgcggcatgatcggcttaacagaagccgttgccatcggaaggacgttcgccgccatgaaggactaccagctagatgggaacaaggagatggtagcacttgggacgatgaacatcgtaggctcaatgacgtcttgctacatcgcaacaggctctttctctcgctcggcggtcagcttcatggccgggtgccggacgccagtgtccaacgtggtcatgtccacggttgtgctcctcaccttgctgctcatcacgccgctgttcaagtacaccccgaacgcgatcctgggctcgatcatcatctctgccgtcatccgcctcgtcgactaccaggcggcgatcctcatctggaaagtcgacaagatggacttcgtcgcctgcatgggggccttcttcggcgtcgttttcaagtctgtcgagataggcctcttgattgctgggtccatctcgtttgccaaaaatacttgttcaaggtacaagacccagtactgggctgct

SEQ ID NO: 276417 - DNA, 606 bp, Zea mays
gcgtcttctacccgctcgccggccgcatccgccaggacgacggcggcgcgctggcagtcgagggcgacgagggcgccgaggtcttcgaggccgaggcccagggcgtcgccgtcgacgacctcgccggaggggactgcagcgacgaggcggagaaggtcttgcagcacctcgtgccctacaccggcgtcatgaacctcgagggcctccgccgcccgcttctcgccgtccaattcacaaagctcaaggacggtctggcggtggggtgcgccttcaaccacgcggtgctggacggcacctccacgtggcacttcatgtcctcctgggccgagctctgccgcggcgtacccctgtcgctgcagcccatccacgaccggtccctgtcccgctccgtgcgcgtgcggctggagctgccggcgtccgccgaggcccacgagaagacggacccgaacgggccgaagaaggcgctggtggcccgcgtcttctcgttcccggagcccaccgtggcgcgcatcaaggccgcggccaacgcggcgctgccgtcgggcgcaaagcccttcttcacgttccagtccctgggggcgcacatctgtgcgcgccgtctccgcg

SEQ ID NO: 276418 - DNA, 596 bp, Zea mays
  unsure (1)..(596): unsure at all n locations
ctcaagaagatcgaccgcggtgggggttgttacttccacgacgacgtaacagtcatagtagtgttccttgattccagcctcgtgagcaaggcgagcacgcaccgaggccccactctttccctgcgaggcggcggtgccagcgctggtctgcgcagcaacacgcttgcaccaacgtcaatgtggctatgaggaggctacaccctgactggaggacgttttctttcctcgtgtcgaatgtgttatatatgtacttgtaccggccaaggtcatccatctcccctcaatggtgtaaagaactaggagaggcgtggaagctcctctccagcgtctttgaatcccctcaatggtgtcaaggtgtggactcaagtcaatagcttcgctgttctgatgatgctctgtggaaactcgaatcctttccacctgaaaaccaagtagtatgtcttctagtgctggaattaaccctagtgcatatatacatatgaaataaaaaaaagccaaaaggaggagtaacttatttaactgatgctgtgtatgtatgttttgtattgtatgtgtactgattttgactangaaaaataaaaaaagataaacaaaaa

SEQ ID NO: 276419 - DNA, 369 bp, Zea mays
cggacgcgtggcgtgacgcgtgggcaagcaggagtctgcttccgttccattgcatcccagtcccagccaaagcaggatgccgcacgccaagacggactcggaggtgacgagcctggcgccgtcgtcgcctccgcggtcgcctccacggacccgcggcgccgtctactacgtgcagagcccgtcccgcgactcgcacgacggcgagacgatcaaggcggccacgtctgtgcactccacccccgcgctgagccccatggcgtcgccgcgccactcgcactcccactcccactcgtccatgggcagggactcctcctccagccgattctcgggccacggccacaacaagcgcaaggccgacaagggcggcag

SEQ ID NO: 276420 - DNA, 617 bp, Zea mays
gttctagatcgcgagcgccgccctttttttttttttttacatttatttttagtttagaaaaccgaagggcgacgggcggagcttacaaagccggtgccggtgagcaatcatgaatttacggagcacactgtagtgtgcagtgtgcccccactgatgtctagaacgacgactgatgatgatagatcacccacgctgccacgcagcgacgtgactgcgacgggtcccactgatgtaccgcgcagtgacttcaatctttggacgttccagtggatggattcgcgacggagatcccgccgtcgacgaacaggttgtggccgctgatgtacctcgcgtcatcgctggccaggaagagcacggcggcggcgacgtcgtgcacccgcagtgcgcccacgcccttgaggttggccatgccctccattgcctgctccaacgcctccgcctcgaggcccatgtacctcatggtcagcggcgtggcgacccccgcgggggagacgcagttcacgcgaatgccgtgctggccgagctccgcagccgcgttctccgtcagagtcaccgttcgccgttcgcgcacgcgtacgcgtacgacgacacgccagtcactgccgccgccacgctcg

SEQ ID NO: 276421 - DNA, 873 bp, Zea mays
gtcccgggcatagttcacgtcctgaagaacgggagcatggaggcacgggagaacgctgcggccggactctgcagcctgtcggtggtggacgaatacaaggtcacgatcgggggcacaggagccatccctgccctcgtggtcttgctgaccgagggcaggcagcgcgggaagaaggacgcggcggctgccctgttcaacctgtgcatctaccaggggaacaagggccgcgccatacgggctggcctcgtgccactcgtcatggggctcgtgacgaaccccaccggagctctgctggacgaggccatggcgatcctgtcgatactgtccagccaccccgagggcaaggccgcgatcggggcggcggagccgtccccgtcctcgtggagatgatcgcgggtgggtcgccgaggaacagggagaacgctgccgccgtgatgctgcacctgtccgccagcgtgcggcagtccgcgcatctggctcgggcgcaggagtgcggcatcatggccccgctgcgggagctggcactgaatggcacggggagggggaagaggaaggccgtgcagctgctcgagcggatgagcaggttcctggtccagcagcaggaggacgcggtggatccacgtgtgcaggagctggaggagatcgagcgccagcttgccgcctttggacctggcgttacggaggctgatgtccttcaacagttgggggctctttaacctatggtacatttttcactatgatactactatacttatatagaaaagttctagcggcggactttattatcagtaaaatctcagttctagctactgaatgttagcgtgggtttcggatttcaagattttaatggccatgcgtgtatatgcatttgcg

SEQ ID NO: 276422 - DNA, 725 bp, Zea mays
cccacgcgtccggctacggggtccaatttgctgtcatgataccaacggtctcggagctttttgggctaagggacttcgggctaatgtacaacttcatgctgttagtgaatccactcggtgcattctttttctcagctcttcttgctggctacatctatgacaaggaggcagcaaggcagcacccaggtgtactggagccttccgactgctatgggcctgactgtttcagattgactttctatgtctgcgccgtcgtgtgttgctgcggtaccctgttgggcgtgttcttcatatcgaggataaagccgggctaccagatgctctacgcaagtggatcgttcagacatcctcggagccaacagcagctccactgatgttgcatatacactacagtcatatgctaagaaatagtcctattgagttttgggaatgaaatcataatgttctggagtaaatcatctgctggatgccatgttccggtgctgtatcgcattaacggtgcttgatttgcccctgtttgtatcagagttttattctgatttcatttgtccctgctctgtaaggtcgccagcctagtagatataatatagcgggtcatcaatatatactggtaaaccagctgcctatttatatggcagctcgtgtgcatcagcaagtttgaggacgtcataaagcgaatgtatcttctttattctgttgttcctatacaatggggttcctccatt

SEQ ID NO: 276423 - DNA, 516 bp, Zea mays
  unsure (1)..(516): unsure at all n locations
gcggcagtgggcagaggcgagagggcccgccgctcctccagcgtccaacgccatccatcccgacctcgcaacgcaagcaaagaaagcccaggcaggcgtgtgcacggcgcggcggggcaaccaagggtgggtgaacccgcagagaggggcagctagcttccttccttcccaggcgcgcgggagaggttagccgccgtataagtagccagccagccagccatgtcgtcggtgtcgtcgtcgctgtccaacttcctgctctgctgcttctacccgtcatccgccggccaccaccgcggcggcgcctactactacagcagccacccgacgagcgccagcaccctgcactaccacgagggcaccttcgccgggcgcagggccatgggccggagcagcaggccgctgtcgctgcagacggtggagctgaaggtgcgcatgtgctgctcgggctgcgagcgcgtggtgaagcacgcggtgacgaggctgcgcggngtggactccgtggaggtggacgtggag

SEQ ID NO: 276424 - DNA, 438 bp, Zea mays
  unsure (1)..(438): unsure at all n locations
cccacgcgtccgcggacgcgtgggctgctaccgagttaagtatattctgagctcgtctgcagccaaaagcttccatttgcattgcgatgggggctctacctcgtggcctgctagctggcatctgcgccgtcttgttagcagcagtggttgcccttgcccatggtgcggaacaggaaacagcgtcaatggtggtcggcttggccaagtgcgccgactgcaccaggaagaacatgaaagctgatgcggcattcaacggccttcaagtggctgtcaagtgcaagaacgccgacggcgtcttcgagaccaaggccctcggtgaggttgacaagtccggcagcttcagcgttcccctcccggctgacctcctncgcgaggactgcgagctgaagcaagactgcttcgngcagcttcacaacgcggccaacaagccatgccccg

SEQ ID NO: 276425 - DNA, 561 bp, Zea mays
atccaagatttctcagggctcattggaagtttttgaaaactgtggtcaacaaattgtttgagttcatgcatgagatgcatcctggagttcaggatatggcatgtgataccttcctgaaaattgttcaaaaatgcaagcgcaagtttgtgacacaacaggtgggcgagaatgaaccatttgtttctgagcttctgtccaaccttgctacaaccatcgccgatcttgagccacatcagattcatacgttttacgaatcagttggccatatgatccaagctgaatctgacaacactaatagggatgaatacctcaagagattgatgagccttcctaaccagaagtgggcagaaataatcggacaggcaagccaaagtattgatatcctgaagaaccaagatgttatccgatcagttctcaacattctacagacaaacacaagtgttgcgagctcccttggaccacacttcttcccacagatttctctaattttcttggacatgctaacagtctacagaatgtacagcgagcttgtatcaagcacgatcgctgaaggaggaccat

SEQ ID NO: 276426 - DNA, 527 bp, Zea mays
  unsure (1)..(527): unsure at all n locations
tcccgggtttcaacattgcgagaactttcagtcatgagtccaaaaagcccacctgtttcaatgcgcttcattcctgaacanaatgacagaggagcgctgacagaagatactcatggattgtctgatcttttgtcccagcaaccatcaagatgtttgatcttgcggaccaatggggagctttctgtgcttgacatggacgatggacatgaacacactctcacaaattcaattgaactcttttgggtcacctgttcgcagtttgaagagaagggtagtcttatcaaggaggtttcatggcttgactacggtcatcggggtatgcaggtgtggtacccatcacatggagcaggtccttttaagcaagaggattttttgcagctggatccggagcttgagtttgatcgcgaggtgtatcctcttggtcttcttccaaacgttggtgtggttgttggtgtttcccagaggatgtccttctcaactgcggagtttccatgctttgagccttcacctcaagcccaaacaatatt

SEQ ID NO: 276427 - DNA, 668 bp, Zea mays
gcggattaaagttggaaatttctgttacgtgaaggagggacttgttcttggtcagctcacagtgaatcgatttacaattactctgaggggtgttactgcagaatctgaagacatgataaaaattgcagtagatggcctaggaaagaatggatttatcaactactatggtttgcagcggcttggaagtggttcaataccaacacatcttgttggggctgctttgcttagaggagagtggaaggttgctgtaaacttgattcttgatcccagggaaggagagcgtgatgacatcaatgaggtgcgcatacgttaccaagaacatggtgacattgatatggcactgagaaacttccctcgacacctcgtagctgagagggccatacttcaatgtctgaagaaatgccctggtaaccagctacaagcgctcaagggtataccaagaacactgagaatgatgtacgtacatagttaccaaagttatctgtggaatcatgctgccagtatgagagtggaaaagtatggcatctcacaggttgtagaaggtgacttagtgtataacaaagaatgcccttcagaagaatcaacttccgtagatattctggaaactgatgatgaccatacaaattcaattgaaatcgatctatgttcttgagcacaaccaggaagaa

SEQ ID NO: 276428 - DNA, 535 bp, Zea mays
ttcgttacgcgtccgcccacgcgtccgagaagtctcgcgacccggcccccgcttcgccgtgatccggcgacccaacgagccgagccgagccgagcagagcagcttcgtggccgagcaccgaaatggggtggatcaacggccacgtcctgccggggacgctgatcctggcggtgggcttgtggcgggtgtggtccgccgtcgcgcgcttcgccgccgacccgccggcgttccgcgtccgcacgtggaaccccctccccaagggcccccgcctgctggagctctacttggtggccggcggcgcgttcctggacatgtgcctggagctcggcggcggcatcctcgccggcggcgcccgggtcggcccggacagcctcatctacctcgagcacgccggcatgctgctcatgttcttcctcttcggcgcgctcgccctcctctcccagaagacatggtctgtcgccacatttctccaccgtggatccgcgcactcttttctcgatggatcgatcgagttcccaaagttggtacagtttgt

SEQ ID NO: 276429 - DNA, 1206 bp, Zea mays
  unsure (1)..(1206): unsure at all n locations
gacgacgtctcgccgtgacaccagctgaggtgtatcacgtatatggacctgggatgaagttactaggccattcgtggcatncaacagcaaggtttagtccttgtttctgcatcacagcgtcagcatacttaaaatccctgtccctagcccatctgctgacctctctgacggtggcaagcttccactcgaggccatattcgtgtcctgcagctgcaagggtagctcgcgcagtccaactgttgtggtccttcacggcggcccacactcggtgtccgtatcaagctactcaaaatcctcggcgttccttgcttcgcttggattcaacctgcttgttgtaaactaccgaggcacgccaggttatggagaggaagccttgcagtcgctccctggaaaagttggatcccaggatgttcaggactgccttgcagcgctagacttcgccgtcgaggaagagctggtagatgcgtctagagtagctgttgtcgggatctcgcatggtgggttcctgacaacacatctcatcggtcaggctccggacaggttcgccgtggcagctgctcggaaccctgtctgcaacctgtcgctgatggccggcaccaccgacatcccggactggtgttacgtagtggcctgcggaacccaagcgaagcgatacgcctctgaagcgccttcgcccgaccatcttcgtctcttctaccagagatcgccgatcgcccatgtctctaaagtcaaagcgccccttcttatgcttcttggcggagctgaccttcgagtgcctgcttctaatggcctacagtacgcaaggagcctaatagaaagaggaggcgatgtcaaaatcatgatgttcccagaggacatacacgaaatcaatttaccgcggtccgatttcgaaagcttcctcaacattggggtatggttcaagaaacatctgaatgcagtggcatgaagcagatccggcctggtggttcatctaggcgaccatgtacagcattgctactttaagtttgtcaagaattcaaacttttttgtgaaaagataaatgctcattcatactggtttcatacgacgttctagtgagtgttccaaagacatcgcctagccgtccagtcatatctagctgactagcttgtcttggagaacaatggcgccttgtagcctaacctgacatgtacaatgatgtttaatatagggtctcttaagttgttt

SEQ ID NO: 276430 - DNA, 349 bp, Zea mays
  unsure (1)..(349): unsure at all n locations
gttgcctatgctgtaatcaacggagtcatagacgacagcttctttggggtgttcacgattgaacagatcaaggaagccgcgtccaaggtacgagtgtgaacccggggccttgttccacaatctctgaacgtgtgttgtaggtggaaagttcataaacttagcggtaactcattgatccttgtgtcctttatttctcgctgaattttgaccatagtcaaccgttcaaaagccagtgcagcattcttttttctgctggaaaaaaaaaaaaaaaaaaaaaaataaaaaaaactaaaaacaaaaaaacaaaaaaaaaaaaaaaaaaaataaaaaaaaaaagggcgngcctcgc

SEQ ID NO: 276431 - DNA, 804 bp, Zea mays
ctgcctccgcggccgtgccgagccggcatcccctccaccagggggaacgcccagcagcgatcgcgacgacccgagccggcaagggtgacaggcggctgacgagccccatgggagacaacaagtctccgctgagcctgagcccgatgggcgggcgcgaccgggaccgggagctcctcatcccggtctcgggcggcggctcggcgcccggcgacggggtcgaggacggggacagggcctcctccgcctccgccgcgctatcctcctccggccgcgaggctttccataaggttgtccgcagttgggcttcaaagaagttcatgactggatgtgtaattctcttccccatagcaataacgttctacatcacctggtggttcattcattttgttgatggattcttctctccaatctatgctcaactgggaatcaacatatttggtcttggcttcatcacatctgttactttcatatttttgatcggagtctttatgtcatcttggcttggggcatctgtccttagccttggcgagtggattattaagcgcatgccccttgttcgtcatatctacaatgcatcgaagcaaattagtgctgcaatatcaccagatcagaacaaacaggcattcaaggaagcggtcatcataaggcatcctcgtgttggagaatatgcgtttggtttcatcacatcgtcagtatctctccagagttattccggtcaagaagatctttactgggtctatgtcccaacgaaccatctttacattgccgatatcttcatggtgaattcaaaggatgtcataaggc

SEQ ID NO: 276432 - DNA, 500 bp, Zea mays
ctatgagcacgctgccctcgtccctaagctcggcatgaggtcgaggctgcatcaacacctgccgactgctgcaggcaagtaaaggtactcctctcctcccctctgctgcagtcctctgcccgctgcagatcatggaggaggaagcatggcaggagtgtctgcatgggtcctgagagtcgcgtgagcagcgaagcagttcacggatggttggatggagggcaatgaccagctgctgagctgctgctgctcctcctggtcgaccatcagtttgtatttgtccatgcctcgtgtagccggccgtcttcttgccctggcttgtccagttccggaaggcgggcaggcccggtgaggcgtggacagagaccggcaagtcagagatcggcaatagtgagctccagcaggagcctacttgtactccttatttacccgttttaaggttcccttcttcgtgctgttcctcgtcttccttcctttctttcttgactggtccctcctgccct

SEQ ID NO: 276433 - DNA, 821 bp, Zea mays
cgaaatttcatcacttcatccccacaagctttgtcaaggtctcccctgatcggatcattttcacggtcactgtcatgggaggatcccccgctggaagtcatgtcgccgaattcgttgagactctcaaggcttttctcgaaggctgatgaagatctagattcactgacgtttatccagaagctggtccactctcgaggcacgggtcgagaaagttgcatattagctgaccctttggacccgagtttgctcgagaagatttcggattacgaagaagatggaattaagtttgggaaaaggcggcccaaacagaggctccttttcgacgccgtaaacgaagcgctcatcgagcttgcttcgatggcggaactggctgcgtacccctggggtagatcatgctcttcggagcacggggattgcaagaacggttccagcagtaattctgcggctgaggaaatctggcgggtcattaggaactggtcgatacttgagaagtaccctcccggtgaagctattgaaagaaatctcttgctggagatgatactaaagagggaggtggccgaggcagccagcgctgacacgactccgttagagacgtttgatctcaacaccacggtctgcgccatggtcttggatggcctggttgaagagacagttgtagatctgactaactactgctagtgaggtacctctgccctctaactaataatctcgcgctctgctccctagtgttggtgtttggtgtgatacttgctgccgtaacactgctccatgctattactcgctcaaatgtgatgccaaataaatgggtctctacgtagttt

SEQ ID NO: 276434 - DNA, 524 bp, Zea mays
cagggaggcttcacaaggtggacactggtaatctcccagatctggatcacctgtcgctgcgcggtgttcagtggaactggggagcagtgagctcggtgctgcagtgcgctagcgaggtgaagcatctagtgatgaagatagagttctgtggcgacctggacgcactccagccgttcccggaagtccattcggttgacttcttcgacaaccaccccaaactccgcaaatttgagatccatggtgccatgttcgctgccctgtgccagaaaaatagcctgaaaaatttgaattcaaggttcctcatcccttgtttggaagaggttctgatcactgtacgctccccactcaatgctgaacagaagctgaacactctcgagtcgcttctgaagtacagtgtgaagctgcggacgatgatcatcagaatctcacagatgaagaattgccacgaggctgctgatgagttctttggggatatatgtaagttcaagtacatgaactacacaaaagtgagaattgaataagtg

SEQ ID NO: 276435 - DNA, 474 bp, Zea mays
acaagatgaagtcactagccttccgaccacacaagactctccagcaacatcatggcaaactatctacctgtagcaacgaaagatacgagggtgatgatagcgcataagtgtactcaacaagcaagagatatcgtcaccaccaaaatggataaaacatagccacactagcaacggcataccagatcttacagaccccaaaaagaaaagctcctaaatcgtcatcaacttcgtgaaggtgtttgctttttgcgcacctatcaggagcaccatcacttttggaccatgaatgcttccctatagatatgaacctactgttagactatttgtggatatgtacatattgacttaacacctgcaagcacactgttgctaagtgttgatgtatgatagttgaatgctacttagtatgtattgtagtctaaatccactctacaactggtatcaactattacataaaaccaacgttatatgctt

SEQ ID NO: 276436 - DNA, 452 bp, Zea mays
gcggcctgaacatgatgttccagctcgcgacgacgctgggcatcttcacggcgaacctgatcaactatggcacgcagaacatcaagccgtgggggtggcggctgtcgctgggcctcgcggcggtgccggcgctgctgatgacgttgggcgggctctttcttccggagactcccaacagcctcattgagcgcgggcgcgtggaggagggtcggcgcgtgctggagcgcatccggggcacggccgacgtggacgccgagttcacggacatggtggaggcgagcgagctggccaacaccgtcgagcacccgttccggaacatcctgcagccgcgcaaccggccgcagctggtgatggccgtgtgcatgccggcgttccagatcctgacgggcatcaactccatcctcttctacgcgccggtcctgttccagagcatgggtttcggcgggaacgcg

SEQ ID NO: 276437 - DNA, 889 bp, Zea mays
ctcacgcgtccgcccacgcgtccgcccacgcgtccgcccacgcgtccggggagaagttggcgtgttggcaactaccgccagcgcatcgagcgctggatggagatgcagaaggagaaaagaatctacgagcttggctccttgccccccttcctgctcgtcttcgccggcgagatagaggccgtcgaccaccggtggaaccaacgtcttcggcagctgccgccctctccataacgggcccgtcagcctgatgcactggtccgggaagggcaagccatgggaccgtctcgacgccggcaagccttgccccctcgaccacacctggaagtcgtacgacctctacattggcgagaatgattcttcaccagcatcagggccgtcccggtcagccttgtcatcgttggtggcatggtagaagttcatatacacaataattctttgatctcgggtgcccgtggttcttggccggtaatggaattgccttgcgatgcattcccactgccggctgccgccacagctgctgccgcaagccagctgccgccttcggctgtacaggacagtgaggggaggggcggtatacagattgcagcaggagcagcagcagcagcaagggggtgaagacagtgaatagcgggggggagcaaattcttgttcgttttgcactatgattgagattgattcattaggctctggtttggaggctgtgactatcatgggatggaaggaattacttggttggtggtgtacaattcttggataggacaaaggtttcggctttttggtgtattagttcagaattgcttcatttacatgtctattcagtacactcgtgtaatacggattaaattgatttgaaacaaattgagtgcatcctggtcgtgtacctgtgctg

SEQ ID NO: 276438 - DNA, 662 bp, Zea mays
ctgccatcgaggagggacgagggagggatccagcgagcggacggagcggacgccaccctcgcgcgcacacctacgcgcaggcgcatacaccaacgacgccgctcaactacgcgcgcaaccacctcgccgacctgctcccgcgctgcgtgccgcgcgcgatatacctcgactccgacgtgctcgccgtcgacgacgtgcggcgcctctgggagacgcgcctgcccgccgccgcggtcgtcgccgcgcccgagtactgccacgccaacttctcccgctacttcaccgaggccttctgggacgaccccgtcctcggcgccagggtctttgccggccgccgccgcgcgccctgctacttcaacaccggcgtcatggtcatcgacctccggaggtggcgcgttggcaactaccgccagcgcatcgagcgctggatggagatgcagaaggagaaaagaatctacgagcttggctccttgccccccttcctgctcgtcttcgccggcgagatagaggccgtcgaccaccggtggaaccagcacggcttgggcggcgacaacgtgttcggtagctgccgccctctccataacgggcctgtcagcctcatgcactggtccgggaagggcaagccatgggaccgtctcgacgccggcaagccttgcccactg

SEQ ID NO: 276439 - DNA, 573 bp, Zea mays
attgcccgccgccgcaccgtgtccggctaggactaggacccctgtttgggctcttgcgtttcgattcctgggtcgtctgcaaggagtgtggccgacggagggggccaaaatgtgggcggagagggtggtcggcgagcgccggatgcggcagatccagcgcttcgcgcggaacgccaagctcaccgtcgtctgcctcctcctcaccgtcgtcgtgctccgcggcaccgtcggcgccggccgcttcggcacgccgcagcaggacctcatcgagctccgccagcacttcgtctcccacccgcaccgggcgctcgccgagcaccacgacgccaggtccagggcctccaccaccaccacatcgtcctcgtcctcgtcctcctccgcccgccgcgacgacgaccccgacccgccgccgaggtcgctcagggacccgccctacacgctggggcccaagatctccgactgggacgagcagcgcgccgcctggcaacgccgccacccggagacgcggccttcctcaacgacatcaagccacgggtgctgctcgtcacggggtcctcgcccaagccctgcgag

SEQ ID NO: 276440 - DNA, 635 bp, Zea mays
  unsure (1)..(635): unsure at all n locations
gtcgcacactgcgcgtctgtctctcggcgcggacagcccgaccagcgggagtcggctcaggtacccgcctacacgctggggcccaagatctccgactgggacgagcagcgcgccgtctggcaccgncgccacccggagacgccgcctttcctcaacgacatcaagccacgggtgctgctcgtcacggggtcctcgcccaagccctgcgagaaccccgtcggggaccactacctcctcaagtccatcaagaacaagatggactactgccgcgtccacggcatcgaggtcttctacaacatggcgctgctcgacgccgagatggccggcttctgggccaaactcccgctcatgcgggcgctgctcctcgcgcacccggaggtcgagttcctctggtggatggactctgacgccatgttcaccgacatggcgttcgagctcccgtgggagcgctacgggccatacaacctgatcatgcacggctgggacgagatggtctacgacgacaagaactggattgggctcaacaccggcagcttcttgctgcgcaactgccagtggtcgcttgatatgctggatacctgggcgccaatggggccaaagggccctgtccgcatcgaggccggcaaggtgctgac

SEQ ID NO: 276441 - DNA, 452 bp, Zea mays
ggacgcggcgcgactccatacaacaatacaaacaaagctgtaacgtactgtgtaagtaagatatggaggccgccggcgggggcggcgaggttcacaaggctagcaacgacaaggaggagcatttcgtgctcgtgctacggcgccggccacggcgcctgtgtagctggttcaagctggcgtgcctgctccggggctccggccgccaccgcgtctcctgcgtcgacctcgccggggccgccggcagcctcgtcgacccggacgacgtccgctcgttcgacgagtacgacgcgccgctcctcgacttgatggccgccttgccggacgacggccgcaaggtggttctggtagggcatagcgcaggaggactgagcgtcacccacgcgatgcatctgttcagagacaagatcaagcaggccatcttcgtagcagcgaccatgctcccgttcgggtac

SEQ ID NO: 276442 - DNA, 823 bp, Zea mays
gttgatcgagacttttgtggacaaggcggaagatttgccacatataggaaagcagtttgtaccaccaatgatggatcctgttcttggtgattatgctagaaatgtacccgatgcaagggagtctgaagttctgtaccttgtttgcaacaatcattaacaagtacaaaggggaaatgcttgaggatgtgcctcgtatatttgaggctgttttccagtgcacccttgagatgattactaagaactttgaagattattctgagcaccgcctcaaattttttttctttgcttcgtgcaattggcacccattgcttccaagcattaatccagctttcaagtcagcaattgaagcttgtgatcgattcaattaattgggcgttcagacataccgagagaaatatcgcagagactggccttagcctgttgttggagatcttgaaaaaattccaggcttcaggattccaaaaccaattctacaaaacctactttttgacaattgagcaagagatttttgcagtcctcacagacacattccacaaacctggtttcaagcttcatgttttggtgctccaacacttattttatgtggttgatagtctaactgagcctctatgggattcttcatcagtaccatatcaatatacggataatgccatgtttgttcgagattacaccataaaactcttaggaacatcatttcctaacatgacagtaaccgaggtgacaaagtttgtagatggccttcttagttcaaaacttgatcttccgagcttcaaaaaccatattagagacttcctggtgcagtccaaggagttctcagttcaag

SEQ ID NO: 276443 - DNA, 760 bp, Zea mays
ctcctttgcaatctcatcctctctctctctctccctctctctctctctggcggtcggcgtggctccgggggcgcgaagcgcgggctcggcggggcgactcgccggcggcgacctgcaggtttgggtatgagaggggtcacccacgcggcgcccaccacaagcgccccccgcccccgcggacgcctcatggacggcctcctcatcttcgtcttctacctctcgctgcccacccgtgccggccgcgaccactcgtcaatcgccgcctctaattgttagccgccgccggcacgccattgctcggcacgcctcccgagaagctcgatctgcggcctagccagccagcctcacgcgggatcaggatcgatggaccagccaccgaatggattcgccgccggaggttttttcacgcacattgatgggcaaaaccgttctcccccttctataattgtcattgggggagggatttcaggcatcgcagctgcacgtgctttgtcgactgcttcatttaatgtcacactcttggagtccagggaccgacttggtggccgtgtgcacactgactattctttcggttgcccaattgacatgggagcatcatggctgcatggcgtgtgcaatgagaattctttggcgccactgattaggatgcttgggcttaggttatatcgcaaaagcggagataactctgctctgcatgaccatgatctggaaagatatgctccttttgataagcatggtcagcaagttccccaggagatag

SEQ ID NO: 276444 - DNA, 751 bp, Zea mays
ccacgcgtccgtggtcatgccgcctttggagccaccggccgtatagccatctcaataatcctgtatgtggaactgtatgcctgttgcatcgagtatctgatattggaaggtgacaatttatcaaaattattccctaatgcgcacctgagcgttgggagcttgacaatgaactcccatgtacttttcacaatcttgactaccatcatagtcatgccgaccacgtggcttcgtgaccttagctgcctgagctacctttcagctggaggtgtttttgcatcaatccttggagtcatctgcctattctgggtcggggttgccgataatgttggctttgagaacaaaggaactgctctgaacctccctggaatccctattgcaattggattgtatggttattgctactcagggcatggggtgtttccaaacatctactcttctctgaagaagcgcaatcagttcccttcaatcctttttacttgcattgggctgtctaccattttatttgctggtgcagcggtgatgggatacaaaatgtttggtgaagccacacagtctcagtttacactgaacttaccagagaatttagtggtttcaaagattgcagtttggaccacggtggcaaatccaataaccaaatatcctttcttatatttggctgggtaattctttgtttttcatgatacttgtcaaactttctatgtccttaacgaataatcacatatgcattaaccataaccccactgactatgag

SEQ ID NO: 276445 - DNA, 1075 bp, Zea mays
cccacgcgtccgccataattgccttctttttgtctcctttgaatgctgaggtagctactgtttagctacttgaccttttctttacctcgggaatagcagattacatatttatgatgagtgatgctttttgctaatacttctactgtgggttaacccacatacacaccaactcaaaatttgcgatttcggaagtgctaaagtattggtcagaggagagccggacatctcctacatatgctcaaggtattatcgagcaccagagctcatatttggtgcaacggaatatactactgctattgatttgtggtcaacaggctgtgtcatggcagagctgcttctaggacaggctctgtttcctggagaaagtggagtcgaccaactagttgagatcatcaaggttttgggtactccaacaagggaagagatcaagtgcatgaacccaaactatacggagttcaagttcccacaaattaaagctcatccgtggcacaaggtttttcaaagaaggcttccacctgaagcagtggaccttgttagcaggtttctacaatactcaccaaatctacggtgcactgctttggaggcctgtatgcaccctttcttcgatgagctgagagacccaaacactcgtctacccaatggtcggcctctgccgcctctcttcaacttcagatctcaagagctaaaaggcgttcccccagaagtcatcgatcgccttgtcccagagcactcaagaaggcagagtttgttcatggcgctaaggacctagtttttgccgttctttttgcccccttttttcccaccgtttgccaccttgagggaagcttgtaaagctatagcttctcctttcccctcgtccttactttcctcccctctctttcttccgagctttgtgtggatgagagatccttgagatacactgctagagctgtgagttccaggatgtgaggttcgagtgtgtgtgatgtgcagttgtcccctttgaggtcggagatttcagttgcagtgttgtgagaggcttgtgaagcttttttgtctacttttcagtgcctccctggcttgaagttttcccccc

SEQ ID NO: 276446 - DNA, 958 bp, Zea mays
tattttaataatcagattgaagaggatagaaaaattatgatttcgaggcataaccttgttaaattgcacaaggtgcttgaggagcatgatctttcttgtgtggagcttttggatgtgaagttggatggtattgttttaacaaaacaaaaagcggagaaggccgttggttgggctagaaaccactatctgtcatcaacaactcttccttctatcaaaggtgacaggttaatcattccccgtgagagtctggatatatcaatcgagaggctgaaggaacagggtataacagctaagaaatcctctcaaaatctgaaggttttggctaaagatgagtatgagcgcaatttcatttctgctgttgtgcctccgaatgaaattggagtgaaatttgacgacatcggtgcacttgaggacgtgaagagaacattggatgagcttgttacacttccaatgaggagacctgaacttttttcgcgtggaaatttgttaaggccctgtaaaggtgttttgctttttgggcctcctgggacaggaaaaacactcttggcaaaagcccttgcaacagaagctggagcaaattttatcagtataactggttctacactcacatcacagtggtttggagacgcagaagctcacaaaggcccttttctcctttgcgactcgactagctcctgttatcatatttgtggacgaggttgacagcttacttggtgcaagaggtggtgcatttgagcatgaagcaacaagaaggatgcgcaatgaattcatggcagcttgggatggtctcaggtccaaagagaaccaacggatccttattcttggtgcaacaaatcgtccatttgatctggatgatgctgtgatacggcgtttacctagacggatatatgttgaccttccggatgcgcagaaccgaatgagaattctaaagattttacttgcgaaggaaaaactagaa

SEQ ID NO: 276447 - DNA, 521 bp, Zea mays
cttccgatgatgattgaagcctttggcaatggtctacctaatggcttactggcatccctcaatgggaggtaatcctggctagccctgccttatttagctgattggggtacctttggaaggttggagggttaaaaggaaggaagagaggaattatatggagtgattagatatgaaggctatttatatctaacctagtaacctgtatgaggattagacacaaacggggattagaaggaaaactcttctttcttgttcggttgcgggcaaggcccccagtcggcctcctctctccttctaaaccctagctactgccataacatctggtataggagattgccaggttccaatgagggcggcaaacagtcgaaggtgcccacccctgccgccgtggcatgtatctatgcgtgcttggaatcctggctgccggtgatcactacctccagtcaccaccttgccgccggattccctacagcttgcagggctatgggacaaccctccatgctagattcagctgcagatct

SEQ ID NO: 276448 - DNA, 762 bp, Zea mays
cccacgcgtccggcggtgacttctgtggcgtgagcatcaattggcatgtctcaacggagtacaacaagggctggagtgctcgggtgacattgttcaactgggaggatgtcgacatggccaattggtttgctgccatcgtcatggacaaggcgtatgacggctttgagaaggcgtactcgttcaacggcactgcagtgggcaagaacacgatctttatgcagggtctggaggggcttaattacctggtgaagcagaccaacatgagcgggtccgactaccttgttcctggcaagcaacagtcagtcctctcattcacctagtccctgaccccggggttaaatgtcgttgctggagatggcttcccaacaaaggtcttcgttcaatggcgacgaatgcgctatgccacagagaattccgatcagcactggattcagcacccgtctcagcagtggccttgctctggttccgttccttgttgcttcggctttcctattgctccagcaatgatccacgggactccaattctttgattctttcaggtggtttggtcgatgccatttgtaagaaagcctttttttttgtttctgtgattgctttagtagattctacttagctgctgtatgttagtcagatgaagcagcagctgtgaaacagtatgaatacttggatagtgagagaaaaagtgaggaagcctttgttgcgggtttgcaacattggttcctcgttctaatggcatttacgaattgtctcatgttctgtctg

SEQ ID NO: 276449 - DNA, 590 bp, Zea mays
cttccccccagatctcgacttctcgagcctgtcctccgccccccacaggctctgctggatccagaaccttctagaacccctgcactgcgcggtgcgcgccatcctcctccttccttccatccagatctcgacacccctcgccggcccagacctccggtcctgtcgtggccccggggttcgggcggctgccaaagaatcagtggccatgggatctgctagcctcaacagcattgcccccgaggagcctaaagtggtcgtgccagagtacggtgagacggctgatatccaggacaaggaagttagtatggaacagctctgctccataagcacctatgatcagtggacgccactctctgtttctggccagcttcccaaaccacgctataagcatggagctgtggtgattcagcagaagatgtatgtctttggtggaaaccacaatggccgttaccttggcgacattcaggttttggacttcaaaactttgtcatggtcaaagctggaagctaaatcacaagcagaaccatcagaatcagctggagcagttccgttttctgcatgtgctggccattcagtgattcaatggggaa

SEQ ID NO: 276450 - DNA, 714 bp, Zea mays
cggacgcgtgggcacaaaccagcagcaggcagagcaacgactagctgccaggcaagccggccgggggtgctgcaagagtgcaacaaacaatggccaccgcgctctccttcaaggccttggcactggccgcgctcctctccatggtcgtcgcctctggcgctcgcgccgagcaacagttcaagcgcaacgccaccaccgcctcgcaggacagatccttgttgtcctacagcagtggctggctgccggccaaggccacctggtacggcgcccccaccggcgccggccccctcgacaacggtggtgcgtgcgggttcaagggcaccaaccagtacccgttctcgtccatgacgtcctgtggcaacgagcccatcttcaaggacggcaagggttgcggctcatgctaccagatacggtgcctgaagagcaaccacccggccttgctccggcgtggcgcagacggtgatcatcacggacatgaactactacccggtggccaagtaccacttcgacctgagcggcacggcgttcgggtccatggccagctggggcctgaacgacaagctccggcacgccgggatcatcgacatgcagttcaggcgggtgccgtgcaacttccagggcctgaccatcaccttccgcgtccagcacggctccaaccccatgtacctggccgtgctcatcgagcacgagaacaaggacggcgaggtggtgcag

SEQ ID NO: 276451 - DNA, 365 bp, Zea mays
cccacgcgtacgcccacgcgtcacaaaccagcagcaggcagagcaacgactagctgccaggggtgctagcaagagtgcaacaatggccaccgcgctgtccttcaaggccttggcactggccgcgctcctctccgtggtcgtcgtcacctctggcgctcgcgccgagcaacagctcaagcgcaacgccaccaccgcctcgcaggacagatccttgttgtcctacagcagtggctggctgccggccaaggccacctggtacggcgcccccaccggcgccggccccgtcgacaacggtggtgcgtgccggttcaagggcaccaaccagtacccgttctagtccatgacgtgctgtggctactagccca

SEQ ID NO: 276452 - DNA, 317 bp, Zea mays
gccgcatcactccctcgccactcgcgcgcccgggctccttcccgccacgctcacgacgatgccgtccccgacgtcctatcttctcctgaatccctccaaaccctcctccttccgccgactctcggccccgcgcctgagccggttccatgtctcctgcgacgcgccacggggcggcgggaggcgcgaggtcatccccgccggtgccagcaaggccaagaaacagatcgtattcttcgacgccgccccgccggtgtcccaggagggtggaggcgccgtgaagaaggcggggagcgagaagcttacccaggtgggcagcg

SEQ ID NO: 276453 - DNA, 658 bp, Zea mays
  unsure (1)..(658): unsure at all n locations
gttccaacctccacctgcgccgcccgatagcaaaacgcagcgacctcgccccccctgccccgctcctccccttttcccggtagcagagacggagcaccgcagcccgccagaaaggaagacgaaacgcgccgcggcgcaacgcaccgcgtgctagtgaaagggcgcaccggaaggccgccgccgcgctgctatttagacaggaagcggggcgatcgaatcgcgtctctcaaccaatcgataaatctgccggtaggtcgatcaaggagagcgcggtccacgtctccgttccgttccggggcaggaaggaaggatggagagagagagagaggagcgatggcgtccgggtaccgcgcggaggaggagtacgactacctattcaaggtggtgctgatcggggacagcggcgtggggaagtcgaacctgctgtcgcggttcgccagggacgagttcagcctcgagaccaggtccaccatcggcgtcgagttcgccaccaagaccgtccaggtcgacgacaagctcgtcaaggcacagatctgggacaccgncgggcaagagaggtacgcccttctttgctgttgtacgctatgcaggttgcagcagatgcagttctaggatctgtgcaccatttttcagagcttcctggttagtaaggatttaa

SEQ ID NO: 276454 - DNA, 485 bp, Zea mays
aacacctcacactccattcacgccagggatcgatcgcgccgctatagctgctgcacgccggcacgctttgcctcctcttcttcgttctctgccgctgcgctagctagctgcggctccgagcctccgacgcaggaagtctaatgtggaagtctctcagaactgagtacttttgttagaacaaagatttgttcagtcaagctttgcaaattatcatcatagtttggatgatatccatgggtactttgatgagtttatggagccctggttgccgagcttatctgggttctctgacactggaactgtaatatttgcaacagaaccttcctcgtcttggaagaaagtttcaagagcgcttgacaactcttaagtgtcctgtgaagcttgatgacgtgttcgtgagggcgaagcgggagagcaaaatttcttctggcatgcagatgtcaacagatcctaaccactacggggtatttccacattcattctgc

SEQ ID NO: 276455 - DNA, 764 bp, Zea mays
attgatcctgctaattgggaccctaattatagtgatgagtcactactgcaagaagacaattcactgtcagctgatctaagcagcagcctccactttggagatgcaactggccaagaccacatctttgctacatctaaccctgtaccgacaaaccaaagaggagatcaattatttcatgtgtcctctcaaggagtgagtgcccattccagtgttctcatcaactacggtggttacaaccctcaaaattatcctcagcaaaatgcccgtcctcgtcatggacagccaattctccatcagcgatataatcaggcaacttccagtccaatgcggccaatgggaagccatcacaatgggcagcctgcgtggcctagtagttttggcatgggcgatggagtgccctggggaggaacaagagggcactcatttacgacaaggaaggattatgggagcatcttttagggtggagttgtggaccggaggaacgtcattgattcattgcaggcgtaaattatttgtatcagcgaaattggagtgcgatgattctggttgattgttttcgatgttgttactccatccctccacttggtcctttgtgaacacactggatatatacactatatgatcggtgacattagcactcctttgtaaccttttttaggaatcagaagtttgggtgttcccctaattgctgactgcattgtggctgtactgaatactgtaccaattgtcaccggtgtaatatgaaggcgtgatgtaggtagact

SEQ ID NO: 276456 - DNA, 423 bp, Zea mays
gcaaaatctccgtcctcgtcgtggacaaccaattcttcatcagcgatataaccaggcaacttccagtccgatgcggccaatgggaagccatcacagtgggcagcctgcgtggcctagttttggcatgggcgatggagtgccctggggaggaacaggagggcactcatttacgacaagtgggctatcttcatctcttgcaagaaaggattatgggagcatcttttagtgtgttgtggacaggaggaatggcgttgattcattgcagtcgtaaattatttgtattagcaaaattggagtgcgatgattctggtttattgtttcgatgttgttaccccatccctccaattggtcctttgtgaacaagacagttgatatacaatatatgatcgatgacaatagcattcctttgcagccctttttttt

SEQ ID NO: 276457 - DNA, 2084 bp, Zea mays
gagacagtgaaggtgcctgatggttctaatgttctgactaatgaacagctggatgcttatgtagtgaaccctgtcacttgctcaagaccaactattcagcattctcgatgtttcaccaagttgtgcatatattggtacaaatacaaaggtttcagttactggtacattcttggtgaataaagaacatgtggaaagtcacaggtggtcatgtatgtttggggatgttgaagtaccagctgaggttttgaccgatggcaccctacgctgctatgcaccagcacaccaatcaggaagagttccattttatgtgacctgttcaaacagggtggcttgtagtgaagtgcgagaatttgagtatcgtgattctgaagctcattacatggagacttctcgttcccaagccaatggtgtaaatgaaatgcatctacacattcgtcttgagaagctactcactttggggccagatgaccatcaaatgcttgttataagcagtggtaatgagaaatatgagataatgaatgctataaattccttaatgcttgatgggaaatggtcaaatcaagaatcttctgtcaaggaagtagtttccactgctagggtccaaagtttaaagaaactggtgaaagagaagctgcatcaatggctcatctgcaaagtaaacgatgatggaaagggtcccaatgttctgtgcaaggaaggacagggtgtgattcatttagtagcagcactgggttatgattgggctataagaccgataatgattgctggtgtcaatgtgaacttccgggatgctcatggatggactgcactccactgggctgcatctttgggaagagagcggacagttagtgtcctcatagcaaatggagctgcagcaggagcactaactgatccaacttctgagttcccttctggaagaagtccagctgatttagcttcagtaaatggacacaaggggattgctggttttctcgcagaatctgctttgacaagccatctgtcagcacttactattagggaatcaaatgatagcactgtagaagcgtgtgggctaccatttgctgaagatctcactggcattgattctgtccatctcgctggagagggtcctgatgctgaatcacttgaaggttctttaagtgccgtgcggaaatccactcaagctgcagctcgtatatttcaagccttcagggtggagtcattccacagaaagaaagtcgtggaatacggagatgacacctgtggattagctggggaatgcacactttcacttgtttctcttaaaaatgtcaaaccaggacaacatgatacacatctgcattctgctgctgttcgcatccagaacaagtttcgcggatggaagggaagaaaggaatttatgatcattcgccagagaattgtcaagctacaggctcatgtacgagggcatcaagtgaggaagaactatcggaaggtagtctggtcagtcggtatcgtcgagaaagtcatactgagatggaggagaaagaggcctgggttacgcgggtttcggccccagaaacaactagaaggtccatcgcaaatccaacctgcaaaggctgaagacgaatacgatttcttgcacgacggcagaaggcaggccgaagccaggctacagagagcacttgcccgggtgcactctatgtcacagtacccagaagcgagagagcagtaccacaggcttacaacctgcgttgctgaaatgaaacagtccaggatgatgcaggatgagatgctaagccaggcggctggtggtgcggacgatttcatggctggactggaggacttgatctgcatagatgatgccccgccccgatgtctgccattcggtgaagctgagcctttttacatcagataggcagggaggcggtttccttgctccccttttgtcagactagccctgtaaatattcttcagctagttgttcaccccgactgtttactcgctttctgctagtgtacaactataacatagtttcaatgcactgattatcggtagaataatcgcctcttatttgatatatagtttatcccaattcaacgtaaaaaaaaaaaaaaaagagaaaa

SEQ ID NO: 276458 - DNA, 592 bp, Zea mays
tggtttggtctgtcagcttgcccgtcactggggtgaatgcaagtgacagaaacccctcgattgaagccagggatataatcggttggataatatggttggtcgggatatgtgtagaagcagcagctgatcagcagaagcttgtgttcaaaaattctccaagcaataggggaaaatggtgtgacgtcggtctttggaagtactctcgccacccgaactactttggggagatattcctttggtggggagtatttgtagcatcgaccccagttatctcagatgccgaatggcttgtgattcttggacctatattcctgactcttctgcttcttttcgttagtggaatcccactcctcgagtcatctgctgataagcgctatggacgattggaggaataccgtgcatacaagaacactacaagccctcttatcccattgccacctgctgtgtatggttccctgcctgcgtggttcaaggttgccttcctccttgagctcccgctctacaatcctgggccgggaggtgatcaatcagttgagtggtgcttgcaaactgttctgctgcccttcagtgatgaacttgtatagaatacccc

SEQ ID NO: 276459 - DNA, 1197 bp, Zea mays
acaataatgatggagaccttcgagttaaagacgacgaactacaccaattattgcaggatattcgtgcacgcgattctaccatcaatgaaattgcggataaattacaggagactgcagaagcagctgaaacagctgcttctgcagcacgttcaattgatgaagagagaagattttttacgttagaacttgaacggctgaaacaagaccacgagaaacaagttgaagcatctttgcttaggttaagggaatcggaggagaaagcaaagcttcttgttgaagagagagatcgcttgcttacagagagagattccgctcttcaagaagctcagatgtggcgctcggagctaggaaaagctagaggaaacgctgtaattctagaagcggctgttgtcagagccgaagagaaagctagggtctcagcagcagatgctgacatccgcataaaagaagccatgaaccgacttgagtctgccaccaaagaaaaggaggatctcctagcccttgtggatgctctacaatcccatatacaaaggccagagactagcacgatacaggtttgcgaagagagcttggaactctgctcgactgcctcgaagcacatggaggatgataacgttgacaaagcttgcgtaagcgatccggattcagtaccggttacggagaacgttgttgagttggacgacgagggagtcgacatccctacggtcggggacaccgaatgggacgatccccgttcttccgaagtgtctgatgtaagggaagtaaccacagaacccgaagaaaacagcttggatattcctgtcgatacttgatgtccaaccccttctgtgagaagaatcgcttagaaggcttaagctggacgccggccattcttgttcgccgtggtgagttgtgttagtagatcctcgttttagttcattgttacattcttgttcaagtttcggcatgagttactgaatttgagtccatttagacttgtgtgccctgtctctcctgaaataaaaaagcgcaactgtgttgagtctgcaagtgtacacctgaactcactctcatgtttagaaggtcatctttggcattttccccttgttattcaggaaattcttgttgtatcctgcaaactgagctagtaaaatttgcactgattctttctatctacgatctatctatataaacactgtaaattttgcaatttttttt

SEQ ID NO: 276460 - DNA, 357 bp, Zea mays
ctctgctgttcctcgaccttcggcgaaaatttccagatacccgtactcttttcatatggcataacacaactagcattaagtcgtatgagagaccttgctaaagaattagtgcttggaggggaagaatgacctagaactgaagatggatgagctgatgtgaaaaatgaggggaagaatgacctagaactgaagatggaggagctcaggtgaaaaatgaacttgttcattgtgtgttttctgaccttttttggaattgtattaaaatatactgtaatgaattggtgtaagaatgtgttggaagtagcaaagaacctgatgccttttgcaatgagaatgtctttctggcaatttatcctg

SEQ ID NO: 276461 - DNA, 643 bp, Zea mays
cgaccgacgcgttcggcgttgagggcggaaagctgcagagtgggacctgcaagccgcgccagtgtacatgtcgtgcgccgtcacacgtgcgctcctctcgtccatcctccacacgtgcgctcaaaccgagcttgtccgcggaccgcaccctgtctggctgtctgcacgcatctccaccgtccgatccccagccgatggcggcggagaccgcggcggacgaccacgatctccggccacccctggcggatggcgccgctgctgccggcgtgggcgacgcctccttggcggcggcggcgggcgcggcagaggcgctgatgagcgcgacgtcggagcagctcacgctggtgtatcagggcgacgtctacgtcttcgaccccgtcccgccccaaaaggttcaggctgttcttttggtacttggagggtacgaggttccgcctggtttggtaaacatggctgtttcttcagcaaatgatgagaagaatacaactgtggctgctagaagggttgcttccttaatgagattccgtgagaagagaaaggaaagatgtttcgataaaaggattagatacagtgtgcgcaaggaggttgcccaaaagatgaaacggcgtaaaggccaatttgctgggagatcagattttggcga

SEQ ID NO: 276462 - DNA, 628 bp, Zea mays
ggctgatcggcgaagtcttcctgctttgtggcgtgggggatgtgttgatgttgctggtgtggtggtgggggcgggggaggtacgatttgtacttccggatggtgttggtaagcgtggtgcggtggatgcggggacgagggcgtggatatatggtggagggggctgctggtaagtgtgtgcgacaactctggggttgtcggctggctgcgcccgtgccattctgtctctggtggccttcgtttcggggcagtctttggtttggtgggcgcagtcttcgccatggaagaggcagtagaatcggcgcggcggctgcgcacgcccccggcccctaccacgagttccatttccgcggccctgggggggatattcctggcgacgggggggggggggtcagcagcgggatgctggttggcgatgttgtgtacttgctgttgactgcgaccgtcgcgaccggaatccggctgcggagtccttgtccacgtgcggctggactgtggagcgtcttttggcttcctttgggactcaatcttgcgctggtggcgctcttcggatttggcgtacttttcaaacagctgatataactcctggaggttctttggcggatctttgatgcaatggctgtaaagga

SEQ ID NO: 276463 - DNA, 416 bp, Zea mays
gtgagtacatggagaagcacgccgtctcccgtttggttggtgccccacctggatatgttggttatgaggaagggggccaattgactgaatcagttcgtcggcgaccttactcagttgttctgtttgatgaaattgagaaagcacaccaggaagtctttaacatattgttgcaactgttggatgatggcagaatcactgattcacaaggcaggactgtcagcttcactaactgtgtcataatcatgacatcgaacattgggtcaccattgatccttgacacacttagaaacaccacagacagcaaggaggccgtgtatgagataatgaagaagcaggtgattgagatggcccggcaaacattccggccagaattcttgaacaggatagatgagtacattgtgttccaaccactggat

SEQ ID NO: 276464 - DNA, 576 bp, Zea mays
aacccacgcgtccgcccacgcgtccgcaccgcaccaccagcgccaggccgccaagcgccagcaccaccgcgccgcgcccaagcaggcaagcaccactgacccaccaggccaccaccccaccgcttcgagccgagggagaagacggcgcggggcggcgcgctcaggtcggagatgaggggcggatccagaccggccccggtcgtcctgtttctcctcgctgcgtccgggatctgcgcccagttcaccgcagtgctagctggtgatccacaaacatccaacgatgacaaggaggctgaagctcagccaaaggggggccataccggcaaaacagttttgttcgtcctcctaggagtggcggctgtcattctggtgtcatttgttattttcaagtattggcagaagaagaaaaggcaggaacagcatgcacgtctgctaaagctatttgaagaggatgacgacattgaggttgaactaggacttccagattgaataatcttaattgtacagcaagagtatctcggctgacagggttctgctggcttgccttcaaagcatattcatgttaatgtaaagaat

SEQ ID NO: 276465 - DNA, 303 bp, Zea mays
cacgaaggccaccacccaccatcaccccccacgaaaaaagcgaaccgagggagaggaaggatcggcgcgttccggccggagatgaggggcggatccagaccggccccggtcgtcctgtttctcctcgctgcgtccgggatctgcgcccaattcaccgcagtgctagctggtgatccacaaacatccaacgatgacaaggaggctgaagctcagccaaaggggggccataccggcaaaacagttttgttcgtcctcctaggagtgggggctgtcattctgttgtcatttgttattatcaagtat

SEQ ID NO: 276466 - DNA, 736 bp, Zea mays
tttgtcttgcacagtcatatgcacgatttgctggctataccctaacagttaggatccgagcagttttcttagtctctaatactaaagtagttcaaatatacacacttgcaagattcatgtgtctacacattttcttcttttaggacaactgggtgatgaaaacagcacagattagtcatagataatttgtttccctcttcataactagtgcccatcttttgatgcctatgtgcatcctatgttaatgcctatactaactgatgtcttttgtaggattcaagcaaaaatatcaggatatgtgccttccacatttttaaggtatttgttgccaatccaaacaagcctcgtgagattattcaggttttggttgagaatcacagagaagtgttgaagctactccacaatctccccacaagcaaaggtgaagatgaacagcttgatgaggagagagatttaattatcaaagaaatcgagaagcttgtgcggttgtcagtataaaccctcaggaaattcgaacgtatccttgaagacatactgtgcaatatgctgccttgtatagagcttgtttttcatgtatggaaaaaaaagtttggcccccaattgcatttttcgcgagaacccttagcatttctgtcagaaaattattgtcgtgtagcagaatttgccacaggaataatctgccttatggtgtggtgttgatacccttaaggattggtgaaagtgcctgccctttccc

SEQ ID NO: 276467 - DNA, 1134 bp, Zea mays
ctgacagactgtagcaataattggtcgctccccgatccatctgggtttcgcctgccagcggcgagatgtccttcttcttccgggccgcatcgcggcagcgcctgttgccgcaggagatcgcgcgctccctcaaggactccctcgttgccctcgacaccaagaccggcgccaaggctctcgaggatgctgagaaaaacatacttacattgaggcatacgctcgctggtgatggagaagtggaaccaaatcaagagcaggttttgcagatagcccttgagatttgcaaggagggtgttctttccctctttgttcagaatcttccttcattgggttgggaggtatgctacattcacgaattgaatgcgataacctttttttcactcagttattagcctttttggttctatgttgcaggctagaaaggatcttgtccactgctggtgtattttgttgagacagaaggttgatgaaagctattgttgcgtccagtatattgaaaatcattttgatcttttggatttccttgttgtttgctataagaacttggaagtcgcgttgaattgtgggaacatgttgcgagaatgcataaaatatcctacacttgcaaaatatatattggagtcaagcagcttcgagttgtttttccagtatgttgaattgtcaaacttcgatattgcatctgatgctctgaacactttcaaggatttgctaaccaaacatgaagatgccgtctctgaatttctgagctcacattatgaacagttttttggactctacacaaaacttttatcttcaactaattatgtgacacgaagacaatcagtgaagtttctttcagagtttctgttggaggccccaaatgctcaaataatgaagcgttacattttggaagttcattacttaaacattatgatgggcctgctaaaggattcaagcaaaaatatcaggatatgtgccttccacatttttaaggtatttgttgccaatccaaacaagcctcgtgagattattcaggttttggttgagaatcacagagaagtgttgaagctactccacaatctccccacaagcaaaggtgaagatgaacagcttgatgaggagagagatttaattatcaaagaaatcgagaagctt

SEQ ID NO: 276468 - DNA, 461 bp, Zea mays
cggacgcgtgggcccttctctccgtctatttccaagctttctccagatcaaatcagaaaggggaagggaagaacggcccagcaatgccgctctgcagcttctacgcctccacctccgttcccgtcggcaagccccagcagtccgtcgcctcgtccaagccccccaccacggcggtggcctccgtggcgacaactgtgccgatgcgcagtgcagcgacggtgacgccagccgtggccacaacaacgagcctagcgctgtctctgcacctgccggagctgccgtcgcaggtgaaggacaagatcctgagcctggagctgatgggcgtggactatgggcgcgcgctggagcagaacccggcgctccgcgacgcggcgccggagtccatccacgcggtggtgtcgttcctccagtcccgcgggctccagttcaaggacctgggccgcgtcttcggcatgtgcccg

SEQ ID NO: 276469 - DNA, 509 bp, Zea mays
agtcatactactgataatgatcgtgctcctaacttatccatcactatgctcccgttgaaatacatggataatgaagttgatgcagggccctgcttcttttccttggaggatggatgtttttgttcattcagtttttcgcttgataaatgcagttggactcttcatcccaagaagctcgaattgtttccaaaggaggcacatttaaacctgagaacatatcagacagagaacctttcatccctggaggttccagaggaaacattgttggctgtgaagccggagattgcagtccacagccattgggagcaggccttcaagatttcctgttcatcccatgggttcaatcaatctgcttccgtccttctcgtataagtcacacttatacctttattttagaaatatgttccttaagaaccttgtagctgcaaatataaatgtcatgaacttttctttattcctgttcgtttcttgctgtttctacatttcagaggatattttccttgcactgg

SEQ ID NO: 276470 - DNA, 1250 bp, Zea mays
  unsure (1)..(1250): unsure at all n locations
cacagctctagcattctctctcccatcggcacacccgagcacgctacctccttccacacaacaaaaaaagagtnnntggagantgttggcaatatggacnggatcggggagatgtacgagacggacattgccaacgtgccccctgcagaggagaagcgttactggcagaggtacgatatgcctctggattaactatgcactgctatgaggagctagacgcacaagacagagaacggacaagagaggtttacaaggaatgcctgaggttgattcctcacaagaaattcacgtttgcaaagatgtggctcatggcggcccagtttgagatacggcagagaaatctaaaggctgcaagacaaattcttggaaatgcaattggaatggccccaaagggcaagatattcaagaaatatattgaaattgagctttatctgggcaactttgaccgttgtaggactctttatgagaaatatattgaatggtccccagcaaactgttatgcctggaggaagtatgccgaattggagaagaaccttagtgagactgatcgtgctcgatcaatatatgaacttgctattgcacaaccagcccttgatacaccagaggttctatggaaggagtacttgcagtttgaaattgatgaaaatgaatttgagaggacaaggcaactatatgagagactgcttgataggacaaaacatttgaaggtatggatcagttatgctgagtttgaggcctctgctggcttgggcggtgaagacggtgaagacaaggagaaaaagaatgaagttagttatcaggagcagcagatggagcgggttcaaaaatgtagagctgtctttgaaagggcatttgattacttcagaaccagtgccccagagttgaaggaggaaagagctatgcttcttgaagaatggcttaataaggaggtgaactttggtgatcttggagatgtcagcttagtgcaaaagaaggcgccaagacaagtcaagcggaagagaccaatccctacagaagatggctccactatagcgtctgaggagtatatagattacattttcccctgatgaagttgctctagcaccaaacctgaagatcctggaagcggcttacaaatggaagaagcagagaaccgacgatgacaatgtgtgatcctggcatcgcagtattggcgttgttgtgaacattttgctacagccaaaatcaggtgtcttgcaacacttgccagagctatcggaatgagaataatc

SEQ ID NO: 276471 - DNA, 492 bp, Zea mays
cccacgcgtccgccacttcaaggcgtgcatgtctgcggagatgcagctgtgcgacgtgggcgcgcgcgtcatcttcgccgtacaactacaaccacttcaaggcgtgcatgtcggcggagatgcagctgtgcgacgtgggcacgcgcttcatcagctgggacggcgtgcacttcacggaggccgccaacgccatcgtcgccgccaaggtgctcaccggcgactactccacgcccagggtcaccatcgccaaactcgtcaactccacgctgcccaacgacgactagctggctggccgatcgatcgatcgatcgtcgtcgtcgtcattctgataaacatactgcaggctgcaggcttcatcgatccatatccaattgtccgtagaaatctacgactagctcattgtagatctgtaatgtgggctaagagatgcatgacgatcgactatagctgcccaacatcgcaagagctgggtcaccggcctcgtcatgatcg

SEQ ID NO: 276472 - DNA, 825 bp, Zea mays
cccacgcgtccgatcttgatgaacatcaagatcaggagaccaatccccttctgttagctctagatgaacagaggccaactaaagagcagattgtaaagcaatggtatagtcaggacgtgttcacagaagcagcaactggcattactgagcagagggacactgaagatgaaagggagagtttgcaaaggaatatgaagaagatggttactggcaaaacggaaaaagtggctaaagcacagcgtttgcaacgagatgatattgagattgtaccagcagaacctgtccgagatgaagaggatacgtcttcatcttctggtgaatcagatgtttcggaggatgaactcgatgattacagaaaggctgaagtactagcctatgctaagaagatgctgaggaagaaacagagagagcagatacttgatgatgcttacaacaagtacatgtttgatgatgaagggttacccaactggtttgttgaggattaaaaaaggcataggcagcccatgaagcctgttacacgtgaggaagtagctgcaatgagggctcagtttaaggagatcgatgcccgcccatccaagaaggttgcagaggccaaggcccggaagaagcgtgttgccatgaagaaactggacaaggctcgccaaaaggcagatgctatagctgaccagaatgacataaacgagctatcgaagaggaagatgattgaccggatttacaggaaggcgatgccaacgaagcctcagaaggagtatgtcgttgcaaagaagggggttcaggtgaggactggcaaagggaaggtgttggtggatcacgtatgaagaagac

SEQ ID NO: 276473 - DNA, 434 bp, Zea mays
ctaggcgagagcacgcactgctggcggcgcggctaagaccgagagccgccgcgcacattattgttcgcgcgaggccagccgccggttgcattgcatggcgcagctgccgcccaggatcccgaccgaggtgcaccactggcccgaggggggccagcacggcgcggcggcggcggcgtgggcggacgacttcgccgagttcgcggcggcgcggcggggcgcgcaccgcaggtcgctcagcgactcggtcgccttcgtcgaggtggcgccggccgacggcggggccggcgagttcgacaggctcgacgacgaccagctcctgtccatgttcccacccgacgaggccggcggcagcggcggcggcggcgggtcgtccgcggccgggtccgagaacggcggcagcagcgacagcgacggcgataagcgtggcgcgcgcg

SEQ ID NO: 276474 - DNA, 786 bp, Zea mays
gatgagcaaagtagctgggagcagcatgttacaggctgcacctgctgtcaaagctaatagtgcagtgtctcagacaaaaccacgaagggctaagtacaggcaagtaaatgctgcagacaaatctccatgtcctgtgaaggtgaatcaggggaacagcgaagccgttagtaaggagtctctatcttgtggagaaatgctatggcagctctctgtagcagcatgtggtcttcagcagagagagaaaatcgttcctacaagtgttaacttctttaccggttttagaaagaacaaattttctagttctgatgtcaatgaggggatgcctgagaaggcagccaacactgagtccactctttcagaacagcccattgctgatcatatgcaggatgactattgggctgacattctcattaatgtggaggagccgctatctagcctgaaaaagaagatagatgagagtaagaaaagagtaaacaagaaggcacctcaggttaagaaacctcctgttaattcattgtcgactgcagaaaatgtagacgagccaaggagtgaaggcaaccaagatacaggaaatgaggaacaacttaggaacgaaaccaagttgttttctgcaaatggatctcaactgcacgccggaaccaaatttggtcaagagatggaaaattgctttctgtctggactggtgctgcacttcagcaggccatgcgctgttccatcacagtgtgaccttatcaagatctttagccaatacggtcctgtcaatgaagtgaaggcagatgttgcaaa

SEQ ID NO: 276475 - DNA, 515 bp, Zea mays
aatcatggttgatgatgttaaatatacagtttcacatgtcgtggagcctatggagcggagttttacaaagataaataagacaattcatcaaatctcagaaaacgtcaagcagcttgagaagcaaaagaggaaggcaaaggacgacagtcatcttattcccctagaaccatggtcagaggaattttcagaagctcatgaccatgttgcgggcggtagtgccagtgacagcggattagctaagacaaggtacaacaggatcttaaataggccccggaggtcattcgagtccagattgcgcagatggttctagcagccagccggtgctagtgggttaattgattttgatcaaaagaggcggttaaccttttcgctccggttgtttgacaaaatgatagcaattctgacaaactagttctccctccgttcttttcttctttatttgctggtgacaaatattcgagaacggagtttggagtttggcacggggtggaggcagtagccagcagctcttcatt

SEQ ID NO: 276476 - DNA, 627 bp, Zea mays
acgcgccctcctaggcggcgccctcgaattcggcaccggctccgccgtaggtgcgtacaatgagtgcgggtttcgacaagcagatattggctcagaagctttcgaagcttaatagctcacagcagaccatagacactttatcacattggtgtgtctttcatcatcgttgctgccaacaagttgtagaaacatgggattctgagttccatgcagctcctggagagaggagggtgtctttgctgtaccttgcgaatgatattatgcagaatagcagaaaagaaggtaatggatatatagctgaattcatgagggtcatccctgctgccttgaatggagtgttgactgtaagagatgattttgggcggaatgtcccaaaaagactgattgacatatgggaagaccgttaaatatttgatacccaggcacaaagcctgaaagatgattttttcaggaggttaaaggacattagaaaccagctgaaaaatacaggcagtgagcagctggagaaggttgcctctagctacaaacatgccctgaatgctcctatggatgaggatactctgatgcgaaaacgcccagcagctcttatcaattttgatgaactcaataaaacatatggaaataact

SEQ ID NO: 276477 - DNA, 775 bp, Zea mays
cccactagctgaacttgaacgccgctgtagacataatggcctctctctgtgcggtggtaaagaaatgatggtcgccaggctgcttaacttggaagaggctgagaaggaacgaatttacgagaaggatgttgacatgaaatatgtgcagggtgaacagcatgtggttggaagagaggacagtggtgtgaatgctcatagtacttcaaggtttggtgaaggttctaatggtgatgaattagatgtctctcggaacagtatgagagctggtaaaggacgttctggaggatctgcttctgccgaacttgaatcatttccaagcaagaagccgaaatacgatcctgttttgccagcttctaaatggagtcgagaggatgacatcagtgacgatgaagataggaaaggtggccgaggcttgggattaagctattcgtccggaagcgatattgctgatggtctcggaaaggtcgatacaacagaagctagtactgaccacacaagtcatcatcatgatacgattgttgatgaagagcacaggcagaagttgaggcagattgaaatttctgtcatgcagtaccgtgaatctcttgaggagcagggtctgcgtgacttggatgagattgagaggaaggttgccagccatcgaagacgtctccagtcagaatatggtttatccactccagctgatggtgctaacagcaggcgatcttctgaaagaacatcatcgtcgtcggagcggaaagagaggcatggcgttgctcatgatcatcctaggaaa

SEQ ID NO: 276478 - DNA, 774 bp, Zea mays
caacctcgcctcgcggtcgcagcctcgccctgatttattaacaggcaaacaaatgtcccgtccgttccctcgagaaaaggccacttctgcctgtgtgcatcgcttgccagcttccgcctttccatgaccacgccgctcctgctgtgattctaggacgacgtgccgcccgggccggctgccttctcacgccgggagggttggggaacgagcgccgcagccgccgccgccaccacgaactcgcggaagaccatgccgagatccaggggcaacgagccgccgctgcggacgtcgcagcgcgcgccgctgcacctcaagacgacggcctgctccgaggcgaatggcgcgcaccaccgccccgtcgccgaccggagtagccccagggtctcgccgcgcagccctctgcccgagaagaagcgtgcggcgggaacacgtgttgcggagctggagggcaagctggggaaggtgcaggaggagctcaagaagctgcgggagcagctcgcgtccgccgaggcccccaagaaggacgcgcaggtcgcgctcgaggaggccaagaagcgcgtcggtaccaagggaagcccagcctccaccaccaccaccactcctctctccccccttcgcctggggtcgaaatcgccaagaagaccgaggagctgaagctgcctcagccggcagccgaggaggagagcagcataaacgccccggcgaccgatgtgttcgaggtagtccgggccgagtcgggggacaaggagaaccagagcgcggccgaggactgcg

SEQ ID NO: 276479 - DNA, 556 bp, Zea mays
agctcaggcgctcagctagctagcagcagcagcagcagctctcaaacctttctttctacctcccccgtctctttcgttcgctcccagacattctagccctctcgagtagctagctcgagcggtgcatgcatctgtagctacctagccgacatgggcaaagatgaggagggcgcgcgtgcgctgcttcgtgccctctctggtgttggcgagaggccggcccagcaggcgcgccttccgcgcatggcgggacagagacgaccaaggaacggaggtggcggtgatcgtccaatccgaggctgaaggagctagctaactggtggtgtggtggtggtgctggtgtgtgtagggtctaactcgatcggcgatttcggcggcggcatacatgggaaagccaggcatttttctcgcagtccaacaagtaccctttccgttagctttcctctccatgcatattgcagcattgcacggtacggtggtggtggttaatcaacagctagtcttagtttgaatgaatccatcgtcgatctaagaacactatgtgtttttttgtttttgg

SEQ ID NO: 276480 - DNA, 452 bp, Zea mays
gaaataagtcattccaactgcatagccgtggggacggggttgacagcgccaggtgcttggaagaaatggtggccagaaactcgtttttgagcaatggacaaagtgagtccctgcaactgcatttaggtgtgtccatatacctgatcaacaattaggcaatgccctgttcattgctaccggcagactgcgcaaatttcatagtcatccatttcaaattcgtaatgatgtggtgggcaacatttaatgtggtacaaatatactactagattttctgtgcattacaacggaacatgtttggtagtattgtccaaaaaaaacttgtcaagctaaaaccaagatacagagggtccgtgtcaacatgttactatgtgttttcagtgctttgtttttttaaaggaaatatcttgctgaagtatgcaaaccgtaatgtctaattaaacttatgattccat

SEQ ID NO: 276481 - DNA, 781 bp, Zea mays
gcagcattaaactcgaccacaccaaacgacggccggcccaaattaaaagaccgacccgggccttgcaacaaccacgcaaatagatcccactcatatacactccagtagctagtagtagtcgacccatctgcatctgtatgtgtgcttgcccccggccggccacctttccggccgatccatcatctagagctagctcatcatcagtctttggcgtgtgtgtatgtatatggtggtgaccagcagctagctatagcagcagggtggttgttctatagttcgttcctatggttatggcggcggcggcggcggtactgctcgcgctggccgccgtggcgacggaggtggccgcggcaggaacgacgtacacggtgggcgcgccggacgggctgtgggacatgcagaccgactacgcgcagtgggtgaagagcaagaccttccgccccggcgacaccatcacgttcacgtactcgccggagctgcacgacgtggtggaggtgacgagggccggctacgatgcctgctccagcgccaacaacatctccgccttccgcaccggcaacgacgccgtgcccctcaccgccgtcggcacccgctacttcctctgcggcctcacgggccactgcggcaacggcatgaagatccgcgtcgacgtcgtcgccgccgcggcctcgccgtccgcgccgggccccgccgctgccgccgcggcgccgccgacgacctcgtcgccctgcaacgtcggagtcgtcgccgcctcgctactactgcttctgctgcacgccgt

SEQ ID NO: 276482 - DNA, 668 bp, Zea mays
gagacatccagttgatgccatttgtggattactatagcctgattctttggaagaccatagcgatctgcatctatgggacaaatgtcctgtcagccaactatgtgatgaaaactgatgacgatgcttttgttcgagtagatgaagtactttcttcccttgaccgaactaatgtcaaccatggactgctgtatggtcgtgtcaattctgattcccagccacatcgagatccatatagcaagtggtacataacccctgaggaatggcctgaggagagttatcctccctgggcgcatggaccaggatatattgtttcaaaggacatagctaaagaagtttacaggaaacacaagagtggggagttaaagatgttcaagctggaggatgtcgcaatgggaatatggatcaatgagatgaagaaggatggcttggatgtcaagtatgagaatgatgggaggattttggttgaaggatgcgaggatggctatgtgattgctcattaccaagaaccaagggatatgatgtgcctctgggatcagtttcagaaaacaaaacgaggaacatgttgcaaataataacagaaatcatgcgaatggtgttttatgttacggtggctgctggttgccggtgcttgaatagacacctttacgctaaaacgttcttgatgtata

SEQ ID NO: 276483 - DNA, 468 bp, Zea mays
cggacgcgtgggcgcccgcgagctccgcgacctcgtcgccgtcgccaggctctggccggggacagggacgacagggacgagggcgctggcgtcgtcaccattccgcagatcgtcaggtacctccaggggaagctggagcggatcggatgccaggccaggttcggatgatgatgatgacggtgatggttcgcctgcgttgcgtgcgcgggcgatcagcgtatcatcatcgtctttgttcttctttaacagcctgtctgtaccatcaaatgtacaaaagcgcgtggcttttcttctgtggatgcccagaatctgttggtgtcgatcagtcgatagaggaaccaaagtgagttgctgactgcaattggaagcggagtgcagttttctcttctgatggacatttttttcgatatgtttgctgtgctttttgtgacgtgacaagaccagagattgccatggcagttttgaatc

SEQ ID NO: 276484 - DNA, 773 bp, Zea mays
gcgattgcgagagccgaccgtctcagtgtgcgcgcgaagaagagaaggaggaggaagaagaagaaaaatgtatccggccaagcccaccgtcgccaccgccagcgagccggtcaccgggatggcggcgccgccggtgaccggcatccccatcagcagccccggccccgccgtcgcggccagccagtggtcctcgggcctctgcgcctgcttcgacgactgcggcctctgctgcatgacgtgctggtgcccgtgcgtgacgttcgggcggatcgcggaggtcgtggaccgcggcgcgacgtcgtgcgcggcggcgggggccatctacacgctgctggcctgcttcacggggttccagtgccactggatctactcctgcacgtaccgctccaagatgcgcgcgcagctggggctccccgacgtcggctgctgcgactgctgcgtccacttctgctgcgagccgtgcgcgctctgccagcagtacagggagctcagggcacgcggcttggaccccgcgctcggctgggacgtcaacgcccagaaggccggcgccggcatgatgtacccgccggcggcgcaggggatgggccgctaattacgctacgaccagctccatcggtaaactgatatgtgttgtgttgtgttgtgtcagccagatcatcggtaaactgatatgtgatataatgtcagggaccggcatgcccatgtgtttcaagatatttcacgttcgagtcctttctgtcagctcactatccgaatgaaaaccattttccttg

SEQ ID NO: 276485 - DNA, 1636 bp, Zea mays
cctatgcttctcgtccacgcgtccggccgtcgcccccgtacctcctgctgagcggggggccgtcgtctcggggcgccagcggggagagccgtggcggtggtggggaaccgggggtcccggaggtgtcgcacctggggtggggccactggtacacgctcaaggagctggaggacgccacgtgcatgttcgccgacgagaaggtgatcggcgagggcggctacggcatagtgtaccacggcgtgctggagggcggagtgcaggtcgccgtcaaaaacttgctcaacatcagggggcaggcagaacgggaattcaaggttgaggtggaagctatcgggcgagtgcgacacaagaaccttgttcggttgttaggatactgcgctgaaggcaaccaaaggatgcttgtgtatgagtacgctaataatggaaacttggagcaatggctccatggggatgttggccctgtgagccctcttacatgggatatcagaatgaagattattctgggaacagcaaaagggttaatgtatttgcacgagggacttgagccaaaggttgttcaccgtgatgtcaagtcgagcaatattcttcttgacaagcattggaatgcatagctttctgattttgggctagcgagacttttgggttcagaaaggagttatgtcacaaccagggtcatggggacgtttgggtatgttgcgccagagtatgcgggcactggcatgttgaatgaaactagcgatgtctatagtttcggaattcttatcatggaaataatatctggccgtgtacctgttgattacaacaggccgccaggggagattaatctagttgagtggctgaagacgatggtcagcaacagaaattctgagggggttttggatccaaagatgactgagaagcctacttctagggcattgaagaaggctttgctagtggctctgcggtgcgtagaccccgaagctcgcaagaggccaaagattgggcatgtcattcacatgcttgaggttgacgattttccgtacagagatgagcgccggggtggcaaagctccagcccaagcaagatcggtggaaacgccacctgcaagcgaacctggcgatagcagcggaaacaacactccaaaggacgcaccgaatggagaacctttcaagtggagaaactaagaggactagcttggctagccaccaggaaaacggtggttgcttgagtttgtgcctgataaagaagctggatatggttggttggttggtcgggcatgcaaactccacaagcaccagtgtcggtcgtcgtcgtgacagtatctgtacattgttgaatcgatatgttagccatagcgattttttttcccagttggttttcttggggccgtatatttatgcgaaggatgatcttgtgtggtaaaggcgcgcgcgctcgtgtgtattcctgaggcgaaaaaaagactgagcattgctatagctgaaaccgttccagtaggattggccgatgacctccaaaccttgctgcctgtttgttgtgccatccgccctggtatatagcctcggtttctgatgtcatactcgtaccgtatgttgctttattataaagtcatagtcgtagcagtgtgactgctcagctgttcaggctggatgctttc

SEQ ID NO: 276486 - DNA, 607 bp, Zea mays
  unsure (1)..(607): unsure at all n locations
gtcacgactctgtccttcccaattctcaggcaaccccgtcgtcttccgccatgatccggttcatcctgctgcagaaccggcaggggaaaacacggctggccaagtactatgtcgctctcgaggactccgagaagcacaaggttgagtacgaggtgcatcggctcgtggtcaaccgggaccccaagttcaccaacttcgtcgagggccgcgcgcacaaagttatctataggagatatgcaggactttttttctctatatgtgtggacatcaccgacaacgaattggcatacttggaatgtatccatctgtttgtcgagatattggaccatttcttcagcaatgtgtgtgaacttgatttagtatttaatttccacaaggtaactttatgcttcactacgctaatctagcaatctgcaataattcaatactttntatcttttcacatcttgtatttaaactttaaagagcagtttccaactaaatattctctttatcaacatgttctttggtaaccaaatttgcatatattgagctagtgttagttggtactgtattctggctaagacttanaaaagactgctggcatngattgtgttaatcatgtact

SEQ ID NO: 276487 - DNA, 743 bp, Zea mays
  unsure (1)..(743): unsure at all n locations
cccacacaggcagttgtcaccctcaaatcggataatcaggtctacttctggaaatgatggtgtcaattccaggagtccgtttgataatattcaacagaagaaattagcagcgcttggagccaatgcagcgcgaaggcctttcaaagattttctcagtacattgacaagaaccaaagaaagtatatcgcgcgcgacacgtcttgctatggaatgtgctaaatttggcattctggtgatgtatgatgcctttggtgttaggctacatgtagggaagcaagcagaggtcttgaaccagattgtgtatgagcttccatcagaacatccactggctgaaacaagaccactgcgagagctgctagggcacacacctccacaggtatttgctggcggagtgcttggatttgcagtagccacatttacagcgatgatcgctgggcttggtagttgactccgcatttgaagaaatggtcaacattcacattgaagttctggaattcaaattggacacatgtttcctagccagcttatgatagataatacgttgtgtataggtgtgtttaatatgaaaattgttgtcaatttgttgaagagaaacttgtgtcattcttttgtagttaatcgacgagtgaactatatgctttattcgttcctgtccaaagtatttggagtgattgaaagtacctcttgataaagcattcatgagatccccccccaaaaaaaaaaaaaaaaaaaantgagttaaa

SEQ ID NO: 276488 - DNA, 1272 bp, Zea mays
gcgcgtcgctgcttccattaccgcctccgcaaccagcccgccgcgcccccgagcgtttcgttccgggagcggcaagactgggacacgccagccctttatttcgagctttctgcgtgcgggaggggggttgacaggcgatggcggccgagggcgaggcggcggcgctggagttcacaccgacgtggatcgtcgcggcggtctgctctctcatcgtgctcctctcgctcgtcgccgagcgatgcctccactacctcggcaagacgctcaagaggaagaaccagaagccgctcttcgaggcgctgctcaaggtcaaagaagagttgatgcttctggggttcatctccctgctgctgacggtgttccaggggatgatccggaggacgtgcatccctgaacgctggacattccacatgctgccatgcgagaagccagatgagaaggccggtgaggccgccaccatggagcattttgtcgctgtagggacgcttggcaggatcggtaggcgtctgttgcaggaaggcactgctggggctgagcaatgccagaagaagggaaaagttccacttttgtcccttgaagccatacatcagctgcacattttcatatttgttctggcaatcacacatgttattttcagcgtcacaactatgcttttaggaggtgcacagatacacctatggatacagtgggagaatggaattaaaaaagatgctcctggaaatgggcctaaggtaaccaatgtacatcatcatgaatttatcaagaaacgttttaagggtattggcaaagattctataatattgagttggctgcattcttttggtaagcagttttatagatcagtatctaaatcagattacaccacaatgcgtcttggttttatcatgactcactgccctggaaatccaaaatttgatttccatagatacatggtaagggttttagaggcggattttaagaaagtggtaggcataagctggtacttgtgggtcttcgtggtgatatttctgttgctgaatgttaatggctggcacacatacttttggattgctttccttccccttattcttctgttagccattggcactaagctggagcatgtcatagctcagctagcccatgatgtagctgagaagcacacagcggtcgagggcgatgtgatcgtaaaaccatcagatgaacacttctggttcggcaagcctagggttatcctttacctgatccacttcatcctctttcagaatgcgtttgagattgcgtttttcttctgga

SEQ ID NO: 276489 - DNA, 432 bp, Zea mays
ctatgcgcgtccagcgtctgctgaggctgaggatggcgtcccgctcgtgctcccgctgcgctgccttggcgccgcacgctgcgctcccgctctcctctctcctcgccccctcgccctctgccgcgcgccctcgatccgcgcccctctcgtgcgcagctcggccgtgcaggggccacgcggcggcgtcagcgttgcacggcgcggcagggcggaggcccccgagcgtggcggcgatgtcgtcgtcgacgccgccgccgggatccgtgcagaagtcggaagaggagtgggaggccatcctcacgccggagcagttcaacatcctacgcctcaagggcaccgagtaccctggaacgggtgagtacgacaaggttctttgaggagggcatttattaatgtgctggatgtggaactcccttatacaaatcatcgaca

SEQ ID NO: 276490 - DNA, 649 bp, Zea mays
cctgacaagccgtagtgtatggtggccttgttgaatcaatcacgagcctctcagttgtatcagcagctgcagcaagtggtgccaagactttggatatattcatcctgggcatagcaaaccttattggtggtcttcctgtactttaccacaatattgctgatctacgaaacacaggagatatagctgaaagcagtgagcaagtggggcattactggctagagctgggaaggcgatccaagtaccagttgcacatggtgatagccatactgtcatacatcctcttcgggctgctgccaccagtcatctacggactgtcattcaggacgagcgacaacagagagaacaaagtgctggtggtcgctgctgcatctctcctgtgcattgcgctgctcgcaatcgggaaggcacatgttaagaggcataggacatacctcacaaccctcctctactacctgtccattggattcagcagctccggactgtcgtacgtcgcaggcgtcctcctcgcgaaggtcctagcacacttcggtatcattgatcagggtggtgcatcagctcctgctcctccaggtctctcattccctgaagcagccgcctgggcttcctactgagactggagccctcatttagtagttttgatggttaaatg

SEQ ID NO: 276491 - DNA, 387 bp, Zea mays
ccaatacgccatctattcccgtcgctgtcgtccacctgtttttttcgttgatccgcagccgccccttcctgctcccatttcggcgtctcgaagccagtagattattcatttctcgatccacaaatccctccacactctccatcccgaaccctgaaatcgaggagcgcgggaggacgccgcaaagcgcgttggctcttagggtttgccggtagggttgggaggctccgatccgggcgcgcaggcatgaggattcgggagctccgagatgggctggaggtggaggacgacgagcgggaggagcagggatcggaggttggcagtggttacggggaggttgtcgcagttgtgcgactgcgggcgaacgcgctatcgttggtgccggcgcga

SEQ ID NO: 276492 - DNA, 814 bp, Zea mays
cgcacaacctatgctccgtatctggaggcgtcactgaagattctgatccggcacagtggctatctccatgaagatgtcaggctgtacgcagtcgtatctttggaacatattctaactgcagttagggcaatacctcctgcacatgctgatgtactagagacacagaaggatgtccttgatactgttctgaacatctacatcaagactatgacagaggatgacgataaagaggtagttgcacaagcttgcatgagtgtagcagacattgtgaaggactgtggttttgctgcaattgagccttacatgctgaggcttgctgaggtaacactggtccttttacgccaagaatcaagctgtcagcaagtagagtcagatggtgaggatgatggcgacattgaccatgatgaagtcctcatggatgcagtttcagatcttttgcctgcttttgcaaaagtgatgggatcttattttgatcccatatttgcaaaattatttgatccgttgatgaaatttgctaaatctccccatgctgcccaagataagactatggttgttgcaaccttagctgaggttgctcaggaaatgggtgctccaatatctgcttatgttgataagataatgcctttggtgttgaaagagcttgcatcatctgatgctactaataggagaaatgctgctttctgtgctggcgagatatgcaagaatgggggtgctgcagcactgaaatactatggtgatatacttcgttctctgcataatttgtttagtaactcagaatcagatgatgcagtaagagataacgctgctggtgcta

SEQ ID NO: 276493 - DNA, 469 bp, Zea mays
cctcacgcgtccgcccacgcgtccggtagatggaagcaggcggcggccatcggccacgaccggcggcttgtcaccgtaacagcagcggagggcgaggagccgccgatctgacctattcctagttgcgcgcgtgtcccgtgaggcgggagctctggaggccatggagagggagccggcggtcgaggaggaggacgacgacgaggcggaggtggcgtgcgagtgctgcggcttcacggaggagtgcacggcgccgtacatcgcgggcgtgcgcgcgcggttcggcgggcggtggatctgcgggctgtgcggggacgcggtgggcgaggagctggggcgcgcggggaccccgcccatcttccccgccgaggcgctggaccggcacgcccgcgcctgccgcggtggcgtccgcgccgccgtcgcccgcgggcagccccgacggcctcatcgttgcgctgcgcctgctgctgcg

SEQ ID NO: 276494 - DNA, 427 bp, Zea mays
gtagatggaagcaagcggcggccacggcctcgaccggcagcttgtcaccgtaacagcagcggagggcgaggagccgccggtctgacctgttcctacttctacttcctagttgcgcgcgtgtcccgtgaggcgggagctctggaggccatggagagggagccggcggtcgaggagtgaggacgacgaggaggaggaggaggtggcgtgcgagtgctgcggcttcacggaggagtgcacggcgccgtacatcgcgggcgtgcgcgcgcggttcggcgggcggtggatctgcgggctgtgcggggacgcggtgggcgaggagctggggcgcgcggggaccccgcccatctcccccgccgaggcgctggaccgtcacgcccgcgcctgccgcggggcgtccgcgccgccgtcgcccgcgggcagccccgac

SEQ ID NO: 276495 - DNA, 623 bp, Zea mays
cccgccggcacgggcccggacttcctggctcgacccacccacgcgggccattaatggcaggctctgcattacaatggcggagaccaggtttacaaggacactgggatggttgacacacaaaggctgacaccgaaggatggagctgctatcacaatgctagacattgccaatgacagcaagggagcgcagttggaaccctccgggtcgacattcttgggcctggatgacaacaggttgtgtagatgggatatgcgcgacgccagaggccgggtgcagacaatcggtagctcatcagactcaccagtgctgaactggtcacagggtcatcagttctcgcggggcaccaatttccagtgctttgcaagtactggggatggttcaatcgttgttggttctgtggatggcaagatcagactctattctaagagctcgatgcgtatggcgaagacagcattcccaggccttgggtccccgattacacatgtagatgttacttatgatgggaaatggattctgggaacaactgacacatacttgatcttgatatgcactatcttcaaggacaaagatgggaaagaaaagactgggtttagtggccgaatggggaataggattgctgcacc

SEQ ID NO: 276496 - DNA, 711 bp, Zea mays
ccttagtaggccggcgacggcgacagcatccagagcctggcgcttggggcgcttgacaacagcttcttagtcggcggcgccgggatacaggtggtcaagaacttccgccacggcttgcacgggaagggcgcgtcggtgaagatctcgggaggccgtggcggcagtgggagcgcttattcgacgccgaagaaggcactgctgatgcgcggcgagactaacatgctactgatgagcccaggagaggctctgcattccaatggtgttcaccatgttgacgttgagactgggaaggttgtcgcagaatggcggtttgagaaggatggagctgatatcacaatgcgagacattgccaatgacagcaagggagcgcagttggaaccctccgggtcgacatttttgggcctggatgacaacagggcgtgcacatgggatatgccgcgacgccagatgccggatgcagatcaattggtagctaatgatactcaccacagctggactggtcacagggtcatcatgtctcgcggggcaccaatatacagtgctgcgaaagtactggagatggagcaatcgttgttggctctgtggatgggaagatcagtgctctattttaagagctctatgcttgtggtgaagacagcatttccaggtcttgtgttcacgatgacacatgtagatgttacttatgatgggaaatggattctgggaacaact

SEQ ID NO: 276497 - DNA, 925 bp, Zea mays
tttggaaagcaatgacaaaaacccctgcatctattgccctaatcatctacacattcattgcaggttggtttggtggtggcctctctgggttccatctgtatctcatgagcacaaatcagacaacatatgagaacttcaggtatcgctatgatcagcgagacaacccatacaacaagggagtcatggaaaacatcaaagagatcttctttacaacgatccctccttccaagaacaacttctgtggtagggtcgaacaggagcatggtctgaggccccgtccaacgaatggtttcatgagtccaaacatggggagagctgttggcgacattgagatgggtagaaaaccagtggcttgggatgagcctaggatggcggctgaaattggtgatttaggagcaggtctgagcaacctgttggaggacaaggatggcaggtttcgtaccacatctccagatctcagccgcgacgcccttgcggttggaggaggcttagaagagcacggatcctcagcgatgaaccctgggcgctcaagctggggagttgaagcaggtcgatgatggcaatggcattgaccatgtaaggcggatgtagtgagatgctcagggttgttagtgccagttcgtcgctaatttgttgttttgttggagatttgaggtcactaatgttattagacttatgacctgtatggctgttgtttctggactttcttttcttcttcctcttaatttggggcgtcttccatgtccattgtttgaagcagtcggtttgtgacgtctccagcttggtactgtcaggttttgtctgtatataatcggagcagtaagcctaaaataggtttcggttgcttgggtttggatggtaatggttgtgaacaatgtcgaaccttcgctttgcagtaaatgaacatcgtttgatcggagtgctt

SEQ ID NO: 276498 - DNA, 547 bp, Zea mays
atgtagttctgcgatcacatttctgaggaatagaatggataggcctcgaaagcgtggtgcagactcattatccagccgggctgccctgatgcttgatgcagaaagagaaccagaaaagacatggagccccatagttgaaatacattatgtagggggaacttatagaggtagatgtcaagaaggtgtccctgaaggaaagggacgtctaaccttcagtgacggaagcttttatgatggactctggaggtatggtaagagatctggtttggggactctatttcacagtaacggtgatgtataccatggaacgtggagggatgaccttattcatggaaagggctggtactattttcacagcggtgaccgctggtttgcaaatttttggaagggcaaggctaatggtgagggtagattttatgccaatgatgggagtatcttctttggccatttccgaaatggatggcgccatggggagagcctgttggtagatgcaaacggttcaaggtggatcgaagtttgggctgatggtgtacttatcaacagaact

SEQ ID NO: 276499 - DNA, 494 bp, Zea mays
agttcttccattctcacagggcgcagagtgttagctgatggtcatataccttgggcctgcgaggcattctcccagttgcatggacgacaacttatacaaaatcctgctctgctgtggggttggcgtttcttcatgattaaactttggaaccataacattttagatgcccgcactatgaacacatgcaatacagtccttcaaattttacaagaagaaagcacaggactaaagtaattttgatgcttctgatgaaaattcaagggaagaagatttctttaccatttccaagaagaaagcatagaattggagtaactttttattgataatttcattcatatctattgtcaattgtattaatggtttttaaaagagacaaatcatgtctaactctcacgctgtaatattctaagtcgtacgtgaatttgatgaatattcattgttgttttacttaagagttatcgtattgagatccttaacatattattttatttttc

SEQ ID NO: 276500 - DNA, 418 bp, Zea mays
caacgcatctgcacttccttctcctacaaaatcgcagcagcacttcttcctccacgtcccagatcaaagcaggaccagcgcgcgcgcagtgatctagggcgaagcaaagcgaggaacagggaccgtctcgttgggcccggaaaactggcgagttcgatggacgctgccgcggaggcctcaacgccgtcgtccccgtcgaagctgcgcgacaagctgcggaccacggtgtgctgctgcttcggcgtggagagggctcggtggcggcggcggcggggggcggcgacggccgcgggcgagttccgctacgacccgctgagctacgcgctcaacttcgacgagggcgaggacgacgacgcgtacgcggaccccaccgcggccttccggtacaggaacttcaacgcgcgccttccgccctcgc

SEQ ID NO: 276501 - DNA, 722 bp, Zea mays
gcgcgcactctccaggcgtctgccaatccgaaacgaaacccacccgtaggcaaaccaggactgagattgagcggagagcagcacagtcatggcggggcaggaggtggcgaacaagcgggtggtactgaagcgctacgtgacggggttccccggcgcggacgacatggaggtggtcaccggcaccgcgcgcgtggccgtgccgccggggtcgacggccatggtgctcaagaacctctacgtgtcgtgcgacccttacatgcgcggccgtatgaccaagcacgagaggcccagctacgtcccggacttcgtcgtgggggaggttttggaaaactttggcgtctgcaaggtgatagcatctgggcaccaggatttcaaggttggggatcttgtgtgggggatgaccggatgggaggagtacactctcatccataacccggagtcatttttcaagatcaatcatcctgaattgcctctgtcctactacacaggcgttcttggcatgccgggccttactgcttgggctggatttttcgatgtgggcaagcccaagaaaggcgactgtgtcttcgtctcagcagcatcaggagccgttggtcagcttgctgggcagtttgctaagctcacaggatgttatgttgtcggcagtgctggttctgacgagaaggttaatcttctgaaaacaaactttggattcgatgaagcattcaactacaagaaagagc

SEQ ID NO: 276502 - DNA, 1177 bp, Zea mays
ccgacggtttcggacccgatgggttcctctgctcgtgctcgccacctcttctttctcgccgccttggtggccgtcgcggcgcctcgctcggcggacgcgtggggcggtggccgcttcttcttcagcaagaccacgcgtgccgaagccactgctgagcccgacaagaaggccgccggcggggacaccgttgccgcgccggcgttctcgcggccctcgaccgccggcagcggcggccgcgggtacgggctctacggccgcctcgaggagaagtacccggcggactacttccgccgtggcgtgcaccgcaacaccgagaagctgacgacgacgaccggcggcgagcgcgtccggacgacgttccccgaagacagcggcaggggtcggccgcccaccgacgtgccgggcgccaccgaggaagaggggggaggcgccggaggagacctcgagggcgtccggccgtacccggaaaacggcagcggcaggggccgcccgccgtggtactacacggccttccaccgcggcaggcagcaggagcaggagcagcgggacttcgggatgagcgacacgaggctgtaccagaacggccgctactactacgacgtggacgccggcaggtacggctacggccgcgagtcgaaccccatgcggacgcgccccgacgagggagagttcggctccgggtacggccgaccccgcggccccgccggtggcaggcgcggcagtagctacggcgacgcggcgggttaccagcagcggtacggcaacgacgaggagttcggggacggagccatggatcagaacacgaacggcgccttccaggaggaagcaggccaaaacggacgacgatacactccatgagcttgcatcgtgtgtcatgcgtcagagatacactcagtcgtcgtcgtgtgttgctagcgtggttactatcgtgtgctccatctccgagtaatctcccatgggtcgatgcgattgagtacttgtaacttaatcgtgggcagaaccagctgcctgcctggtttcgcggacgtctacgcgcacccctggtgacacaagcaatgagtgaataaggtgtgtgtgtgactgtgtgtgtacaatgtaaactgtattgcagataaaaatgtcactatatatccacctactattcaaaaaaacaaaaaaaaaaaaaaaaatgataaaa

SEQ ID NO: 276503 - DNA, 945 bp, Zea mays
cccacgcgtccgcacaggcacaaagacaccgcccgtacacaggctcgttggcttggctgctgtgtgttgcgctcagccattcagacttgagagctactagctaactgctcgttgggtgtgggtgcgctcccggcctagaccgtggaggaaaggagtccagtccactcactaccccctctgctccgttcgggttccaggccagcacagccgagggttccgcacagcgataagcgcgaagcggaagagatggagcatatcgccaggttcttcttcggagtttctgggaatgtcattgcgctcttcctcttcctgtcgcctgttgtcaccttctggagggtcatcaggaagcggtcgacggaggacttctccggcgtgccctacaacatgacgctgctcaactgcctcctatcggcttggtacggcctgccgttcgtgtccccgaacaacatcctggtgtcgacgatcaacgggacggggtcggtgatcgaggccatctacgtggtgatcttcctcatcttcgcggtggaccggcgggccaggctcagcatgctgggcctcctgggcatcgtcgcctccatcttcaccaccgtggtgctcgtctcgctgctggccctccacggcaacgcccgcaaggtcttctgcggcctcgccgccaccatcttctccatctgcatgtacgcctcgccgctctccatcatgaggctggtgatcaagacgaagagcgtggagttcatgccgttcctgctctccctggccgtgttcctgtgcggcacctcctggttcatctacggcctcctcggccgcgaccccttcattattatcccgaacgggtgcgggagcttcctgggcctgatgcagctcatcctgtacgccatctaccggaaaaacaagggccccgtgcgcctctgcaatctgacgcgaggctaggctgggccatggaggaac

SEQ ID NO: 276504 - DNA, 723 bp, Zea mays
  unsure (1)..(723): unsure at all n locations
gaanacccgggccggccgacgcgtccggacgaatagcgtggagttcatgccgttcctgctctccctggccgtgttcctgtgcggcacctcctggttcatctacggcctcctcggccgcgaccccttcattattatcccgaacgggtgcgggagcttcctgggcctgatgcagctcatcctgtacgccatctaccggaaaaacaagggccccgccgcgccggccggcaagggagaggccgccgccgccgccgcggaggtggaggacaccaagaaggtggccgctgccgtggagctggccgatgccacgaccaacaaggcagcggacgccgtcggcggcgacggcaaggtcgccagccaggtgtaggcgggcaaggcttatttgctgtctgggactgggaggaacatcctaaacgaggctgccttagtttgtcggtggagcagattggtgttggtttctgtgggcttttacggttgttgttactctcatctccatctctcccaggaggctaccccaagcatgtagtagcttccattctgattctgggacggtgttgcacgttacagtgctctcaagctgtctctgcaaagtgtgtgtttttttattccatttccctcctgctcttgttctctccaactgcgcttacctgcccccgatttctctaaaaaatgtattaaactatctgagaaattcatccacctgcgagtactgtgctgtgcgtgagc

SEQ ID NO: 276505 - DNA, 954 bp, Zea mays
gcggcacctcctggttcatctacggcctcctcggccgcgaccccttcattattgtacgcacacggttctctctctagtctagatcctgagccgcactcaccgcccggccgtacgcacgtgctatccgcgcatgttgtccgattggcactcggaaaccactgtagcagcactgtatcactagctgctgggactggacgtaactgcatctgatctggccagcacagtacccccgggctgggcgtcggttgccctttcgatgtcccgcccaagcccaaccaggcgcacatgcctgccgctgccgcagccgatgcacgggcatgggcgccggtagcgtctagcagcgtgggcgtggccacccacaggcagcgcacgccggtgctagctgccgatgggccgccgtgcccatgtccatgcagctggattggacccggcacaggcagaagcaacagcgcccgcgctctttcttgtcgcaatgctagcaaactgcacggtgcactccacttcagtacacaccaacgcgacagactgcgatgaaatatcttaggccgagcttttccaaatctcatcatgtcggaatgattcatgccgtccaaacttcggtacagccccactgtctctaaacccgcgctgtctgtgcatgcttgtagatcccgaacgggtgcgggagcttcctgggcctgatgcagctcatcctgtacgccatctaccggaaaaacaagggccccgccgcgccggccggcaagggagaggccgccgccgccgccgcggaggtggaggacaccaagaaggtggccgctgccgtggagctggccgacgccacgaccaacaaggcagcggacgccgtcggcggcgacggcaaggtcgccagccaggtgtaggcgggcaaggcttatttgctgtctgggactgggaggaacatcctaaacgaggctgccttagtttgtcggtggagcc

SEQ ID NO: 276506 - DNA, 556 bp, Zea mays
  unsure (1)..(556): unsure at all n locations
gaaagactaaaaatgctcatagaaaagacaaaaatcaagagagcctgaaagggaataggggaagtgctggatttcctcctaggaaagatatttcagatgtatctaacaaaaagagtgacaagcaagagttgaagcccatccattgtaaagtgcaaacaggaaagaggaagagaggaacagaaaggaggttgttatcgaagaagcaaagttgccaggaccctggaccattgcctgcgtatcgccaagaaattgcatcttgcaatgaatccagaaaatccacccacagaaggattgaaaatgacccttctaccgaggtgaagcttaaagttggtgatgtgagattggcaaacattgatgaaaacatcaacaagcccagtgggactcagagagaaggaatagaaattttttgtggtcctgatgattggacaaaagagcaggacatggcattgcgcaaagcttacttcagtgcccgaccatccncacatttctggaagagggtttcaaaaatggtgccagggagatctgctgaagaatgcttcaacagaatttatactga

SEQ ID NO: 276507 - DNA, 705 bp, Zea mays
ctgaaaaatcgactttgaaccctaatgctaaggaattcaagctaaatcctaatgccaagagttgcactccgtcagcatctctgaggccaccacaccctacatcatctgatgcatcatattactatcctaataacatgccggcggtgccacttggacccggtttgcctgtgggcatggggttcccaccggcatatggcgcccagcctgtcatgtacaatactcaacctggagcatcaccgcacggttatatgcatcctgctggtccgccggagatgcatcaatacagaggaaggagcttttagatataccattctgaactgctcttagatggaagtcgctgcaatccccacaagtgggattttgaccagcaaaaaccgctattacaatggaaaaaactggtcctgttgtgttgctcggattggttggacaaaaaagcgcaccgactttgtgttgctcggattgcctggtcaaaatgctcttcattgtcctgtatcagtgttgctcggaagcaggttcactggaatttcatattatttttgtcagactattgatgttgtaaattgaattgcgggtcatctgttcgacccggaaatgacattcataaatgtgtgaggttgccccatgtaacatttatgtgttccttaacgttgttctgatgtaagatttggacgaaatggatcaaattgctgacctatctgctcgttt

SEQ ID NO: 276508 - DNA, 577 bp, Zea mays
aggtgatgggatggcggatatggcattccgttgcattcaggaaatggatattgacaacaggatgacgctctatcaacatattgtcttaagtggaggaagtaccatgtaccctggtctgccaagtcggttggagaaagaaattcttgaccgttatcttgatgtagttttgaagggaaacaaagatggcctagagaaattacggctgcggatagaggatcctcctcggagaaagcacatggtgtatctgggaggtgcagtgcttgctgggatcatgaaggatgcaccggagttctggataaccaggcaggagtaccaggaagaaggtgtagcgtgcctaaagaagtgcgggcagtcataagtcttgccacatatcattcacagaagaaatggaagttgcattttttaagaaaaagctctgtgtttgtgtttggtattgggggggggttttattagttcttaattttcttttgggttattccctgttttgtttttgttttaattatatttgttctttgtttttttaattattttttttttttttcattatttctttttttttttattttttttttttttt

SEQ ID NO: 276509 - DNA, 450 bp, Zea mays
  unsure (1)..(450): unsure at all n locations
aggacaaaacagtcaccttatatggcatatatattatctcacaaactgtaagcgacaaacagtcctctccagcaacatatgcatcacatgcaacgagaacggtatggaactgagtttctggacaagtctatatggattcagcacctatttcgaatattcacatttctttataccaaaagcagacgatacgcaaaaaacgagcatatctgacagtaacatgcaacgggtagcgctacaacatagatctagcataaccctggcagtttagtaacttggacccatgctacaagaacgggacagtcgcttttccatctctcgtccagtcccaactgttgctcttgagccacctncaccgccgccttctgctgcagaaactgtgttgtattgcttcctgcaacctgngcagcgcccatcttccaccaagatcctgttgtggcagaagaggcacat

SEQ ID NO: 276510 - DNA, 625 bp, Zea mays
  unsure (1)..(625): unsure at all n locations
atggcgggcaagggctcaactgggtgaagttagatgacgaagagagagaatagctaggccgcgccgacgccgaaccgcagcagacacgcgcgcggacagcgtacgagggagggagctgcctgaggtagaggaggaggagaacatgcagggcggcggcggcgtggaccagccgccgatgcagatggtgctgcgggtgaggcacccgtcgtcgctgggcggcagcggggcggacgaggacgacggcgaggggtcctctaggtcggcgctctcggtgttcaaggccaaggaggagcagatcgagcggcgcaagatggaggtccgggagaaggtgttcgcccacctcggacgcgtcgaggaggagtccaagcgactcgccttcatcaggcaggagcttgaagggatggccgaccctacaaggaaggaggtggagtcgataaggaagcggatcgacacggtgaaccgtcagctcaagcctctcagcaagagctgcgtcaagaaggagaaggagtacaaggaggtcctggaggcgtacaacgagaagagcaaagagaaggctctgctagtgaacaggctaatcgagcttgtgagcgaaacgangaggatgcggatgaagaagctcgaggag

SEQ ID NO: 276511 - DNA, 1571 bp, Zea mays
tcgacggcgggcgtttcatcgccgtcaagcgcttctcgcgcctctcctggcctgacccgcagcagttcctcgcggaggcggcgggcgtcgggaaggtgcggcacaggcgcctcgtcaacctcattggctgctgcgcagagggtgacgagaggctgcttgtcgccgagtacatgcccaacgacaccctgtccaagcatctcttccactgggataagcagccgttaccatgggaaatgaggctgagggttgcatatttcattgcgcaagctctcgaccattgcaatgcggagaacaggaaaatctatcatgatttgaatgcttatagggtactttttgatgaggaaggtgatccccgcttgtcaagttttggattaatgaagaacagccgtgatgggaaaagttatagcactaacctggcttacactccaccagagtttctacgaactggcagagtaattccggagagtgtgatctatagctatggaactgtcctgttggatcttttgagcggaaaacacattcctcctagtcatgccctagatttaataaggggaaagaatatactgttgctgatggattcctccttagaagggcagtatgctaatgaagatgcttcgaaattggttgaccttgcatcaaagtgtctgcaatttgaatctagggatagaccgaacataaagtatcttctgtcttctgttggtcctcttcagaatcaaaaggaggttgcatcacatgtgttcatgggtattacaaaagccacatcagtactgccaaccatttgttctccactcagaaaggcctgcgctggtatggatctttcagcggtgcatgatattttgctcaaaacaggttataaagatgacgagggtgcagaaaacgagttatcctttcaagaatggacccagcaagtgcaagagatgctgaacacaaagaagtttggtgacattgcatttagagacaaggattttaagactgcaattgactactattccaagctagtcgcaatgatgtcgacgccttcggctacagtttttgctaggcgcagtttttcctacttgatgaatgagcaagcagagcttgctctacgggacgcaatgcaggcccaggtctgcatgcccgagtggcctacagccttctacctccaggccctggctctttcaaagctcggcatggaaaccgatgcccaggacatgctcaacgatggcgccacgtttgaggccaagaagcagaacggctggcgcagttaggagccgacgacgaacaaagtctctcttccaacgactccgtgccgttgccctttgagagaagaaggtacaatggcgagtctcctccaaatcagttcactgggacacgcctgttgcactactagtagtgggattgaaacgcactggtttatcgtgcaatctcctctcgaatgtcggtaacgagtgatgatcatgatcaggggtggaaaaataggtcagggcctttgaacgcatactcttccgtgggttgcgctttgtgttgctggcgatggtggcaggatctgcctgattgttgcaactgcagttgtaattaaagggatgctttct

SEQ ID NO: 276512 - DNA, 355 bp, Zea mays
caagcccttgctctttcaaagctcggcatggaaaccgacgcgcaggacatgctcaacgacggagcaacatttgaggccaaaaagcaaaacggctggcgcagttaggaaataaaagtctcctaactactccgtgtcgttgcccttcgtggagaaaaaaggcgcaatcgctagtgtcctccaaatcagttcattgggacgtctgttgcacgaccaaggagtgggattgaaatgcactgttttatcgtgcaatctctgccctaatgccggcaacgagcggtggtgttatgatcaggagtggaagaacaggtcagggggctttgagtgcacaggcatagcttgctctcccgtgagttgc

SEQ ID NO: 276513 - DNA, 759 bp, Zea mays
gttgatggatactgcatttgggcagacattagttgagcccaatgtgatagtaataaatgtggaaaaattcgcatcgacgtccttcagaaaataactggttcagcattgaggagagacctcctattgcatatgtgaagcttgagattctagaaggaactgacatgaagccatctgatataaatggactagcggacccatatgtgaaaggtcaccttggtcctttcaaattccaaacacagatacagaggaaaacattgtcccctaagtggtttgaagaatttaaaataccaatcacatcatgggaggcaacgaatgaacttgtcatggaagttcgtgataaggaccccatgtttgatgactcacttgggcaatgtaccattagtttacatgatctgagaggtggacaaagacatgacaaatggatatcactgaataatgtgaagaaaggaaggattcacttggcagtaacaattgatgatatatccgaggaccaaaatacatcaagtttggaccaatcattgaagcaagcggatactgaactaccagtatcaacatctgtttgtagcgaagtggatgctagtgaacctcctgaagaaaagaaagtcttaatggatgaagtggagcacataaacattgatggacaagaacagcctggaggtttatatgtacatcgccctggcactggggttccaaggacatgggaatcccggaaaggacgagcacgaaacccagacacacagattcaccaagaggttgaca

SEQ ID NO: 276514 - DNA, 1032 bp, Zea mays
cggacgcgtggccacggaaccactttcccccgcactatgctgccatatctgagtccaacgtccccgccgagctcttcccgcagtgctccaacttcgactacatcgtcggcggagcggcatccctggggtaggcggcgcgccgcgcgcccgccgcccgtatttctcttcgtcatcgacacctgcgtcatcgaggaggagctggagtacgttaagatggccatgcggaaggccgtcgcgctcctgccggagcacgcactcgtgggcctcgtcaccttcggcacgcaggtgcacctgcacgagctcggattctccgatctcagcaagatctacgtcttccgggggaccaaggagatctctaaggaccagattttggatcagcttggcctggcgggtgctgggcggccgggcttccccaagatgccacagcaaccgggcgggccacaggtgaatgggatgcatccgccgtccacggccggggtcaacaggttcctgctcccggtgtcagattgtgagattgctctcagcacgttgctggacgagttgcagcctgaccaatggccagtcgaggctgggaaccgtgcgatccgttgcactggtgttgcgctcagtgtagctgctgggttacttggtgcttgcatgcctggaacaggtgcaaggatcatcgcattgctaggtggtccgtgtactgagggacctggaatgattgtttcaaaagatttgtcagaaccagttagatcacataaggatcttgacaaggatgcagctcctcacttccagaaagcagttaaattttatgatggtcttgctaagcagttggtcagtcaaggtcacgtgttagatgtttttgcttctgctctcgatcaggttgggctagctgagatgaaggttgctattgagagaacaggtggccttgttgtcttgtctgaaagttttgggcattccgtattcaaggattctttcaaacgcatttttgagggaggtgaacagtctctaggacttttttcaatggcataattgaaataaactgttcaa

SEQ ID NO: 276515 - DNA, 1290 bp, Zea mays
  unsure (1)..(1290): unsure at all n locations
cggacgcgtgggctcgtccactcccccagtcacccccgcgcccgtctttgctctgcctctccgcgccgcagagcagagcagagcatggcgcccccacgccctctcctcgccgccgtcttcctcgccgcggcggttccgctcctcctttctccggcagaggcggggacggtgggcgtgaactacggccgcgtggcgaacaacctgcccaacccagcggcggttgtgcagctgctcaagcagcagggcgtcgcgcaggtgaagctgtacgacgccgaccccaccgtgctgcgcgccctcgcaaacaccggcatcaaggtggtggtggcgctgcccaacgagcaggtcgcggcggcggcgtcgcgcgcgtcctacgcgctgctgtgggtgcgccggaacgtggcggcgtaccacccggccacgcagatccagggcatcgccgtgggcaacgaggtgttcgcgtcggccaagaacgtgacggcgcagctggtcccggccatggccaacgtgcacgccgcgctggccaggctgggcctcgacggggccgtcaaggtgtcgtcgcccatcgcgctcacggcgctcgcgtcgtcctacccgtcctcggcgggcgcgttccgggaggacctcgcgcaggcccgtcatgaagcccatgctcgacttcctggcgcagaccgggtcgtacctcatggtgaacgcgtacccgttcttcgcttactccggcaatgcgggagacatctccctcgactacgccctgttccgccccaacgccggcgtgctcgacgccgggaacggcctcaagtactacagcctcctcgacgcgcagctggacgccgtgttcgccgcggtcagcaggctcggggagggctacaacgccgtgcgcgtcgtggtctccgagacggggtggccgtccaagggcgacgccaacgaggcgggcgcttcggcggccaacgccgcggcgtacaacggcaacctggcccgccgcgtgctctccggcaacgccggcaccccgcgccgccccgacgccgacatcgacgtgtacctcttcgcgctcttcaacgagaaccagaagcccgggtcgacctccgagcgcaactacggtgtcttctaccccaaccagcagaaggtgtacgacgtcgagttcgtcctcggcggcggcggcgccagccagggcaacggcggtctcgggtggcaagagaacggcggctgggcgagcagcaccagcaccaacccgtcgagcgggtgtaggtgactaccgcngaggcgtgctgcgtggccaacgcgatggccggggag

SEQ ID NO: 276516 - DNA, 711 bp, Zea mays
cacatgggtcagcaaagaatttgccgccttcatgcacttcgacgttacctccaggaacgtgctttttcccccagaacgaggtgaaacagatacagacacctctgttcatcctcaacgcagcatacgattcatggcaggtaaggaacattttggtgccaggagtagctgaccctcatggaaaatggcatagctgtaagcatgacatagaccagtgctctgcatcgcagctacgggtattgcagggattcaggggtgattttctgaaggaagtggcagaactagggaactccgactcgagagggttgttcataaactcatgcttcgtgcactgccagtctgagatacaggagctatggttctcatctgactcccccgtgctcggaaacacaacagtagcaaacgctgttggcgactggttcttcgaccgcagctccttccataagatagactgcccatacccttgtgactcgacctgtcacaatcggatctacgatgactcatcacaagcatagcaattacagtggtctcacttcgtactgccattcaccatgttactccattacatttgacgcttccagcattgctaacagtagggcaatgcgttgacagccattgatttttttttctttttacgaataagatcaggtgccggcggctctaactcggttgctaccggaaagtgagcgtgcatcttccgacggtacatggcat

SEQ ID NO: 276517 - DNA, 525 bp, Zea mays
aataccggccgaccacgcgtccgacaggcgtacgtccactcgttcgcccattcttttggtcgggaacgcagaggcgggggcaacaagaaggccgggcgagaagacaagaggaagccaaaaggagaacgagttcggaagggagcggatggcaatggctctgctccagctattgctgtcgctcctcatcgtctcctgcgccgcgcagtcgccgtacgcgtcgaaggctcctccgctcagcgcctcggcgccggggggctctgtcgcgccaccgacaacggcggtctcggcgccgcaggcgtctgcacagccgccgacaacagtcgccgcgtctgggcctcaggcctcggccgtagcaccaacaaaagcagccttggcgccacaggcctctgctgcgccgccaactacagctgcctcgccgcagctggctgccacgttggccccggtttcctcaccgccactagctgctgctgcgccacctgcctccgctacccctccaaccacgccaccatcggtaacgcagacgca

SEQ ID NO: 276518 - DNA, 815 bp, Zea mays
  unsure (1)..(815): unsure at all n locations
ttgtctggtcggaaacgatctgcggatcacgaacgtccttgtggaccagaaccatgtcgccaagatcggcagctacaacatcccgatcctggcggaggccatgaggtccgagcagggaggagctgggaacaagttccaggctgacagtcgggtgaagagcgataagacgggcatcttcgacttcggggtgatcctgcttgaggttctgtccgggaagaccatcacgtccatgtatgaagtggagatactgaaagaactgcttgcatgggcgattgccgacgaggaccgggtgaggaggaggagcttcgcagaccccgcggtgagcaaagggtgctcggacgagtcgctgaggacggtcatggagatctgtcagaggtgcctggcgaaggaggcgtcgcagcggccctcggtggaggacgtgctgtggaacctgcagttcgccgcccaggtgcaggacgactgggaggcggatgcctggagcagcggcggaggaagcccagtgtcgtcgtcgtccagacccaccaggccgtctcggctacacttgagcagatagatgatcaggtgcttcaccaatctccagtaaagcggtcacatgatctacccatagtctaccggggacaaggatctaaagatgggaaatgctggtcagcctacagtacagcatctgcctctgatgggatgctgaaacccacagcaggatcagctcactgaaaactgtcccccctgtggtgcagactaatgtgctntgcgctggtgcagactaatgtgctttgcgccactgtagagttctttttggggttctcttataataacgt

SEQ ID NO: 276519 - DNA, 426 bp, Zea mays
aagcccagtgtcgtcgtcgtccagagccaccaggccgtctcggctacacttgagcagatagatgatcaggtgcttcaccaatctccagtaaagcggtcacatgatctacccatagtctaccggggacaaggacaaggatctaaagatgggaaatgctggtcagcctacagtacagcatctgcctctgatgggatgctgaaaaccacagcagtatcagctcgctgaaaactgtcctccctgtggtgcagactaatgtgctttgcgccactgtagagttcttttttggtttctctttatcatcacgtccctatctacgagtacaataatggtgtgccttttgtccattttcccccattggtattggtagcacaataatgatgtaacagacattgccttaaacgccccgagttttgtgatcatcgtatt

SEQ ID NO: 276520 - DNA, 436 bp, Zea mays
cgacatcgaggcggggatatacatgctgcactgtctacctctcaggctggtcggcgccgagggtgcaccgaccagatgcatcctcatcaagtgatcgttcctcggccggcctgctcttgctgccttgctggaggtggcgacactggaccatgccagctgagctggtgctccgtcgtgggtcgcgtggccaatatttggctcgcatgcagtcgtcgatctatatggaacagaacactgcatgcctatgtagatacgcttgtatggacaataaaggaaccgcagtacttctgtcgatgaaatacttttgggtgagccggtaatctaagacaccaggcctacaggttacttgtaactgtaagctggaggccctggaaggctgaggctagcggctagggatggatccagatttttatttgaatgctattttttggtcatc

SEQ ID NO: 276521 - DNA, 493 bp, Zea mays
  unsure (1)..(493): unsure at all n locations
gagaaaaacaggcagttgcatgatgagctttcaaaggttaaggcctcattagctggcacagcccggcgtcttgagttgttgcagaaggatggcgagttgcagaagaggcagactgaatcgctgaggcagcaatgcaattgcactctccattgaaagttatgcaagattaaggacatggaaggagtttttcagcttctttggcggattagctatttttttccaacaccaagggaggaaaaccagattgagttctaggaatgagaactggcatatgaaaatgattgagaacatatatagtgtatagaccatagtgttcgtcctttataccaatggtgagctgcacagttcatccaaagtgatcggtgggaacttcattggtgacaatgcaaagcgcagaagtcaaaacgtaaaagatggcgccatatggttataagctcctaatttctgagtgattntgcagtggcagtttgcatgagtacctgactatctgtag

SEQ ID NO: 276522 - DNA, 472 bp, Zea mays
  unsure (1)..(472): unsure at all n locations
ggaagctcttgagaatcattctgcttccagacatgattgattgatgtagaattggagttggcagttttacctcaacctggccttggatagattgatattacagattgtaagttgtcaactgtggtttgtctatatctggatgatgttttgagggaaggagcatgccagaaggatgccacattgaggccaattaagtgctagtcatctaggaattgtgcttccggaaaagaatttgaagtgtccttagatacaatggtgtcaccaactatactcttttccccctcttttctctctcgttttaggacgccatgtgatagctgcaatgtgatcttatctgattcataggacgacgccatatagaaatgtcaagcatcgttttttcctgtaattacatcaaattggccagttgtcattgtgtatacttagtctatgtacaccatatcaattcatactttaaaaaantatgtaaaaa

SEQ ID NO: 276523 - DNA, 536 bp, Zea mays
cggtcgcgtgggccttccacttcgcctcctcttctctctctgccccgtctcctgtctccacctgttccatcgcattctcctcccaccaccaccacaccacgcctcgcttatcccccccccccccccccgagacccgacccctgctcgacgacgtgctggcaaaacctcctcctagtcctctcgcagaaggaggctgtgttctttccttcatcggtgcggcaacagcgaaagcttctcggtcgatctctcccaccgctgctccgccgtttgggtggttccgcgccttggccgcgcgggttggatccgagctccgtgcagcagctccgccgcgatacgtatcgcataggattccactggattcagctgctgagcagggtactggaaggtggatttgatactagctctgaacagccagtagaatttctcaaatactgtccaggatcatggcttctctctgtgatttctgtgggaaacaaaggtcaatgatctactgcagatcagatgcggcatcattgggcttatcatgcgaccgtaat

SEQ ID NO: 276524 - DNA, 803 bp, Zea mays
actagttctagatcgcgagcggccgctcgcgatctagaacacacgcgtccgcggacgcgtgggcggacgcgtgggcggacgcgtagtcctctcgccgacggagcttgttttctttaccggcgcggcaacagcgaaagcttctcgatctctctccccgctgctccgccgctgggtacggtggttccgcgcctcggacgcgcccgtgcgggttggttggatccgagctctgtgcagaagcgccgccgcgacacggtcgaattccactggatccagctgctgaacggggtaccagaaggtggatttggtagtagcactgaacagcgagtggaatttctctaatactgtccaggatcatggttcctctctgtggtttctgtgggaaacaaaggtcaatgatctactgcagatcggatgcggcatcattgtgcttatcatgcgaccgtagcgttcattcagctaatgcactgtctcgacgtcatacaaggacccttctttgtgatcgttgtggttcacagcctgcatcagtccgatgtcttgaggacaacgcatcactttgccaaaactgtgactggaatgggcatgatgcagaatcaggggcttctgggcataaaaggcaagccataaactgctactcagggtgcccatcatctgcagagctttcgagaatctggtcatttattactgatatcccgactgtagcagctgagcccgactatgaggatggactaagcatgatgacaattgatggcagtgacgttactaatcgtcacgatacttcagatgataaaagattgttggaaata

SEQ ID NO: 276525 - DNA, 574 bp, Zea mays
gttgccaataatactcaggcctacgtgacgcaagacgacaacctgatcggcacgctgacggtgagggagacgatctcgtactcggcgcggctccggctccccgacaagatgccgagggaggagaagcacgccctggtggagggcaccatcgtcgagatggggctgcaggactgcgccgacaccgtcgtgggcaactggcacctgagggggatcagcggcggcgagaagaggcgggtcagcatcgccctggagatcctcatgaggccccggctgctcttcctggacgagcccaccagcggcctcgacagcgcttcggcgttcttcgtgacgcagacgctgcgggggctggcgagggatggcggccggaccgtcgtagcttcggtccaccagccgagcagcgacgtcttcttgctgttcgactgcctctacctcctgtcaggaggcagaacagtctactttggcaaggcttcagaggcttgcgagttcttcgcgcaagctgggttcccgtgcccgccgatgcgcaacccgtcggaccatttcctgcggtgcataaactcggacttcgacagggtga

SEQ ID NO: 276526 - DNA, 762 bp, Zea mays
tcgatgcaatcaatttcttctgagcttgaggtacttggcaggcatgatcacccacgtctaactgttccatttctgaagatgaggcacaatcattttatgagaaggtcagtctgagggtcaagaagtaaaaattatgattgagaagagaatggaatccagtgcaatatctgaaagaaagaatgttgatgctcgatcttactttatgaccttggaatactgggaagatttattttgtaagctaaatgagatgagaagatataggagaatagttgggtctcttgcgggctcttgtttatcagctgccatcccacttctctcttccaataaggaaacagcatgccttgtggcccttgacattgtggagagtgctgctatatctattgccaatgttgaggaggcttataagtgtgaatgtcaaagcaaaggagtcattgaggaggccatccagttttgttcatttgacgagcttcttgatggtacagatgccaccgaagatgttgatgaaaataggctactcccagcaatgaacaaactgtggccttacttggttatctgtctaaggaacaagatctcagtgccggttgttaggaagtgcaccgaaatgttgagtcgagcaatttgcatatctggcggcgatttttatgtacgcaggtttcataaggatggacctattgtttggaggttgctggctttatctccattccgacgtctgtcaaagatggatgaaaaagcaatcattttaccatatagggatacctcact

SEQ ID NO: 276527 - DNA, 344 bp, Zea mays
cggacgcgtgggcggggatgaccgagtcctgtacgcacatgggcagctttggctgcagcgacagcccatcattggacgggctgttggctatctgccttatgctgggtggcttccaatcgtcatgacggagaaaccagtccccaagtatctgctaattggtgccctggggctgctggtggtagcatccaaggagtgacgttaaaggtaggatcgatgaccaggagaaaaagtatgcggagaggaaaaaacctgtagagaaacccaattgttatgtttaaaaaagctgtattgcatacatgatccaatgttggagtccaagtatatataatatcccatcctgtgtt

SEQ ID NO: 276528 - DNA, 632 bp, Zea mays
  unsure (1)..(632): unsure at all n locations
atagatagcacctatattcagggttcccctgcaaaaattcggttagggaacggaacactagttccaggttttgaagaaggcatacgggacatgaaaccaggtggtaagagaagaattataatacctccagagcttggtcctcctgttgggccttcgacgttcttcagtgcgaagagttcgaagtgttcgatgtggagctactggcggtgcaggactgccagcggaggacgatagcattttactctgatgtcgtgtgcagctgaacttcggtttgtctagtcttccgcctatggcacatcgcagcagcatcctgcacttttggctgctggtctgagttgccgtccaattgtgtgtatgtatatagccagctgccgctactgcggctactgatgatgggcaatggtagtgtgttattagttcttcatttttgtcttgaatctcctgatggcgggatatgcgcatttggtgtgtctgtttagaagttggcatgtgtaccttgatgttgaggttactcctggtcctacctctaccaaggactccacaccatctgactctgcttcttgttcagtactaattcttgcgagtttggtggcggnttttgtaaactattttcaaatacctagtgatagtnt

SEQ ID NO: 276529 - DNA, 517 bp, Zea mays
cggtcgcgtgggctctcttggaagcaataaaatgttgcataagcactacccttgtatgcataggatttaccgtgctaatcgactctataatgtggcgtcgaatcctgtggccagaatttcaagttctctggtttaattcagttctgaatcggagttcagaatggggtacccattcaattcattggtactttacatcggcgcttccccgttccatgatagtggcataccctctctgcatggttggtgctcttcttgatagaaggatagtaccatacatgtttccggtcttcttatttgttgtgctctattcaaaacttccacataaggaactccgtttcataattggctcaattcccatgtttaatgtgtctgcttcactaacagctagcagactgtgaggaactatcttatctaatgcgtagttgcgtaccacttgaacaatgataaattcaagctgggattgataggactatttttgactcatttctttatgaaaatccatgttgttcaagtgcca

SEQ ID NO: 276530 - DNA, 967 bp, Zea mays
  unsure (1)..(967): unsure at all n locations
gctttttattctcatgcttggtgcctttcttgtcagtctaggatattctactgtgactttcatggcatcctacaacaattatcctggtggctatgctttaaaggctctacatgaagcagattcttcagtgaaggaaaagatggtacatattgatgccttcactgcgatgagcggggtttctcgtttctgtgaaaatgaatatccttggagatactccaaggaggaagaaattcccatcgaagaatttgagaaaaggaatttcacctatctactgaatgagcaccgctccatcggtggctaccagtgcctgttcgctgtggatggattctccagagtaaaacttacgccccgaatccccccgctctctctggtgaaagaacccaaggtgtttgcacatgggaatacgagagaccctgacattctttcactgagttggcccggttgtccttgagggcatggggacaccggacacccagattcctgtggcaggaccactaactgccagcagtgaagatgtgttgagtcagtccgcgtgacacatatatggtatatatctctgggtcttgccatgaagctaccttacctgcaaatctagaatgtgggccctcctcccctagatcccacggcttcgaaaccacagctgtaaggaacactgccactttcaggtgcaaatttgtgtaacattctagagccggaagacagacagaaagcacacggggggtggggggaatcatagcaattaccacccttgtatttacaagttgcccgatatatttgtttcccttttgaggcagcttttcatactcccttttaatataacaagagcttccagactttatttatcggcagcaggcatacagtcgtgctggagacgcatacttgctccattcaaagatattatatttgtcctcccatccaaaaaaaaaacccccaaaaaaaaaaaaaaaaaaaaaaaaattatanaaaa

SEQ ID NO: 276531 - DNA, 464 bp, Zea mays
aactattgctccatcaaacagagtatgcggattcaggatcctgcaacagccatggtgccagctaccattgtatcccgtattccgtcaagaatttactgtctccttgtttgcacgttttggtgcaggtgaaagaacccaaggtgtttgcacatgggaatacgagagaccctgacattctttcactgagttggcccggttgtccttgagggcatggggacaccggacacccagattcctgtggcaggaccactaactgccagcagtgaagatgtgtttgagtcagtccgcgtgacacatatatggtatacatctctgggtcttgccatgaagctaccttacctgcaaatctagaaatggggcccctcctcccctagatcccacggcttcgaaaccacagctttaaggaacactgccattttcaggtgcaaatttgtgtaacattttagaggccgaagaaagacaga

SEQ ID NO: 276532 - DNA, 441 bp, Zea mays
ggctagtgattctggtgaaactcagagtcatagtgatttaccttctataaagaggactgcgtactcgagctgatttccagaatgaaagctatcttcggcatactggttatttctctgaggagcagacttcttctgacttcgttgagcaagcaagtaactgagtcttcagagagggaatgctcagaaagtgagactgaagaggatgctgaacttctgcaaaatgcaagtgtgattctacctatagaatcacatgctcctgatccgtattctgttccaatatatgagaagttcaagcatgtgcattatggtgacaatgaggtggcctattctaattatatgccccagttgaatgaatctgaggcagacgatggttcttctgagctgggtgtctctcagtggcacatgaaaggtaaacgtaacaatcgtaatgccacaaagaga

SEQ ID NO: 276533 - DNA, 418 bp, Zea mays
tccccaaattcgtgtcccgcacatctgctcgtcgccctgcgaacctgatggcgctcgtcggcgcgggggccgccggcgcgtccacctccaccggggccgctgcccccacgggggggcacctggtggttcctcgtcgtcctcgacggcgtcgagacgcccatccacgaggggacgctgtacggaagcgccgggggcacagtcaccgtcaccggccctggccagctctccgccgacggcctcgagagcgtcctggtgcgcggcggcgggaccgggaccggcgccgtgcggttcacgctctgcgccgacgcggctgccgagggcgtcggcgcggcgtgcttcgagcggtgcggcgcggcccgcgtggagggcgcgcgcgaggtgtccgtgtcctcgtgccgcgccgtggaggtggagcgcg

SEQ ID NO: 276534 - DNA, 455 bp, Zea mays
gtttgagttgccatgatacatgtagatcaatcccagttcccctgctgcagcttgtaggatggacgccactggtagagctgaagagaatagcccagaaggacaacgtcgacgcccgagtcgtcggcaagctggagtgctaccagcccctctgctccgtcaaggaccgcagcgctctgagaatgatcgaggacgcagaggagagagggctgatctcgcctggcgccacgacgctggtcgagccgacgagcggcaacatgggcatagccctggcgtacatcgctctggcccgaggctacaggttcgtcgcggtcatgcccgccgagtactcgctcgacaagcagatcctgctgcggtacctgggggccgatttggtgttaaccgatcctgcgcttggcttccagggacagctcgacaagctggagcagctcaggaaagaaatacccaacgcgcacgtt

SEQ ID NO: 276535 - DNA, 703 bp, Zea mays
gtccagaacattccgtgctacagagactcggattattggaccgttggtgaagcttcttgatgagagggaagcagatgtgtctcgagaggcagcaatttccctgaccaagtttgcgtgcacagataattacctgcacgttgaccattccaaagcgatcatcagtgcaggtggagcgaagcacctagttcagcttgtgtatttcagcgagcaggtggttcagattgcatcactcacccttgtatgctacattgcacacaatgtcccagacagcgaggagctggcacaagcagaaatcctcacggtgctcgaatgggcttccaagcaagcttacatggtgcaagacccagtaatagacaacttgttgccagaagcaaagatcagattggagctgtatcaatccagaggcgcaaaaggctattattagattacctgctgtgggaagggaattttaaggcgttcttcttggatcggccaagtactgtatatacatccaacggcttctctgtacactctggctaaacctttttttattcccggcatggcaaaagttgttgtagttgcacccctctggttgcgttcttgatatagggaagtaagttttatttgtaggcttggatgttcagtactccgatttctcgtgttggtggtatagtttttggaaccttagcaaaaactttgaggaaaaaaaaaaaaaaaggaaaaa

SEQ ID NO: 276536 - DNA, 651 bp, Zea mays
  unsure (1)..(651): unsure at all n locations
cactgacgccaacaccgactaccccaacgccgtacgaccccaacacgccgnccttcacgggcccatgcacctactggatgatgcacccgggcgtgatctggggcctattcggtttctggtgcccgctggtgcggctgttcggcccgagcgcggcggtgccgttcgggcacgacctcaccgtaccggaggcgctggcgaacacgcgcgaggacggcatgggcgcgctctaccgcgagggcacggcgtcgctgctcaactccatggtgaacaacaggttccccttcacgacgcaggaggtgaaggacgcattcggtgctgcgctcaactctggtgacgacggcgccgccgcggcacaggcgcgtctgttcaagaaagcaaatgaggggcacgtcatcaggcagaactagctaggcggcagtcgccgtgtgtatgtccgcaatgcaactatgtgcgcggcgagcatgcagagcttgcttaggatctgcacgtatgtgtttgatgatggggtgaagttatcatcacttatctcgatacctctttggatctatcttgtatcagttgcgcatgtggtcttaactcctaaagccctgtttcgatacttctggcttattgtttatgaatggttaataattagtcagcaaataattagct

SEQ ID NO: 276537 - DNA, 486 bp, Zea mays
cggccagtttcagcgacgtattcagtctagtctgtagacgttaagagcaagatgagcagcagcagggttcttcttgtcagtgctgttctggtggcgctcgtcaccctgagctcatgcaggagcctgggagagttgtctgagcagaagacctactcctctgctcccagctatggtggctccccaactcctacgtacggatcaggagaaggccacgagccaacgccaacaccatctcatcatggcacaacaccgacaccatcttacggcacaacaccaagtacacctgctcatggggtccctgaaattcccaagcatggatttgttggatcctgcgactactggaagagccacccagacatgatcattgcagttgttgggtccctcggcaacattggcaagacctttggtgctgcctgcagtctgctcgttggcaagaagcttgagaatctgcatgaagcactctcgaacaccagaactgatggcggt

SEQ ID NO: 276538 - DNA, 1566 bp, Zea mays
tcgctcacgcgtccgactagttctagatcgcgatctagaactagtcgcggcggcggcggcgaggagtgcatccctcggcgatgagcagaatcaccaccggatcttaatctcccttgcctcgtttgcggcgagcctgcgctgtcggcggcggcgcacccccctccccttcccccggtgcttccgtctgctggctggactcagttcttccaactcggcccttaacaagagaacgacgaccatgccgatgcgtggcgtcgatttcaagtggtatgatgggttcttcctctccatgctcgccactagcgtaattatcgtttccattaattggaagaggtatcgcctgtgtgcccacccgctccacatttggatagtggtggactacaccactgtcttcatcttccgcctcctaatgtttgttgataatggtctcgctgcaggaatgggattagatctcggatggcaacagagatatgctcgtttttgtggaagaataattgtcctctcagttcttgtgctacttctctacccctttctctgggtttggactgtgattggaacattgtggtttagcactgcaagaggctgcttgccagaggaaggacaaaagtggggcttcttgatatggctgcttttcagttactgtgggctcgcctgtattgcttgtgtagctatcgggaagtggttacaccgaagacatgcacttcaacagagagcacaacaaggaattccagtctctgaacatggggttttggttgatatgatccgtgttcctgactgggcatttgaggctgttggcctggaaatgagagtgggtcaagatactgcatatcatcctggtctttatttaactgatgctcagagagaagcagttgaggcactgattcaagagcttccaaaattcaggctgaaagctgttccaacggactgcagtgaatgccccatctgccttgaagaatttcatgttggcaatgaggtccgtgggctcccatgcgcgcacaatttccatgtggagtgcatcgaccagtggcttcggctgaatgtcaagtgcccacggtgccggtgctccgtcttccccaacctggacctgagtgcgttgaacaatcttcggtcgaccagcgagccggaccatccatccgccagcgccagcaatgtaacgacggcaactgcagcgacgagatacgtgaggtcgcagccggcaggtcaaagctatttggtgcggttgcaggggctgctgctccgccctgtccggcacgatagcgtggagagtgacggtgagccggcggtgggcaacagtcgcttggttggcaccgaagagctgcctagcatacttgtagacgatggccatcagctgccagatcgctgactgatttgatgacctgatggatccagcatacttgtcagcataatttaggatacttgtcagcttttcttttacagttttcttttgcaaatgaaatgcgagttttgttgaaagaattttttttaactgaacactgaaataagcaaataaaattatttagctcaaaggaaataaaattacattacttaaagaaatcacccaatact

SEQ ID NO: 276539 - DNA, 797 bp, Zea mays
gctaatgaaaccgtctaattaggagatctcagtttttttatatatatatggaaagcatgattctaagatttgaatttcaatgtgactgactgactgtatccttatgatcaaaataatgatagctgtgccatttatgatttatcttggtgcatgggagtttcttgacacctgttttcctaccataatttttgctaccttatggttgtcgttcttatactgatgttttaggtttctaagctttgtcttggttgtttgctccactaccaatgactaactgaactttgcaaaagtatggctgtcagtttattctattatgtatcttcttttttgaaaaaaaaatatagagatctcggatggcaacagagatatgctcgtttttgtggaagaataattgtcgtctcagttcttgtgctacttctctacccctttctctgggtttggactgtgattggacattgtggtttagcactgcaagaggctgcttgccagaggaaggcaaaagtggggcttcttgatatggctgcttttcagttactgtgggctcgcctgtattgcttgtgtagctattgggaagtggttacaccgaagacacgcacttcaacagagagcacaacaaggaattccagtctctgaacatggggtaatgcttttctctatttctgtgcatctgcatcctgtcacaaatataaaatgagctgttggcgctgcagtcggaaagtatcaattgttttcgtgcttttttgttagtgcttttatatcaagtccaacttagacacaccaataatattttagtgcaa

SEQ ID NO: 276540 - DNA, 390 bp, Zea mays
cccaaagccgctcggttcgctcacctgcctgtgttgccttgcgacttgcgagtgggcggccgagtgcccgaatcggtgcggccgtgcaggagcgtttgctgtctccgtttccggcccgttccctttcgtggactgttttggaaggcgttgcgatgagacgctgcggtggcggcggcgaggagtgcatccctcggcgatgagcagaatcaccaccggatcttaatctcccttgcctcgtttgcggcgagcttgcgctgtcggcggcggcgcaccccccctccccttcccccggcgcttccgtctgctggctggactcagttcttccaactcggcccttaacaagaagaacgacgaccatgccgatgcgtggcgtcgatttcaagtggtatg

SEQ ID NO: 276541 - DNA, 351 bp, Zea mays
gtcttcttcctctgctgtggatataaagaaggcctaccgcaaagcagcactaagacagcatggagacaaagccagtgggtttcttgtcagaagtgaaaatatcaatgatgctgtatggagagatataacaaatgaaatacgcagggatgctgattatttattcaaaataattgggaaggcatatgctatgctttcagaccctacaacgagaagggaatgataacctggaggtggagtgatagaaaagcagtgcacatgtaacatgagcagcgggagcaatgaaaatgatgacaggacctcttagtgagagcatttaatcatgaagttggtaccgcacaaagcttccatact

SEQ ID NO: 276542 - DNA, 690 bp, Zea mays
tccacgcgtccgcggacgcgtgggaacctggtaagattcaagtgttctatatgatccaagtgatggccccctattccttatacccagtaaatgtcagcaagccgtgtgttgagtcgtttaaaaacaaccagagaaacacatggccaacatccccaagtgtcgttggacccaaaaccccttaatccttctatcttacgctgctgtagtgctggcagtactttctactctgacactgccactgcttgcttcatcagatctagatgctgtaaatttcaagaaattctgccttgttttgaagaaccaatacctatgtctaggtcaaaatgccgaaccacgcgcgaggaacgctatggcgctcctgcttaacagtgagggtatatctgggccacttcccacggccttgggcgccttctccaacttgagttacctcgccctcgccaacaacaagctcaccgggccaatcccaccatcagtcgggcacctgcaccactccctccgcgagattgtcctcctcaacaaccagctctccggctgcctccccggcgagctagggatgctcagcaaggcggtcgtcatcgacgccggcatgaatcagctcaccggcccaatccctccgctcttttcctgcctcagcagagtcgagcagctcaacctggccgggaaccgcctctatggccatgttcccgacgc

SEQ ID NO: 276543 - DNA, 303 bp, Zea mays
cggacgcgtgggcggacgcgtgggcgatcgacaagccgtgtgttgagtcgtttcaaaacaaccagagagacacatggccaacatccccaagtatcgttggacccaaaaccccttaatccttctatcttacgctgctgtagtgctggcagtactttctactctgacgctgccactgcttgcttcatcagattcagatgctgtaaatttcgacacattctgccctggtttcaaaaacttatatttatgtgtgggtgccaagaagtcccccggactacgcaacaatgtcctcctagcatctatggc

SEQ ID NO: 276544 - DNA, 605 bp, Zea mays
tcggtttgagatcctgtgcctttctgggtcatacttggtggtagatgaaggtggcggcgcgcgggcccgaagtggagggcgttgcatagctttgtgtggtcctgacaacagggttattggtgggagtgtaggtggagtcctgatggcagctggagcggttcaggtgatagtggggagcttcatgtacggaggaggttcaaagaagaacaaggtgaaagccgagttggacgcggagcctgaggaggcgaatgccggcgaccaagaggtggcacttgcggagcacagcagcatggcccctcatcctgccatgagtggtggtggcgggtgggcatctggcatgatgaggcagatggagtcgagaactcccaacatcgatatcaactccatccgcgagtagtttgcctgtttggttgggtggatgaggaaggctcctcctccttggatgcacacagcacagcggcatgcatatgtttggttgtaggcgttgctatgttttaggactccagagtatattgtgatgtgatgttgtacttggatgttgttgtataagatcatgggaacgcttggtcgtgttattatgttaataaaaatatataatggatggt

SEQ ID NO: 276545 - DNA, 517 bp, Zea mays
catgaaggcccagcatcctcggctccgtttcctcttctctcccgatccgcggttcctgttcgcttcgcttccttgcctgatctttgcttcccagacggccagatcaggcgaaaggcgtgacgggggccaccgctgcggcgccgcccctcgaccctccgctgctccgcctgcgctggagaccatccatctggaagagatctctgatttacgggatggacggagccaagccagtggcggccgggaagcaggacctggaagaggcgctgctccgtatcgtgcagcagcaccaccaccagtccctctgccaacgacaacaaaccgagcgtgcaaagaaggacgccttgaagagcgcggtgcgggtcgccgatctcctcgtggacacggtcgacggcggggtgcgggagctcttcgtcaacgagaagcgcatcgagctcgaggcccgcgcgctgctcggtacgatcgcgcggtacaggaggcagactgatgagtggctggcggccaccagcgagatcaactc

SEQ ID NO: 276546 - DNA, 1667 bp, Zea mays
aatggggcttccaggggtacattacatctgattgtgatgctgtggcaattattcatgaaaaccagacatacactaaatcaggcgaagattcaatagcaattgttcttaaggcaggaatggatatcaactgtggttctttcctagttcggcatactaagtcagcaattgagaagggaaaaattcaagaagaagatatcgaccgtgccctttttaatctattctcggttcagttgcgtcttggaatatttgataagcccagcaacaaccaatggttctctcaactagggcccaacagtgtgtgcacgaaagagcatagagagcttgcagcagaagctgtaaggcagggtgctgtccttctgaagaatgaccataattttttgcctctgaagagaagcgaagttagacatgttgccatcattggaccatctgcaaatgacgcgtatgcgatgggcggagactatacaggtgttccctgcaatcctacgaccttccttaagggcattcaagcatatgctacacaaacaagctttgcccctggatgcaaggatgcttcctgtaactcaacagatttgtttggcgaagctgttgaagcagctaaaagagccgatattgttgtcgtaattgctggctcgaacctgacagaagagcgtgaggacttcgacagagtgagccttctccttccaggcaagcagatgggcctcatacatgccattgctagtgtagcgaagaagccccttgtgttggttctcctgggtggtggtcctgttgatgtttcgtttgcaaagcaagatccacgaatcgcaagcattctttggctcggatatcctggcgaggttggtggacaagtccttccagaaattcttttcggagagtacaacccaggaggaaagctgcctataacttggtatcctgaatcctttactgctattcccatgactgatatgaacatgagagctgatccttcacgaggctaccctgggagaacatatcgattttacactggagatgtagtgtatggctttggatatggtttaagttactccaaatattcatatagcatctcctcggctctgaagaagatcaccgtgtcgcgttcattcgatttgggcattatcagcagaaagcctgcatacacaaggagggatggactaggctctgtgaaaactgaaggtatcgcttcatgtgaagctctggttttctctgttcacgtcgctgtttcgaatcatggtagcatggatgggagtcatgctgttcttctgttcgcgagatcgaaatcaagcgtcccgggctttcctataaaacagctggttggctttgagagtgtccacacggcggctggcagtgcatccaatgtggagattactgttgacccctgcaagcaaatgagcgcagccaatcctgaaggcaaaagggtacttctgttgggtgcccatgttctaacggtgggtgatgaagagttcgaattatccattgaactctgacagggatgtgccaagtcctcccattttatggagttcaaagttgggaataatctgatgaaacttgtaaagaaacccgttgtaaagattcattattgagctggatgcgtgtacggtaaacatgctgtgacctgtgaagattcatcatttgagttgggtgctagtacaattgcagccatttacccccat

SEQ ID NO: 276547 - DNA, 527 bp, Zea mays
agcatcatacaattcaagcccctataaagtcgcttatggtggcccaggagcaccagtcagaagcacctatccaggttatgccggcgcatctgggccggctgcttccagcagctatgcaaattatatgggatccgtatatcgccctccccagcaaccatagattcgactcctccctcaaaaatgttgtgctggtgatgcaagacatggaaaccagtccctcccatccaactcccatggcggagatgtaaacttgagctattttcttgtttcatcgtccacaacagtggggtttggaggtgtatactgatgctctcatgtccagctacatctacaatgtaccttgcactcttgtttgcttttagctgtgcttattcctgagtcgttgaatgttttatattttctttccacaagtctgtctcatgtagggaactgtctcatctaggaatataacttcctttacttgctacccgtgcgattgagtttggaacccccattgaatttggaaaccccaaacctgggcttgggtt

SEQ ID NO: 276548 - DNA, 383 bp, Zea mays
tgttttttcccaggctgctcagagcgccggccgacgagcgtagcgctccgtggtccgtgcggcgctcgaggacgtacggtacgagatcgacgacgcgggtgggtccgactcggtcgtcatggggctgacggagagcttgttcgggtgcttcggggccgccgccgccggcgggcaggagcccgcggcggcggtgccggcgagcaggcgccccggcggcgttgggaagcggacgctgcggcggctgagcacggccaacctgcggtcgctgtcgctgcaggacctgtcgcggaagctggagacgacgaagctgcacaccttcacgctggacgagctcaaggccgccacgaagaacttcttcaccaccaacttcctcggcgagggcg

SEQ ID NO: 276549 - DNA, 398 bp, Zea mays
acaccacctgcgcatcttctttccgagcagtacgtacgtagctgaattgctgaaaagagaggcagagatccgatccggaccgcgaagagacgatgactcacccgaggccggatcatgaaccgtcgggcgaggtgtcgctggcgctggcgctgagcacggactcgtccggctccgcgggtgccccggcggcgaagcgggcgcggcggatgggcgccgcggcggccacgtcgggggagggggagttcgtgtgcaggacctgcagccgcgccttcacctcgttccaggcgctcggcggccaccggaccagccacctgcggggccgccacggcctcgagctcggcgtcggcgccagggcgctcagccggcagcagcacaagcatcatcagcaggccggcggc

SEQ ID NO: 276550 - DNA, 404 bp, Zea mays
gacgacggcaccgtcaccgagaactactgggagcccgcgagcgacgacgccaccgaggaacccccgcggaggccctaccgcatcgaggtggtcggggtcgtctgcgacgcctacctcgccgtggcgaggggcatccggagggccatcatcacccggcgggccgtcagggtcaggtcccagctgcagtcgcacaagcgcttcgccgccgcgttccagcggtacagccgcctcgtggacggcgccaggctctacagcaccaactccatgggctctgccaagctcatcgcgtggaaggacgggatcggaaacagcctgctggtggagccccgggagttcgactgcctggagaaggtgagcgggctcgacgagcacgccacctccgtccacgacctctaccccgacgg

SEQ ID NO: 276551 - DNA, 457 bp, Zea mays
ttgtcgcgtgggtagcaagcaatggccgctcggacttccgctctcctcttcgccgccctcctcgtggccgcccagtacgtgctccgcttgctccactccttcctgtgggtcccgttccgcctggaacgccgcttccggcggcagggaatccggtggccaccacgaagcctggtctccggtaacgcagccgactaccgcgacctgctagccgccgccaggtccgcgcccctctcctccttccgccacaacggcgtcgtcgcccgcgccacgccgcagtacgcggtctggctggcgcggtacggccggccgttcgtgtactggttcgggccccggccgcggctggtgatctccgacccggagctcgtgaaggccgtgatgaccgacttcacgggggcctttgataaggcggtctcgggcggcaacaacccgctcgccaggcagcttatcggcgaggggc

SEQ ID NO: 276552 - DNA, 536 bp, Zea mays
cccacgcgtccggctgccttgcatctcctctcccgtacagccgcagcgtgctcctcgacctcgctaaaagccaaccgccctgtctcccagtctccctcactcaccacgcacgcacaaagcagagcaggcaacggcacagcccagcacaggtagagagagagagagaagcgcggagtcaagaagcggacaacaacagcaggccgaggaagagaagagaaggccaggaggcagcagccaggaggaagagcaagagcaagatgctgcgcgggggctcgagcgtgctggggatcatcaacttcatcaccttcctgatctcgatcccgatcctgggcggcggcatctggctggcgtcgcgggccaactccaccgactgcatccgcttcctgcagtggcccatcatcattgtggggctcgtcctcatggtcatctccctcatgggcttcgccggcgcctgctaccgccagacctggctgctccgcctctacctcttcgccatgttcttcgtcgtcctcgcgcttctcttcttcatcgtcttc

SEQ ID NO: 276553 - DNA, 764 bp, Zea mays
tcaatagagggaaatttggttgggagggttttatagcctactctccggggtttgtcacatcttggtctactattgttgaccgaacatggagatcttactgctattcatcatctgattctttcatctctccagagactttgtgggaggatctcaaaccagctgtttcatatcttcaacctgaagagttaaaatttgtgcatgatgctttgaagttggcatatgaagcacacagtggacaaaaacggcgaagtggagaaccattcattattcatcctgttgaagttgctcgtattcttggagagcatgaacttgactgggaatccatcgctgctggtttattgcatgacactgttgaagatacgaatgtggttacttttgaaagaatagaaaatgagtttgggccaactgtgcgccgtattgttgaaggggagacaaaggtgtctaagttggggaaacttcagtgtaaaagtgagggtagctccaaacaagatcttaaagcagatgacctaaggcagatgtttcttgccatgactgaagaggttcgtgtgatcattgtcaaactggcagacaggttgcataacatgcgcactctcacacatatgcctcagcacaagcagtatgccatcgccatggagacactacaggtctttgcccccctagcaaaactccttgggatgtaccgtataaagtctgagctggaatatctatccttcatgtacgttaaccccactgggtttgctgaactaagaaaaagagttgaagac

SEQ ID NO: 276554 - DNA, 1162 bp, Zea mays
atttcaaaggcaatggcagcagattcgtaaatatgcacaaaagctgggtatcagcatcatgggtgacatgcctatatatgttggctaccatagcgcagatgtttgggcgaacaggaaatcatttttgctggacaaaaacggtttccccactttcgttagtggcgttccacctgatgcatttagtgaaacgggtcaactatggaacagtccattgtacgactggaaagctatggaagcagatggtttttcatggtggataaagaggattaaacgtgcccttgatttgtatgatgaattccgtattgaccatttccgggggcttgcgggtttttgggcagtcccttctgatgcaaaagtagcactggttggaagctggagggctggaccaaggaatagcttttttgacacgctcttcaaagctgttggtagaatagatataatagcagaagatctgggggtaattactgaagatgtcgttcagctaaggaaatccattggggcccctgggatggcagttctccagtttgctttcggaggtggttctgacaaccctcatttgccacacaaccatgaaatggatcaagttgtgtacactggaacacatgataacgatacagttcttggctggtggcaaaatttaccagaggaagaaaagaaaattgtgatcaagtatctaccagaagccgagaatattgacataacatggacactgattacggctgccctctcttccgtcgcgaggacttccgtggtaaccatgcaggacattcttggccttgacagttctgctagaatgaatactccagctacccagaaaggaaactggaggtggaggataccgagctctgttggcttcgacagcctcagccctgaagcagcaaagctgaaggagctgcttgcgctgtacaatcgacagtgaagtccgctattgccatcgaagttccttcaataaaataggcaacaaaatgtgagcggtttggttgccaagttctatggtacgcggccccgcacagaggttgtgttctggttggctggaaacttgcgtgcactgcaagttaagacttgaacatgaagcactattgtatgtgtgtgtattctcatttttttattaaccatttttttggtcgggtctccaacaaaaaaaaaaaaaaaaaaaaataaa

SEQ ID NO: 276555 - DNA, 587 bp, Zea mays
gtcgagcggttcttcagcctggccccgctcccgggcggcaccgacccggccacgggcgtcgtgtccaaggacgtcgtcgtcgacccggccaccggcctctgggcgcgcctcttcctccccgccggcagccacgggaagaagctccccgtcgtcgtctactaccatggcggcgcctacgtgatcggctcggcggccgacccgatgacgcacggctacctcaacgcgctcggcgccaaggccggcgtcctcagcggtcgcgctcgagtaccgcctcgcgccggagcacccgctcccggccgcctacgaggactcatgggagggactcaagtgggtggacacccacgcctccgccgccacgggaggaggaccggccgccgagccgtggctaacccagcacggcgacttatcccgcgtgttcctggccggggccagcgctggggccaccatcgcgcacttcgtagccgtacgtgccggcgagcacaagagcggaggcctcgggatgcggatcaagggcctcctgatagtgcacccctacttcagcggctgcggagacatcggatacgaggggacgactgggaatgcgcgca

SEQ ID NO: 276556 - DNA, 534 bp, Zea mays
aaccaaccaggccgccgtgtgatcccgatcgcgtactgcgcgcacgcagtacagctcgcgcgcgcaccagacagacgccttctccctctcccgcagtacagggtacagctcgcgctcacacaagacaccatctccctgcctgcgatccgatgcgtccaacgttttcagccggggtacggtcctaccaccgctgtgcctaataattggcggctagctagctagctagctgcagctgctgcgatcctggatcggcacagccggttcttgatgtggagggagcggcggcgggcgctgctcctgctggtggccggcgcggcgctgggactgatcggtgccgcgctcgcgagcgcgccgccggaggccgcgctgaaggtcgggttctaccatgcgacgtgccccatcgcggtggacgtggtcctcgcccagatgaggctcatcctcatggaggacgccacggtcgcgccgtccctgctccggatgcactaccacgactgcttcgtgcaaggctgcgacaggtcgatcatgctccagtcg

SEQ ID NO: 276557 - DNA, 867 bp, Zea mays
tcttatgcagcatcaaaaccagctccaacaccagcacccaccacttcaaattcaacgcccccagcaccagcaccctcatttccttcaagatctcctcccccacctaaaacaacctcaaactcttctgaaggatcaactacccgagatagcacttcaccatctaagaaacacagtacatcaaccctcaagattgttggctttgttcttgccggagtagtgctgtttattatcatagtcctcctagtattattttgtctatccaagtaccaagagagacggtcgagatatgatcataacagaagtcagcaggcaagggtgcatcatagggttgaaccgcaaatcaagccacctccagtgcaacaaagcaatgatcttaaaaaaggctcaggtgaggtacttgatagaaggggccatgaactaagttcatcaacggcagctctcgcaaagaaatctcctgaaaagcgaaaggagcatgtaattaattgtgatcgaacagattcagatctgtttcctgtttctctacccccaccacctcctccacctgcattacccccaattgaaagagctattgcaaatcccattgttccaccagaaaagcgatatagtcctccaccaaagacaagtagctctacttctgccacatcattctctattgcatctcttcagcaatatacaaatagcttcagagaggagaatgtgataagagagagtagattaggaaaggtttacctagcagagcttcctgatggcaagttattggaggttttgaagattgacattgctaatgggaagaatatcaagtgtatgacttcctagaagaggttgaatgtatctttcattttcttgcattctaacattttttgtttt

SEQ ID NO: 276558 - DNA, 1438 bp, Zea mays
cagacatctaggcaggtatttgtccagtcagaggccagggatgctgttcttcatttttaatccaggtgcaattggtgtactagttgcacatgacctagagaatggggaatttgtattgcaggttccattttatcctcctcagcagatgtttgaagattttagtgctaaggtatgcgagcaaattcttttcaaattagtcggatgggagccagcagatgttcatgttttagacataaaaccgggggcaatgcatgctgaagttgcagagaagtacatctgctgcaataatcgagtaatcctctctggtgatgccgcacaccggtttcctcctgctggtggttttggaatgaacaccggtgtccaggatgtacataatttggcttggaaattgggcttactgctgaatggtgtcgcctcaccatcaatattacaaacttatgagtcagagcgccggcctgttgcaattttcaataccgaacttagcgtggagaatttcaaggcagctatgtctattcctacaacccttggccttgatccaactgttgcaaactcagtgcatcaagttataaatagaagcctcggatcaatcattccaagaaatgtgcagaaggcagttctagaaggattgttttctcttggtagggcacaagtctcagactatatcctgaatgagaaaaatcccattgggtcgttgagactagcaagattgagaagtattctcgatgaaggcaaaagtcttcagctgcagttccctgcagaggatcttggcttccactatgcagaaggtgctctagttgttgaagcgagtggtgagaagactcatgaaggagaaaaactacagcattctaagagggcatcaagagagtacatcccatctgctaaggttggttcgcggcttccccacatgctagtaagagaagtgcctgcttcgagtgagggcgcgttctcaacactggacctagtgagtggggataaactcgagtttgttctcatcattgcaccagtgaaagagtcatatgagattgcccgtgccaccctcaagatagcagatgagcttacgctatcagccagagtatgtgtaatgtggccacgaggttcgactgatgctgaagtggaagagagcagatccgagttgacaccctggacaaactacatcgatgtcgaggaagtgcctagggtgtcgggtggttcatggtgggagatgtgtcgtattagtaggaagagtgtccttttggttaggcctgatgagcacatagcatggctaacagaactggacagggtgagggatgctgagtcagaaattaggagggtcttctctcatgttctgtgcctaaatagcccccgggtgtaagaatttataaatttccttccatttaggctttgtttagatactttggtattcactttaatccacatgtatggaagcggattaggttat

SEQ ID NO: 276559 - DNA, 693 bp, Zea mays
  unsure (1)..(693): unsure at all n locations
gttcatccaatgtatatttctccactattaaattacattggatgaacagaaagcgtgtgagaagattctaacaggctttctgttcatccaatgtatatttctccactcttanattacaaaattagcttagtgtgatacaattgcttgcttattgcaggttgcaattttcaataccgaacttagcgtcgagaatttcaaggcagcgatgtctattcctacaacccttggccttgatccaactgttgcaaactcagtgcatcaagttataaatagaagcctcggatcaatcattccaagaaatgtgcagaaggcagttctagaaggattgttttctcttggtagggcacaagtctcagactatatcctgaatgagaaaaatcccattgggtcgttgagactagcaagattgagaagtattctcgatgaaggcaaaagtcttcagctgcagttccctgcagaggatcttggcttccagtaagaccctttacaaccagaatgttcctcataaacaaccttttctttatttctttcagcttagttgatgggacatgagcagacttcattaatctgaccatcttatcagaatggtgaaaattatgcaaatttttcttgtctctttcacttcttccttcagctatgcagaaggtgctctagttgttgagctagttgtgagaagactcatgaaggagaaaa

SEQ ID NO: 276560 - DNA, 499 bp, Zea mays
cggacgcgtggcgaaacaaacacactcgaaggcagcgaagcccgagccttcccttccctccaatcgatcacccgcttcgatccgctagctagctagcagcgcgatggcttccctcaccgtgtccacgaagaccgcggcggccggcggcaacaagcagcgcgagggcgcggaggtcatcacgggcgcggaggcctgcttcgcgcactccaagcagatgctccaggcgctgggcttcccgggcggcgtgatgccgctgcgggggctggaggagtgcggctgggtgcgcgagaccgggttcgtgtggatgcggcagaaggccccctacgagcactacttccgcggcacgggcacgcgggtgcgctacgacgccgaggtcaccgcgtacgtggaggacggccggatgaagcgcatgaccggggtgcgcaacaagcaggtcatgctctgggtgcccatcgtcgagatgagcctcgacggagagaagcgcgacaagatctacttc

SEQ ID NO: 276561 - DNA, 570 bp, Zea mays
ctgatatacctccggatgagtactcgtggaggaagtatgggcagaagccgatcaagggttcccctcatcccaggggctactacaagtgcagcagtgtgaggggctgtccagctacgaagcacgtggaacggtgtgtggatgattcggcgatgctcatcgtgacatacgagggcgcagcacaaccacaccggaatgccagctcagtcagcagcagcagcagcagcacaggtgtagccgtgtagtcgtagagaactcatcatcagttcatcactgcacccccgcctccccctccttgaggacgaagtggcaccaccaacatggcctctgttggtcaccaggtcgtcgagatgtctggtcctgcttgcgcccacaagatctgtagcgagaatggagtgtgggtgtacacaagactttctaatccatttgtgggggcagctggctgtcgctcaggattatttattgtggtcttgttgagaggtggaagggagaaagtaaaagtttggcgggaacgggatagccgtgtaaactacttgttcatagcacaatcgtcagcggcactgccttcgtttc

SEQ ID NO: 276562 - DNA, 806 bp, Zea mays
ttatgcgtccggtatgttgcagttgcagttgattccaatggctttgtttacacgtatgtgtttaattctctatttgttttacacaatttcaaaactaatagctaataggtgtgagtgcctctatgtatggtttacaaagactgcatatgtgcaggacctgtgttttcaggcttaatgtcttctattttctcttactgatgttttattttttgacagctggggcttcggtggatatggaaggttggggcatagagaacagaaggatgaatggcaacctcgccttgtagaagtctttcagaagcacaatgttctgcctgctaatgccattgtctcagctggttctgtgagttctgcatgcactgctggtggtggacagttgtacatgtggggaaagatgaagaatacaggcgatgattggatgtacccgaaacctgtgatggatttaagtggttggaacattcgctgcatggcttctggtaacatgcaccacattgttggtgctgatgattcttgcataagctggggtgtcgcccagaatggagagcttggttatgggcctaacgggcagaaatcatcagcaaatcccaaaaaggtggacattcttgagggcatgcatgttacaagtgtcggctgcggatttggactgtctatgattgatgtggacagagcaaatgttggtgaccgacttggtcagctggaaatttatgatggcgacaccggcgctgaagtcgacaaggtggaggtgcaagtaaccaagaaggcatctgccagcaccaactcacgtgccaacaagcgcaagaaaacca

SEQ ID NO: 276563 - DNA, 559 bp, Zea mays
gtctaatccttatctttcggtcataacaagcatggacagttagggacgggttccttaaggaatgagattgagtcatcgccagtgtcctgtatcgttgcggaagcaaccaacgctgcctgtggggctgattttactgcctggttgtcatctgtggaaggctcttctatacttacagcaggtcttccccaatatgggcaactcgggcatggaactgataatgagtacaatgctaaagaatcgtctgtgaagctgacctatgaaccccagccccgtccaagagcaatagctgcattttctgggaaaactgttgtcaaagttgcatgcggaactaaccatacagttgcagttgattccaatggctttgtttacacctggggtttcggtggatatggaaggttggggcatagagaacagaaggatgaatggcaacctcgccttgttgaagtcttccagaagcacaatgttctgcctcctaatgccattgtctcagctggttctgtgagttctgcatgcactgctggtggtggacagttgtacatgtggggtaagatgaagaata

SEQ ID NO: 276564 - DNA, 349 bp, Zea mays
  unsure (1)..(349): unsure at all n locations
cccgctccagtcgccatggcggaagccctcgtgggcctccgcgtcgctgccctcgccggcccgcgagcctaggggccaccgcagacggcttctccccgctgcgcgcctcgctgcgttccggcgcgaccggctgagcactgcccgcgcggccggtcgcagggccacccgaggtggacggaggacgattccatgagtatcgacaacttgcatcgtttcttcgacctcaacgtcgggaagtgggacggctcagtctaccaattcgacgcgcacgggagggttcttcaggagattagcacgcggctgtccgtgagcacgtacggggaggacaacctnatcagccttcttcaat

SEQ ID NO: 276565 - DNA, 612 bp, Zea mays
gactagttctagaccgccagggcgtcggagcgagctcattctcaactcgactcaagagctctgcctcctccatcttcccttctctggcctccggagccacgctgatcagagatggaggcgaatccgaagaacaccttcacgatcaaagtggaggacgggaagcccgggaaggacggccggctggcggtcggaccggtgttccggagcgttctggccaaggatgggttcccgcagcttgagcctgacatgaagacatcatgggacgtgttcagggtagcagcagtcaagtatgccgacaaccggatgctcggatggcgtccgttcaaagatggagtgccagggccctacttgtggaaatcatacaaggagatctacgacgaggtgctgcaagcaggctctgcgttgcagaagctgggagtgcagccaggttcccgggtggggatctacggagcgaactgtcctcagtggatagtggcaatgcaggcttgcaatggctatagtctagtctgtgtcccactgtacgatactttaggtgcgggagctgtcgactacatcatcgatcatgccgagatcgatgttgtcttcatacaggacaagaaaataaaagagata

SEQ ID NO: 276566 - DNA, 309 bp, Zea mays
gcgtcggatcggagcgagctcattctcaactcgactcaagagctctgcctcctccatcttcccttctctttctggacgttgagggcctccggggccacgctgagagatggaggcgaatccgaagaacaccttcacgatcaaagtggaggacgggaagcccgggaaggacggccggctggcggtcggaccggtgttccggagcgttctggccaaggatgggttcccgcagcttgagcctgacatgaagacatcatgggacgtgttcagggtagcagcagtcaagtatgccgacaaccggatgctcggatg

SEQ ID NO: 276567 - DNA, 519 bp, Zea mays
acgcataccggacatgtaagccatgcctcgaaagtcatggatctgatgcttcaggagggccgggatcccgacgttggcacctacgatactgctatcaactgcctcagtaaaaatggagagcttgatgaggccaagggaattgtaaatcagatggtggatggggttgtttgcctgacaccacaacgttcaacactctcattgttgctctgtgctcacagaatcgacttgaggaagcattggaccttgcacgtgagctaactgtgaagggactttctccagatgtctatactttcaatattttgataaatgccctttgcaaggtaggagatcctcatcttggcattcgattgtttgaggagatgaagagcagtggatgcgctcctgatgaagttacatacaacattttgattgatcatctttgctcaatggggaagcttgtaaatgctttggatttattgaaggagatggaatccaatggttgccctcggagtacagtgacatataacacaataattgatg

SEQ ID NO: 276568 - DNA, 568 bp, Zea mays
ggtgacggtggccgcggcgctgccgcccgtgtaccagggccacggcgacgtggacgtgtggtcgcccgtgctctccggccccggcgtccccttcgcgccctacctcgccgacgcgctccgccaggactgccaggcgggctacctcgtcctccaggtcaaggtcgacggccgcgtgcggtggaaggtcggcagctggatctccggccactaccacctcttcgtcacctgccccgcgttcctcgtcaccgccggcggcaacggcgcccccggcgcttccgggttcaggttccagaccaccacgtactgccacgtcgaggtttaattaggagcgagaggaagcagagaccatggctacctctctagctgctgctcctgccgttgcctggtgtggtaataactctctctatctctctctctctctctgtccgctgctggcgttactactgcagtagtgcagtgatgcgggatgtaaaggaggggtaaaaaaaattcctttcgttctagccccttgtttttttgcatcttctccttcacctttccatatactactagtatgctctgtcgactg

SEQ ID NO: 276569 - DNA, 1358 bp, Zea mays
atctgcttgcagtcaagaaggatcttgaaccagaatattcatgcagagttgttcaacgcatccatgaagaggtaccagaagaagtccttgctttggacaaaagagttgagtgtaactccaggattgccgttgcactctcattaatggacgagtgcttccttccgattgttgaccagagaactggcatcaacttgatacgcaatgttgtgtatagctgtggatcaaattttgcccggttggatttccgtggattctatatatttattttagaacgtggagatgaaataatagctgcagcatctgtccgaatacatggaaccaagttagctgagatgccgttcattggtacccggaatatgtataggcgacaagggatgtgccgccgacttgtagatggaatcgaaatgatcctcagctctctcaatgttgagaagttgatcattcctgctatcacagaacttgtggacacctggacatcgaaatttggatttagtccacttgaagattctgagaagcaagaagtgacactccgtcaggatgttagtttttcctggtacaggtctcctccaaaagccattgctaaaggccttgcctaatgaagaacaatgttcccaaggagacaaaactgagaaagcatcgatgtagtcaatgaagattctccttgctctgatgcaagtgctgatcccctaggtttgggggtcaaagagcatgaggacagcagcaaagacgctgatggcacttgtaacggtgacgtttcacaggaatgtccccattcttgatgggaagatttggttgcagttttctaggccccaagctttacatggactaagcctccatttgtttttgcacctcgagtttttgatccagcagttagcatgacatccatccgttggtgagaaagaggcttgccgggttttttttttggcatattatattagttgatggggcaccccctttagttttactcagaaattgatgattgacgcgtcggcctgggaaaagaatgaacccgtgcagttctgaaaaagcgtttactccatccagccagctaacttaatgtgcagctgaaaagtcggcatgtagaagaatgtggaggataacgtcccttcttttgtttctcgtcgttaacttgagactccgagggcgaatgcagccattgaatcgtcgtaaatgttacatcagttgttgttttgttaataggtttttttatgtcttcgctagcgcattcctggaatctaatctcattcctgtaagataattcacatgtctgtaagatcagctaatgtatgcgcaaagcttgtattccaaaaaaaaaaaaaaaaaaaaaaaaaaaaaaaaaaaaaaaaaaaaaaaaaaaa

SEQ ID NO: 276570 - DNA, 843 bp, Zea mays
gtgagatgtatacccaaactatatagatctaaatactaggttgatgaaacagataagaaagaatcataccataggctctaaaaaccccttgaacaaaccaaagtttgtcccaatgtgcaggcaaaagatattctgaacaagcaaccatgccagggaccggcattccttgaatcaattcatttctaattttcaaacatgatgacttgattttgcatatttctagtactggtgatcttgtttagcgcgaaactttagtatagtgctgtacccgtttctcacttcaattactttacatgattgttgtaaccattgtatattccaatttgaaggaaaagaacatccttactggaatgcctagtattttgctgtacaggtaattgtccgttggtgctgaataataatttatggtatctgcagagtgcagagtcatggaggcaaacctccctttatctttcttaagttactaagaagttttgaatgcttcctctcgtaaggtttatttcatgttttcatgaatatagttttcatagttagtcatgcttgtgcgtgaactttctgtagcttgctaatacacatctgccaagtcatgttaagtacacgaactttctttagctgttttgtgtctgtcttgttatatcattggatgaacagttaacataaacagacaggctcatcactacttttaggtaggttcctattcttaaaatgctgggcccttatactattttgttttttcatatcttaccctgaaacagaatacatggaaccaagttagctgagatgccgttcattggtacccggaatatgtataggcgacaagggatgtgccgccgacttgttgat

SEQ ID NO: 276571 - DNA, 279 bp, Zea mays
atgatcctcagctctctcaatattgagaagctgatcattcctgctatcacagaacttgtggacacctggacatctagatttggacttagcccactcgacgattctgagaagcaagaagtgaaatccgttagcatgttagtttttcctggtacaggtcttctccaaaagccattgctgaaggcctcaccatcggaagatcaatgctcccaaggagctggtgctgtctcttctgtagacaaaactgaaaaatcatctgatgtagtcaatgaagattcgctt

SEQ ID NO: 276572 - DNA, 330 bp, Zea mays
agcagtctcgtacaacgaactatcctgttagccagccctaaacccttctgtcccgatggcgtcgtcgtcgtcgccgccgccgccgaagctgccgattcccggccgccgcaacatactcatcactagcgcacttccgtacgtcaataatgtcccgcacctagggaacatcatcggctgtgtgctcagcgcagacgtgttcgcgcggtactgccggctccggggttacaacgctatctacatatgcgggacggacgagtatggcaccgccaccgagacgaaggccatggaggagaagtgcacgcccaaggagatctgcgataagtaccatgc

SEQ ID NO: 276573 - DNA, 667 bp, Zea mays
ggctggtggatccacccatcaagcacctgctgcatgcctggcatgacgagctcgaaaggcttgcgattgagcttgcaaaaactgccatcaaaacctttgctgaagtcataagcactatcgtgcatcttcaggaagaggaagtggacctaaggaggcggtgtgatgaaactcgtagggatctgaaccgaaagaaggcacagtttgaggactggcatcaaaagtacttggagagacagacagcagaaactcaaaacatagatcctgtcgaggataggaaacgcaccatcgaggaactagagattcggctgagagaggaggaggggcaccatcttaggcatgccaggcaggtgcgggagaaatcacttgcaaacctccggacacacctgccagaacttttcaggaacatgtccgattttgcttacttttgcaaagacatgtacaacaatcttagaaaaactgctgcgctgtccaaagatgaagtctaaggctgatgatatttgtgcgtgtgtatgtatactcgacaagcagtagaatgtttgctggtaacttgtcctgatgccgtctagaatacataatagtcggcattaattatgtttgtaaattggaatggacattccggactccccattgtttatttccatgctatgtactgcattggtgcgtggat

SEQ ID NO: 276574 - DNA, 855 bp, Zea mays
cccacgcgtccggtccttatcatgagtctgttttcaaataaacttatgagctatatgtgagactgacaatattacctcatgaataaatttccttactgaaacaggctctaaaaacagaagttactagagctcgcatccaactattggaaccattgattaagggatcaggtggagtggagtacctgcagaagtcttttgctggtcgctgtggttccccttctgatgcgttagcttctctcccttcaactgcccggtggattttctctttgaaagatgtcgtggaagaacaatggaatgaacatgtcagctcgttatcaattctgccagaagcagaccatgttcagacacttgttgccaccctccgaactggccatgcagttgcaggtgtacaatctgtgatacctgcagcagacaatacaggattaccagagtgtaggggagaaatacttggcaagctaataaggattgggctattacagctcatcagcagcatggagggtgtagaaagggaatcggttcctgagacctttatgttgaattggttgaggctgcggtctgttcagagtaaggttcaacaagtgattgtgatagcgacaagcatgcttgttttgcatcaggtgttagcgagtgagaacccaaagatcacttcttctgagctggagaatgccacttcggaactgttcaacgtcctcacaaggctgctagacaactttccagatgttggcactgagaaaatcattgaggccatgatgtactcgtcaacctcaaggagcttgtcagatcatgaaaggatgaacgccagaaaagagatattgactagggtcttccttagaagcctccagaccgatgacaccg

SEQ ID NO: 276575 - DNA, 724 bp, Zea mays
tcggagaaggtgaagcctcatcctctggtgatcactctcctgactcatgtggaggacgggatccccaggtgggagatcgtgcccaccaagcaggacgtcatcgactccgccttcaaggaccccgtcaagcgtgaaaagatcaggaggaaccagctgatctaccaggacaagccgcggctcaagactgcgttggagatgctcaggaccagcatgtacatagaagacagcttgtcacaggtgacgctgccgttcttcgtcctgcacggcgaggccgacacggtgacggacccggaggtgagccgcgcgctgtacgagcgttcggccagcgccgacaagaccatcaagctgtacccggggatgtggcacggcctcaccgccggggagcccgacgagaacgtggaggccatcttctccgacatcgtgtcctggctcaaccaccgcagccggagctgggccgtggaggaacgccatatgaccaggaagctggcgccagctccggccaagtccatccgaaggccacggcaccgtggacggcaaagtgcacacacaacaagggcgccctcagcggcgccagggcttcctatgcgggcttgccggccggacgcatcaccacgcggagatgtgaaagatagaatcgccgactcggtcctggatcagatgggcgcctgctttcttcaaccatggcaaattaaaggaatgaagacctgcggtttataatatagag

SEQ ID NO: 276576 - DNA, 616 bp, Zea mays
tgctgctggttcctctcttcgcgacgacaaggtgattgcttatctgcttgcaggtttgacagccgagtatgacccctttgttacttcaatgacaaccaagggcgactccatctcgcttgatgatgtatatgcctatctcatggcgtttgaggcgaggcaaattaaacatcagatggaccatcagcttgcgttcggatcgtctgccaactacgcaggccgtggtggtcgtggtgaccgcggcagggggcgtggtgcccgtggccgctggcgcggccgtgctggaccttcgtcccgcatcagcgacaatcgtggccgtggctcaaacgcacgaccgccctgccagatctgtggcaaggagggtcataccgccatccgttgctggcacaggaatgacgacagctacaacactgatcctcccatggtggcaatggcggccacctcctcgaccaaaattgatccaaattggtacgtcgacacgggagcaacagatcacatcactagtgatctcgatcgactgatgcttcgtgaacgctatcatggtggtgagcaagtccaagtcggcaatggtgcaggaccgtcagacgaagagaaagctcctggaaggacaatctaagaa

SEQ ID NO: 276577 - DNA, 514 bp, Zea mays
cccacgcgtccgcccacgcgtccgcgcacagccactgcccaaagccgcctctctgcctcctcttgcgcgtccccagccaccgcagttcgccggtttgtggccgcctccgccgcagttcgccggtctgtggccgcctccctcctctgcagttcgccgatctgtggccgccgccgccgtcacctgtcagtcgtcgattggagcagccgccggcgcgacgtgaggtatgtgaccgtcagcctgccagtcgccggtgtgcagtgaggtctgtggccatcagcctgccagccgccgattggagccgccaccgcgaggtctgtggccgtcgttcgttgattggagccgccgcccgacgagccgtgggctcgtggccgatgccgccgtcgatttgtggtcatcagtcgctgattggagttgtcgcccgatgattggtgggtttgtagccgcccccgccaatagactgtgggtttgtagccgttgttgtcgatccgtgtcgcagtgccacccatcgatccac

SEQ ID NO: 276578 - DNA, 510 bp, Zea mays
caagtggaaaaccctcaagaaccggaggctacaaaactggggtactctttgtcttcttcgcacttggtggttttggcttggagattgctttagcttcctcctttccttgacacggtgtcggattgagcaggaggagtggtgcatgagaaggggctcctgccgcaggccttgccttcatggctaacaaggataaccgacagaatctgccagtggactggtttatttccttctgcaatcaatcacgtgctgataaatgagtatcatccctacccaaagggatcatgccacaccaagatggtcctgcctactaccctgtcgttgctatcatatctcttgcttcacctgtcgtgattaatttcacaccccatcaaaagcttagagagcagcaggacactgatccacaggacttactggcccatgagttgccttcgccagctgagacagagaacaacggctctggatcacaagaacggtgagccacaaatgaatctgatccttcatcttcatcac

SEQ ID NO: 276579 - DNA, 705 bp, Zea mays
cgatttcgacaggcatcggtttagaagtcctagtccgatgtcttctccaaaccctagagctaatctccctggcaatgggttcagtccttggagcggactacaagagagattaggttttcctcaacgagccagcatggactggcaaggagcacccccaagtcctagctcccatgttgtgaagaagattcttcgtctggaggttccggttgattcttatccgaatttcaattttgtggggcgcattttaggacctagaggtaattctctaaagcgtgtagaagcatccactgggtgtcgtgtttccattagaggaaacggttccatcaaagatccagcgatggaggacaaactacggggaaaaccgggctatgagcacctgagtgatccgctgcatatcttgatagaggccgagttccctgccagtatcatcgatgcaaggctgagacaagcacaggagattatagaagaattgcttaaaccagtggacgagtcccaagatttctacaagaggcaacagctcagggagctggcgctgctgaactcaaccctgagagaggacagccctcaccctgggagcgtttctccattcagcaacggcggtatgaaacgcgcgaaaacaggccagtagagaaacacccgtgctctcctacctggccctgtccaggtgtgttacgcggtcgtcgtcgccagagacgccatgcctgc

SEQ ID NO: 276580 - DNA, 622 bp, Zea mays
aggcctgagcccccaatatcaaaggaaatgatagcattgaaagactcggggatatctaacagcaatacctgatcactacttcgcaattttgtggggcgcattttaggacctagaggtaattctctaaagcgagtagaagcatccactgggtgtcgtgttttcattagaggaaagggctccatcaaagattcagggaaggaggacaaactacggggaaaaccgggctatgagcacctgagtgatccgctgcatatcttgatagaggccgagttccctgccagtatcatcgatgcaaggctgagacaagcacaggagattatagaagaattgcttaaaccagtggacgagtcccaagatctctacaaaaggcagcagctcagggagctggcaatgctgaactcaaccctgagagaggacagccctcatcctgggggtgtctctccattcagcaacggtggcatgaggcgtgcgaaaacaggacagtagagaaaacaactatgctcccatatctggccccgtcgtcatgtgaacgccatagagatgccgcatgcgtgaaggaaggccatgcgccttcgctggcggagtccggtatcttctgctagctttcacctccggtcagggg

SEQ ID NO: 276581 - DNA, 294 bp, Zea mays
  unsure (1)..(294): unsure at all n locations
cctccctcatagcagtcggctgccgtgatctggtgacctcctcacgatgcctcccgggaagagatccacacagcgctcagagaattccgaagaagaccctcgtactgaatacgagaaaatgagggctgtgaatatgatgaagaacaatcaattgtttcaacggctaggccttggacaattaaaaacaatgatcaccgcaacaactacaaacaacaatcaaggcggtcctcaggaatcagngttcttatatgatggtgagaacgttgaggattctggtgaagaggatgttggcat

SEQ ID NO: 276582 - DNA, 539 bp, Zea mays
gctatagcacacaagctgatgtatggagcataggtgtaattgcatatatacttctttggggcaatgggccattttgggcacgcaccgaatctggcgtattccgttcgggtctcaaagccgatcccagttacaatgaggcaccatggccttctctgactccggaagcaatggattttgtcaagcgattgctgtgcaaggatccgcgtagaaggattactgcagctcaggctttaagtcatccatggatcagaaattataatgacattaagctgccgttggacattcttatattccgacttatcaaagcttatattcgctcctcatctttacggaaagctgctctgagggctctgtcaaagaaccttaaccgtagacgagcttttctacctgaaatcacaagggttctctattggaaccagacaggaatggatgcatcactcttgacaatatcagaatggccttaacgagagaagctactgatgcaatgaaagaatcgcgagttcaagatattcttgtttcgttgagcgcccttcaataca

SEQ ID NO: 276583 - DNA, 904 bp, Zea mays
acgcccacgcgttcgcgtcgaccggattcggttcggaccggggctgcccacagcccacactcgtgcgtccgcccgtcgaatggcggctcccaaaccctaagccacaggtcccttcccctgcctcagcttcgaacgccctcgcctcgccgccggtctttgtgtactgccgctgtgtccgtcggcgcggatcaagggtccgctccgctgcaccccgcggggagaaaggggcgggcctcggcgtcctccgctcgtcgcccgagtgtctgagtactatcaggtgcaagtccagccgaactgattgcatgacatatgaaatagcgagcgtcgaatgaccttctctatggatatggatttgaacgcatcaccggtgcctgacgatgatgagcagcagccttacaatgaaccagtggaggctgagtatgctcaggaggaacatgttgaatctgctgtcgcaacattgcgccgggaacgtgaagaaagacgcaagagactaaagagagagcagcaggatgatgggtcaaggctacattcccagcagattagggttgattatgctcctcaacccaaaaggcatagtcgcatcaaagaggcacctcagggctggttggactgtcctgcatttggggagccaatagataaaatcataccatctaaagttcctctcgatgaaacattcaatgagtcagtgcctcctgggaagcgatactcctcaaagcaactagttaacaaacaaagaaaagctggtcgtgaaataggtctggtgattgatttgacaaataccaccaggtattattcaccagctgaatggacgaagcaaggtactaagtatgcgaagattgcatgcaaggggagagatgcggtacctgacaatgaatctgttaataagtttgtctatgaggcaatg

SEQ ID NO: 276584 - DNA, 997 bp, Zea mays
gaaaaggctgcagacagaggtatgcatggtccatctagtcggagtgctgcctgcccaccgaaagcaaggctgctccagcaacgaagagctcatgctgcaccaacattcaccatcaagcggttggcagcagaggcagcatggatgcctgctataggcaatgtttctactgtgctgtgttttggcatctgcctggttctaaatctaacacgcgctggtggctcgaaccgtgctattttcttcctggcgccgatccttctgcttctgaaccaggattcagatatcttcgcagggtttggtgataggcagcgctatttcccagtaacagtttctatttctggctatttattgttgacagcgttgtataggatatgggaggagacttggcctggcaatggaggatgggctcttgatatcgggggcccgggctggctgtttgctgtgaagaactttgctcttcttgtgctcactttgccgaatcacatactcttcaaccgcttcatgtgggattatgtcagacagacagatgccaagctactgctgacgctacctctcaacttgccttcgattataatgacagacatacttactattcgggtgttaggattgctaggagctatgtactctcttgcccagtacatgatatcaaggcgcataagaattgctgggatgagatacccttgaaataggtcatgtaactttctgaggctggcactatacatcaatttctttcaaagctcaggaacagatacttcattgcctgatcctctcgcagcaaaattgtgctatgtagcagagaaaaacaagtgtcgaacaactttgctttttttgtactgaatgattgcatactgagtgtaggctaaaggtgttgtcgcatatatagatgtattttaacagcccagatgatgccatccccctgggtcgtttatgttgaacttttgacggcgcaaagttttgcattcccctgagcagaaaactttgatgtaactgttgttttccc

SEQ ID NO: 276585 - DNA, 1013 bp, Zea mays
  unsure (1)..(1013): unsure at all n locations
tcggcgaccagttgggcgcggtgttccttcaatcggtatggctctgccaggatttgtgtctcaacaacaacttggtctcaataataattctgagatgacctggctaccaatattgactggtgcctctggagctctaggagcaccttatggttccccttatatagccatggatggaagttattactctcgacaatctgaacaagcatcttcatcagtttctattagagaacctagtgcaaataatgcttcttctctgttgaagtcccaagaaataacagaggttgcaagtgatgaaataactcaacgccaaaataagcctcgtcgatactcggagatgaactttggccaatgaacatagctgtgaccagtgaggattcattggagcttaggacccaagtaagacctgtgcaagagacccaagccttactaagtccttgcaacatctcactgtctgatgtctagcactttcggctatcttgtaactcccaaaatgccaggcttgacagttgaaggtgttgcaaccatatcagtatgatcatttgctgtgattattctgaagggctagtgttgttacactatgaggtgagatttacatggtactccacttcaccgcaatatcagacgtcgtatcagcatactgcatatgggggaggtcttgatggaaatcgtgagaggtctccgtgctgtaaagctcgtgttccatcgtacatcagtctgtgtacttttgggtgtgcgcttgctttgcttctgtgcctctgccttcagctcggtggcactcggctgacatgcatccgttatatttacttgttatatctggtccgatgtattcaggatggttagtagagcatgatttccggtggtgaatcttgctccccccgtgttggcaaatcagggccttgcacgtaaaagaaccggtgcatccgagacgccagtgcacacagctcatggcgctgccgcaaaagccttgtctatttgcagagtnatgtgtgtaccgtgggcattncaaaataatt

SEQ ID NO: 276586 - DNA, 707 bp, Zea mays
acgacgagcacgaaacccagacacacagattcaccaagaggttgacaagcaaaaggaagtcccaacaccaaaagggagtgggcaagggggtctatttaacgtaggctcctttttccggtggaactcgaggaaggggagctccagaaatctcgatgccagccctcctgcaactccgggttctcagagcgtgacagagcttgatccaaagctccctcaaactccacgtcccaacctgaaggagctaggcgagaagcggacgtcgataaagatcgtagtggacgaagaagcaagcccggcagacaaggtgggaggtgcggagaactcaggagaagatgtggcgaaggtgatagagaaaaatgcaggtgaaccgggcaggtcactgacaagcacattgagcaggaagatttgcagaaggagagcagatgataggctatcagatatccccgagcagattgaagctcgtggatctaagccggtgagtgaagggcctattcttgttagaggtgagccaatgataacagtggaccatccgacgacggaacatagcgatggaggtggcgctgagcaagatgcggtgggagcaaaggttgctactcagacctcataaggattgctacttaaggtcagcagttcttgttcttgtaatctttgctggtcgatttggttcgggcatgggaccttgctttctgtttatagatcagtgtcca

SEQ ID NO: 276587 - DNA, 1119 bp, Zea mays
gtcggaagagagaatcctaccaaacctagctaccaactcgatcgtcgtcatcacgctcgaccgcacaactgcaccaaggggggaggagacctaaaaactactacatcttttatagctacatctctagctaaagatcgagagggtaaataaggacgagcgggcgcgagctagaagagcagctgcaggtactaccatcatcgtcgtcgtcgtcgccaggatgaccgtcgtcgacgccgtcgtctcctccaccgatgccggcgcccctgctgccgccgccaccgcggtaccggcggggaacgggcagaccgtgtgcgtgaccggcgcggccgggtacatcgcctcgtggttggtgaagctgctgctcgagaagggatacactgtgaagggcaccgtcaggaacccagatgacccgaagaacgcgcacctcaaggcgctggacggcgccgccgagcggctgatcctctgcaaggccgatctgctggactacgacgccatctgccgcgccgtgcagggctgccagggcgtcttccacaccgcctcccccgtcaccgacgacccggagcaaatggtggagccggcagtgcgcggcaccgagtacgtgatcaacgcggcggcggtaggccggcacggtgcggcgggtggtgttcacgtcgtccatcggcgccgtgaccatggaccccaagcgcgggcccgacgtcgtggtcgacgagtcgtgctggagcgacctcgagttctgcgagaaaaccaggaactggtactgctacggcaaggcggtggcggacaggcggcgtgggagacggcccggcggcggggcgtggacctggtggtggtgaaccccgtgctggtggtgggccccctgctgcaggcgacggtgaacgccagcatcgcgcacatcctcaagtacctggacggctcggcccgcaccttcgccaacgccgtgcaggcgtacgtggacgtgcgcgacgtggccgacgcgcacctccgcgtcttcgagagcccccgcgcgttcggccgccacctctgcgccgagcgcgttctccaccgcgaggaccgtcctccgcatccttgccaagctctttcgcgagttccccgttccagccaggtgctccgacgaggtga

SEQ ID NO: 276588 - DNA, 980 bp, Zea mays
gcgtttgatgcagccaaccgacggtgcctgatcgccgatctgattgacttccaagcacacttcgaccatcgtatgaatctcagcccgaaggtgggaaaaacccatcggcgaatcagcaaaacccagaggctgatgtatatagtcctcctgctcttattgagccaaagttcggtccactactctctaaattagcacaacaggttggttcaagctggatgccaacagcaatgctcagaaatatatagtgaagctcgttcttcagctttagaatcaagtctgaagaacttgggcgttgaaaaacttagcaaagatgaagtgcagaaaatgccgtgggaaattttggagtctaaaatagggaattggattcatttcatgcgaattgctgttaaacttctttttgctggggagcgccaactttgcgaccaagtttttgagtgcagtcaatcgttgagggataagtgctttgctgcaataacaaagaacagtttggctacactactcagttttggagaggctattgctatgagtaaacgatcaccagagaaactctttgttctgttagacatgtacgagataatgtgcgagcttcaaacagagattgataccattttcgttggagaatcaggttcgcaaatgcgcgactctgcactgagtttaacaaaatgcttagcacaaacagcacaaaagactttcagtgattttgaagaagctgttgaaaaggatgcaacaaagaatattcatactgatggaacagttcatcctttaacaagctatgtgatcaactatgttaagtttttgtttgactaccagtcaactctaaagcagcttttccaggagttcaaggaagatgggacaggttctgagctggcagctgtaacaatgaaaatcatgcaagccttacaaaataatttagaagcaaaagcaaaacaatacaaggatcctgcattgatgcacatatttttgatgaataacattcacta

SEQ ID NO: 276589 - DNA, 625 bp, Zea mays
  unsure (1)..(625): unsure at all n locations
cttcggggttatctgtcagcctctcacacagttattgaagaaaggtgtgcacttcagttgnacgtctgaacatgacaccggcttttccaccctcaagcaagctcttacgtcggctcctgtgttatcattaccagattttgcttatcccttcacagtggaaacggacgccagtgcagtcggtattggagctgtattgatgcagcatgggcacccagttgcattcctcagcaaggctttgggccctaagacccgtggtctctccacttatgaaaaggaatacatggcgattattgtcgcagtccagcagtggcgttcctacctccaacatggcgaattcacaatcctcacggaccacaaaagccttactcagcttaacgagcagcgcctgcacacgccctggcaacacaaagtcttcaccaaacttttgggcttgaattaccgcatccagtacagaagtggctctgacaaccgtgctgctgacgccctgtcacggcatagttttgcagaatgtcaagccgtctccgttattgttcctcaatggctggttgccgtccaagatagttatcaccaagataaacaagcactttccctcatctctaaattggctgttgaccagcggctgtac

SEQ ID NO: 276590 - DNA, 654 bp, Zea mays
cagataagaggtttcgcatggcctgcagttcttgttggcttagttgctcaaagtgctagtctgggcatgaaggactcttggggtcctttgaaggcattggcagctgctagtgttataaatggcgttggcgatatatttctttgctctgtttgtgactatggaattgctggtgctgcctgggcaactatggtttcacaggttgttgcagctttcatgatgatgcaaaatctaagcaataagggttttcgagctttctcatttacgattccatcagttagagagctattgcagatatttgaaattgcagctcctgtttttgtgacaatgacgtccaaggtggcattttatgcattgctcacatattctgcgacttctatgggagcaataacgcttgcagcccatcaggttatgatcaatgtcttatgcatgtgtactgtttggggcgaacctctgtctcaaactgcacagtcattcatgcctgagctggtatatggtgctaatcggaatctgaccaaggcaaggatgctattgaagtcacttgtgatcattggagcgataactgggttgaccttgggggtagtagggacacttgttccatggcttttccccagtgtctttaccaatgaccaaagggtcatccagcagatgcaccga

SEQ ID NO: 276591 - DNA, 1960 bp, Zea mays
gccttctctctctctctaacccactgccagccacctctgcgaccgtcgcgaccactcgccaagtaaattttcttccgcccacctgactacgcctcgacctcggcctcggcgccgcctccgtccaccggacgcggcagccatggcgccagcggtgaggctcaagcgctccgccacgcagactatcacactgccgccgcccgacgcgcggctggctgtgcgcgatgtcatgcggtccacgatcccgtcgcggcccgccgaggctccggcgtccacggagaggccggcgcccgccgcggcgctgcaggggttcctgtgcctggaggaggtggacgggaggcgctggagctacgtggtggacggcggggccgcgaaggggaggagcaggggcggggccgtccccgctggcgccgccgtcagggccgtgccgctgcagtcgccgcttccgcctgccgaggaaataatggcattcataagatcatatgtggtgcctgaagggtttccagacagtgttactccttcatatgtaccttacatgacctggagggctctgaagcatttctttggtggagcgatgggggtgtttacgacaagaaccttgctgagttctgttggagtctctcaaagcaaggtaacaccaggtgccattgctatcaactggatcctcaaggatggtgctgggcgtgtcgggaaaatgctttttgcacgtcaaggaaagaagtttgactatgacctaaagcagttgcggttttctagtgatctcttgttggaaataggagctgggatagaattaactactgctgcattccctcagtttttcttgcctatggcttgcgtagccaatgttgtaaagaacgtcgctgctgttacgtcaacttcaactcgcactccaatctataaggcctatgctagaggagaaaatattggagatgtcactgctaaaggcgaatctgttgggaacattgcagatctgctcggtactggtttgagtatctttatctcaaaaaggaatccctcactggtgacttcgtttgccttcctttcctgtggatatctcctgagttcatatcaagaggtgaggtctgttgtgctgaataccctaaacagggcaaggtttaccgtcgcagtggattccttcattaaaactggtcacattccctccttgaaggaaggaaactcacaggagacgatatttaatccaccttggcggcatgagccagtcgcaataggttcaaggtttggagaagcatttcaagagccagcttcatttcttgccatacgacctctgtttgaggacgagagatacatggtaacatataacccaacaaaggataaagtatatgctttgctcaaggaccaggcaaaatcagacgacattattaaagctgctttccatgctcatgtgctattgcattttattaatgcatcacatgctcggagactgaagcagaagcagaagcaggcaaaccctgaccgatcagagtatctgtactctagaaacatggatttcctggcacacatcgctgaatcttgcaaaatagtttcctcatcatatggaacattcaagaagaaagctagggaacagggttggataatgtcagaatctctgctcaaccctggcaaggctcgattatgtgcagcaaaaccacaatgaatgtactgtttcagtttagtatcgatgagatgataccaatctcatgtttgtaagaccaacttttctaaccagacgggatggctcagttcttaggagctgaactaacatatgttggtgcccagcactaggcgtgaacctttgatctgaagcttgccaaattctaggaagagcaagagttttactagttgtaagttccatctctttcatgtctaggcatcatagtttgtgcttgacttaaaattttatatttttgaataaatattttgaataagacgagtgatcaaagttttcgaaaaaaaaaaaaaagaa

SEQ ID NO: 276592 - DNA, 658 bp, Zea mays
cgattatgtgcagcaaaaccacaatgaatgtactgtttcagtttagtatcgatgagatgataccaatctcatgtttgtaagaccaacttttctaacgagacgggatgctaagttcttaggagctgaactaacatatgttggtgcctagcactaggcgtgaaccttcgatctgaagcttgccaaattccaggaagaggaagagttttacgatttgaagaatgcctgaacatgtaataaaacatgcagtggataagtggtgcgctggttcgcgactcgcgagtaaagggctcaacgagggtgacttcaaacttctaactgcagagactagagcttgtatttatgtttgctgcggtatcagatttggtgtagccattcctgatgtaacctgtttcccttccgtgttggtcgagctgcggggcttcttgtttggaagtctttggagttgctacgttttttacccgccacttggccgacttgtggcacttgagtgttcatctccttggcttctagaccccgttagagcatcaccagcagctgcgggagatgctcttagcaagttccagtttatcagtgaagagtcaatcactgatgtcgtccatagctccttcaaaccttgtacatacatgatcggtaataactgcaagccttctttctgttg

SEQ ID NO: 276593 - DNA, 777 bp, Zea mays
caggacaccctgcattagatgaggatgggaggaatgctttgaggcggttgttaaccgcatatgcaaggcataatccatcagttgggtactgccaggccatgaacttttttgctgggctatttttgttattcatgcctgaagaaaatgcattttgggccttagtaggggttattgatgattattttgatggatactacactgaagaaatgattgaatctcaggttgaccaactcgtccttgaggaggttgtacgagaaaggttccctaaattggccaaacatatggaattcttgggagttcaagtgggatggataactggaccatggtttctttcaattttcatcaatatgcttccatgggaaagtgtacttcgcatttgggatgtcatcctttttgaaggaaatcgcataatgttgttcaggacgacacttgctttgctggatttatatgggcctgcactagtgaccacaaaagatgccggagatgcaattacactactgcagtctcttgctggatctacatttgacagcagccagcttgtattgacagcttgtatgggctttcaatcagttagagaaatgggattgcaagagttaaggaaaaagtacaggcctgaacttttaactgcaatggaggaaagatcgaaagaccgtggctcctggaaagataagaaggggttagcaaccaaactttatagctttaaacatgatccttcatacgtgtgctcaccagttaagtccaaggaagggctagatggttcaaaggtgaatggagaga

SEQ ID NO: 276594 - DNA, 894 bp, Zea mays
attatggacatgaatgcacagtacgggggattcgccgcagcaatagagtccccgaatccgcccgcgcggccggttgtgccgaccatcgcgaagatgcccaccctgggggctgtgtatgagcgaggattgatcggcatatatcatgactggtgtgaggctttctctacttatccaaggacgtatgatcttatccacgctagcggtcttttcaccttgtataaaaccaagtgcagcatggaagatgttctcctggagatggaccgcatcttgaggcccgaagccgccgtcataatacgggacgacgtagacgtcctgaccaaggtgaacagcctcgctctgggtatgaggtgggacacgaagatggttgatcacgaggatggccccctcgtgcgcgagaagatcttgtatgccgtgaagcaatactgggttggtggtaagcagacggctgtagcttgaagcaagcacgtttcatgaggctctaacatgaggaattctgcaaccaaaccttacccgacaaacaaggattagcttaaatgatcaacccttgtagggcttgttcggttacaacaattcagaagcggattggaggggattaaatccttttctagttaaaaatgactagaagaggatttaaacctcaccaatccccttatggattggtgtaaccgaatatgcccgtagggggtagcactgaagcagccaggataccgtgctcgctggtgatcactgcaaccacataatcttctttggtcgtgtactcttttcaaaaagcttgtatctttggaaatttctttacggtcctcgtacagattcgggtgtaacgtattaagtagactagctttatgtaagcgagaaatacatgttttctttggacaaccccaggtctatttgtgt

SEQ ID NO: 276595 - DNA, 1776 bp, Zea mays
cccacgcgtccgcccacgcgtccggccttcttcagaacaagaagcactttctatgagtgagtaccaacgaggtgtcagtgcatggaacttcgatattgaggatctaaaggctcaggcatcactgatatgtgatgatgatccacctgaaataaaagaagacgatgacactggtagaataactgacattgataaggatacatcttctgacgattattttggaaagacagcaccatcgaatggaaataactgcagtgatcgttcttctgtgccagcaaatcctggtcaaaatggtcccgaaataaatgaaatgttgtcttccaacaatgggaatgcctacagtgaaaggaagcctgatggacgtaaaaacccagagtcagaaaatgattcattgccctcgacgtcgaagcatgatgctgatgggaaagattatagaagtgatttcagacaaaaacagaggacatactcaggtccagtcctgcagtctggtccgaataatagttcgatgactgaaaggggccacattattgaaagggatgcaggagttcaatctgtatctgataaacaaaagaatggtacaagaagagccaataatcttagtggtcctttgtcacttccaactcgtgcttctgcaaatagtctttcaagagccaataatcttagtggccctctgtcacttccaactcgtgcttctgcaaatagtctttctgctcctattcgatcttctgcaggttatgtaggctctttgggtgataaacctaagcgcactatggtggaaattaaaggccgcttctcagtgacatctgagaatgtggatcttgcaaaggttcaagaaattccagggagcagtgcctcacgtaaattgcaagaggggccttcactgagaaaatcagccagtgttggtgattggtcagcgaatgataagacaacgtctactaatcatcaaaggaaggaactctgcaatagctctgtatctacatcaattctgattccgcatcttcaaaaccttgtgaagcaaactgcattccagcaagatctgattacgaacctactaagtagcttgcaacaaaatgagagagtcgatgcagctcagtcaagagtccagagcacgacgagtgatacagtggttgaagctgctactgctgagagagaacactcgttacttgttaaaatttttgagttacaatctaggatgatttctttgactgacgaattaattgcggcaaagctgaaacatgttcagctgcaagaagagctaaatgtactctactgccaagaagaaatcctggatatgagagaggacgagaacgaagtagcatgatgcggtggagcctgcccccccttttttactactactactactgagggggactaaaagccacatgctctaagcccgtgcaattgaggcttggctaaactggctgcatacaatacaaggactcgaaggatcattggccaactccgggtgcaatcgaagaacctgcaatgagtttgatggagcggggtttatgatcgttggcctcggatttgaactgttatgtatattcagtggacccgttcgatttctgactcgggtttggtttgttcagtgagcttttaaggcgtcttgcgatgcgcatctacttcatcattaagatggctatgacgccagcctctaatatatatactactagtggtagtaataggtatagcgtccgtatagtaccattgtacttgtacctcagaagtcagaaagactgcgacaataattgcatcgcgtcaaaaaaaaaaaaaaaaaaa

SEQ ID NO: 276596 - DNA, 415 bp, Zea mays
cccactcgtccgaatcttagtggccctctgtcacttccaactcgtgcttctgcaaatagtctgtctgctcctattcgatcttctgcaggttatgtaggctctttgggtgataaacctaagcgcactatggtggaaattaaaggccgcttctcagtgacatctgagaatgtggaccttgcaaaggttcaagaaattccagggagcagtgcctcacgtaaattgcaagtggtaagaattttccttggtcccttgttcataaggaactgttactttgctttagatatatccattttttcaggggccttcactgagaaaatcagccagtgttggcgattggtcagcaaatgataagacaacgtctactaatcatcaaaggaaggaactctgcaatagctctgtatctacatcaattctg

SEQ ID NO: 276597 - DNA, 885 bp, Zea mays
tcggtatcctcctcaaagggcatcctaatgtggtcacacttgttgcccatgatgtttttgacatgggtcgtacaaaagaggcacttcttgtaatggagttctgtgagaagtctttggttagtgcaatggagagcagaggtagtggttactatgaggagaagaaggtgcttttgattttcagagatgtctgcaatgctgcctttgctatgcatggacaatcaccgccaattgcacatagggatctgaaagctgaaaatgttcttcttggttgtgacggtgtatggaaaatatgtgattttggaagcacatcaactaatcacaaatgctttaacaaaccagaagagatgggcattgaggaagatgtcatcaggaagcatacaaccccagcctacaggcccccagagatgtgggatctctacagaagagaagttattagcgaaaaagttgacatttgggctttggggtgccttctatatagaatatgctacttcaagtctgcatttgatggagaatccaagttgcagatactcaatggcaattatcgtatccctgagcaacccaagtatagcactgctgtcacagggttgatcaaagatatgctggaagcctctccaaattccagaccagacatcacacaggtctggtttcgtgttaatgagctactgccgcttgagttacaaaaaagtttacctgacggaccttcgccagccgtttccttgaggttgcaagatgaaggtgctcataaaagggcacatgttatgcctaaaatgaacccttcttcatcttcaagagagcaatctaatagttctctatcgcatggaaactcaaaagcaagagatgcacccttaggtgcattttgggcaacacaacatgcacaaagtgctc

SEQ ID NO: 276598 - DNA, 1167 bp, Zea mays
gggcgcggcgaagggggagaagcgcaagtggttccccgacgcgcggtggctgccgccgacaggcgttcagggggggaccctgtggtacgggaacggcgatccgaccacgccgctgtggccgtcgtgcgcggctggggacgactgcgagcggctgagcatggaggagctggacggcagcgaggagatgccgggcatcccggcgctgccagtgtcggccagggacggggagacaatcctcaaggcgatgggcggcgatgtcgcgccacccaagtggcagggcggcgacggcgcgcccgtgtaccggctcggccccggcccggccgtgttgaacctcacctacattggaaacgagactttagcaacaatcgaaaatgtgtttgcggtgatagaaggaaaagaggagcctgacagatatgtgatcataggcaaccatcgtgatgcttggacatttggagcagttgatcctaacagtggaacagcagccatgcttgagatcgcggagaggctgtccaagctacaagcgaaagggtggaggcctagaagaacaataatcctatgcagttgggacgcagaagagtttgccctgatagggtctactgaatgggccgaggagaacatggacactctagcttcaagagctatagcttacctgaacgtggacatatcactgtttggtcctgggggtcttatgccccgtgcgacccctcaacttgatgaattgatcaaagaagcaagtaaaatggtaccagatcctgatgaaccatctcaaaccttgtatgacaccatgatgcgccatcatccaccgatcactagagtggctggtgctggaacagattttgcagcatttgtccagcatataggagtcccgtcactcgacatgtcttatgggctgtttgaagaataccctgtttaccactcgttgtatgatgattatgtttgggtggagaggtttggagaccccttgttccacaggcatgttgcagtggccagcgtttggggtctgattgcactgaaacttgctgacgacgagatcatacccttcaattacgtctcttatgcctccgaactggaggagtgcacaaaagatatcgtagataaatgtaaaggatttcctgtcagtttctctcctttgcagaactccatcaagcagctcgagagtgctgccac

SEQ ID NO: 276599 - DNA, 683 bp, Zea mays
  unsure (1)..(683): unsure at all n locations
cgccgttccnaccgatcgatgtggctcaaattaaaggattagcccaggccgcaaccctcgcgaacactgaagtactcgaccgtgacggatcattatgtaacacaccttcacccatcacgtcaagaaataaagtagctatcatagctatttcagtagtggttcctgtgccagcactaattgtgctacttcttacatatttcatccggtggcacaaaagaaagcctattgtgcaaccagtacccacacatggctcaacaagagatccagaacctgataatgcttcaggaatcaaaaaaagttatggctacaacctgaatataactgagaatcggcagctcacatacaaagagctcgagaagttcactaataacttcaagaacttcataggacaaggaggttttgggcccgtctactatggccgtttggaagatgacactgaggttgctgtcaagatgcgttctgaatcatcgtcacatgggcttgatgaatttttagctgaggttcagagcttgacaaaggtgcatcacaggaatctagtgtctttgattggttactgctgggaggaagatcatttggcgctggtttatgagtacatgcctcagggcagtctttttgatcatctgagaggtttgtgctatggaaagtctattgagtattgatttaggcataaccagttacgttgc

SEQ ID NO: 276600 - DNA, 724 bp, Zea mays
gcacacgggcatcacacttatgcagccagtgagccagaaagaagaagaggccattcgaagctgccacgcacgccacgcggaaaccatccgagtccgcgaggagcagcagcagaagaaagggcaagggccaggccccaccaccgagaagcgagaagcagagcgaggaacatcctccggtggccgccgccatatggccggctgctgcgtgttcctccggtggccgtcggcctcgccgtcgcgcatcggctaccgctccctcgtcgacgcggcggccgacgccgccgccccgccgtcgacggtgacggtcgtggtcgggaaggagcggcgggcgttcgcggtggaccgcctcgtgctcgactcctacccgctccggctgctcctggagacggcggcgcgcacggaggagcgcatggccgggggcggcgccggcgccatcttcgtggacgtcgactccatcctcttcgagcacatcctctggctcgcctgcgacgcccgctccgtctcccagatcctgcacctcgacctcaaggagatcatcgacttctacgcccatgacgcgtgactggtcgatgcatccgcagctcctcctccctggacacgtactctgcaccacctgcgcgtttcttccatggatggatattcttttttctttcattcttcctttcgtcctctcttgcgctaatgcgcgtgatactattggtaatacagttcagatactattagg

SEQ ID NO: 276601 - DNA, 715 bp, Zea mays
cggacgcgtggggccagccagtgagccagaaagaagaagaggccattcgaagctgccacgcacgccacgcggaaaccattcgagtccacgaggacgaggagcagcagcagaagaaagggcaaggaacatcctccggtggccgccgccatggccggctgctgcgtgttcctccggtggccgtcggcctcgccgtcgcgcatcggctaccgctccctcgtcgacgcggcggccgacgacgccgccccgccgtcgacggtgacggtcgtggtcgggaaggagcggcggccgttcgcggtgaaccgcctggcgctgaactctaaccggttccggttgttcttggacacggcggcgcacagggaggaccgcagggccgggggcggcgccggcgccatcttcgtggacgtcgacgccatcctcttcgagcacatcctctggctcgcctgcgacgcccgctccgtctcccagatcctgcacctcgacctcaaggagatcatcgacttctacgcccaggacgcgtgactggtccgccgccctcagctgcgcggctccggcatgcccgagcccggctcctcctcctccctggacacgtactccgcaccacctgcacgtttcttccatggatggatattcttttttttctttcttcctttcgtcctctcttacgctaatgcgcgtattgatgcgcgggatactattggaaattaatacagaacag

SEQ ID NO: 276602 - DNA, 563 bp, Zea mays
ttgtaaaaataatgttaatggtacctaatatgggggttctgcgtggctgcgggaataagcagcagctgcccttctactgctgctactgatctgagagagaagagaagcacacttgcaacagcgacagtttctttctacaagggatacaacatcaacttactcatcctatctcccatcccatcttgtattttcaattttattatgtggacagtataaaggagtggagacggtgtacatcctctgtgtcaggtgccatgcgagggtgaaatgggatctgcaagcctacatgggctctgattgttctttccttcttttttcaattacatcggttcgattcaatctcagtacctagaaatgaatttgcgaaactgatgagccatcatgtggtttttcctacctgtcgtgacatggtctctgcagaatctgacattcctatttacagtacatgtacttactgatcgactctgattcagatgcttgatatttttaacgctgacaaaatttaccaggtctcgtgaatccttctaagctcctggctagcattgacgaacagatagcgaaag

SEQ ID NO: 276603 - DNA, 798 bp, Zea mays
tacgcgctcgctcctgtacctctcctcagtgcccaagaatccaagatctggaagggccaggtgggaggaccaagcttcgtcgacgtcgactcctcgtcctgcctcacctcgctcgcttctctgcaattctccgcagccctcctctttcggtctttcccgctggcctcctcttttcaaaaccctcgctaatctcgtgccccgtcccacccacctctagcttcgaatcctagcgcctcgcctccgcattctagggtttccccgcctccggcgccggccatggaggcggtggtcgtcgacgcgggctctaagctgctcaaggccggcatcgcggcgcccgaccaggcacccccactggtaatgccgtcgaagatgaagctggatgttgaggaccaggagctggctgacggcgcggtggtagaggaggtggtgcaccctgtggtgcgcggcttcgtcaaggactgggacgccatggaggacctactcaactacgtcctgtacagggacattgggtgggagattggggacgagggccagattctcttcaccgaacccctcttcacgccaaagactcttcgggagcaattggtgcagcttatgtttgaaaagttcaatgtttcaggcttttatgcctctgaacaggctgtattgtcactctatgctggtggacgcatttcaggatgtaccgttgacattggtcacgggaaaatagatattgctccagtttgtgaaggagctgttcaacacatagcttctaagagattagagattgggggagttgacttgacaaacctgtttgca

SEQ ID NO: 276604 - DNA, 487 bp, Zea mays
ggatgacaaaggaatggaggagcgtgcgactatatgttgttccttcagttatatacctcatccacaacaatgtccagtttgcgacattgacctatgttgacccatctacctatcagacaatgggaaacttgaaaattgtcacgactgggattttgtttaggcttgtcctaaaaaggaagttgtccaatatacaatggatggcaattgttttattggctgttggtacaactacaagccaggttaaaggatgtggagattcaccatgtgattctcttttctcagcaccattgcagggttacttgcttggaatactttctgcttgtctttcagctctagctggtgtgtacacagaatatttgatgaagaagaataatgatagtttgtactggcaaaatgtacaattatatacgtcggtatctatatctaacactggtttattgtcagtaatttctcatgcccagaaaccatgtgtgcagcttggcatgca

SEQ ID NO: 276605 - DNA, 691 bp, Zea mays
gtagctttgatgaatccccaatcactcatccgtcatatgcaaagcaatcacatccaatgtattgcttcaggcggtcagcctccgaactacaagttctttttctatgctcaaaaagatggggctgctgctttcttccttgttgaatgtattgtcaacacagcatcagcgaaggcacagctcaaaatcaaggctgatgatggaactgctgctgaggcattctcgagtttgtttcagtcagccttgtccaaatttgggctttcttgatcctgagtaatttgtctgagcgattcaccggtccacagttttttatgggtttcacagtttgccccaactccactgtcttggcttgtccagtacttgtgatcatattattggagaatcagagtagaaggtgcaaaagggtactggagttttgcggagctaaaaatcctatttgtactatttgggtgaactgtgcatttgtacatgactacatgtcacccagataaatagctgggttatttaggactgtactgtttgatgttctgggttatttaggattgtgatagtttgatgccttgatctcttctgaagggtttcgtttccttgaaggatgtagaaacaacacgcaacaacccctttcatgtatgctatttaccatttcttgcacagatgatcaataagatgtttcgtcttcaaaaaaaaaaaaaaa

SEQ ID NO: 276606 - DNA, 607 bp, Zea mays
gttctttttctatgctcagaaagatggggctactgctttcttccttgttgaatgtattgtcaacacagcatcagcgaaggcacagctcaaaattaaggctgatgatgggactgctgctgaggcattctcgactttgtttcagtcagccttgtccaaatttgggctttcttgatcctgagtattttgtctgagcgattcactggtccacaatttttttccggcgttcacagttttgcaccccactctgccgcggtgccgcctaagcttgtccagtacttgatcaatttgttggagaatcagcgtagaaggtgcgattagagggcaatatattattatcactaaattcagcaagagagcaatggagttttgcggagtaaaatcttatttgtattaattgggtgaactgtgcatttgtacatgactacatgtcatctagataaatagctaggttatttaggattgtgctagtgtgatgccttgacttcttctgaagggccttctttttcttgaaggatgtagaaacaacacacacctccccctttcatgtatgctgtacttacctttctttcttgcacaggtgaccaatacccatgtttcttccattttg

SEQ ID NO: 276607 - DNA, 1145 bp, Zea mays
catgtgcctgccatacttgtcgcgaccaaccaaccaaccaaaacacactcaactcagtgtgggcgttagtgtacccataaacataggatctgtgcttcacagccgtccccctcaccctgccaaatatggattcacgcgctctccgccgggaaaccccccatgggggtcccctcaccatgcgcccgcttcgggcgccactctgtgtgcgccttcacaatatcggctcctgtttccagctggagcaggtggtcgcactggatggtggagtctgcgtcgccgtctacgcattcacccgcgacggtggtgagcgactgcagcacgctgtcgcgtccgcactccttcctgtaatccagcgtcatgcttgcgagctcgtgcttctccaggatcgcgatcggagcactctcaagaatccaaccgatgtacttgacgttattcacgtgctggttgacatcaaggtcgccccaccacctaggagtgagcccctttctcatgaactgcttcatagcatcgccaccagcagtgctccctggcttagccagtttctcgctctgctcatctgttatggctgcgcgggcgttgaaatacgggcctatctcagcccttacttcgtccggcatttttgaaagccttctagtgttcttattcatcatcacccaaacacttgtagctctcaagatcgtacatccagacttgcagtcgaggacatgccagtctcgacgcatgccatttttcccagcggcagctacccatgtgtccacttgaacagtatctccccacgaggggtactgctcaacaagaagctgaattttgctgacaacccagatcaagtttcgtttgctcatctctggcgtggcgccaaaaccatctccaagaaggccagctgtcttcacatggttaagagctgtttcctgtaagtgattcattaatgtctctatagaagccgtacgatcggcaccaatctcataggaccgaatcctgaagttttgcctaaacaccatcccatcctggatgatcccgccaaaaccaaatgtatcaacaagcatgtcgggtttcttgggcttccagtcaacaagtgtcccctgattctctgctgccaggaagatggtagtgccagccgaaagaagaatgctccaatctggcagttg

SEQ ID NO: 276608 - DNA, 593 bp, Zea mays
gcatttgggaagttgaaacagacaggagaagcatgtaatgtgttccagcatgtattaactcttggtgttaagccaaatgcaacaacatactccctgcttgtcgatgcccatcttgcaaacaaagatccaaaagctgctcttgccataattgatgagatggttgatgctggcttcactccttccaaggataccctcaggaaggttcgaagacggtgctctcgtgaatcagacttcgacagtgacgagaaagtccaatccctggcaaagcagttcaactaccgaatgggtggtgagaaccgtagagagatgctttatagcatagaatacaatcctgtgtactgaaacagtaagtacttgttcatctgttggattttgccccatgtagtggttggttatgttttcaccctgacaattagtgttgcatcttgctagttatgctttcctggccgtttctcctgactggtgttgtcttcattttgataggcagttgctactgagtttgctagccattgggagagcacagacattgtagcttgtaaattacttggatgtccccccctcctttagcaaatttccccttccccggtcatcag

SEQ ID NO: 276609 - DNA, 432 bp, Zea mays
gccaaatgcaacgacatactccttgcttgtcgacgcccatcttgcaaacaaagatccaaaagctgctcttgccataattgatgagatggttgatgctggcttcactccttccaaggataccctcaggaaggttcgaagacggtgctctcgtgaatcagacttcgacagtgacgagaaagtccagtccctggcaaagcagttcaactaccgaatgggtggtgagaaccgtagagagatgctttatagcatagaatacaatcctgtgtactgaaacagcagttgctactgagtttgctagccattgggagagcacagacattgtagcttgtaaattacttggatgtaccaggattcttaagcaaattttcagtttctcgatcatcatttgtgctcgcagggttcgttttaggatttgctaataagatgacacta

SEQ ID NO: 276610 - DNA, 496 bp, Zea mays
ataatcccgaccggaccaagcgcccaacaactgccgccccaagccaagggaagggaaaaggctatcgttctcgtcagtcgtcacgagagccgcgacggcgcgcatggcggcgacggcagcggcgctccggtgctgcttccccggatcctccggtgtcggtagtggcttcgtcaagcccaactcctccaggcgaggctggtgcgcacggccgtggcggcgccgtcgcgggaggcggaaccggtttcgtcgctggggcaccgcacccgcgtcgacttccccatccttcaccaggaatttgatgatgccaaattagtttacttcgacaatggtgcaacatcgcagaaaccatgtagtgtgatgaaaacattagatgagtactaccgatcgtacaattcgaatgttcattcgtggtatccatgccctcagtgcgaaggctactcatgcatatgaggattcaagatgaaaagttgcaaattttgtcaacgcagctgatagc

SEQ ID NO: 276611 - DNA, 436 bp, Zea mays
ccctctctatcgcccacgcgtccgcccacgcgtccgcccacgcggccgctcatgcatatgaggatgcaagaagaaaagttgcaaatgttgtcaacgcagctgatagcagagagattgttttcactcgtaatgctactgaagctattaatctggtagcctattcatggggactatctaacttgaaagaaggagatgaaattggtcttacagttgcagagcatcatagtgctattgttccatggcaatttgtttcccagaagactggtgccaccttaaattatgttggattgactaaagaaaatgtcccagacattgagcagttaaaagggtttctgtcgaacaagacaaagatagttgttgttcatcatgtctcatatgttctaggttccatgcttcctatcgaggagattgtaacatggtcaaacagagttggagc

SEQ ID NO: 276612 - DNA, 551 bp, Zea mays
gccggtcagcaggaggagcagcggcggcggcggagagaaggctgctaactggtggccggccgttcgccgcgagctccggcaccccgcagccggccggcacgccttcggtccggcggacggcagcagcagcatgtcttcggccgccccgctgctaggcggcgaggccggcggtggcgagcccgcgccgcggacgccgtcgccgtcgtcgtcgtgggtggggcgcgtggtgggcgcggccgaggcgcgcgcgcagctggggttcgcggggccgatggtgctgaccagcatggcctactacggcatcccgctggtgtcggtgatgttctcgggccagctcggcgacgtccacctcgccggcgccacgctcggcaactcctgggccaccgtcaccggctacgcgttcgtgaccggtctgagcggcgccctggagacgctgtgcgggcaggcgtacggcgcggggctgcaccgcatgctgggcctctacctgcagtcgtcgctcatcatgtcggccgccgcgtcggcgctcgtcttcgcgctgtggtggttcacgg

SEQ ID NO: 276613 - DNA, 545 bp, Zea mays
ctccgtgctcttgtcgacgatcacatggcgaagttgatagactacaatgataaagaagaagcaaggtcatcagaagaaaccgatgctctggaggaggcaaggctggcaatcgagcaagtagtgattccgaaaggcgagagcgcgcagctactgccaaggccatcaagcatcatctcgtcccaagtgggtctcgtcgaaagcttcagcctcaagtgggaggtcgtaggccaggagcctaaggcatgcgtgaggatccttccgcactttgcgccaaaacaagtcgaagctgtcgcgcgagaaaccccagcggagcccgccgactcggactgggagagccacgatgactcggatcatacccagagtggcatcaccaggctacctttcctaccggattagcgcggcgtctggcgtatcctttcagttcttcgtggccctgccgcctgctgtgtatgtattccatttatttatcttggtaataacttgcaccagaaagcacttgtgtggttgcgtctatcttcataagtaatcccagtggatagtgctcc

SEQ ID NO: 276614 - DNA, 813 bp, Zea mays
caactttgcaccgagctacgttgatccagaggaagtcattgcaatcctcatttgatgagaaggttaaaggactcgttgaggagcttttgcatgtcgatgaatcagcaagctcaattgaagttttgtttgaggacttcctttgggcaaactcaatcttctggactcgagcactgaacataccattgcctcattcttatgtttttctgggctcatgtggcgatcaacaggccaaggctgacaatgatgcccaccaggaaattgatattacagctaaagattgtagtgctgatgagaattctaaaccaagtaacacagagtcaatttgggttgagggccttgtcccaggaattgatttctgcaatcataatgtaaaggcactggcaacatgggaaggtgattctgtgggaaatgctaccggaattcctgcttcaatgtacctcttgcttgctgataaaagtcctgctgagactggagcagagatctgcataaactacggcaacaaaggaaatgaggaactactgtacctttatggatttgtggttgacaacaatcctgatgattatctcatggttcattatcctttggaagctcttagacagatccagtctgctgatataaaaatgaagctactagagatgcagaagggagaattgaggtgcctcctacccagaagtttgcttgataatggattttttggtatccgttctagtgaagataaggatagcaagaaaaatactggtccgttttcaagttttacttggagtggtcaacgcaaacttccatcatatcttccaaaaattgttttcgctcatg

SEQ ID NO: 276615 - DNA, 864 bp, Zea mays
tcgttatatttaagcatatatctcatggatgttacttcatttatacgtggctcagatttgttaggctctatctgatcctaatggtctaagccaacaaaatcctatgatgtcacaaaatccatgtttcaggtatcagttatcaacgtagaagatgctacaatattatatcaagaacagtttgagtgtcgactgcctggtggaatcgcctctttgcaatttgaaatctatagccataatggatatgacaaggacattttgataatagcgatggaagattcatctatttttgttatcgaggaagaaacggggaaacttttgaaccccaacccagttcagacagacaaaccctctaaagccatccttctgcagatgttggagttatcgcccattgacacaccagcagtttcagataaccaagatacagtatcgaaggaatcattgctgctactttgcactgaaaatgcgatccgtttgttttccttgggccacgcaattcagggcacaaagaagataatcaataagaagaaattgagcagctgttgttgtttcgcctctcttattcatagttcttctaatgacattggacttatactcgtcttctccaatgggaaacttgaaataagatccctgccagacttgtccttgttgaaggatgcctttttacgaggttttgtgtactcaagaaacttgaattcaagtagttccataacatgttcatctgatggagaagccatcttgattaatggagaagagacctattttttctctacgctctgccaggatgagatatacaggcacgtagacagcattagtacagtgtacagaaaagagaactcaaccagggaagactcttcttttgtagtg

SEQ ID NO: 276616 - DNA, 440 bp, Zea mays
ggcatcaggcgtgttgaccgattctgtttcgactcctaaaccagagcagcagcatcaaaagcagcacggcctcttcaaggacctatggaaggcacaggacagtaacgcggatgctggtggtgaggtgcagccactgctccggcaaaaccttgtgtaatactcctacaaaatacggagtacttcctgggatggactcacgccctcgctggcctatacatatacgtgtttatttatttgtctatgttgttgttaacatggtatcgtggtgaacaaaagaaactgaacatgccattgttactgtggtgtggcgttttttgtacacttttgatacctaaatggaactcctatgatttgggtctggaaagggtgtgtgaagatgttttgttccaggttttggagttccgctcccagaatggcttgacaagcatgttaattccatg

SEQ ID NO: 276617 - DNA, 533 bp, Zea mays
cgttgtgcgtcttttcctcagcagcaaccggagagcggctgctcgcctgctcctcctcctagggaaaggacagcggcggcggcggcggcggcgagaagttgggcctgaagcccggacgctttctcccgagataccgcaatactgctagagcactgtgtaaggaaatctctctctctctctctctccctctctggtttagatctctagccacagaacgtgtgctaagttagctagcgcggagggctttcacttgctccaatcgtggccatttgggaaaaaggttctggcaactgctcaggtacccgctgtggtctctgttcacctaatttcgtgcaaagtgtgtgcattcggccggtgtccatgccgacaaaatctaggtgcccccaaaacgatgcgagtgctcaatactctagatttgaaggtcgtgtggtgcgacctctttgctggaatggtgtgagatttgtgcatctcaacagctttttgctgttccgcgcgatttcctttttttttgtagctaaagattttgaaataaa

SEQ ID NO: 276618 - DNA, 632 bp, Zea mays
cggacgcgtgggtcctctcaatacccctctctccctcttgtgggtagcgttgtgcgtcttttcctcagcagcaaccggagagcggctgctcgcctgctcctcctcctagggaaaggacagcggcggcggcggcggcggcgagaagttgggcctgaagcccggacgctttctcccgagataccgcaatactgctagagcactgtcactaatgtttgcttatgacaatggagtcacctacaactgccgctggtggtgaactggagagctacttctccttgggtttgacagtatcccactcacagaaagataatgctgaatttccaaaggttctgttgcttctctcagcgtatcttgacaagacagttcagcagaatgaagagttactagactccagtaaaataaaggagtcgaccactatctttcatggtcagagggtgcctgaacttagtataaagctgtatgcagagcgtattttcaagtatgcaaagtgcagcccatcttgctttgtgctagcacttatctacatggagagatatctacaacaaccaaacatttacatgacgtcatttagtgttcatcgcctgcttattacaagtgttgttgttgctgccaaattcatagatgttgcgttt

SEQ ID NO: 276619 - DNA, 413 bp, Zea mays
gtgattgggatttgggagcttcagcaaatataacatgtttatgggactgggagttttgaatgcggcaccagtcatactgaatcaggttcacactccaaaaaactctgccggttattcttcaggccaaggcacatccaaagatcacgagcattctattatagttactaggcctgatggcatgccagcacatattaggatgctagtgtttggttttgccttgacgaactctctacatgatggatatctcaatatgggcacctggaaggtaagggaaacacacgcccattctcacaattgagcagatgttcatgcttcctgcaactccccattttgcattcagaaggtcataatttggtaatacatggcaaacggatgtgagtttatagtataactgtctgtatgatactataaca

SEQ ID NO: 276620 - DNA, 507 bp, Zea mays
  unsure (1)..(507): unsure at all n locations
gctagataagacaaccatgaagatgcacgaggtcgaggagcctccagcggagatcacccgcgacgcccacccggcgcacgcgctgaggctggtggccaccgacgacggcgcgccgtgccggtgcgacgggtgcaaggagcccggcagcggccaggggcggcggtacaggtgcggccacggctgcgacttcgacctgcacgtggcctgcgcgctggcggggccgactctgaggcaccccctcttcggcgagggcctcgagttccagctcctcccggtggcgccgtcgcccgtcgacaagacgttctgcaacgcctgcggcctgcgggcgcccggcctcgtctaccactgtttcgacagggacctggaccttcacccgacctgcgccgcgctgaagccggagagcgccttcccgggcggtcacctggcccagctcggctgggaggccgccgagcaccgctgcgtcgcctgcgacgccgtcgtcgtcgncggcaagaggttctgggcgta

SEQ ID NO: 276621 - DNA, 429 bp, Zea mays
atccttcgccgcagaagagattggagctgaagagaggaagcagcgcgtcctcgcctaaagccctcgccgccctctttcggctcctcgcctctcgtccacgcgcgacgacgtgtcggcaaacactcagtccatcccaagactcgcgaggcgatggtggacgcgtggtggcctctgctgggcgcggcgatcccggcgctggtggcgggtcagtttgtccgcatcaagcgccgccgcgacgaggagcagcgcctcaaggcggcgcgcgggcgggagaagagctccgacgaggtattcgtctgcgagcgcgtgtgcacctccaagcgtatgctcaagaaggtaggggccttctccaaggaccccataccggagacctgcgtcaccgtctgcggcgtctctgaactcgacgcctgcgccgacgcttgcgcgcgc

SEQ ID NO: 276622 - DNA, 522 bp, Zea mays
  unsure (1)..(522): unsure at all n locations
ttgatcattagtttctccatctacctactgtttagtttgtttcttctagctctgtttcatactccagggccagagtcttgctgtatatttgttgagtaatagccatgtttgtatgtggactattccctgaaggttatccactaaattgttcatttccagatttagataccatgcctaaatgtagtgccctgataccatgaattagctgagatccaacacctattttattgatcacaattgtacttttatgtatacaacggcacatgatgctcttgatctgctccataaaaagctaaaagtgcatgatctangaatagaaggagcgggtgcctttgttaaccatagcattttgcaaacttttaccatgaatgtatgattgccgaacttgttaactgaatttatcagttgaactactttgcttatagcatacacacttaacacaatatcagcctgtgaaattctgggaaggtggattttgctttttttcccttgtaattcgcaatttcacagatgatcttgaat

SEQ ID NO: 276623 - DNA, 330 bp, Zea mays
ggccactaacactagttatcacatccaccataacgaccatggctaccacctcagctttgctagctcttgtctgggtagccagcctccttgcaggcacggtgttcagtgatgatatcgtacccatccatatacccttgttggatcggttccaagcctggcaggccggatacaaccgcacatatgcgaccccagaggaattccagcaacgcttcatggtctatagcgagaatgtcaagttcatcgagaccatgaaccagcctgggagctcatatgagctcggtgagaaccaattcgctgacctcaccgaagaagagttcaaggacacgtatc

SEQ ID NO: 276624 - DNA, 567 bp, Zea mays
caaggataactgcccggtacggacattcagaggacacaaaaatgaaaagaactttgttggcttgtctgtgaacaatgaatatattgcttgtggaagtgagacaaatgaggtttttgtttatcacaaggctatctcgaaaccggcagcaagccatagatttgtatcttctgacccggatgatgccgatgatgatcctggttcttatttcattagtgctgtctgctggaagagtgatagccctacgatgttaactgctaacagtcaggggaccataaaagttcttgtacttgctccttgatgttatggagggcgttcaagaggttcacagtactgtccagttgtttcctttcgtgtcattatattcccccaaaattgggaacgggggcataattgatctccggttagggaatgaagttttgcagatggtcagctgacgtagggttttgaggtatcagaatgtgcatagtcatgtttatgttgtataggtgtaattgtgtaaagcagccaagttattggttacaagtgtaacacgagaaatacacattaacaaaaaaaaaaagcggccgc

SEQ ID NO: 276625 - DNA, 364 bp, Zea mays
cccacgcgtccgatcgccatctcttctcttcttttgctcgctctatacatataccagagaggtaggtagctagctagctagtggtgaaaatacaatggcgcacggcagggaagaggcagtggtgctgtggcccttgcggcggcggcggcggtgctcctctgcgtgctccttcatgcccacgtcgcggagtcggccgtgttcaccgtcggcgaccgtggcggctggagcttcagcaccggcacctggactaatggcaagcgcttcaaagctggggacgtcctagtgttcaagtacgactcgacggcgcacaacgtggtggcggtgaacgcggccggctacaaaggctgctcggcgccgcggggcg

SEQ ID NO: 276626 - DNA, 604 bp, Zea mays
ctcttgatagaaaaaccagagctgtcaggcaacactgatttcgacactgcttgaatctatctgattctcttatgcgtcagatgttgtgcaacttgatgttgacttgttggatttctgatgtaattaatgcagtataatagggggctagaactgatgaaaaactatggttacaaaaatttatacaaatctatcgaatctgataagcgtgtgcattgcccttgacaggttggacaactcatgtagcatgttattttggttgattgtctctctttttttttaaaaaaaactatctgtacagtgcatattgacacaaccattttctcaggtctttgatctttcagttgtgaagccttcagattttgttcaccatggtttgagttgtttggagaggttagctgaccaaggcgataaccgtgcgaaggctgttcgtgagaaaatgaggattgtggttgctgggggtgacggtacagttggttgggtgcttggatgtctctcagatctttataagatgaaaagggaaccggttccacctacaggaatcattccacttggtacaggaaatgatcttgctagatcgtttggatggggtggctcttttcccttt

SEQ ID NO: 276627 - DNA, 576 bp, Zea mays
gccaagggaaccaagattcatcgcaggagttccagcctagaagaataagcttgcttgccgggttttcttccctcggatggcgagacaagaacaagggcaagcagaacggctctgatgagtcaacaaacggtaagctcaataatagcaccgatcaaggggttgaaacacccaaaaaggacgactcgccaaaagagggtgaacagattgtccgaacaccggaaagagacaatgaactgagactagggacacccaagatggatagtgaggtaccaagtgtggaaatggcggcgaacagtacgaatgggctggaggaccagttggaggagataaaattggattgatatcctttggctggtcgctaagccgcaacataaggtgccattaaattatgtattggtgtatccattttccacctctattcttttaggtttatagattcttgtataacttgagtcgagagaatgaataaactatgtttgccctcttatagttctgttgatcgcctgtaagctatcatgagtacacatgaaaaggacgtaccaaatagaagattatcccgaaagcaatttttggaac

SEQ ID NO: 276628 - DNA, 906 bp, Zea mays
cgactgctggccgatcaggggagaattcttttgtaatggagccgctgcgaccacgcggcgatggttgttgcccgcgcgtgctctcggtttctctgctgctcctcgccgccctgctgtggaagcacgtctctgcggcggcgattaccaggggtgatttcccggaggggttcgtcttcggcgccggcgcatcggcttaccagatcgaaggcgcatgggcagaggacgggaagaagcccagcatctgggacacatacacgcacagtggatattcgattgaccgtgatactggagatgtggctgcggaccagtatcaccattacaaggaagatgtgaagctaatgcatgacatgggcttggacgcgtacaggttctcgattgcctggtcaaggcttattccagatgggcgtggagctgagaacccaaaggggttggagtactacaacagcctcatagatgagctccgcggggctggaatacagccgcacgtgaccatctatcacttcgaccttccccaggctctccaggatgaatacaacggcctgctcagtccgagaatcatcgatgattttaccgcttacgcagacgtgtgcttccggagcttcggcgacagggtgaagcactggatcacggtgaacgagcccaacatcgagcccatcggcggctacgaccaaggctacctcccgccgcgccgctgctcctacccgtttggactgggcgtcacctgcacccacggcaacttcacgacggatccgtacgccgtcgtccaccacctactgctcgcgcatgcgtcggctgtgttcctctacagacgcaagtaccagggcgagcaaggaggacggattggactgacgttgctggcctggtggtatgagccagcgacgcagaaacccgacgatgtagaagcag

SEQ ID NO: 276629 - DNA, 741 bp, Zea mays
cccacgcgtccgcccatcagaggtggacacctcgggctgtatctatggggcgcctgggcagtactaccagagccttgatttttcgcaggtgctcaattgtgaccgcaagccggtgatccttgacctgcccctgtcccggtacaacgacactcagattgggaagattgacaattgctgcaggaatgggacaatcttgcccaagtccatggacgaggcacagtcgaaatctgcgttccagatgcaagttttcaagatgccaccagacctgaaccggactaagctgttcccccctgctaatttcaagatcgtgggtgcatcatcgctgaacccggactatgcctgtggccagccggtgcctgtcagcccaaccgcgttcccagacccgagcgggcttgactcgacgacgcttgctgtggcaacatggcaggtcgtgtgcaacattaccacgacaaagggggccaagcccaagtgttgtgtgaccttctcggcgtactacaacgactcagtgatcccctgcagcacctgcgcttgtgggtgccctgcaaacaggcgagggccaacgtgcagcaccaccgcacaatccatgctgctgccaccggaggcgctgcttgtgccattccacaaccggtcacagaaggcgttggcgtgggctgagctgaagcattacaatgtgccccggccgatgccttgcggtgacttctgtggcgtgagcatcaattggcatgtctcaacggactacaa

SEQ ID NO: 276630 - DNA, 885 bp, Zea mays
aataactgttccttcaatggcttctgtctacaatgaatatgccttgaaaagccaatatgacactagcatttatcttcagaacttgtttctgtatggatatggagcaatattcaacttccttggcattctcgggactgccttattccaagggccagagagttttaatattcttcgaggacattcaagggccacgatgtttctcatatgtaataatgcagcacaaggcattctatcttcattcttcttcaagtatgcagacacaattttgaagaagtattcgtcaactgttgccacgatatttactggcctagcttctgctgcatttttggggcataccttgaccattaattttctcctgggcatatcagtggtgtttatttcaatgcaccagttcttctctccacttgctaaagtcaaagatgacaaaccagctgactcaatagagttggaagatacacaaaatcaccggtcatctgaatcttcttttgtaaatatgactgctggtgctgctgatgatgcgagccatcggattggaactgatgagaggcagcccctgttgcctacatgaactagtttcttgaggtaggttggtgtagcattgtaagttgaataaactattgtacactgtaaaggcaaaggaaagaaagaactaccaacatcttctccattttctttcatttttgggacgaggccggccggtggcctgccatctgtggccgtgggagtgacagagcagcatacattttgataggcgtataattcaatagggattttccagatacggcacttgtaacagaattttcttggaggtgtatatgaacaacggcgatgtgacaatcttttctgtacggaacatttatactattgagtgattgatttactatt

SEQ ID NO: 276631 - DNA, 662 bp, Zea mays
caatgctgcacaaggcattctatcttcattcttctttaagtatgcagacacaattttgaagaggtattcgtcaactgttgccacaatatttactggcctagcttctgctgcatttttggggcattccttgaccattaattctctcctgggcatatcagtggtgtttatttcaatgcaccagttcttctctgcgcttgcaaacgtccttgtatgtcacaccagctgactcaatagagttggaagatacacaaaatgaccgcccatctgaatcttcttttgtaaatatgactgctggtgccgctgatgatgcaagccatcggattggaactgatgagaggcagccgctattgcctatatgaacttgtttgttgaggtaggacagaagagaggggatagaagaagaggctccttgtttgccgggtgagcagcagacttgatgtagcattggtaggcgaataaacagctattgtacactgtagaggcaaaagaaacaaataaacgtggcttccatcatctttaaattatttggggatacctttggagcgggagaaatcatacattttgatagacataattaaatagggatttctagattcgaatcttgttaaaaaaaaaaagaattatggagaaacacggctgtgaaatggtttttttaggacctt

SEQ ID NO: 276632 - DNA, 403 bp, Zea mays
ccagttcttctctccacttgctaaagtcaaagatgacaaaccagctgacttaatagagttgggagacacacaaaatcaccggtcatccgaatcttcttttgtaaatatgactgctggtgctgctgttgatgcgagccatcggattggaactgatgagaggcaacccctgttgcctacatgaactagtttcttgaggtagggatagatgactctttttttgcggtgtgagcagcaggtttggtgtagcattgtaagttgaataaactattgtacactgtaaaggcaaaggaaggaaagaactaccaacatcttctccaatttctttcatttttgggacgaggccggtcggtggcctgccatctgtggccgtgggagtgacagagcagcatacattttgataggc

SEQ ID NO: 276633 - DNA, 446 bp, Zea mays
cgtgccttgtgccgaggagcaagaagaagagggctccaacaagatgccccctttatcttctccttccatgctcctcctcccgcagcaccacctccaaatcttctcgggcctgcctctgcctctgcctcctgaggtgctgaacgacagctctgctacttctgatctgcatgatggccgggaaagcagcatgccggagtcatggagccagctgcttcttgggggattagtcggagatcacgagagatacaacgctgccacagctttactgtcaaaaggattagaggagcgacctgcagcttacaattgctacgaccctggacatggtggtggtgaggagatccagacaccggggaccaacattaggtctcatcaggtgagccagacgctcttagcgtcgtcctctcctaggtcctgcatcaccacaagcctcggcagcaacatgctgg

SEQ ID NO: 276634 - DNA, 712 bp, Zea mays
gcgccgtcaccgcgcacctctggcgttgcatgtgcgtctcgcgcgggctcgccccgggctcgggcactcgggtccgcgtgccggccaacgtccgccaccgcctgcgcccgccgctcccgcggagctacttcggcaacgccatcgtgcgcgacctcgtgaccacccgggtggaggacgtcctggaacgcccgctcgggttcgtggcgcatgcgatcaaggacgcggtggaccgcgtcaatgacgcctacgtgcgctccgtggtcgactacctggaggtggagtcggagaagggcagccaggcggcgcgcgggcagctcatgccggagtccgacctgggggtggtcagctggctcgggatgcccatgtacgacgccgacttcgggtggggcacgccgcggttcgtcgcgccggcgcagatgttcggcagcggcacggcctacgtcacgcagcgcgccaacagggacgacggcctcgccgtgctcttcgggctggagcccgagtatctgcagtgcttcgaaaaggtgttctatggagagtgagtcgtgagattactatagtgtcatccgcgtttcgtcgtgtgagcaccgagtgcgattactgtagcttggaacctgatgctgttgatgtgggctttgtgcatatgtatgacaaattactccggtttctgtgttgtttcctagtattctcatggggtttttaggtgctcagtcga

SEQ ID NO: 276635 - DNA, 1000 bp, Zea mays
  unsure (1)..(1000): unsure at all n locations
cccaatcgnccgctttcttgatgttgattaaagacagcgataggcatgtgagaagagcagcagttctggctttgagcacagcagcgcacaacaagccaaatttgattaaaggtcttctattgctaagtgtgttgctgttctatgcttagcagctggtgaccagaagtgtgcatctacaattgaaatgcttaaaggcattttgaaagacgacagcactactaactctgctaaacaacacatggccttattatgtctgggagaaattgggaggaggaaggacctcagcaatcatgttcaaattgagaacatcgtcattgaatcgtttcaatcaccttttgaggagattaagtccgcagcatcctatgcacttggaaacattgctgttggcaacctctccaagtatttaccatttattttggatcagattgacaatcaacagaagaagcaatatctgttgctccattcacttaaagaggtaatcgtgcgacaatctgttgatcatactggccagagtgagctacaggattcaaacattgagaagatattggcattgctcttcaatcactgtgaaagtgaggaggagggagttcggaatgttgttgcagagtgtttaggaaaaatttctctaattgaaccaaaaaaactagtccctgctttggaggtacgcacgtctagcccagcagcaaatacaagagctacggttgctattgctataaaatattcaattgttgaacgacctgagaaaatagatgaaatcatgtactccaagatatctactttcttgatgttgattaaagacagcgataggcatgtgagaagagcagcagttctggctttgagcacagcagcgcacaacaagccaaatttgattaaaggtcttcttccagagatattacctcttctatacgaccaaactgttattaagcaagagttaatcaggacagttgctctggggcctttcaaacatgttgtagatgatggtcttgaactcaggaaagct

SEQ ID NO: 276636 - DNA, 324 bp, Zea mays
tctcattcgattacacacacacacggagagatcaaattgatacactgcgatctcgatcaaacaaatcaaaaaaaaaaaaaatcttgcgagacattactgaccgatgaagttcggcaagcgcctcaagaagcagatcgaggagagcctgccggagtggcggagccagttcctcaactacaaggagctgaagcggcgcgtgaatgccgtgtcctcccgcgggtcggcggcggatccgtcgtcgtccagcgccgcggaggccgacttcctgacgctcctggacgccgagatcgacaagttcaacgtccttcttcctggaacgggaag

SEQ ID NO: 276637 - DNA, 551 bp, Zea mays
cggacgcgtgggcagaagaagtgctttaccctcacccgccccacgcgcggtagttcgttcgacactgtcacagtcacagaccagtcgtttctcccttctctcccccgggcccggagaggagaggatggccggccggagcagcctctccatggtcgcgtcgcaccggctgttcacgccggtcaaccctgtgggcggcgccgaccacggcgtggagctcgacgaggccgacgtcatctggggcggcgtcggcggcggcggcgggtacccggcgtcgtcctcgccgtcgtcgtcgccgatcctgtcctccgcggtcgacccgtacgcgcggtcgccgccggtggccgcgccgtccaagcagaagccgcgtggggtggtggccggcgctccggggccggcgtcggtgcccgtcaacatcccggactggtccaagatcctgggcgccgagtacgccgggagcggttgggcggcgcacgacgaccgcgctgacgacgacgcgggggccttctgtggcgccgggggccggcgctgggtgccgtcccacgaggtgctgc

SEQ ID NO: 276638 - DNA, 492 bp, Zea mays
gtagctggcgcaccagagcatctcggcggacaaggtcctgttcgaccacctttacgcgccgcgcctatccggcgcgggcctgcacaggctgctggccgacgacgtggtgttcgcggcgctcaaggacagcgcggccatggggtacctggctcccgagtacgcgacgacggggcggtccacggacaagcagggcgacgtgtacgcgttcggcgtggtggtgctgcaggtgctggcggggcggcgcgccgtgtcgccgccccacctccagcagggcggcggcggcggcgggcggctggacgacctcgtggacccgcgcctgcgcgggcggttctcgcgcgccgaggccgccaagctcgccggcgtcgcgctgctctgcaccgccgaggcgcccgcgcagcggcccgccatggccgccgtgctgcagcagctcggcaccagcagccagtgatcgtcgtggtcggccggtacggtggtgggccggagtcggagctc

SEQ ID NO: 276639 - DNA, 879 bp, Zea mays
gtgtgagtcacgcatgaacactcaaaatggtgaccgtccattttttgattttctggaatcatccctcagacatagagcagaaatggtggctttggaagctgcacggaagataacagagatggatgttacaagccgtgaattggcaccagcaattactttgttacagttatacttgagttcatccaagcctgtgcttcgatttgctgctgtccggactctcaataaggttgctaggacacgacctctggcggtgacaaactgcaatgtggacttggagagtttgttgtcagaccagaacaggagtatagcgaccctggcaattactactcttcttaaaactggcaatgaatcaagtgtggatcgtctcattaaacaaattacccttttcatgtctgacatagcagatgaattcaagatagttgttgttgaagctatacggtctttgtgcctgaagtgcccactaaactctcgctcagtgttgacttcttggagccactgcttgagggaagaagggggcttcgagtatcatacagccatagtggattccatagttactctgggcagtgaaataccagatgccaaagaaattggcctgctccatctttgtgaattcatcgaagactgtgaattcacatatctttctagtcagattttgcactctttgggatatgaaggaccatggacatcagatccaagcaggtacattcgctacatatacaaccgtgcgatattggaaaatgccactgttcgtgctagtgctgtcagcacgctggcaaagccctggtgcccctggttgatacgctcaagccccaccatctttgttcctcttgcaacgatgcctgtttgatactgaagatgaggttcgtgatcgtgctacac

SEQ ID NO: 276640 - DNA, 662 bp, Zea mays
accagacgtccgaccactcgtatctaatattgattgaatacttttaataaagcagtaccgatccattattggtatgtttatgtcatatagtaaacggatcaaagggatatactgtggcattagagaatattcatcttgacaagaaattatctatatgtgaagatatgtctgacaagggctatagctcagttcggtagagcaactcgtttacacgtgcgccaatgcttttcaagggaactttttatgcaatgaacataattgaccttgttgcaaaatcaatgtcttacttcatggattcgaaagaatagaagaacagtagcctgacaatgacaaacagctggttcagtccgattcaggtgccaattaaggtgcttactcaaatagaactcctattgatttgctagttgataaggtaaatatccagcccactcaatgctaggcgtaatgaggataagggcctccaaaaaacttcttttcgttctatgaactttaaggtgtatgaagtctcatagtaaactcttgcagcggaacgatagagactccatttcacttaggttgatttaatttaggccggaggcagacctaagtcaaggtaatcctcctttgaaacactttggtattgttcctagatagatcataagacaaataatcaatcagagcac

SEQ ID NO: 276641 - DNA, 487 bp, Zea mays
cggacgcgtgttctttagactacaacgttacagcacaacacactgcttgcacgtacatacgcagatagagaccagcagcaagctcgatcgagatcgagaggcatggggagtgtaccggaggagaaggccaagctgggcttcggcggcctggtgggcgacctgagggaggtgtacgagagcggcaggacgcagggcctggagtggcggcagtcgcagctcaggggcctcgtcaggctcctggaggagaaggaggaggagatcttcgacgtgctccacgaggacctggggaagcaccgcggcgaggccttcagagacgaggttggggttctgaagaagtccgtcgtcgacaagctgcaaaacctcaagaactgggccggctccggagaaggctcacacccaattggttgctttccagacaaagggcttgttgttccaaagacggttggggtcatgcttcaattattatgctggaaccttccaataaggc

SEQ ID NO: 276642 - DNA, 431 bp, Zea mays
tcgcgggtcgacgcaagcctctacagtgagcccgatcagcatcgaaccagcacatcgcaagacaagcagcagcagccaccactgccatcacatggagtacgccgccgtcggctacggctacgggtacgggtacgacgagcgccaggagccggcggagtccgcggacggcggcggcggcggcgacgacgagtacgcgacggtgctgtcggcgccacccaagcggccggcggggcggaccaagttccgggagacgcggcaccccgtgtaccgcggcgtgcggcggcgcgggcccgcggggcgctgggtgtgccaggtccgcgagcccaacaagaagtcgcgcatctggctcggcaccttcgccacccccgaggccgccgcgcgcgcgcacgacgtggccgcgctggccctgcggggccgcgccccgtgcctca

SEQ ID NO: 276643 - DNA, 497 bp, Zea mays
cgtggtcgcgccctcgcaggcggacgacgtcgccgccgccgccgccgccgccgcggcggcggcgatgtacggcggcggcatggagttcgaccactcgtattgctacgacgacgggatggtgagcgggagcagcgactgctggcagagcggcggcggatggcatagcagcgtggatggcgacgacgacggcgccggcgacatgacgctctggagctactgagctgtagagtctgtcttcagcgcaggggggtgggagaggagaccacgctctggagctactactggacagggaagaaagtgggggagccgggagcgagttcgaatttgaattcagaaactctgtactggcactggcacacgcggggaacgcgccacgcaagagcgagcgctatttccctccctttttgggtgctgggagaataataaaaagaccaacaatgaaggcattagtactaaaaaaaaaaaaaaaagaaaaaaaaaaaaagggcggccgctct

SEQ ID NO: 276644 - DNA, 974 bp, Zea mays
gcagatgctgaactgtgttgctggattgcgtgaatattgttcgcaaacagatgaaattcatacagttccaaggattccggtgatgcataccatggtctaatgcggcctcaatgaaaaaggaccaaaaccttcaagaaccagactcgaagaccaaacaagctgataacaaacatttggatatggtagatgaagagtcggaagatgatgatgactatcaagttcctgatgctgatgtggaggaagaacctaccaaatctgacagtgatgctaagaactcagacccaatagatttgtcttggttttcgggcattattcgtcaggatacaaatgagaaaagtcgtaactgttgggcagtgcctgatagcaagatctttaaagttcgtagcaagaactttccacatgacaaatcaaaggtaccagcaggtaagtatctaatggagctcgtagcagttgactggtttaaggacgccaagcgcatggatcatgtcgctaggcggaaaggatctgcggttcaggttgccgctgagaagggaatgttcactttcctggtaaacatacaaattcctggaccaagtcattacagcttggtcctttattttgtctcaaactccttgaagaaaggatcgctgttgcagcgttttgccgatggtgatgatgattttagaaacagcagactgaagcttatcccatctgttccaaaggggtcttggatagtgcggcaaagtgttggaagcacaccttgcttgctggggaaagccgtggactgcaactatttgcgtggtcctgactacttaaaagtggatgtaaatatcggttcgtccgcggtagccaacggggtcctggccttgtggttggccgttgttacaactttggtagtcaccttggcgttcttattccagccaaccacttccaacaggttccaaaagcagttcttaggccctgcccggttgtaaaacatggaactttttgcggcc

SEQ ID NO: 276645 - DNA, 955 bp, Zea mays
  unsure (1)..(955): unsure at all n locations
atgnacccacgcgtgcggctggcccgctgnggtggcggtgtggcttgcctgtacttgccttggttggggcgttggccgtcgccggatctgcagctgtctgcggcgccttctgcaggggcggctagctccgtgcgttggggcgtgtggtgggagggcctctggcgaaagccatgcccgcttgcgggcggacagcggtgacgcccgcgggcgccacccctaccctattgagggtggtgtccttggacctctcaccacaatgcgagaaccctcgcctcggccttcttggggtctttcgctggtgctcgtccgatgttggggctctgaaggttggggctgctgggttggtgggtcggcggacgacatgaggtcttcggaggaaactttgcttggttggtaccaggcgagcggcgacgacttttcgatgtcgtctctccttcttgaaggcgcggcccagaagacctctagtttgtgtgttcgtcggcgttgtggaggctctttgtcactccgcttggctcggtggtgtcggggccattgtcgctttaggcgtctgcttgctcccggagttcggcgttgtggatctttgctcgtggcgaagaatcggagctgcctcgtgtggggtgtgcgaggcttggcaacgatggcgcgccgtgatcttattccttgcgtcggtgtctggatttaggcgtcgtcgagttgctttgacagtgtgcggctcgtcttggggagtcggagctgctcgtcccttgtgtttgagcttggcaacaatgactctagatgtgtttgtgtgtgtgagcctgctgttgtctaggtggtttgttagggccttcaccggtttttctgccgtgcgccctgtgtaggttttgggtccggttttccttaaaactggatccattcaattctccccaattgagaggcagagctcctgcctttaagatcaaaaaaaaaaaaaaaagaa

SEQ ID NO: 276646 - DNA, 418 bp, Zea mays
gctgatcacaattccagctcaggccaccagcaagcacatcgcaaaggcagcaagtaagcaagcgagtaaccacaccacaactacagggaggaagagcagaacagaggcagagagagagagagccatggcggcggtcgccgtgagcgggaggctgcggacgctggggcgcggcgcgtcgggcgccgtggtgtcgctggcgtgggacgccgcgtcgggggagctggtcgcggtcaagtcggccggcgcgagcggcgcggcggcgctgaagcgggagcacgcggtgctggccgggctgcgctcgccgcatgtcgtgcgctgcgtcagcggcggcgaggcggcggcggcggaagaggggtcttcgtaccagctctttctcgagtacgcccccggcgggtcgctcgccgacaaggtggcccgg

SEQ ID NO: 276647 - DNA, 463 bp, Zea mays
atcgcagctccgctgccctgctctccaccttctccagtcctccaccatggacgagccgccgctccatccaccgcccctcccccatgccctcaccaccgccgagtaacacctcctcgccgccgcccttgccttgacggattcgaataattcgtggaagagaagttcttattcccttgccttcagccgtactgcggcggcggaatctctctctggacttctccccgatgtccgtggcggccgagcaggaggtggcgccggccgtcgtggccgtggccgtggccgaggcggaggagtgggaggtgtgcgcctgctgcgggctcagggaggagtgcacgccggcgtacgcggccggcgtgcgcgcgcggtacggccggcgctggctgtgcgggctctgcggcgacgccgtgggcgatgaggtcgccgccgggggcggctcggtgcctgagctcgaggccacgatcgc

SEQ ID NO: 276648 - DNA, 959 bp, Zea mays
tgacaccatacaagagctatacggttgcatgcaagcttacgaagctacggatcgtatagaacgaccgccctcatgaatgtacataaacccggatgatcatcatacgtgtggatttagacaagaaaacacctgtatcaagccaacaaccgtctccctttcacaatacaaacactcatcaccactcgagcactccacacaagagtaagcacgcaaacgacaagctcttttcatatctacaggaagcttatctttgggtcagggctagggatttctgtatacaccaactgcagcgactgcaggtaagaagggccgctcctatggttgatatgcactcaaaaaattacatgaatctgctacactcagtgaggtcgatcgagcagattaggaaacgcttcacacccagcaaatggttacagcttttattacctgtaccacagtctccggtgagaaaacatgaggccgtgtgatgttagtgaccaccaacgtggcgaggcaaactggtctacaattgtgtcgggctctgcttttggttacgttgtagcatatgagtttgcaggctgcaatttttgacatgtattgctgcaaccgtggacaagagatcctttgattggtccaacaacatttgttcttgcgttgcaactttggcaagctcagacaccacagagcttgttccctcgaccttagacagcaaattacatatcgaggatgtcattgtgttcattacatccactgctgagttaactgcttccttcacagcttgtgcatcagcctttgcaccatcaacaactggaagacgtagagtactagccttcagagctttgattgctgctgataaagcacttgaatgatgtttttcgatatgagaccaggcctctagatatgacatctgccccctaagaatagcaaacagcttgagtttttgcttttgaagctggagtctgctccttttgttactgaca

SEQ ID NO: 276649 - DNA, 703 bp, Zea mays
  unsure (1)..(703): unsure at all n locations
ctcggaatcgctcgagggcggcgaccgctcgtcccatgtcctagtctccccaacgccttcgacganggcttctacaagcggcgtcatggtccaaccgggggcctgctgtcctcggaccatgcgctgctcagcgacaaggaacacgccgtgcaggtcgtcacctacggcaacgacccggccaccttccaggccgacttcgccgccgccatggtcaagatgggctccgtcggcgtgctcaccggcaccagcggcaaggtcagggccaactgcagagtcgcctgattcatcgtcatcactcgtgtggagttgtagattcattatattgattgatttggaccggacgacgtcgacgggatggcgtagcatagcatggcctgcttgcgcaattgtatgtatgccctgtacttgcgcgtgtatgggtttcgctgtgcaaattttcgttggctcccccgattgattgaggcgtgtgtgcgtgtgtgtctcttctgaatctgaatggaaaatctgtaacctgagctaaaactgctcgtgtactacccaatagttgcttcaaactacgatggatttttttttcaaactatcacttccaaacacgcacaaatatgtactgtatttctcaatcaactaaggatcggagaaactggtttgtaaaggggattttgtaaacaccagtcaatcagacatgtaactcgacatgggccta

SEQ ID NO: 276650 - DNA, 448 bp, Zea mays
cgccgttgcgcaatggcgcactttgattggaccaactgatgcagatttggccttaacctctcatccaaacagcattagggcaaggtgtcggctggactctgagagaaattgcgtgcatggttcggattcaccagaatctgcagacagagagatctcatttttcttcggagaagctgaatccgtatctgtggaacatgatgagctatagacgccacactggtatcagtggcaatattggccggctcactggacaccgtggtgagtagtatcgactctgctgcttctagcgttcgtcatgcttcttttatgaactaaacccgaagacgctgctatttgaggaggggatgtcaggtgtcacagaggacagagtcatttttagggctagtttggaaatctcatttctttcaagagatttttatttccctaacgaaatttagttatttttctt

SEQ ID NO: 276651 - DNA, 436 bp, Zea mays
ctatgtgtgggctggactctgagaaaaattgcgtgcatggttcggattcaccagaatctgcagacagagagatctcatttttcttcggagaagctgaatccgtaactgtggaacatgatgagctatagacgccacactggtatcaggcaagtcagcaaactgaattttgatgtgtctttgaactcttaggctatctcctgtagcttcttactcgtacccgtttcttattattttaaaagttattatgtaaacagtataatttatagtgcaaaacagtgtcttgcatggccatatgcttgtggcttcatatgcagagtttactgatctgctgtgcacattgtgattgctaagactaggatggctgagcagctgaggcctattggccattcatatgcttctgcttgctcaagtgtttactctcgaagtaataatgggc

SEQ ID NO: 276652 - DNA, 921 bp, Zea mays
  unsure (1)..(921): unsure at all n locations
attcactgtcctcgtctcgctggggagctcctgaaggaagagctcatggacaggactgtgttgcagctccacaaggcctcagtcagtgatctcctgatcgcctccaggcctccggcgcagaccgtctacgatgtccagctggttcagacactcatcggcaggtacatgagccatgccggggtatctcaaggtgggatttttctcaacgaccttgaccaggagatgtttgagacgaacgtggacggtgaatctttgctagcgttgtgcgagctggtcgataggtacttggctgaagttgcctctgatccaaacctgtctgggtcgagctttgtggatttggcgacttccatgcctgaaacagccagaccgacacatgatggagtgtacactgccattgacgtatatctgaggttgcatcccggcctacccaagatggagaagaggaagatttcgaacctgatggacgtgaggaagctgtccaagggggcgtgcatccacgcggcgcagaacgaccgcctcccgctgcgcgtggtggtccaggtcctcttcttcgagcagctgcgcgccgcgggagccgccgccgccgccgggacgcccagcgccagcgtggcgcggtgcatagcgcgcctggcggagcaggaggaagaggaggagcgctggaacgacggccgcgcgctgccggagcccccgacccccggcgcgctgaagaggcagctggggagcctgaagctgcagggcgaccaccaccagggcgcgggcgacgacgggcggcgcctggtggcgcgcagcaacagcgtggccaaccagagcagccggatgtcgctgtcgtcgcggtcgcggaggatctttgacaggctgtgggtcggcggagcgaagctgcccggggaggccgncgccgcgggcaaagggtcgtcggacacg

SEQ ID NO: 276653 - DNA, 595 bp, Zea mays
cccacgcgtccgcccacgcgtccgcgcgaggccctgcttcctgctgcgatggggggcgagacgcacctgagcgtgcaggagctggcggcgtcgctgggcgcgctaccgccggagttcgtgcggtctgagcaggaccagccgggcgcgaccacgtaccgcggggccgccgtgccggacgcgccggtgatcgacatgtcggagcccgggttcggcgcgcgcatggccgcagccgccagggagtgggggctgttccaggtggtgaaccacggcgtgccctcagcggcggtggcggagctccagcgcgtcgggcgggccttcttcgcgcttccgacggaggagaaggagcgctacgccatggacccggcgtccggcaagatcgagggctacggcaccaagctgcagagggacctcgagggcaagaagacgtggaacgacttcttcttccacgtcgtcgcgccgccggagaaggtggaccacgccgtctggccccggagcctcgccgggtacagggaggccaacgaggagtactgccgccacatgcagcgcctgacgcgcgagctgttcgagcacctctcgctggggctggggctccacg

SEQ ID NO: 276654 - DNA, 469 bp, Zea mays
agcttcggtgcgggtcttggccatggcggtggcctcggggctggattcaagggaggtggtttcggcggaggtgcgggtggtggctttggaggaggcaagggtggtggttttggcggaggttcaggtggtggcttcggaggtggtggaggttcgggtggtggcatcggtggtggactgtagaggtggcgggagcttggtgcgtgcacgttgagtgtgtgcatgccatgaaattaaaaagcgatacatggagtgtgtggtacggtatggacattgctagagttacattacatcatcactagtatatataaggttgactcttatttgtaagcctaatgaaagtgaataattggatgcgttatgtaagcctactctactatatatatgtttgttttggaaaaaaaaaaagaaaaaaagcaagtggagctaaaaaaaaaaaaaaaaaaaaaaaaaaaaaaaaaaagggggcggc

SEQ ID NO: 276655 - DNA, 1153 bp, Zea mays
  unsure (1)..(1153): unsure at all n locations
cccacgcgtccgcccacgcgtccggttctagatcgcgatctagctctgtgtcacagntaaagattattgctcttactcatgcaaaagatatagtcgtattcatcgatgcaattactattgtatttgaggaggcatccaaaggaggtgctcctttgtctttaccaattgctagtattgaggttgggcatggtcacagcttgccaaacctagcactcaggaggggcgaggaacactcttttattctcaaaccagcaactatgtcctcaagggaacggaagaccaacagtcatgcacctctggccttatcactcccaacgatgaccggtgctactttaaatactcatacaccaaaggctggtgagccgtatgctgatctaagcgaccaatatgctgtactggtatcttatcgctgtaattacacagaatcgaaactttttttcaagcaagcaacaagctggcgaccctctgcagccagcgatcttatgatctcagtatcatccgaactgtctttacggaatcctagtcttggtgctcgtgttcctcaactccccgtgcagatactaacactcgaagctactaatatgacatccgaaaaccttacattaactgtccttgctcctgaagcatctggttcttcttcagttgtatccttgaactcatctccaaccaccccaaatggttcttttgatggtgttaatgagtcatcaaaaagatctgggctgggaaaagatggaattggctttcgaagattgaattctgtcctagctactccaaaagaaggtgataatggaggaaacagaatgagtaatgcttcaggctgtactcatctgtggttgcaaagtgcagtgcccctagggtgtgttcctgcccgctcaagcaccactgtcaaacttgagctgctaccattatcagatggaattatcacacttgatactctgcaaataaccgcaagggagaaaggccttgcttacattccggagcactccttggagatacatgccacctctggtatgtcatcgggaaggtcataggataggagagcatcaagagggatactggtcctgtatattgggggcctgggactcagcctggacatatgaggtggaaacaaccaggccaagcatggtttttttttatctcatttgattggatg

SEQ ID NO: 276656 - DNA, 475 bp, Zea mays
gtggtttagaaggtgtgtatctaccagggaaaagatggcggagaaaagttgaaatcattcaaccaattgaggttcattcttttgctgcaaaatgtactgtggaaaatcttctctgtgtcacagtaaagaatattgctcctactcatgcaaaagatatagtcgtattcatcgatgcaattactattgtatttgaggaggcatccaaaggaggtgctcctttgtctttaccaattgctagtattgaggttgggcatggtcacagcttgccaaacctagcactcaggaggggcgaggaacactcttttattctcaaaccagcaactatgtcctcaagggaacggaagaccaacagtcatgcacctctggccttatcactcccaacgatgaccggtgctactttaaatactcatacaccaaaggctggtgagccgtatgctgatctaagcgaccaatatgctgtactggtatcttatcg

SEQ ID NO: 276657 - DNA, 236 bp, Zea mays
gtcacgtgacttatattgttgtacgcattaaggtcggcctgaaaaggatcagatcatgtgtagaaacaatatagtttagtgaaaaattggacccggcactatgaccaataattatgattcagttgtgttagatttattgtgtggcgtaatgatgtactgtgtgtaatatatctttgtaataagcatatacccattttactctattattaatacagctttctaccctgtctagggct

SEQ ID NO: 276658 - DNA, 389 bp, Zea mays
cagcaaagcaactgcttgcagcctccgcacaacaaaaaaccccacgggtagtctcggatctccacgccaccaaaacattcgaagcttcttcgatctcttgcgcggcgttctggaatctgaaccttcaatcttggagagcggcgcgtccccaaagaattagatcagccatggccaagcaaacgatcgtgatcaaggtgccgatggcgagcgacaagtcccggtccaaggcaatggcgctggtggcagccgcgggcggggtcaactccgtggccatcgccggcgacgacaaggaccaggtggtcgtcgttggcgagggcgtcgacttcatcgagctcatcaccatcctgcgcaagaagatgggcggcgcgcacttcgtcgaggcaatgact

SEQ ID NO: 276659 - DNA, 718 bp, Zea mays
tctacttcgctgaaaagtgtgattgctcaaggtggtcctagtattgccaacaagatcatatcaaaattaaccgaggatatgaccgtggtgacatccattgacggacaccccaccaagacatggatcgtgatgacttataagggagggaaggtttccatttgggactatcaggagaagaaaactgtgatggagttgaaggtcaatgaggaatcaggcaagattgctcgtatcgcgcatggcatttctcaaaacttcaaagagacaggtgtcccacattcagtttgttcagccaaatttatcgctcaagggaaatggctggtagtgggaaatagtgatggatacatatatgtctacacttacactgacactaagcttaaggaggccaagaaattcagagctcatgacaactctgtcgacgtgttggctgtccacccaaccgaggcgtaccttctttcatcatctgcttatggcgaaacaataaagctttggagctggggcagtgactcgatcatgaactgggtgcaaattaaaacatttaacgtgaaacctacatatccggatggagtgcgcagtctcaggtttaacccaagggacaccaacacttttgcttgtgttacgtatgaagatagagtaaaggtcggggacataaaaaatccttctggtcttaccaccatactgaaggggccattgaaagctgattattgcttctctcatactc

SEQ ID NO: 276660 - DNA, 737 bp, Zea mays
ttaacaggcaaaaggagtcctgttccaaccggcgacggcgagcgagttcctacccatgatagaggccgtgcacgagcgcctggtggagacgacgcgcacatacccggtgccaaggtggagaacaacaggttctgcgtctccgtccacttcagacgcgtcgacgaaaagatgtggggcgagctgtcagagtcggtgaggggcgtgctgcgggggtacccgaggctgcggctgacgcacgggcggatggtgctggaggtgcggcccaccatcaagtgggacaagggcaaggccctggagttcctgctcgagtcgctcggcttcgcggactgcagcagcgtgctgcccgtgtacatcggcgacgaccgcaccgacggaggacgccttcagggccctgcggcgccgcggccagggccagggcgtcggcatcctcgtgtccaagcaccccaaggagaccagcgccttctactcgctccaggggcccgccgaggtgatggagttcttgctgcggctcgtcgagtggaagcgcctctccaggctgagtcggacgcaatgagacgatcgacgcaacggaccaagttaactgatgcggccaagtgccagttagtagggtgtgtgtaacaactaacaagcaagcatgcgtgtacattattgcccactagctagagcgtgttcaattattaatataccgacctggcaagagcatgggtttggttaaaaaaaaaaaacaaaagggcggc

SEQ ID NO: 276661 - DNA, 991 bp, Zea mays
tggacgcgtgggcccggccagatgcggcgggcggtgcggagcgtcgccaagcacttcccgacggcgatcgtgagcgggcggtgccgcgacaaggtgttcgaattcgtgaagctggcagagctgtactacgccggcagccacggcatggacatcaagggccccgccaaagggtcccggcacaccaaggccaaaggaggcggcgttctctttcagccggccagccagttcctgcccatgatagagcaggtgcacgattctctggtggaaaagaccaagtgcatacctggagccaaggtggagaacaacaagttctgtgtgtctgtccacttcagatgcgtcgatgagaagagctggatcacgttggcggatatggtgaagtcggtgctcaaggactacccgaagctgaagctgacgcagggcaggatggtgttcgaggtccgccccaccatcaagtgggacaagggcaaggccctggagttcctcctcgagtccctcgggtacgccgactgcaccgacgtgctgcccgtgtacatcggcgacgaccgcaccgacgaggacgccttcaaggtgctccgcaagcgcgggcagggcgtgggcatcctcgtgtccaagcaccccaaggacacctgcgcctcctactcgctgcaggagcccgccgaggtgatggagttcctgctgcggcttgtcgagtgggagcgcctctccaaggcccgccccaagtggtgatccaatccacgacgacagatgacgttcgagctgggattaattatacactatatatgctcaatatataagttagttatactacgggtgatggattaattagagcgatcggtggagcccggagcgagggagtaattaagaccgtacgcgcccactcctacttgagctgagctgaactgagacgagacgagagctcgctgcgctgtgcaaggcacagtcatgtgcgttcagtccacggcgcctcctatgttttacgggagcatgtggc

SEQ ID NO: 276662 - DNA, 639 bp, Zea mays
  unsure (1)..(639): unsure at all n locations
tgcacgagcgcctggtacagacgacgcgctgcataccgggggccaaggtggagaacaacaggttctgcgtctccgtccacttcagacgcgtcgacgaaaaggtgtggttcgccaataataaacggccgtcgtcgttttcctcttgccgtttccagcctcagcctcatcatatcatgtattggctggttcagatgtggggcgagctgtcagagtcggtgaggggcgtgctgcgggggtacccgaggctgcggctgacgcacgggcggatggtgcctggaggtgcggcccaccatcaagtgggacaagggcaaggccctggagttcctgctcgagtcgctcggcttcgcggactgcagcagcgtgctgcccgtgtacatcggcgacgaccgcaccgacgaggacgccttcaaggtcctgcggcgccgcggccaggaccagggcgtcggcatcctcgtgtccaagcaccccaaggagacgagcgcctcctactcgctccaagggcccgccgaggtgcgtccgtgacccacacccacccaccaaagcatccgtttcgatcccgtgtctacgtnctcgtnttcctctctccgcggccccgcatagtgtggccttacctgacctggaccaccaccactaccggtg

SEQ ID NO: 276663 - DNA, 658 bp, Zea mays
cggacgcgtgggcggacgcgtggggtgctgatgggtgttccacgtggcggtgcatcttctatccaaccattgcatctttcccctcttgccgaagcttgttccagaaaggatctgacagcaatacatgaaattctagaaaagacaggctacaaggatgatgaggggactgcaaatgagctctcgtttcagatgtggacgaatcagatgcaagatacgctgaactcaaaaaagaagggtgacaatgcttttcgacagaaggattttactgctgccattgattgctattcccagtttattgaagttggtacaatggtatctccaaccatttatgctcgacgctgcttatcatatctgatgaatgacatgccacaggaggcattgaatgatgcagtgcatgctctggtaatatctccgacatggtcaacagcattctatcttcaggcagcagcacttttatcacaaggcatggagaatgaagcccaagaagcactcagggatggttatagcctagagcaaagtagcagcggtggacattgagtgtgaacagatttgtagtcccccaaatgcacataatttcaggtatacatactttttagaaatcctaatatcttgctcccttcgttccaaattataagttgttttttgcttttctagatac

SEQ ID NO: 276664 - DNA, 553 bp, Zea mays
cggacgcgtgggcgcgtcacgcgccctgtgtagggatctcccccttctcctgctctttgttggccgggtagcgtcgcgtggaagcacggcggcgtggttccgcgcccgtttcgcggtggcggttccgcgaacctcgccggcggccggactaacttcaccccgccgtgtggtgcacggcaatcggcgcagcacggtgggttatgctgctgctgcgcctacctatatggacggaggattgttgtggttgtggtcgccccgactagatattttccttctgtggtgtatgattgctatggcgggcccgcgctcgagcggtgtgcggctcagctcagctgcgggggccctacttgggtgggtgtgccgtgtgcggtcgtggtgagtggtgactttcgtagtccttgtgcgggccatccgcccgtgtctagtggctcctctatgagtatgccagatgtccttagattccggcgcatgtagccgagctcggcggagactccgatgccactgtcgtgaactaaattaccaagggttgttcgatcgaagaatgcaattagca

SEQ ID NO: 276665 - DNA, 1158 bp, Zea mays
gtcgttctcgctcctccccacctcccgcggcctcccacgcgacatgattgcattgcgggctgccgcggagctcagctctcctgtcctgccaccaccacgccgctgacgatgccttcctctcgcctgcctctgcctgccgcggaggagcagcggcgcatcgcaacactaaccaaaggtgccgagccagggtgactgttccgaggagcgtggcgtggacccatggggaagaagggcaagtggttcggcgccgtcaagaaggtcttcagccccgaatccaaggagaagaaagaggagaggctaaggaggaaatcagcagctagcaacccagcaccggtagatctgaccccatctacctccctggaagtcaatgtttcggtgccaccccctccggctcctcctccagttcctcgccagaccgacgaggtcagggtccccgaagccgagcaggagcagagcaagcatgtcaccctggaggaggcccctgctgctgctgctgccccagcacaggcgtcggtgctgccacctggtgcgccaaccgaagagctcgccgcaatcaagatccagaccgccttccgaggttacctggcaaggagggcactaagagcactacgaggccttgtacgattgaagtcattggttgagggtaattcagttaagcgtcaatctgcaagcactctgcgctgtatgcaaactctatcgcgggtgcagtcacaaatacgatctaggagagcaaagatgtccgaggagaaccaggccctccaacgccagctcctacttaaacaggaactggagaatttcagaatgggtgagaactgggacgacagcactcaatccaaggagcaaatcgaggcaagcctaataagcaggcaagaggcagcgataagaagagaaagagctcttgcatatgcattttcacatcagtggaagagcacatcaagatctgcgaacccaatgtttgtagacccaaataacttgcagtggggctggagctggttggagcgctggatggcagcaaaaccttgggagggacgcaatgggaccgacaaggagagcaacattgatcgcggctccgtcaagaatatgagcttgaaccttggagttggaaagggtgagatcacaaaagcttataaccgccgggactcaaagccagagaagcca

SEQ ID NO: 276666 - DNA, 640 bp, Zea mays
ctggaataggggatcgagatgcttctaaagtttctgtgaagaaagaggaagcagcaaacattaagatagttgagcttgcaatgcatagatggtctgggcagttcagccggccattcctctttggattattgaatgatgggacattgttgtgttatcacgcatattattttgaacgctcagaaagcaatgtgcaatgtgctcctttctcacctcatggtggttcaccggatattggcaatgccactgattcaagactcagaaatttgagattttgtcgagtttcaatagatatctcatcacgagatgacatatcatggcttgtacgaccatccctcacaattttcaacaatgttggaggttacgagggattatttcttggtggcccaaggccaacctgggtttttgtttgtcgacagcgatttcgggtgcatccacagttatgcgacggtccaattgtagcctttactgttctccacaatgtcaattgttgccgtggccttatttatgtgacatctcagggttttctgaagatatgtcagttgccatctgcatataactatgacaactactggcctgttcaaaaggtccccttgcatggcactccacatcaggtcacatattatggagagcagtcacttta

SEQ ID NO: 276667 - DNA, 636 bp, Zea mays
  unsure (1)..(636): unsure at all n locations
atctcgctttcgatcangattgggttcggttcgtggttctgcggtgcttatctggttactgtttatcggtgcggcgggttcactaccaaattctcttcttcatttacctttatacattgtagccaattttatcattgttcctgcgtggagaaaaatcatgatggtttaaaagcagatggaactggcaaaactccacagaatgaactgacatgtagtgtttgcttagaacaagtcatggtgggtgatctgttgagaagcctaccatgcttgcatcagtttcacgtaaactgcatcgacccatggctgcgccaacagggtacatgcccaatctgcaagcaccaggtcagtgatgggtggcatgccacaggcaacggtgaaaaggatgcttcatacatggtgtaagtagctgcccaggagtaggccataggtaactagtagcagatgctaccagaatccgtggaaaccctgttttggaggtgacggtttggccttccaatctagggatgtggtctaatccctgtctaccctaacaaaaaaccgagtgtggaatcagctgtccagtgcactgagttcttgtccaactcatgtttatttctctcattctctgtgatgttgatgcccaaaaaggttgctgat

SEQ ID NO: 276668 - DNA, 421 bp, Zea mays
aaaaatgaagctaggttctgcatgttactttgtgatgtccagaagaatatgtcaagggaaccagaaaagagaaggggctatgaaatgttcttcttgagtagtctccttgtggcaccaaatagattccgcccatcaactagctctagtcttggaattatggaacatcctcaaagtgttctgctaagtaaagtgcaagaatccaatcttgcgctacaacattacaatgcatcttctaaccatatggatgttcttcaaagatggatggatctacaacggagtgtaaatgtgctatatgatagtagcaaaggccttgcaagaagcgagaagaatgctcatggtatacgccagctattggaaaagaaagaaggaattcttcgacaaaagatgatggggaagagggttaattatgcatgccgatctg

SEQ ID NO: 276669 - DNA, 489 bp, Zea mays
  unsure (1)..(489): unsure at all n locations
gttgcatcccacagtctcatgcgcatgtttacttacagaagttcatgaaaagacacgtgcacttgtaagttgtaaccaccttgaagaagctaaagtaaaacaacatgtgttttctctaattacaacacattatgttctatcatttttttgtaaccttcacattttctgattttgaaaacctggtaaatgcgtcaaccatcaaactgtaaatttactaatcccagtccatgtatagtgatgccattatttcgtgtcaacctaagttatgagtactgtgaacagatgaattcatttgcctggtgtgtttctgcaagctgcatttggtttgcttctggttgctagatgaaaacccttgtttctgcactaagggctgctgtagtgctgttgggtacttggatgtgcggtgtaccttttgttactctacattgnnttacttatgaaggtcgaatcactgtctggatgatgagtgaactacattttacatttttg

SEQ ID NO: 276670 - DNA, 512 bp, Zea mays
gttgaagttgtggtcaaatcagtcatcaaagaggagccacctaagggtcatgttgggacctcagatgtggggcaagatgatgatggcatacaccaccagaacaatcttgctggccacccaactatccacatcggtgacgaggaaaacatgtcttttggcggacttggaagacgatgatgtgaaatggtgtacttgcaacttgcaaaccgagatatggacttgtgtacaagaaaatgtagaggtcgagattgctcctgaaaagaacagggacaccatgaaaacaggtggctttgttttgcagtcaagttgccggggtgatgccactgttaaagctaccgggggtgaagacacagatgttatcgctcgagatatggcagagatatggcagggtgctacgtttcactagcattatcgtttgtaatttgattcacgctcttttgtacataagaattcatgatgttataaggtaaaaaaaaacaatgtgactaactaaaggattaaccaacatatat

SEQ ID NO: 276671 - DNA, 479 bp, Zea mays
gcgaccagccagtgatcgaccgaggcagatactgactaggagcagagagcagcggagatggtgaagattccgagccccaggaggctgttcaggagccggtccaggagcaccaccatcatcggcggcggcggcgcggacatctgcgccatggtcgccgagcacgagaggatcgagtgggaggtgcggcccggcgggatgctggtgcagaagcggcgctcgacggaggacgacgcggcggcggccgtggagtacatcctggtgagagtctccaccaccgggtggcagtggcacgacgtctccatcgacgccaccgcaaccttcggcgacctgaaggtgatgctgtcgctggcgaccgggctgtggcccacggagcagaggctgctgtacaggggcaacgacggggacgactgcgagcacctgcacatggtgggggttcaggacagggacaaggtgctgctcctggaggacccggccgtaaa

SEQ ID NO: 276672 - DNA, 326 bp, Zea mays
cacaccacaacccagccacccaccacctcccccaattgcctcttctcttctcccagcagcagccgcgacgcagtcctactcctgcggtgcctccagttgcgcagcaccgttgccacacatcgccaactaacgccatcgatcacccggcggcctcccagagtcttgccctgccatatccgaacctgctcctacagctagccagcaacacaaacagaataggtcggtcggtcgatcgatcgatggccagcgttatcgacggcaatggaggcagccggctggtggtgacggagctgggccacctcaaggagctggcgatgcagctggag

SEQ ID NO: 276673 - DNA, 697 bp, Zea mays
cagaggagagcgaggagccgaggaggcgtgcgattgcttgctttgcttccgagtttcgacacgcgtgcccaggaatcggtcggattccccaatcccgtcaccatggccgcgccgccttctccttcgtcccgctccccgtccagcgaggttgccgtccacagattcagcggcaccttggatgtatcatcatcgccctcaaggaccgagttgttgagcatggtgaagaagcactcacatttgattgggtggacgattattggtgccgaggatgatgcatcagatgtgggaatggatgataaattctggcatgaaatgcttgacctattctttgtgcgtggcaggcaatcaaaaagaagtgaagaggatgaccttgtcttctttgttaataacatgaaattgcatggttatggtttcaatgataacatggaagatccacctcccttttttgtacggagatgggctcccacgcttgaaaagatcagtattaatacagtggaggttgattgggagcgctcattctagttgaattcaatccttcacacgttgtacactgtgactgttgcaatatttggaattgaagatcttcgcaaccgtgcatcgaattaccaacagttgctttcagtttagtaggtttcaagtaatgtgtatgcgtgccctagtcgtgtaaattttcatcttgactgaagaacggttttat

SEQ ID NO: 276674 - DNA, 515 bp, Zea mays
gcggcgcagaggagaagaagcccgccgccgcggtggccccgattttgccgttcccgccgctgcaccagctgccgccgcagtacatgcacatgatcaccaacgactacatgagccagtaccaccgccccccgccgccgcccgtggcgtaccacccgtacgcggcgccgcccccgccgcccccgcagtactactacgtgcgcaacatgagcatggaggagaacccaaactcgtgcgccatctgctgaagcaatcgatcccggccgctttgtctgtcgcgtcgcgcgcgcgaacgtgagtacgtacgtgtctcccggcccggcccgccccgccccgtccatgtgtacatccgtcgtcgtgttacgttattattacgatgagaagacagacgaatcaaactagctactcgtagcttttattattttgtgagtccaaagtccaaaccgtatagctgccagctcgtgaatgaatctgtaacttaatttctccgtgccgatataatcttaaatttctctcct

SEQ ID NO: 276675 - DNA, 1340 bp, Zea mays
cccacgcgtccgccaccattgaaacactctctgaccctcactcgctccctgtcacacacactacactcgcaattcatccgcagtcacaagctcggctgctgctcccgctaacggttgaggcgttgctggtgcacacaggaagggaagggaagggagagctgcacacagctttgctctggctcttggctcccctgtccagctgtcctgtccgtccatcatggaggaaacgcccagcccgcagctctagccgccgtcaatctcgtctcgtatcggagtcgaaggaagtaagaggcgggatggcatgaagcgacctaccaagaatgagaggctgggcaacccccggcacatgttggaggaagaacccgagcaaccgagccacagggaggaggaggagatgggcaactgcggcacgcgggaggagaatgccgtcgtcgctgcgcacgcacaagttcaacagctccacttgttacaaaatcctgccaagaatgccattggagataggaagcacaaccgcacctcatcagatataagtgatccttccacacctaggaaagctgaagatgccaagaacatttccatatacaacgatgtgattgtcttcacattgtttgagctagagacaatcacaaagagcttccgtgccgattatgttctcggcgaaggaggatttgggaccgtttacaagggctacatagatgaaaatgtcagggtggggctgaagtcactgcctgttgcagtcaaggtgctcaacaaagatggacatcaagggcacagagaatggcttaccgaggttaactgcctggggcagttgaggcatccaaatttggtgaagttgatcggatattgctgcgaagatgaccatcggctgcttgtctacgagttcatgtttcgaggaagtctagaaaaccacttattccgaaagacagctacaccattgccctggggtactaggatgtcaatcgcactgggagctgctaaagggcttgcttgcctccacaatgctcaaaggcctgtcatctacagagatttcaagacatcaaatattctactggactctgattatactgctaagctgtctgactttggcctggcaaaagctggccctgaaggtgatcagacccatgtatcaacacgggtgatgggaacctacggttatgctgcccctgaatatgtgatgaccggccacttgactgctagaagtgacgtgtacagcttcggcgtggtcctgctggagctcctgacggggcgcaagtcgatcgacaagtcgcggcccagcagggagcagagcctggtggactgggcgctcccgaagctcaacgacaagagaggtcctccagatc

SEQ ID NO: 276676 - DNA, 498 bp, Zea mays
aacggttgaggcgttgctggggctcttgccgcttaccctgccctgttcactgttctgttccgcgtatcccacaggaagggaaggggaggaagcagcagcagcacacagctttgctctcgctctcggctccccgtccaccaaaggaggaaacgcgcagcccgcagcgctagccgtcgtctatctcgtctcctagtccaaggaaggaaagaggcgcttggcatgaagcgacctaccaagaatgagacgctgggctacccctggcacaagtagagcaagagccccagcaaccgagccacagtgaggaggactcgagggaagagatgggcaactgcggcacgcgggaggagaatgccgtcgtcgctgcgcacgcacaagttcaacagctccacttgttacaaaatcctgccaagaatgccattggagataggaagcacaaccgcacctcatcagatataagtgatccttccacacctaggaaagctgaagatgccaagaaca

SEQ ID NO: 276677 - DNA, 668 bp, Zea mays
tgtagaatctcaggccttcgattgtcgattgcagcagcagcaatgaccatggagagaatcgtatgagctgcttggcccccctcctgagtcactctgttacagatgcaagagtggggactgctgccaagttgttcatctttcttgtgagctgtggcatgtatgtataattgaaagatggtgcaggaaggaaggaaaatgcagcgtccgacagcgaccggtgagctttgccggtgagcctgaagggttgaaagcaaagactgacaagaggaagtgaacaaccgcgcattgttgtgagggtggattaggatgggaaagatttggcttttagcgtgcacaagttcacttgccatggactagcctctgtatgttgcttttgctttttctgaaatatcgcatcacctcttttgttgacaaaataaaaaagggtggggttgcatcccagtatcaaaggagggagctccgtactgaccccgctgcaagttaggaccatctgggttttccaggtgtaagcattccagaagggaaggtgcaaagctgttgttggtgtgatttgccacccccagtactgttgctcttgtgtaaagcattctgtgtaattaatgatttgtgccatctgcaatcttgaggatgaatggatgctctaactgaaactttgtacgcgggctaaa

SEQ ID NO: 276678 - DNA, 597 bp, Zea mays
aggtgggcccctggggtgccgcgccgcaatatccggggtgaccacacgcgcgctcacacttccacccacgcgtgcgcccacgcggccatcgcctccgccggcctccgtctggtgccgaggccttcgttggaccctccgcccgcgactagcgtccgccaggctgaaggcgatggcgacggagaggaggcgcgcgtcagtcgtggtactgggcgacatcggccgcagcccgcggatgcaataccactccctctcgctcgctaaccaggccagtatggaagtggacattgttgcaaatggaggaagtgatcctcacttgtcactgagagagaatccatcaattcacatccacgagatgaaaacagtgcagttaactggaatttcaaagatatctggtgctctgtcacttctacttaaagctgctgtccagttcattttgctggtttggtttctttgttttaagattcctcgccctgatgtcttttttgttcagaatccaccctctgttccaacactggctgctgtaaaactggcaagctggctgagagggtgctaaatttattgttgattggcatactttggatatacatgctggggttg

SEQ ID NO: 276679 - DNA, 337 bp, Zea mays
tcgaccgcgcggcgccggtccctgtcccggtcccggccctggcgcccgccgtgtccgtgcagagctgggccgagcgcgggtactccgttgtcaccgtgcagtgcggcgaccggcccaagctgctgttcgacgtggcgtgcacgctccacgacatggactacgtcgtgttccacggcaccgtggacaccgcggccggccgcgcgcgccaggagttctacatccggcgcgccgactgcagccccatccggtccgaggccgagcgcgaggttctcacccaccggcttcaggcagccatcgagcggaagtcgcttggaggcgtgaggcttgagctgtgcgc

SEQ ID NO: 276680 - DNA, 878 bp, Zea mays
cgtagaaggcgcgcgtggatgctcgccgttgcagcttttatcttcgtcgcactagtctgggcttatctggatcctcccccgcgttacacctctcctgtgagagattggcttcctggcaggctccctgcggaaccagccagggaattgactgatgaggagagggcctcgcgtgttgttttcagacagatcctaacaacacctcctgttcgatctaagaactcaaaaatagctttcatgttcttgactccggggacactgccatttgaaaggttgtgggaaaagttctttgagggccatgagggaaggtataccatatatgttcatgcctcaagagagaagccagaacatgtcagtcccatatttgttggtcgagagatacacagtgaaaaggtaacttggggtacaatttctatggttgatgctgagagaaggttgctggcaaatgctctacaagacatggacaatcagcattttattttgctatctgatagttgtgtacctttgcacaattttgactatgtatatgactacctgatgggtgcaaatctcagttttattgactgcttttatgatcctggaccgcatggaaattttagatattcaaagaatatgttacctgaggtcacagaggctgattttaggaagggttcacagtggttctcagttaagcgccacatgcgttgatgatcattgcagatagtctttactataccaagttcaagcttcattgcaggcctgggatggaagatggtcgcaactgctatgctgatgaacattatttgccaacagtattccatatgatggacccagatggaattgctaattggtctgtaacccatgttgactggtctgaagggaagtggcacccgaaagcttac

SEQ ID NO: 276681 - DNA, 987 bp, Zea mays
  unsure (1)..(987): unsure at all n locations
aatagtctctccaatcttgatcaggatctctcgaattatgcccaacacacggtgcctatatgctctggtcctcaagaatggctgtggtgtgaatcttggtgtggaaatgccacaaaagcaagagcaaagaccattgatctatgcaacaatccaatgacaaaggagccaaagcttcagggtgctagaagaatagttccggagtggactggtcttgacagtgaagcacggcagttcactgcacgaatcttgggtgatgatgtcgagcctgcagatgccacacctccgccatcggaggcaccgaagcctgaagatgatcaggatgtgaaagatgagctatgatcgcaagatgtttccaggcttggtcttactgaatgaaagtttggtgactcgacagtcatcagttcagaacacaggcacacagctagtggagcgcagagggatagtttaacgcaggtgcaaatttgtcaaaacactacacctggaatcctagactacgttgattcaggtatttcgtttacagtaaggccttgttcgtttgtgtcggattggtgggtcggaatgatttctagccgggttgcttttctaatttatataaactttaattagctggaataattccgggtgcaatccgatgtaaacgaacaaggtctaatagtttcaagacctttaaccaaatcatatggcggggaagctgcgtccagtaataggttaacaaggcagccagctggggtgtagaactctgtctgctctcagctgcatacacatagactgtaatggtcaacaatttaagatctccttgagacgctgtaaaatttatcggctgccagtcgaaaggcaacagcgaagctggcagctgaaatgcccgagaattttgtagcactcagcaaacggattttttaaacactcagtaagtcaataatgcggcatcccctgtggcatgtaaaaaaacccaaaaaaaaaaaaaaaaaaaaaaaaaaaaaanaaaaa

SEQ ID NO: 276682 - DNA, 579 bp, Zea mays
gatcaggatgtgaaagatgagctatgatcgcaagatgtttccaggcttggtcttactgaatgaaagtttggtgactcgacagtcatcagttcagaacacaggcacacagctagtggagcgcagagggatagtttaacgcaggtgcaaatttgtcaaaacactacacctggaatcctggactacattgattcaggtatttcgtttacagtaatagtttcaagacctttaaccaaatcatatggcggggaagctgcgtccagtaataggttaacaaggcagccagctggggtgtagaactctgtctgctctcagctgcatacgcatagactgtaatggtcaacaatttaagatctccttgagacgctgtataatttatcggctgccagtcgaaaggcaacagcgaagctggcagctgaaatgcccgagaattttgtagcactcagcaaacgggattttttaaacactcagtaagtcaataatgcgacaatgcctgtcgcatgtaacagcaggctattgtgggcatggcagctaaccgttatactaaaacaaatgccaagtgctttatcagttggatttaac

SEQ ID NO: 276683 - DNA, 919 bp, Zea mays
cagagagtgaagctttatccagggcaggatcaatgctatctgaaattaccaccacgaggggtggactgaaggaaaacagctctgctgctggtgatacagaatttgttgctggcataggtgaatttgtcgcggagctaaaagaatggcccagggtcataatggagaattggctgaagggaccataaggagcgtggggctggatcccattatggatatcttgcaatcaccttctcgctggcctttggaattcgagaagaaacagcaggagatcattgacctgtggcatggatgcaacgtttccttggtccacaggacttactttttcctgctgttcaaaggggacccagccgacgccatttacatggaagtggagcttaggaggttatcatttctcaagaacacatactccaacggaagcatggggtatgatatggtggcaggcagcttgagcacttctctggtttcaagtgcaaagaaactgcaacgcgagagggagatgctctgcaggcagatgcagaagcggctgacgatccaggaacgggagagcctgtacaccaagtggggagtctcgctgtcctccaagaggaggcggctgcaggtcgctcggcgcctttggacggagaccagggacctggagcatgtgagggagagcgcgtccctcgtggccagactgatcgggctcctggagcctgggaaggcgctgagggagatgtttggtctgagcttcgcgccgcagcagtccacccggaggtcgcacagtagttggcggtatggccgttcttctctagactgactgagctcgaaagacgcagctgacaaaaaaacaacaacagttattccgttgttttcggtttgtgtagtgcctgatttttttgctgtcctctcggaaaatagaaattcctgaacaattttgtgaccc

SEQ ID NO: 276684 - DNA, 940 bp, Zea mays
tccctcgcgtccgtggcaggccatgcatccatttggccattatcctatgccaacaaatgggcatgctgaaactcatggagctgcgccaagcgctccggaaatgaatggtgcgtcttttccaagggaaaagcgagcctggccgaacgtctgctccatccgccaacgggattacctcgcacagtgagagtggaagcgagagtgagagcgaaggaagtgacgacaattctcaaaacgattcacactcaaaggacaatgatgggaaggaagatggcaattctcagaacggcatgtcttattcaggatcgcaaggagtggtaaaccaaaccatggcgatgcttccaatgcaaccgggtgcaatggtcggaggagttcctagctccacggcagctaacctgaatatcggagtggactactgggcagctccgggttctgcggctgtccccgcagcgcacggcaaagcgccagctggttcagctcgaggagaccaatgggatgaaagggagctcaagaagcagaagcggaagcagtccaacagagagtccgctcgcagatcccggctgcgcaaacaggctgagtgcgaggagcttgggcaacgtgctgaggctctgaggtcggagaactcctcgcttagcgccgagctcgagcggatcagaaaggagtacgaacacctactttcacagaacgcttccctaaaggaaaagctgggggctgccagtagtgattcgcttcctgatatgaacgaacagaacgaccagaacgacggcgacggcggctacaggaagcagcctgattccgatggccaccagcctgggagcgagtcctgacccgtttttagctcaggattcttttggaatgcacattgcttatatattcattctcttgaacgttgtggaacgcagcataggaaggaaatccaactttaattggaaaaaaaaaaata

SEQ ID NO: 276685 - DNA, 872 bp, Zea mays
tttttcaccggcgcccacagactaccatgcctgcgtttcccgacccttcgctccgacccacacaggcgtatgcgtacgaggttttgcaagcttgacgtacaatgccagcagcatgattggccacaatctcgaggggccgttgccagtccacattgtgaaggttctggatctcgtagtacatatgaatcatgctagaccgatgtcaacagcagcagcatcaaaggtgcctgttggagcccggaaggttggtctgaaggttgccatgatgagtcctggtttcgtatatgagccgtacagcccacgggaacgcattcccttctggaaaagatggtttacactaagtggctggagaaggacaaaggaggacatcattttggagatgaagaacgcatatgctgtttcaaggctgaggaagaaaactgggtataccaaaaatcaattctacgatcaagcattaaaaatatacaaggaggttaacactttgatggcacatggagacacatcatcgcttcggaaaattctgacagagaggatgcattctactataaaaaatgaactaaagagaagacagtccatgtggaattctgtacactgggaactggtggagcctgctggtagtatcagaactttgagggctcgcatgattggcctcgataagaatgacctggataaagcttttatacagcttacactcgagtttgttaccaaaccgaaatttggaagcctttaattcaaagggggccgttgtgtctggagaacaagtcgaaaggaggtacttgggaaagacatttgggtggttgagagggcccctttttaacccggagcatattggcctgtatgccgaagaattacactggtaccatatctggttt

SEQ ID NO: 276686 - DNA, 344 bp, Zea mays
cgacagtcggcggtgggcgcgcatgcagtgggtggcgacgcgaccgagtgcggtggtggtacggcgagcgagcgagcgacacgagctgagtgagtgccctgcaagcccaagctcgtgacagagataggacttcagctcgactcgcgcggtcgccttgcctgctgcacacgagccgtcgccaactcgatcctcaccggtgacccctaccgcagctcatatcatcctgttcttgctcttcatcttactgttaatttcctgccaatttaatcccaccggccatcgttctcctgaaccaaagccatggcgcaagctgcttacggctccagcaagatcgacaccaaagc

SEQ ID NO: 276687 - DNA, 365 bp, Zea mays
tttccacgcttttcgagctaacccaatcccaaatcaatcttccatggcgccggcgaccttgctactggcgagactggccgtggcgtgcgcgctggcgctcggcgccatggcgcagctgtcgccgacgttctacgacgcgagctgccccagcctgcaggccatcgtgcgggccgggatggccgccgccgtgcagcaggagccgcggatgggggcctccatcctccgcctcttcttccacgactgcttcgtccaggggtgcgacgcgtccgtgctcctcgacgactcgccgacgctgacgggggagaagaacgcggtgcccaacgccaactccctgcgcggcttcgaggtcatcgactccatcaagt

SEQ ID NO: 276688 - DNA, 594 bp, Zea mays
cgacaaaaggcatttgcagaatggattctttacacatctagtggaatttccagtgcattataccattcatgtgatgttggcacttggtgcattctgtcttttcgtgtattgcagtttttggacttctggctttccttcatggctgtcgtgggtacgttcatatatatggctacaattgatgaagtttcaaagagagcaatgcatactgctgtatttatcctcacggctcttttagccgcaactggtgcaacaagatctgcaaatattggaattgttattgccattggttctgttggcctgcttatggggtggctattggagttctctacagcacgaaggtttatatgctggccctcacgaattaaccttaatatgcctcaaagttggccaagcctcagaactttgttccagattactctggagatggtgaacaaacgcttccgttggatattcttacttttgggtttcatgacactgtcttttgcggctatcagctggaagcttgaatcaaataacaactactggatttggcacagcatatggcacataaccatttatacttcctcattcttcctcctgtgctcaatgcgtgtc

SEQ ID NO: 276689 - DNA, 430 bp, Zea mays
ccctcctgctggttcgatccaaaccctaccaaatcgatggccgacggcggcaactgcgggccgggcggcggcaatgcatcggcgccggtgtgcagtttcgtgaggaaaccacccaagaacatccggaagcgccccgccgcgcccgcggggtctgatgacgacgacgacggcagcggcggcgccctcgccgcgcgcgctccaagaaggggccaccgtcctcaaccgctggcaagctcgttttctccaccgcaggtgcttcctccgaggcgccgcggttccagtacgaatcgtcccggacgatccagtccacggacacccgcgcaactgccacgctcgagacggagacggagtttgaccgcgacgcgcgctccatccgcgagagacagctcaagcaggccgaggagtccctcatgaagaaccccttcgctgt

SEQ ID NO: 276690 - DNA, 1221 bp, Zea mays
ctaggctttgttttcctgtttgtaaagatacatcatggcaccacgcagtagggctccatctagaaggcctctctggttcattgtcttggttgcctttgtctgtgtagtagccattggagcctatctttatactccacagcattacacagcctgttatctggtaccatcagaagcctgcaattctcggcctcctccagaacctgctagggtatacactgatgatgagattgctgctcgtgttatcatgagagacatcattcgggctcggccagtgcagtcaaagaacacaaaaattgctttcatgttcttaacacccagtttattgccatttgagaagctatgggaaaaattcttcatgggtcatgaagacagatacaccatatacgtgcatgcatcaagagatataccgagtcattcaagtccaatattcgctggcagggatattcgaagcgaaaaggtgatatggggcacgatttctatgcttgatgctgaaaagaggctcttggcccatgccctacaagatcctgaaaaccagcattttgtcttgctttctgagagttgtgtgccacttcataactttgattatatatatagttatctcatggagacaaacgtcattattgttgactgttttgatgatcctggtccacatggagcaggtagatattctgaccatatgttacctgaaattgtgaagaaagattggagaaagggtgcacagtggtttacagtgaaacggcagcatgcagttcttattcttgctgacaccctttactatgggaagttcaagcgttactgtaagccaggaaacgagtggcataactgctattcagacgagcactacttgccaaccctctttaacatggttgatccgactggaatctcgaactggtcggtgacgcatgtcgactggtccgaagggaagtggcatcccaaagtctacagggctgcggacacaagcttcgatctgctcaaggacatcgcgtccatcgacgagagcgtccacgttagcagcaacgcgaagcatgtcgcgcagaggaggccgtgcgtgtggaacggcatgaagcggccctgctacctgttcgcgcgcaagttctacccagaggcgctggacaacctgctgaacatattctcgaacttcaccatcatctgagcgagcggtggatcggggaggggtttccgtcctccctcttgagtgctgcggcatcagcggccgctcta

SEQ ID NO: 276691 - DNA, 710 bp, Zea mays
gaattcccgggctcatggagacaaacgtcagttttgttgactgctttgatgatcctggtccacatggagcaggtagatattctgagcatatgctacctgaaattgtgaagaaagattggagaaagggtgcgcagtggtttacagtgaaacggcagcatgcgattcttattctcgcggacaccctttactatgggaagttcaagcgttactgtaagccaggaaacgaatggcataactgctattcagacgagcactacttgccaaccctctttaacatggttgatccgactggaatctcgaactggtcggtgacgcatgtcgactggtccgaagggaagtggcatcccaaagtctacagggctgcggacacgagcttcgagctgctcaaggacatcgcgtccatcgacgagagcgtccacgtgagcagcaacgcgaagcatgtagcgcagaggaggccgtgcgtgtggaacggcatgaagcggccctgctacctgttcgcgcgcaagttctaccccgaggcgcttggcaacctgatgaacatattctcgaagcttcaccgcatctgatctgagcagctgaatggaggcaggaacacagctaagcaactctgtcggatcagagtccagactcgccaactacctgctgccgcaactctagtagatagattgctggtgatggctgctgagctaaggttatttgccagctcttga

SEQ ID NO: 276692 - DNA, 340 bp, Zea mays
gtcggtgacgcatgtcgactggtccgaagggaagtggcatcccaaagtctacagggctgcggacacaagcttcgatctgctcaaggacatcgcggcagcaacgcgaaccatgtagcgcagaggaggccgtgcgtgtggaacggcatgaagcggccctgctacctgttcgcgcgcaagttctaccccgaggcgcttggcaacctgatgaacatattctcgaacttcaccgttatctgagcagctgaaggaggcaactctgtcggatcagagtacagacgtcgctacctacctgctgccgcaactctagtagatagattgctggtgatggctgctgagctaa

SEQ ID NO: 276693 - DNA, 962 bp, Zea mays
atcttattgccaaaggatgcaagaaggtggttgtggtcaaccgttcagtggaaagggtggatgccatccgcgaggagatgaaaggtatcgagattgtgtacaggcctctttcagagatgtacgaagctgctgctgaagctgatgtcctattcacgagcactgcatctgaaaccccattgttcacaaaagagcacgcagaggcacttcccactgtttctgatgccatgggcggtgtccggctgtttgtcgacatatctgtcccaaggaatgtcagcgcgtgcgtctctgaaattggctccgcgcgagtgtacaatgtcgacgacctgaaagaggtggtggaagccaacaaggaagaccgtctcaggaaagcgatggaggcgcagacaatcatcgccgaagagctgaaacggtttgaggcgtggcgggactcgctggagaccgttccaaccatcaagaagctgaggtcgtacgccgacaggatcagggcctcggagctcgagaagtgcctgcagaaagtaggtgaggacgccctcaccaagaagatgaggagagccatcgaggagctgagcaccggcatcgttaacaagctcctccatggcccgctgcagcacctgaggtgcgacggcagcgacagccgcacccttgacgagacgctcgagaacatgcacgccctcaaccggatgttcagcctcgacatggagaaggcgatcatcgagcagaagatcaaggccaaggtggagaagacacaaaactgaggccaggaagcaatttttctaccaccattatctatatatatagcgtctccaatctcattccatttttttatcctttcactcagtgagcccttcccctgctcactgtgatcgttaactgtgtctgtgaattagagccatgccagcgtgttgtcaataccagcaatgtgtcccaattccccacataagaaagcctatctttatatgcac

SEQ ID NO: 276694 - DNA, 361 bp, Zea mays
cgaattccggctacgactcacgcgtacgggctaggtgaaccttacttattggtctttacacggtgcgagtgatcaagggaccgggctacctaacacgagcacagagtcccagctcatgctgatggatcacctcccggaattaaccgatgtaaaatcaaataaactaggttaaccttgattggccaataatctctctgtttttatggcctagttgcaaacaaagtgacagaagcattcattccgtggtgaatcatgaagaatgagcgccgactgctttctttaccacctgcgagtgtatcctgctgcacattgtaacagacgtgcatttactgaactaagtttaatactatcaccgttcttg

SEQ ID NO: 276695 - DNA, 577 bp, Zea mays
aattggtggggtcttcgggggcctgttcaactttctcttggataggattctccgagcttatagttttatcaacgagagaggtgctccatacaagatccttctcaccgtcacaatatcaatcatcacatcagcgtgcgcctatgggctaccttggctcgccccatgcactccgtgccctgctgatgctgtggaggaatgccctaccattggccgctctgggaattttaagaactttcagtgcccgccgggctattacaatggtcttgcgtcgttgttcttcaacacaaatgatgacgccatccgcaatctattcagcagtggcaccgagaatgagttccacatgtccactcttttcgtgttcttcactgcgatttactgccttggccttgtgacatacggtattgctgttccatctggtctcttcatccctgttatacttgctggggctacgtacgggcgcatagtggggacccttcttggtccaatttcagaccttgatcctggactattcgcacttcttggcgcggcatctttcctcggtggcacaatgaggatgactgtgtcagtctgcgtgata

SEQ ID NO: 276696 - DNA, 642 bp, Zea mays
tcgactacgcgtccggcatatagtgtgctcttctcttgctcttccagttggtattctttatctgaaacatagtacagaggaggagaggagaacgagagctaagaagatgaccggcaaggttctccttgtggccgtccttatcttggtgggcgtggcctctcgatgctcgggcagtaggggcctgcagggcgatcacgttgctgaacagaagttcggtggcggtggctatggaggtggcggtgggtacggaggctacggcggcggtggaggaagaggtggtggtgggtatggcggtggcggcctgcggcggtgggtacggaggcggtggcggctacacacccggctactctggcaccggcacctgcgactactggaagagccacccggacgccatcatctcgtgcatcgggtcgctgggcagcatcctcggctccttcggcgacgtgtgcagcgccttcttcgggagcaagctgcagacgctgcaggacgcgctgtgcaacacccgcaccgactgctacggcgacctcctccgcgagggcgccgcggcctacctcaactccatcgccgccgagaagtacgcctacagcacgcagcaggttcaggactgcatcgtcgtcgcgctcactttcaaggtcgacgtcg

SEQ ID NO: 276697 - DNA, 468 bp, Zea mays
agtcgctagtcgctcgctccatcaccgataaccaagatcccaagacctcctccagcctcctctgcgcgcgcgccggcacccgcacgcatggctgcctgtgtcgacgaagtggcaccccacgcacgccggccgcctcaccggcgccatctaccgctacttgccggcacggcgccacggaccgcgcggtggccgccgccgccgccgcgccggcgtccgcgagcggcggcgacgacgacgacgtctgggacgagctgcgcgcggaggcgcaggccgacgcggacgccgagcctctgctccgcaagttctacgccgacctcgtcctgtcgcgcccgtcgctggagggccgccctcgccgcgcacctgtcgggccaagctctgcgtccccggcgcgctgccgcaggacgcgctccgggacctactggccggcgcgctggccgcgcgcccggagtccggccgcgccgcgcgcgc

SEQ ID NO: 276698 - DNA, 825 bp, Zea mays
caaatcgacctttatcgccagagggaaggaggagtaccagtccgtacaatagcaagagtcctaatcgctctcaccagagtttaagtaaagatactgagaaagatacaaatggcaccccttccgttaaggacagagttgtgcactcaagggggcaaaacaaaaatcagatgataataatagggatggtgcaaggattgttggcaataattccccagattctgagcatagattgtcaaagtccttgaggcctgctaactatgaagaaaggaattccacacgtgacagttcttacaagaactcaggcaaacctataactcgagtcagggcagcacagatacaagtggagatgaggaacacagtcgtgctagagaaaatgcccggaaagcaaattcatgtcgtaggaaaacaaaggatctctcggcaggtctgcaacctaagaaaatcagtgctggtgactcaagccccagagacaaatctccattcattttacaacagagtggcaaggtcgtccaaaagaaacaccccgatcaattgtcagaatcatcagaagatgagcttgctggtagaagaacaaagcatcaaactgattcacctgatgattctcgtcgaaaacagcattccccgactagaattgaaaatgatgagtcttattcaaagggtggtagaaacagtgagcatgtcatgagaggtttgcgtgatgattctgatgatgctattgatacaaagaaatatttgtctaaagtcaatgaggactcccaatcggacgatggaagtcctttgaaaaaaactaagaaaaaaacagatggtaataggcacattgattct

SEQ ID NO: 276699 - DNA, 415 bp, Zea mays
gaagaagagacagaaacagtaagggtttgactgtttggctaacgtcatggcgtcgacctctccgcgccgctcctctggcggggactcagcttccccgtccgcacccctcatcccctcgccgccgacctccccggcatccggcccctccggtggcccgctagggcggctcacgagcctccgcggcgcggcgcggttcatccgccgcacggggagccggcgcctgatgagggagccctccgtggcggtgcgggagacggccgccgagcacctcgaggagcgccagaccgactgggcctactcgaagcccgtcgtcgtgctcgacatgctctggaacctcgccttcgtcgccgtcgccgcggccgtactcgccgcatcggtgggcgagcggcccaccgtgccgctccgtgtctggatc

SEQ ID NO: 276700 - DNA, 1895 bp, Zea mays
tgaactgcattcagcgaccatcaatcatagaatctcttctaagaagacatctgggcatcatccatctagcagagcagcatattagtatggaccttactgaaggcatacgtgaagtgctgctagctgagagttatactggtccatttcccaatcttcaaatgtttgagactccagtggggacacaaggaggggggtctgccgttgagatgatatgcaactggtatattgagaatgtagtaaaggacgcttctcgcattggagttgcttttgatgcaatccaaaattgcttcaagagctcacagcctattggtggtggatgtttggctgaatcatttacagataaaagagaaatgaaatcacttgttcgtctttttggtggctatggaatagataaaatggataagatgctaagggagcatacgtctgcgcttttaaactgtatcgattcagcattgaggtcaaatcgtgatgccttagagggcctagctggaactgtaaattccggcgataggattgaaagggatgtgaacctgaaacaaattattgacctcgaaacactggctgacctctgtattcaagcagggcaggcaataactttccgtcggctgttggttgaagccgtcggagcagtccttgaagagaaagtgcctctgatatattctctgctcaaaggattagccttgcagttgccagacgaggtacctgataaaaatgagataattagattgagaaaggttgcgagcagtgttggtgttggcgacaaacatgatgctgagtgggtacactctattctggcagacgctggtgcagctaatgataattcttggatcctacttccatacctttgtgctgcattcatggtgtccaacatttggaacggtgctgtttatgatgtcaatataggtggactcagtaacaatttgcactgcctagcaaggtgtgtaagtgctgtgattgggggaagcgaatacactcgggtcgaaagggagcagcgaataaattctctttcaaatgtgcatacagatgagctgcaagaggccgagttaccgagccgtgtctcagcagaagcaaatatcaaatcttgtatgcagatctacgtcaaactgtctgcagggatcgtcctggattcatggaacgacacaagcaggcagcacatcgtcccgaagctgacattcctggaccagctctgcgagctgtccccgtacgtgccaaggagcaccttagaagctcacatcccatacaccatcctgcgctcgatataccaccagctgtacggaggctctcttgctggcctcggaaccggcggagcagtccccaaggcagtcgcctctcatctctctggcacacgcgtccccgtccgcaaggcagatgcagaaccgaccagagacaacacccaggtcccacaccttcgacccaggctactacagctcgtcggggtcccagcacgacgatggctacgacgcggataggaggaccggacggctgctgcggagcttgaggcgctctggaccgctcgacttcggtgcgagcagaaaggcgaagaagttcgtcgagggctccagctccgggagcagccatggagctggctcgctgcagaggttcgcagtgtccagatctggccctctatcgtacagatagggccgcatgtaatgtaaactctagagagcagtagatcttcctatgcgtgctggtttacgtagctagcagtagcaacagcagcagctagttgtgctgtaagtaaaacccattaattgcttaatttgtgttgactgtcgttaggcaagtgatttgaattagctgttgctcgtttggtttgtgtatcaacaatacaattgttcgttgatttttcttgatagcaaagtaaagtaaaccaaccttctaaaaaaaaaaaagaa

SEQ ID NO: 276701 - DNA, 485 bp, Zea mays
ctgatttgagaaaagtgggcaatgcatctttagtgcctccaagaccaaacaagctaactaaggagtctgttgtttctggaggtcaatatattgatggccatatgcctgatatgaacatgcatgctgccataccctcagaagaagactcatgttttaaggatatgcacacagttaaattgaacaaaggacctggagaagatagtatcaagcgacaattacaagctgttgctgaaggggtagccgcatcagttcttcagccaccctttcctgaaaaaacagtggtgttctctggggatcacatcgattcgcatggagcagaagttgatgtcaagttccaggatgaaaggaacaatcagtcagacaaaataagtcaaggggttcaagttttagatgacaacgataaccttcagataataaagaacagtgaccttgaagaattgcgtgaacttgtttctggaacctttggtactgtttaccatggaaag

SEQ ID NO: 276702 - DNA, 660 bp, Zea mays
gtaactgcgacttgcatacgggttcctgtgatgcgcgcacatgctgaaagtgtcaagctacagtttgaaaagccacttgatgagcgcgtatgctcctcaagtaggccttaatgagaactcaaagagagagttctgggaaggcctggaggacatggttagtagtgtgccagttggcgagaagctcttcataggaggagatctcaatggccatgatactgcaagagaaattttgagagcagctcctggtgttaccattattgatgaccgagcttccaatcgctttcctacacctctggaggtatcagacaaagatgacgtagcagtgggtaggattcgtcaggacttgtccctggatggtaaccgagggttggacatatttgtgtgtggtgatcagatacgtaaaggcgccgcactcaatgccgttcagattgctgaaatgctgctgaagtgaatgcgacctaaccctcttgtccctccctccctccctgtccctaattgctctgatcaaatgctggactgtactctgattagtttgtcctcaattttggtcgcctgttctgtattctgccgtgctagtgcaataattgtgttatgggcttgagttatctgctgtacgcataagtgggctcctaaactgggaaataatgggccgtccttatt

SEQ ID NO: 276703 - DNA, 506 bp, Zea mays
gcttgcacagcatacgctcccctcttctatattcccttgtctttacttgcccgataggtcccaaactcgaatcgtgtatggtggtagctcctaaatccttcggcgggcagttaacccccaatcattgatccctcaccagcttgggggcggtttcgctccggttcttgcgcttcggctccaggccatggagcagcggaggtggctcgcggtagccgttttgatgtgcctgctggtgctttgctccgggagagaactgaagaccaaacatgtgcccatatatgacccagtgctggcccggacacttgctgaatatacttctgctgtctatactgctgaccttacccaactgtttacatggacatgtgagagatgttgtgacttaacagaggggttcgaggtgatagagctgattgttgatgtgaaaaattgcttacaggcatatgttggatttgctagagacatgaatgcagttatagttgtggtcaggggcactcaagaaaacagca

SEQ ID NO: 276704 - DNA, 526 bp, Zea mays
aggatttgatttgtttatcacgacggctccaattcctgacttgaatgacaagctcggtgggtttgggcgagttatcaagggagaggacatctgttcaggagattgaagaagtcgacactgatgagcattaccagccaaaggccgccataggcatcatcgatatcgtgctaaaacaggagccttgagcctggatgcacatgatgacgttaaccacatgccgacggacttttctgtagttggaaaatctatctcatcgagttggtttttgttttggtgccttattatgtgttgttgcgtggaaagcagttgtgacgcttgttccaggagtcgttgcagcagcgtttgtgtataaaatatattcacagggtttttggctgtcagcatgcgcgagcatatgctgctacaccttgtaatcgtggttgtggtaacagtaagcaggctattctctgctattgctaccagtaatcggtttgggccttacgatttgcgaatgaatccaataaaatcagcgcacgtgcttctggtc

SEQ ID NO: 276705 - DNA, 859 bp, Zea mays
  unsure (1)..(859): unsure at all n locations
ggtgatggggaaggcgttcttgtttcacggaaggggaagaaggcgtggcgcgccaacatcggcaccgacgacattgacgattttttcgagaagcagacgcgcgatgcccacgcgggcaccgccgccatcccttctcttccttcggactcgctcttctttgtcgacaagcccgccacctccgcatctacttccgccgccggcgcctcggacacaaccaccaaagatattcctgtcaaaaggaagatcgagaagaagagggagaaggttctttatcatgagagtgtactgaagcggaatccgtttgtgcagccaatcccatcttctgtgccgggcaagaaggataagaagataaagaagaagaaattgcaggagacacagggagagaaaagtgttcctatggaaaatgattctgtagttaagaactttgacatctgggctgtggatggtaaaggtgattccaaggccaaaaagagatctactatatcagttattcctgctgttgaagttgagcctgcaggatgttcatttaatcccccattcgaagcgcatcaagattctcttgctcaagctgtagcagatgaaaaacgcaaagagtacatgaaagagctggggccaacacctgtaccactcatagttcctggtgaagctatagccgaagaagataaattttttcttgatgctggtgaaggagatgaagatgaagatgctgcagaaaatggagatcaggatgctgatactttcattggacaaaggaagaacaccacataaagagttacangagtagaaatgaacagaagagctcgccggaggagaggttaagagcagaagcgtaagcaaagaaaatggaaatattttgaag

SEQ ID NO: 276706 - DNA, 600 bp, Zea mays
ccctcgcttccgcggacgcgtgggtgcggcttgccctcctcgtttgatgaggccaatggccagcaatggcatggcgtccgcaccctcgcccttcttccctccaaacttcctcctccaaatgcagcagacaccctccgatcatgagcatcaagaacagcatcaccaccaccaccaccacaagcaccacctcgctgctcctccccttcatcctcaccacaaccccttcctcccctcttctcaatgcccctcgctccaggacttcagaggtatggcgccaataatgctggggaagcgtccgatgtacggggcggacgtgcaggtcgtcggaggcgaggaggtgaacggctgcggcggcgtgaacgaggacgagctgtcggacgacgggtcccaggccggcggggagaagaagcggcggctgaacgtggagcaggtgcggacgctggagaagaacttcgagctcgggaacaagctggagcccgagcgcaagctgcagctggcgcgcgcgctgggcctgcagccgcgccaggtggccatctggtttcagaaccggcgggcgcggtggaagacgaagcagctggagaaggactacgacgcgctgaa

SEQ ID NO: 276707 - DNA, 474 bp, Zea mays
gccaatggccagcaatggcatggcgtcctcaccctcgcccttcttccctccaaacttcctcctccaaatgcagcagacgccctccgatcatgacccccaagaacaccaccaccttcatgctcctccccttcatcttcaccacaaccccttcctcccctcctctcaatgcccctccctgcaagacttccgaggtatggcggcgccaatgctgcggaagcgcccgacgatgtacggcggcgcggacgacgtcggcgtcggaggcgaggaggcgaactgcggcgcgacgaacgaggacgaggtgtcggacgacggctccctgcaggccggcgggcccggggagaagaagcggcggctgaacgtggagcaggtgcggacgctggagaagaacttcgagctcgggaacaagctggagccggagcgcaagctgcagctggcgcgcgcgctgggcctgcagccgctgcaggtggccatctg

SEQ ID NO: 276708 - DNA, 758 bp, Zea mays
ggaagaaagactgttttattgctttcgactctgcttactagtggattgggtcttctgagtgctctatctattaactacttgtgcttgctggttcttcggttttttgtcggcataggagtgggcagtgggcatgtattttcatcttggttcttggagttcgttcctgcaggaaatcgtggcacttggatggttattttttcctttttttggactattggcacagtcttggaggcttcacttgcatgggctgtactatcagcattgagttggaggtggttgctggcattgtcttcccttccatgcttcctcttgcttcttttcttcagaatcacacctgagtcaccacgctatctttgcgcacaaaatagaatgactgatgcaaggtttgtcctggagagaatggccattgcaaaccaagcagctcttcctatgggagttctcacataccaccaagaaacaaaaactgaatgcattactcatgtttctgaggatgaacatcttattccagtcagagagaaggaacatacagttaggaatgctattagttccaaatctggtgctgttgctgtattgcacaagctattatcacataacttgctcaaatcaactctacttctttggtttgtttactatgccagttccttcgcttattatgggataacattgctgacatcgcaactaagtgatgtgaatagaagctgtaaatctgatctggtctttgaagtgcaccaaaataatggcaatctttataaagatac

SEQ ID NO: 276709 - DNA, 727 bp, Zea mays
aatcttcttgctgttactacagcagacaatggttttaagatacttgcaaatgctgatggacttagaactctacgcgcattagggagccggcctccttttgaagcatttaggccgcaatacgaagcttcttctatgaaggtctcaggtgctcctgttgttgctagcatctctcctaacataggccgaatggatcacttggataggaattctcctgcaaagccatctcctatactgaatggtggggatacagcatcaaggagcatagatataaagccaagaatctcagaagaaaagcctgataaagcaaaaccttgggaactaatggaagttctaaatccccagcaatgccgtgtagcaacaatgccagaaactccagaccaagccagaaaggttgtccgacttctgtacacaaattctggtgttgggttgctagcactagggtctaacgccattcaaaggctatggaaatggagtcgaaacgaacaaaatccgagtggaaaagccacagctagtgttgtgccacaccattggcagccaaatagtggtcttgtcatgacaaatgatacagcagataccaatccagaggaggcagttccatgcattgcactctcaaagaatgattcctatgtgatgtctgcttgtggtgggaaagtttctttgtttaacatgatgacattcaaggtgatgacaacattcatgccacctcaacagcatcaacattttagca

SEQ ID NO: 276710 - DNA, 1010 bp, Zea mays
  unsure (1)..(1010): unsure at all n locations
ggtccggagttccgggtcaacccgcgtccgggacctggcggacgcgtgggctcgggagtttctgagggttatggttttatagagttttataatcacgtttcagcagagaaggcactgcagaatttttctggtcacgtaatgcctaatactgaccgggcttttaagttaaactgggcatcatatagtatgggagaaaaacgctcggaaatttcgtctgatcactcgatatttgttggcgattgggctgttgatgttactgatgcgatgttgctggaacttttttctaacaaataccgatcggtgaaaggagctaaagttattattgatgcaaacacaggccgttctagaggctacggctttgataggtttggagatgataatgacaaaactcttgcaatgactgaaatgaatggtgtatactgttctacaaggccaattcgtgtaggactagcgactcctagaagatctcaaggtgattctggctcttctccgccaaggcaatctcatgttgactctactaacaggacggtatatgttggtgggcttgaccccaatgttagcgaagatgaactgaggaaagcatttgcaaaatatggtgatcttgcctctgtcaaaattccttttgggaaacaatgtgggtttgttcaatttgtaaacagagttgatgctgaagaagcactgcatgggttgaatggatcaactattgggaagcaggcagttcgactttcctggggccgcagccctgcaagtaaacagtctaggggtgattctggccaccggcgcaatggcaactgcaacggcatgtactacgggacaccattctacggtggatatggctacgcctccccgattccgcacccaaacatgtacgccgcggcctacgaagcctacccgtactatgggaaccagcagctagtgagctgatgtagtgatgtggcgagatgctctctgctcagttttcctcccttggaggaaacgagtttttggtcccagtanaagcatagtagcta

SEQ ID NO: 276711 - DNA, 1200 bp, Zea mays
gtcgaggcgctgcgctgctcctggtggccgtcttcgccgtggtcgccgtagcgaagggtcgtgctgatactccaccagctgaaacaaatagtgatagctctactgcacagccaggccttgggaaattggagcagcatgagcaggcaaatcctaataaggagcatgcaacccaccaggaaggaggagtcagcaatgatattggtgacaacaacaagaaggataactcaacagaagtaaccaacatcagaagagatgactccatacagcagccaaagcacaaagatagcatcatgacaaagtcttcacaaccactagatttcttggaagattctcttatcaaggagtgtgatccatcacatagatgtatcattgaaaacaagaaattcatcgcctgcttaaaagtttctggagaagactcattggctctgtcacttctgatggacaacagaggcataaacccactagatgttagcatcatggctccagattatgtcactttagctgaagattccatccatgttgaagcaaatggtcacaatgagacacaagtgagagtttctgtcaatgatgatgcaaatagcacgacaatagtcatcaaagttgcagaaaaatcctgcaacatcagcattcacagtgcaatcacaagggagacggctggcagtggcagagtcataaggatgccacttacgccaacatacacgctactgccagtcttccttctcctcgttgcggtggcagtgtgcatcgtggtccggaggtggcgcaaccaggacggcgaccctgcgtatcagaagctagacatgtcagacttgccggtttcggttggaggcaagaaagaacatgacgatcggtctgacaagtgggacgacaactggggagatgactgggacgacgaggaagctccggtgacgccatccaagcctctgcccaacccttcgtccaaaggtctcgccccgaggcgatcggcgaaagatggttggaaagattagttagccacatgacgccacttaaaaggagcattgcggaaatagttccagtgcatgcagtatatttttaccttcatctttgttgttaaatatttctggaggatgctaatgtcagagagtgcaatacattgataccaagcagaaaattttgtgatcttcctctgccaaactgactaactggcagctattgaatatagttattggacttccgacc

SEQ ID NO: 276712 - DNA, 955 bp, Zea mays
gaaccaaggagcaacttggttatactgtggactctagcccaaggatgacttaccggatgctggcctattgttttcgagttatgtcctccaaatacagtcctatttatctgcggggtcggattgataacttcattgatggtctatctgctctgctggacgagctcaatgaagagacttttgagcaccatagaagtggtttaatagctgataaactggaaaaggaaccttcacttagctaccaaactagtgattattggtctcagatcgctgataaaaggtacatgtttgatatgtcaaaactggaagctgaagagcttaagacagttcagaaggctgatgttatagcttggtacaacacatacataagatcatcgtccccaaagcgaagacgtctagcaattcatgtgtatggttgcaactcagatattgctgaggctgctaaactccaggagcaatcttggactataattgatgacgttgaatcattgaaggcttcgtctcaattttattcaagcctttgttgagggaagttgggcatgatctgtcagtgtgtgcaaagcgcgtaacttggacattgccgaggcccgctaaggtgcaagaatttcgtggatcataatagatgatttaggccccttctgcagatcaaccgccatgttatctatggccggcttgaaattgaacagcatcgttgcacctgaccaacatcatcaacgagtatagtgctagttgggtaagaaaaataggattttgtcagtgcattatgtgattttcataacaaacacacatggctttattgttactttgcgccaagaaatgttgatcttccaatatggcgtagtaattgatggatgagtttttgaggaaacataattttgtacttggagatgtaaaatgtttctggaatcttttctgaacaaccccggaagtcttgtcttattataaaaaaggaggaaaa

SEQ ID NO: 276713 - DNA, 389 bp, Zea mays
agaagctcgacgccggcggtgctccacgggagccaccagccccacctccatcggaggcagccaccggccacgggagcagcacgcctcctgcatcagctgctggcagccaccagccacctccatcgttggctacttggctccctcctccttggtagaagatggccccatcctcgtcctccagctccgatggacatggccatgctgctccgcgccctgggactggtagagttcaagtggcgttgcctaacgcagatgctgctgctgaagctgatgcagaggttagtggtggttatgctgaatctaacgagccaaattctactggtgctccatcatgtgggtctggtgtcggtcccaatgattctgagtctatagttgccaaaacattagag

SEQ ID NO: 276714 - DNA, 424 bp, Zea mays
agacagcgtatgattgctccattccgttagcaccactagttgctgatgttatatgttgccggcaagttaatagcttgatgaatattttccaagctgcatatggcagtggaaatggtaccctagttctcaatcaggcgtcagcaaatgcttgtttctctgacattatgaacatccttgcaagctaaggggcaaactccaacatccctgagttatgtactctgaggccatcaaatcttactgatgtttcttgtcctgtgaaggatattagctcttttgagaaaatagtcaacatcagtaaactccaagatgcatgcagcaatgttgacccactgaaagagtgttgtaggccagtttgccaacctgctatagcagaagcagctattcacatatcctctggtggggctaacatgttcggaagttctag

SEQ ID NO: 276715 - DNA, 1050 bp, Zea mays
  unsure (1)..(1050): unsure at all n locations
gtagcagttcaacaggggtaaaaaccactgaaggttgatattgtatgtcttttactgaaatgtttagggtccagttgaccagttacacgactcgatattatgtgaagtggcaatcaacattgtccagtagccactaacggaagtacatagctcttgcatattcccacaaaagcgaacgttaactatgtatgcaataataactgggctccccaaatttaataaatgttttatttctatagtcattgtaaagatatgtacactaatgttgtgacaagtgtccgaacaagtgatggggacaccgatgactttccaattaacataggactacggcaagggtcggctttgagcccttatcttttcgctttggtgatagatgaggtcacaagggacatacaaggagatataccgtggtgtatgctttttgccgatgatgtggtattattgaggagagtaggagtggtgtttcgcaaaagttggaattgtggaggcagacgctggaagcaaaaggttttaggcttagtaggtctaaaacagagtatatgaagtgtgatttcagtgccatggggtatgaggatggcgatgttagtcttgatgggcaagtggtacccaagaaagacacttttcgttacttaggatcaatgcttcagaaggagggagacatcgatgaggatgtcagtcatagaattaaagctggatggttgaagtggcggcaagctgcgggtgtcttatgcgaccaccgggtgccacacaaactaaaaggcaaattctacaggacagcaatccggccggctatgttgtatggagcagaatgttggcccaccaaaagacgacatgtccaacaactgtgtgtggcagagatgcgtatgttgcgctggatatgtggccacacaaggagagaccgagtccggaatgatgacatacgagagagagtaggagtggcgccaattgaggagaagcttatgcaacatcgtttgagatgtttnggacatattcaacgaagacctgaagaggcaccagtgcatatcngaatattaggcgtcccgagaatgt

SEQ ID NO: 276716 - DNA, 748 bp, Zea mays
aagacgctctgcatctgcgatctgaagcaagtaaactgcagtctctgaggcaagagttggctgcgaaggttcaaggcctatcaaaagagcttgaacttcagaagtctgaaagccagaaaatgactgctttggtagctgaacgtgatgcgctgtgtcaagaactgctccaggctagggcgaaccttgagtttgagaagaaggcgaagccagagctgactgcgcaggttcaggcaatggagaaggatcttgtggctatggctcaggaggcggagaagctgagggctgatatcgcgaagagaaacacacctactagtttcagcagccgtggaacgtatggagcctcgttgtcgactcctgggatgggtttgcaaggcatgtatgatggcggcggctattctatggctgggagccgctacggcagtggcactggggcttggagctcgcacgatccccatggctacccgcatctttaactgtgcttctgaccggtgttttctcctgaacagctccctgagtaccttggctaagtttcttgtagtagtataacttgtggtgcaccattgctacccttcctctggtcaatacacaacaatataccaactttggttgtcttggttgttttttcccctactgcacacggtgacgctgttgtgagcattagatgtttggccactcggccgttttgccgtggtgagttttggcttaattcattattaggtaacaggcctgtaagctgtatagtaagaat

SEQ ID NO: 276717 - DNA, 429 bp, Zea mays
accacgcgtccgcggacgcgtgggcggctactccttccctctccccccttctccccctccgtcttcttcccccaggggcatccgtgttttcactttttgctcccccacgttgaaccttgatcctcgtgctccctttcttgattctttctccgtaggatctcttgctaggagtagcctgccccgtgtgcgcgctcgcacggacatgcttgtttccgcgtcttgaaaggcgagaaaaagtggagatgggcgcttgcgcttcggtacacaaggacccggggcaccccaagaagcagtttcttgactctcccaccaaggcgaaggccgccaacgggaagggtggcgggggcggccgtgttgctccggttggtgatggcttcggtgatctcaagtccaaggtcgacgctgaggctgagcagctgcgggcaaagt

SEQ ID NO: 276718 - DNA, 689 bp, Zea mays
tctctgaaaactctacaaaacgtttttaactttatcgtctcagcgaaacacatgccaagaattggcgtcaggacctggtcacctgatcacttcgaggatggagagcggttcagcggtgggtcttgtcgcaggaaattgccctacaacaagggagagtacagagagggtaacatcgagcgtgtcatgagacagatcgagcttgagtccttcaacaaggctgtagccgcgcttaggggttcagcggacgtggatagactgagactgatggatacctacagcctctcgtccttgagaccggacggccacgttgggccttacagaacaccctatccctttgcaaggggcagcagtaaatccacgcccgtccaaaatgattgcttgcactggtgtgtaccaggccccattgatgcatggaatgatcttgttatgaagatggccctggatccatgaaaaccttatggatttgtatggtgtgctcttatggagtaagtagcagctaagtgggcacaaaaaaagtgtgtccgttttggtttagctgtaaaataggagtgctagcaaatagagaaacctcagggttggctttgttgcaaagatatgtgtatgttgttttaaagctttataagtttcaactgggcagatactgccagttgttcctggtttaacaggttggccctcgatgctgactgatc

SEQ ID NO: 276719 - DNA, 353 bp, Zea mays
tcgcggacgcgtgggctgactcgtgggttctatcgcgagcgccgccctttttttttttttttaatcataagaacttaaggagtggcaataataataatccggaaactggcatgatgcaacaacgttcatatggtgaacaaacagtacatctcttattcaaatctcgtcttttatgcaaatcccaaaaatgaacagcgacgctggacgaagcagactgcaataaggaggaagaaacggccgtacggtcggcatgcactggtatatcatgatcaggccgtgagctccatgatggcgctgacgatgtcgccgtcgtgcgccttgagagccttgacggccttggcgcgggtgacgct

SEQ ID NO: 276720 - DNA, 1302 bp, Zea mays
ggcaggcgtgcgagctcgctcccgtttttaacgagcttgtggaccgtgttagcatggacgggaatttcttgcagaatgctttgtccaaaacaaggcaggttgatgatttcacatctaggctcttggagattcacaggaaaatgatggaaataaataaggaagagaatattcgcttggggttgcaccgatcagattatatgctggattcagaaacaagttctcttcttcaaatagagctcaacaccatttcagcatcatttcctgggcttggttccttagttagtgatcttcacaggtccttaattaaacaatatgggacttctttaagtctagaacacaagagggttcctgcaaatgcggctagcactcaattttctgaagcattggcccaagcatggtctgagtttaatattgacagtgctgtaattatgatgattgttcagccagaagagagaaatatgtatgatcaatactggctttccaaacatttgcaagactcacatggcataacaactataaggaaaaccttatcgcaggtggaagcggaaggccaggttctcccagatggaactcttcttgtaggtggccagaaagttgctgtagtgtattttagagctggctatgcaccaaatgattatccttcagaagcagaatggagtgcaagacttatgatggaacaatcatctgctgtgaagtgcccttcaatatcatatcatttagtgggaaccaaaaagatacaacaagaactagcaaagcctaatgtgcttgaaaggttccttaaaagtgaggaggaaattgacaaggttcgcaaatgttttgctggcttatggagtttggatgacgaatatattataaaaactgcagtggaaaaacctgagttgtttgtattgaagcctcaacgtgaaggcggagggaacaacatctacggtcttgatttgagggaaacgcttgtcagactacagaaggaaggaggggatgcgcttgcagcctacatactgatgcaaagaatcttcccaaaagcttctcctgcttatctcgttcgtggtggtgtttgccacgagggtcttgcaatttctgagcttggaatatatggagcttatctgcgtaacaaagataaagtggtgatcaatgagcaatgtggttacttgatgcgaacgaaggtttcttcatcagacgaaggtggcgtactgcagggtttgctgttttggatagcctatacttgactggcaagtgagataacaaaaggagcggcggctacatacaccgtcaatggatcatcatgtcctccatttagatcgacac

SEQ ID NO: 276721 - DNA, 420 bp, Zea mays
ccttcccaaagctcgcatagatgtgcatattctggggaagctgctgacgatgacggtgacgaatctcggtcggtgacgaaaggagatggtgaagtagggatggtaaaaattgccaaggccagaaatgctggtgtcaccagtgctttcggcttagaagatgaggctgaggaggacaagcgggaatagccatttcttgttcctgatgtcccctaggtcccagaaacaatcgatattttggagcagcaatattgcaagaatacttctttttcaagttacatgtggttgctgtaaaagtgcttggtattgtaaacatgcgaactctattaaaagaaaaaggattaggaattctaatccaaaggcaaaaaaaaaaaaaaaaaaaaaaaaaaaaaaaaaaaaaaaaaaaaaaaaaaaagggcgtca

SEQ ID NO: 276722 - DNA, 647 bp, Zea mays
accaaacatcttgcgtcatccaattcactagtgccagcgagaacagtggcgaccttcatctatcacatggagcgaactctggtctagcgtcatgcggtgatggacagcatatagcttctcagcctcaggctcagctggttcggtttaccatggataccagcaacagtgtctatgagcccagtttcttcagtgtaaaccagataaattaagcgttgaagacacacgccacttggtcatttggataaatagccctgaagatggcctgagcttgtgcaagaagttcttcaaccaaccaccggacataaggatctatctgttaatgtgatctgtgtatttattagccatacctgaattaagttgaacccaatctaggccagcttatgtgcaatatgcagttccaacctgtgattgacccattttttctgttgtttctttgcccgtgatgtgactgctctggaacttaagtgtgatactgttgtagttacactttactgccctgacaatcatgtcaaacggctggatatctttgaaactgtccttgatgaatctggacgtgtattttgtgtgtgtgtatatggtttttgcttcttcaatgtttgtccatggaatatagatatataaaaagctgttgcatcaataattaaaaa

SEQ ID NO: 276723 - DNA, 426 bp, Zea mays
atgatcgagtttatttcatttcatttgttcattttaaaggtgtagagaggaagatgccaactgtgacaacacacagacagttgagcaacaacagccctctgacgacagacagacagttgagcatgctcctcttcagaaaactgatctaggcaaagagacacatgtttcagaggctaaaacgctcacagcagatgctgatggaaatttgagctcaagccagcaaactggggagtacaatgaattgttgagacaatactattaaattgttgcttaattttaaattgttcattgtaaaatagaacttattgtggctgatcatttctggagcttttgtgaatgatctagctagctatctgtaaatgatatagttgtgaatgctattataattgtgatgtttttgtgaatatataattgtgatgcttttgg

SEQ ID NO: 276724 - DNA, 393 bp, Zea mays
gctttaggtgttcacgagaaatataatttgccatcaggaaaaccaaagttaacaggaagttcggtgttcaggctggggattaaaacgaggaacatgaagatattgcttcgtagcccggaaaggaacttgggggatttatagcaatattagtgtgccattttccacaagactgagaggaatgtggtaaaccagtgcagagaggaagatgccacctgtgcccacccccagacagttgagcaacaacagccctctgacgacagacagacagttgagcatgctcctcttcagaaaactgatctaggcaaagagacccatgtttcagaggctaaaacgctcccagcagatgctgatggaaatttgagctcaagccagcaaactggggagtccaatgaa

SEQ ID NO: 276725 - DNA, 475 bp, Zea mays
gtttctgcattgcgtgcgcgtgactgcatcttccgttttcagagctcagagtcttcgttgtttgtttcggatgacgacctgtcgcaccgcgaacgcagccgccgtcgtccgtctcctgctgctgtgctctttctgcgccgccgccgccattgcctgcgaccctcctaatggcgccaagttcgggtacaccggctccgtcggtcccgaccactggggcgcactgagccccagcttcaggcagtgcgcgacagggacgaagcagtccccgatcgacatctacacggtccaggcggtctccaacccggcgctgcagccgctccacagggactacaccgtggccaacgccaccctcgtcgacaacgtcgtcaacgtcgcgctgcgcttcgacggcgacggcggcgccgggagcgtgagcgtcagcaggaagctgtacacgctgaagcaggtgcactggcacttcgcttgcgagcacacc

SEQ ID NO: 276726 - DNA, 1038 bp, Zea mays
  unsure (1)..(1038): unsure at all n locations
cccacgcgtccgtgatgatggggccggattgttacaaggtccattttgatgatcctgaccttggtgttgatactgtgaaggacactgattgtatgccagttaattggctgcataatcgtcctgacaacatgagaaggaactacctttcaaatgatgtgtacaacatactggagatggatcacattcctgaccttacaccaagtgagaacgggaatcatgctataaatggaactactgtattcgaggagctcaaaagtctgcgcttaacatcagatagacagcctaaggcagaatctattatacatagtgaacggccaccatataggagtacatctgatggccctacaagttctagtggtttctcttgcccagacaataatgctggtcacaacggtgaactagagtcatatgtagctgcattttttgaaaactcactatcacaagccaggcagatggttgacgaagccatccaggcaaactctggtggtagtgatgatgaaaaggtatgcatgttaaatcaagtgacaggatgtctaggctcagattctcgtggcgtgcaacttccatctgacatgatatcaaactgcatcgcaacggttatttcaatcaagcgccttagcgactcgcgacatccatttggtaacgtagcgggcgtcttggagcatgctttatcagggctgcggccaagctgtccacagaacctcggagtttacacagaaataaagagagacctttgcaccatagcgaaccagatttttgcacttgtgccaacagcatcaggcaattgcagccctcctgtctcgcccatgtaactgggacctgccccggatagacccgttgccttcttgcaggccctgcagtacacgctgtctcggagttttgctgctgttggagcctgatgttatgaagtccggttgaatggtagcatacggaggacgcaagtctgatgtgctgacttgagcttgtatatgcagcgtgcgatcattaattggctagcctncttgtaacctgtgtatatacctgaatgaataatttata

SEQ ID NO: 276727 - DNA, 440 bp, Zea mays
gatttttgcacttgtgccaacagcatcgggcaattgcagccctcctgtctcgcccatgtaactgggacctgccccggatagacccgttgccttcttgcaggccctgcagtagacacgctgcttcctctgctgtgagttcaaaacagaggttttgctgctgttggagcttgatgttatgaagtccggttgaatggtagcatacggaggacgcaagtctgatgtgctgacttgagcttgtatatgcagcgtgcgatcattaattggctagcctccttgtaacctgtgtatatacctgaatgaataatttataggtccatatacagattcaggatagttaatatctgatccagtagtgaataaagatgtatttctgcagtcatgattctcgtcttctcgatgtaatgtcacaggaacgtttcttgataggaaatttacataat

SEQ ID NO: 276728 - DNA, 842 bp, Zea mays
ttgtctgccacgcgtccggcttgttttaacactggaaatgatgctactttccaatatggaatttatgagcaggctgttttgctcactacagaacccagtgctgtaaaacgatatatatattcattattttgggggtttcagcaaataagtaccttagcaggaaaccttgtcccgagttactttatatgggaagttctgttcacgatggctattattggtctgggactgttgctttttgcattgcttattggaaacatgcaaaattttctgcaagctcttggaagaaggaggttggaaatgcaactcaggcgccgtgatgttgaaaagtggatgagccataggcgattgcctgaagatttgagaaggagggttagacgagccgaaaggttcacctgggcagctactcaaggagtgaatgaagaggagcttttgagtaatttacctgaagacatccaaagggacatacgtcgccacttctttagattccttaataaggtccgattattcaccttgatggattggcctatattggatgcaatatgtgacaaattaagacaaaacttgtatattagtggaagtgacattctttaccaaggtggtactgttgaaaagatggtcttcatagtgagagggaagctggaaagcatcagtgcagatggcagcaaggctccattacatgatggagatgtatgtggagaggagctcctcacgtggtacttggaacactcttcagcgaacagagatggtgggaaaattaaattccaaggtatgcggttggttgctatacgtacagtaagatgtttaacaaatgttgaagcttttgtactcaaaacaagtgatct

SEQ ID NO: 276729 - DNA, 513 bp, Zea mays
tctgatcgatcctcctctcggccgcccgcccgttaattaggtagccgacagtatctatccagctaggtagccagccagcgaggagccgccgttgcttcctagctgcacctccgcccggccggccgtagaagacgccgacgatgaaggtgtcggtgctggcgctgtggtcggcggcggcggcgctgttgctggtggcgcaggcgccgtcggcggcggaggcctcccaccacggcggcgcgggcctcaagctggggtactacaagaagacctgcccgggcgtcgagaacgtggtcaagtaccacgtcgccaaggccatcaaggccaaccgcggcgccggcgccgcgctcgtccgcctcatcttccacgactgcttcgtcagggggtgcgacgcgtcggtgctgctggacccgacgccggcgaacccggagacggagaagacggcgccgatcaacatcgggctggcggcgttcgaggtgatcgacgagatcaaggcggcgcttgaagagcggtgcc

SEQ ID NO: 276730 - DNA, 571 bp, Zea mays
aacgccgccggccacacgcacactgccacacggagctagctagctgcaccgatcctctcgctcgcccgttaggccggttgctgacagtatctagccagccggcgaggagccgccgttgcttcctagctgcacctccgcgcgcggtctgcaggccagtcggtctcgatccacggccggccgaagaagaagacgccgacgatgaaggtgtcggtgctggcgctgtggtcggcggcggcggcgctgctgctggtgctggtggcgcaggcgccgtcggcggcggagggctcccaccacggcggcgcgggcctcaagctggggtactacaagaagacctgcccgggcgtcgagaacgtggtcaagtaccacgtcgccaaggccatcaaggccaaccgcggcgccggcgccgcgctcgtccgcctcatcttccacgactgcttcgtcagggggtgcgacgcgtcggtgctgctggacccgacgccggcgaacccggagacggagaagacggcgccgatcaacatcgggctggcggcgttcgaggtgatcgacgagatcaaggctgcgcttgaggagc

SEQ ID NO: 276731 - DNA, 1074 bp, Zea mays
tctttagatgcttgtcacactcgacctcgcgggccttgctctcacaggagagatttcagggtccctcagccagtgccgattcttgcttgaactgaatctgtccggcaacaaactgcaaggagctatcccagacacactcaacaacataacctacctcaaggtgcttgatctccacaggaaccagcttgatgggggcattccagtcacacttgggcagctcacaaaccttgttctgctagacctctcggagaatcaactgactggggcaatacctccacagcttgggaacctctctaacctgacacatttcaacatgtccttcaataacctatctggcatgattcctcctgagccagtcttgcagaaatttgattacactgcctacatgggcaaccagtttctatgtggctctccattgcccaataactgtgggaccgggatgaagcaccgcaaacgagtgggtgtgcctgtcataatcgccattgttgctgcagccctcatacttattggaatatgcattgtttgtgctttaaacatcaaggcttatacgcgtaagagcacagatgaggacatgaaggaagaggaagaggttcttgtgtctgagagtactcctccaattgcatctccaggctcaaatgccatcatcggaaaattggtgcttttcagcaagagcttgccatcaaggtacgaagattgggaaactggaactaaggcgctacttgataaagactgtctcattggcggtggatcaatcggtacggtgtacaaggccacttttgaaaacggcgtgtccattgctgtgaagaaactggagacactagggagcgtgagaggccaggatgagtttgagcatgagatgagccagcttggtaacctcagccaccccaactctggttgcttttcagggttactactggtcatcctcgatgcagttgcttctgtcggaatttgtggccagcgggagcttgtatgaccacctccacggtagccatcctcacgctttctctgagagcagcagcagaggtgctggaggtgaactgtcttgggaacagaggttcaacgtcgcacttggag

SEQ ID NO: 276732 - DNA, 860 bp, Zea mays
  unsure (1)..(860): unsure at all n locations
tcgtgggtcgtcgcacgcctctgcacttcgtcgtaccagccccggagctcgccaccgcggccgacccaggcaagacggcgaccaccaccacgacgacgagcgagatcaccacggagactggcgcgctggaggactccgactccctggcgcacctgctgctgcagcccgggacagaggacgcggaggccgtcgcgctcggcctcggcctctccgacttcccctccgccgggaaggcggtgctggacgacgaggactcgttcgtgtggcccgccgcgtcgttcgacatgggcgcgtgctgggccggcgcagggttcgccgacccggaccccgcctgcatcttcctcaacctcccgtgacagccacacacggtcacggcgccgaggctctgctctgcgcctgatgatgagtgcaaggaaatggagcgctttgattcttctgctcttggttgcatctgctaattgatttagcagtggtggtaaggtacacgcacgacgagctgactgcgtggttcttggtttgggccttagtatatgatgatgatgacgatgatactagttgtatgtgtgacgtgagagacgatcgcgacgacgaccttgaattttagtttctgagatgaaaaaggtcaactagtggcctctgtatgactttagttttactcatgaactcatcagatggctggctgtggctgtggctgtggctgtggctaactcatcgtcaagtgtttctaccggctgcctataaactagactgagctttggtctggtattcttccttgttcttatgataagttctgttgtgctgtcatgcttgttttcttcttttctgtanagattatgggggatttcctcggctctcaatct

SEQ ID NO: 276733 - DNA, 610 bp, Zea mays
gatacttgtttggatgcatctgctggtcgaaggcagactgcctcagagatcaggcttggtatggtctctgcatgcaggtggcatgcaaaacagatgtgggagttaaatgcgaatggaaatcttgtgagcagctattcaagattatgtgccacagtggaatcaagggacgaaggaggtagtaccagtggaggtcgggcatggattgcaactggaagtgaaggagaaatctatctcgcgttcttcaatctcgactccatgagcaggaagatgaccgttcaaatatcagaccttggaaaggttctcggaagaaaccttttggagaaaaacccatgtagctacactgaagtttggagcgggaagaatttcggccccgtgaaggaagagatttcagcggtggttcattcgcatggctccatggtgttcgaaatcatatgttgagattgcagtactgggcaagttgttcgagaagtttgcagtgataatttagttgtaagctccattcctgttgatccttttttacccttagtccggagatggaagagatacgttgatgaaccattaactagatgtctgctggatttgacttcaatgaataacaaaacccccaagc

SEQ ID NO: 276734 - DNA, 531 bp, Zea mays
gctccgttcccctggatccccgctgaaggcgagtctcactggtggggcaccttcaaccctgtgcagaaccatgcgcatggaggctttagcagaaggcctgctggggagcggatgccgccgcagagccaaagccacccggagaacagctatcaggctgtgccgccgtcacagaggatgccgccgttcttgtgattcgacaaggctgttcctacgtccgatcgctgtatataaaaagaagtattcggttcgggatctgagagagcacattgagcgaagatcgactgcactgcagtctccagcgttgggacctgtgtgatgtttatgccgctggtatttcagcgtttttctttttccctccggtccagcactctggtttcattgagcgctgtagactgtctgtcctaactgatgtgttgcgttgaggaggacgatttggaaacgcgagccgaagctgaactgcatctctggtcgccggggctaaaagatgccgtttgctgctatgaaagttgtatcgatttgcggccgctctag

SEQ ID NO: 276735 - DNA, 751 bp, Zea mays
cttgtctaaccgtgacaacaatataagatatgttgctcttaacatgcttatgagggccattacagttgatgcactagcagtgcagagacacagaacaacaatattagagtgtgtaaaggatgccgatgcctccattcgcaaaagggctcttgaacttgtttatttgttagtcaatgatacaaatgtaaagcctttgactaaagagctcatcgatgtacttaaacatagcggatccagattttataggagatctcacagtaaatatatgctctatagttgaaaagttttctcaagagaagttatggtaccttgaccagatgttcaatgttttatctctggctggaaatcatgtgaaggatgacatatgtcatgcccttattgttgtactaagtaatacatcagagcttcaaggatattcagcgaggtcattgtataacgccttacaagaatatggtaaacagggaagcttactaagagtagctgtttggtgcattggtgaatatggtgaaatgctggtgaacaatgttggcatgctggatggcgaggagccacttacggtcacagaatcagatgctgtggatgctgtagaggtcgctcttaaccgctactcagcagatatgacaactggagcaatgtgtctggttgctcttctgaaactctcctgacgatttcctttgacatcagagaggataaaacaaatagttgcccagaataaaaggactgttgtcctttgactacagcaaagatcaat

SEQ ID NO: 276736 - DNA, 551 bp, Zea mays
cgttctttccagggctagctctatctccctcccgaggggtgctcccttcccccccttcttctctcccttgccgacgattacgccaggtgcccaggtcttcttcgggccgaggtcgctgccgccatacacttggtgcccaggtcttctccgggcccttcgccagcgtcgagcagcaccaggctgagctccacagtggttcttggagaggtctgtgatagactactaggctgaatacacctacacaaagaagagaaaaggggatcttggagaggtttgtgacacactactgtggtgaatagacctatgcagaagagaaaaagggaaagagagaatgttctcaatgaatggaagtccctatgtcaaacacatgagcaaggagctgttgtacaagtggcttgtggaaggagcatatcatatatttgtgggagataactttacgcttgattcatgggcgactggatttataggggcgttgataaacatcgtggggagtgatggcataaactttggtaccaaccttctgaagttgggccatgatcagagagaaaagc

SEQ ID NO: 276737 - DNA, 669 bp, Zea mays
cccacgcgtccgcccacgcgtccggctgcatttggagcttgtgcaagagcttcttccaatttggagagagaagagaccgatcaagtcattggtgacaggcaggccaattctgcttgcacttgaggatattgatggcagcccttcttttttagaaaaagccctgcgctttcttgagaaacatggaataaaggtggaaggaattttgaggcagtctgcagatgtggaagaagttgacaggaggttgcaagaatatgaacaaggaaggactgagttttcagcagatgaagacgctcatgttgtcggtgactgtgtaaagcatgttctccgagagctgccatcatcccccgtgcctgcttcttgctgtacagcattattggaagcgtttcgcctggagactaaggatgctaggataaatgctatgcgttcagctatatctgagacatttcctgagcccaatcggaggttgctgcagagaattttaaaaatgatgcacactgttgcatctcacacctctgaaaatcgaatgactgcatcggcagttgctgcctgtatggcgcctcttctgttgcgtccacttctggctggtgaatgtgagatggatgaggtatttgatatggatggtgatgattcttcacaggttcttgctgcagcaaacgccgcaaacagtgc

SEQ ID NO: 276738 - DNA, 371 bp, Zea mays
gcaaccgcaacatgcacaagctcactttagatggtgttgatgtgatgggtgaacgattggcacatgaggttacttgaagaaatcaacagaagaccgtgtatcggaaagatctcttgggttgcacactctgttggaggattggttgctagatatgctattggaagactttataaaccacctaaacgaacatcagaaattactccacaaactctggatgacaacaatataggtaccatacatggacttgaggcaccgaactttataacagttgcgttaccgcatcttgcttccagaggaactaatcaggttcctttactatgtggaagtactgcatttgaaaatagtgcatgctacattattcaattgatatt

SEQ ID NO: 276739 - DNA, 400 bp, Zea mays
cccacgcgtccgcccacgcgtgcgcccacgcgtccgtgaacagcaagcgcacctagcctagctgcaagcgcaccgcccgccgtcgaaggcgaagacctagttcccggtccgtcgcgatggctgccgcggcccgccgcggccccggggcgcgcctcctcgcggcgctcctcctgctggcgctggtcgtctccgggcactgcctggacgcgcaccaccgcgggctgaagcgccggcggcggaagcacgagatccattccccggtcaagacggtggtggtggtggtgatggagaaccgcagcttctaccacatcctcggctggctccgacgcacccggcccgacatcgacgggctcacgggccgcgagtccaaccggcttaacgccttcgaccccgcaatccc

SEQ ID NO: 276740 - DNA, 646 bp, Zea mays
aacgaaatccagcagaccgacgcgaaccgagaaaaatcccacgaaatctcgtggccgcggcgaccggaagaagaggacgacgacggacggagcggcgatggcgtgccgcgcacttgccctccgctccctgctcctccccgacccgctacaccgcctcccggccgcggcgccacctgtttggagagcgtcccgcggtggccgccgtccgcacctccgctgctgctccggcggcgggggcggggagcccgggcagccgccgcaagaagctgtgctcgaggccatatccaagatagcaaggtctaaaggaagggttgcactcacaacaaatatggtcatgggtggtactgtgactgacgatgcaagtgatgaatggcttgttctggatcagaaggtaaattcctaccccacagatagaggatttacagcaattggcactggaggtgatgattttgtccagtcaatggtagttgctgttgaatctgttcttcaagaatcaattcccaagggccgggtatctcagaaattatcttcaagagggaaatatgtttctgtaaacattgggccaattcgtgttgtttctagtgagcaggtccaagctgtgtatcgtgccatgagaagagataacaggatgaaatacttcttatga

SEQ ID NO: 276741 - DNA, 659 bp, Zea mays
  unsure (1)..(659): unsure at all n locations
gccgtgtgcggtcggtgacgaccttagatcctctactcccgtatggccaaaggcctcgaaaggtgtcggtgtggtgtcccagccgaggccgtgacgaagatcttccgctaagcgggtcggcgtcggccacgcgcncgatggtggttagcacgtcgnccctagcgatggcagcgtcgcgtaacagctcgacgagctggtccttggggaacgaatccagcagcgcctggatcgaagcctggtcgctctcgccttcttgcttcctcttccacttccacctcctcctcgacctccaccctcctcgatttcctctacatcctcgccgcctgccccctgcggcagcttctccatcgtagcctcgacgggggcgaggacctcggatagaccagcggccttagcggtggcagacctggtggtcggggaggccttaaccggcgtgaaccctgccgccgatttgggctcgagcttccgcttcttgcccatagcaacggcgatacggcgtgggaagacgggaattgcgtcgtgctagggtttcgatggagaagagattgcggaacgaggggaagacttttgccgtttcatatagctgaagtaggcaagtagctaacgcggcgtcggacgggctgtctgtgcatcatgtgacctgcacctgaataatgtaa

SEQ ID NO: 276742 - DNA, 477 bp, Zea mays
gaggagtggggagttcccgtgcacaatgataggagattgttcgaactacttgtactatctggtgcattagctgagcttacgtggcctgaaattctcaagaagaggcaacttttcagggaaattttcatggagtttgaccctgctgctgtctctaaaataaatgagaagaagcttgtcgcacctggatgcgttgcccattctcttttatcagagcaaaagctccgagctgtacttgagaatgctcgccagatactaaagatcgctgatgaatttggatcctttgatcggtactgctggggttatctgaaccacaagcctatagtaagcaagttccgctatccaagacaagttcctgtgaagagccccaaggcagatataatcagcaaagacatgatgagaagggggttccgaggtgtgggcccgactgtcatatattccttcatgcaagctgcggagctgacaaatgatcacctagtc

SEQ ID NO: 276743 - DNA, 511 bp, Zea mays
  unsure (1)..(511): unsure at all n locations
tgtccatgtttcaatatgttccatcccttgtgattattgacagatgggtggttgagaatcaggttggcaagaagacccttgctattgatgattgtgattccagacaatctgtctatgtgtatggatgcaaggattctgtccttcaagtaaacggcaaggttaacaatatcactgttgacaaatgcactaagtttggaattgtattcaaggatgttgtagcagcttttgagattgtcaactgcaatggcgttgaggtccaatgtcagggtacgtcaccgacaatatcaatcgacaacacatctggatgtcaattatacttaagcaaagattcgctgggagcttcaattacttctgccaaatctagcgaaatcaatgtgatgggtccaagtggtggcgctgatggtgattgggtggagcatgcattgcctcaacagtacatccatagtttcaaggatggggcagtcaccacttcaccagtttcacacttangagcgtgaatacaattgttact

SEQ ID NO: 276744 - DNA, 1223 bp, Zea mays
agctgcattaataaatggtattctaagttgtccaggaaagatataaaggctcgttgtccagcttgccgtggtctctgcaattgtaaaccatgcagccttggtaataccaagggttctacgcctaaggaaccgccaaatggtgaaaggaagatacttagcataaaaatttccaaccatcaattttacaagcttttacctgtaaaacttgaccaggaacagctagatgagttggaactggaagctaaaatacaaggaacaaaaatatctaatgtctgcgtccaggttgctgaaactggtcagagtgagtcactctactgtaataactgtaagctctcgatgagccgattattaaggtgctgtccaacatgcccgtttaagctgtgcctaagttgctgtcagaagatacgtgaaggaaacacgtcggacaacacccctgaagataaattcaagaatcggttgattcaacaagagtctgtccatgaggatggcagtattacttgcccttcgattgagctgggtggatgtggtgacgccatgctgaacttaatatattcatctccatctagccagtccgaagagctcagttcagaatgtgagctagatgctgcaggcaatcattctggagtgaaggatgctcaggctcatgggtcacctgtacctgagagtaatggaagattattggctgctgcccaggcagaaacagtgtctgaggaatgaagatgcagctatggttggctcatcgttcaggtgggagcgcaagctgacatgttcactagcatgaagcctgaagatgtgtatgatacggtccggattcgatagagggtaggttgcttaatttagctaggttatcggcctatatggctattgattttaggcctgtgacctggggatatgtttcgtctttgatccgggagtcgttatgttaaacatcgttgtacatatggttatggctttatttttgtcattaccgagaggcgggagctgatggattggttgtattgtcgttcgtctaagggattaccttgataatttttatgtgcggtactatcagtattcagtagcccacatggatcgtattgttgacttgttgtcattcgaggctagtttcatgttgtcattgaccattgcggctcgatggtgaaagcattacgaagaggcagtactattgtcaatgtattacagttgattgcaatgtttattaaaaaacatcacatggcttgacc

SEQ ID NO: 276745 - DNA, 507 bp, Zea mays
ccatcgagccagtctgaagagctcagttcagaatgtgagctggatgctgcaggcaatcattctggagtgaaggatgctgaagttcacggatcacctgtacctgagagtaatggaagattagcagcagcttcccaggcagaaacaatgtccacatagtctcagaagatgcaattcttgttggctcatctttcaggtgggagcgcaagcgtttatattacattgaagcctgaagatagtgtatgatatggtcaaaaatcggtagagggtaggttgcctgattaggttgcttgatttaggaggttgccagcctatatggccattgattttaggcctgtgacctggggataatcccaattgttgtattgttcatctttgaccagggagcgaacatcgttgtacatatggttatggctttatttttgtcattaccgaggggcgagagctgatgaatggttgtactgtcgttcgttcaaaaaaaaaaaaaaaaaaactcgagactagttctct

SEQ ID NO: 276746 - DNA, 555 bp, Zea mays
tgtttgcactgtccatctgcagaggcctatagtcccagtagatttatacaggtcaatacgtgattcacaacttattggcctgtcaggatacacaaaggagggtctcccaatttttggcattggtgttggacatagcacatatgacaaagcttcggtccactgctatgtgcaatctcatatccagattaacgagtaccgtgatcgtataattttgcctaggctgacacaacagtttgggcggcctgttaccagctgtataaaagtgctggatatgactggtttgaagctatcagcactaagccaaataaagatgttgacttccatatcgacagttgatgatctaaattaccctgaaaagacagagacctattatgtagtcaacgttccatacatattttctgcttgttggaaggttgtgaagcccttattgcaggagaggacaaaaaagaaggtcaaagttttgactggctgcgggagagatgaacttctgaagatcatggactactcatcactcccccatttctgccgccgggagggctctggatcatcgaagca

SEQ ID NO: 276747 - DNA, 522 bp, Zea mays
tggacgcgtgggctccacgccccccttgtccaactacccctcccactatttcatttcatttcatccccccgatccaagaaaccggccaccgggccggagcgaacccttagaagcgaccttggcccgtgaggaagccaatcagccagagacagaacaatccatccaccatgaacagcctgttctcgagctcatggaagcgcgacggcggggacatcgagtccggcggcgtggagatgtctgcgccgccgggcgccgcggcgggcgcgagcctggacaggttcttcgaggacgtggagtccatcaaggacgagctccgcgacctggagcgcatccagcggtcgctccacgacgccaacgaggggggaaagtcgatgcacgacgcggcggccgtgcgcggcctccgcgcgcggatggacgcggacgtggccgcggcgatcaagaaggccaaggtggtgaagctgcgcctcgagtcgctggaccgcgccaacgccgtcaaccggtccgtgcccggtgcgggccggg

SEQ ID NO: 276748 - DNA, 858 bp, Zea mays
  unsure (1)..(858): unsure at all n locations
aaatcccgcacccccaggaacgaagctgtcgggcaaccaccttcatccacgcgaggggccggttgacccaccaatccaccattgctcgctataagactccgtggtgccgcacggctccgccgccggcgaggcctcatctcggtttactataagagtataagtacgtctccgcaacaagctaatcttttttttgccccctccttccacgtccccaccctgccgtcgtcgctactcgcatagagattcgcgcggccgtgtcttgctcgcgcctgcccccttccttccttgtcgtgccagcgcccagatctctcgctcgccggcgctcgggccagatctgggtgggggctcggaggcggagccgggcgcaggtttggtttgacccaaggggcgaggaggagagggaagaagaccccggacgccatggagctggcggttggcggcgggatgcggcggtcggcgtcgcacacctcgctgtcggagtcggatgacttcgagctcacgcggctgctcagcaagccgcggatcaacgtcgagcgccagcgctccttcgacgaccgctcgctcagcgacgtctcgcactcgggcgggtacagcaggggaggcttcgacggcatgtactcgcctgggggcggcctgcgctccctcgtcggcacgccggcctcctccgggctgcactccttcgagccccaccccatcgtcggcgacgcctgggaggcgctccgccgctccctcgtcttgttccgcggtcagccccttggcaccgttgccgccgtcgaccacgcgtncgaggaagtcctcaactacgaccaagtgtttgtgagggatttcgtgccgagcgcgctggcgtttctgatgaat

SEQ ID NO: 276749 - DNA, 391 bp, Zea mays
caccagaccaattagctagcttcttctagctctagctaggctcgtctgctgcaagaaggtgacagttacagcaggcatggaggggaaggaggaggacgtccgcctgggcgccaacaagttctcggagcgccagcccatcggcacggcggcgcatggcacggacgacaaggactacaaggagcccccgccggcgccgctcttcgagcccggggagctcaagtcctggtccttctaccgcgccggcatcgccgagttcgtcgccaccttcctcttcctctacatctccatcctcaccgtcatgggcgtctccaagtccacctccaagtgcgccaccgtcggcattccaggcatcgcctggtccttcagcggcatgatctttgccctcgtctac

SEQ ID NO: 276750 - DNA, 843 bp, Zea mays
gcttgcaggcatttgttggtgtagatcatagtctgaattcgataattgttgcaatcaggggaactcaagagaacagtgtacagaattggataaaagacttgatatggaagcagctggatctgagttatccaaacatgccaaatgcaaaggtgcacagtggatttttctcctcgtataacaatacaattttgcgtctagctatcacaagtgctgtgcacaaggcaagaaagtcatatggagatatcaatgtcatagtgacaggccactcgatgggaggagctatggcttctttttgcgcgctcgatcttgctatgaagcttggaggtggcagtgtgcaactcatgacttttgggcagcctcgtgttggcaatgctgcattcgcctcatacttcgccaaatatgtacccaacacaattcgagtgacacacgggcatgatattgtgccacatttgccaccttatttctcctttcttccccagctgacataccaccatttcccaagagaggtatgggtccaggattctgatggcaacacaactgaacggatttgtgacgacagcggtgaagacccagattgttgcaggtgcatctccatgttcggcttgaggattcaggaccatttcacttacctaggagttgatatggaagcggacgactggagcacctgtagaatcatcacagctcaaagggttcagcagttccgactggagctagcgggcaacatcatgatgaccaagcacgatatcgacgtctccatcgttgaacctagtgtacaaaacagattggagcagttctagataggcggaacattcgttttgtccagattcagagaagcaacagcct

SEQ ID NO: 276751 - DNA, 443 bp, Zea mays
agcatagataccgcaaggatagcttttgctccgatgttgaacagctttggctcgggctagagtaccaagaagagtgccgcggcgatgatggattacacatctttggaggcagcgacagaaaacttcagtgagagcaatgtccttggattaggtgggtttgggtctgtgtacaaagccaattttgatgggaggtttgctgctgcggtgaatagactggatggtggggcacatgattgcaagaaggaattcgagaatgagctagacttgcttgggaagattcgacatgcgaacatcgtgtcccttgtgggcttctgcattcatgaggagaaccgtttcgttggttatgagctgatggagagtgggtcgttggattcgcaacttcatgggccatcacatggttcagctctgagctggcatattcggatgaagattgctctcgacac

SEQ ID NO: 276752 - DNA, 497 bp, Zea mays
aacaagacgacgtcgacgacgacgtaacggaggccccggaggtccacgccgacctcctgacggagctccgggacgcgtccctcgccggcgagaacgctgaccaccaccaccaccaccaccaccaccaccaacagctggggctagcgcccgacggcgacggcgacggcgactgggggatcgacgacaaccaagagaactacgacaatatgcacgcgcaccagggctgcgaggactgccgcggcctcctcgacggcatactgtccgacttcgacgactacgacgggggcccaccacggccgaggtccccgccggcgccgtaccgcgtcgtcttcggccacgacgacgacaccctgctggagctggagtgggcggaggaggccgccatggacccgttcgccaccagcgagtccgcggggggctggtacatggacggcctggtcatggccatggcgtgggacgagcagcaggacggcggcggctttccgttcgagcctgct

SEQ ID NO: 276753 - DNA, 487 bp, Zea mays
gtttcatcttcctcaagagctcacacgaaagttgacctaagcaagctagaactgactgcactgctcagatattggcgtcacttcaatctcgatgcatgtcctaatccatccagagagcagttagttgatgctgttcaaaggcacttcacggcccagcaattggatgagttgcaggtcattgtcggctttgtgcaagctgcaaagaggctaaagacgactatgaaagtggcctgactgtgaagcctgaacttcaactaacagattcaagagaggatgcagcatgtttgatgaatgttgccgtgctatgtaatatatatgcatgaagttctttagattcaggtggtaatggacaactagactatgttagcctcatctgatgtagatatgcagtatcctgtctaaagatgtttcaacctctagctcagttctttcctgctgactggatgtggattgaaatgacaagtttaaaaccagctattttgtcatc

SEQ ID NO: 276754 - DNA, 546 bp, Zea mays
cgcgcaaccgagcgcctctgtggcggtggcaacagccgtggtccacgcgcctccggcacgggcaacggaggaggaggagggcaatgcagagaaggagcaagaacatgatgagtctgctattagcttggacgaggcctacgcgctagcccatcgccatcgcacgaagccgctggcgtcgccgccgccgtcagcagcagcctctgccaccgctgcgttgccgacggagcacaagaaggtggtggcggactggcggagggtacccaaagcaggggaggcgcttgaggggaaggcggagttgaacgcgcgcgcagacctgttcatccggcagttccgcgaggaactcaagctgcagaggctcaactccgtcctcaaccacacccacgcccttggctaacggcggcgctgtagccggtgtgctacaatgtgcttgctccattgttcacatggccatttttggattaatgtttttttgtaattaattagtttatacagagtatatataagagcaactcgttcgctcggcaaaaataaaaacggacgcgtggg

SEQ ID NO: 276755 - DNA, 531 bp, Zea mays
cgggattacaatcctttgcattcagacccagatattgcacagcttgctggggtcacccgtccaatcctgcacggcctctgcaccctaggattcgctgctcgcgccgtcataaaatctttctgcaacggcgaaccgactgcggtgaagagcatcttcggccgtttccttctgcacgtctaccccggggaaacgttgtccactgagatgtggcttgacggccagaaggtgcactaccaaacgaaggccaaggagcggaaccgagctgtcctctctggatatgtgttgctccagcacatcccctcgtcattgtaagtaaaagttttgtttcttaaaattggtgcccgctgaaagcatttggcttggctgtgataaattgagcacgaggtgggctgccactgtaatgatagccatgtatgggtctgcacataacacattcgtactgtattgattagaagcacgtaccacttaaaaaaaaacaatattgtttttaataaaaattatatatttaatacaactacaatattttataaa

SEQ ID NO: 276756 - DNA, 889 bp, Zea mays
  unsure (1)..(889): unsure at all n locations
cgtcgcgtgggctgaacttctgagaggaaaggagcccgttctccaccacggctccacgaccaccagcccaaccgggtagcttcttcttcgtccgctgttacccacaccgcgggaagcctccatgcgatcccctgggcggcgcctaccagcgccggcgcggctcgtcgcggctgccctcctcctcgcagctctcaccgggggagccgtcggcgccgatgggtacgggcgggcgaggagggtgtacatgaagaacaaggtcctggagatcatgatgaatcgaagcctcttactaaaagtttcacggactcgcttagtgagcttggcaatttaaatcttgaacacttgccacaggattatagtggatccgcgttgacactggttgagtcattatcaagtcttgttgtcttaggtaacctcacagagtttgagagaggagttctctggctttcagaaaatctgacatttgatgttgatgctcggattaatctttttgagtgtaacataagaccttcttggggggcttatttctgctcatattcttgcaaaagactacagcagccagtttaagcatgggctgtatcaagatcaattactacgtcttgctgaaagtttaggcaatcgttttctaccggcatttgagacacctactggattgccgtattcatggattaatcttaaggttcatataccgaactttggcttttttcagactttaaaatcttaattntttgcatgcatgaatcaatcgtaagattcctttacaacctgaaatcgtatggccacttgaatgccatcatttattgtgggtacatatctgtgtacattcaacaggtcatactgagaaagggtcttctgcaaagagtaccacattgtctgaagcagactacac

SEQ ID NO: 276757 - DNA, 656 bp, Zea mays
ggcttcgcgctatgacatttgcttgcatgttgatttatgccttggtggctttgtgctgccttttgctcataagcttgggtaccctattcctccctttgatttttctgtcaagggtgttacatccatctcatctgatgttcataagtacggattagcaccaaaaggcacaagcattgtcctgtacagaaatcatgaaattagaaagcatcagtttgttgctgttactgagtggaccggtggcctttacgtttctcccacaattgctggaagcaggccaggtggattgatagcgggagcttgggctgctatgatgtctctcggactgaacggctacttggacagtacaagccgtatcatggatgtttcaaagaaaatacaaagagggattggagagatcccagggttgtttgtgatagggaaaccggatatgaccgttgtggcgttcggctcagacgttgtcgacatatttgaggtgaacgacataatgtcatcaaaaggttggcatctcaatgctctgcagagacctaacagcttgcatatctgtgtgacccttcaacacacgactgtttacgaccaattcctgaaggatctgcaagactctgtgaacactgtgacagcaaacccaggcccgattagcggcggaaaggttctatcta

SEQ ID NO: 276758 - DNA, 424 bp, Zea mays
gcttcaaagcagcgtctgatgatctgatgatgctgaagaatgcaagccttgaagagatccaggcaattcagcggttgaaagaagaaagagacaacgtgcttcagcaaaatcagcaaatgcaacgtgaattggatgtgcttcggaggcgcaggagccgcaaaggcgatgcaggtttctccctgacgttcgccgcgtttgctgggctaataggtctcatggtggggctcctgatgagcctcatcttctcgtccgcgccggctgatgcgtagtaagatgcacgaaaaggttgcagccaacggaagcgttgttgagttgagaccgacgtgggggaaaaggctcgctcgggggaagaagaagatgaaatttctgctctagtctccatttttctttcttttggctgttgcattctaagtattattatacg

SEQ ID NO: 276759 - DNA, 790 bp, Zea mays
cacgcacacgatgggcctgattcagcaagatccagttattttctcaacgacaataagagagaacattatctacgcaaggcacatcgcaacagaggctgagataaaggaagctgcaaggatagcaaatgctcaccatttcatcagcagcttgccacatggatacgacacccatgtgggaatgagaggggttgatctgacacctggacagaagcaacggattgccatcgctagggtggttttgaagaacgcacctatattgctgttggacgaggccagctctgcgatcgagtctgaatcgagtagagtggtgcaagaagctctagacactctggtcatgggtaacaagacaacgattctcattgcgcacagggcggcaatgatgaagcatgttgataacatcgtcgtcttgaatggcggtaggatagttgagcagggcacacatgactctctgatggaccagaacggtctatatgttagattgatgcaaccccattttggcaagggccttcgccagcatcggctaatgtaattattcttttgagtttgtttaggtgtaaattatcctaggggatgatcaggtttccttgtgcggccactcagtcaggggcccttttcggcacatgaaaaatgctgggagttgccgccctgttgctgttccgagtaagccgacctggtcttcttgacaaaaaaataaaaaaaaatagcttgcagatccaagtaattctggaaatagttagcaagtttgcagggcattgtaattgttgtaacatatgagctgaaacattctttc

SEQ ID NO: 276760 - DNA, 433 bp, Zea mays
  unsure (1)..(433): unsure at all n locations
tatgttaggttgatgcaaccccattttggcaagggccttcgccagcatcggctagtgtaattattattgagcttgttaggtgtaaattatcctagggcatgatcaggtttacttccgctcttggtgcagccactcagggcccgttttggcacatgaaaaatgctgcgaagtggccgccttgctggtgttgttctgagtaagcggaattgcagacctgatcttgacaaaaaaaacctagcttggagattcaggtaagtaactgttggaactgtagggcacaactcattctggaaatagttagcaagtttggatggcattgtaattgttgtaatatatgagttgaaacattctttcaaaggctcgtgcttgtgatctctctcgcatctgtaatgttagtgttttgatcatctcaatgtgtgtatattgttcgntt

SEQ ID NO: 276761 - DNA, 399 bp, Zea mays
gtaggcatttcctgaggcgttgtttcatcaacttcttttagcaatgctctatccagattgtgggacgcatttaggagcacatcggattttctctgttgttcttgttccctcttccgttgctccgtgctcatttgcagacacttcacggacaaggaagattgatctccgaaggacattatctagaacaacatcagtgttttcatcttctgctgctttgtttgggaaacttaaaagagacatgctttcatttcgtgaaagtccgctccaggataacacaaagctactgcccatcagtgaggatgcagatgagatcagcgcaaatgatgcaaaactattcaagtcacagactattcaaaggatggttagtacaagagatatttctcttccctcttccacaga

SEQ ID NO: 276762 - DNA, 648 bp, Zea mays
cctgaattcccggggctctagatcgcgaccggccggccttttttttttttttttttttgtttttttttttttttaaactcggtgaacagtaggatggtcgtaattgagttcatgtacagtatcatcgtcaataattacccaagttaataggaaacatacattttggagcactcaactctgttgtgtgtggagaaaatggcacgattatggttatctttagtatggccctacatgtaatccaacacatgctctgcaagaaagcttagctcagattgcctcatttgtgactctacagttgagctgaataggttcattgagcagataaatgatgcacatttttctccgaaaacctttgccaaatcttctcgcatattagactcggaatctgcgccacatttttcttttgcgtttccagagtaaagaagcagaaactcggaacattttaaccttacatggtcatccctatttgcatcttttacaatgacagcaattttattcagtccatcttgttctttgaaatccgtcaggtttcctgaacaattcaccagcaacgctaagagagtgtcgagacatgctctttgctcgaggataccacgtgtcatcaatatattcaaaaccaccttgacggcattgtagcggtgaaccacg

SEQ ID NO: 276763 - DNA, 824 bp, Zea mays
gcgcttccggccttcacgaacaggttcgtctcctcggctcctccttggcttcgcaagagtggggccgagtagctcctccgcgctccgccgggaccgacttgccgctggccgccaggggctccctcgcccaggaccggctccgccgtccaaccgtcctatcccctccggcctccgcccagatatgggttcttgggagggccaagctaggcagcttttgttggatgaggaagaagatgatgaagagtttttctttcttcttctccctgctatactttcattcctctctgaagagcaaagcgaaactggagcagctattgaaagtttcgtggaattcaagaggagcaccgcagccaaaacgctcgaagctcttgaagaaaagaagaagcatgatgaagatttctctattaaaaagtgtctagaggagttggatacaattgatgggctgacagatgaggatagatcatatgcaatggaagtctttgaatctgggttcaacagagaagtgtttatgagttcaaaaaaccacaatgttaggttgttttggctcaagagagaaattaaagcgcttgctgctatcatgtgatgtgaagtgaatgtggttgtgaagagataggcttacagaaaccgaagaaatccaactgctagtaccgttccagcgagaagacttcagccctgctttctgagtgcttggtgaacgatggaaggcctaggatgctgtttttgtttatgttgcttagagacggatattggaacgaggatataccttgtttgtacggtatcgtgctgccaaaattaatgcgttttaagcaatattttgctaggct

SEQ ID NO: 276764 - DNA, 1210 bp, Zea mays
ctgtgaagaagatagacagcgcttcgctgtctctgtacgaagaagacaactttctcgcggttgtgtcgaacgtgtcccggctcaggcatccaaacatcgtgccccttgcaggctactgcgtggagcacgggcagaggctccttgcgtacgagtacgtcgggaacggaacgctgcatgacatgctgcacttctctgacgacgacgggatgacgatgccgggcaagactactaggctcgcatggaacacccgcgcgaggatagcgctaggcaccgcgcgcgctctagagtacctgcatgaggtgtgcctgcccccggtggtgcatagtaggaccttcaaggcatctaacatcctgcttgatgaagagtacagcccgcatctatctgactgtgggcttgctgctgctctcactactgctgtggtctccgctgaagcggttggctcctttggatatagtgctcctgaggtcgccatgtcaggaacatacactgcaaagagcgacgtgtacagcttcggagtagtgatgctggagctgctgacaggccgcaagccactagacaggtaaaaaaacatgtcactgcccgccatttccgacctggtggcccattatttgttgtatagatcaagctcacgcggttcagtctctccctcgtcggcaattttggataccagctccagagagaggtcagaacagtctctcgtcagatgggcagccccgcagcttcacgacatcgatctcctcgccaggatggtcgatccggcgctggacgggctgtacccttccaagtccctctcccgtttcgccgacatcatcgccatctgcgtccagccggagccggagttccgcccgccgatgtccgaggttgtgcagcagctggtgcgcctgatgcagagggcgagcatcataaggcggcaatcggacgatctgggctactcgtacagggtccccgaccgcgacggcggcgcagcaggcgacgtcctctgactctgagtgaggctaggagacccaagttggttcacgttttgtttccgtccgtcacctactcacctgtaaatgacatttgacatgtactatagggttcggagtgtaccgggacttttcgtcagctgcgagtgtcatgtattgtgtgcgctcttgcaagtggtagatatatatatatagaagggaaaaaaaaaaaaaacaaaaaaaaaaaaaaaaaaaagggcggccgc

SEQ ID NO: 276765 - DNA, 1196 bp, Zea mays
ctgtgaagaagatagacagcgcttcgctgtctctgtacgaagaagacaactttctcgcggttgtgtcgaacgtgtcccggctcaggcatccaaacatcgtgccccttgcaggctactgcgtggagcacgggcagaggctccttgcgtacgagtacgtcgggaacggaacgctgcatgacatgctgcacttctctgacgacgacgggatgacgatgccgggcaagactactaggctcgcatggaacacccgcgcgaggatagcgctaggcaccgcgcgcgctctagagtacctgcatgaggtgtgcctgcccccggtggtgcacagggccttcaagtcatcaaacatcctgctcgacgacgagtacagcccgcgtctgtccgactgtgggctcgctgctctgtcgccgaaccctgagactgagagggaggctttcgctggagtggttggctccttcggatacagcgcccctgagttcgccatgtcagggacgtacactgccaagagtgacgtgtacagtttcggggtagtgatgctggagctgttgaccggccgcaagccgctagacagctccagggagaggtcggaacagtctcttgtgagatgggcgaccccgcagctccacgacatcgatctgctcgccaagatggtcgatcctgcactggatgggctgtaccctgccaagtccctctcccgtttcgccgacataatcgccatctgcgtccagtcggagccggagttccggccgccgatgtccgaagtcgtgcagcagctggtgcgcctgatgcagcgggcgagcatcggaggcgacaatcggacgaccagctgggctactcgtacagggttcccgagcgcgacggcggcggcacggtaggcggcgacgtcgtcgtcgcctgagctagctagctagctagaggccgcgacgagaccaaagctggcgtacactcctactcctacacaaagcgctgcacagtttatatatattcataaacaaaagagcgagcaaaagaaaagaaaagcagttggatatggatggatccttcacgttttgttaaaaagtcccccgtaaacgacatatatgtatagggtttgcagcgtactgggacgttttttcgtgagctgcgagtgtcatgtatagtgggcgcccttcccagtggtagatatataggatgggagaaaaaaaaacgtgtcttctttt

SEQ ID NO: 276766 - DNA, 861 bp, Zea mays
ccctttcgtccgcgacgaacggttcttctactgccggaaggccaaaggttcctgtgacggtgacttcatatacagttgctgatctccaagtcgctacgaatagcttctgtgaagactctctcctaggcgagggttcgcttggtcgtgtttacaaggctggttttcctaatgggaaggtacttgccgtgaagaaggtagacgacagtgccagcttgctgtctctgtatggaggaggagaagaagacgccttccttgagctggtctcgaacgtctctcggctcaggcatccgaacatcgtgcccctcacaggctactgcgtcgagcacggacaaaggcttctcgtgtacgagtacgttgggaacagaacgctgcatgatgtgctgcagcactgcttgtctgacgacgagggggcgagcaagaagctcacgtggaacaccgcgtaaggatagcgctaggcaccgctcgcgccttagagtacctgcatgaggtgtgcctacccccagtggtgcatagtaggaccttcaaggcatctaacatcctgcttgatgaagagtacagcccgcatctatctgactgtgggcttgctgctgctctcactactgctgtggtctccgctgaagcggttggctcctttggatatagtgctcctgaggtcgccatgtcaggaacatacactgcaaagagcgacgtgtacagcttcggagtagtgatgctggagctgctgacaggccgcaagccactagacagtgtgtgtgtgtgtgtgtgttttataccagctccagagagaggtcagaacagtctctcgtcagatgggcagccccgcagctccacgacatcgatctcctcgccaggatggtcgat

SEQ ID NO: 276767 - DNA, 954 bp, Zea mays
aaaagaagacactaccttggcacatgcctgttgtcacaatggacaaaagaagattagtgttgtgtgagacttttttcattcctttgatctattgcatgctatttgtaccctaatcgacaaaatagatgagactcaattcaggagcaaatcaccagtcctgttcacagtccaattcactatggctaaaatatcaaacttatgctccttgaggtttgttttttccttatcttcctttaatatctgatgactgatggactggtgagttcatgatctgcttcatgcttttccttttatatatggtcactacctcactggttagttcatggtgctttttgtctacttctttgcccaaaaaaaatcccggggcgaatttcagcatgcttttcctgcttccgctgtgcaaattcacaggatgcgtgggaaatgtgttcttgtttcgtcgggtggtgttcttgccattcgttttagctcaacacaaaacaaatgcttcttgttcttcaggtcgccctgtgtttctttctcgccagtttgggccatggattctggtgtgcatttgttcaatatatcttagtatcttatttaacaatcagtacttctctgatgctcaagagatcaatttactcaaagtagcaaactgtatcatagttgtatactttatcaaacgaaggaacctgatgcttgtagtataagcctcattttgttccaaacaagacaggcttcggatacaatcacctggaaatcaatcagtaaacttttgctattcagttttttaaataaaaaatttaggccttacgactttcctcgcaatgtgttcacatgtagattaccttattgcattgcctacttttgtccgttgtgtaaaccaatcttttatcatttatcaaatgattttgctcttaacattaacaaattatcgtttggtcatatgcaactaatgacatcacattaccaaga

SEQ ID NO: 276768 - DNA, 695 bp, Zea mays
cgcgtccattgcaagcaagtcagggagttgctgctgccaattccttctccatgtgcttcgcacaagatggccatggtagaatcaattttggggacactggaagctcagatcagcaggaaaccccgttaaacatgtataaacaaaatccatactacaacataagcatcactggtgctacgtggggagtaaatccattcacaccaagttcaacgctattgttgactctggcacctctttcacagctcggtcggatccgatgtacactgcagatcactagcagcttcaactcacaagtccaggataagccaagccagcttgactcttctctgccctttgaattttgctactctataagtccaaaggcttctaccaatcctccgaacataagcttcacggcggaaggtggaagcgtgtttcctgtcaatgatccaataattaccattacggactctgtatctaatccgatggcatattgcttggctgttatgaagagcgaaggtgttaacttaataggggagaattttatgtctgggctgaaggtcctgtttgatccagagaggaaggtcttgggctggaaaaactttgattgttacagtgtgggcaactcaagaagcaaccttccagtgaacccaaatccttctggtgttccccctaaacctgccttgggacctaacagctacactcctgaagctacc

SEQ ID NO: 276769 - DNA, 1093 bp, Zea mays
  unsure (1)..(1093): unsure at all n locations
cataggttctccgcgacgcggccacctccgccaccgccagcgccacctgctagggtcaacacccgctctctgcggactgcgtgagcgtgaagcaccagcggcggccaccgggcaggacgagccccctccccaaacagagagggccggggatcagtgcgtgcgctcctggtggagggcgtggaagagcttggcaggcggcaagcaggggtttgggaggatggtttcgctctcgacttggttccgctatgccgcacaaaagttcgagtactgcgtttccctctcgttgaagaaatataatgatgtgggccggatcagcagcacgcagctaactgatgtgttaaacaaaaatttattccaaggcaagctcacctacgtgtgtccgaccaaaggggaagaagccatggctcccatcgcatctccaactggaggagccgtccttgtcagaaaactcgcaaatttgagccccacgcaagtgtttgtcggggacgttgtgttgttaaaagacccagagaaatctgatgatttaattattcgacgactggctgccctggaaggctatgagatggtctctaatgatgagaaggatgagccgtttgtgcttgagaaagaccaatgctgggtcctggcagacaacctagcccttaagccaaaggaagctagagatagccgcttgtttggacctgtcccaatgactgacatccttggcagagtgatttactctttaagaaccgctgttgatcacggtctagtcgagaacagcggcatggccacgaaactggatggtccagtactggcagtggagcttgatgtggaagagttggcgaagaacattaagccctagacagttgatgttttggacatgctgcgctgtaactcaccgtcacaatggatcttttttttttgtttatgatctgttgcttcaagtagaactgcattggaatgttttttcacggtttgcctttggagcagtcaataatggtcttgacagataatccagaggccgctggaccgtgttcactcagaatggctgtttttagggtttcccctattcatgaagttgctgtgnggcttgtttactaaagaaaaaaaagga

SEQ ID NO: 276770 - DNA, 570 bp, Zea mays
ggacggactgtgcctgcggaaaggagtaagggggaaaacatcataggtcctctttgcgcgacggccgccgcctcctctttgtagtttcattccgccgccgccgctccccgctctctcctctgcttgcggactgcgtggagcaccagcggcggccagcgggcaggaggagctccctccccaaacagagaggggtggggtatcagtgcgtgcgctcctggaggagggcgtggaagagcagagcaggcggcaagcaggggtttgggaggatggtttcgctctcgacttggttccgctatgccgcacacaagtttgattactgcatctccctctcgttgaagaaatataatgtgggccagatcagcagcacgcagctaactgatgtgatattcaaaaatttcttccatggcaagctcacctacgtgtgtcagaccaaaggggaagaagccatggctcccatcgtatctccaactggaggagccgtccttgtcagaaagctcgcaaatttgagccccacatccagtatcgctgggcaggtcaacctactcaacgctgtttcctgcagccatggat

SEQ ID NO: 276771 - DNA, 564 bp, Zea mays
ttttactctgagctccagctggcgcgggcccggtgcgtcgcgctgcaggaccacctcgccgcttcgccggacctgccacgccatcccgcgctccgctccctccttcggctcgtcaacgccgagctgcgcttcctctcctcgctccgcctcgccccggccacgccgctctcctccaacctgccccacctcgtggcgctccacctcgtcctcacccaccctgccagacggggcccgtcccggctctcgccgctccccggcgtagatttctcctgcgccttccgcggccggcccgcgtgggtgctcgtgtccgcgagcaaccccgccaggctcgcctgggccccgcccgggggtctccgtgcccgcttcgcggccgcgctagaagccgcgcgcggtgccccgcccgctacgcggcccgagatgctgcttgtagtcttctcccgcggtgtcggcgtggatatcgcgcggcggctagccgaggggttcgaggccgccgaggctgacttgctcgaggagttcattggcgactccgaggaggagaatgaacaccggtgggttgtcgtcagc

SEQ ID NO: 276772 - DNA, 499 bp, Zea mays
tcgacgcatgcgtacagaagactcgtggtcggacgcgtgggctgactcgtgggcaggtcggaaagtttctgtggcgactgccgagcgagaacgagaagacaagaggaagccaaaaggagaaccgagttcgggagggagcggatggcaatggctctgcttccgctattgctctcggtcctcatcgtctcctgcgtcgcgcagtcgccggcctcgtcgccgtccgcgtcaaatgctcctccggtcagcgcctcggctccgcggggctctgtcgcgccaccgacaacggcggtctcggcgccgcagggctctgtcgcggcaccgacgacagctgcggcctcggcgccgcaggcttctgtagcgccaccgatgacaacggcggcctcggcgccgcatgcctctgtcgcggcaccgacaacggcaacctcggcgccgctggcctctgcagcgccaccgacgacaacggcggcctcggcgccaacggtctctgtcgctgcaccgc

SEQ ID NO: 276773 - DNA, 484 bp, Zea mays
cattatctgtgtcccctagagtgatgcacgggcattgcgtgttgtgctgagtctgacccgagtcaaggagggtctaagaggccatgttgttgtagagatgagtgatcttgataatgaacctttagtgaaactggttggtggtgaactagttgaaacagttgttgcccatgacgtgattggacgtctgatgatacaaatgtccactccaacctggccttgcacagatatgggaagacatattgggatttgaaaatgcagagtttttttttaaccattgcccagaattggatgccatgcggtttggggatgtgttgatctcatttcctgatgccgtaccttgtggagtcaaggttgcttcaaaatctggaaagatcttgatgaatcctgatgatggttatgttttaagagaaggagatgaggtccttgttattgcagaagatgatgatacttatgctcctgcccctctaccagaggtgaataaggg

SEQ ID NO: 276774 - DNA, 340 bp, Zea mays
cagtactatatatctatccccagttccatagttcttccagctctacacatacacatacacgcagcacgctagctctagctctcacatcgattgagatcatcagagaggtggaagaagaaggagctaagataccagatcgaggaagagaggcggtgcggtcggtagatgatggagagggtcgaggacttagggctcagcctcagcctcagctcgtccctcgcgtctcctcgaactcaccatgtcgccaccatgctgctacgcgctccagagaagaggttcctggagatgccactgctgctgcccgcgaagcggacgaccgaagtcaccggccaagaaggcc

SEQ ID NO: 276775 - DNA, 1276 bp, Zea mays
cccttttagccggcgcggcgacgaatgcccgatgtgccgattctcacaatgactgaccgtgcccggcgctcccgccgttgcacgcagggctgcgacgcgtcagtgctgctcaacgcgacgggcggcagcgaggcggagaaggacgcggcgcccaacctgacgctgcgcggcttcggcttcatcgaccgcatcaaggcgctgctcgagaaggagtgccccggcgtggtgtcctgcgccgacatcgtcgcgctcgccgcccgcgactccgtcggcgtcatcggcggtccgttctggagcgtgccgacggggaggcgcgacggcaccgtgtccatcaagcaggaggcgctggaccagatccccgcgcccaccatgaacttcacccaactcctccagtccttccagaacaagagcctcaacctcgccgacctcgtctggctctcaggggctcacacgatcggcatctcccaatgcaactccttcagcgagcgcctgtacaacttcacggggcgcggcgggcccgacgacgcggacccgtcgctggacccgctgtacgccgcgaagttgcggctcaagtgcaagacgctgacggacaacacgacgatcgtggagatggaccccggcagcttccgcaccttcgacctgagctactaccgcggcgtgctcaagcggcggggcctgttccagtccgacgccgcgctcatcaccgacgccgcctccaaggccgacatcctcagcgtgatcaacgcgccgcccgaggtgttcttccaggtcttcgcgggctccatggtcaagatgggcgccatcgaggtcaagaccggctccgagggcgagatcaggaagcactgcgccctcgtcaacaagcactaggcggcggaattcatgcgggagatggctccattgctcgcaaaaaatccttgtgagacacacaacatgctctgcatctgcaggcgttgtcgtcaccttggtggacgtagtacatcggtgcatggattatctgttgtttaatttgtacgttcagttcattctgtttcttgtattcttttggttcctttcctcttgtttattcatggatgatgaggtgtttctgttttattctctggttcagctgtaaccatgtaacatgtaaggtgcgcgttttgtcctcgtgatctctgcaactgtatttattttaatggatggtatacatggagatatgatcatgataataacaataaggtgattacaaaaaaaaaaaaagggcggcagatagcgatctagaactagtcggacgcgtggg

SEQ ID NO: 276776 - DNA, 879 bp, Zea mays
cccacgcgtccgcccacgcgtccgcccacgcgtccgacaggacgagactcgcagctagctgacacggccgagaagcagcttgcattgcaggcgtagtacgtacccagcagcagctagcactagcagtccatcggagcgacgatggtgagaaggacggtgctggcggcgctgctggtggccgccgccctcgccggcggcgcgcgggcgcagctcaaggaggggttctacgactactcctgcccacaggcggagaagatcgtcaaggactacgtgaaggcgcacatcccccacgcgcccgacgtcgcctccaccctgctccgcacccacttccacgactgcttcgtcaggggctgcgacgcgtcagtgctgctcaacgcgacgggcggcagcgaggcggagaaggacgcggcgcccaacctgacgctgcgcggcttcggcttcatcgaccgcatcaaggcgctgctcgagaaggagtgccccggcgtggtgtcctgcgccgacatcgtcgcgctcgccggccgcgactccgtcggcgtcatcggcggtccgttctggagcgtgccgacggggaggcgcgacggcaccgtgtccatcaagcaggaggcgctggaccattatccctgcgcccaccatgaacttcacccaactcctccagtcctttcagaacaagagcctcaacctcgccgacctcgtttgactttcatgggcttacacgatcggctattttccactgtcactccttcagtgagcgcctgttcaacttcacggtgtgctgcctttcttcttcatcttttctttatatctatttacttctttccttctatactattttttcttatttactttttcttttttataacaactttttattttcccttt

SEQ ID NO: 276777 - DNA, 403 bp, Zea mays
gcgatacttctgaaatagtagtccttttcgtagaacatgccctcgatccgttgatggtgccttaaaatacgtacctgaatagctccaaaaaaaccacacacacacacacactgaacagttcacaggcattcctaatcacttctcgcgtgcgggcgcgcaggggctcacacgatcggcatctcccaatgcaactccttcagcgagcgcctgtacaacttcacggggcgcggcgggcccgacgacgcggacccgccgctggacccgaatgacgccgggaagctggatttcaagagcaagacgcttacttgacaacaatagctacccaaggctggtactccggcaggaccagtcaacatcagactcgtctaaaaccaagcagatgcttaagcctcttgcgacccaa

SEQ ID NO: 276778 - DNA, 460 bp, Zea mays
taatgactttgatgtcctagtacttaacacaggccatcactggaacagagggaaattcaatggggatgactgggaattgcatgctgatgggaagcctgtaggcaatggtagtagacttgcagacctaaaccgtgcagaaaatcttacattgcatagcattgctagatggatggattcagaactcgcacggcatcctaagatgaaagttttcctcaggacaatttcaccaaggcactttgtaaatggtgactggaacacaggtggaacatgtggaaataccgtcccctttactaatggaagtgaagtcttgcaggatcattcaattgatatacccgcagaaaatgctgtgaagggaactcgggttaagcttttggatatcactgctatctcaaaactacgggatgaggggcatatctcaaactctagtttcaaaaaggcttccaccggaattaatgattgc

SEQ ID NO: 276779 - DNA, 687 bp, Zea mays
ttgcactgctcataattaggttctaaggaacaagcctgattttcgtaagaggccttggtcaagcatcagcccaggtgcgaaagattttgttaaaaggttactagtgaagaatccaagggccaggctaacagctgctcaagctctctcacatccgtgggtaagagaaggaggagaagcatccgatatccccgtcgacatatctgtgttatcaaacatgcgtcagtttgtcaagtacagccgtttcaagcaattcgcgcttcgggctctggcgagcacccttaacgaggaagagctatcagatctgaaggatcagtttgatgcaattgatatcgataaaagtggatcgattagtatcgaggaaatgcgtcatgcccttgcaaaggatcttccctggagattgaagggtccccgtgtgctggagattattcaagcaattgacagcaacactgatgggctcgtggacttcaaggagtttgttgcggcaactctccatatccaccagatggcggagctcgactcagaaaggtggggcatacgctgccaagctgcttccagtaagtttgatcttgacggtgatggatatatcacgccggaggaactcagaatggtaattttctactcctgttttgtttccatgttgcttcaccaacgaatgcacagttcacataacccttattatcatcactg

SEQ ID NO: 276780 - DNA, 478 bp, Zea mays
atcgataaaagtggatcgattagtatcgaggaaatgcgtcatgtaggttctgttagtgtttgctgatgaaaatgccttagatcctgaactactctgcggtgctgattaatctgtgcatgtttcggtaggcccttgcaaaggatcttccctggagattgaagggtccccgtgtgctggagattattcaacccattgacagcaacactgatgggctcgtggacttcaaggagtttgttgcggcaactctccatatccaccagatggcggagctcgactcagaaaggtggggcatacgctgccaagctgctttcagtaagtttgatcttgacggtgatggatatatcacgccggaggaactcagaatggtgcagcacactgggttgaagggatctatcgagccgctgctggaggaggccgacatcgacaaagacggcaagataagcctgtccgagttccgcaagctcctacggacagcgag

SEQ ID NO: 276781 - DNA, 965 bp, Zea mays
gtcccctcgaacgcgcactgttcaaacaaaccctccactgccctccccactctccccttcaccgcgccgcactcccaagtcccaacaggcctaaatggcggcggccggaacaattcccggctccgcgcagccattggcgcttctgtgtcccaacgccaacgtcgcgtcggcgctccttctttcgtagctgcctacgtctccgagggcacccgcctcgtctgccggaggacttccgtccggctccggtcctcgcttcttcttcatctccctttctcatccagcgttgccgcggttcctctgcgatgctgcggccggagcctcctcaggtcccgctggagatgccaagccccagggatttgcagagagatacccagctcttgtcacaggtttcttcttcttcttgtggtattttctgaatgtaatatttaacatcctcaacaagaagatcttcgactacttcccctatccatattttgtgtcagtgagccatctttttattggagtactatactgccttattggctggagcttcggcatcccaaagcgcgcgccaatcaactcaacacttctgaagcagcttgttccagttgcggtttgccatgccattggccatgtaacaagcactgtgtcatttgctgctgtagctgtgtcatttgcccacactattaaagctctcgagccattcttcaatgcggctgcttcccagtttatccttggacaaccagttccattgacactctggctgtctcttgttccagtggtgattggtgtctcggtagcatccctcactgaactctcatttaattggactggcttcattaatgccatgatctcaaatatttctttcacctaccgaagcatctattctaagaaggctatgactgacatggatagtaccaacttgtatgcatacatatcaataattgctctctttgtctgcatcccccctgcaattattattgaag

SEQ ID NO: 276782 - DNA, 556 bp, Zea mays
ataattcagcaccaaccgagctgcgtgcatctgattcggctgccccattgagtgatgagcagcttgcattattgttgcatcaacaattgaacagctcccccagagtaccgagggtgccacgttgccatcaagcagctggtgcacagatgcttcattcaactggatcatctgttttttctaagcggtattcatcacatggaggaagggatcatgcagcggttataaaaaagagaaacagagaagattcattaaaagatagcgaggacactaagaggacagaaaaaaggcatagagtttctagcacggagcatgctcctgtgaaaaactcgtgcagatcagctgaaaatatagcatcagaacagaaaattcgtggcatatgtccaactggagccaatgctggtttatcaaaggatgatttgatggatactattgtttcacacaatttacctggattgattgatgaaattgtcagtaaagacaggaatataacatatgtggaactctgggatgctttcaataaccatttaaggaactcagggaattcaattggggaaaa

SEQ ID NO: 276783 - DNA, 435 bp, Zea mays
  unsure (1)..(435): unsure at all n locations
gtgcttttttgcagggaagaaaatgcctaccacaggcgtgattgctggtaccagagatggcgtttcatctgagagcatctctagatttctgctgcctgcttctgaatgcgagtttgtattgaactcagttatagaagaaatacaaaaggacccttggcctgttccagctgatcagcgtgcgtctaggtgcactggagctgccttaagtgttgcagccaatctccttggggtttgtgttcctggatcaggtgctaggataatggcatttgttggtggtccatctacggagggccctggtcctattgtatccaaatccttatcagagcccattcgctcacacaaagaccttgataaagactcggcaccactctatgantaaagctgtaagtnntatgatcaaattgcanagcagcttgtgcaccaagggcatgtgct

SEQ ID NO: 276784 - DNA, 679 bp, Zea mays
gccacatcacattggcaggcgaggcgagggagcgagcagcagggcaaggcatccacacccacacccaccggacactccctgagaagcgagaagcgagaagcgaagagcggccggccaccatgttctggcacggggtcgcggaccggctgacggggaagaacaaggaggcgtggaacgagggaaagatccgcggcacggtgaggctggtcaagaaggaggtgctggacgtcggcgacttcaacgcctcgctcctcgacggcgtacacaggatcctcggctgggacgacggcgtcgccttccagctcgtcagcgccaccgcggccgaccccagcaacgggagccgcggcaaggtcgggaaggcggcgcacctggaggaggcggtggtgtcgctcaagtcgacggcggacggggagaccgtgtaccgggtgagcttcgagtgggacgagtcgcagggcatcccgggcgccgtcctggtcaggaacctgcagcacgccgagttcttcctcaagacgctcaccctcgagggcgtccccggcaagggcaccgtcgtcttcgtcgccaactcgtgggtctacccgcacaagctctactcccaggaacgcgtcttcttcgccaacgacgtgagtattcttccccttcggtttcttttttgggttcgctggcgacgtgagtattctta

SEQ ID NO: 276785 - DNA, 320 bp, Zea mays
cacacctgccttgtgccttcccttcccttgcttcgcttattgccggcacatcacatcggcaggcgagggacggagcgagcagggaagcccatccaccagccagccaccgcgttcctgagaagcgaggagcgagaaaagagaagagcggccatgttctggcacggggtcgcggaccggctgacggggaagaacaaggaggcgtggagcgagggcaagatccgcggcacggtgaggctggtcaagaaggaggtgctggacgtcggcgacttcaacgcctcgctcctcgacggcgtccacaggatcctcggctgggacgacgg

SEQ ID NO: 276786 - DNA, 361 bp, Zea mays
gccgattcgtcatcagatctctcaaacaatcatcttactgcagaaacgccgttcaatatcgggttcctgcggggggctaccctatcttcgcgagggaacacggtctctggtcctataccatcagtgattggccttatgcacgcgcttgcagtgctagatctcagtttcaatgagctatctgccccaataccctctatactgggccacttgacatacactgagaaattatacctgcagggcaatacgctcactgcattgatactgtcagagctcgttaatatctctacactgcattacctggaactgaactacaatctgatgactgggttcatatctactgatcttggataacttacagaat

SEQ ID NO: 276787 - DNA, 819 bp, Zea mays
agaagatcacggttcaggtcacccggagcggctacaggcagaagctctcaatatatgaactgctcgtcggcgacatcggtcacctctccattggtgatcaggtgccggctgacgggctgttcatgtcaggcttctcgcttctgatcaacgagtcgagcttgaccggagagagtgagccagttgccgtcaacgttgagtacccattccttttgtcagggacgaaggtgcaggacggttcttgcaaaatgctcgtcacgacagtcggcatgaggactcagtgggggaagctgatggccactctcagcgaaggtggtgatgacgagacaccattgcaggtcaagctgaatggtgtggccaccatcatcggtaagataggacttatctttgcagtggtcacattcgcagtgctcacccaaatcctggtccggggcaggatcattgatggtacgtacttgagctggactggagatgacgcattggagctgcttgagttcttcgccattgctgtcaccatcgtcgttgtggcagtacctgaagggctaccgctggccgtgacactgagccttgcatttgcaatgaagaacatgatgaacgacaaggcactcgtccggcaccttgcagcctgcgagaccatgggctcagcgacctccatttgcagtgacaagacaggcactctcacaacgaaccacatgaccgttgtcaaagcctgcatctgtggtaagatcaaagaattggatggtgtttcggatatcaagaacctgttcttttgactcccagactctgtcatggcgattctttccagttcatattcaacaacac

SEQ ID NO: 276788 - DNA, 1311 bp, Zea mays
tcggtcgcgtgggcggacgcgtgggcgcgcccgtgccgtaccgtccctatcacaccggatcgccactcgctcccccccaccccactccgccccacctccgcgcctcagatccatccccaaccggcaaccctagcgccgggttcctcctcctcggatccgcccgccgccgcgcggactccattgccagaggtgagcgagggggagagatagagcttgggtggtcggattagggagagagggaggggaggatgtccagacggtcgttgaacccgagccggcgggtggcggacgggggtctgccgacagtcggaggcctgttccaccccaagtcacgctcgcctcccgtgcttactattgccctagtcgtcctgggtgtcattcttctcgtcgcctacttcaacagcggctcaggtgtaactgttacaagcagagagtctgtgaccaggtctgaaggttcttgcacatcagaagttatgcgggtgcttccatatcttaaaaaggcatatggaaatgccatgcaaaaggttctccatgtaggccctgatagttgtacagtagtttctaatttgttgaaagaaggaaaggttgaagcttggggagtggagccttatgatttggaagatactgacagtacttgcaaaagcctcgtgcgcaagggctttgtccgtatgtctgatattaagttcccccttccgtaccgtccagattcttttaatcttgttgtggtgtcagatgctttagattatctgaccccaaggtatctgaacaaaacacttccagatttagcaagggtttccacagatggccttgttatttttgctggcaacccaggtcagcagaaagctaaggtctcagaactaccaaaatttggaagaccggcaaagttgcggagttcttcatggtggacacggtactttgtccagaccggcttgacagagaacgaagggccgctgaagaaattcgaagatgctacatccaagaacaaatacaaaccaggttgtcagatcttccacctaagttcgccaaggtgatgcgcatccatagcaccttgaattgttgtcacaccccctgccctcctccggttggcttgctcattgttcgtgtggaggaaatcgtcgcaaaaaaagccatcaggaataggttagcttatgtagagaggctccgacacttgttgctagaaattcactctggaaattaaattgtgtcccccaatgattgcaaactggagccccgctgggatatatatgtaagaactttcacgctgttgtaccgctgtgctatccatgtattgtcaggtgttccccgagcccc

SEQ ID NO: 276789 - DNA, 519 bp, Zea mays
tcgagtactcgtgacagggggagaacttccacgaggagaacccgagctgctcctaagaataatgaccaattgttggcaatgagcacggtcacttctgaggttgatgatgagattgttgatgtaaagcccatagtatcaatgtctggtgaaaggatggaatacttcaaattcaaagaaatctcactcaaggctagacaatattataatggaggctataaagaacttgaatgagcctacagggtcccacagaaactactattgctaattaccttgaggagccatattggccacctagtgattttgatcacttattgtctgcaaaactgaagtatttagctaccagtgggaaattgttgaagcgaacgacacacgtacggtacgggacgcggcgggtgctatgttgccggagtcgagaaagacggtgaaaataaagtcgttctacgtatattctggtgcctggtggccattttgccaaattcatgaacgacaccgcagctaatttttctttcgtgcatgctt

SEQ ID NO: 276790 - DNA, 705 bp, Zea mays
  unsure (1)..(705): unsure at all n locations
ctaccggcgccgccgcgccaccgaccgcagctgcttctccgcagctggctgccacgttgcctccggtttcctccccgccactggccgctacgccacctgtctctgctacccctccagccacgctacctcccgtcgcatcgcctaccgtcgccgtcgctgcgccagccccggcgactccggctccagtcgcctccccgcccgtagcaatgccaccggcggcgcttgccccggccacgctccctccagcgatggctccgacaccacttctcgctgcccccgtcatgcctcccatcgcgccacctggcacggctcccgcaccggctcccgtttctccggccccaagtccaagcgtcgccccgaccccgtctccgacagaagctcccaccccgtcgcccacagaggccccgaccccgtctcccacgctggcgcctacactcgcgccgttgagctcggtgtcggtgagcccgtcgctggcgccggggcccgcgctcgctcaggaggacgagtcggcggcgccaagctcgcgcactggcgtcgtcgcggccctggtggccgccgggctcgtcgtcggcttgttntaagaagtagagctgcggcgtttattaccgctatacgtccgtaccgttcctcgcacgggtctctngttctcctgttggtgttctcatggattgatgcacgcacgaaccattcttgctgtacaacaca

SEQ ID NO: 276791 - DNA, 616 bp, Zea mays
gttcctctatatatacacatctcgaccctgttgctgggtcctctcttccacccactgcaaccccaaatctctccttcctcacacacgcgaagctgagagaccaaagaagaagaagaaggagggagcaagcagaaagttagctagctgctagcgtggaagtgcccaaggcgagagagagagacaagctagctaggacggccgcgacaggctagccagccagctgtgctagctcctgcggacgagccgatggctggcgccgacgtcgacgtcgggacggagctccggctcggcctgccgggaggaggcgccgcggcggccaagaaggacaccatcgacctcaagctgaagctgcccaccgccggcatggaggaggcggctgccgccgccaggccggagccggcagccgagaaggccaagaggcccgccgaggcgccggccgccgatgccgagaagccacctgcacccaaggcacaggccgtgggctggccaccagtccggtcgtaccgcatgaacgccatgacgaccggtccaggcccggaggagcatgaacgaagaggaacctgatgagcagcaacagctcgtttgacgcaacgccttcgtgaagtcagcatggacg

SEQ ID NO: 276792 - DNA, 346 bp, Zea mays
cccacgcgtccgcccactgcaaccccaaatctctccttcctcacacacgcgaaggtgagagaccaaagaagaagaagaaggaggagctgctagcgtggaagtgcccaaggcgagagagagacaagctagctaggacggccgcgacaggctagccagccagctgctagctcctgcggacgagccgatggctggcgccgacgtcgacgtcgggacggaactccggctcggcctgccgggaggaggcgccgcggcggccaagaaggacaccatcgacctcaagctgaagctgcctaccgctggcatggaggaggctgctgccgccgccaggccggagccggcagccgag

SEQ ID NO: 276793 - DNA, 375 bp, Zea mays
  unsure (1)..(375): unsure at all n locations
cccacgcgtccggagatctcttcttacccgcctcttcacctcaactcacattgtcatggcctcgtcttccttctcttcctctccatctcggcggttggtccacctcacacgccatctcgtctcctcttcttccggcgagctttcctcagtcggcgcccccgccgctgccgcctcagatgccgaccccgtgaaaagcccacgctccactgcctccagggttcacgccgcggtgctggtctgcctcttcgaggaccctagcagtgggccacgggtcctgcttacaaagcgcgcttnctncctctcctnccactccggggaggtgtcgctacccggagggaaggtggacgatggagacgcagatccgaaggccacagc

SEQ ID NO: 276794 - DNA, 496 bp, Zea mays
agctagattcactcatggatcaagagtacaccgctatgcagcaaatgaagggatccctcatgaatgaatggataaaggtccttgagcatgcattccgggctggagtgtctctaccgagagatgaattgctcaccaaactgttgctgaactagccgcccatcccatgaggacctggctgtagtcgagtagttctctgatatgcgtcacccccttgactgttgctggtagatagcttcctgcgtgggtgcgtctgtaaaggtgccgattgtgctttcgatttctcagaattttggggatcagaacaacccttcgtaactctttgccctgttgtaccaaactaggttagatggcaaaattgctgaaattttcttgtagctgttgacatgtatggtttcgttcgtatggatgtgaaaatggtacctcagttttggagtttcagccaaacaacacaaaaaaaaggacccacgcgtccgcccacgcgtccgcccaccgtccg

SEQ ID NO: 276795 - DNA, 799 bp, Zea mays
caatgccaaacaggagcatgccagcggctccacttcctacccctggcgcacttctgatgggggatgccttcaatatgagacaccctttaactggtggaggaatgaccgttgcattatccgacatcgttgtcctacgtaatcttctcaagcctctccgcaatctccacgacgcatcttccctgtgcaagtacctcgaatcgttctatacgctgcggaagccggttgcctccaccataaacacgttggccggtgctctgtacaaggtcttcagcgcctcgcctgatcaagctaggaacgagatgcgccaggcctgttttgattacttgagcctcggaggcgtcttctcgaatgggcctattgctttactctcgggtcttaaccctcggccactgagtttagttgcacacttctttgctgttgctatctacggtgtcggccgcttgatgctccctcttccttcacctaaacgaatgtggattggagctagactgatttctggtgcatgcggcatcatcctccctatcatcaaagctgaaggcgtgagacagatgttcttccctgctacagtacccgcatattaccgggccgcacctacgggagaaaaggcatgaacagagaaccgattccgtgctgctggtccgaccatgaatgatctcatggcagctgatgtttcacggatgacatttttcctttgctagtggttagttattggttattgttagaccgtcgatggaatgaggaacctgtatagtgtttgtcctgggtactggtaaagttggaaaatgtgttgggtttgttc

SEQ ID NO: 276796 - DNA, 511 bp, Zea mays
acggttcctgccgcgcctggtggagcggtacgctagggaggcgtgcgtgggccccgacagcgtggttccgtgggcacagcgcgagggggccgtcgccttcttcgacgaccggcctcagcaggaggccgcccagcgtggcctggggagccggcgcaaggccgtgcaggccgtagagtggctgccgtacgccaccagattccgctatgccttcgccaggagcatggtcgacaagccacactgctagctgcttcgcctcgcacagtcgcactcctcgcatcgcagctgttgccgtctggccccgtttccgctggagaaagacatctgatcgctgtggcgcagccattctgatggctagatgtaaatgtctcgttgatgctgcgatgttgacggctaaatagtactgctccgttccgtagtgaacaagtggcaaggatgggacgaagggtttgactaattttgcccaaggtgtacagaagctagttgatcgctattatttcaggtttcagcagcc

SEQ ID NO: 276797 - DNA, 681 bp, Zea mays
gacgacgatgctataaacataattaagatggacaatgaaagggagtttttggttgatctgatggctgctcctggtgctcttattccagcagatatcttaagttggaaaggcaattcgttaaattctaatcgaaaactcggcctgaatcgaacagctggatcatcaagtactgttgatgctaatgtggatcctactgtattgccacttgaacctaaaggtggccaactgcctttgttcagcagtggtgattggatgtcagacattgattctggatatgaggcagcagaaattgcagcttctactcaaacctcttcgggtgtcacaccatatctgtgttctgctggaagtgtttttggcagttcatggatgctggttaatcatgaccaatcagatggaccatcaacttctgctggtacatcatcgcagcagaaagttgtacctcaaagcgagcatcagcggaatttaaaccgccttccagatctgcaggaaattccagagtcaaaaaacctttttgctgaccttgttccttctggggatacgaagtccaagaaaacttcagtaccattcaaaggaccagatcaaaggaacaatgagttgcaaaagcgcagagagaacattgtccctaatggtggaagaccacagcagcggttagttatgaagaattggtctccttataatgat

SEQ ID NO: 276798 - DNA, 410 bp, Zea mays
acgggtgagctcatttaggtttctttagatatatctcgtaaagtgaaagaaatgtattgtgatagcgggtgcggacggtgtcgaggagttcaagaagcatgacaggaagcctgataagtacatcaaacattggtcagctgttaaaccaaagaccggggtcccatatacaattgacattggatatgaacgctttcttgggccagagatcttcttcaatcctgagatttactctgccgacttctccactcctttgcccgagttgattgacaactgtgttcagtctgcaccaattgacacaaggagagctctgtacacgaatatagtattatctggtggatctaccatgtttaaagacttccacaagagactccaaactgctataaagaagatagcggatgaccgtgttgccc

SEQ ID NO: 276799 - DNA, 594 bp, Zea mays
cccctcctcattctcctcccggtttcccctcccccattcgtcgcgatccaattccggcgccggagaagacgcgcgcaggccccacccagccgcctacaggcgctccgctcccacagacggacagcttgggctcgacggatgagcatgtgtgagaaagatcagaatttgccatggggatacgacctgttccgcgacccttttgctcctcccaacgggtactacgggcctcctcccggttactgtgatggccactgttgtgacctccatcattacggtagagcatcacatccagatgagactcagttgcattcttctcaactcgcatatgatatgtacaacccatcagtaggcatctaccatcctggaagcacccatgagcacgagcacgagcacgagacagtatatgtagaaccgtctagttcctctccagacacaggtggtgacggttgttttgagatggaggaggaagttagggagagttttttccccatggtcccaggtccccatgtccccaaaatttatggagatatccctcaattgatgaagccactttggaccatgaaaggctgaccgaagggttgggctgtttgacct

SEQ ID NO: 276800 - DNA, 408 bp, Zea mays
gaaggacatgcgcataaatatggcaatatcagcagcatttgtatgtactcttctctgagattggtaagaagacccagctgttgctaacatgctcattgtttatggttattcacttgtatgtctcgtatatgcactgcagctttgcattattattcttgtcagaaaagctattttaagctatcagcttgaaactttttttttaaaaaaaagaaagcttgaaacatgtttggaagcttaaatcataagttcagatcatttaagtttggatttcatgttttgctagtcatttttaatctgtaaagttgttcagaaaaactacaacccgaatccaaaacagatataacttgttttcaccagatacaactttctccatagttctcttcaaaagggcaaacatgttatgaaaaa

SEQ ID NO: 276801 - DNA, 555 bp, Zea mays
ggcggtgtgggcaatgatatatgcacacttttgtggaagttgggggcattatacttgtttgtcttggctaccgacattctttagcgaggagctgaacctgaacttgacagaagcagcatgggtgtcagtccttcctcctttgggttcaatgagcattacatctattgcagcaccttttgcagacaacttgatatcaaatggagttgacaccacgaaggtgcgaaaaatttgccaaacaattgcctttgtgtcacctgcgactttcatgatgctttcctctgtggatcttggactgcctccctgggaaattgttgcttttcttacaagtggtgtagcactctccagcttcgcattgtcagggctttattgcacacatcaagacatctctagtgaatatgcaagcattctcctgggaatcacaaacactgtaggcgcggtgccaggaattgtaggcgttgcactcacatgctttcttcttgattcaactcattcttggagtatatcactctttgcgccttctatcatcttttacttaacttggactgttgaatgggt

SEQ ID NO: 276802 - DNA, 1115 bp, Zea mays
cccacgcgtccgattactcatcaaggtcttgttgacagtctgaggtcatttagtatggaagcagatattggtatcaagaaactcagagttgcaaatcgtgtcactgcatcagaagtgcaatatgtagagctgttgtccttgatgaaaatagacaaggagatgccattacacaaacaggagcctcggatctttcatgctgatcgtcttttaccagatcttcatggtgcatatgttcctgattctttcgtaccagatcttcatgatgagtatgctcttgatattgagaagtgtcctctttgtccgaactacaagcttgtttatgattgcacatcaaaggaatgcaagaccagcggatctagtatttgcagagggtgtgttgtttgcatctctagatgtttgcgatgtgggagatgtatcgacagtgagtttgaatttgaagagacattttttctggggagcatttgccgtgactgtgtcaagtattcaccccaccacagaaaaatagatgtttgattctgttatccattggatggatacagttgtaacattggatttctgtgattgatgctcccatccatcagacatcttgactgagtatttctaacaaggaaaaaaaagagagaaaggtctaccagtttgctatcggtgtaggtgcagcagctgatatattgtttttgcttgcaagaaaaacgaaaaaaaaacagtataacctaggaaatcagaagatcaaagtatggtttccgtatcatggtgtcagcagtgaatggtgacaactgacaattgctggatgtttccttctggaataatgggagtgctctgctcaggagtgttgaagtacaacagcatactttttttttctctccagccggttgcttgatgctgcatgttcctggaacgtcagaagtaatttaattcattggcccaaaaataaaatcagatgtatctatctgtcccttacgttacctatctaattgcgtggctgtgtgctattacttgacaattgacaaatgtaatactagttactttctaggttgtagacactttgtaccacgtgatttattagaataaaataaacccaaccctctaacccaaaaaaaaaaaaaaaaaaaaaaaaa

SEQ ID NO: 276803 - DNA, 469 bp, Zea mays
acccaagggtcgcggctcaagagcacacacagccagtcctgaaacggacacgttcttggagaggcaaccaaacagatattgcaatgaacctcgtacccgaaatgaggcagcagaagatgatagtggctgggaaactgtaagccaagttgaggagaatgggtcttgtaattcaccgggcggaagtgaaccgtctgtaaatggcttctgtggagaaaacgatgcttccgtaagtggaaccgactgggatgaaaactgtgacaatgatcaggcacacagtgagatcagtgaagtttgttcaacagcagcaggcaggtctcggaacaaaagatcattcgccggactatggagatcatcaaacaccgtggaccaaaagaagatgggatccaatacactcaacggtaggtcatcaaatgccaggatgtcaaatgccaccgaatctgctgacctgaagaatagcgaagtgtgtgac

SEQ ID NO: 276804 - DNA, 732 bp, Zea mays
accaagacccgagccgtgtaggctgctacagtctcttcctccccggcaagccgcggcggtcggggcccccgcccctcatatggtatagtcgccgcctccttgtcaccgccgattcgattaggttgatacagggaggagtcgcgaggggacgtagatgccgacgctgacaaagctgtacagcatgaaggaggctgccctccacaacacgcccgacgactgctgggtcgtcgtcgacggcaagatttatgatgtgaccaagtatttggaggaccatcctgggggcgccgatgttctgctcgaagcaaccggtaaggatgctacagaagaatttgacgatgcagggcacagcaagagtgccaaggagctaatgcaggactacttcgttggggagttggactcggacccaactcctgagattcctgagatggaggttttcagaaaggaacaggacacgggatttgccaggaagcttatggacgacgtggtgcaatattggtcgatcccagccgctgtaattgggatatcagctgttgttgccatattgtatgcgcgaaggaagtgaaagttaatgtgccatgcttgggcagatgatcctttttagagggatcaacccatggtgcatggatgggtatatgtactcctgtcccaaattacactatgatgttcgattcttagacacacttaggcaaacatttgcctgattaatgacactattttatcgatatgacaatc

SEQ ID NO: 276805 - DNA, 352 bp, Zea mays
ctttgagggcagttcttatgatgcttctctctcctagccaattcattctctctgagaaagtgagaggcggggattgtgtgccatgaatgcagagatcattacaacgaaggtttggttggagtccttaaacaagccttgtgtcagaacatgagcccagggcccaagtcttatattgcacatatactgagtatgtttggcctctgtggttttccaagcaagctaggaggaaatatgagaaatgttttgtgtgacagtgagttagttgatctggaactgttgcttgcagatggcgaatctctaagtgctcatgcgggtatcctatcagcaagatgtcctaaattattaccatctg

SEQ ID NO: 276806 - DNA, 418 bp, Zea mays
cgattgatgaccttctaaaggaaaggaatgcaattcatgcatcctataccaacaacccagctctgcagcggagttccagtagcagcaaagggaaatcaccctctaaagggtccagaagtgaggatgaccaaactgtaaagaaggaaaagaaatccaagagccagccaatggagggatccaaaagcgatgacgagggtcccgaaaacaaaaaggaagaaacgcctaaagatcggtttcgaaggaagaagtggttcaacattcatttgaaagtggacaagagaaggccctgctgataactgcgatatatcatgtgctcctcaagatctctgctccaagtacaaggaaaaattcccatttgacgtccaggaagatgcatcttgtcgatcatgatcaagcccattctatttcctgaaaagtc

SEQ ID NO: 276807 - DNA, 447 bp, Zea mays
tttgtaagcacagtttgcatttttcacaaccaagaaggtggaagcatttgaggagctcacatgggattatggtattgattttgatggtgataagcatcctgtcaaatcatttgaatgcctgtgcggaagcagatactgccgtggtagaaagcattcgaggacgcgaggcaaagctgcttcgaagtgaagtgttgactgaaagcagcggtgcatggttggtttgggaaagcgaacggactaatcagttttagaatgctttgttaacctaggtagctatgcattcataaagtgcccgctgtgcttgactgcagaacgtgaaattcaattagacagactgaaatgcaatgtacgtacgctactcctaaaccctaagccatctggccatgatctactgatgatgaggtgcctttggttaaaaaaaaaaaaaaaaaaaaaaaaaaaaaagaa

SEQ ID NO: 276808 - DNA, 447 bp, Zea mays
agcgcatcgaagctgcctctgaccaacctatttgcatccatcgcccactgctagggttccaagaaatttggtgtgctgtggcgaccgggctttccctatgggttggtcatcatttcgggagcgtcgtggctacctccggtgctgcggccagcgcgactaggccagatcgacccagcgcgacgacggttgtgcacggcgtcctcggacatcgctccgccagctcaaatctccaagcgctcgagctcgaaactcctccaatcggtcgtccgctgccagcaatcgacctccatccacagagcactcaccgaaaggtggctctggatatctcctgcactaacagcaccacaaaaattgcattcaacaccaggatggtgcgtttgcggtgataataacaatcagacatcgcgagattataatagagtgtgttatgcagtgatgtaaatattt

SEQ ID NO: 276809 - DNA, 460 bp, Zea mays
gccaaatcaagtaccaactactgaagagttgattacgaagtacatagccacatgtggaccaaagatagaaaaacttgtgaaggcatatgttgataggcacagtacatgtcatccaaccatcaaatacagcagctctgagatgggagcttgagcttaatggtgatgacagcttgaaccttctgtcctaccaatctggttaaccttcatttgtaggcccaacaagttaatattgttcatacaaacatgtatgtccatgacttcttgaggcaagtagtcagcgaagttccagatattggtgcatctgatgttattgctgatgataagcttggcaaaggacgtatatctatcctgtagttgataaggttcttacatgtcaaaataatcttctacgaagtgttaataaatgctgaattgtcatcaagaaagctggagatggaagcgaggaggaattaaagaggac

SEQ ID NO: 276810 - DNA, 514 bp, Zea mays
cggacgcgtggcggacgcgtgggcggacgcgtgggccgaaaaatgttacagacactgagttgactgacttgttttccaactatgggaatggcacggatttgcaaattttgagaggttcacaacaaacgggcggagctggctgtgccttcattaaatatcagacaaaagatcaagcattggcagctattgaagctctaaacgggaagcacaaaatagagggttctagcgtgccgttggttgtcaaatgggctgatacagaaaaggaaaggcaggctcggaaagcacaaaaagctcagtcacagctatctcatatacccaatgcaagtccaatgcagcagcactcttcagtatttggtgctttacagatgggatatatgcctcaatacaatggatttggttatcagccaacagggacatacggacttatgcagtaccctctatctcctatgcaaaatcaaggccccttccagaatatggttcaacctcttactcaagggaactcgataagaggagt

SEQ ID NO: 276811 - DNA, 432 bp, Zea mays
caacctaccagtgttaacaatgaagtggctgtcaatagcaaggccaaagatgacggcgaggaggaggagaaggatcctggaactgagcctgcatttctgtggacagccgacaacgagaagaacgtcatggatcttgggtactccgagaccgaacggagccgtcggctggagacgctgatggtgaagagaaaatccaggaaaaacatacagtttgagctggacggcgtgggcggtctagcagacggtctatcacggttccgtccgaaagttcatcctgtttcagttccaccgcgaaggatgaacccgtttactaccgatgacgcggagatcccaggctcggctcctcctattctgcatccacgagacgaccccttcagtttcctcaccgatgaacagccagctgacgacaacagtggccaccctgcgcaccat

SEQ ID NO: 276812 - DNA, 555 bp, Zea mays
gggatttattcccacggggacggggatgataagctattccccaacggggaattccctgttgccatcactaactgcaagtggctatatagaatcaaatggaagacagatataacactgaacaaatataaagcaggctggtggtaaatggttttaaggtcgattatgtggagacattcagtcttctggtcaaagcatcggctatcaggatcattatgggatagagccagtgtgggaggctctcgcatgagtgtgttctagggaaggataaaccgaggaaaccctttcatcatcaaatgttgtacaaccacagcttaatcatttaatagatttcctgtgagacaatttttatttctaattccatggtgtggttcgaacttgtgaaaagtacaaagctcatattgcttaatgatggaaaaaacacaaccatgcttgagttgggtgctataaattcatgatatggtttaatgtcataggactggactggcagatagaagtaaatcgatatttatctcttgtacgagttgtgctaagaaaatcatttttgtgatcatttac

SEQ ID NO: 276813 - DNA, 438 bp, Zea mays
gagaaagacctgatgctttccaagcttcaaatactcatcggtactgcagacagggcagcgctggaggaggagttggaggaggcagcagctagcatcgaccagttggagacagagctggagcgccatctccaggagaaactagaggctgaaattcagtgtctgttgatgttgaaagcgaggcagaattggcaggtccgagcggtggaccaggtggccttggaggagcacagggcgctgtctgccggggacaagaccagaatgctgctcaagctacgagagacggagagcaagatcgtgatgctgaaagagcaggtggacaagctggaggtccgggagaaggagctcaaccggacgaccgaggtcctgaagatgcagagcaggaccttcagagcgtccctctttggcctcgtccagctggtaatgctatgcctgtccctg

SEQ ID NO: 276814 - DNA, 812 bp, Zea mays
aacaacagcagcagccgtggcagcgaagaagtataaatctctatgcgagaatatcgagaagggatacccaacagttctggcttctcgcatcacatattatatcccataatcccatgagttcgcattcacatctgcggcagtgtgatgaataaaatgatccatgttaaatctcttggacctaatacggctatagcaataatcctgtgtcaacttagctcgagctgttctacgagtgttgagacgcttatactctgtgtactagttatcgaattcctgtatagcagcttgtatgacactacataatgtgctataatagtcatactagctgccaaagaaggtcatgagtgcatggcgcattgctggaatggttcatgcattgcagggatggaacgagcatgagtgtggggacatcgtgctagacatggagaaaatgtggtctggtgctcttctgcatggtttccgccctgtggctcaagtttgattctccagttgcaaatgcaaggcagcccaataagttattgaaagttataacataatgctcgcgagaactatgctacatacatatcagtatgttggtgttctgtacttctgtttgtccatgctctgcctcttatcacttaagacatctgctatctatgaagttaagatgaactcatgtagtgtaaaaaccattctgcagaagcagggtgaaaaatagcatctctacaatggtaagaggggatgggatgtagtatataagtgagtctgatctactgctagatgtttactactttattcacaccctacgctcaaagatcaacgatgaattaatt

SEQ ID NO: 276815 - DNA, 1086 bp, Zea mays
cttgaccacactttttttaggacaaactactccctgttcatgccattctatgactacatatataacaccatggacaagtcatcggacacgttgtatgagaagtcactcaagggaaacgaagaaacggcagatgtggttcaccttacccaccttaccagcctgcactccatctatcatatgaggcccgggtttgcagaatatgcttctagaccttacactgccaagtggtatgtgcggatgatgtggccgatgtcatggctctccatggttctgacatggtcatatggttcttcatttactgttgagaggaacgtcatgaagaaactcaaaatgcaatcatgggtcatcccaagatacagtttccattatggattgagttgggagaaggaagcaatcaatagcctcgttgagaaggcaatatgtgaagctgacaagaaaggagctaaagttgttaccctcggactccttaaccaggcacataacctcaacagaaatggagaactttatcttcagaagtgcccaaagttgggagtaagactcgtagatggcaccagcttagctgctgcagtagttgtgaatagtgttcctcaaggcacagatcaagttgttctcgcagggaatatttccaaagttgctcgtgctgttgccgcagcattgtgtaggaagaatatcaaggtagtaatgaccaacaagcaggattaccattttcttaagcctaacatggcagaagatgcagctgagaaccttttgttttcaaagacaactactgcaaaggtgtggttaattggggatggtctagatgcttctgagcagtttaaggcacagaaagggacacagtttatcccatattcacagtttccaccaagaatggcacgcaaggacacctgcacctactcgacaactcctgcaatggttgtacctaaaacactacagaatgtgcactcctgtgagaattggctgccaaggagggtcatgagtgcatggcgcattgctggaatggttcatgcattggaaggatggaacgagcatgagtgtggggacatcgtgctagacatggagaaaatgtggtctggtgctcttctgcat

SEQ ID NO: 276816 - DNA, 494 bp, Zea mays
aattctccgggactagttctagatcgcgagctgccgcccttttttttttctttctaatctcaaatacactgctaggagtgatgcataggcgaagaattctgctaatggatattaatgctgcacataatagaccttatgtagctacaacagatgtcattaactgtcttttacatagaatcaaatagtacttggagagcaaaggcgtcaacatcaagtcgataaatactatagatggagagcaaggtattatctggtatggttaaacaaggccaacacatatgccggcaggtattattaagaatactgatcagctgtaacgaagccatacctactgaaatgaggcatacctatgtttgcacagaaccatcagtcgcacattgtccatctctcaggtagatgcaatcctacttatcttcctgcgaagccaaatcagtcgcacgtttacatttttttgcatcacaaacatctcccgattcaattcattcttgaacacc

SEQ ID NO: 276817 - DNA, 632 bp, Zea mays
cccacgcgtccgggttcaccatgtaccattggctggtcagggacattgttgggccattagcacaggaatactgagatatatctagtgtttgtagttttggggtgaactcagagaagttgaaggtaacgacttggcttgcgaatatcagctgatctgcactcgggaaatatcagagagcttgtgcagaaaaggtaacagttatgggctcatggcagatgcagtagcatgagatgtcttcagaattgttgtgtacatcaggttcggtggtacccccattgtttagcgtgatacgagtttggaaaaaaaaagtagtcgtaaattgagaaaattgtaaattgattagtaagctcactgcaacactagctgttttcctagttttcattcatttttgggtctggttattgttatgaaccacggaaagaattttcggttttcgggtatgggtacctcagttatatttggtctggttatggtacttactggtggtgcatgtttgtgtgagtgcttagagtttaggctatggccatcagatcatgtatatgactatatgactgtgtaaaacactgttttttatctgattgtgtaaaacagtgtttttgtatcgtacactattgttttatagattgaagttt

SEQ ID NO: 276818 - DNA, 319 bp, Zea mays
gggccattagcacaggaatactgagatatatctagtgtttgtagttttggggtgaactcagagaagttgaaggtaacgacttggcttgcgaatatcagctgatctgcactcgggaaatatcagagagcttgtgcagaaaaggtaacagttatgggcttatggcagatgcagtagcatgagatgtcttcataattgttgtgtacatcaggttcagtggtcttgggggcctccttcttccgctggtcttaaaaacacggttaaccatttattttcagtatgttattaagtttttctagtaacgaagtagttctagatcgcg

SEQ ID NO: 276819 - DNA, 547 bp, Zea mays
ttctttttccgcccttccgtgtggcagaggacaagtttgcttggctgcgggacgacgagggcgcgaggcaggcgctggctggcatcaaccccgtcaacatcgaacgtcttcaggcgttcccgccgatgagcaagctggacccggccgtgtacggcccgccggagtcggccatcacggaggagcacatcatcgggcagctcgacggcatgtcggtgcagcaggcgctgcagagacgacaggctgtacatgctggactaccacgacatcttcatgccgttcctggaccggatcaacgcgctggacggggcggaaggcctacggcacgcgcacgctcttcttcctgacggctcgcgggcacgctgaagcccatcgcgatcgagctgtgcctgccgccgatgaccgacgggtgcgcgcgcgccaagcgcgtgttcacgccgcccgccgatgctcaccagcaactggctgtggcagctcgccaaggcacacgtctgctccaatgacgccggcgtccaccagctcatcaaccactggctgaggacgcacgcgg

SEQ ID NO: 276820 - DNA, 479 bp, Zea mays
ccccccgacagctctactgaacattaccgctcatcatcagggtatacagagagatcgaagagagacctatacagagatggcctccggcggcggctccaagcagctcaaggctagtcttctcatggtggtagcagctctgctcctcctcatctgcacctgcactaccagggggcaagcggcaaggccggatccaggatccgagggccacacgccacagcagctgcgtgctgctgtgtccgtctccgtcgtcgctggtcatgagaaggagagtggctcatcagtggccgtggtggaaatgcgtcggcagcaagagccggaggcggtgagtgaatgtgaagacgacgactgagacgacgaacaagcggagtgcctgatgaggaggacgttgctcgctcacaccgactacatctaacacccagggaagcacaactagctagtcactgctcactagcctgtgctgctggctcatgctcatgtca

SEQ ID NO: 276821 - DNA, 485 bp, Zea mays
gatctccatctccatccgctagctagctatctaggcaagacagtcgagagtcgacaccatggccatggcgacgcatgggcaggccgaccagcagcagcggcacgggcggtctgagcccaccaccagcgtcgccgccaaccgctgggggccctactccggcgccggcgacttcgccagcaacatggccgtcatcctggccgccctgctggccgcgctcgcgctcggcctggcgctcaacgccgccgtgcgctacctgctccgccgcagccgccgcgccggctctgttggtggacagggcaacggcagcggcgtgctgatgccgtcggacgacccggctgagaagccctctgtggaggtggagctgcaggcgccgtcgcccgccctgctggtgtactccgccgtcgggacgacgctggcgggcgccgcggcggagtgcgccatctgcctcgccgagttcccagacggggacgccgtgcgcgtcatgc

SEQ ID NO: 276822 - DNA, 1004 bp, Zea mays
ccggcccgaatttcccggtcggcccaacccgtccggggtatttgaccagttaaaaaaggcttccagaaatggggatttaactaatagggagttggaatccaaaggaagtgagcttcttgaggtagctgttagtatggagcgaatgattcagcggttaggatatcttggaggaaaagatgtactagaagataacaaacctgctagcacacaagctctcgtatcgaagctggaaaagctaataatagcttcaagtactgaatctgggaattctaaatccataatacaggagctgggagcaaagctgcagtcaagggaaaaggcagttgatgagctatcaacaaaagtaaagatgctcgaggatttgtgccatgcacaactttctcagccagaacctagtaaagacagatcatttgaagcatcttcctcaacaattgggtcagatatgtctgatattgaagatgcgggaccagtgggcaagacaacatcagtttcatctgtttctacagctgcacatgctagaacaatgcggaaggggtcagcggatcatcttgttgtcaacattggttcagagtcagaacgattgattgctgcacaagattcagatgacaaggggcgtataaaatcgctccatacatctggcttcattccagctcagggaaagcacatcgctgatagggtcgatgccttctgggtctcggggagccaaattctgatgaaccggccacgagcaaggctagggcttatgttgtactggctggctgtgcacctatggttgatgggcagcatcttgtgacaccgcttctcaataccgagacccatctcataattgtacaatagcacgtattagcagtttcttcttccattcatacaatacatggtagatgttagaaataccatttttttcattgtcttcctcctgctgagatttgcacttgagcagtatgtgttgaatttttgcacacaagatgtaacgcgcagaaaaaataacgttgtcattctttggt

SEQ ID NO: 276823 - DNA, 353 bp, Zea mays
gaacgattgattgctgcacaagattcagatgacaaggggcgtataatatcgttctgactctgaaccaatgttgacaacaagatgatccgcttgacatactttttgttgtcattgatgaattcagtgcacttcaacatgaggttgagaccttctaatatgacaatgcagatttacagttcaatattgaatcctatacccgtgaaattgaacagctaagagaggtctccagaaatagtgatctaactactagggagttggaatccacaggaagtgagcttcttgaggtagctgttagtatggagcgaatgattcagcggttatgatctcttggaggaacagatgtactagaagat

SEQ ID NO: 276824 - DNA, 435 bp, Zea mays
tcgtagaaagaagatgctacgagcacaggctgagagggagatactagaaatgctagatcatccggtggtccctactctttatgcccattttaccacagacaatctctcatgcttggtcatggagtactgtccaggcggtgatttgcatgttcttcgccaaaggcaacctggaaaaagctttccagagccagcagcaaggttttatgttgcagaagttctccttgctttggaatatcttctcttgttaggggtcatataccgtgatctaaagccggagaacattttagtccgtgaagatgggcatataatgttatcggacttcgacctttcactgaggtgctcagtgaatcctgtgctccttcggtcatcttctgttactgcgaaccaccaaccgaggaaacatacaggaccttgtgcagagaactactgcataaa

SEQ ID NO: 276825 - DNA, 1136 bp, Zea mays
cggtgggaactcatcgacagaaccttacattgttgttcataacattctcctatctcatgctactgcagttgcaagataccgcaataaataccaggcaactcaggaaggcaacgtcgggatacttcttgacttcaactggtatgaaccttttacaaactcaactgaagatcaaaaagcagcgcaaagggccagggacttccatattggttggtttcttgatccattaataaatgggcaatatccaaagataatgcaagacattgtgaaagaccggctaccaagtttcacacctgaacaggccaagctagtcaagggctcatcagattatttcgggatcaatcaatatactacatactacattgcagatcaacaaactcctccgcagggaccaccgagctactcgtccgactggggcgtccaatattactttcaaaggaatggcgtgcaaattggacagatggcgcactcaatttggctttacatcgtcccatcgggcatgtatggagtcgtgaactacctaaaggaaaagtaccataatccaatcatcatcatatcggaaaacggaatggatcagcctggaaacctcacgcgcgaggagtacgtgcacgacgccgtgaggatcgatttctacaagaactacctgacggagctaaagagagggatcgacggcggcgcgaacgtgatcggctacttcgcgtggtctctcctggacaacttcgagtggctgtcgggctacacgtccaagttcggcatcgtctacgtcgacttcgcgacgctgaagcggtaccccaaggactcggcgtactggttcagagacatgctttcggggacgggctccaaggctgctaccccgcagactggttcaggcggccggccggctggttcggcttcagccacctcgaacggacctgccttgctggtctcccttttggtctccttgggtgttctgcttccatccatcttcatggtttcctcggtctaattagaaatgtattttcatagtacggatttgtagttgtgtggatgacaacatgttccttttaagaatcaggacatgttgcatcgatgcgggacctgttgtagcgaatgcgaccatgattcagggcttattgttcagagccagttttgttttgttt

SEQ ID NO: 276826 - DNA, 974 bp, Zea mays
gcgtgcggtcctccaagaatctatgcaaaagtgctcctcatctaagtatatctatccagttcaagtggttgtggttcatcttatcatctgtgtatctggatatctcgtgtatctgtgtgtaatgcgcgcactctgcaagaaggaagaatttgtgcaaaacgggtggtagttcagaactttctttgcacaggagaagctcagttccgccttgcagatccaaattggccgatggcgcaacctgaaattccagcatttgaggattgggaaaccacaggaaacaccccttacacacaaaagttcgaggatgtacggaagggcaagaaaacaggaattcctgcacagacaaatgatccaaggaggaacccggaacatcctcgcaagtcgcctttgcatgcaacggcctacaaaaccgatcctcaagaccaaggtccaaggaacccaccacatcgaccgagacctgaaactgatcaacacagacactccgaccggcctactcaccgtgagcctgcaccacgaagacatgcaaatcctcagagagaacaagggagtaatgctgtggcaccaagaagcccctacaggacagctgctgggtctgcttcgccaatgcagtcaaacaaccaatcaaagccgaatcatagatcgactgcgatgcaggctccagagagaaggcattcttcagaggggcatagccagcatacacctggaaggagtaggatgaagcccggtagttatgagcctgaagaagtggctgtaccaccctttggtgaatgggatgatgcaaatgcagcatcaggtgaaaagtacactggtatcttcaacagggtgagggatgataggttgtcacctacctcttctgctaggcaaccgtctactactcgtagtgaagagaataaggtgcaacagaaatgttcttgctgcatactttgagaaaataaggacaggatctcgaagagttctagacaacttcctatgct

SEQ ID NO: 276827 - DNA, 138 bp, Zea mays
tcgcgatctagatcctcaagaccaaggtccaaggaacccaccacatcgaccaatttggatctgcaaggcggaactgagcgtctcctgtgcaaagatggttctgaactaccacccgttttgcacaaattcttccttctt

SEQ ID NO: 276828 - DNA, 1612 bp, Zea mays
  unsure (1)..(1612): unsure at all n locations
tcttccacgcgtccgaacttggcattattgaaggcatttgtttttggttagagttgctcggttgggcacatttcactttcagttatgctacgccttgactatctttctgaaagaccaaaccttccccttttgcaggttactgatgctctagctcaagcaggacttgaatcatcaaatcttattgttggcattgatttcacaaagagcaacgagtggacaggcaaattctctttccatggacgcagtctacatcacatgagcaacacaccaaatccgtatgaacaagccatctcgattattgggcgaacactatcgaaattcgatgaagataatctgattccatgtttcggatttggagatgcatcaacacatgatcaagatgtcttctgtttctctcctgacgagaaaccttgtaatggatttgaagaagctctcgatcgatatagggaacttgtaccacatttgcgcttagctggaccaacatcatttgcgccaattattgagatggctatgaccatcgtggagcaaagtggcgggcaataccatgtcctattgataattgcagatgggcaggttacgaggagtgtagatactgcatctggacagctgagttcgcaagagcagaagactgttgatgccattgtgaaggccagtgaattgcctttgtccattgtgttagtaggagttggtgatggcccctgggacatgatgaaggaatttgatgacaacattcctgctcgagcttttgacaatttccaatttgtaaatttttcagagataatgtccaagaacatggcacaatcaaggaaagaggctgcatttgctctttcagcattgatggagataccacaacagtataaagcaaccgtggaattaggaattttaggtcgtcgctcttccaagtctcccaacagagttcctctacctccgccttccgcaagtcatgatgcttattcctattcatctaaaagctttagcaaaccaaccacctaccctcagagttcttcatcctcatcagtctatcctcaatatggaactccacatacagccaccccggccgcaccttcggccacttatgacaaccaggtctgtcctatctgccttgtgaaccccaaggacatggcgtttggctgtggacaccagacctgctgtgactgcggacagagcctcgagtcgtgcccaatctgtcgcactcccatcaccacaaggataaagctatactagcaagtagtggtttggatcattgacaatgggtggtatactggaggagccacccagcgtcacactggaggatcgtgtcagcatgcccatagatcgattgcaatcggaaagctggagcggcactccatagatcgatcgattggatctaaggattgcagggacaaagcatggatcaattggagcgaggattgcagggccgttgattcatcgctcagggttgtcccagtattcatatccaccaggaatgatccgaatctcccctcgcaataaataataaaaaacaataaacgagcagaaagatgagaaacacaacanaaaatggtgggtgtgaggatcagacgattgcgtgtagggtcaacacacgncactcagcttggttactactctaatc

SEQ ID NO: 276829 - DNA, 547 bp, Zea mays
acgctcacgcttccgcccacgcggggatggcagtactgcacttgcaggtggcggcggtggcggtgctgctgatggcgacggggctgcgcgcgcagctgcgggtgggcttctacgacagctcgtgcccagcggcggagatcatcgtgcagcaggaggtgagcagggcggtggcggccaacccgggcctcgccgccggcctgctccgcctccacttccacgactgtttcgttgggggctgcgacgcgtccgtgctcatcgactccaccaagggcaacaccgcggagaaggacgccgggcccaacctcagcctgcggggcttcgaggtcgtcgatcgcatcaaggcgcgcgtcgagcaggcctgcttcggcgtcgtctcctgcgcggacatactcgcgttcgcggccagggacagcgtcgcactcgtaagtcacagctctttagtgtcagtggacgcctgccttttgattttaacccgacatgattagtttacatggatttggaatccaatgctggactggactagactgaaaagcatatgtgtctgttc

SEQ ID NO: 276830 - DNA, 609 bp, Zea mays
ggcgggctccgacgtcttctgcggcatcgcgcagctggagttcttctacggtgagggccccgccgcgatgcgcagcatctgctcggccttctccttcctggcgctgtcgctggggttctacgtcaactcgctggtggtgacgctggtggcggccgtgacgaagcggcccgggtggctggcgacggacctcgacaccggccacctggactactacttctggctctggaccatcatcagcgtcgccaacctgctgctctacatggtgctcgccgcccggtacacgcccaatcaggtcgccgctgacgtggtggatccgatgcgtcccagcaacagtggcggcagcgacgaatgattaatttggcacatcgatcgtctgcaacttgatccgcttactatacagtaaaaaaacgagatatggtcgagtaggatacgttacactgtacacctaacactagtagtaaaatggatgctccccagtcaacatttctttcagatcgacctgttattttgtgtttagttcagctcctcatgtaaagtgctattgttggtaaaaaaaaatacagcgtcaacctaacgaataacaattagaagatgttaattttatgctgt

SEQ ID NO: 276831 - DNA, 495 bp, Zea mays
caccactcacggagcgctgttgtacactccgggcgtgccgcccaagcaaaaaagcaaagcctgcaatggcatctgcagccaccgccgtggcgctcgtggttgttgccgccctggcctcgctgacgcagctggccgcgtcggagtgctcggcggcggaccgcgacgcgctgctttcgatccgcgcggcgctgtcggaggaggagcggcagctgggcgtgttctcgacgtgggcggcgggcacggactgctgcgccgggtggtacggcgtggcctgcgacccgaccacggggcgcgtcgcggacctgtccctccgcggggaggccgacgacgcggtgatggcgcccgcggggcggcccgcgtcgggggtcatgtccgggtacgtctccgacgctgtgtgccgactggaccgcctctcgacgctggtgctggcggactggaagcggatctcggagcccatcccggactgcgtcgccacgtcgcttcacgaccttcgcg

SEQ ID NO: 276832 - DNA, 629 bp, Zea mays
cactgcaccgtccagcacacaccagcattgtcctgaggcctgagcagcgctgcgccgcccaaccagaacgacgaagcggagccagcgccaacgaaccaactaaccaacggacggaagtcgcgtggcgaggcggggccgccgcgaagccgagcaaatccaagcctccctcctctacccgttcctctcctgccttctcgggatctgcccgcccgccttgtgtgatcttgccgcctcgccccccgcggttggagctccggctgcacgacaccatgagcccccgcgcgtagaggctgggagagaggtagcggggaacaaagttaggcaccaacaaagttaagtggggaggccagagctgcccagctgggtcgctgttctaccagagggatggacgggagcgccggctccttcgtcgccgtccgccggctctccggctccgaccgcgccgccgccttccaccactcctcttcggcggaggtcgtgacggggtcgacggcgtggatcgggagggggctctcctgcgtctgcgcgcagaggagggacagcgatgcgcgcctttccttcgatttgacgcctgtgcaggaagaatgcctacagaggttacaaaaccgtatagaagttcagtatgatag

SEQ ID NO: 276833 - DNA, 387 bp, Zea mays
gggttgccgccgcgtgctggtgacgggcacggggcctctggggtgcgcgccggcggtccgtgcgcagcgcagccgcggcggcgagtgcgcggcggagctgatgcgcgcggcggcgctcttcaacccgcagcttggcgcgcgtcctggaccagctcaacgcgcgctttggcgccggcaccttcatcgcggccaacgcgttccgcgtccacttcgacttcgtcagcgatccggccgccttcggcttcgccacggccaaggacgcgtgctgcggacagggcccccacaacggcctgggcctctgcaccccgctctccaacctgtgcgccgaccgcagcaagtacgtcttctgggacgcctaccaccccacggagcgcgccaaccgggtca

SEQ ID NO: 276834 - DNA, 373 bp, Zea mays
ggggccgagggagggagcctgctccgctctgcagcacgaacatgatgaagccatcgtgtgtactgcttctttccagccttcttgtagccactcttgcagctacttcttcgtcctctcctccgtattccgtcggcaagcacccagggtggctgctggttctaggtcgcaaaggcagagaactcggccagtcgtcagggtaccattattaccagcatcagagcaagcagcccgagctgcagggagtggctatggaggtaaagaaacccgaggaggaggcgacggcgaggcggacggccgatcagagcggggacgccgaggcagggctgatctacagcgcggactacagcagcgtggccatgcatgctgcctctcc

SEQ ID NO: 276835 - DNA, 761 bp, Zea mays
aattagtccccatgttcttcgaatggatctcttaattgttgagagggttgcccaaacgcgggatataaggcatacccagtaaagcttacaagtaaaccagatatggagatggcgactaaagttgctgtttccatttttatagaatttcaagattacaatggatctatgaaaagatcgtgtatttacaactacaacggaatagtatacaaagtcaacaccaatgattaaatagaatttatggctacacaaaccgttgaagatagttctagacctaagccaaaacggactggcgcaggtagtttattgaaacccttgaattcggaatatgggaaagttgctccgggttgggggactactccttttatgggggtcgcaatggctttattcgcgatattcctatctataattttagaaatttataattcttctgttttactggacggaattttaacgaattaggtttctactaactaaaactatgacttcatagtttttccatccaaaaaaagcctttctactttaagctccacatttctagacattctggtagttcgaccgtggatttttttgttttggtatctctggaatatgagtgtgtgacttgttagaattgatcctattgataatacatagaaggggcctgttatctctatcaagatgattctaattcgtcagatattatttattctagtatctggaacacgaaatacatagagtggatcaaaaaaaaaaggaactatgattcatactcactatttaga

SEQ ID NO: 276836 - DNA, 495 bp, Zea mays
gaagcaccacatgctgacagacacgatctgcttttgcacaagatgatagaatcatcaatatagtcacttcgtcttcctaatcacctaggggaaggcgaatatataatacatcttgatcatttgcaatggaaggagattaaatacatgacaccaagaagtcaggatcttggcataggaaacaaatacatagtctgtccagacctcaaaatttgagttggaatcttggaattgacatttccttataactcaattccagtattttgctgagagaatcaattgtaacatggaatccaattccagccttttcaaattgtatctaggcgtagacatttctagaatttgtctagggcgacacaaaaggaaatgtattgcatttttattgcctaaaacaaactttggcattaggtcctgtttggatccttgaattgaattgtattctaacaatcataatttagacatagatcaattaagttaatatagttttacatggaaaaa

SEQ ID NO: 276837 - DNA, 921 bp, Zea mays
cccatttttccgttcattgatcacgcacctgcaaagtgaacttgtagacagttgtaggttaagttgaattctgtatagtgttgccaattgttttgctccagtgaaatacatttttttttcttaactataccctgtttatcttattcttcatcttttcttttcctaggatcggcttgagtatattgagagggaccaatgtgaatattcctttgacgaggaagacaagaaagtgcaagatgctcttttgaatcctgacccttgctcgaatcctacaattgtgctcaagaagactctctcatgttcctatccaaacttgcctttcaatgaggccctccgaaaggaaagtgagaagcttcaggttgaacttcaaaggtcacagagcaacatggatctgggttcgtgtgaggttatccaacacctgcttggagtaaccaaaactgtggaatctacaattccagagaaagaaacaaatgttaaagctccagaaaagaagggttcaaactacagtgaatccaaaggagagactgcaaaatcgtttgatgatgatgacgactatcctaagaagcaaaacgatgactatcctaagaagcaaaaggatacctgcagcacacaacgatgctcttcacaagttccatatggtcatgatcttgtctcaagtagaggatcgtacagcgatgaatggcatgcagatttacttggctgctgttcagaaccggctttgtgtttgaagaccttgttcttcccctgtggaaccttctcgagaattgcttcaatcgccaaggacaggccaatgacttctggagaggcttgcaatgatattatggctttactccctaatattgtcctgcttgctgtcatacatgctgagcaaggagaaagctttcataaaaagttggacattgcgggaggccgctgtgacaa

SEQ ID NO: 276838 - DNA, 463 bp, Zea mays
gttcttgatgaagtcatgccgttcatgacgggttcagctggagtggatggttctgttgggaatttgtcatctatggatggttctgttgggaatttgtttggtaatcacagcacacatgaagtgggaagttcatcatctgtttggcgtgatatatgtatcaatgagattgatgcaagtgtttactctgtgcaatacacttcttatggggatgtcaaaactggcaagcaagaaaacataaacaacacatatgtgggaagacttgcatcaatcgaaggggtcaatgagcaactaaatctacattcttatcctatcccaaatggtggtcaacatgatttgcttcccaaccttgatgtgctatcttcaaataccgatccagagaaaacgttggccaacacagatactgaagttggatacagtggattatttagtgaatgtttttcccaaccaccgacaagggaagatg

SEQ ID NO: 276839 - DNA, 436 bp, Zea mays
ctacacctcgtgtgttgccaaatatgaacgacagtgttcccaccccacccacttcttcggcaggagaagctcaccagtgcgtgccgggcagggaattcatcaggaggagaacatacttgaacagaaggtttcgacatgagcaggccggagcagctagctaatagagggagatgagggggtaagtgttctctgacggacgttctggcgcatgtgcctttgacggacggtggacaggtttgtaaaacacgacgcgacactcatgatccttatcatgttgattggcttgggcttggcttgcatctccagttctccgcaccacagatctaagattattctctgcactgctggctagcctgacctgacctgacctgacagctactgtgcagtcatgtctatgatgtctgagcgctaatctatgccgggcaatcctatgtac

SEQ ID NO: 276840 - DNA, 605 bp, Zea mays
cgctccccaccccgccaccaccgacgctgggatgaaggccgtgccagccgacagcgccgcgcccccggtgccgatgccgatgccgatgccggcgaccaagatcaccattcccgtttccgcggtgggcggcacggaggcggcgctcctcgggaaggggcggtacaaggtctgggccttggccgccatcgcgctcctcgcgctctggtccatgtccgccgcctccgtctcactccgctggtcctcctcgggtgacctcgcctccgtctacggggacctggacgtcccgctcgccgacgacctcgattcccttgagatggaggagagggagaaattagtgggacgaatgtgggacatgtacacacggaccagtgatgaggtacggcttccacggttctggcaggaggcgtttgaggctgcatacgaggaacttgctggtgatgatgtgcaggtccgtgatgcagctatctctgagattgcccgaatgtcagcccacaaacttgagctcgagcagacattgaatgagaatgaggaagagaatgccgcgagcaacagtggtggcaggtcaaaggcgagtcagtagttccacagatatctgtggcctgagg

SEQ ID NO: 276841 - DNA, 406 bp, Zea mays
ctcgaacacaaactcaggcaaggcaaaaggaacccgcaccatccgaggctcaagcagggaagtgatcatcatcatcatcaggagaagatgtgcccgaccaagaaggggatgaccggagagccgagctcgccatgcagctcggcatcagcctcgaccttaccggagcaccaccagacggtgtggacgtcgccgccgaagcggccagcggggcggaccaagttccgggagacgcggcacccggtgttccgcggcgtccggcgccggggcagcgccgggcggtgggtgtgcgaggtgcgcgtgccggggaggcgcggctgcaggctctggctcggcaccttcgacacggccgaggcggcggcccgcgcgcacgacgccgtcatgctcgccctcgccggcgcgggcgcct

SEQ ID NO: 276842 - DNA, 1498 bp, Zea mays
tcgtgggcccttccctccggcgtccgccgccgtcaccactcgtcgttttcctagttcgcacacccatccggcctcgcccccgtctcgatagtcgataccaggttctaaatggcgatggcgatgatggctatgcgacgcgcggtggcgctcggcgctcgccacatccccgccgccgcagcctcttcgttccgagtcgtctccctccgccacatgagcgcggacgcgggcgccgcgatggagaagatccgcgccgccgggctgctcaggacgcaggggcttatcgctgggcagtgggtggacgcctacgacggaaagaccattgaggtgcaaaatccagcaactggtgaggtcctggcaaacgtgtcctgtatgggcagcagagaaacatctgatgctattgcttctgctcacagtacattctattcttggagtaaattcactgcaagtgagaggagcaaggcactaagaaaatggtacgatctaattatttcacacaaggaagagcttgcacttctcatgacactggagcaggggaaacctatgaaagaagcccttggtgaggtcaattatggtgcaagtttcatagaatattttgcagaggaagcaaagcgtatatatggtgacatcattcccccaactttatctgatcgcagattgttggttttgaagcagcctgttggggtagttggagctattacaccatggaattttccattagcaatgataacccggaaggttggaccagctttggcctgtggctgcactgttgttgtcaagctatcagagttaacacctctgacatcattagctgcagcagatcttgctcttcaagctggaataccagcaggtgcactaaatgttgtgatgggcaatgctcctgagataggtgatgcattactgcagagtacacaggtcagaaagattacgttcactggatcaacagctgttggcaaaaaactgatggctgaatctgcaaatactgtgaaaaaggtctctttggaacttggtgggaatgcaccttgcattgtttttgatgatgcagacattgatgttgctgttaaaggcagtcttgctgccaagttccgtaacagtggacagacatgtgtttgtgcaaacaggatattggtgcaagaaggtatctacgaaaagtttgcaaaagcattcatccaggctgttcagagtttgaaggtcggtaacggtctagaagagagtacatctcagggtcctctgattaacgaagctgctgttcaaaaggtggagaagttcataaatgacgcaacttcaaagggagcaaatgtcatgctaggtggtaaaagacacagcctgggaatgtcattttatgagccaactgtagtagggaatgtcagcaacgatatgcttcttttcagagaagaagtttttggtccagttgcaccccttataccgttcaaaactgaggaagaagcagtccatatggccaacgatacatacacaggcttagctgcatacatttttacca

SEQ ID NO: 276843 - DNA, 672 bp, Zea mays
cgccggccgcccgccggacccggccctgtttgaggcgctccgccggttatcccagagacggagccaccagccacggaggcactactagtgtcgtaacgacgccacgacggtgtgtctgatctcgcatcgcgccgaggccctccggaatcccaatcctctcctctcccgcaagcaccccgggtctgctgcagcgcctcgtctctgtggtctggcatcagagtccccgggagaatggttgctctgtcggcaggagcgctggctccgctcgcaggtctgtctccgctgccgtcgtgcagcgcggctccgttgtactgccgcaggagtccgccacttctcaaggtcgccatcgccaagacgcggccagctgttcaccaatctgctcctgcaagctttcgaaaatgtgcagctatgtcagaacatggacgtcaggaactccggaccaatgagtaccagctggatgatgatgatgagccgttttggctggcagtggtcagagaccttgctgtgggtttcaagggattggtagctttcttagctgagcagccgaggcaactgaagcacctggagtggccgggctttctacacacgctgaagacggtcacacttactcttgattggtaggtatgtttattggtgcattatcaactattgatgcttgcctctgctacatgc

SEQ ID NO: 276844 - DNA, 448 bp, Zea mays
gctgccgtcccgcaggaagagtgccgtcctcggcgtcgtcgcgttgtcctcctccgtcctcggcctgctccacgccttctctctcccggtcccggcagcctctgcgctctccgtcggcctggcgcggcgccaccggcacgatgccacgcccgggctggccgccggcggctgcgacgtcttcagcggcagctgggtcctcgacggcggtagctcggcctcggcggcgtacaccgggtacaactgcccgctcatcgacgcggagttcaactgccagctctacggccgcccggactccgactacctccggtacctctggaagccggccggatgcgagctaccgaggttcgatggcgcggacttcctgacgcggatgaaggggaagacggtgatgttcgtgggcgactcgctggggcgcaaccagtgggagtcgctcgtctgcctgctgcac

SEQ ID NO: 276845 - DNA, 479 bp, Zea mays
  unsure (1)..(479): unsure at all n locations
ctgacccgcccactctaccttcttccctcttcagtctcctcgcaccaacgaccacatcccaccgaacaccgatcaaggccaacctgttcgctgctccgccagaagccgaggtcgagctgttcacggcagcgagcatgcaccacgatcccaaccccttcgacgagggcgccgacgagaaccccttctcgaatggaggcggaggagcgcgtggcggaggcgtcaagccgcagtacgggttccggccgacggagcccgcggggttcggcggcggcaggggcgatgcgaccaccgacatccctctggacaccatgaacgattcgaagggcaaggcgaaggagctgtctcagtgggagtccgatctcaggaggggggagtcggatatcaggaggagggaggaagctctcaagagcgctggggtgcccatggaggacaagaactggccgnctttcttcccaatcatccaccatgatattgccaat

SEQ ID NO: 276846 - DNA, 491 bp, Zea mays
tttacgcgtccgcccacgcgtccgccacaggacaataacatcgagtactggaggaactttgtcaatgaatactttgccccgagtgccaagaagaggtggtgcgtttctctgtatggcaatggccgtcaaactaccggagttttccctcaggatgtttggcattgtgagatatgcaataggaagccagggcgaggttttgaaacaacggttgaggtcttgccacggttgtgccaaatcaaatatgccagtggtacactcgaggagcttctgtatgttgatatgccgagagagtcccagaattcatctggacagattgttttggactataccaaagcaatccaggagagtgtctttgagcaactgcgtgtagtccgtgaggggcatctaagaattgtattcaaccaagacttgaagattgcatcgtgggagttctgtgcccggcgtcacgaggaacttattcctcggagatcaatcataccacaggtcagtca

SEQ ID NO: 276847 - DNA, 1062 bp, Zea mays
gaaaaaatggcgacttgaaatctgtcaatgatcttgcaaaggaaggagcgcgtaaaaatgacaggcttgttgctaatttagctaaccaaattgaggtgaacaataggtatttacaggaactagaatgcaaatacagtgagacaactgcatcacttgagaagatgttggggcaaagggaccaacttctccagtcatacaatgacgaaattagcaagatgcagcagctagctcgcaggcattctcagaagatcattgatgagaatcaaaagctgcgttctgaccttgaggcaaaaatgaatgatcttgatgtgagatccaagcaactcgatgagattgcagcaaaaagcgattatgacagaaggagccttgagcaggagaagcaaaagaatgctatcaaatcgagtcatcttaaattggcaacattagagcagcagaaagctgatgagaatgtgctgaagcttgtggaagaacaaaaaagggagaaacatgctgcgttaaagaagattctgatgttggaacaacaattggatgcaaaacaaaagcttgaattagaaatacagcagttgaagggcaaactaaaagtgatggagcatatgccaggtgatgaagattcagcgtcaaagaataaaattaatgagctgagtgaggcattgcaagaaaagatagatgaactggatggaatggagtcacttaaccaaactctggttatcaaagaaagcaaaagcaacattgaactgcaagaagctcgcaaagagctagaaaatggcctgcttgatctttcaggtgggcagacacatataggaatcaagagaatgggagagcttgatctaaaagcattttcaaaggcatgccaaaaggagcgtacagaaaatgcagaagttactgctgcctttctttgttcaaagtgggaggctgaaataaaaaatcctgactggcacccttttagggtcgtcacaattgatggaaaggagatggcaataatcgaggatgatgcaaagcttcgagcactcaaagaagaacatggagaagaaatctatgcaatggtgacaaaggcgctgcttg

SEQ ID NO: 276848 - DNA, 488 bp, Zea mays
tttttcgatgagattgcagcaaaaagcgattatgacagaaggagccttgagcaggagaagcaaaagaatgctatcaaatcgagtcatcttaaattggcaacattagagcagcagagagctgatgagaatgtgctgaagcttgtggaagaacaaaaagtatgtaccttggctcctgtgatatgatgctttaggtttcaaacaatgtgtcctatggtagtcttactgtatggaaactacagagggagaaacatgctgcgttaaagaagattctgatgttggaacaacaattggatgcaaaacaaaagcttgaattagaaatacagcagttgaagggcaaactaaaagtgatggagcatatgccaggtgatgaagattcagcgtcaaagaataaaattaatgagctgagtgaggcattgcaagacaagatagatgaactggatggaatggagtcacttaaccaaactctggttatcaaagaaagcaaaagc

SEQ ID NO: 276849 - DNA, 946 bp, Zea mays
gttgaggttagaagaggagctagagcgagagagtcccatcgcaacacacaaaaggaagaggaagaggaagaggaaggcgagaacgatgggcttgctcctgctgctcctcgtcgcggcggcggcgacagctcctgcggccgacgcatggggcaaggaggggcactacatggtgtgcaagatcgctgagagctttctgacgaaagatgcctcgacggcggtgaaggagctgctgccggggtgggccggcggcgagctcgcggagacgtgctcttgggcggacacgcagagggttccggtaccgctggtccagcccgctgcacttcgccgacacgccaggggactgcgagttcgactacgcccgggactgccacaacaccaatgggagaaggacatgtgcgtggtcggagccatcaacaactacacggcggcgctgaaagactcatcaagtccatttgatccgacggagagcttgatgttcctggcgcacttcgtcggcgacgtccaccagcctctccactgcggccacaccgacgacctcggcggcaacaccatcgtcgtccactggtaccgaaggaagaccaacctgcaccacgtatgggacgtgaacgtcatcgagacggccatgaaggacttctacggcaacgaccagagcaccatgatacaggccatccagcagaacattacggaggaatgggctgatgaggagaagaagtgggaggcctgccgtagccggacaaagacctgcgctgacaagtacgctgcagagagcgcgaactgggcctgcacggcgtacgagggtgtcgaccaagactccaccttggaagatgactacttcttcgccgcgctgccggtggttcagaagaggatcgcccaaggaggcgtcaggctggccgcgatcctcaacagggatattggtgggaacagcagatcaagcttcagagcagtt

SEQ ID NO: 276850 - DNA, 267 bp, Zea mays
gtgagaagctagaggagctagagcgagagagtcccatcgcaacacacaaagggaagaggaagaggcaggcgaggacgatgggcttgctcctgctgctccacgtcctcctcgtcgcggcggcggcgacagctcctgcagccgacgcatggggcaaggaggggcactacatggtgtgcaagatcgctgagagctttctgacgaaagaggcatcgacggcggtgaaggagctgctgccggggtgggccggcggcgagctcgcggagacgt

SEQ ID NO: 276851 - DNA, 597 bp, Zea mays
tttggctgcgccggtcagttgcagggcatgatataccagtaatacacagttgtttcagtttccatgatttgtagtcaccatttcttgattcacatttgactccacaagagaagaccatttggacgatggatattttgtcacaagttacgggatttagttcaaatttgaactgaatacaaaatatcctgacacgatatctgtcgtccaaacacttataataatttccacgctgttttttccctcttgtgtgcctgtacaatagaaatattgcagacttacaacacacatgtaaactggtgtcactttatttcacagaaatagcaatgaataaaataaggttaagcagtcttgaaaaaaaaaaaaaaaaaaaaaaaaaaaaaaaaaaaaaaaaaaaaaaaaaaaaaaaaaaaaaaaaaaaaaaaaaaaaaaaaaaaaaaaaaaaaataaaaaaaaaaaaaaaaaaaaaaaaaaaaaaaaagggggggagagtttaggggtccaaggtttaaaaacgtgtgattgggaataaaaatttttttattggggtcccctaaatccattttattgcccattttttaaaaacttcttaatgggaaa

SEQ ID NO: 276852 - DNA, 783 bp, Zea mays
cccacgcgtccggaggttgcttccctataaggcgaacttagtagatgatttgctgaggtcattgcagctgattttgaaacttgatgcccgtgtagctgatgcttactgtgagaacattaccttggaggtcacactgcttgtcaaggccaatgcaacccatataaaatcccagatgggctggcggactatcatttccttgctctgcatcaccgcacgccatcctgatgcttctgatgcaagatttgaagccctggtttgtatcatgtcacaaggtgcgcacctctcacctgccaacttcatcctttcagtgtaggcatcaaggcagtttgcagaatctcggcttgcgtctgcagaaagatctatccatgctatgaacctaatggcagactcagttaattgtcttgtgcgatggtcacaagaggttagagaagctggtggagaggcagatagaatattggaaggaattgcagagatgtggctgcggctagtgcaggctctacgcaaggtgtgcatggatcaaagagaagaagtgaggaaccatgcattgttatcgttgcatagatgcttggtagttgatggaatatcagttaagtcttcaacatggttgatggcatttgacattattttccagttgcttgacgaactgttggagattgctcagagctactcaccaaaggatttcagaaacatggaggtatctctcttgcatgctgtaaaactgttatgcaaggtgttcttgcagtcacttaaagacctctcaggacagcacagttttgataagct

SEQ ID NO: 276853 - DNA, 441 bp, Zea mays
atccaaatcgcgatcagtcgccgcccaagcctagcagatccgccggcgagcgcgcgggggcaatgggtgtcgtctcggcagcggcggacgcgattgtcgcggttttctccctcaccatcgtcgtcgcggcgccgctactcgacgcgcagtccgtcctcccgcataccctctacccggcgccgctcctggaactcaagcgctggtacgccgccgagtttggcgactacctcgtggcccagtcccccggcttcttccgtggccttgtttgcctcgagctcgccttccaatggccgctcgccgtcgccacactctacggcatcctcacccgccgccgctgggctgccaccacctccctcatggccggcgttggcaccctcacctccatgtctgcaattcttggtgagatgttaggttcaagcaaatcaacaccaaagttgcttt

SEQ ID NO: 276854 - DNA, 677 bp, Zea mays
ctggaagtggtatgctttcagctgctggtttatctggagggaccactgcaaaacccaggacgggcatgcttcttgcgccacctccagtcgcagctgggaagcttagatcttcacttccaccaccacctaacgaccctgcagctgcaaggatgaattctggacatactgcaggaatcagggctccaaaagaacccaccacgagaaataacgatcctttttcagatctttctgctataaagcaaaatctaccttcatctgctgaacccggacaaacaaagagcacaggagctggatgggcagcattctgacgatggatgcatgatctactgctactattggcatttgtttatctgaagaaggggaatgggtagttgaagcaccgaacaaggatctggaactgctggatgcctctacccctttcgaaactgaatggttaaaatgattgatcaccctaccagttccagttgtcccttgtcagtcgagaaataaacctttcccagagttgtattacccgtctccccacatgaatggatgctcccattttctggatttagatacagcgtcccatcttgtttttatgttattcgtgctatgtttcccaaagcaataccagaatcatactgccctcgatgtgtattttgcggcgaaagattgccaatactgtttcaagtgtgccc

SEQ ID NO: 276855 - DNA, 788 bp, Zea mays
cccacgcgtccgggtcccgcggaccaatcagctagagagctgagtgatgtctcgcaagcgatgagcctcatgagatcggatcggaggccatcattccacgcactggtgatgaaaagctcgcttggtgcccctagctagctagtggcgaagcaaggaagctagccagccaagatcctgcttgtgagaaaaaaaagggagtagatccagtaattttaagaatctggtcaacatacctacggcaagatggctgatattgtaatccgcgacctggagagggtagtcaaagtcgcacttgcgatcaagaaggccgtggaaacagctaagcagaacaaggaggattgcgttaagatcggtgagcgtgcagctgaggtcagtactcatatgaagcggctgaaggagaatacaaaagcaatggaggaccctttgatgagcgatacgctcaagagtatggaagagacactccaacgcgctcttaagctcgtcaacgagtgccagaggaagcacgtcgtgctccattacttaaatgccggcggcatgtccaagaagctgcgccaggtgcaggaggatatatcatataaattgtggaatggggtcttggccaccgttgtcgacacaaggattgctttggaaaagcagatccaatctgctattgatgcccctctgcaccaacaccaacagcgtgcaaggcaagtggaaacctcacaaagtagtcattcaagaactgatcaagctagcgagaaaggaaaggccatgttagcaagagtaaaaagggagcaatctgaactttt

SEQ ID NO: 276856 - DNA, 440 bp, Zea mays
taagcctcaaaacctgatcatcagagaaacgaaaaggaagaggtgagcgtgggagaaaaaacaaaagaaaggataagagatatagccctgagaagaatgtcccttacaactgatgaactcaaggccaaggccgaggtatactacggtgacgagatctgccagctgtgtacccagctcctgctcagggaagcaggcctccccaatggcctgcttccattgaaggacctaatcgagtgcggctatgtccaggaaactggattcgtgtggctgaagcaaagcaacagggttgaccacatcttccatagtctaggaaagctggtctcttacggcaacgagatcaccggctatgccgagaagggcaggatcaagaaggtcaaagggataaagaccagggagctcatgctgtgggtcccggtggaggagattgctcttgatgatga

SEQ ID NO: 276857 - DNA, 381 bp, Zea mays
aacgccggggccggaaaaaagggaagccagagcacagagccagacctggcggcgctgggcagccaaaaacgccgccgaggatccttctctctctctctctctctctcttcgcgtccatcgacctgaccgcggaggcgcgggcttcttcttcccgctctccactgcagtgtcatgaagattgagggaaacttgcatgtttgatatacccagctgctttctgtaacgaaaaactcttgtgatcatatttgttgaattggtcactgtcagggagggatctacttgtcagtttttggtattaaggctgctggccttcccttgcagggtatctgtagaataaatgggagaagcacactcggatgaattttgccattgccaggggtg

SEQ ID NO: 276858 - DNA, 484 bp, Zea mays
aacgagaccaaggacaacgggctgacgctcttctgccccgtcgactcggccgtcgcggccttcgcggccacgtacaagaaccgcacggccaaggccaaggcggccatcctcctctaccacgccgtgccggactacttctcgctgcagctgctcaagtccaacaacggcatggtcaccacgctggccaccgccagcgacaagaagatggactacagctacgacgtcaagaacaaaggcgagacggtcacgctgcagaccagggtcgtcacgtccagcgtcaccgccaccgttggcgacatggagccgttggccgtgtatgccgtgaacaagttcctgcagcccaaggagctcttcaaggtcgtcgaggcgcccgcgcccgcgccggagccgtccaagaagaagaaggctggtcgcggcgggagtgacgacgattcctcggacgattcgggagattcgaccgccgatgctgagaagggcgacgcag

SEQ ID NO: 276859 - DNA, 923 bp, Zea mays
atgcgctgagttttgaaggtggcgagggatctttgctgcggggttctatttgttctcagtgatttttggcaaacactctttggttagattaagaatcatggaaaggtacaaattgttacggaagataggtgatggaacctgtgggaatgtttttatggcttctaatgtagaaactaatgaaattgctgctgttaaaaaaatgaagagaaaattgtgtcattgggaagaatgcattagtctgcgagaagtgaaggcccttcagaaactatttcaccctaacattgtgaagctgaaggaagtgacgatggaaaaccatgagctgttcttcatctttgaacacatggagtgcaatttatatgatgtcataagggaaaggcaagttgctttccctgaaagggatatacggaactttatggtccagatactgcaaggtcttgcatatatgcataataatgggtattttcaccgtgatttaaaacctgagaatttgttggtgacaaatggtattattaaaattgctgactttgggttggcaagagaagttgtcttccaatcctccttacactgattatgtttccaccagatggtatcgggctccagaggttctactgcaatcttcagtttatacacctgctattgacatgtgggcggctggtgctattttggctgagctttttacactgtccccactttttcctggtgaaagtgaaactgaccagctttacaaaatatgcactgtgcttgggacccctgattgcactatttggccagagggaatgaacctgcctcgttcatgcagctttaagttttttcagaatcctccaagaaacttatgggagcttattcctaatgcttcatctgaagcaatcgatttgatccagcaactttgttcctgggatcctcgaaggaggccaactgctgag

SEQ ID NO: 276860 - DNA, 456 bp, Zea mays
ctcctccttattataggtcagcttagtagttggtggtgactcgatcggcgagatgggcatggtcgcttccatgtgcacggagcccatcaagcggcaccgggtggagagagacctcgacggcaaggtggcggacgcgctccgggagcggacgaggtcccggcagaggaccttcaggtcggtgaacagcatcaccatgcgcctgcccaggttcaaggaagggctcagggacgtcaagaacatcttcgaccagtacgacgaggattcagatggcacgatcgacagcgaagagctgcagagcttcggaagcagagtccgggtgcacatgtccgaggaggagatgagcaacctgcaccggtactgcgacatcgacagcaggaaagggcgtccagttccaggagttcgtcgtgctcctctgcctcgcgtacctgctcttcgggccagacgtcacacgacgcg

SEQ ID NO: 276861 - DNA, 432 bp, Zea mays
gcttattaggatacaatatgccatcgccaataattgtcgcacctacaggggcacacaaattagccaatcccgaacgcgaggtggccacagcaagagctgccgcagcatgtaacaccataatggtgctttccttctcatcaagctgcaggatcgaggaggttgcctccagttgcgacgctgttcggttttatcagttatatgtgtacaagagaagggatgtttcggcaacattggtacggcgggctgaaagtttaggattcagggcaattgttttgacagttgacacgcctgtgcttggcaggcgtgaagctgatgtcaggagtaaggtggttgctccacctctgtcagacgcttgaaggtttagtgtcgttagacgactttgacggtgctgaaggctgctccaagctggaacgattctcacgggagacgctg

SEQ ID NO: 276862 - DNA, 1216 bp, Zea mays
cccaaatgagagacatgtattgcaatttgcaatgctctatccactattttacttcattgccgcatttgattctacctgtctcgattcttactttgtcatacacagtttcaacttcgccatacgttaatttggttctgtcttccgccactgtgcccactgcccacttatgttattttcatgctgcaaggaccaacttcaagtataacagtgaagttttgccagagcctgacatgaagtccatgaatgtggctagccttgtggagatcagtgatgcatattcacttgaccgtgctatagctacaccagagagagcattgcatactgcaaacctgtgtgtgaggcttttattatctaaggacagcattgtgattaggagacttattatgacagcgaatgcaaaatctcttgcccgtgatctgatctccagagatgctttgatgttccgggtgctccttagtaaggttattgcggatgttgtctaccaatggatgttgagtgccacaggcttgaaacgagttatggagaccaagatccagacgcccatgaccacaggaaagaacgagggacatctggtgctggctgaagaaccatcgaccctgatggtactccaggcggcagtaaaagaccgaaggattcagctcatgttcaccaagtttgtgagggagttgagagaggagcccgtcttgatgattagggtgagctggaacgtgttcctcatctcggtctcatctgccgctgtaggcctgcaccgattcttggtgttcttcttgaaggaggatggtgccaggttcttggatgacaaggtcaagaaaatgaagatttggctgatggagttctcgaagcggacggctaatctggagattcaaggaattctgtgaatgttggtggcttttggttgaaggatttaatagctgcttcgcactctggtttttggagttactttctgcatcgagtgaatccagttcctgtttacgctggctgtctgagcttgcttggctgctggtgttcccagagatttataaaaacagggttttcctccgtcattccgccgcagctagtatataatagatggttcttggttgttcatgtactgtgtagctgtatataatagaaacattgcaggatcagtgagtaattctgtggccgagtaaagtgcagtggtggaaggcatgtgttacctactggatataaacatcatcatgtgaatgttcagttg

SEQ ID NO: 276863 - DNA, 796 bp, Zea mays
tctgttatagagatctttcgttaacaatctcagtggcccattacccatgatttctgctagaacctttatcatagctggaaatccaatgatttgtggtaataaatctggagatagctgctcttctgtgtcacttgacccactctcttacccaccagatgatctgaaaagtgagatctctttccattgctcaaatttgggaaggcgtaacagaagaaagtaaacaccttttcttctgggtggcactcactaatgtctccttttcctcagctcagccacaacaagatcaatatgatccagaagtttgtttgggtcatctaaagcggtatgctttcaaggagctccgtgcagctactaataattttaactcaaagaacatcttaggtgaaggtggatatggcatagtatacaagggttatttgcgtgatggctccgttgttgctgtcaaaaggctgaaggattataatgccgtcggtggggaagttcaattccaaactgaagttgaagtcataagcttggctgttcatcggaatctcctacgtcttattggattctgcactacagagagtgagaggttacttgtttatccatacatgccaaatggaagtgttgcttctcaattgcgggaacatatcaatgccaagccggctctagactggtcaaggagaaagagggtagcgctaggcacggcgcggggcctgctctaccttcacgagcaatgcgacccgaagataatccaccgggacgtaaaggcttccaacgtgcttctcgacgagtacttcgaagcgatcgtgggaga

SEQ ID NO: 276864 - DNA, 674 bp, Zea mays
ctcgagccgacttcctaggaaggcatctgaacggatataatccaggtgactaggtattgagcaatattgcaattatcttaaaaaggatcaactgtagtattctaccagtgtacttgaattgcttcatgcatgtacggtggcagattttagttggatttttcaattctcatggccttgcatggtgctgacagcaagcaaatattgacaggaacacctttttattgtcactgaactactgcgagcaaatctatacgagtttcagaaatataatcaagaatctggtggtgaggtgtattttactttgcctaggatacaggttatagctcggcaatgtttggaggccttggtttacttgcaccgtctgaggatcattcattgtgacctaaagccagaaaatattcttatcaagagctacagtagatgtgaaattaaagtcattgatctgggaagtagttgcttcttgacagacaacttatgtctctatgtccaatcacgctcttatcgagctcctgaggtcattctaggcctaccttatgatcagaggattgatatttgtgtctcttggttgcatcctttctgaattgtatactggtgaagtattattacctaacgagcctgtgtcctgaatgcttgctcaaatgattgggataaccggcccaattgacatggaaatg

SEQ ID NO: 276865 - DNA, 634 bp, Zea mays
gtcaggctctggctgaggaacttgctcgtcggcttggtaaagaaagatgttggagagtcggttggccgaagaagaatgatacagatacttgcaaagatgcaaatgaggttctaatgtttttaggtccacaagcattgagaaaggttatagaagatgcagaactgtatcctataagaggccttttttcattcgaacagttcttcccagagattgacaattactttcttggaatacatggtgatgagcttggtattcatactggatggaaatctatggatgatctttacaaggttgttcctggtgaattgactgttgttactggagtaccaaattctggtaaaagcgagtagatagatgctttattgtgcaatataaacaaacaatctgggtggaaatttgttctgtgctcaatggaaaacaaggtaaaggagcatgctaggaaactcttagagaagcacattcagaagccattctttaatgctaggtatggtgggtctgcacagcggatgactcctgatgaatttgaagcaggaaaacaatggttaaataaaactttccatcttatccggtgtgaagatgatagccttccatctattaattgggttcttgaccttgcgaaagctgcagttctaag

SEQ ID NO: 276866 - DNA, 1176 bp, Zea mays
cattgagtgggttccggacaggacgcacagcgggacgttcacggacggggatctgcgcgtcaacaaggacggcctccgcatcgtctcgcggagggagggaggcgaggctcctcctatagagccgttggatagtcaactgagcttagatgatctagacgttataaaagtgatcgggaaaggtagcagcggaaatgtgcaattggtccgccacaaatttactggccagttttttgctctgaaggttattcaactaaatattgatgagagtatacgcaaacagattgccaaggagttgaagataaacttatcaacacagtgccaatatgttgttgtgttctatcagtgtttctatttcaatggtgccatttctattgttttggaatacatggatggtggctcccttgcagatttcctgaagactgttaaaaccattccagaggcctacctcgctgctatctgtacgcagatgctaaaaggactgatctatttgcataacgagaagcgcgttatacaccgagatctgaaaccatcaaatatattgataaatcataggggtgaagtaaaaatatcagattttggtgtgagtgccattatatctagttcctcttcgcaacgagatacatttattggcacacgcaactacatggcgccagaaagaatcgatggaaagaaacatggttctatgagtgatatctggagtttgggactagtgatactggaatgtgcaaccggcatctttccatttcctccttgtgaaagcttctacgaacttctcgtggctgttgttgatcaaccgccaccttctgcgccgccggatcagttttcaccagaattctgtgggttcatttctgcatgtctccagaaggatgctaatgacaggtcatcagcccctgccttgctggaccatccgttcctgagcatgtatgatgacctgcatgtagatcttgcttcgtacttcacgacagcaggatctcctctcgccaccttcaagtaatgacagcgtccttgttctttttctgtatccatttttgcgcacaggagtgatacattttctttttcagttccaggcaactctaatttttttgtcctccttattacgcgaacggtgtggcgacaaatttctctttttggacaagcttggattgtgtactgagctgtaatgatcttgtgtgtgtc

SEQ ID NO: 276867 - DNA, 399 bp, Zea mays
gttcctgagcatgtatgatgacctgcatgtagatcttgcttcgtacttcacgacagcaggatctcctctcgccaccttcaattccaggcaactctaatttttttgtcctccttattacgcgaacggtgtggcgacaaatttctctttttggacaaggcttggattgtgtactgagctgtaatgatcttgtgtgtgtcaggtcggtgattggctccatcactttacatatatgacatacatgtacagccttttaggataaaaatgagcactgaagttttgcctatctgtatatcggcagcaaacgtttggtcatgtttgtttcaccttgtaatgtattgactcagatatgggattggtcattgtctcatttggtgtatgagtcaagtccagattttcttg

SEQ ID NO: 276868 - DNA, 402 bp, Zea mays
ctaagaacatcagcttcaaggtgagcagccgtttgcccagcagaccacccagtacgtggccgagagacgatggtgcagcaggggcaggcaaagtgacaaagcctctcagagagtcacaaggctctggacttttgcttctaaacgccgctgtctctgtgtatctcgttccttttcgaaaattttgaatccgatcgatccgcgtgttttcacacacttagctagcaagatcgacgctatcacgctactgcgtgccctggatctgttgaagttgtgcctgtaggctgcagggtggctgggtgtgtgtggcttcaaaattcgggcggcgacgggcggcatcctggaccgagcaaaacgcgcattcgatctggctgattttttcggttggtcgtcttggtccaatgc

SEQ ID NO: 276869 - DNA, 425 bp, Zea mays
ctgggacctgcccgacctagagcacgacgccatgccgcccatctccgcggcttccgccgcggcggcgtcggccatggccgccgtagctgccgcgccttcccccacgacggcgcgagccgggcggagtgctccgtcgacctcaagctcagcgggctaggcgagttcggggcggcagacgacacgcctcgacagccgcgcggtcgctgcgcctgatgcccaccccttccgagatcggcaccgtcacccggcccccatcctccgactcactcagttgtcgcgcattctgccgcaacatgatccctctgcgcgccacgcaatgccggccggccagccgcacgcgcacgaggctgtcgacgacggcgccgcgaacctctcgtcctctccaactgtcgacaaccggtccacttgccatagccgctccccgc

SEQ ID NO: 276870 - DNA, 425 bp, Zea mays
catcgtggcgagggcaaccaagctgagcgctactcgcagtcgcagttgttgcctggccagcatgcagctctaactcaccccgtgcagcagacgccgaggcgtggcaggtagctaggaaggagggccggagggaagggaagggcaggccatggcgctggaagccgtggtgttcccgaaggagcacctagcgggcactgccaaggcgcgctcggcgtcgtcactggcctgcggcttccgcaccgaggaggtcgaggacaacggcggtgtggttctgcaaggagaggccggcgcggccaccacgtgggagtactgggacgcggcgctctgcccgtgctccactgcacctgctggtgccgtggaggagtgctggtacgtgcggcaccggctttccgcgtccccaccggcgacggcgcccttcgccgtcg

SEQ ID NO: 276871 - DNA, 635 bp, Zea mays
  unsure (1)..(635): unsure at all n locations
ctcgtctctcttcttcgccacgggcctcgtaagaataaccctaagaaccatgcctcagggcggaagcccttccaagccgggccggaatctggccaccccaacaaccgccccgaccgctgctcctaccgccatcccggccattcctgccatgccgaatccgccggtcgtgcccaccgtgcccgcggccacccttccaccgatacccgccgtgccgacgtcgacggtgcctgcgctgggcgtgccaccgatccccgcgttacccaagatccccgcgatgccccctatgccggctgtacccgcattgccaaaggtgacggtgacgctgccgccgccgatgcccgccgtcgtcgtccctaaggttggcgccttgccgccgatgcccgccgtgcctaagttgacactgccgccgatgccctcgatcccgggcgtgcccatgccgtttgtggcgccgcctccttcggcataattcaattcaccaatgtctgatagagtgtccatatatctgagtattcgagttgatctcactctcgatcaatccatgtgtacgatcttcgctgggcacgcatgctgcagatttacttaattggtgcatgtatgtgattctatatacttctataattgntgntttttttgac

SEQ ID NO: 276872 - DNA, 303 bp, Zea mays
caagcgccttcaaactttcagaacacgcacttctgctagctagtagccatggcttccgcagtctcgtctctcttcttcgccacggcgctcgtgatgatgacgctcatgatcatgctcgagggcagcaccacatgccacgccgcgcggcatcttgccgacacgacgaccgccccgaccgctgctcctaccgccatcccggccattcctgccatgccgaagccgccggtcgtgcccaccgtgcccgcgtccacccttccaccgatacccgccgtgccgacgtcgacggtgcctgcgctgggcgtg

SEQ ID NO: 276873 - DNA, 796 bp, Zea mays
tcggaatttctttcccaagctcttgaagctaaggatttgttgacagaaagcatcatatttgagcagtacacagacaacaaccttcaaactggatcgcaaattcacattgaaaatccagaatctatagatatctctgatgagcggcatcagaaggcagagcagtcagagattgatgaattgaagcaaagattgtgtgagcttactgaggccaaaactcaactagagacccacaatcagaagctgcaagaggaaagcatgtacgcaaaaggcctggcctcggctgcaggtgtggaactgaaagcactgtctggggaggtcaccaaactcatgaaccacaacgagaggctcgcgaacgatttggctttggcaagaaattcaacacgagtgagaagtggtcatagggttgggaggagggatagctatactaaacggcttgagccagcgagtagaagagatgttcatgctagcagtgagagggaatcagctctggaggtcatgcttatggcgaaagaccaaagagaggcggcgcgccaaaagaaaatcgaggagtccaagcagacggaagccttcctggaaggagagcttgcgaacatgtgggttcttgtggcgaaactgaagaaaggtcaggtaattgaccaagatgatgtctcgatgccgtacccaatggatcgtgattcatgaccctagacaatgacaaaaacaattattgaatcggctatgcttcggcattgcactttccttgtctgtggactgtggtggtttgcaccagtgtgaatccgtgtatctatattgccgg

SEQ ID NO: 276874 - DNA, 462 bp, Zea mays
acggctacgaaaatagtagcgctgcgcggccggttcgagatactgtccatgtccggggctggcctgccggcgccggcgccgccgggggccacggggctcaccgtgtacctggcgggggggcaggggcaggtggtgggcgggagcgtcatgggcggagctcatcgcgtcgggccccgtcatggtgatcgccgccacgttcggcaacgccacctacgagaggctgccgctggaccaggcagacgccgaggagggcgccgtgctgtccggctcgtccgagggcgccaccgcgcagcagctggagcagcagcagagcagcgggggtcccgtcgtgccgtcgtccatgtacgccgtcccgcagacgccgtcgtacccgcacgacatggtcgggcagtgggggcacgcggctgtgacgcgcccaccgtcgacgtccgtctagctagcgctagatgcacatgcaccagc

SEQ ID NO: 276875 - DNA, 516 bp, Zea mays
ggccggagaacgtgacggcggacgacttcttctccaacgcgctatcgagcccgggcagcacgggcaacgcgctggggtcggcggtgacgcggacggacgtgcggacgctgccggggctcaacacgctgggcgtgtcggtgtcgcgcatcgactacgcgccgtggggcgtgaacccgccgcacgtgcacccgcgcgccaccgaggtcatcttcgtcctccagggctcgctcgacgtcggcttcgtcgatgccaccgccaccgccaccggcggcagccgcctgtacgcgcgcgccgtcggcgccggcgaggtcttcgtcttcccccggtgcctcgtccactaccagaggaacagcggtggcagccccgccgccgtcctctccgccttcgacagccagctgcccggcacgcagcccgtcgccgaagccctcttcggcgcctcgccgacggtgcccaccgacgtgctcgccaggagcttccaggtcgacggaggactcgtggaggccatcaggtccaact

SEQ ID NO: 276876 - DNA, 795 bp, Zea mays
  unsure (1)..(795): unsure at all n locations
ccagacctactcacggttttacattggagnacactcctccagaggcagtccttaattcaaactggtttcaaggatcaagaagtgcaaggcttaagtatgacatctggagcgttggagttgtcatgctagagttgatgatgggttctccccatgtttttcagataagtgaccgtacacgcattttaatggatcagcatctcggagggtggagtgaacaaacaaaggagcttgcttacaagttgaggtcatacatggagttgtccattttagtcccagggatttcctcgcaacatcatggcagtggtagcccagaacagggtcaatttgggttagctttcttggaaatgctctgaagaatcatttgcacatcaagttgaagatcagagatcctctcaagattggttttcctaatttatgggcgttgcgacttgcacgccagctacttgtgtggcatcctgaggatcggctaagtgtcgatgaagcactaaatcatccttacttccaggagccaatgtaatgtaaggagaggagattagtgataactaaccgacgaatcttcagctcagtcctttcaagttcaagccgcatgcatttggttagaggaattcatgaatcgtttgtaatttaccatcctagctgtgtcataagatgttgtgaatataacatgaagtaaaagatagtagcataagtgaaattacatgtgtaacgactttgcccttacaagctacagcattaggccagactgcctttggttgcaatcactaatgaggaagaacgttatctatttgttaatgt

SEQ ID NO: 276877 - DNA, 463 bp, Zea mays
gcgatacccggttgaaattcattatacaaaagctccagaggctgattacatagatgcagcaattgtcactgttttacagatacatggtacccgatcccctggcgatatcctggtgtttctcacaggtcaggaggaaattgaaacagttgatgaaatccttaaacacagaacaaggggcttaggcaccaaaatctcagaattaattatatgtcctatttatgcaaatctgcctaccgagcttcaagctaagatatttgagccaacccctgagggtgcccgtaaggtggttctggccactaatatagcagagacttcattaaccattgatggtataaaaatatgttattgatcctggcttttgtaagatcaaatcatacaatccccgcacaggaatggaatctctacttattaatcccatctcaaaagcttcggcaaaccagagggctggaagatctggacgcac

SEQ ID NO: 276878 - DNA, 807 bp, Zea mays
  unsure (1)..(807): unsure at all n locations
cccacgcgttttcggacgcgtgggatttgatccgccgcgcgcggcccgatcgacgagcgagcctcattcacactccgatctagctagctagctagtttaggaaagagaaatctgaccacagggatgcggtggcggctgcagccggcgccggcgccggcgctgctcctcgtcctggccaccatcgccgccgtcgtggtggtgcgagcggagccccaggtgccgtgctacttcgtgttcggggactccctcgtggacaacggcaacaacaacgacatcgcgtcgctggcgcgggccaactacccgccctacggcatcgacttcgccgccggccccaccggccgtttcagcaatggcctcaccaccgtcgacgctatatctcggcttctgggcttcgacgattacatccccgcgtacgctggcgcgagcggcgatcagctcctcaccggcgtcaacttcgcttccgccgcagccgggatccgtgacgagaccggccagcaactggggcaacggatcagcttcggcgggcagctccagaactaccaggcggcggtgcagcagctggtgagcatcctgggcgacgaggactccgcggccagccacctgagccagtgcatcttcacggtgggcatgggcagcaacgactacctcaacaactacttcatgccggcggtctactccaccagccagcagtacacgccggagcagtacgccgacgtgctcatcaaccagtactcgcagcagctccggaccctgtacagctacngggccaggaaggtggcgctcatgggcgtggggcaggtcgggtgc

SEQ ID NO: 276879 - DNA, 740 bp, Zea mays
cccacgtgtccttccacgcgtccgcttatcctatctccatcgccccatttcctatcctcccagccgatcccctctccctcacggcgccctctcccatggccgtcggccctccccgccatggacgtcgctcttccttcctacaccgccatggcagtgcctccctgcagcagtccggtgaccgggccctccccttcccacgtcatgctggtgccatgtcttctccctcaccggccaacctcgccagccaccaggaaggtgtctccctctcggcagctcccatggccaccatcagccctagctgcgcttgccctggttccagcagctcgacgccagcccctctcaatcttccatcgctgccgctcagcttgtcccagattcgtggatgttgacaattggaaatccatgtggcaagtaaatgattttggaactgggggcaggtcagagtctggagcatgttcattccacgtatgttggtttcgtgacttgttttcggtgatttcagatctgaatggctgacattttgtctccatcgatatttaatagtaaagcaaggtttgtgacctggatttattgggtgctgtagacattggaagtggattttcctcaattggagatattgacaaattggaaaaaaatgtgacttgacctgtgctgcaacaaccttaaactaagaggggcttctaattcttcatctctaccaacaggactctactgttactttttaaaccaataactttttc

SEQ ID NO: 276880 - DNA, 342 bp, Zea mays
ccctctctctatcctcccagccgatcccctctccctcacggcgccctctcccatggccgtcggccctccccgccatggacgtcgctcttccttcctacagtacgtcagcgacctcgtctccctcccttcccgtggacgcctgctgcaggagttgttcctcccctgcgctcgcctaagatggccggactcgcccatgatggctttcccctgtcgatgctgttctttagccgccatggcagtgcctccctgcagcagtccggtgaccgggccctccccttcccacgtcatgctggtgccatgtcttctccctcaccggccaacttggccagccaccaggaggtg

SEQ ID NO: 276881 - DNA, 395 bp, Zea mays
atggtgcattgtgctaaatgcaatatcgaatggaacaaaaacgatggcattttcttggttgaagtgaacaggcgtttgaggcctggcggatatgttgtatggacatcgaatttgaatacacatagggccttgcgagacaaagaaaaccaaaagaaatggacagccattcgtgactacgctgagggcctttgttgggagatgctgtcacaacaagatgagacaattgtatggaaaaagacgaataaaagggaatgttacaaatcgagaaaatctgggcctgagctatgtggccatgatccagaatcaccatactaccaaccactagacccctgcatatcgggcacaagaagtcagcggtggatccccattgaatatcgtaccacctggccatctca

SEQ ID NO: 276882 - DNA, 450 bp, Zea mays
cagaaatgcacattacccctccgtctgaacatgggaatttctctagcttcattagcagtttgtcaactaaggatgatcatagcactgcgtcaccatctggaaatatcattgttgacattcagaacaagggagctgagaacattgttccttccactgatccatcacttgcttcagatgttggtgagagctcccgttcagtgctctatccagttgatacgactactgtgaactcagtgtcatccacgtctacagtggctggtaccccagttgaactttctgggtatcaggagggtgctccagtggtatgttcttcatgtttaacagctgatgttcagaacaatgtgacatctgatatgccaggtgcttcggataacgaggtgcttcctccagaacctgctgatctctttttgcagtctgaaagaatcactgcactagctgtatgtggttcag

SEQ ID NO: 276883 - DNA, 408 bp, Zea mays
ttttccttttgctcggaacgcacacaccgcccggggtcccgtccccgatctccgatcccctcgtcgatccaaagatgcagagcttcgtcaagactctcactggaaagactatcaccctcgaggtggagtcctctgacaccattgacaacgtcaaggccaagatccaggacaaggaaggcattcccccggaccagcagcggctcatcttcgctggcaagcagctcgaggacgggcgcacacttgccgactacaacatccagaaggagagcaccctccaccttgttctccgcctcaggggaggcatgcagatcttcgtcaagaccctcactggaaagactatcaccctcgaggtggagtcttctgacaccatcgacaacgtcaagggcaagatccaggacatggagggca

SEQ ID NO: 276884 - DNA, 567 bp, Zea mays
  unsure (1)..(567): unsure at all n locations
cccacgcgttcganaaagaacaacaacatgtgtaggtactgctgtggttatagtcatgctnaggacgacattcctcatggtgccaataatgctgctggtgtggaagagccactggatcctcgtggtgaccttcatcgtgctgtcgctgatggtggaggttccctacttcgtggcctgcatactgaagatcgaccagggcggctgggtcccgctcgtcgtggcgacggccttcttcctcgtcatgtacgtgtggcacttctgcacggtgaagcggtacgagttcgagatgcacagcaaggtgtccatggcgtggatcctggggctgggctcgagcctgggcctggtgagggtcccagggatcggcttcgtgtacacggagctggcgagcggcgtgccgcacatcttctcccacttcatcaccaacctccccgcgatccactcggtggtggtgttcgtctgcgtcaagtacctccccgtgtacaccgtgccgacggaggagcggttcctggtgcggaggatcgggcccaggggcttccacatgttccggtgcgtggcgaggtacgggta

SEQ ID NO: 276885 - DNA, 603 bp, Zea mays
agttcttcaccaagcctaagaactacaagggtactatctcatttgctgctggcttttttctggttcttattgggtggccctttcttggcatgctcttagaagcatatggctttgttgtactcttcagtggattttggccaacccttgctgttttcctccaaaggattcctatcattggatggatttttcaacaaccgtttgtcacatcgttccttgaccgctacagaggaaaacgtgttccggtttagcttagtcctgctatatttcaacatacttccctcacaaatatcatgcggttatggatatgttccgtccttgcctttttctttaacttgtttagttggttgtaggaattttgttgttgttgtgtaaattacccctcatccgtggttttccacagaccagaatgcattttccccgataatacattgaagaaagttctcatgcaagcctctttgtgggggaaaatgaagtcttagggatgttctgaaagtagtgactacccatcatgtcttttgtaacattacttaatgtaagcatatctgatataggtatgcaaaggctccaatagcttccgtctgctgtatgggaaagaaaggagac

SEQ ID NO: 276886 - DNA, 638 bp, Zea mays
tccatgggtttgaggccttggccggccagggtttcacctttggccccctgttttccagtttggaggacattcaaaggctgggaccttctgccatcgagctggatgtctgtggcatgatggtgaccctcctacgccagcatgccctggctttgggggaattaaccgcggcacgactgcagctgggaaactatctttgcctatctttgggctggcaccttacaaattacgtgcctccatttggacatctgacaaaactcaagaacgggacctcgtcacctctctgatgcaggaggctgacagctggctccgcagaatacaagtagaccatccggatttccggtttttcgtatcccatttcagtacaacgtggagatgacccgtggctgcaaatggttcatttagtatgaatatggcatagagacacctgagtgcccttttgtaacgggggggaatgtatgagttataagcctgcgtgcataactttttctcttgtctccagtaagctgtatcttttgtaggtttgttttgttgtggggtgaaagtaaagatggatggtggaaaaagcaaaattggaggcattgtggaactgaagtgaaatatggggaaaaaagaataaagatttccagttattagagatg

SEQ ID NO: 276887 - DNA, 955 bp, Zea mays
acgacctcgtccaaaccgtcggtggcgtccaccgcggctactgcagcagcgggtgaggtgaatgtggccgtggcggaggcggaggctgggaatttggagaggttcctcgactccacgacgccctctgtgaccgctcagttcttgcccatgtcaagcctaaggatgcggcgaggtggtgatgctatggattcacgaccttatttctgcctgggagatctttgggaatcattcagggaatggagtgcttatggggccggtgttccacttgtgctaaatggcagtgactctgtgattcagtattatgtgccatatctttctgctatccaactatttgcagatccatcaagacctgcttcaagaaacaggcgtcctggggatgaaagtgatggggactctatggatactagcagtgagagcagcattgagaatgacgttgagcggctaagagtctcatcatcactggaaggtacacatcgactggaaaatggtggcatacgaagtgatgatggtaaaggtgatgcatcttcaagctttccaatatttgagtatatggagagggatcctccatatggtagagagcctctgacagacaaggcatcaactcttgcacatagatttccagctctgaagacattcaaaagctgtgatcttctgccatcgagctggatgtctgttgcatggtaccccatatatagaattccaacagggccaacattgaaggatctcgatgcctgttttttgacattccattgcctagcaacaccttgcaaggattgtgaccctcctacgccagcatgccctggctttgggggaattaaccgcggcacgactgcagctgggaaactatctttgccaatctttgggctggcaccttacaaattacgtgcctccatttggacatctgacaaaacccaagaacgggaccgcgtcacctctctgatgcaggaggctgaca

SEQ ID NO: 276888 - DNA, 424 bp, Zea mays
gttccttctattgaacttcttgatcgtgtggctggccgtctttctcgtgagccaaagtcatgggaccaggcagttttcaacgaggagctgttcttcccgtcccatcctggttatgaaggcctccatgcatccaggagaaccatggatttttatcttttcatgaacagcaaagtcctcttcaagacagtgaggaaagacgccgggctcaagaagctaaagccagtgattgtgcatttgaactaccaccctaacaaactagagcgaatgaaagcggttatcgagttctatgtcaacggcaaacaagatgcactggatcatttccctgacgggtcagaatgaggaaattacagatagttgccggtaaagaaacctataccctctggatcctactccattttggggtgtctggccgttggatctacat

SEQ ID NO: 276889 - DNA, 438 bp, Zea mays
  unsure (1)..(438): unsure at all n locations
gaccgctaatgtccgtccccggacaggtgatcaacctccgtataangaagatacattagcaaaatacacaataaatccagcaatggtgaacgggttttcagactttgttggttctgttgaggtgggaaaattagctgaccttgttctttggaaaccatctttcttcggcgctaaaccagaactggttgtaaagggaggtgcaattgcatgggctaacatgggtgatcccaatgctagcattccaacacctgaacctgttgtgatgcgacctatgtttggtgcatttggaaaggctggaagttccaattcaattgcatttgtgagcaaggctgctaaagaagctggtgtcgcaacggagtacagactagaaaagagggtggaagctgtaggccgtgttcgaggcctgacaaagcttgacatgaagctcaacgacgccct

SEQ ID NO: 276890 - DNA, 880 bp, Zea mays
ttctttccacgcgtccgggtgagccgactgacaatgctgctaggttctacaaatggttcactgagggaaatgagaggggtgtctggctaaatgactttgagtatgctgtgtttggtctgggcaaccgacagtatgagcatttcaacaaggttgccaaggtagtcgatgagatcctgacagaacaaggtggaaagcgccttgttccagttggtcttggggacgatgaccaatgcattgaggatgacttcaatgcatggaaagaagctctctggccagagttggatcgattacttcgggatgaaaatgatgcctctccaggccctacatacacagctgcaattcctgaataccgggttgaattcatcaaacctgaggaggcagctcatttggagagaaacttcagccttgcaaatggccatgcagtccatgatgcccagcatccttgccaggctaatgtggtcgtgcggcaggaactccacacccctgcttctgatcgttcatgcactcatttggagttcgacattgctgcaactggtctcacgtatgaaactggcgaccatgttggtgtatacaccgagaactgccctgaggttgtagaggaggcagagaggttgttgggctactcgccagacacatttttcaccatccatgcagacaaaggggatggcacttcactaagtggcagttctcttgctcctccgttcccctccccaatcacagtgaggaatgcacttgctagatatgccggccttctaaattcaccgaagaaggcttctctggttgcattagcttcttacgcttcagatcctgctgaagctgatcgtctgatgttcttggcctctgctgctggcaaggatgagtatgcccaatgggttgtggc

SEQ ID NO: 276891 - DNA, 358 bp, Zea mays
gcaattctgcatcatatctgtctgcaagcccgggttcagaaatgcgcaaaaatctgcgattgcagtcgctaaaaagaatgcgcaaaactctttgtacgatggtgcgctgtcgaatctctctctgctgtgcacacgcgcgcaggagcatccgggcatgtcgaagggcgacaagaagcggctgtgcgcgctgatggactgcaggaagctgacggcggacgcgagcgagcacgccgtgcagaacgagcggctgcccctgcgcgtggtggtacaggtcctcttcttcgagcaggtccggcagtcggcggcggcggccgctgcctctgccgtccccgcgcgctcgctcatcctgcccagggac

SEQ ID NO: 276892 - DNA, 564 bp, Zea mays
gttggagccttatactctgcatttctggctatgcatatagcggccggtgttcctagtgtgctgtcagcacttgctttggcattcaacacaaatctgttcggtgcaatcactcattatagtagtgggcaggctgcagtatacttcggagccgggtatatggagcttccagatgttttcaggctgggttttataacagccttggctaacacgttaatctggggagttgttggaaccatctggtggaaatttttgggtctgtactgacagtggcagacatgtggttgaccaaaattttcatttggcactggtcgaattgctcttgctcattgttaggaagggcagaatatctagttaactaccgttgctccctccggtcagctatcgctgaggtgatcagcagttagcaattacgcctgtgtcgtgcagttccttgttttctctttggttcccgagaagtccttgggcaatttttctgcgggatgttcctctctgatgcttatatacagaccgctctgtaaaagttgcgcggctgcactgaaagcagtgtacagcgttgcggccctc

SEQ ID NO: 276893 - DNA, 438 bp, Zea mays
gcgcggacgcgtgggcgcgagcggccgccctttttttttttttttgagatcgagagaggttttgtttaagaaaaaaaaagtataggaacaggtgatgtgaggtgagtgacggggaagagtgaagctagtgggccgccgccgtgccgtagcaaaactcgttccggagggcagaactaccgccgcgcacgacgaagtgggcgagcgaccgcgtgctggtctcgacgacgcggttctcctcgcacaggaactccctggagcacgcccgctccacctcccgctcgtagtcgtgcaccaggacgtccgtcttcacgccctccccggcccgcgtccgcgccagcacccccgccgtgaatatcgccgacatcctgcccggcgacgaagccgtgtacccgcgcgggccgtcgacgaggatgacgtcccaggagacgtcgtagagct

SEQ ID NO: 276894 - DNA, 646 bp, Zea mays
cattaagcatggcagagacagtgatgcaagctcctctgagaatttccattgggcctgagtgatcgaccgaggctcagaagattgaagaaagaaccttgaagcagcttactctaagacctattacacctccagcaagcaaatcttctgctcttagttctttgaaaataaaaggtacaaggcttggagatcatcctactggtcctagtaagacctcacaactattaaaaatacagtcagccaacacttcttctagagctccagttaaagcagatgtttcaaagctctctcagccaggaagcttccaagttctcagtcgagagcaaaacggtactgcacacaccgccaaagactgtcctgtgaaacctgtgagtccttcaactcctttggcgtcgctggaaacacagaaaaaaacagtggcgagccaaaagttgaagtttggcaccaatgagagtcttctgcccctgcaaggtccatctcgtgacagaaagtcaaatgcaagagacaaggttagattctttgagatgctacggaccaagtcttcaaatggttcaagcactgcctttgagccaggaagccaaccatccccatccagcttagttgatgtgaagcagattcttctcttaatcttggacatgacttccacgtg

SEQ ID NO: 276895 - DNA, 966 bp, Zea mays
gcacccggcacaacgtgatcctgggcatcgcccgcggcctgctgtacctccacgaggactcgctgctgaaggtggtccaccgggacctcaaggccagcaacgtgctgctcgaccacaagatgagcccaaagatctccgacttcggcatggccaagatcttcgaggacgactccgacgcgattaacacgggccgcgtcgtcgggacctacgggtacatggcgcccgagttcgcgttggacggcgtcttctcggtgaagtcggacgtgttcagcttcggggtcctcctgctggagatcttgagcgggcaacggaacggcgccttgtacctcgaggaacaccagcagtccctcatccaagacgcatggaagctgtggagtgaagaccgcgcggccgagttcatggaccagtcgctggggcggtcctactccaaggacgaggcgtggcggtgctaccacgtcggcctgctctgcgtgcaggaggaccccgacgtccgcccgaccatgtccaacgtcctgctcatgctcatcagcgaccacaccaagttacccgagccagccatgccgcccttgttcgcgcggctcaggaacatctccttgctgcgccgccactcaccaccaaaaccgagtccaccacgtctccgctgtcgatcaacgacgtctccatcaccatgatcgaaccgcgatgagctcatgcgttttgtacttctgacaactgagggagaggcttcgagtgtaaatttataagactgcaatcgttcagaatgactactcctatgtactagtaagtttttttttatgctgtgcacaagtgtgggatttaactactagactagaacatgcggcgcccgtaatcgggtcataacagatttttttttatgtttatgcattctcctatgtgatccaatggactaaaatgtgtcaccactgctagcaaagaccatataactattttaattagtttgtatcc

SEQ ID NO: 276896 - DNA, 1407 bp, Zea mays
gcggaccggccggaattccttttcgtcccacgcggttgttccccttccgggacctcgagcgcgaccggcaggctgttctcatggaccaaaaccacatgtccccagtggacgacctcggcatgtttcgcagcggcagcgctccccccaccgtcgagggatctcgcacggccattggcgcactcttctctggtccaccgcttcacgccaacagccttggcgccggcggcggcagcggtgggactgcttctggccttgacgtgctcactgaggaggagttacggtcacacccggcgtatctgtcgcactactattctaatgagcacctcaacccaaggcttccgccaccaatggtctccaaagaggactggcgtgcggcgcagcggttccaggctgtgtctggaggtatcggggataggaggaggaagcctgcggaggtcgggagtggaaactcgctgttctcggtgcagccaggggcgcgtggagagaaggcgctgctgaatcatagagtggggaggggtgaaaggaatgggctcgcacgacagcagtcgtcggagtggctcgggacaggcgctgatgggctcatcggcttgtcagatgtcagtggccatggatcacggcgcaagagctttgctgatgcattgcaggaaaatattagccgcaccgctgctacagccggtcacctttcacgttctaatagccgcaatgctcttgagggcccaactccaatcaggtcatctgattcacccaagccacaactgcagcatagatcagaatccatgaatggcctgcgatctggatccacttcacccagtttggtcagggtgcaaagtcttggttcttcaatgtctcatacctttgcttcagcagtaggctcatctatctcaagaagcaccacccctgacccccagctgatacgtagaactccaagtccttgccttcctccagttggagttcggatggggagttctgataaaaaaagttgaagctgcagctgttgcttcacttaatcatgataatgctgacattgcggcaactctgtctagcttaaacctatctggaaataagatgtcaattgtggaaaatcaagctcagaatcatgtttaccagaactttggtgaccagacagatgtgctctttaatgtaccaaaggaacacaggcaattttcaccacaaattttaagtcaaaataccgatgatggctcgtttaatgcccctgaatatgtagtttttccaaatggggggagcaacttcagtaattcacatgctagtaagctggcatctcatagcattagcaagttccctatgcagccaccacacggttatgccaacaagaaaggatctttgatgagctcacctggatcagattctcactaccataacttgaatggtgatagccatggcattgat

SEQ ID NO: 276897 - DNA, 398 bp, Zea mays
ctgccgccttcccttcgcgtctcctcgctccggccgcagcagccgccgccgccctccaggcgcaaaattacccaatccatcatccccgaaccctaaataaatcctcgatcggccgcgcgcgggaatcaacggatgggaccgcggccggcggctccgtagcggattggacgcgctcggttcgcgggggccgcggttcggctgccgggtggcgcccgcttctagagggaaaccaagaaggaaggaaggagattggaataaagacaggcactgcaacgatggctccatctcaagcggcggcagcggctggccccacctttgaggacctcgagcgcgacctgcaggcagttctcatggaccaaaaccacatgtgcacagtggacgacctcggcatgtttcgc

SEQ ID NO: 276898 - DNA, 395 bp, Zea mays
ctgatggtggatccactggccgccggttttctccagctggagagccattcgtgggcgtaggacgagagagagaggatcggagcagtacgcggcggcggcggcgtgtgggagatggcgcgcgagaggcgggagatacggcggatagagagcgcggcggcgcggcaggtgaccttctccaagcgccggcgcgggctgttcaagaaggcggaggagctcgccgtgctgtgcgacgccgacgtcgcgctcgtcgtgttctccgccaccggcaggctctcgcagttcgcgagctccagtgtgaatgacatcgttgacaagtacagtacacattctaagaatctggggaaatcacattagcagccttctaatgatttgaatgtagagcagagcaatacagc

SEQ ID NO: 276899 - DNA, 350 bp, Zea mays
caaattttcaggaacatgggcacactggagaaatatggtttggtgcagatgtaatggacacagttgctgtttggacgaaaagggtgtgtaacattattgaaggcaagattccatctggtcaagacaacatcaaaagtgaagtcaatgaaaatttattctccaactaccctgttcttgatgttggaactggaaatggtcttcttttgcaagcattggctaagcaggggtttacagacttaactggaacagattacagtaaaggagctgttgaacttgcaagaaacctagctgctcgtgatggcttctcttcaataaactttttggttgatgatgtacttgagacaagttag

SEQ ID NO: 276900 - DNA, 475 bp, Zea mays
aattctcggtcgaggacgcgtcacgcgtgccccgacgcgtgggtgaaaaacgacctctttttgatgtcaagacatgccaaattgcgtgcaggcgtccaaagcaaacagatcactgtacctggttatattcctttgaggaacaccctttgaccagtgaagtgggaatatcttctccagctttatatgatggattggttgagatcaaacaaccaaatgacattcctgcaattaatggtgccacaacctgcagtggtagttcagtgatcccttgcggtaatcatgatcaatcaattttagtggcaagcttacacatacctgattgggcgacttccttccctggttattttcaagactgtgggccagttgttacatatagccatgttgatgacattggttcgcctagaaagggtgtgccaattggacctgagcaccatgctgacattccagaattgatgcccctaaactctatgattgt

SEQ ID NO: 276901 - DNA, 527 bp, Zea mays
gccccctgctcggtccatgtccatgcagccagagatgtcgagggggaacgtgcatccgagcatgccggatttcgatgaactcgctgcccgcatcagtgctctaaggaacgcgtgagctgtgccccaaaactgaactgattgcccttcagttcagcgacgcttctgttgtttcaggaacaaacctgtaccatggaatctgaaacctggtggtgcctgcgagtcacggggggataagagaacacttgaggagatgtaactggtctgttttcgcagcaattttttttgtgtgtcttggtggtataattgttctcgtgttgctctgagtgtgtcttggtggtagggttgttaagatgtgccaattcatagggataccatactaccataccgatagccagctacagcgatctggatgtggttgtttgttgtactcatagaacagatactgttggtgtgtaagatgtccattgatgctgctacgatgataaagaaattccttcttttattataagttttccctccatttgctg

SEQ ID NO: 276902 - DNA, 425 bp, Zea mays
  unsure (1)..(425): unsure at all n locations
aagctccgcagacctcactcctcagagagagccccaagccaagatctgcgcgggcaagncagcaggcgaagcaccggctcccatggccgtggacctgatgggctgctacgccccgcgccgcgccaacgaccagctcgccgccgccggcgcctcctgtcgtccacggtccgcccgtcagcgtggcgcagccgccgcaaagcctgacgctggatttcacgaagccgaacctggccgtgtcggccgccacgtccgtcacctccacgtccttcttctcgtcggtcacggccggcgagggcagcgtctccaagggccggagcctcatgtcctccgggaagccgccgctgtctggccacaagcggaagccctgcgccggcgcccactccgaggccaccaccaacggcagccgttgccactgctccaagaga

SEQ ID NO: 276903 - DNA, 360 bp, Zea mays
cgtcgatgcccctgccgtggtagagctgatgatgcagaggttgatgactgatgactagcagcaataccagttaattggcagcgccaccattaagacaatttccagttcttaagggagaaacaaatgttggaacatggaagtgcatttgttgttcaccagaaatttggtcgtcttgtcatcaaaacaccagaattgcattattgcacgctagctactcatttctttggttgttatgtgcgtgcttggtgtttatgtacagttttatgtgcttgataatgggcacatggccagttcgacaatgtcatacagttatactacactagtacattgcttatgcttgtgagagaacataattaagtt

SEQ ID NO: 276904 - DNA, 357 bp, Zea mays
  unsure (1)..(357): unsure at all n locations
ccttccacctncgatggccacaacggcgacaacgatggcgccggtgacggcgccggtggccacagccaacctcgaacctacaccaacacctctgcatccacgtcctgccgcgccacctcatctccgggcgctttccaccttggcccccgtcaagtcagaggctcctcccaccccctcgtcttctaccgccatcaccgccgcagccggagcggaggatccatcctacatcatcaccgtccctagttattcagcgtggttctcgttcgactccatccacgacacggagcgccgcctcctgccggagttcttcgtgggggaggccccgcggcgtcaggtgcgnggccgcacgcgtacagt

SEQ ID NO: 276905 - DNA, 384 bp, Zea mays
ccctcaccctggcctacgacaccatcaagaatttccggttcgggtgcggcgagaagaaccgtgggctgttcggtagggcggcggagctgctgggcctcggccgcgggaagacgtcgctgccggtgcaggcgtacgacaagtacggcggcgtgttcgcgtactgcctcccggcgacgtcggccgggacggggttcctggacctggggccgggcgcgccggcggcgaacgcgcgcctgacgccgatgctggtggacaggggcccgacgttctactacgtggagatgacgggcatcaaggtgggcgggcacgtgctgcccatcccgggctccgtcttctccaccgccggcacgctggtggactccggcacggtgatcacgcggctcc

SEQ ID NO: 276906 - DNA, 855 bp, Zea mays
tacatcagatctctcggtcagcttgccacttgaggcatactccggagcaaggtacccaacaagttccccatcactcgcgatagttacatgcagtgcaaggatagctatggatgcttgcactcatgtaactacacgagtgcaagcatccatagctatccttgcaagaccaaaatcagcaaccagtgcttcgaagttattatccagcaaaatattagaggactttatatctctgtggattattctggggtgacaatcttcatgaagataggctattccgcgtgctgaaccagccgcaattttaaccctagatggccattccaagactggtactccaagtccatgaagatggtagtgaagcgtgttgttgggcacaaaatcatagacaagcaatctctgctcatctgaaatgcaataccctacaagagatactagatggcgatgatgcacacgactgataatatccacctcagcatggaactcgcgttccccctgcccaccaccatctttcagtttcttaaccgcaaactctccatcagccaagcaacccttatacactgacccgaacccaccttccccaagcaggttctgtgcagagaagccatttgtgacctgatacaattcctcataagtgaagaaccgacaattgcccatgctgaactctggcattgaatctttcgattcaggactcccggcactgaagtttgttttggccgaataccctaacacttgtgtaggagtcgaggccggtgaaggcattacaaaaccagcatggtatccatgcactctcctccgtttcttcttgtaccaaaatgctgctccaaccaaactaagcacaataatggcaacgactaccca

SEQ ID NO: 276907 - DNA, 695 bp, Zea mays
caattgtcggttcttcacttatgaggaattgtatcagatcacaaattgcttctcatcacagaacctgctaggggaaggtgggttcggatcagtgtataagggttgcttggctgatggaagagaggttgcggttaagaaactgaaagatggcggcgggcagggggaacgtgagttccatgctgaggtggatattatcagtcgtgtgcatcatcgccatctagtttctcttgtggggtattgcatttcagatgaccagagattgcttgtctacgattttgtgcccaacgacacacttcactatcatcttcatggacgtggagtaccagttttggagtggccagctagggttaaaattgcggctggttcggctcgtggaatagcctatcttcacgaagattgtcaacccagaataatccacagggatataaagtcctccaatatcttgctggataataactttgaagcactggttgctgattttggtcttgcaagggtagctatggatgcttgcactcatgtaaccacacgagtgatgggaactttcgggtaccttgctccagagtacgcgtcaagcggcaagttgactgagagatctgatgtattctcattcagtgtacgcctcttggagcttattactggtagaaagcctgtatacgcatcgaagccattgggtgacgagagccttgttgaatggg

SEQ ID NO: 276908 - DNA, 823 bp, Zea mays
ttcttcgtcacgttacgatccccaacttaacgccgaccggaggccggagagaccggctcagcctcgctccgccgccgccggcgaccatgtccctggcggctatcttcgtcttcctcatcgtgtccgcgctgcagctgctcgaccgctacctcgacctcgccagaaagagcggaggacttagtgatgagcagatcaaagtgcggcttgaaatcaagcaacttctcaaggaggctgatcagttgtcaacgccgtccacatttgcacaagctgctaaactcaagcgcctggctgctgccaaggagaaggaactggcaaaaatgcaggaacatgaccttaaagggaagcaatccttatacgacaaatacacaaaatttttggtggttactaaggtcataatttatgctgtgctcgttctgtgcttttggagtactcctgtaactgcagttccacaacatcttctacagcccttcggaaaaatgttttcctggagaggtgttgatactgccaccggcaatgttgtggttggaatactcccgtggctgtttttgacctctcgggtcagcaagatgctgtgccagaaactcggcttcgtgcttgtgcgtccgtagcgcctttccatgagaaagtcagcaagttgctgcacctaaacaagactgctagctttgttcttctatatctttttataatcaactgtttcacttattgtcctctatatactctatccgttcttttttatttgtcacgttttagtttaaaaattagtggacgacaaatattaacgcaggtttatgcatatgaatataccatatgaatttgctctgct

SEQ ID NO: 276909 - DNA, 685 bp, Zea mays
  unsure (1)..(685): unsure at all n locations
ctgtgtgcttcttcttcttgttcctccaagttctggtagctaattaaaggagttgggttgggctgtacagatctccgcgaccacagagcctacctcgccgaccatcctggagcttcagcagtcaccacggcgcagggtgaggaactgaggaagcagatcggcgctgcggcctacatcgagtgcagttccaaaacccagcagaacgtcaagtctgtcttcgatacggccatcaaagtggtccttcagcccccacggaggagggaggcagtgcctgccaggaagaagaacaggcgtggctccggatgctctataatgaaccttgtgtgtggcagcacatgtgctgcttagggagtctactagaacactgaaccggaagggaggtgaaggcgtgattcatggtgtgtaatgtgctgtggcaactggcaagttagtttgctatagatgaggatgactgctgcttttgttttccttggcccatctgctgtagttcgtcaggctcttcaagggctgactttttaccagactgcagtgttgtgtaagaagtttgctagacgctgtaactgtaatgttctccgctgatgtggtataactaagatacgagtaagcttgagcgtgttctgggccctgaaaaaaaaaaaaaaaaaaaaaaaaaaaaaaanaaaaaaaaaaaaaaaaagggcggccg

SEQ ID NO: 276910 - DNA, 567 bp, Zea mays
tcgcccacgcgtccgatcgaccgaccatgcactaggtcgcgcgcgtcctggacagcctcgtctgcccagcaggcccgcccccgaagcaggcgcaggcgcaggcacaggcacaggcgtcggagaagccgtccaccacggcgccgagctatgtcagcgagtacgtcggcctacgaggcggcggcggcggcagcgccctctcctgcaccaactcgtcgagcgcgtccgacgccgagctcttcatgaagtttggcgaggtgatctcgcggagcacggaatagtccaatagatcgacgatcattttgtgttacagtttacaataggtgtctggccggcgccctgtgatgtgactcgctgtaaatatgctgctgccttctcgttgggactccactaggcactagtagctatttttctccgttatgcacgtctctctctttttttttgctgggaaactcgaactgtaactaaaggaatggatttatgtgcaggctgcgtttaaaaaaaaaaaaaaaaaaaaaaaaaaaaaaaaaaaaagggcggcagctcgcgatctagaaccggacgcgtggg

SEQ ID NO: 276911 - DNA, 548 bp, Zea mays
gtgcttcttcgtgaaaccttgaaagatgctgacctcgacaaatatcgtgttgttgtcatgggtgaaggacatgaaagatcactcaacactgatgttttgtttggtatactgaagaaggttgttgcacgtagacgggattttaaactaatcgttacatctgcaaccctaaatgctgacaagttctccaagttcttcggaggtgtgcctgtattccatattccgggtcggactttcccagttaacattatgttcagcaaaacaccatgtgaggactatgtggaagctgcagtgaagcaggccatgactatccacataaccagcggccttggtgatatcctaatcttcatgactgggcaggaagaaattgaggctacctgctatgcgcttgctgaacgcatggaacagttaatatcgtcatccaccaagactatccccaagctagagattctgcccatctactcacagttgcctgctgacttgcaagccaagatttttcagaaggctgaagagggcgctcgcaagtgtattgttgctaccaatattgctga

SEQ ID NO: 276912 - DNA, 1428 bp, Zea mays
tggacgcgtgggatgaacactccacaacctagcaaaatagaggacccacaaggaaacaaccaagcacatacgctttcccatttgtcaaacatgatgcaagcaaatcctttgagcactagcagcctattggcgtcaaatcaaaatcatccatctcttcatggcttagagtttgatttgccttatcttgaagcaaaatataacgcaggcacgactacaaatcctagaccagccatatccatgcaggaggccctgaaagcaggggttttctccaacgctcggtctacgcagtctcttccaagtactagcattccgacggggcatcctctccctcagcaattagcacatcacccttactctcagccgactttagcacccatcacacatttcccaaatatcgttggctatccgccgtatttgccacaaaactatgctgcttacctatcttcgggcaccttccagcaagcatacccgagcaatggagcattccatcagtctgctgccgctgctttgctcgcatctggtatgaagtactcgactccagagtataagaacaacctgtctgccacaggcttacaacagcaacatcagccacaaccacaaccactttcatcagtcatctctggttatggaggctttggaagctcaagtaatatacaaggaaattttacccttagtcagagtaccggctctgcatcagctcttgggtttgatgaagcattgagcagacagtacaaagacaccagtcaatacatggctctccagcagggcgacaactctggaatgtgggttcatggctctggttcaagagcggcgacgcttccgcctaaccacttttatggttaccagggacagagtcagctgggtggctttggtcaggcgcacagcaacagccttcccaattcggaggccacgggtacccgactttctaccagtctcagggtgggctgacacaggagcaccacccccagaaccttgctgagggcagcctgaatggcttccaggtcgcaccgtctcagccgtctcatccgagctggcagcatcagcacacctactgagcattgttctcccttgttatggtctgtctctttcgccgtcacaagccaagtttcgcgtgcttgtgcccttactcgatgcagagtaagctgctcggattttagctgagcttgtaccttcagcgctgagaagggtcccaggcatacaacagtcagagcgttttaacatgctgcgtgcgtgcgtgtgtgtgttgccagaccgatgccttgtggtttttcgatagcgagttatatgtgtggaggcgcagtcatgtattactgagacatgataacataacaaccaatcgtttcgcttgcatttttttggtcatgcactcatgcggttatcgcttcaggaagggaaaaaggagcacctctgccccagcttatggattat

SEQ ID NO: 276913 - DNA, 465 bp, Zea mays
  unsure (1)..(465): unsure at all n locations
cccacgcgtccgcgacgttccacgggctccggcggcggcaggaacgcctcccgatttcgacggcagagcgagagagcgatggcgctgactaacttcatcgtgacggtggccgtggttggcgcgggggtgcttctcttcaccaccgacatccgcaggtctggcgccctcttccgccgcaacgcgcgccagctccggcagtggctcgaggaggacacggcctccgccgcgtccaagtctgcaaaagaagcagctcaaaagaaactcgactcgacggtccccaaggagaagcaaaaggaagatagccactgattggagctgtttatatgaacggtataacccctatttgaagtcgttcaagttctgttttctacagttgctgcgatacaaacttgtagctctcaagtaaggtgcacggcaggattatgtntcccgtttaacatcngnctctgtggaacagctagctaa

SEQ ID NO: 276914 - DNA, 565 bp, Zea mays
  unsure (1)..(565): unsure at all n locations
cttatcgcgtccgggaaggtgagcggctgccttcgaaagcaagccatcactggcggctaccaaatgcaggcatgcatatagcgaacaggacaagaagcagcagaggaggaggaagaaggacaagtaggggcagagagatgaacgccatcaagaaacggttgctcgctgccaccaccatgtcctatgatcagatgctctcgccgcttttcggtgccggcgggcgatcggcgtggagagcggcccagcacggcggcggcgacgcggtgacgaggcagatactcaagtgcacgaggtggcagctcgaggagaccaccgacttcgtcacctgcccctaccactactactgcgacagctcctacccgggcgactaccccgccgccgtcggcgccctcgtcgccgccttcgccgcctactgctttctctccactctcgcgttcaccgtcctcgacctcgtgcggngcaacggtagcagcgccttctcgtcgtcgtcggccggcgtcaggggcatcaagaggaagtacctgctcccctcgggcccgttcctgctccctctggtgctgctcgc

SEQ ID NO: 276915 - DNA, 695 bp, Zea mays
gtgctacatcgctgagtcctccgacgggctcctggcgctgctctgagaactggatgtgctgggcctagcacccctccgctctgcgcctcttcctatccgcgcctccgccaccgtctgcggccgacataactcgcagcggctcgccaatggctgccaactctctcttctcgcgccagaggcggccgaaggcgacacggcgctgccggagaacatgcacaagtggaggatggtcatcgcctacgatggaacaaagttcaaaggttggcagtatcaaccatcaattccaacaatacaatattttctagaggatgcgctgatatgcatcactaagctggatcggaagaaactatgcttagtcggtgcaggcaggactgatacaggtgttcatgcatggggtcaggtttaataaacatactgcataactgtatactgaagcttaaattgatatctatcatctggtttgcgtatcctgcactgttaaatgtcaatattatgttttatatgaaatactgggggattacatacaatatttggtggtttcaggtggcacattttactacacccttcagttacagttgcctcagtagtattcattctgcaatgaatggactccttcctcctgagattcgagtcagggaaattagtgcagcacgtcctgaattccatgctcgctcatccacaaagagcaaagtcta

SEQ ID NO: 276916 - DNA, 872 bp, Zea mays
acgcggtcgccatgtacgtggaaccttctgagacggctatcctacgggtacgctagcctccaaacttgagagcgcgtctctgcagggctcgcacgtgctctttttccctcctcaccccgaattaacaatcgcgaaatcccaggtttgacctttcccccagccttgttgttccagtgggacccactacacccatgtcccttcttcctcgcacacgcgggacactgcacctgatcctctcaagccctcaacacgccaatttgaccacgtgaccgtaatcttgatccacgccctccttgcacttgcaccgcaccggtgcctatttaacccgcgctcgaacaactctctgccggcaacgcaaccaaaccgctctcgctctcggctctcggctctccaccagtctccgctctctggacgccggaaatgcagatggactcctacaactacaactacgccagtttcttccacgacgaggctccgtccttctacccgcacgttgccgtgccgccctccccggagctgcccatcggcctcattgcctcgccaggggagccggagccgcccttcgcgccgccgatgccggccgcgttccaggactacccgccgggcgccgtggccgtgggggtgggagcgccgttcgggggggccagcgtgcacgggcaggcgatcgacgcgatgggcggaggcgacgggcagcgcgagcagagcatggcaatggcggaggacggggaggagccgccgccgcggcggcggcagccggcgggaggcgccgccgtcgccgacgtcgagagcagccgcgggttccggcacatgatgcgggagcggcagcggcgcgagaagctgagccagagctacgccgacctgcacgcgctggt

SEQ ID NO: 276917 - DNA, 469 bp, Zea mays
ggcgcaccgtcgtggaggacaatacatgaatctgcagagctcctagtggcaacgaaggcagtcattgttaaagatggcatgtattggctacttctcgatgaggcttcctcctattcgtctcgagaaatcctgacgctcaacctgacagacgagaggttctcaaaaattgccatcccagatgctgtaaaaagccacaagttggaactattcgagggggaaggaaagctccgtttgttgtcgacacattccgatggatctagcaatatagtgtcagatatttgggtagcggacttggctggtgaagactggatccacttgcagactatcatccccctgacgcatctgggcataagcccgtttttccagctcaagacgaaggtcttcttcggcaaccagaagagactcctctgcgtagatcttcaggacggtacggtttcatacatcaacatgccttccggtgagactttga

SEQ ID NO: 276918 - DNA, 503 bp, Zea mays
gttcggggagctctaccgcgccatcatggacggcgccgcggaggagggggaggaggagggaggtggcgaggaggaggaggacatgcgggaggcgttccgcgtgttcgacgccaacggcgacgggtacatcaccgcggacgagctgggcgcggtgctgtcgtcgctggggctgcggcagggccgcaccgcggaggagtgccggcgcatgatcggccgcgtggaccgcgacggcgacggcagggtcgacttccgcgagttccgccagatgatgcgcgccggcgggctcgccgcgctcgggtgatgggtgaccgtcgccggccggtgctgcctcctgctcctgcacctgggcctggccatcgagcgccgggcaccttatttctgcatctgcgtgcttgatttcgtgtgctagaaagaacctgtagatagatattgcttgcttggagcgaggggggagctcacgtcacgtaaccgcgttgttccgtcttcgttctgttgctttggtt

SEQ ID NO: 276919 - DNA, 879 bp, Zea mays
gtgagagagacaaagcagtgcaggatctggctcggctgaagcagcatttgttagataaggatcttgaagaccaagaaaagatggatgaagatagtaaactcattgaagagttgcgggtagtatgcgagcagcaaagggctcatataatgcagttagagagggctttaaaggtcgagatggcaaagcaggaggagaacaaaaaggtcataagtgaagagcaccagaggtcaaatgaacaaatagaaaatttgaactacaagcttgcaagctgtatgagtgcacttgaatcaaaaaatgtggagctgctaaatcttcagactgcccttggacagtactatgctgagagtgaagccaaggaccgacttggaggtgatttagctgttgctagggaagaactgtctaaattgtcagagtcattaaaggtggcaaatcaaaccattgagatttcaagaagggaaaaggaagatatggctaccaaactttcacaagcagagaggatgttggcagatgggaaacgatccatgcagaagcttgaggatgacaattcaagattgcgaagagcgctagaacaaagcatgacaactgtgaataggatgtcactagattcagataactccgttgacaggcgcattgtgataaaactgctagtcacctacttccaacgaaatcacagcaaagaggtgtgtggctcgtccaaatcaattagtgccatatacacgcaaaataaagttttgttataaaatagtttgccgatgttggataacggcaggttctggatctcatggtgcgcatgcttggcttctccgaggaagacaagcaaaggattggctttgcacaaagtaatgcctgtaggggtgtcgttcgtggtgttttgggtct

SEQ ID NO: 276920 - DNA, 700 bp, Zea mays
tgctggcgcatccgcagctcaagtacacggcgttcgcgcccacgtcgtcgccggcggacacattctattacgtgaagctcaagggcgtgctggtgggcggcgacctgctgaacatcagctcggacacgtgggacgcgggcaaggacgggtccggcggcacgatcatcgactccggcacgacgctgagctacttcgtggagccggcgtaccaggtgatccggcaagcgttcgtcgatctcatgagcaggctgtaccctctgatcccggacttcccggtgctgaacccgtgctacaacgtctctggcgtggagcgaccggaggtgccggagctgtcgctgctgttcgccgacggtgccgtgtgggacttccccgcggagaactacttcgtccggctggacccggacggcatcatgtgcctggcggtccggggcaccccgcgcaccggcatgtccatcatcggtaacttccagcagcagaactttcacgtcgtgtacgacctgcagaacaaccggctgggcttcgagccgcggcggtgcgccgaggcgtagtgtatagacgccggcgaggccttctgagactgagaggacgaacaattcgaacttaaacctcgcttgattgattggattgggaggcaaattgggagtagaaattttaggttgggaaggacggtggaacgtacgcaagctctgctacatagttt

SEQ ID NO: 276921 - DNA, 581 bp, Zea mays
cgcaagtgtcgggaaggctaagaagccaaggaagagcaattctcaagcttctccatcgaagaggccatcaggtgtactccgaaaaaccaagaaagcaaccagcgactggaagaatgcggggactactggtggagcaggagattcagcccgcgcttctgtgatgaagaacgagtggaaggaccaggatctcggcctgaaccaggtggtgttcgacgagtcaaccatgcccgcgcctgcctgctcatgcacaggggagctccaccaatgctacaaatggggcagtggtgggtggcagtcgtcttgctgcaccatgaacatgtccatgcacccgctcccggtgatgcccaacaggcgccacgctcgcatggggggaaggaagatgagcgggggcgcgttcgcgaagctgctcagccggctggcagcagaaggtcatgacctctcgactccggtggacctcaaggaccactgggccaagcatggcacgaaccggtacatcaccatccggtagccagccggcggccacgttgaagcctgagcctggaaagggggagagatcacacaaacgtcgccttgtcctgcat

SEQ ID NO: 276922 - DNA, 314 bp, Zea mays
gccatgacacgtcccgagagcatctcctgagcggagcccaggacccatggccgtcgccgccggcgcgacgtctatgtgcgcggcgcaggggctccggaagcccctctgcgcccgcagctacgcgacgtcgctcccgggcgtcgcgctcgcgccccgtcgttcggcggcccggatggccgtcgtccgggcgtcgtccgcgcatcacgagcagcacccggccaatgagtgggccgccgcggcggtcgttgcagctgcgctggtgctggccgaggtcgccgaggccgagcccgggatctcgccggcactcaagaact

SEQ ID NO: 276923 - DNA, 1059 bp, Zea mays
gttggaaccagtggatcaaaaataatttcttctgttagtgctgaagaaagcactactccgccttcagcagatacctctgaaacagagaatgcatcctctgatatgcctcccagtagtttaaggaaatacaagatttcaaaacgtggacctaggtacagggagcgttctcctggcaaaaggcagaaggtttttacttatgacatttcttttgcaagcaatatactgaataaactttcgattccggagattcgcgacacaagactagagtctagagaacttggaggtgataaactacaaattcttgacgagtccactaagaaaacttcaagcaaagatatctgtggagaaagcccaattactactactgaaaatgtgggaagagagagtaaaaaagtatcttcaacaaagaatttcttggagcacactctttcatgttggagtgccttagagcgagatctatacttgaagggcatagagatatttggaaagaacagctgtctcattgccagaaacttactatctggtctgaagacctgcatggaagtggccaactacatgtataacaatggtgcagcgatggcgaagagacctctcttgaataaatccatctcaggcgactttgcagaaactgaacaagactacatggagcaagacatggctgccagaacaagaatctatcgtcggaggggccgcaatcgaaagctgaaatatacttggaagtctgcagggcatccaactgttagaaaaagaactggtgacgggaagcaatggtacacacaatatagcccatgcgcgtgccagcaaatgtgtggtaaagattgcccctgtgcggacaagggaacttgctgcgagaagtactgtgggtgttcgaagagctgcaaaaacaagtttagaggctgtcattgtgcataaagccaatgcagaagcagacagtgcccctgttttgcagccagtcgtgaatgtgatccagatgtttgtaggaattgctgggtgagctgtggagatggttcactaggtgagccacttgcaagaagtgatggttatcagtgtggaaatatg

SEQ ID NO: 276924 - DNA, 730 bp, Zea mays
catgggctcgtcatcccagcacgattccatttccgcatcacgaagttcggagcgtgctgatggcagcagaagcagcattagcatgtggaccaaaattacgagcacagactcgtggagatggtgcctaaggttgatttacatcgatgctgttgccagtatatggattgctgctagctacatcgtgcagtctgttgtggatgccggtgtctctccgttcttgatcacctatatatgcaattgtctgtatcgtgtctacattcccataggcggggctgcccggtactttgaggattctattggtgacttgtggacaaagctgaaattcaaggatgctgaaagcctgcagcaggcttctgacatggagagtgtgaatcttcttcaaagtggggggcatgagatcaatgttgcctcggatcaatcacaaacaaggctgtctggagacacttcagttccagatacaggcttccctgcccaggcagagctaactgttgtagattgcagcaaagggttggatgcaaaagggcgctggacacgtgctcgtgtggcccaagtgagcatgctaatcagccccttttggttccttgcacagcttacgttcaatctgtctctaagatacaccactgtcacgtcaaacaccatcttgagtagcacgtctagcctcttcactttcttggtcgcattagtttttcttggagagacattcacatggttgaagctaattagtgtgctt

SEQ ID NO: 276925 - DNA, 738 bp, Zea mays
  unsure (1)..(738): unsure at all n locations
ttcgnnctttttttttttttttttaatcaaaataacttccattttttttccgaagagccaacaggtacaatatatactgtaaaatatatattgtaggagtaagtacactcgaagcttggcgatgacgaatatggcctgcactacctaccaccagtacggagactgcaactacaagcccttacaaaattactagtacttattagtataataactaatcaatgaaggaacagaaaccctgcactgaaccaatcatgtacagtatgtatatgtacagccacacacacacatgccgcgcacgatccaccacacccgatgcactgcgccatccgtctccgtctccgtctcccttccggcggggccagacggtctcattgccgcctctccatgtaatccagctatagtttcatattatatcctccttgcaagtcaacaatggcggctcgcctgagtcaaagcccacaccgtgcggttgcattgcattgcgctgcccaagacagatcaatcaaccaaccaaccgcagccgaggatgttcgccacccccacctcccctcaggacatgatgggcggtgtcgtctagaacggcttgccccagtacatgaggatgtcctgcagcagcgggtcgccgccggcgtggccgacgacggggtcgagcatggagcccgcggggttcacggggtcgctcatcgtgttcctccctgctgtctgctggtactggctgtggctactgctgctgctaat

SEQ ID NO: 276926 - DNA, 625 bp, Zea mays
ttcgaggtacgcgtccgttttttttttttttttttttttttttgacgaatatggcctgcactacctaccaccagtacggagactgcaactgcaagcccttacaaaattactagtacttattagtataataactaatcaatgaaggaacagaaaccctgcactgaaccaatcatgtacagtatgtatatgtacagccacacacacacatgccgcgcacgatccaccacacccgatgcactgcgccatccgtctccgtctccgtctcccttccgcggcggggccagacggtctcattgccgcctctccatgtaatccagctgtagtttcatattatatcctccttgcaagtcaacaatggcggctcgcctgactcaagcccacaccgtgcggttgcattgcattgcgctgcccaagacagatcaaccaaccaaaccaaccgcagccgaggatgggtgtttgcatgcatgattcgtctagaacggcttgccccagtacatgaggatgtcctgcagcagcgggtcgccgccggcgtggccgaggacggggtcgagcatggagcccgcgggcctcacggggtcggaggcgaaggtccgctcccactcgctgatcttggcggacgcgtggg

SEQ ID NO: 276927 - DNA, 515 bp, Zea mays
  unsure (1)..(515): unsure at all n locations
ccgagtcccacagtctcagaggccacctcgagccccccctgccccgcaagccgcacccgccgctccctgcgccatctgcgctgcgctgctctgctctgcggtgccaggctgccagccagtgccggcgcgcgcccgctgccgccccgacgggcccaccgttctcttctctccgcgctgcgcgccggctgggctgcacgtctgaggtcagttaatgcgcccgtgacaggcggcgtcggggaggccaagggcggtgccgggttaatcccgccgtctctcgaggcggcgcccgcggaggaccaggcgggagggggagacggtgaggcgcggccatggggggcgccaaggcggaggacaaaccggccgncgctgcagaagattggtgctaccaatttggaaacaaggatgcatttgacttgaagcccccgaaaaaatcaccgatcgcgttgagaacggttgtctttgctatgactatgttatgcgggatatctatttgctcaatgtgcatgaagcaacta

SEQ ID NO: 276928 - DNA, 780 bp, Zea mays
  unsure (1)..(780): unsure at all n locations
cacactgcccacgcggacacgctctgcaccaccacctgccggccgttgccgggctcccggctcgccgccgccgttgcgccctcgcgctcacacctccgccagcccaggtccatcgagcggagaaacccatggccccctcgccgatcctcgtccggccgccggcgctggcgaattcaccccttccgcctccccgatgcgtggccgcggtagcagcggcgccggcggttcggacggctccggcggccccattctctaggctccgtaccaagtgtaggttcgccgcatcggatgtgagagaagactactcttccactccgatagatattgtcgctgatgttaagacggagaagattgtggtgttaggaggaagtggattcgttggttctgcgatttgcagagctgctgtatccaaaggcattgaggttgtgagcttcagcaggtcaggaagaccatcttactctgatccctgngttgatcaagtcaattggctgccaggagatgttttctatgcaagatgggatgaagtattggttggggctactgctgttgtgtctacccttgggagggtttggcaatgaagaacaaatgaaaaggattaatggtgaggcaaatgtcatagcagtaaatgctgcaaaagaaaatggagtcccaaaattcattttaatctccgtccatgactacaaccttccatcctttcttcttacatcgggttacttcactggcaagagaaaggcagaatctgaagtcctttccaaatacccagcctcgggtgtcgtgttg

SEQ ID NO: 276929 - DNA, 617 bp, Zea mays
gcagctgcaccctgcagcgctcactcgctcactgactcactcccctcccctggcctcctcctcctcctcctctctctctctccactatctcccacagccgaaccaacatgcaggggcgcagcagggacgccgccaccattgctgcagcggtggcgtgcgcagctgtgctgctcctcggcgacgcctggagcgtctcggcgcaggcggcggcggaggaggacaagataagcgccctgccggggcagccgccggtgggcttcgcacagtactccggttacatcccggtggacgccgcggggaagcgctccctcttctactacttcgccgaggcggaggcggatccggcggccaagccgctcgtgctctggctcaatggagggcctgggtgctcatccgggggagtggggggcgttctcagagaatgggccgttcaggccgagcggcaatgcgctaacgaggaccgagtacagctggaacaaagaggccaatatgctgtatctggagagccctgcaggggttggcttttcatactccactggtcctgccgtctacttgagatgaggtggagtggtgttggcattgatgaatggtggaggaacgagcagttctgggtcatt

SEQ ID NO: 276930 - DNA, 732 bp, Zea mays
tgttctcccacgcgtccgatggagggcctgggtgctcatccgtgggagtgggggcgggctcagagaatgggccgctcaggcctagcggcaatgcgctaacgaggaacgagttcatgctggaacaaagaggccaatatgctgtatctggagagccctgcaggggttggcttttcatactccactgatcctgccttctacgagggtgttggtgacagcatgacagccagagacaacttgaagttcttgcaaggctggttcgccaggttccctcagtacaagggcggggacctgtatatcacaggagagagctacgctggccactacgttccacagttagcccagcgcatggttgagttcaacaagaaggagaagctattcaacctgaaaggcattgctcttggcaaccctgtgctggagttctccaccgacttcaactcgcgggccgagttcttctggtcgcacggcctgatatcggactccacctacaacatcttcacgacggtgtgcaactactcgcggtacgtgagcgagtactaccgcggctccctgagcacggcctgcgacagggtgatgagccaggtggcgagggagacgagcaggttcgtcgacaagtacgacgtcaccctggacgtctgcatctcgtcggtgctcatgcagtcccaggtcctcgtccctcagcaagggagcagggagctggacgtgtgcgtggaggacgagacgatgcggtacctg

SEQ ID NO: 276931 - DNA, 451 bp, Zea mays
ctagttctagatcgcgagcgccgcccttttttttttcttttagagaatctacgaagtagtttacatttccacaagtgaccatgattggtcatttcgttttcaagcttctgcctgaattcacgcagaatgaacctaacacgtacactccacctaattccatatcataatagtagtctggtcgagttataatagattttcgctgctctgcctagttccaaatttctgacatcttacatgtcctatcttgggccaacaaatatatttacaaatgaaaaaatattgcacaagtctaccgtccctcaacctgaacaagatttgaggacacatggcagcagtcaatgcctctggctctgcatctgacagagcctggtgttgagagcttcaatgtacgtgcgaagtcgatgccgatcggatcttgacacagtcaaagaagggttgacggcagcttatg

SEQ ID NO: 276932 - DNA, 296 bp, Zea mays
ccacacgtgactattattggttaggcggttttcaagcttctgcctgaatcgacacagaatgaacctaccacgtacactctgcctaattccacactacagatatatttacagtagattttcgctgctctgcctagttccacagttctgacatggtacatatgccctaggttgggccaacagatatatttacaaatgaaagaatattgtacaacacctggacaagatttgagggcgcatggcagcagtcaatgcctctggctctgcatctgacagagcctggtgttgagagcgtcaat

SEQ ID NO: 276933 - DNA, 679 bp, Zea mays
attcccggtcccaacagtttcattcttcgagggggatcgcttgtcggcggggaagcaaagcttagttcttgacgcccaacctccccgttgcatattcgcctcaggaatttgggaattatgtctctttgaggggaatcaagggacttgcttttacttgtctaggctccatgtctaagtgggagccagtcacgtttcaggaatctcttagctttgttaagaaagtaaaggcacgtgactacatgctatacatatcattgctcgatgtgctcaaccggaatgatcaaatccctctgcaagcttacagcgagctctcgcttctgtttcagcatcacgaagatctgttagcggagctgtcgaagttcaggcccctcccatgcccaaacaacgtttatacacacggctcgatttggatgatcatattcctcatgccttttctgctcctgagccttgtcctcgccttgagaagccattgaagtgcttcctgctccattagactgttgcgagcctaaatgatttgtcgtagcactaacacctagttgttgtatatagatatatggatggggttttatatcctgtaatttctttatgatctccttgtacgctcgtgcgcacggaaataatcgtacaatattatttcagtcgcggcaaaaaaaaaaaaaaaaaaaaaaaagaatagaaa

SEQ ID NO: 276934 - DNA, 500 bp, Zea mays
ccttctttttttttatacccggcactgcagcgaggcaggagggcgaccggaatttcccatctctccttctcatcattcctttcgggatttcccctcctggttcccatcgatcagagggcccggcgctgttgcctttcgcattcgattcctttcgggtcggatttgtggcggagctcttgatttgctccgtccctgccagaggaggagggcttgctggatcagggatcgagcaaggaagcagccatgagcggcggcggaagcgtgagtttcctcgagatccagccgtcggagctcgcattcccctttgagataatgaggcagagctcgtgctccatgcaactgaccaataagactgaccattatgtagcattcaaggtcaaaacaaccaacccaaaacagtactgtgtgcgtcctaatattggtgttgaattacctggctcaacttgcgatgttacagtgacaatgcaagcacagaaggcttcacaacctgacatgcagtg

SEQ ID NO: 276935 - DNA, 935 bp, Zea mays
ccacgcgtccgcgatcagctagctagctgctgccaagagctagccaggggacagagcagcagcttgaagttggtcaccaatgctaaggatgggccgcgccagcgccacagcaggtgtgttgcgcttcgtcagggcgttcgccctctgcgtggctacggcatgcctcctcctggcggccggcatgccctcgcctgtggcggcgcaggacccgtcgaagctgagcctgcagtactactccaagacgtgccccaacgtggagcacgtcgtccggacggagatggagtgcgcggtgcgcgccgacacgcgcaacgccgcgctcatgctccgcctccatttccatgactgcttcgtgcagggctgcgacgggtcggtgctgctcgacgacacggcaaccatgatcggagagaagcaggcggagcagaacgtcaactcgctgaaagggttcgatctggttgacaagatcaaggagaagctggaagccgagtgccctggaaccgtctcctgcgcagacctgctggcgattgcagctagggatgcggttgtgctggttggtgggccttactgggatgtcccagtaggaagactggactccaagaaggcgagcctggacctagcaaacagcgacatccctacggcccagcaaggcctcctcacgctcattgccaagttctgggagaagggccttgatgccactgacatggtggccctcgtcggatcccacacgatcggattcgctaggtgcgagaatttccgggacagaatctacggcgacttcgagatgacgtccaagtacaacccgtcgtccgaggcctacctgagcaagctgaaggaggtgtgcccgcgggacggcggcgacgacaacatcagcgccatggacagccacacctccgacgtgttcgacaacgcctacttcgagaccctcatcaagggcgagg

SEQ ID NO: 276936 - DNA, 364 bp, Zea mays
acggcaacatggtatatggagctagggttcgcaggcgccgccactcgagctccgccttgcgcgtgtgaggaagaaggcggtcacccagccgagcccggagccggagcaggaaaccgtggtggagaagcgcgtggaggaggcggatccatggagcgcagctcggcgggcggccccctggcagctggcgtggcgagctcatccgcgcgtcctcgactcgtccgcgccggtgccggccgtcgtacccgtcctgtgcgacggcgagctcgtcggcgtgggctacacgccctatgcgcaccagctgcgcactcccccctgctcgacccctcagttcctggtggacggcctagggcccctccgatggtgt

SEQ ID NO: 276937 - DNA, 438 bp, Zea mays
gccacgctcatcgcgctcgacctcgtcaacggctacttcaggacgcacgccgggcaggtggctctggtgatgacgtcggagtcgatcgcgcccaactggtacgcgggcaacaagcgcaccttcatgctgggcaactgcctgttccgctccggcggctgcgcctacttcctgaccaacgacccgcggctccggccgcacgccaagctccgtctccgccacgtggtgcgcacccacacgggcgcctccgacgaggcctacaactgcgcgctccagatggaggacgaggccggccgcccggggttccacctgggcaaggagctgccgcgcgccgcggtgcacgccttcgtgcacaacctccgcgtgctggcgccccgcgtgctgccgctcccggagctgctccgcctcgcctgcgccaccctctcggcgcgcctggcgcgc

SEQ ID NO: 276938 - DNA, 528 bp, Zea mays
ggaatacccaccgacgcctacgcgtccacattgttcttcatgcaccaattgccttagagcatctccatgacacctctgagcctccggtagtacaccagaattttgaaccagccaacgtgctcctcgacaatagatgctcagtgcgtgttgctgaatgtgggctggcacaattgatggcgtctggttctgttacacagctatcaggccgtatgagagctctactcaattatgaagcacctgaaatccatgaatctgagccttttactcgtcaaagcgacgtatatagtttgggtgtggtgatgctagaacttcttactggtcgtaagccatatgacagttctcgtccacgtgatgaacaacatcttgttcgatgggctaattctcagcttcatgacatggagtccctgtcaaagatggttgatccttctatccgaggagagtgttctgtgatactattgtcatgttttgcagacatcatcagtcggtgtattcagccgggaccagaattcaggccagcaatgtctcaaa

SEQ ID NO: 276939 - DNA, 786 bp, Zea mays
gttgctttgtaggtatcgcgagttcacgatatggggggtttgtttagcgcccttgagtacataagaacggaattccaagagttctgtgcagcagcagttagtgtgcatcagcttgaagcattggatagatgggagcaacatgcgagatctgcttatgaacattttgagaaggaaggcaaccgagctattgtaatagatgaattagcttctgaattgggcctcagcccttcagtgccactgcatgtcgttctgcaagattggatcaggcatacggatgggaaattgagctttctcggatttgtcaagttgttgcatggcatgtccagcaggtccctgtcaaagatgagatagctgtcgataatctctaacgacagcgcgtgtttacaccgtcctgttgacttggttcaccggcaaattaacagggctaaagaatcgtacgattggagcttgcatatcaagggcgtctgagctctaacagcacctgatccgacactaatttaactatagagttatgtttattgttgcctgcctactgatcatttagccgatagggaaatgaaagaaaatctcacccatgtctgcaacatgtgatgtttctaacaaccttagattaggcgtcatcttctgttatgattctaaaaattttgtaatgcttcttttctcgaactggagcaagttagctgcagtcaccaggttggcgactggagcatggacatatcactgtcattgtgacattgttactgtatcattgtacccacagataaaagtgcttgatgtggtatgtcc

SEQ ID NO: 276940 - DNA, 277 bp, Zea mays
cctatccacgagcaaggcacagcagcaggggagtcggagtgacagccgcccgcacgatgccgacactaaacctgagcaccaacgtgccggtggacgcggtggtcgccgccgacatcctcagggactgctccaaggccgtcgccaggatcatcggcaagcccgaatcctatgtcatggtgtcggtcaacgggtcggtgcccatgtcgttcgcggccagcgaagagccggcggcgtacggcgagctcgtgtccatcggcggcatcggccccggcgtcaa

SEQ ID NO: 276941 - DNA, 486 bp, Zea mays
ctgccatcacacagcatgcaaagaacaataaacctgccctggtgtatgtaccgacaaggaagcatgcaaggttgactgcattggacttgtgtgcgtactctagtgttgagggtgctggaactccatttcttcttgggtcaggagatgagatggatactttcaccagaggtgttgaagaagagactcttaagaatacacttaaatgtggtgttggctatttgcatgagggtctaagtgagcttgatcaggaacttgtaacccagctgttccttggtgggaggatccaagtgtgtgttgcaagcagcacaatgtgttggggaagaccattgcctgctcatttggtcgttgtcatggggactcagtattatgatgggcgggagaatgctgacaccgactatccaattacagatctgcttcaaagatgggtatgccagtgacccttcagaaactcaggacatggtatttgtgtcatgccctcgaagagta

SEQ ID NO: 276942 - DNA, 1414 bp, Zea mays
cggataggacattcggcgttcctaggtaccccgctgcttccgtgctcacctcgcctgcagggccgcagccgctggaagaacacgaagacgacgggagtgcggggtggcgtcgccgctggagcaccagctgtagccgccggctaggcctccgcgccgctctccgtggccaacgcgccgtcatgcttgcggcgtcggcgcggcggctgtccgccgccgcctcgttttcctcttcttccatgcgctccagccagctcgccgccgtactgaaccaacagaggtggatgcacgacaggaacaagaaggcgatggagctggtggccaagggatggagtgcgctccaggaggtcgacccgcgtcatcgactacgccgatctcaacgacaagcgcctcatcccgcttctaaggggcgctaaggaaaactttgagctggctttggagattgacaatggtaatacacatgcgaggtattggctgggaaaaatgcatttcaagtatcatgttcctggtgcttgcaaggcagttggtgctgctttgttggttgaagctgcaaatatgggtgatccagatgcacagtatgaacttggatgtcgactaagaattgagaatgactatgttcagtcggatcaacaggctttccattacattgagcaagctgttgatcagctgcaccctggtgctttatatcttctcggtgctgtatatctaactggggactgtgttaagagagatatggcttccgcgttgtggtgttttcatagagcttcagaaaagggacatgctggtgcagctatcgcatatggatccttgcttcttaaaggtgctgaaatacctgaagttattacaaggttcaactcaggcaagagtccatcaactgggaaaatgcggaaaaggacccaacagcaggatccagtaaagctagcgaaagaacagtttcaaattgcagctgaggcaggctgtgatctcggtctgcggtggttgaagaggcttgaagcttatgaaaaccaagaagaaaagctaaagcaggttcagcaatgatatccactgaaagaatcccattgcatttgtcgcatacaagtatggtatatggcagcatggttgctgcacataggtataccaataatttcctttcctgccttcattatgttggaggctattcgatcctcggatgttcgggtcaactttgcaggaagatatactgaaatttggatatttagactaacttcttggattataggcgattggatgttcactttgtacgatgtattagcgttgacattactggaagccctaattgtgagaagtagaaacatatcatgtgtgttgctacgggcattatggatgatttagaataaaattagactatataactacttatacgaaggaataaattgtggcatatgatcatgtggatacc

SEQ ID NO: 276943 - DNA, 794 bp, Zea mays
cgcagatgatgccaagaattggagaaagatctatgatgagtataatgacgaggaggttcagattacaaaggatgaggctaagataattagtagattgttaaagggaaagactccacataccaatgttgatccatatccagattatgttgattggtttgaatacgaggataaaggtcatcctctttctaatgcccctgagccaaagaggcgatttgtaccttcaaagtgggagcagaagaaggttgttaaacttgtaagagccattcgcaatggatggataaagtttgacaagcccaaggaggaacaaaacttgtatttattatggggagatgaaactgatacaacagataataagcggcatggcttgagctacattcctcctcctaaacctaagttaccaggtcatgaagagtcatacaatccttctgttgaatacattcctacacaagaggaaatagattcataccagcttatgtatgaggaggatcgcccaaagttcattccgaaacgatttgagtgccttcgaagtgtacctgcatatgagaaggcgttgagggaaggttttgatcggtgtctagatctttatctatgccctagaacccgcaaaaagcgtataaatattgatcctgagtcactcaagcccaagttaccaagtaaaaaggatttgaggccatacccgaaaacttgttaccttgagttcaagggccatatgagtcctgtgaaatccatttcggtcgaaattacagggcagtggcttgcatctggttctggtcatggtacaattcgtgtctggg

SEQ ID NO: 276944 - DNA, 715 bp, Zea mays
ctttgattgacctcgcctcctcttcctctctcaccggcaccgcccggcaacccggcttccaacggccgcgaccgaaacgggacccaccagacgcaattccccaacacgtccgcctcgacgaatttcgatcgtttccaacttgggatttccgccttccaatcgctccgtttccttcgtattctagaacctagcatttggtttgattccgccgcttggtccggccccgaggaggaggcaagggagggagcggtggccgcgcggccatggcgggctcgtctacggcggcgatggacgcagccgcggcctggtgggacgacgtgaacaactccacgctgtggcaggaccgcaccttccacgccctcgccgcgctctacggcatcgttgcagtcgtagccctagtccaactgataagaatcgagtgccgggttcctgagtatgggtggacaacgcagaaggtgttccatttcctaaacgtcattgtcaatggcgtgaggtcaaccgagtttgtactgcggcgggatgtgcaacttgtacaccctgagatacttcaacatgtgcttattgatttgccgggcctagcgttcttcacgacctacgctctgctagtgctcttctgggctgagatttactatcacgcacgtgcagtgtcgactgatgggctccggccagctttctacacaatcaatggaatgatctatgtcattcagatactact

SEQ ID NO: 276945 - DNA, 619 bp, Zea mays
gtcggatgcaggctcttcctggtgtgttcttcttttatgacctttctccaatcaaggtcacattcacggaacaacatgtgtcatttttacactttttaactaatgtttgcgctattgttggaggtgtgttcaccgtttctggaatcatagattcgtttgtataccatagtcaaagagcaatcaagaagaagatggaaatcggcaaattcaactgatgttgccttactattgctgcaattaagtagctcctgttgcagctccaagatccagaaatgcaatgtggcttttcctcgaactcttggcacagttgcgtagttgacaaacaattgctcatcagataactcttgatgtgcttgccaacttgcttccggcaaagataccagcgagcaagatggtcatcttgtatacttcgatgttacatttttgtacgcttagtctgacaagaaaacattttacttcctcgagctgcaggtgttcgtgtactgttgtaaatttgtggtagagggagcctatctgtagtttttttttacaattatgtgtttgtaccagttttttctgagacatttgtagcttagacaggtaaagattgtttgaaatacatataaaccctttttgaagg

SEQ ID NO: 276946 - DNA, 427 bp, Zea mays
cataactgctctttatagtcttgctttctgttgattacttggtgcggtgttgtattcaaagttctgagctatccttaactaactggtgctgtccgaagtggggtgcacaaaagcttttggatttgatattacagctgcttgtagtgggtttttagtcggcttaatcacagctactcgctttatcaaaggcggaggttttcagaatgtcttagtagttggtgcagatgctctttcaaaatacgtggattggacagacagaggcaggattgaggctgtttcatcctcctctgctgcgggatgggtggggtcgtcaccgtggcgtcactcgtggcgtatcgtgcagtatggacgacaacggggagctgtcaagatgggttacctcaagacggatgagttcctcaagaggggcgagagcggtggcacgtgc

SEQ ID NO: 276947 - DNA, 669 bp, Zea mays
tctcggtcaagttactgatgcaatagctgattgttcacttgccatggttcttgatacaaattaccccaaggcaatttcaagatgagccaccttatacgagatgataagggattatggacatgctgctaatgatttaaggaagctaatctcacttcttgaaaagaaagtcaatgtgtctggaatatcaccaaaagcttttaacaagcataaagatatcaagcaagcacatgcgaggctttcacacatacatgctgaagcaaaaaacgatacccccctgaatttgtatttaatcttgggagtggagccatcctgctcttcagcagatattaagaaggcataccggaaagctgcattgagacatcacccagacaaggctgctcaattattagtaaggaacgagaatgctgaagatggattttggagggatgttatcaaggaagtctatgcagatgcggatcatctgttcaaaacaattggggaggcatataatgttctttctgacccggacaagcgtcaagagtacgactttgaagagaatctaagaaatgctcggagagtatcgagttcaaggagcatgcgtaggtcacctgaacataactacagcgacagaggctttaatccacggcagtggcagtcaagcagagcatcacgttggtacagcaaatcaga

SEQ ID NO: 276948 - DNA, 429 bp, Zea mays
gcagacgcgccgccgctgccgaaatgcagggaccgcgtcgaccagaaggttctcgtactcgcccgcgccgcgcaggccgattggctcgtgtcgaacgaccgcgcgctgctgtagctcgcgaagcgcaccgcgcgcgacttcggcttccggatcgcgcaacccgcgccgtttgccgaggcctgcgcgctccacgccgcgccggccgcccctgccacatccgcctgacgcactccgcaccacccgatttcgaccgtatcgatgaacgctccttcagacatgccaacgactcccgttttcccctcgcgcctgccgaacgtcggcacgacgatcttcacggtcatgagcgcgcttgccgtcgaaaaaggcgccgtgaacctcggccagtgtttcccggatttcgattgcgacccgtgcatcgtcgatgcggtc

SEQ ID NO: 276949 - DNA, 566 bp, Zea mays
cccactcgtccgctgagccaacttgccaagccaagcaagccaagtcgtcgcctccccgacccaacgccgcgacccccttgcccgtccgcgagcgctgcagcacctcggatcccgccccaatggcaacagcgtgtccgccgctctcgctgccgtccacctccctcttccgcggcaggtccgcccgcgccgggcccagacgcaggcagctcacggccgtccgctgcagcgccgtcggagaggcggtagtggaggaggcctcgcccgggacggcggaagagccgctgctggtgagcgcaatcagagggaggaaggtcgagaggccacccgtctggctcatgaggcaggccgggaggtacatgaagagctaccaattgctctgcgagcggtatccttcgttccgtgaaagatcagaaaatgtcgacctagttgttgagatctctttgcaaccatggaaggttttcaagcctgatggagtcatcttgttctcggacatccttactccacttcctgggatgaacataccttttgacattgtgaagggaaaaggtccagtgatctatgatcca

SEQ ID NO: 276950 - DNA, 452 bp, Zea mays
ggaccgtggttttgtcccgctcgttatactcctgctagttggggccaagctggaggttgtcatcatggagatggccaaggagatacaggacaaggcgacggtcatcaagggggcgcctgtggtggagccaagtgacaggttcttctggtttaaccgccctggctgggtcctcttcctcatccacctcacgctcttccagaacgccttccagatggcgcatttcgtttggacactggtaggtttggacaatggtagcctgtaaaagatcctcgagtgttctgttcatccagtcagtgcagcataacgagcagaggctgacttgcctacctcttttctctttggctggttcgtcctggcgcagctcaccccagacctgaagaaatgctaccacgagaggctgggcctgagcatcatgaaagttgcggtgggcctggctctccagttcctctgca

SEQ ID NO: 276951 - DNA, 456 bp, Zea mays
gcaggattgattctcgggaggggcgttggttcggacagagaggccgcgaagcttctggctgcagaagaggcactgaagaccttgaaatcaaccactgacccacaaattaagaagtatctgagacctgtaagatgcaatggctgattcccttccacgttctgagctccgcaaccaaatgagctttagctcatttcaccgttacagatgtcattgatttagcagaagtgcatcaccctttctgtgagtatggttgacatctcacctcgagcacatgatgtgtgccaaacacatgtcttgttctggaaatcctggctttgaaggtggtaacatagagagcggacatggtgctttacgcattcttttgaccatcatacaagtatagatgttatgtcttgtttaggatagtggcatagttggctgtaaacaagcaggagagtagatgcggatctaaaattc

SEQ ID NO: 276952 - DNA, 505 bp, Zea mays
caaagttcgtttccggacgggaagggaggcccaaccatccatctgccccgccgcacctcccagcagcagccatataaagctactccctactagctacgaggggagacgagaggcgaggagagacgccgccggactgccgtgcccagcgcccgtgaccatcccatcccatccggtcggtcgtacatgaaggaccgccgtggcagctcctccgtcggcggcggcgagcgcttcgccgtcttccccttctccatgggctgcatgtcgcagtccgccgtgtccgtcgccgaccccggcgacaagaaggcgcagggggacccgtcctccactgccgccgccacggtggctcgggcaggagcaggttcatcggaagaaggcgccggcgaggccatgacgaaggagaaggccgtggcgtcgtcggcggcggcggcgccggcgcccgcgccggcccgcgtggcgaggctgatgaaggggatcccgagcctgtcgcagatgttcgcgggggaag

SEQ ID NO: 276953 - DNA, 1276 bp, Zea mays
ggaataccttgttgtttgcaagttgtgcaaaggaagtggtgacaaatgcccaacgttaatgtggttatgtctgataaggcactggttaagcaattacaaaaagaacttgcaaggttggagccggaattgcgatgcccagcttcatattctggtcttgaagcattagtgagagaaaaagataatcaaatccggaagatggataaagaaattaaggaactgaagttacatcgtgatcttgctcagtctagactgcaagatttgctcaaggttgttggagataaccacggttcgaagcaccccctggcttcttctgcaagaaattttacttttgatgttcctcagccatgtgaggatgagcaatcgacgacatcagaagctatcagcagtggccaaaattttaggcttcaaggacgcctgacaacacaaagagattataggtcacagcaatctgaaaatgatgtgcagtttgctacccctcttagctattcaatcagcagtcccccattcagtgggatgcctccaactaatggcagaaatgataactctcatatatctgatgaagattcagaggatctttgcaaagaagtacggtgcatagagaccaatgaaacagaagaaaatgaatgcttagagtcgtcagctgtgggaagcaatagtctgcaagattcaaatttagcttccagcatgcatgggaacgacaatacaaatcgatctgtgaattctggacggaatgatgcatcttctattaccctggaacaacatctggagaatgtcaaaaaaccgtttgccaatcctggcatggatctgggatcctctacacgtaactcgtcaagctcaaaagtaattggcagaagcaggagctgtaggtctctgatgggttctactctgttggaagacttggagaaacaagtttgcacccctccaagcagatgtttcgtggactacccacggaggcccgtaacatgtcaaagaagggtacctgcactgaactatgatgtagagagtgaaactttatccagaacaggatcaatgctatctgaaattattaccgcgagggacggactgaaggaaaacagctctattgctggtgatacagaatctgttgctggcataggtgaatttgttgcggagctaaaagaaatggtccaggcacagtatcagaagcaacgtggtaatcaggtgcgaaactggaaatgttctggttctcctgctggcatggctcatttcattattattctaatgagataaaatttacgcatagctatgtcctacattt

SEQ ID NO: 276954 - DNA, 817 bp, Zea mays
  unsure (1)..(817): unsure at all n locations
ctcagatccttcaaagattggattttggaggagtgcgctgttgtgttggtggcggagcttcctggcgttgactccgaccttgctgttcctagcagctcccacccaagaggcatcgcggcgaccggatcggtcgatgtgtcgccggtagattggccggcgtcagcggagggtggagatggggaactgcatggacaaagcggtgccggtggacaacacctcctatcaatcgaaagcagggagcaaatcaatttcatcgtccaacccttcgacggtcaagactggttcgactcggtcgacatggactgtagcctcatacaaagatagtcgagagcttcctactcctaggacagaaggggaaatcttgtcatcaccaaatttgaaggcattctcgtttggtgatctcagaactgcgtcgaggaacttcagatcagacagtcttcttggggaaggaggatttggctatgtgttcaaaggctggattgatgagcaaactcttgccccttcaaagccaggaagcggtatggttgttgccatcaagaagctaaaaccagaaggttttcagggccacaaggagtggctgacagagggtgactaccttgggccaacttcaccaccagaatcttgtcaaactcattggttattgcacagatggtgatcaccgacttctggtgtatgagtacatgcctaaaggaagtttggaaaatcatctattcagacgaggtgcggatcctttatcctggggaacaagactcanagttgcaattggggctgctaagggtttatcatttctgcatgatgctgagaaccaagtcatata

SEQ ID NO: 276955 - DNA, 1903 bp, Zea mays
  unsure (1)..(1903): unsure at all n locations
cccacgcgtccgcccacgcgtccgcccacgcgtccgatggtaccaatgttacatcaccaataagcattgtctggaatggcattgaaaagggatctgcagttgaggttttatctgacaaggttgggtttggagtagcttggttttctgctaaggttattgatataactgcctccaatgcttctgtcagctatgacaaccacaatggaactggtcctcgtgaagaatgggtgccattgagacaagagggggataagccgcctcagatacgtcttgcacaccctgctaccctctccaaattcaaaactcaggaaacggcgcagggaaacagcaggcagctgtttatgggtcatcggagatcatgtagacgcttgggtcaacaatagctgttggcgagagggagttatttctcagaattatgagactgatgagacgaaatatgatgtacatttttcagttggaggtggtggtgagtccttagtagttgatgcttggagccttcgtccatcgcgtgtttggaaagatggtcaatggatagagtggtcccgtgcaagagaaaggaaatccaaatctaataagggcgattcacctcctgagaaacgccaaagaatcgacttgcttcaaactggtggcaatctatctgttcttggcgaagtggggggttcttcgaaggacaataatataaacaatgcaaaaaacccggaggaattaaagccattgtctttgtctcagggggaaattgttttcaacattgggaaaagtgtagttgagaataaatctgattctcttgcattcagacgtcctggactacaaaaagaaggatcaaaggtcgtctatggtgttccaaaacatggaaagaagaagaagtttatggaagtaagcaaacattatgatgcaggccaatctgacaagatttctgagggcaattcatctaacagattcgtgaaacatctgatgccacaattgccaaggccacgtgaaaatgcttccaaagttgaccctattagaggaaggagagtaggtgaaacaaggtctagattacctaaacctacgaagtcccacaatgttggagctagcagtgttcctggaaaggattccttgcctatgcaaatgcatgttccaaattctggtgtttctgaaaggagttctagttttgcaggaagttcgacaagcacttccaacaatgagaagcccacttcagaaaataataatccggtgcttggtgtgggccttagaactgaagtttcttctggtcctgaactgcaaactgcatctactgttcctagttccaagccaaatgtatccactactaatcgagctaaaaggaaatatgttcccactgtcagtaacacaaacagaggtatactaaaaacctctgaaaagtcgagttctgattctgctgagccccgaaggactacttctgattctgctgaacctagacgatctaacaggcgaattcaaccaacttcaaggttactagagggcttgcaaagttccctcgtaatctcgaaagttcctggcgagaaggttcctaggagcaattacaaaagtgcatcctcaagagggagaactcaagctcatgggtgagtgaaggcaccacatagctcatagctgcttttggtgggatagctctcgtgtacatagctgtagccgtccagtatggaaggaggatagggttggagtaggaagtctttattggagcgcaaggattcagatgtattataaactagcttaagtgcattgtgttaaccttttcttttacttgcccgaattatacttttccgtgttgtagaatacctggaaatatccttttagtatgtgtggataccccgggaaagaaattgggtgccgtttaaattccaaaaaaacccaccaaaaaaaaaaaaaaaaaaaaaaaatntaatta

SEQ ID NO: 276956 - DNA, 716 bp, Zea mays
tgaagttccttctgtttgggggctgcatactgcatctaccgctccttcttaccgagctaaaaagaaatacattcccactgttagcaacataaacagaagtatactcaatacctctgaaaaggcaaattctgattctggtgaaccccgaaggactacttctgattctaccgaacccagacggtctaacaggcgaattcaaccaacttcaaggttgctagagggattgcaaagttccctcataatctctaaagttcctggcgagaaggttcctaggagcaattacaaaagtgcatcgtcaagagggagagctcaatctcatggttgagtgaaggcaccacatagctaccttttgtgggatacctctcgttgtacatagctgcagccttctagtacggaagcaggataggattggagtaggaagtcttcattggagcacaaggattcggatgtattataaactagcttaagtgaattctgttaaccttttcttttacttgcctgaatcagacttttccgtgttgtagaatagtcattaatatcgtagaaacctccttttagtatgtgtgggtacaccgggaaagaaattgggtgtggtttaaatttatccgataatttaacatgtgctgtagcctgtgaaagacaatttggtttgccagcgtcgtttgatcattaaaaaccccaaaaaaaaaaaaaaaaaaaaaaaaaaaaaataaaaa

SEQ ID NO: 276957 - DNA, 394 bp, Zea mays
aggaggtggtgcgcaaggtggagagcaccaagacagacagccgggataaacccctgaaggatgtgatcatcgcagactgcggcaagatcgaggtggagaagccctttgccatcgccaaggagtagggcacagggacatctttctttgagtgaccgtctgtgcaggccctgtagtccgccacagggctctgcgctgcactggccccggtgctggcatctggtggagcggacccactcccctcacattccacaggcccatggactcacttttgtaacaaactcctaccaacactgaccaataaaaaaaaatgtgggttttttttttttttaataaaaaaacaaaaaaaaaaaaaaataaaaaacacaaaaaaaaaataaaaaaacaaaataaaaag

SEQ ID NO: 276958 - DNA, 636 bp, Zea mays
ccagtcccgaaggcactactggccagtcctacaaccagtattctcagagatgccatcagagaacaaacactaatgttaattgcccaattgagtgcttaatgcctttagatgtacaggctgacagagaagattcccgagagtaaatcatctttccaatccagaggaacaagcatgtctctctgccaagatccatctaaactggagtgatgttagcagacccagcttagagttcttctttctttcttaagccctttgctctggaggaagttctccagcttcagctcaactcacagcttatccaagcatcaccctgggagtttcctgagggttttctcataaatgagggctgcacattgcctgttctgcttcgaagtattcaataccgctcagtattttaaatgaagtgattctaagatttggtttgggatcaataggaaagcatatgcagccaaccaagatgcaaatgttttgaaatgatatgaccaaaattttaagtaggaaagtcacccaaacacttctgctttcacttaagtgtctggcccgcaatactgtaggaacaagcatgatcttgttactgtgatattttaaatatccacagtactcactttttccaaatgatcctagtaattgcctaga

SEQ ID NO: 276959 - DNA, 444 bp, Zea mays
aattctgctcgagcgcagaggggtccatacggcgttgttctggattcccgtcgtaacttaaagggaaattttcacaatgtccggagcccttgatgtcctgcaaatgaaggaggaggatgtccttaagttccttgcagcaggaacccacttaggtggcaccaatcttgacttccagatggaacagtacatctataaaaggaaaagtgatggcatctatatcataaatctcaagaggacctgggagaagcttctgctggcagctcgtgcaattgttgccattgaaaaccctgctgatgtcagtgttatatcctccaggaatactggccagagggctgtgctgaagtttgctgctgccactggagccactccaattgctggccgcttcactcctggaaccttcactaaccagatccaggcagccttccgggagccacggcttcttgt

SEQ ID NO: 276960 - DNA, 425 bp, Zea mays
ggacgcgcagggaccttaagaggacccttgctagcgtctgcttgactatttagggacgaacatgcagggactaggaggtagctcttggaaccaaatacgcctaacactctaaaaggaagagctcgcactgttttctagaaatgattcggtacagaatagtcactgctgtaaagtgggttcataccaatttgatacaacattcaccttcacaaagaaaattcagatgacatgtaagattatgcctgacagcctgaggaggtctttcaaaaaccaatctcacaactgctgtctgacatgtcctttcattacttaatatgtgttcccttgcgtctgtagaaaaactacataaaagaagaaacgatagaaaggatgaggttagatgaagaggtgcttatgggatttcttcagggaacacatcaacgtga

SEQ ID NO: 276961 - DNA, 899 bp, Zea mays
cggacggtggcacgggcaatgcatgaggtctgtgatgcaccatctgctagttgcagtaatcaaccaaacagcactaatggtagctacttcagagttgatcagctagtaagcactttctcggccaatccaagcttgattgcttttgcaaaactctgctccgtgtcatggaagagcagatgcaatagcaattttcaggagttctgttctcaagtgctatatgaatgtatgagcaaagatagaccatcactgttacaggcctatatcagtttttacacaacaatagagttaatgtgggagcatttgaagactgggaattttcctttttataattcccttttccttcctaacttgaaggtcgctttggcctacaacgaagcattagttgattctagaatcacaaatggaggaattattcattcgacattcttggagtcacttatgaagcgagtgggagacatctttgcggagctgccaaacctcaaggacaacctctaccgatacttgagcacgggcacatggcctgacacacagaacgacgtggtggttctctcgggggacctccaatggtacaatataccacctgcccatgctgtggcttctgccgttgagaacggcagaccgagagtccctgccggcgtatctatgctcccactgcttcgcctcctgctgccaaccacacaccttgtgggactgatggagatcgagaaggtacagattgtcatggaatgctaaaggatgagcgtggaaaattcaatcaaccttctctgcatgcgggttacttgtgatgaacggtagcaagtattgcttagtgcacttgtgatgaaatctgccagggactaagctgttctgaattaagtttgagacaaaagaatcccataatttttattgtgctttgcttt

SEQ ID NO: 276962 - DNA, 1359 bp, Zea mays
cccacgtgtccgcccacgcgtccggtcgccgtgggctcggtctcgctcgccgcatacggccgcagccagacagccaacgtactcggggcggctgccgggccggggtccgcgatcgatggcggcgcggcggagcaggggctgggcgcgcggcgcggcggcgttcgcggccgtggcgctggcggtgggcgcggggcggaggtacgggtgggacggtgcctccgcggtggcggcgttccgcgaggcccagggcgcgctggggcactgggcggcgccggcctacgtggccgcgcacgcgctcacgcttgcgctctgtccgccttacgccatcttcttcgagggcggcgccgcgctcatcttcggcttcctgccaggcgtcgcatgcgtcttctccgccaaggtcctcggggcctcgctctccttctggatcggcagggcaattttcagatacttcacttcagcaatggaatggctacagaggaacaagtacttccatgttgtggttaagggggttgagcgtgacggctggaaatttgtattgcttgctagattctctcctttgccttcctacatcatcaactacgcgctatcagccacggacgttggttttttcagagattttctctttcccacaggtatcggctgcttaccaatgatactacagaatgtttccatcgtaagccttgctggtgcagcagtggcgtcaaccacaggatcaaataagtcccatatatactcttacctgtttccagcaataggcattgtgtccagtgttctcatttcatggaggattaagcagtattcctcagcccttgctgttcctgaagagctgcaaagttcacctactaatggagatcacaatggtgacgctaagctggcttccgcgccatctaaaaataccggatctgggaaaactaggaagagaaggtaactgacagtatccccctgtattcactatttactacattgtgataccaagtaccaagcagctacagccaatgctagtcaaacatttggatttccacattggtttaccactacagtaagctgtcttgtctgttccatgccatgatcttttgggggggtatttaacagatgcgcaggcagctaccttcttgtttgtcaattgtcaatgagcttctgttcttgtggcagataatatcataaaatgttgtaacagatgcgcaggctcacatagtcacatgttgtacacccgaataacctggtggtttagatttggatcgtcctgagttcaattgtatcctggggatcaatattggttttccctccctaattattgaacttgacatgtgcacggtgtagtccaaccagtatatgttctttggtgtaacaatttaattc

SEQ ID NO: 276963 - DNA, 474 bp, Zea mays
gtcaagctctccaacaagtggcggtaacattttggtggggagtaatccgtttggagccaagctttccaacaagtggcggtaacattttggtggcgtacatcccctattttgttggggcttattgcctgctctggtatcagcacgaattaactagcttttgccacaagcttggtgttagtttgtgagggtgaataggccagtgaaattgttctgctgcttagcatagttggatgccaattgatctatagggttagaatgcattttagcttttcctttgctaatcaaattgccaactgctaatcttgatccttggctgttgatgcacttttctgctcgatgcatgcaaagagattatttcatttatagcacaaattaattggaagcagcagctggttgcttcttcaacatgcgcattcttattgcgatgtgccaatatgtatatatgcctgctcaatgtggttgactgatttttcc

SEQ ID NO: 276964 - DNA, 615 bp, Zea mays
cccacgcgtccgcccacgcgttcgcccacgcgtccgcccacgcgtccgggggactcctggtccagttgcaaatgcagttacaactggtgttgcttttgcagtatttcaaggtggctttttcatgattgggcagaaattctcaaagccatcaagtgaagatacatactactctctgacaagaagcatgctgcacaaactgggtcttgaaaaatatgaaaagaatttcaggaagggtctcctcaatgatcaaacattaccactccttacggacagtgctctgagagatgtgaagatccctcctggacccagacttctcatactcgaccaaattaaaagggaccccgagctggttcaagcaaagtagcagtcacaattgtcgacagctggttctttctgggttgcatagggtttgaaagcgatgccgtctctagtttcttaataaactttctaggcaagcaagcaagaatttagttgtgctgtagttaattgttttttggccgatcagtttgcatcgatcctattaaattctgaacaacaggtatttatatgcatcttattcaaatttaaactggcattctctacattatgcaaatatgtaggaaacaaggttgatgg

SEQ ID NO: 276965 - DNA, 794 bp, Zea mays
ttttgagaggaaggctttggagttgcagttggagtccaaatctgtagaagttgaggagttacttatggctgtaacttcattggaggaaaacaccgagcagaaagagttggagtcacagttagaactgatgtcagctcaagcttctgagcttcgcctgactgtggcatcactggaagagagagttcaggctgaaagaaatatttctatgcagcagaaagaaaacgcagaagctatgttgagtactaaagaagaactggaagcacagctgtgttcagcaaccactgaaatggggaaactgcgtgacatggtcaaagcactagagaatgaggtcaaaacggagaaggcactgcatgaagaactaacagcacatatacagataaaggttgaagcagctgttgatgcagttaaagaaccattggaagcacaactgtgttcaacaaatactgaagcagagaagctaagagatgttgtcaaagcacttgaggatcaagtagaaaaagagaaggcattgtgcgaagagcttgcagcaaaggtagagttgaaaactaaagcagcaagaactgctgaggctgttcaagaatccttggaggcacaactgtcttcagcaaatgctgaaatacagaaactggaagagatcacgaaacaactacagagtgagttagaaaaggagaagacacttcatgaagagttctcagcacagttagagatgaagattgaagcggagagaactcgttctatggaatctgctaaagaatcattagaggaacaattccagttagtgaactcagaaacag

SEQ ID NO: 276966 - DNA, 761 bp, Zea mays
gaaagatttgagctctccatttgatcacacagtaatatccaatgcaaatgaaatgcagtgcaacagaaatgcagatgacaatggtttacctgaggattcaagcaagcatactaaaagaacaggtcgcaaggtgggcattttaagtcactgcccaaagcgactagttgctctcaaagtcatgtatttcggccagagattctatggtttttcttctgaaggtaacattgaaccaacagttgagtctgagatatttaaagcactggaaagagcaaaactgatggttgccaataggaaagaatcatgctactcgaggtgtggaagaactgacaaaggagttccgcccacgcgtccggtgatttctttatatctgcgatcgaacataaaggatgttgggggggacatgttagatgaaagatccgaaattgattatgtgaaggtattgaatagaattcttccaagagatatacgtgtactgggttggtgtcctgttccagcagattttcatgcaagattcacctgtttgagccgggaatataaatacttattttggaaaggggacctggatatattggaaatgcagaaagctgcatccaaattcattggagaacacgactttaggaatttttgtaagatggatgcagcaaatgtgagtaactacaggcggcacattacagaatttactatttctgcatgtgacagaaggtccaacaatgatgagctgtgttccatgacgatcaagggtagcgcttttttgtggcacc

SEQ ID NO: 276967 - DNA, 480 bp, Zea mays
gaaagagtgcaagaaaggaggacggtgctgacgatgatggcgataagccaccccatgattcgccccatcattccgtcgcctccggggcctgcgcgctagctgctagaagggcctcgccgtccgtcgtggtggtggtggtggtggtgtgcgcggggcgggaggggaggggaggggagtcgtcactgcgccgccacaatgccacaggaccaggagctgccctgcggcgggcaggagctcgatatcgacaccgcgctcaaggatggcatcctcgggggcgcgctggagcccgtgggtgcggcggcggtggacgatggcaagcagcccgtggagctgcgcaggatgatggacgagctggacgcggcggccggggactgtggcggtggggacgaggcggtgccggtggtcttcatctgcccgatctcgctcgaccccatggtggatccggtgacgctctgcacggggcatacgtacgagcgggcc

SEQ ID NO: 276968 - DNA, 413 bp, Zea mays
agtgcagatcactgacctcggcatggccaagtgcctgatgaacgacggcgtgaccagctgctcgagctccccggcgcggatgctgggcacgttcggctacttcgcaccggagtacgccatcgtgggcaaggcgtcgctcaagtccgacgtcttcagcttcggcgtcgttgtgctggagctcatcaccggccggcagcccatccacaagtcgtcgtcgacgagggccgacgagagcctcgtactctgggcgacgtcgcggctgcgggacagcgggctggtggtcacggagctgccggacccgacgctgcagggcaagttcccggcggaggagatgcagatcatggagcatctggcgcgggagtgcctgcagtgggaccccgaggccaggcccaccatgacggaggtcgtgcaca

SEQ ID NO: 276969 - DNA, 618 bp, Zea mays
cctcctgaatatcttaagacaggcagagtaagtcctgagagtgtggtttacagttttggcactgtcttgcttgatctcctgagtggaaagcacattccaccaagtcatgcactcgaccttataagagggaggaactttctagtgctgatggattcttgcttagaaggtcatgtatccaactcggacggaacagacttgatgcgattagcatcccgttgcctgcaatatgaagcacgtgaccgtccaaatctgaaaactgtggtatctggtctcacaagtctccagaaagatgcttatactccttcgcacactttgcttgggattcaacatgataagaacaactcaggtcaagtttccttatctgctattgggaaagcttttgccagagcagacctgaatgaagtgcatgaaatattgctgcatgatggatataatgaggacgacgaggctaatgctgagctatctttccagtcatggaatggtgatatatctgagagctttggtggtaaaaagcgtgcaaaccatgcctttaagtctaaagaatacacgactgcaatcgagtgttactcaaaggtccttgactcaggtgcaatggtggcttcaaccatgcttggaccg

SEQ ID NO: 276970 - DNA, 506 bp, Zea mays
tttccgtgttaattcagggacttcaagggaaggtggtgcatcacttttaacagcaagggcacgtgggtatagatctgatcggcgcgatttttttctttctttctttccggacagcggcaccgcaccgggtactattttgacctcggtcgctcaaaatctctgtctgtcggcccgccagaccccagacctagaccctccaaaaacaactcaacaacaatgctgctcctcctcctcctgctcgtcgcctcctcctccctgtcccaggagggcgtcctcgccgacgtgccgccgtccaacaagctggtcttcatcctggcggggcagtccaacatggccggccgcggcggggtggtggcgaaccgctgggacggcgttggttgcccggcgactgcgcgccgttccccgcggtgctgcgtctctcgaccgacctgcgctgggaagaagcgccggagccggttgacgccggcatcgacgccgtcaaccacgccgtcggggtgggccccggg

SEQ ID NO: 276971 - DNA, 597 bp, Zea mays
gcagaccaggcgtttctccaacttctgttaagttcgagtaatggggacaatagtgaggttctgaagcagtctgctgtcgcttacttgaacggatctgattatgcatctcaggtccttttgccaagagaacagcttgagaaacaatgttcctatgatgctgcacgacctctgcccttctctagtaatttcagagatgccactgtcagaagtgctattcctgacccagatgttctccaaagcttcggtagttcatcggagctgtcctcaataataccaaatagagatgacatggttgctactttacttcaacaaacatcacttaaaggactgcctcctcaatggatacgaccctctccaccaagacttgaaatttttgaaggggaattacagtggctgaacatagacaataaccatgagctactatgggacagtaccatgtgtgcagacactagccgaggtgctgtgattcgagatctggtcgaacaagcttgtaaagctccacttgcattggcccagcatgaggaaattaccaaatatttgcggaaggactggaagctagtttatcattgtggatgacaccacagaagctccctgatc

SEQ ID NO: 276972 - DNA, 968 bp, Zea mays
atggcgaggaaggaagataaactcaaaatcaaggatgagtacaacaattatagggataggacagcctataagtttctgttatttccatctatcctcctcctactgagatggtggatatgggatggatgccttccagcattggctgttcaaatttaccaggcttggttactatacctgtacacaagctttgctttgcgtgagaatgtattaattgcgaatggaagtgacattcgtccatggtggatatatcatcactatctagcaatgctgatggctcttattagccttacatgggagataaagggacagcctgattgttctagcaagcagaggggggtgcaacttttcttgcgctgggcaatcatgcaaggcattgcaatgcatctacagaatagatcccagcggcaaagattgcgtactcgaatagctctaggaaaggctaaaagaatggatgtcgttgctggcgaaacagctggtgtggaggggcagctcttgctgctatatcctgtccttttcatattacagggtttcgaagcatatgttggagttttgcttcttcagacggctttgcgtgggcttgcttccgaatggcacgtctgagtcggccgcatcttgctggtggttatggcagtcgccaactttgtccacactatggagacactgctactgaaactgaggtttaaagcacagatgaagaaagcgaacagcacacacgatcgcccgcatcaaaattgacaggcatcatcgtccttggaaaacaaggatgctcgacaccgcctcttttgtaaatcctttcacccacattaacatttattgcctgctcgacattctctgtctctaattttttcgtgaattcgacctgctacatagaagtagatattccacacaacatggcggatgaaaccatatttaatccttcttcgatcactactgcatgagcaatgtactatatatctactctgatgaaa

SEQ ID NO: 276973 - DNA, 611 bp, Zea mays
gcgcagtgcaggcgtcgtcgtcgtcctccgcggatcccgcgcgcctcctccgccgatagtccttgtggcgaacacgcgaaggcaaagcaacaccgcaaatctctccccctccctggattggattgattgagctgcgcccgtccacctccgctcgaattgccattcccccctctctctcggcttctcttggatcgaattgttagtttattagagtgaagttgtcgggggagggaggctaggcgttaggtgggcgcctgcgtgctacgcctcgggagaaggtcaaaagaaaccgccccaccaccaacccaggcgactcccccccaacccaacccaacccgccattgctcttctttccctccccgtcgccagctggccagagccgccccgcccggagcccaaaggcgccgcctttcctgaaccccgtccgcggcagattgatcgattggttgttcggttccttggtcgggaatcagaggaggcagcaagagaagagatgtgcccgctgcgggtgatcctcatcttcctctccgccaccgttgccggcttcttcctcatcaggggcctcaacgctgaagcccgaccagttcgacgccgacgccgacgactcggga

SEQ ID NO: 276974 - DNA, 323 bp, Zea mays
cccgcgcgcctcctccgccgatagtccttgtggcgaacacgcgaaggcaaagcaacaccgcaaatctctcccccctccctggaattgccattccacctccgctcgaattgccattccccctctctctcagtttctcttggattgaattgatagtttattagagtgaagttgtcgggggagggaggctaggcgttaggtgggcgcctgcgtgctacgcctcgggagaaggtcaaaagacaccgctccaccaccaacccaggcgactcccccccaacccaacccaacccgccattgctcttctttccctccccgtcgccagctgg

SEQ ID NO: 276975 - DNA, 708 bp, Zea mays
tcggctcggctcgacgccgacgattctacatcctgcgctcaggagccgggcagggcggaggccgacttcggccggttcgacgtgaggcgcgtggtgcgcaccatctacgtgctcttcgccggcgccgagatcccgattgccaaggaagggcaggagatcatggacctggccgacctgtccacgcccctcccggagtggttcaccgaggaggacctggacgcctacgccaagctctacgagaagtccggcttcgggtacccgctcaagatgccgtacagatctatgcacaagctcccgaaccggctggacgccaagttccaggtgccggtgttcatggtgatgggggagaaggactacgcgttcaagttcccggggttcgagaccgccatgcgcggcggcgtcatggacaacttcatgccggacctcaagatcacctacatccctgaggggagccacttcgtgcaggagcagctcccagagcaggtcaacgacctgctactcggcttcctcagggaccatccctccgccgcataagcagcgggtgagaccgtcagaataatggaatgcttcctgagcaacggtttctctactctattgccgttgcctggatccatgaccgtgttaattaattaattagtacatatacctcctactcaaatcaaatgtacggtttttttaatctccaataaaaatcatcgttgctgcctt

SEQ ID NO: 276976 - DNA, 479 bp, Zea mays
gtgggcggacgcgtgggcggacgcgtgggtcggtgttttgattgggattgggttctgcttcgctctagctagctgttggtcgaattccatccatttcttccgttgcatcggcccctcccttccttctctagttcccttcccttatagtattaactacgacgatggtggtggatgctggtgttggtgttggcggcggcggcggtggcgccgggacatgtgccgtcggaggtttcgcagtctgggacgtgctgctgtggcgccggggccgcgccgacgtgagcgcctgcctgctggcgggcaccgtctcctcctggctgctcttgtacggcggctacaccttggtgtccctcgcctccaacgtgctgctcctgctcctcaccgtgctcttcctgtgggccaaagcggcgcgcctcctgaacaggccgcagcctcccgtcccggagctgcgcgttccgcagcaggccgtggacgaggcggcc

SEQ ID NO: 276977 - DNA, 527 bp, Zea mays
actgcttgtcttcctttctcggcagtcggcaccttcgcggcttctgctgatcgcctacgccgcttcgtcctgattctgattctctggtgctcccaagaagaaagtcagggaatgaaggaccgccacctcgcgctgaaccagacccagcgggtccgcctcgaggccgcgcttcaagagctccagtccgttgcgcccgccgccgcgcccgccgccgccgtcaccgtcgcgggcaccattcccgtcaatcaagaggacaacatcctcaaggggcatgggacgtcggaccaggacggggaggtggttgcgacgctctgcggggtggtggagcgggtcaacaagctggtctacgtccgcactcttcgcgcgagctgcagattctcgatggagatgaatggggttctgcaagccgcggatgccaagtactgggtttacaagggtgagggcgccgcgaatctcatccttagctacaccggctcatcccctactatgcttggcaaggtattgcgggtcaagaagctttttaatga

SEQ ID NO: 276978 - DNA, 302 bp, Zea mays
cggcagtcggcaccttcgcggcttcgcctgatcgcctacgccgcttcgtcctgattctgattctctggtgctcccaagaagaaagtcagggaatgaaggaccgccacctctcgctgaaccagacccagcgggtccgcctcgaggccgcgcttcaagagctccagtccgttgcgcccgccgccgtgtccgccgccgccgtcaccgtcgcggacaccattcccgtcaatcaagaggacaacatcctcaagtacagagcctccctcacacacactctctctctctctctctctctgtgtctttct

SEQ ID NO: 276979 - DNA, 492 bp, Zea mays
  unsure (1)..(492): unsure at all n locations
attatggtcggcgtggacgttatcctggctatggtcgccgtgatggagcaatgtatgaaaggcgaagccctgtatatgatcgctacggcgggggcagaagccccgcttatgatcgctatgacaggaggagaagccccggttatgatcaatactagtccggtcgattctgaggaacccagtaaagaagtagtttccaaggaagaggtggcgagcaacaacatgatttttgccacgccaagtatacctggaggagccgtggtgtcccaagtatgtctgagtgtagtcatggtaacgcgatgctggttccctggttgttgattggaacgaaacctaagcgtctgaaagagattggtttgcatggattgcttcccattgcccccttgcctgttttgaagtgtaatctttgctggtgaatgtaatgccagtaaaataacttgtacaccgtatctttacgtccccattttttaggcgggtgnnnttttagaatntatt

SEQ ID NO: 276980 - DNA, 500 bp, Zea mays
gtccaagctctaaagctggtgtgcgacgaaggcagcgagttcaacggatccacgagctttagccaagatctgcgtatccagcatgttgaggctatgagtagagcgagtggggatgtagacttcgttgacccaacgctatctgccgagctgttcacctcatcagcgcgttatgatgctatggatgcctctggttctttccgaagatactcgagttcaggtcctctgagagtagggagagctggactggacaaagagagggggctgtcaacaggcagctcaagtgagcacgttgggctacaaaggtttagaattgattcagaatagtcagcctgcatcctgcaagcagcttatcatgattgggagtgcagaactagacttcttcggaagcttaaactagacttcgcacagattttttgtacagttctagagatgtgtagatgcctttaggaaaaagaggtgtacacaagcgagtttttcagctttaatcccccacggtccgt

SEQ ID NO: 276981 - DNA, 645 bp, Zea mays
gccgcggaagcagtcggtggtgcactgggtgatgagcctgccccggcggtccgcgccgtcggagtccgccgagccgcatgccggggcggggctcgagtcggagctcaaggcaatgcttggcggcagtggcgcgcggtgccggtggttccgctacgaggagctctacgactccaccaaccacttctccgcagagaacctgatcgggaacggagggaacagcagggtgtacaggggcagcctcgcctgcggccggcaggtggcgatcaagttgtgcaaggcgtcggtggaggcgtccaaggacttcctccgggaggtggacatcatcaccaagctgcagcaccaccggatcgtccccttgatcggcgtctgcgtggaaggccgcaacctcatctccgtttaccgctacctccccaggggcagcctcgaggacaacctacacggggaaaggtcaaagccggcgctgtcgtgggagaaccggtacaaggctgcgctggggatcgcggaggctctgagctacctgcactccggcagcccgcggccggtgatccacagggacgtcaagtcgtccaacatccttctcgcagacgagttcgagcctcagctatccgattccgggctggtcatttgggcgctcacaaatccgac

SEQ ID NO: 276982 - DNA, 438 bp, Zea mays
gcaatcgctcttaagggactaggaagtctgcttgttattttgagcagctccctcggggcgcatctcctgctgctgtggctggctctgatcactcctatcttgcacgactgctacaactacgacacggataaggcagaattcgcgcggctgtctgcgaagttcacccatgacgtgacgctggttggagctctcctcgtcttacggggcatgaagacctccattccgaatcgacagggcatgaagatggctcacaaggcgaagactaactactaagaggttgctcgctcggcctcaggcgggtgtcaggagactaatagcggcccagtgcgaagcagtcgatgcgcatcgagctgtcggctgcgcttttacatgtatcgcatattcagattccattttgcagggcgcggcccgaacgaaggtgtgactagtgggcggcgg

SEQ ID NO: 276983 - DNA, 401 bp, Zea mays
gcaatccacgtgtcaagaaaataccagatgaagagtggtattgtttggcatgtaaaagaaagaaacctaagagacaacgtggaaagtttgcaaatcccaaagttgaatcatccaagggcattcaaagaccccgccgaggtcttggtcctattcgagatatgttactggattctgaatcatatgaaagtggggttcggattggtactaagtttcaagcagaagttccaaaatggtctggtcctatttctagtagagaagatgagtttgctgagcccactgaacttgatcgtagtaaaacgacaatgctgagtttcgaggataagaaaaccagtatcggtaactggatccagtgccgggaagttctagacacaagaattggttgtggcaaattggcggaggca

SEQ ID NO: 276984 - DNA, 518 bp, Zea mays
gcgcgccatcttgggcagacggttcaaggtcgaggaccgggacacgctgctgcgctacgtggatgacggcggccggctggccggcgggttcacgcccagagacctgttcccgtcgtcgtggctcgtccgcgccctgacccaccgggccgtgcgcgaggtggatgcctagcgagactccttgttcgccttcatggatgtagtggtaggtgagcgcttggatcgacgagaaggtcaactgaagaagaggaggaggagggagaggatctgattgacgttctcctccggagccacaaggaaggaaacctcccgttccctctcaccatgaggacaatcgaagcggtcatatttgatctgatcggagggggtatcgagacagcaacaacaacgctgcagtgggcgatggctgagctgatgaggaatccaggcatcatggccaaggcacaggccgaggtcaggggattgttcatgggccaaaccaaggtaaccgaagaccggctaggtgagctaccctacctgca

SEQ ID NO: 276985 - DNA, 479 bp, Zea mays
tcaagttttaggtttgtaaaatgcctgttaccagtcaggaatgagatattatcttcagatgataaataaaaaaactgggaactgggaattgtaccactatgttgtgtacttagttcttatctaattctaattccttggcttattcttcaataacaaatttctgggaggaggacaatgcactctttctacagtgatgttgtgcgccttcagggtctaagggaaaggttttcacattgcaactcaaacatggacgcgggccagtgtttctttccacgtgaagttgtgaagcacattgtcaacccagttttcgttcttaatccagcatatgatgcctggcatgtacaacatgcgttggctccagaagcatctgaccctcaacattcatggctggactgcagattggatattagcaagtgcagccctaaacaacttggaattcttcaaggttcaggaaagaactgcatgacgctataagtgaa

SEQ ID NO: 276986 - DNA, 1393 bp, Zea mays
attcaacaacactgggggagacgttgtcttgaaccaggatggcaaacgtgaaatactggggacacctactgagacagcgattctagagttcgggctgtcacttggtggagactttttggcggtgcgcaaagcaagcactcttgtaaaggtggagccgttcaactctgccaagaagagaatgggagtggtaatccagctcccagagggtgcactgcgagcacactgcaaaggtgcatcagagatcatactggcatcttgcagcaagtacctgaatgaagatggcaatgtcatccccctggatgcaggaaccattgatcacttgaaggccacgatcgatagcttcgcgaacgaggcacttcgcactctctgtcttgcctacatagaagttgaggatgggttctcagtcaatgatcagatcccaacggatgggtacacctgcattggcattgtggggatcaaagacccagtgcggcctggagtgaaggaatcagttgctatctgcaggtcggcagggattacagtcaggatggtcacaggtgacaacatcaacacggcaaaggcaattgcccgggaatgcggcattttaactgaaggtggcattgccatagaaggcccagatttcagaaccaagagtgaagaagagcttactcaactgataccaaagatacaggtgatggcaagatcttcgccactggataagcatacccttgtcaagcatcttcgaactaaactctacgaagttgtggctgtgactggtgacggaacaaacgatgcacctgctcttcatgaggctgatattgggcttgcaatgggcattgctggaaccgaggtggccaaagagagtgctgacgtcatcattcttgatgacaacttctccactattgtcactgttgcaaaatggggtcgatcagtttacatcaacattcagaagtttgtgcagtttcagctcactgtcaatgtggttgctctggtggtaaacttctcctcagcttgcctgacagggagtgctcctctcactgctgtgcaattgctctgggtcaacatgatcatggatacactgggtgcgctggcattggcgacagaacccccaaacaatgaactgatgaagagaacacctgttggaaggaaaggaaacttcatcagtaacattatgtggagaaacatcctgggacaggccttgtaccagttccttgtaatttggtacctacagacagagggaaagtggctgtttggaatcaagggcgataactccgatctagtcttgaacacactgatcttcaattgcttcgtgttctgccaggtattcaatgaggtgagctcaagggagatggagaggataaatgtattggaagcatcctaaccaccaacgtgtccatggctgtcctcggcagca

SEQ ID NO: 276987 - DNA, 490 bp, Zea mays
ggcatcggccagtgggggctctgaggccgagggaggcgaggaaagcggcgggtgccgggccgcccgcgccggtgccgagccgcccgcgccggtgccgaggccctcaccagtcaccaccccctcccctcttccgtctgtcccccgcttgccgccaccgccgctgcccgctcgcgatccttcccctttttaacgctcccgcggccccgcgtcgtgctcccttttgtcgccgctgccttcgtgcccgtactcgcgggttctcctcgctcctcaatctccgcgcctgggcgcggcgttcgccagccggatctgggcgcgggacggtgccccggacggtcgatggcgcgggcggcgctccggttgggcgcccgcgcgctcgcggttctcgtcctcgtgtcagtggctctgcttccacttgtcagttccgacgatggacacaaacactgcgagggtgttgtcaggggctgggcggattcctccacggggcgcgtga

SEQ ID NO: 276988 - DNA, 579 bp, Zea mays
tctagatcgcgagcggccgccctttttttttttttttgatgccaaccaaaccaatccattactgcccgcttaatcaaagtcaggatatccgacggggcggcggctgattcctatctcatattctcagagcagtaaactaccagcagtaaaataacaaaggtagcaggtagtacaaggcgaaggcgaaggcgaatctggaacgagctcgtgcaccgcctcgagccctcgactactcgccacgtgtcgcgagcaggcccaccaggacctgggtggagccggtgcaggagacgagggcaagatgcggagtaccagtgctactgctcggctctccattaaaaagcagtaaaaaaaatcgggtaccagaagtccagaacaagtcgtacactcgtactacagtctacagtcatggcgcgcacagcaaacggcgcgggtcgccacattatctgatccccgccccggtctcggcacggggtaaatcgaggcggtaaaaataccgatgaccaccaggcaccaggtaggtggcaggcgtccgctagtaccgggcgagcgcgcggcggagcacctgcgcgaggaggccgg

SEQ ID NO: 276989 - DNA, 377 bp, Zea mays
gcggctgctggcggaggccgactgcctgcccaactccaccgtgtgcagcgaccacgacaggcacgtgttctgggaccggtaccaaccggcccagcgcgcgtgcaaccttacggcccgtgcgttctacgacgggccggccaagtccgcgacgcccatcaacttcatgaagctggcccaggccagttaatggtttctgtatggctgtccacgaatacttactagccacgaatacctgtgaaaacagcaaaacaaaaaatgggcaccgttggccattatacatggaaacttgttaatttcttaggtaggtcgcgtggctcgatcgaggccaagccatgtacgtacaagttgttcaattatttatgcatgctgctgcatgt

SEQ ID NO: 276990 - DNA, 378 bp, Zea mays
cggacgcgtgggcggacgcgtgggccgcgtcgcccccgcttgggcggcgctaaccgtcgtctcctcctcttcctcccctctctacctcgccgccgtcggagctagccggcgggttgttcgcccggctcgtgaggaaggcggcggtggggcgtttcggcgtgtcgtggctcgcggcggcggtggcctgtgctcgcgcgcacgccaacggcggtggcattgctgtgctccaacgcgtggccgaccggtttggaggttgttgttggtccagagaatagaactgttgtttctaaagacaactttctgagagtgaatctcattggtgatttttggtggttataccagcatcccaacatttgaggacttctatcttgtgacccc

SEQ ID NO: 276991 - DNA, 466 bp, Zea mays
  unsure (1)..(466): unsure at all n locations
ctcccctctctacctcggggaggnccgtacaagccggcccctcgttttcccccctngngaggaagggggnggtggggcgtccccggcgtgtcgaggctcgcggcggcggtggcctgtgctcgcgcgcacgccaacggcggtggcattgctgtgctccaacgcgtggccgaccggtttggttccatgtttttggaattggaacaaggtcacttgggttcaacatcagggtacaagttaagaaaggttcatctgtatcggaggttgttgttggtccagagaatagaactgttggttctaaagacaactttctgagagtgaatctcattggtgattttggtgggtatacccgcatcccagcatttgaggacttctattttgtgacccctaagaagagtgctggtagtggtgagccacaaaaccttggtgctgtatatagaaagtggatgctggtggaaaaggttcgttt

SEQ ID NO: 276992 - DNA, 302 bp, Zea mays
gtggaggcccccgcgtcgcccccgcttgggcggcgctaaccgtcgtctcctcctcttcctcccctctctacctcgccgccgtcggagctagccggcgggttgttcgcccggctcgtgaccaaggcggcggtggggcgtttcggcgtgtcgtggctcgcggcggcggtggcctgtgctcgcgcgcacgccaacgagcggtggcattgctgtgctccaacgcgtggccgaccggtttggtaagcatggccgtggtggtgacgaacaacacggcgacagcggactggcgtggctgcagtggcggg

SEQ ID NO: 276993 - DNA, 1801 bp, Zea mays
aatgctctcaagagattatgttgtgtatgaagagtcgtgtagagacgcactattcacgaatagccgtttcttgtgttttttacatttaacccctagagacccctcaaaagacgggtattaaatgaggttacatataccattaagaaacagagaataaaaatacattctttgtaattcgatctagagatagttatgcctcatatactagtacggagggagtagtcaagtacactctgtagcgtggtgactttgtgtaagttaggatcaaaatctaagcaaccagttgctgtaggaattgtttttttggtggtattattatcgctatctatacgatctagagaaccatgttcaatctaatggaataaggtttcgtattgacctaggcaattttccctgggattagtcattttgttgaaagactctgtactatactctgtagcgtggtgatttttgctagatggcatgcttccatttaggaagaagagatacttttcatctgccctcatgtttacaattaccatgctgtagttgttctatataataaaagaagtgtttactctatcagtgatttggtttaaacagcttgtttcgatccgagatagggagcatgatagatttaaagcgctactgaaatcatgttctgggatttgactgtctggatattggctataatccaatcagtgaagttgtaaaaatgagcttttaagtatatttctatggcatagaacacagaatgcagatgtgactaggaaaagaagctcttcgctgttgaaaagccatctttaatcgacacgacaaaggtagcttatgccatgattcctgcaagtggcacttgcagcttggaccatggctaaccgtcaatggttcttgtttggaaatgttaacattcattgccatcttaagatcgttaaactcactttcggacaatattgttcctccaatttcaatagaaaattttagttgggccaacagttcagctgacttctctgtgagttggatagcatttgtccaattttctgtcacctttttgctaacttaaacgtggaaacacttgttgcaggggaccgatatttgaaaccattcgtcattccaaaaccagaagtcaccgctgttcctagggcgaaagatgacgactgcctcattcttgcaagtgatgggctgtgggatgtagtgtcgaatgaagaggcatgcaaagctgcgcgtcggcagatccagctgtggcacaagatcaacggtgtcacatcatcattgtgtgacgagggtgatgaatccaatgatcctgctgcacaagctgctgctgattatcttatgaggctcgcactgaagaagggtaccgaggacaatatcactgtcattgtggttgacttgaaacctcgaaagaaggccaagagcaactcataacactgggatggatccatcacggtagagctgaccatgatatgtccaaaggcttctgctgctagttgttggtcgtccgcaagagacttgaccccacaggtttttttcgttgggcctcaagaactgtaggtgcattttccatggagggttatgatgcttaaccccactctggtttctggtggctaaaacattctctccagtcggcttctaccatgagccctggcacttagtatattcctaatgttgtatgatggttgaacttgtaaagagacaagcggctgagacggtcactaaaattaacatattgttacttcatgattcaaggactatccatctgcctgaatccgatgaaagttttgtattgcagcttcaaaaaaaaaaaaaaaggggggccgctaacgaa

SEQ ID NO: 276994 - DNA, 630 bp, Zea mays
cccacgcgtccgcacgcctagcttctctttccaaaagcatggcgttcactgccctctcattgctataccacctctcgatcactgtatcgcttgtcctagctcgtggcattatcatagccggtgttgttgacatagctccacgtcccactcctctacctcttcctccgcagccacttcttgcaccctctccgactcctcgtcctccaggtcttggggcccctactcgcactcctcctcccccgctcccgcggccttcccctaggccaccacgcactccgcctacaacgactcctcttccacgtccatggttgggggcaccttctcctgcccgtgttcctcgtcctccacggctcggagcaccccctcgtactcctgttcttccgtctcctcgagtaggtgctccatctcccgcacctcctcctgttcgtcctccacagttgggagctccccttcctacccctgttgctcctactcctcagttggaggatccctctagaggtcctattcttcctcgaccgcctctcaagggtgttccaccttctactcctccacttgtggcaccacggttaggggcacccctcccatcccctcctgttccttcagctcggaaaggcacttcaacttcttcaa

SEQ ID NO: 276995 - DNA, 547 bp, Zea mays
aatctgcgctgcgcggaagaagggaaggggaaaagcagttaagcttgagcgcgcgcgacagggtcaagtcgagggccggggaatcgccggagaatggaggtgggcagggctccgcgacgacggctgtccccagcggcggcggctgcggctgtgccttcgctgcttctgttcgccgttctattcgcgggccgggcggcggcggcgttcggccacctgcaaggcgccggcgccggcgcgacggcgctgtacaagcacgcgtcgttcttcgaccgcgacggcgacggcgtcgtctccttctcggagacgtacggcgcgtttcgggcactcgggtttggattcggcctgtccagcgtcagcgctgcgctcatcaacggcgctcttggtagcaagtgcagacctcaaaatgcaacgtcatcgaagttggatatctacatagaggacatccagaaagggaaacacggaagcgattcaggggcatacgacgccgaaggaaggtttgttcctgagaagttcgaagagatatcgcagcacgccaagactgtccccg

SEQ ID NO: 276996 - DNA, 665 bp, Zea mays
gtctttgcctcgacagcgattcaatcatccgaagtacttctcaaatgatgttgtggcgaacagcttgcccatccatcaaagtgacccggtttcaacaatgaatgattcttttagcaactatttggcctccgctcctcccgcggaacaaaagaacttgcttgggaacaggctctatcctcttgttgagaggcatcagcccgaactcgcgagcaaaatcactgggatgctcttggagctcgacaactctgaagtggtcacgttgctttgctcgtcggagatgttgtcggtcaaggtcgacgagtgtgtccagctgttgcaggcaaccaagcctaaggctgaggatcatgaggcgctgcacccaggattcatgctggagcctcggcctcctactgtaaatgccagttgatgaggttctgattgcgcggatgagcttctggatgcgcttgtgtttagggatatggtaccaagctagtcgctagctgctgcgttcgttctctccttctagtttgcgaagttttggtgtttggattaatctactgagccgttattgctttctatatatagaacttaatagtaataaggactatatatattcagctagaaactttttatctgcccgggctacttgaatgtatgttagaccctttattcctatcccccattag

SEQ ID NO: 276997 - DNA, 447 bp, Zea mays
gctccccgagatcaggaagaaactcttcagccagcgagtatcgtcctaatgttttttttttgttactctgatcgattgttttctgaaataaaccagaagcggtccgatcctacgaagatacacaggtcctgacattgggtgaagcccgtatgtgcacgtttcggatttcgcaacatcgatttgagcttcaacagttcttcgctagcttgtcggtagaggcggcaatgagaactgttgaagctgtatcccggtggataggggacctccgcgaccgttaccctgagtcgagttgtcacagtctgtatctatcgctcctgaaacctgaggggcctgtattgtttgtcaagcactttgtttcttctcttctgtttgtagcctactatatccactgaaatctaaggggcctgtattgtttgtcaaaaataaaacctactaaaacactaaata

SEQ ID NO: 276998 - DNA, 621 bp, Zea mays
tctgttaagctagtgcaggaaatcagggaatgctgggaccctatagatccagttcggttcctgtgcctcaatatgcgctgcagagggataatgtatgtgctgagagacccgatgaaccagaatgccaatattacatgaagacaggagattgtaaatttggtgcagtgtgcaagttccatcatccccgggtgagatcactgccccctccagattgtgtcttaagtccaatgggtcttccaatacgtccaggtgaagaactgtgcaaattctattctcgttacggcatctgcaagttcggcgccaactgtaaattcgaccatcctacagtggttgctccaatggtctatgcgtatggtttctccgcgtctgcttcccctgcatccgcttcgactaatgtacctatggcgcgacgccttctgggatctccatcaggttctggatatatgtcttaggtgtctttttttcagttgaccttcttcgatgtataaaatccacggcaccgcctcaggcgctgtgaatgtttctcctaacttcccgccgggatcaaagttctgtaaattgagttgctgccggagatgtacagccccccttccccaattaatccagaactttgggaataac

SEQ ID NO: 276999 - DNA, 548 bp, Zea mays
ccatcatcttcattcaccatgatcccaacatctggggacaagacgcaagcgagttcaatccacagaggttcgaggatggcatttccaatgcgaccaagcatcaggccgccttctttccatttggatggggtcccaggatctgcataggccagaacttcgcgttgctggaagcaaagatggcactgagtaccatcctccaacgcttctcctttgagctctcatcatcctacactcatgcgccatacaccgtgataactttgcatcctcagcatggtgctcaaatcaggttgaagaagctttgaccatgatggtcatactgaatgccaaaacatgcactcctagtaacatattgtgattgttcatgtatgcaggtttaaatttagctttgatatgaataatgagaaccaagtgtgtatgaatggagtaggggtgtaatcggatcggatacgaacggatattgcttgtaccatatttgtttcatattttctgtttggattcagataacatcaagttgtgtcggataagatttgaatagatattgatatctt

SEQ ID NO: 277000 - DNA, 826 bp, Zea mays
ctttcttaaagaaaaaaaattcttggttactgggagtggtgggaagccgtacaccctttcttcacaattcttaaccaatgcttgttgttcaccttttccatttggttcagggaaaaaggcttctatattttctaattggcttatagctcagcaaaagaatactacagacagtggagtttatttgtatccagatatacaatgtggagaaattgttcatctattctctctggttttgcctggaaaccttctcatttcacctttcttgcctagtgaaggagttggtgaggctgatgagcctaacagctctggtcctttggtcgtagataccagcgggttggctgacaacagacataagcgcacggctgatacagtgaaactgaaaagcagcaaggctaagagaccgaagcctttgccaacgatagaaagtgacttttgctaccgccgggagagaggatttcctgctatccaaataggtctaaatcttcatagaattcaaacaagcaatttcttgcaagagtttcatggtaaagaatcctctatttttacttcaagctgggcaatgagcaaaaagaatgttgatttgcatgcagaaaggcacatcatgccattgttttcaaattgcttaagttcatataggcatttattgtctgaatctcagttggagaactcatacagtggatggccttgggatgccatgacaaattatgcggaagagttatcaccagtatctgagcaccaaaatgaattgttcacattgtctcctgaactgttcaggaatgcatttcttgttattcatcaagctggtgggcaaggagttaccttgaga

SEQ ID NO: 277001 - DNA, 781 bp, Zea mays
ctgatcacgtcactggaacaggactaataaaaactaagctacctggagttaagtctgttatttcaaaagctagtggagcaaaagctgatcattttgttgatcatggggacaaaatacactttggtaaccttttccttgaggtgcgagctactcctggccatacctctggctgtgtgacttatgttacaggtgatgctgatgggcaaccttcaccaaggatggcttttactggtgatgccttaattatccgggcatgtggaaggactgacttccagggaggaagttctgaacagttgtatcagtcagtgcattcacagattttcacattgccaaaggatacactactttatcctgctcatgactataaaggtttcacggtaagtactgttgaagaggaggctgcctataatgctcgactcacgaaagataaggaaactttcaagacgatcatgaataacttgaatttgtcatatccaaagatgatggatgtagctgtacctgccaatttggtctgcggtatccaggatccaccaccgaagatctgagctgttccagtggaagcctgcaactgcacttctggttgtttatgaactctggatcgccaccagaggcttgcagctgagttgttcattaaataatttgtttgctgcatcctgtgatatcgcgagaaaataatctaaccaatggccggtgtagcctctggttgtatgtggcaaggcactattgtttagagagatcaaaaggaacaatgctgatagtcaatgaagtttgattgcctgac

SEQ ID NO: 277002 - DNA, 522 bp, Zea mays
cccacgcgtccgaacaaagaaaaggaaaaggagaccaaggaaaaatgtgactaaagggtggtttccaaaagatgtcgaagcttcgtcgcagctcgtcctgcaagagaacgaagtgcatccactagctacttaactacctgcaagagaacgaaggcgagggtgagggtggcaagggtgtcaaagagaagcgggaggtagcgtggcgtcgccatggaagcatcggaggcttgggattaggtcggaactcagtagcgaagaggacccataacaggtgtgtgagatataggagaatgtgattgtgtttggccttttgttttgtgaaatttgtacgcgatgaaggcaacatgaaactaaaattaggggatgaattttgggagagaatccagacctcatagttgtcgttctgactgctagacagttcggtaagatcccttaggcatcatatgcatatgcatttgtatggttttcatattagccgtagaattcctcaaagcccccccgaatgatgcagattgttttaaa

SEQ ID NO: 277003 - DNA, 400 bp, Zea mays
  unsure (1)..(400): unsure at all n locations
cccacgcgtccgcttccacttgcacaccacgccccgacaaagcgagcgagagcagccacggcaaaaccctcgcgggcgtctctctcgagatcggcgggcagcagcgacgcgcgcgcacaacacagcaggtgaaggcaagtgagtcagtggttggggtcctcgtcctggctatgagaggtttaagtcggtatctgccgttctgcggcggcgggtgctgctgcggtgacggcgccggcagggcagggggcgtggcggatgggctggtgtgggacgtggccctcaaggcgcacgcgtccggtgactactccatcgccgtggcgcaggcgaacgaggcgctcgaggaccaggcgcaggtggtcgcggctccggccgncacgctcgtcggcgtcttcgacgggca

SEQ ID NO: 277004 - DNA, 427 bp, Zea mays
gtctgatcggatatggtgccagtgctgtgtgtccttatctggcactagaaacatgccggcaatggaggctgagcaacaaaactcttaatttgatgcggaatgggaagatgcccacagtgaccatcgagcaggcacaaaggaactttatcaaagcagtaaaatcaggtctgctcaaaattctttcaacaatgggtatctcactgctctcaagctattgtggagctcagatctttgaaatttatggtcttggtcaagaagttgttgatcttgccttctgtggaagtgtatcgaaaattggaggtctcacacttgatgagctgggtagggagaccttatcattctgggtgaaggcgttctctgaagatactgcaaagaggctagaaaactttggatttatccaatccagacctggaggtgaataccatgc

SEQ ID NO: 277005 - DNA, 393 bp, Zea mays
accgctgacgcgtcggcggacgcgtgggcggacgcgtgggctgacgcgtggggtgaaaatgtgacatgcatccagttcaaccctgttgatgatagatacttcattagtggttcactggatgagaaagtccgcatatggagcattctaaaccgtgaaattgttgattggaaagatttgcatgaaatggtcactgctgcttgctataccccagatggacagagtgcactaattggttcccataaaggcagctgccatatttatgatacatctgataataagcttctccaaaagaaacaaattgacctgcaaaataagaaaaagaagtccagtcagaagaaaataactggatttcagtttctcccagggagtacttcaagggtccttattacatct

SEQ ID NO: 277006 - DNA, 361 bp, Zea mays
gagaaaattgccatcacctaggttccaggttgaggttgtcctggtagattacgatggctcgcaaccaccaaaaccagccgctggagcagttgataataaatccgatgccgattcctcggctagcacggctgtgaaagaaaatagtgttgcgcctgcagaatccaacaaggggactggaagcaatgataaagatgaagtattctcggacagtgacgacggggaggatggatcatctaaggaaagaaaggagaggactgctggcgcggtggtcaaggcagtgtaaatgctgctaaaccatctcaaacaagcaacgtggagaaggaggcatcggccgctgctagcagacttgataaagtatagc

SEQ ID NO: 277007 - DNA, 711 bp, Zea mays
cggacgcgtgggcggacgcgtgggcggacgcgtgggctgacgctgccttttgctctggccttccaccccgtctgcccgcgcgcgctgtctcgtggcgacaactgggcgaccgccgccgccgtcgctgccgccgctacgccaagaagctaggtcttcatcggtcccttcgtcgagattttctccggcgacaagcacccagcaggggactacaagattgattttgatggattatgacaagtctagaagaagtaactccaaaaagaggacacattccaattctgatgacggaaagaggaaacggttgagctctaggcatgatgacacatctatgtcctctgagccaattgaaaccatctacaggatattgtgcccggcaaaaaagataggcagtgtcttgggaagaggtggtgacattgttaaggcccttagagaggaaactaaagccaagataagggttgccgattccattcctggtgcagatgagagagtaattatcatcttcaattaccaaaatgagcctgaaccgactgatgaagcagctgaagaaaaaaatagtgatggcttagggaacttcaaatcccattgctttgcccaagatgcgttattgaagatacatgataagattgtgtctgatgaaattcatgatgaagtcgccaatgatgaaaagtctgaaagtgtagatgatgtgactacttcgaatttggttcaagg

SEQ ID NO: 277008 - DNA, 460 bp, Zea mays
ggggctacagccgcaaagacctcggcgtcagctacgttaaggagaagcagctgacggtcaacatggggatcagcaagctgagggagaaggtgaaggagcaccaagagaagttccacagcgcggccaagatcgctggaaccaaccccgtggagtggatggagaatgccgaccgttggatcgtcgggttcctcgagaagttcgaggacggatgccacatgatcgaaaccgccattcaaggtcgggttcaggaggctctcaagaggcaaggcagctcagagccgaacctttccggggaggactccgactcgtaataatggtctgtagtatccaaatcaaactagcacggaagctggactggaggtcatactcgcgcagtctgtgtaacagtgtcagattgattatcatgcttttgtacgacatcaggaatcataccacgagatcatgcgatgttaacaacaat

SEQ ID NO: 277009 - DNA, 499 bp, Zea mays
catacgatgttactagtaaactggcaagatttactaggctacaagcagatacaaatatggtgctaccaaaacatttgtttgccactgtgctttcctgaatacagtcttactccaaaaatgtggaaataatatgcatggtgcagctatttacttatgatctgatatgcaatcagatgtacttgacgattccagtttattgtcattctgaccaactctagtgtttctgtcgcaacatttcaacttatttgcaagtggttattttgtttttactctcttatcttgagctcaattcttttttgaatgaaattcttgagttcatttcttgtcacatgggctttatacagctctgccttatgttttgcaccttcgcttatcaccatattctattcaacaagcaagcccagaatgcaatactttgtgtaaggtagtccctgcggagtgtggactgcttacacctagaaacatgttttgccaccatttctggtgtctaatttatatt

SEQ ID NO: 277010 - DNA, 454 bp, Zea mays
gtccggcttctcctcgtcggaggagaactgtccgctgtcgtgactgacgttggggaggtcggcctcattcttgatggggcgcagacctgggcgtcgcgcagccgcctctcccacgtggcgacgttgcgggagcagtgcgggagacgacatcaggagtgcggaaggtggaggggaatcaaccactgcattggtgtagattggcgggcaacctgtccgggctgccatcgtcggacggcgaccaaatctaggcagcgcgggtgttggtggcctccaacgaggcctctcctcgactgacgtggtggacgcgacagccatcgagcgcaaggtggagataatggtgttctcgaggatcctcgcgttgcgcagcacacatagttaatctaatctcgggacacgcggaccgttcgagcccaagggccggaccgtccgcttattatggtgtccaacacacccg

SEQ ID NO: 277011 - DNA, 1125 bp, Zea mays
gcaggatgctataaatctatttctggggtattttcaaccacaagaaggaaaaccagctctttgggagctggatactgattactatcttcatgtgacgacagctggggatgatcttatgtctgatagctaccacttgagttctgcacctggaaataatgtgttcatggggtctggagctgcattgaaccctgggaccatattgagccctgtcccagcatgcaaagaggatttctcacggaagaagcttacttcgttcgacaaacttatagaaagaacatgtagttctataaggaatgtaaggcttcattgtgacgctgatctaaagccaagtggaggtgttggaacttctggaatggcaccagatgcagctgagatacagcttaaaagccccaactggttgtttggtcaaaggaagcatacggagacaatttcaaccgcaagagttgccccggttgaaaacgtgaacgaggggaacagagacgagtcaaatgtgtctctttgtggggaactaatttggctatcctcctcagttgaatcatgcgaggaggacattttcagaaggtaccttgcattcacgacagcggatgtagagaatggctggtatggcggaacactgctatatgaccgagatgaaaacagcggggcttacaggcactattctgagctctgccagggagctgtcatggatccctttgagcatgaccctgagaaagagcggcactacgcggaggcccttagcgtggatctcggcgatgcacgggtggaggccgaaatgcaggccgcgcttgatgactaccaggtcatagggtcggacctgagcatcatcccttcgtgcggagcactcgcagaggacccgagccagctgacgaggtggataattggagatgagaggctgcttgtgggtgctgctgcgcagtagaccggtggggttctgtcttctactcttctgtggaaggttgtacggagcaaccgattgccattcaccgacccagcctttgtgttctatagatactatacttccctgaaacaattactccaacacgtgcatgcaatttattgttgtgcagcaggtggtaatgctgctgggattagctttggcaataatagttgattgttgtgcagcat

SEQ ID NO: 277012 - DNA, 349 bp, Zea mays
caggtcatagggtcggacctgagcatcatcccttcgtgcggagcactcgcagaggacccgagccagctgacgaggtggatcattgaaaatgaaaggctgcttgtgggtgctgctgcccagtagaccggtggggttctgtcttctactcttctgtggaaggttgtacagagcaacagattgccattcaccgacccagcctttgtgttttatagacacttccctgaaacaattactccatgtatttagcagcaggtgttttataaacacttccctgaaacaattactccaacacgtgcatgcaatttattgttgtgcagcaggtggtattgctgctggaattagctttggc

SEQ ID NO: 277013 - DNA, 412 bp, Zea mays
cccacgcgtccgatacgtacgtgaagaaccaacaggagggccgggctctcgctcgccgcgcgcacccccctctctctatctctcccgccgccgttgatctatcaccgggccgccggtccgtgactgtcgccagcggctgctggttgttgcttggttgcgtcgccgcgggagccgtgtgacccgggcgcaatgccgggagccgtgatcgtgcaccaccacacgaggtacaagacgtgccccggcgaggtcaccggcatcgccatcttctcgtgcttcatcgcctccgtcgccggctgcatcttcggctatgacatcggcctcacatccgggctgacgtcgacggagccgttcctggtcaagttcttcccctccatctacgaggagatgaagaggcaggtggtcgtcaaccagt

SEQ ID NO: 277014 - DNA, 467 bp, Zea mays
ggcgtatgcgttgcgttgcgttgcttcgagttggaggttggagttggagtgggccgcgtgcgagaggatctgagcggagaggccatggagtggagtgattagcggttgctgggtcaggagaaggcggcgtgtgttttgatcctactcgcgtttgaggggccccgatttcgagcgggtgttcaattttggtgccggatttttaaggaggatccaatttaggaagaattttggttttggggacaatggttttggactgcctgatattcgattcataggttggtcaaacgctttggagtagagaatttttttttcccggaaaacaagaaccatttttctagttgtgctactcgccaatcaatccatggaagctgaactctggaagaagaaactttcctaattagacccggtattttgtggttggccgttggcgtttaaagcgcgtttgagtttaaatatatgaacactat

SEQ ID NO: 277015 - DNA, 828 bp, Zea mays
  unsure (1)..(828): unsure at all n locations
cggacgcgtgggctgcatcccggttatgggcggcgtgcttgagcttggcacaactgacacggtgccggaggccccggacttggtcagccgagcaaccgcggctttctgggagccgcagtgcccgacgtactcggaagagccgagctccagcccgtcagaagcaaacgagaccggcgaggccgcagcagacgacggcacgtttgcgttcgaggaactcgaccacaataatggcatggacatagaggcgatgaccgccgccgggggacacgggcaggaggaggagctaagagaagccgaggccctgccagacgatgcaagcctggagcacatcaccaacgagatcgaggagttctacagcctctgcgaggaattggacctgcaggcgctaccgctaccactagaggacggctggaccgtggacgcgtccaatttcgaggtcccctgctcttccccgaacccagcgccgcccccggtggacagggctaccgctaacgtcgccgccgacgcctcaagggcacccgtctacggctctcgcgcgaccaggttcatggcttggacgaggtcctcgcggcagtcggcgtgctccgacgaagcggcgccggcagtactgccggccatcgaggagccgcagagattgctgaagaaagtggtggccggcggcggcggtgcttgggagagctgtggcggcgcgacgggagcagcacaggacatgagtgccaccaagaaccacgtcatgtgagaccgaaagcgacgagagaagctcaacgagatgctcctcgtngctaagtcactgcttccgttcatgcacagggtgaacaaagcgtcgat

SEQ ID NO: 277016 - DNA, 481 bp, Zea mays
aactcgtccaagcgtccaagaaaaggaaattgaatctgctaaattctccggaacccccgttgccagccggcgatcgcgccgtgggatctcatcgaacgaagcgggcggcgacggcgatgtcaagggaggcggcgaggacgaggagccggctcctggtggttggcgccaccggccgcctcggtggaagcatcgctcgggccagcctcgccgcgggtcaccccaccttcgcgctcgttcggccccaccacttcgcacgccccgattcccccgtgcttgggccgctcgtagccgccggcgccactctgctccaggggtcactggaagattactcgagcctgctcgaggcggtgcgtcaggtggacgttgccatctgcgcggtgtgcacgaagcaggtgctcgagcagaagcctctgattcgggctataaaggaagctggatgcgtgaagagatttattccggcagaatttggagcagatccaac

SEQ ID NO: 277017 - DNA, 441 bp, Zea mays
gaagatgctaagttctgcgctttaagagagtacgagagaattaaggaaaataacaggagcgaactccagcgactagacagcgaaaggaaagaagaattcatgaggatgctaaaaggatttgttgcaagtcaggcggcctacgcggacaaaatcgtggatggatgggagacggtagcggaggagacgagcggttatgttggtgtgcgtggatctgatagcatgacttcgtagcttcgtttggttggatgtcaagtgtttgtacaatgtaatctaggttatggatttgggaatagaagaaaggtgcgccaggttcgatttgtttgtataatcaaataaaggtactgccatggagccacgatttcacgtcctggatgtcaagtatacgttgttcttctgtggatatcacaaatacatcattgctccggttcgttccagagcagg

SEQ ID NO: 277018 - DNA, 437 bp, Zea mays
catcctcggttgcagccggagttcttgacgacggtgcccaacgaggaatagaaaggagggaaggaaaaaacgcgtctctgaattccacacggccggcgaagacacttgaacagtcttgctggcaatgggaaacaagggaccagtgccaacacaggaatcgacgaatgatgacgccgaggcaccgtcgtctacgtctgctgcgagcaatactaagagcaagacagacgtggagcgagagcagctgttcgaaggatcaagcgacgacgacgcccacacgccacggaagagaagcacccaggagatcctcaccaaatacaagttcaaaggggacgccgcggctgccgcggctcacgcgaagcagaagctcatggagcggcaggagaaactcgcgagaatcacggagcagtccgcggagctggagagcgaggccgagaact

SEQ ID NO: 277019 - DNA, 360 bp, Zea mays
cccacgcgtccgcccacgcgtgcgcccacgcggcccgacgacgtgccctcccggcgtgcccccgtcgtcctgccgtccggggatcgatctggccatggcacaacactgagatcctcgtcgtcgtgagccgaacgttaatccggcggacgcgggggcggcgccatatgctgcggccgcagctaggatgacaatcacgtacgccgtcgatgacaactgaccgatggtgcggccataccttgaaagctgtcaggacacgttagcagaccttgggtactctgttgtggccgtgtgcatcgacaaggtcgagatcagccagaacactctcaagagggccatcgactcgctggtacagaatgggca

SEQ ID NO: 277020 - DNA, 823 bp, Zea mays
cacgctttttctttctaacccaacatctcgtctctctcatcctccgacgccatccgctcccggcccggccgagccgcgcgttgtgtatggattccaaaagcaatcatacaggggctatggcgaggccttacaaacctaagaatatcctcattacaggagctgctggttttatcgcctcccatgtcgcaatccgcattaccaagaagtaccccgattacaagattatcgtccttgacaaacttgactactgctctaatctgaagaacctgcttcctgtgagctcatcaccaaacttcaagtttgtgaagggtgatattgcaagtgttgatcttgtcaacttccttcttgtcacagagaacattgataccataatgcacttcgcggcccagacacatgtcgacaattcatttgggaattctttcgaatttaccaagaacaatatttatggtacacatgtacttcttgaggcctgcaggattagtggccagatcaagaggttcatccatgtcagcactgatgaggtctatggggagactgacgaggatgcagttgttggcaaccatgaagcatcacagctgcttcctacaaacccatatgcagccaccaaagcgggagcggagatgcttgtaatggcatatgggagatcctatggactgccagttatcactactcggggaaacaatgtctatggcccaaatcagttccctgagaagcttatcccaaagttcattctcttggccatgagaggggagcccctccctatccatggtgatggagtcaatgtccgtagctacctctattgtgaggatgttgcggaggcatt

SEQ ID NO: 277021 - DNA, 426 bp, Zea mays
gtggagttcctggggactttcgcgagcacggtgcacctgagcgggagactctggctcgctagcatgatgatcggctcgggaagcctgctgatggcgcgccggcctcaagttcatccctgtcgatccgggcagtgaaggctcgtctgaccgccacgatgggtaccagcccatccccaccggccccaacgccgtgtgatttccaagaagacctcctgccatccttcttgatttttatttccttctatagaaacaatagaactgaaccctcggatgcgtttgcagtttggggaaaaaaaagatgttttagataggagcgacggttgcatatgatggccgtcctcaagaattttaatcctcgtctcttggctattttgtctttgtagccggcaatgttttgtttctgaatttggatgatagaatcgatgt

SEQ ID NO: 277022 - DNA, 705 bp, Zea mays
atcctgagtggttctggttctcatatgcgcacgcatatttttgttcttattcctatgtctgcatttcggtcagtggaagcaattgagcgcggttcctaaactcggatcctgcattttgtttcggcgatatgtgttggtgttaccagttgctgcagcgatacttccaatttctgcgccgatgggtttcctcgttttcttcttattttgtttcctcgtcgtcgcagcctgcaaattggtagtttcttggttcttatcagtggagctggctttggaatttgcagcgcaccgttctgagctgcgctggtgctcctggaaaggtgctggtgcctggaggtggcagtgatgacttgctttcctccgcagagccggtcggggacactcaacctgaagaactacagatacctgaagcagaactgactgtggagaagacatcctcctcaccaactcaaacaacatcagcagtggctgaagcaagctcaggagttgaggctgaggagaggcctgagctctcagaagtgattggagttggaggtactggtggaaccaaaaattgatggtgcaggcatcaaagccaaagcaccactcgtggaggagaaaccacgagttatcccaccaccaggagatggccaacgaatatatgagattgacccaatgttggaagggtttcggggtcaccttgactaccgatacagtgaatttaagaga

SEQ ID NO: 277023 - DNA, 463 bp, Zea mays
tgaccttcagcaaggagacttcatcgtgatctacaaggacgacgagaacaaccgctttggcgtacgggcaaacaaggcaggagatgagcagaccgccactgtacctcaagtccatgaacacatgcacatctctgccccactgccagctccacaagcgtcccatgactatgcaggccccgtcgcagcagaagctggtatgctcgccatcgtgccacaggctgacgagatattcgacggcatactgaactccctgccggagataccagtggcgaacgtgaggtactccgacttcttcgacccgttcggtgactccatggacatggcaaatccgctgagctcctccaataaccccgcggtcaacctggctacgcacttccatgacgagaggatcgggagctgctcgtttccctacccaaaatccgggcctcagatgtgagatcctggcagaaaaactgccgcggtc

SEQ ID NO: 277024 - DNA, 630 bp, Zea mays
accgcggtcgtcttcctcggcccgctccttatcaagaagattgttgtacctattcttcactgggaatcaacaacgttcagcagaccagctattgctctaatatgtttcggcacaatcgcattattcccaagtgttttgttaccttcttcgcccttcatgtggcttgcggggatgacttttggatatctttatggttttttaataatcacagtgggtatgagcataggcatgtcattgccgtattttataggttctgcattccactgtaggatacatagatggctggagaagtggccaaagaaagcagcttttgtaaggcttgctggcgagggagattggcatcatcaatttaaggctgttgctttactcaggatttctccatttccatatttagtttttaactacgcttctgtggctacgaacgtcaaatattacccatacatagctggttccatggctggaaccatacatgaaactttccttgcattattcagtggtatatcttctacagtgcttggctgtatctatctagccatgggtcattttttgttgtgtttctatattattctatatatttctttctcctttttcttttacatctcacttcctctctctttttttcttttttat

SEQ ID NO: 277025 - DNA, 656 bp, Zea mays
cggacgcgtggggccggggcggccgtcgctgccgcctacggtgcccaggtcttcctgcccggccttcgccggcgccgagcacgagaagaattgtagttgcatcctaagcatggactgtaatagtgatgatcttgataagcagaatgaagtgacgggatctcgagtattcattcctcaagatgcccaaggggttatccttgcttttcttcctggcagggatgttgtcaagctccgcagtgtgtgcaagttctggctagagtgcgttgaagaacatagttttatggaccgtcacctgaataatgcttgccgctaccaccagtccattgcttgtttcacctcgcttgatcatggcctagtccacatgtacacattcgatcctgccacaatgaatttcagaagtgtggagctcgtgttctcaagtaggtttaacgatgtcagccccctgcaacggcttggtgtgtgcctatgatataaaaggcgatgctgaggtcttgaataccacaactaggaagcatttgaggctcccagattcaccactcacgtcacgggctctttactccgaatatcctgttggattcgtgcactctacaacacagtacaacgtgagctctatatgtcacacatgtgcgctacttgacattcgcaatctgaactat

SEQ ID NO: 277026 - DNA, 373 bp, Zea mays
ctgggtcggaaaaggccaaaaactcatcggcatcctccatctgaaaattctctcgcctgatcgtccaagcacaatcccgaaccctaaccagcgccccagctcgccgtcggcatgtccgccaggttgctccggcgagtcctccaggagcgtgaggccaccccgcaggacaccgacgtcgccgacgacgaccagtcggtggaggaggaggcttctcctccgcggtcctccgcgcggaacctcttcgatctcctcgacgacggaaacggcgacggcggcgaagaagatgaaaaggaagatgaaacagaaataattcaagctgtgagctatacagaacagagacattctgtgcaaaagaaagcgaacgctgttcccg

SEQ ID NO: 277027 - DNA, 721 bp, Zea mays
  unsure (1)..(721): unsure at all n locations
gactggtccggattaccgtgtcgtccacgcgtccgtctcgtgttcgtccacgcgtccggntcgnnactgggctttttagtcgtgtgcgagcgtaatcggaaggaagcgcaggcgaaccacggaaagtgcgggaggaatagattcattctgcgccgtccactcttttcttggcctcatgagctgtttcagattccgtccgccacaccggccacacgacggagtcatgctggcagcagttgcctcttgttctcctttttcttcttcagctcccttggggagagggaactgaaatgaaactgcgcggcagggagggccagaggcttcttctctgagccgcgaaccggctccccgtccaggagaagaagaagccgacgacgaagaagaagcgcttctgggctccgtcgtcgcatgaagaaggaaaccatggaggggcatgtgccattgccattgccattgctcccggacggagaaactgcggtgggctacagcaaggacgccgnctnctcctcctcggcggctctctcgcctctgcaagaggagatttcgagcctgcgatcgaggcagcggcgtgttgacaggagacggcgggaggcgctcgacaggctcgttgacctgaaaagaagcgttagggtcttctgccgggtccggccgctggctcacacgaacagcttgcatgcccaatcatcaccttgtaccgtcgagcangagaggatcacggtca

SEQ ID NO: 277028 - DNA, 894 bp, Zea mays
cttggttttttggccttgtctcggcttggtgtgtatatacctttgggtggggtcaaccgagaagcttttgctgggaaccttgaccagaacagcctgctgggcactttagattctttctctggtggaggcattggccggcttggaatttgctcccttggcattgtaccatttatcaatgcacagattgtgtttcaactccttgcgcaactctacccaaaattgcaagaccttcagcggaaagaaggggaagcaggaagaaagaaggttcttcagtatacaagatatgcttctgttggatttgcaattgttcaggccattggacaagttctttatctccgtccctatgtgaatgatttcagcacagaatgggttctaacatctgtgacattattgacacttggatcggtctttactactttcattggtgaaagaatatctgatctgaaacttggaaatggaacatcacttcttatatttacaagtataatatcatatttgcctgcatcatttgggaggacagttgcgcaggcatttcaagatgggaattatgttggacttctcacaatcatattgtcattcttactattagtccttgggattgtctatgttcaagaagctgagcgcaaaatacccctcaattatgcttctcgttacagcagtcgaactggggaacttcagcgatctgcatatttaccatttaaggtcaacagttctggagtcatgcctatcatattttctacatcttcactggctttgcctggtactttggcacggttttctggcttagactttcttaagaaggctgccatagcccttaatccaggaggtgctctctatcttccaactaatgtattacttatagccttcttcaactattattacacgtttctccag

SEQ ID NO: 277029 - DNA, 397 bp, Zea mays
gcttgggaagctgcaactgagcttcctttatctcataggcgtgatagtcatggggtttgaactcatgaggaacattgtaagggtgatgaagccagtaagggttgcagcaattgagtcgtaagtcataagaaccaaatacatgtacgttgttcttgagaccttgtggtagtcgagatgatactttcacttctccccaatgcctggagatgatgattttagagtagcatctgttaacacatgtgaaactcggcctgctcctagtagcagaataatacgaaacactgagaacacagtgcgcgcctggacagaaatgtctatggcaaggttgcccgttggcgtatgtacctgtaagagtatctgtaccataccgagatttggaatcgatgctttgctgctt

SEQ ID NO: 277030 - DNA, 314 bp, Zea mays
tgctgcggatcaaattatctgtcttgtggctttgcaacttactgatcgtcccctgagtctgcagatccaaatacatgtacactgttcttgagaccttgtggtagtcgagatgggagatgatgattttagagtagcatctgcttacccatgtgaaacttggcctggtcctaagagcagaattaatcgtaaccactgagaaaacagtgcgcgcctggacagaaatgtctatggcaaggttgcccgttggcgtatgtacctataagagtatctgtaccccaccgagatttaaaatcccccctttgctgcttatttcg

SEQ ID NO: 277031 - DNA, 426 bp, Zea mays
  unsure (1)..(426): unsure at all n locations
gtgccgagctcaggggcgaggcacgcatgctagaggaggcctgcacctcagaggggtgggcgaagatacccttcgggccactgcgcaccgacgcgattatcgtcgagccccctatcgcggggttaccggtgatctcgtccgctcccagccggatacctcgttccattcaaaggcgcccctggcgtgggtgtctaccgaaggcgatccatacttcattctcgacaacgtcaacgagcgagatgtctgggctgagttccaggcacaggaccatgtaagggcattggcctcttctttgctgaggttgcttgtcccttagcatgtggtgatgggagtttcgcttctttacatgatctcatgctgcggtctattgctaagtccatcttcccccgccgcgaacggngggtctgggaagcactgcaacgccac

SEQ ID NO: 277032 - DNA, 587 bp, Zea mays
cctgcacctcagaggggtgggggaagatacccttcgggccactgcgcagcgacgcgattagcgtcgagccccctatcgcggggttaccggtgatctcgtccgctcccagccggatacctcgttccattcaaaggcgcccctggcgtgggtgtctaccgaaggcgatccatacttcattctcgacaacgtcaacgagcgagatgtctgggcggtgctccgggcgcacgaccagttggcctagaggagcgccgaagtggccaacctgacgtcccggtgcaagggactgaaggaggagggtgtagccgaccgcaaggaggcctgtcgactgagggctgaggtccttggtctgaaggcagaggcagaccaccgtgaggaggtgctacggtgggcgcaggagggcctccaagcggtgacggaggaacgtaactccctcgccaagtccctggaggacgactggtcctcgggtcaagccctggccgcccaaatagaaggtcttgagaagagtctggagggcatggcttggaccgtggagcaacatggggccgaagcggtggcaaacctctttcaagacctcgatgtggggggca

SEQ ID NO: 277033 - DNA, 747 bp, Zea mays
ctggagcatcctctacgtgctgaacgtgatctacagcctcctgacgggcaggctggtgcgcgagaaggtcgacccggcggtgcagcgggtggtccgcagccagatgaacgcggtggactcgtcgccgttcagggagtcgccggacctgttcgaggtggaggccaccaacggcatgccgcgggcgtccatcgacaagctccccgagtcgtggatcaccgaggagtacaggcgcgacgccgtcggcgacctctccggctgctccgtctgcctccaggatttccaggtcggggagaaggtgcggacctgccggactgctggcacgtgttccacgtgccgtgcatcgacggctggctcatcaagcacggctcctgcccgctctgcaggaggaagctgtaggcggatcgaccggacgacgccatggacgatgttcttctctgcgatcgagccgatgatgtgtgtgtgtgtgtgcccccgccgccaccaccgatagctgctgctagggtcggaggagggaggaggaagaagagactgacatctatagaacccttaatttatagagagggcttttgctttgctacttgtacgtgctctactacgtacctattgcaactttttttttgattcaccatgatcgacctccttcctcagatccatccatgcatgtaatataccctggaccggcttgtgcttcgttcgatccattccatgcatctccggactgtgatctcgatctggtgtaatatatat

SEQ ID NO: 277034 - DNA, 530 bp, Zea mays
tcgcccacgcgttcgtccacgcgtccggtctttggtcccggagggaaaaggacaaatcactcacacagagggaacaaaagggcacaggaatcgcgacagcgtgggaggcgtacggcgcaccgcccggccgccggatctgcgccggcgacgcgcccggacgtcggatctacgccgccgcaggaggagggaggcggcgctctggccgttccttgcccgcgagcgcccagatccgtcccgccgccggatatatatatcaatcaatgcccctgtgatatcgagcttcagttgatgcagtggtgaaaacatcttctcgaaaaactgctggctgcaagttgcaaaagtttgtctttcccttgttgtgttggtgcttccttctctggtggagtacacgggagaagtttgcagatacaggcagctcctttcaaatctcctatgtccagggatttggactgtcctgttcagacacagatggctgtggcagtcctggaccggagctttagcagcgaatatcctggaggtagcagaattga

SEQ ID NO: 277035 - DNA, 440 bp, Zea mays
ggagcacagagctagctagccagccagccagcagccagcttgctcgccgcgcccgtccttctgcctcgcctccgttccgttccgttccgtcccgcccgccgccgccgccgcattcagggatggagatgaagaagatcgcctgcgccgtcctcgtcgccgcctcggcggccaccgtggcgctcgccgcggaggctccggctccgggccccaccagcggctcctccgccgtcgcgcccgccgtcggcgccgccctcggggccgccgtcgcctgcttcttcgcctactacattcagtgagccggccgcggccggtcgcccggaggccgaggaagagacgaagcgggagagagagtgacatggctgcgcgcattccgatgcgtgggcatgtttttgattcgacacaccttttgtcctctttttctttggtccctctttctcctt

SEQ ID NO: 277036 - DNA, 1351 bp, Zea mays
ttctacttcatcaagtattctcatgaagacgagtcccttgaagaccaagaggagactgggtggaagtacattcacggtgatgtattccgtttccccaaacagaagtccgtttttgcagcaattattggttctggaactcagcttctcgcccttgcgattttcatcttcctcctcgctcttgtcggcgtcttctacccatacaaccggggagctctcttcactgccctcgttgtcatctacgctctcacgtccggtatcgctggatacacagccacttctttctatctgcaactggagggcacaaactgggtcaggaatctggtattgactggctgcctattctgcggacctctcttcctgacgttctgcttcctgaacacagtcgcaatagcgtacagcgccacggcagccctgcctttcggcaccatcatcgtcatcatcctcatctgggcgctcgtgacctctcctctcctcgtgctgggcggcatagccgggaagaacagcgacactgagttccaagccccctgccgcacgaccaagtacccgagggagatcccccagctcccgtggtaccgcagcaccgtccctcagatggccatggcggggttcctcccgttcagcgcgatctacatcgagctgtactacatcttcgcgagcatctgggggcacaagatttacaccatctacagcatcctcttcatcgtgttcatcatcctcatcatcgtcacggccttcgtcacggtggcgctcacctacttccagctcgccgtcgaagaccaccagtggtggtggagatctgtcctgtgcggaggctcgacaggcatattcatattcttctactgcatctactactaccacgcgcggtcggacatgtcggggttcatgcagacgtccttcttcttcggctacatgacctgcgtgtgctacggcttcttcctcatgctgggaacggtcggcttccgcgcgtcgctcttcttcgtgcgccacatctaccgctccatcaagtgcgagtaagcgccggacgtgcgcacgcggtctggcatgctcatggctgttgttccgggtggcttgggatccaattgcagaaaccgtcaccagttgggttgtgcatgaatttatatgctgaagcgccagcagttgccctcagtatggacctcttcgcctttagcctttatatatatacgttggagctcccggagaggaggatctatgtagtgtaggactgtcgccagaggcagtgtctgtattattatctagtacacttgtagtggagccagtgtcaaccttcaattatgttgctgaaaaaaacgccgtgctcagtagtgcataccatgcacagtttcttttggtt

SEQ ID NO: 277037 - DNA, 428 bp, Zea mays
cccacgcgtccgcccacgcgtccggccatggacaaggtgcccacggaccctaataaggggacgacgacgatataccccaatgcatggcaagaagatatatatatcagcacaacgcgtgctgcatgcgatgctgcttgttgctgcaattgatccactatactatactataggagtattattaattccagttgcagcatgcatgatgatatatatatgtgtctctatatgcatgcgttggtctatacaattcagatatgcatggtgtatacaagtggtagctagtacgcacgtacacatccaggcattaatttgtacgtcttcgcgtgcatttgggctgccagcttattaattaaagtacatactctttactaaaaaaaaaaaaaataatcaacaagaaatatcaaaaaaaaaaaaataaagaccgaaac

SEQ ID NO: 277038 - DNA, 571 bp, Zea mays
gatcagaagcctcccccgccgcacccgccaggcggcgcgggcgcgcggcaatggccgcgcagaacgctgggatcatcatcgattgtcgacaggcgatgtcccccgatcccccggccgtggagttggaggtcatcggctcatcttctccgtccatcacgccatgtcccgctgcagcggcgcccgccgacgccgatgtcgatcatgacggatgcaccgcggaattctcttcttcaactgatcgagaattacaggaccatatcagacagtgggaagggtcctatgggcagggtgtactccgtaggatgccggatggtggcgagaagatgcattcacgtgtcctccggatgaagaaggagctcgagcggcggagggccagacagaggatggatgtcacgcccttgagacagacagtgcaagctaagcgtactggtggcagcagtggagaaatctacaacttaaagtctgatgatgagaccatggacagtacggctagcaaacactatccaaactcaagttgtactacatctacgaagacctatacccaggttaaaggagctgcatatgaagaaca

SEQ ID NO: 277039 - DNA, 651 bp, Zea mays
  unsure (1)..(651): unsure at all n locations
gatgtgtcccgtccattcctttaggaggagccggatccggcgccgcagtcgcgcaaggtcccgaccgccgcggcctcggccgccgccgccaaggagcggaaggaggtgcagcggcggaagcagcgcgacgaggagggcctccacctgctgacgctgctgctgcagtgcgcggaggccgtgaacgcggacaacctcgacgacgcgcaccagacgctgctggagatcgcggagctggccacgccgttcggcacctcgacccagcgcgtggccgcctacttcgcggaggccatgtcggcgcgcgtcgtcagctcctgcctaggcctgtacgcgccgctgccgccgggctcccccgccgcggcgcgcctccacggccgcgtggccgccgcgttccaggtgttcaacggcatcagccccttcgtcaagttctcgcacttcaccgccaaccaggccatccaggaggcgttcgagcgggaggggcgcgtgcgcatcatcgacctcgacatcatgcaggggctgcagtggccgggcctcttccacatccttgtctcccgccccggcggcccgcccagggtcaggctcaccggcctgggggcgtccatggacgcgctcgaggcgacggggaagcgcctttccgacttcgncgacacgctc

SEQ ID NO: 277040 - DNA, 552 bp, Zea mays
cccggtcgacgcgacgcgtgcgcgcccaaccctacacgagtacgagtacctaacatacgagtatacgaccacgagtccacgagcagacgagctcctccgccaccagtgtcatcgcgtcgccgtcgcgtccgcctcgccctcgtccatggcgtccgtgtccacggcgccgcgcgctccactcccggcggcagcgtcgtcctcgttatccgcgcggcaggtggatccgaaccctagcggcagccactttttcgacgggcggcgcctccgcgtcgtccgccgcctcgccggcgcggccccgtcgcggcgcgctccgttggtctgctgctccgcgcgtagtccggacgcggacgccggcgacgagcgacgccggcggggttgggacgcgatgcttcacgacgccttcaagggtgccgtgcgacggtggagcgagtacgtcagcaattactggcccccaccgacctctgttaggaggccggtacggggaagagggttgggagttcttacgatgaggaggtgatgaatgggatgaaaaaggatattaaaatttcaatt

SEQ ID NO: 277041 - DNA, 759 bp, Zea mays
tgaaattcccacgcgcccgtcgtttgccaccttccccaccagcaccaagcggcgagagcgggacggggcagagcaagagctagggataaccctcgcccaccatggcgacgcccggcgagcagcaggcaccggctgcggcggagtaggtcgtgtccgtcgagatgcctgcacccgacgggtggaccaagaagtttactccccagagagggggaagatccgagattgtttttgtttcgccaactggcgaggaaattaagaacaagaggcaactaagccaatacctaaaggcacaccctggaggccctgctgcttcagattttgattggggaactggtgataccccaaggcgttctgctcgcattagcgagaaagtcaaggtttttgatagcccagagggcgagaagatcccgaagcgcagcaggaactccagtggtaggaagggtaagcaggggaagaaggaaacccctgagaccgaagaagccaaagatgctgaaactggcaaggaggcagaggaggccccaagcgaagatgccgcaaaggagactgatgtggagatgaagcctgctgaagaggtgaagggggcctctgctgaaacagaagatgctgacatggctgatgctcctgcaccagcaccaatggaagaaggataagaaacaaactgaagaactggcagaagctattgcagctcctcctgtgccatcggaggagaagaaagatgtcaagccagctgagcctgaagctgcagcaagcaacccaact

SEQ ID NO: 277042 - DNA, 753 bp, Zea mays
cgcgtgggttgccccctccctccccagctgcaccaccaccaacaccaaccaacaggtggcgagagcgagagcgagagcaaagagctgagcgggacggagcagctagcgctagggataacgcacacccaccaccatggcgacgcccggagagcagccggcggaggtcgtgtccgtcgagatgcccgcacccgacgggtggaccaagaagtttactcccttgagaggggggagatctgagattgtttttgtttcaccaactggcgaggaaattaagaacaagaggcaattaagtcagtacctaaaggcacaccctggaggccctgctgtttcagagtttgattggggaactggtgataccccaaggcgttctgctcgtattagcgagaaagtcaaggtatttgatagcccagagggcgagaagatcccgaagcgcagcaggaactccagtggtaggaagggtaagcaggggaagaaggaaacccctgagaccgaagaagccaaagatgctgaaaccggccaggacgccccaagtgaagatggcacgaaggacactgacgtggagatgaagcctgctgaagaggcgaaggaagctcctactgaaactgatgacgctgagaaggcttcagacaagtggacgatagtcgtgctccaggccaatggaagaagaaaaagaaactgagaaaccagctgaagctgttgtagctcctcctgcgcaatcggaggagaagaaagaagatgtcaagccagatgagc

SEQ ID NO: 277043 - DNA, 596 bp, Zea mays
ggtcgacaggcaccgacacgacccatgtcgtcaatgtggcgcgtttcccgccgcctcctgcgcgccgccgcctcggcctctacctcggcgatcgggcgcggcgccgagccccgccggtgggtcccgccgccgttcgcgctgcagcgctgcggccacgcgtcgctgccggacgcggcgaggagggacggggaggaggaggtgacggcggcggaggcgaggcgcctgatgcggctcgccaacgtggaggcgctcaagcggcgcctcggggacggggaggtgatcccctacgcggacctgctgcgcgcgtgccaggactccggcgcggcccggacgcgcgccgaggccgcggcgctcgccgccgcgctcgacgaggccggcgtcgtcctgctcttccgcgacagggtctacctccaccccgacaagattgcggaccttgtaaggaaagctatgccccttgcactgacacctgagaatgatccggggaaggaagagctcaagcagctccaagtgcagttggaagacatcaaccagcttgcacacaagcaagtccggcgcatcctctggtctggtctgggtttcttgatcacccaagtggg

SEQ ID NO: 277044 - DNA, 452 bp, Zea mays
  unsure (1)..(452): unsure at all n locations
ccgtcctcgcaccagtccctcctccttggaagcgagggaggagagtggagggagagggaggagcgaggcaccggtgagctcgggaggcggcgtggggcttgcacgccggccctacccccagctcactcaccacgctcttctctcaccaactctctctctctcttatctccttccaagattcccccatttttttgttgttgtcccccccattcttgctaggatcattccttgatctttcgctcgctccagtacgcccgttttccagctccggagatcccatctcggccacctcctgcggtctccaagctccaagaggccagattccagcacaaatttgaggtcaatttgcccgctgagctcgaatcaatccgctcggcaacaagtgtcatttgttcccccgatccccgggcttcgattcgatcgaatccgacctaattttattgngtgtgtgt

SEQ ID NO: 277045 - DNA, 409 bp, Zea mays
gatcaaggtcgagcacggccggggcctgccgccgtcgctactgcaccagccgccggcgcccaagggccgcgtcctcgcgccgccgccggcgggcacggcgttctcgggcaccggcggggtcgagcccggcgacggcgccggggacaacggcggcgctggcacgagcggcgcgtgcagggcggccagcggccggttcttgggggtggtggctgctgctgctgcggctctggccgttttggttgctgcctgacttgagtagcgatggtttgaaggcattcgtcatttggaacgactgttctgcttatgtatgtgtctgtatttaaattcatcatttaatggtgatttttgttcgatgcttaggctatcgaaccctaaatttctactctaaaaggaatatttcatcttggtc

SEQ ID NO: 277046 - DNA, 441 bp, Zea mays
ggtgacatcggcaaagaaccgatgtgtctaaacaatgaagaattaagaggaaacttcatatctgagcgtgagcatcagcatcatggagggaacacagctggaaaattggcaactcagcataatgtagaactgaacatattggctgaagatacagacagaagccaagtacaattgaagggaggagtcttagattttatggcaggtccatcagacaacaagcaaattgtaccttatggcactatgtctaatgatgaatcaagtgttatttttggtgccttacataggcttcgcctgtcccgctcagatatcttaagatggctgagatcaccgatcatgcacactacgttagatggcttttttgtccgactgcgatttggtaaatgggaggaagcattgggtggcacacgataccatggttgccgcctgaatggagcacttgat

SEQ ID NO: 277047 - DNA, 1096 bp, Zea mays
  unsure (1)..(1096): unsure at all n locations
gggtcattgaaaattaatgacttaattcgtggtgaggtcagctggactttagacactcttggtgatttcgtgattatgagaagcaatggacagcctgtgtataacttctgtgtgacagttgatgacgctaccatgcaaatatctcatgttatcagagctgaagagcatttaccaaatacattgcggcaagctttaatttataaagctcttggatttgcaatgccttcatttgctcatgtttcgcttattctggctcctgacagaagtaaactgtctaaacggcatggagctacttctgtggggcagtataaagagatgggctatctacctcaggcaatggtcaattatttagcactactgggctggggtgatggtactgaaaatgagttcttcactatagatgacctagtccataaattcactataaatcgtgtcaataaaagtggagcggtctttgatgcaacaaaattgaaatggatgaatggacaacatttaagatcatttccccatgatgaactcatcaaggcttttgaagatcggtggaaggacacaggcattctccaggaatctgaaagtagttttgctaaggaagctgccgagcttttgaaggatggtattgatttgataacagatgctgatgcagctcttacaaatttgttgtcatatccccttcatactactttaagcagtgaggaagctaaacctgtggtgcaagacaagatttctgaggttgcttcgagtcttatttccgcgtacgacagcggcgaactcgcccaagcgctagctgacgggccgtgatggctggcagaagtgggttaaaggtttcggcaagtctatcaaaagaaagggcaaggggctcttcatgccgctccgcgtactgctgaccgggaagcttcatgggcctgacatgggtggcagctatcgccctaatacacaaggccggcgtctgcggcgcggtgactccgcagtccaacttcgtgactctagacgagcggttcagggtcctgaaggagattgactgngactcgttggcgaaggagcaagaaactcctgctgaatctgccgttcccgccacttaataggctgtgacagtagc

SEQ ID NO: 277048 - DNA, 585 bp, Zea mays
cccacgcgtccggtctcggatgccatataggagttggtcctcatggactgcggccaggacggcgttgttccacggcctgaacaccaggcgccgcccaattgctgcgccaccgaggtcccgcagagcccgacgctctcttccgaagaattcctccagttcaagaggaaggccaccacgatcgtggaggagtacttctccacggacgacgtcgccgcgacggcgagcgagctgcgggagctccgcgtcccgtgctaccacttctacttcgtcaagaagctggtctccgtggcaatggaccgccacgacagggagaaggagaaggcggcggtgctgctgtcctcgctctacggcgacgtcgtcgaccgcccgcagctctgcaaggccttctgcaagctcaccgagtcctgcgacgacctgtccgtcgacacgcccgacgccgtcgacatcctcgccgtgttcgtcgcccgcgccgtcgtcgacgacatgctgccgccggcgttcctggccacgcagagcgcgcgcctgccccacgggtgcaagggcgccaaggtcctccgcagggcggagaagagctacctgtccgtg

SEQ ID NO: 277049 - DNA, 483 bp, Zea mays
accttgtactgaggtgtccatattgcaagacgctgaattacgcagtggagtaccgcggcgggaagaccatggaggagaagggcgtagagcagcttgaggagcagagggtcatcgaggcgcagatcaggatgcggcggcaggagctacaggacgatgcagagcggatgaagaacaagcaggctgcgacgtagtagcatctgcacaagttgattcttgcagtaccgacggtgcatcaactgcagctgcaagcagtccgcgaggcaacgatgctctctcgtccgaagtgcagcgtccggagttgatgtcgaggaattctgaagccttcaaacagaggcggggcaataattttgaggtggatcttgaagaagtaatgcttatggaggcaatttggctctctgtacaagatcaagaagctttgggaaatccaggatgtgttagcactacaccgtcatcaattccttcaaggccttttgatgatggtga

SEQ ID NO: 277050 - DNA, 833 bp, Zea mays
aagttgtgtggtcaggcactgaagaccttcaatgatctcacctcggaagttgcgcaaggccatgtactgcaggagaaatgcgtcgcggcgtcgtcgtctcctgtgctgaacgcaaacagcagggtggccggcggctcgtcgtcgtgggcctcagatggcaggaagatcctacgggaggaagaaatggtgggacgacgcggagtactgggcaagctatttcatccaccggctcttcctccattcagttgcagagtttaccggtactacctgtcgtatttctgggcaaacgacaggcgcacccgggatgctcttgggatcaaggagggcaccgtggatgagtgggtcagatgccacaacgacgaccaagagttgccttacgagagcgagctgaagagtgtcgtcaagtaccaccggaacctgacgtccagaggctaccgagccatggtatacagcggcgaccatgacctgctggtgccacatctgggcacccaggcctgggtcaggtcgctcaacttccccgtcgtggacgactggagggcgtggcatctcggtggccagtcagctggatttacaataacttactcaaacaacatgacattcgcgacgatcaagggcgccgggcatacagcacctgagtacgagccggagaggtgtttcgccatgttcagccgttggatcctcaaccggccactctaatccatcggtgaatggagccatccgtgaatgaagagattcgtgtgtaaatctttcttcacgaaactactggctatgagacgtacgtggatggaataaaatgctggctatgaacccttgacgctgatgatatatatata

SEQ ID NO: 277051 - DNA, 559 bp, Zea mays
cgcgtaagaggaaaaaaaaacacacccgccccgccgtccacctctccgcctcctccggtgccggcgctggagcggccgacccacgcaatctatgggcaacatgacccgctcaaactcgcccgtctcccgccgcatcgtcctctccttcctcgacttccttaactccgtcgaattagctcctggtgttgatcctgaagctctggaagttgctaaggattgtctggagtccatttttagtgttaactcaacagccactggtgacgcaatacaaccaggactgttgtttgagctatttgcttctctcgaagcaaatgaaagagaccaggcaagagctgctttgctgtcacaatctgtttcaaacaagccatctcaaactgcgggtacatcaaatgtcgaagaagactcaaacaaatgcacaacatcaaatagcgacagccaggtggaggatacatttgaactagatcattcaggagatgaactatttgcaaaattttatgctgcacttgatgaaatcaatttctttaagacatcacctgctggagctgaagatcctggtcta

SEQ ID NO: 277052 - DNA, 661 bp, Zea mays
cggcgcttgagattgaggcgcgacacagcgccgaaccgctgacgagcgctgcgccttctacgaggacgaggtcgaggagctccgggacatcgtgctcgtgcgggagcgtgaggtgcgcgcgctgcgcaaggaggttgacgcctaccgacgcctgctcggttttagcgctaccgaggaggacgaggaggaggatgacgagcaggagatggtcacgccgcatagtttccccatgtacgaaggagagcccagctcgtccaaatcggtcgatgcgaatcggatgcaacattttgggaatgattctgggttcagcttcaagacgccatcaccgcgtgaacaaccaacggtgccgcctcttactgcagggcaaatcaatgtgggaagcgatgattgtgttgctgttcagacgccggccaaagttcccgtggttcaatcaagactggagctagatagctctgaggatgaggacgaggatgaggatgatggaccagacacggtggaaatcctccccctatccgcccggagccaagatttggatcaaggtagccatttccatgctgatactgcacaaggtatggaatcgacttgtaccaaggaacagacagctcatgcatttcatgaagtcgagtgtccaggtatagacaagattgttaatgaccagata

SEQ ID NO: 277053 - DNA, 763 bp, Zea mays
cggacgcgtgggttccgttgtaaaatatattcgtaaacggacgccggccaaaatcttcttgtggtttgaagaatacatagaggagctcgtccagacgaacgccaccggagccaagaagaagctctgtgagggcacgttcttgaacccgggctcctggggtgcggcgcttctagcggccgggaccacgctctcctccgcgaagcacatactagacgggcaggggaacctggcctacgcgttggttcgcccccctggccaccacgcgcagcccgaccacgccgatggctactgctttctgaacaatgccggacttgctgtgcaactggctctggattccgggcgcgcaaaggtcgccgttgtggatattgatgtgcactacgggaatggcaccgcggagggcttctatcggacagacaccgtgttgacgatgtctcttcacatgatgcatggttcttgggggccatcgcatccgcagagtggctccgtcgatgagattggtgagggcaaggggcttgggtacaatctcaatatacctttgcctaatggaagtggagatgctgcgtatgaatatgcgatgaacgagttggttgttccatcgattgataagtttcagcctcaactgttgtttcttgtggtcggccaagattccagtgcgtttgatcccaatggaagacagtgcttgaccatggaaggctacaggaaaattggacaaataatgaggcgcctggctgatcgccattgcaatgggcaaatactggttgtc

SEQ ID NO: 277054 - DNA, 363 bp, Zea mays
cccacgcgtccgcccacgcgtccggcttcccggaccggctgcggttactggtgcagcgcgcctaccaccgcccgcgccgcgtcacgccggggttcgcgctccgcgacctcatccagtatctgtacagcgacaaagtagaagagaagaaggagctgatcaaggggataacgctcggtaacaaagacaaattccagcttacgcctctgccccagcaagttcttgtgttatggggagagcacgatcagatattccctgtcgagaaggcatttgaagtggcaagggaacttggcgcaaatgctaggttggaggtgctcgaggacaccggccacatgccccaggaagaggatccgaagcggttcaacg

SEQ ID NO: 277055 - DNA, 538 bp, Zea mays
cccacgcgtccgcggacgcgtgggctgaccacagcaaccaacctcctctttcctttggatggatcggaccatcgatcacaattcacacagccctagcccctaggtagtggcatcatggcggtgaaggactgcggcgggcacaagggctgcgagtgcgagcgggagcggctgtaccggcggtgctgcgcggcggtcgtggctctgatcctcctggtcctcttcatcgtgctcgtcgtgtggctggtgctgcgcccccacaagccccggttctacctgcaggacctgtcggtgctgtgcctgaacgtgacgccgccggcgtccacgtacctgttcacgacgatgcaggcgacggtggcggcgcgcaacccgaacgagcgcgtgggcgtgtactacgaccaggcggacgcgtacgcggagtacaagggcgtggcgatcacggtgccgacgcggctgcccgtgcagtaccaggggccccgggacgcgtccgtgtggtccccgttcctgcgcgccccggacggctgcgtgcagctcccgccgc

SEQ ID NO: 277056 - DNA, 410 bp, Zea mays
gcctctcgttcgcccacgcatgcgcccacgcgtggggaggaaccaaactcctctttcctttcctttccatccatcggaccatcgatcacaattttcatggcggtcaaggactgcggcgggcacaagggctgcgagtgcgagcgggagcggctgtaccggcggtgctgcgcggcggtcgtggctctgatcctcctggtcctcttcatcgtgctcgtcgtgtggctggtgctgcgcccccacaagccccggttctacctgcaggacctgtcggtgctgtgcctgaacgtgacgccgccggcgtccacgtacctgttcacgacgatgcatgcgacggtggcggcgcgcaacccgaacgagcgcgtgggcgtgtactacgaccaagcggacgcgtactcagaggacaagggcgt

SEQ ID NO: 277057 - DNA, 822 bp, Zea mays
  unsure (1)..(822): unsure at all n locations
cttatcgagcggtgccacacggccacaggggcacatgcccacaaccagacggggagagagcgaaaaacggggcgaccgagctagctcgccgtcgtttccggctcccctccctcctcccataccgttgccctacccccactaccgcgccccgcggccccgccgggtcctcctccctccgctcgctcggaaccagaggcctcgcgacgtctcgcgccatgcgggctcgcgatctgctagggcttcctccggcgggcgcggccatgtcgtcggcggcggcgctcctcctcctccccctcctcaccgtcgctggccaggggccggtctgccagaggccgcccgtcgccgccgtcatcctgcagcaggcgtccacctgtcgagcggtggacgccccagggctccggggtcaccgcgccggcttcgtggagggggatgatggggccctgcaaaaggcagtagcacttgtgctgcagaacagggaggattttggcgctattcttttttatgcttcgtggtgccctttttctaaaattttcaggacagattttcaaaaactgtcatcctttttcccaacaattgctcatttttcttttgaagaatctaatatcaaaccaagagtattgtcaaggtatggagttcgtgcattcccgacgattttccttctgaactctacagtggcgtgtgcgttatcatggatctcgggccatgaattccgttgctatgttctataaagatgttacaggcctgaatcctgtgtcattggacgctacatgcctggagagaatggaggattncagtactatagtngatcatggcaaaaggctg

SEQ ID NO: 277058 - DNA, 513 bp, Zea mays
tttttgcgtgggcggacgcgtgggcggacgcgtgggatctttctgccaagtccaagagacctctaggtcttggtttgaggttgaaaatcgcatcgggtgctgcaaagggaattctgtatctacatactgaagcagatccacctatattccaccgtgatgttaaggccagcaacattctgttggactccaaattcgttgcaaaggtagccgattttggtctctcgaggcttgctccagtgccagatgtcgaagggacattgccagctcacgtatccactgttgtcaagggcaccccaggctatcttgatccggaatacttcctaactcacaaactgaccgacaagagtgatgtttacagcctgggtgtcgtgttccttgaaatgttaactggtatgaaaccaattgagcatggtaaaaacatagtgagagaggtaaactcagcttgccagtcgggcgcagtttctggaataatcgatggccggatgggcttataccccccagaatgcatcaaga

SEQ ID NO: 277059 - DNA, 621 bp, Zea mays
cgctattttactttctgtggtagctaccacccttatagtgagaaggcgttcaagacacggaactgtctgaaaacgttcattgtcaaggttttctgtcaaagttgatggcgttagatgtttcacatttgaagaaatggctattgcaacaaataattttgatctatcagcccgagttggccaaggaggttacggcaaagtctacaagggaattctaggcgatggagcacttgtagcaatcaaacgagcacacgaggattcccttcaaggttcaagggagttctgcacggagatagagctactatcaagattgcatcatcgcaatttggtttcattggttggctattgcgatgaagaggatgagcagatgctggtttatgaattcatgtcaaatggcactttacgtgatcatctttctgccaagtccaagagacctctaagttttggtttgaggttgaaaatcgcattgggtgctgcaaagggaattttgtatctacatactgaagcagatccacctatattccaccgtgatgttaaggccagcaacattctgttggactccaaattcgttgcaaaggtagccgattttggtctctcgaggcttgctccagtgccagatgtcga

SEQ ID NO: 277060 - DNA, 580 bp, Zea mays
ggccagtctgttcgagctctccctcagcgtgctcatggagaccatcgcgcagaccaagacgtcgcgcgccgacgacgcggacgacgccgtgtcgcccgaggcgcgcgaggggcggcggatcgtcgacgagatcctgccctacctcggcgccaccaacctgtgggactacctgccgctcctgcggcggttcgacgtgctcggggtgaggaacaagatcagggacgttgtcggcaggagggacgccttcctgcagcggctcatcgacgcggagcggcggatgctggacggcgacggcgacggcgacgagaagaagagcatgatcgccgtgatgctctcgctgcagaagtcggagccggacgtgtacacggacaccatgatcatggcactgtgcgggaacttgtttacagccggaacggagacgacgtcgtccacgatagaatgggccatgtcgctgctgctgaaccacccggaggcgctgaagaaggccgaggcagagatcgaggcggccgtgggcgcgttccgcctcatcaccatggacgacgtgcccgggctgggctacctgcagtgcgtcatcaacgag

SEQ ID NO: 277061 - DNA, 339 bp, Zea mays
cggacgcgtgggctccatgaaagaaatattgctcacagagacattaaatgcgcaaagattctggtgcatgcttatggatctgtgaagcttgcacattttggactcgctaaggagattaccaaattcaatgaacttaaatcatgcaaaggaactgtttattgcatggcaccgcaggttgttgatccgcagcagacatatggacctgcagctgatatatggagtcttggttgcactgtcctggagatgttgacacgccagataccctatcctgaccttgaatggtcacaagctctatacaggatctgtaaggcgtaatcaccatcaatttcaaacactctt

SEQ ID NO: 277062 - DNA, 431 bp, Zea mays
gccgtcacgccgatcaagaaccagggcccgtcgtgctctagctgctgggcattcgtgacggcggcgacgatcgagagcatcaccaaggtcacgacagggaggctggtgtcgctgtcggagcaggagctgatcgactgcgacccctacgacggcggctgcaacctgggctacttcgtgaacggctacaggtgggtgatccagaacggcgggctcaccaccgaggccaactacccgtaccaggcgcggcggtacgcgtgcagccgctccagggccgcccagcacgccgtcaccatcttcgactacgtgcagctgccggcgggcgagggccagctgcagcaggcggtggcgcagcagcccgtggccgcggccatcgagatgggcggcagcctgcagttctacagcggccgcgtcttctcggggcagtgcgggac

SEQ ID NO: 277063 - DNA, 927 bp, Zea mays
ttgttcgtgggcggacgcgtgggggaaatgacagatccagttcttgaaggagaaactagtgaaaagagcaactctaaggccagctctgctcaagactcggatagtacttcttcagttgctgaccaagaaagccagaaggatgttctagaggattgctcaaaccaaggacaacaatcttctttcagtcaaacagaggaacatgcacatatagctcggcatgcaagggaggtttctctttcccttgacatggaaccacctgtcttaattagtgattcctctgatgatgacatatcactgtctggtgaacatataaatgattgggaggaagcacaacagagtgaaaattttagtttgtcccagaatacatggcaagaggatcctaatgtcatgcaacaccatcaagaaatagatatcacaagcaatggattgaatcaaatgtcaccacattcgaatgatcttgagttgacgtcgtcatcaactgaaactactgatgatccttttgaagtgaatgacattgaaccaccagctaaggaagtggtggtcgttgatgatacccacgttgtggatcctgtatatgattcaagtccttcgggaagcgagaggcctgcacctactggtttagtaattgacggacctgtcctaaaagatggtcatgcttgtactcttgttgttgaagcaatcatcgaagaagggggttcatcgtcaagaatggaggtttcttccagtgaggtagctggacctagtttgagttctgtggaagcaaaggcgaatccccagagaaagaagcctctgagataagagagcaggccatggttggccatgtcgaagcacatggaggttctgtcagccatgctgatccttcagtatctgatataagttctcagccgagtactgaaagttcaacaaatggtgattctggcagtggtg

SEQ ID NO: 277064 - DNA, 516 bp, Zea mays
cggacgcgtgggcaagaagtccgtgaatcgcagagaaagaatgaagaagctatacaactggaggagcggtatcgggcaacggtcggaaaggagctggaagatatagaaaggagacattgtgatatgacttcaatactgcatgcgctaggcatctcagttgaaggtggtgaggttaaagccttcaagcaagctcttctgaaattccatcccgacagggtatcaaggaatgatatttatcaacaagtaaaagcagaggagacatttaagttcatttcgcggctgaaggagaagctacctcggctatcctaatagccatcccactcttttttccacatgccttggcgcatcctccattcacctgtagggtcaaggtacagaattcagaggatgtttattggcgttatttacaagtaactagggctttagcttgttaaatgtgtttttgtgtgtgtgtgtgtgtgttgggggttgggttgggtaggcattcctgtcaactatgacatgggatggtaacca

SEQ ID NO: 277065 - DNA, 1349 bp, Zea mays
cttttggagatgaaggataaccattatgatgctagaacatttgccgttaggttgaaggctacgatggaaaccatggataaggaggtaaagaggtcaaggttggcagaacagctgtataaacattatgctgcaacagctattcccaaaggaatccattgtttgtctctgcgccttacggatgaatactcctcaaatgctcatgcacggaaacagttaccgccaccagaactgttacctttgctttctgataattccctccaacattatattctagccagtgataatattcttgctgcttcagttgttgtcagctcaactgtacgatcttcctcactgcctgagaaagtagtctttcatgttattaccgataagaaaacatatcctgggatgcattcatggtttgctcttaattccatagctcctgcaatagttgaagtagaaggtgttcaccagtttgcctggctgacaagagaaaatgttccggtactagaggctatagaaaaccatcgtggagtcagaaatcactatcatggagatcatggaacagtttccagtgcaagtgacaatcctagggtgcttgcttcaaagttgcaggctcggagccctaaatacatatccctgctgaaccatctccgtatttatttgcctgagctctttcccaacctcaacaaggtggtcttcctcgatgatgacattgttgttcagcgtgacttgtctcccctttgggcgatcaatcttgaagggaaggtgaatggagctgtggaaacatgcagaggggaagacagctgggtgatgtctaagcgtttcaggacatatttcaacttctcgcatcctgtgatagctcggagccttgacccagatgaatgtgcttgggcatatgggaggaatatatttgatctggcagcttggaggaagacaaacatcagggatacataccatttctggttgaaggagaatctaaaatctggtcttacactctggaaatttggtaccttaccaccagcccttatagcatttaggggtcatgtgcatggcatagacccatcatggcacctgcttggcttaggataccaagacaagacagatattgagagtgtcaggagggctgcagtgatacattacaatggacagtgcaagccatggctagacattgcttttaagaacctacaaccattttggacaaagcatgtaaactactccaacgactttgttaaaaactgccatattttggagcctcagcatgtcaaggagtgacctgcaggctaggctgtagcaaataccggacacacggagggagtatagattatgattcgcttgttggctggagaggctgactgttgctggatgat

SEQ ID NO: 277066 - DNA, 400 bp, Zea mays
gcggtggcggagatgtacctgctgggcatgaccgacaagatcgtcaccagcggctggtcgacgttcggctacgtcgggcacggcctcggcgggctcacgccgtggatcatgttcaggcctgagaaccacaccacgccttacccgccgtgccgccgggccaagtccatggagccgtgcatgcacgggccgccgttctacgactgcggggccaagcacggcgccggcacggggaagctggtgccgcacgtccagcactgcgaagacatgagctgggggctcaaacttgtccatcccgagtgaaacagcaataataatgaaaagaatatcttttttaatggttcgaattcctgtgctaaaaaaaaaaaaacacaagaagaaaaagaaaacatgaagcaacaac

SEQ ID NO: 277067 - DNA, 378 bp, Zea mays
cacaaaatattgggagcatatggttcggatgcatgatattaataagaggtgtccacatatgagccactgaaaatgcggtccaagcaaacaactcaagttgagacgcgaggacacacacacactcatctccgatcaagataatattatgaccggaggtagtcattttttggactcctccaaaaattcgaggatccaagtacgcaaaacaaaagaaatcaataggtgaggtaaattcatcagtgccgcgacaaacaaaatctacgggcaacaactactgcaaacatgatcacatccatggctgcaacttattaacctcagacagcacttcagatatgaccatatcgagttgttactgatgctgactctagaggcgaacaa

SEQ ID NO: 277068 - DNA, 646 bp, Zea mays
agagaagcaggaatagaacaaccccataaaccatgtcggaccatacatttgcaaaagcttgtcggttttctagcctccaatcgtccctcaactcgagcgctttttcccgcagctcaaaccagacctcctcatcagagagcgggggagatttgccgatctctacttcaagacggtatcttgccttctcgatgttcaggtccttaaccatctgcagcttctggctgcgcctcacatcaagtaactcagctgcaagcggcaccttctggacatacctctctaaaaagggcatcatggcatagtcgtgcactagaaaatctatcacccacggaaccacgatcagcaatgctaggaatttggccgagttcgtggaggcatacataaaaactcgatcttcgaacagcatatcctcgtaatcctcatcgatagtacctctgaaaacctcaacgacgcccttatcccagacgatctccgcaggatcatcggttatctgctccgacaagctggcctccccgcgtcagtccccacctccaccattctccggcgcgccaccgccgccgccgccggtccagtcctcccacgaccgctcctcggcgttgaacgcatcctgctgggcctcgcgcagttcaacaatggcctcggccttccg

SEQ ID NO: 277069 - DNA, 512 bp, Zea mays
cccacgcgtccggttacagcaataaggaatttgtctcttcttccacctccagcctcataagcctgcggttaggggggcataaccccaaccggagaggacggccgacggctacgagctacgtagccgtggtccggcgagtcggggattccaggtccttgacaatgacccactggaaaaggcaaatgcatccattaggagcagaactctcatgaacaagcttgttctgcctttacttttggttgaacttgtgataaccaacccaaactgccaaaaaatctggtgttgctacatttgtatcaatctttacctgagcttgtgtttttgtaagcttatgcatgtacctccacatgtatagatatgctacctacattttctttctgtggtcatatgatatgttgacaaggtcacagatatactctcagtatatgatgacgcttctatgaatctatatgcttcaaaatcatcaaaaaggaaaagctgcagggggatgccaactccacagtacacatact

SEQ ID NO: 277070 - DNA, 1124 bp, Zea mays
gatcttgttaatgagattaataccaagattattgattccttgcaatatgcaagaaaagactacttccagaacacaacaaaggaatacccttcagagctgaagccactcttttctgcctttgggttgaaaaattttactatcacaaccctaaggtctttcctattatattatttgccactcatacaacctaaacctcacactggttctgatgatgaggatgatgatctgcttcatgacactcaagagaaaaccatggatctggttactcccttctacaattcagtaaagcaaatcgtgcgggagacttctattgtaacgaccagacgagtatttgaaaggattgtagttcgtcatgtttcacaaagaacagcatggaaacttctcaaagatgcttcaaaatcatcaaaaaggaaagctgcaagggggatgccaactccacagtacacatactgtgttgccagaacaactttccgagcacatgcactgggaataaccgctgcttgggtagtgcaatccataattgaagtatacagatgtttcatccgtaagcctagtgaggactgtgaagcactatcaagcgacggcaatgaacagtttgacgatatgaataaattcagattgtttgggaggaagatttatgggattaccatcaaaagttgtttctctttggttttggcctcagctggagcaggcattggtgccctcgtgcatccagtgcatggacaatggttgggttgtgccttgggagatgttgcaggtccaattatcgctataattgtttttaagaagatgcagctaccactatgagagactggatttttggcgaccactggttttgggtcccttgtgcaagtcatggccttcagtcttctgtgtggttggagatccctgatctaacttgaaagttcacagttgatgaataacagctttcacctcagtgctcgtagttttgtagctccctttacagatgccttcgggtcttgtgggacatgagcatgtacttttgcagttttgctaaattttgtactgtctcagatttgaagaatccaaacaagaaatttaattttactagatttgagaggaataaaaaaaaaaaaaaaaaaaaaaaaaagggcggacctcgc

SEQ ID NO: 277071 - DNA, 433 bp, Zea mays
cccacgcgtccgcccacgcgtccgcccacgcgtccgcccacgcgtccgcccacgcgtccggcataaccccaaccggagaggacggccgacggctacgagctacgtagccgtggtccggcgagtcggggattccaggtccttgacaatgacccactggaaaaggcaaatgcatccattaggagcagaactctcatgaacaagcttgttctgcctttacttttggttgaacttgtgataaccaacccaaactgccaaaaaatctggtgttgctacatttgtatcaatctttacctgagcttgtgtttttgtaagcttatgcatgtacctccacatgtatagatatgctacctacattttctttctgtggtcatatgatatgttgacaaggtcacagatatactctcagtatatgatgacgcttctatgaatctat

SEQ ID NO: 277072 - DNA, 410 bp, Zea mays
gactcgagctctgaagtttgcatcgaagactgctacatcgaaagcggagacgacctcgtggccgtcaagagtggctgggaccagtacgggatctcatttggcaagccgagcacgaacatcgtcatccagagggtttcgggcacgactccgacgtgctcgggcgtaggcttcggcagcgagatgtcaggaggcatatctaacgtgctcgtccgtgacctccacgtgtggaattcggcgcaggccgtgaggctcaagaccgacgtacggaggggtggctacatcaccaacatcaccatagccagtgtggccatggagaaggtcaaggtgcctatgaagttcatgcgaggcacagatgaccattctgacgacaggtatgacccggccgagctgccgatgatcagcaacgtgct

SEQ ID NO: 277073 - DNA, 411 bp, Zea mays
cggttgtagccatcatcgcgtgctcgtcggatagtagagagaaaattgagatcgcgggcagttgattgaggtcgcaatcgcaccttcgcctaagccaactcaatgcttctgaagatcgtaggcgcgcgccgcacctggctgtatcctcgtgtggcgaagactgtggctgggcgctgagaacagagatgtcgcgctggatgctcatcggggcttggtgacggaccgtcgtggtcgccctgggggtggaccctagctgcgcgtggaggccggtgccaaactctccccctctgtgactactagaaggccatctccttccgcgccgccgttttgcatacaccgatgaagaacctcgtggtgtcatcgtggggtggcgcggcgacttctgggaattgcctcggcgaagattgggcg

SEQ ID NO: 277074 - DNA, 796 bp, Zea mays
gaaagatgggacacagccaaaggctcctacttggccaacccagtttttgatgtcccaacaactgatgatgagcttgtaactagatacccatcatactgccgaccaaacatatggccaaaggatcatcttcctgagcttgaggtagcattcaaaggtcttggaaaactgatgttggaagttggcttgatgttggctcatcattgtgatcgctatgtaatacagcgaggggtgggacagtacattggtgaaagccttgagaagacacttgctaggtcaaggtgtcccaagggtcgtctgctgtactacttccccaaatcgtttagcaaacaggacgaagtttcgtcatggtgtggatggcatactgactatggatttttgacaggacttacatgtggcttgttcacgagaaaatcagaggaggtcccctgtcctgatattggaactgggctgtatgttcggactcgtgataatcaagtcgtcaaggtcacacttgtggatgatgagttggtctaccaaattggggagactgctgaaatactatcaagagggcatctatgtgcaaccccacactgtgtgaaggctcccagcagcgaagatgcttctgacgttggtcgctcaactttcgttctgtttattcagccaaactgggatgagccgctgaagcttcctagtgaaatacgctatcaccaggagtgcattccaccaaccaggacacttgcgtacggcgagtactccgaaagagtcttggcgagttttagcggcaagagcgtggaacaaacttgatgccacagtaaga

SEQ ID NO: 277075 - DNA, 415 bp, Zea mays
aggaccgcgacgagccggcgctggggttcaagatcaacgtcacccgcgccatggacgggccctcgctctgcagcgaccccgccaccttctccgactgccccaagatcctgggcatgtcgcccgacgcccccgaggcggagatcttcaaggagtacgcgaagaagcacgagagcaacaacggcaccaccattcctgccgctgcaaccggcgccgccgcggcgaccgggaagagcacgagcgcggcgccgacggcggacggcgccgggaggcagcccggcacggtcttcttctacgtcgtgtcggcgctgctcgtctccgtcgcggtcctgctgtgctgatggcttaacggccggccgcggcagcgcatgcattcatggccggccggccggcagggagatggaggtgctactgcacg

SEQ ID NO: 277076 - DNA, 619 bp, Zea mays
gtttattcagttgatccactagttacatgccaaaagggggggctttggataagctatggggattttacatataatccaagattggctcttgaagcaaaggatctcatttgtcgggtattatgtgatgttgatcacagaattggcagcggaggagcagatcaaataaaagctcatccttgggttcgaggagttgaatgggacaagctgtatgagatggaggcagcatttaagcccctagttaatgatgaactggatacacagagtttcatgaagtttccagatttaaaccctgctccagcaagagcaagttctggggcttcaaggaagatgatgcttaattctaaagatcttagctttggggggtatacatacaagaattttgaggccgtgaaagggttgcatcagtttgcagatcttcagagaagttcctcatttacaaggcactctgctggctccccatctgatacagcagacatggacgcctcgatggaagctaacgggaccgacacacacatgcgcactggttcagctggcgaccctatggcgccataatctgccctgttgttttcgtgaagtaccctgccctacaccggcatcatgcatgcacctcgacaacatg

SEQ ID NO: 277077 - DNA, 456 bp, Zea mays
ccaatcccgacccgacccgaccccgtccccgtcgccagatctcgcgccccctccccggggctcgatcggatcagcggcggccggtgatacggggacggggagatctcgccgaggtttgggccgggccgggccgggctggtgggagcaggggagccatgccgttcgccgcaggcgccgtcctccgccgccgcgccgtcgcgcaaggaccatctcgaggccgggaagaagcggctcgagcagttcccgcaagaaaaaagcggcgaagaaggccaatgcagctggtgcagagcaggcaaaagtgcctgctcctgatgtagagccaaaccaagcgagcacgtcttcggtgccatgggctgtatatgagaatggcccagagagtgctttcagcggtgcagaattcctgtcaaatgctccggtcaatgtatatacttctgttggtgttagtagtggtagacc

SEQ ID NO: 277078 - DNA, 461 bp, Zea mays
gttgtccctagagaggaagcaaaggcacatgaccgtcgtctccgggtgggacgacgagtccggcctgctcgatgcgatggtcgttgaggccacgcccgtctgtgagtcccgtcgcacgaggcgagcctccacctgctccaacaatgacggcgccggatccaacaccaaatacggtgatacggttgacagaccaccaaggatccaccttcctacaatggtgtggtgcagatacaacaacatggtctacacagcagtgcctctaacgcacggaacgacaaaggcagacgccacagagtatcattgacgaaatcatgtctctgttattaaatggttcccgcacatctgctttgagctgatcaccacgccttgtggacacaggcactgtgttcgaggagcctattatatgcacaaacattccaagacttgttctaggatggactaataacgccatctgcagtgga

SEQ ID NO: 277079 - DNA, 729 bp, Zea mays
gaggaagcaaaggcacatgaccgtcgtcttcgggtgggacgacgagtccgtcctcctcgatgcgatggtcgttgaggccacgcccgtctgtgagtcccgtcgcaagaggcgagcctccacctgctccaacaatgacggcgccggatccaacaccaaatacggtgatacggttgacaggtgcgtttgttagctgttgtggcatgctgggctgattttaggccaccgcctggtttcaactttcaagtcatggaatcggtgctcagggctcctctcttccaccctgcgaaggtgacttatagcaatggtgcaaacagatgggggacaccacatcatgcccatccgtgagatcttggcctcagcgtcgattgagaagatgacgttgcaaatatttcagacttgtcaagataagaagagacgaaggaagaacaatcaaatgagaaaccttttcagtcagtatagaatgacatcttttttctttcagttcagaccaccaaggatccaccttcctccaatggtgtggtgcaaaaacaacaacatggtctacacagcagtgcctctaacgcaaggaaggacaaaggcagacgccacagagtatcattgaggaaatcatgtctctgttattaaatggtttgcctgcacatctgctttgagctgatcaccacgccttgtggacacaggtaatttataactgtgtctttccaaaaaaggatggttgcatgaattctatgc

SEQ ID NO: 277080 - DNA, 408 bp, Zea mays
cccacgcgtccgcgcttcgtcgtcgattcgcatggatccataaaaggcttggctctggcatccgccgtcgcccccatcgcgttgtccctagagaggaagcaaggcacatgaccaccgtctccgggtgggacgacgagtccgtcctcctcaatgtgatggtcattgaggccaccctcgtctatgagtcccatcgcaagaggcgagcctccacctgctccaacgatgacgacaccagatccaacaccaaatacggagatacagtccacagggctcctctcttccacgctgcgaaggtgacttgtaggtgtacttagcaatggtgcaaatcatgcccatccacgagatcttggcctcaacgctgattgagaagatgacgttgcaaatatttcagacttgtagagccctcga

SEQ ID NO: 277081 - DNA, 784 bp, Zea mays
  unsure (1)..(784): unsure at all n locations
tttctcgatggagaggctggtggaggaggcccagaacagccggtcttggacgcagtgtctcatcgactcgtgcgccaagcactacacccctgtgtggttgtgtcttttgcatgtgcagccgtggtcgtcctcgcggcgggggtggtcctcgtgcccgccctgctgggagctcgcgacctggagctggagcattggttccggctgtccctggtgctgctggtgagcgcgtgcccgtgcgcgctggtgctgtccacgcccgtcgccaccttctgcgcgctcctgcgggcggccaggatggggctcctcgtcaagggaggcaacgtcctcgagtcgctgggcgaagtcagggtcgccgcgttcgacaagaccggcaccatcaccagaggggagttcagcatcaaggacttccatgtggttggggacaaggttgaaatgaaccagctactctactgggtatctagcatcgagagcaaatcaagccatccaatggccgctgcacttgtcgagtacgctcagtccaaatctgtacagccgaagccggagaacgtgaccgagacctgcatctatcatggcgagggcatctacggggtgatggatgggaaacagatctacattggaaaccaaaggatcatagcaaggtcctcgtgtcgtcatcatcaacatgctggccaccaagaaacagacggtctaaaaggcgtgtccatggnccacgtgatctgcgacggcattggnnnnnnnaagttttcgctgtccgacacctgcaggacaggggcggcgaggcgat

SEQ ID NO: 277082 - DNA, 471 bp, Zea mays
gttcccgaccacgacaactatctgcggctcgcattacacttaatagacgtgctgttgacgataggctgcttctctgtgctccggttttgcaggatctaggcaggaacaaggcaggcccctcgtcccgcggctgaccacgcagagatcgcacgagtgtggcattggccgtcgtcgcgacgacactttgggtcatctatcatcctccgatccgtcgcctcgccgccggccggcgagcccgagagtaggaggccatgacgcttgcgagcacggacaaggtggtgctgggatgcgtcgcgttcagcatcttctgggtgctggccgtgttcccgtcggtgccgttcatgccggtggggcgcaccgcggggtccctcctgggcgccatgctcatggggcctgttccgcgtgatgacccccgacgaggcgtacaaggcgatcgacctcccgatcctgggcctcctattcggcaccatg

SEQ ID NO: 277083 - DNA, 463 bp, Zea mays
tttccttctaccgcagcctcagaattcccccctcccccgtagcgaaaccctagccgccacgccaaaaccaaatcccgccgagcccgaaattttccggcgggttccttgccgcgaatcgattgatttcgagcgattcgactcctttgtgatctctcggcggggtagagcgcggtcgaccgtcggccatgtcgaggtgcttcccctacccgccaccggggtacgtgcggaacccagtggccgtggccgagccggagtcgaccgctaaggtttgttgaaccttcggatttacacacgcacgtgccagatcgtttgttcaatctgtaggttttgcgcggatctgtggtttgcgcgtgcgtgatgtgggtattgcccgtgccttgaaagctaaccgagctgaggaagtgtatggatcttgtgtagctgcacgaggtcctccaaatcgattggtaaaattaagttgtat

SEQ ID NO: 277084 - DNA, 311 bp, Zea mays
cgcggccccggaaaatttcccccttccccgtagagaaaccctagccgccgcgccaaaaccaaatcccgccacgctcgaaaatttccggtggtttccttgccgcgaatcgatcgattccgagcgattcggttgattggatcgatttcgggtgcttcgcgattgattaggccggcaaagccgccaatccttgtgatctctcgaaggggtagagcgcggtcgaccgtcggtcatgtcgaggtgcttcccctacccgccgccggtgtacttgggaaaccagtggccgtggccgaggcggagtcgaccgctaaggt

SEQ ID NO: 277085 - DNA, 413 bp, Zea mays
gcgaagcaaacaaaccacacgagcgcggcgcggcgcggctgccacctagaaaacgcccgcgggcgcacgatgaagaaggcggcggcggcggcggcagtcctggctacccttctcctctcctcggcggtgtcccccaccgccgtgtccgggcagcagccggggacgaaccagcagacggcggccaacaacccgcggctgcacaaggcgtacgtggcgctgcaggcgctgaagccgcgcgatcacggaggaccccaggaaccttgacgcggggctggtgcgggccccaacgtgtgcgcctacttcggcgtctactggcgccggcggcgcccgacggcgacgcggacacggacacgcagaccgtggccgggctcgacctcaaccacggcgacctggcaggggacgctccggaggag

SEQ ID NO: 277086 - DNA, 794 bp, Zea mays
gtaaactcggccgacgccttcgacatgggcggcgggctgatagcgccggacagggccatggaccccggcctagtgtacgacatccagccggaggagtacaaaagcttggacgaccgcgtcgaccgcctcaacctcccgtccatcgccgtgcccaacctcatgtacgactccgtcacggtctcgcgcaccgtcaccaacgtcgggccggtggaggcgacgtaccgggccgtggtcgaggcgccggccggcgtggcgatggacgtggcgccgccggtgatcgccttcgagagaggcggcgtcaggaacgccacgttcaaggtgacgttcgtggcgaagcagagagtgcagggcggctacgcgtttgggagcctgacgtggctggacgacgccaagcggcactcggtgaggatccccgtcgccgttcggaccgtcgtccgggacttcgtcgccgatgtgtctcgatgatgaacactgaacgatgtgtctgtcaaagaagaacactgtacgtctcgatgatcgtccatatatgcagtgccggtcctgacattttacaggcccagggcaagatttataaagaaggccctttataataataattattacatataaatccagtatatacatatattgtctacaactgtacgagaaatagagatgaaacatcaaccatcgttgtctcgttaaacactgagagcctaggtggttggacctaagactataaaatactaccactagaatatagaaatcaagatttaaaaaataaacaaaaaaaacaaaaaaaaaaaaaaaaggaa

SEQ ID NO: 277087 - DNA, 393 bp, Zea mays
aacgccacgttcaaggtgacgttcgtggcgaaacagagagtgcagggcggctacgcgtttggaagcctgacgtggctggacgacgccaagcggcactcggtaaggatccccgtcaccgttcggaccgtcgaccgggacttcgtcgccgatgtgtctcgatgatgaacactgaacgatgtgtctgtcaaagaagaacactgtcgtctcgatgatcgtccatatatgcgacactgtgtcgctgtgtgtgaacactgaacaacgtgtcaaaactgaacttatgttgccaatttatttgcaagcaacaaggcgctcccagctgatcttgtgcctttatgcagtttatacagttcaaaatttcaaataaactatgaggctcagcctagaattcattac

SEQ ID NO: 277088 - DNA, 394 bp, Zea mays
cccacgcgtccgcccacgcgtccgcccacgcgtccggattcatccaaagaaaacaacgatccgggtccagtagacagggagatgggtgacatagaagaatgcatgaagaattgccaaaatcaagaaccacatgcttcttcattagagaagaaattcagagaagaaattagcacagtattagaggaaagcttggacttctggttgaggttcagtacatcatatcattatatccagaaattccaaaagacatttcataaagcaaaacctgagctgcatagacttactgatgcaaaagttcaggagggctttatgacactggttctgctggtcagtctgttaaaaacaagactcggctgtccttgaaaagaacttcgtgacttgagtactgatctac

SEQ ID NO: 277089 - DNA, 608 bp, Zea mays
attgcatgaacgacttcaagaatcccaaggtgatgaggtattgaaagcagaagcaagtgcaaaggtgcacaggtttacagaatgggctctaaagtgtatcgggctgcattcacgtgttcgagagaacaggggcaaaggaaaccacgacactgtaattgaggttcagcttcagttgtctgctttcaagatatttcttgatcttgctgataatgagcttaccgggaaggattttacggaggcttttgatgctgcatgcttccctcttacactcttttcaaccaccttcgaccaaggatgggcatcaggaatatcagcagctgcagtacaaggccttttagagttgttggtagagggtggtgcagaccatgtgaaccaatgctttcttgaagcctgcacgctatggcagcactgaacttgtgccgatcctaactcaaggtggttaaaggaaccacttggaccatggatgtgaaccaacccttggcttttgccgaacactatggaaggatcgaacccaatggaatgctgggttgaagaaggtaatgctatggcctttctgggcccttggatccttgctgttaaacgtgggtgcttccaagttgtggaatggt

SEQ ID NO: 277090 - DNA, 605 bp, Zea mays
  unsure (1)..(605): unsure at all n locations
ggcggctgcggtcccggttcggaggtccgaggcacggcccacgcgctgcgtgacgcttccgcccacgcgtccgcccacgcgtccggcgcgaggtgtcctccgttcggcctgcccactggcgtattacctcctaaaaccttccttgcccgcgcgcacgagcacgcgcatcgacaccttcagctcgtgtgtccgtgcgagcgggcggtttcctcgccaagaactgtcgcgcgggtcgggggattgaggaagagagtgtcggcggcggcggcggcgacgacgacggatttttctggcccgagattcctggtcaaggcaatatgaagtacgtccttgtcaccggcggggtggtgagcggcctgggcaagggcgtcacggccagcagcatcggcgtcgtcctcaaggcgtgcggcttccgcattacgtccattaagatcgatccttaccttaacaccgatgctgggactatgtctccattcgaacatggtgaagtgttcgtgctggatgatggtggcgaggtggacttggatcttggtaattacgagaggtttctggacattaaacttactcgggacaataatataaccactgganagatctatcagtct

SEQ ID NO: 277091 - DNA, 802 bp, Zea mays
gggttcttgaagcgtctggaactctagaaccgagaagaagtgcacttgaggacgattttaaggaagaagaggaagacaaggaggaacagcctatggaaattgatgaaccaaatggtcgtgaaaatgataatcatcgtggaaggagccttgccagggaacgggatagggactgggaccatgacaggtaacatgaaaggcataacagggacaaagattatgatagagatcgggattatgatagggactatgggagagggcgggaaagacaccgagatagagatcgtgaaagagacagaaaccgggatagggatagagaccgtcaccgcctgcgagatgatgattacaatcgcaacagggatagggacagggagagggatggtagggaaagggagcgccgagacagagaccgtggcaggcacaggagccgctcaaggagcagagatcgacgggacagagaccgtgaagatggagagtaccgcaggaggcgtggtcgtggcagtgtaagtcctcgaggacgtggtgaagacggtggcccaagagaggaacctaagaggaagaaggaaaagaaagagaagggtgaaggaaatgctccggacccgaatgaccctgagatcatagaaatgaacaagctacgggcctcactggggttgaaaccactaaagtagtttacacgagtaatgttcaacttgacctgcatccaaccttttttgtgctggactttttcagcttgatgtaactaaacttttgtattgatgtggttatatattcatcagggcttccatttctgtcagaaaaaagatac

SEQ ID NO: 277092 - DNA, 604 bp, Zea mays
ccacgcgtccgcgtctacctccagcttcagttaccatgaatgcaccagcgagttcaagtcaagcaattagctttccaagtggcccaaccaggggtttgaactattaccagaacctgatccatcagcatggaggggagaggcaggagccacttcagctgcgtggaatgcagtttgcaatgcatcaccagcctcttgcctcgcaggccagtgccgctgatgttgtcagcagtggtgctatgccagctagggataccaagcaaaggcctacgaagccttgtgcttacttcaacagcgcgagaggatgccggaacggtgcgaactgcacgtttctgcacgatgtgtctgccgcgaggaaagaacagtcaaagggttccaaaaggattaagcttgacagcagaatagcccggcggtatcgaggggctgctgccccccgttgatttttcactgttctttggttcaaaatcctcatttcgccctttttccccttaaaaaacgtttcagtaaatattgcgccccagctccttgtttctttcacttagccaatttctctttgttgactaaatgaggtgttttagaagaaagaaaaatatcccacgatttattg

SEQ ID NO: 277093 - DNA, 697 bp, Zea mays
cggactcgtgggccggcgagcaaggagcgcatgctggggccgcaggccatcggcttccaggagggcgactaccacgcccacctccgccggctcgtctcccgggctttctcccccgaggccatccgcggctccgtgccggccatcgaggccatcgcgctgcgctcgctcgagtcctgggacggccgcctcgtcaacaccttccaagagatgaagctgtacgcgctgaatgtggcattgctgtccatcttcggcgaggaggagatgcggtacatcgaggagctgaagcagtgctacctgaccctggagaaggggtacaactcgatgccggtgaacctgccgggcaccctgttccacaaggccatgaaggcccgcaagcgcctgggcgccatcgtggcccacatcatcgaggcccggcgcgagggcgagcggcacgcgggagcgacctcctggcctccttcctggacgaccgcgaggcgctcaccgacgcccagatcgccgacaacgtgatcggcgtcatcttcgccgcccgcgacaccaccgccagcgtgctcacctggatggtcaagttcctcggcgaccaccccgccgtcctcaaggccgtcatcgaggagcagcaggagatcgcgcggtccaaaggctcctccggcgagcccctgacgtgggcggacaccaggcggatgcgcacgacgagccgtgt

SEQ ID NO: 277094 - DNA, 289 bp, Zea mays
agtctgattaagtactagtaaatcattcatgtcatgcatggcacattaattaccttattattagtccttgctgagatggatcagatcttgtgagttaagtaaagcgtgcaagagatgtcgacagacactacatgagatgacacggttctacaactctaccggagtctctagtttgttctgcttctgcatgcctttggcgtaatgtaaacgaacgctaaggtttctgtaattttgctgctgtcgcgctggcagtttggttccagatgaaaaaaaaaaaaaaatattagat

SEQ ID NO: 277095 - DNA, 393 bp, Zea mays
ctgacgcgtgggttcaaatgtcaagccccacttgcaaattaccccagcatcaagagcagtggccggccggccggcagctctcggtcgatccactgcggtttccagtcccgaataatcccaattcccaatcgattcgaagcttccttccttcgaggagagggggaggtggatggcgcgggggaagctctgcttagggttcggaggtggccggcgccgccgcggggcggggaccggaaggggatggatccggagcagacgttcctgcgggtgcacgcgcgcttatcggggacgctttcccagctgctcacgccgcggatccgcctcgtcctcgagtacctctacctcgccggcgccgtcgcgctcttctgcctgctcgtcgtcatgcacacgaac

SEQ ID NO: 277096 - DNA, 403 bp, Zea mays
tggttagtctgctgtcatcaagcctttctatcaaagttttggcatctggttcagtttcagcacaagttctagtgttagcttcgtgggggaaagaaaaaaaagaaggaaaaaaaatccaagaaagttcttgaaaaaagaaagaaaaatagaaaaacaatttgaaaaagcaaaaaaaaaaaagtatacaaaaatggaaaaaaaatagtgatgatgtcataggctaggaattatcccccagggtagccagcagagaatgggtcaggcacattcatggtactgatgtggagtgatatcattagccatttactggcaatagcatgttgactatgcatgcactccagaagaagtgcagcagcatttcaattcttgtggaactgttaacagagtgacaatcctgactgac

SEQ ID NO: 277097 - DNA, 371 bp, Zea mays
acgacctacgcttacgttcagttggcgcacgaggatgctagtcatatcagactgggggaggcggttcatctgggggaggggactccagtagcatataaattcaaatctcccgattttgtagttcacctgcgttctagatgctactagtactacttgcatcagttttgctgtcccactatttccgaagcttagcctcgcaaggtttctgataccaaattttgaccttgccaaatgttttgttacctcgtcatgcacactgagtgattcagatgttatatacgtcttatcggatatttgcttttttatgtagggcactatgatttctagctataccgattctaattgtaagtttgagttattctggtcaaaaa

SEQ ID NO: 277098 - DNA, 582 bp, Zea mays
cttcgagaacgtgggtggcagcacactggaagccgtgcttcccaacatgcgtatccatgggcggatccctacctgcggaatgatctcgtagtacaatctggaggagccagagggtgtgcacaacctattcgaaatcatcgctaagcgcctgcgcatggagggtttcatggtcttcgactactacagccagtaccacatgttcgtgcaagagatggtcgggtacctcaaggcggggaagatagcctacgtcgaggacattgctgaggggctagagaaggcgccggaggcactcatcgggctcttcaccgggcgcaacgtcggcaagcaactggtcgccattgcgcgggaatgaatgctgggcatccatatctacgttgagaataatgtcgtataaactataaagcatgcgtacgttttcagacgtgttaggaattgatggtttgtactttgtagtgcttgcagttttatgctgttcgtgtgaaatgtttcgattttctgccgtttgttttctgggcgatatgcgtgtgaaaactcagcacacgcgcttcttctgaggagaaatagacaagcccttttgcggat

SEQ ID NO: 277099 - DNA, 660 bp, Zea mays
aaagaactcgctccattcagagattcagagaagacccgcctctcccgtgaggccgtgacgcgacgccggatcgtcctcgtctcctagctcgtggaatgaagggaggtggcgtcatcagggccgccggcggtggtgccggcggtgcgggtctgttgcgaacgcgactgcggcttcccgtggtgctcctctcctgctccctcttcttcctcgccggcttcttcggctcgctcctcttcacccaggatccggaggaggcggatatgccggtgccgagagagcggctgttggaggcggcgtggccggagatgccttacggcgagtccggcgaggctgcgccgtccttgatcccataccagattttgagctggcagcctcgtgctttgtactttccacaatttgcgacatcagaacagtgtgaaaatatagtaaaaacggcaaaggagagacttaagccatcaacattagccctgaggaaaggagaaaccgcagagagtacaaaaggaatcaggacaggttcgggaacattcctcagtgctaatgaagacccaactgaaaccctcgcggatatcgagaagatgattgcaagggctaccatgttacccagaaatcatggggagccatttaatgtcctgcggtatatattggacaaagatttgctta

SEQ ID NO: 277100 - DNA, 907 bp, Zea mays
gttgatgcagctgcagctctttccttgtactggtctgagctcaagggtaaggttgctggcctggcgttggttcagagcccatatggtggcaccccggtcgcctccgatatccttcgagaaggccagatcgctgataaggagacaaggaggatcatggagctcatcgtatgcaaactaatcaagggcgacatcagggccttggaggacctcgcgtatgccaagagaaaggacttcatctcccagcacaaactccccatcgatgagctgccgatcatctccttccacaccgaagccagcaccgcgcccacagcgctcgcgtcgctgacccgtgtcgcccaagccgagctcctcccatggctacccctgccacggttcttcctgtctgcatccgagtttgtcgagtcaatgctcgcctctctgaaggtccccgtggttgcgcctgtgtctgcagccatggcggtgacagccctccacctgcggctgcgctatggggagaggagcgacgggctggtgacacggcgcgacgccgaggtgcctgggtcagtggtagttagacccgagaggaggctggaccacgcgtggatggtgtactccacgctgaagatgggcagcgctgaggccgatgcgagcgagatgtgcgaggctctgctggccatgctcgttgagattggcaggaagaaattttgctgaccatctggtcatctggagttctccatggttttggttatatatgcacatatatgtcacgcatactacaaatgataagagtatattacagtctttacagggaacagtggaaattagattaatttccttggtgaaagcagggctctgcgataaaaccatatgctactttttttgacaatatgcatactttgtggcaatatgcattaattttggacgaacc

SEQ ID NO: 277101 - DNA, 475 bp, Zea mays
agaacaagaagacacaacctgtatctctcaggaatacggtggtgggggacatcggaatgcaagctcgtttattttgagtgtgactgagtttgacaggtggaaagtcggatcttctcgaccaaaaggtgcataaccatctggctttcttcattgctctacaagattaatgaagaaacacatgcagagggaacaaaaccccaaacttgggggtgtgggacatgagaaacatcatagctgcatatcagacaattctcgacacttacgcagcattctgctatcatgccatatcttaccctatggcacttattcataggctgctgtgtgggcacttagttttacaaaatctgctgaaatcataattggagaactctacatgtctcacgtactggcttagacactgaacatattagtccttaaatgcgtctttttacattttatttatgcaagtgctactttgattaatgtgtagttctgt

SEQ ID NO: 277102 - DNA, 467 bp, Zea mays
tgttggagttggatcctgagcgtgtcatttcccatggacaagcgacattattagagaagcaaagattaatagatgattgtttggagaaatcctatgaaatttccctgggatgtggccagtttgggagttgtctggctgttgatgctgatgctatttcaaatttgagaagcgaacttggaaatcaactagctagcaagagccgtgattttaatctaaggggtattggggctgttgtatacaaagttcctgagttgaataatgaccagatactgaaagtaagtctaagaagtttagaacaagaagacacaacctgtatctctcaggaatacggtggtgggggacatcggaatgcaagctcgtttattttgagtgtgactgagtttgacaggtggaaagtcggatcttctcgaccaaaagttttgaagacatgaactgtcgtgtggatgaggtttcacgtgcttggccaa

SEQ ID NO: 277103 - DNA, 451 bp, Zea mays
cccacgcgtccgggggagatctcttccagcttgagatgctgctgctgctgctgctgctgctgcggctgccaatgcagctgttccggtctctcaagctaacctgacgactgcctgtactagtaacacattcttgagccagccaaagccaagtgatactccgtcactgcctccgaagggaggtcctccatcagaggaggacggtttggaactgactgttgccccaccctcccaacagaacatgacgaacatgtcttcccagaatgcggtaggcgtgatccaagtcatctaagctaatatattttattttattttatttctctctctctctctctttctctctagaagttactgtggctgttgacagttattgaccgaataaatattaacattgtattagcaatactacatgaataagaagagcatgaggtataaacccatcatttgccaaaaa

SEQ ID NO: 277104 - DNA, 803 bp, Zea mays
aattatctctactgagaaaacatcaagcttcaatactccggccaccatttggaatgcaaaggtactattgatgagtggcatgagcaaaggtgcctttgctaacataacttcattgagaagtactgaggaacgagttgtgcacttgaacaatatcttaaaatttgctgtattcaagaaggatcgttctctttttgcaattggaggcccttggaatgcagatatagatggtggtgacccatcagctgactgttcttgcttgattcgaactgccatcagatgcgttaaggaaacggttcacgttgatctatctagttgcacccactggaaccggtttgtcgaggtacattacaatagaataggcaaagatggactgttcagtcataaagaaattactgttctgtttgtgccaaacttgttggaatgcttgccttcagtggatatatggaagaataactggattctgtacaaaaaatcaaaggcagaaagggaagaactcactgttaaaaaggaaaagagtcctggtgatccgaaagagcagatgcaagtttcaggggagctgaataagggtaaaagtttagatgctgatcaattaaaagagggtggtgttggttgcagtgatatgaaaaatgagaaatgtgatgctgatatgaagcagcaaggtaatgatggagacagtaaagttaaagttgaggaacctgttcagaagatgggtggggatgttgaaggaaaaagtacgggtgactcctctattgaccatgcaacaactggggataaaaagcccacataaaagaaaataatataaa

SEQ ID NO: 277105 - DNA, 858 bp, Zea mays
cccacgcgtccgcaatatccatcaatacttaattgatatggcagatgaggtcattaatgctggtcgttttgatcaaagaacaacccatgaggaaagacgaatgactctggagacactcctgcatgatgaagagagatatcaagactctgttcatgatgttccttcattgcaggaagtgaaccgtatgattgctaggactgaaagtgaagtcgagctttttgatcagatggatgaagactttgattggacaggtgatatgacgaagcatgatcaggttccaaagtggcttcgtgttaactccaatgaagtagatgctgtggtggctagtctgtccaaaaagccgtcaagaaatatgtcatctgggggcattgctttagacactaacgaaacacttgagaaaagaagggggcggccaaggggtacgggcaagtactccatctacagggagatcgatgatgaagatcttgaagaatctgatgaagattctgaggagaggaatactgcatccctacctgaagaaggggaagtaggggaattcgaagatgaagaagacaatgatgactcagtacctgataacaaggatgaatcagaggaaaaagagccctggtgatccaaaagagcagatgcaaggggagctgaacaatggtaaaaatttagatgctgatcaattaaaagaggctgatgttggttgcagtgatatgaaaaatgagaaagacgatgttgatatcaaacagcaaggcaatgatggagagggtacggggtaagttgaggaacctgttcatgagatgggtggggattgtgaaggaaaaagtacgggtgacttctctattgaccatgcaacaactggggattaaaagc

SEQ ID NO: 277106 - DNA, 1086 bp, Zea mays
ctctctctgccccgcctacgcctcgccccaggggcatcaaaccgctctcctctccctccctgcccccctcgcaaccctgaagaagcccccacacgcaaggccgcaaacgcgccgcgcaccgcaaggtcccagggagcgacacgaggcggcctcattgcagcatggctgctatggccgccgctggcggcgtcgggctccacctcattggcgctgccacggccacgctcatcgtggcggtccttgttgcggccgtgctggggcgccgccgccgggcccgggcccgggcccaggcgcctccggtggaagggaaacccgcgccggaggcaggctgcgcggtcggtgacggcgcgggtcccgacgtcgggacggacgtcatcatcgtcggcgccggagtggctggatctgcgctgccgtacacgctcggaaaggatggccgccgggtgcatgtcatcgagagggatctgacagaacctgacagaattgtgggcgagctgttgcaacctgggggttacttgaaattaattgagctgggcctccaagattgtgtggaagaaattgaatgcccaacgcgtgcttggttacgcattattcaaagatggaaggaacacaaagcttgcttatcccctggagaagttccattctgatgttgctggtaggagctttcacaatgggaggtttatacagaggatgcgtcaaaaagctgcgtctttgcccaatgtccaattagagcaaggaactgttacctcacttcttgaagaaaatggtactgttaaaggtgttcaatacaaaaccaagtcaggtgaagaactaaaggcttatgcgcccttgacgattgtatgtgatggctgcttttcgaatctacgacgcgccctttgctctccaaaagttgatgttccatcatgttttgttgggctggtattggagaactgccaacttccacatccaaaccatggccatgttatcttggccaatccttcgccaatcctattttacccaattagcagcacagaggtgcgctgtttggttgatgtccctggtcagaaggtgccttccatagctagcggtgaaatggcaaattatctcaaa

SEQ ID NO: 277107 - DNA, 522 bp, Zea mays
acccgacgcgtgggcggacgcgtgggccgtcgcgtgggtccgcatccccaaatgaagccccgcgcgcaaggcagcattacgcgccgcgcaccggaaggccccggggagctgcacgaggtggccccattgcggcatggctgctacggccgccgccgctggcgtcgagttcccgctcattggcgttgccgtggccacgctcatcgtgacggtccttgtcgcggccgtgatgcgccggcgccgccgtccctggcaccaagcgcctctggtggaggggaaacccgcaccagaggcaagctgcgcggtcagcgatggcgggacggacgtcatcatcgtcggcgccggggtagctggatctgcgctggcatacacgctccgaaaggatggccgtccggtgcatgtcatcgagagggatctgacagaacctgacagaattgtgggcgagctgttgcaacctcggggttacttgaaattaattgagctgggcctccaagattgtgtggaagaaattgatgcccaacgcgt

SEQ ID NO: 277108 - DNA, 293 bp, Zea mays
caaattgctaagatcacagcatgaacttgaagtttccacaaagcagccaatatttgtgggttctagtgttagtgatacagtggaaacctgtattgcaatgggaaacgagcgtgctgcactcagagtgaagtccgaattcaaggttcctgataagaggtggtactggcttaaaacgtgcgctttagccacagttggaaactgggatggtttggaaaaatttcaggggagaaaaggccaccgggaggctataaaccttttgtggaagcatgcatggatcctggtcaaaaaaatga

SEQ ID NO: 277109 - DNA, 521 bp, Zea mays
ctcggttgcacagttgctgctgtttctgcatccaatctgcccacacgtaaatgggacaagaggtatccgataaaactggaaagcaaggaatctggtatttgcagggggagcaaggtatgctatgtttatgcagacacctcttgggccgaggaatcatggtgtaaagcactccgtcttgcttctactacggacaaggacaaactcaaatcccatgaaatgctgacccaagagttccgcagttacatgtcctctctgaaagctggatacccttcctttctgggaccctcgacactctccagtcaggaacatgtgcttgtggacaacactgtgaagaatgacggaccttcaaaactccgaggttttctcaaacgattggtgggaaagaaggcatctgccaaggcttctcaggagagcaaaacaggtccggcgccatctaaacaagatacaagccaacccagtactcctagctccactatgagtttcaacagccagctaccagcttcccccagggcaaaggtgga

SEQ ID NO: 277110 - DNA, 441 bp, Zea mays
cccactcgtccggtttccgaccatcctcctcccggggacagcgggcaggcatcagcctccacgcctcacggatttcgcacacgagaggaaaaaaaaggaaagcgaaatcaaccaatctccccaccattcacggcctcgccagtggccagcgcgcgcctcctcctcgtcctcgccagaaatttccccatttccgccccccgctcgcgatcggcgaccgcgctccacgaatcccgccccggattcgcgaccgagccttgggccggcccgggctctggttcgcgggcgccgagggagggccgcggtgggtcgcgcggggaatgctctacctcaagcagccgggcggcgcggacgtagagctccggcaggcggcggcggcggctgcggtgctgtgatctgcccctgcggtggatatatgccagattgagccaccacgcgccgggg

SEQ ID NO: 277111 - DNA, 420 bp, Zea mays
cggacgcgtggggaatttgaagaggtggaagcagcacctgtgttggttgacggccctctagaaccgcaaacgtcaaatatcatgtcaactactactcacattcaagaggatcctttatctgcatttttcagtgcagctgcaaatgttggtggcaactctgctgtagctgttgcaaggcaaccaattcagccttttggtgctactccggtggctacacatgcagctactagtatcactacaacacaatcgccaggcttgcattatttgcttccttcacaagcctcatcggtttctgggaggcctgctgatgctcatggtggcactggttctataggaaggtccacaagccttgtatatccgtcacttttctcaccattgacgtcttcacagacaacaatggtgtgcactaattctgtagta

SEQ ID NO: 277112 - DNA, 582 bp, Zea mays
tttggatgttctatcaggtgacttaccaaaaagcaccaaattgcagaataagcatcttcaagcgctaattgaactgcacaatatgactggcacttttgctaggaacattcagtacttattttcagaatcagatcttgcagttgtgctgaatactttgaaagctatttattctccatatgaaacctttaaagcaaggtatgggcagatggagcgtgctatactctctgctgagatgacaagtatcgacatccgtggggccgtccctcgtggtgttggtgcacagggtatagagctgagcgaaactgtccgcagaatggaggaatccatcccagaaatgatagtactccttgaggcagctgtggagagatgcattagtctgactggtggttcagaagcagatgaactggtactggctcttgatgacgtcatgctgcagtacatatctaatctccaagaaaattgggaagtccctgaggataaatctgaggactggatagtgatgccttgaacaaagatgcaggtttagagaaaaaggaagtacaacgatggtgcgatgtttctgaagaggaagaaatggtctat

SEQ ID NO: 277113 - DNA, 439 bp, Zea mays
ctacttggacatatctccatttcaagattaatcttattctattaacaacatattatcttaactagcatcgtgtttagctttacaaatatgttcagtattttttatatacatatttattttcaattagtagttgtgccaaacttgcaaagtaagatattttagaagaagatacatcatgaaaaaatagaataactaaaaattccaaacaccatggtttttgaatgtttaacttctctatacttcacagcctgtcgcagaagtcttgttggatcgatgtggtcaccatccccttacagttgctgtcatgggcaaggctctgaggaaggaaactagagtggaaaaatgggagaaagctatatccaacctctcaacatatgccacatgtgcacctggtccagtttcatacgtcaatgagaaagatgtggagactacgttgacc

SEQ ID NO: 277114 - DNA, 428 bp, Zea mays
gcacgaagatggcattgaaggagggacaacacgatgagttctctgctgccaaccagctcataccttcgatgatgtcgccggtcaagaagtactcctttatgatcaaaacggccttttccttgaacgtccgcgccgcggcgtcgtcgaccccgctacccttcttcggctccggtggcaacggtcttgaggcacgactcggacagccagccctccgacgaagccttatggatcaccgatttcagaaggcacctcgcgttcggcacgtcgagcgccagatcgtctagagagtcgatcaaacggtcgaaccctttagtgatctggctctcgttgataacgccttccttcgacgccgaagaagggtagcgaggtcgacgactccgtggtgcggcagttcaaggataaggacgttttgatcataaaggagtact

SEQ ID NO: 277115 - DNA, 545 bp, Zea mays
  unsure (1)..(545): unsure at all n locations
gctggtcaacgtatgtacatatgttacgtactgcacgcgcgtgcataaacagctgcgagtcagccgatcctgatccctagccggacgtgtggaggtcaccgtcaccgcgcctcgccgccggggcgtcacaatggcctaccgccggaagcctcagccccatccccagccccagcccacgccctcgttggagcaccactacccgtcgtccgtgggccccgcctcacccgactccctcgccgcgcaggccatgcgcgcctccgccgcacaccgcgatgcctcctccctcacctccgcctactccgcctcagcctcgctggcggcctctcgccggagccaccacgagccctccgtgtccacaccgtccctggatagttcaggctatgaatacacgtccatgaagaacctcaacgaggccaagtatggattctggggcacacttgcgcggaaggcaaagtcatttcttgacgaggactgctcccccgagcaatacaaatcgccaagagatgatgtgcatgtnggtgtccagcttccacattcaaaacaat

SEQ ID NO: 277116 - DNA, 1001 bp, Zea mays
tgaagccttctgaattgacagaggaacagcggcaacttctttcatctaatgttctctgtcaggaccagctgaaaaagattttacatgacactgatcttgaaagcattgaacagtgctatatggagatgaacacagtagagttcaaccttgagcaagctctgaatacggttctgatgcaaggcattcctttgggcaaggaaaaacagatttcaattgaacgtaattggcctgtggaagtatcatgcatgtacctttatggggacaatttaaggcttcagcagatcctagcagactatctagcatgcgcccttcaattcacacaaactgctgaaggacctatcgtgctccaggtcatgtctaagaaggaaaacattggatctggcatgcagattgctcatttggagttcaggattgtccatccagctccaggcgttccagaggccctgatacaggagatgttccagcacaacccaggggtgtccagggagggcctcggcctgtacataagccagaagctggtgaaaacgatgagcggcacggtacagtaccttcgagaagccaacacctcgtcgttcatcatcctgatggagttcccagtcgcccagctcagcagcaagcggtccaagccttcgacgagtaaattctgaccctcatgctcctggaactgcagcgagtgttcggccgtgtcgaagtctcggttgtagctagccaagtggctgctactgaaaaacatcggttggtcggttctggtatctagcacggcctgtgtagtgcggatagatttggttgtttggctttggagagagataagctagctggctaggtgtaacgtaacgtcgaccgataactgtatgtgaatgatgatgagctgtgaggacgaataaaggcttcacttgtgttctccattgctcttcttagagtatgatggccaacagctgtacaggaaagcatccacctaaatctgggctcgctgaatgacgggtaaaagtcgtttggtggcc

SEQ ID NO: 277117 - DNA, 393 bp, Zea mays
gtctattggaatcagcaacaaatcttcaggtgctttgcctgcactattgtcttggaagtttgacttcatttagtttccaaacaaaggcacctgcattaagagtattgcggcttcattgggtaacttcatggcttacaaatgatgacttgacaatccttacagagaattgcaatttggctgaactttcactttctggttgcaaacttcttgactccagctctcaagacattatctcatctgggtggccaaacttggcacttttacaccttgaggaatgtggtaaagtaactgttgaaggggtttcttcttttttcaactgtaaggctttggaagacgtcctactacggcacacggtgagtatgaaaaatatcgtagcaggttcttggtatatag

SEQ ID NO: 277118 - DNA, 241 bp, Zea mays
gaccgcacaggctcggggcatgtgacgcgtgcttgcgagtctggccatactatgagcggatggccggaccattggcctaccatagactgaccggctgattgtcaatctcgctctgtaccctattaccgagcctgagaggcgacgacagcatgccacgtacgcaccatgcacccagacgaccagacactgacacgaggaggatcacacactgaagaacagtctcagccgcctgactgaacga

SEQ ID NO: 277119 - DNA, 425 bp, Zea mays
  unsure (1)..(425): unsure at all n locations
cggtgaagcaagcagcacacgagacgatatagagggagggatcatggctctcttccgtgccgccgcgtcaggagggttcgcgctgatccttctcgcgtgctgcagcctcatcatgctggcggcggcgtctggcggcggcggcgtggacgacgacggcgtcggtggtgacaggctgatgatggaccggttcctcagctggcaggcgacgtacaaccggtcgtacccgacggcggaggagaggcagcggcggttccaggtgtaccgccgcaacattgagcacatcgaggccaccaaccgggcgggcaacctgacgtacacgctcggcgagaaccagttcgccgacctcacggaggaggagttcctggacctgtacaccatgaaggggatgcccgtccgncgtgacgccggcaagaaagcggccaacg

SEQ ID NO: 277120 - DNA, 1297 bp, Zea mays
cccacgcgtccgctctggcggacacctgtcgagcgaccttccatacaagctgtcgagcgacgacatcttcgtcaccgccggaggacgcaagccatcgaggtggtggtctcagtcctcgcgcagccgggcaccaacatactgctcccgaggccgggctatccgaactacgaggcgcgcgcagggctgcacaacctggaagtccgccggttcaatctgatccccgagagagggtgggagattgacatcgacggtctggagtcgatcgccgacaagaacaccaccgccatggtcatcataaaccccaacaacccttgcgggagtgtctacacccgtgagcatttggccaaggtcgcggaggtggcaaggaagcttggaatactggtcatcgctgatgaggtgtatggaaacctggtgtttggggacaccccttacgtcccaatgggtgtctttggccacattgcccctgtgttgagcataggatcactatcgaagagatggatagtgcctgggtggcgacttggttgggtagctgtatgtgatcccaacaagattctgcaagaaaccaagatcattgcatcaataacaaacttccttaacgtttcaactgatccggcaacttttgttcagggagcacttccccatattcttgagaacacaaaggaagattttttcaggaggatcattggtctgctagcggaaacctcagagatatgtttcagcggaataaaggacatcaagtgcatcacatgccctcacaagccagaaggttccatgtttgtcatggtgaaactaaatttgtatcttttggagagcatccatgatgatattgatttttgttgcaagctggcaaaagaagagtccgtgattttgtgtccagggagtgttttgggaatggaaaactggatccgtatcactttcgccattgattcatcttctcttcttgatggtcttgagaggctgaaatctttctgccaaaggcataagaagaagaatttgcttaatggccattaactatattcgacttcaaagttgttacccacttccatcgttttccactgtatcatcaacaaaagtgtaacattgaaatccctcagaagtaataaagttaatgtttacatatgaagatatgcatgtcagtgtacatttttagtccccttaatcctctgttttgaaatctttcgattttgcatttgtttcagttttccataacaatgttcttttcttttaatttgacatcccttataagtgtggtgatggtgacccctgttccaatgtactaaaggttccaattggggcc

SEQ ID NO: 277121 - DNA, 459 bp, Zea mays
cccacgcgtccgatcaaatgcacaattgcacgttattgagggagtaggaatagtgtattcagaaatttaaaggtgtcaaattggcatctgagcaacaactctaattaacagaggtgaagccaggtcacaagtgagggaaaacaggagaagtgtttcacttgtcagcactgccaaaggaatcagagctttcgttctgagctgaagcatcgaccgaaaatttctgggcttccaaaatcttcatttcccgctcagcatgctctcgctcacactgggtaatgcccatgataatgtccagcatggttccagtagtgccgaagaagacgagtggggctaaggatttcttctttatgcccacaggattagcatcaagagcacccgcaactgagaagaaccaagttcctagagcattggctactgtgcaatcctccgggcgcgcaagtcagaggcaactgaggaaac

SEQ ID NO: 277122 - DNA, 474 bp, Zea mays
  unsure (1)..(474): unsure at all n locations
tcgctctctccctctctcgttctcgtcctcgtctttctcgagccgcgaggcgatcgcatcggagactcggagccggcaaaaccctaaggggaaggtttctgcaaggaggagggagatgcagggcgccagccacatgctcctggaggagcccttccgcctcgcctccgtcctctcccccgccaagcctaaagtattcccatcactcaccaagatagttgggacgctcgggcccaattcacactcggttgagattattcaggaatgcctcactgctggaatgtcagttgcacggtttgatttctcatggatggatgctgcgtatcaccaggagacccttgataatttgaggacagcggcacagaatgtgaagaagttgtgccctgtaatgttggatactcttggtccagaaattcangttcacaattccacttgtgagccaaatgagttgaaagctgggaatcatgttatcataac

SEQ ID NO: 277123 - DNA, 458 bp, Zea mays
ctctcgcaggcgcagctcccgcctaggcgcctaacacctcacggccaccgccgctgcggcctgaacactccgcagcgtatccgcctcccgccgcggcttcgtcctcttcgttccctcgctcgccgccgcatccgccgtcctccgcccgctcccgtccgccgccaccgaggccgatgacaccgaaagcccggctccacatccaccgcccaccgaagaatccctctccccgcagcccgccgcggatgcggcggagacgaagcctgaggccagcgagtcggccatgtcgagggtgtacgacgcgacggtcctcggggagccagaggcgttggcaggggacgcgcgggggcgggtgtgggagaagctggcggctgcgagggtggtgtacctcggcgaggccgagctcgaacccgaccccgacgaccgtgtggtcgagctcgagatcgtcaggggcctcgcgg

SEQ ID NO: 277124 - DNA, 630 bp, Zea mays
gagcgcgagctcttaaacgggcgcacgccgcgtgcgcgcccgacccgcttgccccgcgctcggacgcgtcccgatgcgcctccgccggccggaaaacccctactagtcctagggctcgcctcgccgccctgatggggggccggccggggtatctcaccctgccgatcttttccgtggtcgcggcgatcgggtacgtctactacaccacggtgttcgtggccgtgccgcggtggctgggcctgtccacggctgcgggggtagccaacgccgccgcgttcacagcgctagcagctgcctgcctcgccacctacgccgtcgccgttcgcagggaccccgggcgggtgcccccgggttttgtgcccgacgtcgaggacgccgagagcaccgtccacgagatcaagcgcaagggtggcgacttgagatattgccagaaatgttgccactataaacctccacgtgcacaccatttgccgtgtttgcaagagatgtgttctgaaaatggaccatcattgcatttggattaataacctgtgttggacatgagaactaccaggatttcttgggctttggattatatgctgtgggtgccagcttttatgcgttgattctgaatcgagggagcggtttgca

SEQ ID NO: 277125 - DNA, 531 bp, Zea mays
ttgacgcgtgggcggacgcgtgggttcccgagcccccctctctgcccttccgggtccgggcgcccggccttcgcttgcgccactcccgtggcgctccacggccgcgcacgcgtggtcgcctcccctcggcctcgcctgcaaccgttcccgccggcctcccgcgtcgcggcgcaagaggataccctggatttcgtccgtggcgagtggctaccgcttctgctccttttgtgacagctgaatctttgtggttcgaaggcgattgacttgggttcactgacgcggtgacgcccaatgagctcccacgtctccacatcgcggggtcttcatcccccaggcaagcttgggacgttggactcacccggtgcgtggcagccgccagcacctatggctcagcccgaagcaggccgcggggatgaccaggagggcaggctggtgccggctgcttggaatcaggattgtggatgctttgctggcgggaccaataacggattcaggatctttaattgcaagcctttaaggggacttttatga

SEQ ID NO: 277126 - DNA, 1154 bp, Zea mays
tccgggtcgaccttttcgaacggatctgcgtcctcttgcccggagctggcacctcatggcaactagagatatctagagggtttcataagcctttccaacacatgggttccacagcctgcaggttacggagtaccacagtggggatatagtaatgcagtggtcaatcctccagacatgtcaaatgggccactgcctcatttctgccagaatagtatgcaggcacctcaaatacaagtgccccatcaacagtccatcggtaacaatgtggcaaatgtggtgcatggtttaaatccttctgccacaggtcttcctttacatccaagaatgctggctctcccattcaatgctgagcacacttttgggcatccaatgcacccacctctgataaaccaagctaacaatggggctttaagaattctgccatatcagaacgctacagtgatggatcattcaaggatctatgaagcaggacatgttatcgatgaacatagcgatatgcgtttagatgtggataacatgacttatgaggaacttgtagcattgcaagagcagataggcgatgtcaatactggtttgacagaaagctatatccaggaaaacttgaggtccagttttcatgttccaggagcagctagcatgtctgatcagttttctgagctttctttggagaatgatgcttgcataatatgccaggaggagtataaagctaaagaacttataggaacccttgaatgcggtcacaagtaccatgtgaactgcataaagcaatggttgatgatgaaaaacctgtgccccatatgcaagacgacagctttgtcatcagatagaaggaacggatgaccgtcgccaataatgttgttggttgtttaccgcgtggcaaattagcgtggattttgtatatagacatggttgcctttatttgcccgtcccctttgctgtggacataaactgagcttcgaaacactgtacagatattttgtaggatgttttagacgttaaatggcacaatggtgtgtaaagctcccatgactgccttggtagatgccctcttcctttacattgtacattgtatttatctttactcttcaaaaaaagaagcttgaaaaccgtaagttctgtacattctggaattgaaagaaccgaaaattttcttc

SEQ ID NO: 277127 - DNA, 558 bp, Zea mays
cggacgcgtgggggcggccggaccgggccgtgtacacgctgttccggccggaggagaacgcgcggcggatgcagcgcggcgccgagcgcatgtgcatgccggcgccgtcggtggagcagttcgtccacgccgtcaggcagacagtcctcgccaacaggcgctgggtgccgccgcaggggaagggagccctgtacctccggcctctgctcgtggggagcggcccgatccttgggctggctccggcccccgagtacaccttcctcatctacgccgcacccgttgggaactacttcaaggagggcctggcgcccatcaacctggtggtgcatgacgagttccaccgcgcgatgcccggcggcaccggcggggtcaagaccatcgccaactacgcgccggtgctgagggcgcagatggacgccaagagcaaggggttcacggacgtgctgtacctggactcggtccacaagcggtacctggaggaggtgtcgtcgtgcaacgtgttcgtcgtcaagggcggcgtggtcgccacgccggacaaccggggcaccatcctgccgg

SEQ ID NO: 277128 - DNA, 498 bp, Zea mays
cacaggattagttcaataaggaggagctgctggagttctacctgaagcaggcggcgcgcgggaggaagctcaagttcgacatcatccccacggtgcacctgtaccggcacgacccctgggagctgccgagcctggcgcgcgtcgttggcgagcgcgagtggtacttcttcgtgccccgcgacggcggcgggcgggcggccaagcagcagcccggctccggcggccggcctagccgcaccacggagcgcgggttctggaaggccacggggtcggaccgcgccgtgcggtgcgccgtcgaccccaagcgcctcatcgggctcaagaagacgctcgtctactacgagggccgcgcgccgcggggcaccaagacggactgggtcatgaacgagtaccgtcttcccgacgctgccgacgctagcagcgacgcgcgcgtgccgcatgtggacgtggtgctgtgcaaggtctaccgcaaggccgtgtcgctcaaggagctggagc

SEQ ID NO: 277129 - DNA, 522 bp, Zea mays
cccacgcgtccgagaaatctgacagtgagaaagcttgtaagaaagaactggaaaatgataaatgcgtcgaagatggattcagcatatgagaaaggcaagcttatcaatcccatcaaacagctagatatatcactccaaccacctgctcaaactgccagcgccaaatgacgtccgttccagatgaactaacagtagcttttccgaaagaggaaaactagttttggctgctcccaacagtgcttccttttgacgaatcatgcaggataaggaagccgaaaactgcacttgtaagcatcatagattttttttcaatttatagaaaaaacagattagttcttgatcaataaagtatatatttcagtcttagataagtgctattgtatagcccatttcatagtaatgtctatgttctgcagttaatacgttctcaggggattgtcgaagaaattaacctggcgacaagctgtacagatctgacataataatagccttttcttttgggtaataatagattattcttcc

SEQ ID NO: 277130 - DNA, 843 bp, Zea mays
cggacgcgtgggcggacgcgtgggcggacgcgtgggcggacgcgtgggggacgaacttaggaaggcaaagaagaaaatgggggagcaaaatatacaaaaggctgtgaagtccgcaatggatgctgcagaagctgctctttcaggaaataaaccgttttgtgttactcatgtggatgtgggtcttgataccacggctgtccgtgaggcggttatcaaagtcatggaccagaagggtttgcctataatgttattcagcaccgatgaggcatcaaacaaagccgttatctatgctggtgtgcctcccaatgctcctagcggcttcaaggtgttggactggctaacaccttcaattgcgccactcaagggaagaggcggtggcggcaagaacggcgtcgcccagggccaggggagtgacgcttctcagctcaaggaagcaatggcacttgcgaacagcattgcttcaatgaagctctgctgattggtggtagtaactggtgcactgcccatggaactcatgcgtggctgctgctggattactctttgattttagctttctatttacccattatacttaaacagaagttcaatggtgcttgcagtttcatttatacttaccatacaattggaagcacaggacatgtaacagtataaagcttgttgtgtgcccgattgaacgaaaggttctatgcatatacgattgggagtcactttgtaggcgtttaggagtcgaatcatttccttccctgctaaggctattttcagatcctctatccaattccctatcttactctattttaaatttcactctgtaaatagtgttatttattacctatagtgtcctct

SEQ ID NO: 277131 - DNA, 1608 bp, Zea mays
gcccgaggcttaactctccctgccgctaatccctcgcgccgccggagggaagcaagagatagatctgtccgcggccatggcggcggcggcggcggcggcggacaaggcgtggacgccgcgaggaaagaggaggaggaggagcaggtagtgaatccgtgggaggtgtcggcggggaagggcggcatcgactacgacaagctcgtggaccagttcggctgccagcgcatcgacgacgcgctcgtggaccgcatcgcacgcctcaccgcccgaccaccgcactgcttcctccgccgaggcctcttcttcgcccaccgtgatttgaacgagatactggatttgtatgagaacgggcagaagttctacctctacacggggagggggccctcgtcggaggccctgcacctcggccacctcatccccttcatgttcacaaaatacttgcaggaggcttttaaggtgcccctagttatacaactgactgacgatgagaagtacttgtggaaaaacttgactattcaggaaagtaaaaggcttgcccgtgaaaatgctaaagatattatagcatgtggttttgacattgaaagaacattcattttctctgatttttcttttgttggaggtgctttttatgaaaacatgatgcaagttgccagatgtgtaactatgaataaggctattggaatatttgggttcaatcttgaggatcacataggaaaggttagctttcctccagtgcaggcagtcccatcattcccttcttcatttccccatctcttcgctggcaaggaccaactgcggtgtcttatcccatgtgcaatagatcaggatccatattttaggatgactcgtgatgttgctcctagaattggttatcagaaaccatcactgattgaatctagattttttcctgctcttcagggggagaacacaaaaatgtcagctagtgacgcaaattcggcgatatacgtgacagatagtgctaaagaaataaagacaaaggtgaataaatatgccttctcaggtggccaggactcaatagagctccatagaaaacttggcgctaaccttgatgtggatgtcccaatcaaatacctgaacttcttccttgaagatgatgacgagcttgcgcacataaaaaaggagtacaaggagggaaggatgttgactggtgaagtgaagcaacggcttattgcagttctatctgagattgttgctagacaccagagagctagagctcaagtgaccgaagagatggtcgatgcattcatggcagtgaggcctcttcccaatatgtttggctgagcatcacggcgacaacttgaacaaacatttttgttatcagggagaattttaagagtctttagaattgtcgtgccaccataagtatcccctgtgttttacttcttcgggatttaggcaaacctggccaaacatcccatgtggtggctgtggttgattttgtaaactcatacttgatatggtatcaatgattcaattcagacattttttttcaagcatatgcatgccattgtaatagagagcacctcttttttagttataaacggatgttgcttttgttcaattcaataacccactgtgtttgaatgg

SEQ ID NO: 277132 - DNA, 343 bp, Zea mays
gatgactcgcgatgtcgctcctagaattggctatcagaaaccatcactgattgaatctagatttgttcctgctcttcacggggagaacacaaaaatgtcagctagtgacgcaaattcggcgatatacgtgacagatagtgctaaagacatgaagccaaaggtctgccctgctataaagtttgtctgtttagctggagaaatatcaggctacccattttagttggcccatttaagttatgacgaaagcggttattagaccgaaccaagaattagttgatctcctgcatatatctcttataatttgtttccaatgtttcaggtgaataaatatgccttctcagtg

SEQ ID NO: 277133 - DNA, 460 bp, Zea mays
cccacgcgtccgcccacgcgttcggttctagatcgcgagcggcgccctgcttccttctctttagcttgaaccagttactataaatacttgacagcttcatctacttactatatatacttgacactatatacgtgctgtctatgactatgagtctatctactaatactattattctccatctgcgtatacatatgtgcatatttgtttacatgtcatcggaccagtcctgcagctcgccctcggagaagagcgcctcgacgatgttgtcgatgagggagtcgacgaaggcgttgcaccccagcgtgaacatctggccgatcctgttgcgcgctctggacgcccacgcgaacgccgtggcgcaggcgaccaccgtcacacacacccccgcggcctcctcgatctccatcgtgtccagcttcttgaacagcgagctgcccgtcgtcgtctccacggccactgc

SEQ ID NO: 277134 - DNA, 533 bp, Zea mays
gcgcacgcaggcggcggcgtcttcctccgcggatccctcctcctcctcctcttgctatcctcgcggacgacgcgattccacaccgcaaaccctccctccctccctggattgatcgagctgctcgtccacctccgctccgcccctcgcctcgccatttcgtagcttgtttcttttttccttctccctccctttcggtttctgctcgattcatcaaattagtttattggaggggagggagacgttaggtgggctgggcgtctcagcgcctgcgtgctccgcctcgggagaagccgagaaggtcaaaagaaatccccaccaccaacgcaggcgactcccgcaatccaccatagcttcctattctccccgtcgccagacgcccagagccccccgcccccagctcggagcaagcaataaaaggcaaaggtgccgacttttctgaaccgcttgccctccgtccacgccatattggtcgattgctcgattcctcggtcgggggagggaccccgggcccggagaagttagcatgcgatgtg

SEQ ID NO: 277135 - DNA, 995 bp, Zea mays
tgcagattggagtgaacagcataccagtgaatctccatccaagcagagaacgtcagccctattttccagaacagaaacacaactatctgctcatttaggaacaaacaaaagtgatattccttcacctcattcttatcataacatgcgtcctgcttttgattcagatggtggtagctctgatgatgacatagccacaaccacgcatgcagtgcctttaaggtcacattcaggaggatctgcttcgtctgtcctgaacagaggtggtggacctgatgcttcacccatattggattattcacgagcacatgcagtgaggaacttgaaccgtgtgcaaagcagagattctgatctttcggaagaacgagacagatttagataaatttaaaggttcatccttcgccagagcaaatgagcagcagctgttgccttctgccatacgtacttcagcaacttctgatgataaggaagatgacatcagcctgaactttggtaagttaacgcctggactaagaaacaaacccaggcaacccccaccatacaccaaagtttccagggagagcattctgcctaagcagtccttgcctaaggtttctgctggcactgaagagtcagtcgattctgaagagaatactacattcaaacaggatagaagtagtccccaaagctcattttcagccaggacttcttcaggtaaagactacgacagtggactttatgaaaggaaccgaagtgttggaacacactgggaagcaaaatcaaccatagcaagaaattcctctggtttagatgatgctgagaagttatctgatctacctactaatataagtcttccaacaactaagagttctgaacgctggaattcgagtaaagtgccttatcatgaaaaaccaggtattggaacacgccgagaagtgagatcaacactggctagaaattattttgattcagatgacagtgaagaagaactagagcaacagcagattcctcagtcgaag

SEQ ID NO: 277136 - DNA, 674 bp, Zea mays
attgaccaaagacccggtagttccctggatggtcgccggctagcctgcaagagaaaaaatggtgaaggacccaatggccagagttcagcaggtgctagcactagttttccccacaggaacgacaatgctttccataacattgcttcttcaagttacaatcctgcacctatcagaaattcgtcctctcccaagtgcttgccagttccaagttctatcgatgatcaactcccacgatatggaactaatgcagggctctcagccggtacctatgaccttaatggaggggtcaacaatgctgggaattcgcagagaagtttccgggcaagaattactacgtctcaacagattgctccctgtagtgtatggccctcttcaaatgctatcagacttcctaattcatggaatcatcagccacctcattttcaaagtgcatttgatgatacccaggaggttattcctgtggtcagcagcctcaacttgcaataccagcatccagtgaatgtttctagtgtgccaccggctgcaaaccgtttcactggccatggagcttcatcatcgagagctggcagtttggagaacagaattcttggtagtcaagaggctcctacaaggaatgtggtgcctgccaactactctgatttagtttccccgtctgtagtaaacccgagacgttt

SEQ ID NO: 277137 - DNA, 536 bp, Zea mays
gctgcagaaccatggaacttgataatttgctaagtactgggcacaaagctgcatctttcccaagatggaagaacaaaaagcatgccagtgtcgtaagctgcctaaaagagtaacaaaccaagcacatcttaacattttaacatcccaagtcgctatgttttgccaaaaactccagaaaaattattcatgtcgtctagtattatattaataataaaaagaacagtagagcaggtcctgtttcgtccaagactccaggtcagttcttagcattgaggtcattccttatcttgatcctggatcggttgtccaacttgacaaaacgcttcaggtcttcataagagagtgtcttgggatctttcctccgcagctcacttagtacaggacgcttgtcgagcaagtgccacagccagtcaggatactcagagtctggttggattttcggatcagaaccctccttgaagatgtttgccccgaacactgttgtactcttgagctcttggctgagagcaggagttttgccagcatcagcctttcca

SEQ ID NO: 277138 - DNA, 510 bp, Zea mays
tgtacattcctccctcagtccctcttccccccgtttcatcccttcacacccacagcccacctggtctgtcatcccctttgctacgctccccttgccctgtcccctcgccgcccgcgcccgtggagttcttcgatcgagtcctcggagcccggagcacctggtgcaacaatccggacccgcgcgaggaagggcggagagagagccgaatctgagcctcggcacaagttgggcacccgtcaagattctcggcccgatctgctgcggaacatggagctggacagcatcgagtgcatgtcctactccgacagcatgggggacgacgacaccgacgccgtcacctcgtcccagctccctcgccccttcctcaaatcctcctccaccgccggtactgccgccgtcaacgtggtcgtcgtctccgaccgcgtcggtgccgccgggccggtagcgggagcgggttcgctggtgatttcgccagccacgggcgtgcacgagctgctcgagtgccccgtc

SEQ ID NO: 277139 - DNA, 519 bp, Zea mays
cccacgcgtccggagaaatgaatatcgatagctggcatatcatcatgaggatgcgaattccggaggaaggcccatgtgatcctattgctcccttagatcttccacattcgttgcatgctttccaccgcgtatcagcttgtgactctctcaatttggagggataccacacattccgtggaggattctggaattattttagcttgggaatggatgcacaagtatcctatgaattccactctgaaaggaagagaaatccagagaagttcagacaccagctaagaaatcagggtacatatgctaagcttggatttaagcattccctaaaccatctttcatcgaggaacatttctcaacttgcaaaggtgaagatcatgaaaagacctggttcccagtgggaagagctgaagattcctcgcagcattcaatcagttatctgcctgaacctgccaagcttctctggaggattgaatccatggggaacacctggcacaaggaaagcacaagacagagacctgactg

SEQ ID NO: 277140 - DNA, 755 bp, Zea mays
cccacgcgtccgcccacgcgtccggcctgaatcctgtgtcattggacgctacatgcctggagagaatggaggattcagttactatagttgatcatggcaaaaaggctgaaaaggatgattctctgttatcgtgggcaaggtcaccagaccgattacttcatcaagatacatgtcttgcattggctagctcctttgtcctcttgaggttgcttcatttccttcttcctaagcttaatgcatgtatgaagcaagcctggaggatgcgactgtatgaattgaataggttgtttcctagcttgtcttgaggaaggcaatatggaactagaaaacttcaactgactctcgaataaggcagcatacttataagaagtgatgcagacaacaaaccggatcactaggaagccagtgtcaagttaatccacattggtgattcagtttgagtagtgaaaatataccgctaccaactctcaatatcctgaagttcaggaggtctcatcaatggatgccctgtattacatccatgtcgaactcattctgtgtcaactatgtttggtctttccttgggagatatcttgatgcaagcataagtgacattcatggaaatgctgacttaatagtaagtcatctgtaccactgtaccattagccatctcagtctgagttcagatttgtatcttggtgttactcatgaacacaaaaggcatgtattataagaaagattgttcattcattttagtcataggcatgattgatatg

SEQ ID NO: 277141 - DNA, 453 bp, Zea mays
attaggttgacaaaagagaaggaggattatagaaatactattatgaatcttaagcaggaatttgaatcattaagatcgtcatatgaggagagatgtacgttgttagaatctaagaaggaagatgtagttaaacttgtcgcagacaaggaaatgaatgacaacatagttttgcaactcaggcaacaacttgaggcaacaaaaaagttccatgaggcagagacaaacgagaaggaggattatagaaatattaatatgaaacttaagcaggaattcgaatcattaagatcgtcatatgaggagagcagcacgctgttagaatctaagatggaagacgtagttaaacttgttacagactacgtaacgaatgacaacataattttgcaactcacgctagaacttgacgcatcacaatagttgcatgaggcagagactcagcaattagagaccaaagct

SEQ ID NO: 277142 - DNA, 882 bp, Zea mays
  unsure (1)..(882): unsure at all n locations
ggaatagagaaggcacttccatttctaaaacccttgattgacttgccattcattaaagcagtcatccaagggtttcttcctggaattgctttgaagatcttccttatagtgcttccaactatactgatgtttatgtctaaatttgaaggactgatatcgcagtcatctctggagaggcgatctgcatctaagtattacatattcttgttcttcaatgtatttttggggagcgtaattgcaggatctgctctggagcagcttaaaacttatctccatacatcagcaaacgacataccaaggatcattggtgactccatcccaatgaaggcgacttttttcataacatatgtgatggttgatggttggactggaatagctggtgaaatattgagactgaagccgcttatattcttccatctgaagaactttttcttggtcaaaaccgaaaaggacagagaagaagctatggaccctggcagtatctgctttgactcaactgaacctagaatacagttgtacttcttgcttggccttgtttatgctgcagtgacgccgttcttgcttcctttcatattggtgttctttgggttcgcatatgttgtcttccgccaccagataataaatgtctataatcagcaatatgagagcgccgcacagttctggcctagcgttcatgggcgtataatcacagcgttgattgtatcgcaactgctgctcctgggactgatgagcacgaacgactttgagcagacgacacctgtgctccttgttcttcctgtgctgacctttgggttttacaagtactgcaagaaccgctttgagcccgcattcgtgaggaacccgctgcaggaggcgatgaangaggacaccctagaacgcgcc

SEQ ID NO: 277143 - DNA, 634 bp, Zea mays
  unsure (1)..(634): unsure at all n locations
cccacgcgtccgcggacgcgtgggcggacgcgtgggcttgaccaaccagacgcaccggccgcgccggcgcatgccctcctccacgctccgccggcggcggcgccattcccgccggcccaccgtcgacgctctccccgaacgcggctccctacaccttcctcgcgcgtcagtcccgcgccccacccggacgcctccaagatggtgatgctccaaggttgattgataataactttgtgttgtatggagaggacaacagttcttattcggtgccactggcagcacaatcaggaatgaagcagagtgacactgtttactcaagcagctcgcatggaacacaccaaggtcagccaagctccgcacgtggaattcctgtcggtgtttatgcatctgcaacgtcctcaattgcgatagtttcagagccatcagtgaccatagggttctgatttcaaccagcaccttgttccattgacctcagggtagggaagcagacagccaagggtgacgatcagaagccctncaaataagacttcagaaactaacaacacccatttttggttctgttagcaaattggctataaggaaaaatgatgagtccaacaaagagactgggaaacatgtctccttcagcagaact

SEQ ID NO: 277144 - DNA, 707 bp, Zea mays
caaagaacggtttaagtctttcaatacacaattcgaagagcttcacgcgaagaatcacaatggatcgtacctgatcaagaactacgagaatccttgaggctcgctgtagccgaagtcctgttgccagcctaccgatcttttatcaaacgctttggcaatcttgtggacaacaacaagaacccgcagaagtacgtgcggtacagcccagaagcagtggaccaacttctaggccagttcttcgaagggcagcaatgggcggagcaaaagcgctgagcaacatagagtgagagtgacggcatgagtacagccagatgccagcactacctagttttcttttctcagaaaaagcgcgcctaagtttcttttctcgccatttgggtggctggaacggaaagctaacggcaaaaaaagtgttggtggaactttcttgctggaggttcctaaacttattagtgttgatctataaaaggtaaaagaacgagacctctacggttgtggccttgtgggttcacaatcagcagttccaacaccaaggactagtttgataattccatttttccaaaggattttcattttcaagggaaattcattcatttttccttaggaaaacgggaatcccttagaaaaatatagtaactttttttgggtgccgtagaagtattgttttcatcagtatagaaccctatgttgcaataaaattgttcctt

SEQ ID NO: 277145 - DNA, 463 bp, Zea mays
cggacgcgtgggcggacgcgtgggttttttttggaaaataaaaaataattatatttcgataaatatattatttaatcaaagtttatagaaaccgtagcagtgtatggataactaactaccattttatgtctgaccaagtttgtttaaatgaatcagacacgaccaaatgggagagtgagaagggacatctacatctgtttaacacaaaagttggcactcatcagcctatgcgaattacaggtgcttcgaagacagtgctattagtggcgcagcttgcatttgtatccatcgtttcatcccccagctcaacattttcagtgtccatggagaaggcagcaaccacagccatgccaaataggcccttggatttgcatgtatgactctgttccttcacttgaactgcaactagcagatccttagccttggctccctgggactgacagtgagtcatgatagcctcaat

SEQ ID NO: 277146 - DNA, 483 bp, Zea mays
cgcttcgtgttcccttcccgcccggccgaagcgaacaagcaaccgccaccaatggctgcgtgaccttgcgggcgagggcgagggcggcggcggcggcggaaaggagcaaggaggcttccagaagctttcgtccatgcaagctccacctgagagatacgggctcgccgcgatggaattcgagtacagcggcgcggcggcggcagcgcagactctcttcgccgtcgttgaggacccacctcacgccggcttttgacgccgtggccggtggggagggcggcgtgtctgggtactcttcatcgtcgtcttccagcggtctcgaactcgggttcgacgcctctctcctccgcaaccgccgctccggtttcgccgccccctcggacctggacagccgtgtcctcctctactccccgcagtccgtgccgccgcagatgagggcggcgtacctggcagcggatgatggggtcagggcacctggcgtcaacc

SEQ ID NO: 277147 - DNA, 437 bp, Zea mays
ataacatcagagaatgtctcgcaaaggatatgcgtactttccttaaggatccaagaagtagtacaggcatcaggcaactgatcgtggacattcttacggtcgtcgacatattctgggcttgtgttatctatcaacttcaatcaactaattataatggtgtcacaactgttctcatcggcatcattgaaacgatacaatatgttagcggggtcctgaaatatacagcggttgtttgcaggttcgtattaatgccgctggcagtattcgtcttcctagtctataaatactggaaaacaaggataacagtagatgcagtcgagaagttcttgcgaatgcagcagatgctcgttccaatgagatatgcatacacaaacatcattgctatcaccggccatttcagagacaagctcggacaaggtggttacggttctgtatac

SEQ ID NO: 277148 - DNA, 550 bp, Zea mays
cgctcatgctcagggcattgggatttgggaaggacgtgcacctttatgttgcatcaggagatgtatatggaggcgaggagacactgcgcgcctctgaaggcactcttcccaaactttcactcgaaggaaactctagccaacaaggagttagctccttttttaccatattcatctcgcatggctgctctcgattttatcgtatgtgataggagcgatgtcttcgtgacaaacaacaatggcaacatggccagaatgttggctggtcgaaggagatattttgggcacaggaggaccataaggcccaacactaagaaactttactcattatttctgaatcggaccagcatgagttgggacacatttgcatctaaagtccagacctttcaaaagggattcatgggggagcccaatgagattaaactaggaagaggcgaattccatgagcatcctgtagattgcatttgtgcaaaatcgaagggaaaaagcgtacagagcaggcctcacctagttaaaggcgcctgagaagctgtggagaaccattctattgatg

SEQ ID NO: 277149 - DNA, 686 bp, Zea mays
tcgtctctccagtctctagttctttctctacactcttgcagtgcagctagcagcgcacggagagccaaaaccaaagccatggcagcacatctcgccagcgccttcttcttcgctgccgagcccgtcggcgagcccggcgtgcacgcgctcgacgcgtgcgcgctctgcgccaagccgctggcgcgcgacagcgacatcttcatgtacagaggggacacgcccttctgcagcgaggagtgccgctacgagcagatgcagctcgacgccatccgcgccaggcagccgtacgcgtcagggacggaggcgcggagggggcaccgggaggccagcaaggtgtccgcggtggcgacctgatgaacgcccgccggagggtggcccggagctgcgcctgcacagattgagagactcaagccaacggtttggttggtcgtttgcctcgtgaaggttgggattcggagaaacgtactcttagatcagatcgagcggccctgagccgagcttcccggtgaatgatgcccccggatgccggaagtcggagaagacgatctccatcggagttgctctggttgcacgaggcttggcctgcgtgccacagtcagtgccttagtcctagtgtaacatgatttttgtaaattccatgcatttggaaagcttttgcctccaaattcagaccccctttttggacc

SEQ ID NO: 277150 - DNA, 802 bp, Zea mays
gacctcctgttgctgtagcagcaccaggcaaatagccaacgactggcaaagcttgcttagctcaaggcatcaggccgtcctaggctagccagagccacaccaacgcctaaacgctcgccatggcctcctccttcttcttcttcgacgccgagccggtctacgactacgagcctagcctgctgcccacgatggacgcctgcgcgctctgcgccaagccgctgggacgcgactgcgacatcttcatgtacagaggggacacgcccttctgcagcgaggagtgccgcggcgagcagatgcggctcgacgccgtccgcgccaggcaggccgccaggtccgccggacggaggcagcagcagcagcagtactcctccagaacggaatccaggcaccaggagaccatggaggtatccgtggcgacatgatgaacggccggagcctggtcctggtcctcaagaccacgagatgtctacacgagatttctgcgcctgaggaaacgtcgatggagccggcaggacatataggacttcgatttctccgtcactgttgtcctgcctgagcactgcgccgatggcccgagggcgaagggaccacatcgcctggagaagaactttcagtcactgaaatctgcttgcctgtggctttggctactgtgatgaatcgcccgctatgcacgcgctaacctttgctcgtacagggtgtgaagagtgtgattgtacaccggtttgttctttgtaaaaccagtgcatctggggattttatttcccgtctgagatttcaacacgacctggactctacctaccac

SEQ ID NO: 277151 - DNA, 1055 bp, Zea mays
gcgactacgtaccagactccaggcctgaacatcatcagggaggacatcatggggtacctgtacccgggccgtcccgtcgccaacatgtgcttcaaggtgtacggctacatcagcatgacgcaggcgctggccttcctgcaagacttcaagctgggccactacatgaagatcccgccgaggaccatgttcatggcgcaggtggtggggacgctgatcgcggcgctcgtgtacatcgggacggcgtggtggctcatggacagcgtccccaacatctgcagcacggagctgctccccgccgacagcccctggacgtgccccatggaccacgtgttctacgacgcgtccgtcggctggggcctcatcggcccgcgcaggatcttcggcgacctcggcacctactcggcggtcaactggttcttcctgggcggcgccgtcgcgcccctcctcgtgtggctcgcgcaccgggcgttcccgagccagagctggatcctgctcgtcaacatgcccgtgctcatcggctccaccggcatgatgctcgccggccaccgccgtcaactacaccacgtggatcattgccgggttcctgtcggggtacgtggtctacaggtaccggcgtcactggtgggagcgccacaactacctgctctctggcgcgctcgacgcctggcctggcgttcatggccgtgctcatctacctgtgcttgggcttggagaacgtcggcctcaactggtggggcaatgatctggacgggtgccctctcgcctcttgtcccactgccaaaggtatcgttgttgagggctgcccggtgtatacatgaggaattgagaacccatgcattcggagaagagaacatggcaatgcaagtggacaagtgtctcaagagcaatgtaaataatttatcttttcaaacaatttagggatgggaaattggtgttcctttcattgtaaaatggctggtaattacggctattccagctcggaatcaaatttattccgtggtacaacaaaacataatttattcaaaaaagcgatctcgcatgctcaggaacgctgg

SEQ ID NO: 277152 - DNA, 480 bp, Zea mays
cccacgcgtccggggggctctgcatgccacggggcgatgctggccggaggtgccgcggcggcgtacggagctcacacggtgtcccactcccacgggatgtacggccacggccacggccacggcaagttcaagcatggcaagttcaagcacggcaagtttggcaagcacaagaagatgtttggcaagcacaagaatatgttcggtcgcaagtggaagtgattaacgtacagctttaatccgattctggacgagcagacgtatatatatacaccggagtccagaatgctaagttatgctattttgattgtgattcgaatacgggaggttgttagggttttcgaagtacgtactgacggctgcctgtaagctttgttggagctgttcttgccgtgttggcagtccgaattaatttaaccatcgattgtgtcgaacagcatctccagctgccgacaaatagacgagtgatcaaagttttttttt

SEQ ID NO: 277153 - DNA, 444 bp, Zea mays
gcagcttgagacttgagagattggtgatagaggcgtttcattatttgtttctctttggcgaataggagacgcactgtgttgttgcaatcagaattgtgggcttcttggggcacattttgctcttgatttcattagtacgatggtgaatggagggcacattgtgattttcagatcagaattgtggttccttgggctgccttaatgtgttgatttcttttctttatacgatgatagatatagaattgtctaattgcaggtacaaggtgctaaagccatcatgtttaccagtttgctacatgttctctcaatttggtagtaattttcagtttggaacatgtaatctgagtgttagtcagtttgctacatgtttctgaatttgtgtcaatctgagtttggaccatgttatcaacttttgtcaatttgccacctgtaagtggcgctgca

SEQ ID NO: 277154 - DNA, 1265 bp, Zea mays
ggactcgcccgccgtggcggacgtctggccgtccacctccgcgttcgatgggtacctctccgcgctctccccgatccagcttgttcgcagtaacagccgtcgttttatgccttctcaagctgatgaagaaattcatcagttgtcctttctgcaaaagcatatggcgaatattcttactctcttggcagattctgttgagggtgatggtgacgattcactggtgttgacaatggagacttttgagcaccttggatttctagttcaattctcagaaggaacttctttaagccaggctgctacattttttgcatgctcagatccagacatgcctgatgtgcctgtccctgctgctcaggttcttgattggatgtcacagaaaatagctttttcactggaatattctgctgagaggtccgcagcaaaggaaagcaaccagcaaaccatgtctgatcttgatgtgaccatggctgaggccaatacaagtcacccacggaacagtacaccaagtgccaatcctgcatactacagaaatgtaacatttgtggagggcttttccaaaacctctgttgtcaagcatgcatctgatgtcaaagggaattctataaaggttttgaactgccatgattctgttatctacatattagcacccctgaagtatgctactgtgtatggttgttctgatgctacggttgttcttggtgctgttggtaaggtagtaaaagtggagcattgtgaaagagtgcatatcattgcagctgcagaacggatttgtattgccaactgccgggagtgcatcttctacctaggagtaaatcaccaacctcttgtattgggggacaaccataaattacaagttgctccattcaatacatgctacccacaactgcaggatcatatgatgcaagtgggtgttgatcccagtgtcaacaaatgggaccaacctgttgtattgggagttgtggatccacatgattcattatcccatcctgctggggttgcagatgttaaagctgaatcagcaacatgtctggatcctgatctattcaccagttttttgattcctagttggtttggggatgaaaggcaagggactacaaactgcaatcctttcccactgcctgaaatttatgggacatcccaaagcaaaaagcgttctgctctggaagatatccaaaagatgattcgggagctgcagcttgatgagaaccggaaaagggaattggcaactgcccttcacgttcagttcaaggattggttatacgctt

SEQ ID NO: 277155 - DNA, 581 bp, Zea mays
gttttgcagctgcaatgatatgcactctttcacaatgctccacttttactaccttaccaacagcaccaagaacaaccgtagcatcagaacaaccatacacagtagcatacttcagtggtgctaatatgtagataacagaatcatgacagttcaaaacctttattgaattccctcggacgcgtgggcggacgcgtgggcggacgcgtgggcggacgcgtgggttccattcgcttagtaaagttagacttctgagtagtgtcatatactccaatcctaatccaagaagatgaatgagatttgaagttattgtttctatatttctcagcgtagtagtagaaagtgatgaagatatagtgcaaactttgatatattcttaaacattgtttggcacagctagttcatatttcaccatgctgtattactaaaggtcagatgttcctaagtatattgtattcttatcagcgttctgctctggaagatatccaaaagatgattcgggagttgcagcttgatgagaaccggaaaagggaattggcaactgcccttcacgttcagttcaaggattggttatacggtaacgc

SEQ ID NO: 277156 - DNA, 569 bp, Zea mays
cccacgcgtccggtcaaaatcatgatcctggctaagcatgaaaagttttttgatatcttatatctacagaaactatagttgaggcagctgcatgcttgctggcaccggccatccaaactttgacatgggagtacgtccacccagtttcctggtgacagtgagatttttggccatggcttccatgatatgctctagttttgctgttaaacttcaactgattgttctatggcagcaacaagagaacagcaccttgtgattattccggaggcacatcaggggtcgttgcagcggatgcaatcatcatatggtggatagtggatagtgaatagttggcgtcacaatttttgttcccatagtcgtcacgattagccatctgtcaaagtactctctctctctctcttcgttgaataaggtcatcaagaaggccggtcatttacttgtgtattctgtactttatttagtttgtagtcacatgaacaatgagctgaaatactatatcacaggtctattgtcatttttatcacacactgctgtatttagatgaataatacacaagcatttgaggattc

SEQ ID NO: 277157 - DNA, 398 bp, Zea mays
  unsure (1)..(398): unsure at all n locations
ccgcagcgtccaatccccgcgcgtcttcacgccgcgccacgccgtccgggccatgggccaccaatggcgacccccaccgccaccgcactcacctgctcctgccgcccttcgtcgccctcctcatcatccgccgccttccgccggctgaacatcttcgcccccgtctcgggcgcccattctcctcctcgacgccgcctccgtctcgcgccattgcacgtcgtcgacgactccaagaacccccccgaggagaggtctgagacggataagatggtggacggcatggacttcggggagctctgcagcgacttcgagtgcataagcagcccctacgtggagtcgacggcgaggcaggtcgcgcgggacatnctggagctccgcgaggacaaccgcgcattcaa

SEQ ID NO: 277158 - DNA, 614 bp, Zea mays
ggtgatcctaagggagtactaatctcgaacaagagcattgttaccattgtttcagcagtagatgagttcctcagcaactcaaacgagcagcttaacatggatgacgtttacatttcctatcttccgcttgctcatatatttgaccgggtgattgaggaggtgttcattcgtcatggtgcttcaattggattttggcgtggggatgtcaaactcttggttgaagacattggagaactcaaaccaacagttttttgtgctgttccacgtgttctagacagaatttatggaggagggcaagataaaattacagctggtggtttcctaaagaaaaccttgttcaatgttgcttacaaatacaaacaaggcaatatgttgaagggaaacaagcatgaagaggctgctgccatgtttgatcgcctggtcttcaccaaggtgaaactgggactaggtggaagggttcgcctgattctatctggcgcagctcccctatctagacatgttgaggagtatctgcgtgaggtaacatgctcccatgtccttcaaggatacaggctaacggaaacctgtgctgggttctttggttccctgccgaacaacatgtacatgctgggaaa

SEQ ID NO: 277159 - DNA, 435 bp, Zea mays
actcaaaggagttgtctattggcagcaacacaagccaaataattaacatgtcatcatgtggatgaatgtatcttcttgtgcagtggtaactagtacaactggactccattcaacgacaaacaaataaataaataaataactcagtcctaatttaccaccaaacggcaattgcgaagaaaccaaaagaaaggtggccaaaactaggacaatctctgttcgatgatttaagtatgatacaaaatctaatgcgacatcagaacatttgaagtccgtaatcatttgggcgcccatatacaagagtgccacggacttgtctgagcacacattgggggcattagcttactggtggccgactgaatatcatcagttttcaagcagagacagaaatcattccctcttctctggtttctggaccttgacatacggcaagaatcc

SEQ ID NO: 277160 - DNA, 404 bp, Zea mays
cccacgcgtccgcccacacgtccgcccacgcgtccgtcttgacgacgatgatggctccaccggaagcgaaggatcgaccaaggtggcatctgaggcagcagatataggaagatcagccttgtttccagcttctgctttatcaaacacttttgggttcaagattcaggacaagcaagggagaatgcacagatttaactgtgaaacgagcagcttgacagacctgataactagcattcttcagagggtcggcgatgacattgacagaaaacacctgccacaaattttgtatgaagatgaggaccatgataaggtcatattgtcgtccgacagtgaccttatagctgccgtagaccacgcaagacaaatcggttggaagagcctaaggctgcacttggactacgccc

SEQ ID NO: 277161 - DNA, 383 bp, Zea mays
cccacgcgtccgctcaatagcgccatgagacaatactgagagcagggggaaatcgagtgattcctggtaagacagagaaacccgttgtccccattgacggtcgctgctccactgtgttccttccatttctcgccggaattagagcttaaccgtggaacaacatgccgccgtttgggcgagccctctgcgcactccaagctctactccggggatgacagcctcgtcatgctcgtcatcgacacaaaccccttcttctgggctgccacggcgctccccttcaccgactccttcgcgcgctcgaactcccttctgctgttggaccacgtcaaccgtgtggttatctcgtggcgggagtcaactccggtggtgtggccatcttggac

SEQ ID NO: 277162 - DNA, 570 bp, Zea mays
taccgtcgaattccgggcaccccccgcaggtcgcgaccggcgggcaaacatccctactctcctgctcctcttcttcctcctcctctcgctctcaagcgcgtcttcactccggcctagctcggacggatcgacatcgaggggaaagggaataagtgggggcgccagcagatggatccatggatcagcagccagccttctctgagccttgacctgcgcgtcggcctgccgccgctcagcctccaccaggcgccggtggccgtcgccttggccaggcccaaggtgctcgtcgaggagaacttcctgctgcctcccaagaaagaaccagaggtggcggccgctctcgagtcggagctacggcggatgagcgaggagaaccggcgcctggcggaggcgctggccgcggtggtctccaagtacgaggcgctgcgcagccagcacacggagatggtggccgcgtcgtccgcgtcggagggcgggtccgtgtcgccgtcgcggaagcgcaagaacgagagcgcggacacggcgccggggcagcgcctttaccagcagcacgcggcggcggacctgtcg

SEQ ID NO: 277163 - DNA, 513 bp, Zea mays
cccacgcgtccgagcgtctctactcctcttcctcctctctctactctccaagttctcttctccgtcgaccgctctacacgtctcttgtcgacctggacaccgaggtggaagaaggaagcagtcagcagatggatccatggatcagcagccagccttctctgagccttgacctgcgcgtcggcctgccgccgctcagcctccaccaccaggcgccggtggccgtcgccttgcccaggcccaagctgctcgtcgaggagaacttcctcctgccgcctccaaagaaagaaccagaggtcgcggctctcgagacggagctgcagcggatgggcgaggagaaccggcgcctggcggaggcgctggccgaggtggcctccaagtacgaggcgctgctggggcagtacacgagatggtggccgcggcggccacggcctgcgggactactcgtcgttcactcggaggcgggttcggttcgccgtcgcggagcgcagagcagagcacgacaccggccgccgc

SEQ ID NO: 277164 - DNA, 585 bp, Zea mays
cccacgcgtccggttccattccatccgcacgaagaagagcagcggcggatgaccccgttgatgtcatcgccacgcacgtcgcctcgcccttcttgacgacgtgcgccggtcggccggataccatgccgggcaagcaggaggagggcggccaaggcccggcgggcagcagcgtgtgcttgtggctggtgacggcgctgctcctcctctctctgctcgccggcggcgcgtgcctcgcggcctacgtcctgctgccgccgcaggagacgccggcctggctccccgccgtcggcctagcgctcgtcgcgctcccgggggcgttctggatcctcacttgcgcgtaccggtgcgccgccgcgcgggccgcggagcgcacgacgatggccgtggcgccggctgctggtagcatgtgctcgcgctccggctcgtgagcagtaaccgtaagacacttagccgtgcgaattcactttcaggtcaattgttacatgatggttctatacacgtcattgcattaagaaatcaagatcatatacatgctggtatccgtccgtccttaacagtatttaacgatcgctgaagctgcacaac

SEQ ID NO: 277165 - DNA, 526 bp, Zea mays
cacgacgcgtaccaggtcgtgtaccggatcaacgtcggtgggcccgccatcggccgggccgaggacacgctgggccggcggtgggagaccgacgccgcgtacgtgcagtccaaggaggcggtgaaggacgtgtcggtgcccaccagcaccatcaggttccccgacgggacgtcccggctggtggcgccggcgctggtgtacgccagcgctgccaggatggcggacgccgacgtggggagccccaacttcaacctgacgtggaaggtggacgtggacccgtccttcagctacctggtccgcctcttcttcgccgacatcgtgagcaaggccaccaacgacctctacttcgacgtgtacctcggcgggcgcaaggccgtgtccgggctggacctgtcgacggtggccggcggcgagctggcggcgccctactacaaggacttcgtggtgaactcgtcgttgctggaggacggcaagctgagcgtccaggtcgggcccatggggcatgacacggtgcggatcgacgcgc

SEQ ID NO: 277166 - DNA, 893 bp, Zea mays
cattccgatgggatcatgtccgtgtcaaattgaaaaaggagatagtgacgtttggagacccaggtgttatgccaactaaaatcgttgggaaatatgttaagccaaaagactggaatgacttgataagtgatccagacactgtcatcattgatgtgcgtaacatgtatgagatacgcataggaaagtttaagaaagctgtcgatccacgtacaaactcattcagagagtttcctacttgggttgacgatcaatttcaattggttcaatcaggcaccctagggtcagggggagatgataatggaacccgtgaaccatcggcagaccttaatgccagcaaatccaaacagctaccaagagttgctatgtactgcactggtggtatccgatgtgagaaggcatcaagctttctcctcggcaagggctttaaagaggtttatcatttggaaggcgggatattgaagtatctggaggaaatcccaaaggccgaaagtttgtgggagggtgaatgctttgtgtttgacagcgtgtctcggtggggcatggattggcccaaggcacccacaaactttgctacgggtgtaagcagccagtcagcgatgaggacatggtgtcgcctcactgggagtacggcgtctcttgcccgcattgcttcgcaacgaaatccgaggaggagaaggaacgggctagggctcggcagcggcagttcgagacctttggagtgataggtgggcctcatatgggcaagagtccgagagggtctgccgctaacaatgcagtggagttcatacagttgcccaagtcagtgtaactttaattatccatctgaaacttttagattgaagtgttgttgacaaagtgagggaatcaaccacattggcaatgattgccatatt

SEQ ID NO: 277167 - DNA, 506 bp, Zea mays
ttctacgcgtccgcccacgcgtccgaaaaaatgggggagccttcagttcctcaaccagcggccgaccgtcgaccgagaagcccgagcagcggtccgatcaggtgagcagcggcgcggctgctgcctgcccgcgcctgcctccgcggctccgccggccgtcgaccgagcagccgagcagaggcgcggcggatgcctgcccgcgctcgcctccgcggttccgctggccgtcgttcgccgacccgaacgccgagtcgcgcgagcgtgccggcgtgccccgcctctcgtcggctcgcgactgcgccagcgcggtcgcgccgacccaccccccggtgaccggcgtccggatccatccgtctggcaacccaaccggccaagggccaaccccgtccccggaccccgactccccgagggccaaccggccaaggcacaaccgctgaaccgcacaatgcatatttagtcgtctactcgcctaggcctattctttccctctcaaactcaaattcttc

SEQ ID NO: 277168 - DNA, 826 bp, Zea mays
acctgcgccgcagctggtcgggacggtggtcgccggcgtggtgaacctggcggtggcgtggtggatgctggacaacatcgagaacatctgcgacgtggaggcgctgcacccggacagcccgtggacgtgccccaagtaccgcgtcacgttcgacgcgtcggtgatctggggcctgatcggcccggggcggctcttcggccggcacgggctgtaccgcaacctggtgtggctgctcctggtcggcgcggtgctccccgtgccggtgtggctgctgagcagggcgttcccggagaagaagtggatcgcgctcatcaacgtgcccgtcatctcgtacgggttcgccgggatgccgccggccacgcccaccaacatcgccacctggctggtgacgggcaccatcttcaactacttcgtcttcaggtaccgcaaggggtggtggcagaagtacaactacgtgctctcggccgcgctcgacgccggcaccgccttcatgggggtgctcatcttcttcgccctccagaacgcgcaccacgagctcaagtggtggggcacggaggtggatcattgcccgctcgcctcctgccccaccgcgccgggcatcgccgtcaagggctgcccggtgttctgaatcttccgagacctgagcgtagtaagcagtgtgtgtaacagtgtaaggaaatgtttgctccgggagccatggattcaaccaagcatcgattaaccgatgcagggctttgtccctcgtgaatgtaaccccatagcgccagtggtggattcagatttcaaagggaaaaaaaaacccaggcccagtgtttttggacccccc

SEQ ID NO: 277169 - DNA, 684 bp, Zea mays
ctgcctccggccaccgtcagcaggggcggagatgcccaaagcggcttccgcgcctcctcctcttcattggccgcgccgcccgacaccaagagagtcggccgacgagactgtgtgctcaggagcagtgagattgccacgctcgccgccatcttccactccggtggcagcataccaagctaccttggcgttcagaagagtcctccgtcccttgctctctgccctgcaaccaataactgtgtttccacatcagaggaaataagcgactcaaatcactatgctcccccatggaactacaatcccaaggatgggcggagcgggtaacccataaccaaagaggaggccatgaaagaactaattgaagtcgtcacgaagacaaagccggacaacttcactcctcgcatagtagagaaaaaagatgattatatccgagttgaatatgagagtcctatatttgggtttgtagatgatgtggagttctggctcccttctggcaacaagaccatggttcagtatcggtcggcgtctcgatcaggatttatcgatatcaatgccaacaagaagagagtaaaggagctgagattggctttggaaaagaacggctgggcttcaaaaagcaacttctgaattgaagtgagaagtgtggaagacgtgcaagtgcatgctacttagacgagccagcacaac

SEQ ID NO: 277170 - DNA, 526 bp, Zea mays
  unsure (1)..(526): unsure at all n locations
tcgtccacgcgtccgcgcgcgcgcaccgcgcacacagagacagagaactcgcccgcacgcttataactcctccctcctctcatctcacgccaccggcgtgacacacacggctggctcgctgcccgccggcctttaagagcgcgctaggacagtaggacgcgaacgagtctgcggccagccagcaagcagtgcgagtacaggcatggcggctgccggcggacgcgcggttgcggtggcagccatggtggcggtggtggcggcggcggctctgcctctgctcgcgtgtggcggttacgcggagtgctacgactactgcttcaaggactgcatctccaaggacaagtccatgagagactactgcagctacgcctgcgacaagacctgcgcgcccgacgcccggcggcggcgccccgcggtcgtccccatgaactgccagctcgnctgcgtaggggagtcctggcaccgtcgccgcgcggctgatggcgacgacgacacgaagacgaaggcctgctcgggcagtgctacg

SEQ ID NO: 277171 - DNA, 637 bp, Zea mays
  unsure (1)..(637): unsure at all n locations
cccggtcgaccccgcgtctcgtccacgcgtctcgctgccctacagatgcacaaggactgggtatcagtccatccgtcaactccgattgttgagcttncacaccttaaccgtgttgtcggatggactgtttccctgtcctacagatgcacaaggactgcgtgagagatgtcgcgtgggccccatacctgggccttccaaagtccaccatcgccagcgcctctcaggacggaacggtcgtcatctggacagcagcaaaagaaggcgagcagtgggacggccgggtgctgtatgatttcagaacccccgtttggaggctgtcgtggtcactgactgggaacatactggcggtttccgacggcaacaacaatgtgaccctgtggaaggaagctgtggatggcgaatggcagcaagtgacgactgttgagccataggtccataggtctctcgagttattcctcgcctgtattttctaaataataattgtagttttcgcgtaaggtaaagttatgccttgtgggtagcatgtaggactgtttgtggttcacagctgttggcaaggcacagtgcacgagacatggtttcaggctcgggcaaaagtgaaaaaataacttgttatacagtccattctgtttattca

SEQ ID NO: 277172 - DNA, 356 bp, Zea mays
gccggttgctgtatgatttcaggacccctgtgtggaggctgtcgtggtcactgactgggaatatactggcggtgtctgtcggcaacaacaatgtgaccctgtggaaggaagctgtggacggcgaatggcagcaagtgacgactgttgagccataggtctctagagttgtccctcgtcgatattgccttaatacttgtagtttttgtgtacctatggccctgtgtgggtagcaagcaggccacggtgcatgactacttgagacgtgatttcaggctcgggcagaagtgaaaaatgaacttgctgtatatgtggagcattctgtttcgcgattcagtgcctttgctttcccatggttc

SEQ ID NO: 277173 - DNA, 467 bp, Zea mays
tctattggcttggctattgctgttagctccacacaaaagagagaaccggcggcgagctaggagctagccatggacggacacggcgcggtctcgccgtggagcgtgctaggcggggcggcggctgtgctgttcctgtggttggcgtcgcaggtgctggagtgggcctggtgggcgccccggcgcgtgaaccgtgcgctgagggcgcagggcctgaggggcacccggtaccgcctcctctgcggcgacctcatcgaggagcagcgtctccgcgcggcggccctggcaaggcccgtccccgtggatcggccacacgacttcctccctcgcgtcgcgcctttccttcaccgcgtcctccaagagcacggcaagctctcgtttacatgggttgggccgaccccaagagttctaatcaccgatcccgagcttgcgggggaggtgctgacgaatagtggggcgacttcctgaag

SEQ ID NO: 277174 - DNA, 321 bp, Zea mays
cttttaggcggctacgatccgatttgtacgcctcaactagacctcactcgtacgccgccgccccctccaccgccgtcgtgcgagatggaggagggagctctggacctccgtggggcgtggaggagtgggacgacgcacgccgaggcagccccggtcagttgctgctgtatccgtccaggatcgggggaattccaggaggcctgaaggaaagttgagtgctacatagctgagtaccacaggtgatagattgatggctggcgctttggctgaggacaatgctggggatggtagatcctcatcaactgaagagatgtcaagtga

SEQ ID NO: 277175 - DNA, 488 bp, Zea mays
ttctggttccttaagtttgtgggccgtggctatttaatctccaactgcatccccagaagagctcgtctagatgagagactgggaactccgggattgggttggataaggtgttctgggaatggggaaccaatgcccaaacgggacccttgggagtgactactacaaccgccccgcttccaggttcgctgatggttgccttgaggacgatcgctactctgacttgaagaagtttgacaagccatggcctgaggtgaactcgtttaagcccactgctgttggtattttgaagaggggattggatccaacgtcaatcactgtccttgaaaggaagacggccgacgtaagggaacattatatcatcggtcggaggcttggtcaaggccagtttggcacaacattcctctgcaccgagatcagtacagggtgtaccgggtggcacaagacaatcccaaagcgaaagcgcatcaccaaggaggatgttgaggatg

SEQ ID NO: 277176 - DNA, 712 bp, Zea mays
cccacgcgtccgctcttcctactcgccttcaacgccggcaccacagccccggccccgtggggttcctgcaccccacccgtcctgcgaggctcctccgccatgccgtcatacgcgcaccaccatagcagccctctggtaaggaacggtgccggccgtgttgtccgtagacgattgagggggacagaaagagattctttggatgtttttctttgtttcctttatttataccgagagataaacaaataaaaaaacccagagacgaaaaaactttttttcttgaaccgccctgcttcccctctggtgttgggaatttgtgattttgacatacgacctgtatgggtatttttccggccggtgaaggatgataccaggatggacgcgctgaagtgtaacaacaactgcgccccgccggaggagaccgcggaggacgccgacgccgccggggcgctcgtcgagaaagacgggttctcggtcgaggacttgttggacctcgaggagtttggcgagcctgacaaggacggcgccgagcatgaggacgacgacgccccgccggtacccgccgcggccgaggagaggtcgaaagacgactcgcagccgttgtcggtcgtgacgtacgacctcccgtcgccgccgccggagatggttgacctgccgtcgcatgacgtcgaggagttggagtgggtgtcccgtatcatggacgactcgctctctg

SEQ ID NO: 277177 - DNA, 383 bp, Zea mays
cccacgcgtccgcctcgtccagtcgccggttgcgtacgtgtatcgaccaacgacgctgtagtgtgtagaacagattgaggacacatggacatgacggaggaggcggcggcaggagcaggaggctcatcgtcatcatcggggaagccggtgatggtggtgggcatcgacgacagcgaccacagctactacgcgctgaactggacgctgcagcacttcttcgtcgccgggcaaccgcagcagtaccagctggtggtgctcaccgccaagcccccggcatcgtccgtcatcggcatcgccggcgtgggctccgccgagctgcttgccaaggtggagaccgacctcaagcgctccgtcggccgggttatggacaaagccaaagaagc

SEQ ID NO: 277178 - DNA, 757 bp, Zea mays
cccacgcgtccgcaccactctcgcagggctgtaccggtaccgtctaggggacgtggtgcaggtggccgggttcttccgctcgacgccgaagctcaagttcgtgtgccggcggaacctgttgctgagcatcaacatcgacaagagcagcgagcaggacctgcagctggccgtggacagcgcggccaaggtcctggcggcggagaagctggaggtggtggactacagcagccacgcggaggtgtcgcgcgacccgggccactacgtggtgttctgggagctgaacgccgacgccggcgacgacgtgctgcagagctgctgcgacgagctggaccgcgccttcgcggacccgggctacgtcgggtcgcggagggcgcgcggcatcggcccgctcgagctgcgggtgctgcagcgcggcaccttccagaaggtgctccgccactacctctccctcggcgcccccgtcagccagttcaagtcgccgcgctgcgtcggccgggccaacaactccggcgtcctccagatcctctccgccaacgtcgtcaaggccttcttcagcgccgcctacgactgaacccgctgcgttcggtggcgacagatcctcaggtagttgtagactctgcatgcagctgtgctgctgtgtattcacaggattccaggtgctcgatctgcgcgtagatgacgcatcgcatttgtgcctgtttgcaaagttagtagtgtcgtctttggatcgagtgaaataaaacccctattaattagt

SEQ ID NO: 277179 - DNA, 569 bp, Zea mays
tgttgggaagataaatatgttgaagctgtaatatcttgtgggcaagatgatttggcggttgaggaaattggaatcgctcttacagaagtgacgacgatcgatctgttggcggttgacgaagagtcaggtctgcatgaagattctgatgacgattaatcgatgatccgattctttctctggaatctaattcaactgatgatttagtgaacgttgattttatatcacctgcctttcctattggtggtgtaacagtatcatcaattagcaattcagttgctgagaattcttcaattaatggcactccaaggttagtttctgcaatgaaaggaactcgtgcgaagaagggaatcaaaacaaagctgagcgtttcatgggccactgatgtatatgacccacctattacttcagactcgcacattgtgaaagggcaccgtaagagttcaactaagggtaactacaaatacaagtgttccaagagcagcagtagcagtaaccacagtaccactggaagcaaaaaggacaagaagcattctaggcaccgtagcaacaatgagggtggcaacaaaagg

SEQ ID NO: 277180 - DNA, 408 bp, Zea mays
cccacgcgtccggagagacgggaggaagcggattccatccacaccgtcgtgcaccacttttccccgcacccaccacgcggcgccgcccgagcacgaccatggcgtcgccgtccatccccgccgctctccgccacccgcacctccccgccgatggaggacttcttttccactcgtccggcgacccaaccgcgcgctcctcgctctcgttcaggataggagacatgacaatgagaaggtgtcagacaggtcctggtcctgttttggctgcaaggagtcctggtttgggcaacgttgacaatctccatgagagttcaagcttatctaggagctgggatttgaacagacagattgatgatgaccgtgatgtactcatagaatgtagagatgtccataagtcatttggagaga

SEQ ID NO: 277181 - DNA, 447 bp, Zea mays
gttctagatcgcgagcggccgctcgcgccacgtacgtacggtggtcacatcgctgtcgaccgcgcgcgttgggagcgcatccggccgtgtgcattagccgcccatggacgacacggagagagaaaaggagaaggagaaggagaaggagaaggagaagcacgactgcgggacggacgtcgaggacgaagaagaggacgaggaaggcaacaagcgcgtcgtcgtgcttggcccccaggtccccctcaaggaacagctcgagctcgacaaggacgatgagagcctgaggaggtggaaggagcagctccttgggcaggtcgacaccgagcagctaggagaaactgcggagccagaggtcacggtgctggacctgacgatcctgtcgccgggcaggccggacctggtccttcccatcccgttccaggcgagcaagggctatgcgtttgctct

SEQ ID NO: 277182 - DNA, 372 bp, Zea mays
tttgctctctctctctctctcgtggcaacgacagcgcgacaccggcgcctacgccaggtgcccaggcctccgtcggtcatttcgccaggcattcgtcgcgggctcttcgccggcgacgagcacacccaccaaacagattctcgtgacagtgcctccctggttgcctttcgctgaagttactgaatctgaaatctgaccatcatgaaccaggttgagggttggtccttcacgagcatgttataatgggagagaacggagttcagctgacactgacctccactttgaagagcacaggcaagccacggatcaatgcggacgggctgaataatggatcacatactaccaaagagaagcatgaacacggtggcactt

SEQ ID NO: 277183 - DNA, 577 bp, Zea mays
gctccttctcactgcctgtccaggcgccgccgcttcgccgctgcccgtttcttcgaaccactccgaagctgccccgccatggacagctccgccactgacggcgcgaggctaccgccgccaagggccgggagtcgcctctgcgtcaggtgcggcgagaggaaggccgcgctgaagcggcccaaaaccctagaacagatctgtagggaatgcttctatatcatctttgaggacgaaattcatcaaactattgtccagaattctctgtttaaagctggtgagcgtgtggcaatcggagcttctggtggaaaagattcaaccgtgcttgcatatgtgttatcggagttaaaccgtcagcacaactatgggcttgatttgtgccttttatctgtcgatgaaggaatcacaggatatagagatgactcactagaaactgttaaaaggaatgaaatacagtacggcctgccactgaagattgtttcctataaagatttgtatggctggacaatggatgatattgtcaaagcaattggtctaaaaaacaattgtactttctgtgagtttttcgacgtcagatgac

SEQ ID NO: 277184 - DNA, 469 bp, Zea mays
gtcacaccttcgccacctctagaaatctcggtcgcgatatcgcctattcatcccggcaccgacccgatcgcccccaacctcgcgaacgagatccgcagatggagaggccttcaccaattgatttctgcgcgcctcgggcccggggaggcgatggcacggtgctgggcgacctgccggagaactgcgtcgtggaggtgctgctcaggctggacccgctggagatctgctggatggcgcggctcagccgcacgttccacgacgccgcgtccggggacggtgtctgggagtccaagctgctgacgaactacgtgcgccttctcgccgtcgctgcggccggcgatggggaagcggggcaggccgccgggtctgcgccggaggcggagccgctgcccaagaaggaactgtacgcgcggctttgccgtaggaaccgtttcgacggcggcaaaagagttctggctggacaagggtg

SEQ ID NO: 277185 - DNA, 553 bp, Zea mays
tctttcttgaagcccacacacacacactcgtccctggccttcccctccatctccaatctcccctcctccgttcgacgctctccccttgcttctcgcgcacactaaccaattcgagcacccgacgccgaggccccgatcgaatacaccggagccgcccgcctggggcccgcccgcgccattgctcgaatcgggaggcattcgtccgcccgcgctgctgccccgcgccgtggcggtggcgttggcggtatgtacgaccgctagaaggaaggaggaggcggcattagtggtgcggattaggcggcggcactgctggtgccgggaggaggaggaggcgtaccccatgaaggcgacggcgccgccggcgaagcggcggaggggcccgcggctggcggtgctggcgctcgtgttctgttcgctgctcgtgccgatcgccttcctcttcaaccgcttccccgccgtatatgtgacagatgagcgccctcagcaggagattgacttgccttcgttcgatcgtgtggtatttgaaaatggtggctctgtaattgaagatgtg

SEQ ID NO: 277186 - DNA, 453 bp, Zea mays
caaggttaaaaacaatatctcagaaactgcagaagttgcacaggcagaggatacctctcctatggatatcaatagtcaatccaaccagaagcaagaatcatgtggaccgaatggatccaaagatcgtatactaagatcaacttctcgttcatcatcttccagagaaaaaactatggagaaatcatgcagttcggcacacaggggctaaagaaccttatggggccgtacttcagcaagaaaagtcctgtcaacagaggagattgaatgctgcagcgatgatgaggcccttgttgagaaacttgagagcaacaaggttgatctccaatcgaaaattgcaaaggaggccaaagaaaatgctattctacagtcaagtctagaaaagcggaaagaagaactacatgagcgccgtttagcacttgaacaggaagttgaaaatttgagggagcagctgca

SEQ ID NO: 277187 - DNA, 560 bp, Zea mays
gggctgtgcgggcatacctggtctctccgaattgtccagttttttggtgtctgtccgccgggttcttgagctggcttggggatctgtagctttgagagcttcatcggggaaattcctgcggcttgggggggttcttgcggttgtgttgagtggcctttcttgtggaagtgcagagtgattctgcagaagtattcattctactggcgtgctgagcaggtgcaggagctctaataagcctagtgcgcacttcagtcatcagccaagtgattgaaaaggtgcaggcaagtcagctgaaatattggttccgagggctctgtagttgcttatccacgctcgcctatgcctttgcgctgatcttgacaactcaaagcttggatatggctacttattactcgagccctggcagtgaaagagattcacaaacaatgtactcagcagagtcaggcaatgtatcatatcccgtgccatcagccctagggaactttctttatacgaacaatgcatcttctggaccttatacagaatttagtggaattgtccagccttagcagaatttcatg

SEQ ID NO: 277188 - DNA, 604 bp, Zea mays
ggtgcaggaattgtttattccgggggcaggaagaaggaggacgaggaggaggaacacgcgagagatagagagagcgctctcctatcttcttttgcttttggtattgttatcttgggatctgattttgtccccatacataccgagcgggagggaagggggcttgggttttctttctcctctcttctattcttctcccctctcaacctcttctcctcccaaggctgactggccgtcggctcgggtctggggacagcaatccctgccgtcttgccatgctccccacgaggagcacaccgtcagagtgattctgcagaagtattcattctactggcgtgctgagcaggtgcaggagctctaataagtctagtgcgcacttcagtcatcagccaagtgattgaaaagggcaagtcagctgaaatattggttccgagggctctgcagttgcttatccacgctcgcctatgcctttgcgctgatcttgacaactcaaagcttggatatggctacttattactcgagccctggcagtgaaagagattcacacacaatggactcagcagaggcaggcaatgtatcatatcgcgtgccatcagccctagggaac

SEQ ID NO: 277189 - DNA, 958 bp, Zea mays
  unsure (1)..(958): unsure at all n locations
tgaaatttgtattcgtaaccatttattggcaacttcaggttatcacactctgtatgaatgtgatcgatccatggaaagtgagcattttccagatcctactggtcttcgtgctcgtttggagcaatggactctgggactgtatccagcatgtataaaatatcttatggcagcctttgacgtccctgaggtcatggctgtgacaagaataaatatatgcaagaacggaatgatgtctctttcgcggagtgttctgatcatgtactacacttctgtgtttatctatttctggattttctcgactccagttgtttctctcatatttggtagttacctatacatctgcgtcaattggttccacatacactttgatgaagccttctcgtcgctgcgcatcgcaaactacaaatccttcacaaggttccatgttaagaaggatggtgatctagaaatatttactcttgcagttgacaaggtcccaaaggactggaagttggatccgaggtgggaatcagagggacgagggcctcatcagctcagccatgaccggaagcatccaagcaagtggaggtcagcctcatcaactgaccctgtgagatctgtacgggttgttgatcatttcaccatcgaaagaacaagaaccccagatatggagccctcttcctgattgtgcagcccttactattacaaggagttgctactgctgctagaaaaattaacaataactagcttcaacacacagtattgtttttgtttccacatccagccaacttaggtggaccgaggtgatctgcccttgtcggcgtccccgctttactgacctcacctgcagcattgtaatctgtatagaaagaaaattcacctgctgcctattgcttgtattcaatcaaaggacctctaaaaaaagagagttacaccagaatgttttgagaaagcaaaaaaaaaaaanaaaaaaagggaa

SEQ ID NO: 277190 - DNA, 440 bp, Zea mays
ggatggccagcttcagttacatggtgggttcttaatataactggtttggcaaccatggctctcctgggtgaatacctatgcatccggcgggagttgagagaaattccaatatcacggcttcgtgcaagtgtttaagctcacatgctaaaagattataggtgatttcaaatggtgttatcccaggaggtgcttgttaatatgttccttaaggaatacagtgactcacaatgaatgctttattctgtgatttccaatggatacttctcaaacttcgcatagagcgttcatctgatgcccaacctcccagttgaccatgatgaactgattgatcctagaggttccaccaacggaaatggcagctcactttctaaatcctacattcaacaagtcctcccttgccccttataaaaaagagttcctggcctgcctctcatgaaaga

SEQ ID NO: 277191 - DNA, 755 bp, Zea mays
ttctctgagcttcttgatgaggtgggctcaagataccttgatcacttgataattgaaagaaaatatgctgaagctgctcagcgctgcccaaagttgttgcgaggatccccttcagcatgggagagatgggtcttccactttgctcatctccgccaacttcctgttttggtcccttatattcctacagaaaatcctcagctgagtgatactgcatatgaggttgcccttgttgctctaactaccaatccttctttccatgaacttctcttgactactataaaaaattggccaccgacattatactcagcctcaccggtcatatctgccattgagccacagctaaactcctcatcgatggctgattcattgaaagagtcattagctgaattgtatgtgatcaatggtcaatacgaaaaggcactttctctttatgctgaactcctgaagccagaagtattcgagtttattgagaaatacaacttgcatgatgccattcatgataagattgtcaatcttatgatagtggacaataaaagaacagttcacctactgatccaacatcgtgatatcattcccccatatgaagttgtggagcagctgttgcataccagtaaaaaatgtgacaagagatatttgttacacctgtatttgcatgctttatttgagatagatatacacgctggaaaggattttcatgatatgcaggtggagctttatgcagactacgagacaaggatgctactacccttccttcg

SEQ ID NO: 277192 - DNA, 412 bp, Zea mays
ggcattagcgctggccgccgcgctcggcccggccacggcgcgcgcccatctgcggcgggaccaccaggcgccgccgggcccgcgcccgcacagcgtcaccatcaccgaattcggcgccgtcggggatggcaagacgctcaagacggtccccttccagaacgccgtcttctacgtccgctccttcgccgacaagggcggcgcgcacctgtacgtgcccaggggccgctggcccaccggcagcttcaacctcaccagccacctcaccctctacctggaggaaggcgccgtcatcgtcggcgcaaaggactcatcacaatggctgatcgttgaacctttgccatcttatggccaagggctagaccttcctggtcctagacatcaaagcttgatcagcggatacaacttaactgat

SEQ ID NO: 277193 - DNA, 399 bp, Zea mays
ccggcggccactgaccgactcacgcgcgtgaaccggacggcgtaccaacaatgcggcatggccaagggttgcgcctcaagatggctactaaattttcccccttttttctttatgttttttcattttaacgtgtttcattcacccatcttattgtgattgatcgcttgcaataaaaaggccatctttactaaaaaataataagctatacacaatggatctaaaataaattgcctctgaaggaaacaagctgcctaatgtttgcacagtggaaaggagcgaatcatttgcaaaacatgcttattctgtgattctcaacatttgacgccttttacgcctttacccgatatttgccagatcacatgctcctagtctgcttattggccgattgctttccaactt

SEQ ID NO: 277194 - DNA, 433 bp, Zea mays
cccacgcgtccgggttgattcatcacctgccttttgggattcacctgaggggactgacaaaactacagtactgattctggctgatccacactgctcatacgaagtcacttctcgtgcttcactaagtgatgcggcaagcagattctttttgttgtactcatcagagattcttggtttcatggtggccataatgttttttggaattatgcgacagacttcagcatgggaatgtgattcttctatgccatccattttgtcagccatagagtctaatcttggactcccaaaggcattcatgtttctttgcttcatgccaatacttgtattttgtgcctttttcattttcacggcggagcaaaaaccaccatttgggaccttcttattggttactctgatctgctacatagttgctaatggtttcacaattttgttg

SEQ ID NO: 277195 - DNA, 433 bp, Zea mays
cccacgcgtccgcccacgcgtccgaggaggcgtccactgacgacaagagcaccggcggccaggctgacaacactactgtacaagaggcatccaccactgacgataacagcaccggcggccaggctaacaatagcaccaaggacacaccgacagagtcaaaagagaccgttggcggtgacgacggcacggcccagagccagacgagcttcgacgacatgaatggcagtacgaacgactcgcagcccatgaaagaagacgggaaggtcgccgagaatagctccgatgaaactgccagcggcggcaaggtggaaagcacagacgacgacgcgacaaccggcgcggcgtcaaacaacgcaacttccggaggccagaacgtcgcggccgagaccatggcatttgcagccgcggatgatggcgccaacggcaacatcac

SEQ ID NO: 277196 - DNA, 432 bp, Zea mays
cccacgcgtccgggctatcgcagttgagcaccgtaaagatgttgattccgcggtggttactgtccttgatgaagtcatgccgtccatgactggttcagctggaactttgtttacccataaagaagtgttgccatctatggatgattctgttgggaatttgtttgctaatcgcagcacacatgaagtgggtagttcatcatgtgcaggacatgagatacatatcgatgagattgatgtaagtgttcaccctgcacaacacacttcttctggggaggctaaaactggcaagcaagaaaacataaacaatgaatgtgtgggaagacttgcatcagtcgaaggggtcagtgagcaactaaatctacattctgatcctattccaaatggcagtcagcatgatttgattcccaaacttgatgtgctatcatcaaatac

SEQ ID NO: 277197 - DNA, 426 bp, Zea mays
attggaccgtctaacccacaagtggaacattgaaaatttcaatactacagagcaccagatgcaagacacaccatacttgtccagtcgatataccagtagagatattctagccttgggtatcagagacttcaattcctctcaacttacttaccagcaagaacttcaacatcttgaaagttgggtgaaagaatgcaggttggaccaactaccatttgtgcgacaaaatttggcatacttcttattgtccgctgctggctgcatgtactcccctgaactgtctgaagctcgcactttgtgtgcaaaaaatggtgcgctcataactattgttgatgacttctttgatgttggaggatcaaaagaagaacttgaaaaccttgtcatgttggttgagctgtgggacgagcatcacaaaattgagttttactc

SEQ ID NO: 277198 - DNA, 428 bp, Zea mays
cggacgcgtggggaacaagtcgtcgatcgacagccgtgctcatcgtaggcgcggcggcatccgggcatggacaggtgcggcggcggcgccatggcgtcgtacctggtgtcagtcgtcctgcttgttgcgctcttcgcgtcgtctgcaaaatgtcgtcctgagccactcgacggcggcggcaacgttaacggcaatggcacggcgccgccagtcaacggcggcggccccggccccggccccggcgccgtactgaagctgcagttctgcatccagaggaactgcgtgtacgaaggccgtggcaacgccccgtgcttctgctgcggggccttgaagcccaaccagtgctacgaaacgagggacgggtgcagcggcaactgcgtgtagcggtgtagccgccgccgccggcgagggcgagtgatgggagatcg

SEQ ID NO: 277199 - DNA, 792 bp, Zea mays
gaaaaaatctacgtccagttcatccaatgtgcagattgaggaaagcagggaagcaagacagaaattctcaaaagcgaaatcaatttcttcctctcagttttttggtgatcaggccagttttgaaaaggacgctcaagtctctctccaaaagttttctggttcctctgcgatatcaagtgctgacctatttggccatccggcaaacaattctagcgtggatctcagtgcttcagatttgatcaacagaatctcgttccaggccactcaggatctgtcttctctcaagaacatggcaggggaaaccgggaaaaagttgacatcgatggcatccaacatcatcactgatcttcaggaccgcatcctctgagctttaaactcacagtaaacttctgcgttgtttcagtggctggcttctcccgtcgacccgggtgacaaactggcctggcctggcctgcagatctgtctaggagttcgtaggcgtctgagaacttcctggcaatctggcatatctgtctaggagttcggaagcatctgaaaagtggcatatctgcctaggagttcgggagcagctaaaatcttgaagttagagagagagagagagaaagagagagagagggtgaaagaagagaacttatgaccaatactgtaattggctaaagtcatgtatgcttctagagctgtaacgcaaatgtcttttgccattggttttatctcgggtttgagatatatacttttgctttgtaatgatacatacatgttttctaattatgcgtagatatttcttgccccggt

SEQ ID NO: 277200 - DNA, 415 bp, Zea mays
cggacgcgtggggccgcaccctcaaatcccgcgggcgttaaactctttctcggtcaccgtcaatggaaggtcccagatctcttctcgccattaccgcgcccgccccgtcaattcccatatctcttcaataaggccgcccgcggctggcgcgacgtcgccggccatggtgcgggtgcaggagaccgggccatggcggcaccggcgccgagccccatccctggcgacgacgcggcatcaagccccggtgacggcggcccctgcgcagacgcggccaccggcctcagccccggtggcggcgcgctgcctcaccggccccccagcacaggaggacgcgtcggtggctcggtgctatggacgcgtcggtggctcggtgctatcgacctcgctgtcgggttcctgttcccgctgtcgctcg

SEQ ID NO: 277201 - DNA, 403 bp, Zea mays
gtgatatcaggagaaacaactgttcactgtcaacaatgcttcacaataagatgctggcaaggacgaacagattcaaaccaattatttagcgaacagagttcaatcattttttttgaccatccagtcttttggttcacaaaaggtttctctgggagcaaaccatcgatgttactttttccagcgtgcatatgtatttatgctgggtaactcaaaacagtatctggcctttgcgtaccagattaggttttgttcggttattcctatcttcatgtggattgtatgagattggaaggaattatgagagatgttgacttgtttaggatttaaatcatccaataatccacataattcaagtttcgttggtgttaaaaaaaaaaatggaaaacagaaaagcaatcagttt

SEQ ID NO: 277202 - DNA, 433 bp, Zea mays
aacgtccgatcaaggttcctcatgatcagttgccttccttgctcaagagttagggccaaataaaatgaatgcaagacagaaggagtggtatgaaatggggccgggacacaggtgctcatcatatatatggatcagcgtaacacagagaaatcaatggtgggaaggtgagagaggcagacagacacagcagagagaagcatgcatggtgtgctgcagctgcagtgcaggacgacgacgacgacggcagcagctagcagcgagtggtgatgtgagatagagaaacaaaatgcatgcagcaaatagctttcttcactttttttgcaggcggatcggagggggagcggcaggcatgaattgatgaacgaattaacacaccaatgcaacttggaggagcgctcagctaaacatgtatcttcgttcacttgtgcattta

SEQ ID NO: 277203 - DNA, 466 bp, Zea mays
gtccataattcatgggtcgaccaccgcgtcgacaacccatcggccaacccgtccggatatgccaccaggttgctgtcaatatcgcccctccagaaacgcaatcaagtacaagttattgggtttggagggttgattcgacttatggaaggggacgaggaggacgagaaaggggatggttcagcccactttgggttgcatttgcaattctgattggtggtctcttattggatgtgctgatatctgtttctcttggtgtttccgcacttcctgtcaatataataattggcgttcttatagttctcggattgggcaccgcccttcgtcttgctctcgagtgctgccacgaatggggctcaaggaggaacgtaggcaatatgccgaggctggagaacataccgccgactgggtaccaccctgcagtagtataatcgttatgggacttgtaaatagcggtaggaacatctaa

SEQ ID NO: 277204 - DNA, 620 bp, Zea mays
ggtggcggcgtcgcaagccgagacgccggtgccagcggtgaccatcgtgatctcgcggccaggggaggaggttcagacgcctgatgcaatgggtggctccccggcgtgctccacgcaggccggtgacggcaaggctacagccacctcggtttcgttgaccgcttcggcggctgccaaggaggccgagttggcaaggtccgacagcttcgacgactacgagcaatgcagagtttgtcaacagaagacagaagaacctctggtcgaccttggatgtagatgtcgtggtgatcttgcaaaagcacatcgcacatgcattgatgtttggtttcgtactacaggttcaaacaagtgtgagatatgccagcaggttgctgccaatatcccccctccagagacgcaatcaagtacaagttattgggtttggagggttgattccacttatggaatgggacgaggaggacgagaaaggggatggttcagcccactttgggttgcatttgcaattctgattggtggtctcgtattggatgtgcggagacccgtttctcttggtgtttccgcacgtcctgtccgtagactaagtggggttctaatagttcacggattcggcagcgcccttc

SEQ ID NO: 277205 - DNA, 430 bp, Zea mays
cccacgcgtccgcccacgcgtccgcccacgcgtccgcccacgcgtccgactttcaagatccatagcttcatgcaaagtagaagcaagtactgtcagtgcatggatcaactttttgaaagatacgtggaaattgcagtccttgtttgaagagctaagagaaaaacaggccaacgaagaattggatagatgtggactctgctttgcgaaattgatgaagtatcatgtttctgcatccatggaagagctaagcacttctattgaccgtatcaaaacctttgttgataacttgaaaatatttggtaacagatccgtgtcagcagaggatggagctaatggtccgtctaagcaatcaaaccctcgtagatatcttgaggaagaatatctccaaactgagaaaaaggtcgtagctgcattcagtttggttgatagt

SEQ ID NO: 277206 - DNA, 491 bp, Zea mays
  unsure (1)..(491): unsure at all n locations
cccacgcgtccgcccacgcgtccgattttaaatataaaataaaaggctcgacgtcgtcgtcacctctctcgccgtccacgagtcacggcgggcgggcggcggcggcggccgggggtcccggctgcacacggctcgccaccatgcctgaccccaccaccaaacccccctcgccacgcccccgccggcgccgcaggctctgcggcctctgcctcggcaccgcgctcctcgcgctcctcgtcgccgcgctcgtccacgtcgtcgccccgccgccgcgccccgctcccgcctccgcgcgcttctccgtcatcatagacggaggcagcacgggcacccgggcccacgtcttcgccgcggggcccgacggccgcccggatctggcgcgctccaccgtgatgcgcgtctccccgggcctctcgtccttcgccgccgacccggcgcgggccggngagtccctgaagcctctattagatttcgcgagggataagattggc

SEQ ID NO: 277207 - DNA, 778 bp, Zea mays
tggcttggaacctttgggctgatttatgtgcttgtggatgtgcgggtggatgtgcgggcgaatacgcattggcgtaaggatacgtcgactggggatgcgattgcgatggtgtttggggagagttttgtgctggacggtacttatacgggtgatctacttgggactatgactattaatattgctaccggtgctggcgatgatcgtactcttactggttttgggattcttaaggcgaatactattggtgcgattcgtggtttcggttatggtactagtactggtagttcagggtggcataaggatgagaaggatgctatggatactaatgctaaggaccgtatctccaagaagatgacgcctggtgcttgtactaaggtgcatgaggatgttgctcatgcgtctattgctcttaagacttatcatgagaacactaagacggaggatctagttaattttactcctactgatacgaagcatcgttttaataagccgcgcatcggtaatggtgttcctaaggctattgctaaggacgctattcctaagaatactattggtattcttcgtaatttggaggttgccagttcgtctcgtatcgttaagagcttacgtattggtgccattacggacgatgcctatgctcgagcacagtggtgttaataatgagattacggtctcccgtttgaatgttgacggtgagtattagggccgctctaaggagtccggacgtcctcagatttcgtactgatcgatttactccctcaggcaccacccactctcc

SEQ ID NO: 277208 - DNA, 953 bp, Zea mays
tggcttggaacctttgggctgatttatgtgcttgtttatgtgcttgtggatgtgcgggtgactatcataagacggtgcgtatagataacgtgacgagagttccgccttcttcggcttctcctcgtactgcgtacggcgagaaggaagagctaaagggtactgacgtgaaagtgcttgggttcggcgggcttcctgatactattaagccgggtgttcttggtaacggtaagatagatagtatgaaggtcgcgtaggaggtacgggtactggtgcgtggtggtatcgggaagtagataacttctacatttaagggtgatccttccgctggataatctaatcctataggtttccgtaagggtgatgcgattacttaggcggacggtaactcgtcggtgattatggattcaagttagcataaggactacggcaaccggactgagacctcatgtgcggataattccgctactattggtaagggaaagtctgatgggtaggggttagttgcgcggagtgtgcttcttcgtgctaagaagcatgatcgtacgacttcctttaatctgtcggcgacggatcctgcgagataatggggaggcgcttggcgctatgtcgtctaatcgtaagcctccttatacgaatacgcattggcgtaaggatacgtcgactaaggatgcgatcgcgatggtgtttggggatagttttaatatggacggtacgtatacggctgatctgcttggcgctatgactattaatattgctaccggtgctggcgatgatcgtactcttactgggtttgggattcttaaggcgaatactattggtgcgattcgtggtttcggttatggtactagtactggtagttcagggtggcataaggatgagaaggatgctatggatactaatgctaaggaccgtatctccaagaagatgacgcctggtgcttgtactaaggtgca

SEQ ID NO: 277209 - DNA, 462 bp, Zea mays
ttggcttggaacctttgggctgatttatgtgcctgtttatgtgcgtgctctttctctttctcttgacttacctcgtagtgtagtgaagcgaatacgcgcgattggctaaagacgctgcggtaggtgcatgcggatgagtattcgacgcgtgagactgagggttattattctgcggtggtggctactgctggttatgatggcgttgttcgggtgtagagtatggcgcctgttgagcccacgattgaggatacggctaatactacgaaggatcctgatgagttagggtattctgtgtcgataggttcgccttctggattcattaagcctacggctacttaacgtgagttcggcgttgctacttgcggtaagaagggactaggaggtacgattgcgaagaagatagggcaggtatctgctgccggtactcatgatgagttgacgatgttcgggtagcgtaatacg

SEQ ID NO: 277210 - DNA, 434 bp, Zea mays
tggcttggaacctttgggctgatttatgtgcctgggtactgttaagtagagtcattagtcgcgtactcggtctagtgttgcgactgtgaatacggaggtgcgtgctgatcggcctgttgacgatcagcctaaggttaaggcgaaggagctgcctaatgacgggaaggagtctattagtaatgtttcggtgtctactgagaaggggctactgtcttctcttgcgtcaaagggtggtctgaaatcatcgccgtctgaggaggagggagaattggtgtaagttcggttcgtatctgataaggatggtactttggagcgggcgtttgatagcgagtggagggcgtctaaaggtggtggtcccaagagtatatctatgttaaacgcggcggcggtgaacgatcgtagtggtaagcctaagattaccaatgaggtgtccg

SEQ ID NO: 277211 - DNA, 407 bp, Zea mays
tggcttcgaacctttgggctgatttatgtgcttggtcttccgacttctgctcatattgctcctcttcctgttgatgttaagaggcatgttagggatgcgctacgccttgacctctgtttggctccttaactcggcccgttgcgccttctgcttattcggttcttacttgcactattggtattggtgctactcttgtgtggcgttcccgtgttgttgcgacccatacttagtactacgttcgggtcgattatcgcactcctcgggctggttttcctactggtctcctgtcggtcgttactcattattaggcgactactagggtaactttgcctaagagcaggctccaagggagttgacgtcgtcgtcctgagacgactttggttccaaaggaccggactgcggtcgcc

SEQ ID NO: 277212 - DNA, 537 bp, Zea mays
  unsure (1)..(537): unsure at all n locations
ctcatcatttggtacagtccagaaaattgctatttttgagaagaatgggggaacacaagctttgattcagtaccctgatgtaaatacagccgctgtagcgaaggaagcattggaagggcattgcatctacgatggtggctactgtgagcttcacctgtcatactcccgtcatactgatctgaatgtgaaggcacatggtgacaagagcagagattatacaattccagctggcgtaatccaaggggcgccacaaccacctggtgtacaagccacgtcccctgggtggcaaggtaaccttcaagcagctgggccatatgctgccccacccggtgcccctccgcaaagccacggtgccaatggacatgtgcagaactggaatcccggcaactcagtctatcccccagccccaggaccaggaacatatccaggccagatgtactcatctccctcacagtatgcagcgtcagggggcttccctaataccccatccactgctccgncacactatgcagcatcagggggcttccctaacacccc

SEQ ID NO: 277213 - DNA, 431 bp, Zea mays
cccacgcgtccgcccacgcgtccgcttttgtcagttggacaatccgcagctcctccatctgattcttccccccatcccatccccaaggttgaccggcgaaatcagcagtccgagaaccgcgagcttctgcctgatccactgatccagcctcatcccgccatggacgaatctgaggagcacagcaacggcggcgggcacccccacccgcaccacgggtacgagtggaagttcccggcggcgctgagcgcgaacacgacgagcgtgcacgtgacggcgctggacggcgtggtgaacgtgaactcgctgttcacggtggccgtgttcgtggggctgtcgctggcgaccccggggcagctgcggaccctggcgggggacccgcggtgcgacgccgccccgggcgtggcgcggtcgctgctggtgctggaggtggt

SEQ ID NO: 277214 - DNA, 1172 bp, Zea mays
aaaaaaacagctttatatacgggggaacggttcagcaggtgcggttctacatttacaacataacctaatactttggataatttatacacagcccgacaacacaaaaacagaccacaatgttctttgctcaatggaagcgattagcgaaacacagtacccttttctttctttttttctcatatataggttaccttttgggagttgcagtaggttagcagagttttgagcttcaaaacactccatctgatatcataaaaccacctgtctttgatatcaatatacctctcggcaaccaaaccaaatcgagaaaatgggtttcaggacaccgatcttccatagcagatggaagctaggtacaggttcttggaccatttgtccttcacatgctggctaggaaacgcagatgttctcagggtctcctgtgtttcatcagtaggctttctccttggtatgctcaagataaaggccgcctggtcccatgtggcagccgttgccgtaatgcgatagccattgtcccaacgcatgtggatgccctcacttggatttaagaaatcaagctccactacctgagaagtgaaaccagcattgcgggacatgacaactgcccatcggcttccagctgttgccatagcagtgacatagaagccctccttccattttttgtttatccatttgaaaggaaatgtatcacttactttgtaggactgctgggcatattgtgttcctcttgacataatcaccaaagagcttccattattcgcaccagccagtgcagtgatatagaaatttctctcccactgttccattatccattccttgtgaagaaagtaactagaaagttcgtatacttgagatgtaaaaccagtgccagcatccataattaaagcccacaggtttgagctggaggcaactgaactaataaacaagccatcttcgttccccttttgaatatgctgcaccaatctattatcggctacgttgtagtggtacctctgtttcatgggtcgacgggcattgtagacactaatccactgagttgccggcatccccattctgatctttttcttaggttgctcatcatcattttcgtccactattaaccggcctctcttctgcccaacctgatatactagcttttgggcaccatcagtgtttatcggtcttatgtctgg

SEQ ID NO: 277215 - DNA, 898 bp, Zea mays
cggtcttgaattaccacgcgtccgaccacgcgtgcgcccttggcgtcttcccgaatcggggcctccaccatctccaactgcaaccccaccccataccgccgccgcctccgctagggttttggagtgaggatcgccgatgtcgacggctcccaggcgccccttccgaggccgcggcgccccgccccctggcaccggctacgtccgccgcggccccgcccctgccccaggccccgccgacggcgccaagaccctgcgcaagcccgtcttcaccaccgtcgaccagctgcgcccccagacgcacggccacaccctcaccgcccgcgtcatctccgcccgcaccgtcctcgacaagccctccacgcacatcggccgcacccgcgtcgcagagtgcctcgtcggagacagcaccggcaccgtcctcgtcaccgcccgcaacgaacaggttgaccttctgaagccagatacaacagtgatcttccgcaacgctaagattgacatgttcaagggtaccatgaggctggcggtggacaagtggggccggattgaggtgactgattcttctgttttcaaggtgaatgaagacaacaacatgtcactggtggagtacgagctggtggatgtggatgaagaggagtgagctgaagcgatattgcattgccatctgttgggccaagtcgtgctgcggatatgtatttccagctaaaggagggcggtagcgtttaggcttctatctagttatttattattattattatcctggaaggctggcgattgggacggttagttttaagaccatcctaaagaagcacgtcaaattatgtacatcagcattaggtgttctgtctgactgatgctttctgttccgcgacgccgaagtctatcctaatgctactacttt

SEQ ID NO: 277216 - DNA, 856 bp, Zea mays
cccacgcgtccgcccacgcgtccgcggacgcgtgggtcgcaaagtcgcaataacttgtcttctcgaatcggctgcaaccccaccccagaccccaccgccgccgccgctagggttttggggtgaggatcgccgatgtcgacggctcccaggcgtcccttccgaggccgcggcgccatgccctcgggcaccggctacgtccgccgcggccccgccccaggctccgccgacgccgccaagcccctgcgcaagcccgtcttcaccaccgtcgaccagcttcgcccccagacacacggtcacactctcacagcccgcgtcattgccgtccgcaccgtcctcgacaagccctccacgcacctcggccgcacccgcgtcgccgagtgcctcgtcggagacagcaccggcaccgtcctcgtcaccggccgcaacgaacaggttgaccttttgaagccagatacaacagtgatcttccgcaatgccaagattgatatgttcaagggtaccatgaggctggtggtggacaagtgggggcggattgaggtgactcagcctgctgatttcaaggtgaaccaagacaacaacatgtcgctggtggagtacgagctggtggatgtggacgaagaggagtgaccagaaacgaagtcgggctgtggacatatattttggttatggaggcggtagcgttaggctcctatctagctattgttatcctggaccgctggcgattgggactttgttttaagtttatcttgaagaagcatgtcgaattatgtacagcagcagcaggtctctgtctgactgatgctttacgtttccgtcacgctttgactcttaatgccagtcctacctttttttttct

SEQ ID NO: 277217 - DNA, 547 bp, Zea mays
ttgtccacgcgtccgcccacgcgtccgcggacgcgtgggcggctgccaggcgtgccttccgaggccgcggcgccatgccctcgggcaccggctacgtccgccgcggccccgccccaggctccgccgacgccgccaagcccctgcgcaagcccgtcttcaccaccgtcgaccagcttcgcccccagacacacggtcacactctcacagcccgcgtcattgccaagattgatatgttcaagggcaccatgaggctggcggtggacaagtggggccggattgaggtgactgattctgctgatttcaaggtgaatgaagacaacaacatgtcactggtggagtacgaggctggtggatgtggatgaagagggagtgagctgaagcgatattgcattgccatctgttgggccaagtcgtgctgcggatatgtatttcagctaaaggagggcggtagcgtttaggcttctatctagttatttattattattattatcctggaaggctggcgattgggacggttagttttaagaccatcctaaagaagcacgtc

SEQ ID NO: 277218 - DNA, 486 bp, Zea mays
cccacgcgtccgcccacgcgtccgcggacgcgtgggatctaaagttcaacgcccgcaccgcaagcgcaacacgccaacacccgagacccgacgcggccttcgccttccctccgcgcgagggagattcgaggggagagaggttctcaccttcgcgcctgcggttgcttggcgcagagtcgtcgcagatggaccggtaccagagggtcagagaagccgcgggaggagtcccctatcggcgccaacgagatccgcatcacggcgcagggccggccccgcaactacatcacctatgcgctcgccctgctccaggacaatgcaacagatgacattgtcatcaaggccatgggaagggcgatcaacaagacagttgccatcgtggagcttcttaagagaaggattgctggtctccatcagaatacctctattgaatccattgatataacagacacttgggagccattggaagaaggccttgtcactcttgag

SEQ ID NO: 277219 - DNA, 869 bp, Zea mays
tgtcatttataaggatgcccaaacctggagatcataatcatgtcttgggactgtttctctatctgctcgggaaagttggaaagtctgttctgaatgaaattcacaatttgtggtcttgctagcagtaaaatagtttagcagcagatccttacacattcaaatttcaaggcctgattgaggttgaaataaatacttgaaggccggatatgttccttatgtagcttgcttcccctcgtctaggggcggagggaggaatgcagattagttgaagctggattagtttgagaatttgcagactcgaaatttaaggtcctgcttcaaagtcttcgagcttaagatacgcctgaatgtaactgcttatcccttgcggccacggtcgccttcttctctgctgatgccttttggcggcgcttggccctgcagaaagttattcttccacccgagagtgcagacacatttgctcaatgacaccagttcatcccaggaagtaaaaatctaggaacaagagccgcacctggcggggtcgaatcccgcctggagggcgagtcggagctcgttgctgcgcatcctgcgtgagcttggctgcggcgccgtcctcgacggcttttttttgttaccctattccaccgtcggcggatgggtggaggacttgggtggtggaggcatcaggcatgtgcggtcacgcctcgcgacttcatcgtttgcgggagcagacaggtctacggcctgtgagttgaccacagcatcgcggggcacgcgcgtgagggagtgggaggagctgcgaagagggacgcggcatggaggcggaggtgggcaggagcaggtggggtggtcgtgcgagaggccatgggaaaaggcaaacgcgtggg

SEQ ID NO: 277220 - DNA, 842 bp, Zea mays
gtgtacaacggtgcattgatacataagtatgaagggacatcatgtcgagctatacatggaagataatgtgcatgatgtttatgcgaatataaccaatatcgtcctgttctgaatgaaattcacaatttgtggtcttgctagcagtaaaatagtttagcagcagatccttacacattcaaatttcaaggcctgattgaggttgaaataaatacttgaaggccggatatgttccttatgtagcttgcttcccctcgtctaggggccgagggaggaatgcagattagttgaagctggattagtttgagaatttgcagactcgaaatttaaggtcttgcttcaaagtctcgagcttaaaatacgcctgaatgtaactgcttatcccttgcggccacggtcgccttcttctctgctgatgccttttggcggcgcttggccctgcagaaagttattctggcggggtcgaatcccgcctggagggcgagtcggagctcgttgctgcgcatcctgcgtgagcttggctgcggcgccgtcctcgacggcttttttttgttaccctattccaccgtcggcggatgggtggaggacttgggtggtggaggcatcaggcatgtgcggtcacgcctcgcgacttcatcgtttgcgggagcagacaggtctacggcctgtgagttgaccacagcatcgcggggcacgcgcgtgagggagtgggaggagctgcgaagagggacgcggcatggaggcggaggtgggcaggagcaggtggggtggtcgtgcgagaggccatgggttttggcgctgccagcgggagcgaacggggccggacgcgtgggcggacgcgtggg

SEQ ID NO: 277221 - DNA, 336 bp, Zea mays
tgaagttgctgtagagatagaagggctgcgctcggcagccgccatcgcgtcttccaccctcactccctcgcagtacaggtagccgtcggcgccgcgccggaagcagtgcttcggcacgccggccgccgcgggctgtggcggtggggacggggaggccatggagacggaggcgcacacggacaggcgggcacggcggcgggggaaggagacgacggctgggctccgcggggtggggtggctcgttcggatagtgtttggggtggggagaagggagcgcgacagcaggttcgccgccgccattgctagggtttagggttctttctgttccagccttcc

SEQ ID NO: 277222 - DNA, 1162 bp, Zea mays
ttcttcgcgtccgcccacgcgtgcgcctggatcactcggtcatgaaaatgacgacgctgtgatctttgcttcatggggcatggattacctgaaggatgataactgctacagtttgggaattaagcctcaggaacgatatcctcctatgcgagaggctcttaattcaactgggcgccaaatattctactctttgtgtgaatggggacagtatgatccagccttatgggctggcaaagtgggcaatagttggcgtacaactgacgacataacggatacatggaaaagcatgacagacattgctgataagaacaacaagtgggcatcatatgctggacctggtgggtggaatgacccagatatgctggaagtaggcaatggtggcatgaccttagcagagtatcgctcacattttagcatatgggctctcatgaaggcccctctattaattggctgtgatgtcagaaacatgacttctgaaacaatggaaatactgagcaacaaagaagtaattcaagtaaaccaagatcctcttggagttcaaggaagaaaaattttaggacaaggaaaatatggatgccgtgaggtgtgggctggtcccttgtctgggaatcgtcttgttgttgctctgtggaaccgttgttcagatactgctaacgttacaatgaaactgccagcagtaggccttgatgggtatgctgcctattctgttagggatctgtggaagcatgaaactctatcggaaaatgtcgtaggaacttttggcgctcaagttgacgtgcatgacaccaagatgtacatcttttctcctgcaaccattgtcgcttcggtttgatcaggaccggtggatccaagatgacagcaccgctattgttcaaggatatgtcacgacaacaagggccttcgtttttcctgctgcattctgttccacccgagtgcagaagtccacttcgtgcagaactgtctcagtgatgtttgtatttctcacggaatagctctatttatctcaagattgagcaagctcgaggcttactcggtgtaccggcgttgtatccttggggcatccaagatcttgtacgatttgaaacagtctgaaccaatgatgtaaaacaagatagtgaaaatacaacttcacaaattgcagccgtacaatctgcccttgaac

SEQ ID NO: 277223 - DNA, 868 bp, Zea mays
ctgttggcttgctctctaccatgaaccacaacattgcttacaatttgacatggggggggtttactgatccaacacgcatgtcatccaggtccgtacaagaggaattaggcccattgccttttgtcctctattaactacgcgtacaaggctgaccgaagggactcaagcataagacctgcacgtgggtacgcttttatgtcgacttctcaagttggaggccttgcaccagggagcaaatattcacgttttcttaggcaggaatttgatcttcgagtggctttgcctctgggtgtgctgaatggtgctctcaacgccggagtggctgcgggagtcatccatccattggaaaggggatctgcaggatctgtctcaccacttgtagaaagatttaacttgggtggtaatagggctctcgtgtgccgcttgggtggaccatcttcactattaggcttcaaaacaagagggctacgggcagcaacagagtccagaacacatgaccccaacactcctggcaatggcacttccccttcccctgagctaaatggtcttggaggtgaagtagcggtgacagcctttgccgacctgtcatttgatctgcctctgaagccgctcagggagctgggaatccatggtcatgcttttgtctgtgctggaaatcttggtagattaacggagtgcgatctgcggaagttccctgctactgaattcctgcagacgttcagaagttgtgcagatggggtgtagttatgccgaccagactgttccgcgtagagatgaattactgctacatcctaaaacagcttgatcatgacggggggaagacaggcatacagttgaacttctcatcctcctaatttgtaagatgaaa

SEQ ID NO: 277224 - DNA, 403 bp, Zea mays
ttagggaaagaagttcaggacactccagacaaggagaaatcaaggcgccattcatcacgcgaccgggctgactactacaattcgcattcatctcgtgagaaagatcggcataggcaccattgatcaaggtgacgaggatccccggtctgcagggcttcgctgcatggagaccaccacttggcagtgccgaccggatcatgaaaacttgtggattatcatcccactggtggttgtattggcttgattgtgttttgcaccttggattgtaacttgcaagatacgctagccatgagctgtgtgcaacttgaatttataaacacaacatataagatacaattgacgcacgtgcactaactgccattccagcagagcttgtggaatgttataaagaaacagtttgtgg

SEQ ID NO: 277225 - DNA, 674 bp, Zea mays
gattgatctagactatgtgcctgcctgtgagggtgaggaggacatgaacaaattcgagctacaagacagcttcgagttcatcatctagagcatccaggacctcatggaggatccagggaacaacaacgccttcgggatgccaaccaaaatgagctatagccaacatcgttaactataccagtagaacatttgcccgacgcggatgttgctgcagggaaggacatgcaggggatcccgtcggagaagccgctcttcggtggagataaataccaggagatgaggatgaaggtcttagaaattaccagaatataagttacgtaaagaaagaccgtcgtcaaaaaccatctccgcatcaccaaacggataaaccatcaaaaaagcattctagcttaatctcggacagattaattttcaaagcattatcataatcataatatctcagccatactctagaaagaggttttaccagatacgatatggatccatggcaaaagccaattccaaagtgcatttcaacaggggctgcaaatgacaggcaaacactttaaaaggatctatgggacatcagtggcaaacactttaaaaggatctatgggacatcagtgcatttcaagccatcatccttcatggtgcaaacctattaccaaagtatcagatttttttatagcattttt

SEQ ID NO: 277226 - DNA, 459 bp, Zea mays
tggacctttgggctgatttatgtgcttgtttatgtgcttgggcgaatggcaagtcaagtgaggagttcgggccggcgaatgtaagtttgcctgagaaggggcggaccactaaggctaagtctactgacctatgtgagtctagcctgtctacggacggcgataagcatctgaaacctcgtgaggaagaagatggctaccgaagaaactagagggctcctcgaatattaaggattcgcgctctaagtctcactagcgtccctcggctcggagattcgtcgcgataaacccaaaccggttaggcctaccgtacggaacaaaccagccaggacccgtttcaccttattaaggtccgggaaacttgagtccgcgccgcgagcggtgcggctaagcccgaccactctcccccagccgcaactctgcgacccttcctccccccccaaaaaaaaacccactcccccg

SEQ ID NO: 277227 - DNA, 360 bp, Zea mays
tgggctgatttatgtgcttgtttatgtgcttggtagtggaggtggttggtaagttcgagcggggttatggcgggttgattgatgtcggtggtcataataatcggttggaggatattgctcctccctgtggcgataatggcgggcggagtattgagcatggtgatcctccttcgctgcggcatctgtagacgtcgtcggagtatggtgattgtacttcgctgggtgttatgcttgcgcctggtgtggtgtttgcggaggctcttgcgaaggcggttggtacttatcggtatcatggtagttggctttatgtttttgagtctattgtgggtcatcataatatgtggtgttatgatgggcatt

SEQ ID NO: 277228 - DNA, 384 bp, Zea mays
atggaagggttgggttgatttatgtgcttgtttatgtgcttgaattaccgccggatctgccttttcttcgtatgtaattctactcggctgcgtagacttaggacggttgcttcttccgagattccgttcttttgagcgtctctggcgagtcatcccgccctgacccactaggaaacttgcccgtcctacgccgcgtaggtctacactcgaccgtcggacctggtaaatttgtgccggacttcgcactggccagcttccgttcgtaaggcctccgccgccccgccccggcggctgagtactgtacgcctcgtcctcggacttagactcggagaaactgtgaagctgctgctgcctggcctggagtggactcgaggtgatgacaga

SEQ ID NO: 277229 - DNA, 400 bp, Zea mays
tggaacctttgggctgatttatgtgcttgtttctgctgctgctctatctattttgttcctatgttctttctattaaacaaggctttggtgtccccttgatacctataggggggataggaaactagtggttacggttctgaccttggtgatgattcctgttgctactccacttgcttctcctcgcgttgtggtcggtattgttgctgataatgattcttttgatcatgctacttagggttgtgctcatcgtgatattcgttgtgttgggcctgcgattaacgctattgagcatactgtgggtgttaaggcgaggtcggagcgtaagtatcctggtattggtaagtctgagtgtcttactgatggggcgattgatgtgaatggtatgcatatgactgagtct

SEQ ID NO: 277230 - DNA, 479 bp, Zea mays
gttggaactttggggtgatttatgtgcttgtttatgtccttggcgacccgaaacaacccccaacaaacagcctgcgaactttcgtggtgggtccacacacaccttcgttaagacaaaggcaacggagctgctatgtacgccttagttggttgctacttcgtcctcttcgtctaccgcgcttattgacacggtataggtaagggaacgtgagaagcatagcgagtgacccgccggggtacgtacgactgtagataatcgtgttaacgcccgttgtggcgagggtcctccggttggtaggcgtagtattccttgttgttgtcgtactcgtatcaggtagcgtcaaataagactgtctgactgtctgctacgtaccgataattcacctccaacaatgcctaccactctgcctccacccacgatgaacgctacgcacgcctcggcgatcgctacgcacacctcgacgatcgctacgcactccg

SEQ ID NO: 277231 - DNA, 499 bp, Zea mays
  unsure (1)..(499): unsure at all n locations
nccacgcgtccgcggacggtgggcggaccgtgggtgggatactacaaccacgtcaagctgcaggcgctcaaggccaaggaggcgcagaagaaggcggcgcaggccgacgaggaggccgggtcgctgctgcaggagcgcgactcgcacggcgaccgcaagactgccaaccaggcctagcgagtgtgccggatctcatgatccaattcgctcggttctgaacccagtgtactccaaatatgtgatccaacccttacacgtttgatgcaaaatttgttcatttcttgtctttgacttgatctggtggtaccaaggaaataagcacgggaaagatgcaagctttgtgtcgaacatgtgaaaaaaaatatatatgtatgagcaatttttgtcttttttttggggccagttgtagctgttactaccattaaacagtaagcaaaactgtttgcattttaaaaaaaaaaaaataaatttttaattaaaatttataatatttttatat

SEQ ID NO: 277232 - DNA, 305 bp, Zea mays
cttttcttgaagaaaagaaatgcatgccttgggtcgttcagtagtcttacacagacattccaagatgtttcttgattctgaaattcgctaacactagcatgttttatgtgtgtattgttgttatatgaaaagtgaagtatgatcatctccagtgtccactacatgagtacaacaaaccatctggtgtttttttcctgtacacacacaaacacaaacacacacatgatgacgacgacgacgctacttgcactgcctgttggggaaggcctctgacctgacgaccccgtgctcgacgccatcgacga

SEQ ID NO: 277233 - DNA, 582 bp, Zea mays
  unsure (1)..(582): unsure at all n locations
cggatgcttgggcggacgcgtgggctactacaattattgatttcttcctcaacttgcttgctaaggatgtcaacttactacacgggcggccgaaaccctagcgccgccgccccctccctccactccatcccacctcgccgtcaccagagggcgccgccggatgtccgcgcggccccaaggaaggtggcggcgaggcgatttttctctggtttggtcgcgtctgcccggatctagtcgggttccaggaggtggcagcggcgtgtgtggggcggcgacccttcgccggcgcggctcagcctcggcggcatcctggcggcagtgagcgcgacgttcgtatggcacatccgggcgttgcgggtcctggatgggtgttcgcgcagcaggggggcatgcggccggccgtgggtcgcaggcgcggagaaggtgctgtctggcgcccccagggcagggagcggcgccgcgcgtggaggtctggaatctagtgcgcgtggggttcgcggcctccgcgtgccagccttccgaggcgccagtaggctggtcccgggcatgttccgnggtggtgtttcgccgtgtgccgtcgtg

SEQ ID NO: 277234 - DNA, 528 bp, Zea mays
acgcaccgagtggcgaccgcctgacgcgcccgtgtcggcaagccgacgacgacttgacgtggggcgggggaaacaaaacaacgcgggcagcgccacggcaagcgcgtgcctgccacggcgcggacacagagagtggaaaccggaaggggggaagagagatggattcctccacctcggcggcggcggcaggggaggcggccgtgccgccggaggacgacgtctgctccgtctgccacgaccgcttccggatcccgtgccaggcgaactgctcccattggttctgtggagagtgcatcatccgcgtttggaattatggacctcctgtacaggcttgcaagtgtcccatttgtcgccgccttataaatctactggtgcctgctgcattatcagggcacgaggatggtccacaagctcaacgtattctaggagagattcagcactataactgtatatttggtggagcaccacgcagcctaactcagaggttgcaagacctacccttcttcatccgaagactgttcagagaac

SEQ ID NO: 277235 - DNA, 307 bp, Zea mays
ccctgccacggcgcggacacagagagtggaaaccggaagggaggaagagagatggattcctccacctcggcggcggcggcaggggaggcggccttgccgccggaggacgacggctgctccgtctgccacgaccgcttccggatcccgtgccaggcgaactgctcccattggttctgtgaggttgcaagacctacccttcttcatccgaagactgttcagagaactaatggacccccagcggaccctcccactcgtgttcagggcgcggatgctgatgatggtcgcactgagtgcaatttatgtgctg

SEQ ID NO: 277236 - DNA, 1020 bp, Zea mays
gggaaacttaggccattggtagtggttgtttcattctcattatatgtcattccacctaagcaaacaggatgacatggcatgcaattcaatgaagggggatatgagtttcatgaggatgtatctagacctagacaaatgttgacttgacagctttggaaacagtgcgatgaaactatccattgagaatggccttaggccaatttcagtggggagttctataacacagttaccgggactgccacgccaacttttgtgttggtaactgtgccaacgggtttcatccgataaaactccctctatctctctcttcatagttaacctggcaagtcatcaaaattgctgatgtgtaatagcattaaatgcaaatgaaactcagatgaaactcccagtgagatcgaccttagtctaatactgcatttggtgcattaggtccctcttcctccgggtgtgcatcacaggctgacgacaagccccacattgatgaacctggcccaagctctagcttatcataaaacgtgctatgaggacatgccgctacaagattcacaagcgacgcaagagcagcaaacgatacaaaatctttgtgacacacttcgcacaatactgaggttgtagatctgcaagagtgaaggctgcaacctttggagttccgaagcctgcatggagccaagggtgaacgtggcactgatcctgctcgtggtggagaactgaggatcgaaggaacgcatgacatgtgcctaccgtggagcaggcctaatggcttctgcgttttagcctgtggacgctttggtcactggaagctgggttgacacaggaatctctacggaagtggaaatttctgtccctgttaatagcctcttggagtttcactatgtagagacggcatcaaattttgctaatcaaattttgtggcactaacgcatattgtagcctggttttgtatcgttgtcaatgcatttgttctccaaataaagagaaatagttaagaagaaataaacgaaaagttattctatgttggct

SEQ ID NO: 277237 - DNA, 433 bp, Zea mays
cccacgcgtccgcccacgcgtccgtgcagaagggactataaggtgccatgataatcaaattaacttgtcaccaggacttgcaaacacaacaactaaattgaacaacagcccaagccgtaaagcgttttcagttcaggataagctctggtcaatttatgctgccggcaacactgtaccaataccatttcttaaggcaattgacatttcaccactagctctagtatcagaaaatgaatcaggaaatggcctggctgggtcaagtacaaatgatgctttggaggcagttagggagctgttcagtggtgatgggcaggcaaagaaaggacggaaagggcaaaacgaagtccctcttcctccgggtgtgcatcacaggctgatgacaagccccacattgatgaacctggcccaagctctagcttatcacaaaacgtgc

SEQ ID NO: 277238 - DNA, 692 bp, Zea mays
  unsure (1)..(692): unsure at all n locations
caaaaatttgtgcatcgttccccacaagacaagaacctttatttagaaattcaaaaaaaaaatctattcgcgtcggaaatgagagatattttgtttctccatacagaattagtttcttctgattctgacgtaacaaacaatttctatgaaacatcagagaccccgtttacccctatttatacgatttaagtatacataaagcaattttttttactttaatttaaactatacttttgaccttagaatgctaacaggtctgattttcgattttgtacttaaatttaaattgtattttaataagtaaaagaagtcaggtaattcattaaggctatgtttataccgtgtatcaatggtcaagaaggttccattggaacaattattatttatttcaagctatttcggctctttcttaatcttcaaaaagaaatgaattccgtaatggtaacacgaaaaaagaaaaaaaaaggaagtgtggaaaaaatgacaagaagatattggaacatcaatttgaaagagatgatagaagcgggagttcattttggtcatggtattaagaaatggaatcccaaaatggccccttacatctcggcaaagcgtaaaggtactcatattataaatcttgctagaacagctcgttttttatcagaagcttgtgatttaagtttttgatgcagcangtcaagggaaaaagc

SEQ ID NO: 277239 - DNA, 585 bp, Zea mays
ccacgcgtccgcgtcgccggagacacctcgggatccgtacatgaagtacgtctcgccggaggttgtcgagacacctccgtcgggggaaggggtggcgttgagggacaaggggaagaagaaagccgtgaagctcaggattaaggttgggaatcatcacctcaagaggctgatcagtggagcactcgcaggcgcagtgtcaagaactgctgttgcacctttggagacgatcaggacgcatttgatggtggggagtaatgggaattcgtcgacggaggtgttccagtctatcatgaagcatgagggatggactgggttgttccgtggtaactttgttaatgtcatccgggtagccccaagcaaggcaatcgagctttttgctttcgatacagctaacaagttcttgacccccaaatctggggaggaaccgaagatcccagtccctccttcactagtggctggggcatttgccggtgttagctcaactctgtgtacataccctctggaattgattaagacacggctaactatacagagaggggtgtatgacaatttccttgacgcgattgtcaagatcgtccgcgacga

SEQ ID NO: 277240 - DNA, 365 bp, Zea mays
atcgccagatctcaacccgaacctcccagccgcgccgccctgatggcctacaccacctcgccgtcgacatcgacgtcgacggcagcggcggtggcctgggccttcgctgccgccacctgcgtgaaactcctcctcgtccccacctaccgtgccaccgacttcgacgttcaccggtactggctcgccctcacgcacgcgctccccgtgcggcagtggtacaccgacacctgctctcagtggacgctcgattacccgcccttcttcgcttacttctcccgcctcctctccctccctgcgccgctcgtcgacgctaccctcatctcaatccccgtgcgtgacgcgacgcccttcgctcatctcatcta

SEQ ID NO: 277241 - DNA, 1061 bp, Zea mays
agcgctttatatggtatcttcattgacctgagcaaagcatccaagggacaatgcgaagctgttgcacctacttcgttgaggattgctttgagcaaatcctacccaaacagcaaattctttcaggagggacagatgaatgatgcatctgaggtactgggtgtaatctttgagtgtttgcataagtcatacacttctcgtactgtctaccatggtgtatcccacgagaaaaattctattggatcatgggattgtgcaaatatttcttgcataacacataatctttttgggatggacgtatatgaacggatgaactgtcacaattgtaagatggagtctaggcagctcaagtatacttcatttttccacaatatcaatgctagttcactccgaaccgcgaagatgatgtgtccagattcttcatttgatgaacttttgaaggttgttataatgaatgatcaactagcttgtgatcaagacgttggcggctgtggaacaccgaatcacatacaccacatcctttctactcccccacatgtctttacagttgttttgggatggcagaacaacaaagagagggtggatgacatatctgcaactttggctggtatttcaactgagatagacattagcatattctaccgtggcctagatcaaggaagcaaacacaccctggtgtcagtggtttgttactatggccagcattatcattgttttgccttcaaggatggacgatgggtcatgtatgatgaccagacagtcaaggttgtaggtagttgggggtgatgtgctcgtgatgtgtgaaaagggtcacttgcaaccccaagtgcttttctttgagtctgcaaattaatcattcttcagagtcgtaaagtgttgtgcagtggttaacatgccctcaaatatagggtttttacctgtggccgtgaagattagaaatagagtagcaaattcgttttgagcgggggtatagagtagcacattcaacagctgcgttggtctctgagctttggtcgagcccctcgtaataagtagtcacctgaggattaaaggagagctgttta

SEQ ID NO: 277242 - DNA, 421 bp, Zea mays
gcggtcgtctctacagtcttccggcacaccatctttagaaagcttggccttcacagctcggcgccgcagcatggtgacactaattgtctgcaatggcgggaaagagtttcacctattgtactgaggaaaggattggactctctcattatcctggcagcatggatgatctggaagcatacgaacgaagtgatgctcaaaggagtttctcctaatctcactcttctcctggagtctgctaatgagcgaaagggacaaatggcaagttgcaagagccaacggtttatcctttttggctgctcctagtcgtaatgtttagggacagtggttggggttttttattttttgatgtcttttatggacatttttgtgtatgcctgtttctggtctccgtaaggagtgccttgtacccggggtcttctct

SEQ ID NO: 277243 - DNA, 510 bp, Zea mays
cgcacgggcagctggcgctctcggaggacggcgtggagatgaccttcgccaccaactgcctgggccacttcctgctgacgaagctgctggcggggcggatggcggagacggcggcggccacgggcgtgcagggccgcatcgtgaacgtgtcgtccagcgtgcacggctggttcgccggcgactgggccgagtacctgcacctcgtcacccgccgcaagataccctacgacgcgacgcaggcgtacgcggtgtccaagctcgccaacgtgctgcacacccgcgagctcgccgcgcgcctgcaggaaatgggcgccaacgtgacggccaactgcgtccacccgggcatcgtcaggacgcgccttaaccgcgaccgcgacggcgtcctaaccgatctggtgttcctgctgctgtccaagctgctgaaaacgatccctcaggctgcggcgaccacgtgctacgtggcggcccaccgagagtggccgggcgtgtccggccgctactttcgccgac

SEQ ID NO: 277244 - DNA, 423 bp, Zea mays
gagcacgcgtacggcgcgcacgacggcttggctcccgcctccccgcgcgcggcaagccggcaccgcaatggcgcgtccggaccttccctccccgcgtcctcctcctctccgtcgtcctcctcgctgcccccgccgccggcgccggcactggttcggagttcgacgacggcacctcgcccaagttccccggatgcgacaacacgctgcagaaggtgaaagtgacgtactgggtggacggcgacgagcggagcagccttacggggatcagcgcgaggttcggcgcggtcctgccggacgcggcgcccgacgacgagaagcagcgggccgccgtgcccagccccgagagcggctgcgccaagtcgtcgacgccgctcgcgggctccgacgccgtggctgtgcgcggcgagtgcacgttcatcgaga

SEQ ID NO: 277245 - DNA, 1054 bp, Zea mays
ggacgtggcgctaccaagttggatgtgagacggcgtgtccacatggctttagaagttgtaaggggcatgaattatcttcaccattccagcccgcctatcattcatcgagatttaaaatcatctaacctgctggtcgacaagaactggattgtgaaggtggcagactttggtctttcacgtctcaagcgtgaaactttcttgacaacaaaaacaggaaaaggaacaccccaatggatggcgcccgaggtgttgcgcaatgaaccttccgatgagaagtctgatgtgtacagttacggggttatcctgtgggaacttgttactcagaagataccctgggaaaatctgaactcgatgcaggtcattggtgcagtgggttttatgaaccaaaggttggatatcccaagtgaagtagatcctcagtggacatcaattatcctgagctgctgggaaagcgacccgcagcaacggccgtcgttccaggagcttcttgagaggctccgggagctgcagaggcactacgccatccagcaccggaacacaaagaacagcatcgaggagtaaagaacacaatgcgacctctcagagcgctgtggcttgcttcgaagcattttgcgagcgaacgaacgaagaaccccaggtctctagaagggcctggaccctcctgtactgtatggttttgcttctgcggaacagccaaggctggaagaagtttgttgtacagacgggggtacgttcttctttgtttgacagggcaattgtgactgtaatctctgggtcctgacacccaagggtagggtagagactatagagtgagtagtgactgagctccggattgctggcgcatttgggttcttctgattcgtggcaatgcaaatgcgtggttaacaataacatccaatccggggcttgtgtttctggaaaagggcatgatgatgtgtagattgtttgctctgacaagagtggtgcgtacatgtgatcggttgtgatcatgcgtgattgtgagtttaatcgatgtagtaaaatcttaatattctaaaatgcctgcgtttccttg

SEQ ID NO: 277246 - DNA, 409 bp, Zea mays
ctcgtttgtcactttggttgtcaagcacttcgatgatacgaggatagtgaaccctgacttgaaagatcttcttcttcaatcaatatcagttctcgtacagtataaagaattcatgcttgttttcgagaacaatcgggaggctataaataaaatgcctagatcacttttatcagcttttgacaacagatcatggattcctgttacaaacatactttcccggttctgcaaaggctcaggatttgcttcctataagaatggtgaatccccatcatctgcaacttttcaggttctactgagggagacatgtattcatgaacaagagctgttcttttcctttcttaatcgacttttcaatacactcagctggacaatgaccgagttctctatgtccatccgggagatgcaagat

SEQ ID NO: 277247 - DNA, 493 bp, Zea mays
cccacgcgtccgcggacgcgtgggtcctcactctcctcccgctccagctccagctcgtctctctcctcgcctcgcgtagggtttcgcttcccgtctcgccgccgtcagcatgggggacaactacgatgacgaaggcgagccgatcgtgaacctcgacgaacgggaaccctcccctgagcatcagccgtacgaagacctcgatgacgacctcgacggcggcggcgattggacccgcgaccgctctccgacccccgtccacggcgacgacggcggggcagggtcctcctccaagccccgaaagcgccttctcaagaagggcggcggtggaggcatgcccggcgatgacgggctggatgactttgggttggaggacgaggacgcggacccttcggctgaggcgaggaagaggaagggctcgtcgtcgctgagggacctcgcgaggggcggtgcgggcagggagaagaaggctaagaaaatgcggatggaggacgac

SEQ ID NO: 277248 - DNA, 487 bp, Zea mays
cccacgcgtccttccacgcgtccgggggtgagttcgcgggtcgagcggaggagaagcttctggtggtggtggctctcgtcgtcaagcaggaggggagaggagccggcggcggaggtgaatggcggtggagtaccactgctgctcggcggcctttttcgagcacatcgtcatcatcatcgtgctcgtgctcttcgcgggcctcatgtcgggcctcaccctgggcctcatgtccctcagcctcgtcgatctcgaggtcctcgccaagtccggcaccgagcaggatcgcaagcacgcagctaagattttacctgttgtgaagaaccagcaccttctgctatgcactcttctaatctgcaatgcggctgcaatggaggctttgcccatattccttgatagcttggtgacagcttggggtgctattttaatatcagtgacactgattctgctttttggtgggatcttaccacagttcatctgctcacattat

SEQ ID NO: 277249 - DNA, 414 bp, Zea mays
cgaattgaggagacgagcgtacgtcgtgtacaccgttgccgagagaatccaggagggagggagagaagaccacgtcgcagggagaagcgtgcgtcgtcgttgtcgaggagtgccgctgcggaccactcgccgttactctaaataccaagcactggatcgctgggtgggcgttacaccggcaaggaggccaccgtgggctggagcgccgccgggctcgctcgacgtcgaaggttgacgaatcacggtggccgaccgatccgagcgaacgacaccgattggaggagccgggtcatcaccgcggttcgcacctccatcgtgggacggaacgtctacgctgcgattgctggtgagacgagcaagtgactgaggaacccgaagcaccgtatgttgaagattctgagcaggagctcgcag

SEQ ID NO: 277250 - DNA, 537 bp, Zea mays
gaatcgttcaggcgaacagacattggttttccccgccgcgcagcgcgcacacgcctgcctgccatttctagatccggggccggtcatcctctcttgtttccgtggcaaccgcgcctctcctccttccttgcagcgtgcccctgcggggggctgcgcgtggatctgatctcgtcaattgtcgtgctatgtttttctccagcggcacgaagtgaagaacacgtttttgtgacgccatggctgtggaaagagatatatttggaatttctgggccaacgtatctgaaatcaatcgattggaactgtgagcataatcggagatctgtggctgcaagcttagttcaggctgtatatgtgttggagagagaccggcaactgaatcatcaatcttttgaagccttggcacctgcttggcgggaatccctccattttgagctgtttcgcaagctgattgatgatgctgatatgtccatatttggtgcaatatttgaattcaacccttcaaggaggaagcttctggtgcatatgctccaagatttgt

SEQ ID NO: 277251 - DNA, 470 bp, Zea mays
  unsure (1)..(470): unsure at all n locations
cccacgcgtccgcccacgcgttcgcagaaagtcaggaatatagtcatgaaaaggggtcatatggcagctccactcctcctgatttcttacttcccaaagaagaaagaagtaaacaccatggtaatcaaacattccaaaacttcacaactcatgggaaggatgatgattttgcagcactagagcagctcattgaagatttgacaaaagagaaggtttctttgcaacaaaagtcttcagaaatctcaagaactagcccgaaactttggcgacagataactctgcattaactgataagttcaaccaacaggcacatgtaatcagccagttgacatctgacatggagagattgcaggaagagattcaagctcaactgttatcaaacatccagggagttcttggatcaatatctcgtacatgcaactggtngctatgaggctatanaacaatngtcactagctggcgctggagtc

SEQ ID NO: 277252 - DNA, 320 bp, Zea mays
cggcgactactcggactacagcaccgactcctccaccggtggtggtggccgaccgccgcgcaggccatgatgatttatcaacttgacaacttattactagcacaaactgaagctacagtctatacacacatgcaaattagattgagcgagggagatcgagagagagctcttaactaatttgagggcgatcgatagttaagctatggcagcaagtggcgatcgatgtggagatccatggttcatgtaattatattattgctgtgcttgtgatatacacatgcatggatcattaaaaaaaatatgacaagcgatcacctacg

SEQ ID NO: 277253 - DNA, 464 bp, Zea mays
cggacgcgtgggctagcacttattggcaatccttcgaaagtccacagctggtttcctgggtactcgtggacgattgcagcatgcatggcctgcgagtcccacataggctggctattcagagccaccaagaagaatctgcggcctaggtctttctgggggatccgcagctcacaaatcgcagacgacacacaagtagatcagggtgactgatgctccaaacttccatgcgtataaggccatagtagcagtggactactaagccatgtatgacctggtgttcccaatcctccagtcgtctctggttcatacgcactgcctgccttttgtgtgttggcatagtagggacggtggagttccctgtaaaacaatcactctttttctactgttgtagtagtgctctgcactgaagggatttactgaatctctctttttttggtctaaataagatatatgtttccaatagt

SEQ ID NO: 277254 - DNA, 768 bp, Zea mays
cttctacaagggcgccgagaaggtgcacgaggaggaggccatcggccccgagcggctcgcgggcgacgtcctctactacggcgacagcactcggcggtggtgcagctgcactcgcgggaggacgtggaggcgctcatcgacgagcaccgcggcgacaagggcaagctcgtcgtgctggacgtgggcctcaagcactgcgggccctgcgtcaaggtgtaccccaccgtgctgaagctgtcgcggtccatggtcgacaacaccgtcttcgcgcgcatgaacggcgacgagaacgacagctgcatggacttcctcagggccatgaagatcgtggaggtgcccactttcgtcttcatcagggacggccagatcgtcggccgctacgtcggctccggcaagggggagctcgtcggtgagatcctccgatacaacggcgtcagggtcacctactgaagtgaagtagtgaacaacaaaccagtcagagtcagagcaagcgcaagccgacaagcaacgcttcgatacaaaattgaagacgatacaaaattttagattactgcgacgtccatcgacgattggtcgatgtttagactgtttattgtgtaccattaccatacttgcccgttaatcgctactattcaatagtaatagtaggcttttgtagggctagcagctgcttgctgctttgcaactttaatcttgtttggtgatctatcagcttgattgtccaactagtatcttgcaaagttccaagtttacatgctcctgcagaag

SEQ ID NO: 277255 - DNA, 435 bp, Zea mays
cccacgcgtccgccgttcctcgtcgtctcgtgttgtttctcgcgttgccattgccccagctgtccgcccgcgcccgcggcaatggcaggcggcgtggtggtgaacgcggccgggggcaagacgtaccccggccgcatgacgccgttcgtgttcttcacctgcctggtggcgtcatcgggcggcctcatcttcgggtacgacatcggcatctccggcggtgtcacgtccatggcgtcgttcctcaaggagttcttcccttccgtgtacgccaaggcggcggcgaacaaggacacgaaccagtactgcaagttcgacagccagctgctgacgctgttcacgtcgtcgctgtacctggcggcgctggcgacgtcgttcgtggcggcgtccgtgacgcgggtgttcgggcgcaagtggtccatgttctgcggcggggtg

SEQ ID NO: 277256 - DNA, 520 bp, Zea mays
aagccgcccgcctgcccgacccggaacttactggctggacccacgcacgcggttggttacgcatccggcccacccacaactgctccagatccaggcacggcacggcacggcagccgggccaacccaagcccgtcttctcttctctctcgtccgtcccgcactcgccgcgacgtgacaagacaacgcgacgcgcgcgcatacgtcgtccaaggcacgcaggggccagccaagccaaccaatcgcgtccgtccgggtctggtggtggccggaatgggcctcctcgatcagctctgggacgagacggtggccggcccgcgaccggactccggcctcggcaagctccgcaagtactcctacttctccccctcctcctcctcctcctcgtcgtccatcctggcccccgcgccggcgccggcgccggcggtgacgcgcagcatcaccatcggccgcccgccgtcgctttccgacgaggcctacagcttcttcttcgttcctgttctccccggccagcactcccgac

SEQ ID NO: 277257 - DNA, 767 bp, Zea mays
atctcttcctcctctctcatctaagccggtggccagggggcataacccagccgacggggtacggcggcgtgggggtataacccggccggcgaccacggaccgcgactacgatcttcatagtcgaggccctgctaccttgggccccgaggtccttgacatttcaatgtggagaaaaggatataccgtgcctttattttgaataatagttatccaagaatttgttctaggcgaattcgatgacgacgcgactgctgcataccatgaaaatatcacttctgagttagttgacgatgaccatcatgccgaagatatatctcagaggtatcatgttcacttgtatacaaatgggactgtatgtgatctcacagatattccccgggagacagaggttagatttgtctgctcggagcctactgtgctgattagttcagtcaaggagatctcttcctgcaaatatgttgtaacaattcaaagcccgatgctttgcaaaaacccgttgttccagcaagaaaaacgaacccttcccatccattgcaatgaattacctgctaaagcagaatccggtgctgaggatggtttgcttccaaaagaagcgcagatttccatcatccccgatcaggatgagctgcatggttttccagcttatgctacttgatataatgatatgccttcaatatttatttctggtgtagaaaaagcacagttttggaggcccagtggcaactgagcaacgcgatgtattactctctccgttcttttttatttgc

SEQ ID NO: 277258 - DNA, 502 bp, Zea mays
gcgaatcgccggaccggtcggcgacggagacgacagagcccaagtcgaagcgatccgattttgccggcggcagcgaccggagtatggggctgggaggccggggcgtggtgggtgacaggtggtcgcaacgcatcctctggatttgcgccctgggcagcgccgtgagcctctacttcgtggcggtggagaggcaggctcagaatcgtgcgcgggcggtggcggagggcctcaaggcgctcgacggcgccggggatgacgtgtgacagcggtggacgctgccgtgcagagggcctcctttggttcacatgttcacagaacctcatagcgttgcaataatgtactaaacatctgtgctcagtctttgtagaattaaatgtggatcaatgtgagtgttctcctatttcacataattcatctgagcctttgttgctgcacagaaatgttgatccgtgccactacgtgagtgttttcttatttcacacaatttgtccatttaaggatc

SEQ ID NO: 277259 - DNA, 405 bp, Zea mays
cccacgcgtccgcccacgcgtccgcggacgcgtgggtgggggcttcgcgctcggcctggccatgaaccactgcatgttcgacggcatcggcgccatggagttcgtcaactcgtgggcggagacggcgcgcggcgtcgccgagctcaccgtgccgccgttcctggaccgcagcgtcctgaaggcgcgcgacccgcccgtgcccaccttcccccaccacgagttcgccgagatccccgacgtctccgacacggcggcgctctacggcgcgcaggagctgctgtaccgctccttctgcttcgacccggaccggctggagcgcgtgcgcggccttgcgctcgccgacggcgccctgggccgctgcaccaccttcgaggcgctgtcggggctggtgtggcgcgcgcgcac

SEQ ID NO: 277260 - DNA, 271 bp, Zea mays
cccacgcctccgcggacgcgtgggtcttgtctcacctctcgaggcgcagagtcgtcgttggcgaatgaaatcaaactgtgtgtttttagcgggcaagtgattggacgaaatgtaaaaaagaacgaatccagaacagcagcgcgaaaaaaaaaaacaattcacgattctttcgagtcactgcaaaaagaaaattgtaaattggtagcaactcgtttcttgcccttggtggcaggattgaataaactgatcgatacggggagctgttcaatcg

SEQ ID NO: 277261 - DNA, 471 bp, Zea mays
atagctgctggtcatcagagttcatcgattcgccatcagcagctcttgaaaggtcagctgcagcctggatctgatacgagacaagccgattactttgcaggaaggtctgctccagttcatcaagcatcccaggaaattggtgtatatggaagagttgatgctgataaccacaacatgtccattcttgggactactccatatggaagacagcaagcagcctcattgttggaaggagctccaaggacaaacatcgacagcctctatggacaaggatcgtcaggcgctggttttggtgcaggtcttcctcctggacgtgattatgcctcagggaaaggcctgccccatccatcttcggaccctgatcacccagatagtatcttaccccgtgtacatccagccgtctcaatggttgatgatcgtagagttgatcgaattggttatcgtcgtgaactggatctaagagatgaggaa

SEQ ID NO: 277262 - DNA, 419 bp, Zea mays
  unsure (1)..(419): unsure at all n locations
ccacgcgtccgggcgaagggcatgcccggctccgtcccgttccatgaaggcctaacccgagcgggcaggctgttaagtagggcgcgagtgagagcgagcggccaatcggccgggagcgaagccagcgctagctgccgcctccctccccggtcctcgggtccgccgcgcgcgcgccggccgccaccaccgcacgacgccgaccaccacaattagctagcagcggcgtcgactaataaacgacaatggcgtccatctccctcgaggacgtccgcaacgagaccgtcgacctcgagaccgtcccggtgcaggaggtgttccagcacctgaaatgcagcaaggaggggctctccagcgccgagggagacaatcggctcaagatcttcgggcccaacaagctgangagaagtcggagagcaagc

SEQ ID NO: 277263 - DNA, 423 bp, Zea mays
  unsure (1)..(423): unsure at all n locations
actttgaggaagaacccggaaccagaaccagggaggtgtcggcgaacagatggtaagaaatggcgatgttggagaaacactatcccaaacgagcaatactgcgaacgtcacatgcatcgtggccgcaagcgtcctgtacaggttttcctggaggacgacgagcccgattctgcttcagggtcaaaacccgccgctcctggcaaggctaccgaaggtgccaagaaggccgatgacaagagcccaagcagcaagaagcttgcagtggcagcgcctgccgctgtgcagtctacatagtcaattgcagctttagtagcccgcataaagagcataacagcgctggcaactggcgccttcatatngcatgtaatccccagaagactttagtctggtcgtggtcgtaagtataacctcgttcccagcgtc

SEQ ID NO: 277264 - DNA, 264 bp, Zea mays
cgtcgtcttggctagctgcctagctagctagctagttcctcactcctctccgagaaccccctttttcatctctctctctctctctctcggtctcgcccagctcctttcgatgttatcgtctctgctggcctcgcaactcgtcgagagagactcgtgaaaaagaatccagatatagctagagagaccgtgagggcagctagcttaatttactagcatgtcgatgagcttcttgagcatggtggaggcggactgccgccggggttc

SEQ ID NO: 277265 - DNA, 563 bp, Zea mays
atcctccacaaatgccaccttgagaacgaggtgatgagccggtaggacaagctggtgctcgccgaggaggagctggcgcgtttcagatccgcgggcaaccacgcggtctccggtgacggcggagacgtcatggcccgtgccgtctgcagcggtagcccgagctcatcgttctcgactggcacctgccagcagcccggaggaggcggcggcggcggcggcgatcacctgggggacgacgacctgctctatgttcctgactatgcctacgctgacagcagcgtggtcgagtggtttagcctgtatggactgatgtaatcgatggtatgccatcgtcgtcggcagattaattctagctagctactcatcgtagcgtgtcattgctgtgctgaattgctgatttctatgtgcgccctcttaatcatatgtacataaatcaagctatcaattactggcaaaatatagccagctagcagcaactagtactttaattcagatgtgtgttcttactgctaaaaaaaaaaaaaacagggcggccgctcgcgatctaacggacgcaaagaaga

SEQ ID NO: 277266 - DNA, 427 bp, Zea mays
gagagagagagggagagggagagtctttttctctacctgcccgacccgagcgccggcgcgatggaatggggcggcgagcaccaccacccgcttagcgtattcctccgggacgcgaggctcgcattcagatgggacgagctcggtcaggagatcatgaggatcgcggtgcccggcgcgctcgcgctcatggctgacccagtcgcctccctcgtcgacaccgccttcattggccacataggtccagttgaacttggagctgtaggtgtatcaattgccgtgtttaatcaggtctcaagaattgcagtgttcccacttgttagcgtcacaacatcagttgttgctgaggaggatgctatgtccaatggcagagacaatgacaaaatacatcaacaaaacgaacgcaatgtttcggtcagtgaaatggatg

SEQ ID NO: 277267 - DNA, 418 bp, Zea mays
cccacgcgtccggcaatttgaacatctgaaagtgtagtgctgagatgctttgacacaaaaggttttgatggcattaaaccactctcctgggtacctagaagacaatcccactcggtgtctagttcatccatattggttgcagcaagagcaatgacatttctacatttgatcaatggcaatggtagcgttttgtgatgcagtaattctgtaataccttctggcaactgtgccatctcatttcggtcaccagtgtaattgtttcccatgagttgactaaggtaatcttcaaattcttcatcaggagccagacgaactccaaatgctttcgcgacaccagccaaagaaacgtctgaatgtaacggcccgcgttggccttcttggtgagcggcgcatggtgcggtccttccaaaagcccccc

SEQ ID NO: 277268 - DNA, 432 bp, Zea mays
ggtcaccagtgtaattgtttcccatgagttgactaaggtaatcttcaaattcttcatcaggagccagacgaactccaaatgctttcgcgacaccagccaaagaaacgtctgaatgtagcggcccgagtccaccaaaaataaacaccatgtcatcagtagatttacaacgttcaacttcttcagcgacagaatcaatctcattgcgaacaactgctacatgagaaacccgccagccaattgcatgaagcctcttgcacaaggctgctcctaagttatcctcagttgtaccaaacaaaatttcatcaccgactacaatgattgatgccgcccgtgagatcatccgtcctccgtgagtatcgttgatgccattgttgcagcagaattcatttctactttaggattaatcttttttgttctaccagctctttcaag

SEQ ID NO: 277269 - DNA, 615 bp, Zea mays
cccacgcgtccgcccacgcgtccgtccacgcgtccgcggacgcgtggggtgccgggcccatggcgagaggtacagcccggcatcaaggccgcgcgcgcgggcagcgcccacgaactccctcaccacgtcgacgcggcccccgcgccaggggctggcgcgcacggagtgggccgcgtagtcggacggacagaggcagaacccgtcgtggtgcttggcgacgaggatgacgagcgaggcccccgccgtccgcgccgcgtccatccactgggtggcgttgagccccgcggggcggaacagggacgggtcctccgaccccgtgccccactcggagtccgtgaacgtgttcatgccgaagtggaagaacatgatcacctcgcggcgctgccatctcagctgcggcgccgacgggatcggcagcaccggcagcggcggtggagtcgcgcgccacgcctctgtcgcggagacgaggacggctacggccagcgccgcggcggccaggcacagcagcgggcttgccatcgtgctgctgttattgtcacttctctgctcgcgatggctaagtgtagcggtatatactggcccaggcctgtagctgtagggagggggagatgcgtt

SEQ ID NO: 277270 - DNA, 1235 bp, Zea mays
cgggtccgcccacgcgtccaagccatcaacctctgcagctacaggacagcgtgcttgtgagtggctgtgcttccgtagggctagtagggtgcttgcgttgcgttgcagtgcagaggacactgacggacggcgaagaatcgaagatggaggcgtacgctgctggagccaagttcgactgcttgctgttcgacatggacgacactctgtacccgctgagccttggcatcaacctagcatgccgcaagaacatacaggagtacatgctgaagaagctgcggatcgaggagagccaggtccccaggatgtgcctggacctgtacagggagtatgggaccacaatggccggcctcaaggttttggggtacgatttcgactacgacgacttccacgcctgcgtgcacgggacgctgccgtacgagaaggtgaagcctgacccggtgctcaggcagctgctgctttccctgccgcagaggaagatcatcttcaccaactccgacaaggcccacgcggccagagtcctggagaagctcggcctccaggactgcttccaagggatcgtctgcttcgagaccctgaacccgccaccaccaaccgagaccgagaagaacagtggcggcagtgctgggacgatcctgtgcaagccctcgctggcgtccatggaagccgtcatcgagatcgccaagctcgacgccgagagaacggtgttctttgacgacagcgcgcgcaacatcgccgcagggaaggccgccggtttccgcaccgtcatcgtggggagctcggcgctggtgccaggggcggacgtggcgctggagagcatccacaacatcaaggaggcgctgccggagctctgggaggctgccgccgccgccgccggcgaccgcgtcgacgccgtcctccggtccaccaccgccgtggagaccacagtgattgcctgagcaataataccatatgacaaatgacattaaccgtcacggactcacggccacgtaatataatgctggcgtgtagtatttctcgtgacgtgcaaattaaaatgacttggaatgtggtgtgcctgattaagtaccgaccgaggtaactaatactactgtatatgacagaccagaactttactggtaataaggtttgtatagctcatccctgtcggcccgtgcttttttatggcgcggtccgtggtgcaaatggatgccacgtactgaatccaaataaatatatataaaaaaaatgctttgccc

SEQ ID NO: 277271 - DNA, 332 bp, Zea mays
  unsure (1)..(332): unsure at all n locations
aaagccatcaacctctgtgcagctacaggacagcgtgcttgtgagtggctgttagggtgcttgcgttgcgttgcagtgcagaggacactgacggacggcgaagaatcgaagatggaggcgtacgctgctggagccaagttcgactgcttgctgttcgacatggacgacactctgtacccgctgagccttggcatcaacctagcatgccgcaagaacatacaggagtacatgctgaagaagctgcggatcgaggagagccaggtccccaggatgtgcctggtacctgtacagggagtatgggaccacaatggccggcctcaanggtttggggt

SEQ ID NO: 277272 - DNA, 526 bp, Zea mays
acttgctcctcctcgcgagctcagctcgcgcaccgccgcagacagcgccgccgcgctcccctcctccccttccgctttgccgccacccactgctgccggccgccgcaggcaccccatggccccgaccgggcggctcctcgcggtagccgccctctccttcctatgtctgcaggggccgcggggagattcaggcagcgcatttgctcagagccagccgccgcttcaccggaccgttcgcgcagaggcaaatgacggcggcggccgcatgccggagctcccgcccagcggcctcatgcccatgccggagctctcacccagcggctctcccacgccatttgtccccttcctggcgcccgctccgctcgcgccattctttaacaacagcacgccaaagctctcaggaaaatgcacgctgaactttaccgctgtcgacaaactcatgaccaccacagctgtcgactgcttcacctcgtttgctcctttcctggccaatgtcatctgctgcccgcagcttcaggcaacactg

SEQ ID NO: 277273 - DNA, 563 bp, Zea mays
cggacgcgtgggcggacgcgtgggcggacgcgtgggcggcgccgggacaggcgttgacaccgttcggcggcactggcgcgtacggcccgtcaggggcaggcagcacggactacaacgacgccgtcgccccgcgcgccgccgggctgcacgtggtggctgccctcgctctcgccgtcgccgtcgccgcacctctccaccgctaggggcggtgccatggcaactgggagctggcgggcacgacactcgcagacgggatcccgcctcggcggcccgccagcgcgggctctggtcgatgtccggcgttagtgcgtgcgcgtacctgatgaagtgatgatgggttttgatcgaccagccgtcagcgtagtgcggtcacggggtttacagtgttattcgaactgacctctctgcttcctcgtgctagtagtggtggctgccatgtgtgtgtgctgctggtagagaactagggattctttttttttcttctgtcgcttccttgcttatatgtcccgtcgtgttaggctgtgtttactatgcagtgtttggtggtggccgctttccatgag

SEQ ID NO: 277274 - DNA, 689 bp, Zea mays
  unsure (1)..(689): unsure at all n locations
cccacgcgtccgacgccgggcgcacgcagccaggccaggtatccccccggccccaaccaaaccatcgcatgggagccgcgactggcccgacgaagcggagccgcgtccccagcaagaggcaggatgaggaggaggaggccatggcgcgcgctgcgggcgtggaggcgcaggcgcggcggcggccacggctggtggggtacgaggagctgccggagtacctcaaggacaacgagtacatccgcgggcactaccgcgccgagtggcccgtccgcgacgcgctcctcagcgccttcgcctggcacaacgagactctcaacgtgtggacgcatctcggcgggttcctgtttttcctggcgctcgcggtcgccggagggtggacggaggccgccgacgaagccgctcccgggatcatgaggttcgtggtgacaccaccagctaacgcttcgtggggtagcggccagcattcgggtctgccaagccacgacggcagggcgtcgcagtccggcgtgccgcggtggccgcggacggtgttcctggtgggcgccatgtcgtgcctggccatcagcgcgacggcccacctgctggcgtgccactcgcggcgcgccagcgtggtgttctggcagctcgactacgcgggcatctncgtgatgatcgtcggcttctttcgtgccgccggtgtactacgcttt

SEQ ID NO: 277275 - DNA, 835 bp, Zea mays
  unsure (1)..(835): unsure at all n locations
cccacgcgtccgattccttacacgctaagccacgcaacgcaactagcagcagctagccatgacgatgaagtccggcagcggcggcggccatgtcatcggggtcccggtcacctccaaggcgcacgggatagaggaggtgtccagggacgatccgtccttcagcaagggcgccggcgatcacctcgccgtctcgttgacgcaccccagcccttacgcgtctttcggctacaagcacacaggcagcaaaggccaggtgatccactgggtgagcaagctgagcagaagggcgcagggcttcagagagcatgtgaccttggggccgaagctgtcggagacggtgaaggggaagctgagcctgggcgcgcggatcctgcaggcaggcggggtggagcgcgtgttccgccaggccttctccgtcgccgacgacaagggcgagcggctgctcaaggcgctgcagtgctacatctacaccacgggcgggcccatcgccggcatgctcttcgtctccaccaggaaggtcgccttccgcagcgaccgccccatcaccgtcacctcccccggcggcggcggcgacacggcgcgggtcacctacaaggtggccatcccgctgcggaggatccgcagggtgcggcccagcgagaacgtccacaggcccgaggagaagtacatccacgtctccaccgtcgacggcttcgagttctggttcatgggcttcgtcagctaccagaggtcgtgcaagtacatgcagcangccgtctcggagatgcgatgaccggtgtctgtatcgctgncccctgtcngaacgatgtgaagagactagatgttatgggtctcg

SEQ ID NO: 277276 - DNA, 391 bp, Zea mays
  unsure (1)..(391): unsure at all n locations
cactggcatccccctctctccctctccccaccacaccacctccctcctcacaagccatagccgccgcctctttctgtgcttgccctctcgccatcttcgagtacgacgagaaggcggtgatggagctggacgagcaggccttcctggaggagatcctctccctgcggagggacgcctgggactgcaatgccatgggggacttcttcgccccggccgccatggactgcaccttccaggtccgtcaccaccaggcgcccaccgtcagcgtcctccccaccttcaccgnctgctacgcccagccgcagccgcaaccggcggcggcgcccggcttcgactgcctcagcgaggtctactgcgccgacgcattcggcgggcccaatgctggtgacta

SEQ ID NO: 277277 - DNA, 636 bp, Zea mays
aagaagcacaattttgatggtcctatatactattatgtgttcaattcccttctattttcaggacttgttctccacatatattggtgggtcttaatatatcggatgcttctgagacaaatcaagacaagaaatgttggagatgatgttcgatctgattctgaaggagaagacgaccatgaagactgattggcgtcaccatcttagtttgcatattatgtcggtgctagaagcatcacccccaataccgtccctgagcttatacattctttggctggattccaagaatacgtgcagattatgagaggacgagcatttgttcctcacgagaatcaccgaagccgggctacgatttcttctgtctcgactgctcatttgtgttgtactaagtatgcattagaaacagcgctgcaatgtgttaaaaaagttggatgtcggatataacattcttgtgagtgttcagacaaagtgcagcggtaaatgtagcattccagaaaaaggactggctgtaaactatatggcctttctttcgacaaaccattgtaaaaattgtgtatgccaggatagccttgcttgggatttaccacaatcccaatcagaaactgtcccttctgaagcatgtatttcaccattcaaaaa

SEQ ID NO: 277278 - DNA, 830 bp, Zea mays
  unsure (1)..(830): unsure at all n locations
gcgccatgaacatcgacggcgacaacggcctcgcctgcctcaccaagatctccggcgcctcctccgcgtccacggtctcgccgctgccccacatgttcgtcgtcaaggacctggtggtggacatgaccaacttctacagccagtacaagagcgtcgagccatggctcaagcgcaaggaccagcccccgcagcagggcaaggagatcccgcagaccaaggccgaccgggccaagctcgacggcatgtacgagtgcatcctctgcgcctgctgctccacctcctgcccgtcctactggtggaacccggaggagtacctcggcccggccgcgctgctccacgccaacaggtggatacaggacagccgtgaccagttcaccaaggagcgcctggacgccatcaacgacgagttcaagctgtaccgctgccacaccatcaagaactgcacgcacgcctgccccaaaggcctgaacccggcaaagcagatcgacacgatcaagaagctccagttgggtgccccaagtgcctgaaaccgagcgtgtcttcccttgaaaacggtcgtggaacagacctgtggaaaaaattgggatgaacttgccacttatttcgttgttgttgttgttctttggtcttcgcgcggtggtttctacctgccaaagacgaataattcccggctggggcccctccagtccactccacccatgcttttgtgtcaggcggcgcggaggtagagcatagggagtgaataaccgctaccttatttcatttctatgatgtatctatctaatntggtccttccctgataatgcacgacccgtagtgttaacaagcgt

SEQ ID NO: 277279 - DNA, 635 bp, Zea mays
  unsure (1)..(635): unsure at all n locations
catgacacttctaaacagtacagggtgagcgtggtcagcgcaggacncgtcagcgcagctaggcacggaggtctcgcagatcaaggccgancgcgccaagctcgacggcatgtacgagtgcatcctctgcgcctgctgctccaactcctgcccatcctactggtggaaccccgaggagtacctcggcccagccgcgctgctccacgccaataggtggatacaggacagccgtgaccagttcaccaaggagcgcctggacgccatcaacgacgagttcaagctgtaccgctgccacaccatcaagaactgcacgcatgcctgccccaagggcctgaacccggcgaagcagatcgacacgatcaagaagctccagttggacgcctgaaagcggtcatgccttcccttcaagacgaacatggaacaaaacctgtgaaaaattgcccttcttttgcgccgtggttttctacctgacaaataattcccgatttgggggcctcctggaggtagtgtagggagtgaataactgctacagcatttcatttttatgccgtatctaatttggtcatctgcaatgcattgtatggatcaccatcacttgtggatgattgccgttgcactttaaatttgcttcacat

SEQ ID NO: 277280 - DNA, 740 bp, Zea mays
  unsure (1)..(740): unsure at all n locations
cgcatgatgccatcaacctaccgtggatcttggggaagaactcggtcggaagatttcctctttggtcgattatactgtttggtcctttcttgacgcttgctcggacatatgcaatggttaagagatacatgaggaaagagtccgtgtatgacaagattgtggatggcctatatcttggaggatggccctttctcttgaaacatttgccccctggaaacccatctgtcatagactgcacttgtgagcttccaagaagttccttcgttccagcagacgagtatctttgtcttgcaacttgggataccagagctccaacaccataccaaattgaaaaagctgcacgttgggcttgtggaaagagatctgaggggaagccggtttatgtccattgcgcatttggttatggaagaagtgcttgtgtcgtgtgtgcaattctagtagcgctgggcattgctgagaactggaaagaggctgagaacatcatccgtgaaagaagaaagataaaaatgaacgcccttcacaggaaaaccttggaagagtggtccaaacaacgggattctcagaaaaaggctaagtagttgtaagtgtaacattttccttagagataaacttgtttgtggtgttaaagcttgtttgaaacatcatacaatggcatatctacttaggccaagtgtaatgtctgtcaaattattattattattttccccgtgtttctacctttaaacaaaaaaaaaaanaaa

SEQ ID NO: 277281 - DNA, 547 bp, Zea mays
gccttgtatgccatgactcccgagcagctggccgagcgcgccttcatcgaccccaagcgcgccaagagaattctagctaacaggcaatcagctgctagatcgaaagaaagaaaggctcgttatatgacagaccttgagcggaaggtccaaactcttcagactgaagccaccaccctgtcagctcaactcacactatttcagagggacacgaccggactttctgcagaaaatgcagagcttaagataaggttgcaggccatggagcaacaggctcaactccgcgatgctctgaatgatgcactaaagcaggagctggagaggcttaagcttgctactggtgagatgaccaattccagcgaggcatataacatgagattccagcatgttccatacaatccttccttcttcccgctttcccagcaaaatgcatccccacaccctggtaccacccagctgccaccgccgttccacccaccccatcccaacgtgccaaaccaccagatgcggttccccccaaacactctcccagacataatgcaacatgagt

SEQ ID NO: 277282 - DNA, 543 bp, Zea mays
  unsure (1)..(543): unsure at all n locations
ctcttgcacgcacatcacacaacgccagcgagaaagaggtctcgtccgcaccacggcgcagccaacggggagaagaggaaggcagtgagctgtcccgcgcgtgcgcgccccgcctcccgcccgcccgtctgatgaggaagctctgcccgaacctcgagcgcgacgacgcgctggacacggtgctggaggtgcccatccccgaggagatgttctcccgcggcggcggcgcccgcgcctccgcgttcaggttcggctgcaccagcgtcaaggcgtggatgcggtcgcacgccgccgaccggtccggcgcgggcgagccgtgctccatgacccgcggggagctgcagctcatgctgggcgtcatcggcgcgccgctcgtcccgctgcccgtcgccgtcgtctgccgcgccaagcagtcgccctgctccgtcctctgcgagcagctcaagaccggtccaatcgagtcgtcctccgccaagtacatcgtgcagcagtacgtcgcggcgtcgggcggngagtgggcgctggacagggtcaagagcatgt

SEQ ID NO: 277283 - DNA, 1136 bp, Zea mays
tctgatccaaataagttgtctgatatgaaagaaaatgatttcagtagcaacagaaatgtctttggttactctggaaatacgagggatgatatgttgccactttcaagtacttccgaggaatctcgctttatgaaaatggagaacaataattcccggaaaacaggaagttctgttgctgctctcaaagaactttgcactgttgagggatataacttagtttttcaagcctgtccatcttcagcagatggtttagttgggaaagaatcttatgctcaggtacaagttggtgggcaaattctaggcaaaggagttgggttaacatgggaagaggccaagctccaggctgctgctgaggctcttggaactttaagatccatgctaggtcaacttggtcataaacgatctggctctccaaggtcattggcaccaaattttaacaagcggttcaagccagattttccaaggaccgtacaaagagttccttacggaacatattctaggatcgaaggtcatgttccttaagaggtctgcataaatgatgtgcctgggcgctaaacttcaaaactggatgaagctttgaactgtcaggtcttcacacattgaatgcaagccgtagattcctggcttatagtggtcttccaaggctctcacaagctgccactggctgagagtaccgacgaatataaaatacgtacttcatttaagtaagcgccaagagattgaaggattaatggtggccataactttatgcagaatttcattgccatgatcttaccagtcacaagtgttaccccatgttgtcaacttggcataatcgttgacctggaagtttaacggttgaaccagggaccggcatgcagctccatttcttttttggtgtgtgtccatggatcaaagagcagcgccgtggttgggcatttttacccttcctttggtttaggtgaaagttggacctctgtagctcggagtcttagcaggtagccagtttttatttctgataagtttttaggcaagttgtaagttgtagcacaaaatcgatcacttgatagtattaacattgcattgatgtagacatgtagtcatctttgtagctgtactctaggcaagcaacacgaatccagtggcttacatcattc

SEQ ID NO: 277284 - DNA, 963 bp, Zea mays
cccacgcgtccgcccacgcgtccgatctccagactccaaccagcgctcctccctccccgttctttcctcctcccttcagccatcgcagtcgcagcgcaggttcttggctggttgctggtgtcgacagcaaagtccgcaactccaatcctgcctgcgctcctcccgtcctccgtcctcactcagcacccgcgcacgccgcctgcctgtcgattgagatctctttcacgcccctttctgccatcgcacaactgagccgcagctagtaacatccattttgctggtcaataagtcgtgggaggaagaagatggattatttgaaggtgcaggtggtagagtcatcatttgtagtgccgagcgagccgacgccaacgaaggcgctctggctctcttgcttggacatggttcagtccaacaaagcccacaccccaacgatccacttgtacagctccaacgatgctgcggcggctgattttttcgacctgggcagactcaagaaggctacggccaaagccttggtggccttctaccccctcgccggccgcctcgtcgacagcgacgatggtaggaaggagatcagctgcaacggcgaaggtgcactctttgttgtcgctcgcgcggatggtgatctcactatcgatgaagtcaagaaattcaagccatcgccagagttgaggaggctgtttattccactcatcgagccatcgtccatcataatggccatacaggtgactttcttgaagtgtggaggtgtggtgttaggaacagctatccaccacgccgccacagacgtttcaagcgcgttccacttttttcagacatggtcggcgttctgcaagcatggtgacagtgctgccgtggagctcccgtgccacgaccgcaccctactccgcgcacggtccccgcccacagtccaccccgacgcgctctcgacattgcagcctcggctcgtcctcactgaacccg

SEQ ID NO: 277285 - DNA, 558 bp, Zea mays
ggacaatggacaacgcaatactctttccagtgactgagtggattctgatcattggacaagctatcagtatttgcggtcctttgcaatagcagattaggacttgctcaggaaaatggaacaatatctgaggatgttgttcggagtgcgttttctgctacggaggaaggcttcttgacactcgtgcggagaacacgttttataaagcctttgattgctgcggttggatcctgctgtctagttggtgtcacatggagagggacactatatgtggctaatctaggcgattccagggctgttattggcgttctaggtagatcaaacaagatcgtggctgagccactcacaagagatcataatgcaagtagggaggaggtcaggcaggagcttatatcccgtcatccagatgattctcaaattgtcgttctcaagcatggtgtttggcgcatcaagggcataattcaggtttcaagaacaattggagatgcttacttgaagaggcgggaatttgctcttgatccatctatcactcgtttccgcctttcggagcctctccgccag

SEQ ID NO: 277286 - DNA, 435 bp, Zea mays
gtcaaggttcgtcaaggtacccagcctggatagaaggtggtcctacggggcaaaggaataagaagcgaggaactcgccagtgtttgggaatcagtatgtacacttcaatatcagggttccgacggaggtgacgcaaaggcagagggagctgatagatgagttcgataaagaggagtgcgcagaccgggaaagacctgcggttgcctccggatgaagtttttggttcaaccattaattagttttagcccccccctagtttgatgccctcaatttctccaacccgccataaggtgctgtaggccccaaaagcttattgtaacatttgatccttatatagcatctacccagtgtgtaacgtatacattacgcgctaaattattggactattttcgatttctaaacagaaaaaatagtgggggttgtcttcccccttcc

SEQ ID NO: 277287 - DNA, 459 bp, Zea mays
actacacggagctggcggaactggtggagaaggcgctgctcctgcagacgctggaggacgccgtcgggaagcacaacgtcaccatcttcgcgccgcggaacgaggcgctggagcgggacctggacccggagttcaagcgcttcctgctggagccgcgcaacctcaggtcgctgcaggcgctgctgctctaccacgtcctcccctcgcgcctgccctccgactcctggcccgcggcgtcccaccccacgctgtccggcgaggaggtcgagctcgcccccgccgccggcgccggcatgcgcgtcggccacgccgccgtcacgcgcccggacgccgtgctcaggcccgacggggtcatccacggcatcgagcgcctcctcgtgccgcgctccgtgcaggaggacttcaaccgccggcgcagcctcgcggcgatctcggccgtgcttgccacgggcgcgcccg

SEQ ID NO: 277288 - DNA, 963 bp, Zea mays
ccaagaccaaggagtatattgcagagaagatgttagcagtaattgatgaggttggcgcacaaaatgttgtgcaagtcatcactgacaacgctgccaattgcagagctgctggcatcatagttgagcagaagcaccctcatattttttagaccccttgtgttgtgcatactttgaatcttgctttgaagaacatatgtgcttctagggaaattgaaaatgtgctttatactgaattccagtggattagcgaagtcattggagatgccagcatgattaacaatttcatcatgaatcactccatgaggttgtctatgttcaatgagcaaagcaatctgaaattccttgccattgctgacacaagattttcctctgctattgtgatgttgaagagatttattgctataaaagatgctctttcagtgatggttgtgagtgaaaagtggagtgcctatagggaagataatccacgtcaggctcaatttgtaaagaagattgcgaatgatctgtggtgggataaagtgcgctatttccttagtttcactgagcctatctatacaatgatacgagcgacagatactgacaagccatgcctccatttgatatatgagatgtgggacacaatgatagagaaggtgaagagtgtgatctatcgtcatgaaatgaaagagacacatgaagaatctatcttttactcagctgtgcatgacatcttggtgagtcgatggacaaaaagcaacacgcccttgcactgcttggcacacttactaaattcaaagtattacactgatgcatggatcaatgaggtcctcaaccgacaggctcctcataatgatgaggaaatttcagagatgagaaatacttgtttcaagagggtattttctggtgcagaattaaaaaagattaagttgcagtatgctaatttctctttgtttggacctggattcaattcatttgacttacttg

SEQ ID NO: 277289 - DNA, 531 bp, Zea mays
cccacgcgtccgctgaagctgaacagccaaaggacactaagaccagtgtctcattccttgggtcggctgatgatggtaacacattcttgcattcctcagtctacatgccaagtgctccaccagtacttgatgaagaagccttaaattacaacatttatagggctgtactggaagcagagccaccagaatggcttcctgacagttatgctagtgcgtgtatgcagtgcgctgctctttttactgcccttacacgtggaaggcatcattgtcgattctgtggagggatattttgcagggcatgctcaaagggacgatcgctgttgcctgccaagttccgtgagcggaatccgcaaagagtctgtgatgcttgttatgataggcttgatccattgcagaacttattgattaattctgtcagcaatgcctcacaaactgcaaagcatgatgtcatggattggacttgtgcaagagggtggttaaattttcccattggattaacaatggagcatgagatatacaaggcagcgaata

SEQ ID NO: 277290 - DNA, 273 bp, Zea mays
cccacgcgtccgagaaagttgacgatgctaatccttttaaagtcaaaagttactttttgttgtatacttcacctttccgtccaaccggtcgatgatccaagaagttacacaggcgaatggaattgcctgggcttgcttttacacttgtgaaaatcgtgtattttattttcctgctctcgtctcaggttagtgtaataattcaacgtttggagtttcttgttttaactgtattttacatgaaataccacctcaaaatcctgttgtggaatcagc

SEQ ID NO: 277291 - DNA, 724 bp, Zea mays
cggtcgcgtgggccccactcctctcgtcgcgtccaataaaaaggggggaagagcattttcccttttttttgctcccctcccccctcgcttctcccgaatttgatgcttaaaccctcgccgggaggaggaggactccacgcgcgagcccgcccgcgccacctaccgccgcgcccggatccccgccatggccgccgcgccgcaccgggcccaggtccccgctgatagcacgactccgctgcagacggggcctgtacttgagaataacccctccaagagtgcaaacgccaaggaccagattctttctggtacagagaatgtgactacaggcaatgcacggggcgctagctccttgagaccgcccaacggcccaccagagaaggctagctctgtgggaaaagctggagagcaaccttatctctaccagcaaaatgtgtatgcaccgcagccacaaccactctatcctggaggctacatgaacccttcaggacaatgggaggaatatccccattatgtgactatggaggggctccattccgtatctcccggaatctacaatgacaaccagtccctcatgctatctcctggatatgcaaacaatccccaaatgatgtatggagcatattctcctgtttccaccgttggggatggccaacaatacctccctatgcattttcccttctcaagtccttactatcaaccaccagcttctcctagcatgggatat

SEQ ID NO: 277292 - DNA, 534 bp, Zea mays
atggctgcaatgcttgagaagcagtataacagtgagatcaattcattatctcatctgtacgacaagaatgtgatcaagcttgtagcagcctacaaatgcccaccagttttttacattattaccgagttccttcctggaggctcaataaggtcatacctaaacaatccagagaaccaccccatccctctagagagaaccatatccatcgctctcgatgtcgcccgtggcttggagtacatacattctcaggggatcgttcaccgtgacatcaagcccgagaacattctcttcgacgagaacctctgcgtgaagatcgctgatttcggcattgcctgccaggaggccttatgcgatgtgctcgtggaggacgaaggcacttacaggtggatggcgcccgagatgatcaagcagatggcgtacaaccgaaaggtcgacgtctacagcttcggactgctcttgtgggagatggtgtctggtagaatcccttacgagaacctgaccccttaccaggtggcttacgcagtagccaacagg

SEQ ID NO: 277293 - DNA, 534 bp, Zea mays
gcgcccacgcgtccgcgatggtaaattatttactgttggaggcaatgacggaaaaaacaaatttgaattggtaaacagagaaaagaggaaactgacacttggcgacattccattgtcccttacatgtgcacttcataaaggatctatactaacggacccaacttctgaagaagaatcaattattgagacctatgtgactgttgtcgttgattctgcagaccgcctagtgtcattacaaaaagttggaggcacagtgacatccatggcaactattaaggagtgcattagcttggcgaaagaaaggaggctgaggctaacagaaattctgatagactctgtcaaagccatggaagtcgaccatactgaataattctgcagatacattcagttaatctaaccggggatatttcttgatggttctctgtgcctcagctgcactgattgtaacagcatttttgttgggttagtccaagtatttagctatttgtactccgcacatgatttttgacttaattagccagacaattttatctg

SEQ ID NO: 277294 - DNA, 422 bp, Zea mays
accagtgcaccgtcaccaggcggtcgccatacgattcaccgcgcacgtaacatgagaacagcgaaaacgaagatgcttccccgggcggcagcggacgaggagacgagagagggagagatggggccggacctcctgggacttggcttgctgccgccgccgatggccggcggcggccacggaggtggttcagcggcgcatcagaagacgggattcgacgagcccctacgtttcgccgctgacgcccctttgccggtgcgcgcttgcgtgcgcccgcggccccggcccgtggacgtggacgacggcgtcgtccctgcagcacctccggcgagcatcgccgaagccgcccgcgtcgtcgacggcacggtgggcgccagctgagctggcgtcgtccccgacgaagctcggttctttcagggagatct

SEQ ID NO: 277295 - DNA, 2090 bp, Zea mays
ttttacgggcgcacacaccatacaccaccaccactcgcaagtctcttcgccgtctcgccgagttattagaaggcggggaaaaaaatcaactcgaacgggcgggtggcaaccaaccaccaagcggcgagggcgatggcggcgtccccgccgcggaagcggctccctgctgcgcgcctcatcttcgccctccttctcctgatgtcctccgtgctgccgagggacgccggggcggtggaactggggctgaagctgcccttcagtccgggggacgtgctccccgtcctgccgcggcaggtggcgtggcccgtcatgaacacgctccacagcgccgtcgacctactgccgtccttcgtcgccgccgtggcgcccggggcgccggcgccggcggcctggaaaggcgcgtgcttctcggagaacgaggccgctatcgagctcacgcccggggaccgcaacgggaccgacgtcggcggtgccgtactgcgcctcaagactgcttcagctcatagttgggcgtgcatggatctctacgtttttgcaacaccatataggataacatgggactattattttgctgctcgggagcacactttggagattaaatcatgggaggaagaagcggaattgaaatatgtgaaggagcatggcatttctatttttctcatgccatctggaatgctcggaactttgctatctttgattgatgtcctgcctttgttttcaaacactgcctggggccaacattccaacctagcctttttagagaagcatatgggagcctcatttgagaaacgaacccaaccttgggttgctaacattagaaaggaggatatacaatctggtgactttttggctttatcaaagattcgaggacgatggggtgggtttgagacattagagaaatgggtgactggtgcatttgctgggcatacctcggtttgcttaaaagacgagaagggtgatctttgggttgcagagtcaggctatgaaaacgagaagggagaagaaatcattgctatagttccttgggatgaatggtgggccatggctctcaaggatgaatcaaatcctcagatagccctgcttcctttgcaccctgatgtgcgtgccagattcaacgaaagtgctgcatgggaatatgcccggagcatggttggaaatccttatggctaccataacatgatatttagctggatcgatacaataggagataattatccacctcctcttgatgctaacctggtaatggcagttatgtcaatgtggactagattgcagccagtttatgctgcaaacatgtggaatgaagccctaaacaaacgacttggcactgaggatttggaccttcaggggatcattatggagattgaaagacgtggaatgtcttttgatcagttgctcaccatacccgagcaagacgaatgggtgtacagtgatggtaaatcaactacttgtgtcgccttcattcttgcaatgtacaaggaggctggaatattcacccctttctcggagtcgatccaggtcaccgagttcactattcgtgacgcatacatgctcaagatatttgaagacaacccggcaaggcttccaggttggtgcaacgcagacacggacaagcttcccttttgccagattctcggagagtacagaatggagttaccagagtacaacacgattgaaccttatgcgaaaatgaacgagaactgtccgtccttgcccccaacgtacaaacgacccgcacgctgctgactacgagattgtctactatgtatctttctgcagctgctgcctttacacagtggcattagagtgttgttgctatgttctgtaaataaaagacactatatatataggtgcttggtagatggtagttcttaccagtaatgtagctgcgatgtattcaggttcacggttttcagtcgatcagttctgaagccacggcgtcggcgaccaatatgaaggttaggatttgtcagctccggaaagttgcttatatgtatcaatgtatgtatgtaggcaacattatggcttggtcataaattgtgaactccgtcaagaaataaatctataatgcaacgtcaggtgattctgat

SEQ ID NO: 277296 - DNA, 602 bp, Zea mays
ctcgtattaacggtcggcggtgggtgtggagcgggacggggcggcgagatcacgacgagatggagactgacatctcttcatgcggaggcggcggcgcccaacagcggggtataggacctgtggaggtgcaagcggcgacggcagcactgcggcggtcagaggtgttccacgtcttgaaggagctcgtaggcttcgtcctctacatgcaccaccagatcccctcggttttgccgagtcttgaaaatgaatttgcaagtttaaaggaggaaatgacagaaatggcattacaaccagctgaactcaaaccatctgatcggagaaagtacaacacacgaaatacggaggttagacgtagaataaagaagcacgagaagttgatgaatggcatctctaccttactctgttctcttcagcacgcacttgatgaagtttctagcattgaaggagttgtcctgatacttggaggaagccttgtacggcccctatttgtttatgacattacaatttctcatggtatctttggtccaggaagtgccacagaacatgctctaaccaagtcagcccaatctgtttctcgagaaggctatccgtgctcttgtatc

SEQ ID NO: 277297 - DNA, 536 bp, Zea mays
gtgggactgggcttttcaaatcaacagatgaagaatccccactgatatccatggacgacgaaggatggatcacaattccgtgcaaggcacttcctgaaagttggaacgacatatcagaaatggttcagttgcaggctctggaccgttccttcctttttccagttatcaggcgagcaggttcctatactggcgtgcctgtcagcttctaagcaagatgtacaggttatatccccctttagaattgccgcagtaatgtctaagaatggaacttctatgcaaaactttacaaataaatctagccctgtcagtgcaaatggtcatgataatggagcagctggagaaagtggctatgaggatgttgaacccaatggtgaagcatctccttcaggacatgatattttggagactcaatctctccttcagatggaggatcataagcagcagatcgaacatgtgttgcgaagatttagaggatcaaatttttttgtccggattgcggaatcagtggaacctctatggtccaagaaaagtgtaat

SEQ ID NO: 277298 - DNA, 574 bp, Zea mays
cagaaaactacacagttttgctatcgaagcttcaagaagaaggattgaagtttgaaactgataatggctacgaacttgttcctctgaacccaattgaggtggacgacgaggccgtggaactaaacaaggaacttgtttcaaatttgctagagcttgatgacgttgatgccgtctatacagaccaaaaatgagtgaattcatgagctacagctctcaattcaagacgcgctcggccaatggactttgttcgagtatattcacttttcattgatgggaaaaaaatgttaggtctttttatgaagcctggttgagcaccatcggctctacccaaaaacttaacctagttatccagcatctttttgatactttggcatttcgcaagctcatgtctataccttggtttcttcccagcccatcgtgttgggatggtttgatacatgttcagaaagcagatgtgagaaaccatagtaaaataatacgttgatgctgatccatttttgggtcttgttaaattgcaatggaaatgctatgattttggtaagcattgaaatgaaaatgctttggctctttgtat

SEQ ID NO: 277299 - DNA, 444 bp, Zea mays
cctacgcgtccgcgatgagcttggctgcttctccaaggttggctgcgcgctcaaaccgtcttccgccctcgcctccgggaccacctctcctaatattggagttcgtttaggggatacagtcctcttcgctggcgatttcttctctcacactacaaggaggggaactctacgagctcgcgctcgttgcctgccatcccacttcctctctccacctcgtctttggaagtctccaaagcgattgtgcagtctggcaggacaacctggaggattcttcgccgaacgagctttccgagcgcggagggtgcgcatcgatccacagcgtgacctctcctacccgatctggttctttggatctcaaactactcagtctccgccactgcgccacaccaccgcgtcgcagcaatgccgtcgccgcgacgaaagctgaaggcggcctcgtacgag

SEQ ID NO: 277300 - DNA, 477 bp, Zea mays
ggcactttttcctctcctctcctctcctctctctccctctgagcaccaaagaactgcaactaggaacggttcgccacaaaaaaagaacgtacggctatgaagacgaggcgcggtgcctgctactcctgccacgcggcggcggcggccacggcgccgggcgaggggcccgaggcgcaacgccggaagcggcgcaggacggcggcggccgacgggtcgccagcggcggccggcactccaggtgtccgcccggtgggcagagacatgttcgaagagctgcctgacgatctcgtcgtctccatactacgggacgtcgccgcgtccgtcagttcgccggtcgatctcgccggcgccatgctcacgtgcaagaggttcagggagctcgggcagagcaaggtggtgctggcgcgggcgtcgtcgcggtgcctggccgtgcgcgccaaggcctggtcggaggaggcgcaccggttcctgcagcgc

SEQ ID NO: 277301 - DNA, 434 bp, Zea mays
acttactcccagggctgcgtgaatatttttcccaaacagatgatattcatataacggcaaggattcctgcaatggagagcatggctgatgtgaatttagcacaaaaggacgagaagcttaaagaagttgactccaaaactaaaccagaagatcaacaacaagcagaaaatagaaatatgggaacaattgatgaagaatcagatgacgatgaggactatcatgttcctgaagctgatatagaggtgaaatcactaacaaatctgacaatgaagctaaacacacagatgagcctccagaaaaaattgatttatcttgcttttctgggatacttcatcatgatccggatgagaaaagccgcaactgttggacagtacctgatagcaagcttttcaaagttcgtagcaggaaattcccaaatgacaaatcgaaggtct

SEQ ID NO: 277302 - DNA, 551 bp, Zea mays
agctattccaattcgctcggaaaattgaggaattaatgtacaacatgagccctggggagatgcccttccaagttggaatgtcaaaggtagattttcgcaagatgttgaagtctagcttaactggacttgacaagacaatcaatgcaatgtatagaaaactacagaagaatatgactgccgaggaattgctgccttcgctatgggaaaaatgcaagaaagagtttcttgataaatacgcaacattcctcaagttgatttcgaaaatatatcctgacgagaaagtgatatctgtgaacgaaatgagagatactctagcttcactgtagctatttcgttagaaggttcgcatgtccgttggtttgcttgcgcatataagttgacctgattcagcatcatcttaggttcttgatcctcactgaaccaactatctgatatgtgatcccttaccaattatctgattcatggtctgtcgtggaacctttaagggcttgttcaatctatttggattgggtgggattgagtgagtttcaatccaaataagttaaaatctt

SEQ ID NO: 277303 - DNA, 383 bp, Zea mays
cacaaaccacgcagcggaggcgacccacaaaaaacacgcgcggcaggaggaaggcgaggaagcatccccttgttcaattgaccccaccaccgcccgctgctgcttcgtttctagctcgagagagtttagtgggttgcttgattccgaagctccgagctcgtgggattgaattgagcccccccaagatcagaattggagcagcgggttttggtttcctgcttggtgccgctgattggagtacgcttcttttgtggtggttgagaggctgctcggcttccgccgaccatgtccgtgccggcgatagccgtgtacaccagcccgcccggcgccgtctacgcgccgccggagctcgagtccagctcgcgcggctcggcgccgtgcgc

SEQ ID NO: 277304 - DNA, 751 bp, Zea mays
tttgaaataaacaactacaatacagatggctctgctatgcaaccagtaaagcatcctgttgatccaaagacatcagacttggataaatgtgattcaagcatgcatgaaagtaacaaaagcacaaattctcttcaggatagaaatggatcaactcattgcccaccagatggaaatcctctgctcggtttaccatctggaaatgagaaatcatatatcaacagcaacaagcaagattcacagaagcctaaaccccagatggtctgctcacctttgaaagaaaacaaactggattctcactccacaccattaaaacctaatgggtcaaaattgactccacaatcaagacaatacaatgctcaaaatggaggacgacatggcactgcaaagcatgcaattcctagtcctgctgatacttctagtccagctaggaaggacaatacttcaactgcgtatgctctcaaagaagcccgggatttaaagcataaggctaatcgtttgaagggagtacgaaaagagcttgaaagtacaagactctactttgactccgccttaaaatttttgcatgttgcatcacttttggaacctcctagttttgatggtttgaaacaaggcgatgcagcccagagcatgtattcagatactgcaaaactttgcaactttgctggtcacgcgtatgaaaaatgcaagaagatggctgctgctgctttagcatacaagtgtgttgaagttgcttatctgaaggctgcatact

SEQ ID NO: 277305 - DNA, 628 bp, Zea mays
tactcgcctctctctcgcgcaagccacagtagagcaaccaaccataccaccggcccgtgtcgatctctggcctctctcgtgcaaggaattaagcaggcaagaggccaaccttcttccagcatggccaaggcgagcagcaggctgctcttctcgctctcgctcgtcgtcctgctgctcctcgtggagaccactacttctccccatggacaggctgacgccatcgactgcggcgcgagctgctcgtaccggtgcagcaagtcgggacggcccaagatgtgcctgagggcgtgcggcacctgctgccagcgctgcggctgcgtcccgccgggcacctccggcaacgaggacgtctgcccctgctacgccaacatgaagacccacgacggccagcacaagtgcccgtgagccatccaccgtggttcccagcatcagcagctttgccaaaaagacatgatacctacatatatataagagtacctagctgctgctgctctactaccttgctggctcatgatattgtgcgcgtgcatgcatgaataaataaatgaacatattacggcatgtacaatccagatacggctgcacggtactccaagttcaagatacaactgaaacacaacacaataca

SEQ ID NO: 277306 - DNA, 823 bp, Zea mays
agcaatccacagttgcgatttgcgggaacaactactgctatcaaaaactttcgacattcgattatgctggcgatggaaatggagctcctggtccgatttcaatgagagccataggcctccaaaaataggggttcaaaaagggccagagagcaaggagtcatcccatttttagccgttgccgtagctggtcgtcgtcgtcgtcgctgctcccaatctgcggccgtcggtgttgccttcgactttaatccacaagggcgagcagcaccgaccgagccgatccgctcctcttcttggttcttcttcaataaatcagcagagcaggaaagatctgtgagcgttcttgcagccggcaggtgatttgcattttttcaactagggtccaggattacgaaggaaaccaagaacgcaagaaacgtctaagaagaggggaggaaagatttgggtgtagattggtagatatattacacaggttttgttttggtgtaggttattagcaaataaatagctggagaagaagcctggcaaaaaaaaggtgaaatttgtggagaacatgtttgggatccaaaccagggatgtggcagaagatttcaactcctggaggaggacattaaggaacacacccaccgtctcaatgcccatgaacaaccacaacattatgtacaacacaggcaagagtctgctcaatgtacacctcatgtctgtcaagtttgaagacctgtctggattcatggtggtgggcattgtggaccatgtcaatgtgctgaacgaggtgcgggagaggatcagggagcaaggcagggtgtggtgggcgctggaggcaagc

SEQ ID NO: 277307 - DNA, 696 bp, Zea mays
tcgtcactcgtccagaacaactactactatcaaaaactttctacattcgattatgctggccatggaaatggagctcctggtccgatttcaatgagagccatcggcctccaagattaggggtcaaaacgggccagagagcaaggagtcatgccatttttagccgttgccgtagctggtcgatgtcgtcttcgctgctcccaatctgcagccgtcggtgttgacttcgactttaatccacaagggcgagcagcaccgaccgagccgatccgctcctcttcttggttcttcttcaatagagcagcagagcaggaaagatctgtgagcgttcttgcagccggcaggggtccaggattacggaggaaaccaagaacgcatgaaacgtctaagaagaggggaggaaagatttgggtgtagattggtagatatattacacaggttttgttttgctgtaggttattagcaaataaatagctggagaagaagcctggctaaaaaaaggtgaaatttgtggagaacatgtttgggatccaaaccagggatgtggcagaagattgcaactcctggaggaggacattaatgaacacacccaccgtctcaatgcccatgaacaaccacaacattatgtacaacacaggcaagagtttgttcaatgtacacctcatgtctgtcaagtttgaagacctgtatggattcatg

SEQ ID NO: 277308 - DNA, 499 bp, Zea mays
gcgggagggaggcggggtttttgcgtgatttgagttctccggttttccccacgctcccgccatggtgtccgaccaggagatcgccagctgcgtcgagtccgtcctccgaggctccgccggcgggcccggggaggtctcgctcaccgccgtgctgcagcaggcggaggccacgctcggcgtcgacctctcccacaaggcgggctttatccgcgaccagatggacctcttcttcggcccgcgcctccagccgcagccgctgaccacgccacagctggcgcctcccccgcctcaggccgtcgttgcccccgcggacgccgtgcctcagcctcagcctcagcatcaggttctgccgcaggcaccgccttcggctcagcagatgcagccgcagccgcagcagctcgcgccgcttcagccgcagctcatgttccagaccattcaccagctccccgccatctctcccgtccctgtggtctccgcgccgccggccatggcgttctac

SEQ ID NO: 277309 - DNA, 693 bp, Zea mays
gcagcgccggccatgatcgagacaggatgacgtccccgccgacgccgttgccggcgctggcgcgccaggccatgcagtcgccgacgccgccgacaaaggtgggaccaccgtcgctgccaccgccgccgctgccggccgtggacgcggccgtcatcatgggcgtgctcacggccgtgctgctggcgctcttcctcttcctcatctacgccaagcactgcaagcagcgcggccccggcgagcggcccggcggcctgagactcggcttcgcgccctcctcgtgcgaccgctgccgctcggggctcagcagctccgcggtgggcgcgcttccggcggtccggttcggcgacggtgacgtcgacgtgggccgcgccaccgagtgcgcggtgtgcctgggcgccttcgacgccgccgagctgctccgcgtcctgcccgcctgccgccacgccttccacgccgagtgcatcgacacctggctgctggcgcactccacgtgccccgtctgccgccgccgcgtcaccgggggccacgtggacgactccgagccggaggactcggcggcgacgcggcagcacggccggcgctcggcggacgacgcggaggtacaagtggttgtgcaccgcgcgtgggaccagcggtagtccaccgaaggcttggtgggccgggccgcgtacctcgaggccgccaggcatcgga

SEQ ID NO: 277310 - DNA, 763 bp, Zea mays
cccacgcgtccgcagtgttctaatgaggacctgaagaaaggctttgctttgaaggtggagccgttgaatgcatttattcctttcgagcagcagatgatggacctatctcacaggaagcaagagaatgctgcctgtgacgattcatgctctctctcaaaactaatgttgaaggaggatattgaggctgcacccagcctgccgacgggcattcaagtacagaatggctccaagaaccgcaggaggaggcagcccaacgtacagaagaccacggcgactccaacaaggtcgcctgcacggggtcagcgtcgaaagaacaacgatgccatggtcaaatcggagatgggcttgattgagcagagtaaacttgtgctgacggaacaagagccagagctgggagacgttccggtgaagagacccgttgggaggcccaggaaggctaggaacggacctagctcagatgacccgggcacccctgcttcgtatgcttgagctccgtttggcttggattccggcgccttttccagtttcctgtgacttctgtacagtgcaagccatcttaacgccgccaaggttaacttatcgaaacatttggagaacctggaagcaaacggcgaagtttttccgtgtgcgttaatgtttcacagaaggggagtccgaggaaaaaaaagttgccactacgcagcttatggactggttttttttgtaggatgtattgacatcattgtaccaaattaggttcatataatcctggttgatagatttt

SEQ ID NO: 277311 - DNA, 646 bp, Zea mays
gttagatccgtagcgccgccctttttttttttttttattttttttttttttttttgggttgggttttttgttttttgtgttttttttaaataccatcagaagcgccaacaaaatacttgcatttcaagcatttgaggcacatacgtaagtattgcagagaccaagttcttactctgatcttagtttttttgcaagtgcgcaatccctcaccatacaggcaggaaactgggaacgagatgcaactttctcatacaaattgggttgcgatacagaatgcatgacaacacacattatctttgacagcaaactgcagcatccaccagctggtcagatcagatttgtgactgacggagatcactcgggcggaaacaaccacaccgggaaaccggagctctgctctggtgcagaaatgctgcaaggcaatggctcggcgatgaaccttgtcttgccatccatcatgttgtacacgaacgcgtcgtgagggttgtaatggtcaggaacaaagtagataaggtcaccttcaactccacggtactgaccagcaggaaaggacttgcagccgcctgaaccaacaaagacgcagtcgccaccgaagctgtggatctcagtgaggctatttggcttcgcgatcgacctgaacacgaag

SEQ ID NO: 277312 - DNA, 507 bp, Zea mays
ggtagacgctgtgccactttcaagtgctatggacctgggttagagaaaatatggcgcgtcaaacttagatacgctgaagccatatactttcttgggacagattttatcaacagagattcatggatcctgtccataccacctactgatgctgaaacattgctatcagtttgaatatatagaatcctcagagatcatcaaagatcatcatctaccactaattaataatgagccaaattaaataagttttgcgtatatattttatccctatctataaattatgcatgtgttgtaaacaagtcgtggatgggcttcatttgttctcgcgattgaaaaataacaaataaacaaagtagaaaagaggatgaaccagaagtcttgttcagcaagaaggaaggaggaatgacgatatttcccatgtgatacttgtaaatcatatgtgtaaacttcgtgggcgtgcttgtaatttcatacgaagttgtacctccgcataaatagagtaacagtgtc

SEQ ID NO: 277313 - DNA, 1060 bp, Zea mays
actggcccttctggtaattcgttcgcgaacatatcaaacagcacacaactggttacgacaaacaacttgccattacagtctcttgagccaagcaaccaacaacaccttggtcggctgcattcctctgcagaccctttcaactcatttgttggtgagcccccccagtttgcagatcttggaaggtgcaacaccacctggccaaccgcggtctcatcatccaatgttcaggagattggccagaaggacaggatcgtgaataggcccaagcttgagcctctctcaagctttacagatgcatccagtcagatccctttgctgggaaatgaaatgcagagccaccaagtagcatcactagccagcaacggtcttccgatgccgttcactcaggaagcggtgcccttcgcttatggaagcagcacgaactcgagagagatgctgaataacaaccttgcgcttagtaattcaggcgtcaactctacattgccgaaccttcgcatagacggttctgttgttccagggcagacactgggtggtagcaattcaggtggtggtggtgtcccccctctgcaagatggcaggattgatcaccaagctgtcagcagtcatctaaactacaacaacgaactcatggggacaggtaggctgcaaaggggacttagtggtggtctggatgacattgtcgtggacatgtttaggccggaccgcgcagacgatggcgtctccttcattgatggggactgggaactggtctagcaagtttcagttctctacatcaagtctgccttcgtgtgagattttccgcatttgtggttgtggaggacgggttcggcgcttgattggtccaaagttgtttatagtagcaagattgcatcacaaatgccctttgcatttggtttttcagtttagcgaccaggttccagtgtcacgtccgaatatcaactatgtggtatttgctaccttaactcgtatggctatgttttcaagtcaggtgttaactgtggctatcgtgatatatacagcatggttatgagccaaggaatgctgtcctgtttcctcttgg

SEQ ID NO: 277314 - DNA, 755 bp, Zea mays
cccacgcgtccgagtccactcttctggtcctctcgcttttgcgctcccttggtcgtgttcgtcccctgctcgtctcccgtccgttttcggatgcccactccgaccaaaaccctagctacttcgtgaaggtggaggggaggagatggcggcagcggatgggcgcagcggcgacttccgggtcaggggtggcagcgttgggggtcggatcgaccgactggtggtggagaacttcaagtcgtacaagggtgagcagacgattgggcctttcgtcgacttcacagccatcatcggccctaacggcgccggcaagtccaacctgatggacgccatcagcttcgtgctgggcgtgcgctcaacgcaccttcgaggcgcgcagctcaaggacctcatttacgccctcgacgaccgcgacaaggaggccaagggccgcaaggcttccgtccgcctcttctactgccaacccaaccaggaggagctctgcttcacccgcagcatcaccggcgccggcggcagtgagtaccgcatcgaccgcaaccaagtcacctgggacgtctacaacgccaagctcaggtccctcggcatcctcgtcaaggcccgcaacttcctcgtctttcagggtgatgtagaatccattgcctccaagaaccccaaggagctcaccgctctcctggagcagatctcaggctctgatgagcttaggagggagtatgacgagctggaggagcagaaagccagggcgaagagaagtctgctct

SEQ ID NO: 277315 - DNA, 731 bp, Zea mays
ccggagctgcttggatcagtgcaaagacttgtacgtgatgccctagatgggagagatggattggagagaagtttggagcagtggctgaaaagtgtctttgggtcagatactgagtcgccatgggatcagatccgtgggttgatcttgaaggacgacaaggatattttcgaggattggatggaggaagcatttgtgcgacggatgaaggacatcgtgcattcagagtttgatatattgggttctagtgttaacgtgaaggaatcaattcatgctatcggtgccaatgctgatccaaaggatgctggagatttccttgcatacctgcggaaatcttcaaagggtggtggtttctggttctcagagtctaagatcaagaaaggtggagttttggcacacttgaaaccaattgctgatgaaaatgatttctgtagctgcctaacatcgtattttgggccagaagttagtcggatcaggagtgcaattgacagtaaatgcaagaatatcctggaggatctgctaagctttgtggagtcacataattcaaccacaaggctgaaggaattggtgccataccttcaggagaaatgctacaagaccatctcgggagtactgaaagaattagaagctgagctcaggcagctccctgcgctgttgggaaccaaaaaggcgggtaacgacatacctgcagcttctattatagcggagaggtctctcttcattggtcgtctctt

SEQ ID NO: 277316 - DNA, 450 bp, Zea mays
cccacgcgtccggtccgttgagtcggcggtcgattccaaagacagcagcggaggcggaggcatccaagtcctctccgctcactttcctgctcgacgcggtcttggccaagctcggttgcgtgctggaccggctacgcgaaaacgacagcgaggaatctgccatgtaccggggcaccatcaggcgccatgtggacttggagactctgcggcgtcggctgaacgcgtcggccggctcgcgcgccgacgatgacagccactcctctgcgcacgagctctatcgcgacctgctgctgctctgcaccaacatcgtggtcttcttcccgggtggcaccgccgagaactccgcggctgtcgaggcccgcgcgctcgtcaccgggcacgcatcggcggtgctccacaagccgaagcaggagaacgtggctgtggctgcgccggcaccggcaagcgccg

SEQ ID NO: 277317 - DNA, 433 bp, Zea mays
cggacgcgtgggcggacgcgtggggacgacgaccacctcgccgccgcccatgtcgtcggtcccggactgcgccgacgccatcgtccccaacagcaagcgacggcgccaccggtcgccgcccgccgcttcatcctcctcctcgcacagcagcagcaccacacagaaagaggaactggaagacgaggaggaggacatggccaaatgcctcatcctcctcgcccagggccccgccgccattgaggcagctagagtaatgccggcaccccgtagcaggccaaagagcacggggagccgcaggttcttggccgccgccgaggccagaggtggtgtgtgcgtgtcgtacgagtgcaagacgtgcaacaggtgcttaccctccttccaggccctcggcggccaccgcaccagccacaacaagcatccgcgacggccagca

SEQ ID NO: 277318 - DNA, 695 bp, Zea mays
gatccaagctagcagctcagctctccactccctctctgtgctgtgctgtgtagtcgttcattcatgcacttggcgttcttgcagttgcagcccccttctcctcctcatccttgtcggggcagttagctaggtgagaatagtgcagtggagctcaacaggccagcgataagcaattaatggaggtagaggcttgctacaactatggcttcctacctgcagacagaggcaggcaccaaccaccacctgcaccacatgccacccttcctcacgctgcagaggatgcaggtgagctgtgggagtacttcccttgccccttttgctacatcgaggtggaggtgcccttcatctgcaaccaccttcaggaggaacattgctttgacaccaggaatgctgtttgccccatctgcgccaacaatctagggaaagacatggctgcacatttcagactgcagcacacgcatcttctcaagaggaggaagccctacaggccaagctcatgccctgcggctgccaccagcccagcaacataccaagtgaactcttactatgacgaggcagaaccacagcagcactacagcaggccatacaaagatcctgcacctgacccactgctctcccagttcatctgcagcgtcgatgcggtccctggtgatgacaacgcccagaaagatgatcagaggctgaagttgaacaac

SEQ ID NO: 277319 - DNA, 634 bp, Zea mays
aagccagtatggcacccctcctgcaaacaaagaggcggttgacgctctgcccactgtccaaatagcagaggctgtcagctgttcagtctgccttgatgatcttgagctagggtcccaggcaaagcaaatgccttgtgagcataagttccactctccttgtatactgccatggctcgtccgccacagctcctgccctgtgtgccggtttgagctgccatctgaagagacagaagatttggatgagcctagcaatgtggacagaacagagaacacccatgaggaagtcagggccgatggccctgaagatgccggtgagagcagtaacagagcgtgggcccttgttccttggttcagtgggcgattctcaacccctgaaccccaaactgtcagaggcgctttcactgatcagcagactcgctccacttctggaaccaacatgaatgctggcgaaagctgatctcttcctcctttgtgaataatgcccatacatctgagaatagcaatggaccttgtcagtagataacttatttttctgtactgataatccttcttggatgaatcgcaaggtacaaagtttgtgacagctccattttttgccaggattttagcgatcatttcactgttgattgatttc

SEQ ID NO: 277320 - DNA, 506 bp, Zea mays
cttcttcccaacccaacagaagcgaagcatctcttctccccccttcccaatcgggctgcggcatatccccttctccgtcctcccgcctgccgccatgtcttcgccttcgccctcgccgccggcgccggcggaagaggagggccgggcgccgaccaagtacgtgctgatcaccggcggcgtcgtcagcggcctcggcaagggcgtcaccgccagcagcatcggcgtcgtcctcaaggcctgcgggctccgcgtcacttgcatcaagatcgatccatacttgaacacagatgctggtacaatgtccccctttgagcatggcgaggtgtttgttcttgatgatggtggagaggttgacttggatttggggaattatgagcgtttcatagatgttactctgacaagggataacaacattaccactggcaagatataccagtctgtcattgataaggagagaaggggtgattatcttggagagactgtacaagatattgctcatgtgactg

SEQ ID NO: 277321 - DNA, 688 bp, Zea mays
aaaacatgcagcaacacccctggcaagataaaagatagatctaagactgaagatgaagaggtgggaaataaaaagcggaggaggaagggaattaggaggaaggatcaaaaaacaaagatgcactatggggaagaggaagatgagtacaaagatgaaccagaagcagatgatgactatgcagacctggcgaggtataatggcgctgacaattcagagagagccccagatcaccttcttgcagctgctggccttgacgattctgatgccgaagatgacatgggtcatcctcaatctgcaatagaacggatgagacgagcttggtcagaatctgaagacgatgagccagtgaagaagccagcagcacaacctaagcccgggcgctgatggtttgagtgaatgaaagaaaccgagatgatgttcttgcagtgaagattaacatgcatgggtctttgctttaggttagcatggtgttgaattggggagattcagaacttcactatacataatgtatagtgaaggactatgtatataccttgttgccaatcttgtttatcgcattagattatggagttgtttaatctgctggtttctgcaatataacatggaatccagtcctattagatggtgacttgtaggtgttttagttgggatgcaaagttttgcacgtcaagtttcagcagttagattt

SEQ ID NO: 277322 - DNA, 461 bp, Zea mays
acggcgccggcgccggccgacccgtgggagatagagccgtcgtcggaggactacacgtgcgtcatctcccgcgggcctaacccgaggacggtgcacatcttcggcgaccgcgtcgtggagggcggcgccggccccgcgcgccgacgccgcggcggagagggaggacagctcgccgcggcagatcaatctgccggcgcgcggcgaccggggcttcttcagcctgtgaatgatcccacccacatccatccacgagcgggcgcgtagactgatgcctaggtaaagagaccgagtttgctgagtgctagtattaagttcagccttcgtgttgcggtattgtattggttgctccgtttccatctgatcagatgatcatagttgtttccctgatcagatgatgtgtactagacgttttgtccaggttgagctgaagctgtgatataaaatttcattacgttggtatt

SEQ ID NO: 277323 - DNA, 902 bp, Zea mays
cccacgcgtccgcccacgcgtccgcccacgcgtccgcggacgcgtgggttcggagagagcgagaaagaggagagagagagggacgggggcggggccggcggaagcggagcctgcgcccgccggaccgaatcctcgccggatcgcccggcctgccggggcggcgctgcggacggcctgatccggctggaatggcggcgggccgacgagggatctagcggaggtgggtgtcgcgcggcaatggctgcggcggaggcgcggcgccggtcagcggtctgggccctgctgccgctgctgctgcggctgctccacccggccgcgctcgtgctggccaacaccgaaggtgatgccttgcatagcttgaggactaacttaaatgatcctaataatgttctacaaagttgggatcccactctggtcaacccctgcacttggtttcatgttacctgcaataatgacaacagtgttatcagagttgatcttggaaatgctgcactatcaggaactttggttccgcaacttggccagctcaaaaacttgcagtacctggagctctacagtaataatatcagtggcactatacctagtgaacttgggaatcttacaaacttggtcagtttggatttgtacttgaacaacttcactggtcccataccagattcattggggaagctattgaagctgcggttcttgcgtcttaacaacaacagcctttctggttcaattccaaaatcattaactgctatcactgcactccaagtcctggatctgtcaaataacaatttgtctggagaagttccatcaactggttccttttcgttattcacccctatcagttttgggaacaaccctaatttatgtggtcctggcaccacaaaaccttgtcctggtgctcctcccttttc

SEQ ID NO: 277324 - DNA, 463 bp, Zea mays
cgagattcgagatcgatttccaattatgagctgcaatgtaaagtgcatctatctgagggaccacatgtgggtgaaaatgagaaccggttatctggcggtggtctaggctatcctttctatgtcactgtccttcaaggtgtctaagtaattatcaggattcaagaagtaccttcttgagcgtcaatatagaccagtgcaaaactcaggaactacacccaattgcaacgggctgatgataataggtgccagccagtccagtttgtgcaaagatctgccccggaagttccctgactgaatatacttggatacgctcatggttctgcttcggtaccgatatatttacacgtcattttgaaggatgagttctggtgagtacatgtatacaattgtcgctgggaacaaaaactaacggtaattgctggtggatttttggcagacagaatataccaatagaagttttgct

SEQ ID NO: 277325 - DNA, 489 bp, Zea mays
  unsure (1)..(489): unsure at all n locations
cggacgcgtgggctaaaaaaaatttatggctgctactgtgctacatatttccaagggcaacaggatctcatcaaatttccaagcaacgacatgaactggtgacaggagcaggaagcgtggatcgcgaccggctgcgacgtcgacgcgcgccgggcggaggtggaggagacgcgcgagcaggctgctccggcgccggtcgagccgtgcctgtcctcgttcgtggacatgtcggagatcttccccgccagcgtcacgctcagcagcggcggcgacgtggacaatagcggcaacaagccagacgaggaaacggtcccgcgaccgcagctgttggccacgacggcgctggtgccggtgacggaaaagaagggcggctacgacgtggcccaccccgaccgcggcacggtgatctcgcgctacaaggagaagcggangaacaggatgttgagcgggcgagccggagtagtggtagctccgatcgacaccacagtc

SEQ ID NO: 277326 - DNA, 704 bp, Zea mays
acttgttcccttgtaaggggtgcggaaaagcttaagtgcaattcaaaaacaaacaaatgtttttgggaaggcaccatcacaattggatagctatttgcaatcaaaggttgatgaatcagaagaaccacctcaattcttgagattcaagaaagttcacaaggaattgctcttacccctttatcggataaagatggagggaacactgaagataataataggactgagtaaataaatgcatctgaagcaggggggtctaaacgctggagcagggtaccttctttgccttcatatgtgccatttggtgagctttacctattgggagattcatcagtcaatacactttcagattcagaatactccaagatgacgtcggtgcagtctgttatatcggagttaagagagcgtttgcagtcgcactcaatgaagtcctatagggctagatttcaaaaaatatatgattcatgcatgtgtgcaaatgctcccatttttactggcattgagcaattgccacaattttcacatctacaagaattaattggtctaacagctactgattctgttgaacttggagatatcgtggaccctcctgttatccgaactgctacttctatccttcctcttggatggactggactccctggtggtaaaaatgctgagccactgaaagttgatataattgggcatgacctacaaatgtgcactct

SEQ ID NO: 277327 - DNA, 461 bp, Zea mays
tcgagcttgaaggaagtggatttgacatgtcccaatcttttaacgttttacttgagcaactgtagctcactggaggtgctgacgcttgattgcccaagattgtccaatctccagcttctggcatgcatcatgttgcaagaggaggaattagaatctgcaatatccctttgtagtgcgttggagttccttaatgtgcattcttgtccaaagatcaatgctttggattttggcagactccgtttgggttgccccagtctgaagcgcatccagagcagcctcatctcataatacagaggctgctaccatataaaggagggcaattcatgcaacaagccgctgttcagagttgaagaaaaaaacaaggggtggtttgggttcctggggactaatatttagaccctacattttatggtcacttagtctctaaattgctgaatatgaaaactaaaactctattttag

SEQ ID NO: 277328 - DNA, 673 bp, Zea mays
taatgtgcattcttgtccaaagatcaatgctctggattttggccgactccgtttggtttatcccagtctgaagcgcatccagagcagcctcatttcataatgcggaggctactgaccatattaaggagtgcaattcatgcaataagcctctgttcaggtttgatgaaagaagcaagtcgggaaaagctctccttgatgctctttgtacatattacccaagcattgccggtatattgcaagccaggggcaacgtggtcctatttatccagtccattcatggttctgtaataagtactttttttttgcaaatttgttttgttgccggagatagcaaaatatctgttcatgtctgtttgtctttgttccttggagtgtaccaatggagctatcagatgtatatgctggtttatatgcatcaataatcttgttttgatctaggatcttggaatcgctttgctaatgcgatctggggggtagttttgcacacctttaattgttcccagattttagcgagtgttatgaagcttaactgatctaaggtgtagttttgtacgactatgtttaattgttcccagattttagcccagtgttatgaagcttaaccaaggctatcccggcccaaaaaaaaaaaaaccaaccaaaaaaaaaaaaaaaaaaaaaaaaaaaaaaaaaa

SEQ ID NO: 277329 - DNA, 419 bp, Zea mays
cggacgcgtgggtgcaagaggaggaattagaatctgcaatatccctttgtagtgcgttggagttccttaatgtgcattctggtccagagatcaatgctttggattttggcagactccgtttgggttgccccagtctgaagcgcatccagagcagcctcatctcataatacagaggctgctaccatataaaggagggcaattcatgcaataagccgctgctcagatttgaagaaaaaaacaaggggatggttgggttctagggacttatttttaggccctaccttttattcttatttaggctcttaaatggctaaatatggaaactaaaactctattttagttttcgtatttggcaatttaggaactaaaatggaataaaaatatagggactaaaagttagtccctagaatccaaacacc

SEQ ID NO: 277330 - DNA, 418 bp, Zea mays
ggcgtacttgcgtttgccgtctcttccctgctgccgtctctgtccggagggcaagccatggcggcgggcggggacggcgtcgctcgccaggcggagctccgccggatcgagggcaacatctgcttcaagaaggcgcgcctcggcgccgccatcgactgctacaccgaggcaattgcgctctgccccgacgtcgccgtctactggatcaatcgggccctgtgccatttcaagcgcaaggagtgggccaaggtcgaagaggacagcaggagggctcttgcgcttgattacactttagtcaaggggcactatctgctggggtgtgcgctactcgagaaggaagaatctgctcttgctatcaaggaattcgaaaaggctctaactctcttaaagtctgtggattcaacgtatgaaatggctg

SEQ ID NO: 277331 - DNA, 539 bp, Zea mays
agctaccaaatctcttcacatcgtcaatccctcttccacagtttctgaaatcagaagggaaacacaggaacgacaggcaattcgaggcgggcaatctaatcgtctgccatcccgtctcatcgttctcccaaatctgagagcgttcccaggacctagggttcttgagatccagccccaggatggatccgaaccctagagctcccctcctcctcgccatcgtcgttctcgcgcttggcgtatccgtggtggccagcgccgaggacgacgcgtcgggggtctctctgggccgccgcgccggggggttcttgcacggcctgaagaaggatgcactggcggagggcgatcatggggtggcactagacgaggttggaccggggctgttcgacgcactctttgccagcctctccatgatactagtcagtgagattggagatgagaccttcatcattgctgcgctgatggcgatgcggcaccccaagtcaattgtgttgtctggtgcactatctgcgctctatgtgatgacagtattgcaactggac

SEQ ID NO: 277332 - DNA, 459 bp, Zea mays
ggttcatcgaagcgaagggaacttgcggcaagagcacctcttgttgtctcaaccctgcaagctatcagcggactaggtgactcagctttcgagaagaaccttcgccagttctttcctcttctcgctgggctcataagctgcgagcatggttctagtgaagtacaggtggccctgagtgatatgttcagcacttgggttggcccactcgttctccagtcctgctgatgctgaacatcatgttatacatagtagtatacatcccattgtgttcctcctttcctccattatgttatgttaatcttttagtcgctgggagttcatattgttgtgctgaactgatcatgcagatcaatttttccttgacgttattttcttgttcgtatcgggaggagtgtatgtcactatagagaactgaattatgtacggtagtttagctaaaattgtgcccattctgttcct

SEQ ID NO: 277333 - DNA, 682 bp, Zea mays
tgctgatattgaggcaagcttttctccaggagtgaaaggatcaggagtcaatggcatagtttatgcttctgagcctttgaatgcctgcagcccgttaacaatcaaggcagtcaagggcccgccatctccctttgcattaattgtaagaggcggatgcacgtttgatgagaaagtgaaaaatgcacaggatgctgggttcaaagctgcaattgtgtatgacaatgaaaataatggggtgcctggtttcatggctggaagctcaagtggcatacacatatacgctgatctcgtttcgaaggcctcaggagaggtgctgaagaaatcttcaggacatactgatgtagaggtgtggatactacctacattcgacaactcagcctggtcgatcatggcaatctcattcatatcgctgcttgccatgtctgctgtattagctacgtgtttctttgtgagaaggcatcgaataaggagagaccaccctagaatcccagaagctagagagttccatggaatgagcagtcagttagttaaggctatgccaagtcttattttcacgaaagtgcaagaagataactgcacatcatcgatgtgtgccatttgtttggaagactacagtgtcggagaaaagctcagagtgctgccttgtcgtcacaagttccatgcagcttgtgtggacttgtgg

SEQ ID NO: 277334 - DNA, 447 bp, Zea mays
  unsure (1)..(447): unsure at all n locations
cttgtttgcgcctcgccgttgattgatgcgctcactcatctcacatgggtgggactctttgctcttggagcaccacctgtctagtgggagctactccagcctctagacaccaactccagcgcccccgtatggaacaacaactccaccctcactgtctggacagcaagattcattcacctgtcatatagtttcatcgatgaatctgaaacttttattgctcctgtgttgcccctatccaaaggtcatgttccttggatcaactgtaaggtgaaccttttatcctgatattatgatgtggttatgtattctatgttctcaacagtaggagtacattctaaagatcataggttagaaatcttgcgccataagatagctgctaaagaaaatgaactaaaaggtcaaaagagacctttggtcgctgntgctaccaagaatgcagatttttct

SEQ ID NO: 277335 - DNA, 573 bp, Zea mays
tttgctggtgtgtttgaagtggatgtatcaaactggtctccgtttatgccaaatggtttcaaatctgtagtgactggagccacagtagtcttttttgcatatgttggatttgatgcggttgctaattctgctgaggaagccaaaaggccacagagagacctacccattggtatactaggaagccttatagcatgtgtgttgttatacgttgctgtatgcttggtcattactggaatggttccatatacattactcggtgaagatgctcctttggctgaggcttttgctgctaagggcctgaaatttattactgtattgattagtattggagctgttgctggacttacaacaacacttcttgttggcttgtatgttcagtcacgtttgtactttggacttggaagggatgggcttttaccttcagtatttgctgaagtacacccaacaaggcatactcctgtacagtctcagatttgggtcggttgtgttgcagcagtcatggcaggcctctttaatgtgcgtgtgctctcacatattctttccgtcggcactctgaccggttattcagttgta

SEQ ID NO: 277336 - DNA, 714 bp, Zea mays
  unsure (1)..(714): unsure at all n locations
aataatttttttttttttttaatgataaacagggacaatttttgtgagacgaaagacaaccttgttcatgcggctacgttccacttcgtagatgggttccatactgcgcattttcacttgtacagattctaaactaaactactacaggatattagaatcaacaagaccagatgtatagctccaagtaaaccatagtcatctttcgagaaagatccatagaaaactgctagtatgtagcaacgagaggtgagaagattacccttgtcctatgctccaactctcaaaggttctccatctggatattgctcttgagtggcacgtactccccaaggtagcctccaaggtgctcatacaatgcagtgcggtcaatctgctggctgtggaaggccttgcaggcgtagtagaagacactctgcacgagcagtcctagcagattgacagagacaagaacgcacaccagcacggcgccgacaagcagccggccaggcaaggccaggccgaagctcccctcctcggtgcgtcccttaacgacagcggcacggaacagcaacgaggtcgcgccgcagaccgcgaagtaggagacgacaagcgtggctgcggtgccggtgcggccctggagcagctgcctgcttttggccatggcagcgagcccgcagcgcggctcgagcacggagacgacgctggagaagtaccacagcgcggcgnacgcgtggg

SEQ ID NO: 277337 - DNA, 742 bp, Zea mays
tctagatcgcacggccgcccttttttttttttttttttgcgagatgaaaggcaaccgtggtcatgcatctctgttccatacttccattccacagattggttccatactgtgcattaccacttatacagattacgaactactacatggtactagaatcaacaagaccagatagccccttgtaagccatactcatattctgataaagatccacatgaaactgctagtatgaagcaatgaggtgagtgacttacccttgtcctatgcttcaatctcaaaggttctccatctggatattgctcttgagtggcacgtactccccaaggtaccctccaaggtgctcatacaacgcagtccggtcaatctgctggttgtggaaggccttgcaggcgtagtagaagacgctctgcacgagcagtcccagcaaattgacacagacaagaacgcacagcagcacggcgccgacaagcagccgcccgggcaaggccagaccgaagctcccctcctcggcgcgccccttaacgacggcggcacggaacagcacggaggtgacgccgcagaccgcgaagtaggagacgacaagcgtggctgcggtgccggtgcggccctggagcagatccttgctcttggccatggcggcgagtccgcagagcggctcgagcacggagatgacgctggcgaggtgccacagcgcggagatgtagacgtggatcccgaggaagacgaagacgaccggacgcgtggg

SEQ ID NO: 277338 - DNA, 645 bp, Zea mays
cccacgcgtccgcccacgcgtccggaggagaggagaggagagactagacccgctagctgaggccgggcggcgcgctggacacgaacatgatggggagaaaggcgctcggctgtgctcctcttctcctcctcttggccgccgccgtcgctccggccgagctcagcgtcggggcggcggctgcctcgggcgcggtcacccgggccgacttccccgcggggttcgtcttcggcgtcggctcctccgcgtaccaggtcgaaggtgcagttgcagaggacggaaggaagcctagcatctgggacacattcacacatgaaggctattcccttgacaacgccacaggcgatgtaactgcggatcagtatcataagtacaaggacgacgtaaagcttctgcatgagatgggtgtcgatgcctaccggatgtcgattgcctggcctcgacttatcccagatggtcggggagccgtgaatccgaaggggctggagtactacaacaatctcatagatgagctccttagctacggaatacagcctcacgtgacgatataccatttcgatttcccacaggctcttcaggacgagtacagcgggctgatcagtcccagattcatagaggacttcacggcgtacgcagacgtgtgcttca

SEQ ID NO: 277339 - DNA, 469 bp, Zea mays
cacggggtggtgacaaggaacaaggcacaacttgtggcaaaaggttatgcccaagtcgcaggtttggacttcgacgagacttttgctcctgtggctaggcttgagtcaattcgcatcttgctagcctatgccgctcaccattctttcaggttgttccaaatggatgtgaagagcgctttcctcaacgggccaatcaaggaggaggtgtacgtggagcaaccccctggcttcgaggatgaacggtaccccgaccatgtgtgtaagctctctaaggcgctctatggacttaagcaagccccaagagcatggtatgaatgccttagagatttcttaattgctaatgctttcaaggttgggaaagccgatccaactcttttcactaagacttgtgatggtgatttgtttgtgtgccaaatttatgtcgatgacataatatttggttctactaaccaaaagtcttgtgaagagt

SEQ ID NO: 277340 - DNA, 387 bp, Zea mays
cccacgcgtccgctcagcagcactgaacagtctcttcgccattgggtgtgccagcggagcatttattggcggggtgatagcagatcacctgtcaaagtacttcccagattcggcacgggtcatgtgtgcccagtttagtgccttcatgggcatcccgttttcttggatcctcctcacagtcatcccccagtcagttgactactggtatgccttcgccgtcacgcttttcttcatgggcatcacgataagctggtgcgccacctcgacaaacaaccccatgttcgctgaggtggtccctcccaagcaccggaccatgatctacgccttcgaccgtgcgttctacggctcattcgcctcgttggctggccctgcagtgcgcctaatcac

SEQ ID NO: 277341 - DNA, 450 bp, Zea mays
gtcctccgtgccggacgcggccttcacgcacgccaacggctacttctcctccatctcgcccctccctccggctctgcctccgctcaccgctcaccactcatgggcgagtaccaccgtccctaccggggcgacctccgctcgccgccgtcctccgtgccggacccggccttcacgcacgccaacggctacttctcctcctccgcctccccgaactccaacaacggctacttctctcccgtcttcgcgaagaatgacgctttccctgggaccggcgctggcgcaggcggcgaccggcggatcgagatctacaccacggcgcctcctccgcacctcccgccgccacccggccacacgctggcgctgcccccgccgacggggtggaaggaggggcgactgggtggaggtggaggcggcggcggcggcggcaggaaagcgggaggtggtgggggc

SEQ ID NO: 277342 - DNA, 745 bp, Zea mays
tccatgcgtccgcccacgcgtccggatttggctgaggatgaagttaaccttggtcaagaaggaacaaaggtccattttggaggaaatatgtgtgccgagaaacttgatggtttaatggtggttgtgtgtgagcacctcaagtcacgtgtagaagaacctgagcgcctaattaaggaatttgtcactttgaaggctatatttaaatcacatgtgctgagggtgcacaaatccaaatttgcacagtttatcatgttttatgcttgttccctgcatcctgagattggcgatggctttgctaattttcttactgatatttttattgacaaggacaaaaacgaggatgcaattactagagtgtctgcagtttcatatgttggaagctatctgtcccgggcaaggttcatttccgtaaatatagttgtttctgtactcaaaaggctagtggactggtgtgattattattgtggccatcagctggacaatggggtgacagcaaatcctataaagcaccagctattttatgctagctgccaggctgtgatgtatgtcctatgctttcggttaagatctattatggactacccaaatcttaaacaacaactttttcgaatgcgaatccgggatatcttggtccacccattgcagccattaaaggtgtgcttgccttcaatagtgaatgagttcctgagacaggctacagctgcgagcctgttccatgcacctgcgatctcaatgcacgaagatg

SEQ ID NO: 277343 - DNA, 521 bp, Zea mays
agataataattacactattacgcaggtacatttgtgacaccctagccctcttagacaaaagaacagaagaagcacctccgagagaacgttcagggacgctaccaagacgcctcaacaataggcaggcaggcaggcaatcatgtatggtactacgacaccaagacgacatactccagctaaggtacttgactcggcgaaaccaacggcgcctgtcgccctactattgcagctatcctacaacatgtctgatatacgcaaaagactcgggttttttctccccacccagcatccttcaattggccatgctcaagctcaattagcttcagcgtccttctctcgacctgagcctgatctatgccgatttctgaggctgctgctgctgctgtcgctggccctgctgctgtgcctggggcgcctgctgctgaacctgcagctgctggatctggagcatctgggagttcatctgctgctgtaggccttcggcatccgaccatcggttacctccccagtcgcgagtttca

SEQ ID NO: 277344 - DNA, 439 bp, Zea mays
ctttttcctaccgttagcttcttgccctttttttttgtcgctgaaggtacgctatagagaatggttacactattacgcaggtacatttgtgacaccctagcccccttagacaaaagaacagaagaagcacctccgagagaacgttcagggacgctaccaagacgcctctacaataggcaggcaggcaggcaatcatgtatggtactacgacacccaagacgacatactccagctaaggtacttgactcggcgaaaccaactgaaaccgcggcaccacggcgcctgtcgccctactattgcagctatcctacaacatgtctgatatacgcaaaagactcgggttttttctccccacccagcatccttcaattggtcatgctcaagctcaattagcttcagcgtccttctctcgacctgacctgatctatgccgatttctg

SEQ ID NO: 277345 - DNA, 574 bp, Zea mays
cccacgcgtccgggaggcctgtccaccaccgaaccaccaccaccccgcgcgccgagctcaccccgatccagatccaccagtcgtccctccggtctgcgacgggcgccctcctcctcgtcctcacgcgcctccggaagccagtgcctgcgcagtgaagcatccatctgcctctcctctcgtcggatccggggccggccaggcggcggcagcatgaagcgggtgtcgtcgcacgtctccctcgcctccgaggcggagatcaacctcgatctgtcgcgcctcatcatcgacaagcccaggttcacgctggagcggaagcgctccttcgacgagccagtcgtggagcgagctctctcaccgccagaacgacggcttcgacagcgtgctgcagtcgccggcattcccctccggcggcttcgactcgcccttctccgtcggcacgcacttcggcggcccgcacccgctcgtcaacgaggcctgggaggcgctcaggaaatcggtcgtctacttccgggaacagcccgtcggcaccattgctgccgtcgaccatgcgtcggaggaagtgctcaactatgat

SEQ ID NO: 277346 - DNA, 989 bp, Zea mays
ttgacacctatcgtcggagaaccacagaatccaccgcatcgcagagacgagtagaggttagatttaggctgaggtaagatggtgtgcatccggcaggcgaccatcgaagacctgctggcgatgcaggcgtgcaacctgatgtgcctgccggagaactaccagatgaagtactacttctaccacatgctctcgtggccgcagctcctcttcgtcgccgaggactacggaggcagcatcgtcggctacgtgctcgccaagatggaggaggacccctccgagccctgccacggccacatcacctccctcgcggtcctccgctcccaccgcaagctcgggctcgccactaagctcatgtccgccgcgcaggccgccatggaccaggtcttcggcgctgagtacgtgtcactccacgtccgccgatccaaccgcgctgccttcaacctctacacctctaccctcgggtaccagatccaggacatcgaggccaagtactatgccgatggggaggacgcgttcgacatgcgcaagctgctccggcagccacagcccaagaagcaccaccaccaccaccatcacggccccggtgggtgctgctcccacgacgcaccagttgcggcgactggttcttctccccagtcttctggttcacccgataagaaggctatcacttgatgtaggactcgtatctacagagaggaatcaccaagtcaattgtactcatctttcctctcactgggtatacaatattgtagttgtagcggtctttccgtagtagaacggagaaagacctgtgcagtgagtatttgtgtacttggccgatggctcgaatcgtctgaccgaatcagcgagaatggcaaccaaatatgcttcgtacttgaaacctgtgttgtttttagacatgtgcgaattttcacagttcatttgattggtgatgcctgacaatttggtcagatctgataccgcggaatatataatgcaagtactgaacc

SEQ ID NO: 277347 - DNA, 408 bp, Zea mays
gttgtagcgagcggtctttccgtagtagaactgagaaagacctgtgcagtgagtatttgcctccttggccgatggctcgaatcggctgacccaatcagcgagaatggcaaccaaatatgcttcgtacttgatacccgtgttgccttgagacatgtgcgagttctcacagttcatttgattggtgatcatggtttttaaagcggtaaggcgtccaaagcgttggaagaccgcttggacgcctaagcggcgcctaggcgacccctaagccaggtaagccggcaagggccctaagccttaaaacaccggccggacgcctaagcgtcgcctaaaccaccccttaaaaacagaattggtgatgcctgacaatttggtcagatctgataccggtgactatataatgcaaggttg

SEQ ID NO: 277348 - DNA, 582 bp, Zea mays
aggattcggctcgagctcatgtattcgtgtgtgtaagggcgtgggtgacatcatgggcgcgatccctgtgttgccgatcgccattgagctatgcagtcgacaaccggcgtcaacaattggtaccgaggctcagtgtatattcgacgacagtttcgtgagcccacatcggacgtagtcaccagaaggatcctgtcgtcaaggtgatgtccaagggaacgccaagacggaaggcggagctagaacatctggtgctcatgttgtccacaattaatgccatgcacatcgagacgaggtcgctcgacgtcatgacatccagggtgcgcatggctgatcaagttatgcatcttaatgagaagaagatgttccctactgatcacgacaaaggcaacaatgtatgggtccttgacacacgggctagcaatcacatgaaagggagtctcgaggcgctcgcgccactcaacatatctgtgcgcgacacaatgcgtattggcgatggatcactcgttgagattgacggtattggctatatgatgctctagaccaagacatagagctataaagagctcgttgaagtctacttta

SEQ ID NO: 277349 - DNA, 846 bp, Zea mays
ggtacttttccggcagcggcctcgattcgcatctgcttttcctgtccatgcccgcgccggcgggcggtgccagtgccaccgcgctcgcggcggccgtgaacattaagcagccgctgcacggcgcatcgacgctgttcgcgctgctctccctctcgctgctcctcctccgcctgctcctccgcctccgcctggccgccttccgcgacgcggcgctgtcgctccacctgctggcgcgcctccgccttcgccccgtcctcctctgcctcccggcagcctgccacgacggcggcgccggcgccggcgccaccacgctgcgcgtctggtgccccgccgccccatcctccaagccgccgctgctcctcctccacggcttccgcggggacgccaagtggacgtgggcgcgcaacctcccgcgcctgtcccgccacttccacgtgtacgcgccggacctcgtgttcttcggcgcgcagtcccggtccgcgtcgccgctgcgctccgtggcgttccaggcccgctgcgccgccgaggccatgcgcctcctcggcgtgccccgctacgacgtcgcggggatcagctacggcggcttcgtcgcctaccggatggccgccgccgaggccagggacgccgtgggcaggctcgtcatcatgaccaccggcgtcgcggccacgcccggggagatgcgggcgatggcggcgcgcgaggaccgcaccgtcgaggatgcgctgctgccggacaccgccgaggggctgcgcttcctcgtaagacgctccatgcatcgccccccgccttggatgccggacttcgtgcttgacgacttcatgcagatcatgtacgtggaccagaaaa

SEQ ID NO: 277350 - DNA, 431 bp, Zea mays
gaaagatgtggcgctgaatttcctgaggaagtccttaaacaagcttgagaatccaaatgacgtcctggccttattgttagctgctaagatatgcagcaaggagcgccatcttgcctctgagggtgtcgaatacgcaagaagagtaatcgcctgtgccgaatcatcggatcctcatctgaagagcgtcggcctccatttcttggggagctgtctaggcaacaagtccaaggtcgtttcgtcggactaccaaagatctctgctgcagacggagactctcaagtcgcttgcagagtcgattggccttaaccgctacaacgccgacctcatattcgacatgggagttgagtacgccgagcaaaggaacatgaatgccgccctgagatgcgccaaggagttcatcgaggcaacgggcgggtcggtttcgaaaggat

SEQ ID NO: 277351 - DNA, 452 bp, Zea mays
gcatccactggtggtgcccgggtttctaggtgacagtcttagttgaggaacacacttgtacttccagtgcttgcaggacgaccacgagtcctactagctctcgggcagcatcaaaggctggctccttctctgcacaggttgaggacatcacaaacactcacaacagacatgtagtgaagtcatatttgcatgagtgtacatgcctcgagtggcagcacaccggcaaaccttgcccacatgcattggccttgattataacacacgagagtgtggatgtggaattggacgatcctgtgcatgagtactactcagtgcagaggttcaaaagtgcatacaagagaatgactgaaccacttccagataggtctcaatggccattagtggacccgccctatgtggttggtgcaccacttgacaagataggtagcacaaggtacaacttgactgaaaaa

SEQ ID NO: 277352 - DNA, 470 bp, Zea mays
  unsure (1)..(470): unsure at all n locations
gccaccgctttaaaatccccgcagccaccgaacggatacaagagctcgcccacctcgccccccccccccccccatccagctccgaccctagggtttccatccggctcttccggaagcttccgaaaatggccaccgacgagctcgcccacgccgtcgcccccgccccggccgggggcgaccactccccggccttctcgttcagcatctggccgccgacgcagcgcacgcgggacgcggtggtgcggcgcctcgtggagacgctcgcgggggacaccatcctctgcaagcgctacggcgcggtgccggccgccgacgccgagcccgcggcgcgcgccatcgaggccgaggccttcgacgccgcggcctccacgggaggcgccgctgccgccttcgtggaggaggggatcgaggcgctgcagttctactccaaggaggtgagccgncgnctnctcgacttcgtcaagtcccgc

SEQ ID NO: 277353 - DNA, 681 bp, Zea mays
  unsure (1)..(681): unsure at all n locations
ctttcgggccaggagatcgacctggccaaggtcgtggccaaggccgcgggcccgcgcgccggaggcgggctcggcctgccgctgccgctgctcgtgcgcttccccgacgtcctgcgccaccgcgtcgagacgctcaacgccgccttcggctacgccgtccgctccaccggctacggctcaaggtaccagggcgtgtacccggtcaagtgcaaccaggacaggtacgtcgtcgaggacattgtggagttcggcgcgccctttgggttcggcctcgaggccggctccaagcccgagctgctgctcgccatgagctgcctcgccgcgcgcggcggcctggacgccctgctcatctgcaacgggtacaaggacgacggctacgtctcgctcgcgctcatggcgcgctccatgggcctcaacaccgtcatcgtgctcgagcaggaggaggagctcgacattgtcgtcgaggccagccgccgcctcggcgtgcgccccgtcgtcggcatgcgcgccaagctgcgcaccaagcacgccggccacttcggctccacgtccggggagaagggcaagttcggcctcagcgccgcgcagatactgtccgtggtcaccaagctcaaggccatcggtatgctcgactgcctccagctgctgcacttncacatcggctcccagatcccgaccacc

SEQ ID NO: 277354 - DNA, 621 bp, Zea mays
cccacgcgtccgcttttttttttttttttttttaacaacaaacaaaaaaactactatctgagctcaaatttgtacatttagaacgacataatctacttggacctttacagtaaagggcagaatgataattccttggttgtatcattcacaagtagatgcatctcctcctcaagatatgccgatcgtcttccctagcagccacattaccagcgaagaactcgatcataaacagcgcgtgtagccatgtccggtcgacgacgaaaccgaacaccgtgatccccgcccggttgttctccaagtacgtcactagcgcctgcctcttctggaaggagacgttggtggcgtggaaaggcgtgaaccttgaggtgtccacgccgtcctcgctccgccactcgtcgtcgtcggactcttcgccggacgacgcgcccgccatcgggaagggactcgtgggcgtttgctgctgcaggcacgctttgctgggcgtcctggggttctcctggtcacggtccaggctgttgatggtggcgtcggcgtgccacgccgcggcgacgctggtgatcgactgcgtcttgtgcgtgatcttgaccgcgctatggaggcagacgagcagtcccgtgacga

SEQ ID NO: 277355 - DNA, 441 bp, Zea mays
  unsure (1)..(441): unsure at all n locations
agtggttntaatggtcatttctggggtttttgcaacaaacgataaacacgattggagtttgactcaatctgaggttgctgctgttgtatatgctggtgtcatggcatctgctcttaattatgtcctattgacatggtccaacaaaatactgggacctgctatggtggcactttatagccctcttcagccagtggtctctgctctattgtctatgatttttctgggaagcccaatttaccttggaagtatttttggaggacttctaatcatctccggtttataccttgtgacctgggcacgccacagagaaaaactggcaagtattggagtaccttatgtaacatgtgtatcggagtcactcgatggtccttctcatgttgcaaagactgtgcccttcatatctctttcaaggctgtgggatgtgccacatgagtcttgaga

SEQ ID NO: 277356 - DNA, 653 bp, Zea mays
ccaaatcagagagttcatggagattcagtcagtaaattacaatggtgatacctaccatttgataagtaaaaactgcaaccatttctgtgaggatatctgcaaaaggttgacaggaaattttattccaaaatgggtgaatcgacttgctagaatgggtgctgtttgcaactgcattctaccagagtccctcaagatcaacgcggccggtcatgacccagcttctcgagctgaagatagcgagagaaaaatgctgacaagttccttcagttgcttctgttcaatctctctatgccaaagacatttctcaacatcttcgccgtctctgcgttccttcgcgaacggcacttcttgggataccaagcagtccaattctacccgactgaaaaagagctgacagttgaggtcctgtgtatcatatttaactcatgaggcccaaggatccttttttgtcagcaatctctttttcgaccttcatcagagaaggatgaagaggttttgattgataaggtgtttttgcatactcgagcgtcggatccagctgtgcttgaacatctgtacaaaagattgtgtaggaattatttcttgcatttgcagttgtaatccagtgagctggaggaaactccgccctagacttttggggttttgtacccccc

SEQ ID NO: 277357 - DNA, 484 bp, Zea mays
accgcctccgctcgccgctccccgacaacctgggcaactcgccggcctccgtcatcgtgctcgccgacaacagcttcggcggatgcctcccggccagcctcggcaacatgtccggcacgctcaacgagatcctcctcatcaacgacggcctcgactcctgcgtcccgccggatgtcggcttgctccgggaggtgaccgtcttcgacgtcagcttcaactcgctcgtcggcccgctgccgcagcaggtggccgggatgcgcaaggtggagcagctggacgtcgcgcacaaccgcctgtccggggccgtcccggaggccatctgcgccctcccgcggctcaagaacctgaccatctcctacaacttcttcaccggcgagccgccgtcctgcgcgcgcgtcgtgccttcggacggtgacaggaggaactgcctgcccaaccgccgcacacagcgcacgccgcagcagtgcgccgcgttctactcgca

SEQ ID NO: 277358 - DNA, 821 bp, Zea mays
agctcgccggagcagcctcccctcacccgccgccggaatcccacgtggcgccgccccgcccacctccgcagcacgccggaagaggatgtatgtgaagatagaggggacatgagtgtcaccggcgaaaagccatgcacacatcgggaatcagatgttggtcagacaaatagttgtagccttaacaattccagtgagtgtgagaatcatacacccagcaacgacgaaatatcggaaccagagtccaatttggagatggccaagactgatcagggcggcgatgcgccgagcggagagaaggtcctgaagaagccagacaagatcctgccgtgccctcgctgcaacagcatggacacgaagttctgctactacaacaactacaacatcaagcagccaaggcatttctgcaagagctgtcagaggtactggaccgcaggcggaagcatgagaaacatccccgttggtgctgggaggcgcaagagcaagagctccagcgcgagttgccgcagcgtgttgattcccgttccaggcagcagtagtgtagctaatcctggcggagaggcttccctgtttccgttgtccgtaaaagcaaaccaagcagcagttagcttcgggcctgattcccccctctgcacctccatggcctccgtgctgaagatcggaggaagaggagagcaggttaagagctgcagccctgcctcagcagcagcacagcccaggaacggagaaacccagacccagacgtgcgcaccttcttctgctgctacaacaccatcagatggtccagggaatggattgcagaaaggagcagagagcgcacacca

SEQ ID NO: 277359 - DNA, 519 bp, Zea mays
cccacgcgtccggttgatcggtggctccggtttgacgctacggctctggatgttgctcaaatatactgcttaagagaacgtctagcatctgctattcttttcaaagtgaaacatccacaagatgttctacctcctgcgcttggagcgtcaatgtatgccatcacatgcatcctttcattcgatggtttgccttctatggttccacctaatgacctttcagcaaaccgaggttcaggccaggatttagcagaagctagcaagttctctcagggaagaagagcgggttatattccacctagtggttttctgatgtccttgttagctgataggacccataatccaccttctttccagaactcatctaaccatccaggaggtggttcagcgcatactcggccatccagggctcctgttggtaggtttgatcgatctcggcgacctttccgcaattctggacctgggagttcagcaccacgttctttcaaaaggcagcgcgacgctccacggtgagcaaggcat

SEQ ID NO: 277360 - DNA, 552 bp, Zea mays
  unsure (1)..(552): unsure at all n locations
gcagtacgagcgatttataaactctttccggtcgctggagcacaatacccgcggcgagcctgactccatcgtcgcgctggccaaatggaggatcctcaacaggttgcacgaccggaacgagacattgtactacagggtgctaattgacaatatcaaggattttgccccgataatatacactcccactgttggcttggtctgtgaaaattacagcggtctgttcagacgaccccgtgggatgtatttcagtgcaaaggataagggggagatgatgtcaatgatttacaactggccagcagagaaggttgacatgatagttgtgactgatgggagtcgcattctaggcttaggtgaccttggtgttcagggcataggtatacctattggtaaactggatgtttatgttgcagctgctggtattaacccacagaaggttcttccaataatgcttgatgtgggaacaaataatgaaaagcttctggaggacatgctatatttaggactgaggcaacctcngctggaaggagaagaatacttggctgtgtagatgaa

SEQ ID NO: 277361 - DNA, 351 bp, Zea mays
aaaaaggcaacaatcaaattgggaaacctggcttggctttacactgacatgttggtaatgacaaatcatcagaccagatctggcattcttggccaatgggtttgtatggccctctcctatctagcaagaaggatgttcatatggtcgagccagcatctatataaaaggtgtggctggtggaaaatggataattcaaaggaaatggaagaaaactggctctagtttagaaccggggtaaatgcaggaggaagtctgcctaatactatttttctgttcattggacacatggacccttggccccaacgcaaaaaaattcagccccaacttgtgaatccggccccctttcccttt

SEQ ID NO: 277362 - DNA, 388 bp, Zea mays
cagatcgcggcggaggccggcgcgtacgcgcggtggctcatcccgtcgctggccgcctacgtgccgctgcagtgccacgttcgcttcctgcagacgcagagcgtggtcctgcccgtggcggccagctgcggcgccacggcgctctgccacgtgctggtgtgctgggcgctggtgtacaaggccggcatgggcagcaagggcgccgcgctcagcaacggcgtctcctacgccgtcaacctcgtggtactggcgctgtacgtgaggctgtcgggcgcgtgcagggagacatggaaaggcttctcgcgggaggcgtttaaggacctgtggcgattcgccgagctcgcctggccggccgccatgatgatctgcttggagtggtggtcgtttg

SEQ ID NO: 277363 - DNA, 1242 bp, Zea mays
  unsure (1)..(1242): unsure at all n locations
acgcgtccgcagggaaatagaagttgcaggattaatttcaagcttgagtacacttacatctggggtagaacgtttgtataagttatgtgctgactgcaangaagcagaagattcactgaagaagaaatggaagaaaatcgaagaatttgacgcccgtcgaacagagctggagttgcatttacagtgctcttcagcgggctaatatggatgcatcatcattttgggagcaacaaccattatcagctagaggatatgcatcaactacaattatccctgcgtgccatgctgtggtagacatgtctacgaactcaagggacctcatagagcgagagttagctgcatttagccagagcttggataatagcttgtgcaggttgccagcaacccctcaggcccttttggaggctgtgggttctaacggcgtgacaggatcagaagcacttgcagctgcagagaaacatgcagctttgttgactgcaagagctggtgccagagatccatctgctgtgccgtctatatgccgcatctctgctgctcttcagtataactttgtttcaccaggtacagaaggcacagattctggtttggcttcagtattaaattcactggagttctgcctaaaaccatgtgggtctgaagctagcatattagaggatttatcaaaatctatcaacttcgtgcacacacggagaaatcttgttgagaaatgaccgtgttttgctgaaccgtgcacatcgtgctcaacaagaatatgaaagagtggccaactattgtcttaaattagctggcgaacaagaaaagcgggggggtgaaagatggcttccggggctgagaaatgcagttcaagaagctcggaggtgttttgatgactgccagcgtgttaggggcctggttgatgagtggtacgagcagccagccgccacaattgtcgattgggtaacgatagatggacagagcgtgggtgcctggatcaacctcgtgaagcaactccacatggagatctccagacggacgctggccatgtcatcggtaggagacgactgaagcaaccagccgtgacctgcggctttggaagttcggaggctcctttatgggttcggtttggcgccaagatatcttctatctactcgatagccttttcccattgtagtttatacgtctctctctctggtttggtctgtaattagttcctaacatgttcctttagtatgttgtcaattgtcatgtgctggttgccacttg

SEQ ID NO: 277364 - DNA, 417 bp, Zea mays
  unsure (1)..(417): unsure at all n locations
agcgtgggtgcctggatcaacctcgtgaagcaacntccacatggagatctccagacggacgctggcaatgtcatctgtaggagacgactgaagcaaccagctgtgacccagctgtggctttggatgttcggaggctccgtgtgatgggttcggtttggcaccaagatatcttctatctactcgatagccttttcccattgtagtttatacgcctctctctggtttggtttgtaattagtttttttgtatggtgtcaattgccatgtgttgaatttgtcatttgtcacaaattatcggtgttggtgttgtggctttgctgattgggctgcacgtcccgacgtgccgtcctgctgttagttgtacagggtcgcgcctcacctttgagtgttcaagcagtccgtgaattatctcagttat

SEQ ID NO: 277365 - DNA, 1399 bp, Zea mays
cggctcgagtaaatccgcgccaaatcgtcaaaccaaaaccaggccgcgcccgcctcgtcagtcctcagtcctcactttcgggccgagctccggatatccagcggcggcaatggcagccgaagccagcgccgtccagcagctcgctggcctcctggaccaagtggacgcgccgctgaagaagacatttgagaatgtgcatcagggctacccaacagagacattattgcgtttccttaaagctagagagtggcatgtgaataaggctcacaggatgcttgaagattctttgaattggaggatgcaaaatgaaatcgatagtatattggagaaacctattatcccagtagatttgtatagatcaattcgtgatacacagcttattgggttatcaggatactccaaagagggcattcctgtatttgcagttggtgttgggctgagtacatatgacaaagcttcggttaactactatgtgcaatctcacattcagatcaatgagtaccgagatcgttttattttgcctacagtgacaaagaagtatgggagacctattaccacctgtataaaggttctcgatatgactggtctgaaattgtcagcactacaccaaatgaagattgtgactgcaatatctacagttgatgatttgaattaccctgaaaagactgagacctattatatagtaaacgctccatacatattttctgcatgttggaaggtcgtgaagcctctgttgcaagagagaacaaggaagaaagttcatgtgttgcgtggctgcgggagagacgagcttctacagatcatggactactcctccctcccccatttctgcagacaggagggctcgggctcatccaaacattcgtcaggcgactccgataactgcttctctctcgaccacccgttccaccaggagctctacagcttcatccaggagcaggcgctgaaccaggagctcatcaagcagggctccttgcacgtgaaaatccccgagcaggaccctgaggacgcaaagatcgtggaggtcatcgaggccgagttccacaagcttggcgtgcagaacgggtccgccaatggcatcgaccaagcatagcacctttgtctaataaggccagcctgattcaaccgagacgttgcttgccacttctgatgcaactaatcctactgtttattttttttggtggggtgggcccacccccgttgctgtttcctggggggaggggggtgattggtattggtggtatacatagcaaagtcatttgcagatccatccatgatgcaggactgagatagacgatatcacctgtgtaaacttgcagatttgcaatgtgtcctcatctcatatgtatgctgagttgagatgaaatgaataaatcatcctacaagttttttttgagtc

SEQ ID NO: 277366 - DNA, 635 bp, Zea mays
  unsure (1)..(635): unsure at all n locations
tgcttcctagctgtagctagaatgcatagcgttatgcttttatcagctttgcttggcctctacatcacacaagttgtctgccttgagggcattcattcatgtggccaagtgttggtttgtgatctcccttgctggtgaattcnctggagaccctccgccacagaagaagaagtccctatctaaagcttatcgtatatacaaaattaaagtacttctgatttattaaagtataattatttgctcgtgcaaagacaatttggtcatttgttctctctcttaagcttagttcttgttaacaattaggccttatggatgaagcattgccaatctacccgtcaaatgagtcttctctttgctttcatgatacaagagttcagttagacatgtcaatctgcaagtactgaggcaatgatatggttcaatagattgaggacctgcgaaaaaaaaaaaaaaaaaaaaaacatactatataaaacaaacaattaagaaagaagaatgatataaatacaataaaataaaaacaaaactaacaacaggagatccaaatactgcattgacaggtcatagatatgttcagctaacattactagctcatcatttggaccttctaaataagttcaccttacatcaaatgg

SEQ ID NO: 277367 - DNA, 348 bp, Zea mays
gtcaatggtcattgcttcattggtcaaaccttgagagccccggttcagcaatcgcagtcccgcaaggcggcgatggacggcggcggggtcgatacggccacgacggcggcctggatggagaagcaccggcagatgtacgagcgggccacccggcacccgttcaccgtctccatccgcgacggtaccgtcgacatgtctgccttcaagcgctggctgagccaggactatctgtttgtaagggaatttgttgcattcatagcaagtgtactgctcaaatgctgcaagcaagaagacagctcggacatggaaatcatcctgggtggagtagcgtctatcagcgacgagatc

SEQ ID NO: 277368 - DNA, 615 bp, Zea mays
tctgttctggtgattggatatataatgaaaatattctgtgaggaagacttcgcaaggagatgtggttctgtcgctgtcgtgtctgttgccgtgtatggagacgaggacaagccagcgcttataatgtttacagaaatgtggttctgtgactgttgccgtgtactcaggctttatttcaacaggatttaaatatgagatgtagagtgattgatgtacatcacttcactaatcatgaaatctgtagaaggcgaaactactagccatatatgatatgcataatccgtgtggtaaacattatcaatatcccccaaattatttctaagctccggcggagaagaagcccaaggccgagaagcgcctaccggcgggcaagtccgacaggtaaggagggcggcgagggcaagaaggggaaaaagaaagcgaagaagtccgtggagacctacaagatctacatcttcaaggtgctgaagcaggtgcaccccgacatcggcatctcgtccaaggccatgtccatcatgaacttcttcatcaacgacatcttttagaagctcgcggtcgaatcccccgagctggcgcgctataacaagaagcccaacggcaccttctgcgagatcc

SEQ ID NO: 277369 - DNA, 636 bp, Zea mays
gggcaaagggcctcgcctatcttcacgaggagtgcatgaagagagttgctcacttggacgtgaaaccacagaacatcctcttagatgacaacttcgacgctaagctctctgattttggactctgcaagctcatcgaccgggataagagccaagtggttactagaatgagaggcacgcctggatatctagctccagaatggttgacgtcgcacatcactgaaaaggctgatgtatatagctttggcgtggttgtgatggagatcatcagtggaaggaagaacctggacacttctcggtctgaaaagagctttcatcttattaccatgctagaggagaagttgaggagtgatcgcttggtagatctgattgatatgtgcagtactagtgacagtcaggcacaggagcaagaagcaattcagatgatgaagctcgcaatgtggtgtttgcagattgattgcaaacgaaggcccaaaatgtccgaggtcgtaaaagtcttggaaggctctatcactgtcgaaactgacatagatcataactttgtcgtgacaaatccaccaagctttagcgctcctagaattgtggtcatgtcagctccacctctagcttcagaagtgtcaggcccaaggtgaaattcct

SEQ ID NO: 277370 - DNA, 377 bp, Zea mays
tcgtccacgcgttcgtccacgcgtccgcaatcgcggagaggcaatcaccacgtacgtatacacacgggcacgtaactagctagctagctagcagtcgtagaatgacgatgaggggtctctctgttgcggtcgctctggtcgtggtggtggccgcggcctgccttgccgcgccgcggggcgcggacggcgcggccgagtgcggtgcgacgccgtcggacactgtggcgctgaggctggcgccgtgcgcgtcggcggcggaggaccccggctccgcgccgtccggctcctgctgcatcgcggtgcacgccatcgggaagcacagccccaggtgcctctttgccgttatgcttgttcaacagctgctgaagcacctgtat

SEQ ID NO: 277371 - DNA, 344 bp, Zea mays
cccacgcgtccgcccacgcgtccggctagttagcacctagctgtcgtacacacgggctagcagtcgatcacagaccgatcgcggagaggcaatcacgtacgtatacacacgggcacgtaactagctatctagctagcagtcgtagagtgacgatgaggggtctctctgttgcggtcgctctggtcgtggtggtggccgcggcctgcctcgccgcgccgcggggcgcggacggggcggtcgagtgcggggcgacgccgggggacacggtggcgctgaggctggcgccgcgcgcgtcggtggcggaggacaatgggtccagtgcgtccagctcctgatggatggcg

SEQ ID NO: 277372 - DNA, 513 bp, Zea mays
cggacgcgtgggtccttgagtaccttaaagattgaagaaacaaaaaaacaagtttcagcacaaggttccaagtcagcacaaacatcaagcaaggcccctgcaattacagcgccaaaacctacagcataccgcccccctcatgctaagggttctgcagaacttcaggacaagctctttggtggactagctcctgctgggggggagatgagcaaaaatgcattgcgaaacaagaagcgcagagagaaacagaaggaaaagaaagctgctgaagcgtcaggctctcctgctgatgaaagttgatctgtgccggattactttcagcattgccaaccaccgagtataacagtgacaaatgatttctttcaatctggtgaaacggccatgcaccgattcacgtttacaatatgaaactttttggtagtttggtgcagacactcggttattttttcagaactatactgagtttgtataaccatagcgaagaaacataaaaagtgagctatttcatatttt

SEQ ID NO: 277373 - DNA, 1302 bp, Zea mays
cggtcgcgtgggcgcgccacagcagcctcggcgctgcgtttctgccttcccggtgagacaaatggccgccagcgccaccgacgccgacgccggcgccgggctcagatcggagttcctgcaggtcctgctcagccgccgccgcgatctccaagtgcctctctcggtggagcaagggagtccggtgaaggacccgatgtaccagaatcctccgtccaccatggaggcaaatccgatggagtcgtgccccagtaaagatgtggagaacttgagggagaagctggttgaagaaaatttctacctaatcactgagctaggtgaacaaggacgagtacctgtacttctgctgaagcttgacgaccccgttcctagaagaaaaccagctttcgtgttcctgcacagctcttacaagtgcaaagagtggctgcgcccactgcttgaggcatatgcttccaagggctacgtctgtgtggctattgactcgcgctatcacggcgaaagggccagcaatgaaaccacttacatagaggcactgaaatcggcttggcggaatggggatacaatgcctttcatttttgacacggtgtgggacttggtaaagcttggagactacctcggcgagagggaggacgtggatccctgtagggttgggatcaccggcgaatcgctgggagggatgcacgcgtggtttgctgcttttgtggacacacggtacagtgtcgtcgttcctataatcggtgttcagggattcaggtgggccattgacaacaacatgtggctggctagggtgaatagcataaggcctttatttgaagaagcaagaattgacttaggaaagagcgaattagatacagaagttgttgaaagggtttgggaaaagatagcaccaggcctggactcgcaatttgatgccccctattcacttcctttgcttgcaccacggccgctgctacttctaaatggcgctgaagatcctcgttgcccaataagtggtttaggagaagctatttcaaaaactgctaaagcttacgaagaatctggttgcgcggagaagttcatgttcattgcagagcctggagtcggccataaaatcacaatcgacatggtgaaggcagcaagcgaatggttcgatcgcttcctgcatgcatgaatgcaaaagttattgtcgcccatcatttgttctatatcgattgtgatttgtcaacagcatccagtatgtatgtcctcgtctatgtaccttagtaattgcgggtcggacaaatatctgtatctatatctttagtatattaaagcactagttttgac

SEQ ID NO: 277374 - DNA, 760 bp, Zea mays
atgcaaagtccctctccaatatgataatgagagtgcaatccgcttggcggataatgccattgaacacagccgcactaagcacatagacattcggtatcactttctgaggaatcatcagcaaagggggatatcgaaatagcttatgtaaacatcaagaatcaactagtcgatatctttaccaagccattagatgagaaaacctttagcaaacttaggaatgagctaaatatacttgattctcggaactttgattgaaacattgcacacatagctaatttatatacctttgatcatatctctttcattttggtacaaatgcatatttcttattattcttgcgccaagactacgactaatatgtttccaagtgtatttctacactaagtcgtagattgaaagggaattggagtatttgacgaagataaggcttccactccactctaacggtatcatttacccttcgtcgctactccgctctctctccaattggcataatccttcactctcatttacttgtaccaattggacaaaagtaaaaacgggctctcaaagtctccgttttcggcaattaatgccaaaggagaagatattaagcccaaagcacaaaggaccgcaccaccatttcaaaaaatttcaaaataaagttttaatcgatgattttcacattggtatccacacaatggacatctcttcaattggtatctttaaaggtagattttcaaaattggaatccaattctctagaaggtcatctttaaaat

SEQ ID NO: 277375 - DNA, 457 bp, Zea mays
gaccggaggagcccactcctgcatgtaactcggatggctccacccgagagtccgcaccaactcacatcacacctcaccttccactccagaagaagaagccagaccggaatcccgagagccctgcccctgctccctcggttcctcctccgttgggcgtttggccgccgggggtggtgggccgagaccgagatgatatcgtggaacgatgtatacacggtgctgaccgcgatggtgcccctgtacgtggccatgttcctggcgtacgggtcggtgcggtggtggcgcatcttcacggcggaccagtgctccggcatcaaccgcttcgtggccatcttcgccgtgccgctgctgtccttccacttcatctccaccaacgacccgtacgccatgaaccttcggttcctggccgcggacacgctgcagaagctggacgttctcgcggggctggacgcgtgct

SEQ ID NO: 277376 - DNA, 1276 bp, Zea mays
caattggctactgtctttttcacattttcccttggcactaagactcactactatggaagaatgttgcttcatggaggtgctcagtacagaggtactggcaggggatttgtcgtctttcatgctaagtttgcagagaattatagactctattctcgcagccactttgttaaagggattgagctgatgattctgctcattgtataccaactatttggtcaatcttatcgctcaacaattgcctatatttttattaccttctctatgtggcttctggtattgacatggctatttgcaccctttctgttcaacccctcgggatttgagtgggcaaaaattgctgatgattggtctgattggaacaagtggatcagcaatcgtggtgggattggtgtgtcaccagacaagagctgggaatcttggtgggaagtggagcaggatcatctaaaatattcaggaacaataggacgctttgttgagataatcttggctatacgttttttcatataccagtatggccttgtttaccacttacatgtcacacataacaaaagcatctcggtatatttaatttcttggctcgtaattgtggcggttctgctcgttatgaagactgtgtcggtgggaaggcggacattcagtgcagatttccagctattcttccgtctgatcaagtttttgatatttgttgctttcattgctattttgattgtcttgatagtattacttcatatgacctttcgcgatatatttgtgtgctttctagcattcttgcccacaggatgggggatacttctgattgcacaagcttgcaagcctcttgctcgacatgtaggattatggggatctgttcgtgcccttgcacgggcctatgagataattatgggggtgcttctctttagtccagttgctatattggcatggttcccctttgtgtccgagttccaaacgcggatgctgtttaatcaagcgttcagtagaggactgcaaatttctcgaattcttggtggtcaaaagaaggaacgctccgctcgtaacaaagattgattagtcttctttcatgtgtgttccaatatgcacttgtaaatatttgttactgtctcacggggtatagtgtgtttttatgattacaatatgtaaatatcagatcaaggtgtcataattgtattcgttagattactgtgtgtgtttctattgtaatagtctttgatccagcacatgtacttttcctacatatatacgcaaaatctactctaaaaaaaaaaagaacgaaggccgt

SEQ ID NO: 277377 - DNA, 491 bp, Zea mays
cggacgcgtgggcggacgcgtgggtcgtcgtatgcgaaactggagctccaaatatggaaaggctgctgaaagcgatttacgagctgtacacagacttcgttctgaagaatccgttctatgagatggagatgccgattcggtgcgagctgtttgaccacaacctggctcaggtgatccagaaggaccgtgttgcgctcctgggtcggtgaaattggaaagcttttggtcctaaccataccatgtatcttgtactcctgggtaggggaccgaagttgtcgaaacaggctcccgacgcgcatcaagacatcaccagcatgggcgatggtaagtagggatcgagggggtggctcgtaataaggatctctaccttggaaaattcagtgagtatatatgtatcctttggcctttgtatatgctaaacaacacatattccttagcactgatttgatcgaaggatgttgtgtcatgcgtaatcaaaggatgttcaattc

SEQ ID NO: 277378 - DNA, 462 bp, Zea mays
gccaagaagtccaaggccaagaccagcgccgcgccgccaccgtcactcctcgctgccacgcccatggctgccgccgccgccgccggcggtgctttgctcctcaacaggatgctctgatctggtctggtctgcgttgctgcgtatgtagtcacgtcacgtggctccagatcttgcttgggcgctgatgagctacactacactacactagtttttttctgctgcttttagtttttttcccccctcaccccttgagattggggaggcctcttctgcttctagcatgcttgcttgctgcttcttgaattgcgtgactgttattggttggttcttgcttccattattttgccctttttttttttcttttttctttcttgcttccagcttgttgttgatgcagtttttttttcaagagacaagattagtataatgtcaagtgtgaatgaagagctctatttatttatc

SEQ ID NO: 277379 - DNA, 1493 bp, Zea mays
ataagactagtgtttttgaccgtctcattcagttaataggatctgctatcgagaacgaggatgacaatgacaaccttgcttactggctctccaatacatctagcttattgttcctactgcagagaagtctcaaggctgctggtgctcctggtagcgtttcacgaaagaaacctcctcaaccaacatcattatttggaagaatggcccaaggcttgcgttctgcatcttttgccaacatgcatgttgaagcgacagatgttgtgcgccaagttgaggccaaatatcctgccttgcttttcaagcagcagctaactgcttatgtggagaagatatatggaatcgtccgagacaatattaaaaaggaattatcatctttgatttcgctatgtatccaggctccaagaacaatgaaagctagcatgctgcgagtttctggacgattatccagtcaatctcagagtcagagcaaccactggcagaaaatcattgagagcttggataagctcttgaagatactgcaagataaccatgtgcctccggttttagctcacaataatatttacccagatattttcatacatcaatgtccagctattcaacagtctattgcttcgtcgtgagtgttgctccttcagcaacggagagtatgttaaggctggtctagctgagttggagctgcggtgtgcaaaggcaacaactgactatgcagcatcttcatgggatgagctcaagcatatcaggcaggctgctggatttttggttatatcccagaagttcagaatatcttatgatgagatagtcaatgacctatgtccgatcttgagtgttcaacaactgtacagaatatgtacacaatactgggatgacaagtataatacccaaagtgtttcatcagacgttcttagtaacatgcgggtgctaatgacagaggattctaacagtgatgaaagcggttcgttcttgttagatgataattcgagcattcccgttctccgtggatgatatcaccaactcaatgcatgagaaggacttcacggatatcaaaccggctgatgagctactcgagaaccctgccttccagtttttacaggattagcgctagtgaagtcctcgagcattttatgctgctagatatcttgtcagatcatttattgatttgttgtatattttttggatcctttctaccacatgtgcctttttttagttatcttatccttttcagctagcttttgtaaaaattcatataggtatttgttagggttgggatgggattccgcccttacagttagaaaaggccttatcttttaaagcggggcaaatgattctttgtagggcaacatgaaatcaatctttttacccaagggtgtggtgagaaggggtagatgcaatgtttgtagcctcccagttatagattgtgtaaattatatactgtaaatcaacagtgcaatggaaaaaaaagtacccccctatagttagtgcaaccctgcccatat

SEQ ID NO: 277380 - DNA, 1178 bp, Zea mays
gtgcctacgcgtccgcagcagtcgagcactccaccatccagcttcgcatcccgcaagttcccagtcagccgagcagccagcggcggtgccaagaaggccgagctgcgagctccactccccacacctcagaagaaaaaggtgatggcgcaactgccgccgcgggcgccgagcgccgcgccgcaggaccactggccgccggcggcgggggagttcctgggcttcgccgcggccaggcgcggcgcgcaccgccgctccgcgagcgactcggccgcgttcctcgaggccgtgcccattgacgacgacgtcgtcattggcggcggcggcggcggcggcgacgacttcgaccgcctcgaccacgaccagctcctgtccatgttctccgacgtcgacgtctccgtctccgtctccgtctccggcagcgccggggagagggcgcagctcatggacgcggggggtgcgggtgcggacgacggggtggcggactcgtcgccggctgccgcggacggcgtcgctgagcccaaaagggtcaagaggatattggcaaacaggcagtcggctcagaggtcacgagtgaggaagctgcagtacatctcggagcttgaacggagcgtcaccagtctccagatggaggtgtcgccgctgtcccctcgcgtggccttcctcgaccaccaccgctcactgctcaccgtcggcaacagccatctcaagcaaagaatcgcggcgctcgcccaggacaagatcttcaaagacgctcaccaagaggcgctggagaaggagatccagcggctgcgccaagtgtaccagcagcagcaggtcaaggtggccaccaccggcggcgccgacatcgccaccgccgcctcgccgtcgatgcaggccaggcaagagctgctcgcgtgcgagggcgctgctattcgatagcggaggcggcggcggcggcggcggcgttcacgcccctgttactgttagtagcttaattaacttttgtgcagtctgatcaatacgtgttggcttgtttgtttgctgcttcttaatttaattcgtatgtgatgtattctgctcaccctagcaaaaaaaaaaaaaaaaatgcatcgatgccaagttgtgaatgaattgtactattcagttatttggaccggcttagtcggaatatagtgacccggagtttgttggtgtgagtt

SEQ ID NO: 277381 - DNA, 750 bp, Zea mays
  unsure (1)..(750): unsure at all n locations
acgcgctgttccgctgcagcgacgccgccggcgaccagcagcgggacagcagctactacgagcgcgagaacgcgctcacggtcatcgggagcaacccgctgcggcgccacctggccctgggctacgacgactcccactcccacgacgacggcgcgtcgtcagctggctctgaccgcgtggacggcatagagctcgccgcggcggcgccggcgccggcgcgtcgttaagaagcaggtgaggttcgcggtggctccgcccaggagccccggtgtggacgagaccgtgctggaggagctgcacgagctgtgcgaggcgcgcgaggccggcacggcgttcatcctgggccactcgcacgtgaagaccaagcccgggtcgtcgatactcaagaggctggccgtcggcgtcggctacaacttcctgcgccggaactgccgcggcccggacgtggtgctgcgcgtgccgccggcgtcgctgctcgaggtgggaatggtgtacgtcctgtgaccagaacgtggcggtgatgggtgactgcgatctctgcgtccggttttccctgcgtgaactacggatctctctgctctgtgatgtgctattcctattatgcacatctcgacttgcccatgtataaattgtaaccagatgcgatggtaacaaaggatgccctgacatttcccaatgatgggttgactccggcttatcccccaaattaccctcaaaaaaaaaaaaanaaaaaaaaattaatnaaannaa

SEQ ID NO: 277382 - DNA, 620 bp, Zea mays
gttttgtgatgctcacacttgcagtaagggaacaaaacctttccccaaaggtggcaggaaacaaacaaacaggttatacctcgctctctccattttgacgctgatacttttgccgctgttctatctaattgtgttcctgcaccagagggaaatgaggaaaggtacccaagatctaaaacggttttcgaaaattgggcagaagaaaaagccatcctagtgtccaacagtcacaacgttctcgagctcatggagcccgggatgagctggataaggaacgtggtatgcagtgtgaaatgtttttatgggcagggaagaaatttccctcatttccaggacgggaacaatgtccgcaggtcgaggaatgctggcttcgaccttttcttttctttttctttcttttttgtttcgacatgtagatgcaaacttcgagaggcaagcatgtgtggtctttgtgagattacggcgatattctatatcgtcaaccataaccgaagtcctattgataatttaaggatttttgggaggcctcaggcttaaaaaccaatgtcagtgaatgtagtatgacttctatccaatgtaatgatcaatgtgttggtgaggcacaatctttattcccttgc

SEQ ID NO: 277383 - DNA, 395 bp, Zea mays
gtgacacagttccacgcagcagatcagagagtctgcaggtacgctagcgatctagctgccgctgtgctgcgtacagtacgtagtaccatggcgaagaaagtggccactctgctggccctcaacctcctcttcttcgccttcgccgacgcatgcggctgcaggtgcggcggatcctgccctagtccaggcggcggtggcggtggcggtggaggatctggtggtggtggtggtggaagcggtgggggtgggagtggagggggtggatcgggtggtgggagtggaggcggaggatctggtggaggcggcagcagcggtggaggcggcggatctggtggtggtggaagcggtggcggccgcggatctggctgaggtccgacgagcggtcgtttggccgt

SEQ ID NO: 277384 - DNA, 276 bp, Zea mays
tgagttacacgcagcagatcagagaggcacacgcactaggtacctgcagtctggtctgcaggtacgctagcgatctagctaccgctgtgctgcgtacagtacgtagtaccatggcgaagaaagtggccactctgctggccctcaacctcctcttcttcgccttcgccgacgcatgcggctgcaggtgcggcggatcctgccctagtccaggcggcggtggcggtggaggatctggtggtggtggtggtggaagcggctggggtagcagtggagggg

SEQ ID NO: 277385 - DNA, 702 bp, Zea mays
gaagaagctattcaaatctctgccataaaggagatactaagtgaccgtgtggaccagaaacaagtcctcaatgcaacaaaaagagagaacaccagaaaggacaaacaagagaaaaatcttaacactgaaattgccatgaaaagtcaggagaatcagacagatgatgtgcaagttggtcatgggggtgtagatgagctggttaggagaaaagaagaaaatgacaagagcaatatttctcggagtagaacagaagggaaacgacacttggtacagcaccttgagacggagattgagaaattatccatccgatccagcccacttggtaaagacaggcagtacaataggtactggtttttcaagcgtgaaggaaggctttttgttgaaactgcagattccagagaatggggttactacaacactaaggaagagctttgaaacggcaactagagaagttttacagtaagataagttagtaatgccctagagaaacgatcaaaagatatcgcatacaggatgttacttgaagagggttgtactgcggcgttccacacgtgtccgggctcagccaaaggacatggcattcctcaagtacgtcaacaagtggaaggataactgaggtggcggtctgccagcggtggtggtggtctgccagcggtgggaggataacttgagccactgggtgacagggtttgcagtagatgt

SEQ ID NO: 277386 - DNA, 438 bp, Zea mays
gatgaatgctagcccggactgtgacttcgcccgattctgcgaccgcaagtacagacagctgatccatccaggcttcgagtcctcactgttcgggacctcggagtgcgggacactgccggtggtgagcgtggccggcccactctacgagctgttcgtggcaatggcaagctcgatctggacactccacaggttagcatgggcatacgaccccgcagtcggcatattccaggtcggccggggcgcagagttctcgacggtgtacatggagaacattgtccggtcgaagaagcgttttgcggggagcaaggagccccggaagccggtgcggccgaaggtcgggttcacggtggtgccgggcttccggctcggagggacagtgatccagtgtacggtgtatctggatcacgggaagagggaagaagacattacagattcggt

SEQ ID NO: 277387 - DNA, 457 bp, Zea mays
cctgaaccgcgccatcggcgccgacgtcttcgtcaccgccaacacctaccgcatgaacggcgactacctcgcaaacccgcaggacttcgggttcacgaacgtgcaggtggcgtgctgcggccagggcccgtacaacgggatcgggcagtgcacggcggcgtcgaacgtgtgcgacaaccgcgacgtgttcgcgttctgggacgcgttccaccccacggagagggcaaaccgcatcatcgtcgcccagttcatgcacggcgacaccgactacatgcaccccatgaacctcagcaccatcctcgccatggaccaggagggcctctagactatagctcgatcagccggacacgattatacgtacatgcgtgatgtgtctcacgtgcctagcacgttagtcatgtgttggatgatggcagcccaatttgccaataatattcgtgcctcgatcctagtttca

SEQ ID NO: 277388 - DNA, 1200 bp, Zea mays
ggctttattagcatcaactattgttccacatccgaaccaaggaaatatgcatgaacctgctatcgacatgccttttggaagtgtacttctgcaagcactggtttcaagtgatgtcaatggagatatggaggcatgttgcagagcatctagcgttctttctcacattgtcaaggacaacatgcaaagcaaggatcgtgtattgcaaattcagcttgagacacttacaccgtccttggggcgcactgagccagtattgcatcgtattgtcacatgtttgtccatcgcagcctcaacagagggagaaaacaaccaaaacaaccaaccagaagaaccgtacattcaacctgttattcttcggctactcatcatatggcttgttgattgttcaaatgctgttaactgcctgttggaatcagcagtgcatctgaactacataatagagcttgcttcaagcaaacgttacactgcttgtgttcgtggactggctgctgttgttctaggtgcttgcatcctgtacaatgctagccacgagaagggccgtgatgcttttgctgttgcagatgctataagtcaaaagattggcctcacaacgtacttcttgaggtttgacgaattgaggagaagcttggcacatcctttgccagagcagcatcatcgcaaggagctttcccgatcaagtgcgaatagcatgtcagatttccaagaaattgaagaggatgaaacaaataagggcgatcaacaccctgtcctttcagaaatatttgattcacagtttgttaatttacttactaagctcgaggctgatattagagagaacataatggatatatttagtcggacaaaaactgcaacagcagtccttcctactgaattggagcagaagaacggggaggtcgatgaagagtatatcaagcgactaaagtcatttgtagaaaaacagtgcaatgagatgcaggacttgctggcacggaatgcaatgttagcagaagagttactgagaactggtggtggtacgaccacagatacttcacagaaaccgagcagtggccgagaaagggtccagattgaagctctcagacaagaactggagggggcaaaacgacagataggggcactcaaaagtgagaagtcccagattgaagctgaagctaacaagcaaagaaacctttcagtaaaactggagtctgttctcaagagctt

SEQ ID NO: 277389 - DNA, 491 bp, Zea mays
caagcaaagcaatcagagccaagcacccaccgtcctcctttctttccttcgactcatcacagcatgtcttgctgcggcggcaactgcgcgtgcacctccggctgcaactgcggcagcggatgcggcggctgcaagatgttccctgacgtggagaccgccggcgtcgccggcgtgaagcccacggtcctcgccgcccccgccaccaaggcgagcgccggcgggttcgaggcggccgccgagggcggcggctgcgactgcaacacctgcaactgcggcaccagctgcggctgctcctgctgcagctgcaactgagccacccgcgatgacgagacaaccacccggcctcccccccacccatcgtactacaactatgtagcggcgtctatgtaagatccctccaccggccaccgccattgttccttcctgtcgctgcatggtcgcctgcctcgtgcccgggctaatatacatatacatactatgtgtttcagcat

SEQ ID NO: 277390 - DNA, 622 bp, Zea mays
agagtcgcggctgcggccgtcgacgcacgaggaggtggtgcgctaccatcaaggactccttcctcgcgctccacacgcgcacccacgccaaggctctggaagaggtcgagaaaaatatgtcatccttgagattgttgatctttggtgatggagaagtcgaaccagatgaagagcaggtcctgcaaataacccttgagatttgcaaggaggacgtcatttccctgatcgtccaggatctgccttccttgggctggggagtaagaaaagatctggctatctgctggtgcatcttgcttaggcagaagctcgatgaaacttattgctgtgtgcagtatcttgaaaatcatctggagcttttagatttccttgttggttgctacaagaacttggatattgcattgaactgtggaaatatgttaagagaatgcataaagtaccctacacttgcaaaatacatattggaatctggtagctttgagctgttctttgagtatgttgagcttccaaactttgatattgcttcagatgctctgaacaccttcaaggatctgcttaccaagcacgaagttgtagtcgcagagttcttgagttcccactacgagcagttttttgaactctactc

SEQ ID NO: 277391 - DNA, 893 bp, Zea mays
cgatttccaaacgcacgcaaacgctgtcacagtttgtcacggcagcggcaacggcaagtcggcaacgttgccgcggcacgtctcctccctctcttttcctgttcgggtagtcgggtgtaccgccattacgtgatcgaaccagactcgagagggagaggaggagggagtccgaggggagagacccaattaactgcagggattggtcgggttcggctccgccttcggagagtcccaagagatgggtggcgcggcggcgggtaccaagtggatccaccacatccagcgcctcagcgcggccaaggtgtcggcggaggcggtggagcggggccagagccgcgtcatcgacgcctccctcaccctaattcgcgagcgcgcaaagctcaaggcagagttgctgcgtgctctgggtggcgtgaaagcttcagcgtcgctcttaggggtccctcttggtcacaactcatcctttttacaaggccctgcatttgctccttcacgcatacgggaggccatttggtgtggaagcacaaactctagcacagaggaaggcaaagaattgaatgatcctcgggtgctaactgatgttggagatgtccccattcacgagatccgtgactgtggtgtcgaagatgacagattaatgcatgtaactagtgagtctgtcaaaacagtgatggaggaggagcctcttcgaccgtcggtgttaggaggcgatccttcaatatcttatccagtggtcagagctgcgtccgaaaagctgggtggccctgttgaccttcttcatcttgatgcacatccagatatctatgattgtcttgaagggaacacttattcgcatgcctcgtcatttgccagaatcatggaaggtggttatgccaggagactgctacaggttg

SEQ ID NO: 277392 - DNA, 923 bp, Zea mays
tgtttcttctcacgcgttctcaacaacctgaccaagaaccagcagccaaaggacaagacaagagacacaacgaaaggaaaggaaccaagagaaagatcgagaagagaggagccttcgcttttggacttgcaccgtcgtgatctgtcccgcgaccacatgaggatccacccagcatcccccaccgccggcggcaagaaggacctccggcgcctgccgcacgtgtacagcaaggtgctggagctgccgctcccggcggacaccgacgtccaggtgttcgaaggcccagacgccttccacttcgtcgcggcgccggccgccggtgcgcgtgccgccgccaccgtgcgggtgcgcaccgtcaggatccaccccggggtcaccaaggtcgtggtgcaggccggagccgccgaacgggccgctgacgacgacgccgccagcgacagcatggagctcgacaggtggcggtcccggctgcccgagccgacctgtccggccatggcggtggccgggtacgtcgacggccagctcgtcgtcacggtgcccaagggccccggtgccgaggaaggcgccgacgcagggcaaggcgaggttacctggaggtgcggcggcggaggcaagatcactggaagactcgtggttgtacagtaggagcgtctaatctatgtactactactccatagtaatgtcttgccatctttctttctttttttggtaaattaagatgggctagctgttcatcatgttgccttccccttccctgcttcgcatcagagacagtcagacaggcgatgtttcatgagctatgttctcttcctcctgcttctcttctcaagcatgtgagaaccagctactgtggattacctttggttgccctaaaatcagatgtaaatttctagataaacaaactgtgcggtgtttgtgtgccc

SEQ ID NO: 277393 - DNA, 731 bp, Zea mays
cggagcatggaggatactgggtcaaaggctagttctaacagcaatatccagcagaaagctagtgcttcgcaagaggcggtggatgaaaatgaggcttacaaaatgcaggagaacagtgtggtgtctaattcagacgtagctgagcaagcattgaatggtgaggataatagcaacaatgattcttctgctggtgttgaagaggcagggacaaaacatttgccagtatcctcaggtgaaaaggtctcagatgggaggcttgaacatagcggtgttctgaatgacaaggttgaagatgacagtactttgcatgagaagtctgaagatgacacaatgtcggaagaggtctctgttatggagagcaatttgcctaatgacgctagaaatttgctaaactattgtagttttgcaagagttccaacaagaccacgaacagtgcttgcaaacaggaatgttggaccaggtcaaagagaaattactgtgtctgaacagctcaatttggttacttctgaagaaatatccaatatggcaatggatggagaagctaacactaattccataactagcatcgaggaaggcagtaaagttgagctggttggccaagaccaagaacatgctgaacaaagcgctatctgcaatcaagtggcagaatcagtggcattccatgaaaaggaaactcgaggtgaaactgaagaaaaggaagaacagaagaacatcgctcaacattatgaagt

SEQ ID NO: 277394 - DNA, 681 bp, Zea mays
  unsure (1)..(681): unsure at all n locations
cccacgcgtccgctctccccgcgtgctctccctctctcgcgcgcgcgcggcgacgactcggctagtcggctaccgccgccgccccctacgccagcttcccagctcttcgtcaggcccttctccgtcaacgagcacccagcacatatcctgagcccctccacacctcaacgatggcgggattcagaagccttgcacccaagaccaggaacctggtggtggctgggggcctgtcggccttcgtgctcggggtctactactacaccatgagagccgtgggaggcacggacgagctgcaggtggcgatcgacaagtttgaggagatgaagaagaaggacgctgccagaaactccagcacaggaggatcgtaaacgcggcgcccttctcgtctctgtactgaacctggatctgcaggctgacatgatacggtagtcaagtcgctcagtaggccaagaacatgcgtgcctctactgtgcaataaataatgtgtgatactctttatcagatagagcttggcagcttgtgttttaaggagagatgtacactcgagtgtttttgtcctatgatataatagtggtcgcaatgtctaaatttccctgatataacttggcgagacggaaattctgtgggataagtatttgcttgtgtaattacctttctccagctccctggagnctgtgcccc

SEQ ID NO: 277395 - DNA, 490 bp, Zea mays
  unsure (1)..(490): unsure at all n locations
cccacgcgtccgccaccttggccgctgttctcctcaccgctcgtgctctctctctctctctcggcgccgactcggctaccgccgccgccttacggaagcttcccaggtcttcgtcaggcttttctccggcaacgagcaccctgcacagatcgtgaacctccacacctcaacgatagatggcggggttcagaagccttgcacccaagaccaggaacctggtggtggccgggggactgtctgccttcgtgctcggggtctactactacaccatgagagcggtgggaggcacggacgagctacaggtggcgatcgacaagtttgaggagacgaagaagcaggatgctgctagaaactccagctccagcgcaggaggatcataattcataagcacgcggacacgcnctggatctgctgcaagctgagtggctgacatggtacgacgacagtcacgtcgctcagtaggccatgaccatgcgttctgcttgtactg

SEQ ID NO: 277396 - DNA, 463 bp, Zea mays
atttcagccattcaggagggccaccgtacgcagcgagaccagccagcaggcggcgatgttcgcgacggcggtgcggtgggcggcgaagaaggggaagcccaagatggcgccgatcgagctgacggcgccgccggagcaggcgcagtccatcacgcgcgccatcttcgacgccgtccgggagcacggcccgctcaccgtctccgacgtctgggaccacgtcaaggatgtcgggcttcgaggtctggcaagcaagaggcagatgaagatcatgctgcggtggatgagggagcgccagaagctaaagctcatctgcgaaccacgacggcccgcacaagcagttcctctacaccacctggtttaccaaccccaggaacgcgccgcagaggcccaatccgaagcccaatgtcaaagcggataagctccccaccttcccttccccttcgaagcaactgtgacgaggact

SEQ ID NO: 277397 - DNA, 672 bp, Zea mays
agctttctttgagagtattattcaaaactcgttgatttggagacacactactgttatttttaaaatgcagatcttgcaatatctttgtttccttaatgatgaaatattaacattttttaaagatctatgtcatttgtacttcatatttgcttctataatattcaatgtttgggtttatgttggacttgggcaatataaacaaacacatctacatcctatgcattcgttgatattttgagtaccccctctgtttgttttgacaaggtacctgtacatttggagattccagttttgttttagcaataattataacacaatacatgacaataattttgtgtggttacaataatttactaatggtaaacatgagatattggcaagtttaataaagccttactgtttctttgttatggagtaatgttgtaatggttttttctgttttacaaattttagctattttgtacaaattttcacaaatactttaattattttgtaccaatgtaaaggcacctgaacatgtattggtcaagtcgactctattgaatagaattttgaaagaaagattcttgatcacccaagttaaaagagaaacttagccttgcctttcagattaaactagaggagacatgtatgaaaatggctggaaagactacaagatgcaattaatcattt

SEQ ID NO: 277398 - DNA, 945 bp, Zea mays
  unsure (1)..(945): unsure at all n locations
tttagtgtccgcccacgcgtccggctctccgtgctggtgggcgagaagagggacgaggaggtggcgatcgagcggcacttcgagcttctcgagcaattccccagggatctcctgcttctcaagagagcgcagctcatctgcttctatatgggaaagccagatttgtccctgaaattcgttcaacaagttttgccgaagaatcaagatcagaatttcatatatggcatgcttgccttccctttgcttgagcttggacggatggatgaagctgagagagctgctcgaagaggcttggctataaacaagaatgacttctggtcacagcataatttgtgccatgtttttcagcaggaatgtcgtttcagagaagctactgagttcatggaatcatgttctccgtcatgggaggcatgcacatcatttctgttaactcacaactggtggcatgtagctgtttgttacttagaagctgagtcccctttgtgtaaagttctggagatatatgatcacaacatcatgaaggaacttgagaaaagtgattgtgagacagcagaggtgtatttgaatggtctagggttgctgctgcgattattcatacgcggtcatatagattcagctaaagagaggttaacgacattgctagatgcactaaagaatgagtctatatggcatgtggaatggctccttgacttgcttatattgtgggcactatcaagtatgggtgagctaaaaagtgcacataatatgttggaatcattgaagtcaagggtacgtttaatggacaggaatcggctgcaagcgttgcagaaggcaatcaagctggcggaggctgcttatgaatatgggaaaggagatcacatgaaagtctatgacactctgggtccagactttgatgcgcttggttatanaatgattggtgcatcagatgaacaagtggatgtcttc

SEQ ID NO: 277399 - DNA, 376 bp, Zea mays
agagaatttaatagtgcaaatgcagctaaagatgctgctttgccatcaacattacattctgggatgtactcttctgctgtaggatctgagacaactattcatgttgatccagaaattgttgaaatagagggttctagtcctgtatcgacccaattttcagtgcaggactccaacttcatcaggagtccaagcccacatgggcctggtgctatgacaagaaaaggcgctaatactgttgatagacaaaattctgagatttcttattatgctgatgatgaagatggaaataggaaaaagtatactaaaaggggtacatttcgtcacaaatttctaaggatgctgctgccgttctggtccagtgcactgccaacgctac

SEQ ID NO: 277400 - DNA, 432 bp, Zea mays
cattaggcgccacgtggacctggagacggtgaggtccaggctggacggagggtccggcagctacgcctcggggaccgagttctaccgcgacctgctcctgctgtgcgccaacgcgctggtcttctacccgcgcggctcgcccgagcgttccgccgcggcgcggacgcgcgcgctcgtcgccaagcacatgtccaaggaccagccggggccctcggggaaggctgtcgcggggccggcggcgtccaagaaggccaaggcggaggccgacgttgggtcgctgctggagaagacggcgcccatcatcgtgtgccggaagcggagctctatcgccaaggccgccgcggcggccaccgccaaagaggagagatcggagaaggcggagtccgacaaggagggcgagaagcagcaggaggcggttggcaagaagaaggc

SEQ ID NO: 277401 - DNA, 587 bp, Zea mays
ggtaattgctgtaacagttattgtcatgagtctcatgagtcatggaccatacacttccacttcagtagttcagttgcctgtgatggggaaatatcaagtactgattggaatagcatcgaaggggctaatcttgttcttgtatgtagcgcattgaaacaagtactaaaggaaaggtcgtgatttggtttgcgtaccttttattcacttccctatattatttttaaaagcacttcgtgattttcagatgaatagcaatgtctgcatattagtgcgttcattgatgaatttgtttctaggtttcctctcatacaatataatggtgtcaaagcctgtagtgcttgtcttcctgttggtggtactcataatcacatcccagtttgaatggaagcaacagcttgtaaacgagttggaatctacggctcgcaaccagaaacatgtttcaagtagagaagagcttgtcaaggatcaggtgaggcgactcactttgtgtatctgaatgctttaagcgattttttttagttttagatagtggcaaaatttgagatgaaaaggagcttgaatagcaaggctctaataacatgcaaata

SEQ ID NO: 277402 - DNA, 551 bp, Zea mays
tctcgctcgcctgcacaacctctccatccaggccacagctcgagaccaacgacggacgcctagacgcggctgggcgggcggcctcacctcgttccccctcctcccttcttcctgctccgcgtctcgatctcgactcccccgccgcgtcgcgcgacccggccagatctcgcccaccctgcgccgcggccatggataacttgatcaccctcgtcaacaagctgcagagggcttgcacggctctcggagaccacggagaggagagcgccctcccgacgctctgggactcgctgccggctatcgccgtcgctggaggacagagctctggtaaatcatctgtgttggagagcgtggctgggaaggatttcctaccgaggggttcaggcattgtaacccgtcgtccgctggtgctgcagctccacagaattgatggtgacagggaatatgcagagttcatgcatcttccgagaaaaagatttacagattttgctgctgcgagaaaggagatagctgatgaaactgaccgagaacaggccgttcaagcaaatataact

SEQ ID NO: 277403 - DNA, 871 bp, Zea mays
  unsure (1)..(871): unsure at all n locations
gacatgatcaccgccggcacggacacgacggtgatctcggtggagtgggcgatggcggagctgctgaggaaccccagagtgcaggagaagctgcaggaggagctggaccgtgtcgtcggtcgcgaccgggtcctgtcggagacggacttcccgaacctgccttacctgcaggccgtcgtcaaggagtccctgcgcctgcacccgccgacgccgctgatgctcccccacagggccagcgccagcgtcaagatcgccggctacgacatccccaagggcgccaacgtcgtcgtcaacgtgtgggcggtggcgcgcgaccccgaggtgtgggacagcccgctcgagttccggccggagcggttcctccgggagaacatcgacatcaagggcgccgacttccgcgtgctgccgttcggcgccggccgccgggtgtgccccggcgcgcagctcgggatcaacctcgtggcgtccatgatcggccacatgctgcaccacttcacgtggacgctgccgagcgggacctgtcccgaggacgtgagcatgatggagtcccccgggctcgtcaccttcatggccacgccgctgcaggccgtcgccacgccgcgcctggacaaggaggaactgtacaggcgtgtcccttcggacgtgtgagccgtcggcgtcctggcatctgctgcgttccctgttttgaaacctgctgctgctgttgcgaatttgtgtaccattaactattcgctggtgatgtacgtgtcatagtcgtgtacgagcattttgtgtactgcagaacttgatcgctgagcatacacttttgcccggtagtaatttacaatttcacccttgcaaaaaaaaaaaaaaaaaaaaaaaaaaaaaanaa

SEQ ID NO: 277404 - DNA, 561 bp, Zea mays
cccaaccccacttgtcgggcttcggctcttcgcatcctgcccgtcccccgtcacagtcccaatcgcaacccccgcctgcagcacgcgtcacgccacgccacctctccccagggtccggcgatgtcggcgccctccgacgccgcggtggcagccgcagcgcccgcatccacgaccaccgccgccgcctccagcggtgggctcaccttcaagctccacccgctcgtcatcgtgaacgtctccgaccaccacacccgcgtcaaggcccaggccgcctgctccggggacagctcttccccctcctcgtccgccccgggggccgggcagccgccgagggtgttcgggtgcgtgatcggggtgcagcgcggccggaccgtggagatcttcaacagcttcgagctcgtgctcgaccccgtctccggaaccctcgaccgcgccttcctcgacaagaagcaggagctctataagaaggtgttccccgacttctacgtgctcggttggtactccactggaagcgatgtgcacgacaccgacatgctaatccacaaatcattgatggatatt

SEQ ID NO: 277405 - DNA, 558 bp, Zea mays
ggggctctcggaaacaattattattattattattggaaggtgaggtgatctccgagaagtacgttctcgagtacgggactgattgcctggagatgcgtgtcggggccatcgagcgatccggcgagcgggtgctggtcatcgacgacctggttgcgaccggagggacactctgtgctgcgatcaggcttctagaacgtgctggagccgatgtggtcgagtgcgcgtgtgtcattgggctcccgaaattcaaggatttgtacaagttgaatggaaaacctgtatacgtgctggttgagtctcgtgaataatcggagaaatgacaacttattctcaggtgtcagagtgatcagggatattggctgtttactccttgctactgcgattgaacagtggagggacgacatggacaaggacaagtatattcggtgcatcactaagtcttggtgaggggagagattgtagtgttttaggctgagtagtgaagagcctgtagttctgcacggaacatgatggttattagttgatgcaacagcgttgctgttctattattgtttgttg

SEQ ID NO: 277406 - DNA, 604 bp, Zea mays
ggacaaggtggcattcatttagtagccgcacttggtttgatagcccaatcataaccaagtgcggctactaaatgaatgggctatcaaaccaatagttgcggcaggagtaaatataaacttcagggatattcgtggatgacctgcgcttcactgggtgcatgctgtggaagggagcggacagttggtgccctgatagcaagcggagctgcatctggtgctttaacagatccaacgcagcagtatccatctggaagaactcctgctgatttagcatcagaaaatggtcacaaaggcattgctggttttcttgcagagtctgctttgacaagtcacctctcagctcttacattaaaagagtcgccaagtggcaatgtggaagaaatatgtggattaacagcagctgaaggttttgcagcatcaagttcttcccagcttgcttgtgttaattctcaggaagagtccttaaaagattcacttggtgcagttcgtaaatcaactcaagcagcagccagaatatttcaagcttttaggtgggaatcattccacagaaagaatgttattgaatatggagatgatgattgtggattgtctgatgaacgcacac

SEQ ID NO: 277407 - DNA, 268 bp, Zea mays
caaactgcggctgctgtagatacgcgcgccgccactccaaggtccaagcctcccttgctcccgccaccgcccctcacctatgggcagcgccgccgcctctccgcagccgtctgggaatctgacgcaggacgagctcaagcgcgtggcggcgcaccgcgcggtggagttcgtggagcccggcatgacgctgggcctgggcacgggttccacggccgcgcacgcgctggaccgtctgggctacctactccgcgtgggctcgctgtccggg

SEQ ID NO: 277408 - DNA, 518 bp, Zea mays
ggagtcgcgggccgtggccctgcctcagtatttcctcttccccgcgataggcaacagaagccgcagcggaacaaggaaagcgaagcgaaccctcgccgcgcgagttagcgatggccggagaggacgccgccgccgccgcgaggaggcccccgaaggaggaggaggaggacgaagatgacgacgagttggacaacgttccgctggcactttccagggccaagaaaccgggtaatgcgagcgcctccaaggtcaagaaggaggtggaggacgatgacgacgacttggacaacgttccgctcgcactttccagggccaagaagggaaacgagaagcagaaaggcaacaatagcaatatgaaggcttcttcgaaagtcaagaaggaagccagttctgatgatgattatgtcatgccaacggcgcagaagaaaagtgcaggtgctgctggaagtaatgccaagacatccaaggttaaaaaaattaaagatgaagatttggaagatctcaaggaggacaagaaa

SEQ ID NO: 277409 - DNA, 371 bp, Zea mays
cccacgcgtccgcccacgcgtccgcccacgcgtccgggtccgcgaagcgaaccctcgccgcgcgagttagcgatggccggagaggacgccgccgccgcgaggaggcccccgaaggaggaggaggaggaggaagatgacgacgatttggacaacgttccgctggcactttccagggccaagaaaccgggtaatgcgagcgcctccaaggtcaagaaggaggaggaggacgatgacgacgacttggacaacgttccgctcgcactttccagggctaagaagggaaacgagaagcataaaggcaacaatagcaatatgaaggctttttcgaaagtcaagaaagaagtcagttctgatgatgattttgtcatgcc

SEQ ID NO: 277410 - DNA, 440 bp, Zea mays
  unsure (1)..(440): unsure at all n locations
ccaattcctcattgctcgccgtgtattaaacatactcgcactccagctccccatttctctcctcccctgcccttccctaagcatctcagcgaatccaatcgaggcgatggaccagcagggtgcgggcggggacgcggaggtgccggcggggctgggtctgacggcggcggagtacgagcagctgcggtcgacggtggacgcgcaccaccgctacgccgtgggggagggtcaatgctcctcgctgctggcgcagcgcatccacgcgccgccggaggccgtctgggccgtcgtccgccgcttcgactgcccgcaggtgtacaagcacttcatccggagctgcgcgctccgcccagaccccgaagccggcgacgccctccggcccggccggctccgcgaggtgtgcgtcatctcgggccttcccgncagcaccagcaccgagc

SEQ ID NO: 277411 - DNA, 575 bp, Zea mays
cccacgcgtccgcccacgcgtccggtgaaatccagcatagtggcacctgagtgttccaagtaccatgacgtgcctgctgtgatctttgctctgactggatacaccggaaatctattccatgacttcaccgacgtgcttgtcccccttttcacgactgcaagcgagttcaatggtgaagttcagttcctaatcacagacatggctatttggtggacaaggaagtatgctgtggtgtttgagaagctaaccaagtaccccttgattgatttcaacaaagacaacgaagtgcattgcttcaagcatgccattgtcggccttcatgcttacatggagttcacaatcgacccgttaaaggctccacacaattactcaatggtggacttcaaccggttcatgcgcaggacctactcgctgcctagggatgcagtgagagcacctggtgagaccccgcagaccaggaagccaaggctgctgattatctcgaggcaaaggacaaggatgttcctcaatcttaaggagatcgtggccatggctgaggagatcggctacgaggtggtggttgaagaggccaatgt

SEQ ID NO: 277412 - DNA, 573 bp, Zea mays
ctcctcttccacttcctccttccagtaggttccaccccaattccctcaagggatcgagatgaacaactccacctcgccggcggtggactggggtgacgactccgcgggggagatggactctgaggacgcagcgccttcctcctccatgggcatcagcatcgccattggcagcatgatggaggtcgacgccgacgaccgccaacccagtccgcctcccgacgccgacttcttcaacgccttccccgacgacttcgacgaccaagacctcgactgattgccgccgccgcttctttgctcgcccggaccccttccgccagttgggagtcgtatacgaacctacctacttccaaggaagcaccagtcatccatcaccttgtacatgtttttatgttgcagcactagtggtgtttaattgtcagctgcgatcatgtgagaacctgacctggtacattatgtatataagaagaataagaacctgttaacttatatggtatagtatgtaagttcatggcagaatgttcttgatggttggattcgtgcgcagttgaacagttgctggtgttgtaatgtgat

SEQ ID NO: 277413 - DNA, 444 bp, Zea mays
agttcaattgctttctcctcatgccgattgttgacaaactaccagcacttctaagacaagaccttgagtcagctttcgaagaggaacttgatagcatctttgatgtcactcagctgcgccagtcacttgggcagaagaagcgcgagctggagatcgaactgaagcgggtcaagcgcttaaaggaaaagtttggggagataaataagaagctcaattctcttcaggttaggcagtaggccaggctcaaaatttagcagtagcttggtagtctaggactccaggtagagtgtttctatcctgtaataaaataattggtcatctagagtgacttcttgttgtatcctatcagttgtaaatatgaagtcttcctatgtcttaacgtatgttgttgctccaaaaaaaaaaaaaaaaaaaaaaaaaagggcggccgctcgcgaactagaa

SEQ ID NO: 277414 - DNA, 543 bp, Zea mays
cgtgcatgaagatcgcagaggacgttgcggcggggctggtgcacctccaccagtggagcatcgtccacggcaacctgaagccctccaacgtcctcctaggccccgacttcgagtcgtgtctcaccgactacggcctgctgccgacgctgctaccctccaacgccgagctccactcctcgagctccctgttctaccgcgccccagaggtacgcggcgcccacgccacgtccttggaattattcacgcccgcgacagacgtgtacagcttcggggtgctcctgctggagctcctgacgggccggacaccgttccaggacctcatggagctgcatggcgacgacatccccagctgggttcgcgcggtgcgtgaggaggagagggagacggagtctgtgtccgccggtggaggtggagccgaggagaagctcacggcgctgatcaacatcgccgcgacgtgcgtggctgcggacccggccaggcgccctaccacggcggagctgcttccgatggtgagggaggccagggcctaggccatgtcatcgt

SEQ ID NO: 277415 - DNA, 417 bp, Zea mays
cggacgcgtggggttaaatcaactagttgcacaggggcggcatcttggtgagtcgagtaacatttccttggataaagtgacgttgctgcagccttccgcaacatctgatctctatttcaagaaaaggaaaaatcagattattttgggtccctctacttctgatgccccgagttcaaaagatacatttcaggctgaaaatataaagtcaggtgagagtaaagttctaatgtcttcatcttccaacaacattatcactgtggcaaaggacaggctgcactaagctcttcagacaacaaatactgtcagaagtttctctcatgtatggacacttaatggacaaaatccccgttagaaatcttatgtgggagctagtcatatgaacgtcttacctcgtatacttccatggaaaagaaaaat

SEQ ID NO: 277416 - DNA, 444 bp, Zea mays
cccacgcgtccgcagcaccgcagagcaagagcgcaccagcacgacacagccaagctccactccaccgacacgctgcgctcgagcccgcccgagcgagatccatggcgcggctgctcccgacggccgcggcagcggccatcgtggccgccgtcctggtggcgggcctgccgggcgcccgggcggcgtctgcctcgccggcggcggacgacgcgccgccgtacaggaaccacaccgttggcggcggcgacgggtggttcttcgacgccaacaccaacgcctcgtccgggaactactccgactgggccgccggcgagaccttctacctcggtgactacctcattttcaagacgaacgacatctcgtccgtggtgcacgaccaccaacgccacgacatacgggctctgcgacgccagcgacgacctggcggagacgacgtccatctac

SEQ ID NO: 277417 - DNA, 448 bp, Zea mays
taaaattgacaaacctgaagctttccccaagcaaaccttcacagaactaatgggcctaaagacaatcactgaccgagaagtggcatgtttcatgacatcttgcaagaactctaccaacattgattctgtcattgaatggctggtgaagcactcgaaaaagaagaattgaacttaaatctgcactagctcttaaagcgcactccagtcttcctcttttttgcatgtcgcatagcattggagctgtaaattacgcaagaggtattgatcagggattttgtgtttataattctgttaacccggtttggcaatatgttggtggattgtcctacaggagtctgccttctttgttccatacttgtcatttgagctgtgcgatttgtttcacattgtttagtctgaattaaacaaactttaatgacgttgttgatgcagtaaatgaacgttggtg

SEQ ID NO: 277418 - DNA, 503 bp, Zea mays
tcgcccacgcgtacgccattactagtcattggcaacaaaattgacaagcctgaagggctcccgaaacaaaccttcacagaaataatgggcctaaagacgatcactgaccgagaagtggcatgcttcatgacatcatgcatgaactcgaccaacattgattctgtcattgactggctggtgaagaactcgaaaaagaagaattgaacttaaatctgtactagctattaaagcgcacgccaatctctctatttttgcatgtcgcatagcattggagctgtaaatcatgcaagaggtattaatcagggatgttgtgttcataattttgttaacctggtttagcagtatgttggtggacagcgtctggtattgtgcacgcccgtgctctgaggctgcctcctgtgttccactcaattaatagttattttttatgttctcaaagtctaatgattacaaatgtgtgctgtttttttgttatttatgttgctttatcagttttttatttt

SEQ ID NO: 277419 - DNA, 625 bp, Zea mays
cccacgcgtccgcccacgcgtccgcggacgcgtgggttcgacttcacctcgcagaacgtcccgcgcgcgctgtggcagcccgtcaagggcacccgcctgtaccgcgtcaggtacggcgccgtggtgcagatcgtgttccaggacacgggcatcttcgccgccgaggagcaccccatgcacattcacggctaccacttctacgtgctggccacggggttcggcaactactacccgcgccgcgacgccgccaggttcaacctggtggacccgcccagccgcaacaccatcggagtgcccgtcggcggctgggccgtcgtgcgcttcgtggccgacaaccccggggtgtggctcgtgcactgccacatcgacgcgcacctcacgggagggctcgccatggctctgctggtggaggacggcgagtccgagctcgaggccaccgtggcgccgccgctcgacttgcccatctgcgtgctgtagagatttttcagtttgttgctggcgtgcgtcactacgtggagttacagggaggctgtgtcctgtgtgcatcgttctgtgtgtttgcatcggtagttgggcatttgcattcttggatttccatttgaatttgcaaaggaaaaggggaagt

SEQ ID NO: 277420 - DNA, 469 bp, Zea mays
ggaaagtttcacacaaataatgatgtatgggaagtctctgcttcatgaaggttcatgtgagccaaggattcaggaagttgaagcagaagttcaggaaccttcagttcatccttggggaggtctttcgacaacaaaggatggcatcctaactcttcttgattgcttcataaatgcaaaatctcttcatgtgatccagaatgtatttgacaatgcacgtgcgagagaacgtgaacgtgagatgctttaccctgatgcatgtggtggcggtggcagaggatggattagcccagtgatacctaactatggcaggggccatggaacacgagatacctgtgctttgcacactgcacacctttcttgtgatactctggtggatttttggtcggctctgggtgaagaaactagatcatctcttttaaggatgaaagaagaggacttcattgaaagacttatgcacagattcgacagc

SEQ ID NO: 277421 - DNA, 951 bp, Zea mays
gacccacgcgtgcgcgcctgggccttcacgactaccacgccgtcatttagcgtcccatggacctcggcaccgtcaacgaggggctcgccgccgggaggtacgcctctcacggcgacttctcggccgacgtccgcctcaccttcaccaacgcgctgcggtacaacccggtcggccacgaggtccacaccttcgctggcgccctcctcgcctacttcgagaggatgtacaaggaggcgctcgcctgcttcgaggaagactgcaaacgccctgagccgccaaggccagtgccgcctgaattgacacctccacccgcagctgagcctgttgaggccaaggttaagccgagggcagggaatgtgaggatgcggaagcccaaggccagggagcctaacaagagggagatgagcctggaggagaagaacatgctcagggtggggctggagagtttgcccgaagagaagatgcataatgtgctacagattgtgcgcaagaggaacaacaatccggagatgctgggggatgagatcgagcttgatattgatgagatggatgttgagacacagtgggagcttgatcgtttcgttactaacttcaacaaggcgctcaagaagtcccagcgtgctgcgatgatgaatggtggcgttgctgatgtaaccagtactgctgtggctgaggatgacactgcacctgtggccatgtgcctacattggttgacaatgacgatgcggagagtgaggaacctgtgaagagcactacagtggctgagcaggtggatgagtatgttgatattgtggatgaaatgccagcagccacataccaatccatggagatcgagaaggacgctgagggtaggactggctctggtggttctggcagtggctcttaatggtcaagtggtcctaagtcaagaagttcagggtccagttcttaaggagttggcaatgctaattt

SEQ ID NO: 277422 - DNA, 507 bp, Zea mays
gagcaggtggatgagtatgttgatattggggatgaaatgccagcagccacttaccaatccatggagatcgagaaggacgctgaaggttctgagtcgaggagctcaggggacagtgcctcaggagctggcaatgctcattctttgacttaggggaggttggtaacaataggatttgaaaatctgaatgatccgagttcgtgtgcaggtaattgtaagtgtgtagctgtttctgagacatgggtgtctgcttaggctttgattacgttagtagtagataacaaactggctttgtgggtgtctgacagcagtacagcaccatgtgtatgtaagctggaggtggaaggtactggtgtgttaaaagtagctgatcgaccttctcgtatgaagggggccagggctagtgtctgtgttcttaatggtagggttgatcgaccttctcgtaattgatgctttgtgcatgacattaaagtatggttttataagtaaaaaaaaaaaacccagcgtccg

SEQ ID NO: 277423 - DNA, 289 bp, Zea mays
acccactggccgatgaagacgccctcctacaaccaccagagccagtcgtacgtccagcgtccttctcgatctccatggattggtaagtggctgctggcatctcatccccaatatcaacatacttttccacctgtgaagagcactacagtggctgagcaggtggatgagtatgttgatattggggatcaaatgccagcatactcatccacctgctcagctactgtagtgctctgcacacgttcctcactctccgcatcgtcattgccaaccaatgtaggcacatcgccta

SEQ ID NO: 277424 - DNA, 836 bp, Zea mays
  unsure (1)..(836): unsure at all n locations
ggtggcgcgcccgtgcactcgggtggcgcgggtgagccggggaccaagaaaaagcgtggccggccaagacagtacggccccgacggctccatgtcgctggcattggtgcccgcatccatggctggggagccggcgccggcggctcttggagcttccggtcctttctcgcctaacggcccgaagcgccgaacactgcgccgtcagcgtcgccggacggcgcgaagaagcggggccggccgaatggctccaccaacaagaagcacgtggctgcgctcgggccagcgggggcaggttttacgcctcatcttatttttgtaaaagccggagaggacgtatcggcaaagatcatgtcgttctcgcagcacgggacacgcgcggtctgcatcctttcagcaaacggcgccatatcaaatgtgacgcttcggcaatctgccacttcgggtggaacggtgacatacgagggtcgtttcgagatactgtctctgtccgggtcgtttcttctgtcagagaacggtggccagcgcagtcgaactggtgggctcagcgtttcgctagcaggccccgacggccgtgtcctgggtggctgtgttgccggactcctgacggctgcttcaccggtacagatcgtagtggggagcttcgacgccggtggaaagaagcagccgaagcagcagcagcagcagcttgctccgtcaccggcgccactaaatctcgcgccgacgggcgtggcggcagggccgagcagcccgccgtccagaggcacattgagcctaagcgagtcgtccagtggcgccccgncgagcccgccgnacgcaggagccagcggcggcggtggc

SEQ ID NO: 277425 - DNA, 1003 bp, Zea mays
gagaaatagcgttttgtgctatcacagctgatgagcaagttaaaggctatggaacaagattaatgaatcatttgaaacaacatgcacgggatgctgatgggctcacacatttcttaacctatgctgataacaatgctgttggctattttgtaaagcagggtttcacaaaggagatcacattggacaaagaaagatggcaagggtacattaaagattatgacggaggaatattgatggagtgtaaaattgacccaaagctgccatatgttgatgtggcaacaatgattcgacgtcaaaggcaggccattgatgagaagatcagagagctttctaactgccatattgtttattcaggaattgattttcaaaagaaagaagctggcattccaagaagactgataaagccagaagatatccctggtctcagggaagctgggtggacgcctgatcaattggggcattctaaatcacgatcatcattctccccggactataatacttacaggcaacagcttactacccttatgcagacagcgctgaagaatctgaatgaacatcctgatgcttggccattcaaagagcctgtggattcacgggatgttccagactattatgatatcatcaaagatcctattgatttaagaacaatgttaagaagagtcgactcggaacaatattatgtgaccctagagatgtttgtagccgacatgaagagaatgttcagcaatgcaagaacttacaattctccagatactatctattacaaatgtgcgacacggcttgaaaacttcttctcgggcagaattactgtactgcttgcacaactctcaaccaagagctaggctggcgtgggctcactggactgggcactactgtcgcatgttgtaaaattattattggctcactggactggacactactgtcgcatgttgtaaaattattaagttgtattgatatagttgtcaccttgctgaatgttcggcacggtgatgaacttttagtt

SEQ ID NO: 277426 - DNA, 436 bp, Zea mays
cccacgcgtccgcccacgcgtccgcccgcctcttcgccgacaccgtcatcaggctcaacctgcagaagctcaagtccgtcgccgaggccagcacctccagttccgcacccccgccgccgtcggagtagcgggcggccggaatcggcaaggggagaaacgcagcagcaagttttgggcgtttttctgttatttcacttctctgggaaatggtctctctgaattaaatctgatcgtggatggatttggactgcacgagaggagaggaggggtcgggtcagcttgaatcaggtgtcgcgttgccagggtggcgacctgtaataacctctccttcatctccaagattccttcctttcatctcctagattcattcctttcatctctgcttcttccagaatttggttaatttcagctttatgcgagtggaatgattccttag

SEQ ID NO: 277427 - DNA, 406 bp, Zea mays
ggaaataaaaaaacattttccggaggagaaaaaacccccgagaagaagaattcctctcgctcgaggggtgggaaagaagcggaaggggagacgagtcgagaggaagccctcgcctccggcacacgccatggtggagactcgccggagctccgccgccgccgccgggaagcgcacgtctccatcgccatcctcttcgtccgtacctcccccgaagcgccccaaggcggagtcctcggggtcaccgacggcgtccgcgcccggcagggccgaggaggattctgtggcgggagcggcacccgcgaggagcgccggctcggtcgatgacgcggcagcgatcgcacagaaagatcaaggagtcgataagccgtcttccgctgttgcataaagttcaaagcggaagaaggag

SEQ ID NO: 277428 - DNA, 1172 bp, Zea mays
aaggccatctcaaggaatgtaagcttgtcttccatcacaattcctgcatacacagtggcagaccttcagggggcaacgggcagcttcagtcctgacagttttatcggtgagggatcggtaggccgtgtttacaaagccaaattcggtgatcagaaggtcatggctgtaaagaaaataaacttctctgtatttccaagccatccttcagatttgttcattggcgtccgtgcaaacatttcaatgttaaatcatccaaaccttgctgagctcgctggttactgctcagagcatggacaatgcttgctggcatatgaattctaccgaaacggttctcttcatgatttccttcatctgaaagatgaacacagcaagccattgtcttggaacaaccgtgtcaagattgcgcttggatctgcaagagcattagagtacctacatgagacttgttcaccctctgtggtccacaagaatttcaagtcatccaacattttattggatggtgagctgaccccccacctctctgattctgggtttgcaggccttcttgcaaaccaggaattccaggaatcagatgagaactcaggatacagggcacctgaggtgatcttggctggtcagtactccctgaagagcgacgtgtacagcttcggagtcgtcatgctagagcttctgactggccggaaaccgtttgacaggacccgaccgcggcctgagcagtcactggtccgatgggctactccgcagctgcacgacatcgaccccgcgctgcaagggctgtacccgtccaaatccctctcccgcttcgccgatgccatcgccctttgtgttcagcctgagccggagtttcggccgccgatgtcggaggtcgtgcagtcgctggtgcgcctggtgcagagggcgaacatgacgaggatgcacgagagccagtcgcggcgccacggcgaatccggcggggactacgagttttgagcgagacaaaactgtgcctttgcctagatttttttcttctaaaagtataaaaatagttataaactctccttgagagttttgaacttcaaatattcacatatagtttcaaactatattagataggtagtagttcagaataagtatttatctgaaataagtattggttcacatttgcctttccgttgcaggcattttgttttgct

SEQ ID NO: 277429 - DNA, 626 bp, Zea mays
tcatctgaaagatgaacacatggggccattgtcggggaacaaccgtgtcaagattgcgcttggatctgcaagagcattagagtacctacatgagacttgttcaccctctgtggtccacaagaatttcaagtcatccaacattttattggatggtgagctgaccccccacctctctgattctgggtttgcaggccttcttgcaaaccaggaattccaggaatcggatgagaactcaggatacagggcacctgaggtgatcttggctggtcagtactccctgaagagcgacgtgtacagcttcggagtcgtcatgctagagcttctgactggccggaaaccgtttgacaggacccgaccgcggcctgagcagtcactggtccgatgggctactccgcagctgcacgacatcgacgcgctggaccagatggtcgaccccgcgctgcaagggctgtacccgtccaaatccctctcccgcttcgccgatgccatcgccctttgtgttcagcctgagccggagtttcggccgccgatgtcggaggtcgtgcagtcgctggtgcgcctggtgcagagggcgaacatgacgaggatgcacgagagccagtcgcggcgccacggcgaatccggcg

SEQ ID NO: 277430 - DNA, 426 bp, Zea mays
cccacgcgtccgcccacgcgtccgcccacgcgtccgcccacgcgtccgcccacgcgtccgcccacgcgtccgcccacgcgtccgatgttctggagctttcagagggatgggattcattggtcactgcacgtgcagctgaactcctaagtttaaatcttgaaaccatggagaagttgaaggaatcagaagagctattggaacgatgccttgcagtcaagaaaaagattctacctgaagatcatcttcaggtagcttatacgttggtacacctggcaaggttaacattgcacagagttgtaaaggatcgggatgtaaacagcgatgtaactgcatattacctcgcaaaagcaaaacagttcagcaatgattcaatcaggattacagaaggacaattagattcttcaagaagagatcagagtaaaatta

SEQ ID NO: 277431 - DNA, 1225 bp, Zea mays
cgccgatcgacgccggcagggacgtcggcatcggcctgcgctacgactggggcaagttctgcgcgtccaagacgttctacgacccggccaagcgccgccgcgtgctgtggggatgggtcggcgagacagactcggagcgcgcggacgtgtccaagggatgggcgtcgctgcagggtatcccccggacggtgctcctggacaccaagacgggtagcaacctgctgcagtggcccgtggaggaggtggagacgctgcgcaccaactccaccgacctcagcggcatcaccatcgactacggctccgtgttcccgctcaacctccgccgcgccacccagctggacatcgaggcggagttccagctggaccgccgcgccgtcatgtcgctcaacgaggcggacgtgggctacaactgcagcaccagcgggggcgccgccggccgcggcgcgctggggcccttcggcctgctcgtcctcgccgaccgccgtctccgccgcgagcagacggccgtctacttctacgtggccaagggcctggacggctccctcgccacgcacttctgccaggacgagtcccgctcctccagcgccaccgacatcgtcaagcgcgtcgtcggcagcgccgtccccgtgctggaggacgaggccacgctctcgctccgggtgctcgtcgaccactccatcgtcgagagcttcgcgcagggcgggaggtccaccgccacatcgcgcgtctaccccaccgaggccatctacgccaacgccggcgtcttcctcttcaacaacgccaccgccgcgcgggtcacggccacgaagctcgtcgtccacgagatggactcgtcatacaaccacgactacatggcgccggtggcagacatctgatcgatgcaatgcaaccacgccactctgcaccgcaacaaattttccaacacacataaatataccaagcaattcccatctgtcaaattttcttatttccctgccatgattttggtctctatttttcctgctggctactacttatcttccagcactagtaatgtacgtactggctagtaactagggtatccagtgggaagacgtgtagcctctagttgtacatgcatgtatgatgctgtgtagcaccgcatcatgcacaccacaccaatgcaaatgagttataaatgtttttaagctccaaaaaaaaaaaaaaaaagggcggccgctcgcgatctagaactacggacgcgtgg

SEQ ID NO: 277432 - DNA, 501 bp, Zea mays
gcgaactactccttgatgtgctatctattgcagacaatcatctagggagttctgtggcagctgcattggccagattcttgggttcacatgtacgggctttaaatgctacagatatcggcttgggaacagtaggcttccaaatacttgaggaaacattgccaacagaagtagctctttcccacatcaacatcagtaagaatcgtggtgggatcagagcagcatattttgtttccagattaatatgtcgagcaccagaccttgtctcagtcaatgcagcagggaaccttttaccacctgaatcattggaagtcatctgtaactccttgaagcaagggacttgtaatttggagcgagtggacctgactggcaacatgcatttatcaagcaatatttttcctgcattccttgaattcaagaagcatggaaagccaattctggtagtaccaccaaacttgagcacttctgctccatatgatgatgccccatgactactatccgcgg

SEQ ID NO: 277433 - DNA, 462 bp, Zea mays
ccagtctcccgggcagaagaggcacgagaggaaggtggggaaggaaaccacagccgcttctggcgggcgctcaccctgccccttccacctcgcctcgcctcgcaatggaggtttccaggtggaccccggcggccggcctcctgctcctgttgctcctcccgctcgcggccaccccgtcacgcgccgccacgatggcgagatcgccgtcgtcgtccactgccgtgttccagctccagggagacgtataccccaccggccactactatgtcacgatgaacattgggaacccagcgaagccctacttcctggacgtggacactggcagcgatctcacctggctgcagtgcgacgcaccctgtcggagttgcaacaaggtgccacatcccttgtatcgaccaacggcaaaccgccttgtaccgtgtgcaaacgcactctgcactgcactttacaacggacagggct

SEQ ID NO: 277434 - DNA, 496 bp, Zea mays
aagataaagagccccatggaatttagtatgcccggaacaacaatatttcagtctgtcctttctgaggaagaccatgccaacctttccgcgcacgagccagtaagtttcacggagagacaagcggggtgcatccttagtttggctctatgttgtatcacctactgcaaatatcttgctaccatatgctacggcccacatcattatctggcagaccatgcaaaatatctacttgaaggtatcgatcctgcacaatgaatcttctttcttggcataggtgtgttgtgaaatcttatgctcttatgagttaatgtaaaacgtgtcgtgattatcaaggctgttgagcttattttctatatgattgtatgctgagctcgttatttattattttgtatggaagcaccatttttctaaaaaaattttgtcacaaaaaaaaaaaaaaaaaaaaaaaaaaaaaaaaaaaaaaaaaaaaaaaaaaaaaaaagagacccccccaccc

SEQ ID NO: 277435 - DNA, 1129 bp, Zea mays
ccctctcccgtctcccctcaccttctccacctcccccattccgccaccgcacaagccgacctccctcaccaagaggagaaaagaaagggagagcgaaggaggcaaaccaggtgggacagcaacgcgacgtgcttgctattctctcgaggagctcatgcaaggtgtaagtcttactgcaagaagggcagctgtgcatgttaagacccatacatagcctctcttgattacacagcacggggggtgaaaacttgagatacagttgatctcctggttcagagtatgggttcaaggtttgcatcgcatcagctgagcaatggcctgtatgtttctggtcgacctgagcaacctaaggagaaggccccaaccatttgttccactgcgatgccatatactgggggtgacatcaagaaatcaggagagctggggaagatgtttgatctccatgttgagaaatcaagaaaatctggtcctctaggaaacgctccttcaaggaatacttcatttggaggcactgcttccaattctgggcctgtctccaatgctggtggtcggtccaactactctggttccctttcatcttcagttcctggtgctggtggatcagccagagcgaaatcaaactccggaccactcaataagcatggagagccaacaaagaggtcatctggtccccagtctggaggagtaaccccaatggcacgccagaattctggcccccttcctcctgtgcttccgacaactgggcttatcacatctgggcctatctcttcagggccacttaattcgtctggtgctccaaggaaagtatctgggccacttgattctgctgcatcgatgaaaatgcgggctacttcctttgctacacaatcaagctgttactaatctgaacactgaagatggttactcaattcagggaagctttccgaagccaatactctgggctgtgattttgctctttgtgatgggttttatagcaggtggctccattttgggggctgttcacaatgcaattttgctgatagttgttgcggtcatatttggttctgttgctgcacttcttatctggaatgcttgctggggtagcacaggtggaattgggtttgttagtcgctaccctgatgctgatctc

SEQ ID NO: 277436 - DNA, 456 bp, Zea mays
cccacgcgtccgcggacgcgtgggccgagcggcacaactctctcgcaggcttctctcccctctgcgcccttcccgcagcaccctgctcgcagcgctctccacaggacctgctccgcgcgcgccgcccccatcgccggcaaggcggcggtgctgctgcatattctcccggtcccccctccggagccaccctccccttctccgggacctcgagtaactttggagtaccagtgatgcaaagggacactagctctagcgatgtttctgcttctcatgtagggcgtgtacgacgtcgcaaacatccatctgaggcttccacagatgggaatagagctaatggacaaccgttgcttgtcaatgatcagaacaagtataaatcaatgcttatccgtacatattctacagtatggatgattggaggctttgcctttattatttatgtgggtcatctatatatct

SEQ ID NO: 277437 - DNA, 588 bp, Zea mays
tttgttgcactactttagtaaaacttacaattatgatgtacttgtccagattattgaagaattccagaagtgccatctggatcaccctgtcaagaagttcttcggagagtgcacagaccttaaaatcaagctagatcgctgcttccgacaggagaaagctttgaagagaaaggcaaactttgaagagagcaagagatttaaagaacagttgaaggcttacaaaagggaaattgcagagaaaagcgaggaatgataacttggaacggaggacaaggccgtagaggctcttaatctgtgatgacctgcccttgattttgtgaaggatctgtcgagtgtttttgaatataatgtttctaaaaaatattatactcttttcctagtagcagctaaactttaacagcttaaagtttcttccatgactaccgaatatgtttccaatttgttcatgcatgcgtgcaggagtcctttgtatcaaatttggacaacccactcttgttgcctagtataagcagtttattgtccattcctttttttttaataatctctcttattattctctgtttttcctctcagggtactttattcttt

SEQ ID NO: 277438 - DNA, 702 bp, Zea mays
tcctctcgtccgcccacgcgtccgagctcttgcactagctagagaccgaacagagagagattggagaaccatgatgaggtctggccttatctcgctatgtttccacctagccctggccatcacactggctgcaagtgttcctggccttgctcgtagtagggtaatcgacatggaaccgcaactcaaaccgacgctgcaactagaaccaaagcatggtgtatctcaaccagacagaaaccaagaacccaaaccgacaccacagcctgagccaaaaccagagcctaaaccggaaccgaaacctgcaccacaaccagaccccaaacccgcaccacagccggacccaaaacccgcaccacaaccggacccaaaaccagaacccaaacctacaccacagccagacccaaaaccttcaccacaaccaggcccagagccgaaacccaagccagcgccacagcctgaaccaaaaccagaacccaaacctacaccacaaccagacccaaaacctggaccacaaccagacccaaaaccagaacccaaacctacaccacaaccaggcccagagccgaaacccaagccagcgccacagcctgaaccaaaacccacgccgcaaccagatccgaaacctgagccagaacccacgccgcaaccagatccgaaacctgagccaaaaccaacaccacaaccacctttcccacagtccga

SEQ ID NO: 277439 - DNA, 319 bp, Zea mays
caacggtccgggacgtgggtgcttgcttgctaccagggtgtgtgtgagtgtgttagtgagagagaaccatggcgacgcagcggctcacggcggcgctggtggcctgcctcctcctgctcctggcgctgccggcgcgcgggcgcaacatcacggccatcctcgccgggtacaaggagtacaagctttacaaccagtacctgtcggagacaaaggtgtgcgacaagatcaactcgcggaagtcaacttcaataaccgtcctgtggctgtccaacgaccccttgacaaccctggcctccaaagccgggaattggtttcccgc

SEQ ID NO: 277440 - DNA, 587 bp, Zea mays
tattgaaccaggatcaaggccagaaacttctgactatcctcagtcaagtgagaggccactgactgccacaagcagtttcagttctgcatccccattttcggaatcaagccaactagcttcgtctagtaaacaagcggccccatatctacctcgcaaccatatgggcaggcggtctttcatgtctaaaccagtgtacccacttgtcttccggaaccctgtgtccgaatcagaagcgtgcaggatgcttgaggttagtaatgccgggcgagcgacaccaagtgatgacagccaggcttctcctctgtggcgtcgcagcttggcgagcccagagctcaagttccataacgcactgaacgaacttgggaagatggaggtttcacctgaacggaacacgagctcaagaagggaagggttcagatggagcaatgccagcagttatgattttggatacgatggagatgccattgacatgtcagatcatatcagtttcgagtcccagagatcacccacaagctcagtgaggttcctgaaatgtgggctctgcgagagattcctgtgccagaaatcaccctggacctcgaaccgga

SEQ ID NO: 277441 - DNA, 449 bp, Zea mays
cttgtacgcatctgaagacattaacaatgggcaagggacaactgggagaatcattttttcaagctttggctgagtgcccattattgactgctttaacagtcaacgatgcttctcttgggagtggcattcaagaagtcactgttaatcatgatggactgcgtgagcttcatattttgaagtgccgtgcacttagaatatctgtcagatgttcccaacttcaaatactgtctttgaggcgaacaggcatggctcatgtatcactgaactgtcctcagttgcttgagttggacttccaatcctgccataagctttctgacaatgcgattcgccaagctgctacagcttgcccattgttggcaaaactagacatgtcatcttgttcttgtgttactgatgagacactgcgcgacatagctagctcatgtccgagtctttctggtcctgatgca

SEQ ID NO: 277442 - DNA, 589 bp, Zea mays
gaagcatcgttggtagtcgtgtagcagcacacataggggctgggtaaatgggttggttgcccaaccgacatgctgtgctctctgttccagctgagcaacctgcctttgcctgatgaaccaaccatccgagtgtgcagcagccatctccagcggaaataaactattgtaattgtactgctagcagtagtgatcaaaataatgtgcacagtaatgagatccacagatttatgtattcacaatgattccccgatttgcttgcagtactaattactctgcacattattttgatcactactgctagcagtacaattacaatagtttatttccgctggagatggctgctgcacactcggatggttggttcatcaggcaaaggcaggttgctcagctggaacagagagcacagcatgtcggttgggcaaccaacccatttacccagcccctatgtgtgctgctacacgactaccaacgatgctccaccaaactctgcagctgcaatcatggcagctgccaacgcccgccgtcgcagctgaaacggtgcacctggatcactttacagcagcagcaacgtgttcgcgattaggtctgg

SEQ ID NO: 277443 - DNA, 376 bp, Zea mays
cccacgcgtccgcccacgcgtccggcttccctgcagccaaaatgacgaatgggttaccctgcttgaatcctttgccactgcgcttgcctgctactactattccatgcaaaacaacgtgttcggaaccaaaattaaagttccgaacatcgctgtgatgaatgggtgaatcgtcacctttttcttggaaatagcatctgcttgctcgaagaacagctgcgctggtccagctatctgggtaccgtactccctaccctcgattgaactgtatttgggtcaaagtaatctggggagatactctttccatgctaggatataaggtgttactacctttaattcttagatcacgatatatatttaattctcttttatcaatttt

SEQ ID NO: 277444 - DNA, 339 bp, Zea mays
caaggagaaatcaaggcgccatccatcacacgaccgagttgactactacagttcgcattcatcgcgtgaaaaagatcggcatagacaccattgatcaaggtgaggaggatcccgggtttgcagggctttgctgcatggagaccaccacatggcagtgccgacagaatcatgaaaacttgtagattgtcatctcattggcggttgcatttgcttcattgtgttttgcaccttggattgtaacttgcagagcaacatgaatttgtagaaccttcatctccactagttcccaaaattctcgagaattaatttatggtgttactaatataaaaaataatttta

SEQ ID NO: 277445 - DNA, 673 bp, Zea mays
  unsure (1)..(673): unsure at all n locations
gcatccggtgtgttccctcgccatccgccgccgccgccatgccgggcttcgctcagcgtctcgcgggcatcccgtggcggagcatcgcgaggcaaggcctctcccgcgtgttcctggtggcgaaggcctactgcgtgatccacgtcgtcaacgaccacctctgctcggtgaccttagtgcggggcgccagcatgctgccgtccctgaacctggcgggcgacgcggtggcggtggacagggtcagcgtgaggctcggccgggtcgcgccgggggacatcgtgctgatgatcttccccgaggacccgcgcaagtcggtcgtcaagcgcgtcgtcgggatgcagggggactccgtcacctaccttgtcgaccccggcaaaagcgactcctncagaaccgtcgtggtaccgcaagatcatgtctgggtgcaaggtgacaatatctttgcttctaacgattcgaggcaatttggagctgtgccttatgggctgattacagggaagatcttttgccgggtttggccgtcagagagtcttggcgcaattgatgactcatcgaagcagtcttaacgctgatgaggagccgaggagcacatggacccatattgtttgatcgcgcccagagattctatctataacatactgcatgggggccctttattgagctcgagagcttt

SEQ ID NO: 277446 - DNA, 535 bp, Zea mays
ggtgaataatgcaacgtcgaaggatgctgcctgcaacaacagagctacaagagaatctgatgagaaacacattcttgaggtaatggaaaagatgcaaaaaaggagggaaaggttcaaagaggctattgcaccaaaaaaagaagtcggtgacaagaaagacctatcggctttagcatgcagtacagatttcatccagaatcaacggcctgctaggaaacggcggtggggtggtaattgttggatgctggaaatgccttgagagtttgtccgtgatggtttcttcaacaaggtgttctgcttatgttgctcaaaacattttactgttatgtttacttattctgatggctgggttggggaaacaaaatatagaaagcatattcttcaggcacttttatagatatagtatcttgcatagtttaagagtaaaaaggttcgacttcaaatgtaacgtgtttgtggggttctttcaaaccactggagatgatttactatcccctaagatgagatttaaatggtttcctttctgcaggctgct

SEQ ID NO: 277447 - DNA, 956 bp, Zea mays
ttatgggccgtctgccccggtggtgcgtcgggatccctacgaggtgctcagcgttcccagagattcctccgaccaggagatcaagtccgcctaccggaagctcgcactcaagtaccaccctgacaagaatgctagcaacccagaagcatcggaactcttcaaagaagttgcatattcttatagcatcttgtcagatcctgagaaaagaaggcagtatgatactgctggttttgaggagttagaaaatgaaggaatggatatggaaattgatttgtccaatcttggaactgtgaacacaatgtttgcagcactttttagcaagcttggtgttcctatcaagaccacagtatctcctactgtgctggaagaggccatgaatggcacagttacagtgagaccactccctggtggaacatcagctactggaaaggttgataagcaatgcgctcatttttttggcgtaacaataagtgaagagcaagctcattctggaatggttgtcagagtgacttcacctgctcaaagtaaatttaagcttctttacttcgagcaagaagttaatggaggttatggacttgctttgcaggaagatagtcaaaagactggcaaggtaacatcagcaggcatgtatttcttgcatttccaggtgtatcgtatggactcaacagcgaatgcgttggcaatggccaaagatcctgaagctgccttctttaaaaggttggaaggtctccaaccctgcgaagtttcagctctcaaatctggaacccatatatttgctgtatatggtgacaattttttcaagccagctagctatatgattgagcgatgtgcgcaaagagttatgaagacacaacagagaggctgaaagagatagaatctaaaattctagctaagcgaaatgatctgcgtcaatttgaaactgagtacagaaaagctttggcacgatttcaagaagt

SEQ ID NO: 277448 - DNA, 425 bp, Zea mays
agtcccttcagcgtgccaccctcgtctactgcgacaacgtcagcgcggtctacctctccaccaatcccgtgcagcatcagcgcacgaagcacgtggagatcgacctgcacttcgtccgcgagcgtgtcgctgccggtgacgttcgggttctcagcgtccccaccacgctccagttcgccgacatcttcaccaaggggctaccgtcgagtgtatttttagactttcgctccagtctcaacatctgtacaggacagagttgtgactgcgggggtgttagactatccctttgtaatgggccaggcccaagtactctaatctatcaatacaacttcaaccctggttagggttaggttttgtcacaatccaacatttagttgttatatttggctttttggctaattctaatgattttcttgatgatttca

SEQ ID NO: 277449 - DNA, 397 bp, Zea mays
gccacaactgcagctcaagtggcagcagctgttgccgggaagctcattgatactaatgcaccagtggatctgggaacagaatcgaatgtgatgcatacatttgaacttcctatatcattgtctgctttgcaagaatttggtggagccaagggcctgtttgatggttacatggcaaggaggcagaagatagaagcttcaatggggtacaaggtgcctgacaacgatggaaggaggcatgctttaaccttgagtgtgagtgattacaaaaggcggcggggtctcctctgaatggtatctctgattgtgctggacgcccaacggattcaactatattcctgtcgtctgcacctatgtgcatttgctgggacaattgtgcagatcatttgcattttgcctt

SEQ ID NO: 277450 - DNA, 469 bp, Zea mays
gaggcgttcctccgttccaccacaaaccagcggaccttcagcttctccaccgcggctccgcctcttctttcacggctccaccacgcactaaccctaaagcttccccgcgttgccggcgatgagcagccttcgagccatctcctccctcctccatatctactccacgtccgccgccgccagacgaggagccgggcggctgggcttcgcgccgtcgcccggcgggagattccgggtaccgtcgaattccggtccgcccgcgttcgtgttggacgaggtcgcgagggcggccggcggggttcggaggagggcgtccacgcgcgcggcgagttgggactcggagaaatcgccgtacgagacgcttgagctgggtagggatgccgacgaggagaccatatagactgcctacagaagattggccaagctctatcaccctgatgtttatgatggtaagggtacccttgtggtaggg

SEQ ID NO: 277451 - DNA, 716 bp, Zea mays
  unsure (1)..(716): unsure at all n locations
ctttttgtatgctggtgctggggggatggtanacaaaatgtctggtgattccacagagtcccaattcacactcaacttaccagataattctgtcatttctaagattgctgtttggacaacggtggcaaatccaataaccaaatatgcattaactattattccattggctatgagtttggaagagctgctgccaccaaaccaacaaaagtattctacaataatcatgcttagatcatctctggtgatatcaaccctcctgattgctctatctgtgcctttctttggacttgtgatggccttggttggttctttgtttgccatgcttgtgacctacattttgccttgcgcttgttttttggcgatcctcaagacaaaagtggggtggcatcagatagcagcttgctcgttcatcatagttgtcggggtttgctgtgcctacgtgggaacatactcgtccctgtcgaagataatccagaactacgcatagcacagctgttcctgtgatcctgtatatgcatctgcccgacaaaatcatgtgtgtgctatatgggccgaacatatgtacaagatgaaagtttaccattcaattcactcgatgtataataaattattggtgccttatcatagggctcaatgatttctactacgattttaaggttgtatggtgcgtgagtaacattgttccttatggtgagaaaaaagcctgccttggtctt

SEQ ID NO: 277452 - DNA, 825 bp, Zea mays
tcgccacgcgttctgccacgcgttcgggcgagggggaggattgggtttaagagagctgtcgtggttgggttgggagcttctgcggtgatcgccttggctgggctggcgtggcgctttccatattcccagaagcgtatacagcaactcattgttgctccattacactatgttcaagagaaattgccaacaatagagtcaacagagacaaccaaggaggatgcaagtgacagggaatctgatgaaattgaagtttctagtgcaacacatgataagaaggctgaagcaataactgatgattcaaggcaaaactacaggacagcaatcgccagcccttttccattcggagttcctacagatcctgtgcatgaggaggctctctctgtattgaagaagcttcagataattgagaaagatgttagctccagtgatttttgtacacggagggaatctgcaagatggtttgttaagctaagctcaaagtttgagaggaaaaggatgcgcaggattgttcctaataaattaacttctgacacagtccaatgtgcctttgatgatgtaaatattgacgacccagacttcctgtatatccaatctttaggagaatctggtatcgtatccagcaagttgtcaaactccttggaaacgttgacaactggctctccttgttcccagggaaattccttgttcctacctgatagttacctctctcgtttcgatcttgtcaactggaaagtgcttgttgagcatccacgcgcattgagaatagacgaaaagataccgagtcaaaatgtttgcattttggatctgcgagcttgcccagatgtg

SEQ ID NO: 277453 - DNA, 650 bp, Zea mays
aggacatcgtcgttttgagaacttcagaaagactgttaatccagacaggatgaattttgtgaacctgatagatgaattcgatggaggaagagtgccttgggatatattcagctcagaagtgaaaagattacacaaagatagaataggtgctccatattttagggagcctggcgaattcccaaagctagaagagtctttctttgcaaatcccttgcctggctgtatatgtgagcaacatagtgaagaatgaagatgcaggtgtgctgatggttcttaacccacgcctctgaagtcagaaaatataggcctcttactgcctgccagatgttacttacaccgttgtcgagccacggtcagtgaattcgttccaatgaatacaccactgctgggacaatttattccagtctcagcccttactggactacacagtatggataatggatgttctgcaacgggcgtgactgaatcagtttttgcacgactgtagtatgagtggctaggcctatgaggctatgaaatttgctgcaattggtacataaaagatacacacactggaggagtgtatgccgagggcttataattttccacaacttttgtacttgattatttgtaacaagacattgtttgcagaattgcacaactacatttgc

SEQ ID NO: 277454 - DNA, 605 bp, Zea mays
gcctattgctcaagaatatgtttgatccagctttggagacagatcctgatttcgatttggacatcagagatgatgttcaggaggaatgttccaagtttggtcaattaaaacatatttttgtagacaaaagtactgccggttttgtgtacctgcggtttgatagtataacagccgctatgagcgcacagaaagcactccatggaagatggttcgcagggaagatgatcacagcaacttttatgaccccacaacagtatgaaatgaagttcccgagctagtgaacagatgcatgattaatatggacgtagttgcttgggctcggtgggtgctggcatttctatattttagcgttttgagcttgtgtcaacttattactggaggttattataaaaaaaaactagtggaggaaaatttagtggaagctagtgtatcgggaaatggctaacgaaaaatggtgaaagaaagagtttccttgccctgtgggttagtgctcgaattgaaactgtactgtgtaatggagtttctccctgaagtgctagtactaatacctaaaatgatggaagaaagagttgacttgcgttgcgcttgttgatttgattatactc

SEQ ID NO: 277455 - DNA, 359 bp, Zea mays
tccactctaggtctctggcgggtttaatataagggagtcccctcttctccggggtattgaattcgaaccaaaaaatcaaaacaactcagcgattcgattcgcggcgagtcaagcgggatgccgccgcgcacggctccggcggcgacctcaaccccgccgcggaaggtgcccctccggaagctgctgcgtgcggcgtcggtcgcctgcggggtgcagttcggctgggcgctgcagctgtcgttgctgaccccgtacgtgcaggagctgggcatcccgcacgcctttgccagtctcgtctggctgtgcgggccgctgtccggcctccttgtccagcccctcgtcggccacctttccgaccg

SEQ ID NO: 277456 - DNA, 1108 bp, Zea mays
gcctcatggtggactccagcgccatggtggggtggatcggcaagacggggctcccgcacatcaagccgttctcgctggggggcaagaccccctcccaggtggtcgcggaccagggcttcctcgtctccagcgacaaccacaagcccaccgtgctcgtgcagcaggccaagatctacctcgccttccagctcagcttcaccgagccgctcaggcgccagaacgtgctcctcgccgtcggctccgccatccccgtcaacgaccgcctcgccgagcaccaggataagacctccatcgtattcgatttcaccacaggcagctcatcaggctcgtcatccttcccggaaggtctgaaaaggacccatggggcgctcaacctgttcgcctggggcgtgctactgccgatcggcgccatcgtcgcaaggtactgcaggagatgggaccctctgtggttctacctccacgccggcatccagttcgtggggttcatcctgggcctagccggcgtcgtggctggagtatccttgtacagcaagatccaggccgacgtccccgcgcacaggggccttggcatattcgtgctcgtgcttgccattttgcagatcctggcgattttcctgaggcccaacaaggactccaagtaccgcaagttctggaactggtaccaccactgggtcggcaggctcgccctcttctttgcagccatcaacattgtgctcgggatcaaggtcggcggagcaggcaactcttggaagatcggctacggtttcaacctggccgtccttctgatcaccatcgtcaccctggaagtcctgctctggacgaggtggaaaaacagcaccggttccacgggggcatattagctacttaaccgatttttataggtgtttgtgatggtcagtgaaggaggttcgtattcttttgttcgaatattttcgcgtgtatgcagttgctgtaatgtccgcgtttgctgcgtgatgtgttttccttttggtgcatgtgtcctggacttgccgttccgatgccttttgtgctgctcggaatggagatggaatgatgatttccgcaattccgccgcatttcccatgctgcgaatggtggtagatctggt

SEQ ID NO: 277457 - DNA, 392 bp, Zea mays
gccgaccaccgtccgcacggtgctctcgctggcccttgctcgctcctggccaggtcaccagctcgacgtcaagaacgccttcctgcacggcgccctcaccgagaccgtctgctgctgtcagccggcggggttcgtggactcctctcgccctgacatggtctgccggctcaacaggtccctctacggcctcaagcaggcccgtcgggcgtggcactcctgactggctacgttcctggtgaccctgggcttcgtggaggcctagtcacacacgtctctgttctgttcccatcatggagcagagactgcctacttgctttcctacgtggatgacattgtcctcaccgcctccaggcaggcacttcttcgccgcctcgtcgccgaacttcagcggg

SEQ ID NO: 277458 - DNA, 679 bp, Zea mays
tttagatccaaaagtcgacccacccagaatcacagacgcagcacaagatgcaccagcatccaccaagactgatgtcaaggtggtcgatgcagctgcagccacagctgccaagccaaacacagcggagaatccttcgagttccaatgctgtcccctctccagtgcgcacaacagattctgattcacgtaagcatgcgtcatttcccgagcaggatagtcctcatgagaacaaaagcgcagccgtccatccaggtgaagcttctgcgactccaggtgttggttcaagccaccaccgccatgaagcacctgaggcccgttcagccagcttcacggaattgtttggttctgagtctggcatcgaatcagagtccgaagacttgatgccagatatcgtcgacggggaccctgactctgactaggtttgccgtcagttcgttttttttggtaacatctgtatggctcgatccgttttgtggactagtgacaacagtgtcgtctgtcatttgtgacatggcaatggaaattttgtgatgttcctgttttgttttgagcaattgtacgacattgccggctgactgttggtgctgtttttgttttattattatatttttttttttttatattatttttttttttttttttttattttatattttttttatttttttttttttatattt

SEQ ID NO: 277459 - DNA, 489 bp, Zea mays
agtgtgcaggcccgtcgtgcacaaacccgtacaagtaccgcgactccaagacgctgctccctctctgcagcctggcgtgctacaaggctgtccagggccgccctcctgaccagcgaaccgacgctgcccaggggagtggaggtggccaggaaagcgctgggaagcaagcatgatgaatctagctacctgacgcgattgaaccgtgaccgtcagttggctggagaagtgtatgttaacatgtccagctcgctggtgtgtggtttcccttggcggtagtctaacaatcaacctgacaaaagatggggtgaccgcttgcccgtcgtgaaccaagccgggttttgttaatggtggttcgagtttaaacccatggtgtggtcggatcggtgtatgagactagtcgagaaatatgaagggggaaaaaacttgtacagcaatcttgtgcttgcgtggttggatgggagcccagcatgctgcatgcatctgtggcac

SEQ ID NO: 277460 - DNA, 509 bp, Zea mays
  unsure (1)..(509): unsure at all n locations
cgcgccctcccaccacgcaagggtcctcgnctgcgatcacatggtgtacttgagcctcaaggaatgcctccacgatccgctcccgacgccgctggactggcggaccaggctgcaggtcgccattgacgtcgcggcagcacatgggatacctctactaccactgcgaccccccggtgttccacgtgtccgtcaactccggcaccgtgctcgtggacgccaacttcgtcgccaagctatcggatgtcggcgtggtcagccacgacgtgaggctcgccaccactgactccttccaaggtctctctatccgctccccaactcttcccaccccccacgacgtggccgcgctcacctatcttcttgctgcgttgttcgctcgcctgtgcctgtgctgtgcatgcagaccgggtcgagcggaggcgggcgggcctggcgttccaatacggcgtgctggtgctggagctggtgacggtgcagtcctcgggcgctgacggcgagctcgtgcgctgggc

SEQ ID NO: 277461 - DNA, 877 bp, Zea mays
acgggaagccaacaagctagttttgcaattggctttaattcagattctcctcatgtcaactttgggaagagctacatagtttgaagaaactcatgatcgctggcttacacttgacgagctaggttcacctgatgatacaggagataaagtgtgtgctgttgcatgggctcctaacattggcagaccatatgagattatcgcagttgcgacctgcaaaggaattgcaatctggcatataggtttgaacgctgacgctgatggtggaccttcgatgcagaacgttgctttacttaatggccacgatggcgaggtgtggcaactggaatgggacatgggcggtatgacactcgcatcaaccggaggagatggcatggttaagctatggcaggctaatttggatggagtttggcatgagcaggctgttcttgactgcagtggatcacatgtctagggtctacgtgtttgagaaaacattttttttgttcccagcacactagaagttgctgcagaattatccagtacttctttcgcttatccgcccaactattgctgtctcctgtgtggctggttgggcgctatcaaaactggaccattaacggccgtgggaccgcattgaaaagtccagaaaacgaaggtacatttgcttgtaaccttgtaattggggaagctacacagacgttgagtctaagctagtggacggaggtcgagatcaaccacgtgatgtacacgtggtcatgttcctcaaaatcttccgcaggtcctttcagatatcactgatatgcttgtcccattaaaagcagattaacccaggacgcccttcggctgccccccaaaaaaaaaaaaaaaaaaaaaaaaaaaaaaaaaaaaaaaaaaaaaa

SEQ ID NO: 277462 - DNA, 446 bp, Zea mays
acgccacgcgtgcgccgacgcgtgggtaaaaaccaacatgcttcttgtcaaaaaaataagtatgattttgttgcggggatcctttaataaagcgttatgtttaggaagcaaagtagggtatcgaatagactgcaactcggaatagagaaaccttgctattgggagccatatggcatgacaccaaagtataatacacgatcgtgttgtatgaattgctagaatggtagagtgggctagtttttagttgtgaggattaagctgtcttatgttcctgttaggccacaggttttcatttgactggtacatcttttgtttgaaattagacagcacattagaactgtactgtgaaatgactgtgccatgatgcccccctattcagtctaaaaataaatagttgcccccctatccaggttaaaattatagtatatttgggagtctctggcact

SEQ ID NO: 277463 - DNA, 578 bp, Zea mays
cccacgcgtccgcccacgcgtccgggttgctcttggagaggatgtcaagacgctgcaaaagaaagacaacgatgcgagccagtggaaagaggaaaacaaggaactgttcatgccactgaatgaacaggtcaaagatcctaaggagccaggctcggctggagatgccctggaggagaaggaggacctgttttggcgtcaagggttgttaatcattcagaccatatatcatggtgccgtggaagctcttccgtcaagcttaaccttgcggaagaaattcttggagatactaaacagtgttgacttggcacattctgatgagttaaaactggaggtcctggatgaccttaagagagatttctctcatagcgaggactactgggattggtttgctaggcttcagcttagcaacttgaacagttccagtaattcgaatagaaaggatgctatatcaaacaagttgaacagatcaattcaggtgtatgacgaagctatcaggaagctaccaacattccaaaatgtactcattgtatgccaaagttttggatggatgttatatatactgacagagaagattcagt

SEQ ID NO: 277464 - DNA, 480 bp, Zea mays
cccacgcgtccggcccggcctccgcctgcagcttgaacgcgagttttccagactggtcatcgccggagttggggcactgcaagagcagcaaggagaaggagcctgcccctgcctacctcaccttgagcgcgcagcctgcgccacgcgggaagcagcctcctcctgcgctcccctcgatcaaactcccggagttgggtcactggggcgtcatgcagcctcctcaggcaacacgggagcgcttcggcgtcgtcgtccgcgtcggcgtcgcggcccgtctacagcttcatgccggctggtccggttcgcatcgacagaccccggatcgggatcaaggccgacgacgcctctgacggcgtcgacctggaactgaagctgtgaaggcgctcatcgctggacccctctgttcctagctggtaaatttgacgccgaacctgaagcgggaactgggaacagagctcgtcgtcgtcgagaagaaaagtt

SEQ ID NO: 277465 - DNA, 1126 bp, Zea mays
  unsure (1)..(1126): unsure at all n locations
caagcaacctcgccaaaaccctacgccgctcaactatgctcatccggcgaccgctccaaaccctcaccctccccctcctccgccgccacttctccgccgccaccgtcgaggcctttgtgtcccccgaccaagccaccgacccgctctccccgccgtacgactacctcccgggccacccgcggccagacgctaagcacaatgaggtgatcctcgccgtcccgcgcgcctcttcggggcgccacgtagccgccaaggagcgcaaggccgggcgggtccccgccatcgtgttcgagcaggagaacggacaggagggcggcaacaagcgcctcatctccgttcgggccaatcagatccgcaagctcgtcgaccacctcggccggtccttcttcctctccaggctgttcagtctccaggtctggtcagaacatgccgggcagggcgaactcatcgtaagcgtccgcgtcctacccagaaaggtacacctgcatgcaggcactgatgaaccgctgaatatcacatttatgagagcaccttcttctgcacttctcaaataagatgtttctctgatgttcattggagaggatgcctcgcctggtctcaggaaaggagcttacttcaacaccataaaacgaacagccaagtatctgtgccctgctgacatagtaccaccatacattgaagtggatctaagtgagttggatgtagggcggaaattgctgatgcgtgatctgaaagttcatcctgcgtggaagctgcttcattcgccagatcagcccatctgtaacgttaccggatcaaggtctccagaatagaagaagggaaaataacctgcttctttgtatgagctgttttgagcacaataaggctttgctttcgtacttgagtgattcaggtgcttacttgtcctactgttaggatgaattggtgccagagacacctatttttacctctggatgggatcttttgagcaggtagatgctactacagctagacgcacttgcaaagcttcctaaatatggtcatctagtgttaacagagacttatggtgctgtgagcaatatngaaaattggttgcaatctaattgcttacaatatgatttagatagcgtaagtttctgaagatgat

SEQ ID NO: 277466 - DNA, 609 bp, Zea mays
tgatctctctcaacatcaacagggctcaataggtcacgggacaacccacactcgggaggcactgccattcagagcacccagttctactgggacactgctaatcctagcagctgcagcagtagaggaagcagcggaagcaacggcttgggatttgagctgcaaagcacaagctcgcttctggagagtagtgttttcccatggacagaattaacaccagataaaaatagccaagttcaccttggggaagaactcaagtggcccgacttgctccacggaacattcacggacacacctgcaaccatgcagaatcttagccagtcactgtacgaagatgttatcaaagccgagagccaattcaacatagagggcctctgtgcagcctggtctcaaaatctgcagccacagcaacatctgcaggtatcagatttgtatgacaaggatttgcaaaggatgtccttgtcttttgagaatatctagacagcatgtttcagcatgcagggaacagagaaatagcagaaagccgagtcaatgaagcctaaataaatacaatatttcttcacagattcatttgaaggctatgttgatgtgtgttttacgtaagtacattct

SEQ ID NO: 277467 - DNA, 429 bp, Zea mays
catgaaaatggagctttgacgtagctagctgaagaagtccagcccaaagcttggacgcctccttcccccctgtatatacagaacagagagggagagagaggaggaccagcctgcagcggaaaaaagcactcttgagattcccccaccccactggtgtgatgattctttggacagagatgtgaaagatcaatcgccacgccggcggccggtcgatcgcaccacccccgccgcctgttgttagccgcaagatcgccggcgaccaaacgcggtgcatcgcattcccccggtatattctcagatcagacctgaattcgtcttcctctcaagcgagagggggaaaaaaagacctgtaatatcatttggatcgccattatatttgtagctgattatatataaatatatcccatatcatccctcgtattcctgtcc

SEQ ID NO: 277468 - DNA, 664 bp, Zea mays
ctttaagattattttgggagttcctgcacagggtaacaagctataacaaataaaatgtgaagaagacagttttctccaaatgttaggtctttgacatttttctataacacttcagcttaaatatgtacttttttcttttaatttgcgctgaacttgatgctaccttggtgacaagagcagatgtacgtttagtgcgatcaccaaggtcgtccgtatcccacggctgggctgttattttcttgtaatactgctttcagatgtaatgactattcatttctttttcctggtacggaataccggtagttggatggaaatcggcaacagcattagccatttcggaatagtgagcgcccaagtggtcttcgttttgctgctttttgccctcacgaatatatacactagagatattttggtctcgtctcggcaactaaccgcacggaaagttatgtaaatcgttcagtttatttagaaatccaaatacatccatgcttttatttattcatttttgggtcgactttcattttgggatcaagtttgtagcttagcttttggctagagttttgtagcttagcttttttgttttctgtgaatggacttggtgtcaaatttgtgcaatttcaatcgttacttacagcctgaacagattatactatattagctttct

SEQ ID NO: 277469 - DNA, 2169 bp, Zea mays
  unsure (1)..(2169): unsure at all n locations
ggctgcttcagctccgacatcctggcggccgtcgaccgcgccgtggcggacggcgtcgacgtgctctccatctcgctcggcggcggctcgtccccctacttccgcgacagcctggccatcgcgtcgttcggtgccatgcagatgggcgtgttcgtcgcctgctcgggcggcaacggcggcccggaccccataagcctcaccaacctgtcgccgtggataaccacggtgggcgcgacaccatggaccgggacttcccggccacggtgacgctcggcaatggcgcaaacctcaccggggtttcgctctacaaaggccggcgaggtctttcgtccaaggagcagtacccgttagtctacatgggcggcaactcgagcatccctgaccccaggtccctgtgcctggaggggacactccagccccacgaggtcgctgggaagattgtgatctgcgaccgcggcattagtcctcgggtgcagaagggtcaggttgtcaagaacgccggtgccgcgggcatgatactcgccaacacaccggcaaacggcgaggagcttgtcgccgacagccacctcctgccagcagtggccgttgggcagtctgaaggcattgccgccaagaagtacagcaaaaccgccccgaaaccaacggccacgctcagcttcgacgggacgaagctcgggatccgcccatcgccagtcgtagccgcgttctcgtcccggggaccaaacttcctgaccctggagatcctcaagccggatgtcatcgcgcccggcgtgaacatcttggcggcatggagcggcgacgccagcccgtcgagcttgtccagcgaccgccggcgggtcggcttcaacatcctgtcggggacgtccatgtcgtgcccgcacgtcgccggcgtggctgcgctgatcaaggccagccacccggactggagccccgcgaagatcaagtccgcgctgatgaccaccgcgtacgtccacgacaacacgtaccggtcgctgaaggacgcggccaccggcaaggcgtccacgccgttcgatcacggagctgggcacatacacccgctgcgtgccctcaaccctggcctggtctacgacatcggccaggacgactacctggagttcctctgcgtggagaacctgacgccgttgcagctcaggtccttcaccaagaactcgagcaagacatgcaagcacaccttcagctcgccgggtgacttgaattatccggccatctccgcggtcttcgcggagcagccatctgctgcgctgacggtgcgtcgcaccgtgacgaacgtcggcccaccgtcttcgacttaccatgtcaaggttacagagttcaaaggcgcagacattgtcgtcgaaccaagcaccctgcacttcacaagctcgaaccagaagctgacctacaaggtgacgatgacaaccaaggctgcccagaagacaccggagttcggagcgctgtcctggagcgacggcgtccacatcgtccggagcccccttgtcctcacatggctgccaccgatgtgagcttcgtttgtgtaccgtgcgtttagagcaagcaatggagcaggaacctctgggcctgggtaatcaagccagagatctgttgtgtcgcagcggcagcggcagcggcagaacaggttcactaaccaacggaaaaatactgtcaaagctccacatgagaaccgcctttattcttcaatgtattcatgcttattccaaatgttcagttgccagtttgattgtttctacattaatgagtgtacaagaaatggaagcaaatagtacggaaaatttgctggtagcaggtttagcttgattcccaaatggtgacaccatcacaagtgcagagtttcttgtagttctctcctaccccggcgcttcttgcaatcacggctgcggcaatgccagggtctgatctgtcctcggctgcatacaaagcaatcgagcggccgatcaagtcaaccactctcaatttcgccttcggtcctgagaaatgggcttccccgttctctccagcttctagtgttcccaggtcaccaagaggctgtttcagagaggtacaaatattagttcccaattctgattcgaaggagttacgttttcattgttgaaattggtattccttcaaataatcccattgatttctcaaaaaaaaaaaaaaaaaaaanaa

SEQ ID NO: 277470 - DNA, 403 bp, Zea mays
  unsure (1)..(403): unsure at all n locations
ggttgcatacaaagcaatagagcgnccgatcaagtcaaccactctcaatttctccttcggtcttgagaaatgggcttccccgttctctccagcttctagtgttcccaggtcaccaagtggcttatcagataaatgatctggcggattatagacattgccagtgctttctgcacctcttgtcaaatccccaaactgatttattgaccatccatgtttaccaggtgatagaccactaaacgtggcttcaactctagccaactccatgtttacttgggccagacgaacaacaccaaatacaacaggccctttaaactcagctacagcagcagaaactaagaaatcatttgggttcccttggccaatcagtcgcgcatctcgacctgtttgatgaagggcatctaac

SEQ ID NO: 277471 - DNA, 495 bp, Zea mays
cggacgcgtgggcggacgcgtggggtcgcactagccaatcgtgcagcagctttgaatgctgccggggtctctatcaaagaaaccatcaccgctgccatcataccgaatgcatggtctgcactgaatgttggtgcaccccattgtaaagggtatggaatgcttatcctaagagagtggaaagttacatgaaaaatgtaaaaacattgatgttaaaattagtcaatgatacatagggaagtctccaaaccattgtgatgaagatatgagattggcacggtctgtccgacagttgatctgggtgacaagtgctgtgtgcttgtatgcaccacttgctgtgaggatgtgggcatatacccatacaagagtgatgcacatcagcaatgagaacctctcggtaacaggaacatgacgaatatgcacgtgcttgagatactgggaaagcgcgactaataggataagcatggaagaccaatctccacgcatttcccaacccta

SEQ ID NO: 277472 - DNA, 514 bp, Zea mays
agagcaacgacgccatcggagggaggaaagagaagaagacgatccgctagcgtgtgcgtggcgacgagatgtggcggaggcgagtgggcgccctcctccgatctccacgaacttcttcctcggcctcctcggcctgccagagccgccgccaccatcttctccccagcgaggaacctcttgctctcaaccgtcttgccaggctcttcacgtcccaggctggaagtgatggtggcgatacccagaagccctttattgcttttgtcttaggtggtcctgggagtggcaaaggaacacagtgcactaagattgcttcggattttggatttgcccatctgagcgctggtgatattctccgacatgaaatagcatctggcagcgagaaaggggagttgatcctagaaatcataaaggaagggaggattgttccgtctgagataactgtggaactcatcagaaaagcgatggaaatgaacaatgctaaaagggttcttattgatggcttcccaaggtgtga

SEQ ID NO: 277473 - DNA, 1002 bp, Zea mays
agtaccgcaactcctcttccaccaaactccagaggcatccaacagcaggcgaggaaagcaagacacgcccacccacccgctccggcagccagcggctatgcagcagcagatgcccatgccgccggcgcccgctgccgccgcggcggcggcgcccccggcggccggcatcactaccgagcagatccagaagtatttggacgaaaataagcaacttattttggccatcctggaaaatcagaacttagggaagttggctgaatgtgctcagtatcaagctcaacttcaaaagaacctcttgtacctggctgcgattgctgatgcccaaccccagcctccgcaaaaccctgcaggtcgccctcagatgatgcagcctggtatagtgcctggtgcggggcattacatgtcacaagtaccaatgttccctccaagaaccccattaaccccacagcagatgcaggagcagcagcaacaacaacagtttcagcagcagcagcagcaagtgcaggctcttacatttcctggacagatggtcatgagaccaggcaccatcaacggtatgcagcagcagcagcctatgcaggctgaccctgcccgggcagcagcggagctgcagcaggcagcacctatcccagctgacgggcgaggaagcaagcaggacaccgcgggtggggcgagctcagagccttctgccaatgagagccacaagagcgcccccggagcagataccgaggcacgtggcgacgtggccgagaaatcctaagtcgagcagcctgggcagggcgaaaacataatgccttgtgtactagcaacgaaagaaaaaacgagtctttgaatgactagctactagcccctaccagtttactgtgtggtttagatgatgtagaacaaagtttagattggtgatgatgtaaaccgtccaatattgatactgcgttcttacactgctgtagtcaattatatgaataatttcatataagcatgttgccctagtggattttacct

SEQ ID NO: 277474 - DNA, 720 bp, Zea mays
cggctcgagcagatcctgccttgcactgcaagcaaaccacccgcaagcccttactaatttaggaaacatatacatggagtggaacatgataagcgctgctacttcattttacaaagcagctatatctgtgacatctggattatcttccccacttaacaacttggctgtgatatacaagcaacagggaaactatgctgatgctatcacatgttacactgaagtactccgtatagatcctacagcagctgatgcactagttaatagagggaacacattcaaagagattggcagagttaatgaagcaattcaggattatgttcaggcagcaacaatcaggccaaacatgccagaagcccatgccaacttggcctcagcatacaaggacagtgggcatgtagaaacggctataattagctacaagcaggctctccggctgcgtcctgattttcctgaggcaacctgtaatctcctgcatactctacagtgtgtctgtgactgggaaaacagagatggcatgtttcgagatgttgaagaaattattagaaggcaaataaagatgtcagtacttccaagtgttcaacctttccatgccattgcttatcctattgatccattgcttgctttggaaataagccgtaaatatgcggcccactgttccttgattgcctctcgttttgggctgccgccttttgtgcatccacctcctgttcctgtaaaagc

SEQ ID NO: 277475 - DNA, 595 bp, Zea mays
ttgtttacaagaatgattcaactgtgcagctaaatgtttcaactgaatctcgagttttgaagaacaaaaggaagtacaaagttgatattcttcgatgtgagagcttagcctcacttgccccggctacattagaacggctattccttcgggactatgacattattgtgtcgatggttcctcttccttcttcatcagttcttccaggcccttcaggcccaattcattttggaccaccatcttattcctccatgacaccttggatgaagctagtactgtatacagcaggacattgtggaccagtatctgctgtgttcatgaaagggctacgttttagattgctgcctgaaccattagctggttgtgagaaggcactgctatggtcttgggatggctctgtggtgggtggattagggggaaagtttgaagggaacttactgaagggcaacttattgttacactgcttgaattcgatgctgaaacaatctgctgtactggtgcaaccacttagtatacatgatcttgatacgtcaggaaaccttgtcactgtggatatccctttacccctaaaaaatgatgaccagtcaatgaatctgtg

SEQ ID NO: 277476 - DNA, 272 bp, Zea mays
taatactagactgtctagacaggctgaattttcttcaattttgatagattaagagaaaggaatcctcttcaatttttggagctcacttttgggcttttgaagccgagcctttagattttgttcttttgttacgctgcggcacctaataaatgacttgccttctatgttttcgagaaacttacattattcttttttatataacaataatactgtctattcagtaaaaaaaaaaataaaaaaaaaaaaaaataaaaaaaaaaaaaaaaaaggca

SEQ ID NO: 277477 - DNA, 394 bp, Zea mays
ctcgagcgattcggcccagagacaacgcaacccccaaacccaaaaccctaccacggcgcccatggcttcgccgccgccgccgcctcctcctcctgcccggcaccccacctccgcagcaactgccgctgcggcgggcaatggccacgacacctccgcagcaaccgccgctgcggcgggcaatggccacgacacctccgcttcgccggtggacgccctcttcctccagaacctcatgacccgcgtccagctccgcccgcccttcctcgacaccaactcattcctcactcaggaccttgacgacttcctcctcaacgagttcgccgcgctatccgccgctgcaggggcgtcggatgatgacgaagacgtggaggatgaggatggtgggctcgctggc

SEQ ID NO: 277478 - DNA, 403 bp, Zea mays
atttcttgtaagcactggattaacagcgactggccccattgatcatacggattcgtgaagacttgcgttgtgaccccgaaacaaattcttgaagcctcttcttggacagcgaatgaatggagttgacgactagaggtgttctgcttaattaattgcttgcccgtcgcgatggttactgtttctttcaggatgactcgttctggtgtgtaagatcaggtgatgtgcagctcccccttcctgtgcatgattagcccccctccttgagtgcaagtgtagacataggatgctatctgtttgtttggttacctcaatttaagctgaactgtacaatgctgatatagtttcctggttctgaaaaaaaaaaaaaaaaaaaaaaaaaaaaaaaaaaaaaaaaaactcgggg

SEQ ID NO: 277479 - DNA, 325 bp, Zea mays
cccacgcgtccgcccacgcgtccgcccacgcgtccgcccacgcgtccggttcgcgatcgggcaaacctgcaaccctttcctcttcgtccccccgctctctcgttgccccaagccggagtacggagtacggcagtcgcacccccgtcgtcccgttccttgctcgccccaacttcgccgccgcgtccccctcggctcctagtgatgtctggtggtaacgcgtggccgccgctcccttcgcacggatttgaatccgactccggcggcatggggagccgcgcaggcgagcctgtggcgaggaccaacagcagcggcggtggccggtaca

SEQ ID NO: 277480 - DNA, 484 bp, Zea mays
tgtctacgttaaagggaggcaccccaagaaaagctcaaagcttatgagaagaggggtgcacttcagatcctgcatcggatgctgagaagctgagcctccagcagctgccatgatggtgtacagtgagttattgaaggttggaaacggagtggaggcttacatgtgtgtggggtcatttggtcttctagtttgtttctgctgtttcttgtaaatattagttgtgaagtggtaacctatgttcatgtggtgggttttgtttctgaccaatctgtgaaattaaggccaggccccgtttggcaggtctccggctcctcttaaaatggctccggctctggtttcagctccttcgcaggagccggtgttttttttttgtaaattgtttggcaaaacagatccttttgtgtttttgatttggtgtacgagacaagattatggtgaaaaaatattttatggaagaatgttacaacaaaaggatattatggtg

SEQ ID NO: 277481 - DNA, 553 bp, Zea mays
tcataacaacggtttctccaggcatacagatcctgctgttgtgcagatcgcttttcagtacagcgtgattgaacctgccaaggagacatcaggcgatggatcacaatcatctgcaagttataagttctctctaaagaggcggctgagaataagaacattgcagtaccgtccagctaggaatatcagtgaaatttatgacagtgtagatccagaggttgtactgcatatccttgttcataaggttattttagaatgcgtggataagggggttagagaaggcaggcatcaagttcatgcttggctatccctccttgcagcccggtataatcaggtcctgagttctgatgtgcgaactccactatcgagcatagacattgacttctcgcagtgcccgcagcttcaaacgatacctcaacttgtttttgcattgttgagaagtcctcttcttcgcttgcatgaagaaggcgtgctcccagattacaggatatatctacaatgccttttcagtgcactggagccatcttctgtagctaaagccatatatccggtttta

SEQ ID NO: 277482 - DNA, 765 bp, Zea mays
gcataattgcaggagctgatgagttctcctggcctccgtttgtgatgggatcaatttttcttgcgattcttctaattcatgacaatccaggaaaatccaataaaagattgcattttctaagcgtttctggtcctcttacggctgttgtcttggaccatttttgtgaaaatctttcatccaccagccatatcagtggttggtgaaataccacagggtcttcccaggttctccattcctcaaggatttgagcatctaatgtcacttgtgccaactgctgtactaatcactggtgttgctattttggaatctgttggtattgctaaagctttggcagcgaagaatgggtatgagttggactctaacaaagagttatttggtctgggaatagcaaatatctgtggttcattcttctctgcatatcctgccacaggctccttttctaggtcagcagtgaatcatgaaagtggggcaaaaactgggttatctggaatcataatgggcataatcattggtggtgctctcttatttatgaccccattatttactgatataccccagtgtgcattggctgcaattgtgatttctgctgttactggcctggtagattatgaagaggccatcttcttgtgggctattgataagaaagatttctttttatgggcaatcacatttatcacaacattagtttttggcattgagaatggccttcctggtgggggtgcattcttattggcctttgtgaatcatgaatcaacaaattcacat

SEQ ID NO: 277483 - DNA, 287 bp, Zea mays
cgaacagggacacgagacagcggcggccatggcgtgaggcggcggcgatcggagtcgggaggatgaccccttctccgacggcggcaccaccggaaccgactcggacgagtcctctccgcgtggggtgggggcccgcggtcccggctccacctccaacccgatcctgacacgcctcgcggtgtcgcggaacccgagcccgctggccgcggccaccgatgccccaggggtatgcctactccgcttcgcctgggagtccgccgcgggctccctcgtaagctccgtcgttg

SEQ ID NO: 277484 - DNA, 825 bp, Zea mays
gcttgctggacgcaatccttttcataaacgagtgctctcagtcgaacgatcccgacttatccctgaagcaaaacaaagtccctgactatgccgagcggttggtgaagaagcagatgcgttccgcttggctattcagggaagcggctcttaagcacgggggcgtacactgtgaaggagatgctagcgacgcgtttggccaggatgctgacgactctgagtgggaaacggctagcgaaagcgacgccgagaatgatgacacgggagaagcggatgatggaactgaatggaagaacgatggacaccgggaagatatctgtgagataagctgaggagcagggcaagctgaacctattcagagggagtcaaactgagcagcgacagaagcagctgctgggccttatgaagtctgctgcgctatcagcctatcaagcatcagatctttctaatgcagcgatctggtaacatttctactgtcctcgtcaaagcaaagccccagttaaactaattccccacgtcttgttgtttggtcagttgagttattgcgcctgcgaccattcaatgtttccccttagatgttggttctggtttggtgtttgtagcatgctctttctttcaccagtttctcaactctttgaatgaacaaaactgtgcattatttgttcttttttttactattatttctgtagtctggcgaagaggccataatactggcacccttccctttccactggacttatctggaacgagaagagcacgtttccgtctacctgctttttttggctataccatgtcaactagcaagtaagggttgttaggttgggtcat

SEQ ID NO: 277485 - DNA, 507 bp, Zea mays
cttggagtagcaaagtctacaattgaatgtggtacaactctctggaatggtgacttgttggcagggtcgaaacacttgcggtttcttgacctctctggtaacgaaataatcagtagtggaaagagttgcatatctgccacagaaaaaagctgcagcctggagaccatcgtcattcatcaaggatgtgctggactagagaagatctcattggccgggtgtgctcagctagagaatgtactcttgacaggatcattcaatgagctcgtgagccttgatatctcaggatcagctgtgaagaggctggatctcagtgcaatgatagtgctgaaacttgatgagatcattctactagactgcaacatgctgcgtgcaatcctatggcctccggaaggaagaaagaaaagatatcctagcaagctgcgcattcaaacaaaaaaggagagtagcacacccagttatatgtggtggtatatttcagtatacgatgaaaggctgctctggtcactt

SEQ ID NO: 277486 - DNA, 1290 bp, Zea mays
cggacgcgtgggggaagctgtaatccgatcaaagtcagtgctccattggtgacaaattatgctcgcagtcgtctctttgatgtaatactgcattcttctgttggagacgtgtcaccagaacttgtggagcaatttaggaccagacaaaggaactttgacaccgaatctcgcgcaggtgcagcagctaaagtgaagcaaaatcaacatatgactgccatacctggtctgaggatttcacgcagagttaaagtttacaaaccattactattagaagctatgtatgcaaatggattcataggcgcaaagatgattcgagcaaagttatttcataaatttctgtgggcttatgtcaattctttgccaaattggtgcaatgcatttggttgtaccaaagcagggcagtatgataagagccttaatcaatcatgcctgtcattttctatggaagcagctatgaaagaaatgccccttgaactctttctacaaattgttgggtcagcaaagaagattgataacatgataacgttgtgtaggcttggaaaaacactttcagaaatacctacagaggaatacaatcagctcttggatactcatgccaatggccgactctcacgcttagtaaatattttggacaagctcaagctggttcagcttgcaaaagaattcttagaagatgctggtgtatcgtcaaatgccatgtatacacattcgatggagctcaggccttacatcgaagaacccatgccaagaattcttccatcttcccaactgaacaatcatcggaaaattcggcatgattttgtactttcaaagaaagagtttgttgattcttattgggaaacactagagtgttgttatttaacagctggtttggctgacccgttaagtgccttccctggcagttctgtcccggaggtttgtctcatctgctgtacatcattgatgcataggattatcgcatacgttgaataaatgtacttagcgcctgtttggttgctccccaacttacataaggtagcttctgggcatgggcagtacggtgagaaacaccacccttgatgccgaaataagtttcccatatttgtgtttaccatactgcccttgggccataagctatcttatataagtatggatgaaaacaaacagacccttcgaatttgaattatcaaattcctcaactttgaatgctaatatagctgtgttaactatttatattgacaactgtgaaaatagtgggttggatttggcgtgagaaactttaaaaatacaaactcccttagttcccaaaaa

SEQ ID NO: 277487 - DNA, 308 bp, Zea mays
cggacgcgtgggttcccctggtgttcatcttcctcctcatagtgctctatgcgatccctgccagcgcagcagtcttgctactgtacatccttatcacggtgctgttcgcgctcccctcgttcctgatactgtatttcgcgtatccgagcctggactggcttgttagggaaatctttgcctgagatttccttgttcggtaaaatctcaatgctgttgttgagtccttgtataactgaaccttccctagatcttgttgcaagcgtggatgctattgcaaagttttggtttttacaccatgagatgtgttt

SEQ ID NO: 277488 - DNA, 589 bp, Zea mays
tgaaaataacccatctgaacaaccaagtgctaagaaaatggaagacagagtgtccaaggttgtggaagtcttcgttggaagaatccggaagatggaaaatgactttataagtttgaacaagagggcctcgatgctagatgtgcaactggagtgccaagatctggagagaatttctattgtaaatcgtctgggaagatttcatggccggagccatgcagcggcagttgagagttcatcagctccagaaatgactccccggagaatttttcctgaaagacatgtcatgtcttttgccgtccctggaaatcttcctgaaggagtgcactgtttgtcactctagtggaatgatcttcaattactctctagccgcaatgatgatcccgggtcgcgccctgtgattcccagtgctccttgtcccatgcaaagcatggccaaacagaaggatcatattgtcaaggggtaacttgagaactggaagcatcacagtaccacgatgagggcaggccaggggacgtgttccagccgatcaagtctgtgctggctgtggttgttgccccttatatcaagtataggtccatgtatattgtgg

SEQ ID NO: 277489 - DNA, 498 bp, Zea mays
  unsure (1)..(498): unsure at all n locations
tctacttcgagcacaacagcttctccggcgagctcccggcagcgctgttcgagctcaagaaccttgtgaggctggacatcgcggggaacaagttcagcggcaagatctcgcaagacttcaacaagctgatccgcctcggaacgctgtacctcgacgggaacagcttcaccggcgagatccccaagctgcagctgcctgcattggagcagttcaacgtgtcgtacaaccagctcaacgggtccatccccaacacgctccggaagatgccgaaagactcattcttaggcaacacgggcctctgcggcggtccactcggcctgtgccccggcgagtccgcgcccacgccggccggatcgccggagtcgcagccaggcgcgggcggcgcagtcgacgatcggtggcggcaagaagaagaagctctccggcggcgccatcgctggcattgccatcggctccgtgttcggcgtgctnctcttgctcgccctccttttcttcctc

SEQ ID NO: 277490 - DNA, 189 bp, Zea mays
atgcgggcaatcagtgccagtttatctgttgctccacagttacatatcccacccatggtggacgtggagctgcaaagtccgttggaattatcttgtagcagtttctcggcaagatgagtcgcttcattcactgtacgtcggtgccggctactctgaaacttacatactataagaatctggtcccttact

SEQ ID NO: 277491 - DNA, 449 bp, Zea mays
cggacgcgtgggcggacgcgtgggcggacgcgtgggagggtgggctcacaaaaggtcatagctcaacaagctgtggggaataatgtgcatgaactcaccaaaggtgggagctgatgtgtagtgtaaggctgaacaacaaataatggttaaagctgagcattctcttttaataagttggtcaaaaattattagcacttactaaatgtaagtgtatgccaacccaaagtaatagtaaatcaaaattaataataaaccataatgtgatgcaaatgacaaattaagttttacttccacaaattaattatgtgagtgttcgagctatctaggtggcgtctcctagtcagcttgatggcgccaaggaataattattagttctttttattggtatccgttattttttttaagactcttccgctatgtaataatgatgtgacatttatctctataca

SEQ ID NO: 277492 - DNA, 793 bp, Zea mays
agttctggaacgggtgtattcccttgtgcagcaaatccttagccaacagactggccttttcttcaacaggcacattgaccagatcatactatgcagcatatatggagttgccaagatctctcaactggaactttcattcaaggagattattttcggctacaggaaacaacctcagtgcaagccacaagttttccgaagcgtgtatgttcattggcccccaagaagccgtaacgggaaaacaggagaagaccacgttgacatcatcactttctacaacgaagtattcattcctgccgtcaagtccttgttggtggaggtagggcctggcgccaccagtccaaagaagaaagaagaggaaaaaggtcctgctgatgtaggtccattcccagaatctccccggctggctcggttcccgaacctccccgacatgtctccaaagaaggtttctgctacccataacgtgtacgtctcaccgctacggtcatcgaagatggacactctgctgtccccgagctccaagagctactacgcgtgcgtcggcgagagcacctacgcgttccagagcccctccaaggacctgaaggctatcaacaaccgcctaaacagtgtgtccggcgggaagaaagtcagcggccggctgaacttcgacgtcgtcagcgatctggtcgctggccagtagcctcggcagtgaccgtgacgccaagcctgcggccgatcctgccaagacgacgccggtgaagtgcgagccatctgactcgtgatcgtcgtcgactctgatgaggcccttgttata

SEQ ID NO: 277493 - DNA, 503 bp, Zea mays
tggctgccatccgaatcccatgtcgtcgctgctcctcctccaggccctggctccagccatgaccgtcccccgccaccatttcctcatctcccctctccgcctcgcctctgcagccacagttccgttcgctcgacgcttctccaacgccgcttccagcaacaagccggagccactcctctcggaaccggatctggagtcaggtctgtatcttgtgtcaacgccaattgggaaccttgaagatatcaccttaagggcactgcgtgtcctaaaatgtgctaatgtgatactatctgaagacacaaggcattcaggaaagctacttcagcattacaacatcaagacacctcttcttagcttccataagttcaacgaacgggagagagagcccactatcttaaggaggcttcatgaaggtgaagcagttgcactgataagtgatgctgggacgccaggtattagtgaccctggcatggaactggctagactatgtgcaactgagaaaa

SEQ ID NO: 277494 - DNA, 351 bp, Zea mays
gaccacgcgtccgcttgtgccccgcggtcatccggttttactttgccgagatcgtctccgcggtcgcgcgagggccacgtctgcgggcgtcgtgtgccgtgacctcaagcccgagaacgtgctccttcgcgccgacggccacgtcacgctcaccgacttcgacctgtcccgccttctccaccccagcaggtcgtccgcggagtcgtcgtcgcccccgcggccagcgtcgtcccgcggccaccacaaccgtcggtcgcgcgtccccgcgcggagcgactcggttctcagccagcacgtcaagtcgtactccaacttcaacaactccaggcccacttaccagccctggtccgt

SEQ ID NO: 277495 - DNA, 695 bp, Zea mays
  unsure (1)..(695): unsure at all n locations
cccacgcgtccgcggacgcgtgggatttaaacgacttaagcaggagaaacaggaccgtgcagctgctgctggcaaaaatattgatgagattcctggagcggaaggacttgttgtcagagttgtttcatcagtggataagaagctggaggttaaaccacgttttttagaaatttttcaagaagacaactaccctacagagttcccttacaagtccaaggctgttctcttgttccagaaaatagaaggtgtggaagtatgtctatttggaatgtatgttcaagaatttggtgctgaatgctctttcccgaaccagcgtcgtgtttatttgtcatacttggattctgttaagtacttcagacctgagattaaaacagtatctggagaagccttgcgtacatttgtgtatcatgaaattctgataggatatcttgaatactgtaaactgcggggattcacaagttgttacatatgggcttgtccacctttgaagggtgaagattacatcttatattgccatcctgagattcaaaagactccgaaatctgataaactgcgtgagtggtatctatctatgcttcggaaagcttctaaggaggaaattgttgttgagctcacaaatctatatgaccatttcttccttactatgggggaatgcaaggctaangtgactgcttctcgcttgccatatttcgatg

SEQ ID NO: 277496 - DNA, 721 bp, Zea mays
  unsure (1)..(721): unsure at all n locations
ggctgcccaagcgccgccgccacagctcgataccgccgcgggtattctcggcccgtaccagtcggtggcggagcgctcgcctgctgccgcgtacaacaccgacagcccagatgggaattgcttcgacaaaaatcgctgggggcatggttttgggcatctncttgcccaaaaccatctcccgatcaatggaggagattgtggaggcatcaagaattcgggagtacaagaaatttgattccagtacagccagcaagactccatctcgtggtccttttccgctacctccaccgcccaagtctgctcctggcaagctagtggactctaaagccctagaacatcttgatgcaccagttatggcggattgtctctactccgtctatgctttttgtaaggcctagggcctctgctacaaatgtggattgtcatatttccgaggccatcaatgtccggatactgttccgcttcacttggtagaagaattatggcatcagtttcaacctccatctaaagataatcaatcagtgttggggatcaaagccgagctcagggtgctccatctatgtcagtcggttgtaaccactggagcaaacctgaaaaccatgagatttgtcagctagctagcaagattttcattgctcatttttattagaatcgggtggttcagtttcctttgtcagctccaccataacaaggcactgtccaaatattgttccactctcga

SEQ ID NO: 277497 - DNA, 366 bp, Zea mays
atcttttctttccccagctcttcgtctacagcactgccacattagtagttagttaccagcagtactactcttgtgtagtagcttttaatttcccccagctagctagctagtttctacttccgtccgcgcgcgctcatctgcgcacgcacgtgtccccgtccgcaatggagtccgaggccggcctgcttgtccgctcctccctgaacggcgagggcctgtgcatgccggcgccgcgcgccgacccgctgaactggggcaaggccgcggagggcctgtccgggagccacctggacgaggtgaagcggatggtggcggagttccgcgacccgctggtgaagatccagggcgccagcctgagcgtcgcgc

SEQ ID NO: 277498 - DNA, 619 bp, Zea mays
ttttgaattgctaggattcccaggtggcccaagggaaggcaccattgctgatagctgtgctctattgtacaatgaaattcaaagactggtggaggcaaacagggctggagaaaatgaaggccagttcaccatcgttatagacgacgcttccctgttggaagtcgtggcccttggttctgtaagcgatgtgctggatttcttgcactattgtttcacactcacgtctgagatgaattgcaagctagtgatcctcattcacgaggatatatacgcaaatgaggagaacatgggtctccttttacatctgcgctacattgcggatcttgtgattaaagcagcacctttaagcactggtttggctgctgatgttcatggacagctggcggttgtgaacaagggtacattcagcgagcaaagggcaaaagcacagaaagtttggaacttccatttcaaagtgaaagaaaacggtgctgacttcttctatccagggagtagacattagggaatacttgtatacagtagaaacaactctggttgtgataactgataaccagtgctgctattcttcgtgtaccttgtgctaaggacagtaaactaaagtccacaccttcatttccct

SEQ ID NO: 277499 - DNA, 407 bp, Zea mays
  unsure (1)..(407): unsure at all n locations
cccacgcgtccggccaccaagagctccgtcgggtcggccgccgtccggctgggcgtctcggagcccgcggcgtcggccgccgcgtccgccgcggcgggcgtgtccgcggccgtcgcggcgcaggtggtgtggacccccgtagacgtcatcagccagcggctcatggtccagaccccggacgcctgccgctaccgcggcggcgcgagacgcctgccggaagatcctcctcgcggacggcgtccgcggcctgtaccgcgggttcggcctgtccatcctcacctacgcgccgtccaacgcggtgtggtggtccacctacgccgtggcgcagcggttgcctgtggcgcgccgtggggaccgagcgctccgagagctgcgcctgcctgatggctgtgcanggcgcgagcgcg

SEQ ID NO: 277500 - DNA, 479 bp, Zea mays
tcgggttagtcaaaaatacatttggtcatcttccctgcttggagttggagttgagacgccgacgcggcgcccgagaagaatttgcggatggattcgctgcgcagcgtgttggagtcgattcaggcgatgcagatccgccccgtggtcgcccaaatcatcaccctagggatgatcctaacttcggcattgatcctatggaaaggattggtcgtcgtaacagggagtgagtcgccggttgtggtggttctatctggaagcatggagcctgggtttcgaaagggtgatgtcctgtttctgcacatgaataaggaccctgtccgcacaggagacatagttgttttcaatgtcgagggccgtgatattccaattgtccatcgtgtgatcaaggttcatgagcgccatgatacggtggactctgacattctcaccaaaggtgacaataatcccggggatgaccgagttctgtacgcacatgggca

SEQ ID NO: 277501 - DNA, 316 bp, Zea mays
cgacttcgagtcggagccatggcccagcgtctccgaagcgccaaggatcttgtgaggagaatgctcatcagggacccgaggaagagactgaccgcccatgaagttctacggcatccttgggtccaggttggtggtttggctcctgacaagccgctggactcggctgttcttgctcgcatgaagcagttctcggccatgaactagctgaaaaagatggctctcagggtgatcgccgtgaacctgtccgaggacgagatcgcggggctgaaggagatgttcaagatgatcgacgcggacaacagcgggcagatcacgt

SEQ ID NO: 277502 - DNA, 404 bp, Zea mays
  unsure (1)..(404): unsure at all n locations
tgtggggcgggagatgcggttccacctctggttcgaccccacggcggcctaccacacctacgccatcctgtggaaccccgacgccatcaccttcttcgtggacgacgtgcccgtccgccgctacgagcgccgcaccgagctcaccttcccggaccgccccatgtgggtctacggctccatctgggacgcctncgactgggccaccgacgacggccgncaccgcgccgactaccgctaccagcccttcgtcgcgcgcctcgaccgcttcgtcgtcgccggctgctccgnncagcgccccgccgcgtgcaggcccgtgccggcgtcccccgcgggggccgggctcacgccgcggcagtacgcgggcatgcgctgggcgcagcanggccacatggtctactactact

SEQ ID NO: 277503 - DNA, 636 bp, Zea mays
gaacaaggacaaggaaaaggtagccagtggcctgccagatcggaatttgctgtttacgcttttgacctggcgaaatcgaatcagaataaaagaaagctctgcacttcgttcatcgagagcatccatagcaagaggaagcggctgaggttggctcgggtgagcaacatggcggagaagctgacgccggagcaggtggacgagtgcaaggaaatcttcgacctgttcgacgccgacgaggacggtcgcatcgccacgggcgagctcgtgacggcgctgcgctccctgggccagaacgtggacgaggcggaggcgcggcgcttcctggaggacgcgggcatcgcggcgggcgccggcgacatcgacctcgcggcgttcctggccgtggcggcgcgcaagatgggcgccaggcagtcggaggcgcgcctcgccgagtgcttcgacgtgttcgacgacgcctgcagcgggtccatccccgcggagcagctgcggcaggtgatggtgagccacggcgaccggctcacggaggaggaggccgacgcgatgctccgcgaggccgacccgcgcggcgagggccgcgtcgagtacaaacactacgtgaaagtactgctcagggacaagaagtgatccggtgatcct

SEQ ID NO: 277504 - DNA, 518 bp, Zea mays
ctcttgcgtccgattgcattgcgaagatcagctttacaaatccagacagtttgtcgcggtgaacttgcaagaagagtttatcacaacctccagagagaagctgcttcactcaagatccagactttgtaccgtatgtatactgccagaaaagcgtacaacgaactttctgcttcagcagttaccattcaatcaggattgcgcggcatgtgcgcgcgtaaagagctccacttcagaagacaaacaagagctgcaatcatcatccagagtcgctgccgtcaattcttggcgagattgcattattcaagaacaaagaaagctgcaattactacacagtgtgcgtggagagggaaggctgctagaaaggagctccgcaagctcaaaatggctgcccgggaaactggtgcattgcaagctgccaaaaataaacttgagaaacaagttgaggagctcacgtggcggctacagttggagaagcgcatgcgagctgatctcgaggaaactaaatcacaagaaaatgc

SEQ ID NO: 277505 - DNA, 793 bp, Zea mays
ttacagctcagtctacatacagcttagcacctagttcgtcctctcccacatggccaagtgaaatcgcacgcgcccctcctcctctcagctcaggttctcacactataaatatgcactccccctgcgcaccacacacaccaccacaagcctaatacagctcaacacttgctaaaactagagagagagagagccagacagacagacagacacagagagatagagtccatggtgacactagcaggaaaaggagcgagaaccagcagagggatggcggcactgaggagaaggcggccgttccagctcatggtgctgaggcggctgcgggagctgaagaagatcgtgccagcgggcgctcgccgccggaaggcagacgtcgacgtggtgctccggcggaccgccgagtacatctgcgcgctggagctgaaggtggcactcctccggaggctctctcacatgtacggtgtgtagcctgtgccgccggtcacccacgccattgcctgccaccacccccaccaaagtagtagcccctatatatgcgattggttattggtcacatatggtcatatggacgtgcgtgtgtgtgtgtgtctagctagtagttaagatctggctgggaagaaagccagcccccggcccgttgctccagctctgagtgcaagagagagagagagagatgccttccctgctggtggctgtgtcaataggctggaactggaagtaagaacgcatttcatttgttttctaagcatgtgtcggatcggagtgtgtggtatggatttttgtttttgttttt

SEQ ID NO: 277506 - DNA, 484 bp, Zea mays
cacgagccaaaccaatttgcggtcgggctgtcagatgggtccgtcaaagtgctggagccattggagtccgaagggaaatggggagcgcccgctccggcagacaatggcatcattcccaatggcaagacgccagcttcgtcggctactagcaaccctgctgcggatcaaatccaaagatagattgtattccctaagcttttctttttctgcaaactttctaattacactgacttatttgtatgtggatgcccttaggatattatcgtcatttgttgtaaaaaggacagaataggttttatgttcaggtgtggttaactttcaggtactaccctagttatcctgttcatggaagattatgtttgcgatacggggtaatagtgtctataaagtatgtcgcctaaggttctcaggtttagctcgatagctcaaatgatgtaagctatatatttcttcatgaatgtaaagcaatacatagtttttgctc

SEQ ID NO: 277507 - DNA, 646 bp, Zea mays
cccactcttccgcccacgcgtccggtcaagacaatcaagcctgcctccaggacctcgatctcaaccggtaacaacagacccgacaaatcctgcatcaacgggacccatgggttttgatctgcagcgctcaaagtccgccgtcgtcgtctcaatcctcgtagagtcgaagtcatagaagaatcaaacagcgcgccgctcctctctcggatctaggcgaggcgagctgcggcgccggggggtcgcgggagggacgaggatgaactggatcgggcgcaagatccacctctacaatgtcaccatcggcctctacatgctcgattggtgggagcgctacctcttcagtatccttctcccgattgcttctctggcggtcgtgccccctatcctcctgaaatcagttggttaattcagcgccgggctcagtcccgttgtcttttttttactggttttgctttgctagatgtgagcaagctgtgaggattgggatgtatcgaatctatatattgtcactgtcagtgcacattcccttaacgcccctttgaaccgcggcaatttctcatctttagggtattagtgccagccagtatgcaagcccctctttgagcaattttgaccgataaattctatctcagcagctactatacta

SEQ ID NO: 277508 - DNA, 468 bp, Zea mays
taatggtatttacagtgcccctaccctacttcgtcgaccctgaaactgttcaagaaactctacagccttttatttataatctgaagactctttttcaagaggggaactatcttgggcaaggcagtacataaccattgtaaaaacaagatcagattatgatcatttgcccatgtaattccatctcttttaactagttgttgactgagcagctgagaagaactaatttgagcaagcgttaccgtgtagccgttgtctgtatcttccccaggaaagctaatagcctctagtgtttcttctaatggaggaggggggaaaaactgatgttgtgcaacattaactctttgttggttgttaacaaaccacaaatctattaggagtcggtcggttatctaggaactgtcccaggaatgattgattcccagccgtaatgattgtctaattcttaaaaaaaaaaaaaaaataaagaaa

SEQ ID NO: 277509 - DNA, 407 bp, Zea mays
cccacgcgtccgcggacgcgtggggcgccgctcctttcggatctgggcgaggtgagctgcggcgccggacgtcgcggggaagaggatgaactggatcgggcgcaagatccacctctacaatgtcgccatcggcctctacatgctcgattggtgggagcgctacctcttcaatattttgatggtttgcctcttctggtacattctccgctatctccttgggttcttccaaagtaatgtgaagactcttttccaagaggggaactaccttgggcaaggcagtacataaccattgtcaaacaagatctgcttatgatcatttgccccatgtaattccatgtgtttaattagttgttaactacttaactgaggagctgagaagaagtaatttaagcaagtgttacagtgta

SEQ ID NO: 277510 - DNA, 723 bp, Zea mays
ggaaaatcttgatttcatactatcgaatttggtactgctccgtacgagacttatgagagtgattcatgccccttccagagagtctgcatcatgttctgtttggtgcaggtggtttcctgacgattaccaagctctgggccaatgacaccttgaccctccatttccccattacccttagaactgaggcaattaaggatgaccggccggagtacgcgtccatccaagcggtgctgttcggaccgcacctcctcgccggcctgacacacggcaagctgccagtgacagacagcagccactccaacgacggcctgaccgcaggcatctgggaagtggacgccacaggcgccgcctccgtcgccggctgggtcaccccgctccactccgagacgctcaactcacagctcgtcaccctgaaacagagcattggcgggcgcaccctcgtcttgtcggtgtccatcgctgacgcgaagctggagatgcagcagcagcccgcccccgggaccgacgcgtgcgtgcacgccacgttccgcgcctacggccaggcgggcggcagcagccagctgctgcgagggcccaacgtgacgatcgagccgttcgacagaccgggcatggcggtcaccaacggcctcgccgtcggctgccgtggaggccgcgacacgctcttcaacgccgtgccggggctggacggcgcgccgggctccgtgtccttggagcttgccacca

SEQ ID NO: 277511 - DNA, 371 bp, Zea mays
ccgtctcgagaaggtggccgccgtgcgggagggcgcctcgccgaagaagaccgtgtcgggcaccgtccagttcccgctctgggacggctttcgcgccaccaagtgcggcctcgtgctcttcgtccagaacgccgcgctgcaggtgctcggcgtccagcacttcgacctgcctgacaacgtctgagctcgtgacgcggtggggcgcgcgcgcgttccgcgttggctgcctccctgcggcgggcgtcacattctttgtatcactgtatgtagtacatcactggatggtatttagatggaaaacctgagtattctttatctccacgtatgttcttgttctgcattatggcaatggatcttctgttttgcacact

SEQ ID NO: 277512 - DNA, 772 bp, Zea mays
cggttcgggcggctcgtgtggtcggacgggaagcacagcgtggccagcccgatagcgttcacgtggacctgaacctgatggacggatggatataccatacgacagtggtttttggcgcctcagcctcaaagaaaggcccataatccatcatccatgtgacggcctcgttccctacactacgcagtcaaaagggccgaagtgtagggtgggaaggtttggagggggtacggtgcaaattggaggtttcttctgtgttgctattattactactaataaggtcattaatcctatcagcgtccgtaggttgtgatttttggatggaaatgggatcggggtggacggttggatggagattgatggtgcttggttgattggaatggaattattagagaggagaaggttttataggttgaggcttgcaagttgggactggaccagagtgtgactgtgcgagggcaggagcagtttcgcagtgactgattggaacctgctgtagtgctgtggggaactgtcgcctcgcctatcagaaatggtctccacaaatgttttccgttctacctttttgaaaagtctcaaattattacatttttgtggctttacctgaaattgtggaaatgtaataacacgcttgtttttttttatcctatgatcatcatcagggtatgtacaatgagtgttttgggttgtgccttagagtatgtcaaaaagagtaaatgtaaaaaactaaagacacgtcttttaacaaagacattccacctgtttggttacctgt

SEQ ID NO: 277513 - DNA, 539 bp, Zea mays
cccacgcgtccgcccacgcgtccggcatcaagagccatgtcattttctgggaatggatgggctgtttgtatcctgacagccaatggcactgtatctaatgtgaccctgcgtcaaggagagtcttctggtggaacagcaacttatgagggccgttttgagattctctctttggctgggtcatatcttctgtctgaaagtactggcatgagcagtcgaacgggtggacttagtgtttctcttgctagtcctgatgggcatgttttaggtggtgctgtcgcaggacctctaactgcagcttcgccagttcaggtggtcattgggagctttctggctgatacaaaaatggagcttgaccctggatcagcacctgagaaacatgttttcagcaggtttcaaactaccagcagtccatctaagggtacgaatctcgggtgggcatgcaagcccaccaaacaccacaggctccttcagcatcagcacacagccaggcttcccaagctttcccacctggaaatgagcttaccttctatggtggagtg

SEQ ID NO: 277514 - DNA, 724 bp, Zea mays
ggggaggacccatcacagtcgtatgctttgatatgtggcagctgccatatgcataacggcttggcccgaaaggaagattacccacatgttacttactactgcccgcattgtcatgcattaaacacatcaaaacagtccatggggcaatactcaggctccaactcaggccggtcgacccctgttgttctggctgatggattatctacttccagttcagtacaagagactgaattgagtaacctgacgacattgcaggagctacccgaggaaggaaagacagacaagcaacaagtggaggcaagttgatggttcttatgacttgtactgttgatgtgtgtggaactagtttatctttagacttatatcgtcatgtgttcaactggtggagccccaaatttagccctgttgtaaattggaaatagtgagtgatatgatcctcggaagcatagcacgcaaaaacaagaaatgggacatggtgtacatccttgagtggatgattttttgttgtcatatagagcgcgaagtcttcttcctgcgagacaaaaagctatatgacgttcagacaagatggtggtgcaggatataacataagatcattgcttgttcagagaacagccatagatccaattataattccgaaaaaaaagatactgtttgccagattaaaatagtctacattgatccattggaaaaaaaggtcgtcacatttaaaacatccaaactt

SEQ ID NO: 277515 - DNA, 1285 bp, Zea mays
tggacgcttggtctgacgcgtggggattgatattttactctttatatacgcctaccagtatttgggtacttcacatgttatcaaagtcatgcttcaaatgcatcttgctgcgcaaagaggaaacttacttacaatggtacttaaagtcacagcacctacaggtttcatatttcacacttcttctgatgttaaattcatttcctagttatatgtctattgtgaaatatgttatggaacaatatttacacaaatggttgaaagggaacggactcggtcactctacctgggacttgcaccagcgttggcgagagctgttgtctatggtggccttcgctttggactgtatgagccctgcaagcatgcctgcagttatgccatttggttcaacatactttgcttttaaatttgcatctggagtcattgctgggggccttgcaactgctttaacaaatcccatggaagttttgaaggtgaggctgcagatgagtaaaagcagtaccagtacaataagagagatgagaaaagttatagcgcacgaagggtttaaagcactttggaaaggagtcggcccagcaatgacaagagcaggttgccttactgcatcacaaatggcgacttacgatgaggccaaacaggccttaatgaagtggacaccacttgaagaaggttttcagttacatctcatctcgagtttcatagctggaacagctggtactcttgtgaccgcacctgtagacatgatcaaaacacggttaatgctgcaacaggagtccaaaggcgccagagtatacaggaacggattccattgtgcttcccaggttgtggtgacagagggtgtgaagtcactttataaaggtggatttgccacattcgcgagagtaggccctcagacaacgattacctttgtcgtgtgcgagaaactgcgcgaacttgcaggaatgactgccatctagtgccaccccaaattgcataatgtgtggggtccagcggttgaacagcatactctacccgagttttcacaccattctttattcaccattcatgatgagaagggagaagataagcacccactgggatgtttaagggttgggaagccagagctccttcagatttatcatacctcatttgaaatttcgaaatagcgtgattgttcttgggggtgctctaagacttactcatcatatctccaatctcatcttgtatttcgaactacactctacgaacaatacagtctgcagtgtaaaaacattattttgggtgaccatatgggtaacctgctgtacac

SEQ ID NO: 277516 - DNA, 569 bp, Zea mays
ttttacctgcaggtctaaacaaaacaacgctgaggagtcggatgccaatgaacttgagaaacttgaggaactcctgacaaatgctttgaggaatacgaaagccaaaaagatgttggcaaaagaaaacaatggtggtgccggtgcaagtacaagcagccagatgttgctttactcggcagagcgtgcaaccgacaaatgaaacggggcgtgcatctgttgctaacggggcggtgccggtgccgcatactattgttgtgtagctgaggtttgtcaaggtggctgctggcaaggttagccgaggaagtggagttcaataacaggatgcggaaactgtgccgctccttgccgaacttaagccccgttacgttgtcgcacaaagtttatttcctaccactgtgcttgctgcttatgtttgtttggatgtgccaacctgcagtgaccctcgtggagcctgggtctcacgctcctcttacctagtgtgatgtgcagaaaaagtgtgatgctgtaaaattatgtgattgcctagcagatgtcaaattttcaatcagtagctaactccttttaatggt

SEQ ID NO: 277517 - DNA, 591 bp, Zea mays
gtaagacagtacaaggagtcagatctgtacaggcaactatcatacttttgttatgtacttgatgcaacccggtgtcttgaaaagctggaccagaaggcaaggctccccttcgagagagagtttgtagcagtaggccaaacaattaaattggcactgctagagatccagaaaatccgagacagatgtgcatttggatgggttcagctaaaggaccttgccgtatcaatatgatgtttttcttgtgtgaaagggctcaattagataagtttgaattaaccgtgcaagaaattcatctctctgtaggttattctagatctcgttggtaaaaggaacaggacacggcaaacggtgtatcgaaacaccagccgtctttggtatttccctgcgtgacagaccttgtatcatctatacatgtgttttagccagtggctgtattgtacaactttatgttgtgtccgtctccataaaaaaaaaaaaaaaaaaaaaaaaaaaaaaaaaaaaaaaaaaaaaaaaggacaaaaaatataaaagatccaaacataacttacacatacattcaacggcataactcttttatagagccacctaaat

SEQ ID NO: 277518 - DNA, 405 bp, Zea mays
gctccccgagatcgagcccgaccacgtcgtctccctgctcgagggcaactcggacctggtctggcctcgagcggctcgggcgcgaccacctcgtgcgggatgaacgacctgtgggtgaagcactgcggcatctcccacacggggtcgttcaaggacctcggcatgaccgtgctgccgagccaggtgaacccgctccgccgcgcgccgctgtcgcgccccatcgccggcgtcgggtgcgcgtccacggcggacacctcggccgcgctctccgcctactgcgccgccgcggggatcccggccatcgtcttcctccccgccaaccgcatctcgctggagcagctcatccagcccatcgccaacggcgccaccgtgctctcgctcgacaccgacttcgacgggtgcatg

SEQ ID NO: 277519 - DNA, 674 bp, Zea mays
gagctacagcatcttcgggacctaagaaggattgagcaacgggcaagtgcaaggaactctggggagctttcgcctcattacctacatcatcacacggattgaagattccagatcagctgcctatgtccagcgaatattgcttgaagatggaaatcatacaacaatgataagggaaaaaaaagattgccgactaagtagtattgtcattggagaagttttgttggttcctggagtggaaggagctcctcctggaacacccgtcacagtcggttcgaagataccattgggaaggcagatcacggagcaattctgccttccaaggtccaggattttttttgtggaccacttcccacgttctctttttgtgttggtttagttttcccggtgggttccaaacttttgcccaagggcaagagggtggttggtgagccgcccgggcccctgtggggctgtgtgtttggtgggggggtgtggccgcaatcatggccttgtgcagaagctttagaattcattaacctgaagacatgccgatgccagctttgctgccagatatgttgggcttcactagttttctgttttcttctttttttctaaatcctttccctgtaaatcttctagctggatgtaatgtgctttcggcctttggaatgataaggtgttgggtgtgtgcatag

SEQ ID NO: 277520 - DNA, 1027 bp, Zea mays
cgcagatggagtttagcttatttgcccctcctttgtatctgacaacaagcagtaagcaaaggctctttgaacacttctggaacagtggtggtgccagaattggggaagatggagctcttggatggtctgaatggttagcaaaagacgaggagagtagacaaaagttgtctatgcaagaaaattcacaagagactgaaacaggaggctggagtggttggtttgatccttctctgggtaatactgagacaaatgatttatcaaacaaatcactggaaccatcattgaccgatggaaatgatgctgaagaccttgatgctgaggactcaccagcacaagatgatgttgaatccttgctgaaaaagcttggtatcgatgtagatgcagagtccaatagtgaagttaaagacgcagaaacctggaatagatgggcctcaatggagctgtcacgggacaatcagcaatggatgcctcttcatgaaaattatggatcaattcattgtggtgatgctccatctggggaagacaatgaccagctttccagagtaattttgtttgaggatgtaactgagttcttgttttctctatcttcagaggaggcccgcttttctctgatgtgccaatttattgatttttatggtggcaaaatctcaagatggacatcaacaaacagtccaagttggctcgatcgaatattgagcctagagaatattacagatgacatcctggaagatctaggtgctgtatctgacgttgtaaacaagaaccaaagttcatatagttgtaaatatagattggaatcattactgggaagcatgtgtgacctttcacaaaggccgggcctgatgaaatttctcaaaaatgcgatactgcttctgcttggtgttttccctcgtaatcatatcctggaggaagctgttcttgttactacccaaatgtttactcctcaagagaactcttcctccattcaaactaatgcatcacgggctttggccaaaagtatgttgaagaaagaccgacaggatttttt

SEQ ID NO: 277521 - DNA, 536 bp, Zea mays
caaatcttcgcctaccgttgggtcgacaagatcctcggcccggtcaactcaacccgagtttcgtcggcgctatccataccgataatcgccgcttaccccttcatgacgcgcttgtcgggaataaggcttggtgtgcctctctacgtcgcggcgatgctcaaaagcgtcctcgccatcaccagagtcaccggcacatcgctcctgcagaacaacgctgtggtgcccacaggagcagaggggcgctgcgaacgggatagctacgacggcgatgtccctgtccaaggcgttcgctccggccgtggccggtatcttgttctcgtgggcacagaagcgccagcatgccgcgttctttccaggtaattaaacaacctatatatatacacacacgctgttactgcaataagagcatgtagaggatgcagatctgaatgggaggttagacactaaagggattgtgattaatctaacccgcattgatatgtgtgtgtatatatatatgcatgcatgtaggtgaccagatggtgtctctactcctg

SEQ ID NO: 277522 - DNA, 524 bp, Zea mays
ccggcacatcgctcctgcagaacaacgctgtgccacaggagcagaggggcgctgcgaacgggatagctacgacggcgatgtctctgtccaaggcgttcgctccggccgtggcggcatcttgttctcgtgggcacagaagcgccagcatgccgcgttctttccaggtgaccagatggtgtttctgctcctgaatctgacggaggtcatcgggctcgtgctcaccttcaagcctttcctcgcggttccccagcagtacaaacagtgaaagcggtgctgcgtgcgtgcgtgctctgcatggatactatagagaggtagctagctgctagccagtgtgtgtgcgcgagagcgagacgagggagatggacatgtcaagtagaagcagaggatatgatgtcattatacatatttacttcgcgagatatgtagttcctcatgagtcttcgctgtgcggttttctaaaaaaaaaaaaaaaaaaaaagataaataaaaaaaaaattacaaaaataaaaataaaaaggaccatg

SEQ ID NO: 277523 - DNA, 651 bp, Zea mays
cggacgcgtgggtcatgacggatgagatattcggcccgctgctcccgatcatcacggtgaagaagatcgaagacagcatcaagttcctcaggtccaagcccgagccgctggcgatctacgccttcaccaggaacgagaagctgaagcaacgcatcatagacgagacgtcgtcggggagcatcacgttcaacgacgccatcgtgcagtatggcctggacagcatcccgttcggtggcgtggggcacagcgggttcggccagtaccacggcaagtactcgtttgacatgttcagccacaagaaggcggtgctcaagaggagcttcctcgtcgagttcatgttccgctacccgccgtgggacgagaccaagatcggaatgctcaggcgcgtctaccgcttcgactacgtctcgctcttcctcgcgctcatcggcctcaggagatgaagcagacggcagagagtgcgtgaacaatcgagccaacagaatttgcactctcacccaacacacagttgctagtggtcaattgtcggtcatactgatcgatgaatatggaaatggcccttttggacaccaaaagggtgcagaggcggtactcgttataccggctggctataatcgcaccaaagatattaatataatggttatagttttt

SEQ ID NO: 277524 - DNA, 412 bp, Zea mays
ttcggccagtaccacggcaagtactcgtttgacatgttcagccacaagaaggcggtgctcaagagaagcttcctcgtcgagttcatgttccgctacccgccgtgggacgagaccaagatcggaatgctcaggcgcgtctaccgcttcgactacgtctcgctcttcctcgcgctcatcggcctcaggagatgaagcagacggcggagagtgcgtgaacaatcgagccaacagaatttgcacccacacccaacacacagttgctagtggtcaattgtcgttcatactgatcgatgaatatgtaattgtcccttctgtacaccaaaacgtctgtagtgtcgtttactcgttttatacgtgtctgtctatttatcgccccaaaagatatttaataataatggattattatctttct

SEQ ID NO: 277525 - DNA, 565 bp, Zea mays
tttctcccttttaggatttctggtctgttctgttattttgggattcggtatttctgaagcaacctcctggaacgctcaaagaaaagccctttagagacccatgaactatcgaatggggtgttccacaatcaattgcctatttcagaacttccaagctgaagaatatatgacctagctacgacgttgtgaatggctgcggttgcacacctcaagctcaatggttcgattctttgcgtgaaggttttaacgagacagaaaacacggatgtttttgacctgccaatgcccaatgtgtctttgtaatcctccattattgttggccacctgcatcctgtacatgtgaacaactcaagtagatgtgtatccgtattccccttgcagatattgcaattgtcacagcatcctgtttaactgcttgggtagtttcgaaaatttgtttttctcacttggagacgcagatggttcaagctgttaacagaagtgcactgattgttctttttcagaggctgaaacctgtatgtaacccgtccatgatatgattaacaagctgactttatctttgacct

SEQ ID NO: 277526 - DNA, 605 bp, Zea mays
gttactgaagttaatttgcatctggtcttctcttctccaaggcactgaatggtttcaacagggtgcatcatcgtgttggagatagtgtaccaaatggatttctccctttttggatttctggtctgttctgttattttgggattaggtatttttgaaacaacctccttggaacgctcaaagaaaagccctttggagacccatgaactatcgaatggggtgttccacaatcaattgccaattacagaacttccaagctgaagaatatatgacctgggtgagtgagatgcattgaaaaaaatttgtgtttgcttaagtatgatttttgaatgatttatctgttaggtcgagattgtggtgcaagttaatattagatagcatgtttcaatggtggactgttacggtttgagcattagtatcgattgcggaagaatttcttcctgacatgtttatatagcccctcaaccaatagactttaagccccttttccctattcttgtaccccagctgccacatggtgaatggccgcggttgcacacctcaaaatcagtggctcgattctttgtgcgaaggtttagaaccacagacagaaagcacggatatttttg

SEQ ID NO: 277527 - DNA, 414 bp, Zea mays
ctctctctaccccctatattcctctcccatctcttcgccgtcttcttttcctcccctaggtcggtctcctcccctctccccaccgaggttccccctccttccttcgcttccttttttccctgtcgccggcggcgacagggttccgttttccttgctccggcgggctgtaaatgcttccggccctcttcggtgcctcagatccggtggtgctcgttcttctggtcttgattcgagtgggaggggaaggggtcgcttcggtgttgggtgactcggagacatgcctgcgctctacgcttacggagatgacgggtgcctcgtctcggcgccggctgagctggccggactcttctgcctcggcgccgtgcagcagcggaagcgcacgctagtggccgcgttcgctgtggccgtcggggt

SEQ ID NO: 277528 - DNA, 1040 bp, Zea mays
cccacgcgtccgatctcaaacctgtgcgtctgcccctttccagctttcctctcaaacggagagatgtactcggatcagatctccaccgggcgcaacgctccatccatgaccgccttgacggcgacctccctgccggcacgggcgccggcggccgtgtccgtcacacggtgtccaagaggcaacgacagatagatgaaaaatggaagcatgatctgtatcgggaagatgatgaaccagcttcaaaatcaacagatccgaaggatttgcgattgaagcttcagaggcgaagttttcaacaagattttaccagcacaagaagttctggtgtgcgtgatctacgtgagaagctatctggtataatgaacccacagccatcaaatgctgacccaccaaagccaaagccaaagccagtatcggaggttgttaacatctcaaggcgtcaaattgctgatgaaatgcatgcacgccaaaataagaaaccaccaaagcagacttcatcgaagaagacatctcagccaaaggctgaaagtccactcgacagtttcctgagttcccttgggcttgagaagtactcaattaccttccaggcagaagaggttgacatggcagccctaaggcatatgacggacagtgatctaaaagctttgggcattccaatgggtcctcggaagaagattatccttgccttggaatcgagagcataagggaatgacaagggagttcagtgtaggaaggtgggggatatgctaggcatgctcgtgtgcaagttcgacaaaaactttgtatccacatatcttggaaagggtacaacaacaatgattttatgggtctcttgtaacgcataccctgtcctgttgagcatgttcagcgaagtttaggattgctagaaggcaggccacggcgtctattgctgtaacttgtttccgtgttaattaagtggtgcggtatacatgttgaggcagttgggttcgtcttggaatgctatatcctataactacttgggtgtttggttcgatgaatgatatattacatcatcttct

SEQ ID NO: 277529 - DNA, 614 bp, Zea mays
atcccttttctccctcccgcgatctcctccgctcgacgcctgtaccccgccgtcccgcgtccccgctccagctcgaaaccctagacctgtgcggctgtccctattctccccaacggaaagatgtactcggaccagatctccaccgggcgcaagcgctccatccacgaccgccttgacggcgacctccccgccggcacgggcgccggcggccgtgttcgtcacacggtgtccaagaggcaacggcagatagatgaaaaatggaagcatgatctgtatcgggaagacgatgaaccagcttcaaaatcaatagatccaaaggatttgcgattgaagcttcagaggcgaagttctcaacaaagctttaccagcacaaggagatctggtgtgcgtgatttacgtgagaagctatctggtataatgcacccacagccatcaaatgctgatccaaagcccaagccaaagccagtatcagaggttgttaacatctcaaggcgtcaaactgctgatgaaatgcctgcacgtcaaagcaagagagcaccaaaacagacttcattgaagaagacttcacagccaaagttgttctattatataaggttgacatggcagccctaagg

SEQ ID NO: 277530 - DNA, 566 bp, Zea mays
cagtttgatgcgaccgcgggagcgtccgcccgaccgccaccgcgtccgcctcagctcccctcgcttccctctaatttccagcccagtagtagggagactagaatcgtcggcgcgacgccttggcagattcgtccgccccgatcccaccaccaccgtgccccgcgggtgacgtcggaccggcggcgatggcaacgtcggcggcggcgggatcgcgcaggaaggcgccgagccctccgaagcaccgtcacgacggtacctcgccgctgcctctcggcatggactggagccctcccccgaagagatgggagggaaggaacaccatatggccacacaaccctcaaacaggttggagttactgtgtgatgatgccttcttggatcacccaaacacctgaaactggggtcacagccgatagctttttgaaatctgtcgttttttacaggatacatgttggtatacaatctccagaaggctttagctctatccatggaatcctcaaaaggtttagtgactttctgaagctatcttctgatcttaagagcgccgtttccagaaaagatgttcca

SEQ ID NO: 277531 - DNA, 1082 bp, Zea mays
agcgaggagaaaggcgagctgctgctggtgtacgagtacatgcccaatggaagcctggacaaggccctctacggcgagccttgcacgttgtcgtggccgcagagatacacggtcgccgccggcatcgcgtcggtgctgtcgtacctccaccaggagtgcgagcagcgcgtcatccaccgggacatcaagaccagcaacatcctgctggacgtcaacctgagcccgcgcctgggcgacttcgggctggccaggctcatggaccacaacaagagccccgtgtccacgctcaccgcggggaccatgggctacctcgcgccggagtaccttcagtccggcaaggccaccgagcagaccgacgtgttcagctacggcgtggtgctcctcgaggtgtgctgcgggaggcggcccatcgacaaggacgagtgcggcaggggcggcgggggcaagaacgtgaacctggtggactgggtgtggcgcctccacggcgaggacaggctcatcgaggccgcggacgcacggctggcccgcgagtttgacaaggccgagatgctgctgctgctgctcgtggggctgagctgcgccaatccccactgtgaggagcgtcccgcgatgcggcgggtggtgcagatcctcaaccgagaggcggagcctgtgcccgtgccgcccaagaaaccactgctggtgttcagctccagcgcgtccgcgaagctgcaggagatcgccttctcctgtggcgatgacgtccgaggcggctactccgttgccaagcctgcatcaccaaagtccgagggagccgacattgaacgctgacgcgaagcagtcgataccaattacactactacagatttgttggtgtgggaatatataggtgcttcagtctggaaagtgctgatgaatgcaaattccatgagtcatctacggtctagagaagctggcattgacgcttgatagcaagcgatcaatgcactgatagtgaattactacttgtgtgattcatatatgcattggccatgtgctcgtgaagggaatataggtaataatcccctctgttgtatgaatgttcaatactgaataatggagtc

SEQ ID NO: 277532 - DNA, 517 bp, Zea mays
ctagaagttattggttaagttgaattaaaattgccacacatgttatgataatatattaatatgtacagattcacggatcaatcacatgaagggaaagtgcgctagaaagatatgcccgtttcacgttaacaaagccatccccaaactaaacagagatagttaacttgccctctgtagtcgtacccttcagtcaatgctcagctttcactttgacatctccattaagcaaattgccatgggactgagccaaccgctttgcctcctgcacaaaaatggggaattatgatgttatgcaacaagaacaatagaggatttattctaaccaccgaagcaacagctgaggcacatctggacatgttacaatcaccagcgtttgacaaaacttgatttccagaaaccctaacaagcagcaggatttaatgaagcctagatgtttctcacagaatccaatcgattttcacctttcttacactaccaattgctaattgcttcaaaacaaatacgagtaaatggtaac

SEQ ID NO: 277533 - DNA, 815 bp, Zea mays
actagttctagatcgcgacggccgcccttttttttttttttttttttttttttttttttttttttttttttttttttttttttttatttttttatccggagttcgatatgctccggatatctttttgaagttattagttaagttgaatacattgggccacacatgctacgataggatgtacccattcactgatcaggggacgtgcaatagaaagatatgcatgtttctggttaacaaagccatccccaaaactaagcagagataacaaacttgccctctgtagtcgtaccattcgctcaatgctcagctttcactttgacatctccattaggcaaagtaccctgggactgagccaaccgctttgcttcagcagcagaagtagcacgtatctccctgtatgcttctacgtcctcagggaaagcttgttcaagctcctcaagaagatgcttccgtaggcccttgaaagcgtcagtcttgcccttggtgatctggtttttggcgatgcagctgttgagcacgtccctagtgaactcgtcggggttcttcccatcgtcgatcaaactggatgttgcacccctcggcgagtttctgcatcgtgtcgagctccgccacaagcgcattcaggcgctggagcccggggagctgggaggcagagttgaaggaggagacggtgaggttgagctggtggagcaggcccagcgtcttctggatggagctcgtcacctgcgccaggttctgcttcgacgcgtcctccggccgctcccctccatcccccgatgcttggacgccgccgttccctgccgcagcggcgccgg

SEQ ID NO: 277534 - DNA, 513 bp, Zea mays
gtaaattccttcacaatgttggccttcagcctgcctccaagacaagctctatttcagcaaaggtgcacgagcttcaatctcaattggagaccaagagacaagaaaaagatggacttaggcaagaaatggaatccttaaaggctacatcacaagaatttatgaccactattgctaatcaaacaattgagatcgagaatttaaagaagtcgctagcagaaaataatagccttcttcgtcagatactaagcaccaatcgaggcatgtctcctccttaagattgttgctatagtcgaccatgccaatgttacatccaacaacactggactacttttttattagttgtctatttagtctgatcatattgatactatagtagctgtgtgcagcttgtggcggttgaacatgtcctacttttgcatttaagttatagaaaagttgtgtgtgttcatgttgtttgatgaaattgtatgcacggtttggattgaattcaattatatactgattttattaatt

SEQ ID NO: 277535 - DNA, 695 bp, Zea mays
cgttagtcgttgcttgtggctgggacaccatatcatattcaagcttgataaggaaagtagcttcagataatgtgttcgtcatccagatccaacacccacgatctcgccttgataggtttgatttagtggtgactcctcgccatgattactatgctttaaccgctagtggacaacaagaagttccacacctgttccgcagatggattactccacaggaaccacccaggagtaatgtggtacttactgttggtgcactacaccaggctgattctgctgcgctacggcttgctgctatagcctggcatgatgaactcgcccctgggcctaagccgttgctaattgtcagcattgggggccccaccaggaattgtaaatatggtgtagatcttgccaggcagctcataacttctctgtataatgtgctagatagctgtgggagtgtcagaatctcattctctccgagaacaccatggaaggttgctgatactatatttaaagaatttgctggacatcccaaggtctatatttggaatggtgaagaacctaaccctcacatgggacatcttgcatgggctgatgcttttgtcataacagcagactcgataagtatgttaagtgaggcaggtagcacagggaaacctggttatgttattgggaccgaacacttgtaatggaagttttcggcttttcacaag

SEQ ID NO: 277536 - DNA, 666 bp, Zea mays
cggacgcgtggatcagacagggacattgtggcgctctccggcggccatactctggggagagcgcatcgagagaggacagggtttgatggcccatggactagggatcctctgaaatttgacaactcttatttccttgagcttctgaaaggcgactctgaagggctcttgaaactccctactgacaaggttcttgtggaagatcctgaattccgtcagcatgtccaactatatgccaaggatgaagatgcatttttcagggactacgcggagtcacacaagaagctgtcagagctaggcttcaccccccctcgctcttgtctctcatccagatctgcgaataaacacaagtcgttgctggtgcaagctgcagctgggctcgcagttgctaccgcagttgtcgcatgggcgtacctgtgcgaatccaacaacaagttcatctaacttacgcttaccgttagtacaaatacaaattggagtcgccaaaatatttcagttctgtgcacatgtatttgcatctacatattgatataataccaagcatgttatgtgttgtgaacttgttgaggccaaagaatgaaataaagaaaaacctaaaaataagggcaaaagaagaagatagaaaatagaaaaaaaaaaaaaaaaaaaaaaaaaaaaaaataagaaaaa

SEQ ID NO: 277537 - DNA, 412 bp, Zea mays
gcatcggcgccctttttttttttgtttatctttttttttagctagcaagcagaattagaagaaactagtcatagttattccagtaataattctcaaagcaagggaagaaaataacagaaagggcgcattaagttgaccagtactagggtttccatctgcagatcgaaagtaaggaccaaccaaaagctaggaaacacaatcaagctgcgcgtctcgccatacacaaattcatcacccaaaaaccaaaaccttcaccgtctgatctggctgtctgatccgatgtgtgggagcaagagcggtcggatcggatcggatcacgcggaagccgctgccgttcggtagcggttgagcttgccgaagatgtggaggtcggtgacgaagccgatgaagcatagggacatgacgagcacca

SEQ ID NO: 277538 - DNA, 542 bp, Zea mays
  unsure (1)..(542): unsure at all n locations
ttgtttgtcaatgcagaaattctcagcttcaggccggcataagacataacaggcagttgatgaggttcgcgccacagtcactgaacttcagaatgccattagagttttcagtctgttatctgttgcatcaacgtaccactcccatggttttgatgagaggaaaatagaaactcatgttgagtactgtaaacatttacttgatgctgctaaggttcatcgtgatgcagctgagcaagctgaacagcagaataagcaaaaaatggaagttgctcgtcagattgctttggcagaggaagctcgccgaagggcagaagagcagagaaaatttcagttagaaaggaggagggaagaggatgaactcaagcaagtaaaacaacaggaggaacacttccagcgtgtgaaggaacaatggaaaacatccagcaacacccctggcaagagaaaagatcgatctaagactgaagatgaagaggtgggaaataaaaacccgaggangaagggaattaggaggaaggtctcaaaaacaaagatgcaatatgggg

SEQ ID NO: 277539 - DNA, 735 bp, Zea mays
ctctctggctctctctcacatgcctgcctactactccctcaagcaagcaagctgcaagaggtcaagacgagcagtgactgtgagtgagcggcgtctggtcactctggtgtgaactgtgaagtgaggacttgttggaggaggacggagcgcgggccgcggagggtcatggcatggtgatggacctgctgctccccctcactttgcccctagtgctctaggcagccttagctagcctcgcagtcctgggaggaggagaaggacaaggtctctgatcagctccagcttgtctggtcaaagctgaggagcctgcttgggctgcctgtgagtccaagctcgacaggaccactgccactgtgaagcacagcgtcagcggcgacaagacgaaggggcggaagctgccaagccgatagatctacgcaaatggagaccaaggacgtgtcgccgctcgccgccgccaccaccaccaccgcggcgcccgtgcctgcaccgacctctcaaccgcctccgccgccgccggccccttcttctatggcgccgccgcagcaccagcaccagcaccatccgccgccgccgttcgcgcagcaggcggccccggttccgtcgcctgccgcgtccatgcccggcggcatgcggctctcgttcgaccagatgtccgggaaggcgcccggggagcagcaccaccactccgcgcccatgctctacacggtgccaccaccgtagtccggcgcgggcgcg

SEQ ID NO: 277540 - DNA, 551 bp, Zea mays
tatcgagcgaccttgtcgaagatcaagtaactgatggcgaggttgagacgtcatgcaccagctaatgcgagcctcttttttagacctaattgggagttccctgctgtagctcagctcaaggagcgagctgcattgttggcgaggcaagcgcacctggctgcctggctgcctggagtacatggtatcacttcctctaggacggctttagttttgacataaggaggagtgtctttagaaaataagattatgagctccggggcttttcagtctgaatgtaacggtaacataaccattctttactagaacatttattttttccgtcattgacaaagcaccccacatggtctgtatcatcaggaaacatatacatcgtataaaaaacatcagaaaaaggaaagatttgcagttcaaaaaaaaaaacattaaaaaaaaaagaataaccaaaaagaaaacaaaaaaaaaagcctagccatcaagacatacaaaaataacaaaccctatgtctaaaattccagacatgtaatcgcttattgcacgccatacaagacacg

SEQ ID NO: 277541 - DNA, 486 bp, Zea mays
cccacgcgtccgctgtcttggttgcgcaagcaccaagcaggtggaagatgatggaggtggcgggggctcaggcccgcgcggttcccctcctgctccgcaacaccgcctccctgcggacctccgtctccgtctcctgcacgggctcccgccggagctgggtggcggcggccacggcggagggggacgagacccgcggcttcgacaaggtgcccatggacacccccggcgcgtaccgcctggtagaccgggacaccggccgcagcgtcatcgtgtggggcggcaccgacgacagcgacgaggcctccatgccgtccccggcggtgctctcccggaccaccgaccgccgccacagccaaggtgttgggggaggtacaggtatcgggaatttcggcaggttcaaggcacagaaaataaaatccttggtcacgaggtcagctcaccgcaagaaggacagttctaatcgctcaagaactgcctggtctgatg

SEQ ID NO: 277542 - DNA, 581 bp, Zea mays
ggttactttcaatcaatcgactctacctggttgggtgatggcagttgcgtggctattgtatgtgatttggctatgggtctcattcaaagaaccgaaccgtgctactgaggtgaatgaagccccacaaaatcctgcttctggacaaacggttgatattggacaagtagagaatggacttgctcagcctctgctcatggattccgtagataaacaaaatgaagatgaagatgaagaagttgatgaaagtgaagaagctgcagatgattcacgcaagcctgcaacatcaattggctcagcatacagactgcttactccatcagtaaaggtcccagttgttgatatacttcatgctgaaatacgcaccggagattttgctttcagagtctagtgttatcactaatcactatttcagttggaacacaggcgcagtggcaatttttctagcaatccttgggttgacggtgcttcctgttaatcctgttgttggaacatacatcagcaatatgtttgaggacaggcaactgctcatggtctctcaaattacgttgctagtaagcattatctttagctccaaggttacg

SEQ ID NO: 277543 - DNA, 820 bp, Zea mays
attggatgaccacagcaaggcagtaacaagcttagcatcaagcagagatggacttctacttgtctctggatctgaggatggtaatgttcgggtgtgggataccagatgtcagcaagttacccgaaaattcaaacactcccaaggtccagtaaccaatgttcttattgtaacgccacaacgagtaaatctgccaccgctacaaccattacgcaaagttcggtctgcaaatggggaggctgaacggcaggcagtactttttcatcggcctgaaaatgatgtcccaattcctggaaataagaccttcatttttatggagcgctacttggatgagcttcagaagcatggtggttcatccaggttatttgattttgggccgaatgctcagaatggcactccaaaccaacagggtacagaatggagagatagatacttggtgttgcaggatctctttgtccatgaggtcctccatcagatgccatcctcgaggaacccatgatgcaaacttgctttggatatcgatcatttgtggtgtcgaaacagtgatagtttccattcgggctacaaacgatgtagatgagttctttggagtaattcaactgatggtgctttctgctttcggctgcgaggaacttttcagattctgaactaaaacccactagaatcagtgccagcagtcacttggaactggttctcgtttgtgtactagtctagagaaacgctaaaaatcaggtttctcttgattctagttctaattttaaggatacagtgagcttgctacatgaagctattttgatttattagaccccatgttttgttctcc

SEQ ID NO: 277544 - DNA, 1008 bp, Zea mays
ggaacctcgagcgcccgctgtgcatccccaaggaggagctgctcccgcgtccgccggccggggtgcgcgtggaggacaccctgctgctcgcgcaggttacaaagttcacatgtggtggatttgctgtgggcatttgcttcagtcacttggtgttcgatgggcagggtgctgcacaatttctgaaagcggtgggtgagatggctaggggcctccctgagccatcgatcaagccaatctgggctcgtgatgccatccccaacccacctaagccacccctaggtccgccgccgtcattcaccgcattcaactttgagaaatcagtcgttgagatctctctggacagcatcaagagtgtgaaggatcaggttgcaagtgaaaccaaccagaagtgttccactttcgacgtggtcacggccataatcttcaaatgccgcgccttggcagtcgacttcgcgcccgacgctgaggttcgcttgggcttcgcagccagcactcgccacctgctgagcaatgtgctgccctccgtcgaaggctactacgggaactgtgtgtacccaggtggtctcaccaagaccagccaggaggtgaaggaagcttcgcttgtggagatcgtgaccgcgatcagggaagccaaggaagctctgtcatcgaggttccttgactggttgagcggcggcgccaaggagaaccactacaacgtgtcgctggactacggcaccctcgtcgtgactgactggagccatgtgggcttcaacgaggttgactacgggttcggtgagccgagctacgtgttcaccctgaacgacgacgtgaacatcgtcccctccgttgtgtacctgaagccgcccaagccgaagcagggcatcaggctggtcctgcagtgcgtggaaggccatcactctgtcgtgttcggcgaggagttgcagaagcatgcatagagtgagtgtattctacagtgggaatctgttgtattttatttgttgtgtcagattgctgctcccggaattt

SEQ ID NO: 277545 - DNA, 485 bp, Zea mays
ttgcccacgcgtccgcactgcgctagtagagcgaacgacggcgagcacggtgctggcggagcgaagcggacgacggcaacggactacctacgggctggtggcgtagcacggtgcgacggctccccctctgggcaagctcgacggcggcaggtccggctctcccccatcgacggcgcgacggtgtttgggcgatgcggccagtggatggcgcgggccccaagcgatctctgggctgagccagcttccctctccccaagtgacagtgcggtggactctccccctgaccctctccctaggtgctcatggtcagcagtgccaccctcatcccactcctggccacctccatttgttgtgtagtggcgccctcatccccctcccagcctcatgttccccaattgatgtatgtgtgtcaatttagagatgatgtcgctggcctcatcatctaccggtctcactcggcgttcaccgcagctaggaatgccctg

SEQ ID NO: 277546 - DNA, 529 bp, Zea mays
gctttgtaactagaaagggtggtgaaattaaacaagaacgcaagcgtctgtcaaagcgtcgagcaaaggataaagcacgcaaggccacaggaatgcaggttgatgctacaggagatgattatggcgatcctgacctgttttctattagtgttatcaagggtggaaaagaacttgaagctgttgaatcagcagaggttgatgtgcaagatgaaattggacacggtgagaatgaggatactcaagctcttgaacactctgatgaggaaatggattctgacgaggaacagcagaggtatgatgcccagcttgaggagatgcttgatgaagcttatgagcgctttgtaactagaaagggtggtgaaataaagcaagaacgcaagcgtgcaaaacgaataaatcctgacgctgatgcagaactgttagagggaggtgaagatgatggtgatgttgaaatggatcaagattttgatgaagatcaagatcaagaggccaacccccttctgtttgccctagatgaagcagagccaac

SEQ ID NO: 277547 - DNA, 602 bp, Zea mays
ggactggcgctgcttatgatgaaggtgctgaagcagccgaatggttttccacatttttggggtgcccaactcgactggtgcgctttaacgaagattcagaaactaggctgactgaccctgactatgcacgaggttacaaaaccatgttttctgatggcttcccttatctgatagtctctcagggctcattggatgcactaaatgagatactcaaagagcctataccaattaaccgcttcagaccaaatattttagtggaggggtgccacccatatgcagaggatatgtggaaatcagtaaagataaacaagttaacgtttcaaggtgtgaagttatgtggccgttgcaaggttcctacaattaaccaagacactggaatacctagccctactgaaccaactgacactctgcagacatatcggtcgggtgaagtgctgcttcgtagccacaaaaacaaacggcaggtgtactttgggcaaaatgcagtctgcaaggcatctctgtcagcaaatgtggaaagaaggatcggcaaggtgggggatccagtttatgtgacacagtcgttcccttcatctggtgaaagtccattctgagtgaccgaa

SEQ ID NO: 277548 - DNA, 854 bp, Zea mays
cggacgcgtggggtcttgcctccagcaaccctcttgtgcccaaacatcttgcttcacaccgcgcctaccatcaattccaaagcctcggaaacctaaatcctcccagaaaaggcttccacagcttgttgtagagcctactgatgcacgttctaattcctttgttggcacacatgagtaccttgcaccagaaatcatcaaaggggatggccatggaagcgctgttgactggtggacgtttggtgtcttcctttatgaacttctatacggcaagacacccttcagaggacctgggaatgatgaaacattggcaaatgtggtctcgcagaatctccggttcccagaccatccagctgtgagcagcaacaccaaagatctcatcagaggtttactggttaaggagcctgagaacagatttggatcgttgagaggagctgctgagatcaagcagcaccccttctttgaaggcttgaattgggctctgattcggtctgctgctccaccagagacacaaccttgcaacatcgtgactcttgccaaagagcggaagaaagaaggcaagtgcctggagttcagaagcaactcagaggaccttgagtttgaagttttttagtttcgttctggtacagtttagcactatttccgctgatataagcctacatttttttttctatgaatagccaaaggcttgggggtgtacatgtagatccttgtatttcagtaattgctatgtccctgtcaatagcatcaccaaattgaaaagaataagcagcttatgctattattatcattgctgctgcatatgaattggttcctattggagacccagtaaattttactcgtgtatttgcatgaag

SEQ ID NO: 277549 - DNA, 694 bp, Zea mays
cccacgcgtccgctcacgcgtccgcggactcgtgggcgtgccgtgcccgtgtgcatcggggaaaaaacagcagcaggggccgaatcggagctccgccgccggcagatctgcgccggccggtctgctccgcccagcggacatggaccgcgacggccgcccggggtggctaccgtcgctgggcttcgccttcctcagcttcaactgcgggatggccgtctaccgctcctgggacgacccctacgccgtcgccttcgtcctcgccgcgtacgccgccctcgtcctcctcttccgctgcctccaccttctggagcgccgccgggaccagcgcctcaagctcgccgtctggggcctctccacgctcctcacactcatgttctcgtacaagatcgccgccgtgatgccgccctgggcccagctgctcgtctggggcatggggatcctcaccgtcgttgcgggattctacgccttcttcgtcgcccgcccggaggagccctgacccttcgttcgtctccatgccgcccccccgacatcaacatggatacctgatgagcatcactcaccgcatcggtctcagttatcttgtgtagtacgtatgtctttttgcagcatgccgaagaagttgacgaacgtaccgagaggcgcgtagcaagactcatcactcttttgaatggaagagttggtagtagaataaagt

SEQ ID NO: 277550 - DNA, 758 bp, Zea mays
agataataaaagttcaccttttattgatagtaaggactagtaatttaggctcaacagttcttggaaaaagaaggttggatgaagaattttctcaatggtcccaaataagaggaagacgttttcgaaagtctgagcttgacacatacttagaggaagaacttgtgagaatagatgatagattctgaattctaaattggtggaggacaaatgcaaacaaatacccggtgctttcagctatggcgcgtgatattttagcaatacctttgagcactgttccttcggagtttgcgttcagcgctggtggtcgtattcttgctgataatcgaagcacaatgacaccagaaacacttgaatgctttgtatgctgtaaggattggttatatgaatacccaaatattcaagcttagttgatctgacttccttcaaacatgttcaacagtacggcattcaagggagatttatgcatcattcggcgggctcctgtagctgcttagggatgacccttccactgctgctcgcttcaagcttgatcagatactctttctactgatacgcatggtgtaaaactgccgtgttatgtggtagatcggtgtgtgtactggtttctttatgtgtaaaactgtctgcttgatcaggggtgagtattgctttctttatcactctggattcatggtaatgagttcctatttcagtatttcttgccaaaaagattgttgtgcattaaggatatttgacagatgttctttgttatttctctc

SEQ ID NO: 277551 - DNA, 469 bp, Zea mays
cccaacatcaatttaatgctcgtgagagtgattggggtttcacatcttttatgcctttgagtgagctctatgatgcaagtagaggttacctcgtgaatgatactgttgttgtggaggccgaggttgctgtccgcagaatggttgactattggacatatgactcaaaaaaaggaaactggttatgtgggcctgaaaaaccaaggagctacctgttatatgaactcccttctacagacactataccatataccctacttcaggaaggctgtatatcatatgccaaccactgaaaatgacataccatcaggaagcattcccttggcgctgcagagccttttctacaagctccagtacagtgacagtagtgtagctacaaaagagcttgacaaaatcttttggttgggacacatcatgattctttcatgcagcatgatgtacaagagctcaacagatttctgtctgagaaact

SEQ ID NO: 277552 - DNA, 584 bp, Zea mays
gacccacgcgtgcgcggacgcgtgggttctgcctccttctcattctcgaccggtcaccccatctccaccgccacagccgtcgtcttccgccgccgccgatggcccgcctcttcacgcaaaccctcaccctagcccgccccgccgcctccccctccactaccgccgcatccgcttccctccgtggcctcgccaccaaggtcgagatcatcgagatcgatctcgccgaggaagacgctggctcctcgtcccacggctccccctcctcgtccccgtcggtcgaggcggtcgggatccggcgcctggaggaggccatccacggcgtcatggtgcgccgcgccgcgcccgactggctccccttcgtgccgggagggtccttctgggtgcccccgctgcgccgtccgcacggggtcgccgagctcgttggccggatcgcggctgctgggggcacctaatggggcgcctttgccgtttggtgctcgttcgaagtctgattctttatttctctttttgattaagttttcttattttcttttttgttttattttttttttgtatggatttttctttgtattgtcttatttttt

SEQ ID NO: 277553 - DNA, 388 bp, Zea mays
gcgacgtcgtcttcgaggagcactttgtgtcgattctcaacttctcttggcctcaggttacttgtgtgactcagtgccgcatcagaggtagcagggtggtattcgtgagcttctgtgatgagtcttaacagatccagaagtttgctgtacgtttcccacagccctgtgacgcagattcgttcttaagttgtgtggaatgctcatgcggtagcagcggatccatggacatcataccatttggaaatgattatgtgtgtgaagatccatcagcatctgaatatattgcttctaatggacttcatcacaggctggatgatgcttcaaaccttgaggagcaatgttctgatcacacaatagatgaaccaccaatgaactaccactaggaaac

SEQ ID NO: 277554 - DNA, 802 bp, Zea mays
cccacgcgtccgcccacgcgtccgagaagggcttggacgcggatggcgatttgctcgatgtgatattgaaaggtctgtgtagccatgaaaaggttgaagaggcttactctttgtttgttgagatggtggataaggctgagttgaggccttggcaaggcacttgccagcatttaattggtgacttgctgagggtaaacaaacttgaggaggccctggcccttctcaagacaatgaaaacctgcaagttcccaccttttgcggacccgttccctccttacattgccaagtatgggacagttgaagatgcaaggaactttttcaaggcattgacagtgaaaacttctccagcacctgctgcctacctgcatgttctcaaagttgttcttttgcggagggaagatattctgaagctcaagattttctgtacaaatgccctatttcatcccgcaagcaccctcccgtcgccaaactgtttgaatcaataaaaattgagagtgcctctgcctcttgattgggttcaaccaagcaatgattggtgaggctatggtgaacccttacctttgcttgctagctagctttctgtttttaagtagccttggtattgggtcttttaaagacatatggttcaactaagtcgaattttagtatatgccacttccagcccatgacctgctggcatattcccctataacttattagcttaaaaggaaggtgccaactggcacgtccttgagactttttttttgttgttgtaaacattgcttctgcttgctagatcgttaaacagttggattttccttcc

SEQ ID NO: 277555 - DNA, 562 bp, Zea mays
gtcagtcagagaggtccagcatgaggtctgatagacagactactgatgagagccagtctgatagacaaaggcgaacttatagaactgactcgtaccggcatgaggcaagttctcagtatcttgtgcagggccaaccttttggatccacaagttctatgcgcaaacaaggaaacacatcacatggggtttatacaccaccatctacgtcttcaaatggtcccagtgctttatctggccctccaggaccaccattttttatggtgtactcttatgagcaaggctcaaatcatgctgcttcctcatctgaaccaattgaatttggatctcttgggccacttcctgcagcagatggtgatgacataccaaggtcgacacgccaagtaatgcctaatgggttttatgggcaatgacgtggtcgatataggggtggttcctctcattcatctactgatcaaccatcctcgcctcagcctcgtcggtagttgagtcttcgtatgatggcttgatcacttcgtatgaaaccttgcgatagcaatattttggtacaccccttgtgatcaca

SEQ ID NO: 277556 - DNA, 399 bp, Zea mays
cccacgcgtccgctcagcttccaccaaatgttcgagggcatgggtctaggcggctgcatcgttcaggccaagttcaagctgcggtcgatcgtgaccatggtgctcttcttctgcctgacgacgccggtgggcatcgtggtgggcgtcgggatctcgtcggtgtacgacgaggacagccccacggcgctggtcgtggagggcgtgctcaactcggtggcggcggggatcctcgtgtacatggcgctggtggacctgctcgccgaggacttcatgaaccccagggtgcagagccggggcaagctgcagctcggcatcaacgccttcatgctcgtcggtgccggcctcatgtccatgctggccaagtgggcctagtttactagccagccactttttgctctc

SEQ ID NO: 277557 - DNA, 647 bp, Zea mays
gaggacatggaagatgcaaatacagtacctcactagacactaggatgatgagctccaccttgccgtggccgagttgttcaacggaatgtccggccgggaagtggcagcctcgctgcaccgatcgcttgccaagtttatcgtgcctgacaacccagagaaaatcctgtcgcttgtcgctgccaaggctagccatcatagagctcttggctctgcggacctcacatgtgccctgcaggcatgcagggggcgaggcaaccgatggccgcttgtgctggagatccacgcgacatcagtcgtgcgtgggcttggggctgaccgccttataggcaacttgctgatcgatctgtatgcaaagaatgggctcgtgtggcaggcacggcaggtattcaaggagctttcttccagggaccatgtctcatgggttgccatgctgtcagggtatgcacagagtggtcttggaaaaggaagctttcaggctttacagccagatgcattggactgctgttattcctacgccatatgttctgtctagtgtgctgagtgcttgcactaaaggaaaactttttgctcaaggtcggatgatccatgcccaagtttacaagcaagcattctgttcggagacctttgtgggcaatgcacttattgca

SEQ ID NO: 277558 - DNA, 459 bp, Zea mays
cttatggatcttctgtccattggatcatctccatcacagaatggcacccccgtaacagacttcggtcatcctggacaagagtctaaacctgttcctggtgtacctgaagctgttgacctcctcggtagtttgtcaccagccgagtctaaacccacaccagttgtacctaaggacatggatctgctcgacggtttgtcatcaaatacatctatttctggacatgagaatacaacccacccatcaataacagcttttcagagtgcaaccttgaagatcacgtttgatttcaaaatgaagcttggaaacccacgagagactacaattcatgccacttttaccaatttgacatctagtacttttacagattttatttttcaggctgctgttccaaagttcatccaattgagactggatccggctagtggcaacactgttccagctaatggaagtggttcagtc

SEQ ID NO: 277559 - DNA, 608 bp, Zea mays
cggacgcgtgggcgagcccgcagtctgccatcccctttcggtggcaaccaaatccggcttgcctgcagcggatctccatctggtcggagtggatcgggtctccggtggtgtttctcgcctccgtggcggttagtggcgccggacggaccacgtccccgcagcagcggtcagcggcggctggcctagctgcggtggcttgaggcggctctcggacgggtgcctcgagctggcaccagcgggtgggtgccgcaactctcaccgctagctggtgtagaggcggcgagtcccggcgccatggagggtaggccgcaagtgtccgcttagagaggggtcaacaaagggacttgtcaagctacgacactgcggtcttcggttgccctgctcagcttgttgttgccgtacatgatccttcatgatttgtgagagatctatattccccgaatcttcaccggctctgccagatcactggcgatcttcttgccagccgcctccgctaacctgcgcggcacagtagagctcaggaaaagcggtgggactgagggagaaaagaggagatgactagcctgtcgatcacagtgatgacgctgaacttgcatgaaggcgagcag

SEQ ID NO: 277560 - DNA, 557 bp, Zea mays
gccgccctttttttttttttttttagttcaaacgaggagctgcaggtaattcatagatccacataaacaaaagacagtcgcacatctgtggatgattcaagttacagaattctaaggcaaaattggtttacaagaaccacattattacagtacagcccttgtttgtaattcctaagattcttttgtttcttcaggtgcagctcgcctcgctgtcataaaggcaaagcatatcttctcttctgctcagctcctagccatggtcagatgcgcttgtttaaaccttgtgagagcgagcaccagcaggaggagtcgacggcgatgcaggacataagccgcgcggcagccaccgcgctgtgcagcggcattagtgtttccagccccgccgacgccgcggccgtcgatctgcggaggatccgggcggagcgggtagcggaaggcgaggcaaaggaaggtagtggcgctccgaggacgcggccggtaaggggcgcggagcggaccgccgacctcagggccacgacagcggcagcagcggtgcgggacaacgatgccatttcccc

SEQ ID NO: 277561 - DNA, 647 bp, Zea mays
agccaaaacacgcccgcgcgcctgtttgttcggccggaggacgccatggccatggaggagggatcaggagcggtggagaaagggccggccgtgggcacggtggctgacgcctccgccagcgtcatcggcgaaggcgccgtgaaggaggaggccgggggcagacggcagccgtcggccggctacgcggccgtcgtgatcggcggcaccttcgaccgcctacaccagggccaccatctcttcctgaaggcggcagcggagctggcgagggagaggatcgtggtcggcgtctgcgacggccccatgctcgccaagaaacagtacgccgacctgatacaaccgatcgagaagcggatgcagaacgccaaggattatattaagtccataaagcccggccttgatgttcatgtggagcccatcgtcgaccctttcggcccatccatcgttgaccaaggccttgaggccatcattgtcagcaaggagacgttgccgggagggcacgctgtcaacaggaagagagcagagagagggctcactcagctgcagatcgaggtgatagagctggtgccagaggagtcgacggtggacaagataagttccacggcattcaaaatgatggaagccgagagggcgctgcagcaacagaataa

SEQ ID NO: 277562 - DNA, 449 bp, Zea mays
  unsure (1)..(449): unsure at all n locations
accaccattgatttcacaaatttgtcaacataagacattgcacatggagacgaacgagtgtatctggatccagatgaggacaacgattggttgcataggaacgagacattccaggcaaacaacattgtcacaagtaaagaccttctaacaccaggtgatgatgatgagggtgtcatattcgaagaggaggatgatgatgatgagaacgatggatacctattcgctgggcaatgcacttcctattccaacaattgatgtcattgaaggagctgcccttggtggtgggctagaactgggagacaatctaacctcttcaaaatccaacataaaggttgcaaagtagacatgccctatttctatagttcatgcttcatggatatgatggtcacacttcatggtctgcggtgctganggaacagtgatagattgatatgagggttgcaagtcag

SEQ ID NO: 277563 - DNA, 844 bp, Zea mays
gttcccgtcagacactcacgtcagggtgcacgacgtcgtgcgcgacgcggcgctccggttcgcgcccgccaagtggctggtccactcaggcgccgggctcagggagcccccgcgcgaggaggcgccacgaaggtgggcggcgcctcgtggacgcgcaccggcgtcgctgatgctccagcgcaacaaggccctgccgaagaggatgctccaggcgatccagcatctcaccaagctcacgtacctggacctcgaggacaccggcattcaggacgccttccccatggagatctgctgtttggtcagcttgaagcacctcaacctatccaagaacaagatcctgtcgctgccgatggagctgggcaacctgagccagctcgagtacttctacctgcgcgacaactactacatccagatcaccataccaccggggctgatctcgcggcttgggaagctgcaggtgctggaggttttcaccgcgagcatcgtctccgtcgcggacaactacgtcgcgccagtcattgacgacctcgagagcagcggcgcgcgcatggcgtcgctcggcatctggctcgacaccacccgcgacttggagcgcctcgcgcggctagcgccgggcgtgcgcgcccggtcgctgcacctgcgcaagttagaagggacgcgcgccctgccgctgctgtccgcggagcacgcgccggaacttgccggcgtgcaggagagcctgcgggagctggtggtctactcctccgacgtcgaggaggtcacggccgacgcgcacgtgcccatgctggaggtcatcaagtttgggttccttacgaagctgcgcgtcatggcgtggtcccacgcc

SEQ ID NO: 277564 - DNA, 761 bp, Zea mays
  unsure (1)..(761): unsure at all n locations
gggctcccggcggttcctgaacgagcgggagatggcgcgcgcngggcgggagcgggttcgaggtgcgcgtggcggagccgaccagcacacggacacggccgcgttcgcggcgctggtgaactcggcggacgtgatggtgggcgtgcacggcgccgggctgaccaacatggtgttcctgccccgcggcgccgtgctcgtccaggttgtgccgttcggcgggctggagtggctcacgggcgtcactttcaaggaccccgccgcggacatggaggtgagctacatgggctacgacgtgacgctggaggagagctcgctgatgcaccagtacccgaggaaccaccaggtgctcaccgacccctacgccgtgcacaagcagggctgggacgcgctcaaggcggcgtacctggacaagcagaacatccggatggatctcgacaggttcagggccacgctgagggaggccatgagccggttgccgccggctccgtgaccggccgccgtgccccggcccggaggtagataggttggtgtatctatcgtccccgttgtcatgctctcaacaagttgacttaatcttcttcttcttctccgtcccccctttttatttttattatgtcactagcaagattcttttggtccattgttttgttgtgttgtttactgctgctacataaggaatcaatctcatgggaagatgatgagcaaaagcaaagcaagaccaggttgctgttataaatttatatatatatatatgcagtgag

SEQ ID NO: 277565 - DNA, 616 bp, Zea mays
agggcaaggccatgctctgcacgtacacgctcttcggcgtcgtctggctctggaacgagacgtcgccgctcgggtggtggacgctcaagccgcgccccaaggaagaaagagagatggcacacctctacgagcgcaggaagttcccgtaccctggcgatgatgaggcggtcgaggagtttgtaaagagcggaggtgctcttggaaccacaattggacccaggggattcgctgacgccaatatggattctgaaaacatgcagaagcagctgcagtctaagaagttcgagcaggaagcacagaaactgtggattcggatgaggaatgaggtcgtacaggagctccaggagaaggggtttgatatcgagtgaatttgaaacctgcagtatggtcggcgctgaggatgttaaaacttaaaaccacttgccatctaaattggagaactgtataacttaggaataaaagagtttgtagctatctttttaactaactatctggtgcattcttggtgctgctagattgtaccgaaaataatttttgctgtcttgtggagaacagaggatctcatttgaatatttgatcctcttttaatgtttcttattgcctgatcatcacaaaa

SEQ ID NO: 277566 - DNA, 544 bp, Zea mays
gacaaaggaaaaggaacagcagcaagctgcacgagccctacagcagatagaagcaaaagctaaaaagagttatcaaaaagatttagagaataaccagaggaatgttgatggagacacttctgcagcacctggagatggatgggtgcttgactcggcgtcaggatattaccatgacaaatctactggactttactacgattcaaactctggcttctattattctgacagtttaggcaagtgggttacccaagaagaggcgtacaagtctgtgcaagcttcgaaatcagacgctggccaatcctcagcttcacaaacaaaagctcctgctgccgcagaaacagctgtccccgccattaacggaggtgcagctccaggccgggtggtgacgaaaccgcttcctaaccctatgacaccgattaacggcactcctgctccgtctgctgttgctgttaacaagaggaagacggatgacggcaagcccaaggcggtctccaaggaggaggaagcggccctcaaagcgcgggaagcagcaaggcagagagtg

SEQ ID NO: 277567 - DNA, 449 bp, Zea mays
cccacgcgtccgcccacgcgtccggggcgccaaggcggacaagaacctgcggttcctgctgcagaaggtgctgaagcagagcgacgtcgggagcctcggccgcatcgtgctccccaaaaaggaagcggaggttcacctgccggagctgaagacgagggatggcatctccatccccatggaggacatcggaacgtcgcgcgtgtggaacatgcggtacaggttttggcccaacaacaagagcagaatgtatctgctggagaacacaggggaatttgttcgttccaacgagcttcaggagggggatttcatagtgatctactccgatgtcaagtcgggcaaatatctgatacggggcgtgaaggtaaggcccccgccggcgcaagagcaaggcagtggttccagcgggggaggcaagcacaggcccctctgtccagcaggtccagggagag

SEQ ID NO: 277568 - DNA, 320 bp, Zea mays
gtcggtggcggccatcgaccgcgcgatgcattgcgacatttacctggccgcggtttatgcgagcaagcagacgcgatgccactcggtcgggtggcaacaagtgaaggactgagaactcgatcggcaccagtagattaagtgggcatgacgtccataataactgagtgatcacctacctagccgcttgtactagtcatgccctactttatattactctaaaagatacatttcgttgcgtaatcatcttatggctaccatagtcatgtggtccaatatatactgtctcatatctatattcatgcactggcagaactcaatct

SEQ ID NO: 277569 - DNA, 549 bp, Zea mays
  unsure (1)..(549): unsure at all n locations
tgtacctgcgcctcaagcatcaaactttggtgttccaacaacacagcaaaatgtcacaaatgcaccgcaggctggctctaatccggagaatgctcagggaaataattttaatcatgtgcagcatggttcaatgggtgctgctttgcaacaggaaaggactggtcccatgcagggtgcattgaatgcacagcagcagtccagtagcaacatgatatccaacaatgcaatgagtacaatgcagactaataacaatgcaaatgcgaattcattgcagcagttaaagcagcaacgtcaggagcatcaaatgatgcaaagtcagcaaatgaagcagcgccagcagatgatgcaacagatacaacaaaagcaaacgcttcaaccgcagctcccaatacagcaactaaagaaacaacagcagcaagggcagatgcagtttccacagcttcattctggaaatgatgtgaatgagctaaaggttaggcaaggagctgcaatcaaatctggaatgtatcaaacagctgagccagcgtactattatcagcagnataaaca

SEQ ID NO: 277570 - DNA, 603 bp, Zea mays
  unsure (1)..(603): unsure at all n locations
aacccaaaccgtggcttgtatacaacttctcaactccatgagtattttggtagcaaaacattgaacttttcatcaaaaagtgtatttcaagtccacttacatgttcaacagggtgcttttggcaaggatgctttgtttggatttggcctcacaacatattcgttgcttggactaggagtgcttggagggccactgtctcttccttggggtttgtacgtgctaatatgtcagagaacacccgagaaaccatgcttgaacgacgtgagcgatgttggaagttggaggagagcggccttgatagcttcagtatttcttgttgttttgacgctcattccgttgtgggatgaacttgcggaggaactaggtgtagggcttgtttcttcgttctgagatgcggtgcttaccgatagaattaggccgtgatgtagttcagttttgtgttgaaatgtagcttcccacggtggaattgttgtaaaggtatgtggaatttccggattaggtgagcaatgatatcgcttatgcgagtgtaatgaaattgtgccaactgccaagtatagaccttccccattaccaattacataaaaaaaaantaaatnnaannga

SEQ ID NO: 277571 - DNA, 653 bp, Zea mays
cttcaagacaaggaaggtgatgagttgcataggaactccgatgtgctagaaatcctcatgaataccaggtttctaatggtctatgtgcagtatgagcgttcactagaaacaatcataggacacgagtaagcaaagaaccttacaacggattcatgaagtttactccatatgcatttggtgtgacattggttcctttgttttgcctttcattacagtcaaatcatctggctcgggggcctaaattaccgaatcatgctttcccatcagttagtgaaggcccttgtcgagatgcgcaattctagagaaagattaggtgagagcttggtaaccctcaggtttcttttggttacccagtagtccagctaccaacacttgaaacaagctcttcagatgagaagcagcagaagcaacttttctttagaatctacttggtttctaaggattgtcagcatcataagttttccgccacatcctttcttataggtgattgtttgatccccaacctagactcaaagaaactttactgttagttgcagaattgatgctcagttcctttaaaaatgtctcttatagatggaatcggaacacacttgtgcagattagtatcacgatgtaattatttttatttataataatcagtattatttattcct

SEQ ID NO: 277572 - DNA, 1206 bp, Zea mays
cgagccacaggttgcctcctctccctctcctcgtggcctcgtccttctcgttcaagacgaaaccgtacgcgagcgagctggtgagggaggaagagcagggaggtgggatcaggccggctccatggacgccacgctcctcctcctccccgccaacttcacggccgccgccagcgggcggatgcggcctcgactgcctgcaggcccacatgtggcttcccctggtccctccgcgcggcctaggacctccatccgggcctcagccgtgtccgcagccctcgccgttcgtggcctgccgcaacacgcttccgtggccgggcaaagcactggaagttatagggttggtgatgttatgaccaaaagggaagagctccatgttgtgaaaccaacaacttcagttgatgacgcccttgagatgctggtgaagcataggatctctggctttcctgttattgatgatgactggaatttggttggcgttgtgtcagattatgatttattggcactggatacaatatcaggagctggaccggctgaagcagacatatttcctgaggtggatagcacttggaagacatttcatgagatacagaagcttttgagcaaaaccaacgggaaggttattgctgatgttatgaccccagcgcctctcgtggtgcgtgaaacaactaaccttgaagatgctgcaaggttactccttgtgactaagtaccgcaggcttccagtggtcgatagctcaggcaaactggttgggatcattacaagagggaacgtcgtccaagccgccctcgaaatcaagaaaaaggttgaagggacactctgagatgactacctccaggtatcctttttgctgccacatggggggcttaggacttggacacatctctagttggcaactgatcaatcaaagcgactgtcagagtgagcgatgaaagtcgctatgtttatgaagatttgcccggagaagcacaggtgtatgtgtagtgtttgttatatatgctgatgcagtccttgctggccaaaacacaggttaccgattgttctggtttcctgggcttctttggacaccaaattcttaacctaggtcttgtttgggtgcacacgtatctagttcaacttacttgtattgaggttcattgaagtggccaatcaactagttttcgcacttcaaaaaaaaaaaaaaaacccacgcgtccgcccacgcgtccg

SEQ ID NO: 277573 - DNA, 496 bp, Zea mays
agagggcgcccccgctccccgctggcgcctcgtcctcctccttcgccaggcccctgcgccgcggcgcggcgcaccacccgcgcctgcgcaccgcgctcgccgtctcctccgacctgctcgctgggaacaaggccgcgcaggccgccgccgcgcatccggcggttacccgggaagaggcactggagctgtatgaggacatggttcttggccgtgtattcgaggacatgtgtgcacaaatgtactaccgtggcaagatgtttggtttcgtccacctttacaatggccaggaggctgtctccactggcttcatcaaacttctgaaccaagctgactgtgttgttagcacataccgtgatcatgtccatgcgctgtccaagggcgtcccggcacgttctgtcatggctgagctctttggcaaggccacaggctgctgccgtggacagggtggttccatgcacatgttctctgctccccacaacctcctgggaggctttgc

SEQ ID NO: 277574 - DNA, 539 bp, Zea mays
tcctataatctgaatggcatcttgctcctctgtccacgccgtaccatcgctcctcgtctcggcgccgcctagtaggcggcgcacaagtacggccgtatgtcttcagggtgttcgccgcggcagggtcgcgtcctgccgcgtgcggtgtagcgccggggccgggcagggcggggtcaaggtccctgcgaagctggcggagctgtggtcggcggcgaagagcgcgcctcccctggccgtgctcgcgggtgtggcggcggcggtggcgatatacaaggtcgggtccagtctccttgcgccgcgccatcccccgccccgtcggctggaggcccagacggccccgccgtctccagtcccggagccggtgcaggtgggcgagataacggaggaggaactacggcagtacgacgggtccgaccccgagaaaccgctgctgatggccatcaaggggcagatctatgacgtctcagagagcaggatgttctatggacctggcgcagcttatgctctgtttgctggtcaagatgccagtagggcattgg

SEQ ID NO: 277575 - DNA, 567 bp, Zea mays
cccacgcgtccgcccacgcgtccgggtttctggaaacagtaaaaacatgtgctagtgggtcgaaagcaaaaggaacttgcatcgacaaattgtgcatataagtgaaaaagttaactgtatactgtatatattgctagatagggaatgtatctgagcttttgagtaacttagctattagagcattctgacttattatatgaaagttgacatcactaacaactgcctaactagtaggctaataacatcataattgcttgtaatttgcaggaatataaaatttcttggaattaccatttgaagtataatatggaaactgcttgtttaatttgtttgtatttatgaagaccttttgtacatagttaaatttgatggagaaatgatgcactactgcactagtggcttactctcatagcaccctaagacatgtgcaggtcctccctaagtattgttttttagtcttcaatgggccagtaattcaatataatgttcatgtattggagtgcagattggggcccaaagatcgatgttgttggagtttgcttccttgatcttgcttccaattacgta

SEQ ID NO: 277576 - DNA, 1131 bp, Zea mays
agcgtgcccgttctttttcgcgtttcacggcggcgcggacagagagccatcggcggcgcaccgaccgccggcgaagggtacagagatgaagacggttagcctcggcgcctctaggccttccactgtcaacttccgcatgccgacgagggacaacctcgtgcctatacgcgtcgacgtcgaggtggacggccagcgctacagggacgccttcacctggaacccgcgagatcccgactcggagataatcagcttcgctaagcggacggccaaggacctcaagctgccggccaatttcgtcccccagatgctccagtccatccaggggcaacttgcggagttccgctcctacgaggggcaggagatgcaaatcaaagagaagattgtgcctctgaagattgacctccgagtgaacaacactgtaattagggaccagttcttatgggatatcggcaaccttgatagtgaccctgaagaatttgcgaggacgctgtgtgatgatttgaacattacagaccctgaagttgggcctgcaatagctgtttccatccgtgagcagctttatgagattgctagtcagagcgtctctgttatgagagagaagcaaatgtcaaagaagggaaggcgagcaccagaattttcttcaaatagtaaagccgtgaacaatgcagtggatttgttcaagtattttggcagcaaagggagcgtcatccggaaaaggaaggaatggtacctgtatgagcctgttgttgatgtggtagctaatgacgaagacgggaaagaggaggctaataattctagcaggccgaagaaaagagccgacgaagagaaagctgcaagccttcagtccctttgaacacaagctgctgatagttctaaccaaggagggtttctcttgccaatcccagcagatgcctgcctttgacattcgtcgtaggatggcttcatcatagctacatatttgtatgtaagcggtgtgagagcgtgttattcctgatgagggtcggtgctgccctgtcacctagtctgacgacacccgtccagtactccagttgttgtatttgtatattcagttggctttgctgctcttgtttttacgatgcatgtccaaagctaaaggaagcctttgaactg

SEQ ID NO: 277577 - DNA, 333 bp, Zea mays
gaggaaatagaggatttaaagaagacaccataagaaatacatgccctccttcactagctggtaagcttcaatcaggatcagcccaatccagggccataaagttcctaagcccccaacagtgaactattgcaggacgtttctgttttgaaatttgggtggtgggtgaactatgtctaattgttttatcaataattggttgctagttgtttacaagtatgacttagtaggtccaagtttattgatttttgttactgggacctccaagttttgttgaacattgttgcttcttgcaagacgtattgtgatctatgaattggaactcatgtctcctac

SEQ ID NO: 277578 - DNA, 540 bp, Zea mays
cgaatctgaaccagtagcggatgacaatgaagaatcctctagatcaaggaatctatactttacaattggtgatgccaaatgtcgagctgctgtacaactcctgttgattcaggctgtgatggaggtatataacatgtacagaggacagttatcagcacagaacacagtaatcctcttcgaagccttgcacactgttgccgcacatgctcacaaaataaacagtgatagtgatttgcgttccaagttgcaagagttgggctcgatgacacagatgcaggacccgccattgttacgccttgagaatgagtcgtaccagctgtgcctcagtatccttcagaacatatttctggacagctctcctgatcatggaagcacagaggtggtggagagtcaccttattggcttgtgcaaggaggtccttgaggtatacttgagcacagcaagaccttctcagccttccagtggcacacagccgctaggccattggcttatccctgttggttcatcgaagcgaagggaacttgcggcaagagcacctct

SEQ ID NO: 277579 - DNA, 812 bp, Zea mays
gatggcttgtttctcattccctttgttcgtgctgacaatgggcaattgtacactgatattgtacagaaggatttgatccacaatggttgtcgataacattctccaaggctatatttcttggcaatggtctagtggccattgttgctggcctatttgcaaattttcttgctgataacatgggttttggtcctgtggctccatttgatgccgctgctggcttcctagcaataggaaccgcaattatcttatcatcatggggtgagaactatggagattcgtctgacagcaaggacttgataacccagttcaagggtgcagctaaagccattgcttcagacgagaagattgcattgcttggagccatacagtcattgtttgagggatcaatgtatactttcgttttcctgtggactcctgctctgagcccaaaggatgaggaaattcctcacggcttcatatttgctaccttcatgctttcctcgatgctgggtagctcaattgcttctcgtttgttagctaggaagctgaaggttgaaggttatatgcaaatcgtgttttcagtatcagcctttactcttttcctccccgttgtcaccaatttcctagtacctccctccggggagaaaggcggcagcatttcgttaggaggctgcttacagcttcttggcttctgtacctttgagtcatgtgttggcatattctggccatcaatcatgaagatgagatctcaatatattcccgaggaggcaacacgcacaatcatgaatttcttgcgtataccgctcaacctgtttgtttgcctggtactatac

SEQ ID NO: 277580 - DNA, 545 bp, Zea mays
cttgcaaataactcagcactttctggtgaactggatgcattgagggagaagataaaagcactacaggcctcagaaaggtctctgaaggatgaaatttcctgttatgtttctgaaaaggttgttcttgcatcagaggtagagatccttggtaaaagtttatctgaggtttcagagaagaattctatcttggatacctcattatgtgatatgaaaactgagttagatgaattgagaacaaagctgaacgattctgaagaatcctgccagactcaccttacaaataattcagctctttctgctgaaaagaacaatctgttctctcagctggagagcattacattggccatgaaagcactagaaggtatgcacaccaatctggaacagatgcactcctctgtatacaagagggaaggtttggccataaggaggggagccctgcgatatgatcaagtaagggaactgcaggatcagttgagaattaagaatggggaatttgaagtgttagcaaagtcacatcaattgcaagcaaacagctatgagataca

SEQ ID NO: 277581 - DNA, 590 bp, Zea mays
gtttttatacaagcaagagaaattttcagcacggaaatgtggcgctaaaagattctgtggctgaaggtgctgcctgctcttctcttgcccgtcgtgaacattctaccagagaaaatggagcctcaaggagtaagatacttaagagatccaatgtaaaatccccagttgatagttgcactgaacaaggaactgatatggattatcacaagatgaagagtgccgatttgctagggaacctggaagaagtgtaccaggaaagaacgtgtcttggttactgctcttcgcagaagttggaagaaaattgggaaaatgaaaatgtatcttctctcaactccagcagtttacaggcgggaaaaaagagaaagaaaagaagaggcaggaaaaagcacaatcgtcgcaagaaagctaatttacaggattctccagcatcaactgctgctgataattctggtttggtgacgttttctgagaactgtacttcagcccttaaactagaggaacagaggaagaagcaagatcaggacaagacatccatgactaacttacttttaatcaacaatgcaaagagatcagaaccatttgatgtgaat

SEQ ID NO: 277582 - DNA, 749 bp, Zea mays
tcctcgcgtccgctctgccctcagaaccctcgccgccgcccgtcggagctccggtgtgtcagttcgccgtcgaaggatatggactatgacaggttgaattcgccgaacacgtcggctatttcgctggaggtgatgggccaccggctacatatttcacaggatccaaactccaagcaccttgggaccacggtctgggatgcatcaatggtgtttgtcaagttcccgcccacgcgtcccagaaaaggtcggttttgtccatccaagctaaaaggaaagagagtgattgaattaggagctggctgtggcctggctgggttcggaatggccttgttgggttgtgatgttacaacaactgaccaagtcgaggtgcttccgctgcttatgagaaatgttgaacgcaacagatcttggatttcgcaatcgaattccgactcagataccatcggctcaattacagttgcagaattggactgggggaacaaagaacatatcaaggccgttgaacctccatttgattacattgtaggaactgacgttgcttattcggagcatctgttgcaacctctaatggagacgattactgcattatctggtcctaaaacaaaaatattgctagggtacgagatccgttcgacaactgtccatgagaagatgatggaaatgtggaaaagcaatttcattgtgaaaacggtctctagatcgaagatggatgtgaaatatcagcattctagcatacatctctacatgat

SEQ ID NO: 277583 - DNA, 308 bp, Zea mays
ggcccatcgagtatagcagacgaagttgtagttgctctcctccgagaaccctcgccgccgccacccaccggagctccggtttgcagttcttcgctgaaggccatggatcacgacagattgaatttgccgagcacgtcggctatttcgctggaggtgatgggccaccagctacatatttcacaggatccaaactccaagcaccatgggaccacggtctgggatgcatcaatggtgtttgtcaagtttttggaaaagaatagcagaaaaggtcgcttttgtccgtccaaactaaaaggaaagagagtgat

SEQ ID NO: 277584 - DNA, 460 bp, Zea mays
cggacgcgtgggtgaaacaccgcccacctgttatatctgcaatggaagaaagagcaaagggtctaggtgtttggacggataccaatggtcttgcatcaaaaatgtataacttcaaacgtgaccctgaaccgctggtttctttaagtgattcaacagaccagttgagtgatgtgggagatggggataccaatcaagaaagtgatctgggaaacatggatgacgagtatggtggtgtaatagtgaattctgagattgattctttgcctgatccaaaggaccaggttgcctggctgaagttggagctgtgccgactcatagaggagagaagatcagctgttctcagagctgatgaactagaaacagcacttatggaaatggttaagcaagataacaggcgccaattaagtgcaaaggttgagcagttggaacaagaaatatctgaactaagacaggccctgtc

SEQ ID NO: 277585 - DNA, 361 bp, Zea mays
acccacgcgtacggcaggtgggggacttgagcagcgagcgccactgatctcgatccggaagcttccgagcgagtgcttccgtcctcctcgcagtcagccatggcccgctcctcctcgcagtcgcagtcctccgtcggtggcggcggcggcggcggcggtggcgcgcgctcaggcaccgcgggcccgcgccagcctgacagttaacccacctgaacgtgcacaacacggaatgaaacaggcgtctgaaactttgactgtcgatttgggaaggacagcctctgctctcagtggcaaccctattaagggccataacttaaaagcgggtgttggatcagtgctagctactgaaatctgtggagca

SEQ ID NO: 277586 - DNA, 487 bp, Zea mays
cccacgcgttcgcacaggtattactagtgccatctgcattcacaaagataacgggagaggcacactgggaaattctcctccgagctcgtgcaattgagacacaatgttatgttattgctgctgctcaagctggaaagcacaatgaaaaaagagaaagttacggtgattctataattattgacccatgggggacagtgatagctcgacttccagatcggctctccactggatttgcagttgcagatcttgatttgtcaaaagttgaggctgtgagaactcgaatgccaatttcagagcaccggaagttcgacagcgattggaaacccacgcctctttagtagctgagggtttattttgtgtttcctatgtttaatgtgcgtatacacatatagttgatatattcatctatgcataattattaccacaggtttggtcagtttgtgactgggaactcgcaagagaggttgctgaactaaataaggttcct

SEQ ID NO: 277587 - DNA, 680 bp, Zea mays
aaggctagcagaggagagagaagaaatcctagggggttgaatgaaatagtgacattttttcatttaaatttcagttatagtacgaaactttcaagtaccttaaaaaaaaaaaaaaaagggcggccccgacagcgaagacctttgccgtttttattcttcctccggctctgcctgtacagcggcggcttggccacctctgagcctcaagccctcaacctccctcttcggcgcgtaacgccagtcctcacgtataagtatgttccagaaatcattgacggggacatggattctatacgacctgagggaccactgtgccactctagccagggagccaaaaggcctgataagtacacataaccaggagacagcagatacgacacaaaagtatttctcgaatccatcattgaacgcctgatgatgaaaaaccaaatctgtgtgtacttgtgactggagcactaggtggaaggcttgatcacgaggcggcaaactatcaatgctctgtatctgattgcggacatgaggattgtcctcctatcagacgatagcttgatccgacttcttgcgagaacacatcgccatgagctttatatagagtcgtctgctgaaggaccccattgtgggcttttcccctgtggagcaccatcaacatgcacaacaactacagccctgaaatggaatct

SEQ ID NO: 277588 - DNA, 577 bp, Zea mays
cccacgcgtccgcccacgcgtccgcccacgcgtccgcctatcagacgattgcttgatccgacttcttccaagaacacatcgccatgagctttatattgagtcgtctgttgaaggaccccattgtgggcttttccctgttggagcaccatcaacaagcacaacaactactggcctgaaatggaatctaagtgaatcaaagatgagatttgggagcatgataagcacatccaacattgtgcagtcggagaaagtaactgtagaatctgatgcagatctcttgtggacaatttctctgcgaaatctgacataagcagttcctagtttgttatcttttttcttctctttcctgtcaagtggcaaccaagctcttgtacagccacttttgtgtttatgagttgtgtgtctggtaaataaataccatctgatgacaaatcgatgaggtctcatcattagacaggatgtctaccacgatcttgaactgctgatgaattatgtgaataacacgagcaggcatgatggttgtatcctctctagttgtataactgtattgttgtacttgcaacggggtttcttgtat

SEQ ID NO: 277589 - DNA, 474 bp, Zea mays
atttgctcgaggtcacctctgagcctcaagccctcaacctccctcttcggcgcgtaacgtcagtcctcaggtattggcagcataaagtgttagatttgtccttgattgaggtaccccttcaaaggtcaagatgttgtggcgcgcagtacgcagtatggatgtaataatgcattcttcgagtttccttcttccgaaactgtatcaacctgtcaacaaaccagtcaagaactatgctttagttgttctaaaccagcatcttccacgattcatgcctcgactctgggatcatgaacagcaaacttgaggatctgcgctgatggaggagctaatcatatttttgatgagatgtatcagataaccaatgatgaagacaaaaaaagcaccagaaataagtatgttccagaaataattgaaggggacatggattctataagacctgaagtaaaactgttctactctagtcagggatccaaa

SEQ ID NO: 277590 - DNA, 244 bp, Zea mays
gcgcgggctcgggtggaggcgtacaagcaagtccaaaacttcgactggagcagcggcgccgactggaagaccgccgccaacatcctcttcacggtgccccctaagcgcaaggagttcgggcttgatttccaccttgtgcagctcttctttgtctgcatgacatcgctagctgtctatttagtggcccaatatgcacggagggagatcaaaaggatggaaggggaagcagaagagaaaaggaaaa

SEQ ID NO: 277591 - DNA, 1007 bp, Zea mays
  unsure (1)..(1007): unsure at all n locations
tttttctaaaacctcccgactaaaccctagcagcggctcctctccagtctccagcagtccagctcgatcgcgatcggaggccagaaatccatggccgctcccgccgccgcgccgctcgacgagggcaaggcgaagaaagtccttcgccaggtcgagttctacttcagcgacagcaacctcccccgcgataagttcctgcgggagacggtcgagcagagcgatgacggattggtgagcttgcccttgatatgctccttctcgcggatgaagtcccacctggggctggacgcagatgtcaagcccgagactgtgccggaggagaccgtgcttgcggttgctgaggtgctccggccttctcttgccctccgcgtatcggaggatggaaagaagattggtagagctagtgaactcttgaagccagatgagatcatagaacaagtagactctaggactattgctgtatctccgctgccttgcaatgtaaagcaggaagacgtccaatcttttttcacaaattatgcaaaggtaaatagcgtgagacttccacgcaatattgccaacaaaaaacacttctgtgggactgctttggttgagttttctgaagaagaggaagcaaaaagaattatggagactgctttagtatttgcaggggcaaatctggaaataaggccaaagaaggagtttgatgctgagcaaaagtccaaaaaagaagcatatgaaaagacacaccttaaaaaggacaaccagtatgaaggctatcaaaaaggcctaattgtggccttcaaattggagaaggccacagctgatactgtagtgcagcaagataacttagataaagagaatgactctgctacgaaattagatgtttccagttccatggaaaaaccttcaggccaggggccagaggagtctatccttgagatcgatgttattaagcaagggatgtcctcagatgacatgaccaaagagacagatctanacactggggaagctacagaatctgagag

SEQ ID NO: 277592 - DNA, 574 bp, Zea mays
gcattatttattgcttgagatactagaatacaataagatagcatagaaaggaaaatgggggtcagcagcacatcacacaaggtttccatcgaaggttcaagagcacataccccaggtggagtagcaagggaatctctcccatggagtccacaaccataaattgtgattatataagtagcgtgatgtaggacacatacaatgaaggccaggatgtcacaaggctacctaactgtatatttgcatgcagctgagtggctgactgaggccacaagtttgatctaactttgtacttgtacacagggttgaaaaacaggaagaaggtacattttgtttttgtaagtagcgtaggttggtagtgactgggctcagattgggggccctcaagtttcattaaagcttgttccgttgcctcgtcgagtggtaggttgcattttttttaggacaggactggctgattcatgtatatctttactgaaggccatgttttttttaaaaaatttatgatgctgtctacatgttgatatggaaaggattaaatgtggaaaatgatatgtatacctgtgctaatttggcg

SEQ ID NO: 277593 - DNA, 626 bp, Zea mays
taccacgcgtccgcccacgcgtccgccaagcgcccgcatacacttctccaatccactagctaagcgcgccatggcaaagttcgctcttggtcaccaccgcgaggcctccgacgccggctgcgtccgtgccgtcctcgccgagctcatcctcaccttcctcttcgtcttcgccggcgttggctccgccatggcaacagggaagctggccggcggcggcggggacacggtagtgggcctgacggcggtggcgctggcgcacacgctggtggtggccgtcatggtgtcagcggggctgcacgtctccggcggccacatcaacccggccgtgacgctgggcctcgccgccacgggccgcatcacgctgttccgctccgcgctctacgtggccgcccagctgctcggctccacgctcgcctgcctcctcctcgctttcctcgcagttgccgacagcggcgtgcccgtgcacgcgctgggcgccggcgtcggcgcgctccggggcgtgctcatggaggccgtgctcaccttctcgctgctcttcgcggtctacgccaccgtcgtcgacccgcgccgcgccgtcggcggcatgggcccgctgctggtgggcctggtcgtcggcgccaacgtgc

SEQ ID NO: 277594 - DNA, 778 bp, Zea mays
ggtactgtattgtgtatccggcaataggcatggtattgttttttttggctatgaatccactggtaccatgtttaaacttatgaattgttcaaaatagaaaggtgcttcatgcttgccaaaaaaaaaaaaaaaaaaaaaaaaaaaaaaaaaaaaaaaaaaaaaaaaagggcggccgcgattctgtggttaggatgtggaaaatggaggaagggttattgattgatacatcccgtgcacttggtggcaccatccgggcgattgcagctgactcgaggcttttagtgagtggaggaactaatgcctatattcagtgttggagggccgttgaaggcaatggtcaattatttcacatctctggaagtggtaccgaccagaatgcggagtttcgcctctggggtcatgaaggtcctgtgacttgtcttgccctggattcactgaggatttatagtggttcttgggacatgactgttcgtgtttgggacagagaccagatggagtgtgtgcaaaagttcatgcatgcagactgggtttgggatcttgctctgcgtggaaatactgttgccagtactgctggtagagatgcatatgtatgggatatcagggctggcgagttaacaagcttaatttccaatgcccatgttggtagcgcatattcaattgcttggacacacctgccagatgtgctgtttaccggtggagaggatggcgctattcgcctgttcaatgtttctgatgtctctgatgatgagggtgacattaaaccagtggcaacttgggt

SEQ ID NO: 277595 - DNA, 841 bp, Zea mays
cgacgacaaatcatcgagcgtcaccgtcacgctcacgacttcgcccaaacttctccccggggagacgagaaaggaaccgaggatctcgttcccgcggcgcggcggacagaggcctcgccgtgggagatggccggccggcgcgagtcgcccctgatgcgcggtggcggggcggggccaccgctgtcccgagggtcccgcatcgccgcggcggtcgtggtcggcgtcgcgctcggctgcctgtgcgcgtttctctacccagacggcctcttccaccgtgcccctgactccgccatccattggccgcgacgggttgaatcagttgcctgtgatacatctcgggaagttgccaaactaaagtcacgtctggtattgttggaaaggaaaaatgctgaattcaagaagcagatcaatgaattgtcaatgaagcttcaattggccggacaagggaaaaatgaggccctgtataaggctggtccatttggtacagtgaaagctctgagaacaaatccaacagttactcctgatttatccatcaatcccagattggccaacatattggaacaggttgctgtgaagaaagaactgatagttgcattggcaaattctaatgtgaaagagatgcttgagatgtggttcactaacataaaacgagctgggatttcaaattatttagtagttgcattggatgacagcatagagaacttctgcaagtccaatgatgtcccagtttaccgacgcgatccagatgatggcatcgacaatattggcaagacaggcggaaaccacgctgtttctggactcaagttccgcatattgagggagtttttgcagctcggataca

SEQ ID NO: 277596 - DNA, 734 bp, Zea mays
attcccaagaaatattagctcagaaagcactttgtgtttgggcatgggcagctaaggatttgttatcttcgccgaagataaatgtgtagatttgtcccaagccaacatctctgtgcagatcaacatgggaaagcgtgccgccaagagacccgctgctggtgtatccaccaactccaaggaaccagctgatccggcatctagcaacgaattagggcatcagttgacgctgtcgggtgccggtgccgacggcctctctcacgcaacaaagcggcatggacggggcagcagctgatggccgctctccctcacctcgctccccgaccgacggatgacggattggtgacattcttcttttccctcccagccaacggggaggcttccgcccacgcggccggctgtgcttggtgacaagctgagacctccggcgtattctttgattcgatcacccccccgctcgccatcccattgtttacgtagagaagaggaaccgtggagctttccatcgcggattgtgaagccgctcttgtacacaggcttccattcaatgtgagaagcttcccccctccttgacagatctccgtgttgtagacctgtagccacctgtaagatatgtgatgatgtccaacaaacaactctgccagaccactggctagtcgagttgttgggttacttatgtacggtgttctgttttgctgggagtgtagttgccccgccgtctcagtgaactgatcgtc

SEQ ID NO: 277597 - DNA, 453 bp, Zea mays
ctcacctcgctccccgaccgacggacggacggatgacggattggtgacattcttcttttccctcccagccaacggggaggctcgtggattggctggctggctgtacattgtgtgctgtgcttggtgacaagctgagacctccggcgtattctttgattcgatcacccccgcgcccgccatcccattgtttacgtagagaagaggaaccgtggagcttttcatcgcggattgtgaagccgctcttgtacacaggcttccattcaatgtgagaagcttccccctccttgacacatctccgtgttgtagacctgtagccacctgtaagatatgtgatgatgcccaacaatcaactctgccagaccactggctagtcgagttgttgggttactttatgtacggtgttctgttatgctgggagtgtaattgccccgccgtctcagtgaactgttcgtc

SEQ ID NO: 277598 - DNA, 433 bp, Zea mays
gcggtttcgtctcccacttcctcttccgtcgggagctccagggcctctgcttcgccgcagggctgctcgtctctcaggccctcaatgagctcatcaaacactccgtcgcgcagtcccgcccctcgtactgcgagctgctggaggcctgcgactcccacggttggccgtccagccactcgcagtacacgttcttcttcgccacatacctgtcgctcctctccctccgccggtcgcgcgcgcgccaggtgatcgccgccgtgccatggccgcttgccttcctcaccatgctgtccagggtctacctaggttatcataccgtcgcgcaggttttcgcgggagcagtagtgggcctcgtgtttggtgctatctggtactggattgtcaataccatgcttggtaattacttcccaatgattgaggagagtgcaaatcg

SEQ ID NO: 277599 - DNA, 717 bp, Zea mays
tccactcgttcggaaaatgccatatattgtaggagtttttcagagaggacaagatgctagaggtgcctattaaattattttcctatttttcttagaggatagaattaccacacctgtgcctattgaattcagtctggaagttgctctgggagttctgccaatcaggcacatcatagaatcagcataaataaggcacaccctttttttgggagattctgcacttgcctgactaaatgatcctcacgatggaataaaatacacagtaagtatgtttataccttctatcaatgattttactaaccttaaattattttgattagatatccatttgggggcagcaaaactcgagacaacaactacgtagcgtgtcaagatggccatcgggcagcacgtaagcgaggatatcatattgtgactcttttgtctaggcttcgttggtccctcttcctccaaggccccgaagatctgcgcgacgatcactattcttcgtgctactcgggcggctatgaacatcgagttcagcaaggacatactccttgacaagctcgctaagctcagcaacatgcagatgtagcaatgcatcgagagtatccttttcctactttttcttgttcaaatatttggattttggactgcatgaggtacttttgtgatgttttgtttgaatttgcatcttgagggagggttcaacttttgaatctattgaagcgccatgat

SEQ ID NO: 277600 - DNA, 516 bp, Zea mays
cccacgcgtccgcccacgcgtccccgccaatttcagaccgagagaagatcaactgagtggaagagcgccacgttctttcttctccctgtcaacattccgaagcaagggaggtgatgccaggctcaggtgatcctcagaaagacagaagacaccagaggtggagtgtataaaatatcttccgaggttaggtatgagtatcaaattttcagggcggtacgcggacgctgctagcttgtgattataaatatataaatatatatgttgtgtatctatggcaattcatataagctaccagttgagccccccattgttactgtttgattattctttttccgtaatattcttttacctcctgtgtagagttggacttagagatctttttgcagtctgttcttccaactggcccaaaactactgtatttttcgttgtttttgtgatatatatgtatctccctcttgtttcttcattcccatatatcacaaattccacatatatggtaattttcccccttgtagc

SEQ ID NO: 277601 - DNA, 945 bp, Zea mays
gagcatttcagaaagcaatatgctatggtgcttgtgcagctaagagattctaatgatcaagtggctgcagctttgctttcgcttcgccaacgcaatacatatcatgggaattcagggcagtctaaatctatggaaaatggcatagcccttgctggagcaccagatccgtataaccttttcagttatattaatccagagtctggttctcaagtgatcgaagttatcgagacttcaaagtccagggcaaaaatgatggttgatgttgctatccaggctatgtgcaaagtgagtgaaggagagaatgctttttcaaaaataggggaagcactagatcacttgaatagccgcggtactggctctggttcaagtatacttggcataagacggatacctcccgattcaggacagtcaaatgcatcttatcatgacgactgcacagcggcccctgcagcaaacagcagttcaaggttgccgaacggctgtgattcggaagctcaatttcccaaagagttgatatcatcctgcgttgctatgatgcttatgataaagaactgcacggagaagcagtatcaccctgctgaagtcgcgcacatcctcgattcggcactgtcaagcgtacaaccgtgcagctcccagaacatcccgatcttcagagagatcgaaatgtgcatgggcatcatcaagaaccaaatgctggcgttgatacccactccaagtggctaagcttcaatcctgccgcgggtatttaactaatgtactctgaaaacgaaaaaaacggatacctgtatgtgatgtgcaatattccttgttttgctgttgtctgtatgtacaaggcgtgtgttattattcattgcctgttattattatattcaactgggggtaaaaaaaatatcatgtactctgtctccctttctctccctctttctcaaggatgcatttcactcc

SEQ ID NO: 277602 - DNA, 451 bp, Zea mays
gatttaccctacagttcattaggattattgtcatgccgcttaccgatgatctatgaatgtggtgaatcttgcaactgttctacatattgccggaacagagtgacccaaaaagggcccaggctacattttgaggtcttcaggaccaccaatcgaggctggggtcttcgttgctgggaacctgttcgtgctggttcatttatatgtgagtatgctggtgaggtcattgatgagctcaaatttaatttgaatgatagtgaagatgattacatttttcaaactgtatgccctggcgagaagactttaaaatggaattatggacctgaactgataggtgaagtaagcacatatatatcgcctgatgaatttgaaccactgcctgtcaggataagtgcaaaaaacatgggaaatgcctcccgtttcatgaaccacagtggctcacccattgtctttg

SEQ ID NO: 277603 - DNA, 457 bp, Zea mays
cccacgcgtccgcccacgcgtccgcccacgcgtccgtttttttttcatgaatcggtcaaaaggccgttctgacgagggtgaacacgatcaccggcgtggcatacaaggacgacccgacgatcatggcgtgggagctgatgaacgagccgcgttgccagtccgacgtgtcgggccacgccatccagtcgtggatcacggagatggcggcgcacgtgaagtccatcgacgggaaccacctgctggaggccggcctggagggcttctacggcgcgtcgtcggcccgcaggtccgcgaacccgtcggggtaccaggtgggcaccgacttcatcgcctggctcgacgcccacatcgccgacgcgcgggcggtgctgcgcaagccgctgctggtggccgagttcggcgagtcgcgccacgacccgggctacagcggcggccaacgcgacgcggtgttcggcac

SEQ ID NO: 277604 - DNA, 233 bp, Zea mays
attcggtccgctatgagctgtttatactaggcataaagattcccctcgctttgttcgtcccttgctgttaaaggttttatgcttgtctctttctgtttggcccatctcccccatcttttttatagatctgctagggcagataaagatcgtggggtttgcacttgttctcctttgatagctggagtctcgatttcgagtgacttgtgcgggaataacatatatactcaattccc

SEQ ID NO: 277605 - DNA, 427 bp, Zea mays
aacacgcatcgcaacactcgccttcccctcccctccctccgaaccgaagcagcaaagctagagacgatgacgctgacgatcccggacgaggtgcgcgccaaggcggaggtgtacgtgggcgacgcggcggggcaggagaagacgcggctgctcctccaggagacgggcctcccgagcgggctgctcccgctgcgggacatcatcgagtgcggctacgtggaggagacgggcttcgtgtggctccggcagcgccgcaaggtggaccactacttcgccaaggccggccgccacgtgacctacggcgccgaggtgtcggcggtggccgacaagggccggctcaagaagatcacgggcgtcaaggccaaggagatgctgctgtgggtcaccctgcacgagatctgcgtcgacgacccgcccacgggtaagc

SEQ ID NO: 277606 - DNA, 479 bp, Zea mays
ggcttgggaagtgctacaaactggcagcaaagctagagttgtgggttctacaaatgctaatgagcatagtagtcgatctcactgtatacattgtgtaatcgtcaaaggagaaaacttgatgaatggagaatgtacaaagagcaaattatggctaattgaccttgctggaagtgaacgggtagcaaagacagatgcacaaggagaaagattgacagaagcacagaacataaacaaatcactttctgcacttggtgatgttatatctgctcttgcaacgaagacctcgcacataccctttaggaattcgaagctaacgcacttgctccaagactcactaagtggagattccaaaaccttgatgttcgttcaaatcagtcctaatgagaacgacgtgggtgaaactctttgttcgttgaacttcgcgagcagagtgcgaggcatagagcttggacaagctaaaaagcaagtcgatattggag

SEQ ID NO: 277607 - DNA, 401 bp, Zea mays
cccatacgtccgtccacgcgtccgcggacacgtgggctgcatggctaccatcatctgcgacacatgccgtgggagggggcacatgtcgtatgagtgcccttcggcaacaatattcgggctccgcaggctctgaagagcttttcgccaacagctccgctttgttctgatggctgagaattcgccaggatgtttcacttgtttctgacagtattggaacagttttccttctgccgttgtagttgaggaatgattctgtaggatgtgttgcgggtgaaaacttcctgttttccccccttttaatcaggatagccctttgtgggctcaaacattgctgtaacggctcgtgtgaaaattgccaggtcatggtttaactaaaaaaaaaaaataattatttataatat

SEQ ID NO: 277608 - DNA, 553 bp, Zea mays
ccaacaccggtgagcgaagagaaacgtggccggactcgtagggtagatcgcagcggagcagaggcatggatggaaagagctttagcaacgaacagcaagcccaacaaaagaacccagacgcagtgacaaacagtgttccgagccaaggccaggagcccttgaacacgtttccagattcagacgatggaaacacgaacaccggtccgttgaatggccatgcagcagctcatgtgaacatggaagctgccatctccacggaggacgtcatacgggctggcgggttcggagcgaaggacgacattggcagcctcctcccgacggcaattgattccaccgattttgaggcctcgctgcgggatgcccgtggtttcgagggcgagaaagcggcgccgtcgcatcctggactagggtggaagggggagaaagctgatggtggaaccaaactggcagatgtggcgaacagtgatcgcgctttcctcttctgtagcccagctccagccttcagaaaaccttgttttctgccacgtgtgtctggagagctgccctgcgtatg

SEQ ID NO: 277609 - DNA, 262 bp, Zea mays
gtagatcgcagcggacagaggtaagttcctgaatcttcctcctgagcctgctctgctgctcatcaacccggcaggcatggatggaaagagctttagcaacgaacagcaagcccaacaaaagaacccagacgcagtgacaaacagtgttccgagccaaggccaggagcccttgaacacgtttccagattcagacgatggaaacacaaacaccggtccgttgaatggccacgcagcagctcatgtgaacatggaagctgccatc

SEQ ID NO: 277610 - DNA, 712 bp, Zea mays
cccacgcgtccgactaccaggccaccaccaccacgcagcacctctgccatccccgcttccctccctcactcgcagccacccgaaccccaccgccaaccagccggatcaagtcgagtgaagcgatgctggaggaggcgatacccgcgctgctgagcgccgtccacgggtggttcacccccgccgtgctcttcgtcgtcctaaacatcgtcatcggcaccatcgcggtcacctccaaggccgccgcctcggcgaccggcggcgacgaggaggaagtcgccgctgctggcgcgggatgggagccgcaccggcggctggcccgcgtgccgtccatggcgttcgagcgtctcaagtcgttcaacggccgcttcgccacggccgagcccgtgcccgccgagacaggagtggtggatctggggtacaacaagcagccccacacggcggagatggagaaagagggccctgtcgtcgtcgagggcgctgtagatcctgagcccgagcccgagccccaacacgcggcgcacatggagcggagcaggtcggaggcggatgcagaggcgaagctgccgttgctcccgtcgcgtctgcacaagtccgccagcgacaagtcggcgttcgcgcacttcggcgcctaggaggtggaggagaccgtgcgcgcggtggatgcgctgcgccccgcgacgacgagggagaaccgcggtcggcggctccccgt

SEQ ID NO: 277611 - DNA, 674 bp, Zea mays
agtagacgcctccgaggactcgacggcgaccggcgagtactacgaccacgtcgcgtacgagtacgatggcatgcacgaccccttcgtctgcgccactccggacctgtgggatacgtggccgctgctggagtggaacgcggtggcctgaaacctcgatcgtgtactcgtcgtcatgtctctgtatctagtgcacgtgtggtggattcatggtgattccttatatagctagctagccccaactagctaccgagccagttgatccggggagggatcgacgggtaacagacgatagagagctgggtaattaggaatcaggagcgaccgacggctctgaagtctgaaccacctctctcacgaacatggatcctaaggtgcacggtggccggacattgtcgatcgatccctcttttccctccacagccgccggtcgctcctgattcctaattacccagctctctatcgtctgttacccgtcgatccctccccggatcaactggctcggtagctagctggggctagctagctatataaggaatcaccatgaatccaccacacgtgcactagatacagagacatgacgacgagtacacgatcgaggtttcaggccgccgcgttcacactcacagcagcggccacgtatcccacaggtccggagtggcgcagacaaggggtcg

SEQ ID NO: 277612 - DNA, 454 bp, Zea mays
cggacgcgtgggcgcggatcacagacagcctgtgcccgccttccagtccacaatctccctgcctctcctctcccaccctccctccgaaaagcaagctccggcccggaccgccccaccgcgcgcgcgcatacacagagagagagagagagaccgcacggtcgttcggggttcctttggccaggcgcacgacacgagcatggcgcagcgcgacaagaaggaggagcccacggagctgcgggcgccggagatcgcgctctgcgccaacaactgcggcttcccgggcaacccggccacgcagaacctgtgccagagctgcttctcggcgtcgaggtcgtcgtcgtcgtcttcgcagccgtcccctacctcctctccctcagcttccgcgccggccgccgcggtgccgcagccgaggccggcgctcctggacgcggcgctgcagctggcgcctccggcc

SEQ ID NO: 277613 - DNA, 426 bp, Zea mays
tcgcgatctagaacccctccctccctcccgcgcggatcacagacaggctcacggtcacggccggcctcccaattcgcaacctcgcctccgcctctcctcctacccctccgaaaaagcaagctccggccgggccgccaccaccaccaccgcgcgcgcgtgcacgcgctcccacacacagacagacagacagacagacagagtgagagacgcacgggggttcggggtctcccttctgccaggcgcacgaggagccatggcgcagcgcgacaagaaggaggagcccacggagctccgggcgccggagatcacgctgtgcgccaacaactgcgggttcccgggtaacccggccacgcacaacctgtggcagagctgcttctcagcatccaggtcgccgtaggaccctaccttgctccattcttttcctgg

SEQ ID NO: 277614 - DNA, 432 bp, Zea mays
cccactcgttcgattgattcactgtctcttacatttagtattgacttgatgactagggcaggatctgcttgctatttgaaatggggggcatgtgaaagcttgctgcaccggcaagctggtgcacaatcctggaccgtcgaataacaactgccgcctggacagcagtagcaaacaccttcggatattgctccctttttgcaggcccgtttctcgcatttgcagaaacgaacaacgttccgagagtatgcaggaatcatcaaacttcctaggatcaccatcaagagcaggacggcctcgcttgcttccattgtaattctcgccatataaggattttttttctcaggagccgtgtgcagtgttgttgtgcttcatgagggtcttgtgcttggccgtgtcggaggctgcaagaatccctactgtactttttttctt

SEQ ID NO: 277615 - DNA, 620 bp, Zea mays
tgccttgtctgttgctcaatgtgcacgtcgaggccggggcgtgtttgtacgaggctcgggacagatgccaggagattcttggcaagcggcgctatatttgtggcgaccagctgactgaggcggacattcgcctgttcgtgactctcattcggttcgatgaggtctacgccgttcacttcaagtgcaacaagaagctgctgagggagtacccaaacctgttcaactacaccaaggacatataccagatccccggcatcagcagcaccgtcaacatggaacacatcaggaagcactactacggaagccatccgtccataaacccatacgggattatccccgctggacccaacatcgactacaatgccccacatgacagggagaggttcggcgcctgactgcgcctgggaccttgttgcttcctttctctctctctctctctctctcttttctgcaggagccgtgtgcagtgttgttgtgcttcatgagggtcttgtgcttggccgtgtcggaggctgcaagaatccctactgtactttttttcttcttctgagcagttgaagatggaagacaaggttttatttcgcccagataaataaaaggtacaaagggtcgtcgatttt

SEQ ID NO: 277616 - DNA, 424 bp, Zea mays
cccacgcgttcggtcgtctcctggctgcaggctgctcgctcgctcgtgtggactgctggctcatcgttgatcaacaaagcaagttgcaagcggtgaaagcgactgcgccggtgtctctgtccggctagctcaagctcctcgctcctgcggctacaagtaggaccatgacagggagagatgaaagctccgaccgtagttcggcgtgcttgttgttgggaacaccggctctactagctgctcttagaactgctgctcacttctggataaattatcagttaattagtatgcttgtatgtgacatgagtgtagatataatttctcactcaaataatgtcgctatgtaattatgttgatgctataaacttaatatatattaatgtttgaattaaggcattcaaaaaaaaaaaaaaagggcggccgctct

SEQ ID NO: 277617 - DNA, 547 bp, Zea mays
  unsure (1)..(547): unsure at all n locations
atgtcgcgcctaatgaacgagcccgtagatcttgtgttcttgtggctggttttgttggatcgcgatctcggttacgtttacatgagtctactcctgcctaacatacatctgtgttctttttctaggctgagagaaacttaactgatcgagtctgcctggcaggcatcgatctatccagtcgtcagttcgtcacatccgctttttcgtatatatcatcttcagattttaattgtccatctgtcaaatcatggaaaatctgtcgtctttgcttgtattctcttctgtcattcctgctgcctccggcggatcaattcttgaatcgacccgtgttcctattcccttttgttagacagcccaaatcgcttgctcgatcgtagtgtactgtactactgcggctagctagatcttccaagctagctagttcgtcggtccctttgatctgctccacttgaactctnttgcgcttatgagaaaactngctgctttcagctggtatcgccagcatgggtaggggaaggatgagatcatgaggatcgagaacaacacg

SEQ ID NO: 277618 - DNA, 680 bp, Zea mays
cccacgcgtccgcccacgcgtccggtcgggggaagctccggcgcctgcctcgagatgggcatgcgcagggtccccacaatcaccgagggcatcaacttcgacctccccgacgtcgtcgccgcagcgccgcccatcgccggagtgaggcatgttggcggagatatgttcaagtccatcccctccggtgatgccattttcatgaagtgggttctgacgacgtggaccgacgacgagtgcacggccatcctgaggaactgccacgccgctctgccggacggcggcaagctcgtggcctgcgagccggtggtgccggaggagacggacagcagcaccaggacgagggcgctgctggagaacgacatcttcgtcatgaccacctaccggacgcaggggagggagcgctccgaggaggagttccgccacctcggcgtcgacgccgcaggcttcaccgccttccgagccatctatctcgaccccttctatgccgtcctcgagtataccaagtgatctccactccatccgcccaaatctccttgcgagttgaatagcagaataacgaacagataaataaagctattccattcacgttggaatccgaatctctgcctactgtactcaacgttagcttctgtaaccaggatatctctttcaagcatttccaagcttttgatgacaatctc

SEQ ID NO: 277619 - DNA, 430 bp, Zea mays
agcaggagatagcgcgggcggggaggggaaggagacaagtgaactcagagaagaactagcgcggcgagcattgcaagccaagctgcaggggtccggagcggagaccggaggagggagacgtcgcttgcgatgtcaccggcagcatccgccgccgaaaccatcgtcgtcgcaatcgcaagcgtcccgagccagcagcagagcagccaccgcgccgcggcgccgtccgtcccgtcgtcctacgccgtctgggagaaggagcggtaaggcgtctgcagctttacgacgtcgtcgtcgtcgtcgtctgccacctacctactgctgctgctgctgcaaggggaagtaaaaaggaacggaaagggggaaggcatggaggtggaggcggccaagtgcgagtgctgcggggtcacggaggagtgcacgccggcgtaca

SEQ ID NO: 277620 - DNA, 817 bp, Zea mays
ctcgagcgcgccttcatgtcactaatcgacaagggcgtctcgaatggaaggagcccatccaacccaacgaagaagcaaaatccccaatctctgcgccgccgccgttctgtgtcgttcttcgcccgccgtcgttccgtgtcgttcttagcccgccgccgtttgtagtcgcggcttcatcgtcgcgtaccgatccccaccgcccccactgccaccagaggtgtcgacatgtctcagaacaacccctcccagcttctcccctcagagctgatcgaccggtgcatcgggtccaagatctgggtgatcatgaagggggacaaggagctcgttggcaccctctgcggctttgatgtctacgtcaatatggtgctggaggacgtcaccgagtatgaatacactgctgaagggcgccgtattacaaaacttgaccagatcctcctgaacggcaacaacatagccattttggttcctggtggttcaccacccgatgtgtaatgagcttttgctccccagagtaaccattcgtggcgaaggcagccccgtggactttgcaccttattttgggtaatcattggatgtttcctcatctcggatgtgttcctcctgttcgtgattataccgaagtttattgttaactctctttcagcatggaagctgccttctgtatcgaacttactgacctgaagtagtgtgcttgcatagctgtggttatatgattggctatgctaattctgtgtatgtctggtcgccatcattgtactgcaatgtgaattccatgtaatggattatgcaataacctgattaatatctaaatttcttt

SEQ ID NO: 277621 - DNA, 395 bp, Zea mays
cgtagtaccacatgccttctcgtcacaaatcgactagggcgtctgagactctgagacacaggaacagaaccctctctgcgccgccgccgccgttgcagtcgcggccacatcgtcgcctatccatccccaccgctcccactgccacgattcacaagaggtgtcgagatgtctcagaacaacccctcccagctcctcccctcagagctgatcgatcggtgcatcgggtccaagatctgggtgatcatgaagggggacaaggagctcgttggcaccctctgcggctttgatgtctacgtcaatatggtgctggaggacgtcaccgagtatgaatacactgctgaagggcgccgcattacaaaacttgaccagatcctcctaaacggcaacaacatagc

SEQ ID NO: 277622 - DNA, 1112 bp, Zea mays
tcgtgaggttataatgaactgtaaaggctacagtttatcagtggacatatggagtctgggctgtaccattattgaaatggcgacggcaagacctccttggcaccaatacgagggggtagcagctataggtaagatcgcaaacagtaaagatatacctgaaatcccagacagtttctcagaggaagggaaaagtttcttgcagctttgcttgaaacgtaaccctgcatctcgtgcttctgcagtccagctgatggatcatccttttgttcaggatcaccctgcagtgagagctgcaaaatccagtgtattgagaaacacaccatcttctccagctgatggcagacacacagtgtccaacagggtgttgccatctcggaaaattataactcctctgaaggatattggactgggcatgagagattttactggattttccactactgttccttcaccacacagtcctattcctggaagagcaaacatgtctacgccagtttcaccatgctcaagcccgctgcggcagtttaagcaatccaatgtgaggggcatgcgttctccacctcatccaatgctctcccctggtcttggcaacacagtaagttacacccaaaatcagacaagacgcaatccagctcctgccatttcagatccttggatggatgttggccagatgaaactccaaagccccaatatttcccccagaaggttctgagaacgatttaaatataaaaaaagagaatcatgggcgcaatatatccatgacaagttagttattaagagatgttcagtaaggaacttgtttgtgtagttactacaatacgacactcaccagagattcagtacagcgaaatggggctcttgagaatttgtaacaggaagttctgtatatccttaggttttaaggtttgttgtcgcccttgctatatgtagttatacgtgtacacgtcctgatgtaaaggttcccaaaaaatcttacagatgaccacgggatgtaaattcgaaagtttgtgcaaactggtatttctgtgtagtagttaggacttccatggcagaagtaactatgcacttccgattgacccgagtacaatgtccagttccctttccatttcatc

SEQ ID NO: 277623 - DNA, 966 bp, Zea mays
ctctgttacctgcaccgccgctccgttaaatcgcggcccgatcgccgatgcctccccgccccgtcccactattctctcgcctgcgcttccgcctcccgagttgcgccgccgtctccatctccacccctccatcctccgcggcgcccctgcactacggccatcgcactcccctcgctagcccttttcctctgtccccaccttgcccgcgcatcctccgtgcggccgtcgcggtttcttcgctggatctgcgcccgatcaccggcgggttcgcgctattcagcatggctgctgcctcctccgccacctccgtccacgacttcaccgtcaaggatgctagcgggaaagatgtggaccttagcacctataaggggaaggttctgctcatagtcaatgttgcatctcagtgtggcttaaccaattccaactacacagagctgagccagttgtatgagaagtacaaggaccagggttttgagatccttgcattcccatgcaaccagttcggtgggcaggagcctggcactaatgaggagattgtccagtttgcttgtactcgcttcaaggctgagtatccaattttcgacaaggttgatgtcaatggtgacaatactgcacccatttacaagttcctgaagtccagcaaaggtagtctctttggcgataacataaaatggaacttctccaaattcttggttgacaaagaggggcatgttgtggagcggtatgcaccaacaacttccccactgagcatcgagaaggacatcaagaaactactagggagttcttaaaccttgtaattggattcagtagccctaccaaactgctgctttgcatcgagcacctgatgcctcagtagcgttttaataaagttgtttttataaccgagatgttttgtatttcttctgttctccctgctttgtggtaaatggcatgtaataaaaatgatgcaatccaccctttatcttg

SEQ ID NO: 277624 - DNA, 645 bp, Zea mays
  unsure (1)..(645): unsure at all n locations
gtcatgggcgagcgaggctgcctcgtgtcgcccagcagtgtgaggataagttcaatgacctaaataagaggtataaaaggcttacagatatccttggtcggggtactacttgcagagttgtggcgaacccggaacttctggatggcatggctaatctctcagataagatgaaagatgccgcgaggaagatattgagctctaagcacttgttctatgaagagatgtgctcctaccacaacaataattggttcagtttacctgaagatcctgcacttcagcgatcgttgcagcttgctcttaagtgtaaggatgagcatgatgcaaggaagcgagcaagtggagatgctgatgaagatgatcaaagtgcagacactgataatgaagaagagaatgatgatgagcatcccatcacgcatgccaataaggggaccctactcacgcgtaaaagattgcggtacatgccggcggatatggaggatgtaggtttcggcaactcttccagctcacatgactgtagctggagatctgatccncatagcattgcagtggacatcaacaaagcttctccagatggaactaacttggctttcngttcaaaaagacttggctacacagtctgcngagattgagaaacagcgcatggaa

SEQ ID NO: 277625 - DNA, 557 bp, Zea mays
ggagccgtccgtgtgtcagacgatatggttcttgctgctgctgaagcactagcggaactggtaaccccggagcatatcgagaaaggcctgatctacccgcccttctccatcatcaggaagatgtcagctaacatagctgcccatgtcgcacgcagaagcttatgatctcggaatggctacccagctccctcggccaaaagacctggtgaagtacgctgagagctgcatgtacagccccgtctaccgatcgtacaggtgatgtgagcggacagtgctggatgcacctgaggatatatatgcatacctgctgtgcttgttgttcatgtcgtcactgtgacgagtccgctgctgatactgcacgtgcgtactctatgtatgtagctgtgtaataaagttcaggggatgtaaattgacactcctaccaagtatgctgatgtatgttctcatgcgtgtcggggtttcttatacatggtttgtgttagatttagtatgaagatgacctctattttatttgatacaaatcgaataaattgtaggtttatattaaaaaataataa

SEQ ID NO: 277626 - DNA, 612 bp, Zea mays
cccacgcgtccgcccacgcgtccgcccacgcgtccggcaaggtgtgagcatttgattcgttcagtttcatgctatcaggtacttcttcattttctgatcagaaacaaaaaaggacgaattgatttgaagagtatatgtggacatacttaaagttggatttggttcttgcaccaaaggaggtattatttattctgttgccatatctttaatcaagaaagatagttttctgcaagctcttggtattcttcggcaactaaagagtttggatcttaaattaagcaagggagccttgtcgactatagaagaagaatttaccaaggaaaccaaattggggatatgatgaatttgttggaaagagtggagatgttcccctgagttgcgtcttcgcaccaaaaatctttgtgtctgtgtgtacaaatcttggcactgatcaggcatggttgttattccaaatattggaggccttagggtttgctccaaatgcttcgactcttgaaattttcatatttcatagctgtaaagaaacggaactgaaatctgcacatgtatatttatcagagtgcttttctaggcataaaaaaaaaaaaaaaaaaaaaaaaaaaataataaaaa

SEQ ID NO: 277627 - DNA, 558 bp, Zea mays
cataagggagtgtaacagcatggctgggcagctggacatttggaagctcctggacgatgcgcacgatcttgtggtgacccttcacgataggatcgagtagctgtggtgttcattgcttgcgctatttgtcacgttaccatacttccattatacccaaacactttgtatgaagtacgtaccaacagtgaatagaagcacgttgtggagttagctaggcagcaatggcagcatttgtttttaactgagcatgcatactggagaggtgggcaaagaccaaaggagcatgcatactggagaggtgggcaaaagatcaaagagccatttgaatctatcgttgtgacattgtctaccattctgatgcattgcaaccttctctttctgttgtatcctagttacatactgcactattatgtggatgttgtgttgggggctcggtgcaaattggtggatttcaggatctgttcttgttagactgcactgttttataaagtagcgtttgcaataaatgatgagatgagtaaaaaaaaaaaaaaaaaaagggcggcgctcgcgatctag

SEQ ID NO: 277628 - DNA, 435 bp, Zea mays
acagaactttcacctccacacaattgtatggacagctaccatcatttatgcttcagtgggttgtccaataatcaaaagccatctgcttcttattcagcttatcacagccaagtgatgtatccatgactcctttaacataattcaaatcccccaaaacattgcaaatttactctggagggtcgttgtttgctaaaccgctttccggttttaacctctgacccaatgacttgctgttcattatatgctttccctcaattccaacactacagcttgaactgcactgtgccaggaatccctgtccaattgtttttatcgggataatctgcaatttaacctagcatatgcaaattgttcctgtagtcccttctggcattcatttctcaggcaaaaaaatattttggcattattgcatctaccaatactaggtatgaacta

SEQ ID NO: 277629 - DNA, 698 bp, Zea mays
gtcccacgccgtcatcttcggcgtcgtggacgacctcctccgcagggcgcgcgtggccggcggcgacgtcggcgtgctcatcttcaactccagcctgctcagccccacgccgtccttcacgtcgctcatcgccaaccgctacgggatgcggcgcgacgtcgtcagccacaacctcagcggaatgggatgcagcgccggcatcatcgccatcgacctcgccaagcgcctgctccaggtgcacccggacacgtacgcgctggtggtgagcacggagaacatcactctcaacgcctacatgggcaacaaaccgccccatgctggtcaccaacacgctcttccgcgtcggcggcgcggccatcctgctgtccaaccgccccgcgcgaccggccgccgcgccaagtaccagctcatccgcacggtgcgcacccaccgcggcgcgcacgacacagagcttcggctgcgtcacgcaggaggaggacgacgcggggtgcgtcggcgtctccctggccaaggagctcatggtggtcgccggcgaggccctgcgcaccaacatcaccacgctgggcccgctcgtcctgcccatgtccgagcagctccgcttcctggccaccgtcgtcctcaaccgcgtcttccgcgccagagtgcgcgcctacctgccggacttcaagctcgccttcgaccacttctgcatccacgcc

SEQ ID NO: 277630 - DNA, 520 bp, Zea mays
gtaatgatttctttgctctttttctggatccgacgatgacttactcttgtggtattttcaaggcggaagatgagagtttagaagcagcgcactacgtaaacttgacaatctaattaataaggctaaggtggatccggggcatcatgtccttgacattggctgtggttggggctcattggcaatacgtttggtgaagagaactggctgcaagtgcacaggaattacattatcggaggagcaactgaaatatggaaagagaaaggtgaaagaatttggattagaggaccgcataactctcctgctttgtgattaccgtcaaataccgaacggccagaagtttgataggattataagttgtgggatgcttgaacacgttggccatgagttctacgaagatttctttgcctcctgcgagtatcatttggccgaacacggcctacttgtcctccagtccatcgcggtcccaaaggaactgtacgacaaaatgaggacgaaacctgactttctgaaggaatatatc

SEQ ID NO: 277631 - DNA, 462 bp, Zea mays
ggtcgacggacgcgtcaggccacgcgtccggtggcaagaagtgcaagattccaggccccaggaagattcataaggctgggggggagaagcttaaacgagaccacctaaaccatctctttgctgagctgggtaatatgctagaagctgattgacagaacactggcaaagcgatgcatactgactgacactactccgatactaagagacctgcttgttcaaggagactctcttcgcaaggcacataccgacctacaaaacgaatctcattatgtaagccgtcgtctttgagcatgtcatctaacattcgctctatcggccgctgtcctgctgccctttatctagcaaactcctgttatctgattttatccattggaaatgctttatacaaatgcctaatccaactcatcactctgttgaacatgtggcttgtcacgctacctttgttgcatcttccagcatggg

SEQ ID NO: 277632 - DNA, 584 bp, Zea mays
cttttctgtttctttttctcctcctccagccgcccgtcctctcggtctccgaccacgactgtgcgccttcctaagtaaccctagctcggcgccctccctccgcgacatccaagcccggcaatctcatcgtcgcgcttgcaccgttacgcagtgcgacctctgcgtcttcgaatccaggaaggtagagaggaggaggaggtttgtggcaggatttgaccagcccaatggttccatccgagatggggagcgtcgccaccgccgtcagcacgcctgctgcggacaagctgctccatgggcctatctctggcaagaagtgcaagaaaccaggcccgaggaagattcataaggctgagagggagaagcttaaacgagaccacctaaatgatctctttgttgagctgggtaatatgctagaagcagatagacagaacaatgggaaagcatgcatactgactgacactactcggatactaagagacctgcttgttcaagtagactctcttcgaaaggaacatagcgacctacaaaacgaatctcattatgtaacaatggagagggatgagatgcaggatgaaaacggcgtg

SEQ ID NO: 277633 - DNA, 456 bp, Zea mays
cccacgcgtccgcggacgcgtgggtatctaggtatggcaaaactgacagtgaaatgatttggcaggctgtgctagagaatgttcagtcagactcattaagaagattgttagccagagagggtcgactgatatccgtcagcctaggcacagctccaactgtacaattaatattcaactctcgagtagataaatctaaagctgagcagtataggggccaaattctgcaggcatttgaatccgttctgccgtctaccataatacttgacattcgatacgaatctaaggatgatctggcagcaggccatgctccagttatttctgcctaccctgaggatggctcctcaaatctggtattaaggaggtcttttactaaacatagttcagtttcttcggggggcgagaacttaattaggaggcttcagaaagatagtgtggtccaacttggtagctcaaatc

SEQ ID NO: 277634 - DNA, 1223 bp, Zea mays
ctcttgactatgacgatttagttgacttgtatcctgaggaacaaccacaaagggtcgaagtaaacacttatgcaccctctgctagaccgaaccataagaggtcaaagaatttcagtgacgtggaagacgagcttttggtgtctgcatggcttaacataagtttggatccaattattggttataatcaaactcgcagttcatattggactagaatttatgactactttcatgccaataagaccttctcctcaacccgtagccagaactctattatgcaccgttggaccagcatacaagaaggtgtaaacaggtttactggatgccttgctcaggttgagagaagaaggcaaagtggtgctacaatgcaagacaagcttacacaggcgtgtgctttatataagtctgaagataagcaacataaagcttttccatatatgcattgttggaataagttgcggacacagcgtaaatgggagatgaaacttgaagaattggctgttggcaagtcatctaataagaagcaaaagatgaactcaaatgaaacctcacctccacatttaccaagtgcgaccgaaacaagcgagcctacaactccaaatgagactgtcacaacaagaccacctggaaagaagaaggccaaagcagcagcatttcaagctgaaaagaaaggctacacagaaactttaaacaaattatttgaaaagaagaaagaaacagatgaatttaaagaaatgaaaaaagacgagaggtttagattagcattagcagttgaacaagagagggctgcgaatgagaaattaaatatgcagttaaggagtaaagagctagaattgaggcagcaagaagttgaacaacataagaagagggaagaagagaggattatgacactagaccttagtgtcatgcctgctgatcagaagcaatattacatgagactacgatctaagatattgtctgaaaatgcctaatgttacatggtacattaggtgttgattagtctttagctaaactgtttgctttttatcactatagatttaggtttctttcttttggtgctatgtaattggataatacacaactagctttgcttattttttagctaaaatgtttgctgtttttatcactgcgattttaggtttctttcttttggcaatatgtaattggatactgcacaactagcttgtcatatataattcaaacatcaggtgtttgtttacatttag

SEQ ID NO: 277635 - DNA, 552 bp, Zea mays
atgagattaagaacagcagttgatcttttccaactgtgattcaatgtccttcgtggcttttaaaagttcaactgctgttcttaatctcatttggtcagaatatgaactttccaaagccacgaaggacattgaatcacagttggaaaagatctcctctccattgctgattcttcacggagccgcagacatggtaaccgatcctcaggtcagcaaattcctttatgagaaagccagcacgaaggacaagaccctcaagctctatgaaggcagctaccattcaatcttagagggagaaccagatgaccggatttcaactgccattaacgacatcatttcatggctagattcacactgttaaatacccctttgtctatagcctctcatgtcctcatccattgttttggatttatagttccttattagagtaccatgggtctctagtgctttaaattttgccatggtgtgcagagataagtatctctcgaattaattagttgtgcttgctatcttgacactgttggttttatgttaattgcggacaccgcattcaat

SEQ ID NO: 277636 - DNA, 285 bp, Zea mays
gctggttttttttacctcggtttggatatgggtatacatattttttttggagaacttttggttcaggttatacatacgaaaagccgaacttctgtgtcgagaagaggcataaggatttagctatactgtccattgcaggaaaaaaaactgtttcccttttcaattataaaatttcacagtgcagacatgaaggtatgtggtctttagcttggccaaccttgtggaatgctgtcacagtgtcacttgatgcaaaagaaaattcgaatacaaatgctttgctgtgct

SEQ ID NO: 277637 - DNA, 484 bp, Zea mays
gagtcagctgggtggctttgctcgggcgcagcagccacagccttcccaatttggaggccatgggtacccaactgtctaccagtctcagggacaggagcatccccagaaccttgctgagggcagcctgaacggcttccaggtcacaccgtctcagccatctcatccgagctggcagcatcagcacacgtactgagccctcctgtactccttggttagggtggctcttgtgctgtcacaagccaagtttcgcgtgcttgtgccctcactcgatgcagagtaagctgctccgattcagttgagcctttaccttgagcgctgagagggtcccaggcatacaacagttagagcgttgcgttttaacatgttgcgtgtgttgccagactgatgcattgtggtttgttttcgatagtgagttatatgtgcggaggcgcagtcctgtataactgagacatgataacctaacaagcagtcgtttctgttttcc

SEQ ID NO: 277638 - DNA, 1130 bp, Zea mays
ctcaaatctactctagaagggtgaagttggatgaggagcaacaggtccttcaaagacaactccaattgatacatcaaagggaacttgagaaaatgaagattgatgaagattgggatcacagccatcaatccaaagagcaaattgaggccaacctaatgatgaaacaggaagctgcactcaggcgagaaagagcacttgcatatgcattttctcaccagtggaggaattctggtcgaactataacccctacttttacggaacctgggaaccccaactggggctggagctggatggagcgctggatgacagcaagaccatgggagatccggttggcggcggcatcggacaaggaccctaaagaacgtgctgtgacaaagaatgcgagcaccagtgctgttcgagtacctgtatcccgtgccatctcgattcagagaccagcaacaccaaacaagtcgagccgcccaccaagccggcagtcactttcaaccccgccatcgaagaccccgtcagcctcaggaaaggccaggccggcaagtccaaggaacagttggctgtacaaggaggatgacctgaggagcatcacgagcatccgctccgagcgcccaaggaggcagagcacgggtggaggctcggtccgggacgataccagcctgaccagcacaccacctctccccagctacatgcagtcgaccgagtctgcacgggccaagtctcggtaccgcagtctactactgactgagaagcttgaggttcctgagagagcgcctctggcccactccgttgtcaagaagcgcctgtcgttccccgtcgtcgagaagccaagcgttgtgccgacagagaagcccagggaaagagtgaggcgccattccgaccctccgaaggtcgatcctgcgacgctcaaggatgcccctgctgcctgaccagtgaccaggccttatgtgattgttaggtttcgtgctcttttaacaccgtgatgtattatctgagttaggttgctttgttcgtgtcatcgtatgatctgtccgggttgattgtgagacagttctaactgtgtttacagacaatgcgtgatgctaaatgtatgtgtgggtggttggctttcaatgtactgatatgatagtatttgattt

SEQ ID NO: 277639 - DNA, 1013 bp, Zea mays
cccacgcgtccgcccacgcgtccgcccacgcgtccgcccacgcgtccgagaattcctggagttgagtcagaggggcaataatctgtctgtcgatttgactgtgggggacatatatggggaagaaggttacccgaagattggccttccagcatccactactgcggctagctttggaaaagtgaactcaagcaaactttctgagtataaagtagaggatcttgctgcagccttactgaattctttcacatacaacattggacagatagcctactttgtggctaatctttcaggcctgaagagaattttcttccgaggtgcttatgtctgtggtcatgagaagactatggacaagatttctcgttccctaaaatattggtccaaaggtgaagttcagacgacatttctatgccatgaagggttcttgggaacactaggtgcattttggagttatgagaacatggggatcgacagtttggcggcacatgaagtcatcacggaagtcttgcttggtgcaccatacacagggcaattcccatctttacctgtcactcaacaacaggagaatggagaacatggtactctcgaaggggaagtagaaagcttacgacatgacaatgccttgctgaaggctgaggttgagcgattacaaaaggagaatgcgttgctaagagctaagttggtaagatcaggcgagacttcaacattgtgatttgtaacacaataaaaagggcgagccgcagcttgttgtaaattttatctgtttagaaaatggctcaaaatgtaactcatataggaaaactgaattctggaaaagaaatgccaattagcattgttcatctagtgagccttgttgtataattatttatatattctttatacaagagcctatgtatttgctccgttcatgtaatcttgttcctgtaaatgttgtataaatagttaccaaaatccaggaagtatccggctttgtaattttgtcgaaatagtagagtatccctccaagttccctttgg

SEQ ID NO: 277640 - DNA, 436 bp, Zea mays
cttcctttttcccccttactcaaaataatatgccaaaccaggaacttcataatgatttctgggtaactgaaacgcatgggcacacatccatgagtcccccaccgctacatgcctcacgcctcgtcactgagtcgttctcagtcacgacatgctgatgtcgatccacccgtcaagaacaaggtgcagcagagatctttctcctcgtcgctgcttcctcgccatccggagatggtcgtcgccgcctaatatcacagcggtgggaaggcacaacgctcccccatctcctccggttctgcctgctcgccagcacgacgcgacgatgcccccctgacccccgcgcgcacagcctccgctggagaagcgacaacgctctcgtctccggtctccatgagtcagcctccaatccatttccatgccaggtatttacctaacgtac

SEQ ID NO: 277641 - DNA, 603 bp, Zea mays
gcagttctgaggctgtggagggctcactagatgcagttccagagaaagtagtcattctcaggagttctgagactgtggatagctcatatgctgtgtcctgtattttggatgacacagttcatgtcccttctgatatctcacaggctgacggtgtacaacatgaggagcactctagtatctctgatgggagtacagaaaagctaatttctgaggaaagttcattagtatgctatggtgttcccagcaacaaaaaagacttggttaatatagctgttcaagaaagtaaagcctttatcttaaaaaatcctgcctcccaaatcttggaagagagtggtccaggtttggatgtatctacagacagtgtttccctttcacatgcagactcagctcctgatttagcttgtcagcatgtttctcctaatgttgaagatacaacaagttatgagcctggcattggtcctgaagatgtaacaaaaaactcagttgtggaaaatggagcatgcagcggggaacttgttgtttctggtattcagacctcagcgggagatggactgacaaaatgcattgctcatccagctgttttttctaataaaaatagagtag

SEQ ID NO: 277642 - DNA, 653 bp, Zea mays
gtcaccgatttcctcccattcaattcgtaaatttcgtccatgggcatggaattggaatggatggatgtgaatgccacgaacgattccgccccgccggccaggtgagagatgagcctcacggcggccttccgtgccaccaaaatcccgcgcgctcttcctccaaagtgcggtgagcctgcctcctcctcctcggcctcggcgtccggggatccgccgccgggggccgcgaagagtactaaggcggcgccgccgtggtgcgtgtaccttatagcctcatcccggatccgccgcacgtacgtcggcgtcaccaccgatttccctcgccggctgcggcaacataatggtgagttaaaaggtggtgcaaaagcttcctctgccggcaggccttggaatctcgcatgccttgttgaaggatttgccaacagaagtgaagcctgtgagtttgaatcgaaatggaagatcgtctcccgaaaaattgcacggaaaagaactgagcttagcatgaagtcagtgttgcaacatcgagaagcagctttgagcagagtggaaacattcatggattgtagccacctaaaaatcaaatggcagtcaagttgagaccatttaatcacttgcactatgcaggtggcactgggagaaacatcaccacttaa

SEQ ID NO: 277643 - DNA, 666 bp, Zea mays
atgattttatcgcttttggttttgttagatacatttaagatagattttactcttatttgctatgcgtggtttatccattgtttatatagtggttgtcttagaaattactttaatccttaaaaaggtgtgcaatcttccaacacatcatgtggactcaaaattactcgctagttgatttgtctaaatatactgcagctgttcttgttggtttgtcagctatcatcactcttccattatcaattattatcaattaaggtttcacaaggtattatgaaagattgttctttcttagtttgtactctatccattctaaattataagtcattctaatattgtttgagccacaagtttgattgaagctatagagaaaattatgaagatccatatcaaatgtaaaatctaaattaataagaatctagtgacatttagtatcataaatgttattattttaatgtacaacttatgttagacttaatatttctttgactcctcaagaaagttggactgacttaccatttaggatggagtatgatttattattgtcttataaaagcctggatcggtatactctgaatatctgcacccccatcatggaggtgatggcgtttttagatatgatgtatatgaagatcagcacacatactctgagtacctacatgatgagta

SEQ ID NO: 277644 - DNA, 137 bp, Zea mays
gcgttgcttcttgtacctactggtgtctgtcttggtgttgggatcagagcgcacctagtggtccgtttttgtaccagctgttgtatgcgaatccatctgtgccttcatcacctaatgcactcgctgttgctgctggc

SEQ ID NO: 277645 - DNA, 457 bp, Zea mays
gttatgcgccgcccttttttttttctctgctcgggggggatggaagcaaatgaagtcggcattccctaataaatcagcgcaccagccgctgtacgctagcgtgagaggctgagtggagcgctggtgccggcggtgcgtgccctggtgcaccgcatcacactcgaccacgtccacgcatcatggcccgccgcccgccgctagtgccacactttcactagccacccgcacccgcagctcttggcctcttgccgccgcaccatgcctgcgcgtccgactcctgctgcgcactgacccggcccgccccgcccagctagaggacgacagcgccgccatgcgcccgccgcgcagccggtcgacgcctgctccttcggccgcctcggcttcgggcgccatcagctcgccaccttctccctacgcggcattcgcgccgttgggaccaggtcctgcgcccgagccg

SEQ ID NO: 277646 - DNA, 1008 bp, Zea mays
tatcatgtcagttgtattgatttgcatagccgtggtgctgcttgttcttgtgttccttggatacggctagagaagtatggaccgagatatacagcctacttatttgttaccttatgctggaaagctgtggcggctctctttatccttctagggattttcctgatactaaacagcgctgcgcaggatacctgcgaagcaatggaccagtgggcccagcaccctcaggcagagacagctctgagcagcatccttccgtgtgtggatgagagcacgaccaaccgaacgctgtaccagagcaaagaggtggtggtgaggcttgtggggatagtgaacagagctatctccgccctttcaaatcgaaggccgcatcacaagcacccaggacagttcatgccttacctgtgctccccctacgactcaaacctcaacgatagaccgtgcaagtatagggaggccacgtttgaaaacgcgacgacagcatggttgaactacacgtgcatggctcaagacacggacttgtgctcaggcaacaagaccttaacctacgacatctacggccaactcgtgctggctgcaaacgtgagctacgcgctgtaccactacgcccccttcctgctgaacctccaggactgcaagttcgtccgggccaccttcagcgccatcgcctcgcggtactgccctcctctggggcacgacctcgtgctggtctccgcgggtctggcgctcattgcctcggcctttgttctctgcctcgtctggatgctcttcgcggaccgcccccgaagggaggaggtgtccgatctggcgtcggggtcgaggatcgcgccggtagacagctctccgtcgtagaagcaagcaagcaagcggcgcaacgggatgtctatgactatgagtgaggctgcttggtcgcatggtgaccagagtttagtacagttcccttccatggctatgtaaaatagtttcggtatagcgagttccgggagacgtcgttgaagtgcggagaggagg

SEQ ID NO: 277647 - DNA, 485 bp, Zea mays
aaaacggggaggctcccctccccaagatcagaccttcgatccgttgctcctccacggcgccggccgccagcgccgccgtcccgcggcgcctgtttgtccttgcatggccggagccagacgtcgcaccttgcctccaccctcgcattccgatcacccgcttccagctcctctccgtctcgctgctcctcctccgctcgcagagctgagctgatcgatggaccacgagcagcggcgccagcggcagcagcacagtcccagaggcaatgctcctgggagcgggaggtgcggctcctcgtcgaggaagcacaagggcgggggcaagaaacccatcaaagtggtgtacatctccaaccccgtgcgcgtcaagactagcgccgctggtttccgcgccctcgtccaggagctcaccggccgcgacgctgacccctccaagtacagccccgaggacctcgccggcgccgccgtggcggcgggcgaccctgact

SEQ ID NO: 277648 - DNA, 552 bp, Zea mays
gacagatacaaggtttcttgttctagaatcaagtatttcgctgatgattataggggtgtctccaaaatcagcgattatgtgctatcaaatgagcttgtaagtatggcactagcaatggtagcggaagacacacaaataaacagagttcttgaagaactttctgctgaggagggaaatgagatgtgcattctgtctgctgaattacacctttatgagcaagaggaattgagtttctttgatattatggttagggcgcgtgagagagatgagattgtgattggctaccgtcttgctaacacctgaccaggctatcattaacccagaatataagtctcagactaggaagtggtcactacatgatgtctttgttgtcatctcaaaaggtggctaattttcaggagcgtcacttttttgtgtaagtgtatattctaatgctaatccgtgctaattgaaatgataaccggtcaaacatactgtaaagtacagtcatgatccaaacagtcagctatgcacatgttaaattgtagcattcaaaaaaaaaaagaaaaagga

SEQ ID NO: 277649 - DNA, 514 bp, Zea mays
cccacgcgtccgcccacgcgtccggtctctacagcctcagcacggacccggcctgcctcctcttctctctctcggcgacgactgggcgaccgaccaaccgtcgctgcgctacgccaggtgccaaggtcttcttcgggtccttcgccggcgaccagcagcaccaggcatagacttgtgtaagaaatggatgcaactgccggttaattgcgacacagatttatatggacatagatattggggccatgtgtaagggcggaagctgttcctaccgcgtcaataaggggagtcctgctggttctaccaggaagatccattccacagcctctcaaggtcggatggcatctgacacagcgagggtaacgaaaacagacgcatcaaagctgaagaacctgatctcggcatcattcaaacccttgtctctgaccattcccatcggcgacggattccacgaatcgctccctttcagccattgtcatttatagtagagaaagacacccagaacgtcaggtgcttt

SEQ ID NO: 277650 - DNA, 743 bp, Zea mays
acagcgtgattttctttgagttcggggccgttggtgacggcgtggaccctcaacaccgtgtccttccagaacgccgtcttctacctgcgctccttcgccgacaagggcggcgcgcagctgtacattcccaggggccggtggctcaccggcagtttcaatctcaccagccaccttaccctcttcctggagagtggcgctgtcatcgttggcacgcaggacgtttcacagtggcctgttgtcgaacctttgccatcatatggacgaggaatggaccttccaggttcgaggcatcgaagcttaataaacgggcagaatctagttgatgttgtaattacgggaaacaatggaacaatcgatggccagggttctacatggtggaactggtttcgttcgaataagttgaactatagccgccctcatcttgtggagtttgtggactctgagcaaatcgtcatttcgaacataacatttttaaattcccctgcttggagtatacatccagtgtattgcagcaatgtagtggtccatagtgtcacaattcagacttcattggatgctccacttaatcatggaatcgttccagattcttgctcaaatatgtgcatcgaggacagcagtatcagtgttagccacgacgccatatcactaaaaagcgggtgggacaagcaaggcattgctttcgggaggccaacctcagacatccacataagcagactggatctgcagtcctcactgggcgccgc

SEQ ID NO: 277651 - DNA, 494 bp, Zea mays
atcgaactggataaatgtcagaacagggacctgctgcatatgctgtgagactccgattgacgcccttctgtacagatgtgggcacatgtgcacttgctcgaaatgcgcaaacgaattggttcgaggtggagggaaatgcccgttgtgccgcgcacccataatcgaggtcatccgagcatacttcatcatgtagatacaaaaggaagacagcaagaagatagaagaggcccaaattgtttttggtctgtgtggagtcgttagcgggttgtgtattcaattttgttcattctctctaatgcgtttggttaaggttttttccggcttcatttcgttttggtctgcttgccctattgtaagtaatgtacggttttgggtgtggcggcaggacgggaaggtggtcttctctcattaggacttgggtcactgctaattatgttccacaacgactaatggggttggaggttgtccccccacgagatgaggaaacttttggt

SEQ ID NO: 277652 - DNA, 562 bp, Zea mays
cccacgcgtccggcgcgacgtggccgacgcgcacctccgcgtcttcgagagcccccgcgcgtccggccgccacctctgcgccgagcgcgtcctccaccgcgaggacgtcgtccgcatcctcgccaagctcttccccgagtaccccgtcccagccaggtgctccgacgaggtgaatccgcggaagcagccgtacaagttctccaaccagaagctccgggacctggggctgcagttccggccggtcagccagtcgctttacgacacggtgaagaacctccaggagaagggacacctgccggtgctcggagagcggacgacgacggaggccgccgacaaggatgcccccacggccgagatgcagcagggagggatcgccatccgtgcctgagagggcgatgccacacatgaacacaaagcaatgttcatactgctgccctgcacctgctgtgtaaacaggcctgtgtttgttctggctgatagtgatgtaccctaagacttgtaacgtcatgttcgttcttgtgaactatagcgagtgaataaaattggttaatgttggatgttc

SEQ ID NO: 277653 - DNA, 632 bp, Zea mays
ggatgtgacccatcaactgactttagaggcgcaggattcatatccctggagaatcttttgttctttgccaagacgttctccgcatcgtttcagagacttctaaataaacagtgcggtaacagagccacatgggagtacccatttgcggttgctggtgtaaatattacattcatgatcatgcagatgctagatctccagtctactaagccaagaacatttgtgcgagccatttttatccaaatgctctcagaggatgagtgggcatttgatctgctctactgtgtcgcatttgttgtgatggataagcagtggctggacaagaatgcatcttacatggacttcaatgaggtgctgaagtcgacgacgagcccagctggagagggagcttatgctggacgatgtcatccgcatcgaagacatgccgtcatacagcctgctttgctagtaaccaaaataccaaattcgccggagaacagaactgagttgatggttcatctgtatagtacctccctttgtctgatttctgggaggatttttttttagcatcaaagtagagtgtcgacgtactggtatcatgcttaatttgggctaatgatggtgatatgcacattctcagaagtgttacaatgttc

SEQ ID NO: 277654 - DNA, 670 bp, Zea mays
  unsure (1)..(670): unsure at all n locations
cccacgcgtccgccgccttcttcttcttcttcttcttctcctctgcccctgcttgtcgtttgctcgtgctcccccaccccctttctgattcagcaagggttccttccgcggcgcggcgcgtcgccatgggcaactgctggggcgccaagatcagctccgacagcccgtcccgcggcgcctcatccccgtcagggacggcgtccaagttggcgagcaggaacggggcggcggcagccctgagcgggtgcagcagccacgcgtcgtccgcgtccatgctgccgacgccccgcagcgaggacgagatcctggagtcggccaacgtcagggccttcagcttcaacgagctgaggaccgccaccaggaacttcaggccggacagcgtgctgggcgagggcgggttcggatccgtcttcaagggctgggtcgacgagaagacgctcgccccggctaggcccggcacggggatggtcattgccgtcaagaagctcaaccaggatggataccagggccacaaggagtggctgactgaagtgaactaccttggaacgctgtcgcacccctaccttgtgaagctcgttggctactgcctcgaggacgaacagcgcctnctcgtctacgagttcatgccacgtgggagtctggagaaccatctgttcaggaggagctccta

SEQ ID NO: 277655 - DNA, 355 bp, Zea mays
ctcgtttgtcagacttcatctgcctttagtggttcaaagagttcccataaggagcaacatgggccggagatcagtagtgcaagtgcaagctttcaaccgggtccagcaacatcagttgatgattcagtatcaatgtcacaacatttgcctgcttcatttggtgatgcttcacggatcagcagcactgatattgttggtgcacctagtgtccaagagacagatgacatgcaggttgatagtcatgttgctgaggactcagagccagaaaacgatgatctttatttatcaaattgtcgaatttctctggtgggttttgaagagtaagagttggtaatgcttgtcatgctgatacgta

SEQ ID NO: 277656 - DNA, 1021 bp, Zea mays
gacaacaggtcgtgagtgtgagatggagatgcatagtgtgttggaagctgtggccgcggagcttcactctctgtcttggttgacagtaagcccggtgtacacagaaaggcgcacagcactgccctttcactgtgacatggtcctaaggatgcggcggcttctacactacgcagataagtatctatctgaacctaagggagagacaactcactaattgtcatgtacaattaatatctagctaggtaggtatgtgagggcacatttgacgagctttgtagactgattttgcaataaccctgataacttacaggtggatgctgtaacctttatctctttttttaggtctgtattgtttgtcgacacaagatttgagatatgattccgtttgttgactgtattaatcagaattacaagtacagcgtttactgggattgccgtgccctactgcgacgacgtttttttttcctttaatcagaaatacttgtaaaatcaaaatcatctctccgctacggctattgctcacaccccctggctggaataggcagcttaaaacccaggtaaaactgacaggtccgcaatccccttgggcaaactctcaatcttcctcagcaacgttagccggttgttgcgaactctctcgtcttccgccatcacgaagacactattgaagaaatcttctaggggttgtatcaggataagagaagcatccacaaaggtcttaatatcaacaccaggatggatcttatcagcaacctccaagtaggcgctccacaaaactttctcttcatctttctcaaatacgtgtgggtcaacctccaaagcagactcaatttcttttccacggatgatccttgttggccttgaatacgcttcaacgattttttgaaatgtttctgttctcgaaaatgcttccatttcggtcgctgtttgtgctgctagataagggcagtttgcacgctccataagcactgatcggactatctcgcagttaattccctcatccaccagaagctgttccagt

SEQ ID NO: 277657 - DNA, 570 bp, Zea mays
cacccgctgccccgcgcccatccgtcgccgtgatcgccagagcgttcctctgccgagccgttcggccggtccactcacgcgaagcttccagcagaggcgaccgccgcatcgagtctcggctgccgaggagtcgagtcatggaagtggtggcgtcggcgccggggaaggtgctcatcgcgggaggatacctcgtgctggagcgccccaacgccggcctagttctcagcaccaccgcccgcttctacgccgtcgtccgccccctccgcgacagcctcccagccgactcctggacctgggcatggacggacgtcaaagtgacttcccctcaactctcgcgggtggccacatataaattgtccctaaataaaacgacgctgcaattgacgtcttcaagggaatcgacaaacccttttgtggagcaggccatacaattctccgtagcagctgctaaagcgaccattattgataaggagaggaaggatgtagtagataagttactgctgcaaggtctgaacattacaattatttggcacaatgatttctattcttatagaaagcagattgaagcac

SEQ ID NO: 277658 - DNA, 459 bp, Zea mays
cccacgcgtccgcccacgcgtccgcgccgtcgtccgccccctccgcgacagcctcccagccgactcctggacctgggtgagcgcatttcaactgcgcccctcccctccgccgcagcacccagcccccttatgccatcccgctggtctcaacagctacactgtgttctctcgctcctcaccctgggtgctctgtaccgtcgtaccgatgctaggcatggacggacgtcaaagtgacttcccctcaactctcgcgggtggccacatataaattgtccctaaataaaacgacgctgcaattgacgtcttcaagggaatcgacaaacccttttgtggagcaggccatacaattctccgtagcagctgctaaagcgaccattattgataaggagaggaaggatgtagtagataagttactgctgcaaggtctgaacattacaattattggtcacaatgatttct

SEQ ID NO: 277659 - DNA, 771 bp, Zea mays
ctgtgttgtgccataggggttgatggacagaattggatgtacactgttgcttatggattctttgaggcagaaacaacagaaaactggacatggttctttcagcagttgcgcaaggctgtgggagatcttcctctactagcattgtgttcagatgctcgcaaaggtctaaaaaatgccatgaacactgttttccctcaagctgaaaaaagggagtgtttcagacacctaatgcagaactacgtgaagcaatttgttggatccgagtacatgtatcctgcagctagagcatataggagggaggtgttcgaccattacttttccgatgtccaagaaattcccgaggtgtcccgttggttacttgagcatcatgacagtttgtggtaccgtagtgggtttaatccagccatcaagtgtgactatgttaccaacaacatagcagaggtgttcaacaattggattaaggattggaaagatctaccagtttgtgagttggcagacaagatcagggaggaaatcatggagttgtttcacaggaggaggaggataggacagagactgcaaggtcggatactgccatctgtggttcatatccttcatgccaggactagaggtttaggacacttgacagtgaagaaagtcgacaattatgttgcaaaggtgagggataataatcatgtgctttctaagcacatagtgaatgttgagttgagaccaatgttcatgcaacgaatggcagcatacagggaaaccatgtcaccacgcactttgttt

SEQ ID NO: 277660 - DNA, 347 bp, Zea mays
ggccaaccactaaatcagataacaatttgaatagtacagtacagggaggacaagtggcaataggaggacaataatcacgctgaataagtaggccccacatcacagtccttctggcaactgcacatggttttatcattttatttttaaaattgttttttatggacattatctcgatcacgttcctgccacagaagctcatcaagcatcggacggcctgtagttgtagacgtgaaagcttgcatgtggggccacggcgtcgaggaagatcctggccgtcgcctcctgggccaccgacgcctgctccttctccacgagcgacgccgcgaccacgtccacggcggggccgc

SEQ ID NO: 277661 - DNA, 575 bp, Zea mays
gcagttgtgtcacccatttattataccatgttcacatctttaactatcttggcaagtgtcatcatgttcaaggactgggacaggcaaaatcctacgcaaattgtgactgagatgtgtggctttgttacgatcctttctggaacttttcttctacataaaacaaaggacatggctgatggtgggctttcgatgtcatcctccttccgtcttcctacatcttcttcggtgcgcttctccaaacaaacagatgaagatggtgaaggaattcctctaagatcgtccgaatcattccggtcaccacattaacgcatgtttgctaatcattaatttgcacagagttaggggtgggtattatatagataatgctatcagtgagcttgtactaagggtacgatggatggaccctcttttgctttggcagaattgtatatgtatgcccaacatcttgtggaactcccaatatatttctcttggctgtcgtgtgtgataaaaaaaaaaaaaaagggcggccgctcgcgatctagacctctctccatgcacgagcacgacagagctttttcttcgtttccttttaa

SEQ ID NO: 277662 - DNA, 446 bp, Zea mays
gcgcccacgcgtccgcatcagatacgcagcactcctgttcatacgaccatggcgtcgtccaggaagcagagcgctgtggtggccgccgtctccatcgccctgctcctcacttcgcatctcgcagtcgcagctggagcagaagaagcagaagcggaaggaatagcgccgttgaacacatgcgaaacgccgatcgcctgggctccctgcttcggcaagacctgggtctgcgttcccctctgcattggactgcgctacaccggcggtttctgccagcagcagcaggtgatcgagggagacgccggcgccgagcctgctataatcggaggcgccatctgcgtgtgcaccaagcagtgcctgcttgtggatgtggaggcggagcaaggtgcaccggcaccgtcgcagccgcccgtcgccgagcctccgcgggggatgcgtggggttgggat

SEQ ID NO: 277663 - DNA, 590 bp, Zea mays
tcgagctgatcttgctcttggattacaatctcattctgatatgggcgcaataacacttcagatacaagatgatgttggtgggcttgaagtattaaaggatggaatgtggatacctgtgcctgctttgcgtgatggcatccttgtgattctcgctgatcagacagagatcatcaccaatggaagatacaagagttcagttcatcgagctgttgtcaatgctgagcgggcccgcttatcagtagcaacagtttatgatccatcaaaatcaaggaaaatatgcactgccccgcagcttgtgagtgagaatgaaccacaaaagtatcgggatgtaatttatggtgactatgtctcatcttggtatagcaaaggtccagagggcaagcgaaacatcgatgccctcctgattcagcactagagccataagtatgccttaaaacaaggttgggccactcattctgttcctaaacttctaaagcatgtacaatatatcaagtttcaactctaaacaatcatgattaggaaaccaacttgtatactggatgcagtgcaataaagtaccttttcattgtcaaaaaataaaaactatattt

SEQ ID NO: 277664 - DNA, 608 bp, Zea mays
aatacatgatcttcatatgactcccctaagaatgagcacttccaacttctcgtgatgctataaggacgcacttacagatttttgcgtaaacaacgagcatcctagttgtgttttttaccagcaggcgctgctactcctgtcatacttcaaccatttgtattcacatggtcttaatggtttgatgacagctatcctgttttttgttcttatctaaaacacagtcacgcttctgtcttgcattgtaatcgtatttttctgacacttgtgaacttggttgctcaggttcatgttgtctctgctaaatatgtagtgaagtgcgataatgatacttttgtgagacttgattcagtagtcattgaaattaagaaggtaccaggtgggagaaaggctttacatggggagtatgaatatacaacacaagccacgacgccatgggaaacaggctgtaacctatgaggtcaagcttatggaatgtttgccatagcagttattacatttcattcttcaaacaccaccttaacatttcttatattcttctataaaacagttcttgtataacttgaagtgcagagtttgaaatagtttttgtttatttactcctaaccttt

SEQ ID NO: 277665 - DNA, 437 bp, Zea mays
cggacgcgtgggcggacgcgtgggctagttctagatcgcgagcggcccccttttttttgttgtttaaaagcaaaacatagacaatttttcttgacacacttgattgtttgtaatgacattttttaaggtccaattacggttgggcacagtagcagcataaatagacgggcttattttgccggacggtttaaagtccagtcctgatcgccggccgagagcagaggaagcaagcagcatcacaagtcgggcaggattcccagggccttgccgtactcgaccatgtcgtcgtatatgtcatccagcgtcctgtacctgaactcgaaaccttccttcaccagcttcgccgacgacaggcacactctcggcttttaagccgctcgccggaaagcaggttcgttttgacgccgtactgcgggtacttgttcgtcaggaaacgc

SEQ ID NO: 277666 - DNA, 456 bp, Zea mays
cacctggttcgtgtctgcgtgaataaagccagtagtctgtccaggcggaggcaagctgttgtggctgcgacacaaacactgggtacacataccatctctccaccatcctctgtccagacgaccagaccaaattaaaaggagaagcaaagagagatctggccatctgggtgggggtgggcggcgagagagcagcaggagaagaccattgccccttgaaggcgggctccagagcgagcttctacgcgcgcccttctctgtttgccttgcctgcttgcctctactcgtccggcccagccatggccaccatcctggagaccatacagaaggcgaggctcctgcactcacaggccgctcaaggacgagctgccaaccttatgcggcggcggcagacaggagagccacctcacaggcctgcggaagctgctgaccgccttctccggcaagatccagcccatc

SEQ ID NO: 277667 - DNA, 544 bp, Zea mays
cagaactccaagaaacagttgcacacttgaggcaagaaatcagtaatttatcgaaggctgcagaaagcgaggatagttttgctagcgtgcagtctagtgaaccatcaacagcaagcactgatactagggatcaaacaaatgaaatctcaaaccgtgcaaatatgtcctctagaacaacggacttaaatgagtcaggatttatatctcaagtgctcaagcaggcttcagaaattgaaagtttgaaacaagaaaatctgaggttggtggaagagaaggatggactggaaattcatagtcaaaagttggcggaggaatcatcctatgctaaagaattggcttctgctgctgcaattgaacttaagaatttggcagaagaagtcactaggctttcttatgaaaacgcaaagctgaatgcagacttagctgcggcaagagagctaaatgcatcgatgtcaagaagtaacatccaccctgacccaaagcgtcgtgatcatgagagcggaattttagttgaggagttgcagaaagagttggttgctagttg

SEQ ID NO: 277668 - DNA, 467 bp, Zea mays
cggacgctggcaagaccaaaagaagcctcagttttggcatccagcagcaactggccatggaaagcagtgggatcggcagagtggcccccctggaggccgtcctcttcgacatcgacggcaccatggccatctccgacccgttccaccaccgggccacctcggagatgctcctcaaggtgggctacaacaacggcgtgcccatcacgcccgagttcggcatggcgaacatggccggccggagcaacgagcagatcggccgcttcctgttcccggactgggaccagcgccgcctcgacgccttcttcgccgagaaggaggcgctcttcgccaggtacgccgccgaggggctccgggagatcgccggcctcacgccgctctgccgctgggccgccggccgcgggctcaggcgcgccggccgtcaccaacgcacccagggccaacgccgagctcatgatctccatcctcgg

SEQ ID NO: 277669 - DNA, 592 bp, Zea mays
cttcagtccacccagccagccagcaaggcagcacccaagacacgcagcgcagccgcaccccagccagattcgacccgagttcgcgacgagagcacgagatggcgatgcggaccgcgctgacctccctccccgcgcgcctgcggcccctgcgccccccgcggcgacgggcggccggcgcctcctcagcgacgggaaggggcgcgtgctcagcgaggaggagcgcgccaaggagagcgtctacatccagaagatggagagggagcggcaggagaagctcaagaagaggctcgagcaggagaaggccgactccgacaaggccaagcccgccgacgccgacaagaaggccgagggatctacctagctaggattggcatggcgctgttggaaggcaatcacgtttcgcatgtatccgaatccgatggtcagctttgtgaatgaataaattctgtaaaacgtcaacagcactggatatgcctgttgcttcggttgcttgcatgttgaagttgaagacgacattcatattttgatactgctgctctttgtggactaaaaaaaaaaaaaaaaaaaaaaggaaacataacagaaaaaagaa

SEQ ID NO: 277670 - DNA, 508 bp, Zea mays
agcggctgaagcgctgggctccagctactgctgctcgcctgcttcgggacggccgattgggtgccggtttgccaaggacatggaggatgcgagcggcagctcgtcgtctccagccgtcctacggaacaagtattgggtcctccgccacggccgcagcgtccccaacgagcgcggtctcatcgtctcatctctggagaacggcacgaagccggagttcgggctggccccgcagggggtcgagcaggcgcgcgcggccggcgaaaagttccggaaggagcttgacgagattggtgtgccggtgggttccgtcaagattcgttactcgccgttctcacggaccaccgagacggctagagtggtcgccggtgtgctcggcatcccctttgaagctcctagttgcgaagcggtgctgggacttcgtgagcgctactttgggccatcatatgagttactttcacatgataagtatgcagacatatggtcagtagatgaagcacatccctgtatg

SEQ ID NO: 277671 - DNA, 410 bp, Zea mays
ccacgcgtgcgctgggtagtagggtactagtagcactaggggcttaagcaagctaagctgagtgcgcctcatcagaatcacagtagctcgcaccgcactctctggcttctcgtcgatcgtcttcgtcgtcctcgctcctccgacccacatgatggctagctctccatgtgccgcttctcctctcgcacgtgccgcttctcctcttgtgttcgatatgttgtattgtttccatgtaaatttagtcggtggcctggatcgagttggctagctctctctacaggcaagagacaaccgaccgaccactactatcctagagcaaattgattatcgtcatgatggtgtactgttcaagcttttattaacgacttttaatttacttgctacgtacagcacgtacgtccttcgagaag

SEQ ID NO: 277672 - DNA, 518 bp, Zea mays
cagtgtcgttgcggtcgataccatgccttgtaatagccatcaagtgacctctgtatgtcattgtatcacaaagaatggccagatgccggtagttcacatatgacccatcgaaagatatcaccacccgaagctcatccaagagagatcgacggacagcctcaattccaagtacctcaatcacttcaatcagatggttacttgttgtccttgtagcatcaacatcctcgtgacacatgacagctaaaagattcacaccttctgtatcaagcatccattcattagctgctttgaaaccgtcatcttgatagaaggtattgaccttcccttctttgatgaacactttgttgatatctggaatgcctcgaagcgccatctctgtcaacatattgccctctatcttttttaggaagacatcatcctcagcagactcatcttgtatttctcctttttggagcttcatcatttgtgatgcggatacggaggataagcggacccccgggcgcacgcgtggagatgca

SEQ ID NO: 277673 - DNA, 351 bp, Zea mays
gaatagaaaggaagagctctgaagttgaataaagagcgtcgtctagctcaggagaggaagcagctgaatatcttgaacgagcaatatggatagaacctacccggaagactggagttttgtacagtcgaactgttaccagatggtgagtgctgtgtgtgtatatgacggtattgatgcatctgtgaggtgtattgctccggtggcggtactacaacacagttttgcataccgaggagcagaggcatgtacagcgtcatgtgttaaaattgctccgaaatattattgagttttgtagaaaaaaaaaaaaataaaaaaaataaaataaaaaaatataaattataaaataaaaat

SEQ ID NO: 277674 - DNA, 668 bp, Zea mays
cggacgcgtgggacgcaacaaagggatttgcttcgtccgacgtccactacctttaccgccgcggcgccgccccagaatttcccccttcttcgttcgcggaaacgagagcgcccgaaggaatagcgaggtcggaggcgccgttcgattccagaagtttccatcgccgcgccgtgacgatcttgtgtagcctgcgcattggtctgctcgtcggacgtcggcgtcggtcgagtcgtggggtgcgcggtcgtgcgagatcgaggcggggagctcgcgaatcggaggccgcggggcgcaatgccgcgtcggtagggatggcggaggcggcgccatggcgaggggcgtagcgcgggcggtgtctttcgggcgccgtgccacaacggggtggtgctcctaccggcgcgtcaccgtggccgtctgcatcggcaaccttgtcgccgtgctgctcgtgctccgctccctcaccgcccccgcttccttcgcacccaccgctcccaaccgcggggaagtggtgcagtacacggaggagcagattaggtgggtggaggagtcgatccggattcgccgcgaggctgagcccgtcgagctcgttctggcggtaaagaagctgcggaagaaactcgcccaggaggtgaagcggcgggaggagctgtcgctggtgctgaagcaga

SEQ ID NO: 277675 - DNA, 640 bp, Zea mays
gcaagatggaaaccctcagtacttttctgcccctttccagatgccgccgctaccagatactggatcagaccaaggttgcatgtcaagtgtccagcctgcagatggacctatgagcttacctgaggggcttcagcgcccatgggctatggggatgatgggtaatccatttcacccgatggcccttggtcagggaatggatgatggtgcggatgatcctcagggtggtggtggccttgccttcatgcaagctggttttgggggcatgcctgatggctccatgaatacaggcatgcccgatagaggtgatggaaggggtgttcgagcacagatgcccacgccaatgcaaatgcagatgtcacttcccccacctccgcctacacaacctcctccaggctcgcagcaaacgtctaacaggacttgatatattttgttttgcacgaattgatggttcctctcaaaattccatgtcaattcattgaggaaactgtaattttatcgtcgttggcaaaaaaaaaaaaaaaaaaaaacagaaaaaaacagatcaaacataaaaaataaaacaaaaaaatgataaaaagcaacacataaaaaaaaaacacatacaattgcccaaaaaaaaaaagggggggccgttttaaaa

SEQ ID NO: 277676 - DNA, 378 bp, Zea mays
tgccttcatgcaagctggttttgggggcatgcctgagggctccatgaatacaggcatgcccgatagaggtgatggaaggggtgttcgagcacagatgcccacgccaatgcaaatgcagatgtcacttcccccacctccgcctacacaacctccatcaggctcgcagcaaacatttaacaggacttgatatattttgttttgcacgaatcgatggttcctctcaaaattccatgtcaattcattgaggaaacggtaattttatcgtctttggcatgtaacctgtgagaactagatggctcagttctattccctggtttgataggagcctgtgtattatgctgtaactgtcctgtttgaatgaagtgttcccaagttacg

SEQ ID NO: 277677 - DNA, 431 bp, Zea mays
cggacgcgtgggcggacgcgtgggttctagatcgcgagcggccgcccttttttgtgttgtttttttttaggccgacgaaggagattgctcggccaattgttctgtagatcaagctgacacaaattgccatagtggcacggcattgtacccagctgtggccgctgggttcgtgcacgctcagctcagttagttccgatctagtttcgtaaattcgcgcgctcaaattagttcgtttgcctgggacaaattggagctagcggaagaaacacacggacatcaagatgggtccgcgaggagcatctggagcagcatgtcgccccaggcgtcgatggggccggggaggcaccagcgcacgcagtcgttgtacagcgtcacgttctcgtgcggccagtggccgtaccggctcgggtggccgtccggccgaagcacca

SEQ ID NO: 277678 - DNA, 496 bp, Zea mays
ctcaccacggaggattgagttggtgactggttggcacctatgcaatggcccagtgtaaattagtggtgcagtgggctggcgatcatgctgctagcaaccgaaattgcaagacttgtatcatacatcaacgctattgcttttaccgcctgacacggaagggtggtgatcatgcatcaatgctattgcttttactgcctgacacagaagggtgtcattttttttttgtaggagttgccatctgaactgtagagctccataggggataggttctgatcggaatgtgaatggcactagaaaattacttttactgtatctgcttgtgttgtcaagaaccgaatgaggtgcctggcagccttgtctgtaccctgtacactaaaattggagaatgttgaagccctcggcagtaatcggctggacttgtaaggtgccagtgtgtgttgagcctgcatattacggctaaattcggtaaagacaacagcactttactgtgcatcct

SEQ ID NO: 277679 - DNA, 848 bp, Zea mays
tgactccttcgcttctcctctccctcctgctggtggcggcgaggtgctgccatggctggtcgtcgttccagaagccggcggtgactgcggtgatcgctttcggagactccattgtggacccggggaacaacaacgggctgcatacggtgatcaaggccaaccatccgccctacggcaaggacttgttcaaccacgaggccaccggacgctactccaacggcctcattccaaccgacctaattgcccaggagttgggtgtgaagctgctgcttcctgcctacttgggcgtggatctgagcccggatgacctgctcaccggcgtcagcttcgcgtccggcgccaccggattcgacccgctgactcccgtcgtggtcagcgtcatctcgatggaccagcagctcgcctacttcgacgagtaccggtggaggctggtggacatcgccggcgaggccgagacggcgcggatcatcgagggcgcgctgttcctggtgtgcgccggcaccgacgacgtggccaacacctacttcaccacgccgttccgcagcgccgagtacgacatcccgggctacgtggacctgctggtgggccacgccgaggagttcctccgcgagctggtcgtcagctccaggggcgccaggaggatcggcttcgtggggatgccgccggtgggctgcgtgccgtcgcagcgcacgctcgggggcggcctcgccaccagggcctgcgagcccaagcgaaacgaggcggcgctgctgtacaacgccagggcccaggagatgatcgccgccttcaacaacaacaacaacgccgacgccgacgccgacgtgctggtcgtcttcctcgacatctac

SEQ ID NO: 277680 - DNA, 411 bp, Zea mays
gtgcaagcgccgcgggaaccgtgaccccgaccaccggcggcacaatgggaggagcgggaggcccagggaccttgacgcccgccgggacaggcgcaggcacagccggcactaccggcatggggactgcaggcactacgggtaccgggttcggcggcctaggaccagcaggctccgacacagcggcggcggcggcggggggcttgctcctcctcccagaggctgggctgtgcgctgccctcgtcgcgctcctcctctccgccatcgtgctcgcgtgacgccttcacatgacctcggaaacaacaacctactgcctgcatgctagtagtagtagaaagcgctgcccttttgggaggtgtatgtagttcaggagtactctgattatctatcgagaaagggtgggaattattgggg

SEQ ID NO: 277681 - DNA, 1563 bp, Zea mays
tttccgtatccctgccaataagatctcaatattgaccagtctacattggtcagaagcttcttattcgcgatgttatcaacaaaagatgcaaaccatggaatattgagccccctaacaaggttaccactgtggacaagttccagggccagcaaaatgatttcattttactttctcttgtccgtacccgttttgtgggtcaccttcgtgatgtcagaagacttattgtagctatgtcccgtgctcgtctgggcttgtacgtgttctgccgtcgttcactgtttgaacaatgttacgaattgcaaccaacattccagctgctcctccaaagatctgataagcttgccttgaatcttgaggagtgcactccttttaccgagcgacctttggaggaaactggaaacatccattacattactggtattgaagacattaatcatctagtaaagttcaggctggaacatcttcgtcaagtgcaatacatgcagtattatgctcctccggcaaatgaactgcctcaagcagcaccagaaaatattgctgatgcaatcccttctgaaaatggcaatgctggaagggctctgaatgatggaaacgagggcatgacccgggaagaaaatggtggtacaactgacacagtgatcagtaataggatagaggaagacagcgttgaggcaaaggatgacatgacacaggaaggggacaagggtgaagtgagtggcaagggtcacatggctacagaggataggaaaggggaagcacaaggtggcgcagatggcaagctggaggaagcaaatgtgatgtcggcggacaagatgatggaggaagcaaatgtgacgtcggcagacaagatggaggaagcaaatgccatgtcggcggacaagatggaggaagcagatgccacgtcggcggataagatggaggaagcagatgccacagtcgccggacaagatggaggaagcagatgccacgacgtcggacaagatggaagaagtagatgccacattgccggaaaagatggaagaaacaaatgtcacgttgccagacaagatggaggaagcaaatgccatgtcgccggacaagatggaggagaaaaattctgatccgaaagacaagatggatgaggagtgacgtggtggtgtaaccagttttgaaatagcgttagacttgttctgtcagccgcatatctttatttggaacatcttgtattgacctgtgttaccgcagatgaagactgatacgtgctccccaagaggtgtagccttgtgggcagaatcaagatcgacatatgatgaccatgttcctgcggttaatggtggtgaaggttgttttcgctaccatcttggccaggctatgctggaaaatgttccttctcttccagccaagggtatccatgtttcggcatgtgtttaatcgtgtaaactgtagaggattttttgggtagtttttttctgaaacacccgttccatctatcgttgtctccgtcacataacacagctggaacgttgcttttgtatacttgactgactactataattttggcacaagcattagatttttgcaatc

SEQ ID NO: 277682 - DNA, 662 bp, Zea mays
atttcttccgtcgttggtggcagcatcggccgtgtttcttgctagatggacgcttgaccaatccgatctcccatggaaccagactctagagcactacacgtcttacaaatgctctgacattcaattgtggcgctgtgctctacgggaactccagcataacaccagtaactgccctcttaacgccatccgcgagaagtacaggcatcaaaagtttgaatgcgtagcgaacctaacttcaccggagttccctcggtcgttcttcagctgacacgccaatggcaccgattggtgagcaacgttagcagcagccgtagcagcaggttgcgttaacattattgtagcatccccttttaccccccaatgtctgattgggctgggtgtcgctatcgagctgctgtgtcccggcctggcctttctcgagtcgcaagtgagatgaagacggacagagagatggctccttggcttttcttctgcttgtttgacgtaaaaggttcacccgggtgtaaacaacactgtgtgtagggctttttgcttgggctgttgttaattaactgtaaggggagatggtccggctggcttgtatgacgacaaacgacgggatgatgtttgtgttgacacaattcgttcattggtagcctcggaatggaaattagtttattgcc

SEQ ID NO: 277683 - DNA, 747 bp, Zea mays
cccacgcgtccgcggacgcgtgggtagcagcagcccattgcctgcctttcggcttaccctctctctctctctctcacacacacacacaaccactcacactgccggttggtttcccttccgttgtggttggtgcgtacttagtggcggccggccatggcgcggaggaggggcttctcggcggtggtgccgccggcgtggctgccggcggtgctcctgtgcctggcaggcgcggcgtcgggcgagccgctgccgcagtactacaatgccatcttcagcttcggcgactccttctccgacacgggcaacttcgtcatcatcaactcgggcaagctgcccaacatgcccaagttcccgccgccgtacgcgaggtgctccaacggccgcctcgtgatcgacttcctggccgaggcgttcggtctcccgctgctccctccgtcggcgaacaagggcaccaacttcagccagggcgccaacttcgcggtgatgggcgcgactgcgcttgacctcaagtacttcaaggacaacaacgtgtggagcatcccgcccttcaacacgtccatgggcgtgcagctggagtggttccaggaggtgaagcgcacactctgccccgacgaccccggcgcgtgccgcgccctgttcgggagggccctgttcgtgttcggcgagttcggcggcaacgactacagcttcgcgtggaaggcggactggtcgctggagaaggtgaagacgatggtgccggcggtggtg

SEQ ID NO: 277684 - DNA, 791 bp, Zea mays
cccacgcgtccgggtgaagacgatggtgccggcggtggtggcgtcgctggtgggcggcgtggagcggctgctggacgagggcgcccgccacgtcgtggtgccgggcaacctccccgccggatgcatccccatcacgctcaccatgtacccgtccgaggaccgctccgagtacgacccgcgcaccggctgcctcaagaagtacaacagcgtcgcgctctaccacaacgccatgctccgcgtcgcgctcgaccgcctgcagcgccgccgcccggagtcccgcgtcgtctacgccgactactacacgccctacatacagttcgcgcgcacaccgcacctctacggctacaagcgcggcgctctgcgggcttgctgcggcggcggcgggccgtacaactacaacgtgagcgcgtcgtgcgggctccccggcgccaccacctgcgaggaccccgacgcgcacgtcagctgggacggcatccacctcaccgaggcgccctaccgcttcatcgccaacacctgggtcaagggcccctacgcgcacccgccgctcgccaccgtcgtgctcgaggacatggtcgactgatcctcttgtggtttggcacaagggaagagctgatatgtaacgtgaattccattcgttcatgtccatgtatattgggtactaccggagcggagtaacaaaaaaaaatatatatgttagtcttttctgttttttttttcgtcgtgcacctgtgtgccgtgcagtcgcatagatcaatgaagaaaccactccagctgtttttgatgattggttt

SEQ ID NO: 277685 - DNA, 737 bp, Zea mays
tttcttacttcgcggtgatgggcgcgacggcgctggacctcaagtacttcaaggacaacaacgtgtggagcatcccgcccttcaacacgtccatgggcgtgcagctggagtggttccaggaggtgaagcgcagcatctgccccgacgaccccgccgtgtgccgcgccctgttcgggagggccctgttcgtgttcggcgagttcggcggtaacgactactacacgccctacatacagttcgcgcgcacaccgtacctttacggctacaagcgcggcgctctgcgggcgtgctgcggcggcggtgggccgtacaactacaacgtgagcgccgtgtgcgggcttccttggcgccaccacttgcgaggaccccgacgcgcacgtcagctgggacggcatccacctcaccgaggcgccctaccgcttcatcgccaacacctgggtcaagggcccctacgcgcacccgccgctcgccaccgtcgtgctcgaggacatggtcgcctgatccctcttgcttctgcaggattggtttgcctcaagggagtagctgatatgtaacgtgaattccattcgttcatgtccatgtatgttgggtacgcccggagcggagtagcaaaaaaaaatatgttagtcgtttctgttttttttgtcgtcgtgcacctgtgtgccgtgcagtcgcatagatcaatgaagtaaccactccccctgtttttgatgattaaaaaaaaaaaagaagaaaaa

SEQ ID NO: 277686 - DNA, 1028 bp, Zea mays
gagaacaaataaacgtgacatacaaaataatgcgccgaattgaggcagaggagttgtctcttgatgcgtctgaaatagttatcgctagcacaaggcaagaaatagaagaacaatggaacttgtatgatggttttgaagtcatgcgggcgaggaagctccgtgcgttagtcaagcgtggtgctaactgttatggtcgttatatgcctcgtatggttataattcctccaggagttgaattcggccaattgattcatgattttgatatctatggagatgaagataaccaatctccagcctctgggatccatctatttggtttgagataatgcggttcttcacaaatcctaggaaacctatgattttggctattgctcgtccatattctgaaaagaatattgcaacacttgtgaaggcatttggtgaatgccatccgttgagggaacttgctaaccttacactgataatgggcaaccgtgaggctatttccaaaatgaacaaaatcagtgcagctgttttgacatcggtgcttacattgattgatgaatacgatttatatggtcaagtggcatacccaaagcttcacaagcactctgaagttcctgatatttatcgtttagcagcaagaacaaagggcgcttttataaatgttgcttactttgaacaatttggtgttaccttgatagaggctgccatgcacgggctgcctgttattgcaacaaaaaatggggctcctgttgaaattcatcaggttctggaaaatggtctccttgttgatccccatgatcagcatgcaattgcagatgccctctataagatgctttctgaaaagcagttttggtcaagatgtcgagaaaatggattgaaaaatatacaccaattttcttggcctgaacattgcaagaattacttgtcaaggatatcaactcttggtccaagacatcctagtttcgcatgcaaagaagaccacaaggtgcctgtgaagtgcaggaagcatatatctatcattgctgtagactctgttaacaagg

SEQ ID NO: 277687 - DNA, 350 bp, Zea mays
acgcccacgcgtacgcccacgcgtcttcccattgcggctgtactttatcgcgatctagaactaggagagggaaagtgagaagttgtgtagcatagttataccataatttcattcgtagccatttcagttttgtaagtgtagcagtttacaatttactaggtctagtgcgttatactgacaaaattgacggttctgatggaagaacataacctgaggaaattggcttgttagaagtactcgtgagcatgttctgcaatttggcggccactcagactatctccaattatatccactatattccctctgtaagaaaaaaaatctttcgtattaattacggtgaaattgtgaca

SEQ ID NO: 277688 - DNA, 381 bp, Zea mays
taggtgtcaggatatactgtgcaatgactgtgagaggaaaggcagatgtcgatttcactggctataccacaaatgcggctcctgtgggtcgtccaatacccgagttatcaagactgacactgcagattgctccacaccaaattagctggagggaacatttgtgcttatttgtagccctttttttttctcttatgtaaaaatcttctagcgggaaggaaaaaaaagatgtcctgtaggatagttaacataatttcattcgtagcgatatcagttttgtaagtgtagcagtttacaatttactaggtctagtgcgttgtactgccaaaatggacggttctgctggccaaaggacataatccgagaaaataggctagttaggcc

SEQ ID NO: 277689 - DNA, 615 bp, Zea mays
gtcgctgccgccgatggggtgtctcccggcgggcgtgatcctgttcggcggcggtaacgcgggctgcgtggagcgcctcaacaacgactccctcaccttcaaccggaagctcggcgtggccgcggacgccgtgaagcgcaggcaccccgacctcaagctcgtcgtcttcgacatctaccagccgctcctcgacctcgtccaaaaccccaccaacgccggattcttcgagtcccggcgggcgtgctgcggcacgggcacgatcgagacgtcggtgctgtgccaccagggggcgccggggacgtgcaccaacgccacgggctacgtcttctgggacggcttccaccccacggacgccgccaacaaggtgctcgccgacgcgctcctcctgcagggcctacagctcatcgcgtgagccacagccacgcaacggcctcccgccgcccttctacgtacctaccttgctgcttctgtcgttccgtcctgctactgtgtctcgtgtgcttgtctgtctgtctgtctgtccatgatctctcgtagctttgtgatgctttggaaacacttgggagtgctgtaagatttctggtctgtataattaccttcagcgtcttcccagcc

SEQ ID NO: 277690 - DNA, 533 bp, Zea mays
tcggaatcggtcgagctactgcagctgcaactacccgtggggtcccgtggaagagaagagagcatcgccggacccggggacggcgcgccgagaaggaacaaaagaagacggcggcggggcggagatggggagccctctgggcgggtggccgtcatacaacccgcacaacttcagccagttggtccctgccgacccctccgcgcagccctcgaatgtcacaccagccacttatgttgcgacccacaggacagatccgccacccaatcaagtgataaccacggaggccaggaacatcctgctgaggcacttgtaccagaaatccgaggagaagctgaggccaaagagagctgcgccggacaacctagctccggagaacaacaacaacaagaagcagcccaggggacctgtgggcgacgtcggtggccagtcgagcgcaagaagctgaagccacagctggtggccgtacactcctcccctgcctgcctgcttgtttctcatctctgggtgtcgtcatgcagaggcagaggcagatg

SEQ ID NO: 277691 - DNA, 487 bp, Zea mays
gttatgtacaatttgaagatgagagcagcatgtttgctgaacaaggtgagcccttgccaggagaggaaacagttcaagagatcaatggcaacgagaccatgcctcaaagcacgcaacctccagtagaggctccgccaacagcccttgcccaagctacaacaagttctaaggcggaagaagcgaacagtgatcatcagtcagattggcctatgccagatgccattggaagcatcggtgtcgtgccatctggttttggacatctgacagtgcaggttgatgaagatgaggactacgacaatgaggactagtcagggccatcctctcactgtatgcgctaacaggactgttctggtgttgtaaaatgtaaatatagcttgaagtagctgccgcagcttagctatgattgtctgttatgaggttatgtagttgccctgtgtaacttctgtaattgctttttagttgccttttctctccatccttgactgtc

SEQ ID NO: 277692 - DNA, 537 bp, Zea mays
cagccccagaggacgtgggaggggtcgaggcagagggcgaggtcggccaccaaccaagagaaaggaagttggttacgtacaatttgaagatgagagcagcatgtttgctgaacaaggtgaaaccttaccaggagagggaacagttccagagatcaacagcggcaacgagattacgcctcaaagcacgcaacctccgccaacagcccctgcgcaagcgacaaattctaaggtggaagaagcaagcaccgatcatcagtcgggttggcctatgccagatgccactggaagcatcggtgtcgggccatctggttttggacatctgacagtgcaggttgaagatgaggactacgacaatgaggattagtcagggtcatcttctcattgtatgcactaacaggactgttctggtgttgtaaaatgtaaatatagtttgaaatagttgccgcagtttacctgtgattgtctgtcgttttatgcggttatgtagtcctgtgtaactttcgttctccaataattgcttggtagttgcttttttac

SEQ ID NO: 277693 - DNA, 364 bp, Zea mays
gaccccgcgtccgggctagatcgcgagcgtccgcgcctgcttgccttctctgctcgatcgaccgccacgtcgtcggtgatcgccgggaccggggcgggcgtggcggttggctgctccgctcgtctctatgctggcggtggggttggtcgttggcccgtgtccgcaggtcgttgcaatcatgcaggcgatccatccaaaaagtacttgttgccttgtcggggttctcaggctgctgaccagcgtggtcgcgtagtgtgcatgcggttttttgaccttggctatttgcctattcggggtgtttgaggcatgaaactttatatatatagagagagagatttatgacgattaactgaccttgtacagt

SEQ ID NO: 277694 - DNA, 854 bp, Zea mays
ccctctccctctcgtttctctccctctctccgctcgccgcgcctccatcggtccactcagccatgtatagtaattacgggaatccttcggggatgcagatgcccccgcaaaactctcaacctgtccagtttgataatccattatacggtgcaagctcgggcctaatcagatctgggataggagtatatggggagaagtttttgggttctagttcagaattcatgcaaagcaacatcaatagatacttctccaacccgcagtattacttccatgtgaatgatcaatatgtccgtaacaagttgaaagttatactgttcccgttctttcacagggggcactggactcgaataagtgagccggtcggtggccgcttgtcctacaaacctccaatctatgacataaacgcaccagatctgtacatccctttcatggcatttggaagcttcatcatcctttcagggtttacattgggtttcatgggaaagtttactccagcagctataaatctgcagtttacaagggcgctcatcggctggggcttccagctcatggtcctgaaaggtctgctctactcgatgggtggtggcgaggtgccactgctcgacttggtagcgtacggtggttatttattcgccgggctatcgctcgccgtcgtcgcgaggctcatgtgggcgtactcgtactatgtgatgatgccgtggatgagcctgtgcatgggggtgttcctggtgaggacgatgaagagggtgctcttcacggagatgagaagcagcgagaggcactcgtcgcggcagcactacttccttctcttcatggcaatcgcacagttcccctgttcttctggctcggcagca

SEQ ID NO: 277695 - DNA, 466 bp, Zea mays
aataccccgcccgacccactcgtccgaacaccttcttttcttttcttttgtttttgtttttttttcttcttcttcttctggtgtttcaggtttagtaatctgctagtgagatggaagaactgaggtcagatcagacgtggtggtgactagccatgaaagtgaactttactgttactgtactgtgcgatcaactggtgggggtaattagctagctagctagctgctggggctatggttaatgcatgaactgctattagttaccaggtgtaagtgtaactctcgagtcctgctcttgttactgtttgtgtactgactgtgtcactccactactatgtaagaatcagagcagtaagtttactagtgtctctgctgtcaaacaaaggaagtgcaccatataatctacactttaattactcttgcctgtgtgccctgcagcgatcttaacgttcagttcgtccctgtcagt

SEQ ID NO: 277696 - DNA, 527 bp, Zea mays
cttcttatgaacaaaatttacgttttgttggtaaaatagctggtttggaaccaatcaattttattacatctgctacacctcacttgggctcaaggttgaataagcaacttcccttcctttttggtgtcccacttttggagaaaactgctgcaggaacagcacattttatagttggaagaactggtaaacatctattccttacagacaacgatgatgggaagcctcctcttctcctgcgaatggttgaagattgtgactgacgggaaattcatgtctgctttgcgctgtttcaagcgtcgtgttgcctatgctaatgtaacatatgatcatatagttggttggagaacatcatcgcttcgacgtcaacatgaattaccaaaactcaagctaacagcaaacgatgaaaagtatcctcatattattaatgtcgataaaggaaatctagaggatcatcggcaagagggatctgtagaagattcactggcagatagttatgaagaggtgatgatccgtggccttacacaagt

SEQ ID NO: 277697 - DNA, 336 bp, Zea mays
cacgggaacatcaagtcttccaacgttttgcttggttcagactttgaggcttgccttacagacaattgcctgtcgttcctcctggaatcatcagaagtcaaagacgatgctgcttacagagcaccagaaaacatgaaatccaacagaatgctaacgcccaaatcagacatatatgcttttggcgtcctcctccttgagctccttagcggaaagccaccgcttgagcactcagtcttggtcgcaagcaatcttcaaacctatgtccagtctgcgagagaggatgaaggagtggacagtgaccgcatcacaatgatcgtggacatagccacgagctgc

SEQ ID NO: 277698 - DNA, 453 bp, Zea mays
gtaacaaaggccagaaactttcaattcccattatctaaaaaataacatatatatttcgttatatgaaataaaacctgtaatatatactgaatggaagtcgacaaagctgttttccctgttttatcaacagtcacaacattaagatggtgcaggtacagcacatgatgtgtatattgtttcagtagcttgttagacgaattcctgttcctggtcatccggccgccgagaagcctcctcgccatctagcattctcctggtcatgttggccctctgaacgagccgcaccagcgcttgcaccacctcagacattggaggtctgaactctggctcaggctggacacacagagcaataacatccgcaaaacgggaaagggatttggcggggtaaggacccttgagcgccggatcaaccatctggtccaaggcgtcaatgtcatgcagctggcgagttgc

SEQ ID NO: 277699 - DNA, 796 bp, Zea mays
ggacgcgtgggcattcatcaaactggctatttttgataaggagcaggctgcgtgtagtggtcagagaagacgagctgctgacatcagtaattttgccagtgctgttattagagttagcagatcacagacaaaactaaacactgaaattgtaaaacatctgggtattatccatgagtacatggagactatggcttctgttcataatgcttttactgatcgttccaatgctttgcttcgtgtgctaaatctgtcagcagatctatattccttgcatacccgggctggaaaacttgaatctgtatcagcgagaggaatggatcaggagagatcaaggtatcaaaagatagaagaattgaaagaaacagtaagagccacggaagatgcaaaaacacgtgcacttaaagaattggaacttatcaaggaaaataacatgaatgaaattaaaagatttaacaaggaaaggcgccaagatttggtggagatgctaaaaggctttgtattggatcaggccacatactcggatcattttgctaccatatggacaaaggtagcagaagaaacaaaaggatatgcaaacagcagcagttgaagtaggatgtacatattcaggtgaatttgagctgttactgtgcagcgtgaatagctacactcattgagaatcatgcgactggcttatacacaaacaggaccacactcttcattcccgaaggatacatttctatggatttttctggggattggtatctccagttgtgtacctgaattttttcagaaaatatagcaataccattttccc

SEQ ID NO: 277700 - DNA, 525 bp, Zea mays
cccacgcgtccgcccacgcgtccgcgctttctttctcccgttcaccccaagccccaacctgcgagctgcgacaagttcgtctctctcgtggccacgactggccgccgcccccgcctccgtcccctcgcagattcccaggtcttcgccgctcccttcgccgccaaagagcacccactaggttaaatccgccagggggaaatctccatcaagtggctcgtgctaattatgcgatcttcatgggctgactcagttgcgaacgccgaggaatcggcgcccgcgactgctgctgctaacggctctgttgcaactcatagcacctcgcgccctacgcgcactcctacgtgcctcctcatctccgtggccgctcagctggtgctgctgttggagctcaagcaggctcagtagcaccagcacaaggtggaccactgccattggctgctgcacaaccttctggccagggcgctgttgttggtggcctcgctgggctggcattgtgaatggtggtggtggtggcagcgttggtgc

SEQ ID NO: 277701 - DNA, 360 bp, Zea mays
ttccccaagcccccaacctgcgagcggcgtcaagttcgtctctctcgtggccacgactggccgccgcccccgcctccgtcccctcgcagattcccaggttaaatccgccagggggaaatctccatcaagtggctcgtgctaattatgcgatcttcatgggctgactcagttgcgaacgccgaggaatcggcgcccgcgactgctgctgctaatggctctgttgcaactcatagcacctcgcgccctacgcgcagctcctacgtgcctccacatttttcgtggccggtcaactggtgctgctgttgaagctcaagcaggcttagtagcaccaagcacaagtgtggaccactgccattgggc

SEQ ID NO: 277702 - DNA, 574 bp, Zea mays
ccctttcgttcgcccacgcgtccgcccacgcgtccggagagaggtcggggccggggagcacacacccatcacccatggcctgactgacctccggactctccctgcttccgtccacgccgcgggccgcccagctgactgctcctgccctccgccatggcgtccgtcaagctcggctccaagcctgacgccttcaagcggcaaggccaggcatggttctgcacaacaggacttcctagcgatgtcaccgttgaggttggggatatgtctttccaccttcacaagttccctttactttcaaaaagcgcctttcttgaacggtcaattgaagaaaactctgaccaagaagaatgcatcatcaaactaaatgacattcctgggggtgccaagtcatttgagctagttgcaaggttctgctatggtgtgaaaatagagctttcacctgcaaatgctgtctacctacggtgtgcctcagagcatctagaaatgactgaagaagtagctgaggaaaacctgattttgtgaatatatatttgtgatgcttttgtgaatatataattgtggtgcttttgtgttt

SEQ ID NO: 277703 - DNA, 897 bp, Zea mays
ccgacccactcgtccggcgtttaattaacctttatacatgtagtttatattctccataacagtgtctgtttcagtgcagtttcctttactttcaaaaagtgcctttcttgaacggtcaattgaagaaaattctgaccaacaagaatgcatcatcaaactaaatgacattcctcgggatgccacgtcctttgagctagttgcaaggttctgctatggtgtgaaaatagagctttcacctgcaaatgttgtctacctacggtgtgcctcagagcatctagaaatgactgaagaagtagctgaggaaaacctgattgcacagtcagaaatgttcctcaaccaagtggttctccgtaactggaaagattccttggcagcattggaaacatgtgatgacctactcccccatgctgaagacctccagattgtgaacagatgcatcgagtcattggcatcaaaagctactagtaatccaaacctcttcggatggccgataagggaacatggcatgatgcaaagtcctggtggcagtgtactatggaatgggatcagcacgggtgcaaggcccagaaatttcaattcagactggtggtatggtgatgcttcatcattgagttttcccatgtataagaggttaatctccaccatggagtctcgaggcatccggcctgaaataattgctggttccttaacctactatgccaagaagtatcttccaggacttaggcgtcatagtcatagcatgggcacaatgcctcttactgctactctatctgaggttgaacaaaataatttacttgaggagatcgacaggcttttgcctcttcacaggggtatagcatcgacaaaagttctgcttgggctccttcgcactgccatgattctgaaagccagccccac

SEQ ID NO: 277704 - DNA, 428 bp, Zea mays
aagcatttaaacctgctcttaatattgctgaggtagacgaaatatttgatgtacccctggagatgttcctcaaggatgagaacagggcatcggaggagcgagaaaagatgggccagacattcacagttcattacttcacttatgagaacggaatccagaagtacttaatctggggtctgaccgcccgcatcttgatccatgctgcttcagttgtatacgagcgaccgccagactttacagagcgaagagcacatttcaaattgccaaagttcacaaaggactgctcttcaatgctagcaggacctgctaaacattagtgcacactgcctacgctgctatctcagctacatgctatttggattacaggatgttgcaccaacagagtttattgaatcgaagaggcgtccaaatcacttgatgtcatatga

SEQ ID NO: 277705 - DNA, 755 bp, Zea mays
ttgacgcgtgggtgctgatcaaacgctgccaggggagagagtcgttatggaaccaccgtcggttcctttcacacttgtggatacaacacttgctcactgctgaaggaaactggcccgcaacgacatcccagatggatatgtttgtcatccaggacatacaactgctgtcagagtgcctgcatgatcctgtggatgagtttgaggagtcgcgtgtccaagcagagctttcagcgctctacattatgtggataacaaagcacgtcccggatgtgaagggaaagctggaagagaggctgcattttgcctccatggggaggctgaaggacgtgctggcaggagcctgccggccagagaagaagaggttttggatgaatttgctcaacctggctgatcaatccagtgacgtacaataatacatgacctttcttgttgagtttgagccgtcaacatacatgacatggacgccaagctcttgcttcaggtcctgtctcccggatttctgccaagtttttgcttcagcccaagagcaggaaaccagataatgtagatgctaaaaaaaagctctttgggtattggaccagtgagtctattgcgtgaaaggttcaagttttgaagaggacagttgcttagactccaaggtattatctccactgaggccattggcatccaggacaaatctagaaagcactgttaaacctctaagagtttctgggattaccctgctgagagtttctggtatattcgggcttcttgag

SEQ ID NO: 277706 - DNA, 496 bp, Zea mays
cttcgtgttcggtgactccctcgtggacaacggcaacaacaactacctgatgacgacggcgcgcgccgacgcgccgccctacgggatcgtacttccccacgcacctgcccacggggcggttctccaacgggctcaacatccccgacatcatcagcgagcacctcggctcccagcccgcgctgccgtacctgagccccgacctccgcggcgcccagctcctggtcggcgccaacttcgcgtccgccggcgtcggcatcctcaacgacaccggcatacagttcgtgaacatcatcaggatcggacagcagctgcgcaacttccaggactaccagcagaggctggccgcgttcgtcggcgacgacgcggcgcggcaggccgtcagcgacgcgctcgtcctcatcacgctcggcggcaacgacttcgtcaacaactactacctggtgcccttctccgtccgctctcgccagtttgccatccaggactacgtcccctacct

SEQ ID NO: 277707 - DNA, 556 bp, Zea mays
gcttgttcctcgatggtatgaacattggacttcaaatttggtctatgatggcgatatgatcgttcttcaaggccaggagaagattttcctagctgcaaccaaggagtcttctacggatattaatcagcagtacacaaagatcacattcacgcccacacaagctgatcgatttgttttagcattccgcacgtggctaaggaaatttggcaatagccagccggagtggtttggaaatcctacacaagaagcattgccttccaccgtcctttcaaagcgcgagatgctagacagatacgagcagcacacgttgaaatgctcgtcctgcaaaggagcatataatgcattccagaatctgcagaaggtattcatgggagcgacagtagtttgctgtgctgccgctggtattcctccagatgttcagctcaggttatcgatcggtgcggctgctttggtcagtgccgctgtagcatacgcattccatgagctccagaagaattttgtattcgtggattacgtgcatgctgacattgattgaaagattcgtgaggatctgttg

SEQ ID NO: 277708 - DNA, 664 bp, Zea mays
  unsure (1)..(664): unsure at all n locations
aatcncgggatcgacgnctcccgcacctcctggcgcctttttcgggctccgcatccggcccccccccgtccccaaccccattccgcagcaggcgaccagcacaacatcccgaaacccccgccgccccccgcacgcacaaggttattatgtctgggatggcatctgatgattcacctgcccaagtgaatgttgaaggagatgtttcagagaaaaaagttgaacttcaagaccagaatgaagtgggtgggatgccctcacgacaagaggaggaggcagcaattaagaaaaagtatggaggaatattgcccagaaagactccgcttatatctaaggatcatgaacgtgcttactttgattctgctgattgggctctaggaaagcaaggtggtgttcccaacaagcctaaaggtcctcttgaggcactccgacccaagcttcagcctacgcaacagaatgctcgcgcccgccgaacttcatatgcgtctgcggacagtgacgagactttgaacctgtcccccgaggatctggtcccgcaaggagaacccagccagcagggagaaccagtcgaggacaagaacaggaataagcacacaagatgccattttccgccgtcgcacaaaaaaaaaaaaacttcttttgccttggtaataagcgtgtggattcg

SEQ ID NO: 277709 - DNA, 855 bp, Zea mays
ttatattgcccagaaagactccacttatatctaaggatcatgaacgtgcttactttgattctgctgattgggctctaggaaagcaaggtggtgttcccaacaagcctaaaggtcctcttgaggcactccgacccaagcttcagcctacgcaacagaatgcccgcgcccgccgaacttcatatgcgtctgcggacagtgacgacactttgaatctgtcccccgaggatctggtcccgcaaggagaacccagccagcagggagaaccagtcgaggacaagaacaaggaataaacacatgcccagcatagctactgtactgtaccccttttcatacacaagatgccattttccgccgtcgcacaaaaaaaaaaacttcttttgccttggtaataagcgtgttgattcggttccggcccaacggtcccggtgaggctgaggttgagacacgtgcagcttgaactgcatgtgagatgtggtatccgctgcactgggctgttgggggtccttgggatgcatgaacaaataaacaatgatgcttgcgatgtttacattgttgtacctggacctgtgttacctctatgcaaacacatgcaaatccgatggtccgagactcgaaactctcccgttgagctgaaggagttgctgtactaataataatgaagatttttttttttgttctgatgttgcctatagatgcatcgcaatgctttcttttatttgcaccctgtgcatgttattattattcgcctgcttggctgtcggggtactggttggtgcgtttttctctgtaaatgagttctgcgcccctatgctggttaacaactagtgtattacgcgcgcccttgctcgcgtactg

SEQ ID NO: 277710 - DNA, 770 bp, Zea mays
tgcaactatggaaggcggtgaaattctgggtataatgcaccaaagaattttgcgccagataacacagggaagttactctggcaagtatttggcatccaagctgcacagctatgcctctttggtatccaagaacatgaggatatcatgtgggatgcatttcagagttcaggaaaggggaagatctcagttctatatccaaacaagactaccacccccaagtcagttaaagaccttgaatttgatggtttctccttgactactgaccttcgtgagaatttgcaggacggacctttcaattttgttttgcttgatggcacctggagcaattctgctgcactgtacagaaggttgaaggagagatggactgcagtatggggagatgaagctctaccttgtattgcactatctacacttagtgcctcagtgatgcataaactacgaccgcagcctgcctgggatcgtacctgcactgcagcagctgcagctggcctcctctgggagttgagctcgcggcctgagctcatctcatttgggttggaaaagcaagccgaggcggtggagtgctcgttagacaacttgctggatgctctcactgccaggcggcttcgtctgggccgatcgataactcggaaacagagacatagtaggaactgcatatagggaaagaagaaactcacagtaacagaggagcatggtgtgccatcaagtggaaggctgatttcattcttttttgtagaactcaggagctgatcattgtcaacaagttttct

SEQ ID NO: 277711 - DNA, 592 bp, Zea mays
ctctgtgttggtgtttagatctatagattaggtatttctatgggcagtgcatcaggactcgaatgtagcatagcatcatcggtttttgtgtttcattaattctcatttcaagatggcatctgctggcctaaagccaggggtgcctgttattctacgggagctggagccatcctcagagatgttcaagcaaggagcgtcccttcgagtcacaggaagtctccagtcattcgatgtggagtccgcgactgccaccattcaagactgcagcgtaagtctgaaggttgacacccagcatctgagggatgtcagtttccgcacgaactcggtgtaccaattcattggtgaacttcagatccgcgaagttgatgatgccattctactcgcgcgcatcggaaggaacgtcgatggcctcgacatgaacctttaccagcaggctctactcatccgacggcagcacgaagcaaagctgctgagctccaggagagcatgatctgcttgctatcttggagcaggaggcgcatggtggttgtagttattaggtttctttgtttctcaacagtgcaattgcatatgtaaacgtgaagagaactgg

SEQ ID NO: 277712 - DNA, 562 bp, Zea mays
  unsure (1)..(562): unsure at all n locations
ggggtacaggatgatagggctctcttacctagatcccccataagttcagatgacggttgacattgcactggataacttggaggcagacactttcncgtcaccactgcagcgttgtccgagccttggctctggaacaaatagatccctcccctggctattggtttttactgtcgtgacaaagacgactttgatgatttctgttctcgggcctctgagttggcgggtagaaggccaatggcgcgccactctttactgttgtgcagtcaatcgagccatcaaaacaaatgtataaacaggatgatggactgggttgttctggcagtagcatggccaatgacgacgaccttgatggctctggtgaagcagaagagtggcagatcctttagacgaggctaagacatgttgggctgaagaaaaaaaaaacttgcattgaaaatgttgtctgaatgccctcgtctgcgtgtgaatagaggggattatttgtgtgatctcggggtggaaatgttcagaacatacactcgtagtcgtggatgataataattaaatgtatttattattccat

SEQ ID NO: 277713 - DNA, 514 bp, Zea mays
gaactaagagcgttttctaggctttaatttattctaaaaatgaataaaagaaacaagaagcattatgattttgagttagcaaaaaaaaagatagcagcaaccgactagatcaaaatttgaaaaactcaaatatagattcacggggatagatatgcaataagattcatgctatgttctgttagttgaatggttgaacatgcatgtatctttcttgaattctgtctgcagcaacatttgctgccgtcgtccttggatgtgtcgcaattgttttgcttcagactctaaacaacaggaaaagattcaacagaaatggaggtaaactactgaatgcccagggcataaccacctacaccaaaagggagctgaagaagataactaatggctacagcaaacgccttggacgagggcactttggcaatgtttacgagggcaccatcgtcgacggcagaaaggtcgccgtcaaatgtcctttgcggacaagggtgtcgtcgcaccgctgccattggaagaattt

SEQ ID NO: 277714 - DNA, 933 bp, Zea mays
ttcgtgggtttccatccaccgcccgagcccagcgtcctgtgcaagcctcagctctctccctcaaccgccgcctgctcctccgtcgcgattccgacacacccgcctgtgttagccccggagcaggccgcgggcactggaggtgggaggcggcggctggggtcagggggttgtggctctgcgccgccttcctctccgccgacgagcaggcgcgcctcctcaacgccatccagcgagaaggatggtttattaatgcagacaaccaagcgatgagattcggtgacctcccttcgtgggtagtcgaactttctgcacttatccgcgaagctatctgcgtcggcgacgccggtgtcggtcttggtgcggaggcgacgaacgaggacgaggatgcgtgccctctgccatcagacttgctgtggcgggagccattttttgattagatgatcgcgaacagatacagactagggcatctgtgctcacgtcgatctgatgcgctttgacgatgggatcgcaatcgtctcgctcgagtcagcctgtgtgatgcgcttcagtcgagcagaaccagcctctgataccccgaagcaagggggcagtgccagtgaatctactgcagaggtccccgttctgctgaacccgggctcccttgcgctcatgtctggcgatacatgttaaaaagtcgacttagtggtggtcgtccgacaacagagggtcatgttcgctattatgttgttgttcatgttagtcgtctcagtgttatcagtcttgtcgtgttacaaaataaacatgtcgtacgcataattttcccttatgaacaattttgcaattattcgagttgaacatgtatttgaataatcagagttgtatgtttgtgaacaagtcaaactgtggactttgtgtcactaatgttacatgaatgtgtaccccatactgtgttgt

SEQ ID NO: 277715 - DNA, 707 bp, Zea mays
gaaggcgtaacgagttgaatgaatcttgctgtaccgctctgtgctgcgagactggaagagactccacggagacaccacatggccgccgccggcgacggcggtgagtcccactaccgggaggcgctccgcgaggccttcggtgactcgtcgagcagcgattccgacacacccgccggtgtcagccccggagcaggccgcgggcactggaggtgggaggcggtggctggggtcagggggctgtggctctgcgccgccttcctctccgccgacgagcaggcgcgcctcctcaacgccatccagcgagaaggatggtttattaatgcagacaaccaagcgatgagattcggcgacctcccttcgtgggcagtcgaactttctgcacttatccgcgaagctatctgcgtcggcgacaccagtgtcggtcttggtgcggaggcgacgaacgaggacgaggatgcgtgccctctgccatcagacttgttggggcgggagccattttttgatcagatgatcgcgaacagatacagactaggtgaggtgcggaactgtctcagattcacaaggaaaacgtatgtatcgttcagaaaagggatgcattcattcctttttgcgctcgtaacatggatcacgctcctgctgtcgagtgtagggcatctgtgctcacgtcgatctgatgcgctttgacgatgggatcgcaatcgtctcgc

SEQ ID NO: 277716 - DNA, 916 bp, Zea mays
aaagcggtaagccgcaggtaacgggaccggaaaacccggtcgacccagcgcccccataagacaagcaaaaggcagtccaagcaagtatcaccgagactgccactaggcaactacaacgtcgctacggtcacgtatgagctcaccgtcctgcgcaacagggggccaaggagaatgcagtgcaccatgcactcgataccagccgagtgcatccaggagggcgggaaggccccaacccctaccggcaccgtccagtcgcttgacgagccagtgcccaccttacctagtaccaccaaggggaaggaagtggctgtacaattttcttcgacgagcctcagcgccgatctgtctggaccggtttctgggaacgaagcgcctctagttctgaagaacaaagccccgcgctggcacgagcagctgcagtgctggtgcctcaacttccgggggcgcgtcaccgtcgcgtctgtgaagaacttccagctcgtcgcctctgttgatccttccctaaacatccccgcagcggagcaggagaaggtgatcctccagtttgggaagataggtaaggatatattcaccatggactaccggtacccactctcggcgttccaggcctttgcgatctgcctgaccagcttcgacactaaaccggcctgcgaatgattgacggtagtttaaaatcccgggtggtggagtcttgtgtacgtccgtgttcttccagggcgatgtaaattctttatcttgccatgctgggcctctgctgcccaggcgaaatggtagcttgtgaggtggagatgagcgatagcatctgtaccataggaagagatttgagcgaccttgtttacccaactgttatatgtattattgctgggatgtttggctgtgaaatatcactgccgtatcgataatggacgttgtgacc

SEQ ID NO: 277717 - DNA, 944 bp, Zea mays
tgcgttagctgaaggagatgagggacggtatcgggagcatgtcgagacgcggcggtagcggctccgacgggcgcgccggccacggccgctcggggtcgcggtattcttggcccagcctgtgggcggagcagcaacagccgcatcggcagggccagggcctgggtccgggcccggaggggccgcatcatcagcatcaggggcggtgggcgaacttgcctccggaactgctgctggatgtgatacagagggtggagtccagcgaggcgacgtggccggcgcggcgccaggtcgtggcatgcgccgccatttgccggtcgtggcgcgaggtcaccaaggaggtggtgaagacgctcgaggagcgcggcaggattaccttccccatattccttaagcagccggggcctcgtgaaatgccggtccagtgttttgtgaggagagagagggcaacatccacatatctactctacctagggctcagcccatctatgaatgtggagaaagacaagttatagcttgctgcccggaaggtcaggcgtgccacgaggacttattttgtgatatcactggtctctgatgatttctctcactctagtagcacctacgttggcaaactgaagccaaacttcctcggcacaaagttcacaatcttcgacagccagcctcctcctgacgctgtagcgctaccaaacaataggacaagcaaaaggcagtccaagcaagtatcaccgagactgccactaggcaactacaacgtcgccacggtcacgtatgagctcaccgtcctgcgcaacagggggccaaggagaatgcagtgcaccatgcactcgataccagccgagtgcatccaggagggcgggaaggcccctacccctaccggcgccgtccagccgcttgacgagccagtgtccaccttacctagtgccaaagggaaggaagtggctgta

SEQ ID NO: 277718 - DNA, 558 bp, Zea mays
tccatccccaagagagactgctgggctgtctgcctctggctttgtcactgcaattaccgattctctaaatcggacttatggcgatcctcacaaaagcttaaagaatcataccaatgactatgtaaatgctatattggttccagaaggtcgccaagttcctttagatattgaaaatttggcagctcagggaatttttcatgtggtaaccgtgtagtctattcatgaccctaaagtcggcgtcatatttgatgcacggtcattgatccaagccctaaccattctcatatctgaacatatggatatgtgtgtatcaaaagttcagaacgtggtcatgtaactgaaaatgtaaaagttgtaagctgatctttcaagtacaaaaatgaatgtaaagtccctcttaacaattattgttttactaatcgatccatagtgcgaatactcatgtttttatttcagctagcactagtgttgcaattctgcctgacttgacatgattaatgaaaaatgagacatgtatttttcaatttctgtaaaaaaaaaaaaaaagggcggccgccg

SEQ ID NO: 277719 - DNA, 536 bp, Zea mays
gtttgggaaatgcatttaagcctttgattcgtacaagaacggttgtcagtaccttcttggtcagtttgggcctccgtttgctacgctaaggcttgatttctctcccgtcaagttgactgtgccttcaccgtctcttgcttcaaagcctccactccgagatattaggaagaaccttgaggatatgatttcagcccgtcgttcggctctggcaacctcatcagatgggcagctgaatcctgttccagataagcttctgggggagatgcagggccttttggcaaacgttgacaggatgcttactaggccgcctgagaatgctccttagctctgccaatctgaaggattatggctgtaacctattggtagttagacaactttggtggttctgttagttgtagcttttgcatctaactttatgatgaactacatcgtttacccagttcagcagctgcgatttggaattcctgtgaatggtaggggcttattgtgtcactgcttcgtgtactatatatgccaataaggtcgcagcttctttt

SEQ ID NO: 277720 - DNA, 1260 bp, Zea mays
  unsure (1)..(1260): unsure at all n locations
gttacgtctgaaagtactagaagatggactaagggggccaccaagtggctctattcgtccacctactgaaggaaagagctttagcaatgtcccttcccgccggttgtcactcggtggagctgataatatgtcaagattgtctcctaatgggttattgtcaaggcgatctccttcttttaattcaagatcatctcttacgtcaaacagcagcttggtcctgaagcatgctaaaggcacttcaaagtcatttgatggcggaactaggtcactagataggacaaaggtacatggaaatggagctcatttactcaacagatctacagatgctgttagagataaggagactagtgatagttggaagggcgatatggatgagagaactaatgagagcgcagacagcaacacagatgggaaaagtaatgaaaccatgaataataactcagctgagacagtttctggtttcctatatgatatgctgcaaaaagaggtaatttctttgagaaagacatgccatgagaaggatcagattctaaaagataaagatgatgctattgagatgttagcaaagaaagtagacaccttaactaaagcaatggaagtggaagctaaaaaggtcagacgggaggttgcatccatggagaaagaagttgcagcaatgcgtgccagtaaagaacaagaaatcagagccaagcggcttggtacgaaaggctctggtagttcacaactgcttcctggaagaaacgcaccacgaagtgggtccatgcgcaacttccaatgatggcagcactaacaccaagcagcattcttggataggtcctctgttccaccatttgttctgttcctatcctattaattttgtggctaaaatcgtagcacagtgagatgacccaacaatacctagatctgggtaagagtaggctcggatctgatgagaccattgtgggagtgaagctgagcctgttgtctaaccttgtggcgcgccctcttgtttattttagtccaggcagtgcacctgatgcttgtataggccagggatcaccgcatggccaatctgtaatgtatagcctgagtgctcagttacatagacacccgttgcccaggttgtgaatactgtttcctcgcacatgcttctttgcgctgctctatttgccctgtgtttgggttgggaatttttaacatggcttctagcctgtctgagttctgttgattataaatagtgacccatgttcttctgccaaaaaaaagaaaaaaaaaaaanaa

SEQ ID NO: 277721 - DNA, 852 bp, Zea mays
gtactttccattttcatctcgtttcgccgccttttacttatcccatcttccctcgactgcgctctctctcccccttctctcgcgcggcaactgggccatcgccgccacccctacccaggtcttcgtcggtcgcttcgccagccgccaggtcttcgtcggcccatcccccggtcttcgtccttcaatcctccggcgacgagcacccaccagaggctgggaactccaaagaggaacagggtccatggctggaggcgcaggaaatggttcgaacgaggcggtgcaggcaaaggggagtgggggtgatagctccgccgccaagccgctgcccccttgctgcgtcaaggcgagagcggcggcgcccgagtctgaggccaagtgccatgccaccgtggtttcgggatggttcaccgagccacgatcacactgcggtaaagccagcaaggttcagtattacaataacccaatgtggccaggagaggcccattccttgaaagtggagaacatattgtaccaggggaaatcaccataccaggaagtcctggtctttgagtcgtcaacctatgggaaagtccttgtgcttgatggtattgttcaattgactgataaggatgaatgtgcgtaccaggaaatgattactcacctcccactctgttcaattccatcccctaaaaaggttttggttattggtggtggtgatggagggtgacttcgagagatttccagacacagttcagtggagtctattgacctatgtgaaattgttcatcaccttcttcattttcgcaaggaattcttcccacatttgtctgttgaatttgaagaacctcgtgttcaacttcattgttggtgacc

SEQ ID NO: 277722 - DNA, 435 bp, Zea mays
tcagcctgcccgccaggctcggccgcgccggcgtccagggcgtcgccgagatggagctcaccgaggaggaggccaaacgtctgcgccgctccgccaagaccatctgggagaactgccagctcctcggcctctgatgatcacatcaccgtctctcttcattaattaattattgcatcaatttccacaacctagcagcagcatccggtacccgtgttcaataaaaacaaaccgctacaatgtgtgctttctagctgcattaagctgcttactacgagtatttgggctgtggctttctttttcatgtatctcaccaaatcgttattgttgtgagagctatactacacggtggtatcaagagtatcacaatgcccaacaggcgatggattgagctttcctaattttttcatgataaattaagttctactccctccgtcc

SEQ ID NO: 277723 - DNA, 481 bp, Zea mays
ctgagcaatgagcttatatgatgtagatgtgcctatcagatgcgagtatgtggctgtattgtcgacccctgcagtttgcgtagaggagaagctgaaggagctgcaaaacaaactggacgccatgtctttgaagcagcccgggcatgacgaactttaaaaactttagaatattccagcgtgaacataaagaagatgtcaccaggaggcatagctctgacagttacatccataacatgataggcatggaagtcaatgaggtatatggacagaaacgggccaagcgcgagaaatgagaatgtagagtttaggtcgcctaccaggctatattagctcgcatagaacattttttttagctgaaatttgatgttgcaattttccagactcatctgatggaatatatagtaagaaacagtaccccttgaatcagcatatactttacccagggtttttacattaaactatgcccagaacggtcatttgg

SEQ ID NO: 277724 - DNA, 421 bp, Zea mays
  unsure (1)..(421): unsure at all n locations
cacatcactaaatctgagctatgctactgtacgaggccctgaactgattaaattcattagcagatgcaaaaatttgcaactcttatgggtgatggacttgattgaagaccatggtcttgctgttgtggcatcgtcttgtaacaaactgcaggagttgcgggttttcccttctgctcctttcgaagcagctgagcaggtctctttgactgaaagaggtcttgttgatgtatctgccagttgcccaatgctggagtcagtcctctacttttgcagacggatgaccaacgaggcccttattaccatcgcgaagaaccggcccaacttcacttgcttccgcctatgcatcattgagcctcgcacaccagattacattacacaccagcctcttgatgcangttttagtgccattgtggaatcatgc

SEQ ID NO: 277725 - DNA, 356 bp, Zea mays
agaagaaccccccaagcaagggttacgctctgcgtgtggaaacaaacgcccgtggatcaccgccggctcgacgcaggaggaggaaggccacgcgccacggcacaggccggcagggcagggcagagagcccatccaaccggctgctgcgtctttttaccttcgtttgttgacgaaaccgaatggcctccctcctcctgatctccgaaaaatgaaaacgaaggggttggtttgtgcgtgagtttttgcacggttgcacgagtgaaatggtgtgcgtgctgatccccgtgtaaaccctgtcgatacggtatgaaacaagcgagaggcctaaacaagtccctctcgaatttctcgtcaag

SEQ ID NO: 277726 - DNA, 870 bp, Zea mays
cccacgcgtccgcgctcgcgcgctttcccgcctcctcttcctcgcgctcctcgcggggctcgccttcctcctctacccgtccgccccggccgcccgcgtcgccgacctccgtgtcgacagcttccgcgcgcagccgcccgtcctcggcctcggcctcgcgctgcggctccgcgtcagcaaccccggcttcgtcctcccgctccgctaccgcgcggtctccgccgccgtctcctaccgcggacacctgctcggggccgccaaagcgtggcccgggtccggcgagcttgcggccagggatgaggtctatgcggatgctgaggtgtgggtggacgccgggaaggtgctggatgacgtgatcgagctcatcggggacgtggccgcggggtcagtgccgcttgagatcgtatctgaggtagtcggctcgatcaaggtgttccgtttccacattcctgtgaaggggctcatatcgtgctcggtaagtatcagcccagtgactcagggaatcataagccaggattgctactaagcgcgagtgcgggaggctcccgattcccgaggatattttgaacctgcagagcctgctcgatggaactgaagtacttactatctgtatataatctggatatggtgttgtgttatgtgtaggctggaataatgtagtaatgagtaacggatagcatgttgttggaccacaggggtatatgttattttgcagtacgtatcagaactgcctatgtctattttgtagctggtgtgatgccaccttagcatagctatgttctctaatatttgtcgtccgctagtttatttttgaactaaatcgcaacaaataaaatagaacgtgggagtagtaagttaaaaaaataaaaa

SEQ ID NO: 277727 - DNA, 658 bp, Zea mays
gcggcagaatgcagtttggtctttttcttaagggtgctggactaaagttggaagatgctcttgcgttttggagggcggaattttctcaaaagattggttctgagcggtttgacaaggaatatgcctatgccatcagacataattatggaaaagaaggaaaacggacagattacactccatattcatgtcaaaagatcatttctgcaacacctggcgttggagatcaccatggatgtccgtttcgacattttggtgaagaaaatttgcgggcagcactcaacaaaatgggcgttggtgggcatgcattggaagagataatagataaagtgaagaacaggcattaccagctagcttgcacattaacatttgagaccacacacggtgtctcctgtgattctggaatcaaccatccaaacctatatttcagtgaaagccagaaagttctgcgggccaaaaaccagaaaatggagagccaatcagcaacctaaattgtattgcagctggagaaactatgcatcttcaaaaatcttaccagcaggtaagcactgaagcaatattcatccttgaagccaattatgttatcattactgattgttgaccattggcgtctacctggaatattgttgcttcctgctgttaccaaattccagctgctggc

SEQ ID NO: 277728 - DNA, 561 bp, Zea mays
tttacgcgtccgcccacgcgtccgcccacgcgtccgcccacgcgtccgcccacgcgtccgcttcccttcacgcggcaagcggcggccggccttccgccgccatggccaccaccaccgcgcccgtcctcctcgtcttcctcgttgccattgccacgtccgtcgccccctcattccccatcctgacgatggcggcggacgcggacaacggcaccacccacctgagcttcttcatgcacgacatcacgtcgggcgccagcccgaccgcggtgaaggtgatcaaggggcccggcgcggggtccaccccgacggcgccggcgctgggcatgacgttcggcgacaccatggtgatcgacgacccgctgacggaggaggcgtcgcccgcgtccgccgcgctgggccgcatgcagggcttctacatgctggcgtcccagaccggggcggcgcttatggtgtgcgccaacctgctgctcacgtcgggggcccacaacgggagcacgctcgccgtgctgggccgcgacgacaccggccaggacgtgccggagatccccgtcgtcggcggca

SEQ ID NO: 277729 - DNA, 487 bp, Zea mays
cttgactgaaaagttaattgcatctgaatcttcccttaaaagtttggagacttctctcaattctgtatcaagggaaaaggaagatttgggaatgcaacttactgatgcccttttggacatggaatctgaaagatcaatttggacagcaaaggagaaagaatatgtagaagctaatcatagattgaacatctgccttgatgagaaccgcaaactttcagaagatttgatgaaggtgatgcaagagctagggtgttgtagagaacagtgcaaaacaatggaggataaactggtgctttccatgaagagtgacatgaatgagaaagtaatggaatgcagcgaggcttgtaaagcatccaaccaaattgtggagaaaggaggaaccattcctggtgctgtgcgtgaaaatgagctcgacaaacaactatcgttgattactgaagagcgcaattgtttactctttgagacacaacagatgagatccatggtc

SEQ ID NO: 277730 - DNA, 172 bp, Zea mays
ctttgaatgactggttcatcaacatgtgtctgtgtagtacgttaggtgttcgttgtatctgggtatgtgggttgctgtaacactgctaaactaagttactcttgtgcttgctaaggattaagttctgtatttgctgctataaaaggtgcatactttgaatgactggttcatc

SEQ ID NO: 277731 - DNA, 714 bp, Zea mays
gcaattaaatctacccttcgatattcatttcgttatatatagcatgcatgtgtgtgcttactatggtcattaatccatgcattgttcctggtgacagttgttaagcacaatttctgaagaaatcatggtaggggattaaattttctcatctactgcactcagcgaatgcccatatatatgtgtcgtcgcgacgtcgccaggttgagggaatttatccccctaattaagaagatgaactgcctaataatattgcacattgtgcgacgacgatgcagacatgaatgtctctgagcagtttgaaacagagaggcgagagcaacatttccacacgtactaacaagcgacacttaccagtgttctataaaaaaggataacagtgctggcaagtttgcagggcccggagcctcatctggtgctatttgcagcagttcctggctggctggccggactttgtaaagaaccgcctgagaactatggcggccagttccctgcacagttgccatgcattcttctcactcatgctttctgcgtgcttcaaattagggtcacgcactcacggacctgcggcggccactccttttcatccccttcttcccatggatggttggttggtttcagtgcgtggctacctgcgacttgccaacaatgaagagaaagtcagaagacttcacacacaagagtctctccgggaaagagagaaagggatggcgtttg

SEQ ID NO: 277732 - DNA, 726 bp, Zea mays
cctaacgcttggtgccagccgccgcgctctcgctcgctctaacgccgccgcgctctcgctcgctctacccccgccgccgtctgccgaggccttcgccggttactagcaccgccccagctccttctcccttttccggcggaggtgaacaccgccaccactagcgcgccacgatgaggccgatcctgatgaagggccacgagcgcccgctgacgttcctgcgctacaaccgcgacggggacctcctgttctactgcgctaaggaccacacccccacggtctggtacgccgacaacggcgatcgcctcggcacctaccgcggccacaacggcgccgtctggacctgcgacgtctcccgcgactcggcgcgcctcattaccggatccgccgaccagaccgcagagctatgggaggtcagcacggggaaggagctcttcagcttccgcttcgacgcgcccgccaggtccgtcgagttcgccatcggggacgcgctcgccgtcgtcaccaccgacaacttcatggaccacgtccccaccgtccaggtcaagcgcatcgccgaggacatcgacgaccagacggaggagtctgcactcgtcatcaccggcatcaagggaaggatcaacagggccgtttgggggccgctcaacaggaccatcatcactgccggagaggatgccaccggtcgcatttgggattcagagactggacaacttctgaaagagtctgaca

SEQ ID NO: 277733 - DNA, 382 bp, Zea mays
  unsure (1)..(382): unsure at all n locations
gctagggttttccatcaccgccgccgccgtttcatccaaacccaaatcaagccaccaccctctcctcctcctcagcggcgagcaccaccagcaacagcgagacacgatgaggccgatcttgatgaagggccacgagcgcccgctcacgttcctgcgctacaaccgcgacggggacctcctcttctcctgcgccaaggaccacacccccacggtctggtacgccgacaacggcgaccgcctcggcacctaccgcggccacaacggcgctgtctggacctgcgacgtctcccgcgactcggcgcgtctcatcaccggatccgccgaccagaccgccaagctctgggatgtcagcacggngaaggagctcttcagcttccgcttc

SEQ ID NO: 277734 - DNA, 430 bp, Zea mays
tcgtctcgcacatgttttaacaaagggtgactaattccacttatagaatttcgtaaaattaggagaaacataaaaccgaaaagagtgaaacatgaactagtaacgctggtaggatgacaacgcgccgttgtgtttcggcttgggcgacgagagtttgtagccaatggtctgatgtggttcgtgggctttgtgtaggtgcacagttttacgtatatgttctggtcgtgtaatctatatgtttatataaacctgtaggggtgttgatgaccatcgaaagtgtcgtaaatattcagtagtatatgtagcttagggcttaagcggttgtgtttataaggtcattgccgttgtcgatgggaagtattatcatgttattttcaggactcaggagtataaaatgaaataaaatgtgaattcatctgaaaaaaaataa

SEQ ID NO: 277735 - DNA, 719 bp, Zea mays
ctctagaaccttccgagaatccgagttccttctgcgtcccttcacccttctcgttgcgctcaccacaggcaattcgaccgttcacagagaattgaatcatggaaggagggggtagcaacacgcccttctaccgcggcaacagcaccgcactcgccaccaacccttctgctgctgctgctgctgctgctgcgaatggggcacagaaaggggacagggaggctgccatcgatgccgagatagtgagggttaacgacctaccagctcatagttcctacgccatacaccgcatgaaggtgctaaacaaacttcgtcatctgctgtccatcaagaggactacatctcaagatgaggagctcgaacttctcttcgcaagcctttcaatctaaagtgtatccttgataagccagtattttaaccctgctaggggagcccactcttctgcctatctctactgttatgtcgttacctctcatagcatgcttccttatagtttcgaagtgcaaggagatcccgttacttgtctgtatcataactcataaattgttcgaaactttgattgaggatgtggcgtgctctgctcctctaaacctggacgatgtggaatggtgggaaaaccccccctactattgtgttgtttgtgaatgtaccgttgtaaccacaagtgaacttgctgtctcggacaacaattattagctaaatacccatggtactgtttgttg

SEQ ID NO: 277736 - DNA, 601 bp, Zea mays
  unsure (1)..(601): unsure at all n locations
gaattctccgggtccgactccacgccgtcncgagccagggcatggttttggcgaagccaaaagcccactgagcacatggaatgaggatgcgtgccgcggtccggcatcgggcgatctgcgcccgagcgtgctgtgagtggtgcctgcatcctgctcactgctaactggtnngggcgtctgcgccgggcgcccgtgtaccataggtaggcgaacctggaacgcctggggccgtgccgtcgccgtccaaagcccgacgtctaccaagcgctgggccaagtccatccacttcgcgctcggcgactccatctgggtcctgtacccgccgagccaggactcggtgctgcagctggcgccggcggccttcgcgtcctgcgacctgtcgcgccccgtggccaggctcgccgacggcaactccttattcaacctcaccgcgcccggccgcgcctactacgccagcggcgcgccgggccactgtcgcaagggccagaagctctgggtcgatgtgcccttgcccaacgggacctaccttcagccctacgtcaccgacctcgacgcgctcgcgcacaccctcgtcgtcgacccgaacgacgggttcgcgtcc

SEQ ID NO: 277737 - DNA, 734 bp, Zea mays
tgtctcatctagtggttcggcctttccatctgccgttcgcccagcgtgttctccctctagtgcggcaactgggcgaccgccgccgccgctctactccaggtgcccaggcgttcgtccgtaccttctcaggccttcatcgcgtccttcgccggcgacgatcaccgacaaggatggaaagaacaattaattccttgatgtacaaaggatctattcctgatgcaattaatcaatcaagaagggagaagaagctctttgtagtctacatatcaggtgaagatgaggcttccagtagtttggaacagtcatcactgattgatgaaaacgtggttgaagtgatcggtagatgttgcatcttattgcatctcaagcaaggcaatgttgatgcatcacagttttcagctatctatccccagaagtctgtaccaagtatatcagtgattggactgaatggagttctgctgtggaatcatgatggatatatcaactctgaaaatctgaaagaaagcattgagaaagcgtgggctgctcttcatctacaggagacagcagcgaccttgttgacagcatcacttgctacaagaaattctgaacctgtgaattctgctactactgttttgccagctcaaggcggctcttctactgtagacaatccttctgatttatccagtcaatcaccagatgtttctggtgccagtgaagttgctcattcaactgatctggtatcacaaattcct

SEQ ID NO: 277738 - DNA, 479 bp, Zea mays
cttattcttgacaatgagaatactcatatgagtaacccggctcgtcatggtgacagggtctacttgacatcctgtgaagtgaagtatatgcagcaaggagctgaaggagtggtagaagtcggaagaagcttctgtatctggacaatgggccaacaaatctatagatcatccacatatgcctgcttgaatacacaatagcctgacttagggcatcccgttctgctaagggaagccattctgcaaaaataattccatgtaatgtagtaatgtacaagtagaacacttctttcctttgaggtcacaacgaagctaacttaatcctctcccccccttgtgtcaggacaaaaaacgtgcaaataggctttgtagttgtagttcgtttttgctaacatgtatacggttgaccattatttttggagaagtatacatcaaagtttcattgtgaaagttatctcatgctactaaaatgtgttaagaaa

SEQ ID NO: 277739 - DNA, 444 bp, Zea mays
cccacgcgtccgcccacgcgtccgcgcttggcttgataaccaagggatcgtacaaagctcgccgctgatggagctaggtgctcccgtccatagttttcacaagatgggctgccaatccaagatggtaatgatatgttgagtttggcattccatcaacaaagaaactgtcgcgagatgcattggaggctctggaagtttcacaacaacacacaaaaaaagtcttcccaaaagaagtcccagtcgacctatagctatagtcctcattcttgacgcttcaggttcaagaaaaggaactttatgatggaaaaatggacttcagtctgctcaaccccttcatgttactgtgccggccgagatgtgcttggtcgctggtggttgagatttcagatcaggagctctggagtctggactctggactgcagcgagccaaatcagtcaccggtt

SEQ ID NO: 277740 - DNA, 661 bp, Zea mays
ggattaacggttcttccagtaaatgcaatcgttggaagctacattacgaacttgtttgaggataggcaaattttgttggcatctgaagtcatggttctcatcggtataatcatgagcttttgtttcacacctcactactccatcccgcaatatgtcctttcagctctcatcacatttgtatttgctgaggtgcttgaaggagtgaatctgtccttgctctcacgagtaatgtcatcgaggctttcccgagggacctacaatggtggactcctttcgacagaggccgggacgttggcccgtgtagttgcagatgccacgattactgcagccggttatctcggcacggacctccttctgaatgtcactcttctcccatcccttgtgatttgcatagtctccatcgcagcagcactctacacttacaacaatctctattgaagctattgttgctgtacaagtgtacaacaatgttcctaagctaaaatgttcctgcccacaacgggtttgtatatctgttcaagcatggtttgtaaacattttgatcaagtttgtatgcaaaatttcttgtatttagtgcatttatgtaaagattcatcctgtaaagtgttataccaaatgagatgttaaaaaaatctaccatcatttatgtttatctttttgc

SEQ ID NO: 277741 - DNA, 703 bp, Zea mays
ttcactttgttcgagattcgtgattttgagtatagtcctgaagcacaagaaagtagaaagcaggagatggagaagttactgctagagcaggaagttatgaggacctcgcttctgcaatggtgctatgccagctacagtgaggttttcagttcctggatgcacttctgtgccgtgcgcatatttgtagagagcattcttagatacggtctgccaccatcgttcctgtctgccgttcttgctccgtctacaaagggcgagaagaaagtaaggagcatcttagaggacctttgcggcaatgtccatagtatttattggaaaggcgaagatgacgtggcagttgctggtctgggaggtgaatcagaggtccatccttacgtctcattcaccataaactttgtttgagcattactggtgttacgccgtcaagtaaatcgaaacgatggaatggttctgtacattgctagtgttacggcaattctttgttgatctgtcagcttttatctgatcatgtaatttatatattggatatataagccgatcaataatgtagcttttgaggagactggaagtagatggatcacgatcaccatgtaatttgtaaaatggggctactgttactgtaataaagtcacatgtcaaatatcttcagctgaggtggtctcttgctgagctccctcggcctcctcggtactactactgggcg

SEQ ID NO: 277742 - DNA, 663 bp, Zea mays
ccttgagactgggaccccggaggatcagcaagtcaagaggatgagtttctctgagctcagagaggacgtgcgcaaggcgttcacgaaagataaggcagcagtggctgcaatagcttcctcggcgtcctcgtcttcgtctccgaggtgcagacgacccaataggaaatcacggtgatgtcagtctgttcaggacacctgcactgggttgtgtgtgttttgacatgtaacactgtttcagtagataatgctgattgtcagatttgctgccgctctacagaagattaagcgaccgtctgtttcaagaattattcatacagttacttgtgattctttcaagcagcagttacaaaatgtccaagttgtcttggaggttggccagcacccgtaggacggtgtccacgacgacagggtccgcgcccagcatcctgtgcagctgcgcctcgacgctagagcccaagacgtcgcccacgaacctgtacacctgagcgaggcgcaggtcgtccggagacagggggaactgaaccgtctcgacgtccggcgccagtgtaccaccatcgtcggcgcaccaggccgggcaaccggcggcagagcggtgagggtgccgcggcggcacggcgaggaccagcttcttgtccgctctgaggaagtgtttctgggcgtggc

SEQ ID NO: 277743 - DNA, 437 bp, Zea mays
cccacgcgtccgcttgggccgggccggccggtccgcctcacggcgagaaccgaccggcgcgacccttctgccggcgatgcgctcctggccttaactggccgggtcgtgcctccggcgccgttactttgaagaaattagagtgctcaaagcaagccatcgctctggatacattagcatgggataacatcataggattccggtcctattgtgttggccttcgggatcggagtaatgatgttcggaacaaaaaaaaaaaaaaaaaaaaaaaaaaaaaaaaaaaaaaaaaaaaaaacaaaaaaaaaaaaaaaagaaaaggtaaaaagagcaaaaaaatagaaaataaaaaaaaaaaaaaaaaaagggccggccgttttaagggacccagatttacttccccgtgcatgcaaagtaatgctttttttatggggtcccctaaa

SEQ ID NO: 277744 - DNA, 386 bp, Zea mays
tgcgctcctggccttaactggccgggtcgtgcctccggcgccgttactttgaagaaattagagtgctcaaagcaagccatcgctctggatacattagcatgggataacatcataggattccggtcctattgtgttggccttcgggatcggagtaatgattaatagggacggcgccggctaccggatcgtctgcgatgaggacccctcctacgccttcgccatcatgtgattcattgtcccgttacgcgcccacaacccaccacaccagtgtcagtcatctcgtcatgccgtgccgtgccgtgcctcccgtataatcgccgtacagattcatcatacacacacacacactcatattatatatatatacacagcatcatgtataccgt

SEQ ID NO: 277745 - DNA, 708 bp, Zea mays
ctacaccagcttcgcgcaccacctggtttcggctcccaagggggtggccctgcagctcgcggagggccacgcgtgctctgaccgagcagtgcccgtccgtggaggccgagggcgcgcactgcgagggcctggcgttcgacgtgcacctccgggtgcggaacgcgggcgagaggtccggcgggcacacggtgttcctgttctcgtcgccgccggcggtgcacaacgcgccggcgaagcacctgctgggcttcgagaaggtgtcgctggagcccgggcaggcgggcgtggtggcgttcaaggtggacgtgtgcaaggacctcagcgtcgtggacgagctgggcaacaggaaggtggcgctcggcagccacacgctgcacgtcggggacctcaagcacacgctcaacttgggagtctgatggccgagaggggaatggctaccaagtaccaacgtgaaggcagttggaatttggagggctggatgggtcggaggcagtcggaagagaaggttgtcagaattggttcggcaggtgtctaataaaggcttcctgttgggaaagaattggatccacgggcagctttttagtcatttgtttggaggcattggattcattggagggtcgatttgtgattgtaatcacgataaatgtaatggattggaaattcggaaggggccagatctctttttcatacaaatcacgtgatttagtg

SEQ ID NO: 277746 - DNA, 436 bp, Zea mays
agaacccaaaggatcccctttggctggctgttttcccagaaggcactgattatactgagaagaagtgtatcaaaagtcaagaatatgcagcagagcatggtttgcctgttctgaaaaacgtactccttcccaagacaaagggtttcaattgctgtttgcaagtgctgaggagtaccatagatgctgtgtacgacatcacgatcgcctacaaacaccggccgccgacatttctggacaacgtctacggcgtgggtccttcggaagtccacatccacatcagcagcatccaggtctccgacataccggcgtccgaagacggggtggctggctggctggtggagcggttcaggccacacgcacgagctgctgtcgggcttctccgcgctgggccacttccccgacgaagggaaagggaccgaggcgggactgtcgacgg

SEQ ID NO: 277747 - DNA, 736 bp, Zea mays
cccacgcgtccgcggacgcgtgggcgccgtttccgcattcgactccgccgggggcggtgtggcggtgcagccgcccggctccagtgccgtggatttcagtattcaggatgtcaagggctcatccaaaagcttccccaagcacgaggtgaagcatgtctctgaccataagaacgctgcccggtgtgcgaaatttagtcctgatggaaagtattttgcaactgggagtgctgatacatccattaagttttttgaggttgctaagattaagcagactatggtaggagactctaaagatggccctgccaggcctgtggtacggacattttatgatcacacacaggccatcaatgatctggattttcatcctgagagtccaatactgatatcagctgccaaagacagtacaataagattctttgacttttcaaaaaccaatgcgaggaaagcgttcagagttattcaggatactcataatgttagatctgtatgttttcatccttgtggggattaccttttagcagggactgatcacccagttgctcatttatatgatataaatacttttacatgctacttatcagcaaatgcacaggattctagttctcccattaaccaggtacgctactcttgtactgggagcttgtatgtgactgcttctaaagatggttctctgcgcatttgggatggagtatctgctgaatgtgttcgacctattattggagcacatggatcatca

SEQ ID NO: 277748 - DNA, 1143 bp, Zea mays
aggttccttcaatttttaatcgaacaaaggcaacttgttttgcttatgggcaaactggcagtggaaagacatataccatgcgtccccttcctcttaaggcttcccaagatatcttgaggttaatgcaccatgcatatcgaaatcaaggatttcaattgcatgttagcttctttgagatatatggtggcaaattatttgaccttctcaacgataggagcaaactttgcatgagagaggatgcaaagcaaaaggtttgtattgttggtttgcaagagtatagagtgtccgatgtagagactatcaaggagttgattgaaaaaggcagtgctaccagaagtactggcacaaccggtgcaaatgaagagtcctcaaggtctcatgccattcttcagcttgccattaaacgccgtgtggatggcaatgactccaaaccacccagaccagtcggcaagttgtcatttattgaccttgctggcagcgagcgtggtgctgatacaactgacaatgataaacaaacaagaatcgagggtgctgagatcaataaaagtttgcttgccctaaaggaatgcattagagcgcttgataatgatcagactcacatacctttccgaggtagcaaattaactgaggtccggcgtgactcattcattggagactcacgcactgtcatgatatcctgcatttctcctagttctggctcttgtgagcatactctgaacacattgagatatgcagacagagtgaagagtttgtcaaagggaagcaatgccaagaaagatgtgtctttggcagtgcctttaagagagtcgagcccttccccactgccttcagttgtaccctcattctctgcatctgaggtgatgaatgatatcaccgagagaaacaattttggttggcccaagcagcagtatgttaaagaacggcctgctccgacatttgttgaacgaatgcccaaagtgaaggatgccgtggagttcgcaacatcagacggtgcttatttgaagggacaaagaagccagggctgtatggcaccaaatatagctgaaataccggatacaatgtaccagcagagaaggcaaccagcaaggaaggctaaagataccgctttgcggaataatatgagaaattccgttgcttacccaa

SEQ ID NO: 277749 - DNA, 648 bp, Zea mays
cagacggcggtgcaggtcgtcaagggcccagggccggcgcacccggcgatgcccggctagcactggggcgacaccacggtgatcgacgacgcgctgacggacgggcccagcgcgtcgtcgtcgcggctcgtcgggcgcgcccagggcacctacacgctggcgtcgctcacggagcccgtgctggcggtgtccatgaccgtggcgctcacggccggggcctacaacggcagcgccgtcgtcgtcgtgggccgcgacgacgtctcggcgggcgtcagggagctcgcggtggtcggcggcaccggcgcgttccggagagctacgggccacgtgctgtggcggacggccaggatggagtcccgggaccacatggtgctggagctcgacgtctacgccaccgtgccggccgctagtccggctccgcctccgcgcgccggagtggcgcgtcaggtggcctgagtgcctgacctcaaccgtacctcgacgtgatgtcaccggacttggttttgattataccatgcacgctgctcgcctgctgtgtgtatggtcaatcgcataaaattgcttaagctccgcgccttcgcacatacgttggaaaattgaacaataaatgattactatactgctgctggtgctaccgctaccgtcagt

SEQ ID NO: 277750 - DNA, 451 bp, Zea mays
tgcaggatccaagcaacgcggaaggagggaggtgagcaccatgtcggcgctgttcaacttcaactccttcctgaccgtggtgttgctggtgatctgcacctgctcctacatcaagatgcagttcccggcaatcctcaacgaccgcaccggattccgtggtttcttttggaaagctgccaggataggtgagcgattgagcccttgggtatcagtcgggtgcttggctatgggaatatccactattttcttctaaggccgaagtgttaatctccacaaatttagtctaggacgcagcaccttgtttcacttgtagagaaaaaaaaaactatcgtaagcattttgcttcagtttttaatggaatgggcactgtaagatctgtatctgcactgagatttctgagattaacaaaaatgttttctcataagatttctgagaaaaaaaacaactacat

SEQ ID NO: 277751 - DNA, 734 bp, Zea mays
gatgaagtagatcgtgttctacaaggtagactacccaaatatgaggatgtaaaggagctgaagtacttgatgcgctgtataaatgagtctatgcggctgtatccacaccctcctgtgctgttacggcgtgcaatagttgatgatgttcttcctggaaactataaggttaaggctggtcaagatattatgatatctgtgtacaatatacataggtccccggaggtctgggatagagcagatgagttcattccagagaggtttgatttagagggacctgttccaaatgagtcaaacacagatttcaggtttattccattcagtgggggtcctcggaaatgtgctggagatcaatttgctctcctagaagcaatagtggcacttgcagttgtgttgcagaagatggatatgcagcttgtgccagatcaaaagattaacatggctactggagctacaattcatacaaccagtggactatatatgaatgtaagcctgcgtaaagttcagcaagaagctgagttagcgctgagcgaatctaaatagatgtaaacgacttcagacaagaatagagctcctgaactggatccaatcatacaaatatgaaatatgcttctccagtttctcgttgaaagctctactgtactatactagatgtcaatgcgtcggcatacagattacagattcgcttctcttgaaacatgaaaggatccttcgctggctgattcgtttggctaacc

SEQ ID NO: 277752 - DNA, 733 bp, Zea mays
ggtttaatttacaaagacctgttccaaatgagtcaaacacagatttcaggtcagaatacaactttgtgagatatcgtttctatcctgtcgtttcatatttccattaagcatctggttagtttttgttgactggcaaatgtgtctgaactgcgccatgctcctgctacatatttttcccaggtttattccattcagtgggggtcctcggaaatgtgttggagatcaatttgctctcctagaagcaatagtggcacttgcagttgtgttgcagaagatggatatgcagcttgtgccagatcaaaagattaacatgactactggagctacaattcatacagccagtgtaaggaaacatgctatgcatattttccacaatactcttgttttgttcataatccagttgatatcaattggagttaaataaagaattataacaaaagctatgcaacttaagggcacattaggaggaaagtagaaggaagagaccaaacttactgatgttttctctatactactctcaaccatatataacagaggctaaaatttggacacttatgaaaattgtttcagttttgaaagctcgaaagtgtactatattcttgagttcaatcatgtttccccaagaaagtggaaagaaccaactatcataccaccttgccccattgtttgtccgcattttttccgttccactcacccaagtcgcctgtctatttttttccccgttccaagaacc

SEQ ID NO: 277753 - DNA, 610 bp, Zea mays
ggctggagtctgctcatatggtgttgtcatccattggtagcaatgcctaaacatgcacttggcagatttttgcattgtactattaattatttgttccttctgtaaaggtctgggatagagcagatgagttcattccagagaggtttgatttagagggacctgttccaaatgagtcaaacacagatttcaggtttattccattcagtgggggtcctcggaaatgtgctggagatcaattcgctctcctagaagcaatagtggcacttgcagttgtgttgcagaagatggatatgcagcttgtgccagatcaaaagattaacatgactactggagctacaattcatacaaccagtggactatatatgaatgtaagcctgcgtaaagttcagcaagaagctgagttagcgctgagcgaatcgaaatagatggaaacgacttcagacaagaatagagcacctgaactggctacaaatatgtttctccagtttctcgttgaaagctctactgtactatactagatgtcaatgcgtcggcatacagattacagattcgcttctcttgaaacatgaaaggatccttcgctggctgattcgtttggctattcgtgtgt

SEQ ID NO: 277754 - DNA, 315 bp, Zea mays
cccccaatgttgtcatccaacgttctggctgcactttccctgagaagcctgacttcaactggagccggttcagaatttagagtcttatggcatctggtctggataattaggcgggttcgccttggtctgttttcggcacattctagtgtccccgtacaggtcaaatgttcatgcgtgtaaggcgtgtcatactgtcatggccctctacaagtgcatgtgccagaaacgtgcatgcgtctctcggttacggactctttacagttgcatctaaaacaattcaaagcaccttgcggtgcatccttgaaaagttggggc

SEQ ID NO: 277755 - DNA, 832 bp, Zea mays
cccacgcgtccgagtttatctaccggtattcgtcgaaggagcgaatcttagcaggggtgggatgcacttctctcagggcgatggtgaagtttcgttttgtggagcaattgaaatgagtggattccttgagctcaggtgcgagatcataagaggcgggatgaaggaatacttgaccccagttggtccgacaccgctacacgtgaaccctatctttgagatcggtcctgtcgagccgcgcttctcggagtggctagtgtttgagggcataagcgtggatgaatctgggaagcagcatttccttgatgcgtcagttgcttacaagcgtgcagtcctgaacgccattgagtacattgctagatttgggtactcaaaggagcaagtgtatctcttactatcatgctgtccctgtgagggtaggatctctggaatagttgactctcctaatgcagtggcaactcttgccatccctacagcaatatttgatcaggatataaagccaaaacacctgagaggaagactgggaccaaagttgataaggcttccagatctcctgagctgttcaaacaatgggcatattcctgtcacccaagaccaaagtggtacaagggcgtcctaggggcgtatatgatctggaagctgatgccgtatccttctacttatacacacaaataatcgtgttggtgtttccaacaatgtatgaggatagagacccctgagtggtgccatattttcagtgcctgtattgctacaaagttgttcattaatttcactctatagaaaatttcttatttggggtcgagtatgtaactagcagtgaagtgaggatgagata

SEQ ID NO: 277756 - DNA, 755 bp, Zea mays
  unsure (1)..(755): unsure at all n locations
ctcccttgaggtgttgcctgagaggtgctgctgaccgagtagcatcattgaagagttagtgtcgagcacttggattatgtgatcgatgtgcagagaagtggttccaagggcacaagtgtgccaacacggtgcaacttcacgccattgaggaagtctaggatttgctcaccttggatgaagctacagtggaagtcattgaaccaacagaggaactgatgatggttgtcgtatccctgtctaatgcggcatggtccggatctgacacaatatcaaccatgagattacagggtcagattcagcaacataatctcttggttcttattgattcagggtcttcacatactttcctcaatgacagtcgtcgaccactattgtttggagtccaagaattgacaacactaattacagtttaggttgctaatggccaagttattacctgctcacaccaccttccagcagctcaatggaccatcggtatagcccgatgagagtggattggacaaacatgtggatggttatttcttaccaggaaaatactatctaccttcagggtatcaggtcttccttactagtgggaatggtggtggaattattgttactatctgaaacatcattatccacatctaactctagcatagcagctgttgcagtggattccagagtgcaagctgtactcgacagttatcctagcattntcatcgatccagtgggactcctaccaacccgcccgtgtgatcattcaatttcattgatcc

SEQ ID NO: 277757 - DNA, 762 bp, Zea mays
  unsure (1)..(762): unsure at all n locations
ttacgcgtccgcccacgcgtccgcccacgcgtgcgcccacgcgtccggaattcctgagatggtccagcatgtttgccagtctcaattttggttcaatatggttgaagcaatgagagatcagcattctattgaaaggttgacagaagagctgttgcgtcaacttgcgtcacaacatataagcgatgaagaggcttattggattctgtggaccctctttaatcagagcttcaagcgtttaactgtcatgaggacgatgtttgttgacaaatttttgctctggaaaacatttcctttatgctgcctgagatggattcttcactatgctgtctttgaatgtccaccaaattcaaccaccagaaattctgatgcaaaggacaccaaacttttttggtatattgcaaagtttggttagtatttggtccaagaaagagtttattcagtcatattcagtggagcaacaagcttgtatcctttgagccactgaaaattacattgcttcattttttatacaagtattatttggcatcattctccttaataaatgcagatatcactgcagcaattggattatgtttggaaaagctaacagaaaaagaattagaaacaactaaagatgtattgaattctattcttcaaggagtaagctgtgagttcacccttgtacattagcttaccagaatttgatatgagtaacgataacatcttcttgctgatttgttnttgtcactctaggcaggttagagagcccaattgatttattac

SEQ ID NO: 277758 - DNA, 411 bp, Zea mays
atgctgtccagctcgccagaaaagcaacgcccagctgataatgatcgctatgtcaagaactgtcgcaatgggaggtctccgaaagagaccaggtggtggttccatgatgacgccgtgtgatcggtgttccgattattgttgtcctgtatgcatttagttgccagactatatgggagatggacttatttcgaacgacccatttgaccagaaattaacatgctcttgtggtttgtagatgaatgtgcatcagcgtcggcctgtactttctgattcttacaccgtcgatgatatatagaataatgtttgtatcttgtcaatttacggaacagacatgaaattcaatgcaggtcactggtttctgaatcaaaaaaaaaaaaataaattaaaaaaaaattaaaaaaatattaattt

SEQ ID NO: 277759 - DNA, 691 bp, Zea mays
gaactctgcttcacgggccgaactacaccggaaaagcatagcacaaatgaagatggagagcacaatctgttcaagatatgcatatatatgctgatccttcacatgttcctgctgttcttatagaacaacatgtcatggttgttccacagcatagttccagcaaggatttggcttcgaatgcttctgaacaaaaggatactattgtgctacctaaactacaaggagagcctctggtacccaaaagtagtgctggtaaaaaaagtgggcgcatcttgcgagctgtcatttttgtgcatggttttcagggccaccatttggatttacgtcttgttagaaaccaatggcttctattggaccctggagctgattgcctaatgtctgaggctaatgaagataaaacatctggagacttcaaagaaatgggtagcaggttggccggcgaggtaattgccttcctgaagaagaaaatggataagctttctagatatggaggctgcaaagagctgaagttaagcatcgtcatccattccattgtgaacatcatcattagaagtgccctggcagaacctgcatcgcagctcatacttgaagaacctgtacacttacatgtcaatatcagggcctaacttgagttactgctacaggccatagttgatgggcaattctggacttctggtgctgaaatagctca

SEQ ID NO: 277760 - DNA, 745 bp, Zea mays
ccagtcaccaccactgccgcgaccgagagagtcagagagagcaggcggcggcagtggctggcgctggggacgagtactactacggcgggccgggccagcgcggcgcgccccacggcctgctgctggcggtggtggtgggcctcgtggtggcgggcccgctgttcctgggcggcggcggcgaggcgctgacggaagccgtggcggagctgctgagcccggtggggctcctcctcctccccgtgtgcctgctgttcctcatccgcctcctctcgtccgaccgcggcgccgcggcgctcgccgacgcctttcgccctcggcgggtcccccgacgccgtccaccgcgtgggagggtccccggtcggcgtcgcgttcttgctcctcctcatcctcgcgctgctctactaccgatcctcgctcttcggcggcgtcggcggcgacgacgagtaggataggagagctggcggttgcgatctctggctgtctgttgggttggtttctgtaatgcgaggtctgcgaggggcgtctgtgcaaaagtgcgtgtgtaaaatcgagcggaggcggttaatctgttgtttacttggtcggtttgtgacgctgaagccttctgtgcgttgtgttgcgttcgggccaatgtgcgtgccctgtgctcttccccagaaccacgtgtacacgctgtactatcaccccactgacccagaacgccaatgcgtgccagtgaattccacgtttaactttttcaattcag

SEQ ID NO: 277761 - DNA, 539 bp, Zea mays
cgacgtcacgcgtccgcacacgttttctgacggctgacctgattgggatcactcacgctcacctaatggatttgtcgcggttggtctgtcttttaacttatttaagctggattatataatctagagggtaaacaaacagggcaagtttatcatgtgattctattagtcattgaacacatttttacagatagacagtgaattaagcaaagagatagaacaatggaatgacatgctgaggactgaagtagtaaagttgtgtcaagacaacaattttcaaacaggtttttttgaaggcactgataatagcactgttgttgatgcttacgagttgaaggtaaatctaaatgtacactctgtactaactacgtgtacacattaattgaacctatcgagcaattctgttgttaggttcgacttgagcacattctcgagaggatatctttgatctctgatgctgcaagtactgagcgtccatcacagatcacagattacctgtatattggtggtgctcttgctgctcggtcaacacacacacttaa

SEQ ID NO: 277762 - DNA, 420 bp, Zea mays
ctcacggcagtgattcgcggcggtgtagctcaaactaccctcggaggtccgaccgtcgtcgtgaccatggtagtggtggttcgtcaagaccctcgtcaagagggcagccccagaggggagtttgtaaatactacgagaatggccactgctggaagggctccaaatgccagtacctgcaccggtgactgccgtggccgtgggaagcggaacgccctattgcctggtcgccctcacatttttgtatagcagcatatggtctcatcgtagtcagtgaaaggaggaaccgtatcggcgggaccactagttcgtagtagtacatatccttaagagcaggagcatgactaaagattctccgctttggtgcaggaatgcgccccttttgttcagttaaacggagctgtgggcatttgcaaacatgga

SEQ ID NO: 277763 - DNA, 553 bp, Zea mays
gttcctctacataaactttaaaagtacacaaatctgaggtggaacgaattcctgatattacaaatggcacaaagtacatattctctgatggagttggaaagatctcagctaattttgcagtggaggtggctatgaagtgcaaattgaaacgctttgctccttctgtttttcagataaggtatggcggttacaaaggtgttgtcgctgtagatacaagatcaaatcataagctttctttgagaaaaagcatgtcaaagttccagtcagaaaatatcactcttgatgtccttgcatacagcaagtaccaaccatgcttcctgaatcggcagttgattactcttctctcaacacttggggttagcgataatgtctttgagctaaagcagaaggaagccttaaggcagttgaacagaatggtaactgaaccacaggctgctcgtgaagcagttgaacttatgcccatgggagaagtaaccaatgtagttaaagaattgttgtcatgtggctaccagcctgatcatgagccatatctttccatgctgctacaaacttt

SEQ ID NO: 277764 - DNA, 872 bp, Zea mays
tgtggacctaccagtagaagatatcagttgtgatttggggcctgaaatggataaaggtgttgtattaaggcaacaagttgtttcaaggcatcatttaggcagaacggagaagcttgctgaaagtagcattttatctggttccgtagttacttcaaaacattcagctttagcaaggccttcaaattacaaggatccaaatgtctgttctgcaccaagtagaaacaaaacttgtgaattgaaactacggtctgagattgaagaacagtgccagaaacatgagttagatgtagatgaacgtggcatgggtcctagcaaaaactctcgtgtgctaataggatctataattgtcgcaattaaagattgtagtgaacacttgctggacttaggttccaagaatgacccagtacctcccaatttaaagacaaagaaacatgcatcagtcaaggtggtgcaacaagttagccatgatggaaacagaaatgaaggtgttcctgatagtgataaccgttctagcctcagtgttactacagatgaaatcagttattcaacctgctgcgatgcagatttggcagtggatgaacatttacaatgcaccacgttttccagtgaagaagcgacagcctttctttctcaaagatggaaagaagcaatagccgccgatcacgtgaaacttgttgtgtcctgaaaactaaaggaatggcagaataaagaaattctgttgagggcaacagcatggaagctccggccgacttgtcgccggatcccacagccctacaacataggtggttcttatctagcctgcagggtgctatgaaagtttggatgtcaagtttgtgttgcggcatgaatggttgtaaaatggcgggtgcatt

SEQ ID NO: 277765 - DNA, 652 bp, Zea mays
ttccggggttaaggcatgtaccgttcatgcacctgttggggtcacatttcgcagagaaggttttgaacgaggacctacggtttgtttttggtcagcaagaacggatgatcaatggcgccaacgtctggaactggccggtatcatatgacaggctcggggtccggtcccggttgtggagagacaccgttgagaggggctctgaacggttgccattcagtaaccaagctgagagtggatcatagccggccggtgggtcttttaatttcctcctcgtcacatttattcgcgagacgacggccagaattagttacctaggcgtgcgtctctgtgctctgctccctgatgctgctgcgtctatctggaaggcgaaggttgatgggtaacatcatcgtgtctctctctcccctctggtgttggaatgtacactagcgtcgttatcatgagatgcaattgtaatctgaggttgatattttctttctttctttctttttccttttcgctttcttcttttcttccccctttttgtgtaaagattcagcgaatgttactttgtcaaagcatgtataatcaatcatactcctaactatggagacatgttcatatgagaaatggcagcagcacatctttgcttatatattcaccatctgttcct

SEQ ID NO: 277766 - DNA, 456 bp, Zea mays
cccacgcgtccgcccacgcgtccgcccacgcgttcgcttgattggtttccttcatgtcaagaggtgcagcaaatgacgcaacaattgggaccaagagagacgctcgcagctactacgagatctggcagacggtcggggtggaccggccgtctcagatactgttcctgacggacgtgtgccaggaagccacggcagcacaggctgcaggccttgaggtgctaatatctatcagacctggaaacgcgccactccctgctgaaacccatgggtttgggacagtcgagtcatttgctgaaatcttgacatgaagggaggatgcatcctcaacatgcatgcatgcatgctgtgctatttagagatggaaacggattgaactagtttcaaaaggcagatggaatggtttcatggccttgatttgcatcttcatactagctttatttacattgcccatgttca

SEQ ID NO: 277767 - DNA, 546 bp, Zea mays
aattgcttcatcctcacacagagttgtttctcgcctccggtcagttgcagctgggatgcagtgatgcagagacaaccatggccaccacctatgcaatccaaccgtgttgtgagcatcaccgaccgccacaccgaggaggccagccccgtgcgcaaactggttgccgagatcattggtgtgcttgggtcaaaacacatgagaactgtcacgccgcttcctgacaccggtcaatggctgcttctatcattgatcgagaagctccctcaaagcgtggttgatctactgagagctcatgttatcaatctccatcattatctgatgttgtttagcttgctgggattttcagttctgttcgactgtatcaaagcacctgactcgaatgctatctgtagaggcataacacaggatatgacatatgctgctgttcaagcttacacagatgcatataagcctgattgggaacgtatcaacttcattgtagacattttgagatcgactcctggagaagggccttcgtggtaccatcttttgaagaaagttagtggc

SEQ ID NO: 277768 - DNA, 552 bp, Zea mays
tcggcctccgcttgccctttcttccctgccggctgccgcgctcctaataattgcatcgccgccccatgtccgccctgcttattcttgtggctagcctcgctgcttagtgcttatatcaccattcaccagctagcttctcaccaccgccaccgccaccgccggctcctgctgccaccgcccgctggctggcttagcgcgtaggctgtgactgactgactgactgactgcgagaccacagcaccggaggacgcccgcgcgcgcgaaccgcagcgcagaggcaggggaaccttgtccgcggctcggccggcatgaagctcccgctgctgcgtccgctgtggccgggcctggggcctgcggcggcggggccgcccgacgcggcgccggagccggccaagccctcgctgccggccacgtggctgctgctgcacgcgctcttctgcgccacatccatggccgtcggcttccgcttctcccgcctcatcgtcttcctcctcttcctgcccaccccgcccatcaaccccgccgcgcacctcgtctcgctcgtgtcctcgc

SEQ ID NO: 277769 - DNA, 670 bp, Zea mays
cggacgcgtggggacggacacccttccctccgcagctgcgctgccggacgctttctgtcgtgttccactcttcgctgcagaaagctttttttttttttcccttggcggagattgttctctgctcccttttttcgcgaggaaacctaactcgtttctctctctacgacatctgcaggctacggggcatgcgtgtacaccgggggaggccaataatgcacggcgcacggcggtgccaaccccgtggcacatgattagttttgcgagtaccacgcacgcacgatggactggattgccgagtgaaaaaggttgtgcgtgcctacaggctacagcaagggaagggctctgggcggaccgaataattgcggttgttgccgtggttggcgtgttgtagcgtagtgcagtgcagtgcagtgcagtgcagatcctcttgtttgtttcgtcgtaccggaagaaatttcccgttccttttcagctgccctgcctgccttgggacaggctgggacgtgtgagtgtgacttcgtgtaaaagaactattggacgctgtcagtgtcgccgtgagctctgtggacggtagtacatgtgtctaatgtacaagtagagtgagattgtatctatatattgttttttaaaaaaaataaaacttcattcggctctcatcggaatgcgagat

SEQ ID NO: 277770 - DNA, 772 bp, Zea mays
tttggcctggcctcgttctgctgaagctcgacccgttccccctaatcttctccaatccctttcttctgggctctgacagggtgacgaatcccatgggcgccgcggcggggggtcggggcgggggcgggggcggcgcggcgcaccccaggggcggcgggtggcgcggggcgcgggccggcgcctcggacgcggagctgcaggcggacctggactacgcgtgctcgcaggggggcgtcgactgcagcgccatccagcccggcggcgcctgcttcgagcccaacacggtgcgcgcgcacgccgcgtacgccgtgaaccagctgtaccaggcggccgggcggcacccgtggaactgcgacttccgggcgtccgacacgctcacctccgacgacccaaggagcgtcgtcagccgtcgctgctggctagcgaggcaggccgccgacatggcctggattttgatgggctctgtccgtgcagatctcgcagcactgctcgagcatgacaatggtgacatgacatgacatgtgcacgacgaacggagaccagctttgctcatcccctgccctgctccgacgcctttccatcgcccatttgtccatgctacggggcatgcgtgtacaccgggggaggccaataatgcacggcgcacggcggtgccaaccccgtggcacatgattagttttgcgagtacctagcacgcacgatggactggattgccgagtgaaaaaggttgtgcgtgcctacaggctacagcaagggaagggctctgggcgga

SEQ ID NO: 277771 - DNA, 1078 bp, Zea mays
gcaacggaacattcagcacttcctacaaagctgtcatgccgtctggcatggtggtgtgtgtcaagaaactgaagtctgtcgaccgtgcggtcatccaccagcagacgaagatgatccgagagctcgagcgtcttgcccacatcaaccacaagaacctggtccggcccgttgggtatgtcatctatgacgacgtcgcgctgctgctgcaccaacatatgctgaatggaaccctgcttcagttgctgcacagcagcggcggcgatactgacggcaagaagcagaaacctgactggccgaggctgctctcgattgccattgatgtcgccgaagggctcgcattcctccatcaggttgccaccattcaccttgacatctgttcagggaacgtcttccttgactcgcactacaatgcgcttctcggcgaagtcgaaatctccaagctactggacccttcaaagggcacagccagcatcagcacggttgctggctcatttggttacattcctccagagtatgcctacacgatgcaggtgacggtgcccggcaatgtgtacagctacggcgtggtcctgctggagatcctgacatccaagctacccgtggacgacgtgttcggcgagggcgtggacctcgtcaagtgggtgcacaccgcaccagcaaggggtgagacgccagagcagatcatggacccccggctgagcaccgtgtcgttcgcgtggcgcaggcagatgctcgccgtgctcaaggtcgcgatgctgtgcacggagcgcgccccggccaagcgtcccaggatgaggaaggtggtggagatgctgcaagaggccaagaacagctgagttgatgtgtttctctgctgaatcctgaatgctgcggttgcctgcttggaagtcgagccgagcctctagaaaaaaatctggtcattggttcggttcgagtatgaaatccatccagtagtgtttaattctctgtatatatgcggtaattagtaccccgattatgcgccatttatggatattggatcttgaagcatccaactagaaatcttgcaaacccaagtgttaaaaaaaaccccccagtg

SEQ ID NO: 277772 - DNA, 572 bp, Zea mays
tctttctttttttttttttttgtttattccatcgactggcaaaatattagagagcagaaacttcaataatccgtcattttgaacggtaccttgttctctcgagcattttaccatctggagacatttgaactagccttatattctacacaatcatacagaatgggtgctacaaaatggtaggcagctgataacactgaaaaggaacaaaatctcaaacgaaagtaatctacagcaataaacactgctactggcagttgctccgtttctgtgaaactcaagcaaagattctcgcaggtcgaacactgacccaatcaaattgggcagtctgattatgtggcaaagctttctgtcgccagcatcccccagtcctggaactataaaacctttctcatttacttctggatcaatcattcctgtgtacacgtggagcccagggaacttgttattgagcttttgcagggcaggaggtgatgcaatagcagatataactttaatctgcttgctagtaactccgcactcgattaacaagtcaatagcagcaaccattgtcccaccagtggccagcattccta

SEQ ID NO: 277773 - DNA, 275 bp, Zea mays
aaccaaatggggtatttatgcagcaataataattactaatatgttctccatgagttttgcaatgagctgataagtttagaacaataccctttctcatttacttctggatcaatcattcctgtgtacacgtggagcccagggaacttgttattgagcttttgcagggcaggaggtgatgcaatagcagatataactttaatctgcttgctagtaactccgcactcgattaacaagtcaatagcagcaaccattgtcccaccagtggccagcattgg

SEQ ID NO: 277774 - DNA, 495 bp, Zea mays
catcgatccaccgaggtttcttgtgcgtgccgccatggccatggcagtagctcaccttctgcctcagctctccgccgaaggcaatggagctagcaggaacagaatggccattctcttgattcttcagctttttctcttgacgggcgctaggcgtggatggagcggcgtcgttcatcttcaccaacgcctgcaagcacgcggtgtgggtgggcgcgctccacggcgccagctcgccgccgctcgcgcggtcgggcttctacctggcgccgtccgccacgtccagcatggacgcgccgtcgtcggggacatggtccggcacgttgtgggcgcgcacgggctgcgtggccgaccccgccaccgggcgcttctcctgcgccacggccgactgcggcacgggcgacgtcgcgtgccagggccgccggccggcgcctccggtctcgctcgtcgaggtcacgctcgccgcgccgggcagccgcaggccggacttctacgacg

SEQ ID NO: 277775 - DNA, 307 bp, Zea mays
cagagcacctcgcctcattccatcccacgtcaagctagatctgccggctctaggcttagaacacatccggataatggtggatgcatcgttctttctgttcgtcgtaagcagttctttgtatcaagtgagatggcagtgacgactcggtaaaattccagctcaacagaccaaatcacaggtctctctctacatgagatcgatctgtatgccgattttcccgctgaactgagccatctaattttgctctgcttatttgctattcggaatattttctctctacatgaaattcccggttgcttttttttcc

SEQ ID NO: 277776 - DNA, 567 bp, Zea mays
aggcgtgcgcccacgcgttcggatctgttttgcttagttcttccagttccagcacgggggaagtggcgacaaagctgcggacgcagtgggagcagttcgtgcaggcccggcagttctggagcggcctggacctgggagtcctcgacgtcgaggtcaacaggatggcgagcatcctagaagcagcaggaacccgaatcggttcgtcggcgacggcctacatgctgtcgtggctgtcgagctaccagatgcagcggccgacggccatgggctcgccgagcatcgtggccgccgcgttcgtcaccgtgaagatgcagttcacgctgcagcaggcgaccatcgtcaacactcgtccaccaccatgcatcggcggctgcccggcgtgcgagtgcgggtgcgaggaccgctgcgtgcagccactgccgccgccggtgctcctgccgtccggacgcggcgacgacacctaccgcgtcaaccccgcgtacccgcagggcgtactgttcaacgccatcaaccaagcaatggagcagatgtacctggcgttggtcccggcgagcaatctgacgcgtt

SEQ ID NO: 277777 - DNA, 741 bp, Zea mays
agcatgaatctggaacgagaacagttgatcagaatgtttggggggagatccgcaacttcaggaagtgtctgctgaagatgtttgcacagcaggacaaggatgtgttgtttatggagactgtcataagcctggccagacaacggagacactgcatgattgagtgcatccctgtcccttgtgaagtgtcaagcaatgccccaatgtacttcaaaaaggctattgatgatgctgaagaagaatggacccaacatgagatgaagaaggttatcccgacaagtgcaagccgcaacttgaggcaagtcatcccggagaactttgcctacttccatgtggagttcgggctggaccgtggctttgttcatgtaatagatgacgagagcaagttcagtgctggatttggattgaatgtcattagagggatgctccagttgccagaggaggacatgcaccgtcgacgaaggcacgagtccatggataaccagaggcaggctgttgctagcttcatgaaagactgggagcccttcgattggacgaagcaacttgattgaatgtgaatacagttttgagaacgctcgaagaaaaacttgcacgacttgtactaaaagattttgtaggaaaacttgtattgatgttatgctatcactttattttgtttcccaacatatatgtttatttccccagaaactaacaggcgcatgttctagctgtaaaatgatatcgactgagcaatgactgtcattt

SEQ ID NO: 277778 - DNA, 866 bp, Zea mays
ggtgttgaacgcgacgtcgtggtcgggcgggcgtcgtccccggcgcgaggcgtacgcgacggttctgcactcgtcggacacgtacctgtgcggcgcgatcgtgctggcgcagagcatccggcgcgcggggtcgacccgcgacctggtcctcctgcacgaccacacggtgtcgaggccggcgctgcgcgcgctgtcggcggccgggtggacgccccggcggatcaagcgcatccgcaacccgcgccccgcgcgcggcgcctacaacgagtacaactacagcaagttccggctgtggcagctggccgactacgaccgcgtggtgttcgtggacgccgacatcctggtgctgcgcgacctggacgcgctgttcgcgttcccgcagctggcggcggtgggcaacgacggctcgctcttcaactcgggcgtgatggtgatcgagccgtcggcgtgcacgttcgacgcgctcatgcgggggcgccggaccgtccgctcctacaacggcggcgaccaggggttcctcaacgaggtgttcgtgtggtggcaccgcctgccgcgccgggtcaactacctcaagaacttctgggccaacaccacgggggagcgcgcgctcaaggagaggctgttccgggcggacccgcccgaggtctggtccgtccactacctggggatgaagccatggacgtgctacagggactacgactgcaactggaacgtggcggaccagagggtgtacgccagcgacgaggcgcacgcgcgctggtggcaggtgtacgaccagatgggggaccacatgcgcgggccctgccgcctctccgagcggaggaaggtggagatcgcatgggacaggcacgtcgccgaggagctcg

SEQ ID NO: 277779 - DNA, 448 bp, Zea mays
gaggctgcaggtaatgtcgctgacattcggttggattttcaagctgttcaggagaatgctgtctattggcggggagtactttatgtaaattaccaatccaaatttattatgaggatatcattgtcaaatgataaataccaagtaatcaagccacctgtagattttgaatggtttgaatttgaaaatgaatccaggctatccaaaaacctttatttgggaaaatcagagaaaggggtgtactgtgctttgcgttatccgtcaaccgtttccttttcgatttacattctcgatgaatctgacggcaaaacggagtgcataatgaagcctcactattatctcgggagtcaaggaattgacgggcctggaccctggactctacaggatatcaactataactgggacacacagtatgaagacagtatggaggaagagttcgagtgggactcag

SEQ ID NO: 277780 - DNA, 446 bp, Zea mays
gcggccggctgcagccggcgatcgggcatgcgaagggtggagccgggtggcggaccagccggccgcgtcgggaggcagcagcggcgggcggtggcgggatcgtcgccatcatcatcagcagcagcaggagctggtgctgcgtcggctgctgccgatcaacaaggccaaggcgtgccggttcaagcgcagctgcttcattgaggaggacgactccgcctcctacggggtgcttctgctcgcctgcgtcgtctgcgccccctccctttgatggtgataaaaatacttttgtttactttggccgcctgcttgtaactaatcaacatgtggatcaccatgccgcatgcatgtcagtctgtcgcatcggaaacgttcgctatgtaatgctgtactggtcgtccattcgtctctctgaatgagtgttcggcaccatactaacatgtacataa

SEQ ID NO: 277781 - DNA, 513 bp, Zea mays
aaattattttgcagtatgatttcccaagtcaagaaatcgtaatacagttcgtcattgaggccatccaagcagaagctttcaatccaaaaacattgtttttgatgggcggccgcgcgtgtggaaaagaaagattgtttatggaggtggctcgtttgcttcagaagaaagtatatgttggagctgcaaagcggcaaatactgaaacatttagagcttcctcaggagattatgcactggtttacagccaatgaagcagaaagtcacatacatgttgtccccatgtggactctagcaagcttcaagcggatgaaatatctatcgaatcaatatgctggccggtatgaccttatagtggcgttttgtcctactggttgggcatttggcaaaggtaggaaaaagacaccaggcaaaaggtggcaacaaggatcaatcattagatatgaagtgccctacagtgaacacagcagtttcacggaactgcagcagtttgtcaagttcatatcaccagagcaca

SEQ ID NO: 277782 - DNA, 1237 bp, Zea mays
cagatatttgaagtggatgctggagaatgatgtaagtgaccttccctatttaacatttagcatggatcctgatgaggaaaaacatattctctatgagaagaccgaggtattgaaaagccatcacgggtttagccgaaaccttttctgcttgcgtcagctattatcttagctgtgcagtttaacaaattttcaattcaggttaccgattatgagctaaaaccgggtggaagaaacatcagggttactgaggaaacaaaacaagaatatgttgaccttgtagctgaacatatactgaccacagcaattcgtcctcaaatcaatggtttccttgaaggcttcacagagttagttccaagggatctaatatcgctattcaatgataaagaacttgaactgctgatcagtggtcttcctgaaattgacttggatgatctgaaggccaacacggaatatataggatattcagctgcatctcctgttatccagtggttctgggaagttgttagagcattcagcaaggaggacatggcgagactactacagttcgttaccggaacatctaaggtaccattggagggtttcaaagcgctacaaggtatctctggcccccagagatttcagatttacaaggcgtatggatctcctggtcgacttccatctgctcatacctgctttaaccagttggatttaccggaatatacctcaaaggagcaattagaagaacgactgcttcttgccattcatgaagctagtgaaggttttggctttggttgattggttcctcgggaggttgtaaagcgtgcactgggtcattggttttctgcttgacatgtacagattttgaaggcaattgagatggtcagtgctatgcataacatagatcgatccattggtctttttaggagtgctcatgctgcagtagggatctaatttattattccggatagtcgatgagtatgtcgatcgggttgggtacagtagtagagctctgcgacaagagcgctgatacaactagcttccttttgccttctaattaaaaggttgaatgtaaattcgtttaatgctgataccagttctgatgatttttgtactggttcctccgattctggaggccagtgcaatttctgcaaataaataagccttctggtgaagcaatggttcttaaaaaaaaaaaaataataaactaaaactaaaaaaaaataatatataaaaaataataaaaacaaaattatataat

SEQ ID NO: 277783 - DNA, 331 bp, Zea mays
cctacgcgtccgatgatatagaggctattgatcctgattactacagaaatttgaagtggatgctggagaatgatgtaagtgaccttccctatttaacatttagcacggatcctgatgaggaaaaacatattctctatgagaggaccgaggttaccgattatgagctaaaaccgggtggtagaaacatcaggcttactgcggcaacaaaacaagaatctgctgaccttgtatctgaacatatactgaccacagcaattcgtcctcaaatcaatggtttccttgaaggcttcacagagttagttccatgggatctaatatcgctattcaatga

SEQ ID NO: 277784 - DNA, 881 bp, Zea mays
tggtcgcccagtaatatctcaacctcatttcatatctgtctgcatttcaaattagatggaaagaaaaaattattgctgcagaatagcttatatcattacttgcactatagctgatagtagtcaaatacataaacttaaatttcccaatagtagttccttttttattatatctgagagcatagtagctctttcgctaatacatcgatcacccctatactaatttctcaggttggagcagcagattatatagcactagctaggaactaccatacaattttcatatcagaaattccagcgatgagtatgaagatccgtgacaaggcaagaaggtttatcactcttatcgatgagttgtacaaccaccactgccgccttatatgcctagctgcctcatccattgatgatctttttcaaggaactgaggaaggacctctttttgatttagagagttttcagtttgaaaccgagtccgaagggacaaagctgaggagggatgttttggcggaaggcaatgctggctcaggaccatctactaccggccttgtggcgatattgtctggtcaagaagagatgtttgcgttccgcagggcgatatcacggcttatcgagatgcagaccccgctgtatctggagcgtgtgcaggctgtacatccttcgttccgtcgtcctgggcttgcaagcaataacaggcctgcagttcctcagcctgctccggcggtttgacagcctcgcgctgtaccattgcttttgctttatttcgagtttcgtgtgagaagggcaataaaaccaaccagagatggtaacagtgagacattgtaaatgattgtagaaaggttgtgattattaataagttaaaatttactatgttaaacttcaacagg

SEQ ID NO: 277785 - DNA, 519 bp, Zea mays
caaagagcgtttttcaaaaaagtaccgacacccattgttggactcgaagttgactctaaagcgcttaaatgctgaagctcggtgcatgacaaaagcaagaaggcttggtgttcctaccccagtactttatgctgtggatccagttctgcatactttgacctttgagcatgtggatggcttgtctgtcaaggatatacttcttaggtttggttcagatggggtcaatgaggaacgcctgaatgatattgccacacaaataggaaatgccattggcaaactacatgatggaggccttgttcatggtgatttgaccacgtcaaacatgataattaagaacagtaacaatcaattggttcttattgattttgggctgagtttcacttcgacaattcccgaggacaaagcggtggacctatatgtgctagagagagctttgatttccatgcattcgtcctgtggggatgtgatggagaaaatcctggctgcgtacagaaaggcttcgaagcaatggtgctccac

SEQ ID NO: 277786 - DNA, 529 bp, Zea mays
ataccttccttctgggcctcgtccggtcgtccgtcccttcgcgcccctgaaattgtccgaccgcgtggcgactcgggtcggacggatgccggtcgacgtcgaggcggcgatggccccgccccaggcggcatcggcctgcagctcgtcgtcgataggcagggacagcgacgagtgctcgccgccggggaaggaggaggaaggggagggggaggtgcagagcgcgtacgagggaggacgagggggcagcctcgctgggttggcggcgttggaggaggcgctgcctattcggctctgcaaaagacattactaagtcagagaatgcatacttcagaaaacggaagaatctctttgcctacatcatcatgtatgggaatccacatgaaccacgggcagttcaagtttatgaaactgccgcccctaagaggcatgcttgtttgagtagaaactctttggtgactttgggttgcagcagttcaggagcagcatcagtttcagcattgaaaaacatgaactgccccgaccttttgtt

SEQ ID NO: 277787 - DNA, 560 bp, Zea mays
gggaaacaattccactcgccgcggaaaccttccttctgtgcctcgtccggtcgtccggccgttcgcgcccctgaaattgtccgaccgcgtggcgactcgggtcggacggatgccggtcgacgtcgaggcggcgatggccccgccccaggcggcatcggcctgcagctcgtcgtcgataggcagggacagcgacgagtgctcgccgccggggaaggaggaggaaggggagggggaggtgcagagcgcgtacgagggaggaggacggggcagcctcgctgggttggaggcattggaggaggcgctgcctattcggcgcagcatatccaaattctacaatggtaaatccaaatcatttgtgtgcctgaaagaagctataacattttcaggctctgcatgagacattactaagtcagagaatgcatactccatagaacggaagaatctctttgcctacatcatcatgtatggaaattcacatgaaccacgggcagctcaagtttatgaaactgctgcccctaagaggcatgctagtttgagtagaaactctttgatgactttgg

SEQ ID NO: 277788 - DNA, 356 bp, Zea mays
cagatggtctccgggagcacttgctgtacgtggacggcggcggagcggcggcggtagccaggatacgggtgcgccggctgcggcgccgcgcggacgcgaccggcgaggagatcctccgcggcgtccacctcgacgtgccgcgcggggccgtcatgggcgtcatcggccccagcggcagcggcaagtccacgctgctccgcgcgctcaaccgcctctgggagcccgcgcccggcgccgtgctcctcgacggcgccgacatctgcgccctcgacgtcctcgccctgcgccgcaaggtcggcatgctcttacagctccccgccatgttcgacggaaccttggctgacaacgtacgatac

SEQ ID NO: 277789 - DNA, 571 bp, Zea mays
tgaagacattccaaaggcgactcagaggtcgaagaagactgcttactcatctgacatccaagttgaagtttagtgaaaggaggaaaagacctaggtctgtagaaaacagcgcagacggtgtgagcaacccgacgtggacgcctgacaaaggaagggctggagtttcatcatacagcaaggacgagactgaagatgatggcgaagacgaagtcattactagcggcttacaaaagggaaacagtttcacatggaataccctaggaagaagaaggtcaagccacttcagttcgtcatcggactcgagagggcgcccaacattctaatggcaacatacatgaatgttatggcctcgacctgttggttgatggaatacccttgtagagcagggctgcgactatgactgagtaccttcaagcttatgaactttattaggattactagtatactgtatggacttgttggcatgaatttgtaactcctttaaatattaattgtttaaacaactggtggtgtttgctctccccaaaaaaaaaaaaaaaaaaaagaaaaaatttattaaaaaaaaaaaaga

SEQ ID NO: 277790 - DNA, 547 bp, Zea mays
ctcaaaataatatctgctaatgattacatgctacttgttctctacctgtagatacatcaaggaaggtagcactgtaagtgtgatgggggttgtccaaaggaacgacaacgttctgatgattgttcctccatcagagcccatctcaactggttgtcagtgggccaagtgcgttctcccaaccaaccttgatgggcttgttttaagatgcgaagatacttcaaatattgatgtgataccagtttaactggcggtggaagggtcgttgccaaaaaaagtgcctgttaaatatttgagtctattgtttcatggaatgctagttgagaaaaatgtgcaaatgttgggtgggtgtgattatggtaggctgagggtggttggttaagctggcctttggatgtatagttttttcttcttcttttaattgtgttttgttgtttctttttaattttcagttctgagatctgaaacttgtgtaaccacatgccttttaatctaaatctgcgtggcatttagatcgatttgaaagcttcagggtgacaggacttcgcct

SEQ ID NO: 277791 - DNA, 828 bp, Zea mays
tgacaggttgttacttgtggaaatttccccctcgaatcctcgttccaaagggttccaagatgcgtatacacttctactggcttgtatgagtacaggggttgggattccaaagctgccaataccgaacatcggcgttttacatggggtttacgttcaatggagcgacatgcggttgatttctacatttcagattttcagtccgggcttcgagcattggtgaaaacaggatatggtgcacgtgtgaccccatacgttgatgaatctgttgtaattgacatcgatccagacaacaaggatatgtcccctgattttttgagatggctaccggagagaaacctttcaagcgatgatcggacaatgcgcctaaaagaaggatacatcaaggaaggtagcactgtgagtgtgatgggggttgtccaaaggaacgacaacgttctgatgattgttccttcatcaaagcccatctcaactggttgtaagtgggccaaatgcgttctcccggccaaccttgacgggcttgttgtaacatgccaagagccgtcgcccattaatgtggtcccagttaaattagcggtgaagagttgttgccaaagaaagtgtccgttaaatatgagtgtgaactgtttcatgcaatgttagttgacaaaaatgtgcaaatgttgggtgtgattatggcaggtgtagggtggttcgttaacctggctttggcacgtatagtttccttgtcattgagttgtgcttgggcgtttcctgttaatttccagatccaagatctaaaacatgtgtagccaaatgccttttaagttaaaacagcgtggcttttagatc

SEQ ID NO: 277792 - DNA, 303 bp, Zea mays
atattcatcttcgtcgtagccatcagaatcatcatcacaatcatcctccatatagtaatcctcttcttcttggacttgttggggttctggttctgatatttgcagagaactacttgagctggaaccagcttgatcgctggaagaaccctggcaccgctggcgcttctgctgctgcgcggctccacacgacacggcgcccgtcgtgtgccacgacgaggagctcccctgctgcaaggactcggtgtccatgccgccgtcgggacggcgggcgatcgcgttgctacgaggggtcggcgatcgatc

SEQ ID NO: 277793 - DNA, 418 bp, Zea mays
cggacgcgtgggcggacgcgtgggcggacgcgtgggctagactcctagtagccagaccactagtcccgcgaccctgtcgagagaaacagacagagcaacatggcgcctgcattgtcattcccgatcatcgacatggggctgctcgccggggacgacagcccggcggcgatggagcggctgcaagatgcgtgcgagaactggggcttcttcgagattctgaaccacggcatctcgacggagctgatggacgacgtagagaagctgaccaaggagcactacaagcggctgcgccagcagaggttcctcgagttcgccagcaagacgctcggggacggccgcgacattgcgcagggcgtgaaggcggacaacctggactgggagagcaccttcttcgtccgccaccttccggagcccaaca

SEQ ID NO: 277794 - DNA, 460 bp, Zea mays
agctcgtccacttccagttccactccgctagaaagcttgaacttggatgccgagcctataaatggcgaccgaccccggccacttccactcaccgcactccagcgttcagcattagacacgagagctcctagtagccagaccactagtcccgcgaccctgtcgagagaaacagacagagcaacatggcgcctgcattgtcattcccgatcatcgacatggggctgctcgccggggaggagaggccgccggcgatggagctgctgcacgatgcgtgcgagaactggggcttctgccagattctgaaccacgggatctggacggagctgatggacgaggacgagaagctgaccaaggagcactacatagcgcatgcgcgagcagaggtatctctagtgccgcagcaagacgcacgactacggccgtgacatcgtgcagggcgtgaacgacgagaacctggact

SEQ ID NO: 277795 - DNA, 612 bp, Zea mays
  unsure (1)..(612): unsure at all n locations
cggacgcgtgggcggacgcgtggggcctcgccgagctccgcgtgctcagcctcaagggcggcgcgctccacgggcccgtcccggacctctccccgctcgccaacctcaaggcgctcttcctcgcggggaaccgcttctcggggcccttcccgccctcgctcgcctccctgcgccgcctccgctccatcgacctctccggtaacaggctctccggcgcgctcccgcccggcatcgaggccgccttcccgcacctcaccctcctccgcctcgacgccaaccacttcagcggcaccctcccgccctggaaccagtcgtcgctcaaggtgctcaacgtctcctacaacaacttcttcggggccagtgcccgtcacgcccgtcatctcgcaggtcggcgccgccgcgttcgcgggcaaccccgagctctgcgcagtgtgggtnccgcccgcgagtgccgcggctcccacctcctcttcttccaagggggcggcgcgaacggtaccgtcgctccccctgtgcagagcgctgctgctagcgacagcgggccgcagcgggagaacctgagcgtgccggaattcgccgagccaaatgcgaagagagcgaggcggaggatga

SEQ ID NO: 277796 - DNA, 607 bp, Zea mays
cccacgcgtgcgctcgcattgagaaattctttttgcgggtgtcgagctgagcatccggtactgcttcaaggttgctatttatgcggagtttagaagggattggccagaagcattgaagttctatgaggaaggcgttcgtgtttcgcgtgagatgattgggtcggcgacaaggctgcctccaacccaacgcctagttgagataaaagcagttgccgagcaatttcactttaagatatcgaccttgctacttcatgctgggaaagcggtagaagcaatcacatggttccgtaagcatatcagaagctatgcacgggttcttggaacaccagaagttgcttttcttcactgggaatggtttagccggcagttcctcgtctttggtgagttgatagaaacaacatctacaactattccagatacattatctcctagatttggcactgcagactatggattgactgagtgggaatgtcagccagcatactactatcagttagcggcaacttacttgagagagacgaggtatgccatcgaatgttcatcatcaatggctaatcttacaacagaagttaatggagtacctgagtcagtaatgccttctgtatat

SEQ ID NO: 277797 - DNA, 824 bp, Zea mays
cccacgcgtccgcttcctggaaggcggctagggctttgacaccgacatcaccggcaccggcgcgctgcgcatgatgcccttcggcgccggccgccgcatctgccccgccgccacgctcggcgtgctccacatccagctcatgctcgccaacatggtgcgcgagttccgctggctgccgcccgccggtgagggcccgccggaccccaccgagaccttcgcattcaccgtcgtcatgaagaacccgctccgggcagccttcgtcgagcgggccacgacggagacggcgacaaccgcgtgatgagcgacaacgaaaagtaaaaaaaaacagagagaagttactagtacaagttactctttcactgggctctggcagggtgggtaagttgctgcaacgtgcgtgtcgtgcggggttaattcggtcccgcactctgcggtataaattacagttattaattaattagtccacggggaaggtgcgtgatcatcatatactgtatggatggattgatcggttcatcctacctgttggctggtcgacggatggctggatggacacgtgccgccaggcggatggatggggttcatgggaatgcaacgcacgatgctgtcctcatatcataatttttttttctttagtgtttctatgtgctattaattttaatagtagaagtactgtttcttagccttctatttctcttttctctgttcaatttcatccaaaagtgtacctacgtacgtactagctattgcatgatcgatgtggtcaatatattggttgtcatctcatgtgcaaaaatccccatgttaaatgattttctcttggg

SEQ ID NO: 277798 - DNA, 602 bp, Zea mays
gcgactcctcccagtcttaggctcactgtcgctcctcccaagaacccgcccaaagaatcctagaaatccaagaaagggagcaaccaaaacaggaggaggtctgcaggaggaggagcaggtcagcaggaggaggtggtgctgaaggggaagatctcacaagtgtgtgaagaccacacagtctcgcgcactcgcaaacccagtgcgcgctgcggtcttcctcttcgcccaccttcttggagcggggaggttggccatgaggaggtggtggccggctgccctgctgggctgcgcagtggcggtgtccgttctggtggccgccgtggaatgcgctgtgacttacgacaagaaggcggtgctgattgatgggcagaggcggattctcttctccggatccatacactaccccaggagcacccctgatatgtgggaagggctgattcagaaagctaaagacggaggcttggatgtcattcagacctatgtcttttggaccggacatgcgcctacgcatgaccattactatttcgaggagaggtacgatttagtcaggttcataaagacggtccagaaggcctggctgtttgtacatctccgcatcggtc

SEQ ID NO: 277799 - DNA, 978 bp, Zea mays
gccttgggttcccccgccgccgccacgttcgccaaggtgccggcgctgtacgggatcttccgcctggcggttcgggcgctgcacgcccaagtgcgcatcgagctcaacgcgcctgtgaaattggggaagaaggatgccggtcaaaccggtgagggaaaggaggaggcattggtggtgctggccacacagctcgctagagcagtgcaggcactgtgcaggttgagtgtcgctccgggcaaggctctgtgcctagggatttgctgatgctgagcttcgggataagcttactgctggcgtttgcgtcgatgatttgagggggatgcttgacaaggttttgattgattcagatgccgtgtcagtcttgaagggggtgtacaaccacttgctcaagttcagggactttctctcctgggaagcagctatggccatggcagtaattgaaacagacagttcaattgagaagccgcaatctgctgttgacaacgaagcagccggtgcaactgagaagccactggctggtggggacaaagcaaagggtgacaagaagagcaagaagaagaaaactttgggtaagggtacttctgctgtgctcatgctgcttagggaccatgtgacaaatggaagtactgttgctgccatgaattctgcgtcggttgcagagtgggcaacctctctgtcattgctatttgatcccaaatgtccaggattggagtcacttgtggagaaagtgaaggagattgttgagagcaatgaagtgaggagattgcctaaaattccaaagggtacacgcgactttggtaaagagcaaatggcgataagggagcgagcattttcaattataactagtgtattcaagatgcacggtgctactgcgcttgatacccccgtatttgagctgagagaaacccttatgggaaaatatggtgaagactcaaagttgatatatgacctggctgatcagggtggtgagctttgctc

SEQ ID NO: 277800 - DNA, 484 bp, Zea mays
cccacgcgtccggcgctgggcgcagcagggccacatggtctactactactgcaacgacttccgcagggaccactcgctcacgcccgagtgctagcgagcgcgcctgtctgctgtgctgtgtcgtcgtccttgttgctttgtgctttgtttcgttgttgatgaaaaggtcgctaggcgtggctgccctactaccgcccgcgcccgccgccgctctctctgctcgcggtgaccgaggcgcccgcgcgagccggctcgtttgaggcgttggtcgttggcgtatcgccagcaaactcgtgtcgtcgctcgtctacgtacgctcgcgtacccattgcatttcttccggttgttgctttccatttggtctcgcatcgcatgcatcacacgaggcgccccaaagggggcaagcgcttccatgattcatacggatacactatgtataccatatatacacatattatatatatatttaatacatgtttcctgt

SEQ ID NO: 277801 - DNA, 458 bp, Zea mays
ctctccctctcttccgccatccccagctcagcccaccacacagtcacagcctccaccgccgcggcgcgcgcggccagccagccagccagccagccatgaggcagtggaaatccctggtcccggcgctgcacctgcacgccccggcggcctcctgcttcccgcacccgccgtcgccgtcgccttgcccgtcgccgccccgcggggacgacgccaccacgacgccgccgccgccgccgccgcacctgcaggcggtgcggctggtgggctgcgacgggcgcgtgcgcgcgtacgctccgcccgtgacggcgcgggagctgatgcaggcgcacccgcggcacctggtgtgccgcgccgacgcgctgctcatcggcgagaagatccccgccgtggcggttgctcgatgagcttgtgcccggtgacgcctactttcctgctgcctgttcacctgtttcgttccg

SEQ ID NO: 277802 - DNA, 629 bp, Zea mays
gcctcaaggaaatggccttgcttttacggtatcttcccttacaataacattggtggttcacagctaatttggattgcaccgagtggtggtagagatcgcccaaatccttcaacaggagagtggtacccgggcaggcgcattttgattcatccacagtggacaatatgaggaggcttctggagcatgctggtgttcctgggcacatatatccactatcattactgtgctacgaggttatgcctccaccacaacaggtcgagaaagagattggtgaacagagggtgatatccttccatggagtaggcttgtcagcaactgaagaaacaaagtatggggatattacttgtcataccaagaatgctgatgagggaagggagctattcacaaatactttgtacaactcagttgttaatcagtacaatgtcctcaaatctgctatctttagagatcgtggagcagctgtatcaaacaatgccatctcactgtcacaaccatggcgatgaatgttagctttcccagtccagattcgatactgaagttaccttttcagaagaacaggtgaactgcaattgtgcaaattttctgggaaaaactcttgaaagttaatctttctgatatcactggacttt

SEQ ID NO: 277803 - DNA, 722 bp, Zea mays
aatatattgtgttttataggtagctcggcagcccacttttgtctctagatctgccactgtgcggaaccgctgctgcccggcccattctaccaccgatccatggcggaggattcggcggcggcggcggccacgtggggcggcggcgacaagctcattctgcgcggccttcagttccatggcttccacggtgtcctgcaggaggagaagacgttgggacagaagttcgtggttgacatcgacgcctggatggacctcgccgctgccggcgagtccgactgcatcgctgacaccgtcagctacaccgatatctacagcattgcaaaggatgttgtcgagggcacgccacgcaacctcttggagtcggtagctcactcgatcgcagaggccacgctgctcaagttccctcagatctccgcagtccgagtgaaggttggcaagcctcacgtcgcggtgcgaggcgttctggactacctgggcgtggagataacgaggcacagaaagaaagaatgagatgctgtacacatgtggtgatggggagccagttcaatgctgatggcactgcggccataaccataatccacgcacgcttgttgcttgttggcaactaggcatatccctttcacctctgaactgttggaatatcgggaaatctgttcccctagttgctttattacgaattcagatcttctctgcgtagtaagatcaaccttcttctggtctgt

SEQ ID NO: 277804 - DNA, 592 bp, Zea mays
agctgattccttcgcatatccccaaagcaagctcgagtgaagaaactcacgaaatctgaagccagctgagagaggcggatggggcagtgcccgtgtttcgggtccgcgaaggcggcggagcaggagcggcgggcggaggcggaccggcgcgagtcgcaggatgctcgcgccaaggccgccgaggccgcgcagaggagacagcaggactatgagaaatcggcagctggaagggcagccaaagcacaaatgaaagcaatgaaggaatcaaaggcatcaaaccaaggtggagagccggttcttaagtggcagatgggatcatgagtttcgtttctgttgatttgcatccctccgcttacttttgatggccgacagaaaattgattgcgactaatttctgataggatgcactgtgattgtgtgattatgccagtgaagtgtacatccggtttaccatctgctatgctgtacatgctatcccatagactgcccaacttcccagttaaaagtcacaagtttgtgtttgtaagtgaacaaaatatatattttatgaacacatgtagtctcgtagcatttgcatggaggcttttcccccc

SEQ ID NO: 277805 - DNA, 727 bp, Zea mays
  unsure (1)..(727): unsure at all n locations
ggagaatcttctggcatgcatgtgaattcaaagccacggagacctcatgttgatgatgatcttgatgagcattcaaagcgttctagggtagaagatattgaccaatatagtggagaagaatattctgagtgatgaactgataaatcataattatcttgcaccaacgaattttatcagtacatgtgaagccttaaaaggtttcaagcaataggcacaagtggtttcatggtgcatggtcatgcagtgaaagaaaatgtctgacaacaagaggacattggggcttggccaatttgttgatctctgtagtgataatagaaagcgtcacattgttctaaagaagttgtcttcaaagtcttggatgatgcgtatattgcagttgctccacatgttccaggatagtgaaattttattcatggttgcctgataaagtgtggaattatataaattttcagcataaattgttttattattaacgttcgtttttgcctaaaataatgcataagtatatgagatgataaaagggtaatcatgaagcattctgtggtccggtggcccttaagttgcaattctattccagcacanagtgacaatgatatgatgacttttggtctggtattattaattctggacagtaattcagtagctgtggtaacgggcaaaaaatttttcccccccccttttttttcccacaaaaaaaagggggggggggggggggtttttttttttt

SEQ ID NO: 277806 - DNA, 469 bp, Zea mays
aaacagcacatggtggtaccatggagcgcggagaatcttctggcatgcatgcgaattcaaagccacgaagatctcatgttgatgatgatcttgatgagcatccaaagcgtactcgggtagaagatattgaccaatatagtgaagaatattctgagtgatgaactgataaatcataattatcttgcaccaacgaatttgatcagtacatgtgaagccgtcaaggcataagtggttttatggtgcatggtgatgcagtgaaagagaatacctggcagtgggaggacatcatggcttggccagtttcttaagggcagagtatgtgaagcaaagctgagtgtaaccagacttcaagactttgatctctgtagtgatcagagaaagtatcacattgttgtaaagaagttttgcctttaaagtcttggagcggttctcaactgtttgttttccccatatatagaccccccatttt

SEQ ID NO: 277807 - DNA, 1404 bp, Zea mays
gattaagcaatgcttgaaaaattgaaggcaaccgaaagtaaaatacctatacatattcgaaaggttagcagcaggattttctgtttttagtgcttatttgattatggttgatctatgttgctgagacaagcgtttagaatggttattcggtctcaagtgacagaaaatttgacagttgtttatatcatagaactgccactgattcttgcatttcttcttttttattgttgcctactgttcttaatttctttaatgtagccaaaggcagaacaactggagcagatatctcagagtatagcctcagtgctggttaaatttcccaatcttcaggaattgggtaaaagggcttttgttacctatcttgaggcagtatacctccagaaagacaaaaaagtgttcaacctgagcaggttctctgcagagcagtttgctgcatatgctgcttcgcttggtctgcctgttacccccaagatccgcttcataagccacaagaagaatgtgtcgaagaaggatatggaggacattgatatgaaacagatgaaatccagtttggaacatgaagttaccatcactccaaagatcaacattgatttaactttgtgtgatggagatgatgatatcctttatcccaagaagcccactgcagatgctaatatggatgacagacttgatgatgtccttcatcccaaggagtctgccacagatacaaatgtgactggacttgaaagacccttcaaaaagaagaaactgaagataaacgtgaacaggccatcaggaacaagggtcaagtatgatgatgagggcaacgccatcccacctcttgcatctgtcgctgaagaagtatctttagaacctgtggttcacaaggataaaatttcccagcggtatgcagagatgttgagagaaatgcggaaacacgacaaggaggacaagcttgaacacaagaagaccttgcgggagaagaagctgcagaagaagatgaagcttaagcgcaagaggcaggaagacactggagcagggtcagaggaggatagtggatctgaatcagacagaggccaagacacagccaacaaaggtaaaaagaggtacttcaatagcgacgatgaagacaatgacgcagcaaaggacggtgatgttctcgcccagcaggaagcgttggcactgaagctcctgagtaatatgcacagttagctttgggatctgatggtataggttacccttgaatgggggtttgcctattagcgctccagccaggaaggggctgaaattttgaacgtgtcgcggttttgtttttttctgataaccgggagttaattcccacattcaggcatacgttcatggatgtatgaaaaatcagtgtggccgtattaccccaagaaatcggacttagatgaggttttaagt

SEQ ID NO: 277808 - DNA, 648 bp, Zea mays
ttttcttcattcttgagcttcttttttatgtacatctgactgtgtgtatggaactgaagaaccagagtagtttgcgttcttcagatgtcgacggtggtcatgggggtggatcttgagtgcgacaagtgctacaagaagatcaggaaggtcctctgcacggtccaagacaaggtgagcatcaggaccatctcctacgacgagaagaacaacacggtgacggtgtccgggcccttcgacgccgaggaggtcgccgacaggctcaccgccgacgccggcaaggtcatcaccgacatacacgtcgtcgggggcttcggcttcggcttgggcgggggcggaggcggaggctgagggaaacaacagaagcacggcgccgtcgcccccggcaaggcgcccaagccagggaaggccagcggcaacgggcacggccagggcgggcacagaggcggaggccatggccgccgcggctgaggcaacgggcactgccatggccaggccagcgggcacggaggcggaagccatggcgggcactgcagcggaggcaaagccgcgtaagaataagcacgtcaagttcgacgacatggacatggacgacgacttcgacgacctggacatggacgagccggacggcctgcacgcgcacgcgcacgc

SEQ ID NO: 277809 - DNA, 429 bp, Zea mays
gggacctacgacatgatcgccgctgtagctgctgatctctgctcctcgtgcaccagcgacaaaggtggcaggcacagagagagctagctttggccaggcgtccacagcagccagcacaagatgtcgacggtggtcatgggggtggatcttgagtgcgacaagtgctacaagaagatcaggaaggtcctctgcaaggtccaagacaaggtgagcatcaggaccatctcctacgacgagaagaacaacacggtgacggtgtccgggcccttcgacgccgaggaggtcgccgacaggctcaccgccgacgccggcaaggtcatcaccgacatacacgtcgtcgggggcttcggcttcggcttgggcggtggcggaggcggaggcggagggaaacaacagaagcacggcgccgtcgcccccggcaaggcgccc

SEQ ID NO: 277810 - DNA, 1294 bp, Zea mays
cttcctatgattccaccatatggagcaccgccatatgtcatgtaccctcctggagtgtatgcacacccatctatggcctcgggtgcacatccatttactccttatgccattacttctccaaatggcaatgctgatgctactggaactactgctgcagctggtgatactgatggcaagccctctgaaggcaaagataaaagtccaacaaagcgatccaaaggaagtttgggcagcttgaacatgcttactggaaagaatcccagtgaacatggtaagtcctcaggtgcatcgggtaatggagtcacttctcaaagtggcgaaagtggcagtgacagttcaagcgaagggagtgaaggaaattctcacaatgattcacatcacaaggaaagtggacaggaacacgatggagatgttcgaagttcccggaatggtgcatcacgttcgccatctgagggaaaattgaaccaagctatggcaatcttgcccataccatcaagtggcccagcaactggtccaactacaaacctaaatattgggatggactattgggccaacacagcaagctctgctcctgcaattcatggcaaagcgacgtcaacaacagttccaggggctgtggtcccagcagagcagtggacacaggatgaacatgaactcaaaaagcaaagaagacagcagtccaatagggagtctgcacgtagatctaggttgcgtagacaggctgaatgtgaggacttggctcaacgtgctgatgttttaaagcaggaaaatgcttcacttagagatgaagtaaaccgtatcagaaaagagtatgaggaacttctatcaaagaataattcactaaaggaaaaacttgaaggcaaacaacacaaaactgatgaggcaggacttaacaacaagctgcaacattctggcaatgacatccagaaaaaaggaaactaatcgagctatcatgcaatgcttgcatagcatggccctaactagattattgggaggcgcaattgtagtatgcgtgttaactccttactttattgcagttaattgttaccaggttgtgataatgttgatgccaaccttgtgtgtgggtgtttcctgtttcagatctatcttggcttatcttttagaagccaagatgtgactgaagctgtaggctgtgacccagttcactgtatctgaaatagtggataaactcaaatttacaatttgtattgctgactaatattgttatgtatacctggcaaaaggttttcttttccccccaaaaaaaaaaaaaaaaaaaaaaaaggaggaaaaa

SEQ ID NO: 277811 - DNA, 624 bp, Zea mays
accccgagcgcgagaactagggcgaccgcagcacttcgcccctgctgcccatgtcttcgtcggggcctttgccggcgaccggaacccaccacggcagtcaaagggcagagtgtaaatcccagggttccacttctgcacgcaaggtacaaaaggctgatcggtgagaagatgcgaagagataaattaaacgagcagttccaggacttgggaaatgcacttgatccagaccgtcccaggaacgataaggcaactatacttggtgacacaatccagatgctgaaagatttgactactcaggtgaacaagctgaaagctgaatacacgtcactttctgaagaagcgtgtgagttaacacaagaaaagaatgagcttagagatgagaaagcttcactgaaatctgaggttgataatttgaataatcagtatcagcaacgaatgctggtgctatacccatgggttggaatggagccttctgttgtcatggggccacctcctgcatatccctacccagtcccagttccaataccctctggtgctgtacccatgcatccgcagttgcaaacataccacttcttccacagtcaagcttctggaaccatcccatacacatgcatcccttacatg

SEQ ID NO: 277812 - DNA, 771 bp, Zea mays
cggacgcgtgggctccatcactgatgccggggatcactacgttctgagatccaatagtgggagcgaatacgagtgtatggtgacggtggtggcaaccccactcgacgagctgaacattacgtttagccctccaatctccattccgccgaggaagatgcagcacacacatgcgacctttgtgagaggcatattgaacccgggatattttggtctgaactcggcatcagatattccagagctgattggtaccctagagctccctgatatccctttctcctgcatctctgttctgaagaggtacagcgaaggcgacatggcggcgtacaagatgttttcacgggcaaagctggatgatggtttgctggatcagatcttcagggctcggatagagacgatccggatcaactgggctgcttacccgcactaccaagccccagaggagtttgctccgatagtgttggacgggaagcagctgtactacgtgaacacctttgagagcgccgcgagcgccatagagacgggtgctgtagcagcagagaacgtggcgcggctcatcatctccaggctctctctactaccgcaggcacagcagcagcagcctcatatcatcaagtcattcgccgaacaagaatcccagcgtcgccatgtagacctgtgaaatgttgtaatggcattgtagccagttttatcccagctagcattttggtacatttatttatgtatttgaccaatggtttggtttgtaaatggatgatatagttagtaattgtt

SEQ ID NO: 277813 - DNA, 448 bp, Zea mays
gaaatccccagctgagcctgcccaagctttctcattttcaagaccgcagcaaactcaggaattataccattcaaatcccagttcaatcttctcatcatcgttgaatgtaggattcagttcaaagaatgaccgttctactccaatcaacagtcatttgtactggacaatgaggcagacaagaactgaatcctactctgctagcattaacaaagctcctactgacaagaagcaagaatctgctacttctggctgcagattgtttggcattgagataggttctgcagtatcaccagtggctactgttgctagtgttggccaggatcagccacctgctctctcagtagacgttgaatctgatcagctgtcacagccatccaatgccaacaaaacggatgccccagtggcaagcagcgagcgctctcttaacgagtcagagagccggcaagtc

SEQ ID NO: 277814 - DNA, 807 bp, Zea mays
ttttaaacgaagatggatacattgatgagaagtttttattttgggctagcctttgtttactcgcttaataacacgtcattcttttttcatgttaatcttattatgagtctgattcaatggactatcccttagttttctaatcaattagcacagggtcatcaaacaaatgcatgcgtctgatctggtgtcaatcttgaaactgtcaaaaactaaactataggctcggtgtttctgctcactctttccaagccaggacacatggcaatgcgattgtaaagaggatcatgcatcgcgttgttttggtggttgtgcaggggagttgcagtaccgggtgtcgaaagcgagtctggatgaccggctgagcactgataccctattctccagccgtgccataagcgaagactgcagggttctcacgatccacggcgccaaagacgagatcgtcccggcggaggacgcccggcagttcgcggcgaacatccgcaaccacgagctgcgcatcatcgcagatgccaaccaccgttacaccgggcacagggacgagctggcctcgctggtgctgggcttcctcagctcccatccctaccagaccacgtcgcgcttgcgtccgagactgtagatagagtagagcacacccacttgaccgtttgcgaacaaacaaacacaaaaaaaaatcccctgtaccaatccaagagttgtgggtatggtaatgtgtttatccagaaccagaacacgagcacctgccgtccaaatcagcgtgactcgctctcgctctagaatttcaaaaaaagtcagtgccaggcatct

SEQ ID NO: 277815 - DNA, 692 bp, Zea mays
cacacgccaaatttacagctagttagctgaattcgatcgatatccaggaactaataatccaccgacccccctcatggcggcttcgtcgcgaatgggcttatccgtctacctcgccatcatggcggcggtgctcgcctcggcgctcggagcggagctcaccgcggactactatagcgagacgtgcccgcaagcgctgaccaccatcaagctcctcgtcggcgccgccatcctgagggagcccaggatgggggcgtcgctggtccgcctccacttccacgattgcttcgtcaatggctgcgacggctccatcctgctggacgacaccgacgacatggtcggcgagaagacggcgaagcctaacaacaactccgtgagaggctacgatgtcatagacaccatcaagtcggcggtgaacacgatatgcttgggcaacgtcgtctcctgcgccgatatcttggccgtggccgctcgcgattccattgtcgctctgggaggaacctcgtacgacgtgctcctggggcggcgcgacgcgacgacggcaagcatggacgacgcgaacaacgacatcccgacgccgttcatggacctgccggcgctgcaggacagcttcgagtcccacggcctgtccctgcacgacctggtggtgctctccgccggccacacgctgggctactcccgctacaacttcttcc

SEQ ID NO: 277816 - DNA, 450 bp, Zea mays
acttgaagaagctgaaactctcagctgggggactcaacgtgatacaatgcaacagggaatggtgggatgggcttgagtgggatgatgaggaagtcaaagcttcttatgagccattgttccgcccattgcactgaactcagttttggttgctagagattcttctgttattttagaggttgctcttccccgtgcatgcagtagatcgcgtgaattcagagatggccagtctgcactctgcagtgggtgtgatcgtttgtatttgtccagcttgcaagtacaagttgggcgattctttcttttttgcccagctcgtgttctatagaaagaccagtcagcatgtgtggcagccaggaaactggcagatgtaactgtcgaaatctcctgaacagaatggctggtggataccggtacaaccattttctctaattctccctttctgctctctgtgag

SEQ ID NO: 277817 - DNA, 607 bp, Zea mays
atttctgtttgtggtttgtttctcttaattccagttggtgcttatggtgcaaagcaacagtaagtttttctgcgtaagatttgttatttgatttggccgaataacttcgagaaccatacagactaatctgtgtatggtgtgcccgatgatgatagaagtcaaggcttgtttctctacattcgcagttgccgcctaagagctttcgccctgccaggcttgagagctaatgctgctaattccttccttggatgtctgagggcacaataatgccagataattttgctttgaaatctgtttaactgttgttaccctggttttatagttttaattattaaattttattttatttggaggatgtgtaagagtatgcaggctttgtgggaagattttataagaacatgcgaggttcgtttgaagaatttaactggtttctatggataaaagccagcttgtgtggactgtgtcatctgcaatctctgtagaagcaaccaacagagtacggattaaaagccaagtgaatagactgtatgatgtagattctgttgtagatcttcataggtcccattgttaacactataaatatgttaatcctccatgcggctttcct

SEQ ID NO: 277818 - DNA, 594 bp, Zea mays
cccacgcgtccggcacccttctctcagtctcagcgccgtctttcttcgttacctgcccccgctccccgaaggctcgaaccctttacagccggcgaagaagatgcacctgtggccatcgctccggatccgcgactcgttcaagcacggctacctccagaagctggagctcaacctcggcaacatgaagcgcgcgcagcggcagcgccagggccggcagggagagagccaggaggaccaggacggccagcccggcggcaacgggaaggcgccgctgctcgaggaccgctcgccatcggggtccgtgcttgccggcgcgctcgagctcgcctgggacgccgtcttgctcctcacctgctgctgctgttgcttctgctgcggagcttggagcgacgaagaggatcacccaactgcccgctaaggagcaacttcaggtgcctgataattcatcagatcacgaaaaccagataacttgtgggcataatggattgcaggcaaatagttcatatagttttggtcagctttgtacatatgggtttctaatcatacttatgccgccctagatgtcattgataaacggaaaggatccctaatttt

SEQ ID NO: 277819 - DNA, 583 bp, Zea mays
agctggcggcggtagtagttgaggcggtcgccgaggtgggcgcgatttcgagaaactggggggcgaggagagggaagcggtgacgaagttcttgaaggagagggaggtggacgccgagctcggcggattcttgcacgactacatggcaaacaaggagaagatggagctgctccggtggttgaagactgtcgaatcattccttaacaagtaggataagatcgcacacagaagacaccgtcgatgttactgcctggtttgggaacgggtacgctccaacaacaactcgtgacggtcttctgcagtctctgtgatcatccgcatctacccctctgctgacaattgtgtgctgaaaatgtttgtttttaatcagcttaaatagctcagcgcacagcgctcttggaaactggtgatctgaatatcctactgggactttcatttctttgtgataagattgttctcaacggtgtatcttttaagatacaccccattggggtttttttcccttttgcaatataccaaatctcattttggatttccaaccagttgctatgtgcgtgcttagagtaaaaatctgctcttctgc

SEQ ID NO: 277820 - DNA, 573 bp, Zea mays
agcatccgaagaagtactcagctcgctacgtgtgctcactggtggctgatttccaccggacgctcatatatggcggggtcgctatgaacccaagggaccatctgcggctggtttatgaggcgaaccctctcagtttccttgctgaacaggctgggggtagagggtcagatggcaagaacagaatcctcaccattcagcctgtgaagttgcaccagaggctgcctttgttcttaggaagcatggatgacatgcttgagttggaaagctacggagatgtgcagcagaaggtcaatcctggatatgaagtttaacgatatgtaaaaaaaggttcagattttttcaagcgcccaagcagaaaataaggtaacactcgtgtggcaaccctgtatctgccgatactataccttgtcttttcctctcggtttttagcccaccgcaacttgattgggactaaatccagttgttgtcattgttgttcactcttttctgccaaaaattgctgtacttctcagtgaatgtaagttttatgattggcagcttcctcaaccctgcacgcttatatgtgaataatag

SEQ ID NO: 277821 - DNA, 757 bp, Zea mays
cccgcgcggcccgcgcggcgtgctctccgttcgaaccgatgcccatctgctgaatcggatcggatcgtgcgatcggccgccacgccacggcccgcgggtgaggcgtggtctccgggaggcagccaacctatcccgcccggtctagcctctagcgatcccggcgccggcagcgcgcacgagaggaatggacgcgtcgcacccggagggcgaggccacggcggggtggctgacggtcgaggagtggagcggctcgtcagcctccgcgctctcccgcaccgccgtcctcaccgcctccgcctcctctctcaccgcacacaggttcggcagccggtgggagcggatcgggagccgcatgctcggcgccttcgtgcctgagggctttcctgggagcgtgactccggattatgtcccgttccagatgtgggatacgttgcagggtctctccacatacatccgtgcaatgttgtctacacaagctcttctaggggcaatcggagtgggggaacagtccgcaactgtcataggtgctacttttcagtggtttctgagggacttgacaggaatgcttggagggatattgttcaccttttaccagggatctaatcttgatagcaatgctaaaatgtggcgtctagttgcagactttatgaatgaccttggaatgttgatggatcttttgagccctctgtttccttcatcgttgatagttataatgtgcttaggcagcctgtctaggtcattcactggtggtgctagt

SEQ ID NO: 277822 - DNA, 418 bp, Zea mays
cccacgcgtccggatactttcagttggttgtgaactataagctttgcgtcccgcggcgtggaaggaaatccacattacaatggtagtggcattttatagatttatagattggcataccactattcaatggtagtggtgaattatctagaagcaacaaagcaacagatttaaaatgccagttatagagttaggcttagttttagttaaaatattagtggtgaattatcggaggcattcatccagtccacaccctcaacataccgagttaggctcagttttagttaaacaacgtcttggtttcttgtgcctactgatggcttttcttaatattatatcaatgacatcttaggttttggaaggtggtgcagttgtcaggactcttatagatcatagtattccttctaatggggatatcaat

SEQ ID NO: 277823 - DNA, 488 bp, Zea mays
ctcctgggtcctgatggggaggaattgcgtgtgttggttgtgaaagaggcaggtcgtgtgacagaagccatcactattggaacactgatcgattcatacaatgcatctccagcgtttttgaagccattaatttccagtggcaatccagccggacccttcaagtttagtgaggctgaacaagaacagatgttggagctccgagaccaggttttcagagtatggggtcttttgagatcctcaaataactttgatccgagccttttgcaaccaatcgttcaggttctacaagaaccagaggcccgtgtcttgggttctcgtgtcgcaggtggtgtaacacagcgccttgcggcacgtctgctgcaacagcttctcaggacccctcctgctcctggatcttcttagcagatatatagatataggctcgtatgattgtatgaagcatgtaaattgacacgatacttttgacaggatactgaggtgccatttga

SEQ ID NO: 277824 - DNA, 510 bp, Zea mays
caatcatttgtaatggtacaggacttatctgttgagacaatcctggagcagatactacgtaatctcacctttgaggagcagcgtgagctatatggacagctaggcaagttacttgtgagagcgaactgaagctaacagtggccgtggaagcacctgatccaaaaggataatgcgcaatgctttttcaggccttgcttttttgttaatcttcttgtacagccctagcacccctaaggatgagacgaagaaccacaacgctgacagggatcgcatcgctgtatgacgttttggagcatacagctcccgtctttttcagagatttgtgtcacctttttgatttgcttctggtgctacgcttgttgccgcatcaaaaccagctaacgctgttttgtcgtgtcagtggtttatttgacaatgtgtaggagctttccacctgtgagtctcttcgctagtactagtagccggtgatgcatccatgtttttgttactgtatctactacctccgttccc

SEQ ID NO: 277825 - DNA, 532 bp, Zea mays
cccacgcgtccgggatgacctgcaggagttccggctgcccatgggccaccgccccaccgagaacctcgacacggatgggctccagcaagcctctgtctacacccagctcaccgcgtccaacgtcggcttcaggctactgcagaagatgggctggaagaccggcaaggggctcggcaagaacgagcaaggcatactggagccaataagagctgacatgagagatgcaaaactaggtgttgggaagcaagaggaagatgacttcttcacatctgaagagaatgtgcaacgaaagaaattgaatattgaacttgaggagactgaggaacatataaagaaacgggaggtatgcaatctaacacctggtgctagtttctctacattcatgcagttttttccctgggctgatgcttgacatgctggaacctagatataatagttgtaagacctctataggctagaagtagctgtactttcgtgatgtgaggatagctagcatcaaccattaaagagtcttcagcattttgtgcgcttt

SEQ ID NO: 277826 - DNA, 277 bp, Zea mays
tgcaaaattaggtgttgggaagcaagacgaagatgacttcttcacatctgaagagaatgtgcaaccacagaacttgagtattgaacttgaggagactgaggaacatataaagaaacgggaggtcatagcagagcgtgtagcacaaaatccgcagtgaagtcaaggagatacagaaggtgttcttttgcaacctctgcaataagcagtacaagctggctcatgaatttgagagtcacttgagctcatatgaccacaatcataggaagaggtttaaggt

SEQ ID NO: 277827 - DNA, 576 bp, Zea mays
ttggaaattgaaacagctccagttcataatgcaaaaacagttccttcagaagctggtgctatatctcctgtagtcgctgagggtaaggcctgtgcagctgctgatcttagctcattgaaagcttctgaagaagctgggtctcaaaatgatattgacaatggcaggctggaaacttcttcacgccaagctaatgctgattccatgaaattagaaattagtgatgacctaccagtgaagaaatggacataccatgatcataaggctgatttgctcagttctgtcacatctgcaaatagtgctatagccaaagaaattaatgaagtgctatttaaatcattgcctgctgatacacctcgccttgatttgtttgcatcaagtcatcttctgagccaaaggaagagtgattcgattgtcaaagaaaggcttggagtatgtaaaaccaggctgaggttgaaagagcagatgcttacaatgaagttcaaggcatattgtcacttgtggaaagacgtccaactattttctgcaaataaacagcgttcaaagtctaataagcgcactgatcagagcaaccgaaca

SEQ ID NO: 277828 - DNA, 346 bp, Zea mays
cggacgcgtgggcggacgcgtgggcggacgcgtgggcgcaagtggttgcctccggttaagccacaaacacacagacaccatggccttcccagggactccggcgaggaagatcgtaccaggcggcttcaccgcagcacgaaccgccgtggccagcggcggcgctcttagcttcgacctggacggcgccggcgactttttctggggcctgtggcagctcatcaaggcgaaggccgccgaggcagcggcctacctcgctgccctcttcgcggcgctggcggagaaggcggacgagatcttcccgccggagacccgctcggagacgctccggcagtggatgcgcgtcgcc

SEQ ID NO: 277829 - DNA, 568 bp, Zea mays
cccacgcgtccgaggaaaccagacatggaatcttctgggaaaggatctgatggttcctgtaccagtagtgtgaaatcagattttgagaatggaaaagaggttggaaagcggtcaaggcaccgttgctttgttgttactgcaagggcacggtcttttctttaccaccaggtaaggttgatggtcggtcttctaaaatctgttgggactggagatctaacaactgcagatgttgagagaattctggatgcaaagacggatactgctgcacccagtatggcaccttcttgtggtctgtaccttgctaacgttaaatatgatctgaatacctgaagacaagttttatctagtggcttctgttggtgggcctccagattttgtcagctgttggctatcaaaggtatacctgaatccaatctatgaatagtgcacctcagtgagtgcaactttgaagtatctgtaccaggtcgaataagatattcaaacatgtcctttgcttatcaagaatgatacatcattatacaccttgtcgtaatctgtaatttcactttgatcaggattatatgctgcc

SEQ ID NO: 277830 - DNA, 408 bp, Zea mays
atctccatgaggactcaagcatgaggatcatccatcgggacctgaaggcaaataacattcttcttgacgacaacatggaaccgaaaattgcagatttcgggttggcaaggcttctaggagaaggccacacacatactcagacaggcagagttgttgggacattcggttatatggcgccagagtatgcatcacatggtagtgtgtcgcctaagattgacatctttagcttcggcgtcttgatccttgagatcgtgaccaggagaagcaactgcagctctgatgaccacagcactgtgaatctcctaagtgatgtctgggatcactggaagaaagggacgatgccacaaatgcttcaccggtcactggatgagtttgctcgaagccaacgctgcgatgcatccacattgg

SEQ ID NO: 277831 - DNA, 415 bp, Zea mays
aaggcgtcccggcactactcgagagggaggttcaacagcctcagcatgaagcttataaaggacgggtcggtaaagctgggtgtcgagtgaaaaccgcaccgacgctcgttcatatgtgtgtgtgtgtggtgtgtgtgcatgtagtggtaggcccttggcccactaagcagaagaactctaggcctttttttttgtcccctcgtgactgtcttgcgtggaaattttagataggtggaagtggcggaaccctccgatttgtcttactttactacctgtgtaattagctatcccggtctcgctgacaggcactgggccaaacggtgtacctaatgctgtgctcctgctctcacccgttctcttgatgccagcccgagtgctgtacgaaaaaaaaaaaaaaagggcggccgctcgcgat

SEQ ID NO: 277832 - DNA, 902 bp, Zea mays
gtggggaagacggtggggctctacttctcggctaaccattgcgcgccgtgtatcaagttcacgacgaagctggcggccatctacagcagcctcaggggcaaggcggaggacttcgaggtcgtgtacgtccccatggacagggaggaggacgggtacctgcgctcctgcggcgacatgccgtggctggcgctcccctacgacggcgcgccgtcgcgcgcgctggcgaggtacttcgacgtgcgggagatcccgacgctggtggtggtcgggcccgacggcaggacggtgacgcgggacggccggaacctggtgaacctctacttcgacatggccttcccgttcacggacgcgcagatcaggctgctgcaggaggcggaggacgaggcggccaaggagtacccgcggtcgctgcgccaccggggccaccgccacgagctcagcatcgtgtcggagaagtccgggggaaggccctacatctgctgcgagtgcgaggagcagggactcggctgggcgtaccagtgcaatccctgcggctacgagatacacctcaggtgcggccagaatgcggagggcggcagcgcaggaactgcttagctagctaggcgacgtacggcagtcggcagcatgccagcataacagcatcactggagtggtgtctacctattagactgctgcatgcgtattggacttggacatggtctgtgtttgatcccaacaaacgtcagcttgctctacgtcaagcaagtctgatgctaaagtagtcaaatagatagatgagaaatgcatagccttccttgtaaggcttagtaggtggttagctgagtgaacaacaaaatgaagctgcagcaatcaatcaatctactgtggcaggtgttatgcaaatcttgctgcactgcccaacc

SEQ ID NO: 277833 - DNA, 627 bp, Zea mays
cgaaatgataaattattgtcaaccatcttttcgattagtcggtcgacagactgtccgttgagattgtatgttgttgtatgaagaggagaagttgcagttaattgagcagtttacaaagttgaaatctcatgttagtttgactgctgatctttggtcctctaaccaaaaccttggatatcttggtgtaacagcacatttcattagtgaagattttgagttgcacaaaaagattattgcattcaagaagatttccttcccacatacatcttatgctgtgcaagatggtattacctcttgtttgctagagtggggattggttggtgatttgtttaccctgactttggataatgctagtgtaaacaatagagcaatgaaagatatgcgagatgctttgggcagccagatgtttttcagtggtgaacacctccatgtgaggtgttcttctcatgtgctcaacatcatggttcaagctggactaaaggtcgttccaaatgcagtcgggaaggtgagggacattatcaaggtcgtgatatctacaccatctcgtttacagatcttcaattctattgttcaaacgttgggtcttagaagtaaatcggggctgattcttgattctatcgcggctag

SEQ ID NO: 277834 - DNA, 955 bp, Zea mays
ctggaatctcgcccgccgcccccgctggtcatccctccacccaaccccgcttctcggggaccgctcgtcgccggagccgccggcggcctcgagcgatagggatcgacagcgagcgcgcgagcccgtcccgcaacctgatctgcgaggaccaccgggtgggaggctgcgagatcgacgacgggctcggttcgattcggctggcgcgagcaccagcctatctatctgagacgggcatcggcggcggtgagacctggcgcgcggcggaacgctgaggttatcttgtattctcgtcaagacaactctcttccctcagagcactgaacaatcattgtgatttatgactaattctgagtggtgaaagaattaagaaaatacagaacaccgcaatggctgttagatgctcctgtactgctcttttccctctagtcttctgttttatgatctgtcagctttgctatggcactgtaactgatatccaatgtctgaagaagctgaaggcatcagttgatcccgacaataagttagaatggacattcaataacaatacagagggatccatatgcgggttcaatggtgtggagtgctggcatcctaatgagaacagggttctttcgcttcatcttggtagctttggtcttaagggcgaattccctgatggacttgagaattgtagtagcatgacttcgctggatctctcaagcaacagcctctctggccctatccccgctgacatctcgaggagacttccatttgttacaaaccttgatctgtcatttaatagcttctccggagagataccagaagcactagccaattgttcttatctcaacattgtcaatttacaacataacaaattgactggaacaatcccagtttagcttgctgcactcagtcgcctagcccagtttaatgttgctgacaatcaattgtcagggcagattccttcatctttgag

SEQ ID NO: 277835 - DNA, 469 bp, Zea mays
cgatggcccccggcctattgcgggctcgcctaccatctctcctccggtccttcctatcataccggcgggcggcgcggggcagctaatcggcaatccggcttcgcctcgtcgcagtccaatccgcactcaccgccgccctcccgcccctcacctgcccgcggcagtgtcggagtaaaccctaccggacctatcgtcacgcgactgcgggagttgcttgcttcttctgccgctctctcgctccgtcccttccgcccatggagacctcgctgcgcttgcgtcagtggcggcggcctccgcatccacgccaaggagaagctgcccctcggccacagctcgctgctgcaggctcatgcggagctcgacctccacacaagccccgccggagttactaccccgagttatctcgctctctttgtcaggcactctctcgcgttagcattgagtggtcgtgacacgggagactctcgtt

SEQ ID NO: 277836 - DNA, 917 bp, Zea mays
  unsure (1)..(917): unsure at all n locations
ctttcgcttccggccgtcctaattgggctttacgcctttttcttgacggtcgggggtgcctataagaatgctgctcccaagacccaattccactgccgcactgatcgatctgggcttgttgggggcgctccatggataagtgtaccctatccgtttcagtggggagcaccaacctttgatgctggtgaagcctttgctatgatggcagcttcttttgttgcccttgtggagtccaccggtgcgtttatcgccgtttcacggtatgccagcgcaacaccatgccctccttccgtcatgagccgtggcatcgggtggcagggagttggcattttgctgggtggattatttggaactgctaatggaacctctgtatctgtcgaaaatgctgggctgctcgctttgacacgcgttggtagtagacgtgttgtgcagatttctgctggatttatgatattcttctcaatccttggtaaattcggggctgttttcgcatcaattcccggcccagttatcgcagctgtatactgtcttctcttcgcatatgttggtatggcaggtgttgggttcctacagttctgcaacctgaacagcttccgaacaaagttcatcctgngattctccttgtttatgggtctgtcggtgccacagtatttcaacgaatacacttccgtcgcgggctttggtccagtgcacacgcgtgcaagatggttcaacgatatgatcaatgtggtgttctcctcgaaggcgcttgttggcggggcggtggcgtattttctggacaacaccctgcacaggcgcgatggcgtcgtgaggaaggaccggggccaccatttctgggacaggttcaggtccttcaagaccgacccgcgcagcgaggagttctactccctcccgttcaaccctaacaaattctttcc

SEQ ID NO: 277837 - DNA, 826 bp, Zea mays
gtatccctcgaatggacattggagaaggctcttgtctataagccacttattgatgcctcgttagtccaatttgagggatactggtggctatttgcatctgattttacacggtatggtgttgagaagaatgcggaccttgagatttggtacagcaattctcctcttggtccttggactgagcacaagaaaaatcctatctacaaatcagacaaaagtttgggagctcgaaatggtgggagactcttcatttttgaagggtcattatatcgccccggccaggattgcagtggtacttatggccggatggttaagttgcacaaggttgaaaagctaagcaaggaggaatacaaagaggtccctgtaaatcttgggatagatgagccaaagaaagggagaaatgcatggaatggcatgaggtaccatcacatggatgcacaacaactcgcatctggtgcatggattgctgtaatggatggtgatcgagtcccttcaggtgattcaaccagacgctctctcattggttacttagctttcctgttggccagtgcccttgtcgtttttgtgggttttatgaaaggtgcaatcagttgttacgttcctcccagtttatgggttcctctcacaaggagaacagaattatcccgtatcttctacgtgcaccgcttcaaccagaaagtccgcagatattctaccagcatcagcagatatatctctgctgctaaaaccaagctcagcgaaaagacttggtccaacgtgcttttcttcggattgtctatttggtgccataaatgtctgcattgccgtgcatttcttatgtggcggagag

SEQ ID NO: 277838 - DNA, 532 bp, Zea mays
cccacgcgtccgcaagaaaaaagatgatgaacttatgaagaggataaagcaggatcctgatactgagtatgctgtaatagaatgctacgatacattattagatatcctttacagcattattgttgtacaaagtgataagaaagttgttgatagaatacgtgaaagcatcaaagatagcatccaccggaaatcactcgtgaaagaattccgattggatgaacttcctcaactaagtgctaagtttgataagttgctaaatctactgaaggaatatgatgagaacgatcctgtaaatagaaacacacatattgccaatctgttgcaggatataatggaaatcatcacacaggatattatgaaaaatggaaaaggtatcttggaggacgagggccaaaaacaacaactgtttgcaaaattaaatctggattcattgaagcatgttgcttggagggagaagtgcattaggcttcaattgttgttgacaacaaaggaatctgccatatatgtaccaacgaacttggaagctcggcgt

SEQ ID NO: 277839 - DNA, 429 bp, Zea mays
atatgaagtcattggaggaggaatacaaagctctgcaaggtgataaatcgggggaagttgagtacttccagtctcttgatgaaacaattaatgggatgaaggggattttggatcctgtcaaatgccaatgtggactggagtacaacttaaaacttgatggtgaagccatggatataagctaagcaagaacgaccacatacacagatgcccatctccaccagatttcgtgcattttagatctgtacagtgtgagagatggattattctttggaaggtacagaatcttctcgcatgtatacgggtggatgctttgggcagagcttgacagcgtcatcgcgaataatatagaattctgatgttagaactatctggagcttgaacggactatacggccatagttttgttcaataattgtttttccttacgctc

SEQ ID NO: 277840 - DNA, 659 bp, Zea mays
tctcccgtccccccctccgtgatctgttgtgtgtcagtccatgtaccctcctcgatcgtagtgtctatatctcctgccttgcggctttctgcagggagctgcgccaacgatgggcgtcttccaggacaccggcgtcggtggcggcgccggcagccgcacgtccaggagggttttccagtaccagaggctggactgctgctgggacgacggagccacttccaggtggcggtgtccaccagccgcgaatggtaagaaggctgaagccccctgtttgttcagtgtcaggcggctcaagtggagcaaggtcacctcggttctgataccgaagaaagtcgccgagttgtctgcaaagatctgccacgccggcgccaggacggaggccgtcgtctgcccggccgtcgtcttcatgtcgccgtggggcctccctgtgctctcccgcccgctcttggtcggccacaacacttgcaggtatcaccgtggaagagacaccttctggtgagcaggtagctgcacctcgatctgcattcctggcggtggtagtatcggtatatgcgtgtgtgatatatgtggccagcttagttgatcttgtaggatgtgtattattactcctccattttgatttctgcaatacttgtgttgtgttttgccggctgcatcta

SEQ ID NO: 277841 - DNA, 1548 bp, Zea mays
agcggaggaggaagagggagccaagcggtcaagccggctcggccgctcgcctcccaccaaaatccccccgaatccccacccccaagcaacacccagaaaaggcgacaagtgccgaggtcgggggagcgatggttgtgcggcggctgggcggcacggggcgcgcgctgctcacgctccccaacatccggaggcgggcgtccaactcctgggccgccgtctgcgacaccttcttctccaccaagcaagtgttcgagagccaccgcatcgtcttcaccgtcggcacctcaatcgcctccgtcctcacggcttgggccggttattcacttcgccatgtgcaacaattaaagattgaaaggaagcttgagtcaattgaatcatctctgaaggataaccacaaagttgaacatgaagagataaaaaagatcgtcacttacagcaatattatcgcttcagcctgtgtagccacggcgatgaccacaatggttgttgggtccgcggtaggctggcgaggcggtgcttggtacgctcgaaggggcttgagaagagagcaacaaaagctggtggggatgggtcacatgaagtcgcacgacagatggcactggcggcccttcaacaggctcaggaacagcaggttagcctccaagaacaagcgcgccgacgcccatccaagcaccgaggccccctcgacgtcaagcaacacggcctctgcggacgttagctgtgcttctcagccggcagcgggcagtgcatgagcttatatatccacaacaatggactaggatgtgactgtgagcttggggccgcgtagtagtccatacgacttggtagaacagacaatgtgagtcagctcgatctgtggtggatcgtttttacatgcgtgaaccagtacagtgtacatacaaatgtacaatcatatgtactttgataaaccattacataagctattcagctttttttctaatacaactgcgactatttgtactgttaaagccatatatacgagccttagcctatataaagcatggctagaggcgaggtatgtagcacagtagaacatctttatgctcacatcttgcatactttgtcatctttacattcgcctgcagctcttcgggatgccatgatctcttctagcggaggtcgacctgtaatttgcatacggtattttgcccacacaccatatactgcatttgccatgctagctacaggctcatacttagtatcagcataaacccatccaagtcctacttcctcgtacagttttctaaatgcctcaacgtctgtgacaacagttccatctgaaagaaccgcatgtatcctccccatggcagtttcataatcaagcccctgattgtcatctggagagtaatctttcgagcttatgtcaacaaactttattgctccataggatttgtttctttctcttagcatgtttacctcacgcatacagagagggcaatcaccgtcgtagagcatcttgatcctccaagtttcagatttgctactgtccttgaagtccgatgtaggggctactttagcgtcggaatg

SEQ ID NO: 277842 - DNA, 623 bp, Zea mays
acccgagaccacgtggaaggggagcgtcaccagcttccacgcgatccccggctgctgctggggcggcagcggcagcggcagcgtcgagcgggggcgcgacgtactccgcatctaccgccaacggagcggaaggggccgggtcacgcgaggaggtggaggccgaagcggagggcgagaaggggttggcggtgatggtggacaccgcgagctgcaggtcccagttgtgcgcggcgaggatctccgtgcagaggtccgtgttggagatgccggtgacggcctgaaagtagctgaccttgtcgtcgacggtctcggccatggccgccggcgacgagggctagggtttgcagattgaggccagtggtagaggtggcggtggtagttaggaactaggaagaggccagaagccgagagagatgcggttgcgagccgggagggcgacggccggccggtcagtgctgaactgctgagtgttgacgtcttctattctccgtctcgccgtcccggtagattgaacggcgtgccgtattactgcactccgcgacaacgcgtcagtttctacgagattttattttacgactgttgggcaaaggaaacgggcgaagaattctgagaaccacatgatc

SEQ ID NO: 277843 - DNA, 475 bp, Zea mays
cacactttctctccaaggctgtaccaaatgatgcatccaagctaattgagttccaagatgtcgtgcaaagtacaactgaattcgagaacaaacttaagagcatgatgtttcttttgcctgatagaaaggatggcaagctgacccaatttgttgatgatgttgaagttcattttgctgtacggaagagaagtgaaatcttggtgaaagcaaggaacattcttgtacaatatgattatgatagtcctctggaatctggtgaccaaggtgattctgttgttgatctactttttcagccagagaagtgttttacatctaaatcagcacttctagtaatgaaattggttcatggagccctcaaggatgcatctttgtcatcagcaagagtagctaaggagttctgctttgctgctagggatgttttgctcctttatagggctattgtgccggttcagctagagaagcaatttgatagctt

SEQ ID NO: 277844 - DNA, 390 bp, Zea mays
  unsure (1)..(390): unsure at all n locations
ttctnttttttttttttgtttttttttttgtgtttaaatgcgtaatacattgaaagttacatgtcacaaaccagtaaaaattccttctcatctaagaaaaacttgagcataatgcattgcaaggtacatttaaaatttaaagacctaatacctctgtggttcgtatgaaacaacgacagtatcttagcaagcacataaacaatccactaacaactctatcacatcaaccaacagactgtatcctaatttaaggccaaagcattcctttacctaacttttccattttagagataagcagggctgctgaggaatggcagtgcagcgagagacatgagcgtatccgatgaagcgtcaccctttctggcgtgcttttgcctctcgagctgtatt

SEQ ID NO: 277845 - DNA, 451 bp, Zea mays
gtatcctccttgctagctccttgccttgccttgcctttgccttccctccgcgcgaggagaagagccggcggacggacggagcacaggaaagccggacggacggacggagccggacgcgcgagatggagatggcgggggcggccgaagcggacacgccgtcgcaggagccggtgcgcacgggccggagcaacaccatcctgctccccatcggcggcatcctcctggcctacctgctctaccgcttcctccgcccgcgcctccgcggcctgcgcctcgacctgcccgcctggctgcgctgccgccgcgcgccgaccggcgggggcgccgtgctgccctacttcgcgcccatcgccgaccgcctcggcgccgtcgcgctgccgtacctcggcgccttcgccggcccgcaggcggcgctcctcaggttccccggcggggaggcgctgtcggtggc

SEQ ID NO: 277846 - DNA, 849 bp, Zea mays
cccacgcgtccgcggactcgtgggtttttttttttttttttttttttttttttttttttggtttttttggatgggatgacaaccatattgtttgaaagcttcagagttctgatacagattagtccagattcctgatcaactcaaaacacaagccacttcatatgcactgtgccaccttctgatacaaatcctgtggccaattccggctcatgttgcttgctacaaggtttgcgatctttgatttgacagcgcgcaaggtcccatcagtatctctaacattgtcaatgcaatttagagcaaccttcaggagatctggcacgcaagcttgaacatggggtgacaagttcctgaaaatgtcaacagtcacatttggagccttggggtccaaatgaaggaagggtagcctgatggtttccctcaaagcatctacagtttgcccagctcgagctagcctataaatatggagaatagcttcaagctgtctcagcacagtttgttgctcagaaatgaggtccttctcttgaatgctggcttcagaagagtatctagctgtctccaaaatttcattgccagaatgaattagggcagcagcacgactctcgccatctaacatactccgtgccatggcacagactgcatcagacaagcacttgtttattgtctgaagagccatggcaaaggctcctactcttttgtgaatttccacagctttgtcatagagcccagcctcttgacaccgatgggcagcttcaagtaagaattgctgcctacttctccaatccatcatatactttttcagctctccttcttctcccattccacttggaccaagcaaaagttgaatacaac

SEQ ID NO: 277847 - DNA, 415 bp, Zea mays
agcaggggaaatttcttttttaaaaaataaacatcttacatttgacacacattaaacacaggatgggatgacaaccatattgtttgaaagcttcagagttctgatacagattagtccagattcctgatcaactcaaaacacaagccacttcatatgcactgtgccaccttctgatacaaatcctgtggccaattccggctcatgttgcttgctacaaggtttgcgatctttgatttgacagcgcgcaaggtcccatcagtatctctaacattgtcaatgcaatttagagcaaccttcaggagatctggcacgcaagcttgaacatggggtgacaagttcctgaaaatgtcaacagtcacatttggagccttggggtccaaatgaaggaagggtagcctgatggtttccctcaaag

SEQ ID NO: 277848 - DNA, 971 bp, Zea mays
ggagaatatgtgaaacaagggttggcacaactagaggtgtggtgtggagaagtgaagccagagtatgcaggatctgcgttggatgaactcaagcatatcaggcaagctgtcggtttcttggtcatattcaaaaagttcaggatttcatatgatgagattgtcaatgatctctgcccagtactaagtgtgcagcagctttacaaaatatgcactcagtactgggatgataaatataacacagagagtgtgtcagaagaggtccttgaggagatgcgaacattgatgaccaaggaatcaagcgatgaaactctggggaacacctttctactggatgatgaaattagcttgcccatatcacttgaggagatagcagattctatggatgccaaagaatttcagaatgttgccccaccacaagagcttactgcaattcctgcctttcaattcttgaagagctaagccctggaaggcctaggcctacgttgctgcacgggcatacgcaaatacatctagattcttccatcagatgttatagggtttcaattctccttgtgctgtgtaattattttgtccttgtagattggttttgttgtgttaagtttcagttggctcggttggcattagataagttgttagttgaggttgggataggttttttttttgttctgcctcctgatatgcgtttgtgcagtacacttagcctaaaatcttcatgtttttgttatatatgacggtggaagctagggatccgttggaaatcattcttttatccagatttgattgggtttggttatgcagagaaatgtcaataacttgtaatggctggggcagctagatcgtgagttgttgcctccatgggggcagttgtagacttgtagtggcgtgagtttgtggcagtcactgccctgggctgtttatatttgcccactttacattttatctctcttatgcagctctaatgcgtattcaag

SEQ ID NO: 277849 - DNA, 446 bp, Zea mays
aacacgcgtccgcggacgcctggagaaattagttactcgatcactgtagtgatattattactgaactccaaataagcaatgtcgacaatttcgacatccctcggcctgctaatccgtccgccaagatcatcagctggtacgccgtcctttgggtctctcaaaccagtagtggtgactctcccttgcgctcctgctgagaagaagcggcctcgatccatctgttactctgtggatgccaaggctaacgaccatgccttcaacatctctcccgttgcccttgtgcatcccaacatgccgccaacgtctacgccgcgatgggagatcaaggaagatggcaaggaagtcaggctgacattcttcaacttgtcggagggtgctacaacgggcgacttccaggttgccgtggaggacgatgtgctcatcatcaagagcacgaaacccaagcc

SEQ ID NO: 277850 - DNA, 813 bp, Zea mays
gacaaactcgagtgtagtcactcttggcaaaatgaggataaaatgccttgaggaactgagcactctgttaagttgcttgaagcttcctctaacatcctcaaagcctaccattcgtgatttctgcattgaaagcgcgtccatagttttctgtactgtatctagctccacaaaagtaaccgctaacaaaaagctagagttgcttgtggttgatgaggctgcccagctgaaagaatgtgaaacactgatccctttgcgtctgtggaccttaaagcatgctgttctaattggagatgagtgccaattaccagcaacagtctttgcccagatgcattatttggaagaagcctcttcgaaaggttgagttcacttgggcacgaaaagcatctactcaatacgcaatacagaatgcatccatccattagtattttcccgaacactagcttttatgaagggaggatctcggatgcatctaatgtcatggaaaaagaaccccgaaggatgtatcttccaggttctatgtttggtccttactcctttataaatattgaagatggaagggaggaacgtgatgaacttggccatagcaaaagacactttgtcgaagctgctgtcattgaagacatattataccgtctccgaaaagcttgctttaaaaccaaaaggaaagtcacggttggtgtcatatgcccatacaatgctcaagttgtagcaatccaagggaaaatagagaaaatgaggttcgacccattgcaagtaaaaactaattctgtcgatggctttcaggtggtgaagaagacatcatcattttatcaa

SEQ ID NO: 277851 - DNA, 625 bp, Zea mays
cccacgcgtccgcccacgcgtccgtccacgcgtccgagcgaccaaagcggtggagagcacggtgtgccggacagcccattcgcatcccctacgaaatctgctgcgcttttgcatgacagtttcactgccacggagaccgagaacaccgtcgcgtcccgtgttggcgtggatgccggtgtcgggagcaagatcgacggtgggagcaaccatctccgcccccccgcgttggaaatcccttcgcccagctcctacttcttccccatgcacaggctgtcctccgatcacggagccctgggggtggtaaggtcacccttggaggcgagttatacccccccacctagtcatagaatactagaagccaagaaaagcgatggtggaatatatagggaaaaaaaaggagtcgagtgtcagcatagtgttagctcccttctggtctagtaccttttttagaggatagttctactaaaccacaagagaagaagatgcattagccttgattaagaaaacggcagcatatgcagtattgccagatataagtatatatattatatatacaaataatccagtgtcacccctagtttttagagagagatatatataaatagtatctgtacttaatgtttac

SEQ ID NO: 277852 - DNA, 1017 bp, Zea mays
ggcgaccacgcgtgcggcggtgaagcaagccaattcggtcaagccggatcagggatttggagctttccacggtgtgaagggcagtgtcgctgctggatttgggagcttccacagtactgatgctggatctggtggttttcaaagcgctggcacgaccacaccttctaactttacaccaccgccagcaccagcttcaatgcctactcctgtggctgcagcagttaactcaagcatggatcctctggataatctttttgcttcaaccacaagtgcaccgactgcagctgccgctagtaatggtgacagtggcggtgacatgtttggtgagatggatggttgggtcgatgtggaggcacagtttgctggtggtgatagtggtggcacaaccacagagctggatggcctgccacccccaccatccggattgacaatatcagctgccaaggccaaagggatggatagctacaagggagggcagtatgctgatgctatcaagtggttgtcatgggctgttgttctaattgagaaatcagggaaagatgctgacattgttgaggtgttgtcttcaagagcttcttcatatatccgggttggtgagtacaagaaggccatcactgactgctcgggggtgctggatcaagataaggataatgtctcagtgctagtgcagcgtgctctcctttatgaaagcacagagaaatataggcttggtgccgaggacctgcgtttggttctgcagattgatcctacaaataggctggccaggagtacaattccccgcctgaacaagttggctgactagggatgtctttctagcgccctgatgtaatattgtactaccactgtactgcatccttctcacatgagatctgtgagttatttgaactctttagtctttatcactatacttggggctttgggggaatagtttgcaattgtgttgttattaagtatgggatacgaatttaaataccccatattttttatttgtattaaaaacaaacaaggcaacacaaa

SEQ ID NO: 277853 - DNA, 652 bp, Zea mays
ggaaaactctggatattcaagtatggacattcagcgatctgtagacaaacgagatggctgtggtatattctataaacctaaaagtgcagaactggtgcagaatgaagtaatactgtacaatgagttagtacaaaaatatgttcctagtgataatgtaaatagtgctctggtaaataattcttcagcagaagaagacaagaatgcagagccagataatagcaagcgtggagatccaaatgatccacgcgttagattgaagcgggactgtgttggtttactcgcggctttcaagcttaatgatccttgagatcaaagtttgattgtggcaaacacacatatttattgggacccacaatggatcgatgtaaagccggctcaggcaaaatatcttctttcgagagtatctcagtttgagcaactcatctcaaataaatataattgtaaaccttcagtgatcatctctggtgacttcaattcgacacctggtgacaaggtatacaattaccttttatctgccaacctaggatctacggacgaagctccaatcaagttacgcagcctttatgctgcgaatggaggggagccagagtacacaaactacactcctggttttaccggaacactggactacatattcttgtcgatggtagtt

SEQ ID NO: 277854 - DNA, 740 bp, Zea mays
gcgtgctgaagcgtgcgcttagtgccgatttttggaaccctgattgttgagtgttttgacatagtaactggctgtaacacattggtatttgaagaccattgcaggttgtaacacactgttatatttgaagaccagtggtgggttgacttaaaagcagggtttaaacatcacttttgtgatttgttctgcaatatctttgccatatcatggggtttcagaccataccagtcgtaccagaccttgtggtggataagagtgaggttgaaacctcacaagttgcgggctctgattcaatagtcatagaaagggtggaaacaaatctgagcaaggaaccctttctgctagttcccttggaaaataaggaagagaaagagtcccttggtataatttgttatcttgaaaataacaaggttgatgttcctgaggccttctctccaaggagagatatacttgaattgtcaatctctagcaagtctactgatgatagtctttcattgggttgtgagacaccacgtgaaagcatctgtgatccatttgctccaggacctgatgaggcagcctgtgcaccagagaagacagtgactagaggtgctcaagttgcacctcgcaggaagctagattttgattcaggtgactacccagttaaaaggttaagttacgattgcagtgattctgtagaggaggatcaatgatatcgaagtgattcacgagatgatcctggatctattaattctagatgt

SEQ ID NO: 277855 - DNA, 1398 bp, Zea mays
tacctggggactacagtgatctggaactgaagcctgttggtaccttggaggtcaagcttgtgcaggcaagagatttgacaaacaaagatctgataggaaaatcggatccttttgccattgtatatgtgcgaccattaccagacaaaatgaagagaagtaaaacaattaacaacgatctgaaccctatctggaatgaacactttgagtttactgttgaagatgctgatactcagagtgtaaccgtgaagatttatgatgatgatggcattcaagaatctgaattgattggctgtgctcaagtcaggctgaaggatctacagccaggcaaagtgaaggatgtctggttaaaacttgtaaaagatctggagattcaaagggacaggaaagatcggggtcaggtgcaccttgagctgctatactgtccatttgacatgaaggatgaggctccaaaccctttcagccaacatttttcgatgacttcattggagagaacattgacaaacatggaaaatggatcggggggctctagttttgataggctgtcttcaagaaagaaaagggaaattatcatacgaggagttctttcagtaacagtgatatctggggaggatctgcctgcgatggatatgaatggaaaatctgacccatatgtcatactttctctcaagaagacaaagacaaagtacaagacaagggttgtgaccgaaagcttgaacccagtatggaatcaaacttttgattttgtcgttgaagatggcttacatgacatgcttatgttggaagtatatgatcatgacactttccgtagagattacatggggcggtgcatcctgaccttgacaaaagttttgctggaggaagagtacaaggaaagcttcaacctggagggagcgaagagcgggaagctgaacttgcatctgaagtggtcgccacagccaatcatgcgtgattcgcgtgaagcgggcagcttaaggtcaagataaggccagtaagtgcgcacgcattggtgtacgtgtaattttttttggctgggtgtctcggcctcgagacctgcttggtcgagggtttgtaaattttgaggtgcattctttttgaaattcaacgcgtatgcggggacggtccaccaaaattttattccgaccaaggactccagttacgtgagctagcagcaagtattcaggtacaaaatgatccgttgcacatgtacatgaggctgttatacttcgatcggttaagctcgaggtatgttaatgtagtcggcgcatcgcaatggtttgtctgtgtactccttgtaatatttaaagtatgaaaaaaatgtgtagatcagaaagctagtgaaacaaattcagcagttggcggcttgacgcgacaacggtcagtcggtcacgggtggttgct

SEQ ID NO: 277856 - DNA, 573 bp, Zea mays
cccacgcgtccgcccaaggaggcgaagcgcacatcgttctcctgcctgccgccgtcgctgggctgcgacgtggcgcgcacggaggccgcacggttcctccgcgcgcgcgggcccttagacctgacggccccgcagctactgcggctggcctcgctgagccgggcagggcccatccggcttgggctcgacattggcggcggcacgggcacgctggcggcgcggctcaagaagctcgtcaacgccacggtgctgacgacaaccatgaatctgggcgctccctactcggaggcggcggcggcacgcggtggtggtgccgctacacgtgccgctgcagcagcggttcccggtgggggatgggaccatggacgtggtgcgggcggggcacgccgtgaaccgttggatcccggaggtggcgctggagttcctgtggtacgacgccgaccgtgtgctgcgcccgggctggcttctctgggtggaccacttctggtgccggaggagcgacctggagggcgtctacgccgccatgctgcggaggcttggctacaagaccatcaagtgggtcgccgccgacaa

SEQ ID NO: 277857 - DNA, 382 bp, Zea mays
gcaaattctgctgagtctgttttgcttcttaatgggtaacttctgcccactggcattttaggctaagctgaaggtccgatagaacttctcgtgtagcttcttacttgtttatgtctagtctcttcattttaattccatttggaaggcctgcaattgaattccagaacgtgggacatgcagtgcagtattttagattagtaatttggtgcaacctcaaacattttgatcttccctgcctccctgggtaacttgatcaaattttctttttaagctccagagaatagccttacattggcaaatcatttgcccatagattgtaggaaataaaagaggaaagacccgcctttgtggcccaaaaaaaaaaaaagaatggatgtcaccc

SEQ ID NO: 277858 - DNA, 660 bp, Zea mays
gcaaaaatctgttacagtccacttaggtggaagaagtagtttgtagatgattttattttaatatatgaactgtaatagtaaggttacaataaattttcacataggtgatcaagcgtctgtttgtgtaaagccaacagatggtctgacctgacatgtgtttttccaggagtcactacttatagaaaaagcttgttcctagaggtggtttctcccggcaatgcagaatcttgaagcacgtctaaagtggcttgatgatagttctaaatttcaactccctgtcattaccaggtgcaagataggctgctggtcgattccatcctgaacaagttgcgccaaagattacatgaatattgcgtgccgagatctgtcttcagtaatgcgatgccatcctgaacaagttgcagcgacaattaggataggattttcccacgctttttagtcttgtgtattccttttatgctcttcatcttttttttctcattatatccaccaattagatagtcatgtagactttcttttaggcgcttttgttttttatactttgtgttaccttgcttttgtttttcatattttgtgttaccttacagatgtaaaaacgctcccctcccgtacattgcactatttatgaggaaaggtaaaatagcgtcatttagctttttc

SEQ ID NO: 277859 - DNA, 702 bp, Zea mays
aatacccggtccgacccactcgtgccgcccgctcttccgaccagttttgccacaatgttcttcttctttctatatctggcgtgcatggggaatagtttggtgttgttctcttaaatagtgatgcgctaccattgttgtgttgctgataacttgatttttgaaatgtcctgcattgaaacatgaaactggcattgccaacgtttgcagcactcccattgctaatggcatatgctggtggcacttccatcatcattccaaagcccttaactccttatgttggactaacggttttggagctaggtttattttacaagctattcatgctcttgttagcagtcttttgtacaaactcgataaatatacatgctggtctaaatggacttgaagttgggcagactattgttatatctgctgcggttttgatacataatgtaatgcgcatagcatcttctacagatatcgaaactcagcaagctcatgaattctctatttatcttgtcttgccattcctaaccatttcattagctctgctagcttttaactggtatccctcgattgtttttgttggtgatacctacacctattttgctggaatggctttggctgtgataggaattttgggacatttcagcgagacgttgttgctcttctttttacctcaagttcttaatttcctatgttcagtcccacagctctttcact

SEQ ID NO: 277860 - DNA, 574 bp, Zea mays
gtctctcctcatcgtctaggctctaggaggctttgaaagtgggtctatctaagattgtttatgatctgaccaggttgcacttgcatctgggaataaaaggaacattgaaaaagtcagaaatgctcaatttagtgttaatttgcccaatgttgtaactgtggatccgatgggtatggcactgaatgaagacaagttgcatcttaccaccgagtcacaagtaaaacttggcaaaatgctggcagaagcgtacattttgaacttctctacatcaacttgttaggtgaatacaagtgtctcaagatcttcaatccacaacaagtatatttgataaggtcgcctagtgacaagattactatgtgctcaagcacttaatcaatcgaagacattgtatctatcttatgtccgagaatacgctaaagtgcctcaattcttgtatagcatttcaaactcgcttcataacatttctttcatattgtaataatggttgcagcctaaaataaagtaagacactataaataatttgttaaagaaatatgtaataaatttatataatattccaaaaaaaaaagggcgg

SEQ ID NO: 277861 - DNA, 862 bp, Zea mays
aaatattggacgatggtagggttaccgtgtcgcaaggccggaaagtgagcttcaccaacgccatcattatcatgacgtccaacgttgggtcacagtatatactaaacatggatgaagaagatggatcatctgattcagcctatgagaacataaagaggagggtgatggatgctgcaagatcggtgttccgtccagagttcatgaatcgtgtagatgagtacattgttttcaagcctctcgagagagaacagatcaacagcattgtcaaattacagctcgcaagagtacagaagaggattgcagatcgcaaaataaagctggaagtctcacccggtgctattgaattcttgggaagcctggggtatgacccgaactatggcgcgaggccggtgaagagagtgattcaacagcacgtggagaacgaactcgcgaagggcatcctcagaggtgatttcaaggacgaggacagcatcttcgtggacacccaggttacggtgccctccaatggccagcttccgctgcgaaagctagtttttcagaaagtgggtgagcaatcgaagcctgctgctgaaggcgagaagttcttgccggctgtttgattggagtacggttgcagttttgcagatcgtgagcaataaaatgtacatataagggtgacagactggtagagtatttcctttggcttagaagagcattgcagccacaatttgttcttcgatacacgtagcttaaggttacgtcgagcaccgaattttgattttttttttctgccgtttttttttccttttcagtggaagtgtattcgattttgatgtcctccaacgtaactgatgcaacccccccttttacaggtatccagttg

SEQ ID NO: 277862 - DNA, 604 bp, Zea mays
tagttctggctcaaaaattgcaggcactagccatctcaagcggcacatcacactaggctcctgtcctgttatgaaagaccaagacaggaagctagcattgccacttgcagggggccatgtcactgataatgatggtgagggtactgcagaacgtcctactaagaggcgttacagatacactggttatgcaaatgctacttttgatccacagcggagcacctcttatctgacaaagatgataattttgcatgactacccacttcacattgctcaacagtcatcctttattaattttattgagagtctgcagcctcgtttcagagttgtagatgtggagacaatggaaggagaggtgtatgctgttttccagaaagcaaaaggaaacctgttgcaagcattcagcactatgccaggaaggatcagcctcactataggactctggacaaccagtcagactcttggctatgtttctcttgctgggcagtttattgactccgattggaaagtgcaccgaagaatgctcaacttcatgatggtgtcttctccccattcagagaatgcacttagtgaagctattagctcaagcctttctgagtggaatatg

SEQ ID NO: 277863 - DNA, 781 bp, Zea mays
cgttcctgcagcgaagccagccgccgccgagggtagcaatggcagtggcagtggcagcttcctcgtccctgcgccgccgccgccatgacctcggactacacctcctcggtcttcgctccggcgtcttactcttacatgcaaggcggagcgccgaagagaatgaggagcagctacggcggcgcgccgcccagcctcgcacatgacgcggccatgcctggctttggccttgataaagtgagctaccaccactaccaggcgttgcctccttattacgtcgggagcagcaacgcgtcggtgggcaacctcggtcttctgcagcaggctgatgatgctccagctccacaggatggggcgagcgccggggatatctggagcctcgacgagctgctcatgctggcagcagctggtgcttattgagaaccgcaagaaaaaaaaaatgtgttggcgctgctagctggagacgagacgagagggcgagaggcagttgcatccgccatccgctatcgttttgtctctcctatatctagtatatatatgcttctggcagtcgaactctatggcaatgcgtgtgtatagtgtgttgctgccgtctatgattggaagcgagctcgagagtcgagactggttcaataattcacctttgcctaccgtcgtaccgccggcctgctggactgtagtgtgcgtactgcatatatatgccataattatgtatgcactcctcctatataaactatattattatgatgtgcttatactaggactgtgcaactctttgcctggg

SEQ ID NO: 277864 - DNA, 548 bp, Zea mays
ctcgccgtcgaccacgagtccacaacccacaaaatgcacgggaggacccagggcgccgccgtcggcgacatgacccagcgccttctcctcgccctctcgctcatcgcatcagcgaccgccgtgcccgctgtcatccgcacggtcccggacgaccccaccgcgggctcctctggcgcggcagacgccgcggacgcgctcttctgtgacagctggaggctgtcggtggagacggccaacgcgggcccctggagcgccgtgccctcgcgctgtggggctttcgtgcgggactacatggagggacctcgctacgcgtctgactccgccgtcgccgacgccgacgccctagccttcgcctccgaagccctggccgccgccgagtggggcggctcggcgagcgcgaggcctgcgtgggtgttcgacgtcgacgagacgctgctttctaacgcgccgtactacgcggtcaacggatggggatcacaggaattcaatgagacctcatttgatgaatgggtagatgctgcaaaggcaccaacattaccatcgagctt

SEQ ID NO: 277865 - DNA, 592 bp, Zea mays
cccacgcgtccggtctgctcatgcaaaactttttttagaaaaaatgttgagagaagactgggcaatcagtcacaatacatatacttatttaatgataggtttatgcgaagaaaggaacatagcacggttttgggaatgtcggaatcttgcaacaaagtgcagatggtcacctgatagctaggatatgatgggcctcatcagttacttgtgcaaatggggagtgattgaggaagccctgaaacttatgaactctctatttgactgctaccatgatctgtttcttagtgcatattgtgcacttctcaaacagttgcgcaggacaggtcataccagcattggatgcgcactgttggaggctctcaaagaacagggtgtggctgtgcatcgatcattattcttgtatgtgatggagggcttcctaaaggagcaaagaactgctgaatcaattggaatgcatgacatgtggcttagcaaaagcaaagaacttgatgtttttacttaccgatctgtgttgccttcattaccatggctggacacagatcgagccaagaacttggtagaatctatgctgaccgtgaaacttactgaattc

SEQ ID NO: 277866 - DNA, 519 bp, Zea mays
gatgtacctcgatagcaggacatcaacgagtccatcttctctgattgagccatcacactttgaagaagccttatcaaaggtgaagccatcaatatccaaaaagcaaaagagactttacgaaaaaatgcgcaagaaacacttgtcaacaacctgatcagatcaccatacatccatcttgtgtgtgtggcacaaactatgccatcgctacctatgaaaatggttctgccggcactgcagaatgctactataaatttgtgcattacaatcatgcttgaaatataatgataaaccgtatactccctctgtttttttacttgacattttttagttcaaaaacacactatccggcgtctaatatataagattggaggtagtaccagacatgccgtggcttatttgtactgtcttcacctgctggaatttttgcacgtgagctaccaatgcatggctttgtaagttgtgccgtgcttgttcatgaggtaggaaaaaactggaattaatttcccaactaatggtgcc

SEQ ID NO: 277867 - DNA, 490 bp, Zea mays
ccacgcttctggctaggcaccggcgttcggatctgctgcggcgctgctcgccgtctcgaggctctccggcgttgactcggcgcggcagcgccccccggtagcctagttccggaccccccaccgtccacgccccacaggtgaaggtctgtgaccccaattgccccacccgcaccggctgtcccctggtgggacgagacggagacagagagggaggcgtggcgactgctgcggagggcggtcgtcagctactgcggcgagcccgtggggacggtggcggccgagaaccccgagtgcatggagatgctcaactacgaccaggtcttcatcagggacttcgtgccctccgtgctcgccttcctcatgcgcggtgagaccgagatcgccccgaactaactccttgacaccctccagctccaggacttttaggcacagattgtggacaggccattcaaagtctctgaaaactgagcatacacaggagacctggtaa

SEQ ID NO: 277868 - DNA, 832 bp, Zea mays
  unsure (1)..(832): unsure at all n locations
ccctcgcttccgcccacgcgtccgccgatgtcgacccccctcgattcgcggcgccattgcctccaccacgccccaaccactcgacgtcaatccccctcaattggcggcacccagtccccacctgttgcacgcgatcccttcggcacaccgcctcctagcccagatttgttcgcccctcgccctctccagacttggtgattcacagagtcggccagctgcctaggcaccggcgtccggatctcctgctccgctgctcgccgtctcgaggctctccggcgttgactcggcgcggcagcgccccccggtagcctagttccggatcccccaccgtccacgccccacagattgccccacccgcaccacccaccgtacggccggtgcctccccttcctcgtctccgcggcgtcgcagtcgcaggccggcccgggcactcctcccacccttataccagtccccgtcccctccgacccccgcgctgctgtttctggaggaggacgctgcagcgaccgtgtcctctatccggactcgttcccgcttgagaccccgccctctaaggaggaggacgcggcagcgcgacagactgatgaggcggtggcaccggctgtccccttgagggaggagacggagacagagagggaggcgtggcgactgctgcggagggcggtcgtcagctactgcggcgagcccgtggggacggtggcagcggagaaccccgagtgcatggagatgctcaactacgaccaggtcttcatcagggacttcgtgccctncgtgctcgcctttctcatgcgcggtgagaccgagatcgttccgaaccttcttctttacaccc

SEQ ID NO: 277869 - DNA, 696 bp, Zea mays
ctctcctttcttcaattgacagctcgctgaagcttgaccgcgaacgcgtgcgcgaacatcggcgcggtcctcacgccgtgccacggggagatgagggagctgaagggggagcatcaccacaaggtcgtggagatcagcgaaagcgccgggaagtgcctggaggaagagtatctggtggacgagccgtcgtgttcgacgcccaggagaaggcggatcgacctgccgggcgtggagtcgatagaggagctgcggaccccgggctacgccgagcttctcaagtcgttccgggaggcgagggggagctggaagctggcgaatggagacgtcacagggcatttgccagaggcggctcaggatccggcatcatcgccgccgccggccgtgggttcaagaacccctctcgtaggaagaaactagatttaccgaaaccatgtagaaagaaaaaggaaaaaaaaaggaggaagaagaggaaggcatgtgtctactagagtacctttttcgtattggtgttgatagtggtgttggttaactactgctgctgcttggttgattgtttgttcgttcttaggtggtctccttgtatagtgattagtgagtcatatatacttgccgtcacacatatgccggtgtacatcaggtgtgctcagcatgtctattctaaagcaccagtgtttgaaaaaaccatagaaaaacaaa

SEQ ID NO: 277870 - DNA, 429 bp, Zea mays
cccacgcgtccgcagagagtgattcaaactggaatttctatgtgaaaatagtcgataagatggagaagcaaatagttgatcaagtggaaacgaaaatagttgatgaagtggagaggtccttaggttaataggaacatccgctcacgcgtccgaaagttctgtatttgtttgtgttgcttagcaggtgttttgcattgcgccagtgctatcatgtgtaatctaatttagtaattgttgtttcatagacaaaacatgatttgaagaatcttgataggttttgttgttccaaccgagggatgaatcattgtttgtcctgtatcgagtgttacaggctttctggactgctaacttagctatttctggaagtttggttgactatgctggaggatgattcagttcgatggaactgttatatactcgaattgttgt

SEQ ID NO: 277871 - DNA, 518 bp, Zea mays
ataacaaggatgcacaaacagatctcgctaggattgtggcctttgaggttaaaccgttcagtcttaaacatgaattcgatggtgattggaaggggaatgcaactcgacttaaaacctgtaatacacaatctgagcatctaatagtgaactctgatgggcctgaagaagtaaaggcaaacaaagagatcattttcacctatgatgttaactttgaggaaagcagtatccagtggtcatcccgctgggacacctacctccgcacgcctgacgatcattggttttccatcgtgaattctctgaccacggtcctcttcctgtctgtgatggttgccatgatcatgctccgaactctgtaccgcgatatttccaagtacaaccagctagaggaccaggaggaggcccaagaagagtctggatggaagcttctccatggcgatgtgttcaagccttctgccaatgccgacctgctgtgcgtgtacgtgggcacaggtgtacagttctttgggatgctgctggtc

SEQ ID NO: 277872 - DNA, 683 bp, Zea mays
gaagcatacgggggctggatctctgtcgcgatatggctcctcgtcctgcacagcgcgcagagggaggtacgcgagcggcaccactacagcgtggactgcgtcgccgcgatctacgtcggcgtcctcctgtggaggatgacggggttcatctggtccgccagagacctggcccgagctagacggctagccaagctcgaggaggtccagagcaggctggtccacgccgccaaggacagcgacatcgatgagatcagaggcctgctgaaggaggtggagctagccggccaggagaggcccggcttctcgcagagggcgatcctggccttcgccgcaggaacgatcatcttcaccttgtcttgtgtcctcatcgccttcacagctactagcgacggctgatttgggttctgttgcatgcccctgggtctgaatgttagccactgtctcctgggctgcactgttttcttgtagtatgttgactgttgagtgtcgttggttgtggggaaaccatgtttaggactagtttgagaatctcatttttagtttcatttttctttagaaaattagtttattttttcttgagaaaatagaattcttaaaaaaaagttctcaacctaaaaaaaaaaaaaaaaaaaaaaaaaaaaaaaaaaaaaaaaaaaaaagggcggccgctcgcgatctagaac

SEQ ID NO: 277873 - DNA, 504 bp, Zea mays
cccacgcgtccgcggatccgtcctgcaaatctcctctcatacttctccaccggatccctgtaagattcccggagatgtcggacgaggagcaccagttcgagtccaaggccgacgccggcgcctccaagacctacccgcagcaggccggcaccatccgcaagaacggctacatcgtcatcaagggacgtccctgcaaggttgttgaggtctccacttccaagactgggaagcatggccatgccaagtgccactttgttggcattgacgttttcactggaaagaagcttgaggatattgttccttcttctcacaactgtgatgttccccatgttgatcgcactgagtatcagctgattgacatcactgaagatggatttgtgagccttttgactgacagtggcaacactaaggatgacctcaggcttccgactgatgaagctctggaaggccagatcaagagcggatatgatgatggaaaggacctcctcctgacggtgatgtctt

SEQ ID NO: 277874 - DNA, 536 bp, Zea mays
cccacgcgtccgcccacgcgtccgcccacgcgttcgcccacgcgtccgcggacgcgtgggctgggatacagcgatgagcgccgtgttcagccagtaccaggagatcgacatctacaacatctacgcgcccagatgcaacctccctccgtcgtcagctgcacttgcacttgctgttgacaaggcagtcgtagccaacagacaggaacatttcaggcgaaggatcaggatgttctccggatatgacccgtgctactcttcgaacgcggaaaagtacttcaacgatgcaggtgtgcagacggcattccatgcgaatgccagtggagctcggaaatgggaagtttgcagtgattcaattttgaggtcatacaatttctcggtgctttctgtcttaccaatctactctaagctcatcaaagcaggactgagagtgtggctctacagtggggatgcagatggtaaggtcccggtgatcggatcgcggtattgcgtggaaccctgggcctgcgtgtcaagacgcgtggcgagcatggtacctg

SEQ ID NO: 277875 - DNA, 599 bp, Zea mays
gttcgattggctcctcttcatcagattctctcgagcatgactcaaatcactactggactggccgccaccaccaccaccagcaccatggacaccaatgctgtgattcaatgggcctggcatcaacgccaaagctgtcaagtatcagtggagccaaaacagaaacctcatcgatggacgcgtcaatgaggacaagctcgtcacctgaggagatcgacaggtctggtgagctctcggtgtccgtcagcaatgcgagcgaccaggagagggagtgggtcgaagaagacgagccaggcgtatatatcacaatccgggctttacctggtgggatcagagagcttcgccgcgttcggttcagccgggagaagttcagcgagatgcatgccaggctgtggtgggaagagaaccgagcgaggatacacgaacaatacctctgagaagagacgcccgacaccatcagcagcacgagcacatgaatagagctggcactaacacattcacatgcatttccagcttcatacgatgttttgctaacctaaaaggtccggtttccggtattttacatttcgttcagtctcacgtgtggtggtggtggggtggga

SEQ ID NO: 277876 - DNA, 426 bp, Zea mays
tcgggactttgaggttaaaaacagttagatttgtaaagaattcttttcatttaaaattgagggggcgtgatgatatagtcccagaacacactggggggtaaatgggtgtgacaggtaatgttagctttcatctcatttagtttgaggtcccctaagagctgcttcctttttttcttcccgtcttgttctctttgtgagagactttgaaggccaagttctaaggaaatcaagagtaatttagatttaaagatgtttacgaggcggttacacattgaattagtatgtgagctacaaccaaactctgccccatatgtgcggtcttttattttctgagagactgctgtgaatcccatggtactccagctcacattctgttgacatgtatgtcagcaggactgggttttgtcgtcacgcgtgcctggcgtc

SEQ ID NO: 277877 - DNA, 405 bp, Zea mays
tctagatcgcgagcggccgccctttttttttttttttacgattaacatgatttatgggattatcagtcttacaagttgctgaggttgggcaaagccaggagagtaacttcaggcgtttctatcaagtgacagcctgattagcagggccgttactgagcggagggcactggagggcaccccgggaaccccagctcctacagcagtgttaaaacccctccttcagaggcactggatagggcgtggcccgtgacagccaggggccactccactggcttttggtgcccactgacccctttcagcagagactcaaaggcctccagaggcaccaaggacgcaggatgggctgggcaggtggaaagactggtactttctcaccgaggctctgtctctggcctcgatctcccc

SEQ ID NO: 277878 - DNA, 355 bp, Zea mays
tcgcatagccaccgtcaacatgctggggatacggaaggtgctgagcccctacgacctgacccaccgggggcggtactggggcaagttctacatgcctgagcgcgtgtagtgaggctcaggagcaggaatccgcgccttcgtgcccctgagccagtccttcgggtctttgggtacctctgatgtcataaccgaggagcagcatgtgaacagatgctctgaaaaactgtacgtcacctgtcggattcttttaagtacattatattaaagtttgagcgttagctcaaaatgcactgacaccacaaaatggatcccagatcagtctaataggacggttattctatatggtccaagctta

SEQ ID NO: 277879 - DNA, 433 bp, Zea mays
cgcgagcggccgcccttttttttttttttttatgttaagcgtatagtacgctcggattaaacaaacaaaagcaggtccagatctcggaggccaaagatccatccagtgaaagaggaagcactacttgtgtacatcacattaggttacaaatacaaatcaccaatagaaatccgccgaaaggaaaaggggagagaaaggaaggggaagaaagaattaataaagccacaaatgcatggatgggtacatggatggatggggcacaccaactctatgatcgtatcgaccgtgcgacattgtatggcaatgcacggcgcgcggcgcaggagcgatcgatcgccaccggagtagcgccgggccgtgtgatctcaaatctgaacgatggtgactgactctatcctccctctccccatcagaagaggccggcgccgagggc

SEQ ID NO: 277880 - DNA, 784 bp, Zea mays
gttcatcaaacattatgatgagcatgctctgcggactccttcaaacccattcctgctctgtgtgaggtgctccattgaactgcttgatcacccaaaagattacacgacacctccagaagaacttgtacttctaccagcaagtgctaccctaggtgacctgaaagtacaggcttcaaaggctttccaagaaacgtacctgatgttccaaagcttccagactgaacagctccctgactttccaaacttcagtgatacaacccccgtgaagcatgtgcttggatcaggccagttgcttcgagtaaggggacgttgcactggggattacaggagaattgtacagttcaggatggagaggggtttggagaactggacggtggactgctcatgtggggccaaggatgatgatggggaacggatgctagcttgtgacatatgtggagtctggcagcataccaggtgctcggggataagtgattttgaggaagtccctgaaaatttcatctgcagaaagtgtgctagtccacgcaagggagacggacgtgggggtgggggtagcaacggtggtggaacaatggaggttactgcgtctgggaggtgcaaggatgagattggagcatcagttggtggagcaggcaagtatgggcgcatggcaacagttggatgactgtacataatgtagtgaaacgtaaatagtgagatggagagtagtaaggtgcacctaaaggcttttgtggaccttgagtggtgttaaatggatcttgaaactgaccactgatgtgatgtt

SEQ ID NO: 277881 - DNA, 444 bp, Zea mays
ggagtgtgcagagctccaatcatacagcacttcgcagagtcgatagcggggtcgagcagcatcagaagtttcggcaaggaagaccagttcgtgtcgactaacagccgtctaacagatgcctactcccggcccaagttctacaacgccggagcgagggagtggctttgctttcgcctggacttgctgccctctcttgcgttcgccttctctctgatctttctgatcaacctaccgaccggtctcatcgatccaggttgtctggagcatgtgcactttggagaacaagatcatatcagtagagagaatcctacagtacatgggcgttcctgcagagcccccgcttgtcatgccagaaaacaagttggctcagagctggccatcgaatggagaaatccagcttcagaatctccatgtgaaatatgcgccgcagctgcccttcgttct

SEQ ID NO: 277882 - DNA, 443 bp, Zea mays
attgagtagtggattttacttgaatgctccatcaggtacatatctccatttggggtttggggtagttcccatatagatctttatattcagcccctttgggaagatacatttcaccgaaaaatcagatgaatcgcactatttcatacaaattctggggatagcctttgagcaggccactactaccatgttgattttgtaacagcttgtgcagaatcataagaaaccctaggacttgaccgcaaccccttgcgcctacatgtatccgagcattctacttggcagttcttgtaaataatagaaccatacagtaacttagcattcatttttgttttgcaatctgcacatgcttacaagcaacaaagtgtgctatatttgtacggatctacgtgcacctaacctcacccccttgtacaattgctttgcactattgtataatatttcct

SEQ ID NO: 277883 - DNA, 529 bp, Zea mays
cggacgcgtgggcttcaagagaaagaagacatgaatctaggtgccccttcaatgtgaagacgcttctaaagagattggggacaagaaaggtggtactatcgaaggggatcatgtcaaaggaatcagaaggagcagcaggctggaatctaacgacgagatgaagattgctgacaaggctacatcgagagcaatggctaaggatgcgtttatcaacaaaggtatatcttctaaccctttttctgttctcaatactgataattttgttcttatggatgttgctttaaagttgagaagtagaattaggttcctcttttaatgaagctgtggaaaatttagaattgataatatctctagaactatccaggaaaaaacttgcagttcaatctgtcaagagttcttttgttccaaatcatctggttgttcctgactctgatgtggataatattatccataatgaggaagaggacaacacaatgactgatctagaaaatgtgatggtcttaagaaaaggccgtaaaattcgtcacag

SEQ ID NO: 277884 - DNA, 959 bp, Zea mays
ggctgcagaaggagggctcgctagctttccctctcacctccgagattataggcgccgtcatgtttgacatattcggaggtgccaccacaaccctagggtccacgatggagtgggctatgtcagagctaataaagaaatcagagacgatgagaaagacacaagaggacattcgtcgcgtgctaggtgggtcacgacgaggtgtcatcacgaacactgacctcgttggcctcacctacctaccaatggttatcaaggaggttcttcggctgcatcctccaaaccctctgctggtcccgcgtgagtcgagagaggattgccaagtcatgggctaccacattcccaaaggcaccaaggtgctcgtgaacgcatttgcgatctccagggattcaaggtactggaacaaccctgaagattttagcccagagaggtttcagaataacaatgtcgactacaaagggaccgattttgagttcacccccttcggtgctggtcgtcgacgctgccctgcaatcatgtttgccacttctactctagagattgcattggcaaaccttctctaccacttcgactgggctcttccggatggagtgagcccaaagatggtggaaatgtctgagcaatacgggatgggtgtcaccaaaaagttagacctgcatttgagagccatcccatatgtatactctactatggcataggtatggggggtggttaaagctacctgcaccttaacttgaggtcctttgatgatcgatcattgcatcttcctatttctgaataagggtgaacttttctatgcccatcttgtaggccactagtttgttttacatagagcaacttcaggagcttcctaaatgaaacttctactttgttttttgccaaaaagagaaaaagtacccttctaagggtttgaaaaacaactcccttaaaagtaagaaattggatgcaaccttctatggtgg

SEQ ID NO: 277885 - DNA, 504 bp, Zea mays
gcgcttccaacggtagctaactccaaggcaagcatccttggtccattgttggcctcgctcatcgatcagctgtgtctcagcaggaggcgttgcggccatggcggcttcgaagcccatcttgtatagcgcgtggatcagctcctgctccttccgagtccggatcgccctcaacctcaaaggtgtggattatgagtacagggctgtgacaaggaacgatctagattacgaaaagatcaatccaatcaagtatgttccagcattggttgatggggattttgttgtttctgactccctggcaatcatattgtatcttgaagataaatatcctcaacaccctcttttgcctcaagatctcaaaaagaaagctataaatctgcagattgcaaatatagtttgttcaagcattcaacctcttcaatgttatgctgtaattggtctgcttgatggcaccttatgctctaaccagagccttcagattgttcggaattacaccgaccagggatt

SEQ ID NO: 277886 - DNA, 799 bp, Zea mays
  unsure (1)..(799): unsure at all n locations
cccacgcgtccgagcagtatcagcgtatcatatggagctcagccccaacaacagcacggaccagagcttgctcgatgcgcagctcgagctctggcacaccaccttcgcgttcatgaagtccatggcgctcaagtccgcaatacacctccgaattgccgatgccatccacctccatggcggtgccgccagcctatcccagatactaagcaaggtccatctccacccgtccagagtttccagcctccgtcgcctgatgcgcgtgctaacaaccaccaatgtcttcggcacccagcagccggctggtggcagtgacgacgacagtgagcccgtctacactctcactccagtgtctcgcctcctcatcgcctcacagtcgtcgcagctggcccagacctccgttggcggccatggtgctcgatccacccatcgtctcccccttcttcgagctcgccgcgtggttccagcacgagctcccagacccgtgcatcttcaagcacacgcacggccgaggcatatgggagttgaccaaagatgacgcgaccttcgacgccctagtcaacgacgggttggcttccgacagccagctcatcgtcgacgttgccatcaagcagagcgcagaggtcttccaggggataagctcgctcgtcgacgtcggtgggggcatcggtgcggcggcccaagccatctcaaaggcgttcccgcacgtcaagtgtagcgtgctggaccttgcccacgtcgttgcgaaggctccaactcacacggacgtgcaatttatcgctggcgacatngttgagagcat

SEQ ID NO: 277887 - DNA, 904 bp, Zea mays
cttctccccctcttctcttctcgtagacggtagatctccaggggtgtcgccgtctcgggccacggcggccggcgctcggagcatcggtggggttcggtgcggaggtgggcggccatgtacaagaaccagctgcaggagctggcgcagcggagctgcttcaacctgccgtcttacacgtgcctgcgggaggggcccgaccatgcgccgcggttcaaggcggcggtgaacttcaacggggagcagttcgagagccccggcttcttcagcacgctccgccaggctgagcacgccgccgcggaggtcgcgctcgccgcgctcgcgcggcgcggcccgtcctactcgcttcgccgcccgcatcctggatgaaacaggggtttataagaaccttctacaggaggtagctcaaagagttggggcgccgttgccattgtatacaacagagcgatctggcgttggccacctgccggttttcacatgcactgttgagctagctggtatcacatttacaggtgatcatgctaagaataagaaacaggctgaaaaaaatgcagcttcagctgcatggtcagcactaaaacaagtggtacgcgaggaagtgaattcatccaatgagacagaaaacagtgatgagcaggagcagatcaggattgcccgagccctcctcaactatcgcttgaaggagaagatggcgatggccaattatcctcatgtttcaccattccctaagaaatttcccatgcagccagagaggaagccttcttttggtcaatcttctcagtccagctactcaaagattctccctctattccgccctaaatctaactcaagatccagaccagagtcaccagcatctactgatggcgcatcacaaatgcctggccgggccatggatatccacactcca

SEQ ID NO: 277888 - DNA, 534 bp, Zea mays
tttgtatctacctacctgtcgcctccatgctcgcgtccatatatctgatctactccacaaatcctaaaaccacaacaactatccccctctcctctctattctccggcgattctccatcttcttcatgcaggtcgtagccacacctcgatccatgtcgtgtcgtcgtcgctgttgcccaccctcctatttctccattcgttgctgcgctagttacagtggtcgccctcttagatgttacagtaaaaaaaatattggtggtgatatggttatttattgattcgttagggtaattaataagaaccctcaagcttggggtcttcacggagaggttgaatcgatgcggtgaaaacggcacgtgaagggtaataagagatcgatcgagcggttaaagagaacaaggagacagagacaggtggcagatgacgcagtggatgtttttcactgttactgcggtaatttttgtgcatgcggctactactgtacagtggggtagtttggtacaagagaggagtaaaaaaatggaaagagaggact

SEQ ID NO: 277889 - DNA, 767 bp, Zea mays
gttgatactcgcaagcacaggatgcaccatcatattcacaatgtatcagagcagcacagaggtttttggactcttcgatcgtatttgcttgctttcaaatgggaacacactcttttttggagaaacattggcttgcctacagcacttctcgaatgctgggtttccatgtccaatcatgcaaagtccatctgaccacttcttgcgggcaatcaataccgacttcgacagaattatagccatgtgcaagaatttccaggatgatcaaggggatttttcgtcagtgagcatggatacagcagtggcgattcggacactagaagcaacatacaaacaatcagctgactctgttgcagttgaatcaatgattgcaaagttgacagagaaggaaggtccttgcttaaaaggtaaaggcagggccagtgatgcagcaagaatcgtggttctgacctggagatcgttgctaattatgtcaagagattggaagtacttctggatcaggcttgtcttgtatatgcttattgctgtgtcaattggcacgatatttaccgatattggccattcactatcatctgtaatggtgaggatttctgcgatatttgcatttgtatcgtttgtcatccttctaagtgcttctggagtacccgctcagatcgatgaggtcaagatttattcccacgaagaagctaatcggcattcagggacaatggtgttcctgttagggaacttgctatcaagcattcctttcctattcctggtctccatcctgt

SEQ ID NO: 277890 - DNA, 598 bp, Zea mays
caaaggcagcggaggtggcgctgcagtccaccagttcttgggctcttggcaacgtcgcccccgtcagcggccatggtgcttggcaacgtcgccatcgtcatcggctccggagttgtcggatcagtactcacaggcggtgagtctggccttcccgacttcagggatgcaatctctggtgctttcaagttcttgaccaagagtgcaaagccaggcaaggatgggccgtcgaccagcaggccacatactgctgagttgttcacccaggtcaatcatctcagagaggagctgcaaatgttggctaaatcaaatcatgttgccattgtcactgttgatggtagacctggccctggtgcatacggtattacagctgttggtattggaagagctattggctatttattcataagatggaaggggtggaaactttctgatatgatgtttgtgacgaagcgtggattatctgatgcttgcaatgttgtggggaaacaagtggatcaggtttcagaaagtgttaatgttgcaaggagacatcttgcaggaaggattgatcgtgtagattgtagtttagatgaatgccatgaaattacagaagccacaa

SEQ ID NO: 277891 - DNA, 1270 bp, Zea mays
gtgctacctacttcaggtgaaagatcgccacaatgggaatcttctaattgatgaggaaggacatattattcatattgattttggtttcatactgtcgaactctcctggaggtgtaaacttcgagagtgcaccatttaagctaacgagggaactccttgaagtgatggattctgatgcagagggaactcccagtgagttctttgattactttaaggtgctatgcattcaaggtttccttacttgccggaagcatgcagaacgtattatacttcttgtggaaatgttgcaggattctggctttccatgtttcaaaggtggccctcgcacaatacaaaacttgaggaagaggttccacttgagtctaactgaagagcaatgcgtatccctggtgctctcactgatcagtagcagcatgtgatgcttggcgcactcggcaatatgattactaccagagagtattgaatgggattttatgattttccccacaggagcaacggattcatccagaaaccaattttcttgtatccttggagcaaaccatgggattgcataggtcagttttgggctgatctatgctggcaccccatatcagatttccaggagtggactaggttattgatcactgtgttttcatgtggcattgcacatttgtggtcaactagggaaacagattggtgccgcattgtactttcatgggaccccccctctgaaagagttgagaagtgtacagtcatcggcagtcatctagttagcgctttgtgctaggaggttgtgaccagtggagctctatttggcatattggaatttggaatccggctacattgttgtacagacctttgattgacgtagcttggagaggatgtaggagtgaacagggccatgctttgaagcgaacaagttataggcatatgggagctggggatcatccgagacagatgccgctcgaagtgtcactgtacttgttgtgtggtatccctatagcaccaaagtagatggagatgtgctttgctaaaaaaaagataaagacccagtgttggccgctctcatatgtcactaggtctgaaaggaaattggccgctaatttgcgcgaggcctgtccttcagagaggtgctttgctgcatttgtaaattatcattactgtacagggaccatactgtcttagcattctgtttttaagttgttaagattttaattccttctttgtgggtgtcttggtcttcgaagatctaggtgattggtcttccaagatctaggtgatagcttgtttga

SEQ ID NO: 277892 - DNA, 1115 bp, Zea mays
  unsure (1)..(1115): unsure at all n locations
canncttgcagctggctactgaatgcgcgttgtgctgcgtaggttacgtatggcgagctagcctacagataagcctggggaatggtttcatatgcatccggctcgcgcaggtttctggcatcgagcagtctgcgagatctcgattcgtctggaagacatcgctactaccccagccacagtacccattgggtatttatctgctcccttgctgaagctggaatgtgcagctcgatcggttagcgctacgagtcctcgctgaatccagccaaatgatccccttgagcttgccagttagagcacgaagtaacagctagctaagagaagcacaagaaaaatctggtagcttgagttctgactcgaactcagagatggcttatgcaagccccgggactgatgatacgtcgacagatctagatactgacgagaagaatcacatgttggagctcgggcagcttgtgtcccttacagcttctgattccggcaacaaagcaaaggacaagctactaggtcaaaaggcactgcgccgtctggcccagaaccgtgaagctgctaggaaaagccgtctaagaaagaaggcatacgttgagcaacttgagaatagcaggctgaaacttagccagctggagcaggaactccagcgtgctcgccaacagggcatcttcattcctactccgggagacgaccagcagccaaactctactagtgaaaaaggtgctttggcgtttgacaaggactacgctggatgggaagacgagcacaggaagcagataagcgagctgagggccgcgctcagcgcacacgccggtgacgacgagctccggcgcatcgtggacggcgtcatggcgcatcaccacgaagcgttcaggctcaagtgcgtggcagccagggccgacgccttccacgtgctgtcggggatgtggaagacccccgtggagaggtgctttatgtggctgggcggatttcgaccgtcagagattctaaagttcctcgcaagccatctggaccccctcaccgagcggcagctcgcgagcgtacacggcctgcagcagtcctcgcagcaagccgaagagggcatctcgcagcgggtgcaagcgctgcagcagtcggtcgcggag

SEQ ID NO: 277893 - DNA, 559 bp, Zea mays
cccacgcttccgcggacgcgtgggcgagcagtctgcgagatctcgattcgtctggaagacatcgctactaccccagccacagtacccattgggtctttatctgctcccttgctgaagctggaatgtgcagctcgatcggctagcgctaccagtcctcgctgaatccagccaaatgatccccttgagcttgccagctagagcacgcacctaatataatgctggccttccgccagaagtaacagctcgctaagagacgcacaggaaacatctggccgctggagttctgactcgaactcagagatggcttatgcaagccccgggactgatgatacgtcgacagatctagatactgacgagaagaatcacatgttggagctagggcagcttgtgtcccttacagcttctgattccggcaacaaagcaaaggacaagctactaggtcaaaaggcactgcgccgtctggcccagaaccgtgaagctgctaggaaaagccgtctaagaaagaaggcatacgttgagcaacttgagaatagcaggctgaaacttagccagctggagc

SEQ ID NO: 277894 - DNA, 725 bp, Zea mays
gcgctgacgacttggcgggtcgcccgactccttgggtctctacgacgggtctgctaccatgaggcagccttcttttaggaggtcaatttgatgccgaggtgtaaccgggatgagcacgtcgatcggcaagcgctaccagtcctcgctgaatccagccaagtgatccccttgagcttgccagtgacgagcacggtgaggcagcaaagattaaaatagcctccgcacctaatataaatgctggccttccgccagaagtgacagctggctaacagaagctcaagaaaaatctggtagctggggttctggctcgcactcagagatggcttatgcaagccccgggactgacgatacgtcgacagatctagatactgacgagaagaatcacatgttggagctagggcagcttgtgtccctgacagctgctgattccggcaacaaagcaaaggacaagctactaggtcaaaaggcactgcgccgtctggcccagaaccgtgaagctgctaggaaaagccgtctaagaaagaaggcatacgttgagcaacttgagaatagcaggctgaaacttagccagctggagcaggaacttcagcgtgctcgccaacagggcatcttcattcctactccgggagacgaccaagcaccaaacttttctagtgaaaaagcatgtgtctccagcaggtgctttggcgtttgacaaggactacgctggatgggaagaccagcac

SEQ ID NO: 277895 - DNA, 701 bp, Zea mays
tcgcattattataatgctggccttccgtcagaagtaacaacagttagctaagagaagcacaagaaaatctggttggtagctagagttctgactccaactgtgaagagtcagagatggcttatgcaagccccgggactgatgatacgtcgacagatctagatactgacgagaagaatcacatgttggagctagggcagcttgtgtcccttacagcttctgattccggcaacaaagcaaaggacaagctactaggtcaaaaggtactaaattttcactgacgcgatcatctgatgggttctgttgctacaaactggcgtgtttttattttgttactgacctgatgctaggcactgcgccgtctggcccagaaccgtgaagctgctaggaaaagccgtctaagaaagaaggcatacgttgagcaacttgagattagcaggctgaaacttagccagctggagcaggagctccagcgtgctcgccaacagggcatcttcattcctactccgggagacgaccagcagccaaactctactagtgaaaaagcatgtgtctccagcaggtgctttggcgtttgacaaggactacgctggatgggaagacgagcacaggaagcagataagcgagctgagggccgcgctcagcgcacacgccggtgacgacgagctccggcgcatcgtggacggggtcatggcgcatcacca

SEQ ID NO: 277896 - DNA, 477 bp, Zea mays
atggtcgtttcattctgtctccgcttagaaaaggtcaagcggatactgtcggtattgccgtgcgaagagctttacttggagaaatagaaggaacatgtatcacacgcgccaaatttgggaacgtgccacatgaatattccacaatagtaggtattgaagaatccatacaagaaattttactaaatttgaaagaaattgtattgagaagtaatctctatggagttagagacgcatcaatttgcgtcaaaggtcctagatacataaccgctcaagatataatcttaccgccttccgtagaaatcgttgatacgacacaacctatagctaacttgagagaacccgttgatttctgtattgagttacagatcaagagagatcgcgcatatcatacggaactcagaaagaactctcaagatggaagttatcctatagatgctgtattcatgcctgttcgaaatgtgaattatagtaattttt

SEQ ID NO: 277897 - DNA, 1512 bp, Zea mays
  unsure (1)..(1512): unsure at all n locations
ttgtcgcgtgggcggacgcgtgggctctttccctcccgattttctgtttttcttctcttggattgggctcaccctgctcaaaacttcggcggcagcggcagcggtagcggtggcggcgccggctttctccatgaacacggtggctttgttgtccttggcgccgcagctgctcattaagccctccctcacctgtttctccagaaagggcgttggccgctatggcggaatcaaggtgtacgccgtgctcagagacgacggagctgagtttgccaagaacaacaacctggaggccctgttccatgtggatgaccccgggccgagggtccccatcaagaagggcaagttcctggacgtgaacgaggctctcgaggtggtccgttttgacatccagtactgcgactggagggcgcggcatgatcttctcaccatcatggttctccacaacaaggtggtagaggtcctcaaccccctagcgagggagttcaagtcgatcgggaccttgaggaaagagcttgccgagctacagcaggagctggcaaaagctcacaatcaggttcatctctcggaaaccagagtctcatctgcgctcgacaagctagcgcatatggagaccctggtgaacgacaggctgttgccaccggacggagcctctagtacgtccacggcgcagcccacttccttggttccaagcacttcgtccaccgcccgtgtccgagccaagaaaccgccacgtcggggccttaacgtgtctggcccggtgaagccgtacaatcccagcctgaagaacttctggtacccagtcgccttctccagtgatctgaaagatgacaccatggtgccgatagcttgcttcgaggagcagtgggtgatattccgtggaaaagacggaaggcctgggtgtgttcagaacacatgtgctcacagggcttgcccgctgcatcttggttcagtgaacgagggtaggatccagtgcccttaccatggttgggagtactctactgatgggaaatgtgaaaaaatgccatcaacaaagatgctcaacgtgcgcatccagtcattgccatgctttgagcaggaaggaatggtctggatttggcctggcgatgacccaccaaaggctacaatcccttctcttctgcctccttcaggatttacagtgcacgcagagatagtgatggaactgccagttgaacatggactactcctggataacctcttggaccttgctcatgctccttttacacacacatccacctttgccaagggctggagtgttccaagtttggtgaagttcttaacacctgcgtctgggctccaagggtactgggatccttacccgatcgacatggagttccgaccgccatgtatggtcttgtcgaccattggcatctcaaagcctgggaagctagaagggaagagcacccagcaatgctccacgcaccttcaccagcttcacgtntgctttgccctcctctaggaacaaaactaggctgctgtaccggatgtcgctag

SEQ ID NO: 277898 - DNA, 744 bp, Zea mays
cccacgcgtccgcccacgcgtacgaaaagtttcggcggccttctccatgaacacggtggcttcgctgcctttggcgccgcgcctgctcattaagccctccctcgcctgcttctccagaaaggacgtcggccgctatggcgggatcaaggtgtacgccgtgctcagggaagacggggccgagttcgcccggaacaacaacctggaggccctgttccaggtggacgaccccgggccgcgggtgcccgtcaagaagttcctggacgtgaacgaggctctggaggtggtccgcttcgacatccagtactgcgactggagggcgcgccaggatctactcaccatcatgcttctccacagcaaggtggtggaggtcctcaaccctctggcgagggagttcaagtccatcgggaccttgaggaaagagctcgccgagctacagcaggagctggaaaaagctcacaatcaggtccatctctcggaagccagagtctcatcggcgctcgacaagctagcgcatatggagaccctggtgagcgcaccatccacagccgagccgcccacttcttcctccctgtctgcaactgcaagcagcaccgcccgtgtccgagccaagaacaaacagccacgtcggaggcttgacgtgtccggcccagtgaagccttacaaccccagcctcaagaacttctggtacccagtcgccttctccagcgatctcaaggctcctgacaccatggtggcaatcgactg

SEQ ID NO: 277899 - DNA, 537 bp, Zea mays
  unsure (1)..(537): unsure at all n locations
cccacgcgtccgcacctgtgcattctgatgctgacactaaaaaggaagcaggtgcagagggtaccgatggagccgctgatgatacatcaacgcctgctgattgtacacctaaaccaaagcgaggccgtcctcctggcccaaagtcatcgcagaagaaggctgctggaaaggatcaatcttcaggttcagatttgaaaaaggtcaatgaggctggtgattcagccggaaagttggcgaaacgaccagcgaaggatgagaagtccacaaagaaggctggtgaaggagaatcatctaagaagacccaaaagtacaattcaaagcaacagaaggatgaaaacctatctgaggatcctgccaaggatctgagcttaaaggaaatgataacaccaaaatcttcgactaaggtcccaggtagaaccaaagggcaaagcacagagaatagcacacctaaaatgaagcaagaacaagaaactgaagagcctcctcgttcaaggaaaagcaaaggacttgataaaagtctagttggtgcanggatca

SEQ ID NO: 277900 - DNA, 789 bp, Zea mays
attatcttactgttggctgctgctcgccattgctgaccacactcacagcaggctccctgcccctcgccaccaggagctagcccgttgcttgcaagcctcgccaactgccgctatatatacgcatacaagcgcgcgccgcgcacgcgcagcacgcaatcagaacagtggttgctggagagcgcgcgggccgggcaaggagcaaggacgagggattgtcgatggtgttcttctgcttcctggtggagcagcggcggacggtgcggagcagcaagccggcggcggggatctgctcgcgctgcggcgggtgcgccagcgtggcggacatggagaccgccaccagggtctgctacctgctcaccgtgcaccggcgcacctggcgcgccatcatctgcaccttctgcggcgccatgctcaagtcctaccgccactacaggctatagcactggtagcggtacggcactacctaccggtagacgatggagtcggtcggtggatcgcgcgcctttttccgcggcttccgatcccgggttttttttttgttcctgcttgatcatgctggggtttgcaggttattgtaatggtactatggcagcttgccggtgcataaatatggaatgggagtcatgaatattcaaaaaaaaataaaatcatattagaaaacttaattcccttaaaatacataaaattataatatgaccatcataatttaattcaaaacaaattatatttggggggggccgctttaagggatccaagttttcctccgcggggatgcaaatttaaagtttt

SEQ ID NO: 277901 - DNA, 460 bp, Zea mays
gagcaagaaggcaagcaccaatcagccagcagtccagcacaatatcatgaacaagcgtcaggtcgccgcggcggtggctgccctcctggcgctgctagccgcatcatcgacggccggcgccgtgacgttcgacgcgacgaacacggcgtccgatacccccggcgggcagcggttcgaccaggccgtcggcctcgactacgccaagcaggtcctggccgacgcgtccacgttcatctggaacaccttcgaccagcccagccccgccgaccgcaagcccgtcgacgcggtgaccctcgtcgtcgaggacatcggcggcgtggccttcacgagcgccaacgggatccacctcagcgcgcagtacgtcggcggctactccggcgacgtcaagaccgaagtcaccggcgtgctgtaccacgagacaacgcacgtgtggcagtgggacgggcagggccaggcgaac

SEQ ID NO: 277902 - DNA, 409 bp, Zea mays
ttgatgcgtgggccgaaggccacagcggcacagcgccagcggcaacagtcaccagaccaccactaccagtctaccacccacctgacctgagcgaccccttcgcttccactccactgaagcgggccaaaagaaggaaagaaggcgggcaagcgacaggaaggaggaggaggaggaggaggagaagccatggcgagcgacggcgacgggaagggccgggtcgcgacggcgccgggggcaggagggtacggctacggctacggctacgccggcttcgagggggaggaggaccggaagtggtggccgtggctggtgcccaccgtgatcgtcgcatgcatcgccgtcttcgtcgtcgagatgtacgagaacaactgccccaagaaccggagccagctcggcggcgactgcgtcg

SEQ ID NO: 277903 - DNA, 429 bp, Zea mays
caccaacagacgcgcctccgcgcctcccccgggtttcgaccagaacgccgccgcctgccgaccggggattcctccgggcactggtctccgcctaggtcccagcaggccaggaccgcctccggccctccgcgactccgtcggtccaccgcgactggcttgccgctgccaggggctccatcgcccagtaccggctccggtacacaagcggaaggcggccgagtaccaagacgcagcagcagcgcgaggcgcctggtctccacctcctctgggatcaccaccccagaaaagggtgcgcggcgcataggcgaccactgagattttattctctatataacatttggcttgcaaatatctcaatgtcaagtgtttcaaattctattgctgtgggtcttccaagctatgggctatatctagagacaaggttctcac

SEQ ID NO: 277904 - DNA, 439 bp, Zea mays
gttttaacaagcaaatgcaagctaagaaaactcgagatttttctggtggttggcggatgaggattgctttggctagagcactcttcatgaatccaacaatccttttgcttgatgagcctacgaatcatcttgatcttgaggcatgtgtctggttggaagagacgctaaagaaatttgaccgcatactggttggcatatcgcactcccaggactttctcaatggtgtgtgcactaacatcatccatatgcagaacaagaagctaaagttatatactgggaattatgaccaatacattcagacacgctccgagcttgaagaaaatcagatgaagcagttcaggtgggagcaagagcagattgcatcaatgaaagagtacattgcacggtttggccatgggtctgcaaagcttgcacgtcaagctcagagcaaggagaaaac

SEQ ID NO: 277905 - DNA, 798 bp, Zea mays
ctttcgtttgcgttaccccttcctcctcgacgccactgccgtggagcggggatcatccgcctgaaccgggtcgaccgcttcgttccttggtggtgggtagctggttgggggagctcagaaccttacacttacaactatgttctccttgttctatggtctatggaagcacgtcttcagcaaggcagagttccatgtgcttatcctcggagttcataaggctggcaagacgaccttgctagaaaagttgaagtcgatctacttgaagggagaagggcttccgcatgatcgtattgttccaacagttggccttaatattgggcgtattgaagatgcaaatgtaaagcttgttttctgggatctgggaggccagcctggcctacgaacaatatgggagaaatattatgaggaagcccatgctgtaatatatgttatcgactctgcttctgcatcatcatttgaggatgctaaatctgctctcgagaaagttctccgtcatgaagatctgcatggagcgccaatacttggatttggagacaagcaggattcaccagcagctgtcacggaggaagaattggctagacatctgcatcttaaggagttagacgagaggccatgcatgttccaggctggatctgccttcaatgggacggggatcaaacatggcgttgactggttggtggaaaaaatggagaggaagtaacgcaccgaggcactaaaggcgcgtacagaagcagctgggaagatttaacacctcaattcagggctatcacctgtgattttccaaatgcaaagcatctg

SEQ ID NO: 277906 - DNA, 459 bp, Zea mays
  unsure (1)..(459): unsure at all n locations
agctagtgttgtagagcttgaaactgttgttgctgctttgtgaggcggttcatgatggaccagttggtcttttacgaatcaagagcagcagccgctgacccccacagggacatgagactggacatcgacaacatgagctacgaggacctgttggctttgggagaatctatgggcaatgtcaacacaggcttggccgatgagaaaatttcgaagtgcgtgaaagaagtggtctgctgcagttccgaccagacgcaaaccgatcaagatgaccaggatgacgacggaagctgcgtcatctgcctggagggttacagagacaaggatatgctggggatactgaaatgcaggcacgacttccacgccggctgcatcaagaagtggctgcagacgaagaactcgtgcccggtgtgcaaagccgncgncgnctaggacgacaccagaggagcgagcaactatttt

SEQ ID NO: 277907 - DNA, 373 bp, Zea mays
gccagtcgctggcgcacaggcgttctactacgtggccatcaagttcaaggacctgtacgcggcgagcacggggcggaagctgttcgtgtggcagacgcgcgcccgcgaccggcccaccgttgacgaggccttccgctacgtccgggaggtcctccggtgggaggacgagcgtggcgtcgccgggtactgccccgacgagtccttctacagcaccacggagctcagctcgtcccgcctcatcgccgccgcacagtgactgtcccagcgttgttttgtgtataatgatcgtatgcttgcttgttttccgaacaaatcaaatgctatcaaatatagtgatctgagtgatgagcagaaaaaaaaacaaacaaggaag

SEQ ID NO: 277908 - DNA, 642 bp, Zea mays
cggacgcgtgggcgagggctcagttcgcacgcttcccaacatggctctcggtgccctagcccgcctcctccgccttgcgcccacccctcgcctcgcgcgccccttcgctgcaaaggtccgtgcgtctcggccgcaggaaccggagcttccgtcggaggacgacaacgacttcgccggcggcgagctcaccgcccccaccgagggcatcggcaagccgctcgccgaggtgctcaaagagctcgggaagagggttccggactcccttgtcaagacccgcgtcgagaataatggcttcgctatcaagtacatcccatggcacattgtgaacaaaattctcaacatacatgctccagagtggtcgggtgaggtacgcagcattgtttactcatttgacgggaaaacagtatctgttgtctatcgagtgactcttcatgggattgatgcagagatctatagagaggctactggaactgcttctgttgatgatacaagctttggtgatcccatacagaaggcagaagctatggcttttcgtcgtgcttgtgcacgtcttggtcttggactccatctctaccatgaagatatgtcatagactcgtagttgactagtgatagtgtttgtggcggaccattgtcccttaat

SEQ ID NO: 277909 - DNA, 489 bp, Zea mays
tgtctgtgatcatcttgctaacaaccttccattatcttttcctccttcttcttcttcttcttttgctccctgctttctctagctagctctcggctcagctcagcgcgctcacaaacaaatatctgtcctcctcgatcggatccacaactactaaagcaccaccgtaccaccattaccaggccggcgcccgtatgcgattacccggcaaattagcacccgggttctgatcgatcatcgtcagcccttggattcattccatcctcgttccattggtacggtacggtggccaagctaaattaagaagcccacacccagcgtcgtcgtcgtgcttgtcgtgcttccaattgctatcttcttccacatgtctccttcaccgccgccaagcagcggctgcagcctagcagtactagtaggcggcacgagtactgcaggcgtcgtccaacatgtgccggcgcgccagcctcaggaacctgctcctacggctcagca

SEQ ID NO: 277910 - DNA, 575 bp, Zea mays
ggccgggctcccccacgccgcttcccgcctcgtgcctcgtgtccgccagcctcccttccgcgctctctgcgccgcagctgcccccggcgatgcctcgaagcggatgctggtactgtacaccaagccggggtgctgcctctgcgatggactcaaggagaagctccacgccgcgtccatgcttgctggcaggccctactcactcgcgtctctcgagctccaggagagggacatcacgacgaggccggagtgggagcggctctaccagtacgagattccagtgttggccaaggtgctccccgacgggaccgaggaagtacttcccagattatcgccacgtctaagtgttgagctcgtacaaaagaaaatttattttgcgtttgatcagtagggagaccgttctgggggaaacggtaattttattttattaattaatagctccagctgtaagattgccagttgttatattttcatgattttgacacatgaatttcaatttgcttgacttatgtttgcaaggaattactttaggtttgttcattgctctgatgaaatataaattatatggagtgacatcc

SEQ ID NO: 277911 - DNA, 572 bp, Zea mays
acaaaatctgatgcagcgtgcgggtgtcgaacgagctgggcgccgggcggcctcgcgcggccaagttcgcgatcctggcggtgctcatgtcttcggtggccatcgggttggccttcttcgtcctcgtcctggccttccgcgacgtgtacggcgcgcccttcacggaaagccccgaggtggtgcgcgccgtggccagcctcggcgtcgtcttcgccttctcgctgctcctcaacagcgtgcagccggtgctgtcgggcgtggccgccggggccggctggcactggctggtggcgtacatcaacctcggctgctactacctcgctggcatccccgtcgggtacatcatcgccttcccgctgcgcggcggggtgcaggggatgtggggcggcatgctcacgggcgtcggcctgcagaccctcatcctggtcgccatcacgctgcgcaccaactgggacaaggaggccagcgaggcccattccaggatacagaaatggggtggatcggcggcggacaaaagttcacatgcatgactagtctgaatgacgcgcgccaccatgagaatacaatacaac

SEQ ID NO: 277912 - DNA, 613 bp, Zea mays
tccgttgtttttcggatacggaggaggcaaagagggcatggagagcaaagagagcatcgcctgtaagagcagtgccggaggcgggggctacggtggccattaccaggcgacgccgtcggtctcgtaccctgtcgtctaccagtagtacaacgccatgccgccctaccctgccgtctactcctatcctgcagcgtacccgcagtaagaacaggaccctggatgcagcatcatgtgaaaaaacatcctacaagttaatttgaggagttggttgaaggtggccgacgaacacatggagattagattaacatggttgggttcgtccggacaaaatgatccatgctgccttgagctgtgcaacagaggatgatgatccaggatgtgatgggcattatcatccgtgtaattatgtacagggttggccaccaaagttgacggattgatctgttggagttggaggtgttggtggaatgggaggcagagctgttccgcaagattatgattcaagtgcagactaagtagcagcaccgatgtttcctttttgtttctttcgtttttggtaaagttgtagtgtttgttgaagaaaaggattgcaataaaattagtgtttatacac

SEQ ID NO: 277913 - DNA, 518 bp, Zea mays
ttgctgggggtagtacagattaccctgaagtgagcgcggaaaacactgatcacatcatagcaggtgattgcggaaatgaaaccgatttaaaagctgatggtgagggtgctgacaaattcttagcaactgacagtgctcttccttgtgaagatgatgcaacttgcatggatcgtgcgaatgtgattgtatcactggatgtaccccgtagcacgaagaatgatacattttccaagaacacatcttctgacgctgaaatgcctctgcctgttggaacctgtgagctcgtcgatagaccttcttccgagaatgacctgtctgagcacacatcttttgatggtaaacggcctgcggatgataggactttggaagagaacgaaatggttatgcctggtgatgaaaaaacagaggtgcattacaagcgtcggaaggttttggcctcagagaaacaaagcagcttctccggagcaacttctacagattaggtttggctggtgtgagacttattttagtttctggga

SEQ ID NO: 277914 - DNA, 373 bp, Zea mays
cggacgcgtggggaaagggcatctgggcggccaaggccagtggggcgatgggaagtgtgggagtgggagcaggagcagcggcagctgagcctactagcaccgtggcacgggagttttggtgtatgtggtgagcaggaatggtgatcccttgttttgggggatgttcctgtgcaggggtaattatcgttaactcagttgtctatctataggcccagttcagcttgagttttatggttaactcggcgatctttataggctcagctcacctgcaacgctcttcagttcagaaactcggatggtggcagatgtttgtctgttggatgttgtttgtatctcttttgctagtttaagggtaaaaatggttggcctttcc

SEQ ID NO: 277915 - DNA, 740 bp, Zea mays
cccggtcgacccagcgtgcgctaaactcctgcgtcgcatcaccgagccgagcccggcacaaacactactggcgcgcacgcacgcaccagcaccagcaccacaccacatgcatggtggagcctagcacgggcagctagctcccggccggcgacgtgacgaccaccaccaccacatgttgcatgagcagcaggcaccgccaccggcagtagcagcgccaccgccatccatcaaccccgacgacgacggcgcccgcgatgtcgaggtcaccacgttccgcgacatccaccctctgacgcccgacgcgccgccgcccgcctccgcgtcctgggacaccgccagccaccgctccttgtcgtcgtccgacgaccagcagtacatgacgatgagccgcgagttcacggccatggtcgccgccggggcgaccatgcagacccggcggctacgacggcgccgccgaccagctcaccagcatcggcgaggacgagctggaggagaccaacccgctggccatcgtccccgacagccaccccatcgccacgcccgccaggtccagggcgtccgccgccgggctggaggtcgtgcccgcgggcccggcgccggcgccgcagccgcagccgcagccgcccgcgcacctggaggccagccaggtcaagaaggaggaggtggagaccaaggtcacggcctggcagacggacgatgttgccaagatcaacaaccggtttaagagggaggatgtggtc

SEQ ID NO: 277916 - DNA, 1128 bp, Zea mays
gggtagggaggacggcgaccgggcggtagtggatgggatcttctcgccgcgcccctcctgttccacccgctccgctttgctcgccgcagatcgccctcaggattttattccgccctccgtctccgggctcgcttggatcgagatgggcgtctgcgcgtccaaggccgcctactcctgctgctgctgctgctgctgccgcgagccgcacaacggggttactaacgagaggaccgatgctgtaacggatgacgaggaggcatacgacctgcctgcgttccaggagtttaccttcgagcagttgcggctagctacatcagggtttgcggtggagaacatcgtgtctgagcagggtgagaaggcccccgatgtggtatacaaggggaagctccatgcccagcgccgcgatcgccgtcaagcgctttaaccgctctgcctggcccgacccgcgccagttcctggaagaagctagatcagttggcctgctccgaagcaaaaggttggcaaatttgcttggttgttgctgtgaaggtgatgagagattgcttgttgcagaatacatgcccaatgatacgctagcgaacaccttttccattgggagtcacaatcaatgaaatggaccatgagattaagggttgttctctgtctcgctgaggctttagaatattgcaccaacaggggccgtgctctctaccatgatctcaatgcctatagagctctgtttgatgatgattgtaaccctagactttcctgtttcggcctcatgaagaacagtcgggatggaaaaagttacagtaccaatttggcatttacgcctccagaatacatgaggactggacgtatcactcctgaaagtgtcatatacagctttggaaccttgctgattgatgttcttagtgggaagcatattcctccgagccatgcccttgacctgattcgggaccgaaacttcaatatgctcttagactcatgtttagagggtcaatcttcaaatgaggaaggagcataaatggtacgattagcttcaaggtgccttcactatgaaccccgtgaacgacctattgtccgatcactagtgcaagcattgactcctctacagagggatgttgagactccatcttatgtgctgat

SEQ ID NO: 277917 - DNA, 467 bp, Zea mays
ctcatcaccaccttgtatgcagtttccctagcaacagtgatagtcctcctcctttggtggcacaagcccgcagtcgtggggaaagccactgccgttcccggcgacgagaagccacggcgacgactgccgcctgggccatggacccttccggtcatcggcagcatccaccacgtggtgcgcggcctaggacaccgcaccatgatggagctgtcccgtcggcacggccccctcatgttcctccgccttggcgaggtcccgacgctggtggtgtccagcgccgaggcagcggagctggtgatgaagacccacgacctcgccttcttgctcccgcccgaccaccagcgtcaccatcgacatcgtcggctgcaagggcaaggggctcggcttcgccccctacggcgaccggtggcgtcagatgaagaagatcaccgtcgtggagcttctcagcgccacgcaggtcaagcgca

SEQ ID NO: 277918 - DNA, 473 bp, Zea mays
cccaccactaacgaaagtttccagatggcacttcccatcaccaccttgtatgcagtttccctagcaccagtgggactcctcctcctttggcttcacaagcccgcagtcgtggggaaagccactgccagttcccggcgacgacggacgcctgccgcctgggccatggacccttccggtcatcggcagcatccaccacgtggtgcgcggcctaggacaccgcaccatgatggagctgtcccgtcggcacggccccctcatgttcctccgccttggcgacgtcccgacgctggtggtgtccagcgcccacgcagcggagctggtgatgaagacccacgacctcgccttctgctcccgcccgaccaccagcgtcaccatcgacatcgtcggctgcaagggcaaaggggctcggcttcgccccctacggcgaccggtggcgtcagatgaagaagatcaccgtcgtggagcttctcagc

SEQ ID NO: 277919 - DNA, 533 bp, Zea mays
cggacgcgtgggcggacgcgtgggcggacgcgtgggcggacgcgtgggcagggctggcccctcgcgtggcctgcctcgaccaccagcgatcgctgctcaccgtcggcaacagccacctcaagcaacgaatcgcggcgctcgcccaagacaagatcttcaaggatgctcatcaagaggcgctgaagaaggagatcgagcggctacgccatgtgtaccagcagcagcagatgaaggtggccaccaccggcggcgccgacatcgccgcggcggcttccatgcaggccaggcaagagctgctcgcgtgcgagggcgctgccattcgatagcggatcgagggcggaggcgttcaactggcagtgccacaacaacaacaccagcaccgaactttgtgccgggttcctccttttctcagtcagacaagttgttcgtcgtgcgtgggaaatacacgtcgcctgttagtagcctattgattttatttctgtgcagtcttaattaattcgtatatgtgatgtattcgtcctcctcaccctagc

SEQ ID NO: 277920 - DNA, 408 bp, Zea mays
cccacgcgtccgcccacgcgttcggtttctcttcgtgggaaattcgttgcttgcggcgacgataagaatgagggcgggtgggttgatttcgactgcaccaaccctcgcaaacgaagcaggattccttccttcctgcgacgagcgttgcgcaaccaacttctgtaaatactggctactgtgagactggctatgcttgttcttattacagacgtgctattccgcgtctgaattctgaaactgccatggaaccctcctataatcgtcgctgtaatcgtgtggagggatgtaactacgaggtagtaaaaaagcggttacaggacaggaaatagtggaaaggtagataagcatagatagtatatagtcaaaagaggtcatgtttgctatgttgtagagatctctcacttttta

SEQ ID NO: 277921 - DNA, 526 bp, Zea mays
ccctcgcgtccgccaacgcgcacgcagaggggattgatccgcctggtagcgaaacgaaacgctggcaaaagcgaccgaaaagggcgcaacgcaagcagtcagcagcgtttcctcttgcgttcgggcgagggcgaggcttgccgagcgagcgagcgacatgcttggggaccgcgaggagggcgacgaggagctgttcgagacggcatcgtccgtctccagcgccgacgccgactccgacgacgagggcgaccgcttccctagcgccggcgcggcggggggcgagggtccgtgcgaccagcaggaccgccgtcgccgcgcgcccgtgccgcagccgcagccgcagccgctgcggaggatgaactcggacagcatctacgacatggcgtccatggtgtcgcagctagtcccagccaagtaagtgcacgcgcctcccgcctcccttccggcgacgcgaaatcacgccaggctccggttctgaagcttcgatatcgtcgtcgcgacttacagacagtactagtgatttttt

SEQ ID NO: 277922 - DNA, 749 bp, Zea mays
  unsure (1)..(749): unsure at all n locations
ctcgcgggtcgacacaagcctctagcgaagcggaagagaccgagagggagaagcgtttctcctgggttgttcgggtgagccgctagcgagagcgagacggagcgaggctttgccgctgcagagcagagcgacatgagctaccggcttggaggcgcggcggaccgcgaggagggggacgaggagctgttcgagacggcgccgtccgtctccggcggcgagggctcgtgcgaccaggagcgccgcgcgttcgtgccgccgctgcggaggatgaactcggacagcatctacgacatggcgtccatggtgtcgcagcagctcccagccaagaaagggctatcgcggtactacgagggcaagtcgcagtcgttcgcgtgcatgtcggaggtgcgctgcctggaggacctgcgcaagaagggcagcccctacaagcacaggaccaacaagagctacggcgcgctgggactgggactgggagggatgatgtggccaagaagcccgcctccagctcctgcgccgacctcggcctcgccgccgccaacgggttcaggacggcccacggccccaattcagaacgggtaccaccagtgaggctgtagcctgtaggcagacgacgagagcactgcaactgttttttcgttctcttttttttttacttctctactcctctgttctgcgggatttccggcccgggcttccaaaaacttccctgtgagaaaaaaaaaaaaaaaaaaaanaaaanaannannnaa

SEQ ID NO: 277923 - DNA, 350 bp, Zea mays
ttttttacgcgtccgccgacctcggcctcgccgccgccaacgggttcaggacggcccacggccccaattcagaacgggtaccaccagtgaggctgtagcctgtaggcagacgacgagagcactgcaactgttttttcgttctctcttttttttttttacttctctactcttgttctgcgggatttccttcacgggcttgacttgacttgactgtgagaattttacgaggtggtgtgaactgttgcttgctctgctatcggagtacctgtagagcactagagggactcactcacaacataattgaccgttctgcactgttgctgctcggcaaaacccactgctgtttgggt

SEQ ID NO: 277924 - DNA, 464 bp, Zea mays
cggacgcgtgggcggacgcgtgggtcggacagcatctacgacatggcgtccatggtgtcgcagctcccagccaagaaggggctgtcgcggcactacgagggcaaggcccagtcgttcgcgtgcatgtcggaggtgcgctgcctggacgacctgcgcaagaaggacagcccctacatgcagaagaaggtcaagtcagtcgtgcaagggctacgtcgcgctgggagggatgatgatggccaacaagcccccctcctccggatcctgcgccggcctgggcctcgccgccgccaacgggttcaggacgtccccgattcaggacgggtaccagtaccaccagtaggcagggcatgatggcggcttggccagagagcactgcaactgcaactgcaactggagcaaggcgtttttgttcctcccgagggtcactgaactgattattttctctttctttttttccttccttg

SEQ ID NO: 277925 - DNA, 1192 bp, Zea mays
aaagatcccgcctctgtggacgccgctgcggggaggacatgggcacgaatcttgaactaaaactaggggatgtctatattcagtacatgtcccaagctcagaattctgctagccagctaggaatagttttggagtgccgtccaaataactcaagcatcatttcctactattgggaggtgcaagactcgaacgccgtgctctatagccgacagaagtctgcggaggcgaaattgtacgagacttggatgatgccgaccatgtgttcgttgaaatcccctcaaggtagttcaaggtgccagattggttcctcgacaggaatgactacaaggacaacaggttctcacagatcatctccaacgccctcggtatgaagctcagggacaacctcaacaagctcaaaaagatcagtcccttgttggatttcatttctagcctacccgatggtgagagcaagtgaacgcatgcgcacttggaggagacaacgtcacatgataaggttgttcaaggcgttgatcaagtggacgtagcggcttatcgacaagcatgttttggtcctggagagctactacatgaaagtttctttcgctcagatacatctccattttgttctgaagctcatatttgggaatacaaaagaatcgaaaggggaaaaggcagagaggattgttggtctcaactctcaagtcagtaccagcagcacagttgaatgtttggtaatttggtgggagaagcctggagagtacgtgttgtatgagcaacaacagcagaaacgacttttgcttcaacaacaccaacaagatctctatacatcaactgcattcaccgccacaggatcaatcacttccatccatggaacctattcaatagcttccctaggcagaaagacaaacacaaatgaatatgaaacaacagattctggcaaacaattgtagcttggctggaggcgggcatcagcggcgacttcccactcgattcgctgtataataaatactatgagaggatactggtgtttcataagataatcatgcaactcatgaaaatccatgtaaaatatgtagctgactatggatggcctgatgctataattttagccatgtttgtcttatgcgtgtgattcaagtaatatctgatgtgaattattttaatgtttatcttcagcacattttatttacaaaaggttttccaaccctgt

SEQ ID NO: 277926 - DNA, 797 bp, Zea mays
ctttgcaggcatctgatcctgccaggttccagaaccttatgcagacattggatttccgttatcaggcgcttgctagtggcataggacaatatgccgagcaaagaaaaattgaaattgagagagagaaatctgagaaggcaaatgcacagtgacttaataaatcatttctggccgcccttgtttttgccattttgccagtataagccattggtgtctggtcaattccctgtgatttgcaggtcgctggtatgagttttgcagccttagccaacctttaagggtaggacaattttaggctcgcaaaattctatccttgtgaggaagcatcttggataatctgtcacgtcggccatgttcttcgtggcctgttgttgccgtcttggttgcgcaagaaagtttctctcgaggacagttgctccgtcttgttgaatttttttttgggggggcttgtaagagcatttgttatagaaactcacctcaggtggtggggttgcattctccgagttgtcaaagtttattactggttcggagtagattgtatatggtttcggttggtaagaccacggttgtaccagctgcggtatatgtttttttttgtcaacaggaccttgtaattgggttttgttctttggtcggcgagagcaagaaaaattggccttgttctgcggagttaccctgtttggtttcattgtccccttgcctgtgttgccaaattatataatgttatagaaattggatggtgtagcctatatatatatatacatataatgatacctgcagccatcttttaatgttgg

SEQ ID NO: 277927 - DNA, 445 bp, Zea mays
cccgcgcgtccgcccacgcgtccgcggacgcgtgggcgcagaaccagaaaacccactggcctgctgcttgattagaaaaaggagagccacggcctgtgagtaactacgccatgttacgaatcacagcctgacttcctctagatgaaagcataggtagtgacgacctattgttttcttctcagcggacccaatgagtaactacgccatgttacgaataaaagcgagggaaaatcggatgagcaacttttgcagctatatgaaatgcactttggaaaatcacgtcttgaggacgaaaaacacgataaaatggacttgcctacttttgcaccgaagaaactcataagtaatccaatttccgaggacacgaacggaagtaagctgtttttggtattcgtatcggaattagccagaagaagaaaccattttcactgcccttcattctttg

SEQ ID NO: 277928 - DNA, 493 bp, Zea mays
ctaaaatttacaatttacaatttacagctgtgcggaggcgggagcaggggtgcagcgagcacctagcagcgcgcggccggcgactccaccgagacacctcagccggccgcgcggtcgcggttgcctccggctggctcctcgcctcgatggtggggatgtaccagcaccaactccgcgacgaccccttcgacaccctaagcggcggccactgcggggagcagccacgcgttgccggcggcggcgcctcctcctcctcaccctcggctgttcatgacccgctgtctgcagaggtacatggcggcggacagccgcggcagcgggtcgaggcgcttgccgacggaagaagcatgttgcgcggcgggggaagcggtatacttggcgccgcgggtggagatctaggggtgctagtgcggtggatgcgggaactcgcagcggatcccgtgggtccactttccgcgccatcagagcacagggtgaggaagcggcacgtgct

SEQ ID NO: 277929 - DNA, 402 bp, Zea mays
cagctagccagttgttacgccatatcagggtgtttgaagatgggtacgagagcttcgagtcgatggtgccagtttccagcagagtgtccagaagaaagaacaagtgaggttctacttcgaagcgtgaaaccttttgctcaccttgcgagtaatcgtacaaaggagaaacagttttggagtgcggtccaaccgtgccgcagaagcccgtcctatgatccgaaggcaagttggcatcttgccatcgaatagttccattattttctcaaataagttgggatgtttgaagcgattttagtttttttttggtcatattctttaggtgtggtgtatagatatattgcttattcttgttgtaaattagttcatatctggtactggtataatgacaactattaataccac

SEQ ID NO: 277930 - DNA, 606 bp, Zea mays
gactgcagacgcccggaccacaggaacatccaagtaccgaacactaccggccacacgctcgagaataggcggcggtgcaggtcctcctccatctctgtcgtgggttcaacttcactgtgaatacgctgacgctacgagaagtcatcacggaaggggtctcgaagcaaggtgcaaagactcacctgccgtctccgatggacttcgccggccgggtatccgtcctgctcttcttcctggtcgctggcactgtagcaaacgaccagatcttcaccacttcaggtttgccatttgggcgaagttcgcgtgagccaaggtaccgcgtcgagttccatcctgttgattcgccattccatccagagaatggtcaggaatcggtaccaatggctagtcatgaggggaagcgttataagtgctttctaccagttgaagaaactaaaaccatgaagtcaatgctcccacaaaatgcaactaatattataatagaaagtgaaaggcgaattaagccaaaggagccggatgagttactcgaggttctcaaggatcagtgtttctacaggcacgaaggttggtggtcgtatgaattcttgtattatgggaaaatcagac

SEQ ID NO: 277931 - DNA, 420 bp, Zea mays
cggacgcgtgggcaaagacaggttgcgtgagtatgagctcaatcttccaagttcaagacgagggacttgatgttggaagggtgtattttgtgatcctcgagatgtcccctgttacatatattgattcgagtgctgttcaagctcttaaagacttgcaccaagaatacaaagcacgccatattcagattgccatagctaacccgaaccggcaagtgtaccttctgttgtcaagatcgggcatcattgacttggtaggagctgggtggtgctttgtgcgagtgcatgacgccgtgcaagtgtgcctacagcacgtgcagaattcatcttcaaatgcgttgaagctacccgtgcaggcatcaggcgtgttgaccgattctgtttcgactcctaaaccagagcagcagcatcaaaagcagcacg

SEQ ID NO: 277932 - DNA, 983 bp, Zea mays
ggaccagaaaacatgcaggcgattcaagttgaacctgtggcctcatcattgaattcatcatattggtacattctacataatggaaacactgtgttcacttgggctggaaatctgaccactgcattggaccaagagttaatggaaaggcagcttgatgttattaagccaaacacacagtctaggtcacaaaaggaagggtcagaaacggaccagttttggagtttactgggaggcaaatctgagtactcaggccaaaaaatggtgcgagaactcgaaagtgacccccatcttttctcatgcatcctgtcgaaaggcaatttgaaggtcaaagaaatacaccactttactcaagatgatctaatgacagaagatgttttcattctggactgtcacacgagcatatttgtttgggttggtcagcaggtggatgttaaaggcaggttacaagctatggatgctggggagaaatttattgtgcttgattttcttatggaaaaccttgcccgtgaaacaccagttttcaccgttatggaggggaatgagcctccctttttcactagattcttcacctgggactccgcaaaatcactgatgcatggcaattcataccagaggaagctcgccattgtaaaaggtggaggtgctccagcattggataaaccgaaaagacgaacaaccgtctattcaggaaggagtactacacaagataaatcccaacgctccagaagcatgtccttcagccctgaacgtgtgcgtgttaggggaagatctccagcattcactgcattggctgctaattttgaaagttcaagcaacagaaatctttccactcctccacctgtagttaagaaactttacccgaaatctgttacacctgatccgtcgaatactgcttctaagtcacctgcaattgctgctctggctggttcttgtgatcacccgtctcaaactcctgctcgagaattcatgagaggtggctccga

SEQ ID NO: 277933 - DNA, 475 bp, Zea mays
cccacgcgtccggagacagaggccttatccattttggaacaagatgaggctctgcaaaggattgactcagatcaaaagcagaaagaagttgaggagattgaaagtcagaatgatgaacttcaggtagatgaacagaaacatgaagacaagagggatgatttagccaaagaaccactagtggagtaccagaatttcgaaaacagagcttcaaacaacacaaaagacaatgatgcattcaaggttgaacaaacagaggcagccaatagtgagattctcaagaataaagccctacatatatccaaggaatccaccccaagcattatggctatgaaggttgaaaacattaaggaaacaagtgaaggaactgaagaagatgatgctgccaaaaatgataacaaagatgtacaggagaatgcagaaaatgttgatatagtatccaaaacttctactaatgaacaaggccaaacaactgatg

SEQ ID NO: 277934 - DNA, 287 bp, Zea mays
aactgcaccaactgatgatccatgcatagcggcacagcacgagttggagttgccacccattttcatcttccgatccgtatagtctcgttactgtagatagcttctttgtcattcattcggatctcaacacacacgtcggtctcctgttcatttgattcattcttttacataatgatgcaatgcaattattgagatttcgaatctaaaaaaaacaaaaacaaaaaaaaaaacagagataatcacaaagacaagaaataaaatgaatatcaaaaaactacaaaaataaa

SEQ ID NO: 277935 - DNA, 311 bp, Zea mays
cctgtacgtcacgagctggtggaacctcggcttggaccacgttgacttcggcagcggcggcgctgagcgcgtcatcgggtgcatggagcgcaaggtggtgccgggctgcttcctgtgcgggaaaaaggacaaggccgaggccgtcgccgccatggcgctctgcgtcaagcaggagcacgctgaggctttccatgcggagctacgaagcctcaagtgacgcggagaccttacatgtttgtccgtgtttcaattttaataagagcactttaaactcgtgcgttacaataaaaatatataatactacgatatta

SEQ ID NO: 277936 - DNA, 849 bp, Zea mays
  unsure (1)..(849): unsure at all n locations
ggcgtttattctttgcgttctgccatcgcgcgctccgcctggctccccgtgcccgcagtccccgccgccgccccgcaggcagccgccccgtagtccccaccgccgagcacagccgccgcgcccgtagttcccgcgccagcaagcccacagtccccgccgcacacgccgtgatgatcctggaaagcggcatgtacgagcaggccggggagctccagatcctgttggagtacatggaccaggggtcgctcgagagccaccgcatcgcgtggcgcgtcaggtgctgtcgggcatcgcctacctccaccgccgccgcatcgtctaccttcaccgcgacatcaagccctccaacctgctcatcgactccgggcgtcgcgtcaagatcgccgacttcggcgtcagccacatcctgaactagaccatggacccctgcaactcctccgtcggcaccatcgcctacatgagccccgagcgcatcaacaccgacctcaacgacggctgctacgacggctacgccggcgacatctggagcttcggcctcagcatcctcgagttctacttgggcaggttccccttcggggagaacctcggcaggcagggcgactgggccgcgctcatgtgcgccatctgctacaacgacccgcccgagccaccgaccaccggctcgcgcgagttcagggggttcatcgcctgctgcctgcagaagaacccggccaagcgcctcacggccgcgcagctgctgcagcaccccttcgtcgccggcccgcacccgcagcccctcgctgctcctnccccgtcataaccacaccaccatttcggcgggttgggagttgggaccaaagtacggatctc

SEQ ID NO: 277937 - DNA, 454 bp, Zea mays
cgcgtccctgtagaggacggtcggcagcgccgcgacggccgcgggatccagcccgcgcttgggggccgccgccgccgccgaggcggccgtggtcgtcggcagcactgccgccgcgcggcggcggttgcggcggcgcacgtggcagacgtagaggtggaggaagagggcgaggccgagcacggacacgaacgcggcgaccgcggtggtgacgagccgcgcgttgtggcttatccccgccgccgaccgggtgcgtgcgccgctgccgaaccacgcggaccccgggtcgctcgccttcatcgtcgtcgtcgacatggtctctgtcgtctcgtgtctgactgtcctagctccgacaggtctagctcctcggcgtgtcgcagcaggtactacgtacggtacgagcccagttgctcgggtgggttgggtggtgagtgagaagtgagaagcgacaacaatg

SEQ ID NO: 277938 - DNA, 459 bp, Zea mays
cccacgcgtccgcggacgcgtgggcaccgatacaaatacaacgcaccgtccatctctccctccctccctccctccccctcgcaccgccgcgggacacgaacacgcgagccacccaaccggcccgaacccgatcgcaccgacgaggtggatcccaggggaaggctcctctttaccgccgccgatggacgtgggcctcggcggcgcgggtagttccggcagaggagggggagggggccggagcgggagcgggggcggtcgggacagcccgttcgctctcggcgggggcggcgcgtcggcggctgcgtggacccggctcgtcagctccggcgtggaggacgagctgggggctgcgtcgggaggaagaggaggaggtggaaggacgcgcgggggccagagcgggaggcctgccgcaaggccactttttggacgcctgcttcctctggcggaagcccctcccca

SEQ ID NO: 277939 - DNA, 500 bp, Zea mays
cccacgcgtccgcccacgcgtccgcccacgcgtccggcagaaccttgaagttaaaaagatagatgatgagagaaaggctgcattggctgcccagtttgcagcagaagcaactttgcggagagtacatgcagcccagaaagatgatgacatgccaccaattgaagccattcttgcaccacttgaagctgagctaaagctttctcgccaggagattgcaaatctccaggatgacaacagagctttggatcgtctaacaaaacaaaaggaggcagctctgctagaagcagagaggactgtgcaaattgctatggcaaaagctgctatggttgacgatttgcaaaacaagaaccaagagttgatcaagcaaattgagatctgccatgaagaaaataaaatcttagataagctgcatcgccaaaagattgcagaagttgaaaagcttaaccaaactgtgaaggagttggaaaaagctgttctttaacgtggtgcaacggctaatg

SEQ ID NO: 277940 - DNA, 552 bp, Zea mays
ccgggttgattcacgcgaccgcccacttggtgaccacgcgaccgcacaagcccgacacaaccgccggctcctgcaagccgcagcgccaagcctagaagcggagcgcggaacacacgaggccaggaagaggaggtgctgccgtccccgcgccgccgctgtgggagtgcggggaatggggcggcacggcgtggaccagatcggcgctgtggcagcgttcgtctgggtcaccctccttcccttgctgcttgtgtgcgtcgtgtggccgggcgcccaggccggccatacaagcgagtaccggcgccaactcggctccgccatcgacatgccactcgacgccgatgtcttccgccctcccccgggctacaatgcgcccgagcaggttcacatcacacaaggcaatcatgatggcacagccatgataatctcatgggtgacaacaagtgagcctggctcgagtactgtgatctacgggacttcagaggataacctcaactatactgcaaatgggaagcatacccagaatactttctacaactacacctgaggatacat

SEQ ID NO: 277941 - DNA, 506 bp, Zea mays
ctccgtaccaaattatttcttggcacctcagatcagcatattccatctccaatcccccgccgcgttcccccgcacgctttgacccataaagtcgatccatctccgagcaccaagttgaacacgcgatcccattcccattctcttgctcaatacaacctccggctccagcaagccgcagcgccaagcctagaagcggagcgcggaacacacgaggccaggaagaggaggtgctgccgtccccgcgccgccgctgtgggagtgcggggaatggggcggcacggcgtggaccagatcggcgctgtggcagcgttcgtctgggtcaccctccttcccttgctgcttgtgtgcgtcgtgtggccgggcgcccaggccggccatacaagcgagtaccggcgccaactcggctccgccatcgacatgccactcgacgccgatgtcttccgccctcccccgggctacaatgcgcccgagcaggttcacatcacacaaggcaatcatgatggcac

SEQ ID NO: 277942 - DNA, 732 bp, Zea mays
ggaacgctttaatgtttcctcaaagctgaaggaaatacttgtggagaaaaaatgccttcctatcagaggcaagctatatgacgtggcttgtgttgatgatggccttaacactattgcttccaaagtgcagcacaatatcattcaccttgtcggtgacatggtaacagagttttttgctgcacatacatctgcactcgctgaatcaacaacagcttatggaagtcatttcacagatgagtctgaagtgtccacaagaagatgctaagtggtggtacaaattttattttcggcttgaagtttttttgcatttcaataagccatttccttttgaagaagcagcatctccagagcatgtcatagttgctgagtctatttgcaagattttgaggacgttttatcgtgttattgaagtcatttctgcctctagttctccgacagcaaacatgtacttcaatgagatatggaaagtgagaacagtcttgcaagaagaagcatcaagtgagcatgcagaaatcactgcgatggtcgcagagatgcaggaaacattcaatgagtactggcaacattcatacttatggttatgcatacctgttatcctagaccctagattcaagttcggtttcattgagttccgtctgaaacgagcttttggattaaaatcagcaagctacttatctggcatacgtgaaacactccaggaactcttcaatgaatactgcagtccagtggatc

SEQ ID NO: 277943 - DNA, 713 bp, Zea mays
gcttgcgcagctcttcttctccgatcccgactccaactctccctctctccttcgcctggcacatcctcggcggcgcggcagcctgcttcttcaccggcgcggcggcctgcttcttcgacgacgcggaggcctacggcggcctaccgagcggacgggtccacggacgaacggatctccggcgcctggcagatcttcggcgcgcggcctaccggttgtggacggatctccgctgcctggtgccctggtatatcctcgacgtcgcggcttgcttcttcactggcgccgcggcctgattcttcgaaagcacggcggcctggttcttcgacggcacggcggcctgccggttttgtccaggcaggcagacgcggcagcctaccagtcttctccaggcgggtggatctccagcgctcctcgagctggtgcaggcaggcatgccggtcttctccaggcgggtggatcttcaccggcccggtagcctcttcttcaccggcgcggcggcctaccgggcggacggatccggtcgatctccagctgctccgtgcctctgctgctccgcggcctgagctccgggcggacggatccgcggtccagcgactccgctgcctctgctgctctgtgtctccagcggatccgtgcctctgctgctcggcgtcctgagctccggccgtctcgcgctgtagctcgccccttgaatccgcacacatgtgattggg

SEQ ID NO: 277944 - DNA, 386 bp, Zea mays
tgcttacaggatgggtccactacaaactttcactctctcctaagcagcagcctcttcttccccgatcccaactccaactctccctctctctttcgcctggcagatcctcggcggcgcggcagcctgcttcttcaccggcgcggcggcctgcttcttcgacgacgcggaggcctgcggcggacgcgacgcggcagcctaccgggcgaacggatccgcggacgaacggatctccggcgcctgatagatcttcggcgcgcggcctaccgggtggacggatctccggtgcctggtatatcctcggcgtcgcggcttgcttcttcaccggcgccgcggcctgattctttgacggcacggcggcctgccggtcttctccaggcgggcagatg

SEQ ID NO: 277945 - DNA, 218 bp, Zea mays
tcttcttccccgatcccgactccaactctccctctctccttcgcctcggcggcacggcagcctgcttcttcaccggggtggctgcttcttcaccggcgcggcggcctgcttcttcacccgcgcggcggcctacttcttcgacgacgcggaggcctgcggcggacgcgacgcggcggccttccgggcggtcggatccgcggacgaacggatctccggcg

SEQ ID NO: 277946 - DNA, 689 bp, Zea mays
gagagcacgcgctaccgtggtggctcgcgctgccgccggtccgttcttgccggagccgccgcgcgcgacctcctctccgcccaatcgttcagagagcagactgcagcacgggcacggcgtggcgcgcgacgagccgctccagcgcctcgcgcatccaccagtgcgggcacccgtccatcacctgctgcaccgttgcccaggtgcgcttgcgggacgccatctcgggccactggtggagctcgtcggcgacgcggagcgggaacatgaacccctcgtaggtctggtccacgtaccggcggctcttgtactgccagaggccgaggaccggctcggtgtcgccgaggacgccggcctactccagggcctcgcgccgggcggcctcgtccatggactcgtccacctcccacccgcccttggggaacatcatgccgtgccccttctgggacgtgatcgccagcacctccagctcgccgtcgcaccgcacgcggtacgggatgcagcccaccacgatgcgcccgccggtgctctggctgtaccgctgcagctcccgcccctgcctcgcgaccagcacggccatgatggagatacgcgggcggctactagctgattcgttctcgttgctctagcggctcgccggggtcggagctggagcctggagagtaaggtggaacgatgatgccgcagctgct

SEQ ID NO: 277947 - DNA, 539 bp, Zea mays
tgctcggcctgacttgcgtcttcttgcttcctggggtgccgtgtttcatttctttgacacaacgacgtccgggcagccgcctcctgtcgccagttcgccactctctggttgctgcacgcctctagtcggcggggccaagaggtggaaaagggcaggatgaagtccggcgagcggccgaagcagatgcggggcgtccggcaggaatctcggcggttccggcttctggtcatcgtcgccggcttcttcctcgtctccctgaccttcgtcgtcatctccaagcccgattccatcctgtccagcctgaacggcaagctgccggtggaccaggcgccgacgtccatcctgatccagcagaaggttaactcgccccccgccaccgcacttgagacctccaccgacgcactgcgtggagaccctagagtggtcgatgacgaagccgatccatgaccacaggggttcaagggcgaggaggaagagagcccggtactgagcgagcccgacgcgaccagcgggatgacggagctgacccccgacaagga

SEQ ID NO: 277948 - DNA, 467 bp, Zea mays
cacacacagaacttctcctgtcggcctactaatacaactagctgccctcttaggtatactgtgatggccaccttgtcctccacagtagtagttgcacttggtgcacctctcttcttgctccttgtaacgtgtggctcgtgcgcgagaccggtgagctttaacgcctccgacctcaccgccgatcccggctgggatgctgccagggccacctggtacggtgcgcccaccggcgccggccctgatgacgacggtggtgcctgtggattcaagaacgtgaacctgccgccgttctcggcaatgacgtcgtgcggcaacgagcccctgttcaaggacggcaagggctgcggctcctgctaccagatacgatgccaaaaccacccggcctgctccggcaacccagagacggtgatcatcactgacatgaactactaccccgtggccaagtaccacttcgacctcagcggcac

SEQ ID NO: 277949 - DNA, 464 bp, Zea mays
cagaactcctcctgtcggccagagtcctagtagcactctagctagaacgaaggtagctatatatcaagattcaaacaatggcgtccatctcctcctccaaggtgctcgcacttggtgcgctcatcttctccttccttgtcacgtatgcctcgtgcgctagaccggtcaacttcacagcctcagacttcaccgccgatcccaactgggaggctgccagagccacctggtacggcgcgcccaccggcgccggccctgacgacgatggtggcgcgtgcgggttcaagaacgtgaacctgccgcccttctccgccatgacgtcgtgcggcaaccagcccctgttcaaagacggcaagggatgtggctcctgctaccaaatacgatgccagaaccaccctgcctgctccggcaacccggagacggtgatcatcaccgacatgaactactacccggtggccaagtaccac

SEQ ID NO: 277950 - DNA, 376 bp, Zea mays
aggacgcgtgggcgaacttctcctgtcgtctgcctaccagtagctagctctaatacatagcagccctcgctcgcaaggtactgcactacgatggccgccacctcctcctcctcctcctccacggtagttgcacttgcggcgcttctcttcttgctccttgtaacgtgtggctcgtgcgcgagaccggcgagctttaacgcctccgactttaccgccgaccccaactgggaggctgcccgggccacctggtacggtgcgcccaccggcgccggccctgatgacgacggtggtgcctgtggattcaagaacgtgaacctgccgccgttctcggcgatgacatcgtgcggcaacgagcccctcttcaaggacggcaagg

SEQ ID NO: 277951 - DNA, 498 bp, Zea mays
acagatcatcacagtgaattgactgatattggtatcattccctccttgaaggggtccgtaccgggtccaaaattcccccctcgcgtccgctgtgctcctccatatcgttctgaggattatgctggagatctgagagtagcagcttcaaattggaatggaaaaggctctttcctattcacctcgagtactgctgtgtatgactgcagtgacaatggattctgcagtgaggattctccttgtgtacccattggtcaaagcactcgtactgatgtgcttctaaaagctgaaaatgttgtccttgaggcaggcggctgtgttcttaggctagtaggactttataaatcagatcggggtcctcatgtttactggctgtcaaaaggaaccttggatgtgcgtcctgatcatatactcaatctgatacattatgaagatgcagcctctcttgtaatttccatcatgaaaaagagattacggagctgcatctttgtgggttgtgac

SEQ ID NO: 277952 - DNA, 348 bp, Zea mays
ctcgagcctttttgcagtgtgtgaactcaacatcatggtggaaactgtacaccctctctcccgaactcaacatcatggtggaaacttactgtacaccagtgactggaaggagcgtcattttcaggccattgttgtataaaaagagtggagaacattgatggatggttcaagtgtccttgcagttatacctctctgtcttatactttaaacctactagtgtcaggtcccaaggatatgtaaaatatccttactccagatgatatttgcagagtagcagctttaaattggaatggaaaagggtcttttctattcacctcgagtactgctgtgtatgactgcagtgacaat

SEQ ID NO: 277953 - DNA, 476 bp, Zea mays
gcgtgggaaagactgttgcgagagggattattggagatgatgtgcggggagcagagcgacgagctgtccgagaccgagatcagcagccaggaggcgtccaactcctccggcccggtcagcctcgacctctcgctctccgttaccgacaacagcaacggtaacaacagcaacagcggcggcgcgcaggccgacgccgcccgcgagccgtcccgcgtgttcacgtgcaactactgccagcgcacgtccttcagctcgcaggcgctgggcgggcaccagaacgcgcaccggcgggagcgcacgctggcccggcgcgcgctgcggctcgacgcggcgggcccctactacggctacggctacggctactacgccgacgtcgcgtccctgccgctgtacggctcctgcctgtaccccatcggcatccaggcgcacgcgtcggcggcagcgctcccggagcacgaggacgcgcgcgccggcgc

SEQ ID NO: 277954 - DNA, 341 bp, Zea mays
cccacgcgtccgcggacgcgtgggttggattattgtaaggggattttttctttttctattttggtgctcgaaaagatcccacgtcttttttactgatataaagacaagctaggagaggatcatgatgaggaagagagagagtgaaaggagtgggagactgggcatctccccccaccattcttggcgagatcctcatcgatgttactggctggtttcaaataacatcctgtaataaaatttcttctccaaagtaaaagacaagaaaaaaaacaaatacagatagaacaacaaaaaagataaaaaaaaacccagagacaaatagacaataaacaggaacttga

SEQ ID NO: 277955 - DNA, 392 bp, Zea mays
cggacgcgtgggcaaggtggctggtgagatgtgtctctcgctatgttggatcactgctggtgcgcgcagatgtaccagggcgagaagctctgcctcaacatgcacttctagctgttgtgggtcaagaactgtccgaggtgcagcctcacccaccacattgtgccttggcctcacccagtggctggcgtaggaggcccgattctggtggacttgggcatggagaaacccaactgcccaatgatgacgaggtggcttcgaccgaggcttctgcctctactgctcctgatttgtatggtaaaccaagaccctgcaaggatggatggagcaatttattatctgtggactctgttatggatggagcagttgctattaaaaaatcagatgaagtgccc

SEQ ID NO: 277956 - DNA, 536 bp, Zea mays
cccacgcgtccgcccacgcgtccgcggacgcgtgggcgcaaccctctctggtctctggtcgtcccactttcttccacaccagaaggaaacttgagtcgcgcgcgagcagtagtgcatccaatccaatccacaaagagctgaggttagtcagccatggcggcaccgccgaccgaggactgcggctggctgctgtacctctccctggccgccaaatgcggcgaccctagccgcctgctcggcttggcggcggtcttcgtcgccgcctgcgtcgtaacgtcgctcctgcactgggcgtgcccgggcggccccgcctgggggcggtactggtggaccaggcgaggcgggctgggcatcgtccgcgccgccatcccgggaccccggggcctgccggtggtcggcagcatggggctgatgaccggcctggcgcaccgcaagctcgcggcggcggcggccgctgccgggggtcagggcagcagcaggcgccgccgtctgatggcgctctccctcggcgagacctcggcggtggtgaccggcga

SEQ ID NO: 277957 - DNA, 595 bp, Zea mays
gctattcagaggagcttcctggtgtctgctgacatggcacatgctttacatcccaactatatggacaagcatgagggtaaccaccagcctaaattgcatggaggacttgtgatcaagcacaatgccaatcaacgatatgctacaaatgctgtgacagcatttatttttcgagaaattgctgagagacaccagctacctatacaggattttgttgttcgcaatgacatggcttgtggttcaacaattggcccaatacttgctagtggtgttggtattcgcactgttgatattggagcaccccaattatcaatgcacagcatcagagaaatgtgtgccgctgacgatattagctactcatatgagcatttcaaggcatattttgaagaatttactgaattggatggcaaggtcaaggtggattactaaggcatatagcacaataggttagctttgttacaagctgtacttttatacaaattcgataagcaagtggagaacaaatttgggagaatgtgctagttgtgtttgcattgccatacgatgttctaaattgtatctttttatcgaacccaagtacccccatgtttgaatttcc

SEQ ID NO: 277958 - DNA, 1335 bp, Zea mays
cacacgcgtccgcacaagcgtccgcccaagcgtccgcacacgcgtccggtttactctttcctcaccatcacatcgccgctgccgcgacacgcgggccgacgagatgagagccgccgctgcggcctccttccatctggcacccgccacgaaaccggcccatcgccgcggctgcaccacagagtcctgttccctgaagcctgcgccgactgctcggccacctcgcctccgctcgctcgccggccgggcgcctcttgtctgcgcctctctcgggatatctcatgataaagggttcgacatttctgaccccaatgttgctggacagaatgatttactgattgtgggccctggtgttcttgggcgaatcatagctgagaagtggaaaaaggagcatccaagttgcaaagtttatggccagaccgcaagcaaaaatcatcacaacgagttaacagatcttggcatcatcccctcattgaaaggcaccactattcatcagaaggttccacatgttattttctgcgctcccccgtctggttcagatgattaccctagggatgtcagattggcagcatcaaattggactggtgaaggatctttcctgtttacatcaagtacagctctgtatgattgcagtgacaacagcatgtgcaacgaggattgtctgtcagtgccaattggcaggagccctcgtactgatattcttctaaaagtggaaaatgttgttcttgaggcaggaggctgtgttctcaggctggctggactctataagatagacagaggtgcacatgttttctggttgaggaaaggaactttagacacacgaccagatcatatcatcaaccagattcattatgaggatgctgcctcccttgctgtagcaatcatgaaaaagggactgcggagtcgaatatttctgggttgtgacaacaagcccctttccaggcaagaaataatggatgctgttaacaatagtggaaaatttgacacgaagtttggaggctttactggtactgacggtccattggggaagagaatggagaattcaaaaactcgggctgagatcggttgggaaccaaagtatccaagcttcaccgagttccttggtatcagcagttaacatccttgcatactgttcagttagtctgactcagctgagttgcaaccgtgattagattgtacatcgtttgaatttttatatggtctgaactggtgatggtgtacatctcagcctaattttttattctcacagtatttgagctgtgaaccagacagatgccaccccatcccactggacaatatatactgtcacgtgagtggatttctcgatcaaaataaaat

SEQ ID NO: 277959 - DNA, 431 bp, Zea mays
tctaaaccctaatcaatcagtcggtcgccgtcgtccgcccgtccgctcagccggccgagcgctcgagcctcctccgtcccgctcccgcccgtccgccgagcgccgacggcccgagcagccagcaccgcccagcaggcgagccgctccgcctccgcgcctctatccgccgtccgctcgtcccgaggccgcgagccgctccgcggctacgaccctccgcccgccgtctgcccgtccagcgagcgcccgacggcccgagcagcggagcaggcgagcagctccgcgcctccggccttcgcccgccgtccgctcgggctcggaccgagccgctccgcccaccgtccgccgagcgcctgacggcccgagcaggcgagcagctccgcgcctccgcccgccgtccgctcggcccgagcagctcactcgctcagccgcag

SEQ ID NO: 277960 - DNA, 598 bp, Zea mays
gggcacgagcggtcgcaatcttgctgccggtggctccggccccgccgctgtcaccgtcgcatggactggtcgacgatctcgcggactgaccgggcacgtggctcctctgcgcgccggcgctgctgttcgtcgacctcgatctccgccgcaggatcatctcctggatcttcgatctcaagaaacacgcctgcagcaccggaccaagaatccaagaccctacacgacgctctttcggttaggtggagtagatcgaggcagcagctatcaggagacaccgagtgccatgagagatgcaacgccgtggacggggcggagagcttaagtacgcagcgcgagagccaaccaaagcctcagaggtgcactcaaacgcaactgcaagcccggggggagaagcaaaatgggacctcgcgaacctgaaaagatcctgaagacaccgggcatcaactgatcatcttgtttgtagatcgtagtagtgtgccttgctactgcacctcacccaaaattttaagagctcaattgctagttgcagtgacacactccacagagagagagagagaccgacacagagagagagagtgagtgtgtgcggacgcaagga

SEQ ID NO: 277961 - DNA, 451 bp, Zea mays
tcgcccacgcgtccgcccacgcgtccgtccactcgttcggtagatcgaagcagcagcgtgtcaggagacaccgagtgccatgagagatgcaacgccgtggacggggcggagagcttaagtacgcagcgcgtgggccaaccaaagcctcagaggtgcactcaaacgcaactgcaagcccggggggagaagcaaaatgggacctcgcgaacctgaaaagatcctgaagacaccgggcatcaactgatcatcttgtttgtagatcgtagtagtgtgccttgctactgcacctcaaccaaaattttaagagctcaattgctagttacagtgacacaatggggagagagagagtgtgtgtgtgtgagggggcaatgaggaggggtgagggtgtggtgatctactgatcttaacggaggctctccctctcctccccagcccccaccggtgatgtcag

SEQ ID NO: 277962 - DNA, 1582 bp, Zea mays
ggcggggtagccgtcggtgcaggtgtccccggaccgtggcgagagcccaaggcggaccacttcaaccccttcgtcctggacgacggcgtccgcgtcggctaccaccgccccaggagcgacctcgtgaaacccggcgacgacgtgctctcgcggaacttcgacaagattgagtcgccggtgaaggacgtgggactgttccgggtgtctggcgtgttcccaaccatctccaaggacgggtcgaagctggcgttcgtggacaacgagttcaaggcggtgtgggtcgccgacagccagggtctgcgcgtggtgtacgagaccaagggccccgacaacattttctcgccgatgtggaacccgaaccccgacaaggacatcctgtacgtgtgcatgggcccctccttcaacgccggcaagccgctggagatctgcgccatccccaacgtgtccagcggcgcgcggcagcccgtacagctcaccaagggcaagttcaacaacgctttcccgtcgagcagccccgacgggaacaggttcgtgttccggtcgaccagggacggcggcgacaagaagcacaagaacctgtacatcgcggagaacgcggaggtgggcgagtacggcgacggcacggtgacgcggctgaccaacggggagtggacggacacgcactgccagtggtcgcccagcggggactggatcgtcttctcgtcaacgcgggacaagcccaaggacgcaccggaactggacaacggcctggatccgggctacttcgcggtgttcatggtgaaggcgagcgacccgacggtggtgatccgggtgatacggagcggcgacgacctcggcgggcacgtgaaccacccggtgttcagcccggacggcaggagcatcgtcgtgacgtccgacctcgccgctgtgtcggccgacctcatctcgctgccgctcttcatccactccgtgcggccctacggcgacatcttcgtggtggacatcgacccagaggacgcgagcaagaacaaggacgtgaagaagttccaccgggtcacgcacagccgctacgagtactcgacgccgacgtggacggtgtttgccacggatgatcccaacgcgcagtggaacatgctggtgaagaaagactcgtacacgccggcgtgcccctacgcgtacccggacggcggcgagagctggcacatgaccgggcacctctgcatccctaggaggtgctgctgattgtgtcattggattttggattgcatcctccttcgtcgtcacgagcagctaccagctactgcgaccttctccccttgttcatccatcagtaataaaccactagggaattagcagggctcttcgtgcacctgatgatgacatcagcggagccctgcctctctggtctctgccatatgggtttgtacggttccattcatgtcactactgtcccaccacctagctcgtgctcgctcccaaggctatatccagcggtcttcgtattccacctccgactctgtatttcaagcaccactttataaataatgcagtctacagtgtaaaacaatgatttgcatgaccatatatattgtactaagtatgg

SEQ ID NO: 277963 - DNA, 440 bp, Zea mays
tcgccaactcactctctgtacgccctcccctctgctccttcctctccatgaaaatgggggcgtggagagcaaaaatctccgccgccgcgcacctacgcccacggaacacgccgtcatatgagtggagagagaaccccgcgcctcctcctccgtgagctccgtacatggaggctagagcggcggcagcatccgaggggtcggtgaggagggcgatggtgctcccgctggtgaagctcggctcgctcgcgttccggacgctgagcatgcccatcgccgcccgcctcaagtacaacgccggcatccaccccaagttccgcggtctcatcatcggcatcgcgcaggcaaaccatcgtttcacgacaaatatgcagaggcgactttacggacgtgcgactgacattcacattcggcccctgaatgaggagaaagctattcaagct

SEQ ID NO: 277964 - DNA, 492 bp, Zea mays
ttctagatcttctcatcataccgataccggcctcaacgccctctttttcccagcctcacaaccaattcctgtttcagtcgatcgcagttagcatggccacgacacagagctgtcagagcaggagcagcgccttgcagcaaggctgctgcgggcttcccggccgccgtagcggtcgacgaggagcacggccaccacagccaccagctgaagggaggagcgcaggaggaggctgagaacgacaataataagccggagctccggcgtggcccctggacggtagacgaggacctcaccctcgtcaactacatcgccgacaacggcgagggtcgctggaacaacctcgcccgcgccgtcgggctgaagcggacgggcaagagctgccggctgcggtggctcaactacctccggcccgacgtgaagcgtggcaacttcagcgccgacgagcagctgctcatcctcgacctccacacccgctggtgcaaccgatggtcg

SEQ ID NO: 277965 - DNA, 315 bp, Zea mays
tctagatcttctcatcataccgataccggcctcaacgccctctctttcccagcctcacggccggttcctgtttcagtcgatcgcagttagcatggccgcgacacagagctgtcaggctgctgcttgcttcccggccgccgtggcggtcgacgaggagcacggccaccacagccaccagctgaagggaggagcgcatgaggaggctgagaacgacaataagccggagctccggcgtggcccctggaccgtagacgaggacctcaccctcgtcaactacatcgccgacaacggcgagggtcgctggaacaaacctcg

SEQ ID NO: 277966 - DNA, 1191 bp, Zea mays
cattaataacctggtcgccagagcttattgccataagatcttgcggctgtcaggtgccactcaagatcttcccaagtcgacgatctgcaatgtgcacggtgtgaaccccaagtttctggaggttggagagaggatagcagcagagcgggagtctggccagcaatccttctctaaaggagcttattttctggggaagatggtgtgggccaagggttacagagagttaatagatttgttcgcgaagcacaacagtgatttggaaggcttcaagctggacatctatggaaacggtgaggattcacacgaggtgcaatcggctgccaggaagctgaatctgaacctcaactttcataagggccgggaccatgcggatgattctcttcatgggtacaaggttttcataaacccaagcatcagcgacgtcctctgcaccgcgaccgcggaggcgctagcgatgggcaagttcgtggtgtgcgccgaccacccgtccaacgacttcttccggtcgttccccaactgcctgacatacaagaccttcgaggacttcgtcgccagagtgaaggaagccatggcgcgcgacccgcagcccctgaccccggagcagcggtacaacctgtcgtgggatgccgccacccagcggttcatggagcactccgagctcgacaaggtcctgaatggcgacagcaacagcgaatgcggtggctctgttggcaccgaaaccggcaagagcgcgggcacaatgatgaggagatccgcctcggcgccgaacatgtcagacgtcgtggacggcggcctggcgttcgtgcactattgcttcaccggcagtgagctcttgaggctgtccacgggtgccgtccctggaacccgggactacaacaagcaacatagcctggacctccgtctcccgccgccccaggtacagaacccggtctacggctggtaattactagatatataggtatagctctgcagtctgtagcactagctttttcatctccgcgtgtgtttgtttgccaaaggcgagccttgttcattattacctacaaacaacaactacgactgtaaggatgacaacgctgcgtcgtgattttgtaagactagtgttagatagagaggcgagcatttcttcgatcagaaaattaaaaaaaggaaaggaaagaaagcctgaggcggggcaggccctctgtttcc

SEQ ID NO: 277967 - DNA, 431 bp, Zea mays
agcatcagaatctgttgtaaaacaggcttgcttgggtaaaagtggatgctcagttcccgtaacacctatcaaatttggaggcgatccatgtcctggaatccaaaaatctcttctagttgtggcgaactgcaggtgacactagacagtcacccaagtatacatcatagaaaagaagttggccgagtataaaaaataaaaagatgagttacaaaatcaacgagcaatagagtggagggaaagtataagtcaaaacatatagtaattgttattaggtaggcaattgatcacttgaggcttagttggtagaccccatgtaccgattgttttgacctggcatagatatatatgtgttatctgtatatcggtttcacatgaatggcaactcattgttttggtggttatggtgatttagatatatgtgatatcaaaaa

SEQ ID NO: 277968 - DNA, 476 bp, Zea mays
gtgtcataagacttgctagaaggctggatgaatttctgaatcagttgagagctgctgctgaagccgtgggggaggttaaccttgagaagaagttcaaaaatgcaagtgagagtttgcgtcggggtatcatgttctccaactcactgtatctgtaattagcactttagcagcaatagtaccatatgttagccgacaaatgctagcggcgggttttgacctgaagcaaaatatgcgttgtctgtaggagagggcattgccagatagcctctgtaaccttgtactctagttcctagactaaattaatttgttatcatgtatacatcagggtaggcgtgatgctgtcttaagaaatccaagtgataccaatttaagggcctgttattgaatagtgagggattctagctccctcaatcctctctgttactcttgcttccaaacaaatcctaaaggtctaatatcactgttggttatgctct

SEQ ID NO: 277969 - DNA, 527 bp, Zea mays
ttcatttcttcttcttcttgtcactagctgcaggctgacacagcgccgccattgttttgttacatggccccgagcaaggttgctgctgcagtgaacggacagaagccgatggtgcccaacatcgttcagagcagcagcactctgccgccggttgccggcggcgacgaggagttcgcgccgtctgtatggggagatttcttcgtcacctatgcccctcccgtctcacaggcatcagagcagcggatgagtgagagagcggagctgctcaaggcgcaagtacgtcaggcgttcgatgctgccagcatggatgttgcaggtctggtcacgtacgtcgacaccctcgaacgcctcggcttagacaaccacttccgcgacctcatcggagctgccctggaacgaatcggagctgaggagctgccggagcacggcggcggcctgcacatcgtcgcgcttcggtttcgcctgctccggcagcatgggatatgggtatctacagatgtgttcgacgcgttcagagaagacgccgg

SEQ ID NO: 277970 - DNA, 357 bp, Zea mays
ccgcagcatttcttcttcttcttgtcagtagctgtggcctgcacagctagcgccactgcacgtaccgccattgttttgttagcatggccccgagtaacatcgtcgttcagagcagcagcactccgccggttgccggcggcgacgaggagttcgcgccgtctgtatggggagatttcttcgtcacctatgccactcccgtctcacaggcatcagagcagcggatgagtgagagagcggagctgctcaaggcgcaagtacgtcaggcgttcgatgctgccagcatgggatgttgcaggtctggtcacgtaccgtcgacaccctcgaacgcctcggcttaaacaaccacttccgcgacct

SEQ ID NO: 277971 - DNA, 617 bp, Zea mays
  unsure (1)..(617): unsure at all n locations
acggtgatgtcaggaggcaatcaaatgatttcgcagggcgtaatgaaccatttgtatgatgtgatgtgtgaatttagtttctgccttccccctgattatgcgttgatgataagagctcttggttctctagaagggactgcaaaagcacgggatcctgagtttaaagttattgagagtgcatatccttttgtaattgggagactccttgcagaccccagccctgatatgaggaaaatattgcgggagcttcttatatgtgacgatggatccatcagatggaatcgactggaaaggctggtacatgcttaattattgttccttatcttgttatctcattgttatcacgattttttaccaaaatcatatgatgaaattaccaaaaccagtcttttaaataacaagaacatgctagggagttttgtttgtcatgatatacactcctgatttctctgttcgtatgtgtggaaacagtttcatggacctatcctttctgtgaacatgattactaatttgtggtagccctcttgacacatagaaccactaaggtaagattgaagggagtatccagcctatagatgtggaattattaacaactnttactgttgaccatctatttt

SEQ ID NO: 277972 - DNA, 445 bp, Zea mays
cccacgcgtccgtccacgcgttcggtaatttcccccaccttttgctcctgccaaatactaaggggtcaaataccctgccaaatactaacatcatatccatggctgtgcaaattgtacgttttgatggggttgagatccatggggctcatggctacctgcttgagcaatttatgaaagataaagcgaatgaccgaacagacgaatatggtggatcccttgagaaccgctgccgatttgctttggaagttgttgaagctgttgttaatgacataggggcggacagagttggaattaggctatcgccattcgcagaatattcagagtctggagactctaatccaaaagaattggggctttacatgatgaatgccctcaataagtatggtattctttactgtcacatgggggaaccaagaatgaagactcgtggagaaaaaactgaatg

SEQ ID NO: 277973 - DNA, 844 bp, Zea mays
  unsure (1)..(844): unsure at all n locations
cgctttgcctcaattctgccaaagcgatcggctgcactgtactcaacatcggcacacaagacctcgccgaagggaggcctcatctggacctgggcttaatatctcaaataatcaagatacaactgttggcaaatgttattctgaaaagcacacctcaattagttgaattggttgaggacagtaaggagatgggaggagcttatgagtttatcccctgaaaagattctactaaggtggatgaactttcaactgaagaaagcaggtttccagaaaagagtaacaaatttttcatcagatataaaagatagtgaagcctatgcttgtctattgaatgtcctagcacctgaatgcagtgcaaaaccatctgcgatgtctgtaaaagatctacttcatagagcaaggttaattcttgagcatgcagataggatgggctgcaaaaggtacctgactccaaaagacatagttgatggtttacccaatctaaatcttgccttcgtggctcatattttccaaaaaagaaatgggttgtccaaacaaatgaaacaagtttcctttgtggatggactctctgatgatgctcaagtttccagggaagaaaggtcattccggctgtggattaacagccttggaatttcaacttacatcaacaatgtgtttgaagaccttagaaatggatgggttctccttgaggtgattgacaagattgctccaggctcagttaattggaagatggcaaatcgcccaccaatcaaattaccattcaggaaagttgaaaactgcaatcaagttttgaagattggaaaagaactaaaattttctttggtgaatattgctgganatgata

SEQ ID NO: 277974 - DNA, 382 bp, Zea mays
tcccattcttgcaccggggtcattggactatgattactgaaccagtgcgaggtaggctctggtgataaacctccaatttatgacatatatgctcctgacttgtacattccattaatggcatttggtacctatgttgttcttgctggcatctcattgggtctttgtggaaagcttagtcctgaagctttgaactggttatgtatcaagggattggttggttggtttatgcatacagcactgctttaagttactttactttcattacgcaatggggaagctcctctattggacattatagcttacgcctgtttcacttttcctggcttgtgtttggctgtttctggaagaataatatgtgattacttctactactttctgatgc

SEQ ID NO: 277975 - DNA, 695 bp, Zea mays
cccacgcgtccgcccacgcttgcgtcgacgcgtgggatcaaggcaaggtagtggtcgtgaaatgctccctgctaggctcagtgttgtccatcctgttgcttgtcctcggaacctccctgttctttggtggcctgactaaccttggaactgagcagctatgcgacaaattgcatgtacatgtcagcacaggacttctgattcttggtgtgctatgccactctctgccactgatgctgagatatgctgtgagctccggggagcacgcagaatcctcttgggattcaggactggagctgtcccgagcatgcagcattgtcatgctccttgcctatgtagcctaccttttcttccaactgaaaacccaccgccaactatttgaaccccaaccccaagaggttgaagatgatggtgatgattcggtctctcaagacgaggcagtactgggattttccagtgcaatgatttggctgggagtcatgaccctgatgacagcactcctatcacaggttggtgtgagcacaattgaggcagcatcggaatcttgggagctatctgtcaatttcattaacgtcatcttgattccaataggtggtaatgcaacaaaacatgctggggcagtgatatttgcgtttaaaaacaatctggacatcaccctctgagtatctttggggtgcgctacgcacattttcatgttt

SEQ ID NO: 277976 - DNA, 372 bp, Zea mays
gttctccgtccccacgcctcgccggacccgccatcaccgcctcctcgttgggccacgaaacgctagcggcgcctgcagcccctggatactgcgtcccgctcccttgcgcctccgcccgtgccctgctcccaccgacgtcgcattagtgtatgatgatctcattcttcgctatttttttaagctccctacaccaaagaccacagtcagatccgaggctacccgccgtcccagcaaggattttacccggccgaagctctgcaacatcggtgggatcgatggctgcgaccatcacgagctccggtgcccacgaatcgaagtcagcagcgtcacgtggactgaggcacgtgccatgttcgccgtactgtccgacgc

SEQ ID NO: 277977 - DNA, 458 bp, Zea mays
gggcgatgaggatgatggagaggaagaagatgacgaggacggtgaaggggacgaagaagaggaaggtgatgaggaggtgactggattctaagcgaggctactcatcacctgtaactttggaagtgtgagttagttgacatactattcacttgtacctcgtgcgatttcttatacgtgtacttgtgtgcgttctatgggacgcactgagcccataaatcgattcgtgactatgtaggtatgtgtagtgctggtgtgtgtaccttggatttctttctacatcttcctggggtggcattgaatgcctgcagtaaggtatgggctaccttctggttgacatgcccttgggtatttatggtcgatatgtggttttggttaaaaataaaattttttttattttttattttttttttttttattttttaatttattttttttattttatttttttcttttttttt

SEQ ID NO: 277978 - DNA, 591 bp, Zea mays
cggacgcgtgggtgaaattcatctttacagatcggaggaagagtaggttattcagcccgagactcgagatgatcgatcttgaaatgagaagagaaggacccacccaataaataaactattccaatgactttgttcgcttcccctgaggcaacggctgtactcggcacacagacctggcttatgagcaggatttttcagccaagccaagtgcgtatggttgctacctgtattctgataggccacttaatgacactggctcccagttattgacttatgaagaatggcttctcgatggaagagaaacaataataggaaaataggaagctgcaatcagaaccggctaactagacaaaaggagagagattggctcagttcagtaggaggaatttctaccgattattgagtggtttggttcctttcccctgaaaggtaaaatggtttatttgcacctgtagtgggacacctctcccagctcccagccagggttcatgcaggaaactatgttaaggagctgatccgaatacagatacatggcccccactcatcacaacgaacggtgagctttcccactaagcctcacaggagcagcac

SEQ ID NO: 277979 - DNA, 346 bp, Zea mays
tcgcccacgcgtccgcccacgcgtccgcggacgcgtggggaccaaactgcgtgctccggcctccgggagaggagagagggtagagccagaggagttgggcgcgcagcacgatgagcggggaggaggccgacggctccaagccccagggaggcggcgtacactacggcaccttccaggggccgcccagctacccgcccccgcgcccgccgccgagcctctccgcccaccaccgcggcgactaccaggccgttcccgctcgagattccgaggcaggtgtgcggggacgtagccatgatcgacttccctgttgtggcattggttttggatggtccctgtttatagtcgg

SEQ ID NO: 277980 - DNA, 455 bp, Zea mays
cccacgcgtccgagcaaaacagagctccagaaactgaccgattgggtgcacaccggagtgggcgggatggcggggacgagcggccacagcgaacgagcagacgagcctctgaaggaggcgctgttggctgcccgcaacggtagcggcagcgacggcgacggcgagaaggacctggaggagatccggagcgtggggtcgttcctgcggcacgcggcggaggagaaccggaagctctggtaccttgcgggccccgccatcatcacgtccatcacgcagtactcgctcggcggcatcacccaggtcttcgccggccatctcaccacgctcgagctcgacgccatctccaccgagaacaacgtcatcgccggcctcgccttcggcatcatgctggggatgggcagcgcgctggagaccctgtgcggacaggcgtacggcgcgaagcagctgcacatgct

SEQ ID NO: 277981 - DNA, 956 bp, Zea mays
ttctttgccgattacggatggaaatctaggccagtctcttgatgacacaaacgatgatttgggagccagagagccttatatcagaactgatcccgaggtttgtgaagaatgtattggcgaaagggagagctgtgcattggtggaaaaactcaactatcaaaatgaagatatccacgtttactttgtccatggaaaagaagcaccaaagtctattaaagaagcatctaaagctgttactgtaccagatcgtcggacatcgaagcgttcccggagaacaagctctggaaactcaatcagtttgaaagtctctggctctacatctgtctatcagttgaaactgatgatatgggaatctttagggattgttaaggagaaccaaatgcttcacaaaggctctgttgagattgaagatgattttgctactcttgctgataagagtatttttcctggggattttctctgggtcagagactctgaaatatatgagaaccgtgacattgcagatgagatttcagaacaaaaggatgatatgctacaggctgaggaaggctttcgaggaactctgttgacatcaactgtctcagctcagctttgtcaggatatagcttttagtgaatgagttcccacatcagatatgtagctgcatatctgctgacttaagctggtgaagcctgctgggaggtgatgctgactagcttattctttgtttttattgcatattgctgttttttctgaatggcgatcactacttctacatccttctccctctgactatcaaagtcccacttgtatatgcacctgcttccactgtcgatcatgcaaccgacagaacttcaaagttaactacggttttgaacccttattttcattatgtatatattattcatcttccgttccatgcgccgtgtatgaaatgaattttaggatatcaacaaagttggaatgtcagttttatc

SEQ ID NO: 277982 - DNA, 446 bp, Zea mays
tcaggatatagcttttagtgaatgagttcccacatcagatatgtagctgcatatctgctgacttaagctggtgaagcctgctccgcccacgccgattgattcatgattatggtggttctggcagccgccgaggtggaaatttttgtcgaccccttatctccatgctcagtcaagctaaggttgtttagcgaggaaaatgtatggggtacctactgtagttaaggccccgtttggtttgagggactaaagattagtccctccattttagttccatttagttcctagattgccaaacggtaggactaaaaatgagactaaactgttttagtccctagtctctcaaaatgtggctaaaaagactaaaccatattaattccacatttgcccatcatttagttcaattgtactaatagcacgagaatgttaaagacaattttagtcttctt

SEQ ID NO: 277983 - DNA, 450 bp, Zea mays
gtctcagacctcttgtggaggtggagatgaacctagagtagaccaaaccctgcctggctgcttatgcccatctgtcagcagaggacttcaagaaggatttagagtgccagcggttggagcccacagataacacaaaccttgagcttgacaacactgatgagtttcgactcacccaaattgaattttcacaggatagctttatgacatgggcagctgaaaagattactgacgactgacgctgctctagtgcactctcggcaccattttggtacatgaagaaacaactgatctgtttttttgtgggacggcagtgaagtctgcaacaacagtggtctcgcttttgctttgagtagctctggtgcacataaaataatttatatgaaatatgaaaggctgaggaatcatgcggtaccaactgtggagtactgttcagtgtgagattggccttgg

SEQ ID NO: 277984 - DNA, 461 bp, Zea mays
  unsure (1)..(461): unsure at all n locations
cccacgcgtccgaaatcaggcatgtacactcacatattatggaatcaggttcacctgaagatgaggcaggatctgaggacaactttgtgcaaggggagaatgggacttctgtagcaaatgcttcgattgatcctgctcaatctttacatggcagcaatctttcaccaccaacagtactacagtttgggaagacaaggaagctatctgagagatctgaccctagaaatcggcaactcctgcaaaaacgacagttcttccattctcacaaggcgcaacccatgcaactggagcaagtgttctcggaccgtgatagtgaagatgaagttgatgatgatattgctgacttcgaggatagaagaatgcttgatgattntgttgatgttacgaaagatgaaaaacttattatgcatatgtggaattcatttgttcgaaaacaaagagtgttagctgatggtcatata

SEQ ID NO: 277985 - DNA, 537 bp, Zea mays
gttgatggggaaattcctaatctgcgcagtggagatcaaaatgtaaattttgcagctcaaaattctgaagcagcaacaatggagattgacaatgaaaatggagcagataataatagtgaaccgaatgagcgaaacacataaaatgcatataatgttggagagcttgagcagtggtgtctctgtacactgggttatctcaagtcattttcccgccaatatgcaagtgagatttggtcaaacatagcaatgttggatgaggtcttcgttggggatgttcacccacttatccgaaaagctgctttctctggtttgcgcagatttaccaatgaggggtctcatccttgaatttgacaccatacccatattctttatagaactgagtgtattgtacctgtatgatagaggacaacttttctccttgtttaactaatcaaataggcataaacatttttccttggtttcgtatgccttttttttctggttccttggcttctgggccctaaatgaaatttttaccaaggtactaaagtaatggtc

SEQ ID NO: 277986 - DNA, 469 bp, Zea mays
  unsure (1)..(469): unsure at all n locations
cccgcgcctgcccacctctccctcgccgtgtgccgacctcgctccccacaaccatccgcaaggagggcatagccatggtgcgggcgagccttctcgccgtgcgcgaggcgctagcggtcggcgctgctgcggccacgcggcacggcgcctccgccgccccgctcggtcccgtggcgatcttgctcctcgcggtggccgcgacggcggccgtggcggccatcgcggcgttcgggtgcgcgcagggcgccaagaagccgcgccggcagagcagcaacaacaacgcatactactacggccagggctacccgccgcctcccgcgggcgcgtacggctaccctgcgcaggccgcgtacggctacccggcgcagggcgctggagggaggcccggccgtagcgggctcgggtcgggagccgcggggctcgccgtcggcgcggtcggcgggctggccgncggcgccatcatcggctc

SEQ ID NO: 277987 - DNA, 624 bp, Zea mays
ggcggcggcgtacgaggtgctcgtagcaggcggggaggggctgttcctcaagaccaagcccccggccgccagatccgccgtcgaggcgctcccgtccgccgtcgtcgcggccggccaggaagtccagggggatgagtgcgctgtgtgcaaggacggggtcgcggtcggccagcgcgtcaagcggctgccgtgctcgcaccgctaccacgacggctgcatcgtgccctggctccaggtgcgcaactcgtgcccgctctgccgcttcgagctgcccaccgacgacccggagtacgagtcctggaaagccggccggaccgacgccgcgtgaaccggccaaccaggcagtggccgcatgctcttatggtatggttttattgatagtgttgtatgtatgggttgggtttgaatcgggtgctttggttacaaggttgctactcagccgtatcaaaggcaaagtatagaggcagtagatgcagagatggtttttgatcggtttcctttttctccttaaagagagggactcatgaagtttttccaaatgaccgaggttggcatatacttgttagttgtccctacgtattcctgctgtctttattctaaaaaaaaaaaaaaaaaaaaagagaa

SEQ ID NO: 277988 - DNA, 602 bp, Zea mays
tgctctcttcttctggttctcctcatcacattcaccgtcgtcgtcatcacataagcttttatctaggcttgcggctacttgcatcggagcaagtcagtcacatctcacagctcagtgagatccagagccaaagggcggggcgtctcccactcccaatcccaagtccagccgccgccgccgtctcttgctcgctccaaaagccgttttccagagatctttttcagcgccagacgccagccgccgtctctcgcttgcctgcatttccgatcctgaggcagtcctcatctcattctcatgatctcatccaaccgggaggctgggaacgagatcacagctacagctacagctgcctgagcaggatcctcctcagatcggcttcaaaaatcaaaaggcgcgggggacaacaaggcaggggatgagtgcagctgcaaccaaggtgaagagacgtgtgggcaagtacgagctcggccgaaccataggcgaaggcacattcgccaaggtcaggttcgccaagaacaccgagaccggggagccggtggccgtcaagatcctcgacaaggagaaggtcctcaggcacaagatggccgagcagattaagaggg

SEQ ID NO: 277989 - DNA, 609 bp, Zea mays
agtgttcctgaaatggtccgcgctggttcgcaggtcactcgcctcctcaacgattacatgcaaatgcagttgggaaagaacaagaaagatatgcctggctcagtggagacctacatggtagagaatggcttaacaggagatgaggctgcagcggcaatcgcggcacttctagagaacaggtggagaatactaaaccaaacaaggatggagatagatcacacgctactgccagcggcgcaggtggtggtcaacatggcgagggcaaatgagatcatttacctccacggcagggacgcctacaccttcggtgctgacctcaaggaccttgtcaccacactcttcctcaagcaagtgctccctctctagacaatactctgatcacacaaccagattggctataacgattctcgtgttgtattacgctttgtgtttcattatgcacgctatatatatgatcaatgtacctgtttctatcatattgatggtaatataatactccctccgtttctttttattagtcgttggaatatgcaattttgtactatccagcgactaataaaaagaaacagaggaagtattctaaatggatatagttaacttactgtgctc

SEQ ID NO: 277990 - DNA, 943 bp, Zea mays
cccacgcgtccgggcagtacccggcgaggtggtcctcgacgacgccatcgccttcgcgaggggccgcctcctggacatcatcagcaaaggcgaggtcaggtcaccggtgtcagagcagatcacacgagccctcgacatccccctcccacgatttacgaggcggctggaaaccatgcactatattgccgagtatgagcatgaagaggcacacgacggcctgctgcttgagctcgctaggctcaactttgtccttgtgagagcgcttcacctcagggagctgaaggacctgtcactatggtggagggagctctacaacactgtgaagctcccgtacgctcgggaccgtatggtggagatctacttttggacctgtggcatgcttcatgaggaggagtactccctggcacggatgttcttcgccaagacgttcgggatggtgtcactgatggacgacactttcgatgtccatgctactctagacgagtgtcacaagctcaaagaagctatgcagagagggatgaaagtgaggtctccattctacccgagtatctacgcttgctgtatatcaaaacacttagcaacttcaaagagtttgaggagatcttggaaccgaacaagaagtaccgcatggcttacacaaaagaggcatacaagttgtgctccaaaaactacctaaaggaagccatctggtctaaccagaaataccagccaagcttcaaggagcatgaggagctatcaatcatgacctcaggcttgccgatgctcacgatcctaacactaatgggcttcggtgacgaggcaaccccggaggcgttcgaatgggtaagcagtgttcctgaaatggtccgcgctggttcgcaggtcactcgcttcctcaacgatttgtcttttacaagttgggaaagcacaaagaagatatgcctggctctgtggagacctacat

SEQ ID NO: 277991 - DNA, 441 bp, Zea mays
cccacgcgtgcgcagacacatgggggcaaaggcgaggtcaggtcaccggtgtcaagagcagggcacacgagccctcgacatccccctcccacgatttacgaggcggctggaaaccatgcactatattgccgagtatgagcatgaagaggcacacgacggcctgctgcttgagctcgctaggctcaactttgtccttgtgagagcgcttcacctcagggagctgaaggacctgtcactatggtggagggagctctacaacactgtgaagctcccgtacgctcgggaccgtatggtggagatctacttttggacctgtggtatgcttcatgaggaggagtactccctggcacggatgttcttcgccaagacgttcgggatggtgtcactgatggacgacactttcgatgtccatgctactctagacgagtgtcacaagctcaa

SEQ ID NO: 277992 - DNA, 547 bp, Zea mays
cggactcgtgggcgcgcatcgtcatcagttcactagggaggggttgtataggggcgggcgaggagctaacgagagagaagcttcacggagcttgcttgggagttggggacttgggggttgccgagctgtccgtctttcccctcctctctacccaccagctacctcgggagggcaaggcaaacatctgcggcctcctttcccgaacccgggttggatggagcgggacttcctggccgcgatcggcaaggagcagcagcacccgcgcaaggagaaggcaggcggaggcgcggaggaatcagcttacttcggggcagcagccgtcccggcgatggactggtccttcgcgagcaagccctgcgccgccccggcgctgatgtcgttccggtcggcggcgagggaggagccttcgttcccgcagttctccgccttggacggcaccaagaacacagcccctcgtatgctcacgcaccagagatcggtcggcccccacagcacgcagtacgccgcgctgcaccgcgcgcagaacggggctagagtcgttccggtc

SEQ ID NO: 277993 - DNA, 459 bp, Zea mays
gcgccccggccgccgcggcgaggatccggttcccaagccacgcgatacagagatggacaccggggacactgcactccggatccgcgggggacacgccggtgttcttgccggacttgagctgctccagtgcgctggagtaggctgcggtgccggggccgcaccgcctctgcacggcttcatgccgtcgcagcttggagacatggtgctcgctaggtcgcctgcccccgttccggcgatacatggcccaaagacaggcgctggctcaatgctgcccattaggtgggtcatgcggagcccaattgggaaagaccgcacgataacatctgcttcatgggtacgccgagtagcacatccacgtttgggactgttggctttgttccgatcggatctagagatggcaatggcaatgacaaatcatattcgcactaggttattcgttccagtactttcacggacact

SEQ ID NO: 277994 - DNA, 548 bp, Zea mays
cccacgcgtccgcccacgcgtccgcccacgcgtccggagagaaccgaagggcctctgtcatctgggatcaagaggctggtcggtacgtgtcagttcctgcacagacaagaatgggaagtggagtcgatctgccagcaagaaacccacggttcttggcgaacccaagtggcgagccaagcagccatgtgaggggtgttgcacccggcaacacatcgtcctcagcaatgccgtcagggcagccttcggagaggctgacctactctgggcagtcgatattcttcggtggccccatgctgaacacccctagcctgggcgcccagaggaacgaggcaggcgcaagagcgcgtccggagggaagcagagatcctaatgcccagcagcgtgacatccggggtgagaaagcgaggacaggctccttgccagtatttgctcctgggacggtccagaggaacccgccctttgacaaatgacctgctcctgctcatgaagtttatctgaagtgcgatgatgccgttacgctggaacacccccagcctgaagagttggca

SEQ ID NO: 277995 - DNA, 784 bp, Zea mays
ggcaaactggcgaacaaaaggctatgagaaagccaagatccacctccagtgtgatcatggacggaaaatgactcacataaaatttgccagctttggcacaccacagggctcctgcgggagctactctgaaggcagttgccatgcacacaagtcatacgacatattttggaagagctgcattggtcaagagcgctgtggggtaagcgtggttccagatgcatttggtggagatccatgccctgggactatgaaaagagccgttgttgaggctatatgcggctgagtcatatgatccatataacgtactggtttctacaataatgttaccctatatcaagctggcaagaggtgaaagtggcggcaactgcgacacacggattgccagggtttacaggaattagttgtatgttagatttaagcatcgtatgtgtatgtaacttaggtcacatgagacttgcatggaagaagtggttaggaccctagctgtgagaaactaagtcttgtagctctctacccagtagaattggtctggcaggtgagggtgcagatgagactctgctttattacctgagtccatgggcccggtggctcttgggttggagattgccaaaaggccagcaattggctttgcattatctggtcattcatttttttggtcattggagggtgcaatgtaaatgttcagggtcaatcatttatgaatttttctagctagtaatgaaacagtaaagaaaatgttggttcagattataaaacaccagttatcttccatttgcctgagtcc

SEQ ID NO: 277996 - DNA, 685 bp, Zea mays
agtctatgcactactccgtacaagagacatgaccggctcacgctacaaggagtacgggatcccatttgactggctgtcagattctggagtagtttgcaagatcaaagtggcatctgtccggcttgcaaacaagtatatgaagagggttgcctcagaacttgatgcattagaaggcacggagatagagcccaatagagagtttttgcttctccagggtgtgaggttcgctttccgggttcatcagtttgctgggggttttgatgcagaaagcatgaaagcttttgaagagctaagaagcaagatgaccacacaggcatctgctccaccaatatctcaaggctgaagcataaattgagcacaggattcagcacacatctggtcttacttgctggagagtgatttttagttgtgtatattaagtgtacagactacagaagagagattcaaattccggtgttgtgtcaagcaagttgtatatgccaagataatacaagtcaggtttgttcatttgtataacagttttagctcaagcataacacttttcattttgaaggttgtaactgtaaacaggcagttccagaatcacagtagagatcagatgcatagttttgcaactatttttttttccagctgggcatgattttgctactacgactaataaaatgtccaaagcatccattctgct

SEQ ID NO: 277997 - DNA, 349 bp, Zea mays
gagttttcttgaaaaatcaatggatgtttatctaggtcgcggcgcgagaagagagcaaggggaggatgattgtcaccgtgtttccgagcgggggcgagaggtacatgacctccgacctgttcgccgccgccagagaggagtgtattgccatgacgttttgatctttttttaccccctccccccagaaaaaaggggaaaacaaatacgcgtgtatctttatcttcacatggtattggtttaccatgcatgtacatttaaaaatatttttccccgaaacggaatagaacagctgcgtgcttgtttacacatcatataataattttacttgattattttattaataaaattt

SEQ ID NO: 277998 - DNA, 464 bp, Zea mays
cggacgcgtggtgcgaaatcgaaacccaccctcgagcgacgccaagcggccaagacggagaggagaacaattggggacggggaaagtccagggggaagccacggccaccggcgcgatgaaaccgtcgctttcgaagaagaagggcaagaagaagaagaagtcctcgctgccggccgccgcaccggcccctccgccggcggagggcgctgcggatacggaggcatgtcccccgctgcccggaaccataaccctaaccgctgccaccgctgctgcggcggtggtttcggagacggagtccagcagcagcggcgaggcctcgacgtgcccatccgcctgcttcaccgcaagctcgtctgggaccgcgtcctcgcactccttctctgccttgtcctcgtcggcgtccacagcttcagtcgtcggccgccgtcgaggagcggcggcacctcacctggctgctcgacgca

SEQ ID NO: 277999 - DNA, 485 bp, Zea mays
agatgataacagttctgctgtaattaacaacccaagtgttaaatttcatgccgagcttgtaaataatactgggagccttaagtcagaggcccagctcggatttgtaaatagcgaggaggatggtggaggtggagagcaactcccagacttgtgatgttgactatgtcaagatggtcgatggtgatggaggagcctctttaatcgctgaagtcttcattgtgcgtgtgtagctgaattctttcatttctccatcctgagttctttacctctcttctatctatagttctattcataggcattcatgaaaattttaccgagagaaaagataggaagggaggtttaattctggccctatgggtgtggaagctttggtgatgttagttcgatatcttacaagttgtaaataacatgcaataatagcacgtaatttgtgaatatttaaatcataatgtgtccaactgaggtacgagacatcttcccccccc

SEQ ID NO: 278000 - DNA, 893 bp, Zea mays
gtgcggtgtgggcttggcagagagcagacgaccgcgcgccttgcctctaccactgcagctgcgctgttccccggtgccatttctggcgtcatctccgacaaaataggaccacgaagggcttgcatattgtactgggtacttcagcttgcagtaggtgttgtgaagagtttcatgtgcgcttcgctgttcatggatcaacaatttcattctggcttttgcctcttcagtgttctctttctgttttgagacgtggcttgtgctggagcatgagaaggtttctgtatttcttgaaacacatatgtgctattactgtgttgtctatgttgtatgaatcatttagcgcttgatcctgaattttcagcaagaccagaagcaagatgtgctgtttgataccttctggctgatgacattctttgaatcggtgtcccttgtcggaagtcaagaaatcacaaatgtattggttagtgatgatgacagtagattcttgcttccctatgcatttgcagccacactatcggtagtgggcattctgtatatcagaaatgcatcaagtacatgtcagcatgcatctgccattgggagctaccaaaaatcatttcttgcccatgttctcagagacaaaagagtactgatcctggtcttagctcaagcaagcatccattttgctgtctcagccttttggtttctctgggcaccaaccatagtggctgacggaaggtatgctcaactgtcagtaatctacccctgtttcttggcatcaaggatgcttggaagtgctggttttccatggttttacggagccatagcccccttccggaacgaggacagcttgacaatagcttacgttggtgctggactcgctttgtcgattgcggtttatgattaccaggaga

SEQ ID NO: 278001 - DNA, 510 bp, Zea mays
gttccataatctactcgtatccttggcagcagttactgttatgtgatgcagtctatgttttcttttatccttccagtagtagctataacttacaaattttccactgatgattatagaggaccacgaagggcttgcatattgtactgggtacttcagcttgcagtaggtgttgtgaagagtttcagtgcgcttcgctgttcatggatcaacaatttcattctggcttttgcctcttcagtgttctctttctgttttgagacgtggcttgtgctggagcatgagaaggtttctgtatttcttgaaacacatatgtgctattactgtgttgtctatgttgtatgaatcatttagcgctcgatcctgaattttcagcaagaccagaagcaagatctgctgtttgataccttctggctgatgacattctttgaatcggtgtcccttgtcggaagtcaagaaatcacaaatggattggttagtgatgatgacagtagattcttgcttccctatgca

SEQ ID NO: 278002 - DNA, 859 bp, Zea mays
accacgcgtccgcggacgcgtggctgctgtctccgttccaccccctacgagatctgccccctcgccctcgccctgctccaatccccatctccttgcgggccgatccaccctcgctccaatcccccggcgatggtcgtgtgcaaatgccgaaagccgacgagggtttactgcttcgtccatcaggtccccgtctgtggcgtgtgcatatgcttcccggaacatcagctatgtgtggtgaagaactatgctgaatgggttgttaattctgagtatgactggccacaacactgttcgtcttgcaattctgttctcgaaggtggaactgaagaaacaacacgattgggttgcttgcatgtggtacacaccaaatgcttgatatcacatatccaaagttttcctacccaaacagcaccagatggatacgtctgcccctcctgttctgcacccatatggccaccttctagcattaaagatacaggttcgcgccttcacactgaactgaaagaagcgatagtccaggttagatccttaaaatctgtttatgatttctcagtaaaccattgattttgtccatgtatatgttatttgtcacaatatttacgtcactttatgtccaagtgataatatctgcaagttaatagtccctccattccaaattgtaagtcattttgacatttgtagcacccagatatatgtatttttgggtaacatagtaaaaaactatgtatctagattgaaaagctagaacaacttgcaatatagaacagatggaggactaactcggtcaattgtgtacattatgtaagtactgcaatgtaattaatctcttctatgctattacggatacatgtcatacatt

SEQ ID NO: 278003 - DNA, 479 bp, Zea mays
ggcatcttcacgcccatgcacatggtgctcctccgcaagccgcccgccgccgcatccaccgaggaggaggccaaatagtgttttaagagaaataacctggcagaagcagcagcagaggtaagaagagcgagctactcggcgacttgaacaagtgaaaacttcatctgttagagaagaagaagatactactaggaaccatgcttgtctcgtttactctttttttttccttgtccccattcttcttcgtagctttcacttttatttttttttgtttttctggtggacggattattccgttggggacgaggtcgggatttaaatttgcttgatcgtggagatccatctataatctatcatcatcataagccatgttttgtctgctaagagtacattggaattgaactctctaacctaattgttatacccagcttgcttttaaaaacccccaaaaaaaaaaaaaaaaaaaaaaaaagagaaaa

SEQ ID NO: 278004 - DNA, 327 bp, Zea mays
acgagttctatcgggtaaagccaatgattatagggaagaagaagatactactaggaaccatgcttgtctcgtttactcttttttttttcgtgtccccattcttcttcgtagctttcacctttatttttttttttttgtttttcggggggacggattattccgttgggggacgacgaggtcgggatttaaatttgtttcctcgcttgcttgatcgtggagatccatctataatctatcctcgtccatcccaagccatgttttgtctgcaagaaaaaaaaataaaataaatacaaatattaaaaataacatttaatgctatttatttta

SEQ ID NO: 278005 - DNA, 458 bp, Zea mays
gtgaaatagcctccatggaataacccaaagattggatcaaaatgatgcaataaccgacgcgtgggaaatgattcatttgacccagtcggcaaagaggcccgcactagataggtgacccaataaggcaataatgaacccatggtcggagtagtggtgtcattacatgaacataagttactatttaattagcatggagaatagaaggtggcgatcatttccttagctcctgttagtgtccctgaacataagttacccatggtctgagatgttacatctttctgagctatcttctctcggtttgtacttctgttagtgtccctggcaccatatcattcatttggagatattcaatcagctgtgtggctatgtaaaattggttggattttaggtgatctgtgagcattaactttcaatgtaccaaaaatcgatcttaatatatgagatggattatatggggg

SEQ ID NO: 278006 - DNA, 500 bp, Zea mays
tgcacttgtctgggacatcgatcgcgttgtcgtggagacgcagctcatcgcgcacgagaaggccgtgcacgacatcgcctggggggaggccggggtcttcgcctccgtatcggccgacggctccgtccgcgtcttcgaccttcgggacaaggagcactccaccatcgtctacgagagcccccgccccgacacgccgctactaaggctggcgtggaaccgctctgacctccgctatatggccgcgctgctcatggacagcagcgccgtcgtcgtgctcgacatacgtgcgcccggggtgccggtggccgagctgcaccggcaccgggcgtgcgccaacgcagtcgcgtgggcgccgcaagccactaggcacctctgttcggctggggacgacgggcaagcattgatctgggaactgcctgagacggcggcggctgtacccgccgaggggattgatcctgtgctagtgtgcgatgcagaaaaaaaaataaaccaacttcagt

SEQ ID NO: 278007 - DNA, 422 bp, Zea mays
cggcagtcctgtccagtggtgcagctgcctgccttcagccttccctctctttcgcgacccccccggagccggagcagagatcgccagctctaccggcgcggaggcatggcgggggccggagacaaggtggactacgtcttcaaggtggtgctgatcggagactcggcggtgggcaagtcgcagatcctcgcccgcttcgcccgcaacgagttcagcctcgactccaaggccaccatcggcgtcgagttccagacccgcaccctcgtcatcgaccacaggagcgtcaaggcccagatctgggacaccgccggccaggagaggtacagagccgtgactagtgcttattatagaggtgcactgggagctttgctggtctacgacatcaccagacgccagagcttcgatcatataccccgctggct

SEQ ID NO: 278008 - DNA, 321 bp, Zea mays
ccaacgaaaagtgcacgcacacgcgcatcccggcagtcagtagcgcagctgcctctcctctctttggcccccggagccggagcaagagcgccgccaacagcccgctaccggcgccgtgtcatggcggggccaggagacaaggtggactacgtcttcaaggtggtgctgatcggcgactcggcggtgggcaagtcgcagatcctcgcgcgcttcgcccgcaacgagttcagcctcgactccaaggccaccatcggcgtcgagttccagacccgcaccctcgtcatcgaccacaggagcgtcaaggcccagatctgggacacc

SEQ ID NO: 278009 - DNA, 574 bp, Zea mays
cgacccacgcgtccgtccacgcgtccgcccacgcgtccggttcgcccgccgccggagttcgccgggttcgtcttctccgttgcgtccgtccggatctgaggatctccattttctactagtacgtacgtgcaccgttttcgtcgttgctggatccgatgaagactcaccccctccaagatctccgtttccaatggatgcatttgcgcatcccctgacttactagtccgccttgccaacaatgagagatatacatggaggagcgggagccatgggcggttgtaaaatctgaaaaaaaagtggtgagtgtgaatttggatctggtggtgagtgtgaatttggatgagtgtggtgtttttgtcccgaggtgaaggacacagactgttgtttgttgctcttgtcctacacccatgcttttgctttcgctagcctactgcttactagtaataaaaaccactgtgcattcatccatccatacatacatacattcggactgtgccatgcgtgtaaaaaaaaaaaaaaaaaaaaaaaaaaaaaaaaaaaaaaaaaaaaaagggcggccgctcgcgatctagaa

SEQ ID NO: 278010 - DNA, 258 bp, Zea mays
ggctcgaggttcgacgtcaagaccaagagccgcgaccgtggtccgccccccgccggagtttgccggattcctcttctccgtcgcgtccgtccggatctgaggatctccattttctactagtacgtacgtgcaccgttttcgtcgttgctggatccgatgaagactctccccctccaagatctacgtttgcactggatggatctgcgcatccgctgacttactagtccgccttgccaacaatgagagatacatggagga

SEQ ID NO: 278011 - DNA, 522 bp, Zea mays
cggacggtgggcggacgcgtgggcggacgcgtgggcggacgcgtgggcggacgcgtggcgctgcgccataaggctgcgactgcgagagccagccgcacccgcaccagtccataggccggcctcctctcttaccttcccacaccccttctcgaccgtacgtagcctagttgtgcttggtagccagccagaaggtcgtcggccgatgatgggaggaagaacagtggccccgccgctcgtcctcgcgctggtgaccatcatcgccatcgcggcggccgagggggacgaggtgaagtgtggcgggtgctctccgtgcggcggcgccgactgcccggtgctgtacccgtttgccgtccccgccgccgtactactactacagccctcccccacccgcgacctaccccggggagtcctcgtcatactaccagccgtccgccggcgggcgcgtacattcagatcgggagcgcgccgccgggcagggcccgttgacccgcagacccagggttatcccgccggcgcgccggc

SEQ ID NO: 278012 - DNA, 468 bp, Zea mays
gcggcacggttgccaggaacaccttgccggcctgggtgctgaggaacacgcgggcggacccgtccgggtgcgccgccatgttgaggtaggagccgatgcagacgcgctccaggaacatgccgcggagcggcagcgccgccgggcgggtggagttgaacgccgctccgccgccgtccaggcacggcgagccgcagaactcgcccgcggactgccacagggtaacggatgtagagacgacgtgagtatcgctggtttaatcatagacgttaccttgtaatggcgtgatcatgttcattttggagtgtgggtagtcctctagttttttataacagcgaatccctcgcctacgcccccaaatcgtcgaagccgcacctaaggacctctataatggcaaatttctctctatcagtggagcaaccacggaggctgtcggaggacctccactgttacatacatactacttggcag

SEQ ID NO: 278013 - DNA, 716 bp, Zea mays
tccacgcgtacggagaacatgaactggtagttcaagatccttctggtagtgctcccaaaggtgttaatagttaaagattatgtggacgaacctcatgtatcaacaactaccatgagatcgagcggtgaagtacctcaagatcatagtgccaccgaggaaaacccaaaaacaattgacagcattgttgaaaggagaccatctctaagcagtcagattagcattaccctaagatcaagtggtgaagtacttcaagatcatagtgccaccgaggaaaacccaaaaacaagtgaaagtattgttgaaaggagaccatctctaagcagtcagattagcattaccctaagatcgagtggtgaagtacttcaagatcatagtgccaccgaggaaaacccaaaatcaagtgaaagtattgttgaaaggagaccatctctaagcagtcagattagcatgaatgaagcctatagacttgccattggcaacaagggtagcttgacatcccctacattgacggatgtaatccttggaaaggactctacttctagcataaacgaagaactgaggctactgttatcacagatctcagcttccagggggcttgaggcaccatgggccgatccaggccctagcccacgtgcatatggacgtggtgatgagttggtggtgcagaacattaccaatagattatcacttgagaggaatgcttccggtttggagtc

SEQ ID NO: 278014 - DNA, 476 bp, Zea mays
gcgctggggtagtgaccccaatcactggctccactcgtacgatctggtggggaaaccagctgacctgtatgaaaggttctgcgctccggtgggcagcctgttcttcgccggggaggctgcctgcattgaccactccgggtcggtgcacggagcttactcgtcaggcatcgctgccgcagaggactgccgaaggcgtctgtcggcgcagctaggcatctcggccggcctgttccaggtcgggaaggctgccatgagggaggagatgacggctgaagccatggtccccttccagatatccaggttgtaagagagaatctattcaacaccgtctttgtgtcaccggtttgttgcttgatgtaattgtaaaatggtgtaagaccttgtttgttggaatattcgatggtggatgctgtttttcgtcaggtaaacaacagaaaaagctgggccagatgaatgaatattccccttgcgcgctt

SEQ ID NO: 278015 - DNA, 426 bp, Zea mays
ctcgtgctcagctcgtccttcccttccttcggcaagttcatactaatcttctgatccagagccgggtgttggcacagatcaggcggccgccatggcggatcagttcgcggattcggcgaacaacgtgatcatcgaggaggtgaacaagggcctgaacccaggaatggtggttctgctcgtggttgccagcttcctgctgctcttcttcgccgggaactacgcgctgtatgtgtacgcgcagaagacgctcccgccgaagaagaagaagccggtctccaagaagaagctgaagagggaaaagctgaagcagggggtctcggcgccaggggagtgaacagacagggatgccgccgatccgcccgtcctgagcccgccccctatttacatgattgtcgaagaaaaaagatacacctgcatgagccgcgg

SEQ ID NO: 278016 - DNA, 425 bp, Zea mays
agaagccatcttttaaagaacattttgggcagagattgccagtactattacttgtggttaacatggacttctcagctggttcctacttcacatcatggcctgtcaattctgcttctgagagctacagtttggctgatggttcagttgaatcctatggaggagaaggaatcatgccaccttcaagctacttcatgacagccagatcagatcacaatttaaaattcagtgtgcatgaacaggattccactatgcttccaaacgaccaattgacctatgctggcgctaggcagactgatctattacctggcgagactccatctaaggataagctttgtgagaatcttctggagctttaacgactgcagaataacagcagcctaccgagttaattaatgcccccaagggtacttcagcacaattcaaca

SEQ ID NO: 278017 - DNA, 529 bp, Zea mays
acttggctgtcttctatgacacatatcgcccttgaacggggatgctttgtgctgtcagcgtgccagttctgtcgtagaaagaactaccctccccctcccgagtacacattttgtggcctagaggaagagccatccccggaatccgttgtttgttctggagggagtgtcatcatctcaccattgggaacagtgttggcgggtcccaactacgaaagtgaggcccttctcactgctgacctggaccttggagagattgttcgagccaagtttgattttgacgtggtgggccactactcgcgacctgaggtgctgagtttagtggtgaagagcgatccaaagcccgccgtctctttcatctcagccgctggtagggatgatgactatgtgcagacctaatgacaaacatatctttggtctttagcttccttatacggcaatcgcatgcatctgtataattgtgggtttccggaacgttgcacgttccgtcagaataataataaactgttatgtcccctaccatagtagcaat

SEQ ID NO: 278018 - DNA, 405 bp, Zea mays
ctcggactgatgattggttttggtgtggtagaatttgatggcaactcctctgttatttgtgggaagatgagatgtagtttattggtgacaacaaaaaggtcaaggttataaaatccatctgaaaaggaccaggcaagactagaggggatgaataggtctgttataaaatttactcaaagcaatggttagtgataggtgcgccagttctaggaaaaaatgtactagcggtgcaacggttctaggcgcaactatgctactatcacaaaatagagcacctcatgaacataattcaaaatctacaacaagaaaagtatattgagtaaattactagtgttcccagtagtgtatagagactatttcatcacttttcctaggatggacgctctagcacaagtagataaagtg

SEQ ID NO: 278019 - DNA, 951 bp, Zea mays
ggctatcacttccaccttgttgagatataggaaactcaaaagacagcatgtgtctcatgaatcaagctcttcgctcctcttggaagcatggaaaccactttcaatgggcttcaaaaagagatggtgggagtgtgttgctttgcctgaagatgttgattccagtgaagaagaattgtttagacagcagataagggatctggcgtttacgtcactgcagcttctcaaggatgcaatctttgatcctgagtgtgcgcctttgttttcgcttgacatctatggccatataattggcatgtttgagctgaacaatcttgatttagttgtcgcatcaccagctgaagactatttcatatacattgacggtcttccagagagcgacaaggaggaagcagagaaagtgacagggccattcctagatgctttaggagaagactacttagttccgtgcgagggaacggcattctttcctctgcagagctgcatgaaccattcatgccgtccaaatgctaaagcatttaagagagacgaggacaaggatggccatgcagtgataattgcccttaggcccatcagcaaggacgaagagattaccatcgcctacatcgatgaagaccttccttacgaggagaggcaggcgcagcttgcagattacgggttcacgtgtacatgcttgaaatgccaagaagagcgaccggtctgaaaggacaaatatgtttgaattttgcggcattcagcctatgtcactgggtagttttgaaagctcgcgagaagtgagtgcacaaaatgatgtttgttttcggctgtaacttgcaaaagttttgttgttgtccaatgaatatgaatagtgacgaacagacgatcagtcgtcgtaaccagcagcctcatgggactaacacaaccacaagagcgaatggcaatagcagcaggttaacacttgcaactattttggtt

SEQ ID NO: 278020 - DNA, 482 bp, Zea mays
aaaggcacaacgtcaaactgtgtttaaaagaaaagcgtaatcaggcccacctggttggggcagacacaaatttgagccagctcctgttcaagttctattgacagaagagattagtggctcacttagaaagctaaaggggtgtggtaatcttgcaagggatcgctacaagagcattgagaaacgtggaatacttgcaccaagcaagagaataagcaaacgtcggtagagaaggcaagttccaatctgagggatgatatggtgaagctggattgaagaggatttactagatttgagaagaccctttggatgttcactgtcggaatgttcccctctttcagtgtcttgcgaaagtacctaacgattggttctgtcgttgtgggctcgttgttgacgctagtttcataggatctgggatgcactcatatacctgggctggtcttgatgcatgatggcgtatcgcatggtaaaaaaaaaaaaacaaa

SEQ ID NO: 278021 - DNA, 709 bp, Zea mays
cccacgcgtccgcccacgcgtccgcccacgcgtccgatcgtttggaaatggtttatctacggcttgtgttgtcaacattggggctcaagttacacaagtagtttgtgttgaggatggagtagctttgccccacacagctctggcgcttccatatggtggagatgacatctccagatgcttgctttgggttcaacgtcgccatggcacgtggccaaacttccaaactgatccaatgagcaatcctatagatatgctaatgctcaacaaaatcaaagagtcatatagccaaataaagactgggagcattgatgcagctgtccttgttcattcatatgataatgaaaggtctggtggacatcagaagacaagactatcagcaattaatgttcctcctatgggtcttctttacccaagggttcttgttccagaagagtaccctccacctcctcgatcttggttccaagactatgatgacatgctggaggatacctggcaaacaagtgatggtctttaccctagtgggaatggtgggtttggcatgtgggacagttatccgatgtttcccactagattaaagaaatttgataacattggcctcgtagaggcattattagtagtgtactttcaacaggacgtgttgaccttcaaaagaagctgtttggtagcattcagttggttggtggtgcagcttctacacttggccttgcac

SEQ ID NO: 278022 - DNA, 1013 bp, Zea mays
cgtcagtttattttttcgagaaggaggtaatgactaaatacaaagatcagggccctcaaatttaccggaagtttttaagatgttttgaggaccttcctctggcgacaataatagcaggatgtgtgtacactgcacacggcggtatcttccgtggaacaattgtagtgccatcaaagaaatcaaaaaagggaaagaagggtcacaaatacaaggcgaattttactgttgatctgacttccatgaaacttggatccttggatgagttattgaaagcaaggagaactgttctcgaccctccttgggaaggctcaaatttgatccctggggatgtgctgtggtctgacccttccttgcagatgggtctttctccgaataaagaacgaggcataggtttgctttggggtcctgatatcactcagcagtttctgaggacaaatcatttgaagcttatcatcaggtcacatgaaggtccagacgcgagagacatgcgacacgatctcttaggaatggatacaggatatacgattgatcatgaagtagaatgtgggtaactaattactctcttcagtgctccggactacccacagtttcaggcttcagaggagcgatacaacaatcgtggagcatatattgtccttagtccacctgattttgctacccctgttttccatagcttcggagctgtaaagcctcgacctgcggcccatccgttctatgattttgaacaagtgatcgactcagatgaagaattggatttaatcgccatggacagcggcacgtcgagcctgtcatgacgactcgccatgtaccttttgcacttagggttgtatttattattatcgctccaattgttgccatggaagcgtggcatcaaggttttttgctgtcgttgttgtaagctaatgccaacgtagtaacgttgcaggtttctggatggcctgagtcctgacatgcacacgccaaatctgatctgttggtttggttgaggttgatttgtatctaaaactaagtga

SEQ ID NO: 278023 - DNA, 1059 bp, Zea mays
cccacgcgtccgcccacgcgtccgcaccgataaagcctttgcgtacattggagaacacgggaagctaataaagaccctctccgtcgccttcgccgggaacagtgacatggccctccagtatgtattcgaggggtgcaccaagctgcagaagcttgaggtcagagatagccctttcagtgacaggggtttgctctcaggactggactacttgtacaacatgaggttcttgtggatgaactcgtgcaggctgacgatgaggggctgtagaggtgtagctcagcagatgcagaatctggtggtcgaagtaatcaaggaccactccgaagatgaaggggaggcggagaccgttgacaagctgtacttgtatcggtcgctggcagggccgagggatgatgctccgccgttcgtcaccctcttgtagcacttggtatttgaaggacagccccgcaccgtactgacggacatggttggtaggtcattccttaccatcaagttgccatggccagcgagggaaagcgtagcgtcccgtgggtgatattcacaagttgctgcatggagcgctcgtgtaaaatcaagtaaagaacctgccgattattccttggaacttgatctggcatgggggcggcatccagagttggggcagttgaggagcacatccagacctagtatagcagtgatgggtagtaactgattgcacaggaactgactgcacactgactccagtcagcaggctccggatggttctttggcagtggcacccaagtctccagttatttactttgccatcttccgttccattttttcagctcagaccaaggaatggcggcggcgctggtgcgtgctgcctatgcccggaagcttcaatggctcaaccggccattaattatgagttgtagtggatccaaaactcaattccgctatttttctccccctcccagtgtttttagcactccagagttatttttgtagacctgtagtgtagaccaccaccactacccctttcctccgtcccacgccctctgctattttatatcaagaagccactggaggagacctggg

SEQ ID NO: 278024 - DNA, 631 bp, Zea mays
cacagccctgctgtacccacgaacatgtttgttgtattgttaacttaccaagtttgcagagcaagcgaggggagcgtcctgcggatgattttcaaggtgctgcaagcgaggggagcgtcccatcgtaaaatcaatcaagtcagaacctgccgattattcttttccacacttgatctggcgtgggcggcatccagagttggggcagttgaggagcacatccagatccagagcgagagacatctgatggcctcctcattcatggcgccagcgcttacagtaatagcagtgatggatgggtagtgtctgattgcacaggaactgactgcacactgatggctccagtcagcaggcttgggggacggttctgtggcgctctcaagtctccagccacttgtgctttgtgccatctcccgttccatttttcaggtcaaaccaattaattgggtggggcatttctgcctacgtccaaaagttcagtgctccccccccggccattacttgtgttttagattaccccaaaactcggcccccccgctatttttttcccccccctttcccccattgtttttttagcattcctgaactaaatttttttttgtaagcctgtagaccctcatgctatttttgaatt

SEQ ID NO: 278025 - DNA, 705 bp, Zea mays
cggacgcgtgggcggacgcgtggggtgaggctgctcgtccacatttcttacagtcctcggagatgggcctgccgtatatgcgaggttgcatcaggaagtctgcgcccgtgcgattttaagtacagcaaactattagcttctcttcaaactttcagatgcacatataattttgagataaggttgacatctgttcaagctgagccgtttaagaaaattattttgaaggctatcagtcttctcacagaggaagtgcagaatgccggggctttggtagatgggcaactgttttcagaacagatgtacatatgtacagaggacccacaccaagttgattttcttgtgccattcaagaatgctgctgcctggtgtagaatgcaccttagagggagttgctgggctcattcgctttattggatctgtcagcgccttggcatatttaggccctaaagaatctatttcagaagctatatctgatctaaaggcggacatcgttacaagtctaaaaaagccggttggatatcatccttgatgaggcagatgatggccctgccactgctgatgtggagagatcaccatctcagaaggccactcaagttatatttcatgagttgagagaaccttacagtttttcattcccgagaagggtcctgataccttggctgagcggcacctatgtttgtgattacttgcaacaaccagagacag

SEQ ID NO: 278026 - DNA, 333 bp, Zea mays
  unsure (1)..(333): unsure at all n locations
cccacgcgtccggttgaaaccagcgttgtcgagcgagagaaacagagcgctcccctgtccaagtggtcaggtccaggacaccctccacgcacgcactgatggaacccctggtgttcgtgctgctcttggtggccatgccactcagaggatcagacggcgcgtggtgcgtgtgccgcccggacgtgtccgatgcggcgctgcagaagacgttggactacgcgtgcgggcacggcgcggactgcgccgncgtgctcccgaccgggccgtgctacagccccaccacggtgcgcgcgcactgctcctacgccgtcaacagctactttcagcagaaca

SEQ ID NO: 278027 - DNA, 628 bp, Zea mays
cggctcgagagcaaagcatcggtgtctacctcattattttcggagtccgagtggcgaaacccgccgcagcttccactgggcagtgctccacaggctcatatccgattccgatccctaagacctcagccgctgcggcatccacggccaactcaagcgctggcaactggcaagggcagatgatctgtgtatagtactcgctaccttctcttgatttcccccctgaggtcgctgaccaagggtcctgtccgccatggatgcggacgaagctctgcacgcagcgccacgccttttggtccgccgtccgatcgccaccgctagacgccacgcctgcgttgccttcccggctgaatcgccgattcccttggcggcctagcgcctgcggtcggcgccacacgcccgcgaggtagccgcgagacacaggtacgggtcccaaacgggaacggctgctgcccgccgagccgtcgactgcctgcctggagccttgaccgcgcaagcgcagctgccgtgtgttgagtgctgagtcgccgacaacaccaggtggccagcgattgctttgctgctccaggaaagaagccaaaaaaaaaaaaaacacgaagaattaaacatcgattgaaagggaaaagacaat

SEQ ID NO: 278028 - DNA, 455 bp, Zea mays
cccacgcgtccgcccacgcgtccggacgatagagaaggagctcaaccggcgggcggcggagacggcgagcaagcagcagctggagggcatcaggaaggtggccaagctccaagctgagtgcaggaggctgcaggccgcggcacaacggagggcgtcctccgtgaacgtcgagctccggcgttctccgagctcggcctgcgtcgagtcgctcacggattgccagtcggactgctccgactcatgggcctcggccctcgtcacggagctcgaccagttcaagaaggacaagagcggcgcgagcaccaggacagcgagcctcgtggccgcggacatcgacgtgatggacgacttcctcgagatggagaagctcgcctccgcgaacggctcgtcgaaaggcgacgccgtcgaggacgcgagcgggcaggttgagaaggcgctgcacgaggctcagcgcg

SEQ ID NO: 278029 - DNA, 405 bp, Zea mays
tcaagcttaggaatttgttttatatgcagtgtgcatctggagtgttgtaacagattttttttccaactagtgtttgtgtgtattgaaattgggggggaaaggctgttgtcgcaggataacaataacttcctccctgctcagtaattatgactctattcagtttgtaattgccggtgggagtacaattatgctacaatattgtttgtttgtgtgtgtgtggaagttggggagtgctgctgccacagagatagcttcctccctgcccagccagtaatgatagtgattattcagtttgtagttgtcagtggaagtgtccagcaaacttttctactaccctttgatattcctggtacaaatgttggaacgactgtcctaaccatttgagtgatttgctttcgacctgcc

SEQ ID NO: 278030 - DNA, 1184 bp, Zea mays
atcttatatatttgtgaagcactaatagcatgtgtgtttccatttattgtgttcattttgttacattctgtcactgcaaacaggtcactacttttcctttttcttctgtaaaatgtaactggttgctccctgtggttccactctcactttgcaggcgacaattagaaagtaatagctcacatggagatgatggttcagaccgcctggttgggaagggtgatctgagactgaaactcatgaggaaaggcttgttgccgaggagcaatggtggtgcagaacagaatgacatagatctccgtgaaaagctttcccgaaaccataagttaccaaattatgattctagaggtcatgctgcagaatcaagggctagttatgatatgagagatgagcctccagagttaagttccagatattcttcgagggaggatgtcctagggtcgaggaactcttctgttgtaagtcgagttccttattcaagaactgcggatgacttgttaaaatcgaacccttcaagaaaatcttacccctcatggacagacgatggtttgaggcacagatcacctgaaaggatgttaagtgttcgtagtgatgtgtctccaccagtaggttatgatcagattaggtccatgccaccacttagatctgccggttcctcaagacctcaaagttttattacaagaggtgctcctgatacgccaaggagtcaaccatatgctggcaaagccaccatttctgttgatacagtacagagaactaatgggatcactccatctagtgcacctctgcctaaggcccctgttatggctgaagccccgcttacagttactggattgctgaactcgttgggtcttgagaagtatgttgttctctttcaggctgaggaggtggatttgtctgcattgaggcaaatgggagagagagacctcaaagacatgggggtaccaatgggcccgaggaagaagattctccttgcagttggccctcagtccaaataacgccaaagatgagcaaacagggtgtgggtctaagaacatttgttggcaactgaaaatattggtgtaagaactccagataataagaattttgtatacccaattatccatagtgtggtcttaatccacccttttgttgacatgtaaaatctgttcggtcagctgttaatccaggttctatcattctcggtc

SEQ ID NO: 278031 - DNA, 397 bp, Zea mays
tcgctctaaggttccggcggaagccgtcctctgcgtcggctgcggttgagatggcttcctcgtcggcgtcttcgaggcaccaggtcaccatcaccctcggccgcagcggtcaggttgtcaaaaggagagctatgtctgatgatattaatgacggtgaattgcctttgttggggaaaaagcgatctctgagggataggttaggaagtaatgtgtctgattctgatttttatgaaagccagcagagaaacaaacggcgacagttagaaagtaatagctcacatggagatgatggttcagaccgcctggttgggaagggtgatctgagactgaaactcatgaggaaaggtttgttgccgaggagcaatggtagtgcagaacagaatgacatagatctccg

SEQ ID NO: 278032 - DNA, 492 bp, Zea mays
cccatcttcggtttctttcctccggacttcgggttcctgcttgcggcgtccgccaattcccttccctacccaaaccctagagcaaagctgaatggccctcgccacgagctcgcgagagactctgcgccgccgccggtgactgctgatccgcccgccgccgccgcgcccggtgctttgtcacgcaggaggcgacggtatggcgtcgaggcagcacaatgcacagttccacaaatccaagacgctcgacaacaaatacatgctcggagatgagatagggaagggggcgtacggccgcgtatacaaggggcttgacctggagaatggcgatttcgtggccatcaaacaggtctcgctggagaacattccgcaggaggatctcaacataataatgcaagagatcgaccttttgaaaaatcttaatcacaaaaatattgtcaagtatctgggatcactgaagacaaagagccacctccatattattttagagtatgt
